(19) United States
(12) Patent Application Publication
(10) Pub. No.: US 2022/0064268 A1
(43) Pub. Date: Mar. 3, 2022

(54) RECOMBINANT POLYCLONAL PROTEINS TARGETING ZIKA AND METHODS OF USE THEREOF

(71) Applicant: GigaGen, Inc., South San Francisco, CA (US)

(72) Inventors: David Scott Johnson, San Francisco, CA (US); Sheila Keating, South San Francisco, CA (US); Adam Shultz Adler, Belmont, CA (US); Michael Asensio, South San Francisco, CA (US); Kacy Stadtmiller, San Francisco, CA (US); Emily Benzie, San Francisco, CA (US); Ariel Niedecken, Sunnyvale, CA (US); Angelica V. Medina-Cucurella, Mountain View, CA (US); Rena Aviva Mizrahi, Pacifica, CA (US); Yoong Wearn Lim, South San Francisco, CA (US)

(21) Appl. No.: 17/469,493

(22) Filed: Sep. 8, 2021

Related U.S. Application Data
(63) Continuation of application No. PCT/US2021/044523, filed on Aug. 4, 2021.
(60) Provisional application No. 63/061,730, filed on Aug. 5, 2020.

(51) Int. Cl. C07K 16/10; A61P 31/14

(52) U.S. Cl. CPC C07K 16/1081; A61P 31/14; C07K 2317/52; C07K 2317/622; C07K 2317/565

(57) ABSTRACT

Provided herein are compositions comprising recombinant polyclonal protein (RPP) derived from mammalian plasma cells and plasmablasts. Specifically, RPPs specific to Zika virus are provided. Also provided are the methods of using the RPP for treatment of viral infection and the methods of making the RPPs.

### 1. CROSS REFERENCE TO RELATED APPLICATIONS

[0001] The present application is a continuation of PCT/US2021/044523, which claims the benefit of U.S. Provisional Patent Application No. 63/061,730 filed on Aug. 5, 2020 which is hereby incorporated by reference in its entirety.

### 2. SEQUENCE LISTING

[0002] The instant application contains a Sequence Listing with 25860 sequences which has been submitted via EFS-Web and is hereby incorporated by reference in its entirety. Said ASCII copy, created on Aug. 6, 2021, is named 49569 USC1 sequence listing_Zika.txt, and is 5.41 MB in size.

### 3. FIELD

[0003] Provided herein are recombinant polyclonal protein composition (RPP), also called Recombinant Zika Immune Globulin (rZIG), recombinant polyclonal antibody proteins, recombinant hyperimmune globulins, or simply recombinant hyperimmunes, with binding specificity for Zika virus. Included are, e.g., therapeutics, vaccines, and libraries, and compositions comprising such RPPs, including pharmaceutical compositions. Also provided are methods of making RPPs, and methods of using RPPs, for example, for therapeutic purposes.

### 4. BACKGROUND

[0004] A major outbreak of the mosquito-borne flavivirus, Zika, spread across Latin America in 2015-2016. Though Zika virus has been less widespread and less deadly than SARS CoV-2, Zika can spread from mother to a fetus in utero, resulting in birth defects such as microcephaly. As of July 2020, there was no FDA-approved vaccine or therapy for Zika virus. Zika virus disease is complicated by antibody-dependent enhancement (ADE) (Katzelnick et al., 2017; Priyamvada et al., 2017), a phenomenon in which poorly neutralizing antibodies enhance viral infection by bringing virus particles to cells that express Fc receptor (FcR). This problem is particularly troublesome for those previously infected with a related flavivirus, Dengue, since many anti-Dengue antibodies are poor neutralizers against Zika virus, and vice versa (Stettler et al., 2016). ADE is a safety concern in the development of plasma-derived hyperimmune compositions and vaccines (Langerak et al., 2019).

[0005] Many diseases, such as those caused by infectious viruses or bacteria with many variants or serotypes, are best treated by drugs that target multiple epitopes. An established therapeutic modality is multispecific (multivalent) antibodies derived from human or animal plasma, such as intravenous immunoglobulin (IVIG). Polyclonal antibody drugs with higher potency, known as hyperimmune globulins, are often derived from the plasma of recently vaccinated human donors, for example, HepaGam B against hepatitis B virus (HBV) and BabyBIG against infant botulism. In diseases for which human vaccination is not possible, hyperimmune globulins can be generated by immunizing animals, for example, rabbit-derived thymoglobulin (‘rabbit-ATG’) against human thymocytes for transplant tolerance. For rapid response to emerging pathogens with poorly characterized neutralizing epitopes, many groups have developed hyperimmune globulins derived from immunized animal plasma or convalescent human serum, for example, Zika virus hyperimmune globulin or severe acute respiratory syndrome coronavirus-2 (SARS-CoV-2).

[0006] Plasma-derived antibody therapeutics have substantial drawbacks. First, demand for normal and convalescent donor plasma often outstrips supply. Plasma-derived drugs have suffered from impurities, including infectious viruses and dotting factors, that have resulted in serious adverse events. Antibody drugs derived from animal plasma occasionally cause allergic reactions, lead to antidrug antibodies and have suboptimal effector properties. Because they are derived from naturally occurring proteins, plasma-derived drugs are not easily engineered; for example, it is not possible to modify Fc sequences to improve mechanism of action or drug half-life. Finally, each batch of plasma-derived drug is usually derived from a different cohort of human donors or animals, resulting in batch-to-batch variation.

[0007] Many of these problems could be solved by generating multivalent hyperimmune globulins using recombinant DNA technology. However, this strategy presents substantial technical hurdles. Most important, a recombinant hyperimmune globulin technology would have to isolate significant numbers of B cells from donors or animals, natively pair heavy and light chain immunoglobulin at a single-cell level, and then clone the sequences into recombinant expression libraries for manufacturing. Conventionally, most production cell lines for recombinant antibody drugs are generated by random integration of expression constructs into mammalian cell genomes. Pioneering work used 96-well plates to capture antibody sequences from B cells isolated from human donors immunized with Rho(D)⁺ erythrocytes and then engineer multivalent recombinant antibodies, but this approach produced drug candidates with <30 antibodies, complicating broad application and reducing potential for polyvalence.

[0008] There is a need in the art for multivalent hyperimmune globulins with specificity for Zika virus, and methods of using such RPPs, e.g., as human therapeutics.

### 5. SUMMARY

[0009] Provided herein are rZIG (recombinant anti-Zika hyperimmune gammaglobulin), i.e., novel RPPs (novel recombinant polyclonal proteins, also called recombinant polyclonal antibody proteins, recombinant hyperimmune globulins, or recombinant hyperimmunes) with binding specificity to Zika antigens, and methods of using such RPPs, e.g., as human therapeutics. The RPPs are recombinant, and their sequences are derived from peripheral blood plasma cells or plasmablasts. The peripheral blood plasma cells or plasmablasts are mobilized by, e.g., infection of a donor with Zika virus, and the peripheral blood B cells, plasma cells or plasmablasts are specifically separated from other peripheral blood cells. The peripheral blood cells can come from any mammal, for example a mouse, a rat, a human, a monkey, a horse, or a cow.

[0010] Accordingly, the present disclosure provides a recombinant polyclonal protein composition (RPP) (also called a Recombinant Zika Immune Globulin (rZIG)), comprising at least 100 antigen binding proteins (ABPs), each of the ABPs comprising a cognate pair of heavy chain CDR3 and light chain CDR3, wherein each of the ABPs specifically binds an antigen of Zika virus.

[0011] In some embodiments, each of the ABPs comprises a heavy chain CDR3 having a sequence selected from SEQ ID Nos: 2, 4, 6, through 25838 (even numbers) and SEQ ID NO: 25851-25860, and a light chain CDR3 has a sequence selected from SEQ ID Nos: 1, 3, 5, through 25837 (odd numbers).

[0012] In some embodiments, the RPP comprises an ABP comprising a heavy chain CDR1 having the sequence of GFTFX1X2X3X4 (SEQ ID NO: 25839). In some embodiments, the RPP comprises an ABP comprising a heavy chain CDR1 having the sequence of GFTF[S/D][S/D][Y/H/D][A/G/Y/F] (SEQ ID NO: 25840). In some embodiments, the RPP comprises an ABP comprising a heavy chain CDR1 having a sequence selected from the group consisting of: a. GFTFSSYA (SEQ ID NO: 25841); b. GFTFSSYG (SEQ ID NO: 25842); c. GFTFDD[Y/H]G (SEQ ID NO: 25843); and d. GFTFSD[Y/D][Y/F] (SEQ ID NO: 25844).

[0013] In some embodiments, the RPP comprises an ABP comprising a heavy chain CDR2 having the sequence of IX1X2X3G X3X4X5 (SEQ ID NO: 25845). In some embodiments, each of the the RPP comprises an ABP comprising a heavy chain CDR2 having the sequence of I[W/S/N][G/Y/W][S/D/N]G[G/S/D/Y][S/N/T][T/K/I] (SEQ ID NO: 25846).

[0014] In some embodiments, the RPP comprises an ABP comprising a heavy chain CDR2 having a sequence selected from the group consisting of: a. ISGSGGST (SEQ ID NO: 25847); b.I[W/S]YDGSNK (SEQ ID NO: 25848); c.INWNG[G/D]ST (SEQ ID NO: 25849) and d.ISGSG[S/Y]TI (SEQ ID NO: 25850).

[0015] In some embodiments, the RPP comprises an ABP comprising a heavy chain CDR3 having a sequence selected from a. AKEGMVLRYFDWLWDY (SEQ ID NO: 25851); b. RX1X2X3SGX4SX5FDY (SEQ ID NO: 25852); c. AX1X2X3X4X5X6VX7X8X9Y (SEQ ID NO: 25853); d. ARX1X2GSX3X4X5X6DX7FDX8 (SEQ ID NO: 25854); and e. ARDEGYX1GYX2LDX3 (SEQ ID NO: 25855).

[0016] In some embodiments, the RPP comprises an ABP comprising a heavy chain CDR3 having a sequence selected from a. AKEGMVLRYFDWLWDY (SEQ ID NO: 25856); b. R[D/E][R/L][S/V/L]SG[P/W]S[G/H]FDY (SEQ ID NO: 25857); c. A[K/E/R][E/T][Q/L/T][L/W/I][L/V/W/N][G/L]V[V/P/L][F/L/N][D/N]Y (SEQ ID NO: 25858); d. AR[D/N][R/G]GS[S/T][G/S/W/F][W/F/Y][R/F/Y]D[W/A]FD[P/I] (SEQ ID NO: 25859); and e. ARDEGY[R/S]GY[V/N]LD[T/N/S] (SEQ ID NO: 25860).

[0017] In some embodiments, the RPP comprises at least 20, 40, 50, 100 or 200 ABPs comprising: a. a heavy chain CDR1 having the sequence of GFTFSSYA (SEQ ID NO: 25841), a heavy chain CDR2 having the sequence of ISGSGGST (SEQ ID NO: 25847), and a heavy chain CDR3 having the sequence of AKEGMVLRYFDWLWDY (SEQ ID NO: 25856); b. a heavy chain CDR1 having the sequence of GFTFSSYG (SEQ ID NO: 25842), a heavy chain CDR2 having the sequence of I[W/S]YDGSNK (SEQ ID NO: 25848), and a heavy chain CDR3 having the sequence of R[D/E][R/L][SN/L]SG[P/W]S[G/H]FDY (SEQ ID NO: 25857); c. a heavy chain CDR1 having the sequence of GFTFSSYA (SEQ ID NO: 25841), a heavy chain CDR2 having the sequence of ISGSGGST (SEQ ID NO: 25847), and a heavy chain CDR3 having the sequence of A[K/E/R][E/T][Q/L/T][L/W/I][LN/W/N][G/L]V[V/P/L][F/L/N][D/N]Y (SEQ ID NO: 25858); d. a heavy chain CDR1 having the sequence of GFTFDD[Y/H]G (SEQ ID NO: 25843), a heavy chain CDR2 having the sequence of INWNG[G/D]ST (SEQ ID NO: 25849), and a heavy chain CDR3 having the sequence of AR[D/N][R/G]GS[S/T][G/S/W/F][W/F/Y][R/F/Y]D[W/A]FD[P/I] (SEQ ID NO: 25859); or e. a heavy chain CDR1 having the sequence of GFTFSD[Y/D][Y/F] (SEQ ID NO: 25844), a heavy chain CDR2 having the sequence of ISGSG[S/Y]TI (SEQ ID NO: 25850), and a heavy chain CDR3 having the sequence of ARDEGY[R/S]GY[V/N]LD[T/N/S] (SEQ ID NO: 25860).

[0018] In some embodiments, each of at least 5%, 10%, 25%, or 50% of the total ABPs in the RPP comprises: a. a heavy chain CDR1 having the sequence of GFTFSSYA (SEQ ID NO: 25841), a heavy chain CDR2 having the sequence of ISGSGGST (SEQ ID NO: 25847), and a heavy chain CDR3 having the sequence of AKEGMVLRYFDWLWDY (SEQ ID NO: 25856); b. a heavy chain CDR1 having the sequence of GFTFSSYG (SEQ ID NO: 25842), a heavy chain CDR2 having the sequence of I[W/S]YDGSNK (SEQ ID NO: 25848), and a heavy chain CDR3 having the sequence of R[D/E][R/L][SN/L]SG[P/W]S[G/H]FDY (SEQ ID NO: 25857); c. a heavy chain CDR1 having the sequence of GFTFSSYA (SEQ ID NO: 25841), a heavy chain CDR2 having the sequence of ISGSGGST (SEQ ID NO: 25847), and a heavy chain CDR3 having the sequence of A[K/E/R][E/T][Q/L/T][L/W/I][LN/W/N][G/L]V[V/P/L][F/L/N][D/N]Y (SEQ ID NO: 25858); d. a heavy chain CDR1 having the sequence of GFTFDD[Y/H]G (SEQ ID NO: 25843), a heavy chain CDR2 having the sequence of INWNG[G/D]ST (SEQ ID NO: 25849), and a heavy chain CDR3 having the sequence of AR[D/N][R/G]GS[S/T][G/S/W/F][W/F/Y][R/F/Y]D[W/A]FD[P/I] (SEQ ID NO: 25859); or e. a heavy chain CDR1 having the sequence of GFTFSD[Y/D][Y/F] (SEQ ID NO: 25844), a heavy chain CDR2 having the sequence of ISGSG[S/Y]TI (SEQ ID NO: 25850), and a heavy chain CDR3 having the sequence of ARDEGY[R/S]GY[V/N]LD[T/N/S] (SEQ ID NO: 25860).

[0019] In some embodiments, each of the ABPs comprises a unique heavy chain CDR3 and a unique light chain CDR3 sequence.

[0020] In some embodiments, the RPP comprises 100 to 500 ABPs. In some embodiments, the RPP comprises 500 to 1000 ABPs. In some embodiments, the RPP comprises 1000 to 2500 ABPs. In some embodiments, the RPP comprises more than 2500 ABPs.

[0021] In some embodiments, each of the ABPs is an scFv. In some embodiments, each of the ABPs is a full-length antibody. In some embodiments, each of the ABPs is an IgG1 subtype.

[0022] In some embodiments, each of the ABPs is produced in eukaryotic cell culture. In some embodiments, each of the ABPs is produced in a CHO cell. In some embodiments, each of the ABPs is produced in yeast cells. In some embodiments, each of the ABPs is recombinantly produced using sequences derived from B cells, plasma cells, or plasmablasts in a sample from a donor injected with one or more Zika antigens or Dengue antigens, or infected with Zika virus or Dengue virus. In some embodiments, the donor is a human. In some embodiments, each of the ABPs is recombinantly produced using sequences derived from B cells, plasma cells, or plasmablasts in a sample from more than one donor injected with one or more Zika antigens or Dengue antigens, or infected with Zika virus or Dengue virus, optionally wherein the donors are humans.

[0023] In some embodiments, an average binding titer of the RPP is at least 50 times higher than an average binding titer of antibodies in a serum sample from the same donor or donors, wherein the binding titer is measured by ELISA against Zika. In some embodiments, an average binding titer of the RPP is at least 100, 200, 300, 400, 500, 600, 700, 800, 900, or 1000 times higher than an average binding titer of antibodies in a serum sample from the same donor or donors, wherein the binding titer is measured by ELISA against Zika.

[0024] In some embodiments, an average neutralization titer of the RPP is at least 50 times higher than an average neutralization titer of antibodies in a serum sample from the same donor or donors, wherein the neutralization titer is measured by an in vitro assay. In some embodiments, an average neutralization titer of the RPP is at least 100, 200, 300, 400, 500, 600, 700, 800, 900, or 1000 times higher than an average neutralization titer of antibodies in a serum sample from the same donor or donors, wherein the neutralization titer is measured by an in vitro assay.

[0025] In some embodiments, an average activity of the RPP is at least 50 times higher than an average activity of antibodies in a serum sample from the same donor or donors, wherein the activity is measured by an in vitro pathogen neutralization assay or an in vitro binding to antigen assay or an in vivo efficacy assay. In some embodiments, an average activity of the RPP is at least 100, 200, 300, 400, 500, 600, 700, 800, 900, or 1000 times higher than an average activity of antibodies in a serum sample from the same donor or donors, wherein the activity is measured by an in vitro pathogen neutralization assay or an in vitro binding to antigen assay or an in vivo efficacy assay.

[0026] In one aspect, the present disclosure provides a pharmaceutical composition comprising the RPP provided herein and a pharmaceutically acceptable excipient.

[0027] In yet another aspect, the present disclosure provides a method of treating a subject in need thereof, the method comprising administering to the subject an effective amount of the RPPs or the pharmaceutical composition of the present disclosure. In some embodiments, the subject has a viral infection, optionally a Zika virus infection.

[0028] In some embodiments, the method further comprises administration of one or more agents.

[0029] In one aspect, the present disclosure provides a plurality of isolated polynucleotides, each polynucleotide encoding an ABP of the RPP described herein. In another aspect, the present disclosure provides a plurality of isolated vectors, each vector comprising a polynucleotide encoding an ABP of the RPP described herein. In some embodiments, the vector is an expression vector.

[0030] In yet another aspect, the present disclosure provides a plurality of host cells comprising the plurality of isolated polynucleotides or the plurality of the isolated vectors. In some embodiments, the method comprises culturing the host cells under conditions for expression of the RPP and isolating the RPP. In some embodiments, the RPP comprises full-length antibodies and the host cells are CHO cells. In some embodiments, the RPPs comprises scFv and the host cells are CHO cells. In some embodiments, host cells are production host cells.

[0031] The present disclosure also provides an isolated polypeptide comprising a cognate pair of heavy chain CDR3 and light chain CDR3, wherein the heavy chain CDR3 has a sequence selected from SEQ ID Nos: 2, 4, 6, through 25838 (even numbers) and the light chain CDR3 has a sequence selected from SEQ ID Nos: 1, 3, 5, through 25837 (odd numbers).

[0032] In some embodiments, the isolated polypeptide comprises a heavy chain CDR3 having the sequence of SEQ ID NO: [n+1] and a light chain CDR3 having the sequence of SEQ ID NO: [n], wherein n is an odd number from 1 to 25837.

[0033] In one aspect, the present disclosure provides an isolated polypeptide comprising a cognate pair of heavy chain and light chain, wherein a. a heavy chain CDR1 having the sequence of GFTFSSYA (SEQ ID NO: 25841), a heavy chain CDR2 having the sequence of ISGSGGST (SEQ ID NO: 25847), and a heavy chain CDR3 having the sequence of AKEGMVLRYFDWLWDY (SEQ ID NO: 25856); b. a heavy chain CDR1 having the sequence of GFTFSSYG (SEQ ID NO: 25842), a heavy chain CDR2 having the sequence of I[W/S]YDGSNK (SEQ ID NO: 25848), and a heavy chain CDR3 having the sequence of R[D/E][R/L][SN/L]SG[P/W]S[G/H]FDY (SEQ ID NO: 25857); c. a heavy chain CDR1 having the sequence of GFTFSSYA (SEQ ID NO: 25841), a heavy chain CDR2 having the sequence of ISGSGGST (SEQ ID NO: 25847), and a heavy chain CDR3 having the sequence of A[K/E/R][E/T][Q/L/T][L/W/I][LN/W/N][G/L]V[V/P/L][F/L/N][D/N]Y (SEQ ID NO: 25858); d. a heavy chain CDR1 having the sequence of GFTFDD[Y/H]G (SEQ ID NO: 25843), a heavy chain CDR2 having the sequence of INWNG[G/D]ST (SEQ ID NO: 25849), and a heavy chain CDR3 having the sequence of AR[D/N][R/G]GS[S/T][G/S/W/F][W/F/Y][R/F/Y]D[W/A]FD [P/I] (SEQ ID NO: 25859); or e. a heavy chain CDR1 having the sequence of GFTFSD[Y/D][Y/F] (SEQ ID NO: 25844), a heavy chain CDR2 having the sequence of ISGSG[S/Y]TI (SEQ ID NO: 25850), and a heavy chain CDR3 having the sequence of ARDEGY[R/S]GY[V/N]LD[T/N/S] (SEQ ID NO: 25860).

[0034] In one aspect, the present disclosure provides an isolated polynucleotide encoding the isolated polypeptide of described herein.

[0035] In one aspect, the present disclosure provides a cell comprising the isolated polypeptide.

[0036] In one aspect, the present disclosure provides a method of generating a recombinant polyclonal proteins (RPP) (also called a Recombinant Zika Immune Globulin (rZIG)), comprising a. providing B cells, plasma cells, or plasmablasts of a donor exposed to an antigen of Zika or Dengue virus; b. amplifying a cognate pair of polynucleotides encoding a light chain variable region and a heavy chain variable region from a single cell out of the plasma cells or plasmablasts by overlap extension reverse transcriptase polymerase chain reaction (OE-RT-PCR); c. cloning polynucleotides obtained from the amplification into expression vectors, thereby obtaining constructs encoding the RPP; d. expressing the RPP from the constructs; e. enriching a subset of the constructs based on activity of the RPP or a member of the RPP against Zika; and f. obtaining the RPP (also called a Recombinant Zika Immune Globulin (rZIG)).

[0037] In another aspect, the present disclosure provides an RPP (also called a Recombinant Zika Immune Globulin (rZIG)) obtained by the method described herein. The present disclosure also provides a Recombinant Zika Immune Globulin (rZIG) produced using the methods described in Example 2. The present disclosure further provides a method for producing an rZIG as described in Example 2. In one aspect, the present disclosure provides an rZIG produced using the methods described in Example 3. It also provides a method for producing an rZIG as described in Example 3.

### 6. DESCRIPTION OF THE DRAWINGS AND TABLES

[0038] This patent or application file contains at least one drawing executed in color. Copies of this patent or patent application publication with color drawing(s) will be provided by the Office upon request and payment of the necessary fee.

[0039] FIG. 1 illustrates construct PMD-4681 used for random integration into CHOZN cells.

[0040] FIGS. 2A and 2B summarize the steps used to generate libraries of scFv constructs. (FIG. 2A) First, IgH and IgK mRNA transcripts are reverse transcribed into cDNA and then amplified with a pool of VH, VK, CH1, and CK1 primers. (FIG. 2B) The CK1 and V_{H} primers have linkers, which drive fusion of the individual IgH and IgK amplicons into a linked scFv construct. This construct is used for cloning into antibody expression construct libraries.

[0041] FIG. 3A to 3D are tables with characteristics of the donors used to create candidate RPP libraries. SOB=shortness of breath; ST=sore throat.

[0042] FIG. 4 illustrates a map for a fully assembled antibody expression plasmid.

[0043] FIG. 5 is a table with a list of assays used to characterize the rCIG RPP candidate.

[0044] FIG. 6 is a table with results of assays used to characterize rCIG RPPs.

[0045] FIG. 7A illustrates the process of isolating B cells from human donors (vaccinated or convalescent) or immunized humanized mice.

[0046] FIG. 7B illustrates the process of capturing natively paired antibody sequences from millions of single cells using droplet microfluidics.

[0047] FIG. 7C illustrates the process of enriching binders to a soluble antigen using a yeast scFv display system.

[0048] FIG. 7D illustrates the two-step process comprising (i) Gibson assembly of converting the scFv fragment to full-length antibody expression constructs and (ii) stably integrating the constructs into CHO cells following electroporation and selection.

[0049] FIG. 7E illustrates bioproduction and characterizations. The libraries were characterized by deep sequencing, in vitro binding and efficacy assays, and/or in vivo mouse efficacy studies.

[0050] FIG. 8A provides optical density measured by ELISA of individual human plasma donors against SARS-CoV-2 S1 antigen (top) or RBD antigen (bottom). Each data point represents a single measurement at a single test article dilution in a single experiment.

[0051] FIG. 8B shows FACS enrichment of scFv against CoV-2 RBD from library 1 using yeast display. The x axis measures presence of a C-terminal c-Myc tag, indicating expression of an scFv on the surface of the cell. They axis measures binding of antigen to the scFv-expressing cells. The gates used for yeast selection (double positive) are indicated, with the percentage of scFv-expressed antigen binders in greyscale. Each plot summarizes a single FACS experiment with one yeast scFv library.

[0052] FIG. 8C provides clonal cluster analysis of rCIG antibodies. Each node represents an antibody clone (full-length heavy chain). The greyscale shades of the nodes indicate the sorted scFv library from which the CHO antibody clones were derived. The size of the nodes reflects the frequency of the clones in the final CHO cell bank (only clones≥0.01% are plotted). The total number of amino acid differences between each pairwise alignment, and edges indicate ≤5 amino acid differences were computed.

[0053] FIG. 8D provides optical density measured by ELISA of the indicated samples against SARS-CoV-2 S1 antigen (top) or RBD antigen (bottom). Each data point represents a single measurement at a single test article dilution, in a single experiment.

[0054] FIG. 8E provides optical density measured by ELISA of the indicated samples against the indicated antigens (different shapes). For rCIG, no binding was observed against MERS CoV S1. For the CoV-2 Mab (SAD-S35), no binding was observed against MERS CoV S1 and SARS-CoV RBD. Each data point represents a single measurement at a single test article dilution, in a single experiment.

[0055] FIG. 8F shows live virus neutralization. Individual dots are separate test articles that represent the minimum antibody concentration that achieved neutralization. Bars represent median measurements for each test article category. Each test article was run in duplicate using different aliquots of cells and virus, in a single experiment, with the same result observed for each replicate. No neutralization was seen for IVIG. A Wilcoxon rank sum test was used to compare the minimum concentration to achieve SARS-CoV-2 live virus neutralization between convalescent plasma measurements (n=16) and rCIG measurements (n=2).

[0056] FIG. 9A shows clonal cluster analysis of rZIG-IgG1 and rZIG-LALA antibodies. Each node represents an antibody clone (full-length heavy chain). The size of the nodes reflects the frequency of the clones in the final CHO cell bank (only clones ≥0.01% are plotted). The total number of amino acid differences between each pairwise alignment was computed after combining both libraries together, and edges indicate ≤5 amino acid differences.

[0057] FIG. 9B provides ELISA results of rZIG-IgG1, rZIG-LALA, and Zika/dengue+serum control for dengue serotypes 1-4 (y axis, indicated by shape) and Zika virus antigen (x axis). Each data point represents a single test article measured against a single dengue serotype. Linear regression treeline is indicated in black. Simple linear regression was used to calculate the coefficient of determination (R2) between Zika and dengue ELISA EC₅₀ values (n=7, in a single experiment). EC50 values for all dengue serotypes were pooled for the analysis. Significance of the regression model was determined using an F-statistic with 1 and 10 d.f.

[0058] FIG. 9C shows pseudotype neutralization by rZIG-IgG1, rZIG-LALA, and Zika/dengue+serum control for dengue serotypes 1-4 (y axis, indicated by shape) and Zika virus antigen (x axis). Each data point represents a single test article measured against a single dengue serotype, in a single experiment. Linear regression trendline is indicated in black. Simple linear regression was used to calculate the coefficient of determination (R2) between Zika and dengue pseudotype neutralization IC₅₀ values (n=11). IC₅₀ values for all dengue serotypes were pooled for the analysis. Significance of the regression model was determined using an F-statistic with 1 and 10 d.f.

[0059] FIG. 9D shows Zika pseudotype virus ADE assay results for rZIG-IgG1, rZIG-LALA, and positive and negative controls. Test article concentration is on the x axis. Fold-increase infection is on they axis, which was the infection-induced luciferase signal observed in the presence of antibody divided by the luciferase signal observed with a no-antibody control. Each data point represents a single measurement at a single test article dilution, in a single experiment.

[0060] FIG. 10A shows clonal cluster analysis of rHIG and rPIG antibodies. Each node represents an antibody clone (full-length heavy chain). The size of the nodes reflects the frequency of the clones in the final CHO cell bank (only clones ≥0.01% are plotted). The total number of amino acid differences between each pairwise alignment, and edges indicate ≤5 amino acid differences were computed.

[0061] FIG. 10B shows optical density (y-axis) measure by Anti-Hib ELISA for rHIG and IVIG. Each data point represents a single measurement at a single test article dilution, in a single experiment.

[0062] FIG. 10C shows results from serum bactericidal assay (SBA) for rHIG and IVIG with the ATCC 10211 Hib strain. Percentage of no-antibody control (y axis) was computed as the number of bacterial colonies in the test sample divided by the number of bacterial colonies in a no-antibody control sample. Each data point represents a single measurement at a single test article dilution, in a single experiment.

[0063] FIG. 10D shows rPIG fold-improvement over IVIG (y-axis) with respsect to ELISA binding to (dark shade) or opsonophagocytosis of (light shade) the indicated pneumococcal serotype (x-axis). Fold improvement in binding/activity over IVIG was computed as a mean of duplicate measurements for rPIG divided by a mean of duplicate measurements for IVIG (based on the binding concentration for ELISA and the number of bacterial colonies for opsonophagocytosis). Fold improvement over IVIG, by assay (ELISA or opsonophagocytosis) was tested using a one-sample Wilcoxon signed rank test, with the null hypothesis that the median equals 1, that is, H₀=1. For each assay, all individual serotypes were pooled a single Wilcoxon signed rank test. Values for each individual serotype were generated by dividing the mean of duplicate rPIG measurements by the mean of duplicate IVIG measurements.

[0064] FIG. 10E provides in vivo assay data with ATCC 10211 Hib strain. Each circle represents CFU Hib per ml (y axis) from either peritoneal fluid or blood from a single mouse in a given test group. Black bars represent mean of the CFU Hib per ml. Dotted lines represent the lower limit of detection for CFU quantification. Welch's t-tests were used to compare CFU Hib per ml between test groups (n=8 mice per group, in a single experiment). d.f. were 7.87 for IVIG+rHIG/rPIG (500 mg kg⁻¹) and 7.13 for IVIG+rHIG/rPIG (200 mg kg⁻¹) in peritoneal fluid. d.f. were 10.87 for IVIG+rHIG/Rpig (500 mg kg⁻¹) and 8.03 for IVIG+rHIG/rPIG (200 mg kg⁻¹) in blood.

[0065] FIG. 11A provides clonal cluster analysis of rhATG antibodies. Each node represents an antibody clone (full-length heavy chain). The color of the nodes indicates the immunized library source. The shape of the nodes indicates the mouse tissue origin. The size of the nodes reflects the frequency of the clones in the final CHO cell bank (only clones ≥0.01% are plotted). The total number of amino acid differences between each pairwise alignment, and edges indicate ≤5 amino acid differences were computed.

[0066] FIG. 11B shows results from cell killing assays of a dilution series of rabbit-ATG and rhATG with three PBMC donors. They axis (% cells) was determined by dividing the number of cells of the indicated cell type present after overnight incubation with the indicated amount of antibody by the number of cells of that cell type present in a no-antibody control. Each data point represents a single measurement at a single test article dilution, in a single experiment. Linear mixed effects models were used to compute P values for each of the four cell types, with group and concentration as fixed effects and PBMC donor as a random effect to account for the dependence of repeated measures. d.f. were 31 for each of the four models. NK, natural killer.

[0067] FIG. 11C shows survival of mice (n =8 per treatment group, in a single experiment) in the GVH study using PBMC donor 1 treated every other day with a negative vehicle control, rabbit-ATG or rhATG. Treatment days are indicated by green triangles. Kaplan-Meier survival models were fit on time to mortality and pairwise log-rank tests were performed to compare median survival between treatment groups.

[0068] FIG. 11D shows the concentration of CD45+ cells determined by flow cytometry in each alive mouse on days 9, 16, 23 and 30 of the GVH study from FIG. 11C for negative vehicle control, rhATG or rabbit-ATG. Lines connect measurements from each mouse. No CD45+ cells were observed where circles intercept the x axis. Linear mixed effects models were used to compute P values for trends in CD45+ cell counts in each of the four GVH experiments (2 PBMC donors×2 drug dosing regimens=4 experiments) with day as a fixed effect and PBMC donor as a random effect to account for the dependence of repeated measures. A Wilcoxon rank sum test was used to compare CD45+ cell counts on day 9 for saline negative control versus rhATG and saline negative control versus rabbit-ATG, in each of the four GVH experiments (2 PBMC donors×2 drug dosing regimens=4 experiments).

[0069] FIGS. 12A and 12B provide schematic of Gibson assembly processes. (FIG. 12A) Product of Gibson Assembly 1 (GA1), comprising the based plasmid vector with an scFv (from Library 1) cloned between the EF1α promoter and the IgG constant domain sequence. (FIG. 12B) Product of Gibson Assembly 2 (GA2), with the scFv linker excised and replaced with a sequence that comprises an IgK constant domain sequence, a poly(A) signal sequence, and a CMV promoter.

[0070] FIG. 13A Gibson Assembly 1 (GA1) backbone (GenBank accession MW079271).

[0071] FIG. 13B Product of Gibson Assembly 1 (GA1) after insertion of an scFv sequence (GenBank accession MW079272).

[0072] FIG. 13C The linear Gibson Assembly 2 (GA2) insert sequence (GenBank accession MW079275).

[0073] FIG. 13D Product of Gibson Assembly 2 (GA2) after insertion of the GA2 insert (GenBank accession MW079273).

[0074] FIG. 13E Landing pad plasmid used to generate a custom CHO landing pad cell line (GenBank accession MW079274).

[0075] FIG. 14A shows flow sorting for SARS-CoV-2 specific antibodies using yeast scFv display. Gating strategy was used for each yeast sort.

[0076] FIG. 14B shows detection of a C-terminal c-Myc tag (x-axis), indicating expression of an scFv on the surface of the cell. The y-axis measures binding of antigen to the scFv-expressing cells. The gates used for yeast selection (double positive) are indicated, with the percentage of scFv-expressed RBD binders. A negative control and the eight rCIG convalescent donor libraries were stained with 1200 nM biotinylated CoV-2 RBDHis. An average of 1.1% of the expressed antibodies were RBD-specific on the first sort. After the second sort, the RBD-specific scFv were amplified and then cloned into full-length antibody expression plasmids.

[0077] FIG. 15 shows CoV-2 S1- and RBD-specific antibody binding measured by ELISA. rCIG, the 8 recombinant libraries, the 8 plasma pools from donors that made up rCIG, neutralizing SARS-CoV-2 mAb, nonneutralizing SARS-CoV mAb, and IVIG were titrated relative to total IgG concentration.

[0078] FIG. 16A illustrates ACE2 inhibition assay. The blocking ability of SARS-CoV-2 specific antibodies were measured using a plate-based ELISA method. Spike RBD was used to coat the plate and after the antibody samples are coincubated, ACE2 was added and measured for binding to RBD; antibodies that block the interaction demonstrate low or no binding of ACE2 and are considered neutralizing.

[0079] FIG. 16B shows results from the ACE2 inhibition assay. The recombinant polyclonal rCIG, the 8 recombinant antibody libraries, the 8 plasma pools from donors that make up rCIG, neutralizing SARS-CoV-2 mAb, non-neutralizing SARS-CoV mAb, and IVIG were titrated and added to the RBD coated plate. The data are reported as “% no Ab control”, i.e., dividing the signal of the test article by the signal of a no Ab control.

[0080] FIG. 17A illustrates CoV-2 pseudotype virus neutralization assay. A pseudotype virus expressing the SARS-CoV-2 spike proteins can infect ACE2-expressing target cells (which then turn green due to GFP expression from the pseudotype virus), which is used to demonstrate whether antibodies specific to SARS-CoV-2 can neutralize infection.

[0081] FIG. 17B shows results from the CoV-2 pseudotype virus neutralization assay. The recombinant polyclonal rCIG, the 8 recombinant antibody libraries, the eight plasma pools from donors that make up rCIG, neutralizing SARS-CoV-2 mAb, non-neutralizing SARS-CoV mAb, and IVIG were titrated and added to ACE2-expressing cells in the presence of CoV-2 pseudotype virus. The percent of infected cells (GFP+) was quantified by flow cytometry and was normalized by dividing by the GFP+ signal in the negative control wells, which lacked test article.

[0082] FIG. 17C provides flow gating strategy of the pseudotype virus neutralization assay to identify live, GFP+ cells (those infected with pseudotype virus).

[0083] FIGS. 18A and 18B show quality control analysis of purified rCIG protein. (FIG. 18A) SEC-HPLC analysis used to assess the purity of the Protein A-purified protein. (FIG. 18B) SDS-PAGE analysis used to assess the purity of the Protein A-purified protein.

[0084] FIG. 19A to 19D show stability, purity and functional assay of polished rCIG protein. (FIG. 19A) SEC-HPLC analysis used to assess the purity of the polished rCIG protein. (FIG. 19B) SDS-PAGE analysis used to assess the purity of the polished rCIG protein. (FIG. 19C) SEC-HPLC ELISA used to assess the purity and function of the rCIG protein after incubation at 4° C. or at 40° C. for 14 days, or after undergoing 3 or 25 freeze-thaw cycles (F/T). 40° C. incubation weakly increased the high molecular weight species with no change in SARS CoV-2 ELISA binding, while 25× F/T had no change in purity but had ˜50% reduced binding to SARS CoV-2. (FIG. 19D) SARS-CoV-2 S1 ELISA used to assess the purity and function of the rCIG protein after incubation at 4° C. or at 40° C. for 14 days, or after undergoing 3 or 25 freeze-thaw cycles (F/T). 40° C. incubation weakly increased the high molecular weight species with no change in SARS CoV-2 ELISA binding, while 25×F/T had no change in purity but had ˜50% reduced binding to SARS CoV-2.

[0085] FIG. 20A to 20D show repertoire sequencing analysis of rCIG. FIG. 20A is a heatmap showing antibody variable (V) gene usage from the linked scFv library (the 8 sorted libraries combined). The x-axis and y-axis show light and heavy chain V genes, respectively. The greyscale represents unique clone abundance in the library.

[0086] FIG. 20B is a histogram showing distribution of percent germline identity for variable gene (V; left panel) and joining gene (J; right panel), from the final CHO library.

[0087] FIG. 20C is a histogram showing the distribution of heavy chain CDR3 amino acid length, from the final CHO library.

[0088] FIG. 20D shows the clonal cluster analysis of rCIG antibodies from FIG. 8C (from the final CHO library) (left). FIG. 20D also shows sequence logos of all heavy chain sequences from the top five clusters (based on clone count). The first 8 amino acids (variable region primer binding sites) are not shown.

[0089] FIG. 21A to 21C shows repertoire sequencing analysis of pre- and post-sort rCIG.

[0090] FIG. 21A is a heatmap showing antibody variable (V) gene usage from each pre-sort and post-sort linked scFv library. FIG. 21B is a histogram showing distribution of percent germline identity for variable gene (V; left panel) and joining gene (J; right panel) from each pre-sort and post-sort scFv library. FIG. 21C is a histogram showing the distribution of heavy chain CDR3 amino acid length from each pre-sort and post-sort scFv library.

[0091] FIG. 22 shows antibody reactivity to SARS-CoV-2 variants and other coronaviruses. ELISA plates were coated with 2 μg/mL of spike or RBD proteins from known circulating variants of SARS-CoV-2, SARS-CoV, MERS, and other human coronaviruses (HCoV). The binding ability of rCIG, SARS-CoV-2 neutralizing mAb (SAD-S35), and IVIG was determined for each antigen. *, No binding was observed against the indicated antigen. While rCIG and the mAb had poly-variant specific responses to all SARS-CoV-2 variants, only rCIG bound SARS-CoV RBD while the mAb did not. IVIG had no specific responses to SARS-CoV-2, SARS-CoV or MERS but did have a weak response to HCoV-229E and HCoV-NL63.

[0092] FIGS. 23A and 23B provide data showing batch-to-batch variation of rCIG. RNA antibody sequencing was performed (in duplicate) on RNA isolated from the end of replicate CHO bioreactor production runs. In FIG. 23A, Jaccard (left) and Morisita (right) analyses data are provided to show the amount of antibody clone variation between production batches and between PCR replicates performed on each batch. Wilcoxon rank sum tests showed that the indices from the PCR replicates came from the same population as the indices from the batch replicates (p>0.05), suggesting that the variability inherent to the batches was no worse than the variability between PCR replicates.

[0093] FIG. 23B shows binding of the indicated batch of serially diluted rCIG and IVIG to SARS CoV-2 S1 antigen was measured by ELISA.

[0094] FIG. 23C. The indicated batch of rCIG was titrated and added to ACE2-expressing cells in the presence of CoV-2 pseudotype virus. The percent of infected cells (GFP+) was quantified by flow cytometry and was normalized by dividing by the GFP+ signal in the negative control wells, which lacked test article. Feltz & Miller's asymptotic test was used to test whether the three bioproduction batch IC50 measurements had a different coefficient of variation from eight IC50 measurements on a fourth bioproduction batch (18% vs. 17%, respectively). A p-value >0.05 suggested that the variation inherent to the batches was no worse than the variation inherent to the pseudotype neutralization assay.

[0095] FIGS. 24A and 24B show immunization induced antibody responses to Zika and Dengue in humanized mice. (FIG. 24A) Two Trianni mice were immunized weekly with Zika virus like particles (VLP), inactivated Dengue 1, Dengue 4, Dengue 3, or Dengue 2 as indicated in the figure. (FIG. 24B) After week 5, serum from the mice was tested for antibody response against a mixture of Zika and Dengue antigens and compared to pre-immunization or human seropositive controls to confirm antigen-specific antibody responses.

[0096] FIG. 25A to 25D show repertoire sequencing analysis results of rZIG. FIG. 25A is a heatmap showing antibody variable (V) gene usage from the linked scFv library. The x-axis and y-axis show light and heavy chain V genes, respectively. The greyscale gradient represents percent unique clone abundance in the library.

[0097] FIG. 25B. For each indicated rZIG library, histogram showing distribution of percent germline identity for variable gene (V; left panel) and joining gene (J; right panel), from the final CHO library.

[0098] FIG. 25C. For each indicated rZIG library, histogram showing the distribution of heavy chain CDR3 amino acid length, from the final CHO library.

[0099] FIG. 25D. Left: The clonal cluster analysis of rZIG antibodies from FIG. 9A (from the final CHO library). Right: Sequence logos of all heavy chain sequences from the top five clusters (based on clone count). The first 8 amino acids (variable region primer binding sites) are not shown.

[0100] FIG. 26A to 26B show quality control analysis of purified rZIG-IgG1 protein. FIG. 26A is SEC-HPLC analysis used to assess the purity of the Protein A-purified protein. FIG. 26B is SDS-PAGE analysis used to assess the purity of the Protein A-purified protein.

[0101] FIG. 27A to 27B show quality control analysis of purified rZIG-LALA protein. FIG. 27A is SEC-HPLC analysis used to assess the purity of the Protein A-purified protein. FIG. 27B is SDS-PAGE analysis used to assess the purity of the Protein A-purified protein.

[0102] FIG. 28 shows rZIG binding to Zika measured by ELISA. rZIG-IgG1, rZIG-LALA, negative control IVIG, and positive control Zika/Dengue positive serum were serially diluted and added to a Zika envelope-coated plate. Antigen-specific responses were quantified by an anti-human-HRP secondary antibody.

[0103] FIG. 29 shows rZIG binding to Dengue serotypes measured by ELISA. rZIG-IgG1, rZIG-LALA, negative control IVIG, and positive control Zika/Dengue positive serum were serially diluted and added to a Dengue serotypes 1, 2, 3, or 4 envelope-coated plates. Antigen-specific responses were quantified by an anti-human-HRP secondary antibody.

[0104] FIG. 30 provides results from Zika pseudotype virus neutralization assay. rZIG-IgG1, rZIG-LALA, negative control IVIG, positive control Zika/Dengue mAb, and positive control Zika/Dengue positive serum were serially diluted, co-incubated with Zika pseudotype virus, and added to BHK/DC-SIGN target cells. Antibody induced neutralization was quantified by the infection-induced luciferase expression divided by luciferase expression in the no Ab control.

[0105] FIG. 31 provides results from Dengue serotype pseudotype virus neutralization assay. rZIG-IgG1, rZIG-LALA, negative control IVIG, positive control Zika/Dengue mAb, and positive control Zika/Dengue positive serum were serially diluted, co-incubated with pseudotype virus expressing the indicated Dengue serotype envelope antigens, and added to BHK/DC-SIGN target cells. Antibody induced neutralization was quantified as “% no Ab control”, or infection-induced luciferase expression divided by the luciferase expression in the no Ab control.

[0106] FIG. 32 is a schematic of antibody dependent enhancement (ADE) assay. Antibody bound to pseudotype virus can infect cells through the Fc receptor expressed on target cells. By introducing an Fc mutation that prevents FcR binding (e.g., LALA), antibody-induced viral infection is abrogated.

[0107] FIGS. 33A and 33B show batch-to-batch variation of rZIG.

[0108] FIG. 33A is based on RNA antibody sequencing performed (in duplicate) on RNA isolated from the end of replicate CHO bioreactor production runs. Jaccard (left) and Morisita (right) analyses showed that the amount of antibody clone variation between production batches and between PCR replicates performed on each batch. Wilcoxon rank sum tests showed that the indices from the PCR replicates came from the same population as the indices from the batch replicates, suggesting that the variability inherent to the batches was no worse than the variability between PCR replicates.

[0109] FIG. 33B shows binding of the indicated batch of serially diluted rZIG-IgG1 and rZIGLALA to a Zika envelope-coated plate was measured by ELISA.

[0110] FIG. 34A to 34D shows results from repertoire sequencing analysis of rHIG.

[0111] FIG. 34A is a heatmap showing antibody variable (V) gene usage from the linked scFv library. The x-axis and y-axis show light and heavy chain V genes, respectively. The color represents percent unique clone abundance in the library.

[0112] FIG. 34B is a histogram showing distribution of percent germline identity for variable gene (V; left panel) and joining gene (J; right panel), from the final CHO library.

[0113] FIG. 34C is a histogram showing the distribution of heavy chain CDR3 amino acid length, from the final CHO library.

[0114] FIG. 34D. Left: The clonal cluster analysis of Rhig antibodies, modified from FIG. 4a (from the final CHO library). Right: Sequence logos of all heavy chain sequences

[0115] from the top five clusters (based on clone count). The first 8 amino acids (variable region primer binding sites) are not shown.

[0116] FIG. 35A to 35D provide results from repertoire sequencing analysis of rPIG.

[0117] FIG. 35A is a heatmap showing antibody variable (V) gene usage from the linked scFv library. The x-axis and y-axis show light and heavy chain V genes, respectively. The color represents percent unique clone abundance in the library.

[0118] FIG. 35B is a histogram showing distribution of percent germline identity for variable gene (V; left panel) and joining gene (J; right panel), from the final CHO library.

[0119] FIG. 35C is a histogram showing the distribution of heavy chain CDR3 amino acid length, from the final CHO library.

[0120] FIG. 35D. (d) Left: The clonal cluster analysis of Rpig antibodies, modified from FIG. 4a (from the final CHO library). Right: Sequence logos of all heavy chain sequences from the top five clusters (based on clone count). The first 8 amino acids (variable region primer binding sites) are not shown.

[0121] FIGS. 36A and 36B show quality control analysis of purified rHIG protein. FIG. 36A is from SEC-HPLC analysis used to assess the purity of the Protein A-purified protein. FIG. 36B is from SDS-PAGE analysis used to assess the purity of the Protein A-purified protein.

[0122] FIGS. 37A and 37B show quality control analysis of purified rPIG protein. FIG. 37A is from SEC-HPLC analysis were used to assess the purity of the Protein A-purified protein. FIG. 37B is from SDS-PAGE analysis used to assess the purity of the Protein A-purified protein.

[0123] FIG. 38 provides data from haemophilus influenzae serum bactericidal assay (SBA). rHIG and IVIG were serially diluted and co-incubated with 5×10⁴ CFU/mL Haemophilus influenzae Eagan strain. After incubation, complement was added, incubated, and test samples were plated on chocolate agar. After 16 hours incubation, bacteria colony counts for each serial dilution were quantified and divided by the bacteria colony counts in the no Ab control.

[0124] FIG. 39 provides data from Pneumococcal antibody binding assay using ELISA. Binding of serially diluted rPIG and IVIG to a pool of 23 pneumococcal polysaccharides was measured by ELISA.

[0125] FIG. 40A to 40B show measurement of batch-to-batch variation of rHIG. (FIG. 40A) RNA antibody sequencing was performed (in duplicate) on RNA isolated from the end of replicate CHO bioreactor production runs. Jaccard (left) and Morisita (right) analyses showed that the amount of antibody clone variation between production batches and between PCR replicates performed on each batch. Wilcoxon rank sum tests showed that the indices from the PCR replicates came from the same population as the indices from the batch replicates (p>0.05), suggesting that the variability inherent to the batches was no worse than the variability between PCR replicates. FIG. 40B show binding of the indicated batch of serially diluted rHIG and IVIG to Hib as measured by ELISA.

[0126] FIG. 41A and FIG. 41B show measurement of batch-to-batch variation of rPIG. (FIG. 41A) RNA antibody sequencing was performed (in duplicate) on RNA isolated from the end of replicate CHO bioreactor production runs. Jaccard (left) and Morisita (right) analyses showed that the amount of antibody clone variation between production batches and between PCR replicates performed on each batch. Wilcoxon rank sum tests showed that the indices from the PCR replicates came from the same population as the indices from the batch replicates (p>0.05), suggesting that the variability inherent to the batches was no worse than the variability between PCR replicates. FIG. 41B shows binding of the indicated batch of serially diluted rPIG and IVIG to a pool of 23 pneumococcal polysaccharides as measured by ELISA.

[0127] FIGS. 42A and 42B show Pneumococcal or Hib antibody binding of IVIG+rHIG/rPIG by ELISA. FIG. 42A shows binding of serially diluted rHIG, IVIG+rHIG/rPIG, and IVIG to Hib, measured by ELISA. FIG. 42B shows binding of serially diluted rPIG, IVIG+rHIG/rPIG, and IVIG to a pool of 23 pneumococcal polysaccharides, measured by ELISA.

[0128] FIG. 43A illustrates procedures for immunizing three Trianni mice weekly with T cells isolated from one human donor with ALD/MDP adjuvant. After week 5, serum from the mice was tested to confirm binding to T cells before a final boost without adjuvant 5 days prior to harvesting the organ B cells.

[0129] FIG. 43B illustrates procedures for immunizing two Trianni mice weekly with thymocytes isolated from five separate human donors with ALD/MDP adjuvant. After week 5, serum from the mice was tested to confirm binding to T cells before a final boost without adjuvant 5 days prior to harvesting the organ B cells.

[0130] FIG. 44A is a heatmap showing antibody variable (V) gene usage from the linked scFv library (the 4 libraries combined). The x-axis and y-axis show light and heavy chain V genes, respectively. The greyscale represents percent unique clone abundance in the library.

[0131] FIG. 44B provides a histogram showing distribution of percent germline identity for variable gene (V; left panel) and joining gene (J; right panel), from the final CHO library.

[0132] FIG. 44C is a histogram showing the distribution of heavy chain CDR3 amino acid length, from the final CHO library.

[0133] FIG. 44D. Left: The clonal cluster analysis of rhATG antibodies from FIG. 11A (from the CHO libraries). Right: Sequence logos of all heavy chain sequences from the top five clusters (based on clone count). The first 8 amino acids (variable region primer binding sites) are not shown.

[0134] FIG. 45A-45B shows quality control analysis of purified rhATG protein. FIG. 45A shows a result from SEC-HPLC analysis used to assess the purity of the Protein A-purified protein. FIG. 45B shows a result from SDS-PAGE analysis used to assess the purity of the Protein A-purified protein.

[0135] FIG. 46A-46B show ATG immune cell-specific antibody responses measure by ELISA. The indicated Immune cell antigens were coated onto ELISA plates. (FIG. 46A) rabbit-ATG was serially diluted and added to the plate. Antibody bound to antigens were quantified by anti-rabbit-HRP or anti-human-HRP, respectively. (FIG. 46B) h-ATG were serially diluted and added to the plate. Antibody bound to antigens were quantified by anti-rabbit-HRP or anti-human-HRP, respectively.

[0136] FIG. 47 shows ATG binding to red blood cells by ELISA. RBC-specific antibody response was measured by Immucor Capture-R ELISA. Rabbit-ATG and rhATG were serially diluted and added to the Immucor Capture-R plate. RBC-bound antibodies were quantified by anti-rabbit-HRP or anti-human-HRP, respectively.

[0137] FIGS. 48A and 48B show survival of mice in the GVHD study after ATG treatment. (FIG. 48A) Eight animals per treatment group were engrafted with 10⁷ PBMC from one of two donors. Animals were treated with rhATG, rabbit-ATG, or vehicle control either every other day beginning at day 5 or on days 5, 6, and 7 (treatment days are indicated by triangles), then monitored for progression to GVHD and death. **p<0.01, ***p<0.001, n.s. not significant. (FIG. 48B) Eight animals per treatment group were engrafted with 10⁷ PBMC from one of two donors. Animals were treated with rhATG, rabbit-ATG, or vehicle control either every other day beginning at day 5 or on days 5, 6, and 7 (treatment days are indicated by triangles), then monitored for progression to GVHD and death. **p<0.01, ***p<0.001, n.s. not significant.

[0138] FIGS. 49A and 49B show flow cytometry of CD45+ cells from the ATG GVHD study. (FIG. 49A) Eight animals per treatment group were engrafted with 10⁷ PBMC from one of two donors. Animals were treated with rhATG, rabbit-ATG, or vehicle control either every other day beginning at day 5 or on days 5, 6, and 7. Flow cytometry was used to determine the concentration of CD45+ cells from each alive mouse on Days 9, 16, 23, and 30. Lines connect measurements from each mouse. No CD45+ cells were observed where circles intercept the x-axis. **p<0.01, ***p<0.001.

[0139] (FIG. 49B) Eight animals per treatment group were engrafted with 10⁷ PBMC from one of two donors. Animals were treated with rhATG, rabbit-ATG, or vehicle control either every other day beginning at day 5 or on days 5, 6, and 7. Flow cytometry was used to determine the concentration of CD45+ cells from each alive mouse on Days 9, 16, 23, and 30. Lines connect measurements from each mouse. No CD45+ cells were observed where circles intercept the x-axis. **p<0.01, ***p<0.001.

[0140] FIGS. 50A and 50B show ATG assay flow gating strategies. (FIG. 50A) Flow gating strategy for the ATG PBMC killing assay to quantify cytotoxic T cells, T helper cells, B cells, and NK cells. (FIG. 50B) Flow gating strategy of the GVH study to quantify CD45+ cells.

[0141] FIGS. 51A and 51B show data from SARS-CoV-2 pseudotype virus neutralization assay. Wuhan-Hu-1 as well as arising SARS-CoV-2 variants (B.1.1.7 (UK), B.1.351 (South Africa), P.1 (Japanese/Brazilian), and B.1.427/B.1.429 (California)) were psudotyped and tested. FIG. 51A shows % of infected cells normalized to infected cells under a control condition without application of antibodies. FIG. 51B summarizes IC₅₀ value (μg/mL) for psudotype virus of the tested SARS-CoV-2 variants.

### 7. DETAILED DESCRIPTION

[0142] Definitions

[0143] Unless otherwise defined herein, scientific and technical terms used in connection with the present invention shall have the meanings that are commonly understood by those of ordinary skill in the art. Further, unless otherwise required by context, singular terms shall include pluralities and plural terms shall include the singular. Generally, nomenclatures used in connection with, and techniques of, cell and tissue culture, molecular biology, immunology, microbiology, genetics and protein and nucleic acid chemistry and hybridization described herein are those well-known and commonly used in the art. The methods and techniques of the present invention are generally performed according to conventional methods well known in the art and as described in various general and more specific references that are cited and discussed throughout the present specification unless otherwise indicated. Enzymatic reactions and purification techniques are performed according to manufacturer's specifications, as commonly accomplished in the art or as described herein. The terminology used in connection with, and the laboratory procedures and techniques of, analytical chemistry, synthetic organic chemistry, and medicinal and pharmaceutical chemistry described herein are those well-known and commonly used in the art. Standard techniques can be used for chemical syntheses, chemical analyses, pharmaceutical preparation, formulation, and delivery, and treatment of patients.

[0144] The following terms, unless otherwise indicated, shall be understood to have the following meanings:

[0145] The term “recombinant polyclonal protein”, “recombinant polyclonal protein composition” or “RPP” refers to more than one recombinant antigen binding proteins (ABPs), collectively comprising more than one antigen-binding domains that specifically bind to an antigen or epitope, or multiple antigens and epitopes. The recombinant polyclonal protein or RPP can be antibodies or variants or derivatives thereof. In some embodiments, the antigen-binding domains bind an antigen or epitope with specificity and affinity similar to that of a naturally occurring antibody. In some embodiments, an RPP comprises antibodies. In some embodiments, the RPP consists essentially of antibodies. In some embodiments, an RPP is a mixture of antibodies. In some embodiments, an RPP comprises scFvs. In some embodiments, the RPP comprises an alternative scaffold. In some embodiments, the RPP consists of alternative scaffolds. In some embodiments, the RPP consists essentially of alternative scaffolds. In some embodiments, the RPP comprises an antibody fragment. In some embodiments, the RPP consists of antibody fragments. In some embodiments, the RPP consists essentially of antibody fragments.

[0146] The term “antigen binding protein” or “ABP” as used herein refers to a protein comprising one or more antigen-binding domains that specifically bind to an antigen or epitope. In some embodiments, the ABP comprises an antibody. In some embodiments, the ABP consists of an antibody. In some embodiments, the ABP consists essentially of an antibody. In some embodiments, the ABP comprises an alternative scaffold. In some embodiments, the ABP consists of an alternative scaffold. In some embodiments, the ABP consists essentially of an alternative scaffold. In some embodiments, the ABP comprises an antibody fragment. In some embodiments, the ABP consists of an antibody fragment. In some embodiments, the ABP consists essentially of an antibody fragment.

[0147] The term “antibody” is used herein in its broadest sense and includes certain types of immunoglobulin molecules comprising one or more antigen-binding domains that specifically bind to an antigen or epitope. An antibody specifically includes intact antibodies (e.g., intact immunoglobulins), antibody fragments, and multi-specific antibodies. One example of an antigen-binding domain is an antigen-binding domain formed by a V_{H}-V_{L} dimer.

[0148] The term “alternative scaffold” refers to a molecule in which one or more regions may be diversified to produce one or more antigen-binding domains that specifically bind to an antigen or epitope. In some embodiments, the antigen-binding domain binds the antigen or epitope with specificity and affinity similar to that of naturally occurring antibodies. Exemplary alternative scaffolds include those derived from fibronectin (e.g., Adnectins™), the β-sandwich (e.g., iMab), lipocalin (e.g., Anticalins®), EETI-II/AGRP, BPTI/LACI-D1/ITI-D2 (e.g., Kunitz domains), thioredoxin peptide aptamers, protein A (e.g., Affibody®), ankyrin repeats (e.g., DARPins), gamma-B-crystallin/ubiquitin (e.g., Affilins), CTLD₃ (e.g., Tetranectins), Fynomers, and (LDLR-A module) (e.g., Avimers). Additional information on alternative scaffolds is provided in Binz et al., Nat. Biotechnol., 2005 23:1257-1268; Skerra, Current Opin. in Biotech., 2007 18:295-304; and Silacci et al., J. Biol. Chem., 2014, 289:14392-14398; each of which is incorporated by reference in its entirety. Alternative scaffolds comprise one type of RPP.

[0149] The term “antigen-binding domain” means the portion of an ABP that is capable of specifically binding to an antigen or epitope.

[0150] The terms “full length antibody,” “intact antibody,” and “whole antibody” are used herein interchangeably to refer to an antibody having a structure substantially similar to a naturally occurring antibody structure and having heavy chains that comprise an Fc region.

[0151] The term “immunoglobulin” refers to a class of structurally related proteins, e.g., antibodies, generally comprising two pairs of polypeptide chains: one pair of light (L) chains and one pair of heavy (H) chains. In an “intact immunoglobulin,” all four of these chains are interconnected by disulfide bonds. The structure of immunoglobulins has been well characterized. See, e.g., Paul, Fundamental Immunology 7th ed., Ch. 5 (2013) Lippincott Williams & Wilkins, Philadelphia, Pa. Briefly, each heavy chain typically comprises a heavy chain variable region (V_{H}) and a heavy chain constant region (C_{H}). The heavy chain constant region typically comprises three domains, abbreviated C_{H1}, C_{H2}, and C_{H3}. Each light chain typically comprises a light chain variable region (V_{L}) and a light chain constant region. The light chain constant region typically comprises one domain, abbreviated C_{L}.

[0152] The term “Fc region” means the C-terminal region of an immunoglobulin heavy chain that, in naturally occurring antibodies, interacts with Fc receptors and certain proteins of the complement system. The structures of the Fc regions of various immunoglobulins, and the glycosylation sites contained therein, are known in the art. See Schroeder and Cavacini, J. Allergy Clin. Immunol., 2010, 125:S41-52, incorporated by reference in its entirety. The Fc region may be a naturally occurring Fc region, or an Fc region modified as described elsewhere in this disclosure.

[0153] The V_{H} and V_{L} regions may be further subdivided into regions of hypervariability (“hypervariable regions (HVRs)” also called “complementarity determining regions” (CDRs)) interspersed with regions that are more conserved. The more conserved regions are called framework regions (FRs). Each V_{H} and V_{L} generally comprises three CDRs and four FRs, arranged in the following order (from N-terminus to C-terminus): FR1—CDR1—FR2—CDR2—FR3—CDR3—FR4. The CDRs are involved in antigen binding, and influence antigen specificity and binding affinity of the antibody. See Kabat et al., Sequences of Proteins of Immunological Interest 5th ed. (1991) Public Health Service, National Institutes of Health, Bethesda, Md., incorporated by reference in its entirety.

[0154] The light chain from any vertebrate species can be assigned to one of two types, called kappa (κ) and lambda (λ), based on the sequence of its constant domain.

[0155] The heavy chain from any vertebrate species can be assigned to one of five different classes (or isotypes): IgA, IgD, IgE, IgG, and IgM. These classes are also designated α, δ, ε, γ, and μ, respectively. The IgG and IgA classes are further divided into subclasses on the basis of differences in sequence and function. Humans express the following subclasses: IgG1, IgG2, IgG3, IgG4, IgA1, and IgA2.

[0156] The amino acid sequence boundaries of a CDR can be determined by one of skill in the art using any of a number of known numbering schemes, including those described by Kabat et al., supra (“Kabat” numbering scheme); Al-Lazikani et al., 1997, J. Mol. Biol., 273:927-948 (“Chothia” numbering scheme); MacCallum et al., 1996, J. Mol. Biol. 262:732-745 (“Contact” numbering scheme); Lefranc et al., Dev. Comp. Immunol., 2003, 27:55-77 (“IMGT” numbering scheme); and Honegge and Plückthun, J. Mol. Biol., 2001, 309:657-70 (“AHo” numbering scheme); each of which is incorporated by reference in its entirety.

[0157] Table 1 provides the positions of CDR1-L (CDR1 of V_{L}), CDR2-L (CDR2 of V_{L}), CDR3-L (CDR3 of V_{L}), CDR1-H (CDR1 of V_{H}), CDR2-H (CDR2 of V_{H}), and CDR3-H (CDR3 of V_{H}), as identified by the Kabat and Chothia schemes. For CDR1-H, residue numbering is provided using both the Kabat and Chothia numbering schemes.

[0158] CDRs may be assigned, for example, using antibody numbering software, such as Abnum, available at www.bioinf.org.uk/abs/abnum/, and described in Abhinandan and Martin, Immunology, 2008, 45:3832-3839, incorporated by reference in its entirety.

TABLE 1
Residues in CDRs according to Kabat
and Chothia numbering schemes.

| CDR | Kabat | Chothia |
|---|---|---|
| CDR1-L | 24-34 | 24-34 |
| CDR2-L | 50-56 | 50-56 |
| CDR3-L | 89-97 | 89-97 |
| CDR1-H (Kabat Numbering) | 31-35B | 26-32 or 34* |
| CDR1-H (Chothia Numbering) | 31-35 | 26-32 |
| CDR2-H | 50-65 | 52-56 |
| CDR3-H | 95-102 | 95-102 |

*The C-terminus of CDR1-H, when numbered using the Kabat numbering convention, varies between 32 and 34, depending on the length of the CDR.

[0159] The “EU numbering scheme” is generally used when referring to a residue in an antibody heavy chain constant region (e.g., as reported in Kabat et al., supra).

[0160] An “antibody fragment” comprises a portion of an intact antibody, such as the antigen-binding or variable region of an intact antibody. Antibody fragments include, for example, Fv fragments, Fab fragments, F(ab′)₂ fragments, Fab′ fragments, scFv (sFv) fragments, and scFv-Fc fragments.

[0161] “Fv” fragments comprise a non-covalently-linked dimer of one heavy chain variable domain and one light chain variable domain.

[0162] “Fab” fragments comprise, in addition to the heavy and light chain variable domains, the constant domain of the light chain and the first constant domain (Cm) of the heavy chain. Fab fragments may be generated, for example, by recombinant methods or by papain digestion of a full-length antibody.

[0163] “F(ab′)₂” fragments contain two Fab′ fragments joined, near the hinge region, by disulfide bonds. F(ab′)₂ fragments may be generated, for example, by recombinant methods or by pepsin digestion of an intact antibody. The F(ab′) fragments can be dissociated, for example, by treatment with β-mercaptoethanol.

[0164] “Single-chain Fv” or “sFv” or “scFv” antibody fragments comprise a V_{H} domain and a V_{L} domain in a single polypeptide chain. The V_{H} and V_{L} are generally linked by a peptide linker. See Plückthun A. (1994). In some embodiments, the linker is a (GGGGS)ₙ (SEQ ID NO: 5). In some embodiments, n=1, 2, 3, 4, 5, or 6. See Antibodies from Escherichia coli. In Rosenberg M. & Moore G. P. (Eds.), The Pharmacology of Monoclonal Antibodies vol. 113 (pp. 269-315). Springer-Verlag, New York, incorporated by reference in its entirety.

[0165] “scFv-Fc” fragments comprise an scFv attached to an Fc domain. For example, an Fc domain may be attached to the C-terminal of the scFv. The Fc domain may follow the V_{H} or V_{L}, depending on the orientation of the variable domains in the scFv (i.e., V_{H} -V_{L} or V_{L}-V_{H}). Any suitable Fc domain known in the art or described herein may be used. In some cases, the Fc domain comprises an IgG4 Fc domain.

[0166] The term “single domain antibody” refers to a molecule in which one variable domain of an antibody specifically binds to an antigen without the presence of the other variable domain. Single domain antibodies, and fragments thereof, are described in Arabi Ghahroudi et al., FEBS Letters, 1998, 414:521-526 and Muyldermans et al., Trends in Biochem. Sci., 2001, 26:230-245, each of which is incorporated by reference in its entirety.

[0167] A “monospecific RPP” is an RPP that comprises a binding site that specifically binds to a single epitope. An example of a monospecific RPP is a naturally occurring IgG molecule which, while divalent, recognizes the same epitope at each antigen-binding domain. The binding specificity may be present in any suitable valency.

[0168] A “polyspecific RPP” is an RPP that binds to more than one epitope. An example of a polyspecific RPP is a mixture of antibodies that bind to different serotypes of pneumococcal bacteria.

[0169] The term “monoclonal antibody” refers to an antibody from a population of substantially homogeneous antibodies. A population of substantially homogeneous antibodies comprises antibodies that are substantially similar and that bind the same epitope(s), except for variants that may normally arise during production of the monoclonal antibody. Such variants are generally present in only minor amounts. A monoclonal antibody is typically obtained by a process that includes the selection of a single antibody from a plurality of antibodies. For example, the selection process can be the selection of a unique clone from a plurality of clones, such as a pool of hybridoma clones, phage clones, yeast clones, bacterial clones, or other recombinant DNA clones. The selected antibody can be further altered, for example, to improve affinity for the target (“affinity maturation”), to humanize the antibody, to improve its production in cell culture, and/or to reduce its immunogenicity in a subject.

[0170] The term “polyclonal antibody” refers to a mixture of at least two monoclonal antibodies. Polyclonal antibodies may be either monospecific or polyspecific.

[0171] The term “chimeric antibody” refers to an antibody in which a portion of the heavy and/or light chain is derived from a particular source or species, while the remainder of the heavy and/or light chain is derived from a different source or species.

[0172] “Humanized” forms of non-human antibodies are chimeric antibodies that contain minimal sequence derived from the non-human antibody. A humanized antibody is generally a human antibody (recipient antibody) in which residues from one or more CDRs are replaced by residues from one or more CDRs of a non-human antibody (donor antibody). The donor antibody can be any suitable non-human antibody, such as a mouse, rat, rabbit, chicken, or non-human primate antibody having a desired specificity, affinity, or biological effect. In some instances, selected framework region residues of the recipient antibody are replaced by the corresponding framework region residues from the donor antibody. Humanized antibodies may also comprise residues that are not found in either the recipient antibody or the donor antibody. Such modifications may be made to further refine antibody function. For further details, see Jones et al., Nature, 1986, 321:522-525; Riechmann et al., Nature, 1988, 332:323-329; and Presta, Curr. Op. Struct. Biol., 1992, 2:593-596, each of which is incorporated by reference in its entirety.

[0173] A “human antibody” is one which possesses an amino acid sequence corresponding to that of an antibody produced by a human or a human cell, or derived from a non-human source that utilizes a human antibody repertoire or human antibody-encoding sequences (e.g., obtained from human sources or designed de novo). Human antibodies specifically exclude humanized antibodies.

[0174] An “isolated RPP” or “isolated nucleic acid” is an RPP or nucleic acid that has been separated and/or recovered from a component of its natural environment. Components of the natural environment may include enzymes, hormones, and other proteinaceous or nonproteinaceous materials. In some embodiments, an isolated RPP is purified to a degree sufficient to obtain at least 15 residues of N-terminal or internal amino acid sequence, for example by use of a spinning cup sequenator. In some embodiments, an isolated RPP is purified to homogeneity by gel electrophoresis (e.g., SDS-PAGE) under reducing or nonreducing conditions, with detection by Coomassie blue or silver stain. An isolated RPP includes an RPP in situ within recombinant cells, since at least one component of the RPP's natural environment is not present. In some aspects, an isolated RPP or isolated nucleic acid is prepared by at least one purification step. In some embodiments, an isolated RPP or isolated nucleic acid is purified to at least 80%, 85%, 90%, 95%, or 99% by weight. In some embodiments, an isolated RPP or isolated nucleic acid is purified to at least 80%, 85%, 90%, 95%, or 99% by volume. In some embodiments, an isolated RPP or isolated nucleic acid is provided as a solution comprising at least 85%, 90%, 95%, 98%, 99% to 100% RPP or nucleic acid by weight. In some embodiments, an isolated RPP or isolated nucleic acid is provided as a solution comprising at least 85%, 90%, 95%, 98%, 99% to 100% RPP or nucleic acid by volume.

[0175] “Affinity” refers to the strength of the sum total of non-covalent interactions between a single binding site of a molecule (e.g., an RPP) and its binding partner (e.g., an antigen or epitope). Unless indicated otherwise, as used herein, “affinity” refers to intrinsic binding affinity, which reflects a 1:1 interaction between members of a binding pair (e.g., RPP and antigen or epitope). The affinity of a molecule X for its partner Y can be represented by the dissociation equilibrium constant (K_{D}). The kinetic components that contribute to the dissociation equilibrium constant are described in more detail below. Affinity can be measured by common methods known in the art, including those described herein. Affinity can be determined, for example, using surface plasmon resonance (SPR) technology (e.g., BIACORE®) or biolayer interferometry (e.g., FORTEBIO®).

[0176] With regard to the binding of an RPP to a target molecule, the terms “bind,” “specific binding,” “specifically binds to,” “specific for,” “selectively binds,” and “selective for” a particular antigen (e.g., a polypeptide target) or an epitope on a particular antigen mean binding that is measurably different from a non-specific or non-selective interaction (e.g., with a non-target molecule). Specific binding can be measured, for example, by measuring binding to a target molecule and comparing it to binding to a non-target molecule. Specific binding can also be determined by competition with a control molecule that mimics the epitope recognized on the target molecule. In that case, specific binding is indicated if the binding of the RPP to the target molecule is competitively inhibited by the control molecule.

[0177] The term “k_{d}” (sec⁻¹), as used herein, refers to the dissociation rate constant of a particular ABP-antigen interaction. This value is also referred to as the k_{off} value.

[0178] The term “kₐ” (M⁻¹×sec⁻¹), as used herein, refers to the association rate constant of a particular ABP-antigen interaction. This value is also referred to as the kₒₙ value.

[0179] The term “K_{D}” (M), as used herein, refers to the dissociation equilibrium constant of a particular ABP-antigen interaction. K_{D}=k_{d}/kₐ.

[0180] The term “K_{A}” (M⁻¹), as used herein, refers to the association equilibrium constant of a particular ABP-antigen interaction. K_{A}=kₐ/k_{d}.

[0181] An “immunoconjugate” is an RPP conjugated to one or more heterologous molecule(s).

[0182] “Effector functions” refer to those biological activities mediated by the Fc region of an antibody, which activities may vary depending on the antibody isotype. Examples of antibody effector functions include C1q binding to activate complement dependent cytotoxicity (CDC), Fc receptor binding to activate antibody-dependent cellular cytotoxicity (ADCC), and antibody dependent cellular phagocytosis (ADCP).

[0183] When used herein in the context of two or more RPPs, the term “competes with” or “cross-competes with” indicates that the two or more RPPs compete for binding to an antigen (e.g., pneumococcus polysaccharide). In one exemplary assay, an antigen is coated on a surface and contacted with a first RPP against the antigen, after which a second RPP against the antigen is added. In another exemplary assay, a first RPP against an antigen is coated on a surface and contacted with the antigen, and then a second RPP against the antigen is added. If the presence of the first RPP against an antigen reduces binding of the second RPP, in either assay, then the RPPs compete. The term “competes with” also includes combinations of RPPs where one RPP reduces binding of another RPP, but where no competition is observed when the RPPs are added in the reverse order. However, in some embodiments, the first and second RPPs inhibit binding of each other, regardless of the order in which they are added. In some embodiments, one RPP reduces binding of another RPP to its antigen by at least 25%, at least 50%, at least 60%, at least 70%, at least 80%, at least 85%, at least 90%, or at least 95%. A skilled artisan can select the concentrations of the antibodies used in the competition assays based on the affinities of the RPPs for pneumococcus polysaccharide and the valency of the RPPs. The assays described in this definition are illustrative, and a skilled artisan can utilize any suitable assay to determine if antibodies compete with each other. Suitable assays are described, for example, in Cox et al., “Immunoassay Methods,” in Assay Guidance Manual [Internet], Updated Dec. 24, 2014 (www.ncbi.nlm.nih.gov/books/NBK92434/; accessed Sep. 29, 2015); Silman et al., Cytometry, 2001, 44:30-37; and Finco et al., J. Pharm. Biomed. Anal., 2011, 54:351-358; each of which is incorporated by reference in its entirety.

[0184] The term “epitope” means a portion of an antigen the specifically binds to an RPP or an ABP. Epitopes frequently consist of surface-accessible amino acid residues and/or sugar side chains and may have specific three-dimensional structural characteristics, as well as specific charge characteristics. Conformational and non-conformational epitopes are distinguished in that the binding to the former but not the latter may be lost in the presence of denaturing solvents. An epitope may comprise amino acid residues that are directly involved in the binding, and other amino acid residues, which are not directly involved in the binding. The epitope to which an RPP or an ABP binds can be determined using known techniques for epitope determination such as, for example, testing for RPP or an ABP binding to an antigen.

[0185] Percent “identity” between a polypeptide sequence and a reference sequence, is defined as the percentage of amino acid residues in the polypeptide sequence that are identical to the amino acid residues in the reference sequence, after aligning the sequences and introducing gaps, if necessary, to achieve the maximum percent sequence identity. Alignment for purposes of determining percent amino acid sequence identity can be achieved in various ways that are within the skill in the art, for instance, using publicly available computer software such as BLAST, BLAST-2, ALIGN, MEGALIGN (DNASTAR), CLUSTALW, CLUSTAL OMEGA, or MUSCLE software. Those skilled in the art can determine appropriate parameters for aligning sequences, including any algorithms needed to achieve maximal alignment over the full length of the sequences being compared.

[0186] A “conservative substitution” or a “conservative amino acid substitution,” refers to the substitution an amino acid with a chemically or functionally similar amino acid. Conservative substitution tables providing similar amino acids are well known in the art. By way of example, the groups of amino acids provided in TABLES 2-4 are, in some embodiments, considered conservative substitutions for one another.

TABLE 2
Selected groups of amino acids that are considered conservative
substitutions for one another, in certain embodiments.

| | |
|---|---|
| Acidic Residues | D and E |
| Basic Residues | K, R, and H |
| Hydrophilic Uncharged Residues | S, T, N, and Q |
| Aliphatic Uncharged Residues | G, A, V, L, and I |
| Non-polar Uncharged Residues | C, M, and P |
| Aromatic Residues | F, Y, and W |

TABLE 3
Additional selected groups of amino acids that
are considered conservative substitutions
for one another, in certain embodiments.

| | |
|---|---|
| Group 1 | A, S, and T |
| Group 2 | D and E |
| Group 3 | N and Q |
| Group 4 | R and K |
| Group 5 | I, L, and M |
| Group 6 | F, Y, and W |

TABLE 4
Further selected groups of amino acids that are considered conservative
substitutions for one another, in certain embodiments.

| | |
|---|---|
| Group A | A and G |
| Group B | D and E |
| Group C | N and Q |
| Group D | R, K, and H |
| Group E | I, L, M, V |
| Group F | F, Y, and W |
| Group G | S and T |
| Group H | C and M |

[0187] Additional conservative substitutions may be found, for example, in Creighton, Proteins: Structures and Molecular Properties 2nd ed. (1993) W. H. Freeman & Co., New York, N.Y. An RPP generated by making one or more conservative substitutions of amino acid residues in a parent RPP is referred to as a “conservatively modified variant.”

[0188] The term “treating” (and variations thereof such as “treat” or “treatment”) refers to clinical intervention in an attempt to alter the natural course of a disease or condition in a subject in need thereof. Treatment can be performed both for prophylaxis and during the course of clinical pathology. Desirable effects of treatment include preventing occurrence or recurrence of disease, alleviation of symptoms, diminish of any direct or indirect pathological consequences of the disease, preventing reinfection or associated symptom, decreasing the rate of disease progression, amelioration or palliation of the disease state, and remission or improved prognosis. Improvements in any conditions can be readily assessed according to standard methods and techniques known in the art. The population of subjects treated by the method of the disease includes subjects suffering from the undesirable condition or disease, as well as subjects at risk for development of the condition or disease.

[0189] As used herein, the term “therapeutically effective amount” or “effective amount” refers to an amount of an RPP or pharmaceutical composition provided herein that, when administered to a subject, is effective to produces the desired effect for which it is administered. The exact dose or amount will depend on the purpose of the treatment, and will be ascertainable by one skilled in the art using known techniques (see, e.g., Lloyd (1999) The Art, Science and Technology of Pharmaceutical Compounding). A therapeutically effective amount can be a “prophylactically effective amount” as prophylaxis can be considered therapy. The term “sufficient amount” means an amount sufficient to produce a desired effect.

[0190] As used herein, the term “subject” means a mammalian subject. Exemplary subjects include humans, monkeys, dogs, cats, mice, rats, cows, horses, camels, goats, rabbits, and sheep. In certain embodiments, the subject is a human. In some embodiments the subject has a disease or condition that can be treated with an RPP provided herein. In some aspects, the disease or condition is a cancer. In some aspects, the disease or condition is a viral infection.

[0191] The term “package insert” is used to refer to instructions customarily included in commercial packages of therapeutic or diagnostic products (e.g., kits) that contain information about the indications, usage, dosage, administration, combination therapy, contraindications and/or warnings concerning the use of such therapeutic or diagnostic products.

[0192] The term “pharmaceutical composition” refers to a preparation which is in such form as to permit the biological activity of an active ingredient contained therein to be effective in treating a subject, and which contains no additional components which are unacceptably toxic to the subject.

[0193] The term “plasma cell” refers to white blood cells that secrete large volumes of antibodies. They are transported by the blood plasma and the lymphatic system. B cells (for example, either germinal center naïve B cells or memory B cells) differentiate into plasma cells that produce antibody molecules closely modelled after the receptors of the precursor B cell. Once released into the blood and lymph, these antibody molecules bind to the target antigen (foreign substance) and initiate its neutralization or destruction. Terminally differentiated plasma cells express relatively few surface antigens, and do not express common pan-B cell markers, such as CD19 and CD20. Instead, plasma cells are identified through flow cytometry by their additional expression of CD138, CD78, and the Interleukin-6 receptor. In humans, CD27 is a good marker for plasma cells, naive B cells are CD27−, memory B-cells are CD27+ and plasma cells are CD27++. The surface antigen CD138 (syndecan-1) is expressed at high levels. Another important surface antigen is CD319 (SLAMF7). This antigen is expressed at high levels on normal human plasma cells. It is also expressed on malignant plasma cells in multiple myeloma. Compared with CD138, which disappears rapidly ex vivo, the expression of CD319 is considerably more stable.

[0194] The term “plasmablast” refers to antibody-secreting cells in the peripheral blood, which differentiate from activated B cells, such as memory B cells, upon stimulation with an antigen. The most immature blood cell that is considered of plasma cell lineage is the plasmablast. Plasmablasts secrete more antibodies than B cells, but less than plasma cells. They divide rapidly and are still capable of internalizing antigens and presenting them to T cells. A cell may stay in this state for several days, and then either die or irrevocably differentiate into a mature, fully differentiated plasma cell. Differentiation of mature B cells into plasma cells is dependent upon the transcription factors Blimp-1/PRDM1 and IRF4.

[0195] The term “memory B cell” refers to a B cell sub-type that are formed within germinal centers following primary infection and are important in generating an accelerated and more robust antibody-mediated immune response in the case of re-infection (also known as a secondary immune response). Memory B cells do not secrete antibody until activated by their specific antigen.

[0196] The term “naïve B cell” refers to a B cell that has not been exposed to an antigen. Once exposed to an antigen, the naïve B cell either becomes a memory B cell or a plasma cell that secretes antibodies specific to the antigen that was originally bound. Plasma cells do not last long in the circulation, this is in contrast to memory cells that last for very long periods of time.

[0197] The term “peripheral blood” refers to blood which travels through peripheral vessels. Peripheral blood is typically obtained by venipuncture (also called phlebotomy), or by finger prick for small quantities.

[0198] The term “plasma hyperimmune” refers to a polyclonal antibody preparation similar to intravenous immunoglobulin (IVIg), except that it is prepared from the plasma of donors with high titers of antibody against a specific organism or antigen. The term hyperimmune is often used interchangeably with the terms “hyperimmune gammaglobulin” and “hyperimmune globulin”. Some agents against which hyperimmune globulins are available include hepatitis B, rabies, tetanus toxin, varicella-zoster, etc. Administration of hyperimmune globulin provides “passive” immunity to the patient against an agent. This is in contrast to vaccines that provide “active” immunity. However, vaccines take much longer to achieve that purpose while hyperimmune globulin provides instant “passive” short-lived immunity.

[0199] The term “activity” refers to a quantitative measurement of an RPP or antibody against an antigen, vaccine, protein, epitope, cell, bacterium, or virus. Activity can be assessed using in vivo or in vitro methods.

[0200] The term “recombinant” refers to proteins that result from the expression of recombinant DNA within living cells. Recombinant DNA is the general name for a piece of DNA that has been created by the combination of at least two separate segments of DNA.

[0201] The term “neutralization” refers to the ability of specific antibodies to block the site(s) on viruses that they use to enter their target cell. The effect of a neutralizing antibody can be negligible even with large excesses of antibody production if they lack specificity to this antigen. The production of specific antibodies can be learned for a faster response at next exposition. The reduction or destruction of a homologous infectious agent can be partial or complete and can make it no longer infectious or pathogenic to other cells.

[0202] A “variant” of a polypeptide (e.g., an antibody) comprises an amino acid sequence wherein one or more amino acid residues are inserted into, deleted from and/or substituted into the amino acid sequence relative to the native polypeptide sequence, and retains essentially the same biological activity as the native polypeptide. The biological activity of the polypeptide can be measured using standard techniques in the art (for example, if the variant is an antibody, its activity may be tested by binding assays, as described herein). Variants of the invention include fragments, analogs, recombinant polypeptides, synthetic polypeptides, and/or fusion proteins.

[0203] A “derivative” of a polypeptide is a polypeptide (e.g., an antibody) that has been chemically modified, e.g., via conjugation to another chemical moiety such as, for example, polyethylene glycol, albumin (e.g., human serum albumin), phosphorylation, and glycosylation. Unless otherwise indicated, the term “antibody” includes, in addition to antibodies comprising two full-length heavy chains and two full-length light chains, derivatives, variants, fragments, and muteins thereof, examples of which are described below.

[0204] A nucleotide sequence is “operably linked” to a regulatory sequence if the regulatory sequence affects the expression (e.g., the level, timing, or location of expression) of the nucleotide sequence. A “regulatory sequence” is a nucleic acid that affects the expression (e.g., the level, timing, or location of expression) of a nucleic acid to which it is operably linked. The regulatory sequence can, for example, exert its effects directly on the regulated nucleic acid, or through the action of one or more other molecules (e.g., polypeptides that bind to the regulatory sequence and/or the nucleic acid). Examples of regulatory sequences include promoters, enhancers and other expression control elements (e.g., polyadenylation signals). Further examples of regulatory sequences are described in, for example, Goeddel, 1990, Gene Expression Technology: Methods in Enzymology 185, Academic Press, San Diego, Calif. and Baron et al., 1995, Nucleic Acids Res. 23:3605-06.

[0205] A “host cell” is a cell that can be used to express a nucleic acid, e.g., a nucleic acid of the invention. A host cell can be a prokaryote, for example, E. coli, or it can be a eukaryote, for example, a single-celled eukaryote (e.g., a yeast or other fungus), a plant cell (e.g., a tobacco or tomato plant cell), an animal cell (e.g., a human cell, a monkey cell, a hamster cell, a rat cell, a mouse cell, or an insect cell) or a hybridoma. Examples of host cells include CS-9 cells, the COS-7 line of monkey kidney cells (ATCC CRL 1651) (see Gluzman et al., 1981, Cell 23:175), L cells, C127 cells, 3T3 cells (ATCC CCL 163), Chinese hamster ovary (CHO) cells or their derivatives such as Veggie CHO and related cell lines which grow in serum-free media (see Rasmussen et al., 1998, Cytotechnology 28:31), HeLa cells, BHK (ATCC CRL 10) cell lines, the CV1/EBNA cell line derived from the African green monkey kidney cell line CV1 (ATCC CCL 70) (see McMahan et al., 1991, EMBO J. 10:2821), human embryonic kidney cells such as 293, 293 EBNA or MSR 293, human epidermal A431 cells, human Colo205 cells, other transformed primate cell lines, normal diploid cells, cell strains derived from in vitro culture of primary tissue, primary explants, HL-60, U937, HaK or Jurkat cells. Typically, a host cell is a cultured cell that can be transformed or transfected with a polypeptide-encoding nucleic acid, which can then be expressed in the host cell.

[0206] The phrase “recombinant host cell” can be used to denote a host cell that has been transformed or transfected with a nucleic acid to be expressed. A host cell also can be a cell that comprises the nucleic acid but does not express it at a desired level unless a regulatory sequence is introduced into the host cell such that it becomes operably linked with the nucleic acid. It is understood that the term host cell refers not only to the particular subject cell but to the progeny or potential progeny of such a cell. Because certain modifications may occur in succeeding generations due to, e.g., mutation or environmental influence, such progeny may not, in fact, be identical to the parent cell, but are still included within the scope of the term as used herein.

[0207] Other Interpretational Conventions

[0208] Ranges recited herein are understood to be shorthand for all of the values within the range, inclusive of the recited endpoints. For example, a range of 1 to 50 is understood to include any number, combination of numbers, or sub-range from the group consisting of 1, 2, 3, 4, 5, 6, 7, 8, 9, 10, 11, 12, 13, 14, 15, 16, 17, 18, 19, 20, 21, 22, 23, 24, 25, 26, 27, 28, 29, 30, 31, 32, 33, 34, 35, 36, 37, 38, 39, 40, 41, 42, 43, 44, 45, 46, 47, 48, 49, and 50.

[0209] Unless otherwise indicated, reference to a compound that has one or more stereocenters intends each stereoisomer, and all combinations of stereoisomers, thereof.

[0210] Recombinant Polyclonal Proteins (RPPs)

[0211] The present disclosure provides a RPP (rZIG) that specifically binds one or more Zika antigens. The RPP comprises a plurality of ABPs specifically binding to one or more Zika antigens.

[0212] In some embodiments, the RPP comprises at least 100 ABPs each with a cognate pair of heavy chain CDR3 and light chain CDR3 sequences as shown in Table 5. In some embodiments, the RPP comprises at least 100, 500, 1000, 5000, 10,000, or 15,000 ABPs each with a cognate pair of heavy chain CDR3 and light chain CDR3 sequences as shown in Table 5. In some embodiments, the RPP comprises 100 to 500 ABPs, 500 to 1000 ABPs. 1000 to 2500 ABPs, or more than 2500 ABPs. In some embodiments, the RPP comprises 10, 100, 1,000, 10,000, 100,000 or more than 100,000 distinct ABPs.

[0213] In some embodiments, the RPP comprises scFvs. In some embodiments, the RPP consists of scFvs. In some embodiments, the RPP comprises antibody fragments. In some embodiments, the RPP consists of antibody fragments. In some embodiments, the RPP comprises recombinant full-length antibodies. In some embodiments, the RPP consists of recombinant full-length antibodies. In some embodiments, the RPP comprises human antibodies. In some embodiments, the RPP comprises humanized antibodies. In some embodiments, the RPP comprises monospecific ABPs. In some embodiments, the RPP comprises bispecific ABPs. In some embodiments, the RPP consists of ABPs of a human IgG1 subtype. In some embodiments, the RPP comprises IgGs, IgAs, or IgMs.

[0214] In some embodiments, the RPP comprises antibody fragments. The RPP can be a Fab fragment, a F(ab′)₂ fragment an Fv fragment, or a combination thereof. A Fab fragment is a monovalent fragment having the V_{L}, V_{H}, C_{L} and C_{H1} domains; a F(ab′)₂ fragment is a bivalent fragment having two Fab fragments linked by a disulfide bridge at the hinge region; a Fd fragment has the V_{H} and C_{H1} domains; an Fv fragment has the V_{L} and V_{H} domains of a single arm of an antibody; and a dAb fragment has a V_{H} domain, a V_{L} domain, or an antigen-binding fragment of a V_{H} or V_{L} domain (U.S. Pat. Nos. 6,846,634, 6,696,245, US App. Pub. No. 05/0202512, 04/0202995, 04/0038291, 04/0009507, 03/0039958, Ward et al., Nature 341:544-546, 1989).

[0215] Naturally occurring immunoglobulin chains exhibit the same general structure of relatively conserved framework regions (FR) joined by three hypervariable regions, also called complementarity determining regions or CDRs. From N-terminus to C-terminus, both light and heavy chains comprise the domains FR1, CDR1, FR2, CDR2, FR3, CDR3 and FR4. The assignment of amino acids to each domain is in accordance with the definitions of Kabat et al. in Sequences of Proteins of Immunological Interest, 5th Ed., US Dept. of Health and Human Services, PHS, NIH, NIH Publication no. 91-3242, 1991.

[0216] In some embodiments, the RPP comprises humanized antibodies. A humanized antibody has a sequence that differs from the sequence of an antibody derived from a non-human species by one or more amino acid substitutions, deletions, and/or additions, such that the humanized antibody is less likely to induce an immune response, and/or induces a less severe immune response, as compared to the non-human species antibody, when it is administered to a human subject. In one embodiment, certain amino acids in the framework and constant domains of the heavy and/or light chains of the non-human species antibody are mutated to produce the humanized antibody. In another embodiment, the constant domain(s) from a human antibody are fused to the variable domain(s) of a non-human species. In another embodiment, one or more amino acid residues in one or more CDR sequences of a non-human antibody are changed to reduce the likely immunogenicity of the non-human antibody when it is administered to a human subject, wherein the changed amino acid residues either are not critical for immunospecific binding of the antibody to its antigen, or the changes to the amino acid sequence that are made are conservative changes, such that the binding of the humanized antibody to the antigen is not significantly worse than the binding of the non-human antibody to the antigen. Examples of how to make humanized antibodies may be found in U.S. Pat. Nos. 6,054,297, 5,886,152 and 5,877,293.

[0217] Fragments or analogs of antibodies can be readily prepared by those of ordinary skill in the art following the teachings of this specification and using techniques well-known in the art. Preferred amino- and carboxy-termini of fragments or analogs occur near boundaries of functional domains. Structural and functional domains can be identified by comparison of the nucleotide and/or amino acid sequence data to public or proprietary sequence databases. Computerized comparison methods can be used to identify sequence motifs or predicted protein conformation domains that occur in other proteins of known structure and/or function. Methods to identify protein sequences that fold into a known three-dimensional structure are known. See, e.g., Bowie et al., 1991, Science 253:164.

[0218] An RPP can also be any synthetic or genetically engineered protein. For example, antibody fragments include isolated fragments consisting of the light chain variable region, “Fv” fragments consisting of the variable regions of the heavy and light chains, recombinant single chain polypeptide molecules in which light and heavy variable regions are connected by a peptide linker (scFv proteins).

[0219] Another form of an antibody fragment is a peptide comprising one or more complementarity determining regions (CDRs) of an antibody. CDRs (also termed “minimal recognition units”, or “hypervariable region”) can be incorporated into a molecule either covalently or noncovalently to make it an antigen binding protein. CDRs can be obtained by constructing polynucleotides that encode the CDR of interest. Such polynucleotides are prepared, for example, by using the polymerase chain reaction to synthesize the variable region using mRNA of antibody producing cells as a template (see, for example, Larrick et al., Methods: A Companion to Methods in Enzymology 2:106, 1991; Courtenay Luck, “Genetic Manipulation of Monoclonal Antibodies,” in Monoclonal Antibodies: Production, Engineering and Clinical Application, Ritter et al. (eds.), page 166 (Cambridge University Press 1995); and Ward et al., “Genetic Manipulation and Expression of Antibodies,” in Monoclonal Antibodies: Principles and Applications, Birch et al., (eds.), page 137 (Wiley Liss, Inc. 1995).

[0220] The variable region domains of RPPs can be any naturally occurring variable domain or an engineered version thereof. By engineered version is meant a variable region domain that has been created using recombinant DNA engineering techniques. Such engineered versions include those created, for example, from a specific antibody variable region by insertions, deletions, or changes in or to the amino acid sequences of the specific antibody. Particular examples include engineered variable region domains containing at least one CDR and optionally one or more framework amino acids from a first antibody and the remainder of the variable region domain from a second antibody.

[0221] The variable region domain may be covalently attached at a C terminal amino acid to at least one other antibody domain or a fragment thereof. Thus, for example, a V_{H} domain that is present in the variable region domain may be linked to an immunoglobulin CH1 domain, or a fragment thereof. Similarly, a V_{L} domain may be linked to a CK domain or a fragment thereof. In this way, for example, the antibody may be a Fab fragment wherein the antigen binding domain contains associated V_{H} and V_{L} domains covalently linked at their C termini to a CH1 and CK domain, respectively. The CH1 domain may be extended with further amino acids, for example to provide a hinge region or a portion of a hinge region domain as found in a Fab′ fragment, or to provide further domains, such as antibody CH2 and CH3 domains.

[0222] The RPP can be ABPs comprising, e.g., the cognate pairs of heavy and light chain CDR3 sequence disclosed herein. For example, CDRs may be incorporated into known antibody framework regions (IgG1, IgG2, etc.), or conjugated to a suitable vehicle to enhance the half-life thereof. Suitable vehicles include, but are not limited to Fc, polyethylene glycol (PEG), albumin, transferrin, and the like. These and other suitable vehicles are known in the art. Such conjugated CDR peptides may be in monomeric, dimeric, tetrameric, or other form. In one embodiment, one or more water-soluble polymer is bonded at one or more specific position, for example at the amino terminus, of a binding agent.

[0223] In certain embodiments, the RPP comprises one or more water soluble polymer attachments, including, but not limited to, polyethylene glycol, polyoxyethylene glycol, or polypropylene glycol. See, e.g., U.S. Pat. Nos. 4,640,835, 4,496,689, 4,301,144, 4,670,417, 4,791,192 and 4,179,337. In certain embodiments, a derivative binding agent comprises one or more of monomethoxy-polyethylene glycol, dextran, cellulose, or other carbohydrate based polymers, poly-(N-vinyl pyrrolidone)-polyethylene glycol, propylene glycol homopolymers, a polypropylene oxide/ethylene oxide co-polymer, polyoxyethylated polyols (e.g., glycerol) and polyvinyl alcohol, as well as mixtures of such polymers. In certain embodiments, one or more water-soluble polymer is randomly attached to one or more side chains. In certain embodiments, PEG can act to improve the therapeutic capacity for a binding agent, such as an antibody. Certain such methods are discussed, for example, in U.S. Pat. No. 6,133,426, which is hereby incorporated by reference for any purpose.

[0224] An RPP can have, for example, the structure of a naturally occurring immunoglobulin. An “immunoglobulin” is a tetrameric molecule. In a naturally occurring immunoglobulin, each tetramer is composed of two identical pairs of polypeptide chains, each pair having one “light” (about 25 kDa) and one “heavy” chain (about 50-70 kDa). The amino-terminal portion of each chain includes a variable region of about 100 to 110 or more amino acids primarily responsible for antigen recognition. The carboxy-terminal portion of each chain defines a constant region primarily responsible for effector function. Human light chains are classified as kappa and lambda light chains. Heavy chains are classified as mu, delta, gamma, alpha, or epsilon, and define the antibody's isotype as IgM, IgD, IgG, IgA, and IgE, respectively. Within light and heavy chains, the variable and constant regions are joined by a “J” region of about 12 or more amino acids, with the heavy chain also including a “D” region of about 10 more amino acids. See generally, Fundamental Immunology Ch. 7 (Paul, W., ed., 2nd ed. Raven Press, N.Y. (1989)) (incorporated by reference in its entirety for all purposes). The variable regions of each light/heavy chain pair form the antibody binding site such that an intact immunoglobulin has two binding sites.

[0225] Different RPPs may bind to different domains of disease targets or act by different mechanisms of action. As indicated herein inter alia, the domain regions are designated such as to be inclusive of the group, unless otherwise indicated. For example, amino acids 4-12 refers to nine amino acids: amino acids at positions 4, and 12, as well as the seven intervening amino acids in the sequence. Other examples include antigen binding proteins that inhibit binding of a pathogen to its target cell, i.e., neutralizing activity. An antigen binding protein need not completely inhibit a binding to target cell to find use in the present invention.

[0226] The RPPs provided herein can induce various biological effects associated with binding to an antigen that comprises a vaccine. In some embodiments, an RPP provided herein prevents binding of a virus to a cell, which therein prevents entry of the virus into the cell. In some embodiments, the RPP binds to the cell surface of a patient's cells, in order to eliminate cells associated with a pathology.

[0227] The RPPs describe herein can include an Fc region, e.g., a dimer Fc polypeptide. One suitable Fc polypeptide, described in PCT application WO 93/10151 (hereby incorporated by reference), is a single chain polypeptide extending from the N-terminal hinge region to the native C-terminus of the Fc region of a human IgG1 antibody. Another useful Fc polypeptide is the Fc mutein described in U.S. Pat. No. 5,457,035 and in Baum et al., 1994, EMBO J. 13:3992-4001. The amino acid sequence of this mutein is identical to that of the native Fc sequence presented in WO 93/10151, except that amino acid 19 has been changed from Leu to Ala, amino acid 20 has been changed from Leu to Glu, and amino acid 22 has been changed from Gly to Ala. The mutein exhibits reduced affinity for Fc receptors.

[0228] Antigen-binding fragments of RPPs of the invention can be produced by conventional techniques. Examples of such fragments include, but are not limited to, Fab and F(ab′)₂ fragments. Antibody fragments and derivatives produced by genetic engineering techniques also are contemplated.

[0229] Additional embodiments include chimeric antibodies, e.g., humanized versions of non-human (e.g., murine) monoclonal antibodies. Such humanized antibodies may be prepared by known techniques, and offer the advantage of reduced immunogenicity when the antibodies are administered to humans. In one embodiment, a humanized antibody comprises the variable domain of a murine antibody (or all or part of the antigen binding site thereof) and a constant domain derived from a human antibody. Alternatively, a humanized antibody fragment may comprise the antigen binding site of a murine antibody and a variable domain fragment (lacking the antigen-binding site) derived from a human antibody. Procedures for the production of chimeric and further engineered antibodies include those described in Riechmann et al., 1988, Nature 332:323, Liu et al., 1987, Proc. Nat. Acad. Sci. USA 84:3439, Larrick et al., 1989, Bio/Technology 7:934, and Winter et al., 1993, TIPS 14:139. In one embodiment, the chimeric antibody is a CDR grafted antibody. Techniques for humanizing antibodies are discussed in, e.g., U.S. Pat. Nos. 5,869,619, 5,225,539, 5,821,337, 5,859,205, 6,881,557, Padlan et al., 1995, FASEB J. 9:133-39, and Tamura et al., 2000, J. Immunol. 164:1432-41.

[0230] Procedures have been developed for generating human or partially human antibodies in non-human animals. For example, mice in which one or more endogenous immunoglobulin genes have been inactivated by various means have been prepared. Human immunoglobulin genes have been introduced into the mice to replace the inactivated mouse genes. Antibodies produced in the animal incorporate human immunoglobulin polypeptide chains encoded by the human genetic material introduced into the animal. In one embodiment, a non-human animal, such as a transgenic mouse, is immunized with a vaccine, such that antibodies directed against the vaccine antigen pare generated in the animal.

[0231] Examples of techniques for production and use of transgenic animals for the production of human or partially human antibodies are described in U.S. Pat. Nos. 5,814,318, 5,569,825, and 5,545,806, Davis et al., 2003, Production of human antibodies from transgenic mice in Lo, ed. Antibody Engineering: Methods and Protocols, Humana Press, NJ:191-200, Kellermann et al., 2002, Curr Opin Biotechnol. 13:593-97, Russel et al., 2000, Infect Immun. 68:1820-26, Gallo et al., 2000, Eur J. Immun. 30:534-40, Davis et al., 1999, Cancer Metastasis Rev. 18:421-25, Green, 1999, J Immunol Methods. 231:11-23, Jakobovits, 1998, Advanced Drug Delivery Reviews 31:33-42, Green et al., 1998, J Exp Med. 188:483-95, Jakobovits A, 1998, Exp. Opin. Invest. Drugs. 7:607-14, Tsuda et al., 1997, Genomics. 42:413-21, Mendez et al., 1997, Nat Genet. 15:146-56, Jakobovits, 1994, Curr Biol. 4:761-63, Arbones et al., 1994, Immunity. 1:247-60, Green et al., 1994, Nat Genet. 7:13-21, Jakobovits et al., 1993, Nature. 362:255-58, Jakobovits et al., 1993, Proc Natl Acad Sci USA. 90:2551-55. Chen, J., M. Trounstine, F. W. Alt, F. Young, C. Kurahara, J. Loring, D. Huszar. Inter'l Immunol. 5 (1993): 647-656, Choi et al., 1993, Nature Genetics 4: 117-23, Fishwild et al., 1996, Nature Biotech. 14: 845-51, Harding et al., 1995, Annals of the New York Academy of Sciences, Lonberg et al., 1994, Nature 368: 856-59, Lonberg, 1994, Transgenic Approaches to Human Monoclonal Antibodies in Handbook of Experimental Pharmacology 113: 49-101, Lonberg et al., 1995, Internal Review of Immunology 13:65-93, Neuberger, 1996, Nature Biotechnology 14: 826, Taylor et al., 1992, Nucleic Acids Res. 20:6287-95, Taylor et al., 1994, Inter'l Immunol. 6:579-91, Tomizuka et al., 1997, Nature Genetics 16: 133-43, Tomizuka et al., 2000, Pro. Nat'lAcad. Sci. USA 97: 722-27, Tuaillon et al., 1993, Pro.Nat'lAcad.Sci. USA 90: 3720-24, and Tuaillon et al., 1994, J. Immunol. 152: 2912-20.

[0232] RPPs of the invention can comprise any constant region known in the art. The light chain constant region can be, for example, a kappa- or lambda-type light chain constant region, e.g., a human kappa- or lambda-type light chain constant region. The heavy chain constant region can be, for example, an alpha-, delta-, epsilon-, gamma-, or mu-type heavy chain constant regions, e.g., a human alpha-, delta-, epsilon-, gamma-, or mu-type heavy chain constant region. In one embodiment, the light or heavy chain constant region is a fragment, derivative, variant, or mutein of a naturally occurring constant region.

[0233] Techniques are known for deriving an antibody of a different subclass or isotype from an antibody of interest, i.e., subclass switching. Thus, IgG antibodies may be derived from an IgM antibody, for example, and vice versa. Such techniques allow the preparation of new antibodies that possess the antigen-binding properties of a given antibody (the parent antibody), but also exhibit biological properties associated with an antibody isotype or subclass different from that of the parent antibody. Recombinant DNA techniques may be employed. Cloned DNA encoding particular antibody polypeptides may be employed in such procedures, e.g., DNA encoding the constant domain of an antibody of the desired isotype. See also Lantto et al., 2002, Methods Mol. Biol. 178:303-16.

[0234] Single chain antibodies (scFv) may be formed by linking heavy and light chain variable domain (Fv region) fragments via an amino acid bridge (short peptide linker, e.g., a synthetic sequence of amino acid residues), resulting in a single polypeptide chain. Such single-chain Fvs (scFvs) have been prepared by fusing DNA encoding a peptide linker between DNAs encoding the two variable domain polypeptides (VL and VII). The resulting polypeptides can fold back on themselves to form antigen-binding monomers, or they can form multimers (e.g., dimers, trimers, or tetramers), depending on the length of a flexible linker between the two variable domains (Kortt et al., 1997, Prot. Eng. 10:423; Kortt et al., 2001, Biomol. Eng. 18:95-108, Bird et al., 1988, Science 242:423-26 and Huston et al., 1988, Proc. Natl. Acad. Sci. USA 85:5879-83). By combining different V_{L} and VI-I-comprising polypeptides, one can form multimeric scFvs that bind to different epitopes (Kriangkum et al., 2001, Biomol. Eng. 18:31-40). Techniques developed for the production of single chain antibodies include those described in U.S. Pat. No. 4,946,778; Bird, 1988, Science 242:423; Huston et al., 1988, Proc. Natl. Acad. Sci. USA 85:5879; Ward et al., 1989, Nature 334:544, de Graaf et al., 2002, Methods Mol Biol. 178:379-87.

[0235] An RPP, e.g., ABPs, according to the invention may have a binding affinity for antigen target of less than or equal to 5×10⁻⁷M, less than or equal to 1×10⁻⁷M, less than or equal to 0.5×10⁻⁷M, less than or equal to 1×10⁻⁸M, less than or equal to 1×10⁻⁹M, less than or equal to 1×10⁻¹⁰M, less than or equal to 1×10⁻¹¹M, or less than or equal to 1×10⁻¹²M.

[0236] The affinity of an RPP, as well as the extent to which the RPP inhibits binding, can be determined by one of ordinary skill in the art using conventional techniques, for example those described by Scatchard et al. (Ann. N.Y. Acad. Sci. 51:660-672 (1949)) or by surface plasmon resonance (SPR; BIAcore, Biosensor, Piscataway, N.J.). For surface plasmon resonance, target molecules are immobilized on a solid phase and exposed to ligands in a mobile phase running along a flow cell. If ligand binding to the immobilized target occurs, the local refractive index changes, leading to a change in SPR angle, which can be monitored in real time by detecting changes in the intensity of the reflected light. The rates of change of the SPR signal can be analyzed to yield apparent rate constants for the association and dissociation phases of the binding reaction. The ratio of these values gives the apparent equilibrium constant (affinity) (see, e.g., Wolff et al., Cancer Res. 53:2560-65 (1993)).

[0237] Sequences of RPPs

[0238] CDR polypeptide sequences of recombinant antibodies generated using the methods described herein are provided in the sequence listing.

[0239] A summary of the sequences is provided in TABLE 5. ABPs of the RPP provided herein can comprise a cognate pair of heavy chain CDR3 and light chain CDR3 sequences as shown in Table 5, optionally all the cognate pairs.

[0240] In some embodiments, the RPP comprises an ABP specifically binding to one or more Zika antigens and comprising a cognate pair of heavy chain CDR3 and light chain CDR3 sequences as shown in Table 5, optionally all the cognate pairs. In particular, the heavy chain CDR3 can comprise a sequence selected from SEQ ID NO: 2, 4, 6, through 25838 (even numbers). The light chain CDR3 can comprise a sequence selected from SEQ ID NO: 1, 3, 5, through 25837 (odd numbers).

[0241] In some embodiments, the RPP is recombinantly produced using sequences derived from plasma cells or plasmablasts from at least one donor injected with the antigen or infected with Zika. In some embodiments, the sequences are obtained from antiboidies generated in a mammalian subject injected with a Zika or Denghe antigen. In some embodiments, the mammalian subject is injected or infected with Zika virus or Denghe virus. In some embodiments, the mammalian subject is injected or infected with Zika virus and Denghe virus. In some embodiments, the mammalian subject is injected with inactivated Zika virus or Denghe virus. In some embodiments, the mammalian subject is injected with Zika virus like particles (VLP), inactivated Dengue 1, Dengue 4, Dengue 3, or Dengue. In some embodiments, the donor is a human subject. In some embodiments, the donor is not a human subject. In some embodiments, the donor is a mouse.

[0242] In some embodiments, the RPP is recombinantly produced using sequences derived from plasma cells or plasmablasts from at least one donor and the activity of the RPP exceeds by at least tenfold a serum titer activity of the donor against Zika virus or a Zika antigen. In some embodiments, the activity is measured by an in vitro pathogen neutralization assay or an in vitro binding to antien assay or an in vivo efficacy assay.

TABLE 5
CDR3 heavy and CDR3 light chain sequences

| Sequence | Description |
|---|---|
| 1, 3, 5, through | Antibodies from Trianni mice immunized with |
| 25837 (odd numbers) | Zika and dengue viruses - light chain CDR3 |
| | sequences |
| 2, 4, 6, through | Antibodies from Trianni mice immunized with |
| 25838 (even numbers) | Zika and dengue viruses - heavy chain CDR3 |
| | sequences |

[0243] In some embodiments, the RPP includes an ABP comprising cognate pairs of the heavy and light chain variable regions. In some embodiments, the ABP comprises CDR3 sequences disclosed herein. In some embodiments, the ABP comprises a heavy chain CDR3 having a sequence selected from SEQ ID Nos: 2, 4, 6, through 25838 (even numbers) and a light chain CDR3 has a sequence selected from SEQ ID Nos: 1, 3, 5, through 25837 (odd numbers).

[0244] In some embodiments, the ABP comprises a heavy chain CDR3 having the sequence of SEQ ID NO: [n+1] and a light chain CDR3 has the sequence of SEQ ID NO: [n], wherein n is an odd number from 1 to 25837. In some embodiments, the ABP comprises a heavy chain CDR3 having the sequence of SEQ ID NO: [n+1] or a light chain CDR3 has the sequence of SEQ ID NO: [n], wherein n is an odd number from 1 to 25837.

[0245] In some embodiments, the ABPs of the RPP comprise a heavy chain CDR1 having the sequence of GFTF X₁X₂X₃X₄ (SEQ ID NO: 25839).

[0246] In some embodiments, the RPP comprises an ABP comprising a heavy chain CDR1 having the sequence of GFTF[S/D][S/D][Y/H/D][A/G/Y/F] (SEQ ID NO: 25840). In some embodiments, the RPP comprises an ABP comprising a heavy chain CDR1 having a sequence selected from the group consisting of:

(SEQ ID NO: 25841)
GFTFSSYA;
(SEQ ID NO: 25842)
GFTFSSYG;
(SEQ ID NO: 25843)
GFTFDD[Y/H]G;
and
(SEQ ID NO: 25844)
GFTFSD[Y/D][Y/F]

[0247] In some embodiments, each of the ABPs in the RPP comprises a heavy chain CDR1 having the sequence selected from SEQ ID Nos: 25839-25844. In some embodiments, each of at least 5%, 10%, 25%, or 50% of the total ABPs in the RPP comprises a heavy chain CDR1 having the sequence selected from SEQ ID Nos: 25839-25844.

[0248] In some embodiments, the RPP comprises an ABP comprising a heavy chain CDR2 having the sequence of I X₁X₂X₃G X₃X₄X₅ (SEQ ID NO: 25845).

[0249] In some embodiments, the RPP comprises an ABP comprising a heavy chain CDR2 having the sequence of I[W/S/N][G/Y/W][S/D/N]G[G/S/D/Y][S/N/T][T/K/I] (SEQ ID NO: 25846). In some embodiments, the RPP comprises an ABP comprising a heavy chain CDR2 having a sequence selected from the group consisting of:

(SEQ ID NO: 25847)
ISGSGGST;
(SEQ ID NO: 25848)
I[W/S]YDGSNK;
(SEQ ID NO: 25849)
INWNG[G/D]ST
and
(SEQ ID NO: 25850)
ISGSG[S/Y]TI.

[0250] In some embodiments, each of the ABPs in the RPP comprises a heavy chain CDR1 having the sequence selected from SEQ ID Nos: 25845-25850. In some embodiments, each of at least 5%, 10%, 25%, or 50% of the total ABPs in the RPP comprises a heavy chain CDR1 having the sequence selected from SEQ ID Nos: 25845-25850.

[0251] In some embodiments, the RPP comprises an ABP comprising a heavy chain CDR3 having a seqyebce selected from

(SEQ ID NO: 25851)
AKEGMVLRYFDWLWDY;
(SEQ ID NO: 25852)
RX₁X₂X₃SGX₄S X₅FDY;
(SEQ ID NO: 25853)
AX₁X₂X₃X₄X₅X₆VX₇X₈X₉Y;
(SEQ ID NO: 25854)
ARX₁X₂GSX₃X₄X₅X₆DX₇FD X₈;
and
(SEQ ID NO: 25855)
ARDEGYX₁GYX₂LDX₃.

[0252] In some embodiments, each of the ABPs in the RPP comprises a heavy chain CDR3 having a seqyebce selected from

(SEQ ID NO: 25851)
AKEGMVLRYFDWLWDY;
(SEQ ID NO: 25852)
RX₁X₂X₃SGX₄S X₅FDY;
(SEQ ID NO: 25853)
AX₁X₂X₃X₄X₅X₆VX₇X₈X₉Y;
(SEQ ID NO: 25854)
ARX₁X₂GSX₃X₄X₅X₆DX₇FD X₈;
and
(SEQ ID NO: 25855)
ARDEGYX₁GYX₂LDX₃.

[0253] In some embodiments, each of at least 5%, 10%, 25%, or 50% of the total ABPs om the RPP comprises a heavy chain CDR3 having a seqyebce selected from

(SEQ ID NO: 25851)
AKEGMVLRYFDWLWDY;
(SEQ ID NO: 25852)
RX₁X₂X₃SGX₄S X₅FDY;
(SEQ ID NO: 25853)
AX₁X₂X₃X₄X₅X₆VX₇X₈X₉Y;
(SEQ ID NO: 25854)
ARX₁X₂GSX₃X₄X₅X₆DX₇FD X₈;
and
(SEQ ID NO: 25855)
ARDEGYX₁GYX₂LDX₃.

[0254] In some embodiments, the RPP comprises an ABP comprising a heavy chain CDR3 having a sequence selected from
[0255] AKEGMVLRYFDWLWDY (SEQ ID NO: 25856);
[0256] R[D/E][R/L][S/V/L]SG[P/W]S[G/H]FDY (SEQ ID NO: 25857);
[0257] A[K/E/R][E/T][Q/L/T][L/W/I][L/V/W/N][G/L]V[V/P/L][F/L/N][D/N]Y (SEQ ID NO: 25858);
[0258] AR[D/N][R/G]GS[S/T][G/S/W/F][W/F/Y][R/F/Y]D[W/A]FD[P/I] (SEQ ID NO: 25859); and
[0259] ARDEGY[R/S]GY[V/N]LD[T/N/S] (SEQ ID NO: 25860).

[0260] In some embodiments, the RPP comprises at least 20, 40, 50, 100 or 200 ABPs comprising:
[0261] a heavy chain CDR1 having the sequence of GFTFSSYA (SEQ ID NO: 25841), a
[0262] heavy chain CDR2 having the sequence of ISGSGGST (SEQ ID NO: 25847), and
[0263] a heavy chain CDR3 having the sequence of AKEGMVLRYFDWLWDY (SEQ ID NO: 25856);
[0264] a heavy chain CDR1 having the sequence of GFTFSSYG (SEQ ID NO: 25842), a heavy chain CDR2 having the sequence of I[W/S]YDGSNK (SEQ ID NO: 25848), and a heavy chain CDR3 having the sequence of R[D/E][R/L][S/V/L]SG[P/W]S[G/H]FDY (SEQ ID NO: 25857);
[0265] a heavy chain CDR1 having the sequence of GFTFSSYA (SEQ ID NO: 25841), a heavy chain CDR2 having the sequence of ISGSGGST (SEQ ID NO: 25847), and a heavy chain CDR3 having the sequence of A[K/E/R][E/T][Q/L/T][L/W/I][L/V/W/N][G/L]V[V/P/L][F/L/N][D/N]Y (SEQ ID NO: 25858);
[0266] a heavy chain CDR1 having the sequence of GFTFDD[Y/H]G (SEQ ID NO: 25843), a heavy chain CDR2 having the sequence of INWNG[G/D]ST (SEQ ID NO: 25849), and a heavy chain CDR3 having the sequence of AR[D/N][R/G]GS[S/T][G/S/W/F][W/F/Y][R/F/Y]D[W/A]FD[P/I] (SEQ ID NO: 25859); or
[0267] a heavy chain CDR1 having the sequence of GFTFSD[Y/D][Y/F] (SEQ ID NO: 25844), a heavy chain CDR2 having the sequence of ISGSG[S/Y]TI (SEQ ID NO: 25850), and a heavy chain CDR3 having the sequence of ARDEGY[R/S]GY[V/N]LD[T/N/S] (SEQ ID NO: 25860).

[0268] In some embodiments, each of at least 5%, 10%, 25%, or 50% of the total ABPs in the RPP comprises:
[0269] a heavy chain CDR1 having the sequence of GFTFSSYA (SEQ ID NO: 25841) , a heavy chain CDR2 having the sequence of ISGSGGST (SEQ ID NO: 25847), and a heavy chain CDR3 having the sequence of AKEGMVLRYFDWLWDY (SEQ ID NO: 25856);
[0270] a heavy chain CDR1 having the sequence of GFTFSSYG (SEQ ID NO: 25842), a heavy chain CDR2 having the sequence of I[W/S]YDGSNK (SEQ ID NO: 25848), and a heavy chain CDR3 having the sequence of R[D/E][R/L][S/V/L]SG[P/W]S[G/H]FDY (SEQ ID NO: 25857);
[0271] a heavy chain CDR1 having the sequence of GFTFSSYA (SEQ ID NO: 25841), a heavy chain CDR2 having the sequence of ISGSGGST (SEQ ID NO: 25847), and a heavy chain CDR3 having the sequence of A[K/E/R][E/T][Q/L/T][L/W/I][L/V/W/N][G/L]V[V/P/L][F/L/N][D/N]Y (SEQ ID NO: 25858);
[0272] a heavy chain CDR1 having the sequence of GFTFDD[Y/H]G (SEQ ID NO: 25843), a heavy chain CDR2 having the sequence of INWNG[G/D]ST (SEQ ID NO: 25849), and a heavy chain CDR3 having the sequence of AR[D/N][R/G]GS[S/T][G/S/W/F][W/F/Y][R/F/Y]D[W/A]FD[P/I] (SEQ ID NO: 25859); or
[0273] a heavy chain CDR1 having the sequence of GFTFSD[Y/D][Y/F] (SEQ ID NO: 25844), a heavy chain CDR2 having the sequence of ISGSG[S/Y]TI (SEQ ID NO: 25850), and a heavy chain CDR3 having the sequence of ARDEGY[R/S]GY[V/N]LD[T/N/S] (SEQ ID NO: 25860).

[0274] In some embodiments, each of the ABPs comprises a unique heavy chain CDR3 and a unique light chain CDR3 sequence. In some embodiments, each of the ABPs comprises a unique heavy chain CDR3 and light chain CDR3 pair.

[0275] An oligopeptide or polypeptide is within the scope of the invention if it has an amino acid sequence that is at least 75%, 76%, 77%, 78%, 79%, 80%, 81%, 82%, 83%, 84%, 85%, 86%, 87%, 88%, 89%, 90%, 91%, 92%, 93%, 94%, 95%, 96%, 97%, 98% or 99% identical to least one of the CDRs provided herein.

[0276] In some embodiments, the RPP comprises about 10, 100, 500, 1,000, 5,000, 10,000, 50,000 or more than 100,000 distinct ABPs, each having a unique sequence. In some embodiments, the RPP comprises at least 10, 100, 500, 1,000, 5,000, 10,000, 20,000, 30,000, 40,000, 50,000 or more than 100,000 distinct ABPs, each having a unique sequence.

[0277] In some embodiments, the RPP has a binding titer to a Zika antigen at least 50 times higher than antibodies in a sample obtained from one or more donor exposed to the antigen. The binding titer can be measured by any of the methods known in the art. For example, the binding titer can be measured by anti-Zika-ELISA. In some embodiments, the binding titer of the RPP is at least 10, 100, 200, 300, 400, 500, 600, 700, 800, 900, or 1000 times higher than antibodies in a sample obtained from one or more donor exposed to the Zika antigen. The sample can be a plasma sample.

[0278] In some embodiments, the RPP has a Zika neutralization titer at least 50 times higher than antibodies in a sample obtained from one or more donor exposed to the antigen. The neutralization titer can be measured by any of the methods known in the art. For example, the neutralization titer can be measured by an in vitro or in vivo assay. In some embodiments, the neutralization titer of the RPP is at least 10, 100, 200, 300, 400, 500, 600, 700, 800, 900, or 1000 times higher than antibodies in a sample obtained from one or more donor exposed to the Zika antigen. The sample can be a plasma sample.

[0279] In some embodiments, the RPP comprises ABPs selected based on their activity. For example, the RPP comprises ABPs selected based on their binding or neutralization activity against Zika virus. In some embodiments, the ABP contains a mix of RPPs selected for their activity against different types or variants of Zika virus.

[0280] Nucleic Acids

[0281] In one aspect, the present invention provides isolated nucleic acid molecules. The nucleic acids comprise, for example, polynucleotides that encode all or part of an ABP in the RPP, for example, one or both chains of an antibody of the invention, or a fragment, derivative, mutein, or variant thereof, polynucleotides sufficient for use as hybridization probes, PCR primers or sequencing primers for identifying, analyzing, mutating or amplifying a polynucleotide encoding a polypeptide, anti-sense nucleic acids for inhibiting expression of a polynucleotide, and complementary sequences of the foregoing. The nucleic acids can be any length. They can be, for example, 5, 10, 15, 20, 25, 30, 35, 40, 45, 50, 75, 100, 125, 150, 175, 200, 250, 300, 350, 400, 450, 500, 750, 1,000, 1,500, 3,000, 5,000 or more nucleotides in length, and/or can comprise one or more additional sequences, for example, regulatory sequences, and/or be part of a larger nucleic acid, for example, a vector. The nucleic acids can be single-stranded or double-stranded and can comprise RNA and/or DNA nucleotides, and artificial variants thereof (e.g., peptide nucleic acids).

[0282] Polynucleotides encoding antibody polypeptides (e.g., heavy or light chain, variable domain only, CDRs only, or full length) can be isolated from B cells, plasma cells, or plasmablasts of a subject that has been exposed to an antigen, e.g., by being infected by virus or immunized with a vaccine. The nucleic acid can be isolated by conventional procedures such as polymerase chain reaction (PCR) or methods described herein (e.g., single cell OE-RT-PCR).

[0283] Polypeptide sequences of the CDR3 from the variable regions of the heavy and light chain variable regions are shown herein. The skilled artisan will appreciate that, due to the degeneracy of the genetic code, each of the polypeptide sequences disclosed herein is encoded by a large number of other nucleic acid sequences. The present invention provides each degenerate nucleotide sequence encoding each RPP of the invention.

[0284] Methods for hybridizing nucleic acids are well-known in the art. See, e.g., Curr. Prot. in Mol. Biol., John Wiley & Sons, N.Y. (1989), 6.3.1-6.3.6. As defined herein, a moderately stringent hybridization condition uses a prewashing solution containing 5× sodium chloride/sodium citrate (SSC), 0.5% SDS, 1.0 mM EDTA (pH 8.0), hybridization buffer of about 50% formamide, 6X SSC, and a hybridization temperature of 55° C. (or other similar hybridization solutions, such as one containing about 50% formamide, with a hybridization temperature of 42° C.), and washing conditions of 60° C., in 0.5× SSC, 0.1% SDS. A stringent hybridization condition hybridizes in 6× SSC at 45° C., followed by one or more washes in 0.1× SSC, 0.2% SDS at 68° C. Furthermore, one of skill in the art can manipulate the hybridization and/or washing conditions to increase or decrease the stringency of hybridization such that nucleic acids comprising nucleotide sequences that are at least 65, 70, 75, 80, 85, 90, 95, 98, or 99% identical to each other typically remain hybridized to each other. The basic parameters affecting the choice of hybridization conditions and guidance for devising suitable conditions are set forth by, for example, Sambrook, Fritsch, and Maniatis (1989, Molecular Cloning: A Laboratory Manual, Cold Spring Harbor Laboratory Press, Cold Spring Harbor, N.Y., chapters 9 and 11; and Curr. Prot. in Mol. Biol. 1995, Ausubel et al., eds., John Wiley & Sons, Inc., sections 2.10 and 6.3-6.4), and can be readily determined by those having ordinary skill in the art based on, for example, the length and/or base composition of the DNA.

[0285] Changes can be introduced by mutation into a nucleic acid, thereby leading to changes in the amino acid sequence of a polypeptide (e.g., an RPP) that it encodes. Mutations can be introduced using any technique known in the art. In one embodiment, one or more particular amino acid residues are changed using, for example, a site-directed mutagenesis protocol. In another embodiment, one or more randomly selected residues are changed using, for example, a random mutagenesis protocol. However, it is made, a mutant polypeptide can be expressed and screened for a desired property (e.g., binding to a virus).

[0286] In another aspect, the present invention provides nucleic acid molecules that are suitable for use as primers or hybridization probes for the detection of nucleic acid sequences of the invention. A nucleic acid molecule of the invention can comprise only a portion of a nucleic acid sequence encoding a full-length polypeptide of the invention, for example, a fragment that can be used as a probe or primer or a fragment encoding an active portion (e.g., a virus binding portion) of a polypeptide of the invention.

[0287] Probes based on the sequence of a nucleic acid of the invention can be used to detect the nucleic acid or similar nucleic acids, for example, transcripts encoding a polypeptide of the invention. The probe can comprise a label group, e.g., a radioisotope, a fluorescent compound, an enzyme, or an enzyme co-factor. Such probes can be used to identify a cell that expresses the polypeptide

[0288] In another aspect, the present invention provides libraries of nucleic acids that encode for RPP or a variant or derivative thereof, derived from B cells, plasmablasts, and plasma cells. These libraries of nucleic acids are generated by isolating plasmablasts and plasma cells into single-cell reaction containers, wherein they are lysed and antibody-specific nucleic acids are purified or captured, for example on solid supports such as beads.

[0289] In some embodiments, the library is generated by obtaining a plurality of first linear polynucleotides, each comprising a first sequence encoding a heavy chain variable domain from a cognate pair from the single plasma cell or plasmablast; and a second sequence encoding a light chain variable domain from the cognate pair; and a third sequence linking the first and second sequences and comprising a restriction site; and obtaining a second linear polynucleotide, not operationally linked to the first polynucleotide, comprising a fourth sequence homologous to a portion of the first polynucleotide; and circularizing each of the plurality of first polynucleotides with the second polynucleotide to generate a library of polynucleotides encoding the library of recombinant antibodies, wherein circularization is effected through Gibson Assembly; and expressing the library of recombinant antibodies in mammalian cells comprising the library of polynucleotides encoding the recombinant antibodies, thereby generating the library of recombinant antibodies.

[0290] The present invention provides methods for performing capture of transcripts from millions of single cells in parallel. Capture of transcripts is followed by amplification of nucleic acids that encode heavy and light chain immunoglobulins, and subsequent linkage of said nucleic acids into libraries of fused constructs that encode both heavy and light chain immunoglobulins. In such libraries the native pairing of heavy and light chain immunoglobulins, as originally found in the input B cells, plasmablasts, and plasma cells, is maintained. Such methods are performed in parallel on millions of single cells, such that the resulting library of fused heavy and light chain immunoglobulin nucleic acids comprises natively paired sequences for millions of single cells. Such methods are described elsewhere (Adler et al., Mabs 9, 1282-1996, 2017; WO2020/223573 which are incorporated by reference in its entirety herein).

[0291] Vectors and Host Cells

[0292] The present invention provides vectors, each vector comprising a nucleic acid encoding a polypeptide of the invention or a portion thereof. Examples of vectors include, but are not limited to, plasmids, viral vectors, non-episomal mammalian vectors and expression vectors, for example, recombinant expression vectors.

[0293] In another aspect of the present invention, expression vectors containing the nucleic acid molecules and polynucleotides of the present invention are also provided, and host cells transformed with such vectors, and methods of producing the polypeptides are also provided. The term “expression vector” refers to a plasmid, phage, virus or vector for expressing a polypeptide from a polynucleotide sequence. Vectors for the expression of the polypeptides contain at a minimum sequence required for vector propagation and for expression of the cloned insert. An expression vector comprises a transcriptional unit comprising an assembly of (1) a genetic element or elements having a regulatory role in gene expression, for example, promoters or enhancers, (2) a sequence that encodes polypeptides and proteins to be transcribed into mRNA and translated into protein, and (3) appropriate transcription initiation and termination sequences. These sequences may further include a selection marker. Vectors suitable for expression in host cells are readily available and the nucleic acid molecules are inserted into the vectors using standard recombinant DNA techniques. Such vectors can include promoters which function in specific cells or tissues, and viral vectors for the expression of polypeptides in targeted human or animal cells.

[0294] The recombinant expression vectors of the invention can comprise a nucleic acid of the invention in a form suitable for expression of the nucleic acid in a host cell. The recombinant expression vectors include one or more regulatory sequences, selected on the basis of the host cells to be used for expression, which is operably linked to the nucleic acid sequence to be expressed. Regulatory sequences include those that direct constitutive expression of a nucleotide sequence in many types of host cells (e.g., SV40 early gene enhancer, Rous sarcoma virus promoter and cytomegalovirus promoter), those that direct expression of the nucleotide sequence only in certain host cells (e.g., tissue-specific regulatory sequences, see Voss et al., 1986, Trends Biochem. Sci. 11:287, Maniatis et al., 1987, Science 236:1237, incorporated by reference herein in their entireties), and those that direct inducible expression of a nucleotide sequence in response to particular treatment or condition (e.g., the metallothionin promoter in mammalian cells and the tet-responsive and/or streptomycin responsive promoter in both prokaryotic and eukaryotic systems (see id.). It will be appreciated by those skilled in the art that the design of the expression vector can depend on such factors as the choice of the host cell to be transformed, the level of expression of protein desired, etc. The expression vectors of the invention can be introduced into host cells to thereby produce proteins or peptides, including fusion proteins or peptides, encoded by nucleic acids as described herein.

[0295] The invention further provides methods of making polypeptides, e.g., RPP. A variety of other expression/host systems may be utilized. Vector DNA can be introduced into prokaryotic or eukaryotic systems via conventional transformation or transfection techniques. These systems include but are not limited to microorganisms such as bacteria (for example, E. coli) transformed with recombinant bacteriophage, plasmid or cosmid DNA expression vectors; yeast transformed with yeast expression vectors; insect cell systems infected with virus expression vectors (e.g., baculovirus); plant cell systems transfected with virus expression vectors (e.g., cauliflower mosaic virus, CaMV; tobacco mosaic virus, TMV) or transformed with bacterial expression vectors (e.g., Ti or pBR322 plasmid); or animal cell systems. Mammalian cells useful in recombinant protein production include but are not limited to VERO cells, HeLa cells, Chinese hamster ovary (CHO) cell lines, or their derivatives such as Veggie CHO and related cell lines which grow in serum-free media (see Rasmussen et al., 1998, Cytotechnology 28:31) or CHO strain DX-B11, which is deficient in DHFR (see Urlaub et al., 1980, Proc. Natl. Acad. Sci. USA 77:4216-20) COS cells such as the COS-7 line of monkey kidney cells (ATCC CRL 1651) (see Gluzman et al., 1981, Cell 23:175), W138, BHK, HepG2, 3T3 (ATCC CCL 163), RIN, MDCK, A549, PC12, K562, L cells, C127 cells, BHK (ATCC CRL 10) cell lines, the CV1/EBNA cell line derived from the African green monkey kidney cell line CV1 (ATCC CCL 70) (see McMahan et al., 1991, EMBO J. 10:2821), human embryonic kidney cells such as 293, 293 EBNA or MSR 293, human epidermal A431 cells, human Colo205 cells, other transformed primate cell lines, normal diploid cells, cell strains derived from in vitro culture of primary tissue, primary explants, HL-60, U937, HaK or Jurkat cells. Mammalian expression allows for the production of secreted or soluble polypeptides which may be recovered from the growth medium.

[0296] For stable transfection of mammalian cells, it is known that, depending upon the expression vector and transfection technique used, only a small fraction of cells may integrate the foreign DNA into their genome. In order to identify and select these integrants, a gene that encodes a selectable marker (e.g., for resistance to antibiotics) is generally introduced into the host cells along with the gene of interest. Once such cells are transformed with vectors that contain selectable markers as well as the desired expression cassette, the cells can be allowed to grow in an enriched media before they are switched to selective media, for example. The selectable marker is designed to allow growth and recovery of cells that successfully express the introduced sequences. Resistant clumps of stably transformed cells can be proliferated using tissue culture techniques appropriate to the cell line employed. An overview of expression of recombinant proteins is found in Methods of Enzymology, v. 185, Goeddell, D. V., ed., Academic Press (1990). Preferred selectable markers include those which confer resistance to drugs, such as G418, hygromycin and methotrexate. Cells stably transfected with the introduced nucleic acid can be identified by drug selection (e.g., cells that have incorporated the selectable marker gene will survive, while the other cells die), among other methods.

[0297] The transformed cells can be cultured under conditions that promote expression of the polypeptide, and the polypeptide can be recovered by conventional protein purification procedures (as defined above).

[0298] In some cases, such as in expression using prokaryotic systems, the expressed polypeptides of this invention may need to be “refolded” and oxidized into a proper tertiary structure and disulfide linkages generated in order to be biologically active. Refolding can be accomplished using a number of procedures well known in the art. Such methods include, for example, exposing the solubilized polypeptide to a pH usually above 7 in the presence of a chaotropic agent. The selection of chaotrope is similar to the choices used for inclusion body solubilization; however, a chaotrope is typically used at a lower concentration. Exemplary chaotropic agents are guanidine and urea. In most cases, the refolding/oxidation solution will also contain a reducing agent plus its oxidized form in a specific ratio to generate a particular redox potential which allows for disulfide shuffling to occur for the formation of cysteine bridges. Some commonly used redox couples include cysteine/cystamine, glutathione/dithiobisGSH, cupric chloride, dithiothreitol DTT/dithiane DTT, and 2-mercaptoethanol (bME)/dithio-bME. In many instances, a co-solvent may be used to increase the efficiency of the refolding. Commonly used cosolvents include glycerol, polyethylene glycol of various molecular weights, and arginine.

[0299] In addition, the polypeptides can be synthesized in solution or on a solid support in accordance with conventional techniques. Various automatic synthesizers are commercially available and can be used in accordance with known protocols. See, for example, Stewart and Young, Solid Phase Peptide Synthesis, 2d.Ed., Pierce Chemical Co. (1984); Tam et al., J Am Chem Soc, 105:6442, (1983); Merrifield, Science 232:341-347 (1986); Barany and Merrifield, The Peptides, Gross and Meienhofer, eds, Academic Press, New York, 1-284; Barany et al., Int J Pep Protein Res, 30:705-739 (1987).

[0300] The polypeptides and proteins of the present invention can be purified according to protein purification techniques well known to those of skill in the art. These techniques involve, at one level, the crude fractionation of the proteinaceous and non-proteinaceous fractions. Having separated the peptide polypeptides from other proteins, the peptide or polypeptide of interest can be further purified using chromatographic and electrophoretic techniques to achieve partial or complete purification (or purification to homogeneity). The term “purified polypeptide” as used herein, is intended to refer to a composition, isolatable from other components, wherein the polypeptide is purified to any degree relative to its naturally-obtainable state. A purified polypeptide therefore also refers to a polypeptide that is free from the environment in which it may naturally occur. Generally, “purified” will refer to a polypeptide composition that has been subjected to fractionation to remove various other components, and which composition substantially retains its expressed biological activity. Where the term “substantially purified” is used, this designation will refer to a peptide or polypeptide composition in which the polypeptide or peptide forms the major component of the composition, such as constituting about 50%, about 60%, about 70%, about 80%, about 85%, or about 90% or more of the proteins in the composition.

[0301] Various techniques suitable for use in purification are well known to those of skill in the art. These include, for example, precipitation with ammonium sulphate, PEG, antibodies (immunoprecipitation) and the like or by heat denaturation, followed by centrifugation; chromatography such as affinity chromatography (Protein-A columns), ion exchange, gel filtration, reverse phase, hydroxylapatite, hydrophobic interaction chromatography, isoelectric focusing, gel electrophoresis, and combinations of these techniques. As is generally known in the art, it is believed that the order of conducting the various purification steps may be changed, or that certain steps may be omitted, and still result in a suitable method for the preparation of a substantially purified polypeptide. Exemplary purification steps are provided in the Examples below.

[0302] Various methods for quantifying the degree of purification of polypeptide are known to those of skill in the art in light of the present disclosure. These include, for example, determining the specific binding activity of an active fraction, or assessing the amount of peptide or polypeptide within a fraction by SDS/PAGE analysis. A preferred method for assessing the purity of a polypeptide fraction is to calculate the binding activity of the fraction, to compare it to the binding activity of the initial extract, and to thus calculate the degree of purification, herein assessed by a “-fold purification number.” The actual units used to represent the amount of binding activity are, of course, be dependent upon the particular assay technique chosen to follow the purification and whether or not the polypeptide or peptide exhibits a detectable binding activity.

[0303] In some aspects, the present invention includes libraries of antibody-encoding nucleic acid vectors for site-directed integration into mammalian genomes. Such vectors include plasmids, retroviruses, and lentivirus. These libraries of vectors encode libraries of antibody sequences, which are then be used to engineer mammalian cells for production of RPPs. The libraries of nucleic acid vectors may include 10, 100, 1,000, 10,000, or more than 100,000 different antibody-encoding sequences. The sequences are derived from plasmablasts and plasma cells. These libraries of nucleic acids are generated by isolating plasmablasts and plasma cells into single-cell reaction containers, wherein they are lysed and antibody-specific nucleic acids are purified or captured, for example on solid supports such as beads. The present invention provides methods for performing capture of transcripts from millions of single cells in parallel. Capture of transcripts is followed by amplification of nucleic acids that encode heavy and light chain immunoglobulins, and subsequent linkage of said nucleic acids into libraries of fused constructs that encode both heavy and light chain immunoglobulins. In such libraries the native pairing of heavy and light chain immunoglobulins, as originally found in the input plasmablasts and plasma cells, is maintained. Such methods are performed in parallel on millions of single cells, such that the resulting library of fused heavy and light chain immunoglobulin nucleic acids comprises natively paired sequences for millions of single cells. These paired fused amplicons are then engineered into full-length antibody constructs using Gibson Assembly, restriction endonucleases, or other recombinant DNA techniques. Engineering into full-length antibody constructs is performed on the full library en masse, such that the antibody sequence content and antibody sequence counts of the library are essentially maintained throughout the process. In some aspects, the library of expression vectors is engineered in two steps, such that the scFv amplicon is subcloned into an intermediate vector, and then a second round of Gibson Assembly, restriction digestion, or other recombinant technique is used to engineer additional domains of the antibody into the linker of the scFv. The method is described in U.S. Pat. No. 9,422,547, which is incorporated by reference in its entirety herein. The native pairing of heavy and light chain immunoglobulins is essentially maintained throughout the process of engineering into full-length expression vector libraries. The vectors are designed in various orientations, for example, two separate promoters drive expression of heavy and light chain immunoglobulins, or one promoter drives expression of both heavy and light chain immunoglobulins, and a translational skip motif is used to separately translate the heavy and light chain immunoglobulins into separate polypeptides. In some embodiments, the expression vectors comprise sequences for site-directed integration into mammalian production cells, for example, CRISPR-Cas9, Flp-In, Cre/Lox, or zinc finger recombination methods. Site-directed integration ensures that each mammalian production cell encodes a single antibody sequence, and decreases variability in expression levels between single production cells.

[0304] In another aspect, the present disclosure provides a host cell or a library of host cells, each comprising a polynucleotide encoding an ABP described herein. In some embodiments, the host cell comprises a vector or comprises a polynucleotide stably integrated into its genome. In some embodiments, the host cell comprises a polynucleotide encoding a ABP stably integrated into the genome using a Flp recombinase recognition target (FRT) landing pad or a similar method known in the art. In some embodiments, the host cell is a mammalian or prokaryotic cell. In some embodiments, the host cell is a human cell or a yeast cell. In some embodiments, the host cell is CHO cell.

[0305] In some embodiments, the host cell comprises an expression vector or integrated polynucleotide for production of RPP. In some embodiments, a library of host cells can be used produce a RPP described herein. In some embodiments, a library of host cells comprise cells selected based on their production yields or neutralization or binding titers of RPP produced by them. The host cells can be production host cells.

[0306] Methods of Producing RPPs

[0307] The RPP can be purified from host cells that comprises a gene encoding the RPP. The RPP produced from the host cells can be obtained by elution of filtered supernatant of host cell culture fluid using a Heparin HP column, using a salt gradient, or with protein A resin.

[0308] Fully human monoclonal antibodies can be generated by any number of techniques with which those having ordinary skill in the art are familiar. Such methods include, but are not limited to, Epstein Barr Virus (EBV) transformation of human peripheral blood cells (e.g., containing B lymphocytes), in vitro immunization of human B-cells, fusion of spleen cells from immunized transgenic mice carrying inserted human immunoglobulin genes, isolation from human immunoglobulin V region phage libraries, or other procedures as known in the art and based on the disclosure herein. For example, fully human monoclonal antibodies may be obtained from transgenic mice that have been engineered to produce specific human antibodies in response to antigenic challenge. Methods for obtaining fully human antibodies from transgenic mice are described, for example, by Green et al., Nature Genet. 7:13, 1994; Lonberg et al., Nature 368:856, 1994; Taylor et al., Int. Immun. 6:579, 1994; U.S. Pat. No. 5,877,397; Bruggemann et al., 1997 Curr. Opin. Biotechnol. 8:455-58; Jakobovits et al., 1995 Ann. N. Y. Acad. Sci. 764:525-35. In this technique, elements of the human heavy and light chain locus are introduced into strains of mice derived from embryonic stem cell lines that contain targeted disruptions of the endogenous heavy chain and light chain loci (see also Bruggemann et al., Curr. Opin. Biotechnol. 8:455-58 (1997)). For example, human immunoglobulin transgenes may be mini-gene constructs, or transloci on yeast artificial chromosomes, which undergo B-cell-specific DNA rearrangement and hypermutation in the mouse lymphoid tissue. Fully human monoclonal antibodies may be obtained by immunizing the transgenic mice, which may then produce human antibodies specific for the antigen target or targets. Lymphoid cells of the immunized transgenic mice can be used to produce human antibody-secreting hybridomas according to the methods described herein.

[0309] Another method for generating human antibodies of the invention includes immortalizing human peripheral blood cells by EBV transformation. See, e.g., U.S. Pat. No. 4,464,456. Such an immortalized B-cell line (or lymphoblastoid cell line) producing an RPP that specifically binds to target or targets can be identified by immunodetection methods as provided herein, for example, an ELISA, and then isolated by standard cloning techniques. The stability of the lymphoblastoid cell line producing an RPP can be improved by fusing the transformed cell lines with a murine myeloma to produce a mouse-human hybrid cell line according to methods known in the art (see, e.g., Glasky et al., Hybridoma 8:377-89 (1989)). Still another method to generate human RPPs is in vitro immunization, which includes priming human splenic B-cells with antigen targets, followed by fusion of primed with a hetero-hybrid fusion partner. See, e.g., Boerner et al., 1991 J. Immunol. 147:86-95.

[0310] In certain embodiments, B-cells that are producing a RPP are selected and the light chain and heavy chain variable regions are cloned from the B-cell according to molecular biology techniques known in the art (WO 92/02551; U.S. Pat. No. 5,627,052; Babcook et al., Proc. Natl. Acad. Sci. USA 93:7843-48 (1996)) and described herein. B-cells from an immunized animal may be isolated from the spleen, lymph node, or peripheral blood sample by selecting a cell that is producing an antibody that specifically binds to to the antigen target. B-cells may also be isolated from humans, for example, from a peripheral blood sample.

[0311] Methods for detecting single B-cells that are producing an antibody with the desired specificity are well known in the art, for example, by plaque formation, fluorescence-activated cell sorting, in vitro stimulation followed by detection of specific antibody, and the like. Methods for selection of specific antibody-producing B-cells include, for example, preparing a single cell suspension of B-cells in soft agar that contains the antigen target. Binding of the specific antibodies produced by the B-cell to the antigen results in the formation of a complex, which may be visible as an immunoprecipitate.

[0312] In some embodiments, specific antibody-producing B-cells are selected by using a method that allows identification natively paired antibodies. For example, a method described in Adler et al., A natively paired antibody library yields drug leads with higher sensitivity and specificity than a randomly paired antibody library, MAbs (2018), which is incorporated by reference in its entirety herein, can be employed. The method combines microfluidic technology, molecular genomics, yeast single-chain variable fragment (scFv) display, fluorescence-activated cell sorting (FACS) and deep sequencing. In short, B cells can be isolated from immunized animals and then pooled. The B cells are encapsulated into droplets with oligo-dT beads and a lysis solution, and mRNA-bound beads are purified from the droplets, and then injected into a second emulsion with an OE-RT-PCR amplification mix that generates DNA amplicons that encode scFv with native pairing of heavy and light chain Ig. Libraries of natively paired amplicons are then electroporated into yeast for scFv display. FACS is used to identify high affinity scFv. Finally, deep antibody sequencing can be used to identify all clones in the pre- and post-sort scFv libraries.

[0313] After the B-cells producing the desired antibody are selected, the specific antibody genes may be cloned by isolating and amplifying DNA or mRNA according to methods known in the art and described herein.

[0314] The methods for obtaining antibodies of the invention can also adopt various phage display technologies known in the art. See, e.g., Winter et al., 1994 Annu. Rev. Immunol. 12:433-55; Burton et al., 1994 Adv. Immunol. 57:191-280. Human or murine immunoglobulin variable region gene combinatorial libraries may be created in phage vectors that can be screened to select Ig fragments (Fab, Fv, sFv, or multimers thereof) that bind specifically to the RPP or variant or fragment thereof. See, e.g., U.S. Pat. No. 5,223,409; Huse et al., 1989 Science 246:1275-81; Sastry et al., Proc. Natl. Acad. Sci. USA 86:5728-32 (1989); Alting-Mees et al., Strategies in Molecular Biology 3:1-9 (1990); Kang et al., 1991 Proc. Natl. Acad. Sci. USA 88:4363-66; Hoogenboom et al., 1992 J. Molec. Biol. 227:381-388; Schlebusch et al., 1997 Hybridoma 16:47-52 and references cited therein. For example, a library containing a plurality of polynucleotide sequences encoding Ig variable region fragments may be inserted into the genome of a filamentous bacteriophage, such as M13 or a variant thereof, in frame with the sequence encoding a phage coat protein. A fusion protein may be a fusion of the coat protein with the light chain variable region domain and/or with the heavy chain variable region domain. According to certain embodiments, immunoglobulin Fab fragments may also be displayed on a phage particle (see, e.g., U.S. Pat. No. 5,698,426).

[0315] In one embodiment, in a hybridoma the variable regions of a gene expressing a monoclonal antibody of interest are amplified using nucleotide primers. These primers may be synthesized by one of ordinary skill in the art, or may be purchased from commercially available sources. (See, e.g., Stratagene (La Jolla, Calif.), which sells primers for mouse and human variable regions including, among others, primers for V_{Ha}, V_{Hb}, V_{Hc}, V_{Hd}, C_{H1}, V_{L} and C_{L} regions.) These primers may be used to amplify heavy or light chain variable regions, which may then be inserted into vectors such as ImmunoZAP™H or ImmunoZAP™L (Stratagene), respectively. These vectors may then be introduced into E. coli, yeast, or mammalian-based systems for expression. Large amounts of a single-chain protein containing a fusion of the V_{H} and V_{L} domains may be produced using these methods (see Bird et al., Science 242:423-426, 1988).

[0316] Once cells producing antibodies according to the invention have been obtained using any of the above-described immunization and other techniques, the specific antibody genes may be cloned by isolating and amplifying DNA or mRNA therefrom according to standard procedures as described herein. The antibodies produced therefrom may be sequenced and the CDRs identified and the DNA coding for the CDRs may be manipulated as described previously to generate other antibodies according to the invention.

[0317] RPP of the present invention preferably have activity in the cell-based assays described herein and/or the in vivo assay described herein and/or bind to one or more of the antigens described herein. Accordingly, such binding agents can be identified using the assays described herein.

[0318] Other antibodies according to the invention may be obtained by conventional immunization and cell fusion procedures as described herein and known in the art.

[0319] Molecular evolution of the complementarity determining regions (CDRs) in the center of the antibody binding site also has been used to isolate antibodies with increased affinity, for example, antibodies having increased affinity for c-erbB-2, as described by Schier et al., 1996, J. Mol. Biol. 263:551.

[0320] Human, partially human, or humanized antibodies are suitable for many applications, particularly those involving administration of the antibody to a human subject, other types of antigen binding proteins. The non-human antibodies of the invention can be, for example, derived from any antibody-producing animal, such as mouse, rat, rabbit, goat, donkey, or non-human primate (such as monkey (e.g., cynomologous or rhesus monkey) or ape (e.g., chimpanzee)). Non-human antibodies of the invention can be used, for example, in in vitro and cell-culture based applications, or any other application where an immune response to the antibody of the invention does not occur, is insignificant, can be prevented, is not a concern, or is desired. In one embodiment, a non-human antibody of the invention is administered to a non-human subject. In another embodiment, the non-human antibody does not elicit an immune response in the non-human subject. In another embodiment, the non-human antibody is from the same species as the non-human subject, e.g., a mouse antibody of the invention is administered to a mouse. An antibody from a particular species can be made by, for example, immunizing an animal of that species with the desired immunogen or using an artificial system for generating antibodies of that species (e.g., a bacterial or phage display-based system for generating antibodies of a particular species), or by converting an antibody from one species into an antibody from another species by replacing, e.g., the constant region of the antibody with a constant region from the other species, or by replacing one or more amino acid residues of the antibody so that it more closely resembles the sequence of an antibody from the other species. In one embodiment, the antibody is a chimeric antibody comprising amino acid sequences derived from antibodies from two or more different species.

[0321] ABPs may be prepared, and screened for desired properties, by any of a number of conventional techniques. Certain of the techniques involve isolating a nucleic acid encoding a polypeptide chain (or portion thereof) of an RPP of interest, and manipulating the nucleic acid through recombinant DNA technology. The nucleic acid may be fused to another nucleic acid of interest, or altered (e.g., by mutagenesis or other conventional techniques) to add, delete, or substitute one or more amino acid residues, for example. Furthermore, the antigen binding proteins may be purified from cells that naturally express them (e.g., an antibody can be purified from a hybridoma that produces it), or produced in recombinant expression systems, using any technique known in the art. See, for example, Monoclonal Antibodies, Hybridomas: A New Dimension in Biological Analyses, Kennet et al. (eds.), Plenum Press, New York (1980); and Antibodies: A Laboratory Manual, Harlow and Land (eds.), Cold Spring Harbor Laboratory Press, Cold Spring Harbor, N.Y., (1988).

[0322] Any expression system known in the art can be used to make the recombinant polypeptides of the invention. Expression systems are detailed comprehensively above. In general, host cells are transformed with a recombinant expression vector that comprises DNA encoding a desired polypeptide. Among the host cells that may be employed are prokaryotes, yeast or higher eukaryotic cells. Prokaryotes include gram negative or gram-positive organisms, for example E. coli or Bacilli. Higher eukaryotic cells include insect cells and established cell lines of mammalian origin. Examples of suitable mammalian host cell lines include the COS-7 line of monkey kidney cells (ATCC CRL 1651) (Gluzman et al., 1981, Cell 23:175), L cells, 293 cells, C127 cells, 3T3 cells (ATCC CCL 163), Chinese hamster ovary (CHO) cells, HeLa cells, BHK (ATCC CRL 10) cell lines, and the CVI/EBNA cell line derived from the African green monkey kidney cell line CVI (ATCC CCL 70) as described by McMahan et al., 1991, EMBO J. 10:2821. Appropriate cloning and expression vectors for use with bacterial, fungal, yeast, and mammalian cellular hosts are described by Pouwels et al. (Cloning Vectors: A Laboratory Manual, Elsevier, New York, 1985).

[0323] Production cell lines for monoclonal antibodies (mAbs) are typically produced by randomly inserting expression constructs into a mammalian production cell genome, for example, a CHO genome (Rita Costa et al., 2010). However, this canonical method produces cell lines with multiple copies of mAb inserted into the CHO genome. If the polyclonal antibody construct libraries were randomly inserted into the CHO genome, many clones would express multiple antibodies, which would result in frequent non-native pairing between heavy and light chain Ig. Additionally, different genome locations have different transcriptional activity levels (Kito et al., 2002), which could result in heterogeneous, inconsistent and/or unstable bioproduction. Thus, in some aspects the current invention provides a CHO cell line with a Flp recombinase recognition target (FRT) landing pad stably engineered into the genome. Such site-directed genome integration cell lines are then used for stable expression of RPP.

[0324] It will be appreciated that an antibody of the present invention may have at least one amino acid substitution, providing that the antibody retains binding specificity. Therefore, modifications to the antibody structures are encompassed within the scope of the invention. These may include amino acid substitutions, which may be conservative or non-conservative that do not destroy the binding capability of an antibody comprising the RPP. Conservative amino acid substitutions may encompass non-naturally occurring amino acid residues, which are typically incorporated by chemical peptide synthesis rather than by synthesis in biological systems. These include peptidomimetics and other reversed or inverted forms of amino acid moieties. A conservative amino acid substitution may also involve a substitution of a native amino acid residue with a normative residue such that there is little or no effect on the polarity or charge of the amino acid residue at that position.

[0325] Non-conservative substitutions can involve the exchange of a member of one class of amino acids or amino acid mimetics for a member from another class with different physical properties (e.g. size, polarity, hydrophobicity, charge). Such substituted residues can be introduced into regions of the human antibody that are homologous with non-human antibodies, or into the non-homologous regions of the molecule.

[0326] Moreover, one skilled in the art may generate test variants containing a single amino acid substitution at each desired amino acid residue. The variants can then be screened using activity assays known to those skilled in the art. Such variants could be used to gather information about suitable variants. For example, if one discovered that a change to a particular amino acid residue resulted in destroyed, undesirably reduced, or unsuitable activity, variants with such a change may be avoided. In other words, based on information gathered from such routine experiments, one skilled in the art can readily determine the amino acids where further substitutions should be avoided either alone or in combination with other mutations.

[0327] A skilled artisan will be able to determine suitable variants of the polypeptide as set forth herein using well-known techniques. In certain embodiments, one skilled in the art may identify suitable areas of the molecule that may be changed without destroying activity by targeting regions not believed to be important for activity. In certain embodiments, one can identify residues and portions of the molecules that are conserved among similar polypeptides. In certain embodiments, even areas that may be important for biological activity or for structure may be subject to conservative amino acid substitutions without destroying the biological activity or without adversely affecting the polypeptide structure.

[0328] Additionally, one skilled in the art can review structure-function studies identifying residues in similar polypeptides that are important for activity or structure. In view of such a comparison, one can predict the importance of amino acid residues in a protein that correspond to amino acid residues which are important for activity or structure in similar proteins. One skilled in the art can opt for chemically similar amino acid substitutions for such predicted important amino acid residues.

[0329] One skilled in the art can also analyze the three-dimensional structure and amino acid sequence in relation to that structure in similar polypeptides. In view of such information, one skilled in the art may predict the alignment of amino acid residues of an antibody with respect to its three-dimensional structure. In certain embodiments, one skilled in the art can choose not to make radical changes to amino acid residues predicted to be on the surface of the protein, since such residues may be involved in important interactions with other molecules.

[0330] A number of scientific publications have been devoted to the prediction of secondary structure. See Moult J., Curr. Op. in Biotech., 7(4):422-427 (1996), Chou et al., Biochem., 13(2):222-245 (1974); Chou et al., Biochem., 113(2):211-222 (1974); Chou et al., Adv. Enzymol. Belot Areas Mol. Biol., 47:45-148 (1978); Chou et al., Ann. Rev. Biochem., 47:251-276 and Chou et al., Biophys. J., 26:367-384 (1979). Moreover, computer programs are currently available to assist with predicting secondary structure. One method of predicting secondary structure is based upon homology modeling. For example, two polypeptides or proteins which have a sequence identity of greater than 30%, or similarity greater than 40% often have similar structural topologies. The recent growth of the protein structural database (PDB) has provided enhanced predictability of secondary structure, including the potential number of folds within a polypeptide's or protein's structure. See Holm et al., Nucl. Acid. Res., 27(1):244-247 (1999). It has been suggested (Brenner et al., Curr. Op. Struct. Biol., 7(3):369-376 (1997)) that there are a limited number of folds in a given polypeptide or protein and that once a critical number of structures have been resolved, structural prediction will become dramatically more accurate.

[0331] Additional methods of predicting secondary structure include “threading” (Jones, D., Curr. Opin. Struct. Biol., 7(3):377-87 (1997); Sippl et al., Structure, 4(1):15-19 (1996)), “profile analysis” (Bowie et al., Science, 253:164-170 (1991); Gribskov et al., Meth. Enzym., 183:146-159 (1990); Gribskov et al., Proc. Nat. Acad. Sci., 84(13):4355-4358 (1987)), and “evolutionary linkage” (See Holm, supra (1999), and Brenner, supra (1997)).

[0332] In certain embodiments, variants of antibodies include glycosylation variants wherein the number and/or type of glycosylation site has been altered compared to the amino acid sequences of a parent polypeptide. In certain embodiments, variants comprise a greater or a lesser number of N-linked glycosylation sites than the native protein. An N-linked glycosylation site is characterized by the sequence: Asn-X-Ser or Asn-X-Thr, wherein the amino acid residue designated as X can be any amino acid residue except proline. The substitution of amino acid residues to create this sequence provides a potential new site for the addition of an N-linked carbohydrate chain. Alternatively, substitutions which eliminate this sequence will remove an existing N-linked carbohydrate chain. Also provided is a rearrangement of N-linked carbohydrate chains wherein one or more N-linked glycosylation sites (typically those that are naturally occurring) are eliminated and one or more new N-linked sites are created. Additional preferred antibody variants include cysteine variants wherein one or more cysteine residues are deleted from or substituted for another amino acid (e.g., serine) as compared to the parent amino acid sequence. Cysteine variants can be useful when antibodies must be refolded into a biologically active conformation such as after the isolation of insoluble inclusion bodies. Cysteine variants generally have fewer cysteine residues than the native protein, and typically have an even number to minimize interactions resulting from unpaired cysteines.

[0333] According to certain embodiments, preferred amino acid substitutions are those which: (1) reduce susceptibility to proteolysis, (2) reduce susceptibility to oxidation, (3) alter binding affinity for forming protein complexes, (4) alter binding affinities, and/or (4) confer or modify other physiochemical or functional properties on such polypeptides. According to certain embodiments, single or multiple amino acid substitutions (in certain embodiments, conservative amino acid substitutions) can be made in the naturally-occurring sequence (in certain embodiments, in the portion of the polypeptide outside the domain(s) forming intermolecular contacts). In certain embodiments, a conservative amino acid substitution typically may not substantially change the structural characteristics of the parent sequence (e.g., a replacement amino acid should not tend to break a helix that occurs in the parent sequence, or disrupt other types of secondary structure that characterizes the parent sequence). Examples of art-recognized polypeptide secondary and tertiary structures are described in Proteins, Structures and Molecular Principles (Creighton, Ed., W. H. Freeman and Company, New York (1984)); Introduction to Protein Structure (C. Branden and J. Tooze, eds., Garland Publishing, New York, N.Y. (1991)); and Thornton et al. Nature 354:105 (1991), which are each incorporated herein by reference.

[0334] In certain embodiments, ABPs of the invention can be chemically bonded with polymers, lipids, or other moieties.

[0335] The binding agents may comprise at least one of the CDRs described herein incorporated into a biocompatible framework structure. In one example, the biocompatible framework structure comprises a polypeptide or portion thereof that is sufficient to form a conformationally stable structural support, or framework, or scaffold, which is able to display one or more sequences of amino acids that bind to an antigen (e.g., CDRs, a variable region, etc.) in a localized surface region. Such structures can be a naturally occurring polypeptide or polypeptide “fold” (a structural motif), or can have one or more modifications, such as additions, deletions or substitutions of amino acids, relative to a naturally occurring polypeptide or fold. These scaffolds can be derived from a polypeptide of any species (or of more than one species), such as a human, other mammal, other vertebrate, invertebrate, plant, bacteria or virus.

[0336] Typically, the biocompatible framework structures are based on protein scaffolds or skeletons other than immunoglobulin domains. For example, those based on fibronectin, ankyrin, lipocalin, neocarzinostain, cytochrome b, CP1 zinc finger, PST1, coiled coil, LACI-D1, Z domain and tendamistat domains may be used (See e.g., Nygren and Uhlen, 1997, Curr. Opin. in Struct. Biol., 7, 463-469).

[0337] It will be appreciated that the ABPs of the invention include the humanized antibodies described herein. Humanized antibodies such as those described herein can be produced using techniques known to those skilled in the art (Zhang, W., et al., Molecular Immunology. 42(12): 1445-1451, 2005; Hwang W. et al., Methods. 36(1): 35-42, 2005; Dall'Acqua W F, et al., Methods 36(1): 43-60, 2005; and Clark, M., Immunology Today. 21(8): 397-402, 2000).

[0338] Where an antibody comprises one or more of CDR3-H, and/or CDR3-L as described in Table 5, it may be obtained by expression from a host cell containing DNA coding for these sequences. A DNA coding for each CDR sequence may be determined on the basis of the amino acid sequence of the CDR and synthesized together with any desired antibody variable region framework and constant region DNA sequences using oligonucleotide synthesis techniques, site-directed mutagenesis and polymerase chain reaction (PCR) techniques as appropriate. DNA coding for variable region frameworks and constant regions is widely available to those skilled in the art from genetic sequences databases such as GenBank®.

[0339] Once synthesized, the DNA encoding an antibody of the invention or fragment thereof may be propagated and expressed according to any of a variety of well-known procedures for nucleic acid excision, ligation, transformation, and transfection using any number of known expression vectors. Thus, in certain embodiments expression of an antibody fragment may be preferred in a prokaryotic host, such as Escherichia coli (see, e.g., Pluckthun et al., 1989 Methods Enzymol. 178:497-515). In certain other embodiments, expression of the antibody or a fragment thereof may be preferred in a eukaryotic host cell, including yeast (e.g., Saccharomyces cerevisiae, Schizosaccharomyces pombe, and Pichia pastoris), animal cells (including mammalian cells) or plant cells. Examples of suitable animal cells include, but are not limited to, myeloma (such as a mouse NSO line), COS, CHO, or hybridoma cells. Examples of plant cells include tobacco, corn, soybean, and rice cells.

[0340] Replicable expression vectors containing DNA encoding an antibody variable and/or constant region may be prepared and used to transform an appropriate cell line, for example, a non-producing myeloma cell line, such as a mouse NSO line or a bacteria, such as E. coli, in which production of the antibody will occur. In order to obtain efficient transcription and translation, the DNA sequence in each vector should include appropriate regulatory sequences, particularly a promoter and leader sequence operatively linked to the variable domain sequence. Particular methods for producing antibodies in this way are generally well-known and routinely used. For example, basic molecular biology procedures are described by Maniatis et al. (Molecular Cloning, A Laboratory Manual, 2nd ed., Cold Spring Harbor Laboratory, New York, 1989; see also Maniatis et al, 3rd ed., Cold Spring Harbor Laboratory, New York, (2001)). DNA sequencing can be performed as described in Sanger et al. (PNAS 74:5463, (1977)) and the Amersham International plc sequencing handbook, and site directed mutagenesis can be carried out according to methods known in the art (Kramer et al., Nucleic Acids Res. 12:9441, (1984); Kunkel Proc. Natl. Acad. Sci. USA 82:488-92 (1985); Kunkel et al., Methods in Enzymol. 154:367-82 (1987); the Anglian Biotechnology Ltd. handbook). Additionally, numerous publications describe techniques suitable for the preparation of antibodies by manipulation of DNA, creation of expression vectors, and transformation and culture of appropriate cells (Mountain A and Adair, J R in Biotechnology and Genetic Engineering Reviews (ed. Tombs, M P, 10, Chapter 1, 1992, Intercept, Andover, UK); “Current Protocols in Molecular Biology”, 1999, F. M. Ausubel (ed.), Wiley Interscience, New York).

[0341] Where it is desired to improve the affinity of ABPs according to the invention containing one or more of the above-mentioned CDRs can be obtained by a number of affinity maturation protocols including maintaining the CDRs (Yang et al., J. Mol. Biol., 254, 392-403, 1995), chain shuffling (Marks et al., Bio/Technology, 10, 779-783, 1992), use of mutation strains of E. coli. (Low et al., J. Mol. Biol., 250, 350-368, 1996), DNA shuffling (Patten et al., Curr. Opin. Biotechnol., 8, 724-733, 1997), phage display (Thompson et al., J. Mol. Biol., 256, 7-88, 1996) and sexual PCR (Crameri, et al., Nature, 391, 288-291, 1998). All of these methods of affinity maturation are discussed by Vaughan et al. (Nature Biotech., 16, 535-539, 1998).

[0342] It will be understood by one skilled in the art that some proteins, such as antibodies, may undergo a variety of posttranslational modifications. The type and extent of these modifications often depends on the host cell line used to express the protein as well as the culture conditions. Such modifications may include variations in glycosylation, methionine oxidation, diketopiperizine formation, aspartate isomerization and asparagine deamidation. A frequent modification is the loss of a carboxy-terminal basic residue (such as lysine or arginine) due to the action of carboxypeptidases (as described in Harris, R. J. Journal of Chromatography 705:129-134, 1995).

[0343] Pharmaceutical Compositions

[0344] Pharmaceutical compositions containing one or more of the RPPs of the present disclosure are also provided. Such compositions comprise a therapeutically or prophylactically effective amount of the polypeptides or proteins in a mixture with pharmaceutically acceptable materials.

[0345] In some embodiments, the pharmaceutical composition comprises an RPP produced using sequences derived from immune cells of a donor exposed to one or more Zika (and/or Dengue virus) antigens. In some embodiments, the pharmaceutical composition comprises RPPs produced using sequences derived from immune cells of multiple donors exposed to one or more Zika (and/or Dengue virus) antigens. The donors can be a human, non-human animal (mouse, humanized mouse, rat, humanized rat, horse, or cow) or both.

[0346] In some embodiments, the pharmaceutical composition comprises a first RPP comprising a first ABPs, wherein each of the first ABPs specifically binds to a first antigen, and a second RPP comprising a second ABPs, wherein each of the second ABPs specifically binds to a second antigen. In some embodiments, the first antigen is an antigen of Zika (and/or Dengue virus). In some embodiments, the second antigen is a different antigen of Zika (and/or Dengue virus).

[0347] In some embodiments, the pharmaceutical composition comprises about 10, 100, 500, 1,000, 5,000, 10,000, 50,000 or more than 100,000 distinct ABPs, each having a unique sequence. In some embodiments, the pharmaceutical composition comprises at least 10, 100, 500, 1,000, 5,000, 10,000, 20,000, 30,000, 40,000, 50,000 or more than 100,000 distinct ABPs, each having a unique sequence.

[0348] The pharmaceutical composition may contain formulation materials for modifying, maintaining or preserving, for example, the pH, osmolarity, viscosity, clarity, color, isotonicity, odor, sterility, stability, rate of dissolution or release, adsorption or penetration of the composition.

[0349] Suitable formulation materials include, but are not limited to, amino acids (such as glycine, glutamine, asparagine, arginine or lysine); antimicrobials; antioxidants (such as ascorbic acid, sodium sulfite or sodium hydrogen-sulfite); buffers (such as borate, bicarbonate, Tris-HCl, citrates, phosphates, other organic acids); bulking agents (such as mannitol or glycine), chelating agents (such as ethylenediamine tetraacetic acid (EDTA)); complexing agents (such as caffeine, polyvinylpyrrolidone, beta-cyclodextrin or hydroxypropyl-beta-cyclodextrin); fillers; monosaccharides; disaccharides and other carbohydrates (such as glucose, mannose, or dextrins); proteins (such as serum albumin, gelatin or immunoglobulins); coloring; flavoring and diluting agents; emulsifying agents; hydrophilic polymers (such as polyvinylpyrrolidone); low molecular weight polypeptides; salt-forming counterions (such as sodium); preservatives (such as benzalkonium chloride, benzoic acid, salicylic acid, thimerosal, phenethyl alcohol, methylparaben, propylparaben, chlorhexidine, sorbic acid or hydrogen peroxide); solvents (such as glycerin, propylene glycol or polyethylene glycol); sugar alcohols (such as mannitol or sorbitol); suspending agents; surfactants or wetting agents (such as pluronics, PEG, sorbitan esters, polysorbates such as polysorbate 20, polysorbate 80, triton, tromethamine, lecithin, cholesterol, tyloxapal); stability enhancing agents (sucrose or sorbitol); tonicity enhancing agents (such as alkali metal halides (preferably sodium or potassium chloride, mannitol sorbitol); delivery vehicles; diluents; excipients and/or pharmaceutical adjuvants. Neutral buffered saline or saline mixed with conspecific serum albumin are examples of appropriate diluents. In accordance with appropriate industry standards, preservatives such as benzyl alcohol may also be added. The composition may be formulated as a lyophilizate using appropriate excipient solutions (e.g., sucrose) as diluents. Suitable components are nontoxic to recipients at the dosages and concentrations employed. Further examples of components that may be employed in pharmaceutical formulations are presented in Remington's Pharmaceutical Sciences, 16^{th} Ed. (1980) and 20^{th} Ed. (2000), Mack Publishing Company, Easton, Pa.

[0350] Optionally, the composition additionally comprises one or more physiologically active agents, for example, an anti-viral agent, plasma IVIg, etc. In various embodiments, the composition comprises one, two, three, four, five, or six physiologically active agents in addition to an RPP.

[0351] In another embodiment of the invention, the compositions disclosed herein may be formulated in a neutral or salt form. Illustrative pharmaceutically-acceptable salts include the acid addition salts (formed with the free amino groups of the protein) and which are formed with inorganic acids such as, for example, hydrochloric or phosphoric acids, or such organic acids as acetic, oxalic, tartaric, mandelic, and the like. Salts formed with the free carboxyl groups can also be derived from inorganic bases such as, for example, sodium, potassium, ammonium, calcium, or ferric hydroxides, and such organic bases as isopropylamine, trimethylamine, histidine, procaine and the like. Upon formulation, solutions will be administered in a manner compatible with the dosage formulation and in such amount as is therapeutically effective.

[0352] The carriers can further comprise any and all solvents, dispersion media, vehicles, coatings, diluents, antibacterial and antifungal agents, isotonic and absorption delaying agents, buffers, carrier solutions, suspensions, colloids, and the like. The use of such media and agents for pharmaceutical active substances is well known in the art. Except insofar as any conventional media or agent is incompatible with the active ingredient, its use in the therapeutic compositions is contemplated. Supplementary active ingredients can also be incorporated into the compositions. The phrase “pharmaceutically-acceptable” refers to molecular entities and compositions that do not produce an allergic or similar untoward reaction when administered to a human.

[0353] The optimal pharmaceutical composition will be determined by one skilled in the art depending upon, for example, the intended route of administration, delivery format, and desired dosage. See for example, Remington's Pharmaceutical Sciences, supra. Such compositions may influence the physical state, stability, rate of in vivo release, and rate of in vivo clearance of the polypeptide. For example, suitable compositions may be water for injection, physiological saline solution for parenteral administration.

### Content of Pharmaceutically Active Ingredient

[0354] In typical embodiments, the active ingredient (i.e., the proteins and polypeptides of the present invention) is present in the pharmaceutical composition at a concentration of at least 0.01 mg/ml, at least 0.1 mg/ml, at least 0.5 mg/ml, or at least 1 mg/ml. In certain embodiments, the active ingredient is present in the pharmaceutical composition at a concentration of at least 1 mg/ml, 2 mg/ml, 3 mg/ml, 4 mg/ml, 5 mg/ml, 10 mg/ml, 15 mg/ml, 20 mg/ml, or 25 mg/ml. In certain embodiments, the active ingredient is present in the pharmaceutical composition at a concentration of at least 30 mg/ml, 35 mg/ml, 40 mg/ml, 45 mg/ml or 50 mg/ml. In certain embodiments, the active ingredient is present in the pharmaceutical composition at a concentration of at least 100 mg/ml, 250 mg/ml, 500 mg/ml, 750 mg/ml, 1 g/ml, 5 g/ml, 10 g/ml, or 50 g/ml.

### Formulation Generally

[0355] The pharmaceutical composition can be in any form appropriate for human or veterinary medicine, including a liquid, an oil, an emulsion, a gel, a colloid, an aerosol or a solid.

[0356] The pharmaceutical composition can be formulated for administration by any route of administration appropriate for human or veterinary medicine, including enteral and parenteral routes of administration.

[0357] In some embodiments, the pharmaceutical composition is formulated for intravenous, intraperitoneal, intramuscular, or subcutaneous administration. In some embodiments, the pharmaceutical composition is formulated for intravenous injection or intravenous infusion.

[0358] In some embodiments, the pharmaceutical composition is formulated for intrathecal or intracerebroventricular administration.

[0359] In some embodiments, the pharmaceutical composition is formulated for topical administration.

### Pharmacological Compositions Adapted for Injection

[0360] For intravenous, cutaneous or subcutaneous injection, or injection at the site of affliction, the active ingredient will be in the form of a parenterally acceptable aqueous solution which is pyrogen-free and has suitable pH, isotonicity and stability. Those of relevant skill in the art are well able to prepare suitable solutions using, for example, isotonic vehicles such as Sodium Chloride Injection, Ringer's Injection, Lactated Ringer's Injection. Preservatives, stabilizers, buffers, antioxidants and/or other additives can be included, as required.

[0361] In various embodiments, the unit dosage form is a vial, ampule, bottle, or pre-filled syringe. In some embodiments, the unit dosage form contains 0.01 mg, 0.1 mg, 0.5 mg, 1 mg, 2.5 mg, 5 mg, 10 mg, 12.5 mg, 25 mg, 50 mg, 75 mg, or 100 mg of the active ingredient. In some embodiments, the unit dosage form contains 125 mg, 150 mg, 175 mg, or 200 mg of the active ingredient. In some embodiments, the unit dosage form contains at least 250 mg, lg, 10 g, 20 g, 30 g, 40 g, 50 g, 60 g, 70 g, 80 g, 90 g, or 100g of the active ingredient. In some embodiments, the unit dosage form contains about 250 mg, lg, 10 g, 20 g, 30 g, 40 g, 50 g, 60 g, 70 g, 80 g, 90 g, or 100 g of the active ingredient.

[0362] In typical embodiments, the pharmaceutical composition in the unit dosage form is in liquid form. In various embodiments, the unit dosage form contains between 0.1 mL and 50 ml of the active ingredient. In some embodiments, the unit dosage form contains 1 ml, 2.5 ml, 5 ml, 7.5 ml, 10 ml, 25 ml, or 50 ml of active ingredient.

[0363] In particular embodiments, the unit dosage form is a vial containing 1 ml of the pharmaceutical composition containing an active ingredient (e.g., RPP) at a concentration of 0.01 mg/ml, 0.1 mg/ml, 0.5 mg/ml, or 1 mg/ml. In particular embodiments, the unit dosage form is a vial containing 1 ml of the pharmaceutical composition containing an active ingredient (e.g., RPP) at a concentration of 0.01 mg/ml, 0.1 mg/ml, 0.5 mg/ml, lmg/ml, 2 mg/ml, 3 mg/ml, 4 mg/ml, 5 mg/ml, 10 mg/ml, 15 mg/ml, 20 mg/ml, 25 mg/ml, 30 mg/ml, 35 mg/ml, 40 mg/ml, 45 mg/ml or 50 mg/ml, 100 mg/ml, 250 mg/ml, 500 mg/ml, 750 mg/ml, 1 g/ml, 5g/ml, 10g/ml, or 50 g/ml. In some embodiments, the unit dosage form is a vial containing 2 ml of the pharmaceutical composition containing an active ingredient at a concentration of 0.01 mg/ml, 0.1 mg/ml, 0.5 mg/ml, 1 mg/ml, 2 mg/ml, 3 mg/ml, 4 mg/ml, 5 mg/ml, 10 mg/ml, 15 mg/ml, 20 mg/ml, 25 mg/ml, 30 mg/ml, 35 mg/ml, 40 mg/ml, 45 mg/ml or 50 mg/ml, 100 mg/ml, 250 mg/ml, 500 mg/ml, 750 mg/ml, lg/ml, 5 g/ml, 10 g/ml, or 50 g/ml.

[0364] In some embodiments, the pharmaceutical composition is formulated for injection of an active ingredient at a single dose or multiple doses of between 0.010 and 5 g/kg body weight. In some embodiments, the pharmaceutical composition is formulated for injection of an active ingredient at a single dose of 0.010 g/kg body weight. In some embodiments, the pharmaceutical composition is formulated for injection at a single dose of 0.01, 0.05, 0.15, 0.20, 0.25, 0.30, 0.35, 0.40, 0.45, 0.50, 0.55, 0.60, 0.65, 0.70, 0.75, 0.80, 0.85, 0.90, 0.95, or 0.1 g/kg body weight.

[0365] In some embodiments, the unit dose contains at least 0.1 g, 0.5 g, lg, 1.5 g, 2 g, 2.5 g, 3 g, 3.5 g, 4 g, 5 g, 10 g, 20 g, 30 g, 40 g, or 50 g of the active ingredient (e.g., RPP). In some embodiments, the unit dose contains about 0.1 g, 0.5 g, 1 g, 1.5 g, 2 g, 2.5 g, 3 g, 3.5 g, 4 g, 5 g, 10 g, 20 g, 30 g, 40 g, or 50 g of the active ingredient (e.g., RPP).

[0366] The amount of active ingredient which can be combined with a carrier material to produce a single dosage form will generally be that amount of the compound which produces a therapeutic effect.

[0367] The pharmaceutical compositions may conveniently be presented in unit dosage form.

[0368] The unit dosage form will typically be adapted to one or more specific routes of administration of the pharmaceutical composition.

[0369] In some embodiments, the pharmaceutical composition in the unit dosage form is in solid form, such as a lyophilate, suitable for solubilization.

[0370] In some embodiments, the unit dosage form is suitable for subcutaneous, intradermal, or intramuscular administration include preloaded syringes, auto-injectors, and auto-inject pens, each containing a predetermined amount of the pharmaceutical composition described hereinabove.

[0371] In various embodiments, the unit dosage form is a preloaded syringe, comprising a syringe and a predetermined amount of the pharmaceutical composition. In certain preloaded syringe embodiments, the syringe is adapted for subcutaneous administration. In certain embodiments, the syringe is suitable for self-administration. In particular embodiments, the preloaded syringe is a single use syringe.

[0372] In certain embodiments, the unit dosage form is an auto-inject pen. The auto-inject pen comprises an auto-inject pen containing a pharmaceutical composition as described herein. In some embodiments, the auto-inject pen delivers a predetermined volume of pharmaceutical composition. In other embodiments, the auto-inject pen is configured to deliver a volume of pharmaceutical composition set by the user.

7.1.1. Mixtures of Plasma IVIg with Recombinant Hyperimmunes

[0373] In some embodiments, a recombinant hyperimmune is spiked into conventional plasma IVIg to increase the anti-pathogen titer of IVIg. In some embodiments, several anti-pathogen recombinant hyperimmunes are spiked into conventional plasma IVIg. Any number of spike-ins can be mixed with plasma IVIg to generate increased titers against any number of pathogens.

[0374] In some embodiments, the spike-in recombinant hyperimmunes are mixed with plasma IVIg by the pharmacist. In some embodiments, the spike-in recombinant hyperimmunes are mixed with plasma IVIg by the manufacturer.

[0375] Methods of Treating a Disease Responsive to an RPP

[0376] In another aspect, methods are presented for treating a subject having a disease responsive to an RPP. The disease can be a viral infection, e.g., Zika virus or Dengue virus. In some embodiments, the method comprises administering the pharmaceutical composition, the RPP disclosed herein to a patient infected with Zika virus, Dengue virus, or other related viral infection.

[0377] In vivo and/or in vitro assays may optionally be employed to help identify optimal dosage ranges. The precise dose to be employed in the formulation will also depend on the route of administration, and the seriousness of the condition, and should be decided according to the judgment of the practitioner and each subject's circumstances. Effective doses may be extrapolated from dose-response curves derived from in vitro or animal model test systems.

[0378] The actual amount administered, and rate and time-course of administration, will depend on the nature and severity of disease being treated. Prescription of treatment, e.g. decisions on dosage etc., is within the responsibility of general practitioners and other medical doctors, and typically takes account of the disorder to be treated, the condition of the individual patient, the site of delivery, the method of administration and other factors known to practitioners. Examples of the techniques and protocols mentioned above can be found in Remington's Pharmaceutical Sciences, 16th edition, Osol, A. (ed), 1980.

[0379] In some embodiments, the pharmaceutical composition is administered by injection, infusion, or by topical application. In some embodiments, the pharmaceutical composition is administered by intravenous infusion.

[0380] In some embodiments, the pharmaceutical composition is administered at a dose of 0.01, 0.05, 0.15, 0.20, 0.25, 0.30, 0.35, 0.40, 0.45, 0.50, 0.55, 0.60, 0.65, 0.70, 0.75, 0.80, 0.85, 0.90, 0.95, or 0.1 g active ingredient (RPP)/kg body weight. In some embodiments, the pharmaceutical composition is administered at a dose of about 0.01, 0.05, 0.15, 0.20, 0.25, 0.30, 0.35, 0.40, 0.45, 0.50, 0.55, 0.60, 0.65, 0.70, 0.75, 0.80, 0.85, 0.90, 0.95, or 0.1 g active ingredient (RPP)/kg body weight. In some embodiments, the pharmaceutical composition is administered at a dose of more than 0.01, 0.05, 0.15, 0.20, 0.25, 0.30, 0.35, 0.40, 0.45, 0.50, 0.55, 0.60, 0.65, 0.70, 0.75, 0.80, 0.85, 0.90, 0.95, or 0.1 g active ingredient (RPP)/kg body weight.

[0381] In some embodiments, the pharmaceutical composition is administered once a day, 2-4 times a day, 2-4 times a week, once a week, or once every two weeks.

[0382] In some embodiments, the pharmaceutical composition is administered once, twice, three times, four times, five times, or more. In some embodiments, the pharmaceutical composition is administered once a day for one, two, three, four, five, or more days. In some embodiments, the pharmaceutical composition is administered until the desired outcome is observed.

[0383] In some embodiments, the pharmaceutical composition is administered with plasma IVIg.

[0384] In some embodiments, the method further comprises administering one or more additional therapeutic agents. In some embodiments, the additional therapeutic agent is an immune stimulatory or suppressive agent.

[0385] In some embodiments, the RPP is administered in an amount sufficient as prophylaxis against infectious disease when administered to a subject. In some embodiments, the RPP is administered in an amount sufficient to clear infectious disease in an individual actively fighting infection.

### 8. EXAMPLES

[0386] Below are examples of specific embodiments for carrying out the present invention. The examples are offered for illustrative purposes only, and are not intended to limit the scope of the present invention in any way. Efforts have been made to ensure accuracy with respect to numbers used (e.g., amounts, temperatures, etc.), but some experimental error and deviation should, of course, be allowed for.

[0387] The practice of the present invention will employ, unless otherwise indicated, conventional methods of protein chemistry, biochemistry, recombinant DNA techniques and pharmacology, within the skill of the art. Such techniques are explained fully in the literature. See, e.g., T. E. Creighton, Proteins: Structures and Molecular Properties (W. H. Freeman and Company, 1993); A. L. Lehninger, Biochemistry (Worth Publishers, Inc., current addition); Sambrook, et al., Molecular Cloning: A Laboratory Manual (2nd Edition, 1989); Methods In Enzymology (S. Colowick and N. Kaplan eds., Academic Press, Inc.); Remington's Pharmaceutical Sciences, 18th Edition (Easton, Pa.: Mack Publishing Company, 1990); Carey and Sundberg Advanced Organic Chemistry 3^{rd} Ed. (Plenum Press) Vols A and B(1992).

### Example 1: Generation of rCIG using Immunized Mice

[0388] Two RPPs targeting COVID-19 were produced, one selected for binding to the SARS-CoV-2 receptor binding domain (RBD) and the other for binding to the SARS-CoV-2 spike S1 protein, using Trianni immunized mice as the donors. The heavy and light chain CDR3 sequences are provided in Table 5 above.

[0389] First, transgenic mice carrying inserted human immunoglobulin genes were immunized with a protocol comprising adjuvant, RBD, and inactivated SARS-CoV-2 virus. Footpad injections were performed on two Trianni Mice twice weekly for four weeks. Before the final boosts, the serum titer of thymocyte antibodies was assessed by flow cytometry, using a dilution series of RBD and Spike S1 antigen. A strong serum response was observed in the animals, with one animal showing a slightly stronger response. Lymph nodes (popliteal, inguinal, axillary, and mesenteric) were surgically removed after sacrifice. Single cell suspensions for each animal were made by manual disruption followed by passage through a 70 μm filter. Next, the EasySep™ Mouse Pan-B Cell Isolation Kit (Stemcell Technologies) negative selection kit was used to isolate B cells from each sample. The lymph node B cell populations were quantified by counting on a C-Chip hemocytometer (Incyto) and assessed for viability using Trypan blue. The cells were then diluted to 5,000-6,000 cells/mL in phosphate-buffered saline (PBS) with 12% OptiPrep™ Density Gradient Medium (Sigma). This cell mixture was used for microfluidic encapsulation. Approximately one million B cells from each of the six animals were run through an emulsion droplet microfluidics platform.

[0390] A DNA library encoding scFv from RNA of single cells, with native heavy-light Ig pairing intact, was generated using the emulsion droplet microfluidics platform or vortex emulsions. The method for generating the DNA library comprises the steps of 1) poly(A)+mRNA capture, 2) multiplexed overlap extension reverse transcriptase polymerase chain reaction (OE-RT-PCR), and 3) nested PCR to remove artifacts and add adapters for deep sequencing or yeast display libraries. The scFv libraries are generated from approximately one million B cells from each animal that achieved a positive titer.

[0391] For poly(A) +mRNA capture, a custom designed co-flow emulsion droplet microfluidic chip fabricated from glass (Dolomite) was used. The microfluidic chip has two input channels for fluorocarbon oil (Dolomite), one input channel for the cell suspension mix described above, and one input channel for oligo-dT beads (NEB) at 1.25 mg/ml in cell lysis buffer (20 mM Tris pH 7.5, 0.5 M NaCl, 1 mM ethylenediaminetetraacetic acid (EDTA), 0.5% Tween-20, and 20 mM dithiothreitol). The input channels are etched to 50 μm by 150 μm for most of the chip's length, narrow to 55 μm at the droplet junction, and were coated with hydrophobic Pico-Glide (Dolomite). Three Mitos P-Pump pressure pumps (Dolomite) were used to pump the liquids through the chip. Droplet size depends on pressure, but typically droplets of ˜45 μm diameter were optimally stable. Emulsions were collected into chilled 2 ml microcentrifuge tubes and incubated at 40° C. for 15 minutes for mRNA capture. The beads were extracted from the droplets using Pico-Break (Dolomite). In some embodiments, similar single cell partitioning emulsions are made using a vortex.

[0392] For multiplex OE-RT-PCR, glass Telos droplet emulsion microfluidic chips were used (Dolomite). mRNA-bound beads were re-suspended into OE-RT-PCR mix and injected into the microfluidic chips with a mineral oil-based surfactant mix (available commercially from GigaGen) at pressures that generate 27 μm droplets. The OE-RT-PCR mix contains 2× one-step RT-PCR buffer, 2.0 mM MgSO₄, SuperScript III reverse transcriptase, and Platinum Taq (Thermo Fisher Scientific), plus a mixture of primers directed against the IgK C region, the IgG C region, and all V regions. The overlap region is a DNA sequence that encodes a Gly-Ser rich scFv linker sequence. The DNA fragments were recovered from the droplets using a droplet breaking solution (available commercially from GigaGen) and then purified using QIAquick PCR Purification Kit (Qiagen). In some embodiments, similar OE-RT-PCR emulsions were made using a vortex.

[0393] For nested PCR, the purified OE-RT-PCR product was first run on a 1.7% agarose gel for 80 minutes at 150 V. A band at 1200-1500 base pair (bp) corresponding to the linked product was excised and purified using NucleoSpin Gel and PCR Clean-up Kit (Macherey Nagel). PCR was then performed to add adapters for Illumina sequencing or yeast display; for sequencing, a randomer of seven nucleotides is added to increase base calling accuracy in subsequent next generation sequencing steps. Nested PCR was performed with 2× NEBNext High-Fidelity amplification mix (NEB) with either Illumina adapter containing primers or primers for cloning into the yeast expression vector. The nested PCR product was run on a 1.2% agarose gel for 50 minutes at 150V. A band at 800-1100 bp was excised and purified using NucleoSpin Gel and PCR Clean-up Kit (Macherey Nagel).

[0394] The OE-RT-PCR products were used as template in a nested PCR to add adapters for yeast surface display. S. cerevisiae cells (ATCC) were electroporated (Bio-Rad Gene Pulser II; 0.54 kV, 25 uF, infinite resistance) with the PCR product combined with a linearized vector for in vivo homologous recombination and inducible expression of scFv protein. Transformed yeast were expanded, induced with galactose, and approximately 2×10⁶ induced yeast cells were stained with anti-c-Myc (Thermo Fisher Scientific) followed by a FITC-conjugated secondary antibody (Thermo Fisher Scientific), and biotinylated SARS CoV-2 RBD or Spike (1200 nM final concentration) followed by APC-streptavidin (Thermo Fisher Scientific); an scFv library specific for an unrelated target was used as a negative control. Yeast cells were then sorted (BD Influx) and 20-30×10³ double-positive cells (FITC/APC+) were recovered. For further specificity, a second round of sorting using the same antigen was performed and 50×10³ double-positive yeast was recovered.

[0395] The flow-sorted scFv were then subjected to sequencing (Illumina). Sequences identified using yeast scFv sorting with SARS-CoV-2 RBD are listed as Sequences 5083 through 6630, and sequences identified using yeast scFv sorting with SARS-CoV-2 Spike Slare listed as Sequences 6631 through 8390. In some embodiments, sequences comprising Sequences 5083 through 8390 are used to generate an RPPs with binding and neutralization activity against SARS-CoV-2.

[0396] In certain embodiments, rCIG is an RPP comprising antibodies derived from one, two, four, eight, twelve, 50, or 100 mice. In certain embodiments, rCIG is an RPP comprising, 10, 100, 1,000, 10,000, 100,000, or more than 100,000 distinct antibody sequences. In certain embodiments, rCIG is an RPP comprising antibodies at various molar ratios, or antibodies comprising substantially similar molar ratios. In certain embodiments, these RPPs comprise therapeutics for COVID-19. In other embodiments, any single antibody from the RPP is used as a therapeutic for COVID-19. In certain embodiments, any single antibody or RPP is used as a therapeutic for any kind of coronavirus infection in human patients.

### Example 2: Generation of RPP with Activity Against SARS CoV-2 from Convalescent COVID-19 Human Donors

[0397] Overview

[0398] Multiple rCIG (recombinant anti-coronavirus 19 hyperimmune gammaglobulin), i.e., RPP antibody pools with activity against COVID-19 antigens, were generated using B cells from convalescent COVID-19 donors. The sequence identifiers of the heavy and light chain CDR3 sequences are provided in Table 5, above, corresponding the sequences found in the sequence listing.

[0399] The rCIG drug is a fully recombinant IgG1/IgK polyclonal antibody preparation, comprising >1,000 unique antibody sequences at various ratios. The antibody sequences were derived from COVID-19 convalescent human donor peripheral blood mononuclear cells (PBMCs).

[0400] First, COVID-19 patients underwent IRB-approved consent at clinical sites, and approximately 50 mL of blood from each donor was obtained. Each sample was assessed for residual SARS CoV-2 using CDC qPCR assays. Additionally, each serum sample was tested for seroconversion using anti-SARS CoV-2 ELISA. The 16 high-titer convalescent COVID-19 donors were selected and custom microfluidics was used to capture natively paired antibody sequences from millions of donor B cells. The captured, natively paired, nucleic acid sequences were then expressed as yeast scFv libraries, and subjected to flow cytometry to enrich for binders against SARS CoV-2 RBD. Antibody nucleic acid sequences were purified from the sorted yeast clones and then engineered into full-length IgG1 antibody expression constructs, still retaining native pairing between heavy and light chain Ig.

[0401] The flow-sorted scFv were subjected to sequencing (Illumina). Sequences identified using yeast scFv sorting with SARS-CoV-2 RBD are listed as Sequences 1 through 4760, and sequences identified using yeast scFv sorting with SARS-CoV-2 Spike Slare listed as Sequences 4761 through 5082. In some embodiments, sequences comprising Sequences 1 through 5082 are used to generate an RPPs with binding and neutralization activity against SARS-CoV-2. In some embodiments, single antibodies comprising Sequences 1 through 5082 are used as a therapeutic for COVID-19, or any coronavirus infection in patients.

[0402] To convert the scFv libraries into full-length CHO expression libraries (RPPs), nested outer PCR primers were used to add adapters with overhangs for Gibson assembly to the 5′ and 3′ ends of the scFv library. Then NEBuilder HiFi DNA Assembly Master Mix (NEB, Ipswich, Mass., USA) was used to insert the scFv library into a vector containing a single promoter, a secretory leader sequence for light chain Ig and the remainder of the IgG1 constant region, creating a cloned scFv library. This intermediate library was transformed into E. coli, spread onto LB-ampicillin plates, 0.5-1 million colonies were scraped and pooled for a plasmid purification using ZymoPURE II Plasmid Maxiprep Kits (Zymo Research, Irvine, Calif., USA). To create the full-length antibody library, a second Gibson assembly was performed by linearizing the product of GA1 with BamHI-HF (NEB, Ipswich, Mass., USA) and using it as a vector to insert a synthetic amplicon containing a portion of the light chain Ig constant region, a poly(A) signal for light chain Ig, a promoter for the IgG gene and a secretory leader sequence for the IgG gene. The full-length library was then transformed into E. coli and spread on LB-ampicillin plates Over 0.5 million colonies are scraped and plasmid is purified with a ZymoPURE II Plasmid Maxiprep Kits (Zymo Research) to make the full-length recombinant hyperimmune maxiprep library for transfection.

[0403] The adherent Flp-In™-CHO cell line was adapted with a genomically integrated FRT site (Thermo Fisher Scientific, Waltham, Mass., USA) to suspension culture. For all steps in the adaptation process, “Ham's F-12” refers to Ham's F-12 (with L-glutamine, Thermo Fisher Scientific, Waltham, Mass., USA) plus 10% FBS (Thermo Fisher Scientific, Waltham, Mass., USA) and “BalanCD” refers to BalanCD CHO Growth A (Irvine Scientific) with 4 mM Glutamax (Thermo Fisher Scientific, Waltham, Mass., USA). To adapt this cell line to suspension, the cells were first passaged into a mixture of 50% Ham's F-12 plus 50% BalanCD in T-flasks. Cells were next passaged into 25% Ham's F-12 plus 75% BalanCD and switched to shaking Erlenmeyer flasks. Cells were then passaged into 10% Ham's F-12, 90% BalanCD+0.2% anti-clumping agent (Irvine Scientific, Santa Ana, Calif., USA) and banked for future use.

[0404] 100 million of the adapted Flp-In CHO cells were transfected per recombinant hyperimmune library using an Amaxa Nucleofector 4D (SG buffer, pulse DU133; Lonza, Basel, Switzerland). These cells were plated into shaking Erlenmeyer flasks and recovered in an incubator at 37° C. and 125 rpm for 48 hours. After 48 hours, the cells were counted to determine viability, cells were seeded at 1 million cells/mL, and selection was started using 600 μg/mL Hygromycin-B (Gemini Bio, West Sacramento, Calif., USA) in fresh media. Cells were counted and media was changed every 2-3 days during the 7-day selection. The libraries were kept on 600 μg/mL Hygromycin-B (Gemini Bio, West Sacramento, Calif., USA) during expansion until viability exceeded 95%. When cells were >95% viable and doubling every 24 hours, the cell line was banked for liquid nitrogen storage.

[0405] CHO cells stably expressing antibody libraries were grown in media consisting of 90% BalanCD CHO Growth A Medium (Irvine Scientific, Santa Ana, Calif.), 9% Ham's F-12 (Thermo Fisher Scientific, Waltham, Mass., USA), 1% FBS (ThermoFisher Scientific), 4 mM Glutamax (Thermo Fisher Scientific, Waltham, Mass., USA), 0.2% anti-clumping agent (Irvine Scientific, Santa Ana, Calif., USA). For small-scale production, cells were seeded at 1×10⁶ cells/mL into 50 mL media in a 250 mL Erlenmeyer flask and grown at 37° C., 5% CO₂, 125 rpm. Cells were continually grown under these conditions and supplemented with 7.5 mL CHO Feed 1 (Irvine Scientific, Santa Ana, Calif., USA) on days 2, 4 and 7 of the production run. Supernatant was harvested on Day 8 by centrifugation followed by filtration through a 0.22 μm 250 mL filter bottle (EMD Millipore, Burlington, Mass., USA) with 1 μm pre-filter (EMD Millipore, Burlington, Mass., USA). Harvested cell culture fluid (HCCF) was stored at 4° C. until Protein A purification. For large-scale production of the plasma cell recombinant hyperimmune, cells were grown in the same media but with some modifications to the production conditions. A seed train was used to scale the cultures from 2×10⁷ cells to 1.2×10¹⁰ cells at 37° C. Cells were then seeded at 1×10⁶ cells/mL in 2 L in a 5 L flask (in triplicate; Day 0). On Day 2 the temperature was shifted from 37° C. to 33° C. Each flask was fed with 300 mL CHO Feed 1 (Irvine Scientific, Santa Ana, Calif., USA) on days 2, 4, 6, 8, 10, and 13 of the culture. Supernatant was harvested on Day 14.

[0406] After harvest, HCCF was purified with MabSelect SuRe Protein A resin (GE Life Sciences, Marlborough, Mass., USA) using the following buffers: Equilibration, Chase, Wash 2 (25 mM Tris, 150 mM NaCl, pH 7.4), Wash 1 (25 mM Tris, 1 M NaCl, pH 7.4), Elution (20 mM citric acid, pH 3.0), Neutralization (100 mM Tris, pH 8.0 for small scale, 1 M Tris, pH 9.0 for large scale). The column was sanitized before and after use with 0.1 N NaOH. For the large-scale production of the plasma cell recombinant hyperimmune, an additional Wash 3 consisting of 0.5 M arginine, pH 7.4 was used, followed by an additional wash with Wash 2 before elution. The order of purification steps was: Equilibration, Load, Chase, Wash 1, Wash 2, (large scale: Wash 3, Wash 2), Elution, Neutralization (added manually into tubes used for collection of eluate fractions). The recombinant hyperimmunes (RPPs) were concentrated using Vivaspin 20, 30 kDa molecular weight cut off spin concentrators (Sartorius, Gottingen, Germany) and formulated in PBS (small-scale productions) or 0.2 M glycine, pH 4.5 (large scale production), followed by 0.22 μm filtration.

[0407] This processed resulted in integration of a single heavy-light chain-paired transgene into the genomic FRT site of individual CHO cells, creating cell pools, or “research cell banks” (RCBs). In certain embodiments, these RCBs are combined to create a CHO polyclonal master cell bank (MCB).

[0408] In certain embodiments, rCIG is an RPP comprising antibodies derived from one, two, four, eight, twelve, 50, or 100 human donors. In certain embodiments, rCIG is an RPP comprising, 10, 100, 1,000, 10,000, 100,000, or more than 100,000 distinct antibody sequences. In certain embodiments, rCIG is an RPP comprising antibodies at various molar ratios, or antibodies comprising substantially similar molar ratios. In certain embodiments, these RPPs comprise therapeutics for COVID-19. In other embodiments, any single antibody from the RPP is used as a therapeutic for COVID-19. In certain embodiments, any single antibody or RPP is used as a therapeutic for any kind of coronavirus infection in human patients.

[0409] Upstream GMP manufacturing is carried out using this MCB and standard GMP protocols in single-use fed-batch bioreactors. The rCIG protein is purified with Protein A resin and standard downstream recombinant antibody processing steps, including anion and cation exchange, viral inactivation and filtration, and diafiltration/ultrafiltration (DF/UF). Viral clearance studies and full MCB characterization are performed. A plasma-derived IVIG is used as a reference control for protein quality assessment. Plasma-derived IVIG is the best available reference control, since it comprises a diverse set of antibodies, like rCIG, and serves as a baseline for an immunoglobulin that is not highly reactive against SARS CoV-2. Lot release assays include a battery of assays typically used to assess purity, such as SEC HPLC, CE-SDS, host cell protein, and potency, such as anti-SARS CoV-2 ELISA. Anti-SARS CoV-2 ELISA, SEC HPLC, and CD-SDS is used to infer identity.

[0410] Quantitative PCR (qPCR) is used to confirm the absence of SARS CoV-2 RNA present in donor PBMCs.

[0411] Host Cell Line Development

[0412] A large-scale screen was performed to identify a parental host cell clone for targeted integration of rCIG expression construct libraries.

[0413] First, a landing pad construct (PMD-4681) was designed and synthesized. PMD-4681 was based on pFRT-lacZeo (ThermoFisher), with some modifications (FIG. 1). In place of the LacZ expression construct a cassette was inserted coding for expression of CD34 and GFP. The CD34, GFP, and downstream Zeocin resistance genes (ZeoR present in original plasmid) were separated by 2A motifs (T2A-2 or P2A) to allow for translation of three separate polypeptide chains. The CD34 sequence was sourced as a gBlock from IDT. The GFP sequence was sourced from ATUM (DasherGFP).

[0414] The GMP suspension CHO line CHOZN® GS−/− was obtained from Sigma Aldrich. Cells were sent to Bionova Scientific (Fremont, Calif.) to generate a working cell bank (WCB). A vial of cells from the WCB was thawed from LN2 and expanded. PMD-4681 was linearized using a restriction enzyme and purified via ethanol precipitation. Cells were then transfected with the FRT-GFP-Zeocin landing pad by random integration using Lonza's Nucleofector™ 4D, SE kit. Cells recovered overnight in an incubator and were plated the next day into minipools at 5,000 cells per well, across ten 96-well plates in selective media. The remaining cells were plated and selected together as a bulk pool control. Wells were fed every seven days until at least 80% confluency was reached.

[0415] A total of 236 minipools grew out and were screened in parallel for high GFP expression via flow cytometry and low copy number with a Copy Number Variation assay (CNV). Minipools with a copy number less than 2.5 and GFP expression at least 50% of the bulk pool were expanded into shaking adaptation. Expanded pools were also re-tested for GFP expression and confirmed via flow cytometry. Once minipools were expanded, vial aliquots were frozen down.

[0416] Minipool vials were thawed and allowed to recover. Cells were then adapted to a liquid counterpart of the semisolid media used for single cell cloning. Minipools were deemed fully adapted when cells would show consistent doubling times and high viability (>90%). Adapted cells were then plated into semisolid media for the Molecular Devices ClonePix3 single cell cloning platform. Single cell imaging was obtained on day 0 of cell plating in semisolid media to confirm monoclonality. Clonal cell colonies reached outgrowth in fourteen days. Clonal cell colonies were picked and deposited as one colony per well of a 96-well plate. Each clone was then expanded, re-adapted to selection media, and cryopreserved. Doubling times were calculated and clones with less than a 30-hour doubling time were chosen for further development. Expanded clones were retested for GFP expression and copy number.

[0417] Each clone was then transfected in duplicate using the BioRad Gene Pulser Xcell™ Total System with a monoclonal antibody (mAb)-cyan fluorescent protein (CFP) construct to test expression titer. Transfection conditions were optimized such that clonal lines were >90% viable at time of transfection and at least >70% viable post-transfection. CFP expression was evaluated via flow cytometry 3 days post transfection to determine relative transfection efficiency >35%. After full selection and recovery, cell lines were tested in a 10-day TPP (bioreactor tubes) shaking production run in duplicate. Titers for candidate cell lines ranged 50-100 mg/L. A single clone (CSS-1286) derived from minipool CSS-1144 was selected for further development.

[0418] Agilent SureSelect was used to confirm the number of copies and genome location of the landing pad in CSS-1286. SureSelect enriches for a targeted area of interest within the CHO genome and allows for high throughput sequencing using Illumina. In this case, the landing pad site was targeted for enrichment using custom probes.

[0419] Genomic DNA was extracted from CSS-1286 and fragmented for sequencing. Complementary oligonucleotide probes (“baits”), were designed to enrich target DNA sequences. When exposed to the genomic DNA library, the baits bound to the sequence of interest and were pulled down via magnetic bead enrichment. Illumina sequencing adapters were then added to the enriched DNA fragments and amplified via PCR, resulting in an enrichment of the fragments of interest. Fragments were analyzed on an Illumina MiSeq.

[0420] The data were analyzed using the Horizon Discovery CHO genome sequence as a reference. Sequences were mapped to the reference landing pad sequence. Any chimeric reads, sequences containing both partial landing pad sequences and CHO genome sequences were extracted and mapped back to the CHO genome. This allowed for identification of where the landing pad had inserted into the CSS-1286 genome.

[0421] To confirm copy number using an orthogonal method, CSS-1286 was sent to Cergentis for Targeted Locus Amplification (TLA) (Hottentot et al., 2007). Targeted DNA sequences close in physical space were crosslinked. The targeted sequences were then digested and then ligated back together, forming circles of DNA. Inverse PCR was performed, using the targeted sequence as the initial binding region for amplification. This created large libraries of DNA that were then be sequenced using Illumina sequencing. Sequences were then mapped back to the reference Horizon Discovery CHO genome to determine copy number and genome integration location. TLA and SureSelect identified the same single genome location.

[0422] Antibody Library Cloning

[0423] Generation of amplicon libraries comprised three steps: (i) poly(A)+mRNA capture, (ii) multiplexed overlap extension reverse transcriptase polymerase chain reaction (OE-RT-PCR), and (iii) nested PCR to remove artifacts and add adapter sequences for Illumina sequencing or cloning into antibody expression vectors (FIGS. 2A and 2B).

[0424] First, PBMCs were collected from 50 human donors (median age 52; range 20-71), either presumed positive by symptoms or confirmed positive by nasal swab test (Roche) at the collection site. No follow-up nasal swab qPCR assay was required to show viral clearance. The median days since onset of symptoms was 23 days (range 12-42). Donors were consented under an IRB protocol by a CRO and shipped to GigaGen overnight at ambient temperature. The serum fraction was isolated for each of the 50 donors. Each serum was assayed for reactivity against SARS CoV-2 Spike protein and SARS CoV-2 RBD protein, using ELISA (FIGS. 3A-3D). 33 of the donors bound to Spike and/or RBD. The 16 highest titer donors were then selected for library generation (Library 1 to 8).

[0425] Next, PBMC samples from each of the 16 “high titer” donors were assayed the for SARS CoV-2 virus using CDC qPCR assays (FIGS. 3A-3D). None of the 16 donors showed any detectable SARS CoV-2 RNA. 1.5-2 million B cells were isolated from each of the 16 high titer donors into fluorocarbon oil (Dolomite) emulsion microdroplets with lysis buffer (20 mM Tris pH 7.5, 0.5 M NaCl, 1 mM EDTA, 0.5% Tween-20, and 20 mM DTT) and oligo(dT) beads (New England Biolabs Inc.; NEB), using an emulsion droplet microfluidic chip. Typically, >3 million single cells were processed per hour, with >99% of cell-containing droplets containing single cells. Beads were separated from the droplets using Pico-Break solution (Dolomite). Multiplex OE-RT-PCR was then performed in emulsions, using purified RNA-bound beads as template, to generate single chain variable fragment (scFv) amplicons that linked the heavy and light chain Ig from single B cells (Adler et al., 2017). Pools of 2 high titer donors were amplified in the emulsions, for a total of 8 emulsion reactions.

[0426] The OE-RT-PCR products were used as template in a nested PCR to add adapters for yeast surface display. S. cerevisiae cells (ATCC) were electroporated (Bio-Rad Gene Pulser II; 0.54 kV, 25 uF, infinite resistance) with the PCR product combined with a linearized vector for in vivo homologous recombination and inducible expression of scFv protein. Transformed yeast were expanded, induced with galactose, and approximately 2×10⁶ induced yeast cells were stained with anti-c-Myc (Thermo Fisher Scientific) followed by a FITC-conjugated secondary antibody (Thermo Fisher Scientific), and biotinylated SARS CoV-2 RBD or Spike (1200 nM final concentration) followed by APC-streptavidin (Thermo Fisher Scientific); an scFv library specific for an unrelated target was used as a negative control. Yeast cells were then sorted (BD Influx) and 20-30×10³ double-positive cells (FITC/APC+) were recovered. For further specificity, a second round of sorting using the same antigen was performed and 50×10³ double-positive yeast 2-donor library were recovered.

[0427] An average of 1.1% of the expressed antibodies were RBD-specific after the first sort, suggesting that most antibodies in the original convalescent COVID-19 repertoires are not specific to SARS CoV-2. Plasmid scFvs from each of the 8 sorted libraries were subjected to PCR to amplify the scFv and add adapters for Illumina sequencing. A randomer of seven nucleotides was added to increase base calling accuracy in subsequent Illumina sequencing steps. Sequencing on a MiSeq (Illumina) showed that each sorted library comprised a median of 129 antibodies (range: 83 to 209).

[0428] To convert the 8 sorted scFv libraries into full-length antibody libraries, a cloning pipeline was developed to convert the 8 scFv libraries into full-length CHO expression libraries (FIG. 4). First, nested outer PCR primers added adapters with overhangs for Gibson assembly to the 5′ and 3′ ends of the scFv library. Then Gibson Assembly (NEB) was used to insert the scFv library into a vector containing a single promoter, a secretory leader sequence for light chain Ig and the remainder of the IgG constant region, creating a cloned scFv library. To create the full-length antibody library, another Gibson Assembly was used to insert a synthetic amplicon containing a portion of the light chain Ig constant region, a poly(A) signal for light chain Ig, a promoter for the IgG gene and a secretory leader sequence for the IgG gene.

[0429] The base plasmid for antibody expression was derived from pCDNA5/FRT (ThermoFisher), with some modifications (FIG. 4). The original plasmid (purchased from ThermoFisher) contained a CMV promoter followed by the protein open reading frame and finally a BGH polyadenylation sequence. The assembled antibody expression plasmid (after the second Gibson Assembly) contains an EF1-alpha promoter (sourced from pEF1a-IRES, Takara Bio), followed by an H. sapiens IgG signal peptide, the IgK variable region sourced from the donor B cell, and the IgK constant region. Next is a BGH polyadenylation sequence (same sequence as in the original plasmid), followed by the CMV promoter (from the original plasmid), the IgG signal peptide, IgG variable region sourced from the donor B cell, IgG constant region and a second BGH polyadenylation sequence (from the original plasmid). The hygromycin resistance gene in the original plasmid was replaced with the glutamine synthetase gene (sourced from pCGS3, MilliporeSigma) preceded by a 2A motif

[0430] The full-length rCIG plasmid libraries were then transformed en masse into E. coli and then spread on LB-carbenicillin plates. >1 million colonies were typically scraped and plasmid was purified with a Maxi prep kit (Qiagen) to make the full-length Maxi prep library, which was then transfected into parental CHO cells, as described below. RCB and MCB Generation

[0431] The 8 full-length rCIG library maxipreps were used to create 8 polyclonal RCBs, which could be used to produce RPP. First, a vial from the bank of parental CSS-1286 cells was thawed out and recovered. CSS-1286 cells were taken off Zeocin selection the day before transfection. CSS-1286 cells were co-transfected with the full-length rCIG library maxiprep and a recombinase plasmid using the Gene Pulser Xcell™ Total System in growth media. The host cell then expresses the Flp recombinase off the recombinase plasmid to promote recombination of each donor full-length rCIG library into the landing pad site of CSS-1286. Transfected cells were recovered in static flasks for 72 hours at 37° C., 5% CO₂ and then subjected to GS selection to produce stable pools of cells expressing rCIG antibodies. The cells were provided a media change with selective media every seven days for approximately 14 days until fully selected.

[0432] The selected cells were expanded and cryopreserved, generating 8 polyclonal rCIG RCBs, which could be used to produce RPP. Small-scale production of RPP in shake flasks was performed for each rCIG RCB, and the protein products were subjected to a battery of tests, including anti-SARS CoV-2 ELISA and a Spike:ACE2-inhibition ELISA. The anti-SARS CoV-2 binding ELISA showed that the scFv-sorted rCIG products were typically >10,000-fold more potent than plasma-derived IVIG, and ranged from 147- to 1,394-fold more potent binding than matched convalescent serum/plasma. The potential for SARS CoV-2 neutralization was assessed using a Spike:ACE2-inhibition ELISA and pseudotype neutralization assays. Preliminary results showed that neutralization was generally consistent between the ELISA and pseudotype neutralization methods. Plasma-derived IVIG showed no detectable neutralization. The scFv-sorted rCIG library products were 32.7-1,500-fold more potent than matched convalescent serum/plasma, generally consistent with the trends observed in the anti-SARS CoV-2 binding ELISA experiments. No library that was tested showed anti-RBC agglutination or anti-HLA reactivity.

[0433] A mixture of the 8 RCBs is prepared to generate an MCB for GMP production of RPPs, simultaneously maximizing antibody diversity and neutralizing activity, while retaining low off-target reactivity. The mixture of RCBs is generated by thawing the chosen RCBs and then mixing them at a predetermined ratio, i.e., not necessarily in equivalent ratios. A panel of assays is used to characterize rCIG drug candidate produced at small scale from the mixture of RCBs (FIGS. 5 and 6). The MCB is characterized using standard assays, including mycoplasma, adventitious viruses, hamster antibodies, and sterility. The MCB is also assessed for phenotypic stability using a standard cell aging protocol.

[0434] Bioproduction of rCIG

[0435] The MCB are expanded in a seed train. The seed train is used to inoculate large-scale bioreactors, for example, 200 L single use bioreactors (SUBs). Bioproduction of RPP is monitored for a variety of parameters, including viability, IgG titer, glucose, and metabolites. Bioproduction continues for 14 days or until cell viability drops below 80%. The harvested cell culture fluid (HCCF) is then be used for downstream purification.

[0436] The GMP downstream process is designed to selectively purify antibody from the harvested cell culture fluid (HCCF), and then further polish the material by removing residual host cell protein (HCP), aggregate, and other impurities. DNA and virus are also inactivated and removed, and the final material is formulated at the desired concentration in the final buffer.

[0437] The steps of downstream production include, e.g., standard Protein A purification; subjecting the eluant to a pH 3.5 hold for viral inactivation; and polishing using cation-exchange (CEX), anion-exchange (AEX), and viral clearance filters; ultrafiltration/diafiltration (UF/DF) and sterile filtration for final formulation of the drug substance.

[0438] Antibody RNA Sequencing for Process Monitoring

[0439] Currently, no technology exists to reliably quantify the individual protein components of mixtures of more than 1,000 proteins. As such, the individual antibody protein components of plasma-derived antibody products such as IVIG remain unknown. Using current technologies, antibody sequencing can only be performed on individual purified proteins, such as monoclonal antibodies. Therefore, lot release metrics for plasma-derived antibody products do not include antibody sequencing.

[0440] Like plasma-derived antibody products, rCIG comprise >1,000 different antibodies. Unlike plasma-derived antibody products, rCIG is manufactured from a CHO master cell bank that expresses RNA that encodes >1,000 different antibodies. Unlike protein sequencing, sequencing of RNA mixtures is technologically mature, very high-throughput, and quantitative. Therefore, Illumina sequencing of antibody RNA (“antibody RNA-seq”) expressed by CHO cells is used as a method to assesses antibody diversity at the end of bioproduction.

[0441] Small-scale (2.5-5 L) engineering runs are used to establish control ranges in the Jaccard and Morisita indices (Rempala & Seweryn, 2013) between the MCB and harvest day. The Jaccard metric assesses the overlap of antibody sequences between two given samples, whereas the Morisita index assesses the quantitative consistency of antibody sequences between two given samples. Thus, Jaccard assesses maintenance of antibody diversity, and Morisita assesses maintenance of antibody frequencies.

[0442] Sufficient replicates are performed to generate a median and standard deviation for Jaccard and Morisita indices from production runs that produce protein product above a critical minimal cutoff for rCIG potency. These ranges are used to monitor and assess GMP manufacturing at the 200 L scale.

### Example 3: Generation of Recombinant Hyperimmune Globulins from Diverse B-cell Repertoires

[0443] Plasma-derived polyclonal antibody therapeutics, such as intravenous immunoglobulin, have multiple drawbacks, including low potency, impurities, insufficient supply and batch-to-batch variation. The present disclosure describes a microfluidics and molecular genomics strategy for capturing diverse mammalian antibody repertoires to create recombinant multivalent hyperimmune globulins. The method generates of diverse mixtures of thousands of recombinant antibodies, enriched for specificity and activity against therapeutic targets. Each hyperimmune globulin product comprised thousands to tens of thousands of antibodies derived from convalescent or vaccinated human donors or from immunized mice. Using this approach, Applicant generated hyperimmune globulins with potent neutralizing activity against severe acute respiratory syndrome coronavirus-2 (SARS-CoV-2) in under 3 months, Fc-engineered hyperimmune globulins specific for Zika virus that lacked antibody-dependent enhancement of disease, and hyperimmune globulins specific for lung pathogens present in patients with primary immune deficiency. To address the limitations of rabbit-derived anti-thymocyte globulin, Applicant generated a recombinant human version and demonstrated its efficacy in mice against graft-versus-host disease.

[0444] The technology described here generates recombinant hyperimmune globulins for diverse conditions through high-throughput microfluidics, genomics and mammalian cell engineering. B cells from human donors or mice are run through a microfluidic platform, heavy and light chain immunoglobulin nucleic acid sequences are fused on a single-cell level to create antibody repertoires, antibody repertoires are engineered into full-length expression constructs en masse, and then the full-length antibody expression constructs are stably introduced en masse into Chinese hamster ovary (CHO) cells in a site-directed manner. The technology disclosed herein was applied to develop 10³ to 10⁴ diverse recombinant hyperimmune globulin drug candidates to address unmet clinical needs for the COVID-19 pandemic, Zika virus disease, primary immune deficiency (PID) and transplant tolerance. The drug candidates were validated in vivo and/or in vitro for each of the four clinical applications.

### Results

[0445] Capturing Diverse Antibody Repertoires as CHO Libraries and RPPs

[0446] Mammalian antibody repertoires are extremely diverse, comprising as many as 10⁷ antibody clonotypes. Advanced molecular technology is required to capture a substantial fraction of a mammalian donor's diverse antibody repertoire. Applicant used methods for generating millions-diverse libraries of natively paired heavy and light chain immunoglobulin sequences in yeast. That method used microfluidics to isolate millions of single B cells per hour into picoliter droplets for lysis, followed by overlap extension-reverse transcriptase-polymerase chain reaction (OE-RT-PCR), to generate libraries of natively paired single chain variable fragments (scFv).

[0447] Because antibody repertoires often contain many antibodies not directed against the target(s) of interest, a variety of enrichment methods (FIG. 7A-7E) were used. For ATG, Zika virus, Haemophilus influenzae b (Hib) and Streptococcus pneumoniae (pneumococcus), immunogens were administered to human donors or humanized mice before sampling antibody-producing cells. For SARS-CoV-2, convalescent donors were recruited who recently tested positive for COVID-19, made yeast display scFv libraries from donor B cells and sorted the libraries derived from these donors to enrich for antibodies directed against SARS-CoV-2 antigen. In all cases, the output was a library of thousands to tens of thousands of natively paired scFv DNAs, enriched for activity against their respective target(s).

[0448] Next, each library of scFv DNAs was used to produce natively paired full-length antibody expression constructs, which were then engineered into mammalian cells for production of recombinant hyperimmune globulins (FIG. 7A-7E). Cloning into full-length antibody expression constructs was performed en masse, that is, to perform all molecular steps on full libraries rather than individual clones. Briefly, the protocol involved a series of two Gibson assemblies, which are referred to as Gibson assembly 1 (GA1) and Gibson assembly 2 (GA2) (FIGS. 12A and 12B). In GA1, the scFv library was inserted into a vector backbone that contained a promoter, a fragment of the IgG1 constant domain and a poly(A) signal. In GA2, the GA1 plasmid was linearlized, and subcloned it into a DNA fragment that contained a fragment of the IgK constant domain, a second poly(A) signal and a second promoter.

[0449] Production cell lines for monoclonal antibodies are typically produced by randomly inserting expression constructs into the CHO genome. This method produces cell lines with genomic insertion of multiple copies of the expression construct. If polyclonal antibody construct libraries are inserted randomly into the CHO genome, because each cell might contain several inserted transgenes, many clones would express multiple antibodies, which would result in frequent nonnative pairing between heavy and light chain immunoglobulin. Additionally, different genome locations have different transcriptional activity levels, which could result in heterogeneous, inconsistent and/or unstable bioproduction. Applicant therefore used CHO cell lines engineered with a Flp recombinase recognition target landing pad (FIG. 13E). These cell lines were then used for stable expression of recombinant hyperimmune globulins or RPPs in polyclonal cell banks.

### Recombinant Hyperimmune Globulins or RPPs for SARS-CoV-2

[0450] To address the urgent unmet clinical need of the COVID-19 pandemic, methods provided herein were to build recombinant hyperimmune globulins against SARS-CoV-2, which is referred to as recombinant coronavirus-2 immune globulin, or rCIG. In March 2020, 50 human donors were recruited from a single clinic in Louisiana who either had tested positive for SARS-CoV-2 by nasal swab PCR testing or had shown symptoms of COVID-19 around the time of a major local outbreak. First, anti-SARS-CoV-2 plasma titer was assessed for each of the donors using the Si and receptor binding domain (RBD) regions of SARS-CoV-2 spike glycoprotein (FIG. 8A and Table 6). A wide range of half-maximum effective concentration (EC₅₀) values was observed among patients who tested positive for COVID-19 (range 0.0056-9.94 mg ml⁻¹). 16 donors with high plasma antibody titers was selected and used to build yeast scFv display libraries from pools of two donors, for a total of eight libraries. The libraries comprised a median of 70,940 antibodies (range 54,986-156,592, Table 7).

[0451] Applicant used flow sorting to enrich for anti-SARS-CoV-2 antibodies in the eight yeast scFv libraries (FIG. 8B, FIG. 14A-14B and Table 7). One round of flow sorting suggested that a median of 0.99% of antibodies (range 0.42-2.29%) were directed against SARS-CoV-2. After two rounds of sorting, a median of 62.7% of unsorted antibody sequences were human IgG1 subtype (range 51.5-83.4%), whereas in the sorted libraries a median of 82.4% of antibody sequences were human IgG1 subtype (range 63.6-92.2%), suggesting that the COVID-19 antibody response was generally dominated by IgG1 antibodies. Next, full-length polyclonal antibody preparations were generated from each of the eight scFv libraries. The antibodies were formatted as human IgG1, regardless of the initial IgG subtype. Anti-SARS-CoV-2 enzyme-linked immunosorbent assay (ELISA), spike:ACE2 blocking assays and pseudotype and live virus neutralization assays were used to assess the relative activity of each of the eight antibody libraries (FIG. 8F, FIGS. 15 and 17A-17C and Table 7). The eight scFv-sorted CHO cell banks were used in a way that sought to balance high antibody diversity with high anti-SARS-CoV-2 pseudotype neutralization titer (Table 8) and used the combined cell bank to generate rCIG protein product (FIG. 18A-18B). In preparation for manufacturing rCIG for clinical trials, a comprehensive polishing strategy was developed. Stress testing showed that the polished protein quality and function was highly stable, suggesting that rCIG was amenable to large-scale manufacturing (FIG. 19A-19D). This entire process, from delivery of the first donor sample to laboratory-scale generation of the rCIG protein product, was completed in less than 3 months.

[0452] Antibody RNA sequencing of the final CHO cell bank indicated that the rCIG drug candidate comprised a diverse set of 12,500 antibodies (FIG. 8C and Table 9). Additional repertoire analysis of the linked scFv and CHO cell bank libraries for rCIG was performed, including variable gene usage frequency, divergence from germline, CDR3H length distribution and sequence logos of the most abundant clonal clusters (FIG. 20A-20D, FIG. 21A-21C). Anti-SARS-CoV-2 ELISA suggested that the binding titer of rCIG was between 99- and 747-fold higher than corresponding plasma (FIG. 8D, FIG. 15 and Table 7 and 9). ELISAs with several natural variants of SARS-CoV-2 and antigens from related viruses, including SARS-CoV and Middle East respiratory syndrome (MERS) CoV, showed that rCIG bound a broader variety of antigen targets than IVIG or a neutralizing CoV-2 monoclonal antibody (mAb; FIG. 8E, FIG. 22 and Table 9). SARS-CoV-2 pseudotype virus neutralization assay was performed with psudotype virus of several SARS-CoV-2 variants (B.1.1.7 (UK), B.1.351 (South Africa), P.1 (Japanese/Brazilian), and B.1.427/B.1.429 (California)). The result showed that rCIG neutralizes the psudotype virus of the variants in a concentration dependent matter, with an IC₅₀ within 6-fold of the IC₅₀ determined using the Wuhan-Hu-1 psudoviral particle (FIG. 51 and FIG. 52). The rCIG RPP therefore has broad activity across variants against which individual monoclonal antibodies are not active.

[0453] Finally, spike:ACE2 blocking assays, pseudotype virus neutralization assays and live SARS-CoV-2 neutralization assays suggested that the neutralizing titer of rCIG was between 44- and 1,767-fold higher than corresponding convalescent plasma (FIG. 8F, FIG. 16A and 16B, and Tables 7 and 9).

[0454] Antibody RNA sequencing of the CHO cells and SARS-CoV-2 ELISA binding and SARS-CoV-2 pseudotype neutralization of rCIG protein generated from replicate 3-1 bioreactor runs did not show significant batch-to-batch variation in antibody sequence content (Wilcoxon rank sum test, P>0.05) or in vitro pseudotype neutralization (Feltz and Miller's asymptotic test, P>0.05; FIG. 23A and 23B).

[0455] Recombinant Hyperimmune Globulin or RPP for Zika Virus

[0456] To address the Zika pandemic, the method described herein was to build recombinant hyperimmune globulins or RPP against Zika virus, which is referred to as recombinant Zika immune globulin, or rZIG. To create rZIG RPP, human-transgenic mice (Trianni) was used that expressed a complete repertoire of human antibody sequences. The mice were immunized with Zika virus antigens (FIGS. 24A and 24B). To explore the ability to engineer an rZIG that would not exhibit antibody-dependent enhancement (ADE), a safety concern for anti-Zika therapeutic antibodies, Applicant additionally boosted with four inactivated dengue virus serotypes.

[0457] B cells from the immunized animals and microfluidics technology were used to create an scFv library of natively paired IgGs. The resulting scFv library comprised approximately 119,700 IgG-IgK clonotypes (Table 10). Because enrichment by flow sorting is time-consuming and makes (possibly inappropriate) choices about viral epitope targets, the potency of an rZIG product produced without enrichment by flow sorting was assessed. To this end, the unsorted scFv library and CHO engineering technology to create rZIG CHO cell banks with a wild type human IgG1 isotype (rZIG-IgG1) or a mutated human IgG1 with abrogated Fc receptor (FcR) binding (rZIG-LALA) were used. Antibody RNA sequencing of IgG sequences in the rZIG cell banks suggested that the rZIG-IgG1 comprised 33,642 antibodies and rZIG-LALA comprised 26,708 antibodies (FIG. 9A and Table 11). A Morisita overlap of 86% and a Jaccard overlap of 58% between the rZIG-IgG1 and rZIG-LALA libraries suggested that the cell banks comprised substantially similar antibody repertoires. Additional repertoire analysis of the linked scFv and CHO cell bank libraries for rZIG was performed, including variable gene usage frequency, divergence from germline, CDR3 length distribution and sequence logos of the most abundant clonal clusters (FIG. 25A-25D). CDR1, CDR2 and CDR3 sequences of 5 clusters provided in FIG. 25D are also summarized in the below table.

| Cluster | CDR1 | CDR2 | CDR3 |
|---|---|---|---|
| 1 | GFTFSSYA | ISGSGGST | AKEGMVLRYFDWLWDY (SEQ ID NO: 25856) |
| | (SEQ ID NO: | (SEQ ID NO: | |
| | 25841) | 25847) | |
| 2 | GFTFSSYG (SEQ | I[W/S]YDGSN | R[D/E][R/L][S/V/L]SG[P/W]S[G/H]FDY (SEQ ID NO: 25857) |
| | ID NO: 25842) | K (SEQ ID NO: | |
| | | 25848) | |
| 3 | GFTFSSYA (SEQ | ISGSGGST | A[K/E/R][E/T][Q/L/T][L/W/I][L/V/W/N][G/L]V[V/P/L][F/L/N][D/N] |
| | ID NO: 25841) | (SEQ ID NO: | Y (SEQ ID NO: 25858) |
| | | 25847) | |
| 4 | GFTFDD[Y/H]G | INWNG[G/D]S | AR[D/N][R/G]GS[S/T][G/S/W/F][W/F/Y][R/F/Y]D[W/A]FD[P/I] |
| | (SEQ ID NO: | T (SEQ ID NO: | (SEQ ID NO: 25859) |
| | 25843) | 25849) | |
| 5 | GFTFSD[Y/D][Y/F] | ISGSG[S/Y]TI | ARDEGY[R/S]GY[V/N]LD[T/N/S] (SEQ ID NO: 25860) |
| | (SEQ ID NO: | (SEQ ID NO: | |
| | 25844) | 25850) | |

[0458] Applicant used these CHO cell banks to produce rZIG-IgG1 and rZIG-LALA hyperimmune globulins at laboratory scale (FIG. 26A-26B, FIG. 27A-27B).

[0459] Anti-Zika virus ELISA showed that both rZIG-LALA and rZIG-IgG1 had >75-fold higher titers against Zika virus than a human Zika positive serum sample (FIG. 28 and Table 11). Both rZIG-LALA and rZIG-IgG1 had anti-dengue binding activity across four serotypes, with pooled EC₅₀ values showing strong correlation with anti-Zika EC₅₀ values (linear regression, R²=0.9993, F-statistic P<0.001; FIG. 9B, FIG. 29 and Table 10). In contrast, although both rZIG-LALA and rZIG-IgG1 had strong activity in a Zika pseudotype neutralization assay (FIG. 30), there was no correlation between Zika and pooled dengue neutralization (linear regression, R²=0.00271, F-statistic P>0.05; FIG. 9C and FIG. 31). Applicant investigated whether the abrogated Fc function of rZIG-LALA could decrease ADE in a Zika pseudotype virus assay (FIG. 32). Both Zika⁺ human serum and rZIG-IgG1 showed considerable ADE, whereas rZIG-LALA showed no detectable ADE (FIG. 9D). Antibody RNA sequencing of the CHO cells and anti-Zika virus ELISA binding of rZIG-IgG1 and rZIG-LALA protein generated from replicate bioproduction runs did not show significant batch-to-batch variation in antibody sequence content (Wilcoxon rank sum test, P>0.05), and batch-to-batch anti-Zika virus ELISA results were indistinguishable (FIG. 33A-33B).

[0460] IVIG Spike-in for Patients with Primary Immunodeficiencies

[0461] Plasma-derived IVIG acts as antibody replacement for patients with humoral primary immunodeficiencies (“PID”), who have low serum IgG titers. However, it has insufficient antipathogen activity for certain patients at-risk for PID. To address this unmet clinical need, Applicant manufactured recombinant hyperimmune globulins or RPPs directed against pneumococcus and Hib bacteria, designed as multivalent ‘spike-ins’ for plasma-derived IVIG, that is, recombinant Haemophilus immune globulin (rHIG) and recombinant pneumococcus immune globulin (rPIG). Note that rHIG and rPIG are not replacements for IVIG, but rather supplements meant to increase the efficacy of IVIG. A full recombinant replacement for IVIG would require much broader antipathogen activity.

[0462] Healthy human donors were recruited and administered vaccines directed against pneumococcus or Hib. Eight to nine days after vaccination, peripheral blood mononuclear cells (PBMCs) were collected and shipped to our microfluidics processing facility. B cells from the PBMCs were selected and millions of cells were run through the microfluidics platform (Table 12), and then the scFv libraries and the CHO engineering technology were used to create IgG1 CHO cell banks for rHIG and rPIG. Heavy chain antibody RNA sequencing of the cell banks indicated that rHIG comprised 49,206 IgG sequences and rPIG comprised 17,938 IgG sequences (FIG. 10A and Table 13 and 14). Additional repertoire analysis of the linked scFv and CHO cell bank libraries for rHIG and rPIG was performed, including variable gene usage frequency, divergence from germline, CDR3 length distribution and sequence logos of the most abundant clonal clusters (FIGS. 34A-34D and 35A-35D). These CHO cell banks were used to produce rHIG and rPIG hyperimmune globulins at laboratory scale (FIGS. 36A-36B and 37A-37B).

[0463] Anti-Hib ELISA indicated that rHIG had 233-fold higher titer than plasma-derived IVIG (FIG. 10B and Table 13). A serum bactericidal assay demonstrated that rHIG was strongly active against two different Hib strains, whereas no bactericidal activity was observed for plasma-derived IVIG (FIG. 10C, FIG. 38 and Table 13). An ELISA against a combination of 23 pneumococcus serotypes showed that rPIG has 85-fold higher titer than plasma-derived IVIG (FIG. 39 and Table 14). ELISA for individual pneumococcus serotypes showed that rPIG was at least fivefold higher titer than plasma-derived IVIG for 13 out of 16 serotypes measured, indicating broadly enriched multivalent reactivity and significantly higher than IVIG overall across all separate ELISAs combined (Wilcoxon signed rank test, P=0.00123; FIG. 10D and Table 14). Finally, semiquantitative serotype-specific opsonophagocytosis assays suggested that rPIG was as effective or more effective than plasma-derived IVIG at cell killing for 15 out of 16 serotypes tested, and had significantly higher activity than IVIG across all separate opsonophagocytosis assays combined (Wilcoxon signed rank test, P=0.00251; FIG. 10D and Table 14). Antibody RNA sequencing of the CHO cells and anti-Hib or antipneumococcal ELISA binding of rHIG or rPIG protein generated from replicate bioproduction runs, respectively, did not show significant batch-to-batch variation in antibody sequence content (Wilcoxon rank sum test, P>0.05), and batch-to-batch antipathogen ELISA results were indistinguishable (FIGS. 40A-40B and 41A-41B).

[0464] To simulate the potential clinical application, rHIG and rPIG were mixed in with plasma-derived IVIG (IVIG+rHIG/rPIG) at a ratio of 1:1:8 (rHIG:rPIG:IVIG), producing a product with 18.3-fold higher titer than plasma IVIG for Hib and 8.3-fold higher titer than plasma IVIG for a pool of 23 pneumococcus serotypes (FIG. 42A-42B and Table 15). A Hib mouse challenge model using IVIG+rHIG/rPIG as prophylactic treatment showed significantly lower bacterial loads in the blood (Welch t-test, P<0.001) and peritoneal fluid (Welch t-test, P<0.001) as compared to plasma IVIG alone (FIG. 10E).

[0465] Recombinant Human ATG RPP for Transplant Tolerance

[0466] To encourage tolerance of grafts, transplant physicians use a variety immunosuppressive drugs, such as rabbit-ATG, which is manufactured by injecting rabbits with human thymocytes and isolating antibodies from the rabbit serum. However, rabbit-ATG can cause allergic reactions and other complications in humans, and the drug shows significant variation in potency across lots. To improve on rabbit-ATG, a recombinant human ATG, or rhATG RPP, derived from transgenic mice that express human antibodies (Trianni) were used. The mice were immunized with either human T cells or human fetal thymocytes (FIG. 43A-43B). B cells from the immunized animals and the microfluidics technology were used to create four scFv libraries of natively paired IgGs: bone marrow cells from T-cell immunized mice, lymph node cells from T-cell immunized mice, lymph node cells from thymocyte immunized mice and spleen cells from thymocyte immunized mice. The resulting scFv libraries comprised a range of 13,314 to 34,324 IgG-IgK clonotypes (Table 16). Additional repertoire analysis of the linked scFv and CHO cell bank libraries for rhATG was performed, including variable gene usage frequency, divergence from germline, CDR3 length distribution and sequence logos of the most abundant clonal clusters (FIG. 44A-44D). The CHO engineering technology was used to make cell banks from each of the four libraries.

[0467] Protein from each of the CHO cell banks was produced, and then pooled in equal mass equivalents to create rhATG (FIG. 45A-45B). Sequencing of individual libraries suggests that the pool comprised 49,885 antibodies (FIG. 11A and Table 17). Then ELISA was performed for a panel of known cell surface antigen targets for rabbit-ATG and observed that rhATG bound several immune cell surface targets, but only a subset of the targets bound by rabbit-ATG (FIG. 46A-46B). To investigate further, in vitro cell killing assays were performed with human PBMCs, which showed that rhATG and rabbit-ATG were not significantly different in cell killing potency against cytotoxic T cells and helper T cells (linear mixed effects model, P>0.05), whereas rhATG is significantly stronger than rabbit-ATG at killing B cells (linear mixed effects model, P<0.01) but significantly weaker than rabbit-ATG at killing natural killer cells (linear mixed effects model, P<0.01; FIG. 11B). Anti-erythrocyte binding assays were also performed, which suggested that rhATG has less off-target activity than rabbit-ATG (FIG. 47).

[0468] The efficacy of rhATG in vivo was also studied, using a graft-versus-host (GVH) model in which human PBMCs were grafted onto immune-incompetent mice. Animals (n=8 per PBMC donor) were dosed with rhATG, rabbit-ATG or vehicle control, either every other day for 5 weeks starting 5 days after the PBMC graft, or only on days 5, 6 and 7 after the graft. Two different PBMC donors were tested for each dosing regimen. After 42 days, rhATG was not significantly different from rabbit-ATG for survival (log-rank pairwise tests, P>0.05) and was superior to vehicle control for survival (log-rank pairwise tests, P<0.001), in both dosing schemes across multiple PBMC donors (FIG. 11C and FIG. 48A-48B). In both dosing regimens across both PBMC donors, immune cell (CD45⁺) expansion was not significantly different between rhATG and rabbit-ATG (linear mixed effects model, P>0.05), whereas for the vehicle control immune cell counts were significantly higher than rhATG at day 9 (Wilcoxon rank sum tests, P<0.01; FIG. 11D and FIG. 49A-49B). The conclusion was that although rhATG and rabbit-ATG did not share identical antigen targets, the drugs had similar efficacy in vivo.

### Discussion

[0469] Applicant demonstrated the generation of multivalent, 10³ to 10⁴ diverse recombinant hyperimmune antibody drugs (RPPs) from convalescent human blood donors, vaccinated human blood donors and humanized mouse repertoires. The drug candidates were validated using in vitro and in vivo methods, highlighting their advantages over plasma-derived incumbents. The technology combines methods in microfluidics, genomics and mammalian cell engineering. Contrasted against previous methods for generating recombinant polyclonal antibodies, our drug candidates had hundreds-fold higher antibody diversity and therefore represented higher fractions of antigen-reactive repertoires. Their advantages over plasma-derived products include higher potency, the ability to scale production without collecting further donors, consistency of production and the ability to modulate pharmacologic problems such as ADE. The technology is fast, producing a master cell bank against a poorly characterized virus (SARS-CoV-2) in less than 3 months. The rCIG product (GIGA-2050) has now been manufactured at a good manufacturing practice (GMP) facility. GMP production was similar to the methods described in this study, except that upstream bioproduction was performed in a single use bioreactor at the 250-liter scale and downstream purification was scaled equivalently.

[0470] Emerging viruses are a constant and unpredictable threat to human health. In the past two decades alone, the world has seen outbreaks of Ebola virus, SARS, MERS, 2009 H1N1 swine flu, Zika Virus and SARS-CoV-2, among others. Notwithstanding recent successes in rapid development of SARS-CoV-2 prophylactic vaccines, previous vaccine development efforts required very long development timelines. Development of broadly neutralizing monoclonal antibodies is often confounded by the difficulty of identifying broadly neutralizing epitopes, and escape variants can emerge over time. Because of such issues, convalescent COVID-19 plasma emerged as a promising approach early in the COVID-19 pandemic. However, convalescent plasma is difficult to manufacture at scale because convalescent plasma supply is constrained and each plasma donor supplies enough therapeutic for only 1-2 patients. The conclusion was that rCIG was a promising alternative to COVID-19 convalescent plasma due to significantly higher potency against live virus (Wilcoxon rank sum test, P=0.02869) and the ability to scale GMP production without the need to recruit more donors.

[0471] Although Zika virus has been less widespread and less deadly than SARS-CoV-2, Zika can spread from mother to fetus in utero, resulting in birth defects such as microcephaly. As of July 2020, there was no FDA-approved vaccine or therapy for Zika virus. Zika virus disease is complicated by ADE, a phenomenon in which poorly neutralizing antibodies enhance viral infection by bringing virus particles to cells that express FcR. This problem is particularly troublesome for individuals who have been previously infected with dengue, a related flavivirus, since many anti-dengue antibodies are poor neutralizers against Zika virus and vice versa. ADE is a safety concern in the development of plasma-derived hyperimmune globulins and vaccines. The conclusion was that rZIG-LALA was a promising alternative to plasma-derived drugs, due to high neutralizing potency against Zika virus and complete abrogation of the risk of ADE.

[0472] Although plasma-derived IVIG reduces rates of serious infections in PID, many patients still suffer frequent serious infections that require hospitalization. In particular, about 78% of serious lung infections are caused by pneumococcus and Hib bacteria. Clinicians have improved outcomes by further increasing IVIG doses, suggesting that, however, bacterial species are often incredibly diverse; for example, there are 90 known pneumococcus serotypes, complicating therapeutic development. The conclusion was that a polyvalent IVIG+rHIG/rPIG product had strong potential to address unmet clinical needs in patients with PID through increased potency against key pathogens.

[0473] In 2019, nearly 40,000 solid organ transplants were performed in the USA alone (www.unos.org). Transplantation generally introduces at least some mismatch between the human leukocyte antigen genotypes of the donor and host. This frequently results in some host-versus-graft effects, leading to loss of the graft and other serious complications. The work provided herein suggested that rhATG could one day address unmet clinical needs in transplant tolerance.

[0474] Our technology for generating recombinant hyperimmune globulins combines the advantages of recombinant antibodies (purity, consistency, potency) with the advantages of plasma-derived antibodies (proven efficacy, diversity, polyvalence, in vivo affinity maturation). The study disclosed herein has shown how the technology can improve existing plasma-derived products such as IVIG and rabbit-ATG. Polyclonal antibodies contain drugs with different mechanisms of action, potentially increasing efficacy; for example, rCIG may contain some antibodies optimized to block binding of virus to ACE2 and other antibodies optimized to clear virus through complement fixation. In the future, our technology could be used to develop drugs with new mechanisms of action, for example, antitumor antibody mixtures or antiplasma cell mixtures to cure humoral-driven autoimmune disease. It could also be extended to develop recombinant polyclonal IgM or IgA. To strengthen readiness against future pandemics, recombinant hyperimmune globulin cell banks against the most pressing biodefense threats could be produced preemptively.

### Methods

[0475] Generating Paired Heavy and Light Chain Libraries

[0476] Generation of scFv libraries from antibody-producing cells comprises three steps: (1) poly(A)+mRNA capture, (2) multiplexed OE-RT-PCR) and (3) nested PCR. Briefly, a microfluidic device captures single cells in droplets with a mixture of lysis buffer and oligo dT beads (NEB). After the cell is lysed and messenger RNA is bound to the bead, the emulsion is broken and the mRNA-containing beads are purified. Next, an emulsion is created using OE-RT-PCR reagents including a pool of primers directed against the IgK C region, the IgG C region and all V regions (Table 18), and the mRNA-bound beads as a template. The emulsion is subjected to thermal cycling, which creates complementary DNA, amplifies the IgK and IgG variable regions and links them together in an scFv format. Then the emulsion is broken and the linked scFv DNA product is extracted and purified. The purified scFv product is then amplified using nested PCR to remove artifacts and add adapter sequences. Depending on the adapter sequences, the product can be used for deep sequencing, yeast display libraries or full-length CHO expression.

[0477] To convert the scFv libraries into full-length CHO expression libraries, nested outer PCR primers were first used to add adapters with overhangs for Gibson assembly to the 5′ and 3′ ends of the scFv library (for rCIG, this was done after yeast scFv display enrichment, as described in the next section). Then NEBuilder HiFi DNA Assembly Master Mix (NEB) was used to insert the scFv library into a vector containing a single promoter, a secretory leader sequence for light chain immunoglobulin and the remainder of the IgG1 constant region, creating a cloned scFv library (GA1 backbone, FIG. 12A-12E; GenBank accession number MW079271). This intermediate library (GA1 product, FIG. 12A-12E; example plasmid sequence provided as GenBank accession number MW079272) was transformed into E. coli and plasmids were purified by either (1) spreading onto LB-ampicillin plates, scraping 0.5-1 million colonies and pooling or (2) inoculating directly into LB-ampicillin broth and growing overnight. Plasmid purification was performed using ZymoPURE II Plasmid Maxiprep Kits (Zymo Research). To create the full-length antibody library, a second Gibson assembly was performed by linearizing the GA1 product with BamHI-HF (rHIG) or NheI-HF (rCIG, rPIG, rhATG and rZIG) (NEB) and using it as a vector to insert a synthetic amplicon (Supplementary FIG. 2, GenBank accession number MW079275) containing a portion of the light chain immunoglobulin constant region, a poly(A) signal for light chain immunoglobulin, a promoter for the IgG gene and a secretory leader sequence for the IgG gene. The full-length library was then transformed into E. coli and spread on LB-ampicillin plates. >0.5 million colonies were combined and plasmid was purified with a ZymoPURE II Plasmid Maxiprep Kits (Zymo Research) to make the full-length recombinant hyperimmune globulin maxiprep library for transfection (GA2 product, FIG. 13A-13E; example plasmid sequence provided as GenBank accession number MW079273). When the transformed E. coli were inoculated directly into LB-ampicillin medium, a small volume of cells was plated to calculate the total number of transformants. In some cases, ampicillin was used for both plates and medium, whereas in other cases carbenicillin was used instead of ampicillin. Paired heavy and light chain libraries were made only once from each sample.

[0478] Enrichment for Antigen Binders by Yeast scFv Display

[0479] Polyclonal COVID-19 scFv libraries were sorted to enrich for relevant sequences. Briefly, yeast surface display scFv libraries were generated using COVID-19 scFv DNA libraries and a custom yeast surface display vector transformed by electroporation into EBY100 yeast strain (MYA-4941, ATCC). Surface displayed scFv sequences include a C-terminal myc tag to identify scFv expression with 1 μl per sample of undiluted anti-myc primary (A21281, Thermo Fisher Scientific) and 1 μl per sample of undiluted AF488 secondary antibody (A11039; Thermo Fisher Scientific). Binding to antigen was identified by staining with soluble biotinylated SARS-CoV-2 RBD antigen (SPD-C82E9, Acro Biosystems) at 1,200 nM and APC-streptavidin (SA1005, Thermo Fisher Scientific). Stained yeast libraries were sorted on a FACSMelody (BD Biosciences, with BD fluorescent activated cell sorting (FACS) Chorus software v.1.3.3) and double positive (AF488⁺/APC⁺) cells were collected. The gating strategy is outlined in FIG. 14A-14B. The collected cells were expanded and sorted again to further enrich the libraries. After the second round of sorting, cells were expanded a third time before plasmid isolation with a Zymoprep Yeast Plasmid Miniprep kit (Zymo Research). The plasmid libraries were then used as template for barcoding PCR and subsequent analysis by deep sequencing (Illumina). Plasmid from twice-sorted libraries was used as template for PCR toward full-length CHO antibody expression. Yeast scFv sorting was performed only once from each yeast scFv library.

[0480] Bioproduction of rHIG and rhATG

[0481] Adapted Flp-In-CHO cells stably expressing antibody libraries were grown in media consisting of 90% BalanCD CHO Growth A Medium (Irvine Scientific), 9% Ham's F-12 (Thermo Fisher Scientific), 1% FBS (Thermo Fisher Scientific), 4 mM Glutamax (Thermo Fisher Scientific), 0.2% anticlumping agent (Irvine Scientific), 600 μg ml⁻¹ Hygromycin-B (Gemini Bio). Protein production was performed at either small (250 ml) or medium (5 l) scale. For small-scale production, cells were seeded at 1×10⁶ cells per ml into 50 ml of media in a 250 ml Erlenmeyer flask and grown at 37° C., 5% CO₂, 125 r.p.m. Cells were continually grown under these conditions and supplemented with 7.5 ml of CHO Feed 1 (Irvine Scientific) on days 2, 4 and 7 of the production run. Supernatant was harvested on days 8 or 9 by centrifugation followed by filtration through a 0.22-μm 250 ml filter bottle (MilliporeSigma) with a 1 μm prefilter (MilliporeSigma). Harvested cell culture fluid (HCCF) was stored at 4° C. (if less than 1 week) or at −80° C. (if more than 1 week) until Protein A purification. For medium-scale production, cells were grown in the same media. Cells were then seeded at 1×10⁶ cells per ml in 2.3 l in a 5 l flask (in duplicate, day 0). Each flask was fed with 345 ml of CHO Feed 1 (Irvine Scientific) on days 2 and 4 of the culture. Cultures were gathered on days 8 or 9. Each of the four rhATG protein libraries were produced separately. Bioproduction was performed twice each for rHIG and rhATG.

[0482] Bioproduction of rPIG, rZIG and rCIG

[0483] CSS-1286 CHO cells stably expressing antibody libraries were grown in media without glutamine (EX-CELL CHOZN Advanced, MilliporeSigma). Protein production was performed at either small (500 ml flask) or medium (5 l flask) scale. For small-scale production, cells were seeded at 0.5×10⁶ cells per ml into 100 ml media in a 500 ml Erlenmeyer flask and grown at 37° C., 5% CO₂, 125 r.p.m. Cells were continually grown under these conditions and supplemented with 15 ml of CHO Feed 1 (MilliporeSigma) on day 3, and 10 ml of CHO Feed 1 (MilliporeSigma) on days 6 and 8 of the production run. Starting on day 3, glucose was measured each day and supplemented to 6 g L⁻¹ if below 4 g1⁻¹. Supernatant was harvested after cell viability peak and before dropping below 70% viability between days 9 and 11, centrifuged and filtered through a 0.22-μm 250 ml filter bottle (MilliporeSigma) with a 1 μm prefilter (MilliporeSigma). HCCF was stored at 4° C. (if less than 1 week) or at −80° C. (if more than 1 week) until Protein A purification. For medium-scale production, cells were grown in the same media. Cells were seeded at 0.5×10⁶ cells per ml in 2.2 L in a 5 L flask (in duplicate, day 0). Each flask was fed with 330 ml of CHO Feed 1 (MilliporeSigma) on day 3 and 220 ml of CHO Feed 1 (MilliporeSigma) on days 6 and 8 of the production run. Starting on day 3, glucose was measured each day and supplemented to 6 g L⁻¹ if below 4 g1⁻¹. Cultures were gathered on days 10-12. Bioproduction was performed three times for rCIG and twice each for rZIG and rPIG.

[0484] Protein Production and Characterization

[0485] After harvest, HCCF was purified using MabSelect PrismA (Cytiva) using 1×PBS (Teknova) for running and wash buffer, 0.1 M Citrate, pH 3.0 (Teknova) for elution and 1 M sodium citrate pH 6.0 (Teknova) for neutralization. The protocol was 10 column volumes (CV) of equilibration, HCCF loading, 10 CV of washing and 5-10 CV of elution followed by cleaning-in-place with 1 M NaOH. HCCF was loaded with a 1-min residence time. Eluted material was neutralized to a pH of roughly 4.5 and centrifuged to remove any precipitation. This material was dialyzed into 0.2 M glycine, pH 4.5 (Teknova) using a 20K molecular weight cutoff dialysis cassette (Thermo Fisher Scientific) and optionally concentrated up to 30 mg ml⁻¹ using a 50 kDa molecular weight cutoff spin device (MilliporeSigma). Final material was sterilized with a 0.22 μm filter and quantified by A280 (NanoDrop, Thermo Fisher Scientific). For rhATG, each of the four libraries were purified by Protein A separately and then equally pooled based on mass.

[0486] Purity of the protein was determined by size-exclusion—HPLC. Here, 20 μg of material at 1 mg ml⁻¹ was injected over a 300 Å, 2.7 μm, 7.8×300 mm size-exclusion column (Agilent) using a mobile phase of 25 mM phosphate, 200 mM NaCl pH 7.0 with 10% acetonitrile at 1 ml min⁻¹. The percentage of monomer was determined by integrating the product peaks and reporting the percent area corresponding to roughly 150 kDa. The product was further characterized by running 2 μg on a 12% SDS-PAGE gel under reduced and nonreduced buffering conditions and imaged after staining with SimplyBlue SafeStain (Thermo Fisher Scientific).

[0487] Protein production was performed once for each of the bioproduction runs.

[0488] Statistical Analysis

[0489] All statistical tests were performed on nonnormalized data, two-sided without adjustments to type I error rates. A significance threshold of α=0.05 was used for all statistical tests. All statistical analyses were conducted using R v.3.6.2.

[0490] For FIG. 8F, a Wilcoxon rank sum test was used to compare the minimum concentration to achieve SARS-CoV-2 live virus neutralization between convalescent plasma measurements (n=16) and rCIG measurements (n=2).

[0491] For FIG. 9B, simple linear regression was used to calculate the coefficient of determination (R²) between Zika and dengue ELISA EC₅₀ values. EC₅₀ values for all dengue serotypes were pooled for the analysis. Significance of the regression model was determined using an F-statistic with 1 and 10 degrees of freedom (d.f.). All measurements were performed in a single experiment. No power analysis was carried out to predetermine an appropriate sample size for this experiment.

[0492] For FIG. 9C, simple linear regression was used to calculate the coefficient of determination (R²) between Zika and dengue pseudotype neutralization half-maximum inhibitory concentration (IC₅₀) values. IC₅₀ values for all dengue serotypes were pooled for the analysis. Significance of the regression model was determined using an F-statistic with 1 and 10 d.f. All measurements were performed in a single experiment. No power analysis was carried out to predetermine an appropriate sample size for this experiment.

[0493] For FIG. 10D, fold improvement over IVIG, by assay (ELISA or opsonophagocytosis) was tested using a one-sample Wilcoxon signed rank test, with the null hypothesis that the median equals 1, that is, H₀=1. For each assay, all individual serotypes were pooled a single Wilcoxon signed rank test. Values for each individual serotype were generated by dividing the mean of duplicate rPIG measurements by the mean of duplicate IVIG measurements. All measurements were performed in a single experiment. No power analysis was carried out to predetermine an appropriate sample size for this experiment.

[0494] For FIG. 10E, Welch's t-tests were used to compare colony forming units (CFU) Hib per ml between test groups and d.f. were 7.87 for IVIG+rHIG/rPIG (500 mg kg⁻¹) and 7.13 for IVIG+rHIG/rPIG (200 mg kg⁻¹) in peritoneal fluid, and were 10.87 for IVIG+rHIG/rPIG (500 mg kg⁻¹) and 8.03 for IVIG+rHIG/rPIG (200 mg kg⁻¹) in blood. All measurements were performed in a single experiment. No power analysis was carried out to predetermine an appropriate sample size for this experiment.

[0495] For FIG. 11B, linear mixed effects models were used to compute P values for each of the four cell types, with group and concentration as fixed effects and PBMC donor as a random effect to account for the dependence of repeated measures: the d.f. were 31 for each of the four models. All measurements were performed in a single experiment. No power analysis was carried out to predetermine an appropriate sample size for this experiment.

[0496] For FIG. 11C and FIG. 48A-48B, Kaplan-Meier survival models were fit on time to mortality and pairwise log-rank tests were performed to compare median survival between treatment groups. All measurements were performed in a single experiment. No power analysis was carried out to predetermine an appropriate sample size for this experiment.

[0497] For FIG. 11D and FIGS. 49A-49B, linear mixed effects models were used to compute P values for trends in CD45⁺ cell counts in each of the four GVH experiments (2 PBMC donors×2 drug dosing regimens=4 experiments) with day as a fixed effect and PBMC donor as a random effect to account for the dependence of repeated measures. A Wilcoxon rank sum test was used to compare CD45⁺ cell counts on day 9 for saline negative control versus rhATG and saline negative control versus rabbit-ATG, in each of the four GVH experiments (2 PBMC donors×2 drug dosing regimens=4 experiments). No power analysis was carried out to predetermine an appropriate sample size for this experiment.

[0498] For FIGS. 23A-23C, 33A-33B, 40A-40B and 41A-41B, it was assessed whether batch-to-batch variation was more significant than the variability inherent to the assays used to make the measurements.

[0499] For rCIG pseudotype neutralization assays (FIG. 23A-23C), Feltz and Miller's asymptotic test was used to determine whether the coefficient of variation of three bioproduction batch IC₅₀ measurements (18%) was different from the coefficient of variation of eight IC₅₀ measurements on a fourth bioproduction batch (17%).

[0500] To assess batch variation in antibody sequence content, the Wilcoxon rank sum test was used to test whether the Jaccard or Morisita indices from PCR replicates from each bioproduction batch came from the same populations as the Jaccard or Morisita indices among bioproduction batches. Sequencing was performed in a single experiment. No power analysis was carried out to predetermine an appropriate sample size for this experiment.

[0501] Data Availability

[0502] Plasmid and cloning insert sequences are available on GenBank (GA1 backbone, GenBank accession number MW079271; GA1 product, GenBank accession number MW079272; synthetic amplicon insert, GenBank accession number MW079275; GA2 product, example plasmid sequence provided as GenBank accession number MW079273; PMD-4681, GenBank accession number MW079274. Sequencing data are available in the Short Read Archive under project identifier PRJNA649279.

[0503] Methods

[0504] Sourcing Human Materials

[0505] Local ethical regulations were followed and informed consent was obtained for all human sample collection.

[0506] rCIG: A contract research organization (CRO; Access Biologics, New Orleans, La., USA) recruited under sample collection protocol #PRO00026464 (Advarra, Columbia, Md., USA) approved by Institutional Review Board (IRB) and included if donors were 12-46 days (average 24 days +/−14 days) from the onset of two or more COVID-19 symptoms (fever, cough, shortness of breath, sore throat, and pneumonia). Sixty mL of whole blood was collected in ACD tubes, de-identified, and transported overnight to GigaGen for processing. 16 donors with high SARS CoV-2 Spike antigen- specific antibodies by ELISA (as described below) were included in rCIG and were predominantly Caucasian (87.5%), female (75%), aged 49 (+/−17 years), collected 21 days (+/−6 days) from onset of symptoms, and were approximately equally distributed, with 6 donors with 2 symptoms, 6 donors with 3 symptoms, and 4 donors with 4 symptoms.

[0507] rHIG: A contract research organization (BloodCenter Wisconsin, Milwaukee, Wis., USA) vaccinated two donors (Donor 1, a 26-year-old Caucasian female, and Donor 2, a 21-year-old Asian male) with PedvaxHlB vaccine (Merck, Kenilworth, N.J., USA). Leukapheresis was performed eight or nine days later to obtain PBMCs. In parallel, plasma was isolated from separate blood draws on the day of leukapheresis and prior to vaccination. ELISA was performed against Hib (Alpha Diagnostics, San Antonio, Tex., USA; see methods below) on the plasma samples to confirm a response to the vaccine as compared to plasma from the same donors prior to vaccination. Sample collection protocols were approved by IRB protocol #PRO00028063 (Medical College of Wisconsin/Froedtert Hospital IRB) to GigaGen. Informed consent was obtained from all participants and samples were shipped to GigaGen de-identified.

[0508] rPIG: A contract research organization (AllCells, Alameda, Calif., USA) vaccinated three donors (Donor 1, 57-year-old Caucasian male; Donor 2, 44-year-old Caucasian male; Donor 3, 35-year-old Caucasian/Asian male) with Pneumovax®23 vaccine (Merck, Kenilworth, N.J., USA). 60 mL blood draw was performed eight days later. Plasma and pan-B cells were isolated from whole blood (see methods below). ELISA was performed against a mixture of all 23 pneumococcal polysaccharides (Alpha Diagnostics, San Antonio, Tex., USA; see methods below) on the plasma samples to confirm response to the vaccine. Sample collection protocols were approved by IRB protocol #7000-SOP-045 (Alpha IRB, San Clemente, Calif., USA) to AllCells. Informed consent was obtained from all participants and samples were shipped to GigaGen de-identified.

[0509] Processing Human Materials

[0510] For whole blood, PBMCs and plasma were isolated using density gradient centrifugation SepMate tubes with Lymphoprep medium (StemCell Technologies, Vancouver, BC, Canada). To isolate pan-B cells from PBMCs (from either whole blood or a leukopak), the Human EasySep Pan-B Cell Enrichment Kit (StemCell, Vancouver, BC, Canada) was used. After isolation, the cells were cryopreserved using CryoStor® CS10 (StemCell Technologies, Vancouver, BC, Canada). Immediately prior to generating paired heavy and light chain libraries, cells were thawed, washed in cold DPBS+0.5% BSA, assessed for viability with Trypan blue on a disposable hemocytometer (Bulldog Bio, Portsmouth, N.H., USA) or with AOPI on a Cellometer K2 (Nexcelom Bioscience, Lawrence, Mass., USA), and then re-suspended in 12% OptiPrep™ Density Gradient Medium (Sigma, St. Louis, Mo., USA) at 5,000-10,000 cells per μl. This cell mixture was used for microfluidic encapslation as described below.

[0511] Immunization of Trianni Mouse® Mice

[0512] Local ethical regulations were followed for mouse immunizations, by Antibody Solutions IACUC (Sunnyvale, Calif., USA).

[0513] Humanized mice were engineered by Trianni (San Francisco, Calif., USA). Trianni mice were bred and obtained from Charles River Laboratories (Wilmington, Mass., USA). All mice were male and 12-15 weeks old at the start of the immunization process. Antibody Solutions (Santa Clara, Calif., USA) performed all Trianni Mouse immunizations. Local ethical regulations were followed for mouse immunizations by the Antibody Solutions IACUC. The mice were ear marked for identification by the breeder and housed in individually ventilated cages (Innovive, San Diego, Calif., USA) and racks with HEPA filtered air at a density of up to 5 mice per cage. The animal room was lighted entirely with artificial fluorescent lighting, with a controlled 12 h light/dark cycle (7 am to 7 pm light). The normal temperature and relative humidity ranges in the animal rooms were 20-22.2° C. and 30-70%, respectively. The animal rooms were set to have up to 10 air exchanges per hour. Sunnyvale municipal tap water and rodent chow (Teklad Global, Indianapolis, Ind., USA) were provided ad libitum.

[0514] rZIG: Two Trianni humanized mice were immunized consecutively weekly with Zika VLP, inactivated Dengue 1, inactivated Dengue 4, inactivated Dengue 3, then inactivated Dengue 2 with alhydrogel/muramyl dipeptide (ALD/MDP) adjuvant. Animals were checked for antibody titer and boosted with Zika VLPs without adjuvant 5 days before harvest (Antibody Solutions, Santa Clara, Calif., USA).

[0515] rhATG: Two Trianni humanized mice were immunized weekly with human thymocytes from 5 de-identified specimens acquired from a CRO (Vitalant Research Institute, San Francisco, Calif., USA) for 5 weeks with ALD/MDP adjuvant and boosted on week 6 without adjuvant. Three Trianni mice were immunized weekly for 5 weeks with Pan T cells (StemCell, Vancouver, Canada) in ALD/MDP isolated from PBMCs from 1 de-identified donor (StemCell), checked for an elevated antigen-specific antibody titer, and boosted with the same cells 5 days before harvest without adjuvant (Antibody Solutions, Santa Clara, Calif., USA).

[0516] After sacrifice, spleen, lymph nodes, and/or bone marrow were harvested and processed into a single cell suspension. Samples from multiple mice were pooled together by tissue and pan-B cells were isolated from spleen and lymph node tissue using the EasySep Mouse Pan-B Cell Enrichment Kit (StemCell Technologies, Vancouver, BC, Canada). CD138+ cells were isolated from bone marrow using Miltenyi CD138+ mouse microbeads (Miltenyi, Bergisch Gladbach, Germany). After isolation, the cells were cryopreserved using CryoStor® CS10 (StemCell Technologies, Vancouver, BC, Canada).

[0517] Generating Paired Heavy and Light Chain Libraries

[0518] Generation of scFv libraries from antibody-producing cells (Adler et al., 2017) comprises three steps: (i) poly(A)+mRNA capture, (ii) multiplexed overlap extension reverse transcriptase polymerase chain reaction (OE-RT-PCR), and (iii) nested PCR. Briefly, a microfluidic device captures single cells in droplets with a mixture of lysis buffer and oligo dT beads (NEB, Ipswich, Mass., USA). After the cell is lysed and mRNA is bound to the bead, the emulsion is broken, and the mRNA-containing beads are purified. Next, an emulsion is created using OE-RT-PCR reagents and the beads as template. The emulsion is subjected to thermal cycling which creates cDNA, amplifies the IgK and IgG variable regions, and links them together in an scFv format. Then the emulsion is broken and the linked scFv DNA product is extracted and purified. The purified scFv product is then amplified using nested PCR to remove artifacts and add adapter sequences. Depending on the adapter sequences, the product can be used for deep sequencing, yeast display libraries, or full-length CHO expression.

[0519] To convert the scFv libraries into full-length CHO expression libraries, nested outer PCR primers were first used to add adapters with overhangs for Gibson assembly to the 5′ and 3′ ends of the scFv library (for rCIG, this was done after yeast scFv display enrichment, as described in the next section). Then NEBuilder HiFi DNA Assembly Master Mix (NEB, Ipswich, Mass., USA) was used to insert the scFv library into a vector containing a single promoter, a secretory leader sequence for light chain Ig and the remainder of the IgG1 constant region, creating a cloned scFv library. This intermediate library was transformed into E. coli and plasmids were purified by either (a) spreading onto LB-ampicillin plates, scraping 0.5-1 million colonies and pooling or (b) inoculating directly into LB-ampicillin broth and growing overnight. Plasmid purification was performed using ZymoPURE II Plasmid Maxiprep Kits (Zymo Research, Irvine, Calif., USA). To create the full-length antibody library, a second Gibson assembly was performed by linearizing the product of GA1 with BamHI-HF (rHIG) or NheI-HF (rCIG, rPIG, rhATG, and rZIG) (NEB, Ipswich, Mass., USA) and using it as a vector to insert a synthetic amplicon containing a portion of the light chain Ig constant region, a poly(A) signal for light chain Ig, a promoter for the IgG gene and a secretory leader sequence for the IgG gene. The full-length library was then transformed into E. coli and spread on LB-ampicillin plates. >0.5 million colonies were combined and plasmid with a ZymoPURE II Plasmid Maxiprep Kits (Zymo Research, Irvine, Calif., USA) was purified to make the full-length recombinant hyperimmune maxiprep library for transfection. When the transformed E. coli were inoculated directly into LB-ampicillin broth, a small volume of cells was plated to calculate the total number of transformants. In some cases ampicillin was used for both plates and broth, in other cases carbenicillin was used instead. Paired heavy and light chain libraries were made only once from each sample.

[0520] Enrichment for Antigen Binders by Yeast scFv Display

[0521] Polyclonal COVID-19 scFv libraries were sorted (Adler et al., 2017) to enrich for relevant sequences. Briefly, yeast surface display scFv libraries were generated using COVID-19 scFv DNA libraries and a custom yeast surface display vector transformed by electroporation into EBY100 yeast strain (MYA-4941; ATCC, Manassas, Va., USA). Surface displayed scFv sequences include a C-terminal myc tag to identify scFv expression with an anti-myc primary (A21281; Thermo Fisher Scientific, Waltham, Mass., USA) and AF488 secondary antibody (A11039; Thermo Fisher Scientific, Waltham, Mass., USA). Binding to antigen was identified by staining with soluble biotinylated SARS CoV-2 receptor binding domain antigen (SPD-C82E9; Acro Biosystems, Newark, Del., USA) at 1200 nM and APC-streptavidin (SA1005; Thermo Fisher Scientific, Waltham, Mass., USA). Stained yeast libraries were sorted on a FACSMelody (BD Biosciences, San Jose, Calif., USA) and double positive (AF488+/APC+) cells were collected. The gating strategy is outlined in Supplementary FIG. S2. The collected cells were expanded and sorted again to further enrich the libraries. After the second round of sorting, cells were expanded a third time prior to plasmid isolation with a Zymoprep Yeast Plasmid Miniprep kit (Zymo Research, Irvine, Calif., USA). The plasmid libraries were then used as template for barcoding PCR and subsequent analysis by deep sequencing (Illumina, San Diego, Calif., USA). Plasmid from twice-sorted libraries was used as template for PCR towards full-length CHO antibody expression. Yeast scFv sorting was performed only once from each yeast scFv library.

[0522] Cell Line Used for rHIG and rhATG

[0523] The adherent Flp-In™-CHO cell line with a genetically integrated FRT site (Thermo Fisher Scientific, Waltham, Mass., USA) was adapted to suspension culture. For all steps in the adaptation process, “Ham's F-12” refers to Ham's F-12 (with L-glutamine, Thermo Fisher Scientific, Waltham, Mass., USA) plus 10% FBS (Thermo Fisher Scientific, Waltham, Mass., USA), and “BalanCD” refers to BalanCD CHO Growth A (Irvine Scientific, Santa Ana, Calif., USA) with 4 mM Glutamax (Thermo Fisher Scientific, Waltham, Mass., USA). To adapt this cell line to suspension, the cells were first passaged into a mixture of 50% Ham's F-12 plus 50% BalanCD in T-flasks. Cells were next passaged into 25% Ham's F-12 plus 75% BalanCD and switched to shaking Erlenmeyer flasks. Cells were then passaged into 10% Ham's F-12, 90% BalanCD+0.2% anti-clumping agent (Irvine Scientific, Santa Ana, Calif., USA) and banked for future use.

[0524] Approximately 100 million of the adapted Flp-In CHO cells were transfected per recombinant hyperimmune globulin library using an Amaxa Nucleofector 4D (SG buffer, pulse DU133; Lonza, Basel, Switzerland). These cells were plated into shaking Erlenmeyer flasks and recovered in an incubator at 37° C., 5% CO₂, 125 rpm. After 48 hours, the cells were counted to determine viability, cells were seeded at 1 million cells/mL, and selection was started using 600 μg/mL Hygromycin-B (Gemini Bio, West Sacramento, Calif., USA) in fresh media. Cells were counted and media was changed every 2-3 days during the 7-day selection. The libraries were kept on 600 μg/mL Hygromycin-B (Gemini Bio, West Sacramento, Calif., USA) during expansion until viability exceeded 95%. When cells were >95% viable and doubling every 24 hours, the adapted Flp-In™-CHO cell line was banked for liquid nitrogen storage. Before banking, cells were sampled from each library, RNA was purified, and antibody RNA-seq (Illumina, San Diego, Calif., USA) was performed to assess the diversity of the libraries (Table 13 and 17).

[0525] Cell Line Used for rPIG, rZIG, and rCIG

[0526] A landing pad construct (FIG. 13E, PMD-4681; GenBank accession number MW079274) was designed and cloned at GigaGen. PMD-4681 was based on pFRT-lacZeo (Thermo Fisher Scientific, Waltham, Mass., USA), with some modifications. In place of the LacZ expression construct a cassette was inserted coding for expression of CD34 and GFP. The CD34, GFP, and downstream Zeocin resistance genes (ZeoR present in pFRT-lacZeo) were separated by 2A motifs (T2A or P2A) to allow for translation of three separate polypeptide chains. The CD34 sequence was sourced as a gBlock from IDT (Coralville, Iowa, USA). The GFP sequence was sourced from ATUM (DasherGFP; Newark, Calif., USA).

[0527] The GMP suspension CHO line CHOZN® GS−/− was obtained from MilliporeSigma (St. Louis, Mo., USA). PMD-4681 was linearized using ScaI-HF and purified via ethanol precipitation. Cells were transfected with the linearized DNA using Amaxa Nucleofector 4D, SE kit, pulse CM-150 (Lonza, Basel, Switzerland). Cells recovered overnight in an incubator and were plated the next day into minipools at approximately 5,000 cells per well, across ten 96-well plates in selective media. The remaining cells were plated and selected together as a bulk pool control. Wells were topped off with fresh media every seven days until at least 80% confluency was reached.

[0528] A total of 236 minipools grew out and were screened in parallel for high GFP expression via flow cytometry and low copy number with a quantitative PCR Copy Number Variation (CNV) assay. Minipools with a copy number less than 2.5 and GFP expression at least 50% of the bulk pool were expanded into shaking adaptation. Expanded pools were re-tested for GFP expression via flow cytometry.

[0529] Cells were then adapted to BalanCD CHO Growth A in preparation for plating into semi-solid media. Minipools were deemed fully adapted when cells showed consistent doubling times and high viability (>90%). Adapted cells were plated into semisolid media for the Molecular Devices (Fremont, Calif., USA) ClonePix3 single cell cloning platform. Single cell imaging was obtained on day 0 of cell plating in semisolid media to confirm monoclonality. After 14 days, clonal cell colonies were picked and deposited as one colony per well of a 96-well plate. Each clone was then expanded, re-adapted to selection media, and cryopreserved. Doubling times were calculated and clones with less than a 30-hour doubling time were chosen for further development. Expanded clones were retested for GFP expression and copy number.

[0530] Remaining clones were transfected in duplicate using the Gene Pulser Xcell Total System (BioRad, Hercules, Calif., USA) per guidelines from MilliporeSigma (St. Louis, Mo., USA) for use with CHOZN GS with a monoclonal antibody (mAb)-cyan fluorescent protein (FrostyCFP, ATUM, Newark, Calif., USA) construct to test expression titer. CFP expression was evaluated via flow cytometry 3 days post transfection to confirm transfection efficiency >35%. After full selection and recovery, cell lines were tested in a 10-day fed batch TPP shaking production run in duplicate. Titers for candidate cell lines ranged from 50-100 mg/L. A single clone (CSS-1286) was selected to use for recombinant hyperimmune expression.

[0531] For transfection of recombinant hyperimmune globilins into CSS-1286, approximately 50 million cells were transfected per recombinant hyperimmune globulin library using the BioRad Gene Pulser Xcell Total System (Hercules, Calif., USA), per guidelines from MilliporeSigma (St. Louis, Mo., USA) for use with CHOZN GS. The cells were plated into T-75 flasks (approximately 10 million cells per flask) and recovered in an incubator at 37° C., 5% CO₂ for 72 hours. After 72 hours, the cells were counted to determine viability and then seeded into 100 mL fresh media without glutamine (EX-CELL CD CHO Fusion, MilliporeSigma, St. Louis, Mo., USA) in a 500 mL Erlenmeyer flask. Cells were counted and media was changed every 2-3 days during the ˜14-day selection. When cells were >95% viable and doubling every 24 hours, the cell line was banked for liquid nitrogen storage. Before banking, cells were sampled from each library, RNA was purified, and antibody RNA-seq (Illumina, San Diego, Calif., USA) was performed to assess the diversity of the libraries (Tables 9, 11, 14).

[0532] Bioproduction of rHIG and rhATG RPP

[0533] Adapted Flp-In™-CHO cells stably expressing antibody libraries were grown in media consisting of 90% BalanCD CHO Growth A Medium (Irvine Scientific, Santa Ana, Calif., USA), 9% Ham's F-12 (Thermo Fisher Scientific, Waltham, Mass., USA), 1% FBS (Thermo Fisher Scientific, Waltham, Mass., USA), 4 mM Glutamax (Thermo Fisher Scientific, Waltham, Mass., USA), 0.2% anti-clumping agent (Irvine Scientific, Santa Ana, Calif., USA), 600 μg/mL Hygromycin-B (Gemini Bio, West Sacramento, Calif., USA). Protein production was performed at either small (250 mL) or medium (5 L) scale. For small-scale production, cells were seeded at 1×10⁶ cells/mL into 50 mL media in a 250 mL Erlenmeyer flask and grown at 37° C., 5% CO₂, 125 rpm. Cells were continually grown under these conditions and supplemented with 7.5 mL CHO Feed 1 (Irvine Scientific, Santa Ana, Calif., USA) on Days 2, 4 and 7 of the production run. Supernatant was harvested on Day 8 or 9 by centrifugation followed by filtration through a 0.22 μm 250 mL filter bottle (MilliporeSigma, St. Louis, Mo., USA) with 1 μm pre-filter (MilliporeSigma, St. Louis, Mo., USA). Harvested cell culture fluid (HCCF) was stored at 4° C. (if less than 1 week) or at −80° C. (if more than one week) until Protein A purification. For medium-scale production, cells were grown in the same media. Cells were then seeded at 1×10⁶ cells/mL in 2.3 L in a 5 L flask (in duplicate; Day 0). Each flask was fed with 345 mL CHO Feed 1 (Irvine Scientific, Santa Ana, Calif., USA) on Days 2 and 4 of the culture. Cultures were harvested on Day 8 or 9. Each of the four rhATG protein libraries were produced separately.

[0534] Bioproduction of rPIG, rZIG, and rCIG RPP

[0535] CSS-1286 CHO cells stably expressing antibody libraries were grown in media without glutamine (EX-CELL CHOZN Advanced; MilliporeSigma, St. Louis, Mo., USA). Protein production was performed at either small (250 mL) or medium (5 L) scale. For small-scale production, cells were seeded at 0.5×10⁶ cells/mL into 100 mL media in a 500 mL Erlenmeyer flask and grown at 37° C., 5% CO₂, 125 rpm. Cells were continually grown under these conditions and supplemented with 15 mL CHO Feed 1 (MilliporeSigma, St. Louis, Mo., USA) on Day 3, and 10 mL CHO Feed 1 (MilliporeSigma, St. Louis, Mo., USA) on Days 6 and 8 of the production run. Starting on Day 3, glucose was measured each day and supplemented to 6 g/L if below 4 g/L. Supernatant was harvested after cell viability peak and before dropping below 90% viability between Days 9-11, centrifuged and filtered through a 0.22 μm 250 mL filter bottle (MilliporeSigma, St. Louis, Mo., USA) with 1 μm pre-filter (MilliporeSigma, St. Louis, Mo., USA). HCCF was stored at 4° C. (if less than 1 week) or at −80° C. (if more than one week) until Protein A purification. For medium-scale production, cells were grown in the same media. Cells were seeded at 0.5×10⁶ cells/mL in 2.2 L in a 5 L flask (in duplicate; Day 0). Each flask was fed with 330 mL CHO Feed 1 (MilliporeSigma, St. Louis, Mo., USA) on Day 3 and 220 mL CHO Feed 1 (MilliporeSigma, St. Louis, Mo., USA) on Days 6 and 8 of the production run. Starting on Day 3, glucose was measured each day and supplemented to 6 g/L if below 4 g/L. Cultures were harvested on Day 10-12.

[0536] RPP Protein Production and Characterization

[0537] After harvest, HCCF was purified using a 1 mL or 5 mL HiTrap MabSelect PrismA Protein A Column (GE Life Sciences, Marlborough, Mass., USA) using the following buffers: 1×PBS pH 7.0-7.4 (Teknova, Hollister, Calif., USA) for running and wash buffer, 0.1 M Citrate Buffer, pH 3.0 (Teknova, Hollister, Calif., USA) for elution buffer, 1 M Sodium Citrate, pH 6.0 (Teknova, Hollister, Calif., USA) for neutralization. The column was washed at 10 mL/min until UV was stable, then sample was injected at 5 mL/min. The column was washed with 10 column volumes at 10 mL/min. Protein was eluted using elution buffer at 5 mL/min, collecting 1 mL fractions. Fractions were then pooled. Pooled sample was neutralized slowly using 1 M Sodium Citrate to a pH of ˜5.0. Neutralized sample was centrifuged at 5000×g to remove any precipitation, then dialyzed overnight into 0.2 M glycine, pH 4.5 (Teknova, Hollister, Calif., USA) using a 20K MWCO Dialysis Cassette (Thermo Fisher Scientific, Waltham, Mass., USA). Buffer was changed once, then sample was removed, spun down to remove any precipitant, filtered through a 0.22 μm filter and quantified by A280 (NanoDrop; Thermo Fisher Scientific, Waltham, Mass., USA). For rhATG, each of the four libraries were purified by Protein A separately and then equally pooled based on mass.

[0538] Purity of the protein was determined by SEC-HPLC. 20 μg of material at 1 mg/mL was injected over a 300 Å, 2.7 μam, 7.8×300 mm size exclusion column (Agilent, Santa Clara, Calif., USA) using a mobile phase of 25 mM phosphate, 200 mM NaCl pH 7.0 with 10% acetonitrile at 1 mL/min. The percent monomer was determined by integrating the product peaks and reporting the percent area corresponding to ˜150 kDa. The product was further characterized by running 2 μg on a 12% SDS-PAGE gel under reduced and non-reduced buffering conditions, and imaged after staining with SimplyBlue SafeStain (Thermo Fisher Scientific, Waltham, Mass., USA).

[0539] Medium-scale Production, Polishing, and Stress Testing of rCIG

[0540] For bioreactor production at 3 L scale, a seed train protocol was devised to mimic the number of passages required for production at up to 2,000 L scale. For each bioreactor production run, a single vial of rCIG cell bank was thawed at 37° C. and the contents of the vial were transferred to 10 mL of EX-CELL CD CHO Fusion media (MilliporeSigma, St. Louis, Mo., USA). The cells were then centrifuged for 5 minutes at 500×g. The supernatant was aspirated and discarded, and the cells were re- suspended in 5 mL of EX-CELL CD CHO Fusion. The entire volume of cells was seeded into a 250 mL non-baffled, vented shake flask at a final volume of 50 mL. The shake flask was incubated at 37° C., 5% CO₂, ≥80% humidity and 125 RPM (25 mm orbital diameter). Three days post thaw the viable cell density (VCD) was 4.0-6.0×10⁶ vc/mL with a viability ≥90%. At this point the cells were passaged using EX-CELL CD CHO Fusion into a 1000 mL shake flask at a seeding density of 0.4×10⁶ vc/mL. In a similar manner, the culture was passaged once more into a 1000 mL shake flask, and then two more times into 1000 mL spinner flasks. The final passage before bioreactor inoculation was done in EX-Cell Advanced CHO Fed Batch media (MilliporeSigma, St. Louis, Mo., USA).

[0541] Three days after completing the fifth passage, three 3 L Mobius single-use bioreactors (MilliporeSigma, St. Louis, Mo., USA) were seeded using the culture. Each bioreactor was prepared with 1300 mL of EX-Cell Advanced CHO Fed Batch media and then seeded at a VCD of 0.4 ±0.1×10⁶ vc/mL. Additional media was added if required to have an initial working volume of 1600 mL. Each bioreactor was controlled using the following set points: temperature setpoint Days 0-4 setpoint 37° C.; temperature Days 4-14 setpoint 32° C.; dissolved oxygen setpoint 30%; pH Days 0-3 7.0±0.2; pH Days 3-14 7.0±0.1. EX-Cell Advanced CHO Feed (MilliporeSigma, St. Louis, Mo., USA) and Cellvento 4Feed COMP (MilliporeSigma, St. Louis, Mo., USA) were added on Days 3, 5, 7, 9, and 11. Feed volumes were determined as a percentage of the current bioreactor volume, such that EX-Cell Advanced CHO Feed was added at 4% of the volume of the bioreactor and Cellvento 4Feed COMP was added at 2% of the volume of the bioreactor. Glucose levels were monitored daily, and starting on Day 3 were maintained above 4 g/L by adding a 45% Glucose solution until levels reached 6 g/L. The bioreactors were harvested after 14 days of culture. 5-10 million cells were collected from each bioreactor for antibody repertoire sequencing (FIG. 23A-23B).

[0542] For purification and polishing, an empty column was packed with MabSelect Sure PrismA resin (Cytiva, Marlborough, Mass., USA) and equilibrated with 20 mM phosphate, 150 mM NaCl, pH 7.4. Harvested cell-culture fluid was loaded at 20-40 g/L, washed with 20 mM phosphate, 500 mM NaCl, pH 7.4 and 50 mM phosphate, pH 6.0, and eluted with 50 mM sodium acetate, pH 3.5. The pH of the Protein A eluate was adjusted to 3.5 using 1 M acetic acid and the material was subjected to a 1 hour viral hold, after which it was adjusted to pH 5 using 1 M Tris-HCl, pH 9 and filtered to remove particulate. A second column was packed with POROS XS (Thermo Fisher Scientific, Waltham, Mass., USA) cation exchange (CEX) resin and equilibrated with 50 mM sodium acetate, pH 5.0. The filtered neutralized low pH hold pool was loaded on this column at 14-21 g/L, washed with 50 mM sodium acetate, 100 mM sodium chloride, pH 5.0, and eluted over a 20 CV gradient to 50 mM sodium acetate, 400 mM sodium chloride, pH 5.0. The product eluted with several distinct peaks, of which only the first was collected. The pooled CEX eluate was diluted with 20 mM tris-acetate, pH 7.4 to <8 mS/cm, then flowed through a Sartobind Q (Sartorious, Gottingen, Germany) anion-exchange membrane. The flowthrough was concentrated using a 30K molecular weight cutoff cellulose acetate tangential flow filtration cartridge (MilliporeSigma, St. Louis, Mo., USA), then diafiltered with 200 mM glycine pH 4.5 and sterile-filtered.

[0543] For stress testing, polished rCIG at 15 mg/mL in 200 mM glycine, pH 4.5 was incubated at 40° C. for 14 days. Separately, aliquots were subjected to 3 or 25 freeze-thaw cycles in a −80° C. freezer or dry ice/ethanol bath. The stressed samples were run on SEC-HPLC and SARS CoV-2 S1 ELISA and compared to a control that was stored at 4° C.

[0544] Deep Antibody Repertoire Sequencing

[0545] Deep antibody sequencing libraries were prepared as described previously (Adler et al., 2017), quantified using a KAPA quantitative PCR Illumina Library Quantification Kit (Roche, Mannheim, Germany), and diluted to 17.5 pM. Libraries were sequenced on a MiSeq (Illumina, San Diego, Calif., USA) using a 500 cycle MiSeq Reagent Kit v2, according to the manufacturer's instructions. To make sequencing libraries, tailed-end PCR was used to add Illumina sequencing adapters to the 5′ and 3′ ends of the constructs of interest. For scFv libraries (after droplet emulsion breaking or yeast plasmid isolation), a forward read of 340 cycles was used to capture the light chain CDR3 sequence, and a reverse read of 162 cycles was used to capture the linked heavy chain CDR3 sequence. For CHO libraries, the full-length heavy chain sequence was obtained using overlapping forward and reverse reads of 251 cycles. To determine the number of antibody clones in the final CHO cell libraries and for generating the clonal cluster analysis figures, 5-10 million CHO cells were harvested prior to a production run. For the batch-to-batch variation analysis, 5-10 million CHO cells were harvested at the conclusion of the replicate production runs, and a median of 855,746 sequence reads were obtained for each sequencing library (range: 658,013 to 1,113,968).

[0546] To determine the Fc subtype of a library, the heavy chain was amplified with a primer that binds further into the constant domain to add the Illumina sequencing adapter to the 3′ end; the first 60 bp of the constant domain was sequenced to determine the subtype, which was linked to the corresponding CDR3H that was simultaneously sequenced. Each library was sequenced one time.

[0547] Sequence analysis, including error correction, reading frame identification, and FR/CDR junction calls was performed using our previously reported bioinformatics pipeline (Adler et al., 2017). Reads with E>1 (E is the expected number of errors) were discarded, to retain sequences for which the most probable number of base call errors is zero. Clones are defined as sequences with unique CDR3 amino acid sequences (CDR3K+CDR3H for scFv clones, CDR3H only for CHO clones). A more conservative clone count is also provided (combined CDR3), where unique clones were combined if they had 1 amino acid difference for 5-6 amino acid long CDR3s, or if they had 1-2 amino acid differences for >6 amino acid long CDR3s; this applies to a concatenation of CDR3K+CDR3H for scFv clones or CDR3H only for CHO clones).

[0548] For the clonal cluster analysis, USEARCH (Edgar, 2010) to compute the total amino acid differences between each pairwise alignment of full-length heavy chain sequences with abundance ≥0.01% in each CHO cell bank. Then the R package graph (version 1.2.4.1) was used to generate clustering plots for the pairwise alignments. The sequences were represented as “nodes”, with the color (and sometimes shape) defined in the respective figures. The size of the nodes reflects the frequency of the clone (small, <0.1%; medium, 0.1-1%; large, >1%). “Edges” are the links between nodes, which indicate pairwise alignments with ≤5 amino acid differences. The layout_with_graphopt (niter=3000, charge=0.03) option was used to format the output. To visualize the sequences within a library, the top five clusters containing the highest number of connected nodes/sequences were selected. These sequences were aligned and visualized as sequence logos using the R package msa 1.16.0.

[0549] To assess antibody repertoire overlap between libraries, Jaccard and Morisita indices were computed using the R package tcR (version 2.3.2). Shannon entropy and Simpson diversity indices were calculated using the R package vegan 2.5.5. Heavy chain V and J gene identities were measured using the USEARCH⁴⁹-local algorithm with the germline database as reference. For the heatmaps showing the pairing of VH and VL genes, the germline divergence histograms, and the histograms showing the distribution of heavy chain CDR3 length, each unique clone was plotted once (i.e., not scaled by sequencing read abundance).

[0550] To estimate the error rate due to RNA/cDNA amplification, a region of the heavy chain constant domain from the rCIG libraries (the region used to determine the heavy chain subtype) was sequenced, after performing the same amplification process as the final polyclonal libraries. The total error rate for this region was 0.3%, then using Illumina's quality (Q) score for each sequenced base, the estimated sequencing error rate for this region was determined to be 0.052%. Thus, the estimated maximum error rate from our amplification process is 0.3% -0.052%=0.248% (which may still contain some error due to natural sequence variation in the constant domain).

[0551] Sequencing data are available in the Short Read Archive (SRA) under project identifier PRJNA649279.

[0552] In Vitro Efficacy Studies

[0553] rCIG: Anti-SARS CoV-2 antibody reactivities were measured using a protocol based on published ELISA methods (Amanat et al., 2020). In brief, SARS CoV-2 Spike and RBD (wild type and variant proteins; Sino Biological, Wayne, Pa., USA) were used to coat ELISA plates at 2 μg/mL. Serial dilutions of antibody preparations including test plasma and recombinant products, positive control monoclonal antibodies (CR3022; Absolute Antibody, San Diego, Calif., USA, and SAD-535; Acro Biosystems, Newark, Del., USA) and negative control IVIG (Gamunex; Grifols, S.A., Sant Cugat, Spain) were performed in dilution buffer (1×PBS +0.05% Tween+0.3% dry milk) in singlet. Quantitative measurements were performed on a plate reader (Molecular Devices, Fremont, Calif., USA) and analyzed using Softmax Pro (Version 7.1; Molecular Devices, Fremont, Calif., USA) to calculate the EC50 concentrations of samples. The concentration of total IgG was calculated by Cedex Bioanalyzer Human IgG assay (Roche, Mannheim, Germany).

[0554] Blocking of binding between Spike RBD and ACE2 was demonstrated by ELISA (BPS Bioscience, San Diego, Calif., USA). In brief, SARS CoV-2 Spike RBD protein was coated onto an ELISA plate, serial dilutions of test plasma and recombinant products, positive control monoclonal antibodies (CR3022; Absolute Antibody, San Diego, Calif., USA, and SAD-S35; Acro Biosystems, Newark, Del., USA) and negative control IVIG (Gamunex; Grifols, S.A., Sant Cugat, Spain) were performed in singlet in dilution buffer (1×PBS+0.05% Tween+0.3% dry milk). After incubation, ACE2-His was added at 2.5 ng/mL. After further incubation, anti-His-horseradish peroxidase was added. The plate was developed for a chemiluminescent readout. Quantitative measurements were performed on a plate reader (Molecular Devices, Fremont, Calif., USA) and analyzed using Softmax Pro (Version 7.1; Molecular Devices, Fremont, Calif., USA) to calculate the EC50 concentrations of samples.

[0555] The SARS CoV-2 pseudotype virus neutralization assay was performed in a 96-well plate using ACE2 expressing HEK-293T target cells (CRL-11268; ATCC, Manassas, Va., USA) transiently transfected with TMPRSS-2 expression plasmid. The GFP reporter pseudotype virus expressing SARS-CoV-2 spike (Integral Molecular, Philadelphia, Pa., USA) was mixed with test plasma, test rCIG, positive control monoclonal antibodies (CR3022; Absolute Antibody, San Diego, Calif., USA, and SAD- S35; Acro Biosystems, Newark, Del., USA) and negative control IVIG (Gamunex; Grifols, S.A., Sant Cugat, Spain) at a five-fold dilution series in singlet. After one-hour incubation, 4×10⁴ cells target cells were added to each well and incubated at 37° C. for 48 hours. After incubation, the media was removed from all wells without disturbing the adherent cells. TrypLE (Thermo Fisher Scientific, Waltham, Mass., USA) was added to each well and incubated for 3 minutes at 37° C. Media was added to stop trypsinization and cells were stained with DAPI and passed through a 30-40 μm filter (Pall Corporation, Port Washington, N.Y., USA) before quantifying GFP+cells using a Cytoflex LX (Beckman Coulter, Indianapolis, Ind., USA). Flow cytometry data were analyzed by FlowJo (BD Biosciences, San Jose, Calif., USA).

[0556] SARS CoV-2 microneutralization assays were performed at the Regional Biocontainment Laboratory at Duke University Medical Center (Durham, N.C., USA) in a 96-well plate format using Vero E6 cells (CRL-1586; ATCC, Manassas, Va., USA) infected with 100 TCID50 dose of the 2019-nCoV/USA-WA1/2020 strain. Test and control samples were initially diluted to 1:50, then a 12-step, two-fold serial dilution of test antibodies was performed before infection of the cells; every test or control was run in duplicate. IVIG (Gamunex; Grifols, S.A., Sant Cugat, Spain) was used as negative control. Cell-only control wells were included alongside virus-only treated wells. Following 4 days of infection, culture media was removed, and cell monolayer was fixed with 10% neutral buffered formalin (NBF) and stained with 0.1% Crystal Violet. Absorbance at 590 nm or visual inspection was used to measure the monolayer condition/level of infection. Neutralization was reported as the lowest concentration of sample that prevents cytopathic effect in the monolayer of cells.

[0557] rZIG: Zika- and Dengue-specific antibodies were measured by ELISA. A 96-well microtiter plate was coated with either 2 μg/ml Zika or Dengue Serotype 1, 2, 3, or 4 recombinant envelope proteins (ProSpec Bio, East Brunswick, N.J., USA) in 1× carbonate coating buffer (BioLegend, San Diego, Calif., USA) and incubated overnight at 4° C. After blocking the coated plate with ultrablock buffer (Bio-Rad, Hercules, Calif., USA) and washing with PBS+0.05% Tween-20 (Teknova, Hollister, Calif., USA), eight-step three-fold serial dilutions in assay buffer (1×PBS+0.05% Tween+0.3% dry milk) were performed on rZIG-IgG1, rZIG-LALA, Zika/Dengue+serum positive control (Seracare, Milford, Mass., USA), and a negative control IVIG (Gamunex; Grifols, S.A., Sant Cugat, Spain). Dilutions were added in duplicate and incubated at 37° C. for 1 hour. Next, 1:2500 secondary rabbit anti-human IgG horseradish peroxidase conjugate (Southern Biotech 6140-05, Birmingham, Ala., USA) was added, and the plate was washed and developed using 3,3′,5,5′-tetramethylbenzidine (TMB) substrate solution (Thermo Fisher Scientific, Waltham, Mass., USA). The reaction was halted after 8 minutes using sulfuric acid stopping solution (Southern Biotech, Birmingham, Ala., USA). Quantitative absorbance measurements were performed on a SpectraMax i3x plate reader (Molecular Devices, Fremont, Calif., USA) at 450 nm and 620 nm. Standard curves (OD450-620) were artificially set to max out at 2.97 absorbance value. EC50 values were calculated by non-linear regression analysis using GraphPad Prism v8 (San Diego, Calif., USA).

[0558] Zika and Dengue in vitro pseudotype neutralization assays were performed at Vitalant Research Institute (VRI, San Francisco, Calif., USA). rZIG, a Zika/Dengue-specific immune sera (UWIS; de-identified sample screened positive for Zika and Dengue 1-4 by University of the West Indies), monoclonal antibody positive control (UWI-mAbl; IgG1 isotype cloned from de-identified donor by University of the West Indies, found to be cross-reactive to Zika and Dengue 1-4), and IVIG negative control (Gamunex; Grifols, S.A., Sant Cugat, Spain) were co-incubated with reporter virus particles (RVPs; Integral Molecular, Philadelphia, Pa., USA) expressing both luciferase and flavivirus-specific glycoproteins as previously described. Briefly, BHK/DC-SIGN cells (CRL-325; ATCC, Manassas, Va., USA) were seeded in black 96-well plates and then incubated with a 7-step, 3-fold serial dilution of antibodies pre-incubated for one hour at 37° C. with RVPs and tested in duplicate. After 72 hours cells were lysed and luciferase activity measured using lysis buffer and firefly luciferase substrate following manufacturer's guidelines (Promega, Madison, Wis., USA). Infection-induced relative light units (RLU) in the presence of test articles were calculated as the RLU of the test article divided by the RLU of a no-serum control infection. The amount of protein required to inhibit 50% of the maximum untreated Zika or Dengue RLUs (IC50) was calculated by non-linear regression analysis using GraphPad Prism v8 (San Diego, Calif., USA).

[0559] Zika pseudotype assays for in vitro antibody-dependent enhancement (ADE) were performed at VRI. rZIG, the Zika/Dengue-specific immune sera UWIS, the monoclonal antibody positive control UWI-mAbl, and IVIG negative control (Gamunex; Grifols, S.A., Sant Cugat, Spain) were serially diluted and co-incubated with Zika pseudotype RVPs at 37° C. for 1 hour before addition to K562 chronic myelogenous leukemia cells (CCL-243; Manassas, Va., USA) in U-bottom 96-well plates in triplicate. After a 72 hour incubation at 37° C., cells were harvested, lysed, and infection-induced relative light units (RLU) in the presence of test articles were calculated as the RLU of the test article divided by the RLU of a no antibody control infection (to determine the reported fold-increase in infection).

[0560] rHIG: The Human Anti-Hib-PRP IgG ELISA kit (#980-100-PHG, Alpha Diagnostics, San Antonio, Tex., USA) was used for anti-Hib ELISA titers. Serial dilutions of test articles were performed in Low NSB (non-specific binding) sample diluent in singlet. IVIG (Gamunex; Grifols, S.A., Sant Cugat, Spain) was used as a reference control. Quantitative measurements were performed on a plate reader (Molecular Devices, Fremont, Calif., USA) at 450 nm. EC50 values were calculated using SoftMax Pro v8 (Molecular Devices, Fremont, Calif., USA).

[0561] In vitro serum bactericidal assay neutralization studies for Hib were performed at ImQuest (Frederick, Md., USA). The Haemophilus influenzae strain ATCC 10211 was obtained from ATCC (Manassas, Va., USA) as a lyophilized stock and was propagated as recommended by the supplier. The Eagan strain was obtained from Zeptometrix (Buffalo, N.Y., USA). Colonies from an overnight incubation on chocolate agar plates were inoculated into growth media (Brain Heart Infusion, or BHI broth; BD Biosciences, San Jose, Calif., USA, with 2% Fildes enrichment; Remel, San Diego, Calif., USA) and allowed to achieve an optical density of 625 nm (OD₆₂₅) of approximately 0.4. The culture was adjusted to an OD625 of 0.15, which is equivalent to approximately 5×10⁸ colony forming units (CFU)/mL. The culture was further diluted to 5×10⁴ CFU/mL in dilution buffer (Hanks Balanced Salt Solution; Gibco, Waltham, Mass., USA, with 2% Fildes enrichment; Remel, San Diego, Calif., USA). The density of the bacterial culture used in the assay was confirmed by plating 50 μL of the 5×10³ and 5×10² dilutions in duplicate on chocolate agar and enumerating the colonies following incubation at 37° C/5% CO2 for 24 hours. rHIG and IVIG (Gamunex; Grifols, S.A., Sant Cugat, Spain) reference control were diluted three-fold in buffer, starting at 200 μg/mL such that a total of ten total dilutions were evaluated in singlet. 10 μL of each dilution of test article was added in duplicate to a 96-well microtiter plate. ATCC 10211 bacteria at a concentration of approximately 5×10⁴ CFU/mL were then added to the plate in a volume of 20 μL, such that the total in-well bacterial density would be 1×10⁴ CFU/20 μL. Following an incubation of 15 minutes at 37° C/5% CO2, 25 μL of baby rabbit complement (Pel-Freez; Rogers, Ark., USA) and 25 μL of dilution buffer was added to each well. The plate was incubated at 37° C/5% CO2 for 60 minutes. Following the incubation, 5 μL of each reaction mixture was diluted in 45 μL of dilution buffer and the entire 50 μL was plated on chocolate agar plates. The plates were incubated for approximately 16 hours at 37° C/5% CO2. Following incubation, bacterial colonies were enumerated. The fold-dilution of the test article that killed >50% of the bacteria is the serum bactericidal index (SBI).

[0562] rPIG: The Human Anti-S. Pneumococcal vaccine (Pneumovax/CPS23) IgG ELISA kit (Alpha Diagnostics #560-190-23G, San Antonio, Tex., USA) was used in parallel with the human anti-S. pneumoniae CWPS/22F IgG ELISA kit (#560-410-C22, Alpha Diagnostics, San Antonio, Tex., USA) for initial assessment of anti-pneumococcal titers against a pool of all 23 polysaccharides included in the vaccine.

[0563] Serotype-specific antibodies were measured by ELISA and opsonophagocytosis. The concentrations of serotype-specific IgG antibody were calculated using the standard reference serum, lot 007SP (National Institute for Biological Standards and Control; Hertfordshire, UK), using the standardized pneumococcal reference ELISA as previously described. Briefly, 96-well flat-bottomed microtiter plates were coated with capsular polysaccharide antigens (LGC Standards, Teddington, UK) from pneumococcal serotypes 1, 3, 4, 5, 6A, 6B, 7F, 9V, 12F, 14, 18C, 19A, 19F, 22F, 23F, and 33F. All samples were tested in duplicate and double absorbed with CWPS and with purified serotype 22F polysaccharide to neutralize the anti-cell wall polysaccharide and nonspecific homologous antibodies to serotype 22F, except for the 22F assay which was absorbed with CWPS Multi, as described in the WHO reference ELISA protocol. Plates were washed, and a titration of rPIG and reference control IVIG (Gamunex; Grifols, S.A., Sant Cugat, Spain) was performed. Plates were incubated and washed again, and prediluted alkaline phosphatase-conjugated goat anti-human IgG (Thermo Fisher Scientific, Waltham, Mass., USA) was added to each well. After another incubation, the plates were washed a final time and p-nitrophenyl phosphate substrate (MilliporeSigma, St. Louis, Mo., USA) was added. Following a final incubation, the reaction was stopped by adding 3 M NaOH (Thermo Fisher Scientific, Waltham, Mass., USA) to each well. Plates were read using a microtiter plate reader (SPECTROstar Omega; BMG Labtech, Buckinghamshire, UK) at 405 and 620 nm.

[0564] The opsonophagocytic indices (OI) to the same pneumococcal serotypes were evaluated by multiplexed opsonophagocytic assay, as previously described. In brief, frozen aliquots of target pneumococci were thawed, washed twice with opsonization buffer B (HBSS with Ca and Mg, 0.1% gelatin, and 10% fetal bovine serum), and diluted to the proper bacterial density (approximately 2×10⁵ CFUs/mL each serotype). Equal volumes of four bacterial suspensions chosen for simultaneous analysis were pooled. Duplicate serially diluted test articles (20 μ/well) were mixed with 10 μL of bacterial suspension in each well of a microplate. After 30 minutes of incubation at room temperature with shaking at 700 rpm, 10 μL of 3- to 4-week-old rabbit complement (Pel- Freeze, Rogers, Ark., USA) and 40 μL of differentiated HL60 cells (10⁷ cells; CCL-240, ATCC, Manassas, Va., USA) were added. Plates were incubated in a 37° C./5% CO2 incubator with shaking at 700 rpm. After being incubated for 45 minutes, plates were placed on ice for 20 minutes, and an aliquot of the final reaction mixture (10 μL ) was spotted onto four different Todd-Hewitt broth with 0.5% yeast extract and 0.75% agar (THY) plate. When the fluid was absorbed into the agar, an equal volume of overlay agar containing one of four antibiotics (optochin, spectinomycin, streptomycin, or trimethoprim) was applied to each THY agar plate. After overnight incubation at 37° C., the number of bacterial colonies in the agar plates was enumerated. IVIG was used as reference control (Gamunex; Grifols, S.A., Sant Cugat, Spain). The OI was defined as the test product dilution that kills 50% of bacteria and was determined by linear interpolation.

[0565] rhATG: To assess relative amount and specificity of rhATG, an ELISA was performed on antigens known to be expressed on thymocytes and previously described as having rabbit-ATG reactivity.⁴¹ Rabbit-ATG positive control was from Sanofi Genzyme (Thymogobulin; Cambridge, Mass., USA). T cell antigens (CD3, CD4, CDS, CD7, CD8, CD16a, CD32a, CD45, CD81, CD85 CD95) were purchased from Sino Biological (Wayne, Pa., USA) and individually coated onto 96-well ELISA plates (Thermo Fisher Scientific, Waltham, Mass., USA) at 1μg/mL in lx carbonate coating buffer (BioLegend, San Diego, Calif., USA). After an overnight incubation at 4° C., coated plates were washed and blocked (Bio-Rad, Hercules, Calif., USA) for 1 hour. Polyclonal products were diluted to 200 μg/mL of total IgG and an 8-step 1:3 titration in assay buffer (1×PBS+0.05% Tween+0.3% dry milk) was performed. The antibody titrations were added to each antigen and incubated for 1 hour at 37° C. 1:2500 polyclonal HRP goat anti-rabbit IgG (E28002; Novodiax, Hayward, Calif., USA) or 1:2500 mouse anti-human IgG HRP (109-035-088; Jackson ImmunoResearch, West Grove, Pa., USA) were diluted 1:2500 and incubated on the plate for 1 hour. Plates were washed, developed using 1-step ultra TMB substrate (Thermo Fisher Scientific, Waltham, Mass., USA), and stopped with 1 N HCl. Plates were read by a spectrophotometer (Molecular Devices, Fremont, Calif., USA) at 450 nm and analyzed with Softmax Pro (v7; Molecular Devices, Fremont, Calif., USA).

[0566] To assess off-target antibody binding a red blood cell antigen binding assay was perfromed, using the Capture-R kit (Immucor, Norcross, Ga., USA). Using a dilution of test article (Thymoglobulin or rhATG) or positive control from the Immucor kit, samples were added to the plate and incubated for 1 hr at 37° C. in singlets. ELISA plates were washed and incubated with 1:2500 polyclonal HRP goat anti-rabbit IgG (E28002; Novodiax, Hayward, Calif., USA) or 1:2500 mouse anti-human IgG HRP (109-035-088; Jackson ImmunoResearch, West Grove, Pa., USA). Subsequently, plates were washed and developed with ultra-TMB substrate (Thermo Fisher Scientific, Waltham, Mass.) and the reaction was stopped with 3 M NaOH (Thermo Fisher Scientific, Waltham, Mass., USA) and read the plate on a spectrophotometer at 450 nm.

[0567] To determine in vitro function of rhATG, peripheral blood mononuclear cells were isolated from whole blood acquired from a CRO (StemCell Technologies, Vancouver, Canada) and frozen. PBMCs were thawed, washed, and plated at 1.5×10⁵ cells/well in singlets. Thymoglobulin or rhATG were diluted five-fold starting at 40 μg/mL total IgG and co-incubated with each donor PBMC. Cells were co-incubated overnight at 37° C. After incubation, cells were washed, FcR blocked, and stained for CD45 (clone H130; BioLegend #304008, San Diego, Calif., USA), CD3 (clone UCHT1; BioLegend #300439, San Diego, Calif., USA), CD8 (clone BW135/80; Miltenyi #130-113-157, Bergisch Gladbach, Germany), CD20 (clone 2H7; BioLegend, San Diego, Calif.), CD56 (clone 5.1H11; BioLegend #362509, San Diego, Calif., USA), and CD16 (clone 3G8; BioLegend #302017, San Diego, Calif., USA). 1 μL of each antibody was used per 1.5×10⁵ cells. Flow cytometry was performed using a Cytoflex LX (Beckman Coulter, Indianapolis, Ind., USA) with CytExpert (2.3.1.22) and a consistent collection volume of 150 seconds per well was implemented for every sample. The data were analyzed by FlowJo v10 (BD Biosciences, San Jose, Calif., USA). Cell counts after antibody co-incubation relative to no-antibody control (% cells) were calculated. Results were graphed in GraphPad Prism v8 (San Diego, Calif., USA). The gating strategy is outlined in FIG. 50A.

[0568] In Vivo Mouse Efficacy Studies

[0569] Ethical approval was obtained by Institutional Animal Care and Use Committees (IACUCs) at either SSI (Copenhagen, Denmark) for the Hib challenge model or Jackson Laboratory (Sacramento, Calif., USA) for the GVH model.

[0570] IVIG+rHIG/rPIG: For IVIG+rHIG/rPIG in vivo challenge studies, the Haemophilus influenza strain ATCC 10211 was grown on chocolate agar plates overnight at 35° C. and 5% CO2. Single overnight colonies were resuspended in sterile saline to 1.5×10⁸ CFU/mL. This suspension was diluted in BHI broth to 1.5×10⁷ CFU/mL and further diluted in BHI broth with 5% mucin and 2% hemoglobin to 1.5×10⁴ CFU/mL. In an IACUC-approved protocol (SSI, Copenhagen, Denmark), Balb/cJ mice (Taconic, Rensselaer, N.Y., USA; n=6 per group) were inoculated with single 0.5 mL intraperitoneal doses of 10⁵ CFU/mL ATCC 10211, and then randomized into treatment groups by animal identifier. All mice were female, age 6-8 weeks. The temperature and humidity were registered daily in the animal facilities. The temperature was 22° C. +/−2° C. and can be regulated by heating and cooling. The humidity was 55+/−10%. The air changes per hour were approximately 8-12 times (70-73 times per hours inside cages), and light/dark period was in 12-hours interval of 6 am-6 pm/6 pm-6 am. The mice had free access to domestic quality drinking water and food (Teklad Global diet 2916C, Envigo, Indianapolis, Ind., USA) and occasionally peanuts and sunflower seeds (Koge Korn A/S, Koge, Denmark). The mice were housed in IVC cages, 6-8 mice per cage, with bedding from Tapvei. Further, the animals were offered Enviro-Dri nesting material and cardboard houses (Bio-Serv, Flemington, N.J., USA).

[0571] Approximately 1 hour before inoculation, mice were treated orally with 45 μL Nurofen (30 mg/kg) as pain relief. Twenty-four hours prior to Hib inoculation, mice were intravenously administered 200 mg/kg IVIG+rHIG/rPIG mixture, 500 mg/kg IVIG+rHIG/rPIG mixture, 500 mg/kg IVIG (Gamunex; Grifols, S.A., Sant Cugat, Spain), or saline (no treatment). For the ciprofloxacin positive control, one hour after Hib inoculation, mice were dosed with 20 mg/kg ciprofloxacin. Mice were scored for clinical signs of infection, then after 6 hours all animals were sacrificed and blood and peritoneal fluid was collected for CFU determination by serial dilution and plating of 0.02 ml spots on chocolate agar plates.

[0572] rhATG was tested for ability to delay GVHD in immunodeficient NOD scid gamma (NSG) mice (genotype: NOD.Cg-Prkdc^{scid}Il2rg^{tm1Wjl}/SzJ), compared against rabbit-ATG (Thymoglobulin; Sanofi Genzyme, Cambridge, Mass.) and a vehicle control. All mice were female, age 6-8 weeks. The mice were ear notched for identification and housed in individually ventilated polysulfonate cages with HEPA filtered air at a density of up to 5 mice per cage. The animal room was lighted entirely with artificial fluorescent lighting, with a controlled 12 hour light/dark cycle (6 am to 6 pm light). The normal temperature and relative humidity ranges in the animal rooms were 22-26° C. and 30-70%, respectively. The animal rooms were set to have up to 15 air exchanges per hour. Filtered tap water, acidified to a pH of 2.5 to 3.0, and standard rodent chow was provided ad libitum.

[0573] Each animal was grafted with approximately 1×10⁷ PBMC of a single human donor. On Day 5 after PBMC engraftment, animals were randomized by weight and dosed intravenously every other day for two weeks with 5.5 mg/kg rhATG (n=8), 6.5 mg/kg Thymoglobulin (n=8), or a vehicle control (n=8), or Days 5, 6, and 7 post- engraftment with 5.5 mg/kg rhATG (n=8), 6.5 mg/kg Thymoglobulin (n=8), or a vehicle control (n=8). Two PBMC donors were tested for each dosing regimen (2 PBMC donors×2 dosing regimens×3 treatment groups×8 animals per group=96 animals). Animals were assessed for clinical signs of mortality daily. Mice were euthanized by CO2 asphyxiation before final study take down if they showed >20% weight loss from their starting weight or a combination of the following clinical signs: >10-20% weight loss from their starting weight, cold to touch, lethargic, pale, hunched posture and scruffy coat. 50 μL of blood was drawn from all alive animals on Days 9,16, 23, and 30 post-engraftment via retro-orbital bleed, and flow cytometry stained for Human (hu)CD45-PE (clone HI30; BioLegend #304008, San Diego, Calif., USA) and 7AAD (BioLegend, San Diego, Calif., USA); 50 μL of CountBright beads (Thermo Fisher Scientific, Waltham, Mass., USA) were added to each sample prior to acquisition. Flow cytometric data acquisition was performed using the BD Biosciences FACSCanto flow cytometer (San Jose, Calif., USA), and data were acquired and analyzed using BD Biosciences FACSDiva™ software (version 8; San Jose, Calif., USA); lymphocytes, singlet, live cells, and CD45+ cells were gated and cell numbers quantified relative to CountBright beads. The gating strategy is outlined in FIG. 50B.

### 9. INCORPORATION BY REFERENCE

[0574] All publications, patents, patent applications and other documents cited in this application are hereby incorporated by reference in their entireties for all purposes to the same extent as if each individual publication, patent, patent application or other document were individually indicated to be incorporated by reference for all purposes.

### 10. EQUIVALENTS

[0575] Whereas various specific embodiments have been illustrated and described, the above specification is not restrictive. It will be appreciated that various changes can be made without departing from the spirit and scope of the invention(s). Many variations will become apparent to those skilled in the art upon review of this specification.

The application's sequence listing, which the Patent Office published only in electronic form, follows.

SEQUENCE LISTING (25860 sequences)

SEQ ID NO: 1 - protein, 9 aa, Homo sapiens
  Light chain CDR3 for antibody 1 (IGKV5-2)
LQHDNFPWT

SEQ ID NO: 2 - protein, 13 aa, Homo sapiens
  Heavy chain CDR3 for antibody 1 (IGHV4-34)
ASNFYYYYYGMDV

SEQ ID NO: 3 - protein, 9 aa, Homo sapiens
  Light chain CDR3 for antibody 2 (IGKV1-9)
QQLNSYPLT

SEQ ID NO: 4 - protein, 13 aa, Homo sapiens
  Heavy chain CDR3 for antibody 2 (IGHV4-59)
ARDAGYSSSWFDY

SEQ ID NO: 5 - protein, 9 aa, Homo sapiens
  Light chain CDR3 for antibody 3 (IGKV1-17)
LQHNSYPYT

SEQ ID NO: 6 - protein, 11 aa, Homo sapiens
  Heavy chain CDR3 for antibody 3 (IGHV3-33)
ARDRSSGPFDY

SEQ ID NO: 7 - protein, 9 aa, Homo sapiens
  Light chain CDR3 for antibody 4 (IGKV6-21)
HQSSSLPYT

SEQ ID NO: 8 - protein, 16 aa, Homo sapiens
  Heavy chain CDR3 for antibody 4 (IGHV3-23)
AKEGMVLRYFDWLWDY

SEQ ID NO: 9 - protein, 9 aa, Homo sapiens
  Light chain CDR3 for antibody 5 (IGKV1-16)
QQYNSYPYT

SEQ ID NO: 10 - protein, 18 aa, Homo sapiens
  Heavy chain CDR3 for antibody 5 (IGHV4-59)
AREGDYVWGSYRPNWFDP

SEQ ID NO: 11 - protein, 9 aa, Homo sapiens
  Light chain CDR3 for antibody 6 (IGKV1-39)
QQSYRTPLT

SEQ ID NO: 12 - protein, 13 aa, Homo sapiens
  Heavy chain CDR3 for antibody 6 (IGHV3-11)
ARDGGAAAGTWDS

SEQ ID NO: 13 - protein, 9 aa, Homo sapiens
  Light chain CDR3 for antibody 7 (IGKV5-2)
LQHDNFPYT

SEQ ID NO: 14 - protein, 14 aa, Homo sapiens
  Heavy chain CDR3 for antibody 7 (IGHV3-23)
AKSRIVGALYYFDY

SEQ ID NO: 15 - protein, 9 aa, Homo sapiens
  Light chain CDR3 for antibody 8 (IGKV5-2)
LQHDNFPWT

SEQ ID NO: 16 - protein, 13 aa, Homo sapiens
  Heavy chain CDR3 for antibody 8 (IGHV4-39)
ARQWPSGYWYFDL

SEQ ID NO: 17 - protein, 9 aa, Homo sapiens
  Light chain CDR3 for antibody 9 (IGKV5-2)
LQHDNFPWT

SEQ ID NO: 18 - protein, 13 aa, Homo sapiens
  Heavy chain CDR3 for antibody 9 (IGHV4-39)
ARREVVGGRGFDY

SEQ ID NO: 19 - protein, 9 aa, Homo sapiens
  Light chain CDR3 for antibody 10 (IGKV1D-16)
QQYNSYPFT

SEQ ID NO: 20 - protein, 11 aa, Homo sapiens
  Heavy chain CDR3 for antibody 10 (IGHV4-59)
AREMGHDTFDI

SEQ ID NO: 21 - protein, 9 aa, Homo sapiens
  Light chain CDR3 for antibody 11 (IGKV1-16)
QQYNSYPYT

SEQ ID NO: 22 - protein, 18 aa, Homo sapiens
  Heavy chain CDR3 for antibody 11 (IGHV1-46)
ARDGDYVWGSYRSDWFDP

SEQ ID NO: 23 - protein, 9 aa, Homo sapiens
  Light chain CDR3 for antibody 12 (IGKV3-20)
QQYGSSPLT

SEQ ID NO: 24 - protein, 12 aa, Homo sapiens
  Heavy chain CDR3 for antibody 12 (IGHV1-18)
ARILFYGDYFDY

SEQ ID NO: 25 - protein, 9 aa, Homo sapiens
  Light chain CDR3 for antibody 13 (IGKV1D-16)
QQYNSYPLT

SEQ ID NO: 26 - protein, 15 aa, Homo sapiens
  Heavy chain CDR3 for antibody 13 (IGHV3-30)
ARGAMVRGVDYGMDV

SEQ ID NO: 27 - protein, 9 aa, Homo sapiens
  Light chain CDR3 for antibody 14 (IGKV1D-16)
QQYHSYPYT

SEQ ID NO: 28 - protein, 12 aa, Homo sapiens
  Heavy chain CDR3 for antibody 14 (IGHV1-46)
ARGLTGDHAVDI

SEQ ID NO: 29 - protein, 9 aa, Homo sapiens
  Light chain CDR3 for antibody 15 (IGKV1-6)
LQDYNYPYT

SEQ ID NO: 30 - protein, 9 aa, Homo sapiens
  Heavy chain CDR3 for antibody 15 (IGHV1-18)
ARGKDWFDP

SEQ ID NO: 31 - protein, 9 aa, Homo sapiens
  Light chain CDR3 for antibody 16 (IGKV1D-16)
QQYNSFPLT

SEQ ID NO: 32 - protein, 16 aa, Homo sapiens
  Heavy chain CDR3 for antibody 16 (IGHV4-59)
ARGRYFEWLLGDVFDI

SEQ ID NO: 33 - protein, 9 aa, Homo sapiens
  Light chain CDR3 for antibody 17 (IGKV1-27)
QKYNSAPYT

SEQ ID NO: 34 - protein, 14 aa, Homo sapiens
  Heavy chain CDR3 for antibody 17 (IGHV3-33)
ARGAAAGNFYGLDV

SEQ ID NO: 35 - protein, 9 aa, Homo sapiens
  Light chain CDR3 for antibody 18 (IGKV1-6)
LQDYNYPRT

SEQ ID NO: 36 - protein, 17 aa, Homo sapiens
  Heavy chain CDR3 for antibody 18 (IGHV1-18)
ARDRAFTMVRGVPPFDY

SEQ ID NO: 37 - protein, 9 aa, Homo sapiens
  Light chain CDR3 for antibody 19 (IGKV1-6)
LQDYNYPYT

SEQ ID NO: 38 - protein, 17 aa, Homo sapiens
  Heavy chain CDR3 for antibody 19 (IGHV1-18)
ARDEGYDILTGYPHFDY

SEQ ID NO: 39 - protein, 9 aa, Homo sapiens
  Light chain CDR3 for antibody 20 (IGKV1-6)
LQDFNYPRT

SEQ ID NO: 40 - protein, 18 aa, Homo sapiens
  Heavy chain CDR3 for antibody 20 (IGHV4-59)
AREGHYYTSGSYYKAFDY

SEQ ID NO: 41 - protein, 9 aa, Homo sapiens
  Light chain CDR3 for antibody 21 (IGKV1-39)
QQSYSTPFT

SEQ ID NO: 42 - protein, 17 aa, Homo sapiens
  Heavy chain CDR3 for antibody 21 (IGHV4-59)
ARDFLVRGEGSYYGMDV

SEQ ID NO: 43 - protein, 9 aa, Homo sapiens
  Light chain CDR3 for antibody 22 (IGKV3D-20)
QQYGSSPYT

SEQ ID NO: 44 - protein, 17 aa, Homo sapiens
  Heavy chain CDR3 for antibody 22 (IGHV3-33)
ARGYCSRTSCYLYYFDY

SEQ ID NO: 45 - protein, 9 aa, Homo sapiens
  Light chain CDR3 for antibody 23 (IGKV1-39)
QQSYSTPLT

SEQ ID NO: 46 - protein, 15 aa, Homo sapiens
  Heavy chain CDR3 for antibody 23 (IGHV3-20)
ARDRGSSGWRDWFDP

SEQ ID NO: 47 - protein, 9 aa, Homo sapiens
  Light chain CDR3 for antibody 24 (IGKV3-15)
QQYNNWPLT

SEQ ID NO: 48 - protein, 14 aa, Homo sapiens
  Heavy chain CDR3 for antibody 24 (IGHV4-39)
ARQDYDILTGLFDY

SEQ ID NO: 49 - protein, 9 aa, Homo sapiens
  Light chain CDR3 for antibody 25 (IGKV1-17)
LQHNSYPPT

SEQ ID NO: 50 - protein, 13 aa, Homo sapiens
  Heavy chain CDR3 for antibody 25 (IGHV3-23)
ASPFNWNDGFFDY

SEQ ID NO: 51 - protein, 9 aa, Homo sapiens
  Light chain CDR3 for antibody 26 (IGKV1-27)
QKYNSAPYT

SEQ ID NO: 52 - protein, 12 aa, Homo sapiens
  Heavy chain CDR3 for antibody 26 (IGHV3-33)
ARGYFGSGYAHF

SEQ ID NO: 53 - protein, 9 aa, Homo sapiens
  Light chain CDR3 for antibody 27 (IGKV6-21)
HQSTSLPFT

SEQ ID NO: 54 - protein, 12 aa, Homo sapiens
  Heavy chain CDR3 for antibody 27 (IGHV4-39)
ARHGSGSSYFDY

SEQ ID NO: 55 - protein, 9 aa, Homo sapiens
  Light chain CDR3 for antibody 28 (IGKV3-20)
QQYGSSPRT

SEQ ID NO: 56 - protein, 16 aa, Homo sapiens
  Heavy chain CDR3 for antibody 28 (IGHV1-24)
ATEDSSSTYYYYGLDV

SEQ ID NO: 57 - protein, 9 aa, Homo sapiens
  Light chain CDR3 for antibody 29 (IGKV1-9)
QQLKSYLYT

SEQ ID NO: 58 - protein, 15 aa, Homo sapiens
  Heavy chain CDR3 for antibody 29 (IGHV1-18)
ARGYCSSTSCYYFDY

SEQ ID NO: 59 - protein, 9 aa, Homo sapiens
  Light chain CDR3 for antibody 30 (IGKV5-2)
LQHDKFPYT

SEQ ID NO: 60 - protein, 18 aa, Homo sapiens
  Heavy chain CDR3 for antibody 30 (IGHV3-33)
ARGYYGSGNFYKDSGMDV

SEQ ID NO: 61 - protein, 9 aa, Homo sapiens
  Light chain CDR3 for antibody 31 (IGKV1-6)
LQDYNYPYT

SEQ ID NO: 62 - protein, 14 aa, Homo sapiens
  Heavy chain CDR3 for antibody 31 (IGHV3-33)
ARDWNDVYYYGMDV

SEQ ID NO: 63 - protein, 9 aa, Homo sapiens
  Light chain CDR3 for antibody 32 (IGKV2-30)
MQGTHWPLT

SEQ ID NO: 64 - protein, 13 aa, Homo sapiens
  Heavy chain CDR3 for antibody 32 (IGHV3-11)
ARDEGYRGYVLDT

SEQ ID NO: 65 - protein, 9 aa, Homo sapiens
  Light chain CDR3 for antibody 33 (IGKV5-2)
LQHDNFPYT

SEQ ID NO: 66 - protein, 9 aa, Homo sapiens
  Heavy chain CDR3 for antibody 33 (IGHV3-33)
ARATVGVDY

SEQ ID NO: 67 - protein, 10 aa, Homo sapiens
  Light chain CDR3 for antibody 34 (IGKV3-11)
QQRSNWPIFT

SEQ ID NO: 68 - protein, 8 aa, Homo sapiens
  Heavy chain CDR3 for antibody 34 (IGHV3-23)
AKETGNNY

SEQ ID NO: 69 - protein, 9 aa, Homo sapiens
  Light chain CDR3 for antibody 35 (IGKV3-20)
QQYGSSPYT

SEQ ID NO: 70 - protein, 13 aa, Homo sapiens
  Heavy chain CDR3 for antibody 35 (IGHV3-33)
ARRYRSGWYPFDY

SEQ ID NO: 71 - protein, 9 aa, Homo sapiens
  Light chain CDR3 for antibody 36 (IGKV1D-16)
QQYNSYPYT

SEQ ID NO: 72 - protein, 13 aa, Homo sapiens
  Heavy chain CDR3 for antibody 36 (IGHV3-33)
ARDQRYSSGWYDY

SEQ ID NO: 73 - protein, 9 aa, Homo sapiens
  Light chain CDR3 for antibody 37 (IGKV1-6)
LQDHNYPYT

SEQ ID NO: 74 - protein, 12 aa, Homo sapiens
  Heavy chain CDR3 for antibody 37 (IGHV3-33)
ARESGGSYSFDY

SEQ ID NO: 75 - protein, 9 aa, Homo sapiens
  Light chain CDR3 for antibody 38 (IGKV1-9)
QQLNSYPWT

SEQ ID NO: 76 - protein, 12 aa, Homo sapiens
  Heavy chain CDR3 for antibody 38 (IGHV4-59)
ARDRSGWAYFDY

SEQ ID NO: 77 - protein, 9 aa, Homo sapiens
  Light chain CDR3 for antibody 39 (IGKV6-21)
HQSSSLPLT

SEQ ID NO: 78 - protein, 12 aa, Homo sapiens
  Heavy chain CDR3 for antibody 39 (IGHV3-33)
TRGYSSKSYFDY

SEQ ID NO: 79 - protein, 9 aa, Homo sapiens
  Light chain CDR3 for antibody 40 (IGKV1-6)
LQDYNYPYT

SEQ ID NO: 80 - protein, 13 aa, Homo sapiens
  Heavy chain CDR3 for antibody 40 (IGHV3-33)
ARKAYGDYFYFDY

SEQ ID NO: 81 - protein, 8 aa, Homo sapiens
  Light chain CDR3 for antibody 41 (IGKV3D-7)
QQDYNLLT

SEQ ID NO: 82 - protein, 18 aa, Homo sapiens
  Heavy chain CDR3 for antibody 41 (IGHV3-33)
ARREGIVGATTYYYGMDV

SEQ ID NO: 83 - protein, 9 aa, Homo sapiens
  Light chain CDR3 for antibody 42 (IGKV1-6)
LQDYNYPRT

SEQ ID NO: 84 - protein, 15 aa, Homo sapiens
  Heavy chain CDR3 for antibody 42 (IGHV4-59)
ARDLGHYYGSVSIDY

SEQ ID NO: 85 - protein, 9 aa, Homo sapiens
  Light chain CDR3 for antibody 43 (IGKV1-17)
LQQNSYPWT

SEQ ID NO: 86 - protein, 11 aa, Homo sapiens
  Heavy chain CDR3 for antibody 43 (IGHV4-59)
ARSLRYSVFDY

SEQ ID NO: 87 - protein, 9 aa, Homo sapiens
  Light chain CDR3 for antibody 44 (IGKV1-6)
LQDYNYPRT

SEQ ID NO: 88 - protein, 14 aa, Homo sapiens
  Heavy chain CDR3 for antibody 44 (IGHV4-39)
ARDSGYDYYYGMDV

SEQ ID NO: 89 - protein, 9 aa, Homo sapiens
  Light chain CDR3 for antibody 45 (IGKV1-6)
LQDYNYPFT

SEQ ID NO: 90 - protein, 15 aa, Homo sapiens
  Heavy chain CDR3 for antibody 45 (IGHV3-33)
ARRICSGGSCSLFDY

SEQ ID NO: 91 - protein, 11 aa, Homo sapiens
  Light chain CDR3 for antibody 46 (IGKV3-11)
QQRSNWPPTWT

SEQ ID NO: 92 - protein, 13 aa, Homo sapiens
  Heavy chain CDR3 for antibody 46 (IGHV4-39)
ARHVLLWFGEFDP

SEQ ID NO: 93 - protein, 9 aa, Homo sapiens
  Light chain CDR3 for antibody 47 (IGKV1D-16)
QQYSSYPYT

SEQ ID NO: 94 - protein, 9 aa, Homo sapiens
  Heavy chain CDR3 for antibody 47 (IGHV3-13)
ARDRWYFDL

SEQ ID NO: 95 - protein, 9 aa, Homo sapiens
  Light chain CDR3 for antibody 48 (IGKV1D-16)
QQYNSYPYT

SEQ ID NO: 96 - protein, 14 aa, Homo sapiens
  Heavy chain CDR3 for antibody 48 (IGHV3-33)
ARDRIAAASSDFDC

SEQ ID NO: 97 - protein, 10 aa, Homo sapiens
  Light chain CDR3 for antibody 49 (IGKV1-39)
QQSYSTPMYT

SEQ ID NO: 98 - protein, 11 aa, Homo sapiens
  Heavy chain CDR3 for antibody 49 (IGHV3-33)
ARDRVLTPFDY

SEQ ID NO: 99 - protein, 9 aa, Homo sapiens
  Light chain CDR3 for antibody 50 (IGKV1-6)
LQDYNYPYT

SEQ ID NO: 100 - protein, 15 aa, Homo sapiens
  Heavy chain CDR3 for antibody 50 (IGHV3-33)
ARDTGYSSSWNWFDP

SEQ ID NO: 101 - protein, 9 aa, Homo sapiens
  Light chain CDR3 for antibody 51 (IGKV1-6)
LQDYNYPPT

SEQ ID NO: 102 - protein, 12 aa, Homo sapiens
  Heavy chain CDR3 for antibody 51 (IGHV3-33)
ARDLVGATPFDY

SEQ ID NO: 103 - protein, 9 aa, Homo sapiens
  Light chain CDR3 for antibody 52 (IGKV1-6)
LQDYNYPYT

SEQ ID NO: 104 - protein, 7 aa, Homo sapiens
  Heavy chain CDR3 for antibody 52 (IGHV1-46)
AREGGDY

SEQ ID NO: 105 - protein, 9 aa, Homo sapiens
  Light chain CDR3 for antibody 53 (IGKV1D-13)
QQFNNYPHT

SEQ ID NO: 106 - protein, 13 aa, Homo sapiens
  Heavy chain CDR3 for antibody 53 (IGHV3-53)
ARSGSYWGYYFDY

SEQ ID NO: 107 - protein, 9 aa, Homo sapiens
  Light chain CDR3 for antibody 54 (IGKV1-9)
QQLNSYPYT

SEQ ID NO: 108 - protein, 12 aa, Homo sapiens
  Heavy chain CDR3 for antibody 54 (IGHV3-13)
VREAGIPDAFDI

SEQ ID NO: 109 - protein, 9 aa, Homo sapiens
  Light chain CDR3 for antibody 55 (IGKV3D-7)
QQDYTLPLT

SEQ ID NO: 110 - protein, 12 aa, Homo sapiens
  Heavy chain CDR3 for antibody 55 (IGHV4-61)
ARVYSSGWLFDY

SEQ ID NO: 111 - protein, 9 aa, Homo sapiens
  Light chain CDR3 for antibody 56 (IGKV1-17)
LQHNSYPRT

SEQ ID NO: 112 - protein, 14 aa, Homo sapiens
  Heavy chain CDR3 for antibody 56 (IGHV3-33)
AREGYSSNWYDFDY

SEQ ID NO: 113 - protein, 9 aa, Homo sapiens
  Light chain CDR3 for antibody 57 (IGKV1-6)
LQDYNYPRT

SEQ ID NO: 114 - protein, 20 aa, Homo sapiens
  Heavy chain CDR3 for antibody 57 (IGHV3-20)
ARDLCSSTSCYGYYYYGMDV

SEQ ID NO: 115 - protein, 9 aa, Homo sapiens
  Light chain CDR3 for antibody 58 (IGKV1D-16)
QQYNSYPYT

SEQ ID NO: 116 - protein, 13 aa, Homo sapiens
  Heavy chain CDR3 for antibody 58 (IGHV3-33)
ARRATLVRGVFDP

SEQ ID NO: 117 - protein, 9 aa, Homo sapiens
  Light chain CDR3 for antibody 59 (IGKV1-6)
LQDYNYPWT

SEQ ID NO: 118 - protein, 14 aa, Homo sapiens
  Heavy chain CDR3 for antibody 59 (IGHV3-33)
ARDKTYPLSYGMDV

SEQ ID NO: 119 - protein, 9 aa, Homo sapiens
  Light chain CDR3 for antibody 60 (IGKV1-6)
LQDYNYPWT

SEQ ID NO: 120 - protein, 13 aa, Homo sapiens
  Heavy chain CDR3 for antibody 60 (IGHV4-59)
ARTMVRGVAPFDY

SEQ ID NO: 121 - protein, 9 aa, Homo sapiens
  Light chain CDR3 for antibody 61 (IGKV1-9)
QQLNSYPRT

SEQ ID NO: 122 - protein, 16 aa, Homo sapiens
  Heavy chain CDR3 for antibody 61 (IGHV4-59)
ARDTPYYSGSGRPFDS

SEQ ID NO: 123 - protein, 9 aa, Homo sapiens
  Light chain CDR3 for antibody 62 (IGKV1-16)
QQYNSYPLT

SEQ ID NO: 124 - protein, 9 aa, Homo sapiens
  Heavy chain CDR3 for antibody 62 (IGHV3-30)
ARDNWGFDY

SEQ ID NO: 125 - protein, 9 aa, Homo sapiens
  Light chain CDR3 for antibody 63 (IGKV3-20)
QQYGSSPYT

SEQ ID NO: 126 - protein, 19 aa, Homo sapiens
  Heavy chain CDR3 for antibody 63 (IGHV5-51)
ARHGEKGKRITMVRGSLDV

SEQ ID NO: 127 - protein, 9 aa, Homo sapiens
  Light chain CDR3 for antibody 64 (IGKV1-17)
LQHNSYPPT

SEQ ID NO: 128 - protein, 14 aa, Homo sapiens
  Heavy chain CDR3 for antibody 64 (IGHV1-46)
ARRGIVGALDAFDI

SEQ ID NO: 129 - protein, 9 aa, Homo sapiens
  Light chain CDR3 for antibody 65 (IGKV1-39)
QQSYSTPIT

SEQ ID NO: 130 - protein, 18 aa, Homo sapiens
  Heavy chain CDR3 for antibody 65 (IGHV1-46)
ARDLTGRTENYYYYGMDV

SEQ ID NO: 131 - protein, 9 aa, Homo sapiens
  Light chain CDR3 for antibody 66 (IGKV1-17)
LQHNSYPYT

SEQ ID NO: 132 - protein, 12 aa, Homo sapiens
  Heavy chain CDR3 for antibody 66 (IGHV3-33)
ARDRAYRGSLDY

SEQ ID NO: 133 - protein, 9 aa, Homo sapiens
  Light chain CDR3 for antibody 67 (IGKV1-9)
QQLNGYPFT

SEQ ID NO: 134 - protein, 13 aa, Homo sapiens
  Heavy chain CDR3 for antibody 67 (IGHV4-28)
ARKGATGYYGMDV

SEQ ID NO: 135 - protein, 9 aa, Homo sapiens
  Light chain CDR3 for antibody 68 (IGKV1-17)
LQHNSYPYT

SEQ ID NO: 136 - protein, 19 aa, Homo sapiens
  Heavy chain CDR3 for antibody 68 (IGHV1-18)
ARDDILTGYSLYYYYGMDV

SEQ ID NO: 137 - protein, 9 aa, Homo sapiens
  Light chain CDR3 for antibody 69 (IGKV1-9)
QQLNSYPWT

SEQ ID NO: 138 - protein, 15 aa, Homo sapiens
  Heavy chain CDR3 for antibody 69 (IGHV3-33)
ARDRGWKAPGYGMDV

SEQ ID NO: 139 - protein, 9 aa, Homo sapiens
  Light chain CDR3 for antibody 70 (IGKV1-39)
QQSYSTPYT

SEQ ID NO: 140 - protein, 10 aa, Homo sapiens
  Heavy chain CDR3 for antibody 70 (IGHV3-23)
AKGDRWRFDP

SEQ ID NO: 141 - protein, 9 aa, Homo sapiens
  Light chain CDR3 for antibody 71 (IGKV1-6)
LQDYNYPYT

SEQ ID NO: 142 - protein, 16 aa, Homo sapiens
  Heavy chain CDR3 for antibody 71 (IGHV4-59)
ARYSGSYYGDYYGMDV

SEQ ID NO: 143 - protein, 9 aa, Homo sapiens
  Light chain CDR3 for antibody 72 (IGKV1-17)
LQHNSYPYT

SEQ ID NO: 144 - protein, 18 aa, Homo sapiens
  Heavy chain CDR3 for antibody 72 (IGHV3-23)
AKDRITGTTYGYYSGLDV

SEQ ID NO: 145 - protein, 9 aa, Homo sapiens
  Light chain CDR3 for antibody 73 (IGKV1D-13)
QQFNNYPRT

SEQ ID NO: 146 - protein, 20 aa, Homo sapiens
  Heavy chain CDR3 for antibody 73 (IGHV1-f)
ATGLITFVRGVILTYRSFDY

SEQ ID NO: 147 - protein, 9 aa, Homo sapiens
  Light chain CDR3 for antibody 74 (IGKV1D-13)
QQFNNYPHT

SEQ ID NO: 148 - protein, 13 aa, Homo sapiens
  Heavy chain CDR3 for antibody 74 (IGHV4-39)
ARHEVMVRGVFDY

SEQ ID NO: 149 - protein, 9 aa, Homo sapiens
  Light chain CDR3 for antibody 75 (IGKV1-6)
LQDYNYPYT

SEQ ID NO: 150 - protein, 12 aa, Homo sapiens
  Heavy chain CDR3 for antibody 75 (IGHV3-13)
AREAGIPDAFDI

SEQ ID NO: 151 - protein, 9 aa, Homo sapiens
  Light chain CDR3 for antibody 76 (IGKV1D-16)
QQYNSYPYT

SEQ ID NO: 152 - protein, 13 aa, Homo sapiens
  Heavy chain CDR3 for antibody 76 (IGHV3-33)
VSTGDSYYYVMDV

SEQ ID NO: 153 - protein, 9 aa, Homo sapiens
  Light chain CDR3 for antibody 77 (IGKV1D-13)
QQFNNYPYT

SEQ ID NO: 154 - protein, 11 aa, Homo sapiens
  Heavy chain CDR3 for antibody 77 (IGHV3-33)
ARDKSSGWSDY

SEQ ID NO: 155 - protein, 9 aa, Homo sapiens
  Light chain CDR3 for antibody 78 (IGKV1D-13)
QQFNNYPHT

SEQ ID NO: 156 - protein, 15 aa, Homo sapiens
  Heavy chain CDR3 for antibody 78 (IGHV3-23)
AKDGSYYDYYYGMDV

SEQ ID NO: 157 - protein, 9 aa, Homo sapiens
  Light chain CDR3 for antibody 79 (IGKV1-6)
LQDYNYPRT

SEQ ID NO: 158 - protein, 17 aa, Homo sapiens
  Heavy chain CDR3 for antibody 79 (IGHV3-33)
ARGFSGYDGYYYYGMDV

SEQ ID NO: 159 - protein, 9 aa, Homo sapiens
  Light chain CDR3 for antibody 80 (IGKV5-2)
LQHDNFPLT

SEQ ID NO: 160 - protein, 20 aa, Homo sapiens
  Heavy chain CDR3 for antibody 80 (IGHV3-23)
AKGMGGLRYFDWPHYYGMDV

SEQ ID NO: 161 - protein, 9 aa, Homo sapiens
  Light chain CDR3 for antibody 81 (IGKV1-17)
LQHNSYPRT

SEQ ID NO: 162 - protein, 9 aa, Homo sapiens
  Heavy chain CDR3 for antibody 81 (IGHV1-8)
ARGRLDFDY

SEQ ID NO: 163 - protein, 9 aa, Homo sapiens
  Light chain CDR3 for antibody 82 (IGKV1D-16)
QQYDSYPWT

SEQ ID NO: 164 - protein, 11 aa, Homo sapiens
  Heavy chain CDR3 for antibody 82 (IGHV3-33)
AREAANWGFDY

SEQ ID NO: 165 - protein, 9 aa, Homo sapiens
  Light chain CDR3 for antibody 83 (IGKV1D-16)
QQYNSYPLT

SEQ ID NO: 166 - protein, 14 aa, Homo sapiens
  Heavy chain CDR3 for antibody 83 (IGHV3-33)
ARTTAAAGPRDFQH

SEQ ID NO: 167 - protein, 9 aa, Homo sapiens
  Light chain CDR3 for antibody 84 (IGKV3-11)
QQRSNWMYT

SEQ ID NO: 168 - protein, 10 aa, Homo sapiens
  Heavy chain CDR3 for antibody 84 (IGHV3-23)
AKEQWLVLDY

SEQ ID NO: 169 - protein, 9 aa, Homo sapiens
  Light chain CDR3 for antibody 85 (IGKV1-9)
QQLNSYPYT

SEQ ID NO: 170 - protein, 15 aa, Homo sapiens
  Heavy chain CDR3 for antibody 85 (IGHV3-33)
ARDHLTGYYYYGMDV

SEQ ID NO: 171 - protein, 9 aa, Homo sapiens
  Light chain CDR3 for antibody 86 (IGKV3D-20)
QQYGSSPWT

SEQ ID NO: 172 - protein, 15 aa, Homo sapiens
  Heavy chain CDR3 for antibody 86 (IGHV3-33)
ARDSRPEIIGPPFDY

SEQ ID NO: 173 - protein, 9 aa, Homo sapiens
  Light chain CDR3 for antibody 87 (IGKV1-9)
QQVKSYPYT

SEQ ID NO: 174 - protein, 12 aa, Homo sapiens
  Heavy chain CDR3 for antibody 87 (IGHV1-46)
AREDYDIDGMDV

SEQ ID NO: 175 - protein, 9 aa, Homo sapiens
  Light chain CDR3 for antibody 88 (IGKV1-6)
LQDYNYPLT

SEQ ID NO: 176 - protein, 14 aa, Homo sapiens
  Heavy chain CDR3 for antibody 88 (IGHV3-33)
ARAGSGYDRDWFDP

SEQ ID NO: 177 - protein, 9 aa, Homo sapiens
  Light chain CDR3 for antibody 89 (IGKV1-17)
LQHNGYPLT

SEQ ID NO: 178 - protein, 10 aa, Homo sapiens
  Heavy chain CDR3 for antibody 89 (IGHV3-33)
ARENSTPLDY

SEQ ID NO: 179 - protein, 9 aa, Homo sapiens
  Light chain CDR3 for antibody 90 (IGKV1-6)
LQDYNYPWT

SEQ ID NO: 180 - protein, 18 aa, Homo sapiens
  Heavy chain CDR3 for antibody 90 (IGHV3-33)
ARDRDRYGSGTYPDAIDI

SEQ ID NO: 181 - protein, 9 aa, Homo sapiens
  Light chain CDR3 for antibody 91 (IGKV1-17)
LQHNSYPRT

SEQ ID NO: 182 - protein, 11 aa, Homo sapiens
  Heavy chain CDR3 for antibody 91 (IGHV3-33)
ARDTWDDYFDY

SEQ ID NO: 183 - protein, 9 aa, Homo sapiens
  Light chain CDR3 for antibody 92 (IGKV1-6)
LQDYNYPWT

SEQ ID NO: 184 - protein, 9 aa, Homo sapiens
  Heavy chain CDR3 for antibody 92 (IGHV4-59)
AGGSWDFDY

SEQ ID NO: 185 - protein, 9 aa, Homo sapiens
  Light chain CDR3 for antibody 93 (IGKV1D-16)
QQYYSYPRT

SEQ ID NO: 186 - protein, 13 aa, Homo sapiens
  Heavy chain CDR3 for antibody 93 (IGHV3-33)
ARDYCGGDCYLDY

SEQ ID NO: 187 - protein, 9 aa, Homo sapiens
  Light chain CDR3 for antibody 94 (IGKV3-20)
QQYGSSPRT

SEQ ID NO: 188 - protein, 14 aa, Homo sapiens
  Heavy chain CDR3 for antibody 94 (IGHV1-18)
ARCFGSGSYGWFDP

SEQ ID NO: 189 - protein, 9 aa, Homo sapiens
  Light chain CDR3 for antibody 95 (IGKV1-6)
LQDYNYPWT

SEQ ID NO: 190 - protein, 14 aa, Homo sapiens
  Heavy chain CDR3 for antibody 95 (IGHV3-33)
ARDGYDFLTGPFDY

SEQ ID NO: 191 - protein, 9 aa, Homo sapiens
  Light chain CDR3 for antibody 96 (IGKV1-17)
LQHNSYPYT

SEQ ID NO: 192 - protein, 11 aa, Homo sapiens
  Heavy chain CDR3 for antibody 96 (IGHV3-33)
ARARYTTGLDY

SEQ ID NO: 193 - protein, 9 aa, Homo sapiens
  Light chain CDR3 for antibody 97 (IGKV3-11)
QQRSNWPPT

SEQ ID NO: 194 - protein, 14 aa, Homo sapiens
  Heavy chain CDR3 for antibody 97 (IGHV3-33)
ARDREQQLVRYFDY

SEQ ID NO: 195 - protein, 9 aa, Homo sapiens
  Light chain CDR3 for antibody 98 (IGKV1-16)
QQYNSYPRT

SEQ ID NO: 196 - protein, 13 aa, Homo sapiens
  Heavy chain CDR3 for antibody 98 (IGHV3-33)
AKEDGDYHHYFDY

SEQ ID NO: 197 - protein, 9 aa, Homo sapiens
  Light chain CDR3 for antibody 99 (IGKV1-6)
LQDYNHPFT

SEQ ID NO: 198 - protein, 17 aa, Homo sapiens
  Heavy chain CDR3 for antibody 99 (IGHV3-33)
ARVYYDILTGYSPAFDI

SEQ ID NO: 199 - protein, 9 aa, Homo sapiens
  Light chain CDR3 for antibody 100 (IGKV1-6)
LQDYNYPYT

SEQ ID NO: 200 - protein, 13 aa, Homo sapiens
  Heavy chain CDR3 for antibody 100 (IGHV4-34)
ASNFYYYYYGMDV

SEQ ID NO: 201 - protein, 9 aa, Homo sapiens
  Light chain CDR3 for antibody 101 (IGKV1-6)
LQDYNYPWT

SEQ ID NO: 202 - protein, 17 aa, Homo sapiens
  Heavy chain CDR3 for antibody 101 (IGHV3-33)
ARESLKLGIYYYYGMDV

SEQ ID NO: 203 - protein, 9 aa, Homo sapiens
  Light chain CDR3 for antibody 102 (IGKV1-9)
QQLISYPLT

SEQ ID NO: 204 - protein, 21 aa, Homo sapiens
  Heavy chain CDR3 for antibody 102 (IGHV3-33)
ARKRLYDILTGYYKAYYGMDV

SEQ ID NO: 205 - protein, 9 aa, Homo sapiens
  Light chain CDR3 for antibody 103 (IGKV1-17)
LQHNSFPLT

SEQ ID NO: 206 - protein, 17 aa, Homo sapiens
  Heavy chain CDR3 for antibody 103 (IGHV3-33)
ARGEQWLGYYYYYGMDV

SEQ ID NO: 207 - protein, 9 aa, Homo sapiens
  Light chain CDR3 for antibody 104 (IGKV1-6)
LQDYNYPYT

SEQ ID NO: 208 - protein, 14 aa, Homo sapiens
  Heavy chain CDR3 for antibody 104 (IGHV3-33)
ARQYSYGYPYYFDY

SEQ ID NO: 209 - protein, 9 aa, Homo sapiens
  Light chain CDR3 for antibody 105 (IGKV1-16)
QQYNSYPIT

SEQ ID NO: 210 - protein, 9 aa, Homo sapiens
  Heavy chain CDR3 for antibody 105 (IGHV3-30)
ARDYFHYDY

SEQ ID NO: 211 - protein, 9 aa, Homo sapiens
  Light chain CDR3 for antibody 106 (IGKV3-11)
QQRINWPWT

SEQ ID NO: 212 - protein, 9 aa, Homo sapiens
  Heavy chain CDR3 for antibody 106 (IGHV4-59)
AREGGSGSL

SEQ ID NO: 213 - protein, 9 aa, Homo sapiens
  Light chain CDR3 for antibody 107 (IGKV1-17)
LQHNSYPWT

SEQ ID NO: 214 - protein, 14 aa, Homo sapiens
  Heavy chain CDR3 for antibody 107 (IGHV3-33)
ARDNILTAYYLFDY

SEQ ID NO: 215 - protein, 9 aa, Homo sapiens
  Light chain CDR3 for antibody 108 (IGKV1-6)
LQDYNYPRT

SEQ ID NO: 216 - protein, 12 aa, Homo sapiens
  Heavy chain CDR3 for antibody 108 (IGHV3-33)
AREGDILTGYSL

SEQ ID NO: 217 - protein, 9 aa, Homo sapiens
  Light chain CDR3 for antibody 109 (IGKV6-21)
HQSSNLPYT

SEQ ID NO: 218 - protein, 16 aa, Homo sapiens
  Heavy chain CDR3 for antibody 109 (IGHV1-8)
AREGTMVRGVTYAFDI

SEQ ID NO: 219 - protein, 9 aa, Homo sapiens
  Light chain CDR3 for antibody 110 (IGKV3-20)
QHYGSSPYT

SEQ ID NO: 220 - protein, 13 aa, Homo sapiens
  Heavy chain CDR3 for antibody 110 (IGHV3-33)
ARTDYYFYYGLDV

SEQ ID NO: 221 - protein, 9 aa, Homo sapiens
  Light chain CDR3 for antibody 111 (IGKV1D-16)
QQYNSYPYT

SEQ ID NO: 222 - protein, 12 aa, Homo sapiens
  Heavy chain CDR3 for antibody 111 (IGHV3-33)
ARVDAAAPYFDY

SEQ ID NO: 223 - protein, 9 aa, Homo sapiens
  Light chain CDR3 for antibody 112 (IGKV3-20)
QQYGSSPYT

SEQ ID NO: 224 - protein, 13 aa, Homo sapiens
  Heavy chain CDR3 for antibody 112 (IGHV3-33)
ARGDNWNDGGFDY

SEQ ID NO: 225 - protein, 9 aa, Homo sapiens
  Light chain CDR3 for antibody 113 (IGKV1-17)
LQHNSYPWT

SEQ ID NO: 226 - protein, 10 aa, Homo sapiens
  Heavy chain CDR3 for antibody 113 (IGHV3-33)
ARDGSGSQPI

SEQ ID NO: 227 - protein, 9 aa, Homo sapiens
  Light chain CDR3 for antibody 114 (IGKV3-20)
LQYGSSPYT

SEQ ID NO: 228 - protein, 16 aa, Homo sapiens
  Heavy chain CDR3 for antibody 114 (IGHV3-33)
ARGGRSDWLYYYGMDV

SEQ ID NO: 229 - protein, 9 aa, Homo sapiens
  Light chain CDR3 for antibody 115 (IGKV1-17)
LQHNSYPWT

SEQ ID NO: 230 - protein, 17 aa, Homo sapiens
  Heavy chain CDR3 for antibody 115 (IGHV3-33)
VREGGLLWVGELSLFDY

SEQ ID NO: 231 - protein, 9 aa, Homo sapiens
  Light chain CDR3 for antibody 116 (IGKV1-6)
LQDYKSPFT

SEQ ID NO: 232 - protein, 20 aa, Homo sapiens
  Heavy chain CDR3 for antibody 116 (IGHV3-23)
AKDREMAATSHYYYYYGMDV

SEQ ID NO: 233 - protein, 9 aa, Homo sapiens
  Light chain CDR3 for antibody 117 (IGKV1-6)
LQDYNYPYT

SEQ ID NO: 234 - protein, 20 aa, Homo sapiens
  Heavy chain CDR3 for antibody 117 (IGHV3-11)
ARGGATLIRGLIDYYYGMDV

SEQ ID NO: 235 - protein, 9 aa, Homo sapiens
  Light chain CDR3 for antibody 118 (IGKV1D-13)
QQFNNYPYT

SEQ ID NO: 236 - protein, 18 aa, Homo sapiens
  Heavy chain CDR3 for antibody 118 (IGHV3-33)
ARGLLWFGVSYYYYGMDV

SEQ ID NO: 237 - protein, 8 aa, Homo sapiens
  Light chain CDR3 for antibody 119 (IGKV1-5)
QQYNSYWT

SEQ ID NO: 238 - protein, 16 aa, Homo sapiens
  Heavy chain CDR3 for antibody 119 (IGHV3-33)
ARAVYYGSGSSLIMDV

SEQ ID NO: 239 - protein, 9 aa, Homo sapiens
  Light chain CDR3 for antibody 120 (IGKV1-6)
LQDYNYPYT

SEQ ID NO: 240 - protein, 16 aa, Homo sapiens
  Heavy chain CDR3 for antibody 120 (IGHV3-33)
ARGYDMLTGDYYGMDV

SEQ ID NO: 241 - protein, 9 aa, Homo sapiens
  Light chain CDR3 for antibody 121 (IGKV1-6)
QQEYNYPLT

SEQ ID NO: 242 - protein, 13 aa, Homo sapiens
  Heavy chain CDR3 for antibody 121 (IGHV1-46)
ARVKLGSLGAFDI

SEQ ID NO: 243 - protein, 9 aa, Homo sapiens
  Light chain CDR3 for antibody 122 (IGKV6-21)
HQSSSLPLT

SEQ ID NO: 244 - protein, 11 aa, Homo sapiens
  Heavy chain CDR3 for antibody 122 (IGHV3-33)
ARDILTGFLDH

SEQ ID NO: 245 - protein, 9 aa, Homo sapiens
  Light chain CDR3 for antibody 123 (IGKV1-39)
QQSYSTPWT

SEQ ID NO: 246 - protein, 18 aa, Homo sapiens
  Heavy chain CDR3 for antibody 123 (IGHV4-39)
ARQYYFGSGNYYRGWFDP

SEQ ID NO: 247 - protein, 9 aa, Homo sapiens
  Light chain CDR3 for antibody 124 (IGKV3-20)
QQYGSSPRT

SEQ ID NO: 248 - protein, 18 aa, Homo sapiens
  Heavy chain CDR3 for antibody 124 (IGHV3-23)
AKEGNYYGSGSYWGYFDP

SEQ ID NO: 249 - protein, 8 aa, Homo sapiens
  Light chain CDR3 for antibody 125 (IGKV3-20)
QQYGRSFT

SEQ ID NO: 250 - protein, 13 aa, Homo sapiens
  Heavy chain CDR3 for antibody 125 (IGHV4-39)
ARHHYGSGSLRDY

SEQ ID NO: 251 - protein, 9 aa, Homo sapiens
  Light chain CDR3 for antibody 126 (IGKV1D-16)
QQYNSYPYT

SEQ ID NO: 252 - protein, 16 aa, Homo sapiens
  Heavy chain CDR3 for antibody 126 (IGHV3-23)
AKEGMVLRYFDWLWDY

SEQ ID NO: 253 - protein, 9 aa, Homo sapiens
  Light chain CDR3 for antibody 127 (IGKV1-6)
LQDYNYPRT

SEQ ID NO: 254 - protein, 20 aa, Homo sapiens
  Heavy chain CDR3 for antibody 127 (IGHV1-18)
AREVGIAVAGTLYYYYGMDV

SEQ ID NO: 255 - protein, 9 aa, Homo sapiens
  Light chain CDR3 for antibody 128 (IGKV1D-16)
QQYNSYPRT

SEQ ID NO: 256 - protein, 11 aa, Homo sapiens
  Heavy chain CDR3 for antibody 128 (IGHV3-33)
ARAGIAAVFDY

SEQ ID NO: 257 - protein, 8 aa, Homo sapiens
  Light chain CDR3 for antibody 129 (IGKV1D-13)
QQFNNYPT

SEQ ID NO: 258 - protein, 18 aa, Homo sapiens
  Heavy chain CDR3 for antibody 129 (IGHV3-33)
ARDRYYDILTGYYMGFDY

SEQ ID NO: 259 - protein, 9 aa, Homo sapiens
  Light chain CDR3 for antibody 130 (IGKV1-6)
LQDYNYPWT

SEQ ID NO: 260 - protein, 14 aa, Homo sapiens
  Heavy chain CDR3 for antibody 130 (IGHV3-33)
ARRGSPLRPSHLDV

SEQ ID NO: 261 - protein, 10 aa, Homo sapiens
  Light chain CDR3 for antibody 131 (IGKV3-11)
QQRSNWPALT

SEQ ID NO: 262 - protein, 8 aa, Homo sapiens
  Heavy chain CDR3 for antibody 131 (IGHV3-23)
EKSAGEDV

SEQ ID NO: 263 - protein, 8 aa, Homo sapiens
  Light chain CDR3 for antibody 132 (IGKV3-11)
QQRSNWLT

SEQ ID NO: 264 - protein, 18 aa, Homo sapiens
  Heavy chain CDR3 for antibody 132 (IGHV1-8)
ARSRIAAAGIYYYYGMDV

SEQ ID NO: 265 - protein, 9 aa, Homo sapiens
  Light chain CDR3 for antibody 133 (IGKV1-17)
LQHNSYPIT

SEQ ID NO: 266 - protein, 17 aa, Homo sapiens
  Heavy chain CDR3 for antibody 133 (IGHV3-23)
AKDGSFYSSGWYDAFDI

SEQ ID NO: 267 - protein, 9 aa, Homo sapiens
  Light chain CDR3 for antibody 134 (IGKV1-9)
QQLNSYPYT

SEQ ID NO: 268 - protein, 13 aa, Homo sapiens
  Heavy chain CDR3 for antibody 134 (IGHV4-39)
ARHPPSRDYGMDV

SEQ ID NO: 269 - protein, 9 aa, Homo sapiens
  Light chain CDR3 for antibody 135 (IGKV1-17)
LQHNSYPRT

SEQ ID NO: 270 - protein, 17 aa, Homo sapiens
  Heavy chain CDR3 for antibody 135 (IGHV4-34)
AGLRFFDWLFDYYGMDV

SEQ ID NO: 271 - protein, 9 aa, Homo sapiens
  Light chain CDR3 for antibody 136 (IGKV1-39)
QQSYSTPYT

SEQ ID NO: 272 - protein, 13 aa, Homo sapiens
  Heavy chain CDR3 for antibody 136 (IGHV1-18)
ARSITMVRGVIGY

SEQ ID NO: 273 - protein, 9 aa, Homo sapiens
  Light chain CDR3 for antibody 137 (IGKV1-6)
LQDYNYPYT

SEQ ID NO: 274 - protein, 21 aa, Homo sapiens
  Heavy chain CDR3 for antibody 137 (IGHV3-23)
AKDIDYYGSGSYPLYYYGMDV

SEQ ID NO: 275 - protein, 9 aa, Homo sapiens
  Light chain CDR3 for antibody 138 (IGKV1-17)
LQYNSYPWT

SEQ ID NO: 276 - protein, 15 aa, Homo sapiens
  Heavy chain CDR3 for antibody 138 (IGHV3-30)
ARRGYGSGSPDAFDL

SEQ ID NO: 277 - protein, 9 aa, Homo sapiens
  Light chain CDR3 for antibody 139 (IGKV1-6)
LQDYNYMYT

SEQ ID NO: 278 - protein, 18 aa, Homo sapiens
  Heavy chain CDR3 for antibody 139 (IGHV3-33)
ARDGYSGYDYYYYYGMDV

SEQ ID NO: 279 - protein, 9 aa, Homo sapiens
  Light chain CDR3 for antibody 140 (IGKV3-11)
QQRSNWPLT

SEQ ID NO: 280 - protein, 11 aa, Homo sapiens
  Heavy chain CDR3 for antibody 140 (IGHV3-33)
ARGSGSYAFDS

SEQ ID NO: 281 - protein, 10 aa, Homo sapiens
  Light chain CDR3 for antibody 141 (IGKV1-17)
LQHNSYPMYT

SEQ ID NO: 282 - protein, 8 aa, Homo sapiens
  Heavy chain CDR3 for antibody 141 (IGHV3-23)
AETFLFDY

SEQ ID NO: 283 - protein, 9 aa, Homo sapiens
  Light chain CDR3 for antibody 142 (IGKV3D-7)
QQDYNLPYT

SEQ ID NO: 284 - protein, 11 aa, Homo sapiens
  Heavy chain CDR3 for antibody 142 (IGHV3-74)
ARDRGNWGFDY

SEQ ID NO: 285 - protein, 9 aa, Homo sapiens
  Light chain CDR3 for antibody 143 (IGKV1-6)
LQDYNYPYT

SEQ ID NO: 286 - protein, 15 aa, Homo sapiens
  Heavy chain CDR3 for antibody 143 (IGHV3-33)
VCVLYDYGDYVGFDY

SEQ ID NO: 287 - protein, 9 aa, Homo sapiens
  Light chain CDR3 for antibody 144 (IGKV1-6)
LQDYNYPRT

SEQ ID NO: 288 - protein, 16 aa, Homo sapiens
  Heavy chain CDR3 for antibody 144 (IGHV1-18)
ARYFDWLLRDYYGMDV

SEQ ID NO: 289 - protein, 9 aa, Homo sapiens
  Light chain CDR3 for antibody 145 (IGKV3D-7)
QQDYEFPLT

SEQ ID NO: 290 - protein, 12 aa, Homo sapiens
  Heavy chain CDR3 for antibody 145 (IGHV4-61)
ARVDSSGWFFDY

SEQ ID NO: 291 - protein, 9 aa, Homo sapiens
  Light chain CDR3 for antibody 146 (IGKV1D-16)
QQYDSYPYT

SEQ ID NO: 292 - protein, 14 aa, Homo sapiens
  Heavy chain CDR3 for antibody 146 (IGHV3-33)
VRDAMGATTAWFDP

SEQ ID NO: 293 - protein, 9 aa, Homo sapiens
  Light chain CDR3 for antibody 147 (IGKV3-20)
QLYGSSPYT

SEQ ID NO: 294 - protein, 17 aa, Homo sapiens
  Heavy chain CDR3 for antibody 147 (IGHV1-24)
ATEGYDILPGYYNVLDY

SEQ ID NO: 295 - protein, 9 aa, Homo sapiens
  Light chain CDR3 for antibody 148 (IGKV1-17)
LQHNSYPFT

SEQ ID NO: 296 - protein, 12 aa, Homo sapiens
  Heavy chain CDR3 for antibody 148 (IGHV3-23)
AKDGWFGESLDY

SEQ ID NO: 297 - protein, 9 aa, Homo sapiens
  Light chain CDR3 for antibody 149 (IGKV1-6)
LQDYNYPRT

SEQ ID NO: 298 - protein, 23 aa, Homo sapiens
  Heavy chain CDR3 for antibody 149 (IGHV4-59)
ARERTYSDILPGYYEDYYYGMDV

SEQ ID NO: 299 - protein, 9 aa, Homo sapiens
  Light chain CDR3 for antibody 150 (IGKV1-39)
QQSYSTPYT

SEQ ID NO: 300 - protein, 9 aa, Homo sapiens
  Heavy chain CDR3 for antibody 150 (IGHV4-59)
ARGGASFDY

SEQ ID NO: 301 - protein, 9 aa, Homo sapiens
  Light chain CDR3 for antibody 151 (IGKV1-9)
QQGNTYSRT

SEQ ID NO: 302 - protein, 11 aa, Homo sapiens
  Heavy chain CDR3 for antibody 151 (IGHV4-4)
AREAYYYGLDV

SEQ ID NO: 303 - protein, 9 aa, Homo sapiens
  Light chain CDR3 for antibody 152 (IGKV1-9)
QQLNSYPYT

SEQ ID NO: 304 - protein, 19 aa, Homo sapiens
  Heavy chain CDR3 for antibody 152 (IGHV3-33)
ARGVRLRYFDPYYYYGMDV

SEQ ID NO: 305 - protein, 9 aa, Homo sapiens
  Light chain CDR3 for antibody 153 (IGKV1-6)
LQDYNYPYT

SEQ ID NO: 306 - protein, 17 aa, Homo sapiens
  Heavy chain CDR3 for antibody 153 (IGHV3-23)
AKDGIGELSYYYYGMDV

SEQ ID NO: 307 - protein, 9 aa, Homo sapiens
  Light chain CDR3 for antibody 154 (IGKV1-6)
LQDYNYTWT

SEQ ID NO: 308 - protein, 14 aa, Homo sapiens
  Heavy chain CDR3 for antibody 154 (IGHV3-23)
ANWAYDILTGYLDY

SEQ ID NO: 309 - protein, 8 aa, Homo sapiens
  Light chain CDR3 for antibody 155 (IGKV1D-13)
QQFNNYYT

SEQ ID NO: 310 - protein, 18 aa, Homo sapiens
  Heavy chain CDR3 for antibody 155 (IGHV1-18)
ARDRYYYDSGSYYYGMDV

SEQ ID NO: 311 - protein, 9 aa, Homo sapiens
  Light chain CDR3 for antibody 156 (IGKV1-6)
LQDYNYPRT

SEQ ID NO: 312 - protein, 15 aa, Homo sapiens
  Heavy chain CDR3 for antibody 156 (IGHV3-33)
ARRGYNDYDPYGMDV

SEQ ID NO: 313 - protein, 9 aa, Homo sapiens
  Light chain CDR3 for antibody 157 (IGKV3-20)
QQYGSSPRT

SEQ ID NO: 314 - protein, 15 aa, Homo sapiens
  Heavy chain CDR3 for antibody 157 (IGHV1-24)
ATHWDLRYYYYGMDV

SEQ ID NO: 315 - protein, 9 aa, Homo sapiens
  Light chain CDR3 for antibody 158 (IGKV1-6)
LQDYNYPWT

SEQ ID NO: 316 - protein, 20 aa, Homo sapiens
  Heavy chain CDR3 for antibody 158 (IGHV3-33)
SRGGATLVRGVIDYYYGMDV

SEQ ID NO: 317 - protein, 9 aa, Homo sapiens
  Light chain CDR3 for antibody 159 (IGKV1-6)
LQDYNYPWT

SEQ ID NO: 318 - protein, 18 aa, Homo sapiens
  Heavy chain CDR3 for antibody 159 (IGHV3-33)
ARERDYYGSGSYPDAFDI

SEQ ID NO: 319 - protein, 9 aa, Homo sapiens
  Light chain CDR3 for antibody 160 (IGKV1-6)
LQDYNYPYT

SEQ ID NO: 320 - protein, 10 aa, Homo sapiens
  Heavy chain CDR3 for antibody 160 (IGHV3-23)
AKDHYGDYPY

SEQ ID NO: 321 - protein, 9 aa, Homo sapiens
  Light chain CDR3 for antibody 161 (IGKV5-2)
LQHDNFPWT

SEQ ID NO: 322 - protein, 13 aa, Homo sapiens
  Heavy chain CDR3 for antibody 161 (IGHV4-59)
ARDAGYSSSWFDY

SEQ ID NO: 323 - protein, 9 aa, Homo sapiens
  Light chain CDR3 for antibody 162 (IGKV1-6)
LQDYNYPWT

SEQ ID NO: 324 - protein, 17 aa, Homo sapiens
  Heavy chain CDR3 for antibody 162 (IGHV3-33)
ARAYYDILTGYSYYFDY

SEQ ID NO: 325 - protein, 8 aa, Homo sapiens
  Light chain CDR3 for antibody 163 (IGKV3D-7)
QQDYNLVT

SEQ ID NO: 326 - protein, 17 aa, Homo sapiens
  Heavy chain CDR3 for antibody 163 (IGHV4-59)
ARRITMVREIIITAFDY

SEQ ID NO: 327 - protein, 9 aa, Homo sapiens
  Light chain CDR3 for antibody 164 (IGKV1D-16)
QQYNSYPYT

SEQ ID NO: 328 - protein, 18 aa, Homo sapiens
  Heavy chain CDR3 for antibody 164 (IGHV6-1)
ARDQYSYGPYYYYYGMDV

SEQ ID NO: 329 - protein, 9 aa, Homo sapiens
  Light chain CDR3 for antibody 165 (IGKV1-6)
LQDYNYPRT

SEQ ID NO: 330 - protein, 12 aa, Homo sapiens
  Heavy chain CDR3 for antibody 165 (IGHV3-33)
ARKGYDMHEFDI

SEQ ID NO: 331 - protein, 10 aa, Homo sapiens
  Light chain CDR3 for antibody 166 (IGKV1-9)
QQLDSYPMYT

SEQ ID NO: 332 - protein, 11 aa, Homo sapiens
  Heavy chain CDR3 for antibody 166 (IGHV3-13)
AREAIIGPFDY

SEQ ID NO: 333 - protein, 9 aa, Homo sapiens
  Light chain CDR3 for antibody 167 (IGKV1-6)
LQDYNSPYT

SEQ ID NO: 334 - protein, 15 aa, Homo sapiens
  Heavy chain CDR3 for antibody 167 (IGHV3-23)
AKEALRYFDWSGMDV

SEQ ID NO: 335 - protein, 9 aa, Homo sapiens
  Light chain CDR3 for antibody 168 (IGKV1-9)
QQLNSYPYT

SEQ ID NO: 336 - protein, 14 aa, Homo sapiens
  Heavy chain CDR3 for antibody 168 (IGHV1-2)
ARDYYGSGNYYMGY

SEQ ID NO: 337 - protein, 9 aa, Homo sapiens
  Light chain CDR3 for antibody 169 (IGKV1-17)
LQHNSYPYT

SEQ ID NO: 338 - protein, 12 aa, Homo sapiens
  Heavy chain CDR3 for antibody 169 (IGHV3-33)
AREGTRWVYFDY

SEQ ID NO: 339 - protein, 9 aa, Homo sapiens
  Light chain CDR3 for antibody 170 (IGKV1D-16)
QQYNSYPLT

SEQ ID NO: 340 - protein, 15 aa, Homo sapiens
  Heavy chain CDR3 for antibody 170 (IGHV3-33)
ARGYYYGSGSFPVDY

SEQ ID NO: 341 - protein, 9 aa, Homo sapiens
  Light chain CDR3 for antibody 171 (IGKV3-11)
QQRSNWPWT

SEQ ID NO: 342 - protein, 11 aa, Homo sapiens
  Heavy chain CDR3 for antibody 171 (IGHV4-59)
ARDGVRGVFDI

SEQ ID NO: 343 - protein, 9 aa, Homo sapiens
  Light chain CDR3 for antibody 172 (IGKV1D-16)
QQYNSYPFT

SEQ ID NO: 344 - protein, 12 aa, Homo sapiens
  Heavy chain CDR3 for antibody 172 (IGHV3-23)
AKEYDILTGYFH

SEQ ID NO: 345 - protein, 9 aa, Homo sapiens
  Light chain CDR3 for antibody 173 (IGKV1D-16)
QQYNSYPYT

SEQ ID NO: 346 - protein, 13 aa, Homo sapiens
  Heavy chain CDR3 for antibody 173 (IGHV3-33)
ANTGDSYYYDMDV

SEQ ID NO: 347 - protein, 9 aa, Homo sapiens
  Light chain CDR3 for antibody 174 (IGKV3D-20)
QQYGYSPLT

SEQ ID NO: 348 - protein, 14 aa, Homo sapiens
  Heavy chain CDR3 for antibody 174 (IGHV3-23)
AKDRYRGYEGLFDY

SEQ ID NO: 349 - protein, 9 aa, Homo sapiens
  Light chain CDR3 for antibody 175 (IGKV1-6)
LQDYNFPFT

SEQ ID NO: 350 - protein, 17 aa, Homo sapiens
  Heavy chain CDR3 for antibody 175 (IGHV3-66)
ARVQYDILTGYSPYFDN

SEQ ID NO: 351 - protein, 9 aa, Homo sapiens
  Light chain CDR3 for antibody 176 (IGKV1-17)
LQHNSYPWT

SEQ ID NO: 352 - protein, 12 aa, Homo sapiens
  Heavy chain CDR3 for antibody 176 (IGHV3-33)
ARDPGYYYGLDV

SEQ ID NO: 353 - protein, 9 aa, Homo sapiens
  Light chain CDR3 for antibody 177 (IGKV1-6)
LQDYNYPYT

SEQ ID NO: 354 - protein, 24 aa, Homo sapiens
  Heavy chain CDR3 for antibody 177 (IGHV3-20)
ARGRITMVRGVIINPLDYYNGMDV

SEQ ID NO: 355 - protein, 9 aa, Homo sapiens
  Light chain CDR3 for antibody 178 (IGKV1-6)
LQDYNYPRT

SEQ ID NO: 356 - protein, 14 aa, Homo sapiens
  Heavy chain CDR3 for antibody 178 (IGHV3-33)
ARGGYSGYRYYFDY

SEQ ID NO: 357 - protein, 9 aa, Homo sapiens
  Light chain CDR3 for antibody 179 (IGKV1-6)
LQDYNYPYT

SEQ ID NO: 358 - protein, 11 aa, Homo sapiens
  Heavy chain CDR3 for antibody 179 (IGHV3-33)
AREGAVARFDY

SEQ ID NO: 359 - protein, 9 aa, Homo sapiens
  Light chain CDR3 for antibody 180 (IGKV3-20)
QQYGSSPYT

SEQ ID NO: 360 - protein, 13 aa, Homo sapiens
  Heavy chain CDR3 for antibody 180 (IGHV3-33)
ARQSSGWFDAFDI

SEQ ID NO: 361 - protein, 9 aa, Homo sapiens
  Light chain CDR3 for antibody 181 (IGKV1-17)
LQHNSYPYT

SEQ ID NO: 362 - protein, 11 aa, Homo sapiens
  Heavy chain CDR3 for antibody 181 (IGHV1-24)
ATELGLYYFDY

SEQ ID NO: 363 - protein, 9 aa, Homo sapiens
  Light chain CDR3 for antibody 182 (IGKV3-15)
QQYNNWPYT

SEQ ID NO: 364 - protein, 18 aa, Homo sapiens
  Heavy chain CDR3 for antibody 182 (IGHV3-33)
ARGGYSSGWDYYYYGMDV

SEQ ID NO: 365 - protein, 9 aa, Homo sapiens
  Light chain CDR3 for antibody 183 (IGKV1-17)
LQHNSFPYT

SEQ ID NO: 366 - protein, 17 aa, Homo sapiens
  Heavy chain CDR3 for antibody 183 (IGHV4-39)
ARVLRYFDWLSHDAFDI

SEQ ID NO: 367 - protein, 9 aa, Homo sapiens
  Light chain CDR3 for antibody 184 (IGKV1-17)
LQHTSYPFT

SEQ ID NO: 368 - protein, 13 aa, Homo sapiens
  Heavy chain CDR3 for antibody 184 (IGHV1-2)
ARDGVRGSFGMDV

SEQ ID NO: 369 - protein, 9 aa, Homo sapiens
  Light chain CDR3 for antibody 185 (IGKV1D-16)
QQYNSYPFT

SEQ ID NO: 370 - protein, 13 aa, Homo sapiens
  Heavy chain CDR3 for antibody 185 (IGHV3-33)
ARVDTMVRGVMAY

SEQ ID NO: 371 - protein, 9 aa, Homo sapiens
  Light chain CDR3 for antibody 186 (IGKV3-20)
QQYGSSPYT

SEQ ID NO: 372 - protein, 19 aa, Homo sapiens
  Heavy chain CDR3 for antibody 186 (IGHV3-33)
TRDPHYDILTGYAYYGMDV

SEQ ID NO: 373 - protein, 9 aa, Homo sapiens
  Light chain CDR3 for antibody 187 (IGKV1-6)
LQDYNYPRT

SEQ ID NO: 374 - protein, 12 aa, Homo sapiens
  Heavy chain CDR3 for antibody 187 (IGHV3-33)
ARDSSGWSHFDY

SEQ ID NO: 375 - protein, 9 aa, Homo sapiens
  Light chain CDR3 for antibody 188 (IGKV3-11)
QQRSNWPRT

SEQ ID NO: 376 - protein, 10 aa, Homo sapiens
  Heavy chain CDR3 for antibody 188 (IGHV1-18)
AREQRLGFDY

SEQ ID NO: 377 - protein, 9 aa, Homo sapiens
  Light chain CDR3 for antibody 189 (IGKV3D-7)
QQDYKLPLT

SEQ ID NO: 378 - protein, 11 aa, Homo sapiens
  Heavy chain CDR3 for antibody 189 (IGHV1-46)
AREEDLGAFDI

SEQ ID NO: 379 - protein, 9 aa, Homo sapiens
  Light chain CDR3 for antibody 190 (IGKV1-6)
LQDYNYPLT

SEQ ID NO: 380 - protein, 19 aa, Homo sapiens
  Heavy chain CDR3 for antibody 190 (IGHV3-30)
ARRFSGYSGYDHYYYGMDV

SEQ ID NO: 381 - protein, 9 aa, Homo sapiens
  Light chain CDR3 for antibody 191 (IGKV1-17)
LQHNSYPWT

SEQ ID NO: 382 - protein, 17 aa, Homo sapiens
  Heavy chain CDR3 for antibody 191 (IGHV3-33)
ARDLIGPLSSSWYPFDY

SEQ ID NO: 383 - protein, 9 aa, Homo sapiens
  Light chain CDR3 for antibody 192 (IGKV3D-7)
QQDYNLPYT

SEQ ID NO: 384 - protein, 13 aa, Homo sapiens
  Heavy chain CDR3 for antibody 192 (IGHV1-46)
ARRQVGYYYGMDV

SEQ ID NO: 385 - protein, 9 aa, Homo sapiens
  Light chain CDR3 for antibody 193 (IGKV3-20)
QQYGSSPWT

SEQ ID NO: 386 - protein, 13 aa, Homo sapiens
  Heavy chain CDR3 for antibody 193 (IGHV4-59)
ANRDYYGYYGMDV

SEQ ID NO: 387 - protein, 9 aa, Homo sapiens
  Light chain CDR3 for antibody 194 (IGKV1-6)
LQDYNYPYT

SEQ ID NO: 388 - protein, 13 aa, Homo sapiens
  Heavy chain CDR3 for antibody 194 (IGHV3-33)
ASGYSGYDWYFDL

SEQ ID NO: 389 - protein, 9 aa, Homo sapiens
  Light chain CDR3 for antibody 195 (IGKV3-20)
QQYGSSPYT

SEQ ID NO: 390 - protein, 19 aa, Homo sapiens
  Heavy chain CDR3 for antibody 195 (IGHV3-33)
ARGPYYDILTGYGYYGMDV

SEQ ID NO: 391 - protein, 9 aa, Homo sapiens
  Light chain CDR3 for antibody 196 (IGKV1-9)
QQLNSYPYT

SEQ ID NO: 392 - protein, 12 aa, Homo sapiens
  Heavy chain CDR3 for antibody 196 (IGHV3-h)
AREDYYYYGMDV

SEQ ID NO: 393 - protein, 9 aa, Homo sapiens
  Light chain CDR3 for antibody 197 (IGKV1-16)
QHYNDYPFT

SEQ ID NO: 394 - protein, 14 aa, Homo sapiens
  Heavy chain CDR3 for antibody 197 (IGHV3-33)
VRDQGSMVRGGGDY

SEQ ID NO: 395 - protein, 9 aa, Homo sapiens
  Light chain CDR3 for antibody 198 (IGKV1-6)
LQDYNYPWT

SEQ ID NO: 396 - protein, 16 aa, Homo sapiens
  Heavy chain CDR3 for antibody 198 (IGHV3-33)
ARDNFGSGSYYSHFHY

SEQ ID NO: 397 - protein, 9 aa, Homo sapiens
  Light chain CDR3 for antibody 199 (IGKV1-17)
LQHNSYPYT

SEQ ID NO: 398 - protein, 21 aa, Homo sapiens
  Heavy chain CDR3 for antibody 199 (IGHV3-33)
ARDEYYEIVTGYGYYHYGMDV

SEQ ID NO: 399 - protein, 9 aa, Homo sapiens
  Light chain CDR3 for antibody 200 (IGKV1-5)
QQYNSYSYT

SEQ ID NO: 400 - protein, 26 aa, Homo sapiens
  Heavy chain CDR3 for antibody 200 (IGHV4-39)
ARQGLLWFGDLKAYDSSGYYYGYFHH

SEQ ID NO: 401 - protein, 9 aa, Homo sapiens
  Light chain CDR3 for antibody 201 (IGKV6-21)
HQSSSLPYT

SEQ ID NO: 402 - protein, 12 aa, Homo sapiens
  Heavy chain CDR3 for antibody 201 (IGHV3-13)
ARDRGYSGYFDY

SEQ ID NO: 403 - protein, 9 aa, Homo sapiens
  Light chain CDR3 for antibody 202 (IGKV1-17)
LQHNSYPYT

SEQ ID NO: 404 - protein, 15 aa, Homo sapiens
  Heavy chain CDR3 for antibody 202 (IGHV1-46)
ARGAVDDYYYYGMDV

SEQ ID NO: 405 - protein, 9 aa, Homo sapiens
  Light chain CDR3 for antibody 203 (IGKV1-17)
LQHNSYPLT

SEQ ID NO: 406 - protein, 14 aa, Homo sapiens
  Heavy chain CDR3 for antibody 203 (IGHV1-46)
ARKGIVGAFDAFDI

SEQ ID NO: 407 - protein, 9 aa, Homo sapiens
  Light chain CDR3 for antibody 204 (IGKV1D-13)
QHFNNYMYT

SEQ ID NO: 408 - protein, 17 aa, Homo sapiens
  Heavy chain CDR3 for antibody 204 (IGHV4-39)
ARQGWYYGSGSSLLFDY

SEQ ID NO: 409 - protein, 9 aa, Homo sapiens
  Light chain CDR3 for antibody 205 (IGKV1-9)
QQLNSYPLT

SEQ ID NO: 410 - protein, 12 aa, Homo sapiens
  Heavy chain CDR3 for antibody 205 (IGHV4-59)
ARDSGSYYYFDY

SEQ ID NO: 411 - protein, 9 aa, Homo sapiens
  Light chain CDR3 for antibody 206 (IGKV1D-16)
QQYSSYPYT

SEQ ID NO: 412 - protein, 17 aa, Homo sapiens
  Heavy chain CDR3 for antibody 206 (IGHV3-64)
ARERYYGSGSYYNWFDP

SEQ ID NO: 413 - protein, 9 aa, Homo sapiens
  Light chain CDR3 for antibody 207 (IGKV1-6)
LQDYNYPWT

SEQ ID NO: 414 - protein, 13 aa, Homo sapiens
  Heavy chain CDR3 for antibody 207 (IGHV4-39)
APFRVMVRGVLDY

SEQ ID NO: 415 - protein, 9 aa, Homo sapiens
  Light chain CDR3 for antibody 208 (IGKV1D-13)
QQFNNYPST

SEQ ID NO: 416 - protein, 18 aa, Homo sapiens
  Heavy chain CDR3 for antibody 208 (IGHV3-33)
ARREGITLIFYYYYGMDV

SEQ ID NO: 417 - protein, 10 aa, Homo sapiens
  Light chain CDR3 for antibody 209 (IGKV3-11)
QQRSNWPTWT

SEQ ID NO: 418 - protein, 8 aa, Homo sapiens
  Heavy chain CDR3 for antibody 209 (IGHV3-23)
AKESLLDY

SEQ ID NO: 419 - protein, 9 aa, Homo sapiens
  Light chain CDR3 for antibody 210 (IGKV6-21)
HQSSSLPLT

SEQ ID NO: 420 - protein, 14 aa, Homo sapiens
  Heavy chain CDR3 for antibody 210 (IGHV3-20)
ARDGGSTCYDWFDP

SEQ ID NO: 421 - protein, 9 aa, Homo sapiens
  Light chain CDR3 for antibody 211 (IGKV1-6)
LQDYNSPWT

SEQ ID NO: 422 - protein, 17 aa, Homo sapiens
  Heavy chain CDR3 for antibody 211 (IGHV3-33)
ARVRGVIEGYYYYGMDV

SEQ ID NO: 423 - protein, 9 aa, Homo sapiens
  Light chain CDR3 for antibody 212 (IGKV1-17)
LQHNSYPYT

SEQ ID NO: 424 - protein, 12 aa, Homo sapiens
  Heavy chain CDR3 for antibody 212 (IGHV3-33)
ASRDILTGYLGY

SEQ ID NO: 425 - protein, 9 aa, Homo sapiens
  Light chain CDR3 for antibody 213 (IGKV1-6)
LQDYNYPYT

SEQ ID NO: 426 - protein, 18 aa, Homo sapiens
  Heavy chain CDR3 for antibody 213 (IGHV3-33)
ARERGYYGSDIYPAAFDI

SEQ ID NO: 427 - protein, 9 aa, Homo sapiens
  Light chain CDR3 for antibody 214 (IGKV3D-20)
QQYGSSPLT

SEQ ID NO: 428 - protein, 13 aa, Homo sapiens
  Heavy chain CDR3 for antibody 214 (IGHV4-39)
ARRDGSYYGYFDY

SEQ ID NO: 429 - protein, 9 aa, Homo sapiens
  Light chain CDR3 for antibody 215 (IGKV1D-13)
QQFNNYPWT

SEQ ID NO: 430 - protein, 12 aa, Homo sapiens
  Heavy chain CDR3 for antibody 215 (IGHV4-39)
ARQMVREGWFDP

SEQ ID NO: 431 - protein, 10 aa, Homo sapiens
  Light chain CDR3 for antibody 216 (IGKV3-11)
QQRSNWPMYT

SEQ ID NO: 432 - protein, 9 aa, Homo sapiens
  Heavy chain CDR3 for antibody 216 (IGHV3-23)
AKEQQLFDY

SEQ ID NO: 433 - protein, 9 aa, Homo sapiens
  Light chain CDR3 for antibody 217 (IGKV1-6)
LQDYNYPYT

SEQ ID NO: 434 - protein, 13 aa, Homo sapiens
  Heavy chain CDR3 for antibody 217 (IGHV3-33)
AREYCSGGSCYDY

SEQ ID NO: 435 - protein, 9 aa, Homo sapiens
  Light chain CDR3 for antibody 218 (IGKV1D-16)
QQYNSYPYT

SEQ ID NO: 436 - protein, 13 aa, Homo sapiens
  Heavy chain CDR3 for antibody 218 (IGHV3-11)
ARDGGAAAGTWDS

SEQ ID NO: 437 - protein, 9 aa, Homo sapiens
  Light chain CDR3 for antibody 219 (IGKV1-6)
LQDYNYPRT

SEQ ID NO: 438 - protein, 18 aa, Homo sapiens
  Heavy chain CDR3 for antibody 219 (IGHV4-59)
ARERGNWNDVDYYYGMDV

SEQ ID NO: 439 - protein, 9 aa, Homo sapiens
  Light chain CDR3 for antibody 220 (IGKV3D-7)
QQDYNLPYT

SEQ ID NO: 440 - protein, 13 aa, Homo sapiens
  Heavy chain CDR3 for antibody 220 (IGHV4-39)
ARRDVLAPAAFDY

SEQ ID NO: 441 - protein, 9 aa, Homo sapiens
  Light chain CDR3 for antibody 221 (IGKV1-6)
LQDYNYPWT

SEQ ID NO: 442 - protein, 20 aa, Homo sapiens
  Heavy chain CDR3 for antibody 221 (IGHV3-33)
AREDYYGSGSYYPAYNWFDP

SEQ ID NO: 443 - protein, 9 aa, Homo sapiens
  Light chain CDR3 for antibody 222 (IGKV1-6)
LQDYNLPYT

SEQ ID NO: 444 - protein, 14 aa, Homo sapiens
  Heavy chain CDR3 for antibody 222 (IGHV1-46)
ARDGVGAKEGGFDY

SEQ ID NO: 445 - protein, 9 aa, Homo sapiens
  Light chain CDR3 for antibody 223 (IGKV3D-20)
QQYGRSPRT

SEQ ID NO: 446 - protein, 16 aa, Homo sapiens
  Heavy chain CDR3 for antibody 223 (IGHV1-24)
ATDWNDRGYYYYGMDV

SEQ ID NO: 447 - protein, 9 aa, Homo sapiens
  Light chain CDR3 for antibody 224 (IGKV1-6)
LQDNNYPWT

SEQ ID NO: 448 - protein, 14 aa, Homo sapiens
  Heavy chain CDR3 for antibody 224 (IGHV4-39)
ARQGTMIRGGYFDY

SEQ ID NO: 449 - protein, 9 aa, Homo sapiens
  Light chain CDR3 for antibody 225 (IGKV3-20)
QQYGSSPIT

SEQ ID NO: 450 - protein, 13 aa, Homo sapiens
  Heavy chain CDR3 for antibody 225 (IGHV3-33)
ARIDYYSYYGMDV

SEQ ID NO: 451 - protein, 9 aa, Homo sapiens
  Light chain CDR3 for antibody 226 (IGKV3D-7)
QQDYEFPIT

SEQ ID NO: 452 - protein, 12 aa, Homo sapiens
  Heavy chain CDR3 for antibody 226 (IGHV4-61)
ARVYSSGWLFDY

SEQ ID NO: 453 - protein, 9 aa, Homo sapiens
  Light chain CDR3 for antibody 227 (IGKV1-17)
LQHNSYPRT

SEQ ID NO: 454 - protein, 7 aa, Homo sapiens
  Heavy chain CDR3 for antibody 227 (IGHV3-33)
ARELVDY

SEQ ID NO: 455 - protein, 9 aa, Homo sapiens
  Light chain CDR3 for antibody 228 (IGKV6-21)
HQSYSLPHT

SEQ ID NO: 456 - protein, 9 aa, Homo sapiens
  Heavy chain CDR3 for antibody 228 (IGHV3-33)
AREYKEFDY

SEQ ID NO: 457 - protein, 9 aa, Homo sapiens
  Light chain CDR3 for antibody 229 (IGKV1-17)
LQHNTYPYT

SEQ ID NO: 458 - protein, 13 aa, Homo sapiens
  Heavy chain CDR3 for antibody 229 (IGHV3-33)
ARGVLWFGELFDY

SEQ ID NO: 459 - protein, 9 aa, Homo sapiens
  Light chain CDR3 for antibody 230 (IGKV1D-13)
QQFNNYPST

SEQ ID NO: 460 - protein, 17 aa, Homo sapiens
  Heavy chain CDR3 for antibody 230 (IGHV3-33)
ARGGAAAGPYLYYGLDV

SEQ ID NO: 461 - protein, 9 aa, Homo sapiens
  Light chain CDR3 for antibody 231 (IGKV3-15)
QQYNNWPFT

SEQ ID NO: 462 - protein, 18 aa, Homo sapiens
  Heavy chain CDR3 for antibody 231 (IGHV1-18)
ARDPNYYGSGSYYNYFDY

SEQ ID NO: 463 - protein, 9 aa, Homo sapiens
  Light chain CDR3 for antibody 232 (IGKV3-20)
QQYGRSPRT

SEQ ID NO: 464 - protein, 20 aa, Homo sapiens
  Heavy chain CDR3 for antibody 232 (IGHV1-f)
ATHYDILTGSPYYYYCALDV

SEQ ID NO: 465 - protein, 9 aa, Homo sapiens
  Light chain CDR3 for antibody 233 (IGKV2-30)
MQGTHWPLT

SEQ ID NO: 466 - protein, 13 aa, Homo sapiens
  Heavy chain CDR3 for antibody 233 (IGHV3-33)
ARVDTMVRGVMAY

SEQ ID NO: 467 - protein, 9 aa, Homo sapiens
  Light chain CDR3 for antibody 234 (IGKV1-6)
LQDYNYPWT

SEQ ID NO: 468 - protein, 18 aa, Homo sapiens
  Heavy chain CDR3 for antibody 234 (IGHV3-33)
VRDRERYGSGSYPDAFDI

SEQ ID NO: 469 - protein, 9 aa, Homo sapiens
  Light chain CDR3 for antibody 235 (IGKV5-2)
LQHDNFPWT

SEQ ID NO: 470 - protein, 18 aa, Homo sapiens
  Heavy chain CDR3 for antibody 235 (IGHV4-59)
AREGDYVWGSYRPNWFDP

SEQ ID NO: 471 - protein, 9 aa, Homo sapiens
  Light chain CDR3 for antibody 236 (IGKV6-21)
HQSSSLPYT

SEQ ID NO: 472 - protein, 16 aa, Homo sapiens
  Heavy chain CDR3 for antibody 236 (IGHV3-23)
AKEGEVLRYFDWLFNY

SEQ ID NO: 473 - protein, 9 aa, Homo sapiens
  Light chain CDR3 for antibody 237 (IGKV6-21)
HQSSSLPHT

SEQ ID NO: 474 - protein, 14 aa, Homo sapiens
  Heavy chain CDR3 for antibody 237 (IGHV3-20)
ARDGGSTSFDWFDP

SEQ ID NO: 475 - protein, 9 aa, Homo sapiens
  Light chain CDR3 for antibody 238 (IGKV1D-16)
QQYNSYPYT

SEQ ID NO: 476 - protein, 13 aa, Homo sapiens
  Heavy chain CDR3 for antibody 238 (IGHV3-33)
ARDYTMVRGVMNY

SEQ ID NO: 477 - protein, 9 aa, Homo sapiens
  Light chain CDR3 for antibody 239 (IGKV3D-7)
QQDYNLPWT

SEQ ID NO: 478 - protein, 12 aa, Homo sapiens
  Heavy chain CDR3 for antibody 239 (IGHV3-23)
AKEGLGSDYEPY

SEQ ID NO: 479 - protein, 9 aa, Homo sapiens
  Light chain CDR3 for antibody 240 (IGKV3D-20)
QQYGSSPVT

SEQ ID NO: 480 - protein, 9 aa, Homo sapiens
  Heavy chain CDR3 for antibody 240 (IGHV1-18)
ARGGWGFEY

SEQ ID NO: 481 - protein, 9 aa, Homo sapiens
  Light chain CDR3 for antibody 241 (IGKV3-20)
QQYGSSPLT

SEQ ID NO: 482 - protein, 12 aa, Homo sapiens
  Heavy chain CDR3 for antibody 241 (IGHV1-18)
AGVLFDGDYFDY

SEQ ID NO: 483 - protein, 9 aa, Homo sapiens
  Light chain CDR3 for antibody 242 (IGKV1-9)
QQLNSYPYT

SEQ ID NO: 484 - protein, 15 aa, Homo sapiens
  Heavy chain CDR3 for antibody 242 (IGHV3-74)
ARGSGSHYHYYGMDV

SEQ ID NO: 485 - protein, 9 aa, Homo sapiens
  Light chain CDR3 for antibody 243 (IGKV1D-16)
QQYNSYPLT

SEQ ID NO: 486 - protein, 11 aa, Homo sapiens
  Heavy chain CDR3 for antibody 243 (IGHV3-33)
ARDRSSGPFDY

SEQ ID NO: 487 - protein, 9 aa, Homo sapiens
  Light chain CDR3 for antibody 244 (IGKV3D-20)
QQYGSSPFT

SEQ ID NO: 488 - protein, 15 aa, Homo sapiens
  Heavy chain CDR3 for antibody 244 (IGHV1-46)
ARGRFFDWLLSPFDY

SEQ ID NO: 489 - protein, 9 aa, Homo sapiens
  Light chain CDR3 for antibody 245 (IGKV1-5)
QQYNTYSRT

SEQ ID NO: 490 - protein, 10 aa, Homo sapiens
  Heavy chain CDR3 for antibody 245 (IGHV3-74)
ARENWGGFDY

SEQ ID NO: 491 - protein, 9 aa, Homo sapiens
  Light chain CDR3 for antibody 246 (IGKV1D-13)
QRFNNYLYT

SEQ ID NO: 492 - protein, 20 aa, Homo sapiens
  Heavy chain CDR3 for antibody 246 (IGHV3-33)
ARDPAQLERRYYYFYYGMDV

SEQ ID NO: 493 - protein, 9 aa, Homo sapiens
  Light chain CDR3 for antibody 247 (IGKV1D-13)
QQFNNYPYT

SEQ ID NO: 494 - protein, 15 aa, Homo sapiens
  Heavy chain CDR3 for antibody 247 (IGHV3-23)
AKDGGWNYYYYGMDV

SEQ ID NO: 495 - protein, 9 aa, Homo sapiens
  Light chain CDR3 for antibody 248 (IGKV6-21)
HQSSSLPYT

SEQ ID NO: 496 - protein, 14 aa, Homo sapiens
  Heavy chain CDR3 for antibody 248 (IGHV4-39)
ARHGYYGSSNWFDP

SEQ ID NO: 497 - protein, 9 aa, Homo sapiens
  Light chain CDR3 for antibody 249 (IGKV1-17)
LQHNSYPYT

SEQ ID NO: 498 - protein, 10 aa, Homo sapiens
  Heavy chain CDR3 for antibody 249 (IGHV3-30)
AREWYGGMDV

SEQ ID NO: 499 - protein, 9 aa, Homo sapiens
  Light chain CDR3 for antibody 250 (IGKV1-6)
LQDYNYPFT

SEQ ID NO: 500 - protein, 14 aa, Homo sapiens
  Heavy chain CDR3 for antibody 250 (IGHV3-33)
ARRGYSGYDWYFDY

SEQ ID NO: 501 - protein, 9 aa, Homo sapiens
  Light chain CDR3 for antibody 251 (IGKV1-6)
LQDYNYPYT

SEQ ID NO: 502 - protein, 18 aa, Homo sapiens
  Heavy chain CDR3 for antibody 251 (IGHV3-33)
ARDQYSGYDFYYYYGMDV

SEQ ID NO: 503 - protein, 9 aa, Homo sapiens
  Light chain CDR3 for antibody 252 (IGKV1D-16)
QQYNSYPPT

SEQ ID NO: 504 - protein, 17 aa, Homo sapiens
  Heavy chain CDR3 for antibody 252 (IGHV3-33)
ARQGVLLWFGELYYFDY

SEQ ID NO: 505 - protein, 9 aa, Homo sapiens
  Light chain CDR3 for antibody 253 (IGKV1-6)
LQDFHYPWT

SEQ ID NO: 506 - protein, 23 aa, Homo sapiens
  Heavy chain CDR3 for antibody 253 (IGHV3-11)
ARDEGVTMVRGVISYYYYYGMDV

SEQ ID NO: 507 - protein, 9 aa, Homo sapiens
  Light chain CDR3 for antibody 254 (IGKV1-6)
LQDYNYPRT

SEQ ID NO: 508 - protein, 14 aa, Homo sapiens
  Heavy chain CDR3 for antibody 254 (IGHV3-33)
AREDYYGPLNWFDP

SEQ ID NO: 509 - protein, 9 aa, Homo sapiens
  Light chain CDR3 for antibody 255 (IGKV1-6)
LQDYNYPWT

SEQ ID NO: 510 - protein, 16 aa, Homo sapiens
  Heavy chain CDR3 for antibody 255 (IGHV3-30)
ARDIAVAGHVYYGMDV

SEQ ID NO: 511 - protein, 9 aa, Homo sapiens
  Light chain CDR3 for antibody 256 (IGKV5-2)
LQHDNFPWT

SEQ ID NO: 512 - protein, 13 aa, Homo sapiens
  Heavy chain CDR3 for antibody 256 (IGHV3-33)
ARDYCGGDCYLDY

SEQ ID NO: 513 - protein, 9 aa, Homo sapiens
  Light chain CDR3 for antibody 257 (IGKV1-6)
LQDYNYPYT

SEQ ID NO: 514 - protein, 16 aa, Homo sapiens
  Heavy chain CDR3 for antibody 257 (IGHV3-33)
ARGDDILTHQYYGVDV

SEQ ID NO: 515 - protein, 9 aa, Homo sapiens
  Light chain CDR3 for antibody 258 (IGKV1-33)
QQYDNLPFT

SEQ ID NO: 516 - protein, 18 aa, Homo sapiens
  Heavy chain CDR3 for antibody 258 (IGHV3-30)
ARDRHHDILTGYSDAFEI

SEQ ID NO: 517 - protein, 9 aa, Homo sapiens
  Light chain CDR3 for antibody 259 (IGKV1-6)
LQDYNYPYT

SEQ ID NO: 518 - protein, 16 aa, Homo sapiens
  Heavy chain CDR3 for antibody 259 (IGHV3-13)
ARDRSYESYYYYGMDV

SEQ ID NO: 519 - protein, 9 aa, Homo sapiens
  Light chain CDR3 for antibody 260 (IGKV1-6)
LQDYNYPFT

SEQ ID NO: 520 - protein, 16 aa, Homo sapiens
  Heavy chain CDR3 for antibody 260 (IGHV3-33)
ARDKNTDYDILTGFDY

SEQ ID NO: 521 - protein, 10 aa, Homo sapiens
  Light chain CDR3 for antibody 261 (IGKV1-17)
LQHNSYPMYT

SEQ ID NO: 522 - protein, 9 aa, Homo sapiens
  Heavy chain CDR3 for antibody 261 (IGHV3-23)
ARIWWLKDY

SEQ ID NO: 523 - protein, 9 aa, Homo sapiens
  Light chain CDR3 for antibody 262 (IGKV1D-16)
QQYNSYPYT

SEQ ID NO: 524 - protein, 13 aa, Homo sapiens
  Heavy chain CDR3 for antibody 262 (IGHV3-21)
ARDSTLVRGVFPY

SEQ ID NO: 525 - protein, 9 aa, Homo sapiens
  Light chain CDR3 for antibody 263 (IGKV3-20)
QQYGSSPLT

SEQ ID NO: 526 - protein, 14 aa, Homo sapiens
  Heavy chain CDR3 for antibody 263 (IGHV1-24)
ATWLPLYYYYGMDV

SEQ ID NO: 527 - protein, 9 aa, Homo sapiens
  Light chain CDR3 for antibody 264 (IGKV1-6)
LQDYNYPWT

SEQ ID NO: 528 - protein, 18 aa, Homo sapiens
  Heavy chain CDR3 for antibody 264 (IGHV3-33)
AREGDYYGSGGFPNWFDP

SEQ ID NO: 529 - protein, 9 aa, Homo sapiens
  Light chain CDR3 for antibody 265 (IGKV1-6)
LQDYNYPWT

SEQ ID NO: 530 - protein, 17 aa, Homo sapiens
  Heavy chain CDR3 for antibody 265 (IGHV3-33)
ARGDGDILTGYYEWFDP

SEQ ID NO: 531 - protein, 10 aa, Homo sapiens
  Light chain CDR3 for antibody 266 (IGKV3-11)
QQRSNWPPFT

SEQ ID NO: 532 - protein, 17 aa, Homo sapiens
  Heavy chain CDR3 for antibody 266 (IGHV3-23)
AKDYDILTGYSHNWFDP

SEQ ID NO: 533 - protein, 8 aa, Homo sapiens
  Light chain CDR3 for antibody 267 (IGKV3-11)
LQRGNWPT

SEQ ID NO: 534 - protein, 14 aa, Homo sapiens
  Heavy chain CDR3 for antibody 267 (IGHV3-15)
SIYYYGSGRDFFDY

SEQ ID NO: 535 - protein, 9 aa, Homo sapiens
  Light chain CDR3 for antibody 268 (IGKV1-9)
QQLNSYPLT

SEQ ID NO: 536 - protein, 13 aa, Homo sapiens
  Heavy chain CDR3 for antibody 268 (IGHV3-23)
AKDRGYSSTSTAY

SEQ ID NO: 537 - protein, 9 aa, Homo sapiens
  Light chain CDR3 for antibody 269 (IGKV1-6)
LQDYNYPYT

SEQ ID NO: 538 - protein, 19 aa, Homo sapiens
  Heavy chain CDR3 for antibody 269 (IGHV1-24)
ATAGLQWFGEKIGYYGMDV

SEQ ID NO: 539 - protein, 9 aa, Homo sapiens
  Light chain CDR3 for antibody 270 (IGKV1-6)
LQDYNYPYT

SEQ ID NO: 540 - protein, 17 aa, Homo sapiens
  Heavy chain CDR3 for antibody 270 (IGHV4-39)
AGRLTYYYGSGSPSFDY

SEQ ID NO: 541 - protein, 9 aa, Homo sapiens
  Light chain CDR3 for antibody 271 (IGKV1-6)
LQDYNYPRT

SEQ ID NO: 542 - protein, 14 aa, Homo sapiens
  Heavy chain CDR3 for antibody 271 (IGHV4-59)
AKGGSGSYYNWFDP

SEQ ID NO: 543 - protein, 9 aa, Homo sapiens
  Light chain CDR3 for antibody 272 (IGKV1D-16)
QQYNSYPLT

SEQ ID NO: 544 - protein, 19 aa, Homo sapiens
  Heavy chain CDR3 for antibody 272 (IGHV4-59)
ARDRVVGATTYYYYYGMDV

SEQ ID NO: 545 - protein, 9 aa, Homo sapiens
  Light chain CDR3 for antibody 273 (IGKV1-6)
LQDYNYPYT

SEQ ID NO: 546 - protein, 15 aa, Homo sapiens
  Heavy chain CDR3 for antibody 273 (IGHV4-39)
ARRDYDILTGYLFDY

SEQ ID NO: 547 - protein, 9 aa, Homo sapiens
  Light chain CDR3 for antibody 274 (IGKV1-6)
LQDYNYPYT

SEQ ID NO: 548 - protein, 18 aa, Homo sapiens
  Heavy chain CDR3 for antibody 274 (IGHV3-13)
ARDYYGSGSLYYYYGMDV

SEQ ID NO: 549 - protein, 9 aa, Homo sapiens
  Light chain CDR3 for antibody 275 (IGKV1-17)
LQHNSYPFT

SEQ ID NO: 550 - protein, 8 aa, Homo sapiens
  Heavy chain CDR3 for antibody 275 (IGHV3-33)
ARDRGFDY

SEQ ID NO: 551 - protein, 9 aa, Homo sapiens
  Light chain CDR3 for antibody 276 (IGKV1-39)
QQSYSTPFT

SEQ ID NO: 552 - protein, 16 aa, Homo sapiens
  Heavy chain CDR3 for antibody 276 (IGHV3-33)
ARDGSMVRRIHDAFDF

SEQ ID NO: 553 - protein, 9 aa, Homo sapiens
  Light chain CDR3 for antibody 277 (IGKV1-6)
LQDYNYPYT

SEQ ID NO: 554 - protein, 15 aa, Homo sapiens
  Heavy chain CDR3 for antibody 277 (IGHV3-33)
AREGLRYFHYYGMDV

SEQ ID NO: 555 - protein, 9 aa, Homo sapiens
  Light chain CDR3 for antibody 278 (IGKV1-6)
LQDYNYPFT

SEQ ID NO: 556 - protein, 13 aa, Homo sapiens
  Heavy chain CDR3 for antibody 278 (IGHV3-23)
AKDRGLRYYGMDV

SEQ ID NO: 557 - protein, 9 aa, Homo sapiens
  Light chain CDR3 for antibody 279 (IGKV1D-16)
QQYNSYPLT

SEQ ID NO: 558 - protein, 11 aa, Homo sapiens
  Heavy chain CDR3 for antibody 279 (IGHV4-59)
TRDRGLGSFDY

SEQ ID NO: 559 - protein, 9 aa, Homo sapiens
  Light chain CDR3 for antibody 280 (IGKV1-9)
QQLNSYPLT

SEQ ID NO: 560 - protein, 13 aa, Homo sapiens
  Heavy chain CDR3 for antibody 280 (IGHV3-30)
AAPFMVRGDGMDV

SEQ ID NO: 561 - protein, 9 aa, Homo sapiens
  Light chain CDR3 for antibody 281 (IGKV3-20)
QQYGSSPYT

SEQ ID NO: 562 - protein, 11 aa, Homo sapiens
  Heavy chain CDR3 for antibody 281 (IGHV3-33)
ARDRSSGPFDY

SEQ ID NO: 563 - protein, 7 aa, Homo sapiens
  Light chain CDR3 for antibody 282 (IGKV1-17)
LQHNSYP

SEQ ID NO: 564 - protein, 15 aa, Homo sapiens
  Heavy chain CDR3 for antibody 282 (IGHV1-18)
ARRSPNWGHYYGMDV

SEQ ID NO: 565 - protein, 9 aa, Homo sapiens
  Light chain CDR3 for antibody 283 (IGKV3-20)
QQYGSSPWT

SEQ ID NO: 566 - protein, 15 aa, Homo sapiens
  Heavy chain CDR3 for antibody 283 (IGHV4-39)
ARHSGYSSGWYPFDY

SEQ ID NO: 567 - protein, 9 aa, Homo sapiens
  Light chain CDR3 for antibody 284 (IGKV1D-16)
QQYNSYPYT

SEQ ID NO: 568 - protein, 13 aa, Homo sapiens
  Heavy chain CDR3 for antibody 284 (IGHV3-66)
ANTGDSYYYGFYV

SEQ ID NO: 569 - protein, 9 aa, Homo sapiens
  Light chain CDR3 for antibody 285 (IGKV3-20)
QQYGSSPYT

SEQ ID NO: 570 - protein, 13 aa, Homo sapiens
  Heavy chain CDR3 for antibody 285 (IGHV4-59)
ARDAGYSSSWFDY

SEQ ID NO: 571 - protein, 9 aa, Homo sapiens
  Light chain CDR3 for antibody 286 (IGKV1-9)
QQLNSYPYT

SEQ ID NO: 572 - protein, 24 aa, Homo sapiens
  Heavy chain CDR3 for antibody 286 (IGHV1-46)
ARDEARGLLTGYYNMREYYYGMDV

SEQ ID NO: 573 - protein, 9 aa, Homo sapiens
  Light chain CDR3 for antibody 287 (IGKV2-30)
MQGTHWPLT

SEQ ID NO: 574 - protein, 13 aa, Homo sapiens
  Heavy chain CDR3 for antibody 287 (IGHV3-11)
ARDEGYSGYNLDN

SEQ ID NO: 575 - protein, 9 aa, Homo sapiens
  Light chain CDR3 for antibody 288 (IGKV3-20)
QQYGISPYT

SEQ ID NO: 576 - protein, 17 aa, Homo sapiens
  Heavy chain CDR3 for antibody 288 (IGHV1-24)
ATHYGSGSHYKGYGMDV

SEQ ID NO: 577 - protein, 9 aa, Homo sapiens
  Light chain CDR3 for antibody 289 (IGKV1-6)
LQDYNYPYT

SEQ ID NO: 578 - protein, 19 aa, Homo sapiens
  Heavy chain CDR3 for antibody 289 (IGHV3-33)
ARDSGYSGYDYYYYYGMDV

SEQ ID NO: 579 - protein, 9 aa, Homo sapiens
  Light chain CDR3 for antibody 290 (IGKV1-9)
QQLNSYPLT

SEQ ID NO: 580 - protein, 12 aa, Homo sapiens
  Heavy chain CDR3 for antibody 290 (IGHV1-18)
ARRDGSGTSFDY

SEQ ID NO: 581 - protein, 9 aa, Homo sapiens
  Light chain CDR3 for antibody 291 (IGKV5-2)
LQHDAFPTT

SEQ ID NO: 582 - protein, 17 aa, Homo sapiens
  Heavy chain CDR3 for antibody 291 (IGHV4-61)
ARNTMVGTWQRQGNLDH

SEQ ID NO: 583 - protein, 9 aa, Homo sapiens
  Light chain CDR3 for antibody 292 (IGKV3D-20)
QQYGSSPFT

SEQ ID NO: 584 - protein, 15 aa, Homo sapiens
  Heavy chain CDR3 for antibody 292 (IGHV4-39)
ARQGLVATIKGYFQH

SEQ ID NO: 585 - protein, 9 aa, Homo sapiens
  Light chain CDR3 for antibody 293 (IGKV1-16)
QQYNSYPPT

SEQ ID NO: 586 - protein, 15 aa, Homo sapiens
  Heavy chain CDR3 for antibody 293 (IGHV3-23)
AKEFTMVRGVITPDY

SEQ ID NO: 587 - protein, 9 aa, Homo sapiens
  Light chain CDR3 for antibody 294 (IGKV1-6)
LQDYNYPRT

SEQ ID NO: 588 - protein, 12 aa, Homo sapiens
  Heavy chain CDR3 for antibody 294 (IGHV3-33)
ARDGYSSRNFDY

SEQ ID NO: 589 - protein, 9 aa, Homo sapiens
  Light chain CDR3 for antibody 295 (IGKV3D-20)
HQYGSSPLT

SEQ ID NO: 590 - protein, 19 aa, Homo sapiens
  Heavy chain CDR3 for antibody 295 (IGHV4-39)
ARQGDVLRYFDWLLGAFDI

SEQ ID NO: 591 - protein, 11 aa, Homo sapiens
  Light chain CDR3 for antibody 296 (IGKV3-11)
QQRSNWPPMYT

SEQ ID NO: 592 - protein, 17 aa, Homo sapiens
  Heavy chain CDR3 for antibody 296 (IGHV4-59)
AREGADSGIYYHWYFDL

SEQ ID NO: 593 - protein, 9 aa, Homo sapiens
  Light chain CDR3 for antibody 297 (IGKV2D-24)
TQATQFPHT

SEQ ID NO: 594 - protein, 18 aa, Homo sapiens
  Heavy chain CDR3 for antibody 297 (IGHV1-18)
ARDPTFYYVSGSYYKFDY

SEQ ID NO: 595 - protein, 9 aa, Homo sapiens
  Light chain CDR3 for antibody 298 (IGKV1D-13)
QQFNNYPYT

SEQ ID NO: 596 - protein, 16 aa, Homo sapiens
  Heavy chain CDR3 for antibody 298 (IGHV4-59)
ARFYFGSGSYYWYFDL

SEQ ID NO: 597 - protein, 9 aa, Homo sapiens
  Light chain CDR3 for antibody 299 (IGKV1D-16)
QQYNSYPYT

SEQ ID NO: 598 - protein, 9 aa, Homo sapiens
  Heavy chain CDR3 for antibody 299 (IGHV1-18)
ARGKDWFDP

SEQ ID NO: 599 - protein, 9 aa, Homo sapiens
  Light chain CDR3 for antibody 300 (IGKV1-6)
LQDYNYPWT

SEQ ID NO: 600 - protein, 11 aa, Homo sapiens
  Heavy chain CDR3 for antibody 300 (IGHV3-33)
ARGTTVTHFDY

SEQ ID NO: 601 - protein, 9 aa, Homo sapiens
  Light chain CDR3 for antibody 301 (IGKV1-9)
QQLNSYPLT

SEQ ID NO: 602 - protein, 18 aa, Homo sapiens
  Heavy chain CDR3 for antibody 301 (IGHV1-8)
AREGAAAGSYYYYNGMDV

SEQ ID NO: 603 - protein, 9 aa, Homo sapiens
  Light chain CDR3 for antibody 302 (IGKV3-20)
QQYGSSPWT

SEQ ID NO: 604 - protein, 17 aa, Homo sapiens
  Heavy chain CDR3 for antibody 302 (IGHV4-59)
ARDRELLWFGEFGGMDV

SEQ ID NO: 605 - protein, 9 aa, Homo sapiens
  Light chain CDR3 for antibody 303 (IGKV1-17)
LQHNSYPFT

SEQ ID NO: 606 - protein, 17 aa, Homo sapiens
  Heavy chain CDR3 for antibody 303 (IGHV3-33)
ARGGGYENDHYYYGMDV

SEQ ID NO: 607 - protein, 9 aa, Homo sapiens
  Light chain CDR3 for antibody 304 (IGKV1-6)
LQVYSYPWT

SEQ ID NO: 608 - protein, 17 aa, Homo sapiens
  Heavy chain CDR3 for antibody 304 (IGHV3-33)
ARSPYDILTGYSYYFDY

SEQ ID NO: 609 - protein, 9 aa, Homo sapiens
  Light chain CDR3 for antibody 305 (IGKV6-21)
HQSSSLPRT

SEQ ID NO: 610 - protein, 14 aa, Homo sapiens
  Heavy chain CDR3 for antibody 305 (IGHV3-20)
ARDEGSGGYDVFDI

SEQ ID NO: 611 - protein, 9 aa, Homo sapiens
  Light chain CDR3 for antibody 306 (IGKV1-6)
LQDYNYPWT

SEQ ID NO: 612 - protein, 15 aa, Homo sapiens
  Heavy chain CDR3 for antibody 306 (IGHV3-33)
ARDRVVRGVMGYFDY

SEQ ID NO: 613 - protein, 9 aa, Homo sapiens
  Light chain CDR3 for antibody 307 (IGKV2D-28)
MQVLQTPFT

SEQ ID NO: 614 - protein, 16 aa, Homo sapiens
  Heavy chain CDR3 for antibody 307 (IGHV4-59)
AGGSGSYRDYYYGMDV

SEQ ID NO: 615 - protein, 9 aa, Homo sapiens
  Light chain CDR3 for antibody 308 (IGKV1-9)
QQLNSYPRT

SEQ ID NO: 616 - protein, 12 aa, Homo sapiens
  Heavy chain CDR3 for antibody 308 (IGHV3-33)
AREGTGGNWFDP

SEQ ID NO: 617 - protein, 9 aa, Homo sapiens
  Light chain CDR3 for antibody 309 (IGKV1-6)
LQDYNYPYT

SEQ ID NO: 618 - protein, 14 aa, Homo sapiens
  Heavy chain CDR3 for antibody 309 (IGHV4-39)
ARRGVVVPPGGMDV

SEQ ID NO: 619 - protein, 9 aa, Homo sapiens
  Light chain CDR3 for antibody 310 (IGKV1-17)
LQHNSYPYT

SEQ ID NO: 620 - protein, 13 aa, Homo sapiens
  Heavy chain CDR3 for antibody 310 (IGHV3-33)
ARDYCGGDCYLDY

SEQ ID NO: 621 - protein, 9 aa, Homo sapiens
  Light chain CDR3 for antibody 311 (IGKV3D-20)
QQYGSSPWT

SEQ ID NO: 622 - protein, 9 aa, Homo sapiens
  Heavy chain CDR3 for antibody 311 (IGHV3-30)
ARPNWGFDY

SEQ ID NO: 623 - protein, 9 aa, Homo sapiens
  Light chain CDR3 for antibody 312 (IGKV3D-7)
QQDYNLPWT

SEQ ID NO: 624 - protein, 13 aa, Homo sapiens
  Heavy chain CDR3 for antibody 312 (IGHV4-39)
ARRGVVAPAAFDY

SEQ ID NO: 625 - protein, 9 aa, Homo sapiens
  Light chain CDR3 for antibody 313 (IGKV6-21)
HQSSSLPYT

SEQ ID NO: 626 - protein, 15 aa, Homo sapiens
  Heavy chain CDR3 for antibody 313 (IGHV3-33)
ARDHLTGYYYYGMDV

SEQ ID NO: 627 - protein, 8 aa, Homo sapiens
  Light chain CDR3 for antibody 314 (IGKV1-5)
QQYNSYYT

SEQ ID NO: 628 - protein, 16 aa, Homo sapiens
  Heavy chain CDR3 for antibody 314 (IGHV3-20)
AREGYSSSWFDRNFDY

SEQ ID NO: 629 - protein, 9 aa, Homo sapiens
  Light chain CDR3 for antibody 315 (IGKV1-17)
LQHNSYPYT

SEQ ID NO: 630 - protein, 10 aa, Homo sapiens
  Heavy chain CDR3 for antibody 315 (IGHV3-33)
AREWFGGFDI

SEQ ID NO: 631 - protein, 9 aa, Homo sapiens
  Light chain CDR3 for antibody 316 (IGKV6-21)
HQSSSLPYT

SEQ ID NO: 632 - protein, 11 aa, Homo sapiens
  Heavy chain CDR3 for antibody 316 (IGHV3-33)
ARDRATATVDY

SEQ ID NO: 633 - protein, 9 aa, Homo sapiens
  Light chain CDR3 for antibody 317 (IGKV1D-16)
QQYNSYPYT

SEQ ID NO: 634 - protein, 17 aa, Homo sapiens
  Heavy chain CDR3 for antibody 317 (IGHV1-18)
ARDEGYDILTGYPHFDY

SEQ ID NO: 635 - protein, 9 aa, Homo sapiens
  Light chain CDR3 for antibody 318 (IGKV3D-20)
QQYGTSPYT

SEQ ID NO: 636 - protein, 18 aa, Homo sapiens
  Heavy chain CDR3 for antibody 318 (IGHV3-33)
ARGGYDILTGYYRTGMDV

SEQ ID NO: 637 - protein, 9 aa, Homo sapiens
  Light chain CDR3 for antibody 319 (IGKV1-6)
LQDYNYPWT

SEQ ID NO: 638 - protein, 13 aa, Homo sapiens
  Heavy chain CDR3 for antibody 319 (IGHV3-33)
ARDSSSWYHWFDP

SEQ ID NO: 639 - protein, 9 aa, Homo sapiens
  Light chain CDR3 for antibody 320 (IGKV5-2)
LQHDNFPYT

SEQ ID NO: 640 - protein, 16 aa, Homo sapiens
  Heavy chain CDR3 for antibody 320 (IGHV3-23)
AKEGMVLRYFDWLWDY

SEQ ID NO: 641 - protein, 10 aa, Homo sapiens
  Light chain CDR3 for antibody 321 (IGKV1-17)
LQHNSYPMYT

SEQ ID NO: 642 - protein, 11 aa, Homo sapiens
  Heavy chain CDR3 for antibody 321 (IGHV3-23)
ARDPGSITGDY

SEQ ID NO: 643 - protein, 9 aa, Homo sapiens
  Light chain CDR3 for antibody 322 (IGKV6-21)
HQSRSLPYT

SEQ ID NO: 644 - protein, 14 aa, Homo sapiens
  Heavy chain CDR3 for antibody 322 (IGHV4-39)
ARQGGSGSYYNLDY

SEQ ID NO: 645 - protein, 9 aa, Homo sapiens
  Light chain CDR3 for antibody 323 (IGKV1-6)
LQDYNYPYT

SEQ ID NO: 646 - protein, 12 aa, Homo sapiens
  Heavy chain CDR3 for antibody 323 (IGHV1-46)
ARGLTGDHAVDI

SEQ ID NO: 647 - protein, 9 aa, Homo sapiens
  Light chain CDR3 for antibody 324 (IGKV2D-28)
MQALQTPPT

SEQ ID NO: 648 - protein, 17 aa, Homo sapiens
  Heavy chain CDR3 for antibody 324 (IGHV3-23)
AKDTITMVRGALFGMDV

SEQ ID NO: 649 - protein, 9 aa, Homo sapiens
  Light chain CDR3 for antibody 325 (IGKV4-1)
QQYYSTPLT

SEQ ID NO: 650 - protein, 15 aa, Homo sapiens
  Heavy chain CDR3 for antibody 325 (IGHV1-18)
ARIYYGSGSSYYFDY

SEQ ID NO: 651 - protein, 9 aa, Homo sapiens
  Light chain CDR3 for antibody 326 (IGKV1-6)
LQDYNYPYT

SEQ ID NO: 652 - protein, 17 aa, Homo sapiens
  Heavy chain CDR3 for antibody 326 (IGHV3-33)
AREDYDILTGYPFYFDY

SEQ ID NO: 653 - protein, 9 aa, Homo sapiens
  Light chain CDR3 for antibody 327 (IGKV1-17)
LQHNSYPYT

SEQ ID NO: 654 - protein, 15 aa, Homo sapiens
  Heavy chain CDR3 for antibody 327 (IGHV3-30)
ARGAMVRGVDYGMDV

SEQ ID NO: 655 - protein, 9 aa, Homo sapiens
  Light chain CDR3 for antibody 328 (IGKV1-16)
QQYDSYPPT

SEQ ID NO: 656 - protein, 15 aa, Homo sapiens
  Heavy chain CDR3 for antibody 328 (IGHV3-33)
ARAYDLPHYYYGMDV

SEQ ID NO: 657 - protein, 9 aa, Homo sapiens
  Light chain CDR3 for antibody 329 (IGKV3D-7)
QQDYNLPFT

SEQ ID NO: 658 - protein, 15 aa, Homo sapiens
  Heavy chain CDR3 for antibody 329 (IGHV3-23)
AKDRDYDFLSGPFDY

SEQ ID NO: 659 - protein, 10 aa, Homo sapiens
  Light chain CDR3 for antibody 330 (IGKV3-15)
QQYNNWPPYT

SEQ ID NO: 660 - protein, 11 aa, Homo sapiens
  Heavy chain CDR3 for antibody 330 (IGHV1-24)
ATYFGSGSLDY

SEQ ID NO: 661 - protein, 9 aa, Homo sapiens
  Light chain CDR3 for antibody 331 (IGKV1-17)
LQHNSYPRT

SEQ ID NO: 662 - protein, 17 aa, Homo sapiens
  Heavy chain CDR3 for antibody 331 (IGHV3-23)
AKEYCSGGSCYVYYFDY

SEQ ID NO: 663 - protein, 9 aa, Homo sapiens
  Light chain CDR3 for antibody 332 (IGKV1D-17)
LQHNSYPYT

SEQ ID NO: 664 - protein, 10 aa, Homo sapiens
  Heavy chain CDR3 for antibody 332 (IGHV3-33)
ARNILTPLDY

SEQ ID NO: 665 - protein, 9 aa, Homo sapiens
  Light chain CDR3 for antibody 333 (IGKV6-21)
HQSSSLPYT

SEQ ID NO: 666 - protein, 11 aa, Homo sapiens
  Heavy chain CDR3 for antibody 333 (IGHV3-33)
ARDRSSGPFDY

SEQ ID NO: 667 - protein, 9 aa, Homo sapiens
  Light chain CDR3 for antibody 334 (IGKV3D-7)
QQDYNLPYS

SEQ ID NO: 668 - protein, 13 aa, Homo sapiens
  Heavy chain CDR3 for antibody 334 (IGHV1-18)
ARGGGVRGAPLDY

SEQ ID NO: 669 - protein, 9 aa, Homo sapiens
  Light chain CDR3 for antibody 335 (IGKV1-6)
LQDYNYPYT

SEQ ID NO: 670 - protein, 18 aa, Homo sapiens
  Heavy chain CDR3 for antibody 335 (IGHV1-46)
ARDGDYVWGSYRSDWFDP

SEQ ID NO: 671 - protein, 9 aa, Homo sapiens
  Light chain CDR3 for antibody 336 (IGKV1-17)
LQHNSYPRT

SEQ ID NO: 672 - protein, 17 aa, Homo sapiens
  Heavy chain CDR3 for antibody 336 (IGHV3-33)
ARSGIVGATDYYYGLDV

SEQ ID NO: 673 - protein, 9 aa, Homo sapiens
  Light chain CDR3 for antibody 337 (IGKV3D-7)
QQDSNLPYT

SEQ ID NO: 674 - protein, 14 aa, Homo sapiens
  Heavy chain CDR3 for antibody 337 (IGHV4-39)
ARRGVVVPPGGMDV

SEQ ID NO: 675 - protein, 9 aa, Homo sapiens
  Light chain CDR3 for antibody 338 (IGKV1D-16)
QQYNSYPYT

SEQ ID NO: 676 - protein, 13 aa, Homo sapiens
  Heavy chain CDR3 for antibody 338 (IGHV3-33)
ARKAYGDYFYFDY

SEQ ID NO: 677 - protein, 9 aa, Homo sapiens
  Light chain CDR3 for antibody 339 (IGKV1-9)
QQLNSYPYT

SEQ ID NO: 678 - protein, 14 aa, Homo sapiens
  Heavy chain CDR3 for antibody 339 (IGHV1-46)
ARSYYDILTGAFDI

SEQ ID NO: 679 - protein, 9 aa, Homo sapiens
  Light chain CDR3 for antibody 340 (IGKV1-6)
LQDYNYPYT

SEQ ID NO: 680 - protein, 18 aa, Homo sapiens
  Heavy chain CDR3 for antibody 340 (IGHV3-33)
ARDYDSLTTYPEDYGMDV

SEQ ID NO: 681 - protein, 8 aa, Homo sapiens
  Light chain CDR3 for antibody 341 (IGKV3-15)
QQYNNWPT

SEQ ID NO: 682 - protein, 18 aa, Homo sapiens
  Heavy chain CDR3 for antibody 341 (IGHV3-33)
ARDQGIVVLPGAPWYFDP

SEQ ID NO: 683 - protein, 9 aa, Homo sapiens
  Light chain CDR3 for antibody 342 (IGKV1D-13)
QQFNNYPRT

SEQ ID NO: 684 - protein, 18 aa, Homo sapiens
  Heavy chain CDR3 for antibody 342 (IGHV3-33)
ARDEYYGSGIYYNYGMDV

SEQ ID NO: 685 - protein, 9 aa, Homo sapiens
  Light chain CDR3 for antibody 343 (IGKV5-2)
LQHDNFPYT

SEQ ID NO: 686 - protein, 11 aa, Homo sapiens
  Heavy chain CDR3 for antibody 343 (IGHV3-33)
ARDRSSGPFDY

SEQ ID NO: 687 - protein, 8 aa, Homo sapiens
  Light chain CDR3 for antibody 344 (IGKV1-5)
QQYNSYYT

SEQ ID NO: 688 - protein, 13 aa, Homo sapiens
  Heavy chain CDR3 for antibody 344 (IGHV3-23)
AKDRGGSYSYFDF

SEQ ID NO: 689 - protein, 9 aa, Homo sapiens
  Light chain CDR3 for antibody 345 (IGKV1D-16)
QQYSSYPYT

SEQ ID NO: 690 - protein, 13 aa, Homo sapiens
  Heavy chain CDR3 for antibody 345 (IGHV3-23)
ASTGDSYYYGMDV

SEQ ID NO: 691 - protein, 10 aa, Homo sapiens
  Light chain CDR3 for antibody 346 (IGKV1-27)
QKYNSAPMYT

SEQ ID NO: 692 - protein, 8 aa, Homo sapiens
  Heavy chain CDR3 for antibody 346 (IGHV4-39)
ARRGGLDY

SEQ ID NO: 693 - protein, 9 aa, Homo sapiens
  Light chain CDR3 for antibody 347 (IGKV3D-7)
QQDYNLPLT

SEQ ID NO: 694 - protein, 17 aa, Homo sapiens
  Heavy chain CDR3 for antibody 347 (IGHV3-15)
TTERYPRRYYYYFGMDV

SEQ ID NO: 695 - protein, 9 aa, Homo sapiens
  Light chain CDR3 for antibody 348 (IGKV1-9)
QQLNSYPRT

SEQ ID NO: 696 - protein, 13 aa, Homo sapiens
  Heavy chain CDR3 for antibody 348 (IGHV1-24)
ATGYSINWYEFDY

SEQ ID NO: 697 - protein, 9 aa, Homo sapiens
  Light chain CDR3 for antibody 349 (IGKV1D-16)
QQYNSYPYT

SEQ ID NO: 698 - protein, 13 aa, Homo sapiens
  Heavy chain CDR3 for antibody 349 (IGHV3-53)
ARSGSYWGYYFDY

SEQ ID NO: 699 - protein, 9 aa, Homo sapiens
  Light chain CDR3 for antibody 350 (IGKV1-17)
LQHNSYPYT

SEQ ID NO: 700 - protein, 11 aa, Homo sapiens
  Heavy chain CDR3 for antibody 350 (IGHV4-59)
VRERGYYGMDV

SEQ ID NO: 701 - protein, 9 aa, Homo sapiens
  Light chain CDR3 for antibody 351 (IGKV1-6)
LQDYNYPWT

SEQ ID NO: 702 - protein, 19 aa, Homo sapiens
  Heavy chain CDR3 for antibody 351 (IGHV3-33)
AREDYYGSGSYYNEDWFDP

SEQ ID NO: 703 - protein, 9 aa, Homo sapiens
  Light chain CDR3 for antibody 352 (IGKV1-6)
LQDYNYPWT

SEQ ID NO: 704 - protein, 17 aa, Homo sapiens
  Heavy chain CDR3 for antibody 352 (IGHV3-33)
ARDWFGELSDYYYGMDV

SEQ ID NO: 705 - protein, 9 aa, Homo sapiens
  Light chain CDR3 for antibody 353 (IGKV1D-16)
QQYNSYPYT

SEQ ID NO: 706 - protein, 15 aa, Homo sapiens
  Heavy chain CDR3 for antibody 353 (IGHV3-20)
ARDRGSSGWRDWFDP

SEQ ID NO: 707 - protein, 9 aa, Homo sapiens
  Light chain CDR3 for antibody 354 (IGKV3D-7)
QQDYNLPLT

SEQ ID NO: 708 - protein, 19 aa, Homo sapiens
  Heavy chain CDR3 for antibody 354 (IGHV1-18)
ARDTTLVRGLMNYYYGMDV

SEQ ID NO: 709 - protein, 9 aa, Homo sapiens
  Light chain CDR3 for antibody 355 (IGKV1-16)
QQYNSYPRT

SEQ ID NO: 710 - protein, 7 aa, Homo sapiens
  Heavy chain CDR3 for antibody 355 (IGHV3-33)
ARELFDY

SEQ ID NO: 711 - protein, 9 aa, Homo sapiens
  Light chain CDR3 for antibody 356 (IGKV3-15)
QQYNNWPFT

SEQ ID NO: 712 - protein, 9 aa, Homo sapiens
  Heavy chain CDR3 for antibody 356 (IGHV1-8)
ARGPRIMDV

SEQ ID NO: 713 - protein, 9 aa, Homo sapiens
  Light chain CDR3 for antibody 357 (IGKV1-6)
LQDYNYPYT

SEQ ID NO: 714 - protein, 16 aa, Homo sapiens
  Heavy chain CDR3 for antibody 357 (IGHV3-23)
ARNWNDVGDYYYGMDV

SEQ ID NO: 715 - protein, 9 aa, Homo sapiens
  Light chain CDR3 for antibody 358 (IGKV1-16)
QQYNSYPYT

SEQ ID NO: 716 - protein, 15 aa, Homo sapiens
  Heavy chain CDR3 for antibody 358 (IGHV3-33)
AKDRNSGYDWGGFDY

SEQ ID NO: 717 - protein, 9 aa, Homo sapiens
  Light chain CDR3 for antibody 359 (IGKV1-16)
QQYNSYPLT

SEQ ID NO: 718 - protein, 15 aa, Homo sapiens
  Heavy chain CDR3 for antibody 359 (IGHV3-23)
AKDLSSGWYAYFFDY

SEQ ID NO: 719 - protein, 9 aa, Homo sapiens
  Light chain CDR3 for antibody 360 (IGKV1-6)
LQDYNYPYT

SEQ ID NO: 720 - protein, 12 aa, Homo sapiens
  Heavy chain CDR3 for antibody 360 (IGHV3-33)
AKDPGWQQLAEY

SEQ ID NO: 721 - protein, 9 aa, Homo sapiens
  Light chain CDR3 for antibody 361 (IGKV1-6)
LQDYNYPYT

SEQ ID NO: 722 - protein, 19 aa, Homo sapiens
  Heavy chain CDR3 for antibody 361 (IGHV3-23)
AKDGRSGSYDYYYYYGMDV

SEQ ID NO: 723 - protein, 9 aa, Homo sapiens
  Light chain CDR3 for antibody 362 (IGKV5-2)
LQHDNFPWT

SEQ ID NO: 724 - protein, 13 aa, Homo sapiens
  Heavy chain CDR3 for antibody 362 (IGHV3-33)
ARDWGYSHGYFDY

SEQ ID NO: 725 - protein, 9 aa, Homo sapiens
  Light chain CDR3 for antibody 363 (IGKV1-6)
LQDYNYPYT

SEQ ID NO: 726 - protein, 16 aa, Homo sapiens
  Heavy chain CDR3 for antibody 363 (IGHV3-33)
AREVAGSYYYYYGMDV

SEQ ID NO: 727 - protein, 9 aa, Homo sapiens
  Light chain CDR3 for antibody 364 (IGKV3-20)
QQYGSSPFT

SEQ ID NO: 728 - protein, 18 aa, Homo sapiens
  Heavy chain CDR3 for antibody 364 (IGHV3-23)
AKVGDFFASGNYWDYFDY

SEQ ID NO: 729 - protein, 9 aa, Homo sapiens
  Light chain CDR3 for antibody 365 (IGKV3D-7)
QQDYTLPRT

SEQ ID NO: 730 - protein, 11 aa, Homo sapiens
  Heavy chain CDR3 for antibody 365 (IGHV4-59)
ARDGSWEPFDY

SEQ ID NO: 731 - protein, 8 aa, Homo sapiens
  Light chain CDR3 for antibody 366 (IGKV1-5)
QQYHSYYT

SEQ ID NO: 732 - protein, 13 aa, Homo sapiens
  Heavy chain CDR3 for antibody 366 (IGHV1-18)
ARSYYGSGSPFDY

SEQ ID NO: 733 - protein, 9 aa, Homo sapiens
  Light chain CDR3 for antibody 367 (IGKV1-17)
LHSNNYPWT

SEQ ID NO: 734 - protein, 14 aa, Homo sapiens
  Heavy chain CDR3 for antibody 367 (IGHV3-33)
ARDRRDFYYYGMDV

SEQ ID NO: 735 - protein, 9 aa, Homo sapiens
  Light chain CDR3 for antibody 368 (IGKV1D-16)
QQYNSYPYT

SEQ ID NO: 736 - protein, 11 aa, Homo sapiens
  Heavy chain CDR3 for antibody 368 (IGHV3-33)
ARDRVLTPFDY

SEQ ID NO: 737 - protein, 9 aa, Homo sapiens
  Light chain CDR3 for antibody 369 (IGKV1D-16)
QQYNSYPYT

SEQ ID NO: 738 - protein, 17 aa, Homo sapiens
  Heavy chain CDR3 for antibody 369 (IGHV1-18)
ARDRAFTMVRGVPPFDY

SEQ ID NO: 739 - protein, 9 aa, Homo sapiens
  Light chain CDR3 for antibody 370 (IGKV1-6)
LQDYNYPLT

SEQ ID NO: 740 - protein, 18 aa, Homo sapiens
  Heavy chain CDR3 for antibody 370 (IGHV3-33)
ARDRGDILTGYYKGWFDP

SEQ ID NO: 741 - protein, 6 aa, Homo sapiens
  Light chain CDR3 for antibody 371 (IGKV3-20)
QQYGST

SEQ ID NO: 742 - protein, 12 aa, Homo sapiens
  Heavy chain CDR3 for antibody 371 (IGHV3-33)
ARDYISTYGMDV

SEQ ID NO: 743 - protein, 9 aa, Homo sapiens
  Light chain CDR3 for antibody 372 (IGKV1D-16)
QQYNSYPYT

SEQ ID NO: 744 - protein, 12 aa, Homo sapiens
  Heavy chain CDR3 for antibody 372 (IGHV3-33)
ARESGGSYSFDY

SEQ ID NO: 745 - protein, 9 aa, Homo sapiens
  Light chain CDR3 for antibody 373 (IGKV6-21)
HQSSSLPLT

SEQ ID NO: 746 - protein, 10 aa, Homo sapiens
  Heavy chain CDR3 for antibody 373 (IGHV3-30)
ARDGLESFDY

SEQ ID NO: 747 - protein, 9 aa, Homo sapiens
  Light chain CDR3 for antibody 374 (IGKV1D-16)
QQYNSYPYT

SEQ ID NO: 748 - protein, 11 aa, Homo sapiens
  Heavy chain CDR3 for antibody 374 (IGHV3-23)
GEFSSGWSFDY

SEQ ID NO: 749 - protein, 8 aa, Homo sapiens
  Light chain CDR3 for antibody 375 (IGKV3-11)
QQRRNWLT

SEQ ID NO: 750 - protein, 20 aa, Homo sapiens
  Heavy chain CDR3 for antibody 375 (IGHV1-8)
ARGDGTMVRGIYYYYYGMDV

SEQ ID NO: 751 - protein, 9 aa, Homo sapiens
  Light chain CDR3 for antibody 376 (IGKV1D-16)
QQYNSFPYT

SEQ ID NO: 752 - protein, 13 aa, Homo sapiens
  Heavy chain CDR3 for antibody 376 (IGHV3-33)
ASAGNSYYNVMDV

SEQ ID NO: 753 - protein, 9 aa, Homo sapiens
  Light chain CDR3 for antibody 377 (IGKV5-2)
LQHDNFPWT

SEQ ID NO: 754 - protein, 11 aa, Homo sapiens
  Heavy chain CDR3 for antibody 377 (IGHV4-59)
AREMGHDTFDI

SEQ ID NO: 755 - protein, 9 aa, Homo sapiens
  Light chain CDR3 for antibody 378 (IGKV1-9)
QQLNSYPRT

SEQ ID NO: 756 - protein, 17 aa, Homo sapiens
  Heavy chain CDR3 for antibody 378 (IGHV1-8)
ARGDYYGSGSPYWYFDL

SEQ ID NO: 757 - protein, 9 aa, Homo sapiens
  Light chain CDR3 for antibody 379 (IGKV1-9)
QQLNSYPYT

SEQ ID NO: 758 - protein, 17 aa, Homo sapiens
  Heavy chain CDR3 for antibody 379 (IGHV3-33)
ARDPARGNVRSFYGLDV

SEQ ID NO: 759 - protein, 9 aa, Homo sapiens
  Light chain CDR3 for antibody 380 (IGKV6-21)
HQSSSLPHT

SEQ ID NO: 760 - protein, 10 aa, Homo sapiens
  Heavy chain CDR3 for antibody 380 (IGHV3-33)
ARDLGWSFDH

SEQ ID NO: 761 - protein, 9 aa, Homo sapiens
  Light chain CDR3 for antibody 381 (IGKV1-6)
LQDYNYPWT

SEQ ID NO: 762 - protein, 14 aa, Homo sapiens
  Heavy chain CDR3 for antibody 381 (IGHV3-33)
ARDAYDILTGYYDY

SEQ ID NO: 763 - protein, 9 aa, Homo sapiens
  Light chain CDR3 for antibody 382 (IGKV1-9)
QQLNSYPWT

SEQ ID NO: 764 - protein, 14 aa, Homo sapiens
  Heavy chain CDR3 for antibody 382 (IGHV3-20)
AREGWFGDYYGMDV

SEQ ID NO: 765 - protein, 9 aa, Homo sapiens
  Light chain CDR3 for antibody 383 (IGKV3-11)
QQRSNWPLT

SEQ ID NO: 766 - protein, 17 aa, Homo sapiens
  Heavy chain CDR3 for antibody 383 (IGHV4-34)
ARDGSGSYTHYYYGMDV

SEQ ID NO: 767 - protein, 9 aa, Homo sapiens
  Light chain CDR3 for antibody 384 (IGKV1D-13)
QQFNNYPRT

SEQ ID NO: 768 - protein, 18 aa, Homo sapiens
  Heavy chain CDR3 for antibody 384 (IGHV3-33)
ARDGRISLVRGIIDAFDI

SEQ ID NO: 769 - protein, 8 aa, Homo sapiens
  Light chain CDR3 for antibody 385 (IGKV6-21)
HQSSSLPT

SEQ ID NO: 770 - protein, 9 aa, Homo sapiens
  Heavy chain CDR3 for antibody 385 (IGHV3-33)
ARELAYFDY

SEQ ID NO: 771 - protein, 9 aa, Homo sapiens
  Light chain CDR3 for antibody 386 (IGKV1-6)
LQDYNYPYT

SEQ ID NO: 772 - protein, 17 aa, Homo sapiens
  Heavy chain CDR3 for antibody 386 (IGHV3-30)
AREGVRGLIYYYYGMDV

SEQ ID NO: 773 - protein, 9 aa, Homo sapiens
  Light chain CDR3 for antibody 387 (IGKV1-6)
LQDFNYPPT

SEQ ID NO: 774 - protein, 11 aa, Homo sapiens
  Heavy chain CDR3 for antibody 387 (IGHV3-23)
AKAGIVGCLDV

SEQ ID NO: 775 - protein, 9 aa, Homo sapiens
  Light chain CDR3 for antibody 388 (IGKV1-9)
QQLNTYPWT

SEQ ID NO: 776 - protein, 18 aa, Homo sapiens
  Heavy chain CDR3 for antibody 388 (IGHV3-33)
ARGGVLYDILTGFYGMDV

SEQ ID NO: 777 - protein, 9 aa, Homo sapiens
  Light chain CDR3 for antibody 389 (IGKV1-9)
QQLNSYPYT

SEQ ID NO: 778 - protein, 17 aa, Homo sapiens
  Heavy chain CDR3 for antibody 389 (IGHV3-33)
ARCGYSSSWYDPYYFDY

SEQ ID NO: 779 - protein, 9 aa, Homo sapiens
  Light chain CDR3 for antibody 390 (IGKV1-17)
LQHNSYPYT

SEQ ID NO: 780 - protein, 14 aa, Homo sapiens
  Heavy chain CDR3 for antibody 390 (IGHV3-33)
ARGAAAGNFYGLDV

SEQ ID NO: 781 - protein, 9 aa, Homo sapiens
  Light chain CDR3 for antibody 391 (IGKV1D-16)
QQYNSYPPT

SEQ ID NO: 782 - protein, 18 aa, Homo sapiens
  Heavy chain CDR3 for antibody 391 (IGHV3-33)
ARKGGYYSGSGSYRHFDF

SEQ ID NO: 783 - protein, 9 aa, Homo sapiens
  Light chain CDR3 for antibody 392 (IGKV3-20)
QQFGRSPRT

SEQ ID NO: 784 - protein, 18 aa, Homo sapiens
  Heavy chain CDR3 for antibody 392 (IGHV1-24)
ATGLRYFDWPIISNLFDY

SEQ ID NO: 785 - protein, 9 aa, Homo sapiens
  Light chain CDR3 for antibody 393 (IGKV1-9)
QQLNSYPYT

SEQ ID NO: 786 - protein, 15 aa, Homo sapiens
  Heavy chain CDR3 for antibody 393 (IGHV3-66)
ARDRDYYYYYYGMDV

SEQ ID NO: 787 - protein, 9 aa, Homo sapiens
  Light chain CDR3 for antibody 394 (IGKV5-2)
LQHDNFPYT

SEQ ID NO: 788 - protein, 15 aa, Homo sapiens
  Heavy chain CDR3 for antibody 394 (IGHV3-23)
AKDPRGYYYYYGMDV

SEQ ID NO: 789 - protein, 9 aa, Homo sapiens
  Light chain CDR3 for antibody 395 (IGKV1-17)
LQHNSYPYT

SEQ ID NO: 790 - protein, 13 aa, Homo sapiens
  Heavy chain CDR3 for antibody 395 (IGHV3-33)
ARDWGYSHGYFDY

SEQ ID NO: 791 - protein, 9 aa, Homo sapiens
  Light chain CDR3 for antibody 396 (IGKV2-30)
MQGTHWPYT

SEQ ID NO: 792 - protein, 12 aa, Homo sapiens
  Heavy chain CDR3 for antibody 396 (IGHV4-39)
ARHPRYLDAFDI

SEQ ID NO: 793 - protein, 9 aa, Homo sapiens
  Light chain CDR3 for antibody 397 (IGKV3-20)
QQYGSSIFT

SEQ ID NO: 794 - protein, 13 aa, Homo sapiens
  Heavy chain CDR3 for antibody 397 (IGHV3-33)
ARTDYYYYYGMDV

SEQ ID NO: 795 - protein, 9 aa, Homo sapiens
  Light chain CDR3 for antibody 398 (IGKV4-1)
QQYYSTPYT

SEQ ID NO: 796 - protein, 12 aa, Homo sapiens
  Heavy chain CDR3 for antibody 398 (IGHV3-23)
AKESLYTPTDDY

SEQ ID NO: 797 - protein, 9 aa, Homo sapiens
  Light chain CDR3 for antibody 399 (IGKV1D-13)
QQFNNYPST

SEQ ID NO: 798 - protein, 20 aa, Homo sapiens
  Heavy chain CDR3 for antibody 399 (IGHV3-33)
ARDWMVRGVIITDYYYGMDV

SEQ ID NO: 799 - protein, 9 aa, Homo sapiens
  Light chain CDR3 for antibody 400 (IGKV1-6)
LQDYNYPFT

SEQ ID NO: 800 - protein, 15 aa, Homo sapiens
  Heavy chain CDR3 for antibody 400 (IGHV3-33)
ARRSILTGSYWYFDL

SEQ ID NO: 801 - protein, 9 aa, Homo sapiens
  Light chain CDR3 for antibody 401 (IGKV3D-7)
QQDYNLPYT

SEQ ID NO: 802 - protein, 11 aa, Homo sapiens
  Heavy chain CDR3 for antibody 401 (IGHV4-59)
ARETGDDAFDI

SEQ ID NO: 803 - protein, 9 aa, Homo sapiens
  Light chain CDR3 for antibody 402 (IGKV1-39)
QQSYSSPFT

SEQ ID NO: 804 - protein, 21 aa, Homo sapiens
  Heavy chain CDR3 for antibody 402 (IGHV1-18)
ASGVLIWFGELLSEDYYDMDV

SEQ ID NO: 805 - protein, 9 aa, Homo sapiens
  Light chain CDR3 for antibody 403 (IGKV1-6)
LQDYNYPWT

SEQ ID NO: 806 - protein, 14 aa, Homo sapiens
  Heavy chain CDR3 for antibody 403 (IGHV3-33)
ARDLNYDILNGGGY

SEQ ID NO: 807 - protein, 9 aa, Homo sapiens
  Light chain CDR3 for antibody 404 (IGKV1-6)
LQDYNYPRT

SEQ ID NO: 808 - protein, 14 aa, Homo sapiens
  Heavy chain CDR3 for antibody 404 (IGHV3-64)
ARDHAAGGYSHSDY

SEQ ID NO: 809 - protein, 9 aa, Homo sapiens
  Light chain CDR3 for antibody 405 (IGKV3-11)
QQRSSWPPT

SEQ ID NO: 810 - protein, 15 aa, Homo sapiens
  Heavy chain CDR3 for antibody 405 (IGHV3-23)
AKDGFYYGSGSSFDH

SEQ ID NO: 811 - protein, 9 aa, Homo sapiens
  Light chain CDR3 for antibody 406 (IGKV1D-16)
QQYNSYPYT

SEQ ID NO: 812 - protein, 14 aa, Homo sapiens
  Heavy chain CDR3 for antibody 406 (IGHV3-33)
ARDRDIMATSYFDY

SEQ ID NO: 813 - protein, 9 aa, Homo sapiens
  Light chain CDR3 for antibody 407 (IGKV1-27)
QKYNSAPYT

SEQ ID NO: 814 - protein, 12 aa, Homo sapiens
  Heavy chain CDR3 for antibody 407 (IGHV3-33)
ARGYFTSGSAHY

SEQ ID NO: 815 - protein, 9 aa, Homo sapiens
  Light chain CDR3 for antibody 408 (IGKV1-6)
LQDYNYPRT

SEQ ID NO: 816 - protein, 13 aa, Homo sapiens
  Heavy chain CDR3 for antibody 408 (IGHV3-13)
ARAITMVRGVIDY

SEQ ID NO: 817 - protein, 9 aa, Homo sapiens
  Light chain CDR3 for antibody 409 (IGKV1-27)
QKYNSAPYT

SEQ ID NO: 818 - protein, 15 aa, Homo sapiens
  Heavy chain CDR3 for antibody 409 (IGHV3-11)
ARDRAVAGTIHAFDI

SEQ ID NO: 819 - protein, 8 aa, Homo sapiens
  Light chain CDR3 for antibody 410 (IGKV3-20)
QQYGSSLT

SEQ ID NO: 820 - protein, 16 aa, Homo sapiens
  Heavy chain CDR3 for antibody 410 (IGHV3-23)
AKDLRYFDWSLYAFDI

SEQ ID NO: 821 - protein, 9 aa, Homo sapiens
  Light chain CDR3 for antibody 411 (IGKV1-6)
LQDYNYPHT

SEQ ID NO: 822 - protein, 14 aa, Homo sapiens
  Heavy chain CDR3 for antibody 411 (IGHV3-33)
ARKGYSGRYYYFDY

SEQ ID NO: 823 - protein, 9 aa, Homo sapiens
  Light chain CDR3 for antibody 412 (IGKV1D-16)
QQYDSYPYT

SEQ ID NO: 824 - protein, 12 aa, Homo sapiens
  Heavy chain CDR3 for antibody 412 (IGHV3-33)
ARAGMGAPYFDY

SEQ ID NO: 825 - protein, 9 aa, Homo sapiens
  Light chain CDR3 for antibody 413 (IGKV1-17)
LQHNSYPYT

SEQ ID NO: 826 - protein, 14 aa, Homo sapiens
  Heavy chain CDR3 for antibody 413 (IGHV3-33)
ARDWNDVYYYGMDV

SEQ ID NO: 827 - protein, 9 aa, Homo sapiens
  Light chain CDR3 for antibody 414 (IGKV1-9)
QQLNSYPWT

SEQ ID NO: 828 - protein, 20 aa, Homo sapiens
  Heavy chain CDR3 for antibody 414 (IGHV3-20)
ARDLCSSTSCYGYYYYGMDV

SEQ ID NO: 829 - protein, 9 aa, Homo sapiens
  Light chain CDR3 for antibody 415 (IGKV1-17)
LQHNSYPYT

SEQ ID NO: 830 - protein, 14 aa, Homo sapiens
  Heavy chain CDR3 for antibody 415 (IGHV3-23)
AKSRIVGALYYFDY

SEQ ID NO: 831 - protein, 9 aa, Homo sapiens
  Light chain CDR3 for antibody 416 (IGKV1-9)
QQLNSYPYT

SEQ ID NO: 832 - protein, 17 aa, Homo sapiens
  Heavy chain CDR3 for antibody 416 (IGHV3-23)
AKDRPVTTLYYYFGMDV

SEQ ID NO: 833 - protein, 9 aa, Homo sapiens
  Light chain CDR3 for antibody 417 (IGKV1D-16)
QQYNSYPYT

SEQ ID NO: 834 - protein, 13 aa, Homo sapiens
  Heavy chain CDR3 for antibody 417 (IGHV3-23)
ASPFNWNDGFFDY

SEQ ID NO: 835 - protein, 9 aa, Homo sapiens
  Light chain CDR3 for antibody 418 (IGKV1-6)
LQDYNYPRT

SEQ ID NO: 836 - protein, 17 aa, Homo sapiens
  Heavy chain CDR3 for antibody 418 (IGHV3-23)
AKDRDWKDGYYYFGMDV

SEQ ID NO: 837 - protein, 9 aa, Homo sapiens
  Light chain CDR3 for antibody 419 (IGKV1-27)
QKYNSAPHT

SEQ ID NO: 838 - protein, 18 aa, Homo sapiens
  Heavy chain CDR3 for antibody 419 (IGHV3-33)
AREGYDILTGDYRLGFDY

SEQ ID NO: 839 - protein, 9 aa, Homo sapiens
  Light chain CDR3 for antibody 420 (IGKV1-17)
LQHNSYPWT

SEQ ID NO: 840 - protein, 22 aa, Homo sapiens
  Heavy chain CDR3 for antibody 420 (IGHV4-59)
AREINYGSGSYYNEDYYYGMDV

SEQ ID NO: 841 - protein, 9 aa, Homo sapiens
  Light chain CDR3 for antibody 421 (IGKV1-17)
LQHNDYPPT

SEQ ID NO: 842 - protein, 14 aa, Homo sapiens
  Heavy chain CDR3 for antibody 421 (IGHV1-18)
AREGGSYFYYGVDV

SEQ ID NO: 843 - protein, 9 aa, Homo sapiens
  Light chain CDR3 for antibody 422 (IGKV6-21)
HQSSSLPFT

SEQ ID NO: 844 - protein, 6 aa, Homo sapiens
  Heavy chain CDR3 for antibody 422 (IGHV1-8)
AREGTY

SEQ ID NO: 845 - protein, 9 aa, Homo sapiens
  Light chain CDR3 for antibody 423 (IGKV3-15)
QQYHNWPLT

SEQ ID NO: 846 - protein, 17 aa, Homo sapiens
  Heavy chain CDR3 for antibody 423 (IGHV3-33)
TRDSGMVRGIIIYGMDV

SEQ ID NO: 847 - protein, 9 aa, Homo sapiens
  Light chain CDR3 for antibody 424 (IGKV3-20)
QQYGSSPYT

SEQ ID NO: 848 - protein, 15 aa, Homo sapiens
  Heavy chain CDR3 for antibody 424 (IGHV3-33)
ARHSSGFYYYYGMDV

SEQ ID NO: 849 - protein, 9 aa, Homo sapiens
  Light chain CDR3 for antibody 425 (IGKV1-6)
LQDYNYPYT

SEQ ID NO: 850 - protein, 20 aa, Homo sapiens
  Heavy chain CDR3 for antibody 425 (IGHV3-33)
ARDNDSSGYYDYYYYYGMDV

SEQ ID NO: 851 - protein, 9 aa, Homo sapiens
  Light chain CDR3 for antibody 426 (IGKV1-6)
LQDYDYPYT

SEQ ID NO: 852 - protein, 19 aa, Homo sapiens
  Heavy chain CDR3 for antibody 426 (IGHV1-18)
ARGGHIGVVTAFHGYGMDV

SEQ ID NO: 853 - protein, 9 aa, Homo sapiens
  Light chain CDR3 for antibody 427 (IGKV1-17)
LQHNTYPWT

SEQ ID NO: 854 - protein, 12 aa, Homo sapiens
  Heavy chain CDR3 for antibody 427 (IGHV3-33)
AREGIAVAGVDP

SEQ ID NO: 855 - protein, 9 aa, Homo sapiens
  Light chain CDR3 for antibody 428 (IGKV3D-7)
QQDYNLPLT

SEQ ID NO: 856 - protein, 16 aa, Homo sapiens
  Heavy chain CDR3 for antibody 428 (IGHV3-33)
ARDRGGMTMVRGGFDY

SEQ ID NO: 857 - protein, 9 aa, Homo sapiens
  Light chain CDR3 for antibody 429 (IGKV6-21)
HQSSSLPFT

SEQ ID NO: 858 - protein, 14 aa, Homo sapiens
  Heavy chain CDR3 for antibody 429 (IGHV3-23)
AKGGDVLTGYYPDY

SEQ ID NO: 859 - protein, 9 aa, Homo sapiens
  Light chain CDR3 for antibody 430 (IGKV1-9)
QQLNNYLFT

SEQ ID NO: 860 - protein, 10 aa, Homo sapiens
  Heavy chain CDR3 for antibody 430 (IGHV4-39)
ARQLGNWFDP

SEQ ID NO: 861 - protein, 9 aa, Homo sapiens
  Light chain CDR3 for antibody 431 (IGKV1-9)
QQLNSYPYT

SEQ ID NO: 862 - protein, 14 aa, Homo sapiens
  Heavy chain CDR3 for antibody 431 (IGHV1-46)
ARAYYAFLTGAFDI

SEQ ID NO: 863 - protein, 9 aa, Homo sapiens
  Light chain CDR3 for antibody 432 (IGKV1-6)
LQDYNYPRT

SEQ ID NO: 864 - protein, 14 aa, Homo sapiens
  Heavy chain CDR3 for antibody 432 (IGHV3-33)
VSAISGSSYWYFAL

SEQ ID NO: 865 - protein, 9 aa, Homo sapiens
  Light chain CDR3 for antibody 433 (IGKV1D-16)
QQYNSYPYT

SEQ ID NO: 866 - protein, 15 aa, Homo sapiens
  Heavy chain CDR3 for antibody 433 (IGHV1-18)
ARGYCSSTSCYYFDY

SEQ ID NO: 867 - protein, 9 aa, Homo sapiens
  Light chain CDR3 for antibody 434 (IGKV1-6)
LQDYSYPFT

SEQ ID NO: 868 - protein, 12 aa, Homo sapiens
  Heavy chain CDR3 for antibody 434 (IGHV3-33)
ARKQWLVQAFDI

SEQ ID NO: 869 - protein, 9 aa, Homo sapiens
  Light chain CDR3 for antibody 435 (IGKV3D-7)
QQDYNLPYT

SEQ ID NO: 870 - protein, 12 aa, Homo sapiens
  Heavy chain CDR3 for antibody 435 (IGHV4-39)
ARREVILGAFDY

SEQ ID NO: 871 - protein, 9 aa, Homo sapiens
  Light chain CDR3 for antibody 436 (IGKV3-15)
QQYNNWPLT

SEQ ID NO: 872 - protein, 17 aa, Homo sapiens
  Heavy chain CDR3 for antibody 436 (IGHV3-23)
AKEGSSSSWYGGLYFDY

SEQ ID NO: 873 - protein, 9 aa, Homo sapiens
  Light chain CDR3 for antibody 437 (IGKV6-21)
HQSSSLPQT

SEQ ID NO: 874 - protein, 14 aa, Homo sapiens
  Heavy chain CDR3 for antibody 437 (IGHV3-33)
ARDTVAAGFNGMDV

SEQ ID NO: 875 - protein, 9 aa, Homo sapiens
  Light chain CDR3 for antibody 438 (IGKV1-16)
QQYNSYPYT

SEQ ID NO: 876 - protein, 13 aa, Homo sapiens
  Heavy chain CDR3 for antibody 438 (IGHV4-39)
ARQWPSGYWYFDL

SEQ ID NO: 877 - protein, 9 aa, Homo sapiens
  Light chain CDR3 for antibody 439 (IGKV1-17)
LQHNSYPYT

SEQ ID NO: 878 - protein, 15 aa, Homo sapiens
  Heavy chain CDR3 for antibody 439 (IGHV3-33)
ARDGSGSYSLYGMDV

SEQ ID NO: 879 - protein, 10 aa, Homo sapiens
  Light chain CDR3 for antibody 440 (IGKV1-6)
LQDYNYPMYT

SEQ ID NO: 880 - protein, 12 aa, Homo sapiens
  Heavy chain CDR3 for antibody 440 (IGHV3-23)
AKEGIVGVPFDY

SEQ ID NO: 881 - protein, 9 aa, Homo sapiens
  Light chain CDR3 for antibody 441 (IGKV1D-16)
QQYAGYPPT

SEQ ID NO: 882 - protein, 12 aa, Homo sapiens
  Heavy chain CDR3 for antibody 441 (IGHV4-34)
ARGYSSSWYFDY

SEQ ID NO: 883 - protein, 9 aa, Homo sapiens
  Light chain CDR3 for antibody 442 (IGKV1D-16)
QQYNSYPYT

SEQ ID NO: 884 - protein, 14 aa, Homo sapiens
  Heavy chain CDR3 for antibody 442 (IGHV3-33)
AREGYSSNWYDFDY

SEQ ID NO: 885 - protein, 9 aa, Homo sapiens
  Light chain CDR3 for antibody 443 (IGKV6-21)
HQSSSLPFT

SEQ ID NO: 886 - protein, 11 aa, Homo sapiens
  Heavy chain CDR3 for antibody 443 (IGHV4-59)
AREDYGVPFDY

SEQ ID NO: 887 - protein, 9 aa, Homo sapiens
  Light chain CDR3 for antibody 444 (IGKV3-15)
QQYNNWPRT

SEQ ID NO: 888 - protein, 15 aa, Homo sapiens
  Heavy chain CDR3 for antibody 444 (IGHV3-33)
ARDEHYDILTGYWGY

SEQ ID NO: 889 - protein, 9 aa, Homo sapiens
  Light chain CDR3 for antibody 445 (IGKV3D-20)
QQYGNSPRT

SEQ ID NO: 890 - protein, 19 aa, Homo sapiens
  Heavy chain CDR3 for antibody 445 (IGHV3-33)
ARRRDDILTGWDYYFGMDV

SEQ ID NO: 891 - protein, 9 aa, Homo sapiens
  Light chain CDR3 for antibody 446 (IGKV3-11)
QQRSNWPLT

SEQ ID NO: 892 - protein, 9 aa, Homo sapiens
  Heavy chain CDR3 for antibody 446 (IGHV4-59)
ARGGVHFDS

SEQ ID NO: 893 - protein, 9 aa, Homo sapiens
  Light chain CDR3 for antibody 447 (IGKV3D-7)
QQDYNLPLT

SEQ ID NO: 894 - protein, 17 aa, Homo sapiens
  Heavy chain CDR3 for antibody 447 (IGHV3-23)
AKGNYGSGSYYNGDFQH

SEQ ID NO: 895 - protein, 9 aa, Homo sapiens
  Light chain CDR3 for antibody 448 (IGKV3-20)
QQYGSSLYT

SEQ ID NO: 896 - protein, 11 aa, Homo sapiens
  Heavy chain CDR3 for antibody 448 (IGHV3-64)
ARERGSYAFDI

SEQ ID NO: 897 - protein, 9 aa, Homo sapiens
  Light chain CDR3 for antibody 449 (IGKV5-2)
LQHDNFPWT

SEQ ID NO: 898 - protein, 16 aa, Homo sapiens
  Heavy chain CDR3 for antibody 449 (IGHV4-59)
ARGRYFEWLLGDVFDI

SEQ ID NO: 899 - protein, 9 aa, Homo sapiens
  Light chain CDR3 for antibody 450 (IGKV3D-11)
QQRSNWQYT

SEQ ID NO: 900 - protein, 10 aa, Homo sapiens
  Heavy chain CDR3 for antibody 450 (IGHV3-23)
AKDHWGDFDY

SEQ ID NO: 901 - protein, 9 aa, Homo sapiens
  Light chain CDR3 for antibody 451 (IGKV1-9)
QQYNSYPLT

SEQ ID NO: 902 - protein, 9 aa, Homo sapiens
  Heavy chain CDR3 for antibody 451 (IGHV4-59)
AREGGSGSL

SEQ ID NO: 903 - protein, 9 aa, Homo sapiens
  Light chain CDR3 for antibody 452 (IGKV1-6)
LQDYNYPYT

SEQ ID NO: 904 - protein, 19 aa, Homo sapiens
  Heavy chain CDR3 for antibody 452 (IGHV3-33)
ARDRYYDILTGYSSYYFDY

SEQ ID NO: 905 - protein, 9 aa, Homo sapiens
  Light chain CDR3 for antibody 453 (IGKV6-21)
HQSSSLPYT

SEQ ID NO: 906 - protein, 18 aa, Homo sapiens
  Heavy chain CDR3 for antibody 453 (IGHV4-59)
AREGDYVWGSYRPNWFDP

SEQ ID NO: 907 - protein, 9 aa, Homo sapiens
  Light chain CDR3 for antibody 454 (IGKV3-20)
QQYGSSPRT

SEQ ID NO: 908 - protein, 12 aa, Homo sapiens
  Heavy chain CDR3 for antibody 454 (IGHV1-24)
ASDWAYYYGMDV

SEQ ID NO: 909 - protein, 9 aa, Homo sapiens
  Light chain CDR3 for antibody 455 (IGKV1-17)
LQHYSYPRT

SEQ ID NO: 910 - protein, 13 aa, Homo sapiens
  Heavy chain CDR3 for antibody 455 (IGHV3-11)
ARDEGYRGYVLDT

SEQ ID NO: 911 - protein, 9 aa, Homo sapiens
  Light chain CDR3 for antibody 456 (IGKV1-17)
LQHNTYPWT

SEQ ID NO: 912 - protein, 12 aa, Homo sapiens
  Heavy chain CDR3 for antibody 456 (IGHV3-33)
ARDPGYFFGLDV

SEQ ID NO: 913 - protein, 9 aa, Homo sapiens
  Light chain CDR3 for antibody 457 (IGKV3-15)
QQYNDWPLT

SEQ ID NO: 914 - protein, 12 aa, Homo sapiens
  Heavy chain CDR3 for antibody 457 (IGHV3-13)
AIGTMVRGIPDY

SEQ ID NO: 915 - protein, 9 aa, Homo sapiens
  Light chain CDR3 for antibody 458 (IGKV1-6)
LQDYNYPYT

SEQ ID NO: 916 - protein, 16 aa, Homo sapiens
  Heavy chain CDR3 for antibody 458 (IGHV3-20)
ARDSSSLDYYYYGMDV

SEQ ID NO: 917 - protein, 8 aa, Homo sapiens
  Light chain CDR3 for antibody 459 (IGKV1-5)
QQYNSYST

SEQ ID NO: 918 - protein, 23 aa, Homo sapiens
  Heavy chain CDR3 for antibody 459 (IGHV1-18)
ARNLHYDILTGYFPYYFYYGMDV

SEQ ID NO: 919 - protein, 9 aa, Homo sapiens
  Light chain CDR3 for antibody 460 (IGKV1-9)
QQLNRYPYT

SEQ ID NO: 920 - protein, 14 aa, Homo sapiens
  Heavy chain CDR3 for antibody 460 (IGHV3-33)
AREGYSSGWDYFDH

SEQ ID NO: 921 - protein, 9 aa, Homo sapiens
  Light chain CDR3 for antibody 461 (IGKV1D-13)
QQFNNYMYT

SEQ ID NO: 922 - protein, 17 aa, Homo sapiens
  Heavy chain CDR3 for antibody 461 (IGHV3-33)
ARDSYDILTGYYKPFDY

SEQ ID NO: 923 - protein, 9 aa, Homo sapiens
  Light chain CDR3 for antibody 462 (IGKV1D-16)
QQYNSYPYT

SEQ ID NO: 924 - protein, 17 aa, Homo sapiens
  Heavy chain CDR3 for antibody 462 (IGHV3-33)
ARGFSGYDGYYYYGMDV

SEQ ID NO: 925 - protein, 9 aa, Homo sapiens
  Light chain CDR3 for antibody 463 (IGKV1-6)
LQDYNYPWT

SEQ ID NO: 926 - protein, 18 aa, Homo sapiens
  Heavy chain CDR3 for antibody 463 (IGHV3-33)
AREGYDILTGYYNVKFDY

SEQ ID NO: 927 - protein, 9 aa, Homo sapiens
  Light chain CDR3 for antibody 464 (IGKV1-6)
LQDYNYPYT

SEQ ID NO: 928 - protein, 15 aa, Homo sapiens
  Heavy chain CDR3 for antibody 464 (IGHV1-18)
ARGYCSSTSCYYFDY

SEQ ID NO: 929 - protein, 9 aa, Homo sapiens
  Light chain CDR3 for antibody 465 (IGKV3-20)
QQYGSSPYT

SEQ ID NO: 930 - protein, 13 aa, Homo sapiens
  Heavy chain CDR3 for antibody 465 (IGHV3-33)
ARDYCGGDCYLDY

SEQ ID NO: 931 - protein, 9 aa, Homo sapiens
  Light chain CDR3 for antibody 466 (IGKV3-20)
QQYGSSPYT

SEQ ID NO: 932 - protein, 17 aa, Homo sapiens
  Heavy chain CDR3 for antibody 466 (IGHV4-59)
AREEDYFGSGSFGTFDI

SEQ ID NO: 933 - protein, 9 aa, Homo sapiens
  Light chain CDR3 for antibody 467 (IGKV1-6)
LQDYNYPYT

SEQ ID NO: 934 - protein, 15 aa, Homo sapiens
  Heavy chain CDR3 for antibody 467 (IGHV1-2)
ARDLGYYGSGSRMDV

SEQ ID NO: 935 - protein, 9 aa, Homo sapiens
  Light chain CDR3 for antibody 468 (IGKV1D-16)
QQYNSYPYT

SEQ ID NO: 936 - protein, 7 aa, Homo sapiens
  Heavy chain CDR3 for antibody 468 (IGHV1-46)
AREGGDY

SEQ ID NO: 937 - protein, 9 aa, Homo sapiens
  Light chain CDR3 for antibody 469 (IGKV1D-16)
QQYNSYPYT

SEQ ID NO: 938 - protein, 9 aa, Homo sapiens
  Heavy chain CDR3 for antibody 469 (IGHV3-33)
ARATVGVDY

SEQ ID NO: 939 - protein, 9 aa, Homo sapiens
  Light chain CDR3 for antibody 470 (IGKV1-17)
LQHNSYPYT

SEQ ID NO: 940 - protein, 15 aa, Homo sapiens
  Heavy chain CDR3 for antibody 470 (IGHV3-33)
ARDTGYSSSWNWFDP

SEQ ID NO: 941 - protein, 9 aa, Homo sapiens
  Light chain CDR3 for antibody 471 (IGKV1D-16)
QQYNSYPYT

SEQ ID NO: 942 - protein, 18 aa, Homo sapiens
  Heavy chain CDR3 for antibody 471 (IGHV3-33)
ARGYYGSGNFYKDSGMDV

SEQ ID NO: 943 - protein, 10 aa, Homo sapiens
  Light chain CDR3 for antibody 472 (IGKV3-11)
QQRSNWLMYT

SEQ ID NO: 944 - protein, 10 aa, Homo sapiens
  Heavy chain CDR3 for antibody 472 (IGHV3-23)
AKENWNDFDY

SEQ ID NO: 945 - protein, 9 aa, Homo sapiens
  Light chain CDR3 for antibody 473 (IGKV6-21)
HQSSSLPYT

SEQ ID NO: 946 - protein, 15 aa, Homo sapiens
  Heavy chain CDR3 for antibody 473 (IGHV3-64)
ARDGLRYFDWLFPWY

SEQ ID NO: 947 - protein, 9 aa, Homo sapiens
  Light chain CDR3 for antibody 474 (IGKV1-17)
LQHYSYPRT

SEQ ID NO: 948 - protein, 11 aa, Homo sapiens
  Heavy chain CDR3 for antibody 474 (IGHV3-33)
ARDQGGSSFDY

SEQ ID NO: 949 - protein, 9 aa, Homo sapiens
  Light chain CDR3 for antibody 475 (IGKV6-21)
QQSSSLPFT

SEQ ID NO: 950 - protein, 14 aa, Homo sapiens
  Heavy chain CDR3 for antibody 475 (IGHV3-20)
ARDRGSSFFDAFDI

SEQ ID NO: 951 - protein, 9 aa, Homo sapiens
  Light chain CDR3 for antibody 476 (IGKV1-17)
LHHHSYPYT

SEQ ID NO: 952 - protein, 11 aa, Homo sapiens
  Heavy chain CDR3 for antibody 476 (IGHV4-59)
ARDRGHYGMDV

SEQ ID NO: 953 - protein, 9 aa, Homo sapiens
  Light chain CDR3 for antibody 477 (IGKV5-2)
LQHDNFPWT

SEQ ID NO: 954 - protein, 18 aa, Homo sapiens
  Heavy chain CDR3 for antibody 477 (IGHV4-59)
AREGHYYTSGSYYKAFDY

SEQ ID NO: 955 - protein, 9 aa, Homo sapiens
  Light chain CDR3 for antibody 478 (IGKV1D-16)
QQYNSYPLT

SEQ ID NO: 956 - protein, 14 aa, Homo sapiens
  Heavy chain CDR3 for antibody 478 (IGHV3-33)
ARGAAAGNFYGLDV

SEQ ID NO: 957 - protein, 9 aa, Homo sapiens
  Light chain CDR3 for antibody 479 (IGKV1D-13)
QQFNNYMYT

SEQ ID NO: 958 - protein, 20 aa, Homo sapiens
  Heavy chain CDR3 for antibody 479 (IGHV3-33)
ARRMVRGVKKTYYYYYGLDV

SEQ ID NO: 959 - protein, 10 aa, Homo sapiens
  Light chain CDR3 for antibody 480 (IGKV3-15)
QKYNNWPPLT

SEQ ID NO: 960 - protein, 9 aa, Homo sapiens
  Heavy chain CDR3 for antibody 480 (IGHV1-18)
ARGNTWFDY

SEQ ID NO: 961 - protein, 9 aa, Homo sapiens
  Light chain CDR3 for antibody 481 (IGKV1-16)
QQYSSSPIT

SEQ ID NO: 962 - protein, 9 aa, Homo sapiens
  Heavy chain CDR3 for antibody 481 (IGHV4-59)
ARSGSGIYT

SEQ ID NO: 963 - protein, 9 aa, Homo sapiens
  Light chain CDR3 for antibody 482 (IGKV6-21)
HQSSSLLYT

SEQ ID NO: 964 - protein, 16 aa, Homo sapiens
  Heavy chain CDR3 for antibody 482 (IGHV3-33)
ARDQGILTGYYTALDY

SEQ ID NO: 965 - protein, 9 aa, Homo sapiens
  Light chain CDR3 for antibody 483 (IGKV1-6)
LQDYNYPWT

SEQ ID NO: 966 - protein, 14 aa, Homo sapiens
  Heavy chain CDR3 for antibody 483 (IGHV3-33)
ARDGYDILTGPMDV

SEQ ID NO: 967 - protein, 9 aa, Homo sapiens
  Light chain CDR3 for antibody 484 (IGKV1D-16)
QQYNSYPYT

SEQ ID NO: 968 - protein, 12 aa, Homo sapiens
  Heavy chain CDR3 for antibody 484 (IGHV1-18)
ARILFYGDYFDY

SEQ ID NO: 969 - protein, 9 aa, Homo sapiens
  Light chain CDR3 for antibody 485 (IGKV1D-16)
QQYNSYPYT

SEQ ID NO: 970 - protein, 14 aa, Homo sapiens
  Heavy chain CDR3 for antibody 485 (IGHV3-33)
ARAGSGYDRDWFDP

SEQ ID NO: 971 - protein, 10 aa, Homo sapiens
  Light chain CDR3 for antibody 486 (IGKV3-20)
QQYGRSPPVT

SEQ ID NO: 972 - protein, 18 aa, Homo sapiens
  Heavy chain CDR3 for antibody 486 (IGHV3-53)
AKAGDYYVSGSYWGYFDL

SEQ ID NO: 973 - protein, 9 aa, Homo sapiens
  Light chain CDR3 for antibody 487 (IGKV5-2)
LQHDNFPYT

SEQ ID NO: 974 - protein, 15 aa, Homo sapiens
  Heavy chain CDR3 for antibody 487 (IGHV3-30)
ARGAMVRGVDYGMDV

SEQ ID NO: 975 - protein, 9 aa, Homo sapiens
  Light chain CDR3 for antibody 488 (IGKV6-21)
HQSSSLPYT

SEQ ID NO: 976 - protein, 14 aa, Homo sapiens
  Heavy chain CDR3 for antibody 488 (IGHV3-23)
AKSRIVGALYYFDY

SEQ ID NO: 977 - protein, 9 aa, Homo sapiens
  Light chain CDR3 for antibody 489 (IGKV1-6)
LQDYIYPRT

SEQ ID NO: 978 - protein, 17 aa, Homo sapiens
  Heavy chain CDR3 for antibody 489 (IGHV3-33)
AREGYYYGSGSYHFFDY

SEQ ID NO: 979 - protein, 9 aa, Homo sapiens
  Light chain CDR3 for antibody 490 (IGKV1-17)
LQHNSYPYT

SEQ ID NO: 980 - protein, 12 aa, Homo sapiens
  Heavy chain CDR3 for antibody 490 (IGHV3-33)
TRGYSSKSYFDY

SEQ ID NO: 981 - protein, 9 aa, Homo sapiens
  Light chain CDR3 for antibody 491 (IGKV1-6)
LQDYNYPHT

SEQ ID NO: 982 - protein, 17 aa, Homo sapiens
  Heavy chain CDR3 for antibody 491 (IGHV3-30)
ARDGVGATSYYYYGMDV

SEQ ID NO: 983 - protein, 9 aa, Homo sapiens
  Light chain CDR3 for antibody 492 (IGKV1-6)
LQDYNYPYT

SEQ ID NO: 984 - protein, 14 aa, Homo sapiens
  Heavy chain CDR3 for antibody 492 (IGHV3-33)
ARSTLVRGANWFDP

SEQ ID NO: 985 - protein, 8 aa, Homo sapiens
  Light chain CDR3 for antibody 493 (IGKV1-5)
QQYNSYYT

SEQ ID NO: 986 - protein, 11 aa, Homo sapiens
  Heavy chain CDR3 for antibody 493 (IGHV4-39)
ARLLVGATTDY

SEQ ID NO: 987 - protein, 9 aa, Homo sapiens
  Light chain CDR3 for antibody 494 (IGKV1D-16)
QQYNSYPYT

SEQ ID NO: 988 - protein, 14 aa, Homo sapiens
  Heavy chain CDR3 for antibody 494 (IGHV3-33)
ARDKTYPLSYGMDV

SEQ ID NO: 989 - protein, 9 aa, Homo sapiens
  Light chain CDR3 for antibody 495 (IGKV6-21)
HQSSSLPYT

SEQ ID NO: 990 - protein, 13 aa, Homo sapiens
  Heavy chain CDR3 for antibody 495 (IGHV3-11)
ARDGGAAAGTWDS

SEQ ID NO: 991 - protein, 9 aa, Homo sapiens
  Light chain CDR3 for antibody 496 (IGKV1-6)
LQDYNYPYT

SEQ ID NO: 992 - protein, 13 aa, Homo sapiens
  Heavy chain CDR3 for antibody 496 (IGHV3-23)
ASTGDSYYYGMDV

SEQ ID NO: 993 - protein, 7 aa, Homo sapiens
  Light chain CDR3 for antibody 497 (IGKV3-11)
QQRSKFT

SEQ ID NO: 994 - protein, 16 aa, Homo sapiens
  Heavy chain CDR3 for antibody 497 (IGHV1-46)
ARGGGYSESYSNWFDP

SEQ ID NO: 995 - protein, 9 aa, Homo sapiens
  Light chain CDR3 for antibody 498 (IGKV6-21)
HQSSSLPLT

SEQ ID NO: 996 - protein, 14 aa, Homo sapiens
  Heavy chain CDR3 for antibody 498 (IGHV3-20)
ARDGGSGSYDGLDV

SEQ ID NO: 997 - protein, 8 aa, Homo sapiens
  Light chain CDR3 for antibody 499 (IGKV2D-28)
MQALQTPT

SEQ ID NO: 998 - protein, 9 aa, Homo sapiens
  Heavy chain CDR3 for antibody 499 (IGHV3-33)
AANSYGLDY

SEQ ID NO: 999 - protein, 9 aa, Homo sapiens
  Light chain CDR3 for antibody 500 (IGKV1D-16)
QQYDSYPYT

SEQ ID NO: 1000 - protein, 14 aa, Homo sapiens
  Heavy chain CDR3 for antibody 500 (IGHV3-33)
ARDLDIMATSPFAY

SEQ ID NO: 1001 - protein, 9 aa, Homo sapiens
  Light chain CDR3 for antibody 501 (IGKV1-16)
QQYNSYPYT

SEQ ID NO: 1002 - protein, 16 aa, Homo sapiens
  Heavy chain CDR3 for antibody 501 (IGHV4-59)
ARYSGSYYGDYYGMDV

SEQ ID NO: 1003 - protein, 9 aa, Homo sapiens
  Light chain CDR3 for antibody 502 (IGKV1-17)
LQHNSYPYT

SEQ ID NO: 1004 - protein, 18 aa, Homo sapiens
  Heavy chain CDR3 for antibody 502 (IGHV3-33)
ARREGIVGATTYYYGMDV

SEQ ID NO: 1005 - protein, 9 aa, Homo sapiens
  Light chain CDR3 for antibody 503 (IGKV3-20)
QQYGSSPLT

SEQ ID NO: 1006 - protein, 16 aa, Homo sapiens
  Heavy chain CDR3 for antibody 503 (IGHV3-33)
ARIAAPGSEYYYGMDV

SEQ ID NO: 1007 - protein, 9 aa, Homo sapiens
  Light chain CDR3 for antibody 504 (IGKV3-20)
QQYGRSPYT

SEQ ID NO: 1008 - protein, 13 aa, Homo sapiens
  Heavy chain CDR3 for antibody 504 (IGHV3-33)
ARTDYYSYYGLDV

SEQ ID NO: 1009 - protein, 9 aa, Homo sapiens
  Light chain CDR3 for antibody 505 (IGKV1-6)
LQDYNYPYT

SEQ ID NO: 1010 - protein, 9 aa, Homo sapiens
  Heavy chain CDR3 for antibody 505 (IGHV3-13)
ARDRWYFDL

SEQ ID NO: 1011 - protein, 9 aa, Homo sapiens
  Light chain CDR3 for antibody 506 (IGKV3-20)
QQYGSSPYT

SEQ ID NO: 1012 - protein, 18 aa, Homo sapiens
  Heavy chain CDR3 for antibody 506 (IGHV3-33)
ARGYNQGSGSYYNVCFDY

SEQ ID NO: 1013 - protein, 9 aa, Homo sapiens
  Light chain CDR3 for antibody 507 (IGKV1-17)
LQHNSYPYT

SEQ ID NO: 1014 - protein, 12 aa, Homo sapiens
  Heavy chain CDR3 for antibody 507 (IGHV3-33)
ARDLVGATPFDY

SEQ ID NO: 1015 - protein, 9 aa, Homo sapiens
  Light chain CDR3 for antibody 508 (IGKV2D-28)
MQTLQTPWT

SEQ ID NO: 1016 - protein, 12 aa, Homo sapiens
  Heavy chain CDR3 for antibody 508 (IGHV6-1)
ARLDWNYRAFDI

SEQ ID NO: 1017 - protein, 9 aa, Homo sapiens
  Light chain CDR3 for antibody 509 (IGKV3-20)
QQYGSSPYT

SEQ ID NO: 1018 - protein, 16 aa, Homo sapiens
  Heavy chain CDR3 for antibody 509 (IGHV4-59)
AREPLRYFDWPDAFDI

SEQ ID NO: 1019 - protein, 9 aa, Homo sapiens
  Light chain CDR3 for antibody 510 (IGKV5-2)
LQHDNFPWT

SEQ ID NO: 1020 - protein, 9 aa, Homo sapiens
  Heavy chain CDR3 for antibody 510 (IGHV4-59)
AREGGSGSL

SEQ ID NO: 1021 - protein, 9 aa, Homo sapiens
  Light chain CDR3 for antibody 511 (IGKV1D-16)
QQYNSYPYT

SEQ ID NO: 1022 - protein, 20 aa, Homo sapiens
  Heavy chain CDR3 for antibody 511 (IGHV3-11)
ARGGATLIRGLIDYYYGMDV

SEQ ID NO: 1023 - protein, 9 aa, Homo sapiens
  Light chain CDR3 for antibody 512 (IGKV6-21)
HQSSSLPYT

SEQ ID NO: 1024 - protein, 18 aa, Homo sapiens
  Heavy chain CDR3 for antibody 512 (IGHV1-18)
ARDRGYYYGSGSYSPFDY

SEQ ID NO: 1025 - protein, 9 aa, Homo sapiens
  Light chain CDR3 for antibody 513 (IGKV3-20)
QQYGSSPYT

SEQ ID NO: 1026 - protein, 15 aa, Homo sapiens
  Heavy chain CDR3 for antibody 513 (IGHV3-30)
ARGAMVRGVDYGMDV

SEQ ID NO: 1027 - protein, 10 aa, Homo sapiens
  Light chain CDR3 for antibody 514 (IGKV3-20)
QQYGSSPPYT

SEQ ID NO: 1028 - protein, 18 aa, Homo sapiens
  Heavy chain CDR3 for antibody 514 (IGHV3-11)
ARDGYSSGWNYYYFGLDV

SEQ ID NO: 1029 - protein, 9 aa, Homo sapiens
  Light chain CDR3 for antibody 515 (IGKV3-20)
QQYGSSPYT

SEQ ID NO: 1030 - protein, 16 aa, Homo sapiens
  Heavy chain CDR3 for antibody 515 (IGHV3-33)
ARGANYYGSGIPNFEY

SEQ ID NO: 1031 - protein, 9 aa, Homo sapiens
  Light chain CDR3 for antibody 516 (IGKV1-16)
QQYNSYPIT

SEQ ID NO: 1032 - protein, 15 aa, Homo sapiens
  Heavy chain CDR3 for antibody 516 (IGHV1-18)
ARLRWFGELSGWFDP

SEQ ID NO: 1033 - protein, 9 aa, Homo sapiens
  Light chain CDR3 for antibody 517 (IGKV1-17)
LQHNSYPYT

SEQ ID NO: 1034 - protein, 17 aa, Homo sapiens
  Heavy chain CDR3 for antibody 517 (IGHV3-33)
ARGYCSRTSCYLYYFDY

SEQ ID NO: 1035 - protein, 8 aa, Homo sapiens
  Light chain CDR3 for antibody 518 (IGKV6-21)
HQSSSLPT

SEQ ID NO: 1036 - protein, 12 aa, Homo sapiens
  Heavy chain CDR3 for antibody 518 (IGHV3-33)
ARDYGSGSFFDY

SEQ ID NO: 1037 - protein, 9 aa, Homo sapiens
  Light chain CDR3 for antibody 519 (IGKV1-17)
LQHNSYPYT

SEQ ID NO: 1038 - protein, 14 aa, Homo sapiens
  Heavy chain CDR3 for antibody 519 (IGHV3-33)
ARAISGSSYWYFDL

SEQ ID NO: 1039 - protein, 9 aa, Homo sapiens
  Light chain CDR3 for antibody 520 (IGKV5-2)
LQHDNFPYT

SEQ ID NO: 1040 - protein, 13 aa, Homo sapiens
  Heavy chain CDR3 for antibody 520 (IGHV3-11)
ARDGGAAAGTWDS

SEQ ID NO: 1041 - protein, 9 aa, Homo sapiens
  Light chain CDR3 for antibody 521 (IGKV1D-16)
QQYNSYPYT

SEQ ID NO: 1042 - protein, 17 aa, Homo sapiens
  Heavy chain CDR3 for antibody 521 (IGHV3-33)
ARGEQWLGYYYYYGMDV

SEQ ID NO: 1043 - protein, 10 aa, Homo sapiens
  Light chain CDR3 for antibody 522 (IGKV3-15)
QQYNNWPPYT

SEQ ID NO: 1044 - protein, 15 aa, Homo sapiens
  Heavy chain CDR3 for antibody 522 (IGHV3-33)
ARDALAVTGTGWFDP

SEQ ID NO: 1045 - protein, 9 aa, Homo sapiens
  Light chain CDR3 for antibody 523 (IGKV4-1)
QQYYTTPPT

SEQ ID NO: 1046 - protein, 12 aa, Homo sapiens
  Heavy chain CDR3 for antibody 523 (IGHV3-23)
AKGYTSFWYFDL

SEQ ID NO: 1047 - protein, 9 aa, Homo sapiens
  Light chain CDR3 for antibody 524 (IGKV3-20)
QQYGSSPYT

SEQ ID NO: 1048 - protein, 14 aa, Homo sapiens
  Heavy chain CDR3 for antibody 524 (IGHV3-33)
ARGAAAGNFYGLDV

SEQ ID NO: 1049 - protein, 9 aa, Homo sapiens
  Light chain CDR3 for antibody 525 (IGKV3D-7)
QQDYKLPLT

SEQ ID NO: 1050 - protein, 12 aa, Homo sapiens
  Heavy chain CDR3 for antibody 525 (IGHV4-61)
ARVGSSGWYFDY

SEQ ID NO: 1051 - protein, 9 aa, Homo sapiens
  Light chain CDR3 for antibody 526 (IGKV1-17)
LQHNSYPYT

SEQ ID NO: 1052 - protein, 15 aa, Homo sapiens
  Heavy chain CDR3 for antibody 526 (IGHV3-23)
AKDRYFDWLSDAFDI

SEQ ID NO: 1053 - protein, 9 aa, Homo sapiens
  Light chain CDR3 for antibody 527 (IGKV3-20)
QQYGGSPYT

SEQ ID NO: 1054 - protein, 13 aa, Homo sapiens
  Heavy chain CDR3 for antibody 527 (IGHV3-33)
ARVDYYNYYGLDV

SEQ ID NO: 1055 - protein, 9 aa, Homo sapiens
  Light chain CDR3 for antibody 528 (IGKV1D-16)
QQYNSYPYT

SEQ ID NO: 1056 - protein, 18 aa, Homo sapiens
  Heavy chain CDR3 for antibody 528 (IGHV3-33)
ARDRYYDILTGYYMGFDY

SEQ ID NO: 1057 - protein, 8 aa, Homo sapiens
  Light chain CDR3 for antibody 529 (IGKV3-15)
QQYNNWLT

SEQ ID NO: 1058 - protein, 16 aa, Homo sapiens
  Heavy chain CDR3 for antibody 529 (IGHV1-18)
TRGTFYYGSGSSFFDY

SEQ ID NO: 1059 - protein, 8 aa, Homo sapiens
  Light chain CDR3 for antibody 530 (IGKV3-20)
QQYGSSRT

SEQ ID NO: 1060 - protein, 14 aa, Homo sapiens
  Heavy chain CDR3 for antibody 530 (IGHV4-39)
ARQGGWYLYWYFDL

SEQ ID NO: 1061 - protein, 9 aa, Homo sapiens
  Light chain CDR3 for antibody 531 (IGKV1-9)
QQFNSYPYT

SEQ ID NO: 1062 - protein, 12 aa, Homo sapiens
  Heavy chain CDR3 for antibody 531 (IGHV3-33)
VRKWFGELYFDY

SEQ ID NO: 1063 - protein, 9 aa, Homo sapiens
  Light chain CDR3 for antibody 532 (IGKV1-17)
LQHNSFPWT

SEQ ID NO: 1064 - protein, 15 aa, Homo sapiens
  Heavy chain CDR3 for antibody 532 (IGHV3-20)
AREGPYYYGSGSLDY

SEQ ID NO: 1065 - protein, 8 aa, Homo sapiens
  Light chain CDR3 for antibody 533 (IGKV3-11)
QQRSNWWT

SEQ ID NO: 1066 - protein, 12 aa, Homo sapiens
  Heavy chain CDR3 for antibody 533 (IGHV3-33)
ARNYDILDYFDY

SEQ ID NO: 1067 - protein, 9 aa, Homo sapiens
  Light chain CDR3 for antibody 534 (IGKV3-20)
QQYGSSPLT

SEQ ID NO: 1068 - protein, 21 aa, Homo sapiens
  Heavy chain CDR3 for antibody 534 (IGHV1-18)
ASGVLIWFGELLSEDYYDMDV

SEQ ID NO: 1069 - protein, 9 aa, Homo sapiens
  Light chain CDR3 for antibody 535 (IGKV1-6)
LQDYNYPWT

SEQ ID NO: 1070 - protein, 18 aa, Homo sapiens
  Heavy chain CDR3 for antibody 535 (IGHV3-33)
ARRTAAGTGDYYYYGMDV

SEQ ID NO: 1071 - protein, 9 aa, Homo sapiens
  Light chain CDR3 for antibody 536 (IGKV5-2)
LQHDNFPWT

SEQ ID NO: 1072 - protein, 17 aa, Homo sapiens
  Heavy chain CDR3 for antibody 536 (IGHV4-59)
ARDFLVRGEGSYYGMDV

SEQ ID NO: 1073 - protein, 9 aa, Homo sapiens
  Light chain CDR3 for antibody 537 (IGKV1-17)
LQHNSYPYT

SEQ ID NO: 1074 - protein, 12 aa, Homo sapiens
  Heavy chain CDR3 for antibody 537 (IGHV3-33)
ARGYFGSGYAHF

SEQ ID NO: 1075 - protein, 9 aa, Homo sapiens
  Light chain CDR3 for antibody 538 (IGKV2-30)
MQGTHWPLT

SEQ ID NO: 1076 - protein, 16 aa, Homo sapiens
  Heavy chain CDR3 for antibody 538 (IGHV3-33)
AREGGLIAAAGTGFDY

SEQ ID NO: 1077 - protein, 9 aa, Homo sapiens
  Light chain CDR3 for antibody 539 (IGKV1-6)
LQDYNYPYT

SEQ ID NO: 1078 - protein, 12 aa, Homo sapiens
  Heavy chain CDR3 for antibody 539 (IGHV1-18)
ARILFYGDYFDY

SEQ ID NO: 1079 - protein, 9 aa, Homo sapiens
  Light chain CDR3 for antibody 540 (IGKV3D-7)
QQDYNLPYT

SEQ ID NO: 1080 - protein, 12 aa, Homo sapiens
  Heavy chain CDR3 for antibody 540 (IGHV3-21)
AREGFGESSFDY

SEQ ID NO: 1081 - protein, 9 aa, Homo sapiens
  Light chain CDR3 for antibody 541 (IGKV1D-16)
QQYNSYPYT

SEQ ID NO: 1082 - protein, 11 aa, Homo sapiens
  Heavy chain CDR3 for antibody 541 (IGHV3-33)
ARDILTGFLDH

SEQ ID NO: 1083 - protein, 9 aa, Homo sapiens
  Light chain CDR3 for antibody 542 (IGKV6-21)
HQSSSLPWT

SEQ ID NO: 1084 - protein, 15 aa, Homo sapiens
  Heavy chain CDR3 for antibody 542 (IGHV3-33)
ARDRGMVRGDGYLDY

SEQ ID NO: 1085 - protein, 9 aa, Homo sapiens
  Light chain CDR3 for antibody 543 (IGKV4-1)
QQYYSTPWT

SEQ ID NO: 1086 - protein, 20 aa, Homo sapiens
  Heavy chain CDR3 for antibody 543 (IGHV3-33)
ARDLGWATMVRGVIRAPFDY

SEQ ID NO: 1087 - protein, 9 aa, Homo sapiens
  Light chain CDR3 for antibody 544 (IGKV3D-20)
QQYGSSPPT

SEQ ID NO: 1088 - protein, 15 aa, Homo sapiens
  Heavy chain CDR3 for antibody 544 (IGHV3-23)
AKAGGRYFDWFPFDY

SEQ ID NO: 1089 - protein, 9 aa, Homo sapiens
  Light chain CDR3 for antibody 545 (IGKV1-6)
LQDYNYPYT

SEQ ID NO: 1090 - protein, 9 aa, Homo sapiens
  Heavy chain CDR3 for antibody 545 (IGHV3-30)
ARDYFHYDY

SEQ ID NO: 1091 - protein, 8 aa, Homo sapiens
  Light chain CDR3 for antibody 546 (IGKV3-20)
QQYGSSFT

SEQ ID NO: 1092 - protein, 13 aa, Homo sapiens
  Heavy chain CDR3 for antibody 546 (IGHV4-39)
ARPGIVAAGWFDP

SEQ ID NO: 1093 - protein, 9 aa, Homo sapiens
  Light chain CDR3 for antibody 547 (IGKV3-20)
QQYGSSPLT

SEQ ID NO: 1094 - protein, 16 aa, Homo sapiens
  Heavy chain CDR3 for antibody 547 (IGHV3-33)
ARAYYYGSGSYPHFQH

SEQ ID NO: 1095 - protein, 9 aa, Homo sapiens
  Light chain CDR3 for antibody 548 (IGKV3-15)
QQYNNWPLT

SEQ ID NO: 1096 - protein, 12 aa, Homo sapiens
  Heavy chain CDR3 for antibody 548 (IGHV4-28)
ARKDSGYDWFDY

SEQ ID NO: 1097 - protein, 9 aa, Homo sapiens
  Light chain CDR3 for antibody 549 (IGKV1-9)
QQLHIYPWT

SEQ ID NO: 1098 - protein, 12 aa, Homo sapiens
  Heavy chain CDR3 for antibody 549 (IGHV3-33)
ARKGYGLYVLDV

SEQ ID NO: 1099 - protein, 9 aa, Homo sapiens
  Light chain CDR3 for antibody 550 (IGKV1-16)
QQYTSYPFT

SEQ ID NO: 1100 - protein, 20 aa, Homo sapiens
  Heavy chain CDR3 for antibody 550 (IGHV4-59)
ARDRGYDILTGYYGYYGMDV

SEQ ID NO: 1101 - protein, 9 aa, Homo sapiens
  Light chain CDR3 for antibody 551 (IGKV1-27)
QKYNSAPFT

SEQ ID NO: 1102 - protein, 11 aa, Homo sapiens
  Heavy chain CDR3 for antibody 551 (IGHV3-23)
AKEGTYFDIPH

SEQ ID NO: 1103 - protein, 9 aa, Homo sapiens
  Light chain CDR3 for antibody 552 (IGKV3D-7)
QQDYNLPWT

SEQ ID NO: 1104 - protein, 17 aa, Homo sapiens
  Heavy chain CDR3 for antibody 552 (IGHV3-33)
ARENDILTGSYYYGMDV

SEQ ID NO: 1105 - protein, 9 aa, Homo sapiens
  Light chain CDR3 for antibody 553 (IGKV3-20)
QQYGSSPYT

SEQ ID NO: 1106 - protein, 13 aa, Homo sapiens
  Heavy chain CDR3 for antibody 553 (IGHV3-33)
ARDWGYSHGYFDY

SEQ ID NO: 1107 - protein, 9 aa, Homo sapiens
  Light chain CDR3 for antibody 554 (IGKV1-6)
LQDYNYPYT

SEQ ID NO: 1108 - protein, 13 aa, Homo sapiens
  Heavy chain CDR3 for antibody 554 (IGHV3-23)
ARAFFMVRGVIDF

SEQ ID NO: 1109 - protein, 9 aa, Homo sapiens
  Light chain CDR3 for antibody 555 (IGKV1-6)
LQDYNYPYT

SEQ ID NO: 1110 - protein, 17 aa, Homo sapiens
  Heavy chain CDR3 for antibody 555 (IGHV3-33)
ARDQDDILTGYYWYFDL

SEQ ID NO: 1111 - protein, 9 aa, Homo sapiens
  Light chain CDR3 for antibody 556 (IGKV6-21)
HQSGSLPHT

SEQ ID NO: 1112 - protein, 16 aa, Homo sapiens
  Heavy chain CDR3 for antibody 556 (IGHV3-33)
AKDAFYYGSGSHLFDY

SEQ ID NO: 1113 - protein, 9 aa, Homo sapiens
  Light chain CDR3 for antibody 557 (IGKV1D-16)
QQYNSYPLT

SEQ ID NO: 1114 - protein, 14 aa, Homo sapiens
  Heavy chain CDR3 for antibody 557 (IGHV3-23)
AKSRIVGALYYFDY

SEQ ID NO: 1115 - protein, 9 aa, Homo sapiens
  Light chain CDR3 for antibody 558 (IGKV3-11)
QQRSDWPLT

SEQ ID NO: 1116 - protein, 14 aa, Homo sapiens
  Heavy chain CDR3 for antibody 558 (IGHV3-33)
ARDGAAAALDAFDI

SEQ ID NO: 1117 - protein, 9 aa, Homo sapiens
  Light chain CDR3 for antibody 559 (IGKV3-20)
QQYGSSPYT

SEQ ID NO: 1118 - protein, 16 aa, Homo sapiens
  Heavy chain CDR3 for antibody 559 (IGHV3-33)
ARDAGYPNYDYYGMDV

SEQ ID NO: 1119 - protein, 9 aa, Homo sapiens
  Light chain CDR3 for antibody 560 (IGKV1-17)
LQHNSYPYT

SEQ ID NO: 1120 - protein, 14 aa, Homo sapiens
  Heavy chain CDR3 for antibody 560 (IGHV3-33)
ARGYGSGSYYSFDY

SEQ ID NO: 1121 - protein, 9 aa, Homo sapiens
  Light chain CDR3 for antibody 561 (IGKV3-15)
QQYNNWPRT

SEQ ID NO: 1122 - protein, 15 aa, Homo sapiens
  Heavy chain CDR3 for antibody 561 (IGHV3-11)
AREYSSGWYGDAFDI

SEQ ID NO: 1123 - protein, 9 aa, Homo sapiens
  Light chain CDR3 for antibody 562 (IGKV1D-16)
QQYNSYPLT

SEQ ID NO: 1124 - protein, 13 aa, Homo sapiens
  Heavy chain CDR3 for antibody 562 (IGHV3-33)
ARDWGYSHGYFDY

SEQ ID NO: 1125 - protein, 9 aa, Homo sapiens
  Light chain CDR3 for antibody 563 (IGKV6-21)
HQSSSLPHT

SEQ ID NO: 1126 - protein, 19 aa, Homo sapiens
  Heavy chain CDR3 for antibody 563 (IGHV4-39)
ARLDYDFLTDYYRPYFFAY

SEQ ID NO: 1127 - protein, 9 aa, Homo sapiens
  Light chain CDR3 for antibody 564 (IGKV1D-16)
QQYNSYPYT

SEQ ID NO: 1128 - protein, 11 aa, Homo sapiens
  Heavy chain CDR3 for antibody 564 (IGHV3-33)
ARDTWDDYFDY

SEQ ID NO: 1129 - protein, 9 aa, Homo sapiens
  Light chain CDR3 for antibody 565 (IGKV1-17)
LQHNSYPWT

SEQ ID NO: 1130 - protein, 14 aa, Homo sapiens
  Heavy chain CDR3 for antibody 565 (IGHV3-33)
ARDRGRHNYFGMDV

SEQ ID NO: 1131 - protein, 9 aa, Homo sapiens
  Light chain CDR3 for antibody 566 (IGKV1-6)
LQDHNYPRT

SEQ ID NO: 1132 - protein, 13 aa, Homo sapiens
  Heavy chain CDR3 for antibody 566 (IGHV3-33)
ARDGYSYGPYFDY

SEQ ID NO: 1133 - protein, 9 aa, Homo sapiens
  Light chain CDR3 for antibody 567 (IGKV3D-7)
QQDYNLPFT

SEQ ID NO: 1134 - protein, 15 aa, Homo sapiens
  Heavy chain CDR3 for antibody 567 (IGHV3-23)
AKDRNYDFLTGPFDP

SEQ ID NO: 1135 - protein, 9 aa, Homo sapiens
  Light chain CDR3 for antibody 568 (IGKV1D-16)
QQYNSYPYT

SEQ ID NO: 1136 - protein, 13 aa, Homo sapiens
  Heavy chain CDR3 for antibody 568 (IGHV4-59)
ARESPGPYDAFDI

SEQ ID NO: 1137 - protein, 9 aa, Homo sapiens
  Light chain CDR3 for antibody 569 (IGKV1-27)
QKYNSAPYT

SEQ ID NO: 1138 - protein, 11 aa, Homo sapiens
  Heavy chain CDR3 for antibody 569 (IGHV3-33)
ARDRSSGPFDY

SEQ ID NO: 1139 - protein, 9 aa, Homo sapiens
  Light chain CDR3 for antibody 570 (IGKV1-39)
QQSYSTPLT

SEQ ID NO: 1140 - protein, 16 aa, Homo sapiens
  Heavy chain CDR3 for antibody 570 (IGHV3-23)
AKEGMVLRYFDWLWDY

SEQ ID NO: 1141 - protein, 9 aa, Homo sapiens
  Light chain CDR3 for antibody 571 (IGKV1-9)
QQLNSYPLT

SEQ ID NO: 1142 - protein, 12 aa, Homo sapiens
  Heavy chain CDR3 for antibody 571 (IGHV4-61)
ARVYSSGWLFDY

SEQ ID NO: 1143 - protein, 9 aa, Homo sapiens
  Light chain CDR3 for antibody 572 (IGKV3-20)
QQYGSSPYT

SEQ ID NO: 1144 - protein, 14 aa, Homo sapiens
  Heavy chain CDR3 for antibody 572 (IGHV3-23)
AKSRIVGALYYFDY

SEQ ID NO: 1145 - protein, 9 aa, Homo sapiens
  Light chain CDR3 for antibody 573 (IGKV6-21)
HQSSSLPYT

SEQ ID NO: 1146 - protein, 10 aa, Homo sapiens
  Heavy chain CDR3 for antibody 573 (IGHV3-11)
ARGQWPPLDY

SEQ ID NO: 1147 - protein, 10 aa, Homo sapiens
  Light chain CDR3 for antibody 574 (IGKV1-9)
QQLNSFLMYT

SEQ ID NO: 1148 - protein, 18 aa, Homo sapiens
  Heavy chain CDR3 for antibody 574 (IGHV4-59)
ARDNHYYSSGTYSNWFDP

SEQ ID NO: 1149 - protein, 9 aa, Homo sapiens
  Light chain CDR3 for antibody 575 (IGKV3D-7)
QQDYKLPLT

SEQ ID NO: 1150 - protein, 12 aa, Homo sapiens
  Heavy chain CDR3 for antibody 575 (IGHV3-33)
ARDLVRGIRMDV

SEQ ID NO: 1151 - protein, 9 aa, Homo sapiens
  Light chain CDR3 for antibody 576 (IGKV1D-13)
QQFNNYPHT

SEQ ID NO: 1152 - protein, 19 aa, Homo sapiens
  Heavy chain CDR3 for antibody 576 (IGHV3-33)
ARRKNYYGSGSWHYYGMDV

SEQ ID NO: 1153 - protein, 10 aa, Homo sapiens
  Light chain CDR3 for antibody 577 (IGKV1-17)
LQHNSYPIFT

SEQ ID NO: 1154 - protein, 10 aa, Homo sapiens
  Heavy chain CDR3 for antibody 577 (IGHV3-23)
AKDQVGATDC

SEQ ID NO: 1155 - protein, 9 aa, Homo sapiens
  Light chain CDR3 for antibody 578 (IGKV1-6)
LQDYNYPWT

SEQ ID NO: 1156 - protein, 18 aa, Homo sapiens
  Heavy chain CDR3 for antibody 578 (IGHV3-33)
VREGGYYGSGSYPDAFDI

SEQ ID NO: 1157 - protein, 9 aa, Homo sapiens
  Light chain CDR3 for antibody 579 (IGKV5-2)
LQHDNFPWT

SEQ ID NO: 1158 - protein, 14 aa, Homo sapiens
  Heavy chain CDR3 for antibody 579 (IGHV4-39)
ARDSGYDYYYGMDV

SEQ ID NO: 1159 - protein, 9 aa, Homo sapiens
  Light chain CDR3 for antibody 580 (IGKV1D-16)
QQYNSYPLT

SEQ ID NO: 1160 - protein, 12 aa, Homo sapiens
  Heavy chain CDR3 for antibody 580 (IGHV3-33)
ARGYFGSGYAHF

SEQ ID NO: 1161 - protein, 9 aa, Homo sapiens
  Light chain CDR3 for antibody 581 (IGKV1D-16)
QQYDSYPYT

SEQ ID NO: 1162 - protein, 14 aa, Homo sapiens
  Heavy chain CDR3 for antibody 581 (IGHV3-23)
AKDDIVRATGAFDI

SEQ ID NO: 1163 - protein, 8 aa, Homo sapiens
  Light chain CDR3 for antibody 582 (IGKV6-21)
HQSSSLYT

SEQ ID NO: 1164 - protein, 10 aa, Homo sapiens
  Heavy chain CDR3 for antibody 582 (IGHV1-46)
AREWELLFDY

SEQ ID NO: 1165 - protein, 9 aa, Homo sapiens
  Light chain CDR3 for antibody 583 (IGKV1-17)
LQHNSYPYT

SEQ ID NO: 1166 - protein, 17 aa, Homo sapiens
  Heavy chain CDR3 for antibody 583 (IGHV3-33)
ARDWFGELSDYYYGMDV

SEQ ID NO: 1167 - protein, 9 aa, Homo sapiens
  Light chain CDR3 for antibody 584 (IGKV1-16)
QKYNSNPLT

SEQ ID NO: 1168 - protein, 12 aa, Homo sapiens
  Heavy chain CDR3 for antibody 584 (IGHV3-33)
ASRDILTGYLGY

SEQ ID NO: 1169 - protein, 9 aa, Homo sapiens
  Light chain CDR3 for antibody 585 (IGKV3-20)
QQYGSSPYT

SEQ ID NO: 1170 - protein, 17 aa, Homo sapiens
  Heavy chain CDR3 for antibody 585 (IGHV3-33)
ARKDYGILSGYYSPFDY

SEQ ID NO: 1171 - protein, 9 aa, Homo sapiens
  Light chain CDR3 for antibody 586 (IGKV1D-16)
QQYNSYPYT

SEQ ID NO: 1172 - protein, 10 aa, Homo sapiens
  Heavy chain CDR3 for antibody 586 (IGHV3-33)
ARENSTPLDY

SEQ ID NO: 1173 - protein, 9 aa, Homo sapiens
  Light chain CDR3 for antibody 587 (IGKV3-20)
QQYGSSPYT

SEQ ID NO: 1174 - protein, 13 aa, Homo sapiens
  Heavy chain CDR3 for antibody 587 (IGHV3-33)
ARVHFDWLDAFDI

SEQ ID NO: 1175 - protein, 9 aa, Homo sapiens
  Light chain CDR3 for antibody 588 (IGKV1-6)
LQDYNYPYT

SEQ ID NO: 1176 - protein, 9 aa, Homo sapiens
  Heavy chain CDR3 for antibody 588 (IGHV3-20)
ASIRGYFDY

SEQ ID NO: 1177 - protein, 9 aa, Homo sapiens
  Light chain CDR3 for antibody 589 (IGKV6-21)
HQSSSLPYT

SEQ ID NO: 1178 - protein, 12 aa, Homo sapiens
  Heavy chain CDR3 for antibody 589 (IGHV4-39)
ARHGSGSSFFDY

SEQ ID NO: 1179 - protein, 10 aa, Homo sapiens
  Light chain CDR3 for antibody 590 (IGKV4-1)
QQYYDISMYT

SEQ ID NO: 1180 - protein, 16 aa, Homo sapiens
  Heavy chain CDR3 for antibody 590 (IGHV2-70)
AHRAVVTSNLNCRFDF

SEQ ID NO: 1181 - protein, 9 aa, Homo sapiens
  Light chain CDR3 for antibody 591 (IGKV1-6)
LQDYNFPYT

SEQ ID NO: 1182 - protein, 17 aa, Homo sapiens
  Heavy chain CDR3 for antibody 591 (IGHV3-33)
ARDRDDILTGFYTYFDY

SEQ ID NO: 1183 - protein, 9 aa, Homo sapiens
  Light chain CDR3 for antibody 592 (IGKV6-21)
HQSSSLPIT

SEQ ID NO: 1184 - protein, 10 aa, Homo sapiens
  Heavy chain CDR3 for antibody 592 (IGHV3-30)
ARDNFEGMDV

SEQ ID NO: 1185 - protein, 9 aa, Homo sapiens
  Light chain CDR3 for antibody 593 (IGKV5-2)
LQHDNFPWT

SEQ ID NO: 1186 - protein, 12 aa, Homo sapiens
  Heavy chain CDR3 for antibody 593 (IGHV4-39)
ARHGSGSSYFDY

SEQ ID NO: 1187 - protein, 9 aa, Homo sapiens
  Light chain CDR3 for antibody 594 (IGKV1-17)
LQHNSYPYT

SEQ ID NO: 1188 - protein, 15 aa, Homo sapiens
  Heavy chain CDR3 for antibody 594 (IGHV3-33)
ARRICSGGSCSLFDY

SEQ ID NO: 1189 - protein, 9 aa, Homo sapiens
  Light chain CDR3 for antibody 595 (IGKV1-6)
LQDYNYPWT

SEQ ID NO: 1190 - protein, 17 aa, Homo sapiens
  Heavy chain CDR3 for antibody 595 (IGHV3-23)
SKERNWNDGYYYFGMDA

SEQ ID NO: 1191 - protein, 10 aa, Homo sapiens
  Light chain CDR3 for antibody 596 (IGKV3-20)
QQYGRSPPVT

SEQ ID NO: 1192 - protein, 18 aa, Homo sapiens
  Heavy chain CDR3 for antibody 596 (IGHV3-23)
AKDGDYFGSGSYWGYFDL

SEQ ID NO: 1193 - protein, 9 aa, Homo sapiens
  Light chain CDR3 for antibody 597 (IGKV1-39)
QQSYSTPLT

SEQ ID NO: 1194 - protein, 11 aa, Homo sapiens
  Heavy chain CDR3 for antibody 597 (IGHV3-33)
ARDRSSGPFDY

SEQ ID NO: 1195 - protein, 9 aa, Homo sapiens
  Light chain CDR3 for antibody 598 (IGKV1-39)
QQSYSTPLT

SEQ ID NO: 1196 - protein, 16 aa, Homo sapiens
  Heavy chain CDR3 for antibody 598 (IGHV3-64)
ARGRYFDWLLGDWFDP

SEQ ID NO: 1197 - protein, 9 aa, Homo sapiens
  Light chain CDR3 for antibody 599 (IGKV1-6)
LQDYNYPLT

SEQ ID NO: 1198 - protein, 12 aa, Homo sapiens
  Heavy chain CDR3 for antibody 599 (IGHV3-33)
ARESGGSFGMDV

SEQ ID NO: 1199 - protein, 9 aa, Homo sapiens
  Light chain CDR3 for antibody 600 (IGKV1-6)
LQDYNYPYT

SEQ ID NO: 1200 - protein, 10 aa, Homo sapiens
  Heavy chain CDR3 for antibody 600 (IGHV3-30)
ARGSWYGFDY

SEQ ID NO: 1201 - protein, 9 aa, Homo sapiens
  Light chain CDR3 for antibody 601 (IGKV6-21)
HQSSSLPYT

SEQ ID NO: 1202 - protein, 16 aa, Homo sapiens
  Heavy chain CDR3 for antibody 601 (IGHV3-11)
ARDSELRYFDWFGMDV

SEQ ID NO: 1203 - protein, 9 aa, Homo sapiens
  Light chain CDR3 for antibody 602 (IGKV5-2)
LQHDNFPYT

SEQ ID NO: 1204 - protein, 14 aa, Homo sapiens
  Heavy chain CDR3 for antibody 602 (IGHV3-33)
ARGAAAGNFYGLDV

SEQ ID NO: 1205 - protein, 9 aa, Homo sapiens
  Light chain CDR3 for antibody 603 (IGKV6-21)
HQSSSLPHT

SEQ ID NO: 1206 - protein, 13 aa, Homo sapiens
  Heavy chain CDR3 for antibody 603 (IGHV3-13)
ARAITMVRGVIDY

SEQ ID NO: 1207 - protein, 9 aa, Homo sapiens
  Light chain CDR3 for antibody 604 (IGKV5-2)
LQHDNFPYT

SEQ ID NO: 1208 - protein, 13 aa, Homo sapiens
  Heavy chain CDR3 for antibody 604 (IGHV3-23)
ASPFNWNDGFFDY

SEQ ID NO: 1209 - protein, 9 aa, Homo sapiens
  Light chain CDR3 for antibody 605 (IGKV3D-7)
QQDYNLPWT

SEQ ID NO: 1210 - protein, 14 aa, Homo sapiens
  Heavy chain CDR3 for antibody 605 (IGHV4-39)
ARRGVLVPPGGMDV

SEQ ID NO: 1211 - protein, 10 aa, Homo sapiens
  Light chain CDR3 for antibody 606 (IGKV3-15)
QQYNNWPPIT

SEQ ID NO: 1212 - protein, 14 aa, Homo sapiens
  Heavy chain CDR3 for antibody 606 (IGHV3-64)
ARGGGAVTGTNFDY

SEQ ID NO: 1213 - protein, 9 aa, Homo sapiens
  Light chain CDR3 for antibody 607 (IGKV1D-16)
QQYNSYPYT

SEQ ID NO: 1214 - protein, 10 aa, Homo sapiens
  Heavy chain CDR3 for antibody 607 (IGHV3-33)
ARDGSGSQPI

SEQ ID NO: 1215 - protein, 9 aa, Homo sapiens
  Light chain CDR3 for antibody 608 (IGKV6-21)
HQSSSLPYT

SEQ ID NO: 1216 - protein, 14 aa, Homo sapiens
  Heavy chain CDR3 for antibody 608 (IGHV3-33)
ARGAAAGNFYGLDV

SEQ ID NO: 1217 - protein, 9 aa, Homo sapiens
  Light chain CDR3 for antibody 609 (IGKV1-9)
QQLNSYPLT

SEQ ID NO: 1218 - protein, 13 aa, Homo sapiens
  Heavy chain CDR3 for antibody 609 (IGHV4-59)
ARTMVRGVAPFDY

SEQ ID NO: 1219 - protein, 9 aa, Homo sapiens
  Light chain CDR3 for antibody 610 (IGKV5-2)
LQHDNFPWT

SEQ ID NO: 1220 - protein, 15 aa, Homo sapiens
  Heavy chain CDR3 for antibody 610 (IGHV4-59)
ARDLGHYYGSVSIDY

SEQ ID NO: 1221 - protein, 8 aa, Homo sapiens
  Light chain CDR3 for antibody 611 (IGKV6-21)
HQSSSLPT

SEQ ID NO: 1222 - protein, 14 aa, Homo sapiens
  Heavy chain CDR3 for antibody 611 (IGHV3-20)
ARGGSSGWYDWFDP

SEQ ID NO: 1223 - protein, 9 aa, Homo sapiens
  Light chain CDR3 for antibody 612 (IGKV3-20)
QQYGSSPYT

SEQ ID NO: 1224 - protein, 13 aa, Homo sapiens
  Heavy chain CDR3 for antibody 612 (IGHV3-33)
AKRYSSGWYPFDF

SEQ ID NO: 1225 - protein, 9 aa, Homo sapiens
  Light chain CDR3 for antibody 613 (IGKV1D-16)
QQYNSYPYT

SEQ ID NO: 1226 - protein, 14 aa, Homo sapiens
  Heavy chain CDR3 for antibody 613 (IGHV1-46)
ARRGIVGALDAFDI

SEQ ID NO: 1227 - protein, 9 aa, Homo sapiens
  Light chain CDR3 for antibody 614 (IGKV1D-16)
QQYNSYPYT

SEQ ID NO: 1228 - protein, 14 aa, Homo sapiens
  Heavy chain CDR3 for antibody 614 (IGHV3-33)
ARDNILTVYYLFDY

SEQ ID NO: 1229 - protein, 10 aa, Homo sapiens
  Light chain CDR3 for antibody 615 (IGKV3-15)
QQYNNWPPLT

SEQ ID NO: 1230 - protein, 15 aa, Homo sapiens
  Heavy chain CDR3 for antibody 615 (IGHV3-33)
ARGGTGYYSYWYFDL

SEQ ID NO: 1231 - protein, 9 aa, Homo sapiens
  Light chain CDR3 for antibody 616 (IGKV1-27)
QKYNSAPWT

SEQ ID NO: 1232 - protein, 15 aa, Homo sapiens
  Heavy chain CDR3 for antibody 616 (IGHV3-23)
AKAGDYYGSGSPFDY

SEQ ID NO: 1233 - protein, 9 aa, Homo sapiens
  Light chain CDR3 for antibody 617 (IGKV1-9)
QQLNSYPLT

SEQ ID NO: 1234 - protein, 14 aa, Homo sapiens
  Heavy chain CDR3 for antibody 617 (IGHV4-39)
ARDSGYDYYYGMDV

SEQ ID NO: 1235 - protein, 9 aa, Homo sapiens
  Light chain CDR3 for antibody 618 (IGKV6-21)
HQSSSLPYT

SEQ ID NO: 1236 - protein, 13 aa, Homo sapiens
  Heavy chain CDR3 for antibody 618 (IGHV3-23)
ASPFNWNDGFFDY

SEQ ID NO: 1237 - protein, 9 aa, Homo sapiens
  Light chain CDR3 for antibody 619 (IGKV6-21)
HQSSSLPRT

SEQ ID NO: 1238 - protein, 13 aa, Homo sapiens
  Heavy chain CDR3 for antibody 619 (IGHV3-33)
ARDPLYSGSYFDY

SEQ ID NO: 1239 - protein, 9 aa, Homo sapiens
  Light chain CDR3 for antibody 620 (IGKV3D-7)
QQDDNLPPT

SEQ ID NO: 1240 - protein, 22 aa, Homo sapiens
  Heavy chain CDR3 for antibody 620 (IGHV1-18)
ARDRYNNQSKYRNRDYYYGLDV

SEQ ID NO: 1241 - protein, 9 aa, Homo sapiens
  Light chain CDR3 for antibody 621 (IGKV1-17)
LQHNSYPYT

SEQ ID NO: 1242 - protein, 10 aa, Homo sapiens
  Heavy chain CDR3 for antibody 621 (IGHV3-23)
AKGDRWRFDP

SEQ ID NO: 1243 - protein, 10 aa, Homo sapiens
  Light chain CDR3 for antibody 622 (IGKV3-11)
QQRSTWPTLT

SEQ ID NO: 1244 - protein, 8 aa, Homo sapiens
  Heavy chain CDR3 for antibody 622 (IGHV3-23)
AKETGNNY

SEQ ID NO: 1245 - protein, 9 aa, Homo sapiens
  Light chain CDR3 for antibody 623 (IGKV1-17)
LQHNSYPYT

SEQ ID NO: 1246 - protein, 13 aa, Homo sapiens
  Heavy chain CDR3 for antibody 623 (IGHV3-33)
ARAFTMVRGVIDY

SEQ ID NO: 1247 - protein, 9 aa, Homo sapiens
  Light chain CDR3 for antibody 624 (IGKV1D-16)
QQYNSYPYT

SEQ ID NO: 1248 - protein, 12 aa, Homo sapiens
  Heavy chain CDR3 for antibody 624 (IGHV1-24)
ASDWAYYYGMDV

SEQ ID NO: 1249 - protein, 9 aa, Homo sapiens
  Light chain CDR3 for antibody 625 (IGKV3D-20)
QQYGSSPYT

SEQ ID NO: 1250 - protein, 12 aa, Homo sapiens
  Heavy chain CDR3 for antibody 625 (IGHV3-33)
ARGYFGSGYAHF

SEQ ID NO: 1251 - protein, 9 aa, Homo sapiens
  Light chain CDR3 for antibody 626 (IGKV3-20)
QQYGSSPRT

SEQ ID NO: 1252 - protein, 16 aa, Homo sapiens
  Heavy chain CDR3 for antibody 626 (IGHV1-24)
ATEDSSSYYYYYGMDV

SEQ ID NO: 1253 - protein, 9 aa, Homo sapiens
  Light chain CDR3 for antibody 627 (IGKV1-17)
LQHNSYPYT

SEQ ID NO: 1254 - protein, 13 aa, Homo sapiens
  Heavy chain CDR3 for antibody 627 (IGHV4-4)
ARERGIAAAGPDY

SEQ ID NO: 1255 - protein, 9 aa, Homo sapiens
  Light chain CDR3 for antibody 628 (IGKV1-6)
LQDYMYPFT

SEQ ID NO: 1256 - protein, 20 aa, Homo sapiens
  Heavy chain CDR3 for antibody 628 (IGHV3-23)
AKDRETGTTSYHYYYYGMDV

SEQ ID NO: 1257 - protein, 9 aa, Homo sapiens
  Light chain CDR3 for antibody 629 (IGKV1-17)
LQHNSYPWT

SEQ ID NO: 1258 - protein, 16 aa, Homo sapiens
  Heavy chain CDR3 for antibody 629 (IGHV3-23)
ARNDILTASGYYGMDV

SEQ ID NO: 1259 - protein, 9 aa, Homo sapiens
  Light chain CDR3 for antibody 630 (IGKV1D-16)
QQYNSYPYT

SEQ ID NO: 1260 - protein, 17 aa, Homo sapiens
  Heavy chain CDR3 for antibody 630 (IGHV3-23)
AKDGIGELSYYYYGMDV

SEQ ID NO: 1261 - protein, 9 aa, Homo sapiens
  Light chain CDR3 for antibody 631 (IGKV1D-16)
QQYNSYPYT

SEQ ID NO: 1262 - protein, 13 aa, Homo sapiens
  Heavy chain CDR3 for antibody 631 (IGHV3-33)
ASGYSGYDWYFDL

SEQ ID NO: 1263 - protein, 9 aa, Homo sapiens
  Light chain CDR3 for antibody 632 (IGKV1D-16)
QQYNSYPLT

SEQ ID NO: 1264 - protein, 14 aa, Homo sapiens
  Heavy chain CDR3 for antibody 632 (IGHV3-33)
ARDWNDVYYYGMDV

SEQ ID NO: 1265 - protein, 9 aa, Homo sapiens
  Light chain CDR3 for antibody 633 (IGKV1D-16)
QQYNSYPYT

SEQ ID NO: 1266 - protein, 14 aa, Homo sapiens
  Heavy chain CDR3 for antibody 633 (IGHV3-33)
ARDREQQLVRYFDY

SEQ ID NO: 1267 - protein, 9 aa, Homo sapiens
  Light chain CDR3 for antibody 634 (IGKV5-2)
LQHDNFPWT

SEQ ID NO: 1268 - protein, 11 aa, Homo sapiens
  Heavy chain CDR3 for antibody 634 (IGHV4-59)
ARSLRYSVFDY

SEQ ID NO: 1269 - protein, 9 aa, Homo sapiens
  Light chain CDR3 for antibody 635 (IGKV1-9)
QQLNSYPLT

SEQ ID NO: 1270 - protein, 12 aa, Homo sapiens
  Heavy chain CDR3 for antibody 635 (IGHV3-23)
AKGAVVTAIFDY

SEQ ID NO: 1271 - protein, 9 aa, Homo sapiens
  Light chain CDR3 for antibody 636 (IGKV1-6)
LQDYNYPFT

SEQ ID NO: 1272 - protein, 16 aa, Homo sapiens
  Heavy chain CDR3 for antibody 636 (IGHV3-30)
ARDSSYYGSGYYGMDV

SEQ ID NO: 1273 - protein, 9 aa, Homo sapiens
  Light chain CDR3 for antibody 637 (IGKV1-17)
LQHNSYPYT

SEQ ID NO: 1274 - protein, 14 aa, Homo sapiens
  Heavy chain CDR3 for antibody 637 (IGHV3-33)
ARQYSYGYPYYFDY

SEQ ID NO: 1275 - protein, 9 aa, Homo sapiens
  Light chain CDR3 for antibody 638 (IGKV1-17)
LQHNGYPFT

SEQ ID NO: 1276 - protein, 12 aa, Homo sapiens
  Heavy chain CDR3 for antibody 638 (IGHV3-33)
AREEAVAEAFDI

SEQ ID NO: 1277 - protein, 9 aa, Homo sapiens
  Light chain CDR3 for antibody 639 (IGKV1-6)
LQDYNYPYT

SEQ ID NO: 1278 - protein, 8 aa, Homo sapiens
  Heavy chain CDR3 for antibody 639 (IGHV3-23)
AETFLFDY

SEQ ID NO: 1279 - protein, 9 aa, Homo sapiens
  Light chain CDR3 for antibody 640 (IGKV3-20)
QQYGSSPYT

SEQ ID NO: 1280 - protein, 14 aa, Homo sapiens
  Heavy chain CDR3 for antibody 640 (IGHV3-33)
ARGLEWGGDNWFDP

SEQ ID NO: 1281 - protein, 9 aa, Homo sapiens
  Light chain CDR3 for antibody 641 (IGKV1D-16)
QQYNSYPLT

SEQ ID NO: 1282 - protein, 12 aa, Homo sapiens
  Heavy chain CDR3 for antibody 641 (IGHV3-33)
ARGGIAVDVCDI

SEQ ID NO: 1283 - protein, 9 aa, Homo sapiens
  Light chain CDR3 for antibody 642 (IGKV3-20)
QQYGSSPRT

SEQ ID NO: 1284 - protein, 24 aa, Homo sapiens
  Heavy chain CDR3 for antibody 642 (IGHV1-24)
ATEAHYDILTGYYNPHYYYYGMDV

SEQ ID NO: 1285 - protein, 9 aa, Homo sapiens
  Light chain CDR3 for antibody 643 (IGKV5-2)
LQHDNFPWT

SEQ ID NO: 1286 - protein, 12 aa, Homo sapiens
  Heavy chain CDR3 for antibody 643 (IGHV1-24)
ASDWAYYYGMDV

SEQ ID NO: 1287 - protein, 9 aa, Homo sapiens
  Light chain CDR3 for antibody 644 (IGKV1-6)
LQDYNYPWT

SEQ ID NO: 1288 - protein, 14 aa, Homo sapiens
  Heavy chain CDR3 for antibody 644 (IGHV3-23)
AKCDYDILTGILDY

SEQ ID NO: 1289 - protein, 9 aa, Homo sapiens
  Light chain CDR3 for antibody 645 (IGKV1D-16)
QQYNSYPYT

SEQ ID NO: 1290 - protein, 13 aa, Homo sapiens
  Heavy chain CDR3 for antibody 645 (IGHV3-11)
ARDEGYRGYVLDT

SEQ ID NO: 1291 - protein, 9 aa, Homo sapiens
  Light chain CDR3 for antibody 646 (IGKV1-6)
LQDYNYPYT

SEQ ID NO: 1292 - protein, 13 aa, Homo sapiens
  Heavy chain CDR3 for antibody 646 (IGHV3-11)
ARDEGYRGYVLDT

SEQ ID NO: 1293 - protein, 9 aa, Homo sapiens
  Light chain CDR3 for antibody 647 (IGKV1-17)
LQHNSYPYT

SEQ ID NO: 1294 - protein, 16 aa, Homo sapiens
  Heavy chain CDR3 for antibody 647 (IGHV3-33)
ARAVYYGSGSSLIMDV

SEQ ID NO: 1295 - protein, 9 aa, Homo sapiens
  Light chain CDR3 for antibody 648 (IGKV6-21)
HQSSSLPFT

SEQ ID NO: 1296 - protein, 11 aa, Homo sapiens
  Heavy chain CDR3 for antibody 648 (IGHV3-33)
ARDRATAGLDY

SEQ ID NO: 1297 - protein, 9 aa, Homo sapiens
  Light chain CDR3 for antibody 649 (IGKV1-27)
QKYNSAPWT

SEQ ID NO: 1298 - protein, 14 aa, Homo sapiens
  Heavy chain CDR3 for antibody 649 (IGHV1-18)
ARDQPTVPSGYFDY

SEQ ID NO: 1299 - protein, 9 aa, Homo sapiens
  Light chain CDR3 for antibody 650 (IGKV6-21)
HQSSSLPYT

SEQ ID NO: 1300 - protein, 12 aa, Homo sapiens
  Heavy chain CDR3 for antibody 650 (IGHV3-13)
AREAGIPDAFDI

SEQ ID NO: 1301 - protein, 9 aa, Homo sapiens
  Light chain CDR3 for antibody 651 (IGKV3D-7)
QQDYNLPLT

SEQ ID NO: 1302 - protein, 14 aa, Homo sapiens
  Heavy chain CDR3 for antibody 651 (IGHV1-2)
AREGGSGSSPGMDV

SEQ ID NO: 1303 - protein, 9 aa, Homo sapiens
  Light chain CDR3 for antibody 652 (IGKV1-17)
LQHNSYPYT

SEQ ID NO: 1304 - protein, 15 aa, Homo sapiens
  Heavy chain CDR3 for antibody 652 (IGHV3-23)
AKDGSYYDYYYGMDV

SEQ ID NO: 1305 - protein, 9 aa, Homo sapiens
  Light chain CDR3 for antibody 653 (IGKV1-6)
LQDYNYPYT

SEQ ID NO: 1306 - protein, 13 aa, Homo sapiens
  Heavy chain CDR3 for antibody 653 (IGHV3-33)
ARRYRSGWYPFDY

SEQ ID NO: 1307 - protein, 9 aa, Homo sapiens
  Light chain CDR3 for antibody 654 (IGKV3-15)
QQYNNWPRT

SEQ ID NO: 1308 - protein, 17 aa, Homo sapiens
  Heavy chain CDR3 for antibody 654 (IGHV3-13)
AREGWFGELWGYYGMDV

SEQ ID NO: 1309 - protein, 9 aa, Homo sapiens
  Light chain CDR3 for antibody 655 (IGKV1-9)
QQLNSYPLT

SEQ ID NO: 1310 - protein, 13 aa, Homo sapiens
  Heavy chain CDR3 for antibody 655 (IGHV3-33)
ARDYCGGDCYLDY

SEQ ID NO: 1311 - protein, 9 aa, Homo sapiens
  Light chain CDR3 for antibody 656 (IGKV5-2)
LQHDNFPWT

SEQ ID NO: 1312 - protein, 12 aa, Homo sapiens
  Heavy chain CDR3 for antibody 656 (IGHV4-61)
ARVYSSGWLFDY

SEQ ID NO: 1313 - protein, 9 aa, Homo sapiens
  Light chain CDR3 for antibody 657 (IGKV3-15)
QQYNNWPLT

SEQ ID NO: 1314 - protein, 13 aa, Homo sapiens
  Heavy chain CDR3 for antibody 657 (IGHV4-59)
ARDAGYSSSWFDY

SEQ ID NO: 1315 - protein, 9 aa, Homo sapiens
  Light chain CDR3 for antibody 658 (IGKV3-20)
QQYGSSPYT

SEQ ID NO: 1316 - protein, 18 aa, Homo sapiens
  Heavy chain CDR3 for antibody 658 (IGHV3-33)
ARREGIVGATTYYYGMDV

SEQ ID NO: 1317 - protein, 9 aa, Homo sapiens
  Light chain CDR3 for antibody 659 (IGKV6-21)
HQSSSLPYT

SEQ ID NO: 1318 - protein, 13 aa, Homo sapiens
  Heavy chain CDR3 for antibody 659 (IGHV3-33)
ARALYSSSWPGDY

SEQ ID NO: 1319 - protein, 9 aa, Homo sapiens
  Light chain CDR3 for antibody 660 (IGKV1D-16)
QQYNSYPYT

SEQ ID NO: 1320 - protein, 17 aa, Homo sapiens
  Heavy chain CDR3 for antibody 660 (IGHV3-33)
VREGGLLWVGELSLFDY

SEQ ID NO: 1321 - protein, 9 aa, Homo sapiens
  Light chain CDR3 for antibody 661 (IGKV1D-16)
QQYNSYPYT

SEQ ID NO: 1322 - protein, 20 aa, Homo sapiens
  Heavy chain CDR3 for antibody 661 (IGHV1-f)
ATGLITFVRGVILTYRSFDY

SEQ ID NO: 1323 - protein, 9 aa, Homo sapiens
  Light chain CDR3 for antibody 662 (IGKV6-21)
HQSSSLPQT

SEQ ID NO: 1324 - protein, 11 aa, Homo sapiens
  Heavy chain CDR3 for antibody 662 (IGHV3-33)
ARDRSTGWLDY

SEQ ID NO: 1325 - protein, 9 aa, Homo sapiens
  Light chain CDR3 for antibody 663 (IGKV3D-7)
QQDYDLPYP

SEQ ID NO: 1326 - protein, 10 aa, Homo sapiens
  Heavy chain CDR3 for antibody 663 (IGHV4-59)
VSSGTSLLAY

SEQ ID NO: 1327 - protein, 9 aa, Homo sapiens
  Light chain CDR3 for antibody 664 (IGKV3-20)
QQYGSSPYT

SEQ ID NO: 1328 - protein, 12 aa, Homo sapiens
  Heavy chain CDR3 for antibody 664 (IGHV3-13)
AREAGIPDAFDI

SEQ ID NO: 1329 - protein, 9 aa, Homo sapiens
  Light chain CDR3 for antibody 665 (IGKV3-20)
QQYGSSPYT

SEQ ID NO: 1330 - protein, 8 aa, Homo sapiens
  Heavy chain CDR3 for antibody 665 (IGHV3-23)
AKETGNNY

SEQ ID NO: 1331 - protein, 10 aa, Homo sapiens
  Light chain CDR3 for antibody 666 (IGKV3-11)
QQRSNWPMYT

SEQ ID NO: 1332 - protein, 10 aa, Homo sapiens
  Heavy chain CDR3 for antibody 666 (IGHV3-23)
ATIVGPFLDV

SEQ ID NO: 1333 - protein, 8 aa, Homo sapiens
  Light chain CDR3 for antibody 667 (IGKV1-5)
QQYNTYSS

SEQ ID NO: 1334 - protein, 11 aa, Homo sapiens
  Heavy chain CDR3 for antibody 667 (IGHV1-18)
SRGGFSVGYDS

SEQ ID NO: 1335 - protein, 9 aa, Homo sapiens
  Light chain CDR3 for antibody 668 (IGKV6-21)
HQSSSLPYT

SEQ ID NO: 1336 - protein, 15 aa, Homo sapiens
  Heavy chain CDR3 for antibody 668 (IGHV3-20)
ARDRGSSGWRDWFDP

SEQ ID NO: 1337 - protein, 9 aa, Homo sapiens
  Light chain CDR3 for antibody 669 (IGKV6-21)
HQSSSLPYT

SEQ ID NO: 1338 - protein, 9 aa, Homo sapiens
  Heavy chain CDR3 for antibody 669 (IGHV4-34)
ARDLYYFDY

SEQ ID NO: 1339 - protein, 9 aa, Homo sapiens
  Light chain CDR3 for antibody 670 (IGKV1D-13)
QQFNNYPYT

SEQ ID NO: 1340 - protein, 13 aa, Homo sapiens
  Heavy chain CDR3 for antibody 670 (IGHV3-33)
ARDYCGGDCYLDY

SEQ ID NO: 1341 - protein, 9 aa, Homo sapiens
  Light chain CDR3 for antibody 671 (IGKV1D-16)
QQYNSYPYT

SEQ ID NO: 1342 - protein, 11 aa, Homo sapiens
  Heavy chain CDR3 for antibody 671 (IGHV3-33)
AREGAVARFDY

SEQ ID NO: 1343 - protein, 9 aa, Homo sapiens
  Light chain CDR3 for antibody 672 (IGKV3-20)
QQYGSSPYT

SEQ ID NO: 1344 - protein, 16 aa, Homo sapiens
  Heavy chain CDR3 for antibody 672 (IGHV4-59)
ARGRYFEWLLGDVFDI

SEQ ID NO: 1345 - protein, 9 aa, Homo sapiens
  Light chain CDR3 for antibody 673 (IGKV3D-20)
QQYGRSPRT

SEQ ID NO: 1346 - protein, 15 aa, Homo sapiens
  Heavy chain CDR3 for antibody 673 (IGHV3-20)
AREGSSSWYLYYFDY

SEQ ID NO: 1347 - protein, 9 aa, Homo sapiens
  Light chain CDR3 for antibody 674 (IGKV1D-16)
QQYNSYPYT

SEQ ID NO: 1348 - protein, 20 aa, Homo sapiens
  Heavy chain CDR3 for antibody 674 (IGHV3-23)
AKDREMAATSHYYYYYGMDV

SEQ ID NO: 1349 - protein, 9 aa, Homo sapiens
  Light chain CDR3 for antibody 675 (IGKV5-2)
LQHDNFPWT

SEQ ID NO: 1350 - protein, 12 aa, Homo sapiens
  Heavy chain CDR3 for antibody 675 (IGHV4-59)
ARDRSGWAYFDY

SEQ ID NO: 1351 - protein, 9 aa, Homo sapiens
  Light chain CDR3 for antibody 676 (IGKV3D-7)
QQDYNFPLT

SEQ ID NO: 1352 - protein, 15 aa, Homo sapiens
  Heavy chain CDR3 for antibody 676 (IGHV4-59)
ARDLGYYGSGSPLAY

SEQ ID NO: 1353 - protein, 9 aa, Homo sapiens
  Light chain CDR3 for antibody 677 (IGKV6-21)
HQSSSLPLT

SEQ ID NO: 1354 - protein, 9 aa, Homo sapiens
  Heavy chain CDR3 for antibody 677 (IGHV3-30)
VRDDYGVDV

SEQ ID NO: 1355 - protein, 10 aa, Homo sapiens
  Light chain CDR3 for antibody 678 (IGKV3-11)
QQRSNWPPFT

SEQ ID NO: 1356 - protein, 23 aa, Homo sapiens
  Heavy chain CDR3 for antibody 678 (IGHV1-18)
ARNLHYDILTGYFPYYFYYGMDV

SEQ ID NO: 1357 - protein, 9 aa, Homo sapiens
  Light chain CDR3 for antibody 679 (IGKV1D-16)
QQYNSYPYT

SEQ ID NO: 1358 - protein, 9 aa, Homo sapiens
  Heavy chain CDR3 for antibody 679 (IGHV1-8)
ARGRLDFDY

SEQ ID NO: 1359 - protein, 9 aa, Homo sapiens
  Light chain CDR3 for antibody 680 (IGKV1D-16)
QQYNSYPYT

SEQ ID NO: 1360 - protein, 14 aa, Homo sapiens
  Heavy chain CDR3 for antibody 680 (IGHV3-33)
ARGGYSGYRYYFDY

SEQ ID NO: 1361 - protein, 9 aa, Homo sapiens
  Light chain CDR3 for antibody 681 (IGKV6-21)
HQSSSLPYT

SEQ ID NO: 1362 - protein, 11 aa, Homo sapiens
  Heavy chain CDR3 for antibody 681 (IGHV3-23)
AKKVYDYGSDY

SEQ ID NO: 1363 - protein, 9 aa, Homo sapiens
  Light chain CDR3 for antibody 682 (IGKV3-20)
QQYGSSPYT

SEQ ID NO: 1364 - protein, 12 aa, Homo sapiens
  Heavy chain CDR3 for antibody 682 (IGHV3-33)
TRGYSSKSYFDY

SEQ ID NO: 1365 - protein, 9 aa, Homo sapiens
  Light chain CDR3 for antibody 683 (IGKV1D-16)
QQYNSYPLT

SEQ ID NO: 1366 - protein, 12 aa, Homo sapiens
  Heavy chain CDR3 for antibody 683 (IGHV3-33)
TRGYSSKSYFDY

SEQ ID NO: 1367 - protein, 9 aa, Homo sapiens
  Light chain CDR3 for antibody 684 (IGKV5-2)
LQHDNFPWT

SEQ ID NO: 1368 - protein, 13 aa, Homo sapiens
  Heavy chain CDR3 for antibody 684 (IGHV4-39)
ARHVLLWFGEFDP

SEQ ID NO: 1369 - protein, 9 aa, Homo sapiens
  Light chain CDR3 for antibody 685 (IGKV1-6)
LQDYNYPPT

SEQ ID NO: 1370 - protein, 18 aa, Homo sapiens
  Heavy chain CDR3 for antibody 685 (IGHV3-33)
ARDHYDILTGYYKGWFDP

SEQ ID NO: 1371 - protein, 9 aa, Homo sapiens
  Light chain CDR3 for antibody 686 (IGKV5-2)
LQHDNFPWT

SEQ ID NO: 1372 - protein, 18 aa, Homo sapiens
  Heavy chain CDR3 for antibody 686 (IGHV1-46)
ARDGDYVWGSYRSDWFDP

SEQ ID NO: 1373 - protein, 9 aa, Homo sapiens
  Light chain CDR3 for antibody 687 (IGKV6-21)
HQSSSLPWT

SEQ ID NO: 1374 - protein, 14 aa, Homo sapiens
  Heavy chain CDR3 for antibody 687 (IGHV3-33)
ARWELPFYYSGMDV

SEQ ID NO: 1375 - protein, 9 aa, Homo sapiens
  Light chain CDR3 for antibody 688 (IGKV6-21)
HQSSSLPYT

SEQ ID NO: 1376 - protein, 12 aa, Homo sapiens
  Heavy chain CDR3 for antibody 688 (IGHV1-46)
ARGLTGDHAVDI

SEQ ID NO: 1377 - protein, 10 aa, Homo sapiens [sequence omitted]

SEQ ID NO: 1378 - protein, 12 aa, Homo sapiens
  Heavy chain CDR3 for antibody 689 (IGHV4-39)
ARQGAYSRFFDY

SEQ ID NO: 1379 - protein, 9 aa, Homo sapiens
  Light chain CDR3 for antibody 690 (IGKV6-21)
HQTSSLPYT

SEQ ID NO: 1380 - protein, 13 aa, Homo sapiens
  Heavy chain CDR3 for antibody 690 (IGHV3-15)
TTDRLLLFGAFDY

SEQ ID NO: 1381 - protein, 9 aa, Homo sapiens
  Light chain CDR3 for antibody 691 (IGKV1D-16)
QQYNSYPYT

SEQ ID NO: 1382 - protein, 10 aa, Homo sapiens
  Heavy chain CDR3 for antibody 691 (IGHV4-31)
ARHGVAGTNY

SEQ ID NO: 1383 - protein, 9 aa, Homo sapiens
  Light chain CDR3 for antibody 692 (IGKV3-20)
QQYGTSPFP

SEQ ID NO: 1384 - protein, 13 aa, Homo sapiens
  Heavy chain CDR3 for antibody 692 (IGHV3-33)
ARIDYYSYYGMDV

SEQ ID NO: 1385 - protein, 9 aa, Homo sapiens
  Light chain CDR3 for antibody 693 (IGKV1-9)
QQLNSYPLT

SEQ ID NO: 1386 - protein, 11 aa, Homo sapiens
  Heavy chain CDR3 for antibody 693 (IGHV4-59)
ARSIRYSVFDY

SEQ ID NO: 1387 - protein, 9 aa, Homo sapiens
  Light chain CDR3 for antibody 694 (IGKV3D-7)
HQDYNLPWT

SEQ ID NO: 1388 - protein, 19 aa, Homo sapiens
  Heavy chain CDR3 for antibody 694 (IGHV3-33)
ARGRGSYYYGPGSHNGMDV

SEQ ID NO: 1389 - protein, 9 aa, Homo sapiens
  Light chain CDR3 for antibody 695 (IGKV1-17)
LQHNSSPWT

SEQ ID NO: 1390 - protein, 11 aa, Homo sapiens
  Heavy chain CDR3 for antibody 695 (IGHV4-59)
ARESFYGSGNL

SEQ ID NO: 1391 - protein, 9 aa, Homo sapiens
  Light chain CDR3 for antibody 696 (IGKV1-17)
LQHNSYPYT

SEQ ID NO: 1392 - protein, 18 aa, Homo sapiens
  Heavy chain CDR3 for antibody 696 (IGHV3-33)
ARDGYSGYDYYYYYGMDV

SEQ ID NO: 1393 - protein, 8 aa, Homo sapiens
  Light chain CDR3 for antibody 697 (IGKV6-21)
HQSSSLPT

SEQ ID NO: 1394 - protein, 10 aa, Homo sapiens
  Heavy chain CDR3 for antibody 697 (IGHV1-18)
ARGPTSDVDY

SEQ ID NO: 1395 - protein, 9 aa, Homo sapiens
  Light chain CDR3 for antibody 698 (IGKV6-21)
HQSSSLPYT

SEQ ID NO: 1396 - protein, 16 aa, Homo sapiens
  Heavy chain CDR3 for antibody 698 (IGHV3-11)
ARYHYGSGSYYNVGDY

SEQ ID NO: 1397 - protein, 9 aa, Homo sapiens
  Light chain CDR3 for antibody 699 (IGKV1-17)
LQHNSYPWT

SEQ ID NO: 1398 - protein, 22 aa, Homo sapiens
  Heavy chain CDR3 for antibody 699 (IGHV3-23)
AKDDLPYYDILTHSTTTGGMDV

SEQ ID NO: 1399 - protein, 9 aa, Homo sapiens
  Light chain CDR3 for antibody 700 (IGKV1D-16)
QQYNSYPLT

SEQ ID NO: 1400 - protein, 17 aa, Homo sapiens
  Heavy chain CDR3 for antibody 700 (IGHV3-33)
ARGYCSRTSCYLYYFDY

SEQ ID NO: 1401 - protein, 9 aa, Homo sapiens
  Light chain CDR3 for antibody 701 (IGKV1-6)
LQDYNYPYT

SEQ ID NO: 1402 - protein, 12 aa, Homo sapiens
  Heavy chain CDR3 for antibody 701 (IGHV3-33)
ARVDAAAPYFDY

SEQ ID NO: 1403 - protein, 9 aa, Homo sapiens
  Light chain CDR3 for antibody 702 (IGKV5-2)
LQHDNFPYT

SEQ ID NO: 1404 - protein, 12 aa, Homo sapiens
  Heavy chain CDR3 for antibody 702 (IGHV3-13)
AREAGIPDAFDI

SEQ ID NO: 1405 - protein, 9 aa, Homo sapiens
  Light chain CDR3 for antibody 703 (IGKV1-17)
LQHNSYPYT

SEQ ID NO: 1406 - protein, 8 aa, Homo sapiens
  Heavy chain CDR3 for antibody 703 (IGHV3-23)
AETFLFDY

SEQ ID NO: 1407 - protein, 9 aa, Homo sapiens
  Light chain CDR3 for antibody 704 (IGKV1-6)
LQDYNYPRT

SEQ ID NO: 1408 - protein, 16 aa, Homo sapiens
  Heavy chain CDR3 for antibody 704 (IGHV4-59)
ARDTPYYSGSGRPFDS

SEQ ID NO: 1409 - protein, 9 aa, Homo sapiens
  Light chain CDR3 for antibody 705 (IGKV1D-16)
QQYNSYPYT

SEQ ID NO: 1410 - protein, 11 aa, Homo sapiens
  Heavy chain CDR3 for antibody 705 (IGHV3-13)
AREAIIGPFDY

SEQ ID NO: 1411 - protein, 9 aa, Homo sapiens
  Light chain CDR3 for antibody 706 (IGKV3-20)
QQYGSSPYT

SEQ ID NO: 1412 - protein, 13 aa, Homo sapiens
  Heavy chain CDR3 for antibody 706 (IGHV3-33)
ARAFTMVRGVIDY

SEQ ID NO: 1413 - protein, 9 aa, Homo sapiens
  Light chain CDR3 for antibody 707 (IGKV1-6)
LQDYNYPYT

SEQ ID NO: 1414 - protein, 19 aa, Homo sapiens
  Heavy chain CDR3 for antibody 707 (IGHV1-18)
ARDDILTGYSLYYYYGMDV

SEQ ID NO: 1415 - protein, 9 aa, Homo sapiens
  Light chain CDR3 for antibody 708 (IGKV6-21)
HQSSSLPHT

SEQ ID NO: 1416 - protein, 13 aa, Homo sapiens
  Heavy chain CDR3 for antibody 708 (IGHV3-33)
ARGGYYGSGSLDY

SEQ ID NO: 1417 - protein, 9 aa, Homo sapiens
  Light chain CDR3 for antibody 709 (IGKV1-17)
LQLNSFPWT

SEQ ID NO: 1418 - protein, 14 aa, Homo sapiens
  Heavy chain CDR3 for antibody 709 (IGHV3-23)
ARGRRDFYYYGMDV

SEQ ID NO: 1419 - protein, 9 aa, Homo sapiens
  Light chain CDR3 for antibody 710 (IGKV1D-16)
QQYNSFPLT

SEQ ID NO: 1420 - protein, 13 aa, Homo sapiens
  Heavy chain CDR3 for antibody 710 (IGHV3-33)
ARGDNWNDGGFDY

SEQ ID NO: 1421 - protein, 9 aa, Homo sapiens
  Light chain CDR3 for antibody 711 (IGKV1-17)
LQHNSYPYT

SEQ ID NO: 1422 - protein, 12 aa, Homo sapiens
  Heavy chain CDR3 for antibody 711 (IGHV3-33)
AREGDILTGYSL

SEQ ID NO: 1423 - protein, 9 aa, Homo sapiens
  Light chain CDR3 for antibody 712 (IGKV1-17)
LQHNSYPYT

SEQ ID NO: 1424 - protein, 17 aa, Homo sapiens
  Heavy chain CDR3 for antibody 712 (IGHV3-33)
ARESLKLGIYYYYGMDV

SEQ ID NO: 1425 - protein, 9 aa, Homo sapiens
  Light chain CDR3 for antibody 713 (IGKV1-16)
QQYNNYPLT

SEQ ID NO: 1426 - protein, 18 aa, Homo sapiens
  Heavy chain CDR3 for antibody 713 (IGHV4-39)
ARGALTYYDILTGYFFDY

SEQ ID NO: 1427 - protein, 9 aa, Homo sapiens
  Light chain CDR3 for antibody 714 (IGKV3D-20)
QQHGNSPLT

SEQ ID NO: 1428 - protein, 13 aa, Homo sapiens
  Heavy chain CDR3 for antibody 714 (IGHV4-39)
ARRDGSYYGYFDY

SEQ ID NO: 1429 - protein, 9 aa, Homo sapiens
  Light chain CDR3 for antibody 715 (IGKV1-17)
LQHNSYPYT

SEQ ID NO: 1430 - protein, 18 aa, Homo sapiens
  Heavy chain CDR3 for antibody 715 (IGHV3-33)
ARDRDRYGSGTYPDAIDI

SEQ ID NO: 1431 - protein, 9 aa, Homo sapiens
  Light chain CDR3 for antibody 716 (IGKV5-2)
LQHDNFPYT

SEQ ID NO: 1432 - protein, 15 aa, Homo sapiens
  Heavy chain CDR3 for antibody 716 (IGHV3-20)
ARDRGSSGWRDWFDP

SEQ ID NO: 1433 - protein, 9 aa, Homo sapiens
  Light chain CDR3 for antibody 717 (IGKV6-21)
HQSSSLPWT

SEQ ID NO: 1434 - protein, 10 aa, Homo sapiens
  Heavy chain CDR3 for antibody 717 (IGHV3-33)
ARVVDTAMAY

SEQ ID NO: 1435 - protein, 9 aa, Homo sapiens
  Light chain CDR3 for antibody 718 (IGKV1-17)
LQHNSYPYT

SEQ ID NO: 1436 - protein, 17 aa, Homo sapiens
  Heavy chain CDR3 for antibody 718 (IGHV3-33)
ARVYYDILTGYSPAFDI

SEQ ID NO: 1437 - protein, 9 aa, Homo sapiens
  Light chain CDR3 for antibody 719 (IGKV6-21)
HQSSTLPHT

SEQ ID NO: 1438 - protein, 16 aa, Homo sapiens
  Heavy chain CDR3 for antibody 719 (IGHV4-39)
ARHPLILTGYPNWFDP

SEQ ID NO: 1439 - protein, 8 aa, Homo sapiens
  Light chain CDR3 for antibody 720 (IGKV3-20)
QQYGSSLT

SEQ ID NO: 1440 - protein, 13 aa, Homo sapiens
  Heavy chain CDR3 for antibody 720 (IGHV3-21)
ATGAWASSWWGDY

SEQ ID NO: 1441 - protein, 9 aa, Homo sapiens
  Light chain CDR3 for antibody 721 (IGKV3-20)
QQYGSSPYT

SEQ ID NO: 1442 - protein, 14 aa, Homo sapiens
  Heavy chain CDR3 for antibody 721 (IGHV3-33)
ARDWNDVYYYGMDV

SEQ ID NO: 1443 - protein, 9 aa, Homo sapiens
  Light chain CDR3 for antibody 722 (IGKV3-20)
QHYGSSPYT

SEQ ID NO: 1444 - protein, 13 aa, Homo sapiens
  Heavy chain CDR3 for antibody 722 (IGHV3-33)
GRTDYYSYYGVDV

SEQ ID NO: 1445 - protein, 9 aa, Homo sapiens
  Light chain CDR3 for antibody 723 (IGKV1-17)
LQHNSYPYT

SEQ ID NO: 1446 - protein, 9 aa, Homo sapiens
  Heavy chain CDR3 for antibody 723 (IGHV3-13)
ARDRWYFDL

SEQ ID NO: 1447 - protein, 9 aa, Homo sapiens
  Light chain CDR3 for antibody 724 (IGKV1-16)
QQYNRYPYT

SEQ ID NO: 1448 - protein, 13 aa, Homo sapiens
  Heavy chain CDR3 for antibody 724 (IGHV4-59)
ARDAGYSSSWFDY

SEQ ID NO: 1449 - protein, 9 aa, Homo sapiens
  Light chain CDR3 for antibody 725 (IGKV3-20)
QQYGSSPYT

SEQ ID NO: 1450 - protein, 15 aa, Homo sapiens
  Heavy chain CDR3 for antibody 725 (IGHV3-33)
ARDTGYSSSWNWFDP

SEQ ID NO: 1451 - protein, 9 aa, Homo sapiens
  Light chain CDR3 for antibody 726 (IGKV1D-16)
QQYNSYPYT

SEQ ID NO: 1452 - protein, 15 aa, Homo sapiens
  Heavy chain CDR3 for antibody 726 (IGHV3-33)
ARRGYNDYDPYGMDV

SEQ ID NO: 1453 - protein, 9 aa, Homo sapiens
  Light chain CDR3 for antibody 727 (IGKV1-16)
QQYNSYPYT

SEQ ID NO: 1454 - protein, 18 aa, Homo sapiens
  Heavy chain CDR3 for antibody 727 (IGHV1-46)
ARDLTGRTENYYYYGMDV

SEQ ID NO: 1455 - protein, 9 aa, Homo sapiens
  Light chain CDR3 for antibody 728 (IGKV1-17)
LQHNSYPYT

SEQ ID NO: 1456 - protein, 14 aa, Homo sapiens
  Heavy chain CDR3 for antibody 728 (IGHV3-33)
ARDGYDFLTGPFDY

SEQ ID NO: 1457 - protein, 9 aa, Homo sapiens
  Light chain CDR3 for antibody 729 (IGKV1D-16)
QQYNSYPYT

SEQ ID NO: 1458 - protein, 18 aa, Homo sapiens
  Heavy chain CDR3 for antibody 729 (IGHV3-33)
ARREGITLIFYYYYGMDV

SEQ ID NO: 1459 - protein, 9 aa, Homo sapiens
  Light chain CDR3 for antibody 730 (IGKV6-21)
HQSSTLPST

SEQ ID NO: 1460 - protein, 11 aa, Homo sapiens
  Heavy chain CDR3 for antibody 730 (IGHV3-33)
ARDRGYSYFDY

SEQ ID NO: 1461 - protein, 9 aa, Homo sapiens
  Light chain CDR3 for antibody 731 (IGKV1-6)
LQDYNYPYT

SEQ ID NO: 1462 - protein, 18 aa, Homo sapiens
  Heavy chain CDR3 for antibody 731 (IGHV3-33)
ARREGITLIFYYYYGMDV

SEQ ID NO: 1463 - protein, 9 aa, Homo sapiens
  Light chain CDR3 for antibody 732 (IGKV1-17)
LQHNSYPYT

SEQ ID NO: 1464 - protein, 15 aa, Homo sapiens
  Heavy chain CDR3 for antibody 732 (IGHV3-33)
VCVLYDYGDYVGFDY

SEQ ID NO: 1465 - protein, 9 aa, Homo sapiens
  Light chain CDR3 for antibody 733 (IGKV1-9)
QQLNSYPLT

SEQ ID NO: 1466 - protein, 12 aa, Homo sapiens
  Heavy chain CDR3 for antibody 733 (IGHV1-46)
ARGLTGDHAVDI

SEQ ID NO: 1467 - protein, 9 aa, Homo sapiens
  Light chain CDR3 for antibody 734 (IGKV1-39)
QQSYSTPYT

SEQ ID NO: 1468 - protein, 22 aa, Homo sapiens
  Heavy chain CDR3 for antibody 734 (IGHV3-11)
AREAYYDILTGYYTGYYYGMDV

SEQ ID NO: 1469 - protein, 9 aa, Homo sapiens
  Light chain CDR3 for antibody 735 (IGKV6-21)
HQSSSLPYT

SEQ ID NO: 1470 - protein, 18 aa, Homo sapiens
  Heavy chain CDR3 for antibody 735 (IGHV3-33)
AREGYFGSGSYYRNWFDP

SEQ ID NO: 1471 - protein, 9 aa, Homo sapiens
  Light chain CDR3 for antibody 736 (IGKV1-37)
QRTSNAPYT

SEQ ID NO: 1472 - protein, 19 aa, Homo sapiens
  Heavy chain CDR3 for antibody 736 (IGHV3-33)
ARIPGIAVAGGYYYYGMDV

SEQ ID NO: 1473 - protein, 8 aa, Homo sapiens
  Light chain CDR3 for antibody 737 (IGKV1D-13)
QQFNNYLT

SEQ ID NO: 1474 - protein, 18 aa, Homo sapiens
  Heavy chain CDR3 for antibody 737 (IGHV3-23)
AKPDYYGSGSYYNVPFDY

SEQ ID NO: 1475 - protein, 9 aa, Homo sapiens
  Light chain CDR3 for antibody 738 (IGKV1D-16)
QQYNSYPYT

SEQ ID NO: 1476 - protein, 12 aa, Homo sapiens
  Heavy chain CDR3 for antibody 738 (IGHV3-33)
ARDSSGWSHFDY

SEQ ID NO: 1477 - protein, 9 aa, Homo sapiens
  Light chain CDR3 for antibody 739 (IGKV1D-16)
QQYNSYPYT

SEQ ID NO: 1478 - protein, 17 aa, Homo sapiens
  Heavy chain CDR3 for antibody 739 (IGHV3-23)
AKDGSFYSSGWYDAFDI

SEQ ID NO: 1479 - protein, 9 aa, Homo sapiens
  Light chain CDR3 for antibody 740 (IGKV5-2)
LQHDNFPWT

SEQ ID NO: 1480 - protein, 13 aa, Homo sapiens
  Heavy chain CDR3 for antibody 740 (IGHV4-59)
ARTMVRGVAPFDY

SEQ ID NO: 1481 - protein, 9 aa, Homo sapiens
  Light chain CDR3 for antibody 741 (IGKV1D-16)
QQYNSYPYT

SEQ ID NO: 1482 - protein, 17 aa, Homo sapiens
  Heavy chain CDR3 for antibody 741 (IGHV3-66)
ARVQYDILTGYSPYFDN

SEQ ID NO: 1483 - protein, 9 aa, Homo sapiens
  Light chain CDR3 for antibody 742 (IGKV5-2)
LQHDNFPWT

SEQ ID NO: 1484 - protein, 12 aa, Homo sapiens
  Heavy chain CDR3 for antibody 742 (IGHV4-39)
ARQMVREGWFDP

SEQ ID NO: 1485 - protein, 9 aa, Homo sapiens
  Light chain CDR3 for antibody 743 (IGKV1D-16)
QQYNSYPYT

SEQ ID NO: 1486 - protein, 13 aa, Homo sapiens
  Heavy chain CDR3 for antibody 743 (IGHV3-23)
ARGELLWFGEFAC

SEQ ID NO: 1487 - protein, 9 aa, Homo sapiens
  Light chain CDR3 for antibody 744 (IGKV1D-16)
QQYNSYPLT

SEQ ID NO: 1488 - protein, 15 aa, Homo sapiens
  Heavy chain CDR3 for antibody 744 (IGHV3-33)
ARDTGYSSSWNWFDP

SEQ ID NO: 1489 - protein, 9 aa, Homo sapiens
  Light chain CDR3 for antibody 745 (IGKV3-20)
QQYGSSPWT

SEQ ID NO: 1490 - protein, 21 aa, Homo sapiens
  Heavy chain CDR3 for antibody 745 (IGHV4-59)
AAGVLLWFGEPNYYYYYGMDV

SEQ ID NO: 1491 - protein, 9 aa, Homo sapiens
  Light chain CDR3 for antibody 746 (IGKV5-2)
LQHDNFPWT

SEQ ID NO: 1492 - protein, 14 aa, Homo sapiens
  Heavy chain CDR3 for antibody 746 (IGHV4-39)
ARQDYDILTGLFDY

SEQ ID NO: 1493 - protein, 9 aa, Homo sapiens
  Light chain CDR3 for antibody 747 (IGKV1D-16)
QQYNSYPYT

SEQ ID NO: 1494 - protein, 15 aa, Homo sapiens
  Heavy chain CDR3 for antibody 747 (IGHV3-23)
AKEALRYFDWSGMDV

SEQ ID NO: 1495 - protein, 9 aa, Homo sapiens
  Light chain CDR3 for antibody 748 (IGKV5-2)
LQHDNFPYT

SEQ ID NO: 1496 - protein, 17 aa, Homo sapiens
  Heavy chain CDR3 for antibody 748 (IGHV3-33)
ARGYCSRTSCYLYYFDY

SEQ ID NO: 1497 - protein, 9 aa, Homo sapiens
  Light chain CDR3 for antibody 749 (IGKV1D-16)
QQYNSYPYT

SEQ ID NO: 1498 - protein, 17 aa, Homo sapiens
  Heavy chain CDR3 for antibody 749 (IGHV3-23)
AKEYCSGGSCYVYYFDY

SEQ ID NO: 1499 - protein, 9 aa, Homo sapiens
  Light chain CDR3 for antibody 750 (IGKV6-21)
HQSSSLPYT

SEQ ID NO: 1500 - protein, 12 aa, Homo sapiens
  Heavy chain CDR3 for antibody 750 (IGHV3-33)
ARGYFGSGYAHF

SEQ ID NO: 1501 - protein, 9 aa, Homo sapiens
  Light chain CDR3 for antibody 751 (IGKV3D-7)
QQDYNLPRT

SEQ ID NO: 1502 - protein, 17 aa, Homo sapiens
  Heavy chain CDR3 for antibody 751 (IGHV3-33)
AREGTMVRGYYYYGMDV

SEQ ID NO: 1503 - protein, 9 aa, Homo sapiens
  Light chain CDR3 for antibody 752 (IGKV3-20)
QQYGSSPYT

SEQ ID NO: 1504 - protein, 10 aa, Homo sapiens
  Heavy chain CDR3 for antibody 752 (IGHV3-23)
AKEQWLVLDY

SEQ ID NO: 1505 - protein, 9 aa, Homo sapiens
  Light chain CDR3 for antibody 753 (IGKV1-6)
LQDYNYPYT

SEQ ID NO: 1506 - protein, 17 aa, Homo sapiens
  Heavy chain CDR3 for antibody 753 (IGHV1-18)
ARERYYGSGIYKYAMDV

SEQ ID NO: 1507 - protein, 9 aa, Homo sapiens
  Light chain CDR3 for antibody 754 (IGKV6-21)
HQSSSLPYT

SEQ ID NO: 1508 - protein, 9 aa, Homo sapiens
  Heavy chain CDR3 for antibody 754 (IGHV3-30)
ARGRVSLDV

SEQ ID NO: 1509 - protein, 9 aa, Homo sapiens
  Light chain CDR3 for antibody 755 (IGKV5-2)
LQHDNFPWT

SEQ ID NO: 1510 - protein, 9 aa, Homo sapiens
  Heavy chain CDR3 for antibody 755 (IGHV1-18)
ARGKDWFDP

SEQ ID NO: 1511 - protein, 9 aa, Homo sapiens
  Light chain CDR3 for antibody 756 (IGKV6-21)
HQSSSLPYT

SEQ ID NO: 1512 - protein, 17 aa, Homo sapiens
  Heavy chain CDR3 for antibody 756 (IGHV3-33)
ARGYCSRTSCYLYYFDY

SEQ ID NO: 1513 - protein, 9 aa, Homo sapiens
  Light chain CDR3 for antibody 757 (IGKV1-6)
LQDYNYPYT

SEQ ID NO: 1514 - protein, 20 aa, Homo sapiens
  Heavy chain CDR3 for antibody 757 (IGHV1-f)
ATGLITFVRGVILTYRSFDY

SEQ ID NO: 1515 - protein, 9 aa, Homo sapiens
  Light chain CDR3 for antibody 758 (IGKV5-2)
LQHDNFPWT

SEQ ID NO: 1516 - protein, 13 aa, Homo sapiens
  Heavy chain CDR3 for antibody 758 (IGHV4-39)
ARHEVMVRGVFDY

SEQ ID NO: 1517 - protein, 9 aa, Homo sapiens
  Light chain CDR3 for antibody 759 (IGKV6-21)
HQSSSLPYT

SEQ ID NO: 1518 - protein, 9 aa, Homo sapiens
  Heavy chain CDR3 for antibody 759 (IGHV1-18)
ARGKDWFDP

SEQ ID NO: 1519 - protein, 9 aa, Homo sapiens
  Light chain CDR3 for antibody 760 (IGKV1D-16)
QQYNSYPLT

SEQ ID NO: 1520 - protein, 18 aa, Homo sapiens
  Heavy chain CDR3 for antibody 760 (IGHV3-33)
ARREGIVGATTYYYGMDV

SEQ ID NO: 1521 - protein, 9 aa, Homo sapiens
  Light chain CDR3 for antibody 761 (IGKV1D-13)
QQFNNYPST

SEQ ID NO: 1522 - protein, 16 aa, Homo sapiens
  Heavy chain CDR3 for antibody 761 (IGHV4-39)
ARRVPYYDILTGYLDY

SEQ ID NO: 1523 - protein, 9 aa, Homo sapiens
  Light chain CDR3 for antibody 762 (IGKV1D-16)
QQYNSYPYT

SEQ ID NO: 1524 - protein, 18 aa, Homo sapiens
  Heavy chain CDR3 for antibody 762 (IGHV3-33)
ARERGYYGSDIYPAAFDI

SEQ ID NO: 1525 - protein, 9 aa, Homo sapiens
  Light chain CDR3 for antibody 763 (IGKV1D-16)
QQYNSYPYT

SEQ ID NO: 1526 - protein, 17 aa, Homo sapiens
  Heavy chain CDR3 for antibody 763 (IGHV1-18)
ARERYYGSGNYKYNMDV

SEQ ID NO: 1527 - protein, 9 aa, Homo sapiens
  Light chain CDR3 for antibody 764 (IGKV1-9)
QQLNSYPHT

SEQ ID NO: 1528 - protein, 11 aa, Homo sapiens
  Heavy chain CDR3 for antibody 764 (IGHV3-33)
ARDILTGYFDY

SEQ ID NO: 1529 - protein, 9 aa, Homo sapiens
  Light chain CDR3 for antibody 765 (IGKV1D-16)
QQYNSYPYT

SEQ ID NO: 1530 - protein, 13 aa, Homo sapiens
  Heavy chain CDR3 for antibody 765 (IGHV1-18)
ARSITMVRGVIGY

SEQ ID NO: 1531 - protein, 9 aa, Homo sapiens
  Light chain CDR3 for antibody 766 (IGKV1-39)
QQSYSTPFT

SEQ ID NO: 1532 - protein, 11 aa, Homo sapiens
  Heavy chain CDR3 for antibody 766 (IGHV4-59)
AREMGHDTFDI

SEQ ID NO: 1533 - protein, 9 aa, Homo sapiens
  Light chain CDR3 for antibody 767 (IGKV6-21)
HQSSYSPYT

SEQ ID NO: 1534 - protein, 13 aa, Homo sapiens
  Heavy chain CDR3 for antibody 767 (IGHV3-33)
TRRIAVAGAEGDY

SEQ ID NO: 1535 - protein, 9 aa, Homo sapiens
  Light chain CDR3 for antibody 768 (IGKV3-20)
QQYGSSPLT

SEQ ID NO: 1536 - protein, 13 aa, Homo sapiens
  Heavy chain CDR3 for antibody 768 (IGHV1-18)
ARKWEWDLLNFDY

SEQ ID NO: 1537 - protein, 9 aa, Homo sapiens
  Light chain CDR3 for antibody 769 (IGKV1D-16)
QQYNSYPYT

SEQ ID NO: 1538 - protein, 20 aa, Homo sapiens
  Heavy chain CDR3 for antibody 769 (IGHV3-33)
AREDYYGSGSYYPAYNWFDP

SEQ ID NO: 1539 - protein, 9 aa, Homo sapiens
  Light chain CDR3 for antibody 770 (IGKV5-2)
LQHDNFPYT

SEQ ID NO: 1540 - protein, 14 aa, Homo sapiens
  Heavy chain CDR3 for antibody 770 (IGHV3-33)
ARDWNDVYYYGMDV

SEQ ID NO: 1541 - protein, 9 aa, Homo sapiens
  Light chain CDR3 for antibody 771 (IGKV1-9)
QQLNSYPWP

SEQ ID NO: 1542 - protein, 17 aa, Homo sapiens
  Heavy chain CDR3 for antibody 771 (IGHV3-33)
ARSMVTTYGYYYYGMDV

SEQ ID NO: 1543 - protein, 9 aa, Homo sapiens
  Light chain CDR3 for antibody 772 (IGKV6-21)
HQSSSLPHT

SEQ ID NO: 1544 - protein, 13 aa, Homo sapiens
  Heavy chain CDR3 for antibody 772 (IGHV3-33)
ARGRGYNYGYGDY

SEQ ID NO: 1545 - protein, 9 aa, Homo sapiens
  Light chain CDR3 for antibody 773 (IGKV6-21)
HQSSSLPWT

SEQ ID NO: 1546 - protein, 17 aa, Homo sapiens
  Heavy chain CDR3 for antibody 773 (IGHV3-23)
AKGDYYGSGSYSTFFDY

SEQ ID NO: 1547 - protein, 9 aa, Homo sapiens
  Light chain CDR3 for antibody 774 (IGKV1-17)
LQHNSYPYT

SEQ ID NO: 1548 - protein, 14 aa, Homo sapiens
  Heavy chain CDR3 for antibody 774 (IGHV3-33)
ARRGSPLRPSHLDV

SEQ ID NO: 1549 - protein, 9 aa, Homo sapiens
  Light chain CDR3 for antibody 775 (IGKV5-2)
LQHDNFPWT

SEQ ID NO: 1550 - protein, 17 aa, Homo sapiens
  Heavy chain CDR3 for antibody 775 (IGHV1-18)
ARDEGYDILTGYPHFDY

SEQ ID NO: 1551 - protein, 9 aa, Homo sapiens
  Light chain CDR3 for antibody 776 (IGKV6-21)
HQSSSLPYT

SEQ ID NO: 1552 - protein, 18 aa, Homo sapiens
  Heavy chain CDR3 for antibody 776 (IGHV1-46)
ARDGDYVWGSYRSDWFDP

SEQ ID NO: 1553 - protein, 9 aa, Homo sapiens
  Light chain CDR3 for antibody 777 (IGKV6-21)
HQSSSLPYT

SEQ ID NO: 1554 - protein, 13 aa, Homo sapiens
  Heavy chain CDR3 for antibody 777 (IGHV1-18)
ARKWEWDLLNFDY

SEQ ID NO: 1555 - protein, 9 aa, Homo sapiens
  Light chain CDR3 for antibody 778 (IGKV3D-20)
QQYGSSPRT

SEQ ID NO: 1556 - protein, 19 aa, Homo sapiens
  Heavy chain CDR3 for antibody 778 (IGHV1-24)
ATEGGIVGGTRYYYYGMDV

SEQ ID NO: 1557 - protein, 9 aa, Homo sapiens
  Light chain CDR3 for antibody 779 (IGKV1-9)
QQLNSYPLT

SEQ ID NO: 1558 - protein, 18 aa, Homo sapiens
  Heavy chain CDR3 for antibody 779 (IGHV4-59)
AREGDYVWGSYRSNWFDP

SEQ ID NO: 1559 - protein, 9 aa, Homo sapiens
  Light chain CDR3 for antibody 780 (IGKV1-9)
QQLNSYPLT

SEQ ID NO: 1560 - protein, 13 aa, Homo sapiens
  Heavy chain CDR3 for antibody 780 (IGHV4-39)
ARHEVMVRGVFDY

SEQ ID NO: 1561 - protein, 9 aa, Homo sapiens
  Light chain CDR3 for antibody 781 (IGKV3-20)
QQYGSSPYT

SEQ ID NO: 1562 - protein, 13 aa, Homo sapiens
  Heavy chain CDR3 for antibody 781 (IGHV4-61)
ASRYSSGRYPFDY

SEQ ID NO: 1563 - protein, 9 aa, Homo sapiens
  Light chain CDR3 for antibody 782 (IGKV3-20)
QQFGTSPLT

SEQ ID NO: 1564 - protein, 13 aa, Homo sapiens
  Heavy chain CDR3 for antibody 782 (IGHV1-24)
ATLHTYFYGEFAY

SEQ ID NO: 1565 - protein, 9 aa, Homo sapiens
  Light chain CDR3 for antibody 783 (IGKV1-6)
LQDYNYPFT

SEQ ID NO: 1566 - protein, 15 aa, Homo sapiens
  Heavy chain CDR3 for antibody 783 (IGHV3-33)
ARDRVQLGYYYGMDV

SEQ ID NO: 1567 - protein, 8 aa, Homo sapiens
  Light chain CDR3 for antibody 784 (IGKV3D-7)
QQDYHLLT

SEQ ID NO: 1568 - protein, 8 aa, Homo sapiens
  Heavy chain CDR3 for antibody 784 (IGHV4-4)
ARGARFDP

SEQ ID NO: 1569 - protein, 9 aa, Homo sapiens
  Light chain CDR3 for antibody 785 (IGKV6-21)
HQSSSLPYT

SEQ ID NO: 1570 - protein, 13 aa, Homo sapiens
  Heavy chain CDR3 for antibody 785 (IGHV3-11)
AREGIAVAGDFDF

SEQ ID NO: 1571 - protein, 9 aa, Homo sapiens
  Light chain CDR3 for antibody 786 (IGKV3-15)
QQYNNWPRT

SEQ ID NO: 1572 - protein, 16 aa, Homo sapiens
  Heavy chain CDR3 for antibody 786 (IGHV3-33)
ARPTYYDILTGYPFDY

SEQ ID NO: 1573 - protein, 9 aa, Homo sapiens
  Light chain CDR3 for antibody 787 (IGKV1D-16)
QQYNSYPYT

SEQ ID NO: 1574 - protein, 8 aa, Homo sapiens
  Heavy chain CDR3 for antibody 787 (IGHV3-23)
EKSAGEDV

SEQ ID NO: 1575 - protein, 9 aa, Homo sapiens
  Light chain CDR3 for antibody 788 (IGKV1-39)
QQSYSTPLT

SEQ ID NO: 1576 - protein, 13 aa, Homo sapiens
  Heavy chain CDR3 for antibody 788 (IGHV3-33)
ARDYCGGDCYLDY

SEQ ID NO: 1577 - protein, 9 aa, Homo sapiens
  Light chain CDR3 for antibody 789 (IGKV5-2)
LQHDNFPYT

SEQ ID NO: 1578 - protein, 12 aa, Homo sapiens
  Heavy chain CDR3 for antibody 789 (IGHV3-33)
ARESGGSYSFDY

SEQ ID NO: 1579 - protein, 9 aa, Homo sapiens
  Light chain CDR3 for antibody 790 (IGKV1D-16)
QQYNSYPYT

SEQ ID NO: 1580 - protein, 13 aa, Homo sapiens
  Heavy chain CDR3 for antibody 790 (IGHV1-46)
ARVKLGSLGAFDI

SEQ ID NO: 1581 - protein, 9 aa, Homo sapiens
  Light chain CDR3 for antibody 791 (IGKV1D-16)
QQYNSYPYT

SEQ ID NO: 1582 - protein, 13 aa, Homo sapiens
  Heavy chain CDR3 for antibody 791 (IGHV3-33)
ARGVLWFGELFDY

SEQ ID NO: 1583 - protein, 9 aa, Homo sapiens
  Light chain CDR3 for antibody 792 (IGKV5-2)
LQHDNFPWT

SEQ ID NO: 1584 - protein, 16 aa, Homo sapiens
  Heavy chain CDR3 for antibody 792 (IGHV4-59)
ARDTPYYSGSGRPFDS

SEQ ID NO: 1585 - protein, 9 aa, Homo sapiens
  Light chain CDR3 for antibody 793 (IGKV1D-16)
QQYNSYPLT

SEQ ID NO: 1586 - protein, 12 aa, Homo sapiens
  Heavy chain CDR3 for antibody 793 (IGHV3-33)
ARDLVGATPFDY

SEQ ID NO: 1587 - protein, 9 aa, Homo sapiens
  Light chain CDR3 for antibody 794 (IGKV1D-16)
QQYNSYPYT

SEQ ID NO: 1588 - protein, 17 aa, Homo sapiens
  Heavy chain CDR3 for antibody 794 (IGHV4-39)
ARVLRYFDWLSHDAFDI

SEQ ID NO: 1589 - protein, 9 aa, Homo sapiens
  Light chain CDR3 for antibody 795 (IGKV1-6)
LQDYNYPYT

SEQ ID NO: 1590 - protein, 12 aa, Homo sapiens
  Heavy chain CDR3 for antibody 795 (IGHV1-46)
AREDYDIDGMDV

SEQ ID NO: 1591 - protein, 9 aa, Homo sapiens
  Light chain CDR3 for antibody 796 (IGKV6-21)
HQSSSLPRT

SEQ ID NO: 1592 - protein, 14 aa, Homo sapiens
  Heavy chain CDR3 for antibody 796 (IGHV3-33)
AREEDYYYYYDMDV

SEQ ID NO: 1593 - protein, 9 aa, Homo sapiens
  Light chain CDR3 for antibody 797 (IGKV1D-16)
QQYDSYPYT

SEQ ID NO: 1594 - protein, 14 aa, Homo sapiens
  Heavy chain CDR3 for antibody 797 (IGHV3-33)
ARDAMGTSTAWFDP

SEQ ID NO: 1595 - protein, 9 aa, Homo sapiens
  Light chain CDR3 for antibody 798 (IGKV1D-16)
QQYNSYPYT

SEQ ID NO: 1596 - protein, 24 aa, Homo sapiens
  Heavy chain CDR3 for antibody 798 (IGHV3-20)
ARGRITMVRGVIINPLDYYNGMDV

SEQ ID NO: 1597 - protein, 9 aa, Homo sapiens
  Light chain CDR3 for antibody 799 (IGKV5-2)
LQHDNFPYT

SEQ ID NO: 1598 - protein, 12 aa, Homo sapiens
  Heavy chain CDR3 for antibody 799 (IGHV3-33)
ARGYFGSGYAHF

SEQ ID NO: 1599 - protein, 9 aa, Homo sapiens
  Light chain CDR3 for antibody 800 (IGKV1-17)
LQHNSYPYT

SEQ ID NO: 1600 - protein, 20 aa, Homo sapiens
  Heavy chain CDR3 for antibody 800 (IGHV3-20)
ARDLCSSTSCYGYYYYGMDV

SEQ ID NO: 1601 - protein, 9 aa, Homo sapiens
  Light chain CDR3 for antibody 801 (IGKV1D-16)
QQYNSYPYT

SEQ ID NO: 1602 - protein, 20 aa, Homo sapiens
  Heavy chain CDR3 for antibody 801 (IGHV1-18)
AREVGIAVAGTLYYYYGMDV

SEQ ID NO: 1603 - protein, 9 aa, Homo sapiens
  Light chain CDR3 for antibody 802 (IGKV6-21)
HQSSSLPHT

SEQ ID NO: 1604 - protein, 10 aa, Homo sapiens
  Heavy chain CDR3 for antibody 802 (IGHV4-39)
ASSNWNDGPL

SEQ ID NO: 1605 - protein, 9 aa, Homo sapiens
  Light chain CDR3 for antibody 803 (IGKV1-17)
LQHNSYPYT

SEQ ID NO: 1606 - protein, 16 aa, Homo sapiens
  Heavy chain CDR3 for antibody 803 (IGHV3-33)
ARGGRSDWLYYYGMDV

SEQ ID NO: 1607 - protein, 9 aa, Homo sapiens
  Light chain CDR3 for antibody 804 (IGKV1D-16)
QQYNSYPYT

SEQ ID NO: 1608 - protein, 13 aa, Homo sapiens
  Heavy chain CDR3 for antibody 804 (IGHV4-28)
ARKGATGYYGMDV

SEQ ID NO: 1609 - protein, 9 aa, Homo sapiens
  Light chain CDR3 for antibody 805 (IGKV1D-16)
QQYNSYPYT

SEQ ID NO: 1610 - protein, 17 aa, Homo sapiens
  Heavy chain CDR3 for antibody 805 (IGHV1-18)
ARERYYGSGSYKYNMDV

SEQ ID NO: 1611 - protein, 9 aa, Homo sapiens
  Light chain CDR3 for antibody 806 (IGKV1D-16)
QQYNSYPYT

SEQ ID NO: 1612 - protein, 13 aa, Homo sapiens
  Heavy chain CDR3 for antibody 806 (IGHV3-33)
AREYFDWLLPLDY

SEQ ID NO: 1613 - protein, 9 aa, Homo sapiens
  Light chain CDR3 for antibody 807 (IGKV1D-16)
QQYNSYPYT

SEQ ID NO: 1614 - protein, 15 aa, Homo sapiens
  Heavy chain CDR3 for antibody 807 (IGHV3-33)
ARDSRPEIIGPPFDY

SEQ ID NO: 1615 - protein, 9 aa, Homo sapiens
  Light chain CDR3 for antibody 808 (IGKV5-2)
LQHDNFPYT

SEQ ID NO: 1616 - protein, 13 aa, Homo sapiens
  Heavy chain CDR3 for antibody 808 (IGHV3-33)
ARKAYGDYFYFDY

SEQ ID NO: 1617 - protein, 9 aa, Homo sapiens
  Light chain CDR3 for antibody 809 (IGKV6-21)
HQSSSLPYT

SEQ ID NO: 1618 - protein, 13 aa, Homo sapiens
  Heavy chain CDR3 for antibody 809 (IGHV3-33)
ARDQRYSSGWYDY

SEQ ID NO: 1619 - protein, 9 aa, Homo sapiens
  Light chain CDR3 for antibody 810 (IGKV1-6)
LQDYNYPRT

SEQ ID NO: 1620 - protein, 15 aa, Homo sapiens
  Heavy chain CDR3 for antibody 810 (IGHV3-64)
ARDSHHDLLTGHYEY

SEQ ID NO: 1621 - protein, 9 aa, Homo sapiens
  Light chain CDR3 for antibody 811 (IGKV1-6)
LQDYNYPYT

SEQ ID NO: 1622 - protein, 14 aa, Homo sapiens
  Heavy chain CDR3 for antibody 811 (IGHV1-46)
ARRGIVGALDAFDI

SEQ ID NO: 1623 - protein, 9 aa, Homo sapiens
  Light chain CDR3 for antibody 812 (IGKV3-15)
QQYNNWPYT

SEQ ID NO: 1624 - protein, 12 aa, Homo sapiens
  Heavy chain CDR3 for antibody 812 (IGHV3-33)
ARDGPVAGLFDY

SEQ ID NO: 1625 - protein, 9 aa, Homo sapiens
  Light chain CDR3 for antibody 813 (IGKV1-17)
LQHNSYPYT

SEQ ID NO: 1626 - protein, 15 aa, Homo sapiens
  Heavy chain CDR3 for antibody 813 (IGHV3-33)
ARDRGWKAPGYGMDV

SEQ ID NO: 1627 - protein, 9 aa, Homo sapiens
  Light chain CDR3 for antibody 814 (IGKV1-6)
LQDYNYPYT

SEQ ID NO: 1628 - protein, 20 aa, Homo sapiens
  Heavy chain CDR3 for antibody 814 (IGHV3-23)
AKDREMAATSHYYYYYGMDV

SEQ ID NO: 1629 - protein, 9 aa, Homo sapiens
  Light chain CDR3 for antibody 815 (IGKV3D-20)
QQYGSSPPT

SEQ ID NO: 1630 - protein, 18 aa, Homo sapiens
  Heavy chain CDR3 for antibody 815 (IGHV3-33)
ARRGVGARGYYYYYGMDV

SEQ ID NO: 1631 - protein, 9 aa, Homo sapiens
  Light chain CDR3 for antibody 816 (IGKV1-17)
LQHNSYPYT

SEQ ID NO: 1632 - protein, 11 aa, Homo sapiens
  Heavy chain CDR3 for antibody 816 (IGHV3-33)
AREAANWGFDY

SEQ ID NO: 1633 - protein, 9 aa, Homo sapiens
  Light chain CDR3 for antibody 817 (IGKV1-6)
LQDYNYPFT

SEQ ID NO: 1634 - protein, 20 aa, Homo sapiens
  Heavy chain CDR3 for antibody 817 (IGHV3-23)
AKDRMTTVTSYYYYSYGMDV

SEQ ID NO: 1635 - protein, 9 aa, Homo sapiens
  Light chain CDR3 for antibody 818 (IGKV3D-7)
QQDYNLPHT

SEQ ID NO: 1636 - protein, 15 aa, Homo sapiens
  Heavy chain CDR3 for antibody 818 (IGHV4-39)
ARRVRGLIITRYFDY

SEQ ID NO: 1637 - protein, 9 aa, Homo sapiens
  Light chain CDR3 for antibody 819 (IGKV1D-16)
QQYHSYPYT

SEQ ID NO: 1638 - protein, 12 aa, Homo sapiens
  Heavy chain CDR3 for antibody 819 (IGHV3-66)
VRDRAAAPYFDL

SEQ ID NO: 1639 - protein, 9 aa, Homo sapiens
  Light chain CDR3 for antibody 820 (IGKV1-6)
LQDYNYPWT

SEQ ID NO: 1640 - protein, 18 aa, Homo sapiens
  Heavy chain CDR3 for antibody 820 (IGHV3-33)
VRERGHYGSGSFPDAFDI

SEQ ID NO: 1641 - protein, 9 aa, Homo sapiens
  Light chain CDR3 for antibody 821 (IGKV1D-16)
QQYNSYPYT

SEQ ID NO: 1642 - protein, 12 aa, Homo sapiens
  Heavy chain CDR3 for antibody 821 (IGHV3-23)
AKDGWFGESLDY

SEQ ID NO: 1643 - protein, 9 aa, Homo sapiens
  Light chain CDR3 for antibody 822 (IGKV1-9)
QQLNSYPYT

SEQ ID NO: 1644 - protein, 17 aa, Homo sapiens
  Heavy chain CDR3 for antibody 822 (IGHV4-39)
AGRLTYYFGSGSPSFDY

SEQ ID NO: 1645 - protein, 9 aa, Homo sapiens
  Light chain CDR3 for antibody 823 (IGKV1D-13)
QQFNNYPHT

SEQ ID NO: 1646 - protein, 16 aa, Homo sapiens
  Heavy chain CDR3 for antibody 823 (IGHV3-23)
AKEGMVLRYFDWLWDY

SEQ ID NO: 1647 - protein, 9 aa, Homo sapiens
  Light chain CDR3 for antibody 824 (IGKV1D-16)
QQYNSYPYT

SEQ ID NO: 1648 - protein, 13 aa, Homo sapiens
  Heavy chain CDR3 for antibody 824 (IGHV3-33)
ARIDYYSYYGMDV

SEQ ID NO: 1649 - protein, 9 aa, Homo sapiens
  Light chain CDR3 for antibody 825 (IGKV1-27)
QKYNSAPYT

SEQ ID NO: 1650 - protein, 13 aa, Homo sapiens
  Heavy chain CDR3 for antibody 825 (IGHV3-33)
ARDYCGGDCYLDY

SEQ ID NO: 1651 - protein, 9 aa, Homo sapiens
  Light chain CDR3 for antibody 826 (IGKV3-15)
QQYNNWPWT

SEQ ID NO: 1652 - protein, 11 aa, Homo sapiens
  Heavy chain CDR3 for antibody 826 (IGHV3-11)
ARASRGSYYDY

SEQ ID NO: 1653 - protein, 9 aa, Homo sapiens
  Light chain CDR3 for antibody 827 (IGKV5-2)
LQHDNFPWT

SEQ ID NO: 1654 - protein, 17 aa, Homo sapiens
  Heavy chain CDR3 for antibody 827 (IGHV1-18)
ARDRAFTMVRGVPPFDY

SEQ ID NO: 1655 - protein, 9 aa, Homo sapiens
  Light chain CDR3 for antibody 828 (IGKV3-11)
QQRSNWPWT

SEQ ID NO: 1656 - protein, 13 aa, Homo sapiens
  Heavy chain CDR3 for antibody 828 (IGHV4-59)
ARDAGYSSSWFDY

SEQ ID NO: 1657 - protein, 9 aa, Homo sapiens
  Light chain CDR3 for antibody 829 (IGKV1-6)
LQDYNYPYT

SEQ ID NO: 1658 - protein, 15 aa, Homo sapiens
  Heavy chain CDR3 for antibody 829 (IGHV3-33)
ARGYYYGSGSFPVDY

SEQ ID NO: 1659 - protein, 9 aa, Homo sapiens
  Light chain CDR3 for antibody 830 (IGKV1-17)
LQHNSYPYT

SEQ ID NO: 1660 - protein, 20 aa, Homo sapiens
  Heavy chain CDR3 for antibody 830 (IGHV3-33)
SRGGATLVRGVIDYYYGMDV

SEQ ID NO: 1661 - protein, 9 aa, Homo sapiens
  Light chain CDR3 for antibody 831 (IGKV5-2)
LQHDNFPWT

SEQ ID NO: 1662 - protein, 16 aa, Homo sapiens
  Heavy chain CDR3 for antibody 831 (IGHV4-59)
ARYSGSYYGDYYGMDV

SEQ ID NO: 1663 - protein, 9 aa, Homo sapiens
  Light chain CDR3 for antibody 832 (IGKV1-17)
LQHNSYPYT

SEQ ID NO: 1664 - protein, 17 aa, Homo sapiens
  Heavy chain CDR3 for antibody 832 (IGHV3-33)
ARAYYDILTGYSYYFDY

SEQ ID NO: 1665 - protein, 9 aa, Homo sapiens
  Light chain CDR3 for antibody 833 (IGKV1-17)
LQHNSYPYT

SEQ ID NO: 1666 - protein, 18 aa, Homo sapiens
  Heavy chain CDR3 for antibody 833 (IGHV3-23)
AKEGNYYGSGSYWGYFDP

SEQ ID NO: 1667 - protein, 8 aa, Homo sapiens
  Light chain CDR3 for antibody 834 (IGKV3D-7)
LQDYNLPT

SEQ ID NO: 1668 - protein, 12 aa, Homo sapiens
  Heavy chain CDR3 for antibody 834 (IGHV1-18)
ARKGIEVGGFDY

SEQ ID NO: 1669 - protein, 9 aa, Homo sapiens
  Light chain CDR3 for antibody 835 (IGKV1D-16)
QQYNSYPYT

SEQ ID NO: 1670 - protein, 9 aa, Homo sapiens
  Heavy chain CDR3 for antibody 835 (IGHV3-33)
AREYKEFDY

SEQ ID NO: 1671 - protein, 9 aa, Homo sapiens
  Light chain CDR3 for antibody 836 (IGKV1D-16)
QQYNSYPYT

SEQ ID NO: 1672 - protein, 11 aa, Homo sapiens
  Heavy chain CDR3 for antibody 836 (IGHV1-24)
ATREYSSSCDY

SEQ ID NO: 1673 - protein, 9 aa, Homo sapiens
  Light chain CDR3 for antibody 837 (IGKV1D-16)
QQYNSYPYT

SEQ ID NO: 1674 - protein, 18 aa, Homo sapiens
  Heavy chain CDR3 for antibody 837 (IGHV1-18)
ARDRYYYDSGSYYYGMDV

SEQ ID NO: 1675 - protein, 8 aa, Homo sapiens
  Light chain CDR3 for antibody 838 (IGKV3D-7)
QQDYNLLT

SEQ ID NO: 1676 - protein, 18 aa, Homo sapiens
  Heavy chain CDR3 for antibody 838 (IGHV3-33)
ARGAYSSGWDYYYYGLDV

SEQ ID NO: 1677 - protein, 9 aa, Homo sapiens
  Light chain CDR3 for antibody 839 (IGKV6-21)
HQSSSLPYT

SEQ ID NO: 1678 - protein, 8 aa, Homo sapiens
  Heavy chain CDR3 for antibody 839 (IGHV3-23)
AKETGNNY

SEQ ID NO: 1679 - protein, 9 aa, Homo sapiens
  Light chain CDR3 for antibody 840 (IGKV1-8)
QQYYSYPPT

SEQ ID NO: 1680 - protein, 15 aa, Homo sapiens
  Heavy chain CDR3 for antibody 840 (IGHV3-23)
AKDRSGSGSYNLFDY

SEQ ID NO: 1681 - protein, 9 aa, Homo sapiens
  Light chain CDR3 for antibody 841 (IGKV1-17)
LQHNSYPYT

SEQ ID NO: 1682 - protein, 16 aa, Homo sapiens
  Heavy chain CDR3 for antibody 841 (IGHV3-33)
ARGYDMLTGDYYGMDV

SEQ ID NO: 1683 - protein, 9 aa, Homo sapiens
  Light chain CDR3 for antibody 842 (IGKV1-16)
QQYNSYPYT

SEQ ID NO: 1684 - protein, 23 aa, Homo sapiens
  Heavy chain CDR3 for antibody 842 (IGHV4-59)
ARERTYSDILPGYYEDYYYGMDV

SEQ ID NO: 1685 - protein, 9 aa, Homo sapiens
  Light chain CDR3 for antibody 843 (IGKV1-16)
QQYNSYPYT

SEQ ID NO: 1686 - protein, 16 aa, Homo sapiens
  Heavy chain CDR3 for antibody 843 (IGHV1-18)
ARYFDWLLRDYYGMDV

SEQ ID NO: 1687 - protein, 9 aa, Homo sapiens
  Light chain CDR3 for antibody 844 (IGKV1-16)
QQYKSYPYT

SEQ ID NO: 1688 - protein, 18 aa, Homo sapiens
  Heavy chain CDR3 for antibody 844 (IGHV1-46)
ARDGDYVWGSYRSNWFDP

SEQ ID NO: 1689 - protein, 9 aa, Homo sapiens
  Light chain CDR3 for antibody 845 (IGKV1D-16)
QQYNSYPYT

SEQ ID NO: 1690 - protein, 16 aa, Homo sapiens
  Heavy chain CDR3 for antibody 845 (IGHV3-33)
ARDNFGSGSYYSHFHY

SEQ ID NO: 1691 - protein, 9 aa, Homo sapiens
  Light chain CDR3 for antibody 846 (IGKV6-21)
HQSSSLPHT

SEQ ID NO: 1692 - protein, 10 aa, Homo sapiens
  Heavy chain CDR3 for antibody 846 (IGHV3-33)
ARDHGYYFDY

SEQ ID NO: 1693 - protein, 9 aa, Homo sapiens
  Light chain CDR3 for antibody 847 (IGKV1-17)
LQHNSYPYT

SEQ ID NO: 1694 - protein, 21 aa, Homo sapiens
  Heavy chain CDR3 for antibody 847 (IGHV3-23)
AKDIDYYGSGSYPLYYYGMDV

SEQ ID NO: 1695 - protein, 9 aa, Homo sapiens
  Light chain CDR3 for antibody 848 (IGKV1-17)
LQHNSYPYT

SEQ ID NO: 1696 - protein, 10 aa, Homo sapiens
  Heavy chain CDR3 for antibody 848 (IGHV3-33)
ARDVVVYFDY

SEQ ID NO: 1697 - protein, 9 aa, Homo sapiens
  Light chain CDR3 for antibody 849 (IGKV1D-16)
QQYNSYPLT

SEQ ID NO: 1698 - protein, 12 aa, Homo sapiens
  Heavy chain CDR3 for antibody 849 (IGHV3-33)
ARDRAYRGSLDY

SEQ ID NO: 1699 - protein, 9 aa, Homo sapiens
  Light chain CDR3 for antibody 850 (IGKV1-6)
LHDYNYPYT

SEQ ID NO: 1700 - protein, 14 aa, Homo sapiens
  Heavy chain CDR3 for antibody 850 (IGHV4-39)
ARQGDILTGYSFDN

SEQ ID NO: 1701 - protein, 9 aa, Homo sapiens
  Light chain CDR3 for antibody 851 (IGKV6-21)
HQSSSLPYT

SEQ ID NO: 1702 - protein, 18 aa, Homo sapiens
  Heavy chain CDR3 for antibody 851 (IGHV3-33)
ARREGIVGATTYYYGMDV

SEQ ID NO: 1703 - protein, 9 aa, Homo sapiens
  Light chain CDR3 for antibody 852 (IGKV1-6)
LQAYNYPFT

SEQ ID NO: 1704 - protein, 17 aa, Homo sapiens
  Heavy chain CDR3 for antibody 852 (IGHV3-23)
AKERNWNDGYYYYGMDV

SEQ ID NO: 1705 - protein, 9 aa, Homo sapiens
  Light chain CDR3 for antibody 853 (IGKV1-39)
QQSYSTPLT

SEQ ID NO: 1706 - protein, 15 aa, Homo sapiens
  Heavy chain CDR3 for antibody 853 (IGHV3-30)
ARGAMVRGVDYGMDV

SEQ ID NO: 1707 - protein, 9 aa, Homo sapiens
  Light chain CDR3 for antibody 854 (IGKV6-21)
HQSSSLPHT

SEQ ID NO: 1708 - protein, 18 aa, Homo sapiens
  Heavy chain CDR3 for antibody 854 (IGHV4-39)
VKYITMVRGDIITGPFAY

SEQ ID NO: 1709 - protein, 9 aa, Homo sapiens
  Light chain CDR3 for antibody 855 (IGKV3D-7)
QQDYNLPLT

SEQ ID NO: 1710 - protein, 17 aa, Homo sapiens
  Heavy chain CDR3 for antibody 855 (IGHV3-23)
ANGGFGESHYNYYGMDV

SEQ ID NO: 1711 - protein, 9 aa, Homo sapiens
  Light chain CDR3 for antibody 856 (IGKV1-17)
LQHNSYPYT

SEQ ID NO: 1712 - protein, 12 aa, Homo sapiens
  Heavy chain CDR3 for antibody 856 (IGHV1-46)
ARALTVGASFDY

SEQ ID NO: 1713 - protein, 9 aa, Homo sapiens
  Light chain CDR3 for antibody 857 (IGKV1D-16)
QQYNSYPLT

SEQ ID NO: 1714 - protein, 17 aa, Homo sapiens
  Heavy chain CDR3 for antibody 857 (IGHV3-33)
ARESLKLGIYYYYGMDV

SEQ ID NO: 1715 - protein, 9 aa, Homo sapiens
  Light chain CDR3 for antibody 858 (IGKV5-2)
LQHDNFPYT

SEQ ID NO: 1716 - protein, 13 aa, Homo sapiens
  Heavy chain CDR3 for antibody 858 (IGHV3-33)
ARDQRYSSGWYDY

SEQ ID NO: 1717 - protein, 9 aa, Homo sapiens
  Light chain CDR3 for antibody 859 (IGKV3D-20)
QQFGSLPLT

SEQ ID NO: 1718 - protein, 19 aa, Homo sapiens
  Heavy chain CDR3 for antibody 859 (IGHV4-39)
ARQGDVLRYFDWLLGAFDI

SEQ ID NO: 1719 - protein, 9 aa, Homo sapiens
  Light chain CDR3 for antibody 860 (IGKV1D-13)
QQFNNYLFT

SEQ ID NO: 1720 - protein, 18 aa, Homo sapiens
  Heavy chain CDR3 for antibody 860 (IGHV3-11)
ARDGYYGSGSFYYYGMDV

SEQ ID NO: 1721 - protein, 9 aa, Homo sapiens
  Light chain CDR3 for antibody 861 (IGKV1-6)
LQDYNYPYT

SEQ ID NO: 1722 - protein, 18 aa, Homo sapiens
  Heavy chain CDR3 for antibody 861 (IGHV1-46)
ARDLTGRTENYYYYGMDV

SEQ ID NO: 1723 - protein, 9 aa, Homo sapiens
  Light chain CDR3 for antibody 862 (IGKV3D-7)
QQDYNLPYT

SEQ ID NO: 1724 - protein, 16 aa, Homo sapiens
  Heavy chain CDR3 for antibody 862 (IGHV1-8)
ARGHYYGSGSYYNFDY

SEQ ID NO: 1725 - protein, 8 aa, Homo sapiens
  Light chain CDR3 for antibody 863 (IGKV3-11)
QQRGNWPS

SEQ ID NO: 1726 - protein, 14 aa, Homo sapiens
  Heavy chain CDR3 for antibody 863 (IGHV3-15)
SIYFYGSGRDYFDY

SEQ ID NO: 1727 - protein, 9 aa, Homo sapiens
  Light chain CDR3 for antibody 864 (IGKV3-20)
QQFGSSPYT

SEQ ID NO: 1728 - protein, 16 aa, Homo sapiens
  Heavy chain CDR3 for antibody 864 (IGHV3-33)
ARGGLTGGGDYDAFDI

SEQ ID NO: 1729 - protein, 9 aa, Homo sapiens
  Light chain CDR3 for antibody 865 (IGKV1-17)
LQHNSYPYT

SEQ ID NO: 1730 - protein, 14 aa, Homo sapiens
  Heavy chain CDR3 for antibody 865 (IGHV3-33)
ARTTAAAGPRDFQH

SEQ ID NO: 1731 - protein, 9 aa, Homo sapiens
  Light chain CDR3 for antibody 866 (IGKV3-20)
QQYGSSPYT

SEQ ID NO: 1732 - protein, 12 aa, Homo sapiens
  Heavy chain CDR3 for antibody 866 (IGHV3-33)
ARDLVGATPFDY

SEQ ID NO: 1733 - protein, 9 aa, Homo sapiens
  Light chain CDR3 for antibody 867 (IGKV1-6)
LQDYNYPWT

SEQ ID NO: 1734 - protein, 15 aa, Homo sapiens
  Heavy chain CDR3 for antibody 867 (IGHV3-23)
AKDRGWYDYYYGMDV

SEQ ID NO: 1735 - protein, 9 aa, Homo sapiens
  Light chain CDR3 for antibody 868 (IGKV1-9)
QQLNSYPYT

SEQ ID NO: 1736 - protein, 16 aa, Homo sapiens
  Heavy chain CDR3 for antibody 868 (IGHV4-59)
ARQLLWFGELKGVFDY

SEQ ID NO: 1737 - protein, 9 aa, Homo sapiens
  Light chain CDR3 for antibody 869 (IGKV1D-13)
QQFNNYPYT

SEQ ID NO: 1738 - protein, 18 aa, Homo sapiens
  Heavy chain CDR3 for antibody 869 (IGHV3-23)
AKERGYYGSGSYSNWFDP

SEQ ID NO: 1739 - protein, 9 aa, Homo sapiens
  Light chain CDR3 for antibody 870 (IGKV5-2)
LQHDNFPWT

SEQ ID NO: 1740 - protein, 17 aa, Homo sapiens
  Heavy chain CDR3 for antibody 870 (IGHV4-34)
AGLRFFDWLFDYYGMDV

SEQ ID NO: 1741 - protein, 9 aa, Homo sapiens
  Light chain CDR3 for antibody 871 (IGKV5-2)
LQHDNFPYT

SEQ ID NO: 1742 - protein, 8 aa, Homo sapiens
  Heavy chain CDR3 for antibody 871 (IGHV3-23)
AKETGNNY

SEQ ID NO: 1743 - protein, 9 aa, Homo sapiens
  Light chain CDR3 for antibody 872 (IGKV2D-28)
MQALQTPWT

SEQ ID NO: 1744 - protein, 19 aa, Homo sapiens
  Heavy chain CDR3 for antibody 872 (IGHV3-20)
ARDSAVAGRYYYYYYGMDV

SEQ ID NO: 1745 - protein, 9 aa, Homo sapiens
  Light chain CDR3 for antibody 873 (IGKV1-17)
LQHNSYPYT

SEQ ID NO: 1746 - protein, 13 aa, Homo sapiens
  Heavy chain CDR3 for antibody 873 (IGHV3-33)
ARRYRSGWYPFDY

SEQ ID NO: 1747 - protein, 8 aa, Homo sapiens
  Light chain CDR3 for antibody 874 (IGKV6-21)
HQSGSLPT

SEQ ID NO: 1748 - protein, 18 aa, Homo sapiens
  Heavy chain CDR3 for antibody 874 (IGHV3-64)
ARDEYYYGSGSYYNYFDW

SEQ ID NO: 1749 - protein, 9 aa, Homo sapiens
  Light chain CDR3 for antibody 875 (IGKV1-16)
QQYNSYPYT

SEQ ID NO: 1750 - protein, 16 aa, Homo sapiens
  Heavy chain CDR3 for antibody 875 (IGHV1-24)
ATEDSSSTYYYYGLDV

SEQ ID NO: 1751 - protein, 9 aa, Homo sapiens
  Light chain CDR3 for antibody 876 (IGKV3-20)
QQYGSSPYT

SEQ ID NO: 1752 - protein, 12 aa, Homo sapiens
  Heavy chain CDR3 for antibody 876 (IGHV4-61)
ARVYSSGWLFDY

SEQ ID NO: 1753 - protein, 9 aa, Homo sapiens
  Light chain CDR3 for antibody 877 (IGKV5-2)
LQHDNFPYT

SEQ ID NO: 1754 - protein, 9 aa, Homo sapiens
  Heavy chain CDR3 for antibody 877 (IGHV3-13)
ARDRWYFDL

SEQ ID NO: 1755 - protein, 9 aa, Homo sapiens
  Light chain CDR3 for antibody 878 (IGKV1D-16)
QQYNSYPLT

SEQ ID NO: 1756 - protein, 16 aa, Homo sapiens
  Heavy chain CDR3 for antibody 878 (IGHV3-33)
ARAVYYGSGSSLIMDV

SEQ ID NO: 1757 - protein, 9 aa, Homo sapiens
  Light chain CDR3 for antibody 879 (IGKV1-27)
QKYNSAPYT

SEQ ID NO: 1758 - protein, 15 aa, Homo sapiens
  Heavy chain CDR3 for antibody 879 (IGHV3-30)
ARGAMVRGVDYGMDV

SEQ ID NO: 1759 - protein, 9 aa, Homo sapiens
  Light chain CDR3 for antibody 880 (IGKV6-21)
QQSSNLPHT

SEQ ID NO: 1760 - protein, 14 aa, Homo sapiens
  Heavy chain CDR3 for antibody 880 (IGHV3-33)
AREEDYYYHYDMDV

SEQ ID NO: 1761 - protein, 9 aa, Homo sapiens
  Light chain CDR3 for antibody 881 (IGKV1-6)
LQDYNYPYT

SEQ ID NO: 1762 - protein, 16 aa, Homo sapiens
  Heavy chain CDR3 for antibody 881 (IGHV4-59)
AREGYNWNDGVNWFDP

SEQ ID NO: 1763 - protein, 9 aa, Homo sapiens
  Light chain CDR3 for antibody 882 (IGKV1-17)
LQHNSYPYT

SEQ ID NO: 1764 - protein, 14 aa, Homo sapiens
  Heavy chain CDR3 for antibody 882 (IGHV3-23)
ANWAYDILTGYLDY

SEQ ID NO: 1765 - protein, 9 aa, Homo sapiens
  Light chain CDR3 for antibody 883 (IGKV1-9)
QQVNSYPNT

SEQ ID NO: 1766 - protein, 17 aa, Homo sapiens
  Heavy chain CDR3 for antibody 883 (IGHV1-24)
TTVVLYYDILPGYSFDY

SEQ ID NO: 1767 - protein, 9 aa, Homo sapiens
  Light chain CDR3 for antibody 884 (IGKV3-20)
QQYGSSPYT

SEQ ID NO: 1768 - protein, 14 aa, Homo sapiens
  Heavy chain CDR3 for antibody 884 (IGHV3-33)
ARAISGSSYWYFDL

SEQ ID NO: 1769 - protein, 9 aa, Homo sapiens
  Light chain CDR3 for antibody 885 (IGKV1-17)
LQHNSYPYT

SEQ ID NO: 1770 - protein, 13 aa, Homo sapiens
  Heavy chain CDR3 for antibody 885 (IGHV3-33)
ARTDYYFYYGLDV

SEQ ID NO: 1771 - protein, 9 aa, Homo sapiens
  Light chain CDR3 for antibody 886 (IGKV1D-16)
QQYNSYPYT

SEQ ID NO: 1772 - protein, 11 aa, Homo sapiens
  Heavy chain CDR3 for antibody 886 (IGHV3-33)
ARGSGSYAFDS

SEQ ID NO: 1773 - protein, 9 aa, Homo sapiens
  Light chain CDR3 for antibody 887 (IGKV1D-16)
QQYNSYPLT

SEQ ID NO: 1774 - protein, 18 aa, Homo sapiens
  Heavy chain CDR3 for antibody 887 (IGHV3-33)
ARDRDRYGSGTYPDAIDI

SEQ ID NO: 1775 - protein, 9 aa, Homo sapiens
  Light chain CDR3 for antibody 888 (IGKV1-6)
LQDYNYPWT

SEQ ID NO: 1776 - protein, 16 aa, Homo sapiens
  Heavy chain CDR3 for antibody 888 (IGHV3-23)
ARDLGIAAAGTGWFDP

SEQ ID NO: 1777 - protein, 9 aa, Homo sapiens
  Light chain CDR3 for antibody 889 (IGKV6-21)
HQSSSLPYT

SEQ ID NO: 1778 - protein, 13 aa, Homo sapiens
  Heavy chain CDR3 for antibody 889 (IGHV3-53)
ARSGSYWGYYFDY

SEQ ID NO: 1779 - protein, 9 aa, Homo sapiens
  Light chain CDR3 for antibody 890 (IGKV6-21)
HQSRSLPFT

SEQ ID NO: 1780 - protein, 13 aa, Homo sapiens
  Heavy chain CDR3 for antibody 890 (IGHV3-53)
ARDRDSSGSYFDY

SEQ ID NO: 1781 - protein, 9 aa, Homo sapiens
  Light chain CDR3 for antibody 891 (IGKV1D-16)
QQYNSYPYT

SEQ ID NO: 1782 - protein, 18 aa, Homo sapiens
  Heavy chain CDR3 for antibody 891 (IGHV3-23)
ARYHLYFGSGFGSDGMDV

SEQ ID NO: 1783 - protein, 8 aa, Homo sapiens
  Light chain CDR3 for antibody 892 (IGKV3D-7)
QQDYNLVT

SEQ ID NO: 1784 - protein, 13 aa, Homo sapiens
  Heavy chain CDR3 for antibody 892 (IGHV4-59)
ARDAGYSSSWFDY

SEQ ID NO: 1785 - protein, 9 aa, Homo sapiens
  Light chain CDR3 for antibody 893 (IGKV1-9)
QQLNSYPWT

SEQ ID NO: 1786 - protein, 18 aa, Homo sapiens
  Heavy chain CDR3 for antibody 893 (IGHV3-33)
AGGGSGSYSSYYYYGMDV

SEQ ID NO: 1787 - protein, 9 aa, Homo sapiens
  Light chain CDR3 for antibody 894 (IGKV1D-16)
QQYNSYPYT

SEQ ID NO: 1788 - protein, 14 aa, Homo sapiens
  Heavy chain CDR3 for antibody 894 (IGHV3-33)
ARRGYSGYDWYFDY

SEQ ID NO: 1789 - protein, 9 aa, Homo sapiens
  Light chain CDR3 for antibody 895 (IGKV6-21)
HQSSSLPYT

SEQ ID NO: 1790 - protein, 12 aa, Homo sapiens
  Heavy chain CDR3 for antibody 895 (IGHV3-33)
ARESGGSYSFDY

SEQ ID NO: 1791 - protein, 9 aa, Homo sapiens
  Light chain CDR3 for antibody 896 (IGKV3-20)
QQYGSSPYT

SEQ ID NO: 1792 - protein, 15 aa, Homo sapiens
  Heavy chain CDR3 for antibody 896 (IGHV3-33)
ARDRGWKAPGYGMDV

SEQ ID NO: 1793 - protein, 9 aa, Homo sapiens
  Light chain CDR3 for antibody 897 (IGKV6-21)
HQSSSLPYT

SEQ ID NO: 1794 - protein, 13 aa, Homo sapiens
  Heavy chain CDR3 for antibody 897 (IGHV3-33)
ARKAYGDYFYFDY

SEQ ID NO: 1795 - protein, 9 aa, Homo sapiens
  Light chain CDR3 for antibody 898 (IGKV1-6)
LQDYNYPRT

SEQ ID NO: 1796 - protein, 15 aa, Homo sapiens
  Heavy chain CDR3 for antibody 898 (IGHV3-33)
AKGGTMVRGVIAFDY

SEQ ID NO: 1797 - protein, 9 aa, Homo sapiens
  Light chain CDR3 for antibody 899 (IGKV5-2)
LQHDNFPWT

SEQ ID NO: 1798 - protein, 9 aa, Homo sapiens
  Heavy chain CDR3 for antibody 899 (IGHV4-59)
AGGSWDFDY

SEQ ID NO: 1799 - protein, 9 aa, Homo sapiens
  Light chain CDR3 for antibody 900 (IGKV1D-16)
QQYNSYPYT

SEQ ID NO: 1800 - protein, 20 aa, Homo sapiens
  Heavy chain CDR3 for antibody 900 (IGHV3-23)
AKGMGGLRYFDWPHYYGMDV

SEQ ID NO: 1801 - protein, 9 aa, Homo sapiens
  Light chain CDR3 for antibody 901 (IGKV6-21)
HQSSSLPYT

SEQ ID NO: 1802 - protein, 9 aa, Homo sapiens
  Heavy chain CDR3 for antibody 901 (IGHV3-13)
ARDRWYFDL

SEQ ID NO: 1803 - protein, 9 aa, Homo sapiens
  Light chain CDR3 for antibody 902 (IGKV1D-16)
QQYNSYPYT

SEQ ID NO: 1804 - protein, 17 aa, Homo sapiens
  Heavy chain CDR3 for antibody 902 (IGHV3-33)
ARDLIGPLSSSWYPFDY

SEQ ID NO: 1805 - protein, 9 aa, Homo sapiens
  Light chain CDR3 for antibody 903 (IGKV1-6)
LQDYNYPYT

SEQ ID NO: 1806 - protein, 11 aa, Homo sapiens
  Heavy chain CDR3 for antibody 903 (IGHV3-13)
AREAIIGPFDY

SEQ ID NO: 1807 - protein, 9 aa, Homo sapiens
  Light chain CDR3 for antibody 904 (IGKV1-17)
LQHNSYPYT

SEQ ID NO: 1808 - protein, 10 aa, Homo sapiens
  Heavy chain CDR3 for antibody 904 (IGHV3-23)
AKDHYGDYPY

SEQ ID NO: 1809 - protein, 9 aa, Homo sapiens
  Light chain CDR3 for antibody 905 (IGKV3D-20)
QQYGSSPYT

SEQ ID NO: 1810 - protein, 18 aa, Homo sapiens
  Heavy chain CDR3 for antibody 905 (IGHV1-18)
ARDRYSSGWSDYYFGMDV

SEQ ID NO: 1811 - protein, 9 aa, Homo sapiens
  Light chain CDR3 for antibody 906 (IGKV1-6)
LQDYNYPYT

SEQ ID NO: 1812 - protein, 16 aa, Homo sapiens
  Heavy chain CDR3 for antibody 906 (IGHV1-24)
ATEDSSSTYYYYGLDV

SEQ ID NO: 1813 - protein, 9 aa, Homo sapiens
  Light chain CDR3 for antibody 907 (IGKV6-21)
HQSSSLPQT

SEQ ID NO: 1814 - protein, 13 aa, Homo sapiens
  Heavy chain CDR3 for antibody 907 (IGHV3-33)
ARCIVAAMGGFDY

SEQ ID NO: 1815 - protein, 9 aa, Homo sapiens
  Light chain CDR3 for antibody 908 (IGKV1D-16)
QQYNSYPYT

SEQ ID NO: 1816 - protein, 10 aa, Homo sapiens
  Heavy chain CDR3 for antibody 908 (IGHV3-74)
ARENWGGFDY

SEQ ID NO: 1817 - protein, 9 aa, Homo sapiens
  Light chain CDR3 for antibody 909 (IGKV6-21)
HQSSSLPYT

SEQ ID NO: 1818 - protein, 17 aa, Homo sapiens
  Heavy chain CDR3 for antibody 909 (IGHV1-18)
ARDEGYDILTGYPHFDY

SEQ ID NO: 1819 - protein, 9 aa, Homo sapiens
  Light chain CDR3 for antibody 910 (IGKV1-6)
LQGYNYPRS

SEQ ID NO: 1820 - protein, 12 aa, Homo sapiens
  Heavy chain CDR3 for antibody 910 (IGHV3-33)
ARKGYDMHAFDI

SEQ ID NO: 1821 - protein, 9 aa, Homo sapiens
  Light chain CDR3 for antibody 911 (IGKV5-2)
LQHDNFPWT

SEQ ID NO: 1822 - protein, 15 aa, Homo sapiens
  Heavy chain CDR3 for antibody 911 (IGHV1-18)
ARGYCSSTSCYYFDY

SEQ ID NO: 1823 - protein, 9 aa, Homo sapiens
  Light chain CDR3 for antibody 912 (IGKV5-2)
LQHDNFPYT

SEQ ID NO: 1824 - protein, 18 aa, Homo sapiens
  Heavy chain CDR3 for antibody 912 (IGHV3-33)
ARREGIVGATTYYYGMDV

SEQ ID NO: 1825 - protein, 11 aa, Homo sapiens
  Light chain CDR3 for antibody 913 (IGKV3-11)
QQRSNWPPTWT

SEQ ID NO: 1826 - protein, 13 aa, Homo sapiens
  Heavy chain CDR3 for antibody 913 (IGHV4-59)
ARDAGYSSSWFDY

SEQ ID NO: 1827 - protein, 9 aa, Homo sapiens
  Light chain CDR3 for antibody 914 (IGKV1D-13)
QQFNNYPHT

SEQ ID NO: 1828 - protein, 18 aa, Homo sapiens
  Heavy chain CDR3 for antibody 914 (IGHV4-59)
AREGDYVWGSYRPNWFDP

SEQ ID NO: 1829 - protein, 9 aa, Homo sapiens
  Light chain CDR3 for antibody 915 (IGKV6-21)
HQSSSLPNT

SEQ ID NO: 1830 - protein, 15 aa, Homo sapiens
  Heavy chain CDR3 for antibody 915 (IGHV3-33)
ARDRGSSGYDRYFDY

SEQ ID NO: 1831 - protein, 9 aa, Homo sapiens
  Light chain CDR3 for antibody 916 (IGKV5-2)
LQHDNFPYT

SEQ ID NO: 1832 - protein, 20 aa, Homo sapiens
  Heavy chain CDR3 for antibody 916 (IGHV3-20)
ARDLCSSTSCYGYYYYGMDV

SEQ ID NO: 1833 - protein, 9 aa, Homo sapiens
  Light chain CDR3 for antibody 917 (IGKV6-21)
HQSSSLPHT

SEQ ID NO: 1834 - protein, 10 aa, Homo sapiens
  Heavy chain CDR3 for antibody 917 (IGHV3-33)
ARKGMNAFDI

SEQ ID NO: 1835 - protein, 9 aa, Homo sapiens
  Light chain CDR3 for antibody 918 (IGKV3-20)
QQYGSSPYT

SEQ ID NO: 1836 - protein, 11 aa, Homo sapiens
  Heavy chain CDR3 for antibody 918 (IGHV3-33)
ARDKSSGWSDY

SEQ ID NO: 1837 - protein, 9 aa, Homo sapiens
  Light chain CDR3 for antibody 919 (IGKV5-2)
LQHDNFPWT

SEQ ID NO: 1838 - protein, 13 aa, Homo sapiens
  Heavy chain CDR3 for antibody 919 (IGHV4-28)
ARKGATGYYGMDV

SEQ ID NO: 1839 - protein, 9 aa, Homo sapiens
  Light chain CDR3 for antibody 920 (IGKV5-2)
LQHDNFPYT

SEQ ID NO: 1840 - protein, 12 aa, Homo sapiens
  Heavy chain CDR3 for antibody 920 (IGHV3-33)
TRGYSSKSYFDY

SEQ ID NO: 1841 - protein, 9 aa, Homo sapiens
  Light chain CDR3 for antibody 921 (IGKV6-21)
HQSSSLPYT

SEQ ID NO: 1842 - protein, 14 aa, Homo sapiens
  Heavy chain CDR3 for antibody 921 (IGHV3-33)
AREGYSSNWYDFDY

SEQ ID NO: 1843 - protein, 9 aa, Homo sapiens
  Light chain CDR3 for antibody 922 (IGKV1-6)
LQDYNYPYT

SEQ ID NO: 1844 - protein, 20 aa, Homo sapiens
  Heavy chain CDR3 for antibody 922 (IGHV3-33)
ARDPAQLERRYYYFYYGMDV

SEQ ID NO: 1845 - protein, 9 aa, Homo sapiens
  Light chain CDR3 for antibody 923 (IGKV3D-7)
QQDYNLPLT

SEQ ID NO: 1846 - protein, 14 aa, Homo sapiens
  Heavy chain CDR3 for antibody 923 (IGHV1-18)
ARERGVRGVMYFDY

SEQ ID NO: 1847 - protein, 9 aa, Homo sapiens
  Light chain CDR3 for antibody 924 (IGKV1-17)
LQHNSYPYT

SEQ ID NO: 1848 - protein, 13 aa, Homo sapiens
  Heavy chain CDR3 for antibody 924 (IGHV3-23)
ASTGDSYYYGMDV

SEQ ID NO: 1849 - protein, 9 aa, Homo sapiens
  Light chain CDR3 for antibody 925 (IGKV1-9)
QQLNSYPWT

SEQ ID NO: 1850 - protein, 12 aa, Homo sapiens
  Heavy chain CDR3 for antibody 925 (IGHV3-33)
ARKAYALYVLDV

SEQ ID NO: 1851 - protein, 9 aa, Homo sapiens
  Light chain CDR3 for antibody 926 (IGKV1D-16)
QQYNSYPYT

SEQ ID NO: 1852 - protein, 18 aa, Homo sapiens
  Heavy chain CDR3 for antibody 926 (IGHV3-30)
ARDRHHDILTGYSDAFEI

SEQ ID NO: 1853 - protein, 9 aa, Homo sapiens
  Light chain CDR3 for antibody 927 (IGKV1-16)
QQYNSYPYT

SEQ ID NO: 1854 - protein, 17 aa, Homo sapiens
  Heavy chain CDR3 for antibody 927 (IGHV4-39)
ARQGWYYGSGSSLLFDY

SEQ ID NO: 1855 - protein, 9 aa, Homo sapiens
  Light chain CDR3 for antibody 928 (IGKV6-21)
HQSSSLPWT

SEQ ID NO: 1856 - protein, 13 aa, Homo sapiens
  Heavy chain CDR3 for antibody 928 (IGHV3-33)
ARDYGDYLNWFDP

SEQ ID NO: 1857 - protein, 9 aa, Homo sapiens
  Light chain CDR3 for antibody 929 (IGKV1-17)
LQHNSYPYT

SEQ ID NO: 1858 - protein, 13 aa, Homo sapiens
  Heavy chain CDR3 for antibody 929 (IGHV3-33)
AREYCSGGSCYDY

SEQ ID NO: 1859 - protein, 9 aa, Homo sapiens
  Light chain CDR3 for antibody 930 (IGKV1-6)
LQDYNYPYT

SEQ ID NO: 1860 - protein, 20 aa, Homo sapiens
  Heavy chain CDR3 for antibody 930 (IGHV3-23)
AKGMGGLRYFDWPHYYGMDV

SEQ ID NO: 1861 - protein, 9 aa, Homo sapiens
  Light chain CDR3 for antibody 931 (IGKV3-11)
QHRGNWPLT

SEQ ID NO: 1862 - protein, 17 aa, Homo sapiens
  Heavy chain CDR3 for antibody 931 (IGHV4-34)
ARDGSGSYTSYYYGMDV

SEQ ID NO: 1863 - protein, 9 aa, Homo sapiens
  Light chain CDR3 for antibody 932 (IGKV6-21)
HQSISLPHT

SEQ ID NO: 1864 - protein, 14 aa, Homo sapiens
  Heavy chain CDR3 for antibody 932 (IGHV3-20)
ARDRGSSGHDAFDI

SEQ ID NO: 1865 - protein, 9 aa, Homo sapiens
  Light chain CDR3 for antibody 933 (IGKV1-17)
LQHNSYPYT

SEQ ID NO: 1866 - protein, 13 aa, Homo sapiens
  Heavy chain CDR3 for antibody 933 (IGHV3-33)
ARVDTMVRGVMAY

SEQ ID NO: 1867 - protein, 9 aa, Homo sapiens
  Light chain CDR3 for antibody 934 (IGKV6-21)
HQSSSLPYT

SEQ ID NO: 1868 - protein, 18 aa, Homo sapiens
  Heavy chain CDR3 for antibody 934 (IGHV3-23)
AKDRITGTTYGYYSGLDV

SEQ ID NO: 1869 - protein, 9 aa, Homo sapiens
  Light chain CDR3 for antibody 935 (IGKV5-2)
LQHDNFPYT

SEQ ID NO: 1870 - protein, 18 aa, Homo sapiens
  Heavy chain CDR3 for antibody 935 (IGHV3-23)
AKEGNYYGSGSYWGYFDP

SEQ ID NO: 1871 - protein, 9 aa, Homo sapiens
  Light chain CDR3 for antibody 936 (IGKV1-17)
LQHNSYPYT

SEQ ID NO: 1872 - protein, 12 aa, Homo sapiens
  Heavy chain CDR3 for antibody 936 (IGHV3-33)
ARKGYDMHEFDI

SEQ ID NO: 1873 - protein, 9 aa, Homo sapiens
  Light chain CDR3 for antibody 937 (IGKV1-17)
LQHNSYPYT

SEQ ID NO: 1874 - protein, 16 aa, Homo sapiens
  Heavy chain CDR3 for antibody 937 (IGHV3-33)
ARGDDILTHQYYGVDV

SEQ ID NO: 1875 - protein, 9 aa, Homo sapiens
  Light chain CDR3 for antibody 938 (IGKV6-21)
HQSSSLPYT

SEQ ID NO: 1876 - protein, 18 aa, Homo sapiens
  Heavy chain CDR3 for antibody 938 (IGHV3-33)
ARGYYGSGNFYKDSGMDV

SEQ ID NO: 1877 - protein, 9 aa, Homo sapiens
  Light chain CDR3 for antibody 939 (IGKV5-2)
LQHDNFPYT

SEQ ID NO: 1878 - protein, 13 aa, Homo sapiens
  Heavy chain CDR3 for antibody 939 (IGHV3-23)
ARAFFMVRGVIDF

SEQ ID NO: 1879 - protein, 9 aa, Homo sapiens
  Light chain CDR3 for antibody 940 (IGKV1D-16)
QQYNSYPLT

SEQ ID NO: 1880 - protein, 18 aa, Homo sapiens
  Heavy chain CDR3 for antibody 940 (IGHV3-23)
AKDRITGTTYGYYSGLDV

SEQ ID NO: 1881 - protein, 9 aa, Homo sapiens
  Light chain CDR3 for antibody 941 (IGKV6-21)
HQSSSLPYT

SEQ ID NO: 1882 - protein, 12 aa, Homo sapiens
  Heavy chain CDR3 for antibody 941 (IGHV1-18)
ARILFYGDYFDY

SEQ ID NO: 1883 - protein, 9 aa, Homo sapiens
  Light chain CDR3 for antibody 942 (IGKV5-2)
LQHDNFPYT

SEQ ID NO: 1884 - protein, 15 aa, Homo sapiens
  Heavy chain CDR3 for antibody 942 (IGHV3-33)
ARRICSGGSCSLFDY

SEQ ID NO: 1885 - protein, 9 aa, Homo sapiens
  Light chain CDR3 for antibody 943 (IGKV6-21)
HQSSSLPQT

SEQ ID NO: 1886 - protein, 14 aa, Homo sapiens
  Heavy chain CDR3 for antibody 943 (IGHV3-33)
ARKPDYYGSGYFDY

SEQ ID NO: 1887 - protein, 9 aa, Homo sapiens
  Light chain CDR3 for antibody 944 (IGKV5-2)
LQHDNFPYT

SEQ ID NO: 1888 - protein, 9 aa, Homo sapiens
  Heavy chain CDR3 for antibody 944 (IGHV3-30)
ARDNWGFDY

SEQ ID NO: 1889 - protein, 9 aa, Homo sapiens
  Light chain CDR3 for antibody 945 (IGKV1D-16)
QQCNSYPRT

SEQ ID NO: 1890 - protein, 17 aa, Homo sapiens
  Heavy chain CDR3 for antibody 945 (IGHV3-64)
ARERYYGSGSYYNWFDP

SEQ ID NO: 1891 - protein, 9 aa, Homo sapiens
  Light chain CDR3 for antibody 946 (IGKV1-39)
QQSYSTPFT

SEQ ID NO: 1892 - protein, 16 aa, Homo sapiens
  Heavy chain CDR3 for antibody 946 (IGHV4-59)
ARGRYFEWLLGDVFDI

SEQ ID NO: 1893 - protein, 9 aa, Homo sapiens
  Light chain CDR3 for antibody 947 (IGKV3-20)
QQYGSSPYT

SEQ ID NO: 1894 - protein, 11 aa, Homo sapiens
  Heavy chain CDR3 for antibody 947 (IGHV3-74)
ARDRGNWGFDY

SEQ ID NO: 1895 - protein, 9 aa, Homo sapiens
  Light chain CDR3 for antibody 948 (IGKV1D-16)
QQYNSYPYT

SEQ ID NO: 1896 - protein, 13 aa, Homo sapiens
  Heavy chain CDR3 for antibody 948 (IGHV4-39)
APFRVMVRGVLDY

SEQ ID NO: 1897 - protein, 9 aa, Homo sapiens
  Light chain CDR3 for antibody 949 (IGKV1-16)
QQYNSYPYT

SEQ ID NO: 1898 - protein, 16 aa, Homo sapiens
  Heavy chain CDR3 for antibody 949 (IGHV1-8)
AREGTMVRGVTYAFDI

SEQ ID NO: 1899 - protein, 9 aa, Homo sapiens
  Light chain CDR3 for antibody 950 (IGKV5-2)
LQHDNFPWT

SEQ ID NO: 1900 - protein, 13 aa, Homo sapiens
  Heavy chain CDR3 for antibody 950 (IGHV4-39)
ARHPPSRDYGMDV

SEQ ID NO: 1901 - protein, 9 aa, Homo sapiens
  Light chain CDR3 for antibody 951 (IGKV6-21)
HQSSSLPYT

SEQ ID NO: 1902 - protein, 11 aa, Homo sapiens
  Heavy chain CDR3 for antibody 951 (IGHV3-33)
ARDRVLTPFDY

SEQ ID NO: 1903 - protein, 9 aa, Homo sapiens
  Light chain CDR3 for antibody 952 (IGKV6-21)
HQSSSLPHT

SEQ ID NO: 1904 - protein, 15 aa, Homo sapiens
  Heavy chain CDR3 for antibody 952 (IGHV3-33)
ARPPIAVAGPEYFQH

SEQ ID NO: 1905 - protein, 9 aa, Homo sapiens
  Light chain CDR3 for antibody 953 (IGKV1D-16)
QQYNSYPLT

SEQ ID NO: 1906 - protein, 8 aa, Homo sapiens
  Heavy chain CDR3 for antibody 953 (IGHV3-23)
AETFLFDY

SEQ ID NO: 1907 - protein, 9 aa, Homo sapiens
  Light chain CDR3 for antibody 954 (IGKV1D-16)
QQYNSYPLT

SEQ ID NO: 1908 - protein, 10 aa, Homo sapiens
  Heavy chain CDR3 for antibody 954 (IGHV3-23)
AKGDRWRFDP

SEQ ID NO: 1909 - protein, 9 aa, Homo sapiens
  Light chain CDR3 for antibody 955 (IGKV1-17)
LRHNCYPYT

SEQ ID NO: 1910 - protein, 11 aa, Homo sapiens
  Heavy chain CDR3 for antibody 955 (IGHV4-39)
ARLSGEGHFDS

SEQ ID NO: 1911 - protein, 9 aa, Homo sapiens
  Light chain CDR3 for antibody 956 (IGKV1-6)
LQDYNYPYT

SEQ ID NO: 1912 - protein, 17 aa, Homo sapiens
  Heavy chain CDR3 for antibody 956 (IGHV3-33)
ARGGAAAGPYLYYGLDV

SEQ ID NO: 1913 - protein, 9 aa, Homo sapiens
  Light chain CDR3 for antibody 957 (IGKV1-27)
QKYNSAPYT

SEQ ID NO: 1914 - protein, 13 aa, Homo sapiens
  Heavy chain CDR3 for antibody 957 (IGHV4-59)
ARDAGYSSSWFDY

SEQ ID NO: 1915 - protein, 9 aa, Homo sapiens
  Light chain CDR3 for antibody 958 (IGKV5-2)
LQHDNFPWT

SEQ ID NO: 1916 - protein, 13 aa, Homo sapiens
  Heavy chain CDR3 for antibody 958 (IGHV4-61)
ASRYSSGWYPFDY

SEQ ID NO: 1917 - protein, 9 aa, Homo sapiens
  Light chain CDR3 for antibody 959 (IGKV1-39)
QQSYSTPLT

SEQ ID NO: 1918 - protein, 14 aa, Homo sapiens
  Heavy chain CDR3 for antibody 959 (IGHV3-23)
AKSRIVGALYYFDY

SEQ ID NO: 1919 - protein, 9 aa, Homo sapiens
  Light chain CDR3 for antibody 960 (IGKV3-20)
QQYGSSPYT

SEQ ID NO: 1920 - protein, 15 aa, Homo sapiens
  Heavy chain CDR3 for antibody 960 (IGHV3-33)
ARDHLTGYYYYGMDV

SEQ ID NO: 1921 - protein, 9 aa, Homo sapiens
  Light chain CDR3 for antibody 961 (IGKV1-27)
QKYNSAPYT

SEQ ID NO: 1922 - protein, 10 aa, Homo sapiens
  Heavy chain CDR3 for antibody 961 (IGHV3-33)
ARDGLRYFDW

SEQ ID NO: 1923 - protein, 9 aa, Homo sapiens
  Light chain CDR3 for antibody 962 (IGKV1-17)
LQHNSYPYT

SEQ ID NO: 1924 - protein, 11 aa, Homo sapiens
  Heavy chain CDR3 for antibody 962 (IGHV3-33)
ARAGIAALFDY

SEQ ID NO: 1925 - protein, 9 aa, Homo sapiens
  Light chain CDR3 for antibody 963 (IGKV5-2)
LQHDNFPWT

SEQ ID NO: 1926 - protein, 26 aa, Homo sapiens
  Heavy chain CDR3 for antibody 963 (IGHV4-39)
ARQGLLWFGDLKAYDSSGYYYGYFHH

SEQ ID NO: 1927 - protein, 9 aa, Homo sapiens
  Light chain CDR3 for antibody 964 (IGKV6-21)
HQSSSLPHT

SEQ ID NO: 1928 - protein, 17 aa, Homo sapiens
  Heavy chain CDR3 for antibody 964 (IGHV3-33)
ARDPWIYSGYGGGWFDP

SEQ ID NO: 1929 - protein, 9 aa, Homo sapiens
  Light chain CDR3 for antibody 965 (IGKV6-21)
HQSSSLPYT

SEQ ID NO: 1930 - protein, 12 aa, Homo sapiens
  Heavy chain CDR3 for antibody 965 (IGHV3-11)
ARVLLWFGETDY

SEQ ID NO: 1931 - protein, 9 aa, Homo sapiens
  Light chain CDR3 for antibody 966 (IGKV1-17)
LQHNSYPYT

SEQ ID NO: 1932 - protein, 13 aa, Homo sapiens
  Heavy chain CDR3 for antibody 966 (IGHV3-33)
AKEDGDYHHYFDY

SEQ ID NO: 1933 - protein, 9 aa, Homo sapiens
  Light chain CDR3 for antibody 967 (IGKV5-2)
LQHDNFPYT

SEQ ID NO: 1934 - protein, 10 aa, Homo sapiens
  Heavy chain CDR3 for antibody 967 (IGHV3-23)
AKGDRWRFDP

SEQ ID NO: 1935 - protein, 9 aa, Homo sapiens
  Light chain CDR3 for antibody 968 (IGKV6-21)
HQSSSLPYT

SEQ ID NO: 1936 - protein, 14 aa, Homo sapiens
  Heavy chain CDR3 for antibody 968 (IGHV3-33)
ARDRIAAASSDFDC

SEQ ID NO: 1937 - protein, 9 aa, Homo sapiens
  Light chain CDR3 for antibody 969 (IGKV6-21)
HQSSSLPYT

SEQ ID NO: 1938 - protein, 15 aa, Homo sapiens
  Heavy chain CDR3 for antibody 969 (IGHV3-33)
ARDTGYSSSWNWFDP

SEQ ID NO: 1939 - protein, 9 aa, Homo sapiens
  Light chain CDR3 for antibody 970 (IGKV3-15)
QQYNNWPLT

SEQ ID NO: 1940 - protein, 13 aa, Homo sapiens
  Heavy chain CDR3 for antibody 970 (IGHV4-34)
ASNFYYYYYGMDV

SEQ ID NO: 1941 - protein, 9 aa, Homo sapiens
  Light chain CDR3 for antibody 971 (IGKV5-2)
LQHDNFPYT

SEQ ID NO: 1942 - protein, 15 aa, Homo sapiens
  Heavy chain CDR3 for antibody 971 (IGHV3-33)
ARDTGYSSSWNWFDP

SEQ ID NO: 1943 - protein, 9 aa, Homo sapiens
  Light chain CDR3 for antibody 972 (IGKV1D-16)
QQYNSYPYT

SEQ ID NO: 1944 - protein, 12 aa, Homo sapiens
  Heavy chain CDR3 for antibody 972 (IGHV3-13)
ARDRGYSGYFDY

SEQ ID NO: 1945 - protein, 9 aa, Homo sapiens
  Light chain CDR3 for antibody 973 (IGKV6-21)
HQSSSLPYT

SEQ ID NO: 1946 - protein, 12 aa, Homo sapiens
  Heavy chain CDR3 for antibody 973 (IGHV3-33)
ARDLVGATPFDY

SEQ ID NO: 1947 - protein, 9 aa, Homo sapiens
  Light chain CDR3 for antibody 974 (IGKV1-9)
QQLNSYPLT

SEQ ID NO: 1948 - protein, 13 aa, Homo sapiens
  Heavy chain CDR3 for antibody 974 (IGHV4-61)
ASRYSSGWYPFDY

SEQ ID NO: 1949 - protein, 9 aa, Homo sapiens
  Light chain CDR3 for antibody 975 (IGKV5-2)
LQHDNFPYT

SEQ ID NO: 1950 - protein, 14 aa, Homo sapiens
  Heavy chain CDR3 for antibody 975 (IGHV3-33)
AREGYSSNWYDFDY

SEQ ID NO: 1951 - protein, 9 aa, Homo sapiens
  Light chain CDR3 for antibody 976 (IGKV1D-16)
QQYNSYPYT

SEQ ID NO: 1952 - protein, 11 aa, Homo sapiens
  Heavy chain CDR3 for antibody 976 (IGHV3-33)
ARDRATATVDY

SEQ ID NO: 1953 - protein, 9 aa, Homo sapiens
  Light chain CDR3 for antibody 977 (IGKV5-2)
LQHDNFPYT

SEQ ID NO: 1954 - protein, 13 aa, Homo sapiens
  Heavy chain CDR3 for antibody 977 (IGHV3-11)
ARDEGYRGYVLDT

SEQ ID NO: 1955 - protein, 9 aa, Homo sapiens
  Light chain CDR3 for antibody 978 (IGKV2-30)
MQGTHWPWT

SEQ ID NO: 1956 - protein, 11 aa, Homo sapiens
  Heavy chain CDR3 for antibody 978 (IGHV3-33)
ATERDMVRGDY

SEQ ID NO: 1957 - protein, 9 aa, Homo sapiens
  Light chain CDR3 for antibody 979 (IGKV1-39)
QQSYSTPLT

SEQ ID NO: 1958 - protein, 13 aa, Homo sapiens
  Heavy chain CDR3 for antibody 979 (IGHV3-23)
ASPFNWNDGFFDY

SEQ ID NO: 1959 - protein, 8 aa, Homo sapiens
  Light chain CDR3 for antibody 980 (IGKV1-39)
QQSYTTPT

SEQ ID NO: 1960 - protein, 17 aa, Homo sapiens
  Heavy chain CDR3 for antibody 980 (IGHV4-61)
ARNTMVGTWQRQGNLDH

SEQ ID NO: 1961 - protein, 9 aa, Homo sapiens
  Light chain CDR3 for antibody 981 (IGKV3-20)
QQYGSSPYT

SEQ ID NO: 1962 - protein, 20 aa, Homo sapiens
  Heavy chain CDR3 for antibody 981 (IGHV3-20)
ARDLCSSTSCYGYYYYGMDV

SEQ ID NO: 1963 - protein, 9 aa, Homo sapiens
  Light chain CDR3 for antibody 982 (IGKV1D-16)
QQYDSYPYT

SEQ ID NO: 1964 - protein, 14 aa, Homo sapiens
  Heavy chain CDR3 for antibody 982 (IGHV3-33)
ARDGIVRATDAFAI

SEQ ID NO: 1965 - protein, 9 aa, Homo sapiens
  Light chain CDR3 for antibody 983 (IGKV3-20)
QQYGSSPYT

SEQ ID NO: 1966 - protein, 10 aa, Homo sapiens
  Heavy chain CDR3 for antibody 983 (IGHV3-23)
AKGDRWRFDP

SEQ ID NO: 1967 - protein, 9 aa, Homo sapiens
  Light chain CDR3 for antibody 984 (IGKV6-21)
HQRSSLPHT

SEQ ID NO: 1968 - protein, 15 aa, Homo sapiens
  Heavy chain CDR3 for antibody 984 (IGHV3-33)
ARERYSSAWSSGMDV

SEQ ID NO: 1969 - protein, 9 aa, Homo sapiens
  Light chain CDR3 for antibody 985 (IGKV5-2)
LQHDNFPWT

SEQ ID NO: 1970 - protein, 14 aa, Homo sapiens
  Heavy chain CDR3 for antibody 985 (IGHV4-39)
ARRGVVVPPGGMDV

SEQ ID NO: 1971 - protein, 9 aa, Homo sapiens
  Light chain CDR3 for antibody 986 (IGKV3-20)
QQYGSSPYT

SEQ ID NO: 1972 - protein, 12 aa, Homo sapiens
  Heavy chain CDR3 for antibody 986 (IGHV3-33)
ARDRAYRGSLDY

SEQ ID NO: 1973 - protein, 9 aa, Homo sapiens
  Light chain CDR3 for antibody 987 (IGKV3D-7)
QQDYNLPLT

SEQ ID NO: 1974 - protein, 15 aa, Homo sapiens
  Heavy chain CDR3 for antibody 987 (IGHV4-59)
ARDGHGNWGSGTFDY

SEQ ID NO: 1975 - protein, 9 aa, Homo sapiens
  Light chain CDR3 for antibody 988 (IGKV2-30)
MQGTHWPLT

SEQ ID NO: 1976 - protein, 16 aa, Homo sapiens
  Heavy chain CDR3 for antibody 988 (IGHV3-23)
AKEGMVLRYFDWLWDY

SEQ ID NO: 1977 - protein, 9 aa, Homo sapiens
  Light chain CDR3 for antibody 989 (IGKV1D-13)
QQFNNYPYT

SEQ ID NO: 1978 - protein, 14 aa, Homo sapiens
  Heavy chain CDR3 for antibody 989 (IGHV3-33)
ARDWNDVYYYGMDV

SEQ ID NO: 1979 - protein, 9 aa, Homo sapiens
  Light chain CDR3 for antibody 990 (IGKV5-2)
LQHDNFPWT

SEQ ID NO: 1980 - protein, 18 aa, Homo sapiens
  Heavy chain CDR3 for antibody 990 (IGHV4-39)
ARQYYFGSGNYYRGWFDP

SEQ ID NO: 1981 - protein, 9 aa, Homo sapiens
  Light chain CDR3 for antibody 991 (IGKV1D-16)
QQYNSYPYT

SEQ ID NO: 1982 - protein, 14 aa, Homo sapiens
  Heavy chain CDR3 for antibody 991 (IGHV3-33)
ARDGLVGASSWFDP

SEQ ID NO: 1983 - protein, 9 aa, Homo sapiens
  Light chain CDR3 for antibody 992 (IGKV6-21)
HQSSSLPYT

SEQ ID NO: 1984 - protein, 15 aa, Homo sapiens
  Heavy chain CDR3 for antibody 992 (IGHV3-33)
ARRICSGGSCSLFDY

SEQ ID NO: 1985 - protein, 9 aa, Homo sapiens
  Light chain CDR3 for antibody 993 (IGKV5-2)
LQHDNFPYT

SEQ ID NO: 1986 - protein, 15 aa, Homo sapiens
  Heavy chain CDR3 for antibody 993 (IGHV3-23)
AKDGSYYDYYYGMDV

SEQ ID NO: 1987 - protein, 9 aa, Homo sapiens
  Light chain CDR3 for antibody 994 (IGKV3D-7)
QQDYEFPLT

SEQ ID NO: 1988 - protein, 18 aa, Homo sapiens
  Heavy chain CDR3 for antibody 994 (IGHV4-59)
AREGDYVWGSYRPNWFDP

SEQ ID NO: 1989 - protein, 9 aa, Homo sapiens
  Light chain CDR3 for antibody 995 (IGKV6-21)
HQSSSLPYT

SEQ ID NO: 1990 - protein, 17 aa, Homo sapiens
  Heavy chain CDR3 for antibody 995 (IGHV1-18)
ARDRAFTMVRGVPPFDY

SEQ ID NO: 1991 - protein, 9 aa, Homo sapiens
  Light chain CDR3 for antibody 996 (IGKV1D-16)
QQYNSYPYT

SEQ ID NO: 1992 - protein, 17 aa, Homo sapiens
  Heavy chain CDR3 for antibody 996 (IGHV3-33)
ARSPYDILTGYSYYFDY

SEQ ID NO: 1993 - protein, 9 aa, Homo sapiens
  Light chain CDR3 for antibody 997 (IGKV5-2)
LQHDNFPYT

SEQ ID NO: 1994 - protein, 18 aa, Homo sapiens
  Heavy chain CDR3 for antibody 997 (IGHV3-23)
AKDRITGTTYGYYSGLDV

SEQ ID NO: 1995 - protein, 9 aa, Homo sapiens
  Light chain CDR3 for antibody 998 (IGKV6-21)
HQSSSLPYT

SEQ ID NO: 1996 - protein, 9 aa, Homo sapiens
  Heavy chain CDR3 for antibody 998 (IGHV3-33)
ARATVGVDY

SEQ ID NO: 1997 - protein, 9 aa, Homo sapiens
  Light chain CDR3 for antibody 999 (IGKV1D-13)
QQFNNYPHT

SEQ ID NO: 1998 - protein, 18 aa, Homo sapiens
  Heavy chain CDR3 for antibody 999 (IGHV3-33)
ARAGYYGSGSYYYYGMDV

SEQ ID NO: 1999 - protein, 9 aa, Homo sapiens
  Light chain CDR3 for antibody 1000 (IGKV1-6)
LQDYNYPWT

SEQ ID NO: 2000 - protein, 17 aa, Homo sapiens
  Heavy chain CDR3 for antibody 1000 (IGHV3-11)
ARAGPRYDSSGHDAFDI

SEQ ID NO: 2001 - protein, 9 aa, Homo sapiens
  Light chain CDR3 for antibody 1001 (IGKV1-17)
LQHNSYPST

SEQ ID NO: 2002 - protein, 17 aa, Homo sapiens
  Heavy chain CDR3 for antibody 1001 (IGHV3-23)
AREGYYDILTDYYGMDV

SEQ ID NO: 2003 - protein, 9 aa, Homo sapiens
  Light chain CDR3 for antibody 1002 (IGKV3-20)
QQYGSSPYT

SEQ ID NO: 2004 - protein, 18 aa, Homo sapiens
  Heavy chain CDR3 for antibody 1002 (IGHV3-33)
ARGLLWFGVSYYYYGMDV

SEQ ID NO: 2005 - protein, 9 aa, Homo sapiens
  Light chain CDR3 for antibody 1003 (IGKV6-21)
HQSSSLPYT

SEQ ID NO: 2006 - protein, 15 aa, Homo sapiens
  Heavy chain CDR3 for antibody 1003 (IGHV3-23)
AKDGSYYDYYYGMDV

SEQ ID NO: 2007 - protein, 9 aa, Homo sapiens
  Light chain CDR3 for antibody 1004 (IGKV6-21)
HQSSSLPHT

SEQ ID NO: 2008 - protein, 12 aa, Homo sapiens
  Heavy chain CDR3 for antibody 1004 (IGHV3-9)
AEDPFLGTSFDY

SEQ ID NO: 2009 - protein, 9 aa, Homo sapiens
  Light chain CDR3 for antibody 1005 (IGKV1-39)
QQSYSTPFT

SEQ ID NO: 2010 - protein, 18 aa, Homo sapiens
  Heavy chain CDR3 for antibody 1005 (IGHV4-59)
AREGHYYTSGSYYKAFDY

SEQ ID NO: 2011 - protein, 9 aa, Homo sapiens
  Light chain CDR3 for antibody 1006 (IGKV1-16)
QQYNSYPYT

SEQ ID NO: 2012 - protein, 16 aa, Homo sapiens
  Heavy chain CDR3 for antibody 1006 (IGHV4-59)
ARDTPYYSGSGRPFDH

SEQ ID NO: 2013 - protein, 9 aa, Homo sapiens
  Light chain CDR3 for antibody 1007 (IGKV1-39)
QQSYSTPLT

SEQ ID NO: 2014 - protein, 20 aa, Homo sapiens
  Heavy chain CDR3 for antibody 1007 (IGHV3-23)
TKDRYSDSSGYYLYYNDMDV

SEQ ID NO: 2015 - protein, 9 aa, Homo sapiens
  Light chain CDR3 for antibody 1008 (IGKV6-21)
HQSSSLPYT

SEQ ID NO: 2016 - protein, 14 aa, Homo sapiens
  Heavy chain CDR3 for antibody 1008 (IGHV3-33)
ARAISGSSYWYFDL

SEQ ID NO: 2017 - protein, 9 aa, Homo sapiens
  Light chain CDR3 for antibody 1009 (IGKV5-2)
LQHDNFPYT

SEQ ID NO: 2018 - protein, 13 aa, Homo sapiens
  Heavy chain CDR3 for antibody 1009 (IGHV3-53)
ARSGSYWGYYFDY

SEQ ID NO: 2019 - protein, 9 aa, Homo sapiens
  Light chain CDR3 for antibody 1010 (IGKV3D-7)
QQDYILPWT

SEQ ID NO: 2020 - protein, 14 aa, Homo sapiens
  Heavy chain CDR3 for antibody 1010 (IGHV3-23)
AKDRNIPAAGPFDY

SEQ ID NO: 2021 - protein, 9 aa, Homo sapiens
  Light chain CDR3 for antibody 1011 (IGKV1-39)
QQSYSTPLT

SEQ ID NO: 2022 - protein, 14 aa, Homo sapiens
  Heavy chain CDR3 for antibody 1011 (IGHV3-33)
ARGAAAGNFYGLDV

SEQ ID NO: 2023 - protein, 9 aa, Homo sapiens
  Light chain CDR3 for antibody 1012 (IGKV1-17)
LQHNSYPYT

SEQ ID NO: 2024 - protein, 9 aa, Homo sapiens
  Heavy chain CDR3 for antibody 1012 (IGHV3-23)
ARIWWLKDY

SEQ ID NO: 2025 - protein, 9 aa, Homo sapiens
  Light chain CDR3 for antibody 1013 (IGKV1-17)
LQHNSYPYT

SEQ ID NO: 2026 - protein, 20 aa, Homo sapiens
  Heavy chain CDR3 for antibody 1013 (IGHV3-33)
ARDPAQLERRYYYFYYGMDV

SEQ ID NO: 2027 - protein, 9 aa, Homo sapiens
  Light chain CDR3 for antibody 1014 (IGKV1-17)
LQHNSYPYT

SEQ ID NO: 2028 - protein, 17 aa, Homo sapiens
  Heavy chain CDR3 for antibody 1014 (IGHV3-33)
ARGGAAAGPYLYYGLDV

SEQ ID NO: 2029 - protein, 9 aa, Homo sapiens
  Light chain CDR3 for antibody 1015 (IGKV5-2)
LQHDNFPYT

SEQ ID NO: 2030 - protein, 11 aa, Homo sapiens
  Heavy chain CDR3 for antibody 1015 (IGHV3-33)
ARDKSSGWSDY

SEQ ID NO: 2031 - protein, 9 aa, Homo sapiens
  Light chain CDR3 for antibody 1016 (IGKV3-20)
QQYGSSPYT

SEQ ID NO: 2032 - protein, 18 aa, Homo sapiens
  Heavy chain CDR3 for antibody 1016 (IGHV3-23)
AKDRITGTTYGYYSGLDV

SEQ ID NO: 2033 - protein, 9 aa, Homo sapiens
  Light chain CDR3 for antibody 1017 (IGKV1-6)
LQDYNYPYT

SEQ ID NO: 2034 - protein, 18 aa, Homo sapiens
  Heavy chain CDR3 for antibody 1017 (IGHV1-18)
ARDRYYYDSGSYYYGMDV

SEQ ID NO: 2035 - protein, 9 aa, Homo sapiens
  Light chain CDR3 for antibody 1018 (IGKV1-16)
QQYNSYPYT

SEQ ID NO: 2036 - protein, 13 aa, Homo sapiens
  Heavy chain CDR3 for antibody 1018 (IGHV1-2)
ARDGVRGSFGMDV

SEQ ID NO: 2037 - protein, 9 aa, Homo sapiens
  Light chain CDR3 for antibody 1019 (IGKV6-21)
HQSSSLPLT

SEQ ID NO: 2038 - protein, 14 aa, Homo sapiens
  Heavy chain CDR3 for antibody 1019 (IGHV3-20)
ARDEGSTWSDIFDI

SEQ ID NO: 2039 - protein, 9 aa, Homo sapiens
  Light chain CDR3 for antibody 1020 (IGKV1D-16)
QQYNSYPLT

SEQ ID NO: 2040 - protein, 18 aa, Homo sapiens
  Heavy chain CDR3 for antibody 1020 (IGHV3-33)
ARERDYYGSGSYPDAFDI

SEQ ID NO: 2041 - protein, 9 aa, Homo sapiens
  Light chain CDR3 for antibody 1021 (IGKV2-30)
MQGTHWPLT

SEQ ID NO: 2042 - protein, 13 aa, Homo sapiens
  Heavy chain CDR3 for antibody 1021 (IGHV3-11)
ARDGGAAAGTWDS

SEQ ID NO: 2043 - protein, 9 aa, Homo sapiens
  Light chain CDR3 for antibody 1022 (IGKV5-2)
LQHDNFPWT

SEQ ID NO: 2044 - protein, 12 aa, Homo sapiens
  Heavy chain CDR3 for antibody 1022 (IGHV1-18)
ARILFYGDYFDY

SEQ ID NO: 2045 - protein, 9 aa, Homo sapiens
  Light chain CDR3 for antibody 1023 (IGKV1-17)
LQHNSYPYT

SEQ ID NO: 2046 - protein, 16 aa, Homo sapiens
  Heavy chain CDR3 for antibody 1023 (IGHV3-13)
ARDRSYESYYYYGMDV

SEQ ID NO: 2047 - protein, 9 aa, Homo sapiens
  Light chain CDR3 for antibody 1024 (IGKV6-21)
HQSSSLPYT

SEQ ID NO: 2048 - protein, 15 aa, Homo sapiens
  Heavy chain CDR3 for antibody 1024 (IGHV1-18)
ARGYCSSTSCYYFDY

SEQ ID NO: 2049 - protein, 9 aa, Homo sapiens
  Light chain CDR3 for antibody 1025 (IGKV1-16)
QQYNSYPYT

SEQ ID NO: 2050 - protein, 14 aa, Homo sapiens
  Heavy chain CDR3 for antibody 1025 (IGHV1-46)
ARDGVGAKEGGFDY

SEQ ID NO: 2051 - protein, 9 aa, Homo sapiens
  Light chain CDR3 for antibody 1026 (IGKV3D-7)
QQDYNLPYT

SEQ ID NO: 2052 - protein, 22 aa, Homo sapiens
  Heavy chain CDR3 for antibody 1026 (IGHV3-33)
ARMYYDILTGYYKDYYYYGMDV

SEQ ID NO: 2053 - protein, 9 aa, Homo sapiens
  Light chain CDR3 for antibody 1027 (IGKV1D-16)
QQYNSYPLT

SEQ ID NO: 2054 - protein, 12 aa, Homo sapiens
  Heavy chain CDR3 for antibody 1027 (IGHV1-46)
AREDYDIDGMDV

SEQ ID NO: 2055 - protein, 9 aa, Homo sapiens
  Light chain CDR3 for antibody 1028 (IGKV1D-16)
QQYNSYPYT

SEQ ID NO: 2056 - protein, 11 aa, Homo sapiens
  Heavy chain CDR3 for antibody 1028 (IGHV3-23)
ARDPGSITGDY

SEQ ID NO: 2057 - protein, 9 aa, Homo sapiens
  Light chain CDR3 for antibody 1029 (IGKV1-17)
LQHNSYPYT

SEQ ID NO: 2058 - protein, 17 aa, Homo sapiens
  Heavy chain CDR3 for antibody 1029 (IGHV1-18)
ARERYYGSGSYKYNMDV

SEQ ID NO: 2059 - protein, 9 aa, Homo sapiens
  Light chain CDR3 for antibody 1030 (IGKV6-21)
HQSNSLPFT

SEQ ID NO: 2060 - protein, 10 aa, Homo sapiens
  Heavy chain CDR3 for antibody 1030 (IGHV3-13)
ARDRGSYYDY

SEQ ID NO: 2061 - protein, 9 aa, Homo sapiens
  Light chain CDR3 for antibody 1031 (IGKV3-15)
QQYNNWPLT

SEQ ID NO: 2062 - protein, 18 aa, Homo sapiens
  Heavy chain CDR3 for antibody 1031 (IGHV4-59)
AREGDYVWGSYRPNWFDP

SEQ ID NO: 2063 - protein, 9 aa, Homo sapiens
  Light chain CDR3 for antibody 1032 (IGKV1D-16)
QQYNSYPYT

SEQ ID NO: 2064 - protein, 18 aa, Homo sapiens
  Heavy chain CDR3 for antibody 1032 (IGHV3-33)
ARDEYYGSGIYYNYGMDV

SEQ ID NO: 2065 - protein, 9 aa, Homo sapiens
  Light chain CDR3 for antibody 1033 (IGKV1D-16)
QQYNSYPYT

SEQ ID NO: 2066 - protein, 17 aa, Homo sapiens
  Heavy chain CDR3 for antibody 1033 (IGHV3-33)
ARSGIVGATDYYYGLDV

SEQ ID NO: 2067 - protein, 9 aa, Homo sapiens
  Light chain CDR3 for antibody 1034 (IGKV1-9)
QQFNSYTRT

SEQ ID NO: 2068 - protein, 11 aa, Homo sapiens
  Heavy chain CDR3 for antibody 1034 (IGHV3-33)
AREGAVASFDY

SEQ ID NO: 2069 - protein, 9 aa, Homo sapiens
  Light chain CDR3 for antibody 1035 (IGKV6-21)
HQSSSLPYT

SEQ ID NO: 2070 - protein, 10 aa, Homo sapiens
  Heavy chain CDR3 for antibody 1035 (IGHV3-23)
AKGDRWRFDP

SEQ ID NO: 2071 - protein, 9 aa, Homo sapiens
  Light chain CDR3 for antibody 1036 (IGKV5-2)
LQHDNFPWT

SEQ ID NO: 2072 - protein, 11 aa, Homo sapiens
  Heavy chain CDR3 for antibody 1036 (IGHV4-4)
AREAYYYGLDV

SEQ ID NO: 2073 - protein, 9 aa, Homo sapiens
  Light chain CDR3 for antibody 1037 (IGKV1D-16)
QQYNSYPLT

SEQ ID NO: 2074 - protein, 12 aa, Homo sapiens
  Heavy chain CDR3 for antibody 1037 (IGHV3-13)
AREAGIPDAFDI

SEQ ID NO: 2075 - protein, 9 aa, Homo sapiens
  Light chain CDR3 for antibody 1038 (IGKV1-6)
LQDYNYPYT

SEQ ID NO: 2076 - protein, 11 aa, Homo sapiens
  Heavy chain CDR3 for antibody 1038 (IGHV1-24)
ATELGLYYFDY

SEQ ID NO: 2077 - protein, 9 aa, Homo sapiens
  Light chain CDR3 for antibody 1039 (IGKV3D-20)
QQYGSSPYT

SEQ ID NO: 2078 - protein, 18 aa, Homo sapiens
  Heavy chain CDR3 for antibody 1039 (IGHV3-33)
ARDGYSGYDYYYYYGMDV

SEQ ID NO: 2079 - protein, 9 aa, Homo sapiens
  Light chain CDR3 for antibody 1040 (IGKV1D-16)
QQYNSYPLT

SEQ ID NO: 2080 - protein, 18 aa, Homo sapiens
  Heavy chain CDR3 for antibody 1040 (IGHV3-33)
ARDGYSGYDYYYYYGMDV

SEQ ID NO: 2081 - protein, 9 aa, Homo sapiens
  Light chain CDR3 for antibody 1041 (IGKV3-20)
QQYGSSPYT

SEQ ID NO: 2082 - protein, 15 aa, Homo sapiens
  Heavy chain CDR3 for antibody 1041 (IGHV3-23)
AKDGSYYDYYYGMDV

SEQ ID NO: 2083 - protein, 9 aa, Homo sapiens
  Light chain CDR3 for antibody 1042 (IGKV1-6)
LQDYNYPYT

SEQ ID NO: 2084 - protein, 14 aa, Homo sapiens
  Heavy chain CDR3 for antibody 1042 (IGHV1-2)
ARDYYGSGNYYMGY

SEQ ID NO: 2085 - protein, 9 aa, Homo sapiens
  Light chain CDR3 for antibody 1043 (IGKV5-2)
LQHDNFPYT

SEQ ID NO: 2086 - protein, 14 aa, Homo sapiens
  Heavy chain CDR3 for antibody 1043 (IGHV3-33)
ARDRIAAASSDFDC

SEQ ID NO: 2087 - protein, 9 aa, Homo sapiens
  Light chain CDR3 for antibody 1044 (IGKV1-17)
LQHNSYPYT

SEQ ID NO: 2088 - protein, 11 aa, Homo sapiens
  Heavy chain CDR3 for antibody 1044 (IGHV3-23)
AKGLWSYYFDY

SEQ ID NO: 2089 - protein, 9 aa, Homo sapiens
  Light chain CDR3 for antibody 1045 (IGKV6-21)
HQSSSLPYT

SEQ ID NO: 2090 - protein, 20 aa, Homo sapiens
  Heavy chain CDR3 for antibody 1045 (IGHV3-20)
ARDLCSSTSCYGYYYYGMDV

SEQ ID NO: 2091 - protein, 9 aa, Homo sapiens
  Light chain CDR3 for antibody 1046 (IGKV3-15)
QQYNNWPRT

SEQ ID NO: 2092 - protein, 18 aa, Homo sapiens
  Heavy chain CDR3 for antibody 1046 (IGHV3-33)
ARDPYSSGWYDYYFGMDV

SEQ ID NO: 2093 - protein, 9 aa, Homo sapiens
  Light chain CDR3 for antibody 1047 (IGKV1-12)
QQADTIPVT

SEQ ID NO: 2094 - protein, 9 aa, Homo sapiens
  Heavy chain CDR3 for antibody 1047 (IGHV4-59)
ARGRSNFRI

SEQ ID NO: 2095 - protein, 9 aa, Homo sapiens
  Light chain CDR3 for antibody 1048 (IGKV3-11)
QQRSNWPYT

SEQ ID NO: 2096 - protein, 16 aa, Homo sapiens
  Heavy chain CDR3 for antibody 1048 (IGHV3-23)
AKEGMVLRYFDWLWDY

SEQ ID NO: 2097 - protein, 9 aa, Homo sapiens
  Light chain CDR3 for antibody 1049 (IGKV1D-16)
QQYNSYPYT

SEQ ID NO: 2098 - protein, 8 aa, Homo sapiens
  Heavy chain CDR3 for antibody 1049 (IGHV3-33)
ARDRGFDY

SEQ ID NO: 2099 - protein, 9 aa, Homo sapiens
  Light chain CDR3 for antibody 1050 (IGKV5-2)
LQHDNFPWT

SEQ ID NO: 2100 - protein, 13 aa, Homo sapiens
  Heavy chain CDR3 for antibody 1050 (IGHV4-39)
ARRDVLAPAAFDY

SEQ ID NO: 2101 - protein, 9 aa, Homo sapiens
  Light chain CDR3 for antibody 1051 (IGKV1-6)
LQDYNYPYT

SEQ ID NO: 2102 - protein, 11 aa, Homo sapiens
  Heavy chain CDR3 for antibody 1051 (IGHV3-33)
ARDRATATVDY

SEQ ID NO: 2103 - protein, 9 aa, Homo sapiens
  Light chain CDR3 for antibody 1052 (IGKV1-17)
LQHNSYPYT

SEQ ID NO: 2104 - protein, 18 aa, Homo sapiens
  Heavy chain CDR3 for antibody 1052 (IGHV3-33)
ARERDYYGSGSYPDAFDI

SEQ ID NO: 2105 - protein, 9 aa, Homo sapiens
  Light chain CDR3 for antibody 1053 (IGKV1-9)
QQYNSYPLT

SEQ ID NO: 2106 - protein, 18 aa, Homo sapiens
  Heavy chain CDR3 for antibody 1053 (IGHV4-59)
ARERGNWNDVDYYYGMDV

SEQ ID NO: 2107 - protein, 9 aa, Homo sapiens
  Light chain CDR3 for antibody 1054 (IGKV1-17)
LQHNSYPYT

SEQ ID NO: 2108 - protein, 14 aa, Homo sapiens
  Heavy chain CDR3 for antibody 1054 (IGHV3-33)
VRDQGSMVRGGGDY

SEQ ID NO: 2109 - protein, 9 aa, Homo sapiens
  Light chain CDR3 for antibody 1055 (IGKV5-2)
LQHDNFPYT

SEQ ID NO: 2110 - protein, 11 aa, Homo sapiens
  Heavy chain CDR3 for antibody 1055 (IGHV3-33)
ARDRVLTPFDY

SEQ ID NO: 2111 - protein, 9 aa, Homo sapiens
  Light chain CDR3 for antibody 1056 (IGKV1D-16)
QQYNSYPLT

SEQ ID NO: 2112 - protein, 17 aa, Homo sapiens
  Heavy chain CDR3 for antibody 1056 (IGHV3-33)
ARVYYDILTGYSPAFDI

SEQ ID NO: 2113 - protein, 9 aa, Homo sapiens
  Light chain CDR3 for antibody 1057 (IGKV6-21)
HQSSSLPYT

SEQ ID NO: 2114 - protein, 10 aa, Homo sapiens
  Heavy chain CDR3 for antibody 1057 (IGHV3-23)
AKEQWLVLDY

SEQ ID NO: 2115 - protein, 9 aa, Homo sapiens
  Light chain CDR3 for antibody 1058 (IGKV1-17)
LQHNSYPWT

SEQ ID NO: 2116 - protein, 13 aa, Homo sapiens
  Heavy chain CDR3 for antibody 1058 (IGHV1-18)
ARKWEWDLLNFDY

SEQ ID NO: 2117 - protein, 9 aa, Homo sapiens
  Light chain CDR3 for antibody 1059 (IGKV3-20)
QQYGSSPYT

SEQ ID NO: 2118 - protein, 12 aa, Homo sapiens
  Heavy chain CDR3 for antibody 1059 (IGHV3-33)
AREKGGSYSFDY

SEQ ID NO: 2119 - protein, 8 aa, Homo sapiens
  Light chain CDR3 for antibody 1060 (IGKV1D-13)
QQFNNYHT

SEQ ID NO: 2120 - protein, 15 aa, Homo sapiens
  Heavy chain CDR3 for antibody 1060 (IGHV3-23)
AKDGSYSYYYYGMDV

SEQ ID NO: 2121 - protein, 9 aa, Homo sapiens
  Light chain CDR3 for antibody 1061 (IGKV5-2)
LQHDNFPYT

SEQ ID NO: 2122 - protein, 13 aa, Homo sapiens
  Heavy chain CDR3 for antibody 1061 (IGHV3-33)
ARRATLVRGVFDP

SEQ ID NO: 2123 - protein, 9 aa, Homo sapiens
  Light chain CDR3 for antibody 1062 (IGKV1-16)
QQYNSYPYT

SEQ ID NO: 2124 - protein, 17 aa, Homo sapiens
  Heavy chain CDR3 for antibody 1062 (IGHV1-24)
ATEGYDILPGYYNVLDY

SEQ ID NO: 2125 - protein, 9 aa, Homo sapiens
  Light chain CDR3 for antibody 1063 (IGKV1-17)
LQHNSYPYT

SEQ ID NO: 2126 - protein, 14 aa, Homo sapiens
  Heavy chain CDR3 for antibody 1063 (IGHV3-33)
AREDYYGPLNWFDP

SEQ ID NO: 2127 - protein, 9 aa, Homo sapiens
  Light chain CDR3 for antibody 1064 (IGKV1D-16)
QQYNSYPYT

SEQ ID NO: 2128 - protein, 18 aa, Homo sapiens
  Heavy chain CDR3 for antibody 1064 (IGHV3-33)
ARDYDSLTTYPEDYGMDV

SEQ ID NO: 2129 - protein, 9 aa, Homo sapiens
  Light chain CDR3 for antibody 1065 (IGKV6-21)
HQSSSLPLT

SEQ ID NO: 2130 - protein, 13 aa, Homo sapiens
  Heavy chain CDR3 for antibody 1065 (IGHV3-33)
ARDDDYGDYPFDY

SEQ ID NO: 2131 - protein, 9 aa, Homo sapiens
  Light chain CDR3 for antibody 1066 (IGKV5-2)
LQHDNFPYT

SEQ ID NO: 2132 - protein, 12 aa, Homo sapiens
  Heavy chain CDR3 for antibody 1066 (IGHV3-33)
ARDLVGATPFDY

SEQ ID NO: 2133 - protein, 9 aa, Homo sapiens
  Light chain CDR3 for antibody 1067 (IGKV2-30)
MQGTHWPLT

SEQ ID NO: 2134 - protein, 11 aa, Homo sapiens
  Heavy chain CDR3 for antibody 1067 (IGHV3-33)
ARDRSSGPFDY

SEQ ID NO: 2135 - protein, 9 aa, Homo sapiens
  Light chain CDR3 for antibody 1068 (IGKV1-6)
LQDYNYPYT

SEQ ID NO: 2136 - protein, 9 aa, Homo sapiens
  Heavy chain CDR3 for antibody 1068 (IGHV3-33)
ARGSGWSDY

SEQ ID NO: 2137 - protein, 9 aa, Homo sapiens
  Light chain CDR3 for antibody 1069 (IGKV1-6)
LQDYNYPYT

SEQ ID NO: 2138 - protein, 14 aa, Homo sapiens
  Heavy chain CDR3 for antibody 1069 (IGHV1-18)
ARCFGSGSYGWFDP

SEQ ID NO: 2139 - protein, 9 aa, Homo sapiens
  Light chain CDR3 for antibody 1070 (IGKV1-6)
LQDYNYPYT

SEQ ID NO: 2140 - protein, 11 aa, Homo sapiens
  Heavy chain CDR3 for antibody 1070 (IGHV3-23)
ARDPGSITGDY

SEQ ID NO: 2141 - protein, 9 aa, Homo sapiens
  Light chain CDR3 for antibody 1071 (IGKV5-2)
LQHDNFPWT

SEQ ID NO: 2142 - protein, 23 aa, Homo sapiens
  Heavy chain CDR3 for antibody 1071 (IGHV4-59)
ARERTYSDILPGYYEDYYYGMDV

SEQ ID NO: 2143 - protein, 9 aa, Homo sapiens
  Light chain CDR3 for antibody 1072 (IGKV1-17)
LQHNSYPYT

SEQ ID NO: 2144 - protein, 19 aa, Homo sapiens
  Heavy chain CDR3 for antibody 1072 (IGHV3-33)
ARDSGYSGYDYYYYYGMDV

SEQ ID NO: 2145 - protein, 9 aa, Homo sapiens
  Light chain CDR3 for antibody 1073 (IGKV3D-7)
QQDYNLPLT

SEQ ID NO: 2146 - protein, 11 aa, Homo sapiens
  Heavy chain CDR3 for antibody 1073 (IGHV4-59)
AREMGHDTFDI

SEQ ID NO: 2147 - protein, 9 aa, Homo sapiens
  Light chain CDR3 for antibody 1074 (IGKV1D-16)
QQYNSYPLT

SEQ ID NO: 2148 - protein, 13 aa, Homo sapiens
  Heavy chain CDR3 for antibody 1074 (IGHV3-33)
ARTDYYFYYGLDV

SEQ ID NO: 2149 - protein, 9 aa, Homo sapiens
  Light chain CDR3 for antibody 1075 (IGKV1-6)
LQDYNYPYT

SEQ ID NO: 2150 - protein, 23 aa, Homo sapiens
  Heavy chain CDR3 for antibody 1075 (IGHV3-11)
ARDEGVTMVRGVISYYYYYGMDV

SEQ ID NO: 2151 - protein, 9 aa, Homo sapiens
  Light chain CDR3 for antibody 1076 (IGKV1D-16)
QQYNSYPLT

SEQ ID NO: 2152 - protein, 11 aa, Homo sapiens
  Heavy chain CDR3 for antibody 1076 (IGHV3-33)
ARARYTTGLDY

SEQ ID NO: 2153 - protein, 9 aa, Homo sapiens
  Light chain CDR3 for antibody 1077 (IGKV1-27)
QKYNSAPYT

SEQ ID NO: 2154 - protein, 14 aa, Homo sapiens
  Heavy chain CDR3 for antibody 1077 (IGHV3-33)
ARDWNDVYYYGMDV

SEQ ID NO: 2155 - protein, 9 aa, Homo sapiens
  Light chain CDR3 for antibody 1078 (IGKV1-6)
LQDYHYPWT

SEQ ID NO: 2156 - protein, 23 aa, Homo sapiens
  Heavy chain CDR3 for antibody 1078 (IGHV3-11)
ARDRGITMVRGVITYYYFYGMDV

SEQ ID NO: 2157 - protein, 9 aa, Homo sapiens
  Light chain CDR3 for antibody 1079 (IGKV1-17)
LQHNSYPYT

SEQ ID NO: 2158 - protein, 17 aa, Homo sapiens
  Heavy chain CDR3 for antibody 1079 (IGHV3-33)
ARVRGVIEGYYYYGMDV

SEQ ID NO: 2159 - protein, 9 aa, Homo sapiens
  Light chain CDR3 for antibody 1080 (IGKV1-17)
LQHNSYPYT

SEQ ID NO: 2160 - protein, 18 aa, Homo sapiens
  Heavy chain CDR3 for antibody 1080 (IGHV3-33)
VRDRERYGSGSYPDAFDI

SEQ ID NO: 2161 - protein, 9 aa, Homo sapiens
  Light chain CDR3 for antibody 1081 (IGKV1-12)
QQANSFPFT

SEQ ID NO: 2162 - protein, 15 aa, Homo sapiens
  Heavy chain CDR3 for antibody 1081 (IGHV3-33)
ATERAYGSGSSYCDY

SEQ ID NO: 2163 - protein, 9 aa, Homo sapiens
  Light chain CDR3 for antibody 1082 (IGKV1D-13)
QQFNNYPHT

SEQ ID NO: 2164 - protein, 13 aa, Homo sapiens
  Heavy chain CDR3 for antibody 1082 (IGHV3-11)
ARDGGAAAGTWDS

SEQ ID NO: 2165 - protein, 9 aa, Homo sapiens
  Light chain CDR3 for antibody 1083 (IGKV1-6)
LQDYNYPWT

SEQ ID NO: 2166 - protein, 13 aa, Homo sapiens
  Heavy chain CDR3 for antibody 1083 (IGHV3-33)
ARAFIMVRGVIDY

SEQ ID NO: 2167 - protein, 9 aa, Homo sapiens
  Light chain CDR3 for antibody 1084 (IGKV3-20)
QQYGSSPYT

SEQ ID NO: 2168 - protein, 12 aa, Homo sapiens
  Heavy chain CDR3 for antibody 1084 (IGHV4-59)
ARDRSGWAYFDY

SEQ ID NO: 2169 - protein, 9 aa, Homo sapiens
  Light chain CDR3 for antibody 1085 (IGKV1-9)
QQLNSYPLT

SEQ ID NO: 2170 - protein, 12 aa, Homo sapiens
  Heavy chain CDR3 for antibody 1085 (IGHV4-39)
ARQMVREGWFDP

SEQ ID NO: 2171 - protein, 9 aa, Homo sapiens
  Light chain CDR3 for antibody 1086 (IGKV6-21)
HQSSSLPYT

SEQ ID NO: 2172 - protein, 11 aa, Homo sapiens
  Heavy chain CDR3 for antibody 1086 (IGHV3-33)
ARARYTTGLDY

SEQ ID NO: 2173 - protein, 9 aa, Homo sapiens
  Light chain CDR3 for antibody 1087 (IGKV3-20)
QQYGSSPYT

SEQ ID NO: 2174 - protein, 17 aa, Homo sapiens
  Heavy chain CDR3 for antibody 1087 (IGHV3-33)
ARVYYDILTGYSPAFDI

SEQ ID NO: 2175 - protein, 9 aa, Homo sapiens
  Light chain CDR3 for antibody 1088 (IGKV1D-16)
QQYNSYPYT

SEQ ID NO: 2176 - protein, 14 aa, Homo sapiens
  Heavy chain CDR3 for antibody 1088 (IGHV3-33)
ARDAYDILTGYYDY

SEQ ID NO: 2177 - protein, 9 aa, Homo sapiens
  Light chain CDR3 for antibody 1089 (IGKV5-2)
LQHDNFPYT

SEQ ID NO: 2178 - protein, 15 aa, Homo sapiens
  Heavy chain CDR3 for antibody 1089 (IGHV3-33)
ARDHLTGYYYYGMDV

SEQ ID NO: 2179 - protein, 10 aa, Homo sapiens
  Light chain CDR3 for antibody 1090 (IGKV3-15)
QQYNKWPPLT

SEQ ID NO: 2180 - protein, 18 aa, Homo sapiens
  Heavy chain CDR3 for antibody 1090 (IGHV1-8)
ARGRYNSGWNYYYFGMDV

SEQ ID NO: 2181 - protein, 9 aa, Homo sapiens
  Light chain CDR3 for antibody 1091 (IGKV1-17)
LQHNSYPYT

SEQ ID NO: 2182 - protein, 18 aa, Homo sapiens
  Heavy chain CDR3 for antibody 1091 (IGHV3-33)
ARGGYSSGWDYYYYGMDV

SEQ ID NO: 2183 - protein, 9 aa, Homo sapiens
  Light chain CDR3 for antibody 1092 (IGKV1-17)
LQHNSYPYT

SEQ ID NO: 2184 - protein, 19 aa, Homo sapiens
  Heavy chain CDR3 for antibody 1092 (IGHV3-30)
ARRFSGYSGYDHYYYGMDV

SEQ ID NO: 2185 - protein, 9 aa, Homo sapiens
  Light chain CDR3 for antibody 1093 (IGKV1-39)
QQSYSTPLT

SEQ ID NO: 2186 - protein, 12 aa, Homo sapiens
  Heavy chain CDR3 for antibody 1093 (IGHV1-46)
ARGLTGDHAVDI

SEQ ID NO: 2187 - protein, 9 aa, Homo sapiens
  Light chain CDR3 for antibody 1094 (IGKV6-21)
LQSSSFPYT

SEQ ID NO: 2188 - protein, 11 aa, Homo sapiens
  Heavy chain CDR3 for antibody 1094 (IGHV3-33)
ASWDILTGSGY

SEQ ID NO: 2189 - protein, 9 aa, Homo sapiens
  Light chain CDR3 for antibody 1095 (IGKV3-20)
QQYGSSPRT

SEQ ID NO: 2190 - protein, 20 aa, Homo sapiens
  Heavy chain CDR3 for antibody 1095 (IGHV1-f)
ATGLITFVRGVILTYRSFDY

SEQ ID NO: 2191 - protein, 9 aa, Homo sapiens
  Light chain CDR3 for antibody 1096 (IGKV1D-16)
QQYNSYPYT

SEQ ID NO: 2192 - protein, 16 aa, Homo sapiens
  Heavy chain CDR3 for antibody 1096 (IGHV3-20)
AREGYSSSWFDRNFDY

SEQ ID NO: 2193 - protein, 9 aa, Homo sapiens
  Light chain CDR3 for antibody 1097 (IGKV3-20)
QQYGSSPLT

SEQ ID NO: 2194 - protein, 16 aa, Homo sapiens
  Heavy chain CDR3 for antibody 1097 (IGHV1-24)
TTEGGTVDYYYYGMDV

SEQ ID NO: 2195 - protein, 9 aa, Homo sapiens
  Light chain CDR3 for antibody 1098 (IGKV1D-16)
QQYNSYPLT

SEQ ID NO: 2196 - protein, 21 aa, Homo sapiens
  Heavy chain CDR3 for antibody 1098 (IGHV3-33)
ARDEYYEIVTGYGYYHYGMDV

SEQ ID NO: 2197 - protein, 9 aa, Homo sapiens
  Light chain CDR3 for antibody 1099 (IGKV6-21)
HQSSSLPHT

SEQ ID NO: 2198 - protein, 12 aa, Homo sapiens
  Heavy chain CDR3 for antibody 1099 (IGHV3-33)
ARDIVGTSYFDY

SEQ ID NO: 2199 - protein, 9 aa, Homo sapiens
  Light chain CDR3 for antibody 1100 (IGKV1-17)
LQHNSYPYT

SEQ ID NO: 2200 - protein, 12 aa, Homo sapiens
  Heavy chain CDR3 for antibody 1100 (IGHV3-33)
ARDGYSSRNFDY

SEQ ID NO: 2201 - protein, 9 aa, Homo sapiens
  Light chain CDR3 for antibody 1101 (IGKV1-37)
QRTYNAPFT

SEQ ID NO: 2202 - protein, 17 aa, Homo sapiens
  Heavy chain CDR3 for antibody 1101 (IGHV3-33)
ARAYYDILTGYYIHCDY

SEQ ID NO: 2203 - protein, 9 aa, Homo sapiens
  Light chain CDR3 for antibody 1102 (IGKV6-21)
HQSDSLPHT

SEQ ID NO: 2204 - protein, 18 aa, Homo sapiens
  Heavy chain CDR3 for antibody 1102 (IGHV4-39)
ARYITMVRGAIITGPFDY

SEQ ID NO: 2205 - protein, 9 aa, Homo sapiens
  Light chain CDR3 for antibody 1103 (IGKV1-6)
LQDYNYPYT

SEQ ID NO: 2206 - protein, 13 aa, Homo sapiens
  Heavy chain CDR3 for antibody 1103 (IGHV1-18)
ARSITMVRGVIGY

SEQ ID NO: 2207 - protein, 9 aa, Homo sapiens
  Light chain CDR3 for antibody 1104 (IGKV3-20)
QQYGSSPYT

SEQ ID NO: 2208 - protein, 11 aa, Homo sapiens
  Heavy chain CDR3 for antibody 1104 (IGHV4-59)
ARSIRYSVFDY

SEQ ID NO: 2209 - protein, 9 aa, Homo sapiens
  Light chain CDR3 for antibody 1105 (IGKV3-20)
QQYGSSPYT

SEQ ID NO: 2210 - protein, 15 aa, Homo sapiens
  Heavy chain CDR3 for antibody 1105 (IGHV3-33)
ARRICSGGSCSLFDY

SEQ ID NO: 2211 - protein, 9 aa, Homo sapiens
  Light chain CDR3 for antibody 1106 (IGKV5-2)
LQHDNFPYT

SEQ ID NO: 2212 - protein, 17 aa, Homo sapiens
  Heavy chain CDR3 for antibody 1106 (IGHV3-33)
ARESLKLGIYYYYGMDV

SEQ ID NO: 2213 - protein, 9 aa, Homo sapiens
  Light chain CDR3 for antibody 1107 (IGKV1D-16)
QQYNSYPYT

SEQ ID NO: 2214 - protein, 13 aa, Homo sapiens
  Heavy chain CDR3 for antibody 1107 (IGHV4-39)
ARHEVMIRGVFDY

SEQ ID NO: 2215 - protein, 9 aa, Homo sapiens
  Light chain CDR3 for antibody 1108 (IGKV5-2)
LQHDNFPWT

SEQ ID NO: 2216 - protein, 7 aa, Homo sapiens
  Heavy chain CDR3 for antibody 1108 (IGHV1-46)
AREGGDY

SEQ ID NO: 2217 - protein, 9 aa, Homo sapiens
  Light chain CDR3 for antibody 1109 (IGKV5-2)
LQHDNFPYT

SEQ ID NO: 2218 - protein, 15 aa, Homo sapiens
  Heavy chain CDR3 for antibody 1109 (IGHV3-33)
ARDRGWKAPGYGMDV

SEQ ID NO: 2219 - protein, 9 aa, Homo sapiens
  Light chain CDR3 for antibody 1110 (IGKV5-2)
LQHDNFPYT

SEQ ID NO: 2220 - protein, 18 aa, Homo sapiens
  Heavy chain CDR3 for antibody 1110 (IGHV3-33)
ARGLLWFGVSYYYYGMDV

SEQ ID NO: 2221 - protein, 9 aa, Homo sapiens
  Light chain CDR3 for antibody 1111 (IGKV1-17)
LQHNSYPYT

SEQ ID NO: 2222 - protein, 16 aa, Homo sapiens
  Heavy chain CDR3 for antibody 1111 (IGHV3-33)
ARDKNTDYDILTGFDY

SEQ ID NO: 2223 - protein, 9 aa, Homo sapiens
  Light chain CDR3 for antibody 1112 (IGKV3-20)
QQYGSSPYT

SEQ ID NO: 2224 - protein, 10 aa, Homo sapiens
  Heavy chain CDR3 for antibody 1112 (IGHV3-33)
ARDVVVYFDY

SEQ ID NO: 2225 - protein, 9 aa, Homo sapiens
  Light chain CDR3 for antibody 1113 (IGKV1D-16)
QQYNSYPLT

SEQ ID NO: 2226 - protein, 15 aa, Homo sapiens
  Heavy chain CDR3 for antibody 1113 (IGHV3-33)
VRGYYYGSGSYPLNY

SEQ ID NO: 2227 - protein, 9 aa, Homo sapiens
  Light chain CDR3 for antibody 1114 (IGKV6-21)
HQSSSLPYT

SEQ ID NO: 2228 - protein, 18 aa, Homo sapiens
  Heavy chain CDR3 for antibody 1114 (IGHV3-23)
AKEGNYYGSGSYWGYFDP

SEQ ID NO: 2229 - protein, 9 aa, Homo sapiens
  Light chain CDR3 for antibody 1115 (IGKV5-2)
LQHDNFPYT

SEQ ID NO: 2230 - protein, 10 aa, Homo sapiens
  Heavy chain CDR3 for antibody 1115 (IGHV3-23)
AKEQWLVLDY

SEQ ID NO: 2231 - protein, 9 aa, Homo sapiens
  Light chain CDR3 for antibody 1116 (IGKV6-21)
HQSSSLPYT

SEQ ID NO: 2232 - protein, 13 aa, Homo sapiens
  Heavy chain CDR3 for antibody 1116 (IGHV3-23)
ASTGDSYYYGMDV

SEQ ID NO: 2233 - protein, 9 aa, Homo sapiens
  Light chain CDR3 for antibody 1117 (IGKV1-6)
LQDYNYPYT

SEQ ID NO: 2234 - protein, 15 aa, Homo sapiens
  Heavy chain CDR3 for antibody 1117 (IGHV3-74)
SRGSGSHYFYYGMDV

SEQ ID NO: 2235 - protein, 9 aa, Homo sapiens
  Light chain CDR3 for antibody 1118 (IGKV5-2)
LQHDNFPWT

SEQ ID NO: 2236 - protein, 16 aa, Homo sapiens
  Heavy chain CDR3 for antibody 1118 (IGHV1-24)
ATEDSSSTYYYYGLDV

SEQ ID NO: 2237 - protein, 9 aa, Homo sapiens
  Light chain CDR3 for antibody 1119 (IGKV6-21)
HQSSSLPHT

SEQ ID NO: 2238 - protein, 9 aa, Homo sapiens
  Heavy chain CDR3 for antibody 1119 (IGHV3-30)
ARELGYFDY

SEQ ID NO: 2239 - protein, 9 aa, Homo sapiens
  Light chain CDR3 for antibody 1120 (IGKV1-17)
LQHNSYPYT

SEQ ID NO: 2240 - protein, 13 aa, Homo sapiens
  Heavy chain CDR3 for antibody 1120 (IGHV3-33)
ARGDNWNDGGFDY

SEQ ID NO: 2241 - protein, 9 aa, Homo sapiens
  Light chain CDR3 for antibody 1121 (IGKV5-2)
LQHDNFPYT

SEQ ID NO: 2242 - protein, 14 aa, Homo sapiens
  Heavy chain CDR3 for antibody 1121 (IGHV3-33)
ARTTAAAGPRDFQH

SEQ ID NO: 2243 - protein, 9 aa, Homo sapiens
  Light chain CDR3 for antibody 1122 (IGKV6-21)
HQSSSLPYT

SEQ ID NO: 2244 - protein, 13 aa, Homo sapiens
  Heavy chain CDR3 for antibody 1122 (IGHV3-33)
ARRATLVRGVFDP

SEQ ID NO: 2245 - protein, 9 aa, Homo sapiens
  Light chain CDR3 for antibody 1123 (IGKV6-21)
HQSSSLPYT

SEQ ID NO: 2246 - protein, 8 aa, Homo sapiens
  Heavy chain CDR3 for antibody 1123 (IGHV3-23)
AETFLFDY

SEQ ID NO: 2247 - protein, 9 aa, Homo sapiens
  Light chain CDR3 for antibody 1124 (IGKV6-21)
HQSSSLPYT

SEQ ID NO: 2248 - protein, 13 aa, Homo sapiens
  Heavy chain CDR3 for antibody 1124 (IGHV3-11)
ARDEGYRGYVLDT

SEQ ID NO: 2249 - protein, 9 aa, Homo sapiens
  Light chain CDR3 for antibody 1125 (IGKV3-20)
QQYGSSPYT

SEQ ID NO: 2250 - protein, 14 aa, Homo sapiens
  Heavy chain CDR3 for antibody 1125 (IGHV3-33)
ARQYSYGYPYYFDY

SEQ ID NO: 2251 - protein, 9 aa, Homo sapiens
  Light chain CDR3 for antibody 1126 (IGKV3-20)
QLSGSSLLT

SEQ ID NO: 2252 - protein, 12 aa, Homo sapiens
  Heavy chain CDR3 for antibody 1126 (IGHV4-39)
ALDEWHPSWYKY

SEQ ID NO: 2253 - protein, 9 aa, Homo sapiens
  Light chain CDR3 for antibody 1127 (IGKV6-21)
HQSGSFPRT

SEQ ID NO: 2254 - protein, 12 aa, Homo sapiens
  Heavy chain CDR3 for antibody 1127 (IGHV3-11)
VRVLLWFGESDY

SEQ ID NO: 2255 - protein, 9 aa, Homo sapiens
  Light chain CDR3 for antibody 1128 (IGKV6-21)
HQSSSLPYT

SEQ ID NO: 2256 - protein, 18 aa, Homo sapiens
  Heavy chain CDR3 for antibody 1128 (IGHV3-33)
ARDGYSGYDYYYYYGMDV

SEQ ID NO: 2257 - protein, 9 aa, Homo sapiens
  Light chain CDR3 for antibody 1129 (IGKV6-21)
HQSSSLPYT

SEQ ID NO: 2258 - protein, 13 aa, Homo sapiens
  Heavy chain CDR3 for antibody 1129 (IGHV3-33)
ARRYRSGWYPFDY

SEQ ID NO: 2259 - protein, 9 aa, Homo sapiens
  Light chain CDR3 for antibody 1130 (IGKV1D-16)
QQYNSYPYT

SEQ ID NO: 2260 - protein, 18 aa, Homo sapiens
  Heavy chain CDR3 for antibody 1130 (IGHV3-33)
ARDQYSGYDFYYYYGMDV

SEQ ID NO: 2261 - protein, 9 aa, Homo sapiens
  Light chain CDR3 for antibody 1131 (IGKV1-16)
QQYNSYPIT

SEQ ID NO: 2262 - protein, 12 aa, Homo sapiens
  Heavy chain CDR3 for antibody 1131 (IGHV3-33)
ARGGFDWGSIDY

SEQ ID NO: 2263 - protein, 9 aa, Homo sapiens
  Light chain CDR3 for antibody 1132 (IGKV3-20)
QQYGSSPYT

SEQ ID NO: 2264 - protein, 14 aa, Homo sapiens
  Heavy chain CDR3 for antibody 1132 (IGHV3-33)
ARRGSPLRPSHLDV

SEQ ID NO: 2265 - protein, 9 aa, Homo sapiens
  Light chain CDR3 for antibody 1133 (IGKV1D-16)
QQYNSYPLT

SEQ ID NO: 2266 - protein, 14 aa, Homo sapiens
  Heavy chain CDR3 for antibody 1133 (IGHV3-33)
ARRGSPLRPSHLDV

SEQ ID NO: 2267 - protein, 9 aa, Homo sapiens
  Light chain CDR3 for antibody 1134 (IGKV5-2)
LQHDNFPYT

SEQ ID NO: 2268 - protein, 8 aa, Homo sapiens
  Heavy chain CDR3 for antibody 1134 (IGHV3-23)
AETFLFDY

SEQ ID NO: 2269 - protein, 9 aa, Homo sapiens
  Light chain CDR3 for antibody 1135 (IGKV1-17)
LQHNSYPYT

SEQ ID NO: 2270 - protein, 23 aa, Homo sapiens
  Heavy chain CDR3 for antibody 1135 (IGHV3-11)
ARDEGVTMVRGVISYYYYYGMDV

SEQ ID NO: 2271 - protein, 9 aa, Homo sapiens
  Light chain CDR3 for antibody 1136 (IGKV6-21)
HQSSSLPYT

SEQ ID NO: 2272 - protein, 20 aa, Homo sapiens
  Heavy chain CDR3 for antibody 1136 (IGHV3-11)
ARGGATLIRGLIDYYYGMDV

SEQ ID NO: 2273 - protein, 9 aa, Homo sapiens
  Light chain CDR3 for antibody 1137 (IGKV1-39)
QQSYSTPWT

SEQ ID NO: 2274 - protein, 19 aa, Homo sapiens
  Heavy chain CDR3 for antibody 1137 (IGHV3-33)
ARGSDYDILTGYSSDAFDI

SEQ ID NO: 2275 - protein, 9 aa, Homo sapiens
  Light chain CDR3 for antibody 1138 (IGKV1-9)
QQLTSFPRT

SEQ ID NO: 2276 - protein, 10 aa, Homo sapiens
  Heavy chain CDR3 for antibody 1138 (IGHV3-33)
ARDLRADFDY

SEQ ID NO: 2277 - protein, 9 aa, Homo sapiens
  Light chain CDR3 for antibody 1139 (IGKV1-9)
QQLNSYPLT

SEQ ID NO: 2278 - protein, 17 aa, Homo sapiens
  Heavy chain CDR3 for antibody 1139 (IGHV4-59)
ARRITMVREIIITAFDY

SEQ ID NO: 2279 - protein, 9 aa, Homo sapiens
  Light chain CDR3 for antibody 1140 (IGKV1-17)
LQHNSYPYT

SEQ ID NO: 2280 - protein, 8 aa, Homo sapiens
  Heavy chain CDR3 for antibody 1140 (IGHV3-33)
ARDDPPRY

SEQ ID NO: 2281 - protein, 9 aa, Homo sapiens
  Light chain CDR3 for antibody 1141 (IGKV6-21)
HQSSSLPYT

SEQ ID NO: 2282 - protein, 12 aa, Homo sapiens
  Heavy chain CDR3 for antibody 1141 (IGHV3-33)
ARDRAYRGSLDY

SEQ ID NO: 2283 - protein, 9 aa, Homo sapiens
  Light chain CDR3 for antibody 1142 (IGKV5-2)
LQHDNFPYT

SEQ ID NO: 2284 - protein, 11 aa, Homo sapiens
  Heavy chain CDR3 for antibody 1142 (IGHV3-33)
AREAANWGFDY

SEQ ID NO: 2285 - protein, 9 aa, Homo sapiens
  Light chain CDR3 for antibody 1143 (IGKV6-21)
HQSSSLPYT

SEQ ID NO: 2286 - protein, 7 aa, Homo sapiens
  Heavy chain CDR3 for antibody 1143 (IGHV1-46)
AREGGDY

SEQ ID NO: 2287 - protein, 9 aa, Homo sapiens
  Light chain CDR3 for antibody 1144 (IGKV1-17)
LQHNSYPYT

SEQ ID NO: 2288 - protein, 15 aa, Homo sapiens
  Heavy chain CDR3 for antibody 1144 (IGHV3-33)
AREGLRYFHYYGMDV

SEQ ID NO: 2289 - protein, 9 aa, Homo sapiens
  Light chain CDR3 for antibody 1145 (IGKV1-17)
LQHNSYPYT

SEQ ID NO: 2290 - protein, 14 aa, Homo sapiens
  Heavy chain CDR3 for antibody 1145 (IGHV3-33)
VRDAMGATTAWFDP

SEQ ID NO: 2291 - protein, 9 aa, Homo sapiens
  Light chain CDR3 for antibody 1146 (IGKV3-20)
QQYGSSPYT

SEQ ID NO: 2292 - protein, 21 aa, Homo sapiens
  Heavy chain CDR3 for antibody 1146 (IGHV3-33)
ARDGGITMGRGVYYYYYGMDV

SEQ ID NO: 2293 - protein, 9 aa, Homo sapiens
  Light chain CDR3 for antibody 1147 (IGKV5-2)
LQHDNFPYT

SEQ ID NO: 2294 - protein, 12 aa, Homo sapiens
  Heavy chain CDR3 for antibody 1147 (IGHV3-33)
ARDRAYRGSLDY

SEQ ID NO: 2295 - protein, 9 aa, Homo sapiens
  Light chain CDR3 for antibody 1148 (IGKV3-20)
QQYGSSPYT

SEQ ID NO: 2296 - protein, 13 aa, Homo sapiens
  Heavy chain CDR3 for antibody 1148 (IGHV3-33)
AKEDGDYHHYFDY

SEQ ID NO: 2297 - protein, 9 aa, Homo sapiens
  Light chain CDR3 for antibody 1149 (IGKV6-21)
HQSSSLPYT

SEQ ID NO: 2298 - protein, 12 aa, Homo sapiens
  Heavy chain CDR3 for antibody 1149 (IGHV3-64)
ARVNSGSPYFDY

SEQ ID NO: 2299 - protein, 9 aa, Homo sapiens
  Light chain CDR3 for antibody 1150 (IGKV1D-16)
QQYNSYPYT

SEQ ID NO: 2300 - protein, 14 aa, Homo sapiens
  Heavy chain CDR3 for antibody 1150 (IGHV1-18)
ARCFGSGSYGWFDP

SEQ ID NO: 2301 - protein, 9 aa, Homo sapiens
  Light chain CDR3 for antibody 1151 (IGKV5-2)
LQHDNFPWT

SEQ ID NO: 2302 - protein, 17 aa, Homo sapiens
  Heavy chain CDR3 for antibody 1151 (IGHV1-18)
ARERYYGSGIYKYAMDV

SEQ ID NO: 2303 - protein, 9 aa, Homo sapiens
  Light chain CDR3 for antibody 1152 (IGKV6-21)
HQSSSLPQT

SEQ ID NO: 2304 - protein, 19 aa, Homo sapiens
  Heavy chain CDR3 for antibody 1152 (IGHV3-33)
ARDKYYDILTGYPWNGMDV

SEQ ID NO: 2305 - protein, 9 aa, Homo sapiens
  Light chain CDR3 for antibody 1153 (IGKV1-6)
LQDYNYPYT

SEQ ID NO: 2306 - protein, 14 aa, Homo sapiens
  Heavy chain CDR3 for antibody 1153 (IGHV3-20)
ARDGGSTCYDWFDP

SEQ ID NO: 2307 - protein, 9 aa, Homo sapiens
  Light chain CDR3 for antibody 1154 (IGKV1-6)
LQDYSYPWT

SEQ ID NO: 2308 - protein, 18 aa, Homo sapiens
  Heavy chain CDR3 for antibody 1154 (IGHV3-23)
AREYYDFLTGYYKGAFDI

SEQ ID NO: 2309 - protein, 9 aa, Homo sapiens
  Light chain CDR3 for antibody 1155 (IGKV1D-16)
QQYNSYPYT

SEQ ID NO: 2310 - protein, 13 aa, Homo sapiens
  Heavy chain CDR3 for antibody 1155 (IGHV3-23)
AKDRGLRYYGMDV

SEQ ID NO: 2311 - protein, 9 aa, Homo sapiens
  Light chain CDR3 for antibody 1156 (IGKV1-6)
LQDYNYPRT

SEQ ID NO: 2312 - protein, 17 aa, Homo sapiens
  Heavy chain CDR3 for antibody 1156 (IGHV1-18)
ARERYYGSGSYKYNMDV

SEQ ID NO: 2313 - protein, 9 aa, Homo sapiens
  Light chain CDR3 for antibody 1157 (IGKV1D-13)
QQFNNYPYT

SEQ ID NO: 2314 - protein, 12 aa, Homo sapiens
  Heavy chain CDR3 for antibody 1157 (IGHV3-33)
TRGYSSKSYFDY

SEQ ID NO: 2315 - protein, 9 aa, Homo sapiens
  Light chain CDR3 for antibody 1158 (IGKV6-21)
HQSSSLPYT

SEQ ID NO: 2316 - protein, 11 aa, Homo sapiens
  Heavy chain CDR3 for antibody 1158 (IGHV3-33)
ARDKSSGWSDY

SEQ ID NO: 2317 - protein, 9 aa, Homo sapiens
  Light chain CDR3 for antibody 1159 (IGKV6-21)
HQSSSLPYT

SEQ ID NO: 2318 - protein, 12 aa, Homo sapiens
  Heavy chain CDR3 for antibody 1159 (IGHV3-33)
ARVDAAAPYFDY

SEQ ID NO: 2319 - protein, 9 aa, Homo sapiens
  Light chain CDR3 for antibody 1160 (IGKV1D-16)
QQYNSYPLT

SEQ ID NO: 2320 - protein, 15 aa, Homo sapiens
  Heavy chain CDR3 for antibody 1160 (IGHV3-33)
VCVLYDYGDYVGFDY

SEQ ID NO: 2321 - protein, 9 aa, Homo sapiens
  Light chain CDR3 for antibody 1161 (IGKV5-2)
LQHDNFPWT

SEQ ID NO: 2322 - protein, 9 aa, Homo sapiens
  Heavy chain CDR3 for antibody 1161 (IGHV4-59)
ARGGASFDY

SEQ ID NO: 2323 - protein, 9 aa, Homo sapiens
  Light chain CDR3 for antibody 1162 (IGKV3D-7)
QQDYNFPLT

SEQ ID NO: 2324 - protein, 12 aa, Homo sapiens
  Heavy chain CDR3 for antibody 1162 (IGHV4-61)
ARVVSSGWYFDY

SEQ ID NO: 2325 - protein, 9 aa, Homo sapiens
  Light chain CDR3 for antibody 1163 (IGKV2-30)
MQGTHWPLT

SEQ ID NO: 2326 - protein, 13 aa, Homo sapiens
  Heavy chain CDR3 for antibody 1163 (IGHV4-59)
ARDAGYSSSWFDY

SEQ ID NO: 2327 - protein, 9 aa, Homo sapiens
  Light chain CDR3 for antibody 1164 (IGKV1-9)
QQLNSYPLT

SEQ ID NO: 2328 - protein, 11 aa, Homo sapiens
  Heavy chain CDR3 for antibody 1164 (IGHV4-59)
AREMGHDIFDI

SEQ ID NO: 2329 - protein, 9 aa, Homo sapiens
  Light chain CDR3 for antibody 1165 (IGKV6-21)
HQSSSLPYT

SEQ ID NO: 2330 - protein, 12 aa, Homo sapiens
  Heavy chain CDR3 for antibody 1165 (IGHV3-23)
AKDGWFGESLDY

SEQ ID NO: 2331 - protein, 9 aa, Homo sapiens
  Light chain CDR3 for antibody 1166 (IGKV1D-13)
QQFNNYPYT

SEQ ID NO: 2332 - protein, 15 aa, Homo sapiens
  Heavy chain CDR3 for antibody 1166 (IGHV3-33)
ARDTGYSSSWNWFDP

SEQ ID NO: 2333 - protein, 9 aa, Homo sapiens
  Light chain CDR3 for antibody 1167 (IGKV6-21)
HQSSSLPYT

SEQ ID NO: 2334 - protein, 14 aa, Homo sapiens
  Heavy chain CDR3 for antibody 1167 (IGHV3-33)
ARQYSYGYPYYFDY

SEQ ID NO: 2335 - protein, 9 aa, Homo sapiens
  Light chain CDR3 for antibody 1168 (IGKV1D-13)
QQFNNYPRT

SEQ ID NO: 2336 - protein, 20 aa, Homo sapiens
  Heavy chain CDR3 for antibody 1168 (IGHV3-33)
ARDNDSSGYYDYYYYYGMDV

SEQ ID NO: 2337 - protein, 9 aa, Homo sapiens
  Light chain CDR3 for antibody 1169 (IGKV1-6)
LQDYNYPYT

SEQ ID NO: 2338 - protein, 13 aa, Homo sapiens
  Heavy chain CDR3 for antibody 1169 (IGHV3-33)
AREYFDWLLPLDY

SEQ ID NO: 2339 - protein, 9 aa, Homo sapiens
  Light chain CDR3 for antibody 1170 (IGKV1D-16)
QQYNSYPYT

SEQ ID NO: 2340 - protein, 14 aa, Homo sapiens
  Heavy chain CDR3 for antibody 1170 (IGHV3-20)
ARDGGSTCYDWFDP

SEQ ID NO: 2341 - protein, 11 aa, Homo sapiens
  Light chain CDR3 for antibody 1171 (IGKV3-11)
QQRSNWPPTWT

SEQ ID NO: 2342 - protein, 18 aa, Homo sapiens
  Heavy chain CDR3 for antibody 1171 (IGHV4-59)
AREGDYVWGSYRPNWFDP

SEQ ID NO: 2343 - protein, 9 aa, Homo sapiens
  Light chain CDR3 for antibody 1172 (IGKV5-2)
LQHDNFPYT

SEQ ID NO: 2344 - protein, 20 aa, Homo sapiens
  Heavy chain CDR3 for antibody 1172 (IGHV3-23)
AKDREMAATSHYYYYYGMDV

SEQ ID NO: 2345 - protein, 9 aa, Homo sapiens
  Light chain CDR3 for antibody 1173 (IGKV6-21)
HQSSSLPYT

SEQ ID NO: 2346 - protein, 12 aa, Homo sapiens
  Heavy chain CDR3 for antibody 1173 (IGHV4-61)
ARVYSSGWLFDY

SEQ ID NO: 2347 - protein, 9 aa, Homo sapiens
  Light chain CDR3 for antibody 1174 (IGKV1D-16)
QQYNSYPYT

SEQ ID NO: 2348 - protein, 12 aa, Homo sapiens
  Heavy chain CDR3 for antibody 1174 (IGHV4-61)
ARVDSSGWFFDY

SEQ ID NO: 2349 - protein, 9 aa, Homo sapiens
  Light chain CDR3 for antibody 1175 (IGKV1-39)
QQSYSTPYT

SEQ ID NO: 2350 - protein, 16 aa, Homo sapiens
  Heavy chain CDR3 for antibody 1175 (IGHV1-24)
ATDGYYYGSGSYLFDY

SEQ ID NO: 2351 - protein, 9 aa, Homo sapiens
  Light chain CDR3 for antibody 1176 (IGKV5-2)
LQHDNFPWT

SEQ ID NO: 2352 - protein, 17 aa, Homo sapiens
  Heavy chain CDR3 for antibody 1176 (IGHV4-39)
ARVLRYFDWLSHDAFDI

SEQ ID NO: 2353 - protein, 9 aa, Homo sapiens
  Light chain CDR3 for antibody 1177 (IGKV5-2)
LQHDNFPYT

SEQ ID NO: 2354 - protein, 11 aa, Homo sapiens
  Heavy chain CDR3 for antibody 1177 (IGHV3-33)
ARDTWDDYFDY

SEQ ID NO: 2355 - protein, 10 aa, Homo sapiens
  Light chain CDR3 for antibody 1178 (IGKV3-11)
QQRSNWPPWT

SEQ ID NO: 2356 - protein, 15 aa, Homo sapiens
  Heavy chain CDR3 for antibody 1178 (IGHV5-51)
AIRYYSSGRYDAFDI

SEQ ID NO: 2357 - protein, 9 aa, Homo sapiens
  Light chain CDR3 for antibody 1179 (IGKV5-2)
LQHDNFPYT

SEQ ID NO: 2358 - protein, 13 aa, Homo sapiens
  Heavy chain CDR3 for antibody 1179 (IGHV3-33)
VSTGDSYYYVMDV

SEQ ID NO: 2359 - protein, 9 aa, Homo sapiens
  Light chain CDR3 for antibody 1180 (IGKV6-21)
HQSSSLPYT

SEQ ID NO: 2360 - protein, 13 aa, Homo sapiens
  Heavy chain CDR3 for antibody 1180 (IGHV3-23)
ARAFFMVRGVIDF

SEQ ID NO: 2361 - protein, 9 aa, Homo sapiens
  Light chain CDR3 for antibody 1181 (IGKV5-2)
LQHDNFPYT

SEQ ID NO: 2362 - protein, 17 aa, Homo sapiens
  Heavy chain CDR3 for antibody 1181 (IGHV3-33)
ARVYYDILTGYSPAFDI

SEQ ID NO: 2363 - protein, 9 aa, Homo sapiens
  Light chain CDR3 for antibody 1182 (IGKV1-17)
LQHNSYPYT

SEQ ID NO: 2364 - protein, 11 aa, Homo sapiens
  Heavy chain CDR3 for antibody 1182 (IGHV4-59)
ARSLRYSFFDY

SEQ ID NO: 2365 - protein, 9 aa, Homo sapiens
  Light chain CDR3 for antibody 1183 (IGKV1-9)
QQLNSYPLT

SEQ ID NO: 2366 - protein, 9 aa, Homo sapiens
  Heavy chain CDR3 for antibody 1183 (IGHV3-13)
ARDRWYFDL

SEQ ID NO: 2367 - protein, 9 aa, Homo sapiens
  Light chain CDR3 for antibody 1184 (IGKV5-2)
LQHDNFPWT

SEQ ID NO: 2368 - protein, 9 aa, Homo sapiens
  Heavy chain CDR3 for antibody 1184 (IGHV1-8)
ARGRLDFDY

SEQ ID NO: 2369 - protein, 9 aa, Homo sapiens
  Light chain CDR3 for antibody 1185 (IGKV1-9)
QQLNSYPRT

SEQ ID NO: 2370 - protein, 16 aa, Homo sapiens
  Heavy chain CDR3 for antibody 1185 (IGHV3-33)
ARAPGGDYYFYFGMDV

SEQ ID NO: 2371 - protein, 9 aa, Homo sapiens
  Light chain CDR3 for antibody 1186 (IGKV5-2)
LQHDNFPYT

SEQ ID NO: 2372 - protein, 15 aa, Homo sapiens
  Heavy chain CDR3 for antibody 1186 (IGHV3-33)
ARDSRPEIIGPPFDY

SEQ ID NO: 2373 - protein, 9 aa, Homo sapiens
  Light chain CDR3 for antibody 1187 (IGKV1-17)
LQHNSYPYT

SEQ ID NO: 2374 - protein, 16 aa, Homo sapiens
  Heavy chain CDR3 for antibody 1187 (IGHV3-33)
ARDGSMVRRIHDAFDF

SEQ ID NO: 2375 - protein, 9 aa, Homo sapiens
  Light chain CDR3 for antibody 1188 (IGKV1-39)
QQSYSTPLT

SEQ ID NO: 2376 - protein, 17 aa, Homo sapiens
  Heavy chain CDR3 for antibody 1188 (IGHV1-18)
ARDEGYDILTGYPHFDY

SEQ ID NO: 2377 - protein, 9 aa, Homo sapiens
  Light chain CDR3 for antibody 1189 (IGKV6-21)
HQSSSLPFT

SEQ ID NO: 2378 - protein, 10 aa, Homo sapiens
  Heavy chain CDR3 for antibody 1189 (IGHV3-33)
ARDYGDYFDY

SEQ ID NO: 2379 - protein, 9 aa, Homo sapiens
  Light chain CDR3 for antibody 1190 (IGKV6-21)
HQSSSLPYT

SEQ ID NO: 2380 - protein, 11 aa, Homo sapiens
  Heavy chain CDR3 for antibody 1190 (IGHV3-33)
ARDTWDDYFDY

SEQ ID NO: 2381 - protein, 9 aa, Homo sapiens
  Light chain CDR3 for antibody 1191 (IGKV5-2)
LQHDNFPYT

SEQ ID NO: 2382 - protein, 18 aa, Homo sapiens
  Heavy chain CDR3 for antibody 1191 (IGHV3-33)
ARDGYSGYDYYYYYGMDV

SEQ ID NO: 2383 - protein, 9 aa, Homo sapiens
  Light chain CDR3 for antibody 1192 (IGKV1D-16)
QQYNSYPYT

SEQ ID NO: 2384 - protein, 15 aa, Homo sapiens
  Heavy chain CDR3 for antibody 1192 (IGHV4-39)
ARRDYDILTGYLFDY

SEQ ID NO: 2385 - protein, 9 aa, Homo sapiens
  Light chain CDR3 for antibody 1193 (IGKV5-2)
LQHDNFPYT

SEQ ID NO: 2386 - protein, 11 aa, Homo sapiens
  Heavy chain CDR3 for antibody 1193 (IGHV3-33)
ARARYTTGLDY

SEQ ID NO: 2387 - protein, 9 aa, Homo sapiens
  Light chain CDR3 for antibody 1194 (IGKV1-9)
QQVNSYPFT

SEQ ID NO: 2388 - protein, 14 aa, Homo sapiens
  Heavy chain CDR3 for antibody 1194 (IGHV3-23)
AKGGGVGAYNWFDP

SEQ ID NO: 2389 - protein, 9 aa, Homo sapiens
  Light chain CDR3 for antibody 1195 (IGKV3D-7)
QQDYNFALT

SEQ ID NO: 2390 - protein, 9 aa, Homo sapiens
  Heavy chain CDR3 for antibody 1195 (IGHV3-33)
ASHSSGEDY

SEQ ID NO: 2391 - protein, 9 aa, Homo sapiens
  Light chain CDR3 for antibody 1196 (IGKV3-20)
QQYGSSPYT

SEQ ID NO: 2392 - protein, 18 aa, Homo sapiens
  Heavy chain CDR3 for antibody 1196 (IGHV3-33)
ARGGYSSGWDYYYYGMDV

SEQ ID NO: 2393 - protein, 9 aa, Homo sapiens
  Light chain CDR3 for antibody 1197 (IGKV1-6)
LQDYNYPYT

SEQ ID NO: 2394 - protein, 18 aa, Homo sapiens
  Heavy chain CDR3 for antibody 1197 (IGHV6-1)
ARDQYSYGPYYYYYGMDV

SEQ ID NO: 2395 - protein, 9 aa, Homo sapiens
  Light chain CDR3 for antibody 1198 (IGKV1-17)
LQHNSYPWT

SEQ ID NO: 2396 - protein, 14 aa, Homo sapiens
  Heavy chain CDR3 for antibody 1198 (IGHV3-33)
ARDYYDSGSYYFDY

SEQ ID NO: 2397 - protein, 9 aa, Homo sapiens
  Light chain CDR3 for antibody 1199 (IGKV5-2)
LQHDNFPYT

SEQ ID NO: 2398 - protein, 21 aa, Homo sapiens
  Heavy chain CDR3 for antibody 1199 (IGHV3-23)
AKDIDYYGSGSYPLYYYGMDV

SEQ ID NO: 2399 - protein, 9 aa, Homo sapiens
  Light chain CDR3 for antibody 1200 (IGKV3-20)
QQYGSSPYT

SEQ ID NO: 2400 - protein, 16 aa, Homo sapiens
  Heavy chain CDR3 for antibody 1200 (IGHV3-33)
ARGYDMLTGDYYGMDV

SEQ ID NO: 2401 - protein, 9 aa, Homo sapiens
  Light chain CDR3 for antibody 1201 (IGKV1-39)
QQSYSTPLT

SEQ ID NO: 2402 - protein, 11 aa, Homo sapiens
  Heavy chain CDR3 for antibody 1201 (IGHV3-33)
ARDRVLTPFDY

SEQ ID NO: 2403 - protein, 9 aa, Homo sapiens
  Light chain CDR3 for antibody 1202 (IGKV1-17)
LQHNSYPYT

SEQ ID NO: 2404 - protein, 12 aa, Homo sapiens
  Heavy chain CDR3 for antibody 1202 (IGHV3-23)
AKEYDILTGYFH

SEQ ID NO: 2405 - protein, 9 aa, Homo sapiens
  Light chain CDR3 for antibody 1203 (IGKV1D-16)
QQYNSYPYT

SEQ ID NO: 2406 - protein, 14 aa, Homo sapiens
  Heavy chain CDR3 for antibody 1203 (IGHV1-46)
ARKGIVGGFDAFDV

SEQ ID NO: 2407 - protein, 9 aa, Homo sapiens
  Light chain CDR3 for antibody 1204 (IGKV1-39)
QQSYSTPLT

SEQ ID NO: 2408 - protein, 12 aa, Homo sapiens
  Heavy chain CDR3 for antibody 1204 (IGHV3-13)
VREAGIPDAFDI

SEQ ID NO: 2409 - protein, 9 aa, Homo sapiens
  Light chain CDR3 for antibody 1205 (IGKV5-2)
LQHDNFPWT

SEQ ID NO: 2410 - protein, 16 aa, Homo sapiens
  Heavy chain CDR3 for antibody 1205 (IGHV3-33)
ARAVYYGSGSSLIMDV

SEQ ID NO: 2411 - protein, 9 aa, Homo sapiens
  Light chain CDR3 for antibody 1206 (IGKV1D-16)
QQYNSYPYT

SEQ ID NO: 2412 - protein, 12 aa, Homo sapiens
  Heavy chain CDR3 for antibody 1206 (IGHV3-33)
AREGIAVAGVDP

SEQ ID NO: 2413 - protein, 9 aa, Homo sapiens
  Light chain CDR3 for antibody 1207 (IGKV3-20)
QQYGSSPYT

SEQ ID NO: 2414 - protein, 21 aa, Homo sapiens
  Heavy chain CDR3 for antibody 1207 (IGHV3-33)
ARKRLYDILTGYYKAYYGMDV

SEQ ID NO: 2415 - protein, 9 aa, Homo sapiens
  Light chain CDR3 for antibody 1208 (IGKV1-17)
LQHNSYPYT

SEQ ID NO: 2416 - protein, 17 aa, Homo sapiens
  Heavy chain CDR3 for antibody 1208 (IGHV3-33)
AREDYDILTGYPFYFDY

SEQ ID NO: 2417 - protein, 9 aa, Homo sapiens
  Light chain CDR3 for antibody 1209 (IGKV1-17)
LQHNSYPYT

SEQ ID NO: 2418 - protein, 18 aa, Homo sapiens
  Heavy chain CDR3 for antibody 1209 (IGHV3-33)
AREGDYYGSGGFPNWFDP

SEQ ID NO: 2419 - protein, 9 aa, Homo sapiens
  Light chain CDR3 for antibody 1210 (IGKV5-2)
LQHDNFPWT

SEQ ID NO: 2420 - protein, 12 aa, Homo sapiens
  Heavy chain CDR3 for antibody 1210 (IGHV4-34)
ASNFYYYYGMDV

SEQ ID NO: 2421 - protein, 9 aa, Homo sapiens
  Light chain CDR3 for antibody 1211 (IGKV6-21)
HQSSSLPYT

SEQ ID NO: 2422 - protein, 16 aa, Homo sapiens
  Heavy chain CDR3 for antibody 1211 (IGHV3-33)
ARGGRSDWLYYYGMDV

SEQ ID NO: 2423 - protein, 9 aa, Homo sapiens
  Light chain CDR3 for antibody 1212 (IGKV5-2)
LQHDNFPYT

SEQ ID NO: 2424 - protein, 10 aa, Homo sapiens
  Heavy chain CDR3 for antibody 1212 (IGHV3-33)
ARDGSGSQPI

SEQ ID NO: 2425 - protein, 9 aa, Homo sapiens
  Light chain CDR3 for antibody 1213 (IGKV3-20)
QQYGSSPYT

SEQ ID NO: 2426 - protein, 12 aa, Homo sapiens
  Heavy chain CDR3 for antibody 1213 (IGHV3-33)
AREGTRWVYFDY

SEQ ID NO: 2427 - protein, 9 aa, Homo sapiens
  Light chain CDR3 for antibody 1214 (IGKV5-2)
LQHDNFPWT

SEQ ID NO: 2428 - protein, 13 aa, Homo sapiens
  Heavy chain CDR3 for antibody 1214 (IGHV3-33)
ARAFTMVRGVIDY

SEQ ID NO: 2429 - protein, 9 aa, Homo sapiens
  Light chain CDR3 for antibody 1215 (IGKV3-20)
QQYGSSPYT

SEQ ID NO: 2430 - protein, 15 aa, Homo sapiens
  Heavy chain CDR3 for antibody 1215 (IGHV3-33)
VCVLYDYGDYVGFDY

SEQ ID NO: 2431 - protein, 9 aa, Homo sapiens
  Light chain CDR3 for antibody 1216 (IGKV2-30)
MQGTHWPLT

SEQ ID NO: 2432 - protein, 13 aa, Homo sapiens
  Heavy chain CDR3 for antibody 1216 (IGHV3-33)
ARDYCGGDCYLDY

SEQ ID NO: 2433 - protein, 8 aa, Homo sapiens
  Light chain CDR3 for antibody 1217 (IGKV1D-13)
QQFNNYPT

SEQ ID NO: 2434 - protein, 11 aa, Homo sapiens
  Heavy chain CDR3 for antibody 1217 (IGHV3-33)
ARDRSSGPFDY

SEQ ID NO: 2435 - protein, 9 aa, Homo sapiens
  Light chain CDR3 for antibody 1218 (IGKV3-20)
QQYGSSPYT

SEQ ID NO: 2436 - protein, 11 aa, Homo sapiens
  Heavy chain CDR3 for antibody 1218 (IGHV3-33)
ARARYTTGLDY

SEQ ID NO: 2437 - protein, 9 aa, Homo sapiens
  Light chain CDR3 for antibody 1219 (IGKV3-20)
QHYGSSPYT

SEQ ID NO: 2438 - protein, 13 aa, Homo sapiens
  Heavy chain CDR3 for antibody 1219 (IGHV4-59)
ARGYYDIFGWFDP

SEQ ID NO: 2439 - protein, 9 aa, Homo sapiens
  Light chain CDR3 for antibody 1220 (IGKV1-16)
QQYNSYPYT

SEQ ID NO: 2440 - protein, 14 aa, Homo sapiens
  Heavy chain CDR3 for antibody 1220 (IGHV4-39)
ARHGYYGSSNWFDP

SEQ ID NO: 2441 - protein, 9 aa, Homo sapiens
  Light chain CDR3 for antibody 1221 (IGKV5-2)
LQHDNFPYT

SEQ ID NO: 2442 - protein, 17 aa, Homo sapiens
  Heavy chain CDR3 for antibody 1221 (IGHV3-33)
ARGEQWLGYYYYYGMDV

SEQ ID NO: 2443 - protein, 9 aa, Homo sapiens
  Light chain CDR3 for antibody 1222 (IGKV5-2)
LQHDNFPYT

SEQ ID NO: 2444 - protein, 13 aa, Homo sapiens
  Heavy chain CDR3 for antibody 1222 (IGHV3-33)
ARTDYYFYYGLDV

SEQ ID NO: 2445 - protein, 9 aa, Homo sapiens
  Light chain CDR3 for antibody 1223 (IGKV5-2)
LQHDNFPWT

SEQ ID NO: 2446 - protein, 13 aa, Homo sapiens
  Heavy chain CDR3 for antibody 1223 (IGHV4-39)
ARHHYGSGSLRDY

SEQ ID NO: 2447 - protein, 9 aa, Homo sapiens
  Light chain CDR3 for antibody 1224 (IGKV1-6)
LQDYNYPYT

SEQ ID NO: 2448 - protein, 16 aa, Homo sapiens
  Heavy chain CDR3 for antibody 1224 (IGHV1-8)
AREGTMVRGVTYAFDI

SEQ ID NO: 2449 - protein, 9 aa, Homo sapiens
  Light chain CDR3 for antibody 1225 (IGKV1D-16)
QQYNSYPYT

SEQ ID NO: 2450 - protein, 14 aa, Homo sapiens
  Heavy chain CDR3 for antibody 1225 (IGHV3-33)
ARSTLVRGANWFDP

SEQ ID NO: 2451 - protein, 9 aa, Homo sapiens
  Light chain CDR3 for antibody 1226 (IGKV1D-16)
QQYNSYPLT

SEQ ID NO: 2452 - protein, 14 aa, Homo sapiens
  Heavy chain CDR3 for antibody 1226 (IGHV3-33)
VRDQGSMVRGGGDY

SEQ ID NO: 2453 - protein, 9 aa, Homo sapiens
  Light chain CDR3 for antibody 1227 (IGKV1D-13)
QQFNNYPYT

SEQ ID NO: 2454 - protein, 17 aa, Homo sapiens
  Heavy chain CDR3 for antibody 1227 (IGHV3-33)
ARGYCSRTSCYLYYFDY

SEQ ID NO: 2455 - protein, 9 aa, Homo sapiens
  Light chain CDR3 for antibody 1228 (IGKV1-39)
QQSHTLPCT

SEQ ID NO: 2456 - protein, 12 aa, Homo sapiens
  Heavy chain CDR3 for antibody 1228 (IGHV3-21)
ARDGGRYGDFDY

SEQ ID NO: 2457 - protein, 9 aa, Homo sapiens
  Light chain CDR3 for antibody 1229 (IGKV5-2)
LQHDNFPWT

SEQ ID NO: 2458 - protein, 13 aa, Homo sapiens
  Heavy chain CDR3 for antibody 1229 (IGHV4-39)
APFRVMVRGVLDY

SEQ ID NO: 2459 - protein, 9 aa, Homo sapiens
  Light chain CDR3 for antibody 1230 (IGKV3D-7)
QQDYNLPLT

SEQ ID NO: 2460 - protein, 11 aa, Homo sapiens
  Heavy chain CDR3 for antibody 1230 (IGHV3-33)
ARDRSSGPFDY

SEQ ID NO: 2461 - protein, 9 aa, Homo sapiens
  Light chain CDR3 for antibody 1231 (IGKV2D-28)
MQALQTPFT

SEQ ID NO: 2462 - protein, 14 aa, Homo sapiens
  Heavy chain CDR3 for antibody 1231 (IGHV3-33)
AKSYDILTGEAFDI

SEQ ID NO: 2463 - protein, 9 aa, Homo sapiens
  Light chain CDR3 for antibody 1232 (IGKV1-16)
QQYNRYPYT

SEQ ID NO: 2464 - protein, 16 aa, Homo sapiens
  Heavy chain CDR3 for antibody 1232 (IGHV4-59)
ARGRYFEWLLGDVFDI

SEQ ID NO: 2465 - protein, 9 aa, Homo sapiens
  Light chain CDR3 for antibody 1233 (IGKV1-17)
LQHNSYPYT

SEQ ID NO: 2466 - protein, 13 aa, Homo sapiens
  Heavy chain CDR3 for antibody 1233 (IGHV3-33)
ARQSSGWFDAFDI

SEQ ID NO: 2467 - protein, 9 aa, Homo sapiens
  Light chain CDR3 for antibody 1234 (IGKV5-2)
LQHDNFPYT

SEQ ID NO: 2468 - protein, 20 aa, Homo sapiens
  Heavy chain CDR3 for antibody 1234 (IGHV3-11)
ARGGATLIRGLIDYYYGMDV

SEQ ID NO: 2469 - protein, 9 aa, Homo sapiens
  Light chain CDR3 for antibody 1235 (IGKV5-2)
LQHDNFPYT

SEQ ID NO: 2470 - protein, 13 aa, Homo sapiens
  Heavy chain CDR3 for antibody 1235 (IGHV3-33)
AKEDGDYHHYFDY

SEQ ID NO: 2471 - protein, 9 aa, Homo sapiens
  Light chain CDR3 for antibody 1236 (IGKV6-21)
HQSSSLPYT

SEQ ID NO: 2472 - protein, 11 aa, Homo sapiens
  Heavy chain CDR3 for antibody 1236 (IGHV3-33)
AREAANWGFDY

SEQ ID NO: 2473 - protein, 9 aa, Homo sapiens
  Light chain CDR3 for antibody 1237 (IGKV6-21)
HQSSSLPYT

SEQ ID NO: 2474 - protein, 10 aa, Homo sapiens
  Heavy chain CDR3 for antibody 1237 (IGHV3-33)
ARENSTPLDY

SEQ ID NO: 2475 - protein, 9 aa, Homo sapiens
  Light chain CDR3 for antibody 1238 (IGKV1-16)
QQYNSYPYT

SEQ ID NO: 2476 - protein, 15 aa, Homo sapiens
  Heavy chain CDR3 for antibody 1238 (IGHV1-24)
ATHWDLRYYYYGMDV

SEQ ID NO: 2477 - protein, 9 aa, Homo sapiens
  Light chain CDR3 for antibody 1239 (IGKV1D-16)
QQYNSYPYT

SEQ ID NO: 2478 - protein, 18 aa, Homo sapiens
  Heavy chain CDR3 for antibody 1239 (IGHV1-8)
ARSRIAAAGIYYYYGMDV

SEQ ID NO: 2479 - protein, 9 aa, Homo sapiens
  Light chain CDR3 for antibody 1240 (IGKV1D-16)
QQYNSYPYT

SEQ ID NO: 2480 - protein, 9 aa, Homo sapiens
  Heavy chain CDR3 for antibody 1240 (IGHV3-33)
ARELAYFDY

SEQ ID NO: 2481 - protein, 9 aa, Homo sapiens
  Light chain CDR3 for antibody 1241 (IGKV1-16)
QQYNRYPYT

SEQ ID NO: 2482 - protein, 13 aa, Homo sapiens
  Heavy chain CDR3 for antibody 1241 (IGHV4-34)
ASNFYYYYYGMDV

SEQ ID NO: 2483 - protein, 9 aa, Homo sapiens
  Light chain CDR3 for antibody 1242 (IGKV1-17)
LQHNSYPYT

SEQ ID NO: 2484 - protein, 11 aa, Homo sapiens
  Heavy chain CDR3 for antibody 1242 (IGHV3-33)
ARGTTVTHFDY

SEQ ID NO: 2485 - protein, 9 aa, Homo sapiens
  Light chain CDR3 for antibody 1243 (IGKV5-2)
LQHDNFPYT

SEQ ID NO: 2486 - protein, 11 aa, Homo sapiens
  Heavy chain CDR3 for antibody 1243 (IGHV3-33)
ARDILTGFLDH

SEQ ID NO: 2487 - protein, 9 aa, Homo sapiens
  Light chain CDR3 for antibody 1244 (IGKV5-2)
LQHDNFPYT

SEQ ID NO: 2488 - protein, 14 aa, Homo sapiens
  Heavy chain CDR3 for antibody 1244 (IGHV3-33)
ARQYSYGYPYYFDY

SEQ ID NO: 2489 - protein, 9 aa, Homo sapiens
  Light chain CDR3 for antibody 1245 (IGKV1-27)
QKYNSAPYT

SEQ ID NO: 2490 - protein, 13 aa, Homo sapiens
  Heavy chain CDR3 for antibody 1245 (IGHV3-33)
ARDWGYSHGYFDY

SEQ ID NO: 2491 - protein, 9 aa, Homo sapiens
  Light chain CDR3 for antibody 1246 (IGKV1-17)
LQHNSYPFT

SEQ ID NO: 2492 - protein, 12 aa, Homo sapiens
  Heavy chain CDR3 for antibody 1246 (IGHV1-18)
ARAPYNWNDPDY

SEQ ID NO: 2493 - protein, 9 aa, Homo sapiens
  Light chain CDR3 for antibody 1247 (IGKV1-9)
QQYNSYPLT

SEQ ID NO: 2494 - protein, 14 aa, Homo sapiens
  Heavy chain CDR3 for antibody 1247 (IGHV4-59)
AKGGSGSYYNWFDP

SEQ ID NO: 2495 - protein, 9 aa, Homo sapiens
  Light chain CDR3 for antibody 1248 (IGKV6-21)
HQSSSLPYT

SEQ ID NO: 2496 - protein, 13 aa, Homo sapiens
  Heavy chain CDR3 for antibody 1248 (IGHV3-33)
ARVDTMVRGVMAY

SEQ ID NO: 2497 - protein, 9 aa, Homo sapiens
  Light chain CDR3 for antibody 1249 (IGKV1-17)
LQHNSYPYT

SEQ ID NO: 2498 - protein, 17 aa, Homo sapiens
  Heavy chain CDR3 for antibody 1249 (IGHV3-33)
ARGDGDILTGYYEWFDP

SEQ ID NO: 2499 - protein, 8 aa, Homo sapiens
  Light chain CDR3 for antibody 1250 (IGKV3D-7)
QQDYNLLT

SEQ ID NO: 2500 - protein, 11 aa, Homo sapiens
  Heavy chain CDR3 for antibody 1250 (IGHV3-33)
ARDRSSGPFDY

SEQ ID NO: 2501 - protein, 9 aa, Homo sapiens
  Light chain CDR3 for antibody 1251 (IGKV3-20)
QQYGSSPYT

SEQ ID NO: 2502 - protein, 13 aa, Homo sapiens
  Heavy chain CDR3 for antibody 1251 (IGHV4-59)
ARTMVRGVAPFDY

SEQ ID NO: 2503 - protein, 9 aa, Homo sapiens
  Light chain CDR3 for antibody 1252 (IGKV1-6)
LQDYNYPYT

SEQ ID NO: 2504 - protein, 11 aa, Homo sapiens
  Heavy chain CDR3 for antibody 1252 (IGHV3-23)
AKDRPYYGSGV

SEQ ID NO: 2505 - protein, 9 aa, Homo sapiens
  Light chain CDR3 for antibody 1253 (IGKV1D-16)
QQYNSYPYT

SEQ ID NO: 2506 - protein, 17 aa, Homo sapiens
  Heavy chain CDR3 for antibody 1253 (IGHV3-33)
ARGGGYENDHYYYGMDV

SEQ ID NO: 2507 - protein, 9 aa, Homo sapiens
  Light chain CDR3 for antibody 1254 (IGKV1-17)
LQHNSFPLT

SEQ ID NO: 2508 - protein, 16 aa, Homo sapiens
  Heavy chain CDR3 for antibody 1254 (IGHV3-33)
ARGEQWLGYYYYGMDV

SEQ ID NO: 2509 - protein, 9 aa, Homo sapiens
  Light chain CDR3 for antibody 1255 (IGKV3D-20)
QQYGSSPYT

SEQ ID NO: 2510 - protein, 16 aa, Homo sapiens
  Heavy chain CDR3 for antibody 1255 (IGHV3-23)
AKEGEVLRYFDWLFNY

SEQ ID NO: 2511 - protein, 9 aa, Homo sapiens
  Light chain CDR3 for antibody 1256 (IGKV1D-16)
QQYNSYPLT

SEQ ID NO: 2512 - protein, 13 aa, Homo sapiens
  Heavy chain CDR3 for antibody 1256 (IGHV3-33)
AREYCSGGSCYDY

SEQ ID NO: 2513 - protein, 9 aa, Homo sapiens
  Light chain CDR3 for antibody 1257 (IGKV6-21)
HQSSSLPYT

SEQ ID NO: 2514 - protein, 13 aa, Homo sapiens
  Heavy chain CDR3 for antibody 1257 (IGHV4-39)
ARHPPSRDYGMDV

SEQ ID NO: 2515 - protein, 9 aa, Homo sapiens
  Light chain CDR3 for antibody 1258 (IGKV2-30)
MQGTHWPLT

SEQ ID NO: 2516 - protein, 18 aa, Homo sapiens
  Heavy chain CDR3 for antibody 1258 (IGHV4-59)
AREGDYVWGSYRPNWFDP

SEQ ID NO: 2517 - protein, 9 aa, Homo sapiens
  Light chain CDR3 for antibody 1259 (IGKV5-2)
LQHDNFPYT

SEQ ID NO: 2518 - protein, 13 aa, Homo sapiens
  Heavy chain CDR3 for antibody 1259 (IGHV3-33)
ARVDTMVRGVMAY

SEQ ID NO: 2519 - protein, 9 aa, Homo sapiens
  Light chain CDR3 for antibody 1260 (IGKV1-17)
LQHNSYPYT

SEQ ID NO: 2520 - protein, 16 aa, Homo sapiens
  Heavy chain CDR3 for antibody 1260 (IGHV3-30)
ARDIAVAGHVYYGMDV

SEQ ID NO: 2521 - protein, 9 aa, Homo sapiens
  Light chain CDR3 for antibody 1261 (IGKV1-17)
LQHNSYPYT

SEQ ID NO: 2522 - protein, 14 aa, Homo sapiens
  Heavy chain CDR3 for antibody 1261 (IGHV3-33)
ARDRRDFYYYGMDV

SEQ ID NO: 2523 - protein, 9 aa, Homo sapiens
  Light chain CDR3 for antibody 1262 (IGKV6-21)
HQSSSLPYT

SEQ ID NO: 2524 - protein, 16 aa, Homo sapiens
  Heavy chain CDR3 for antibody 1262 (IGHV3-33)
ARAVYYGSGSSLIMDV

SEQ ID NO: 2525 - protein, 9 aa, Homo sapiens
  Light chain CDR3 for antibody 1263 (IGKV6-21)
HQSSTLPFT

SEQ ID NO: 2526 - protein, 14 aa, Homo sapiens
  Heavy chain CDR3 for antibody 1263 (IGHV3-20)
ARDRGSSFFDGFDI

SEQ ID NO: 2527 - protein, 9 aa, Homo sapiens
  Light chain CDR3 for antibody 1264 (IGKV3-20)
QQYGSSPYT

SEQ ID NO: 2528 - protein, 14 aa, Homo sapiens
  Heavy chain CDR3 for antibody 1264 (IGHV3-33)
ARTTAAAGPRDFQH

SEQ ID NO: 2529 - protein, 9 aa, Homo sapiens
  Light chain CDR3 for antibody 1265 (IGKV6-21)
HQSSSLPWT

SEQ ID NO: 2530 - protein, 14 aa, Homo sapiens
  Heavy chain CDR3 for antibody 1265 (IGHV3-33)
ARDDILTGYSYFQH

SEQ ID NO: 2531 - protein, 9 aa, Homo sapiens
  Light chain CDR3 for antibody 1266 (IGKV1-6)
LQDYNYPYT

SEQ ID NO: 2532 - protein, 13 aa, Homo sapiens
  Heavy chain CDR3 for antibody 1266 (IGHV3-33)
ASAGNSYYNVMDV

SEQ ID NO: 2533 - protein, 9 aa, Homo sapiens
  Light chain CDR3 for antibody 1267 (IGKV5-2)
LQHDNFPWT

SEQ ID NO: 2534 - protein, 17 aa, Homo sapiens
  Heavy chain CDR3 for antibody 1267 (IGHV4-39)
ARQGWYYGSGSSLLFDY

SEQ ID NO: 2535 - protein, 9 aa, Homo sapiens
  Light chain CDR3 for antibody 1268 (IGKV1-16)
QQYYSYPYT

SEQ ID NO: 2536 - protein, 18 aa, Homo sapiens
  Heavy chain CDR3 for antibody 1268 (IGHV1-46)
ARDGDYVWGSYRSNWFDP

SEQ ID NO: 2537 - protein, 9 aa, Homo sapiens
  Light chain CDR3 for antibody 1269 (IGKV6-21)
HQSSSLPYT

SEQ ID NO: 2538 - protein, 21 aa, Homo sapiens
  Heavy chain CDR3 for antibody 1269 (IGHV3-33)
ARKRLYDILTGYYKAYYGMDV

SEQ ID NO: 2539 - protein, 9 aa, Homo sapiens
  Light chain CDR3 for antibody 1270 (IGKV3D-7)
QQDYNLPYT

SEQ ID NO: 2540 - protein, 16 aa, Homo sapiens
  Heavy chain CDR3 for antibody 1270 (IGHV3-33)
AREVGAKDYYYYGMDV

SEQ ID NO: 2541 - protein, 9 aa, Homo sapiens
  Light chain CDR3 for antibody 1271 (IGKV5-2)
LQHDNFPYT

SEQ ID NO: 2542 - protein, 12 aa, Homo sapiens
  Heavy chain CDR3 for antibody 1271 (IGHV3-33)
ARKGYDMHEFDI

SEQ ID NO: 2543 - protein, 9 aa, Homo sapiens
  Light chain CDR3 for antibody 1272 (IGKV1D-16)
QQYNSYPLT

SEQ ID NO: 2544 - protein, 10 aa, Homo sapiens
  Heavy chain CDR3 for antibody 1272 (IGHV3-23)
AKDHYGDYPY

SEQ ID NO: 2545 - protein, 9 aa, Homo sapiens
  Light chain CDR3 for antibody 1273 (IGKV5-2)
LQHDNFPYT

SEQ ID NO: 2546 - protein, 14 aa, Homo sapiens
  Heavy chain CDR3 for antibody 1273 (IGHV3-33)
ARAGSGYDRDWFDP

SEQ ID NO: 2547 - protein, 9 aa, Homo sapiens
  Light chain CDR3 for antibody 1274 (IGKV1D-16)
QQYNSYPYT

SEQ ID NO: 2548 - protein, 10 aa, Homo sapiens
  Heavy chain CDR3 for antibody 1274 (IGHV1-18)
AREQRLGFDY

SEQ ID NO: 2549 - protein, 9 aa, Homo sapiens
  Light chain CDR3 for antibody 1275 (IGKV6-21)
HQSSSLPYT

SEQ ID NO: 2550 - protein, 17 aa, Homo sapiens
  Heavy chain CDR3 for antibody 1275 (IGHV3-23)
AKDGSFYSSGWYDAFDI

SEQ ID NO: 2551 - protein, 9 aa, Homo sapiens
  Light chain CDR3 for antibody 1276 (IGKV1D-13)
QQFNNYPHT

SEQ ID NO: 2552 - protein, 12 aa, Homo sapiens
  Heavy chain CDR3 for antibody 1276 (IGHV3-13)
AREAGIPDAFDI

SEQ ID NO: 2553 - protein, 9 aa, Homo sapiens
  Light chain CDR3 for antibody 1277 (IGKV3-20)
QQYGSSPYT

SEQ ID NO: 2554 - protein, 14 aa, Homo sapiens
  Heavy chain CDR3 for antibody 1277 (IGHV3-33)
ARDKTYPLSYGMDV

SEQ ID NO: 2555 - protein, 9 aa, Homo sapiens
  Light chain CDR3 for antibody 1278 (IGKV5-2)
LQHDNFPWT

SEQ ID NO: 2556 - protein, 17 aa, Homo sapiens
  Heavy chain CDR3 for antibody 1278 (IGHV3-33)
ARGFSGYDGYYYYGMDV

SEQ ID NO: 2557 - protein, 9 aa, Homo sapiens
  Light chain CDR3 for antibody 1279 (IGKV1D-16)
QQYNSYPYT

SEQ ID NO: 2558 - protein, 16 aa, Homo sapiens
  Heavy chain CDR3 for antibody 1279 (IGHV3-33)
ARDRGGMTMVRGGFDY

SEQ ID NO: 2559 - protein, 9 aa, Homo sapiens
  Light chain CDR3 for antibody 1280 (IGKV1-27)
QKYNSAPYT

SEQ ID NO: 2560 - protein, 12 aa, Homo sapiens
  Heavy chain CDR3 for antibody 1280 (IGHV1-46)
ARGLTGDHAVDI

SEQ ID NO: 2561 - protein, 9 aa, Homo sapiens
  Light chain CDR3 for antibody 1281 (IGKV1-17)
LQHNSYPWT

SEQ ID NO: 2562 - protein, 19 aa, Homo sapiens
  Heavy chain CDR3 for antibody 1281 (IGHV3-33)
ARVLDGLSPPYYYYDGLDV

SEQ ID NO: 2563 - protein, 9 aa, Homo sapiens
  Light chain CDR3 for antibody 1282 (IGKV1D-16)
QQYNSYPYT

SEQ ID NO: 2564 - protein, 20 aa, Homo sapiens
  Heavy chain CDR3 for antibody 1282 (IGHV3-33)
ARRMVRGVKKTYYYYYGLDV

SEQ ID NO: 2565 - protein, 9 aa, Homo sapiens
  Light chain CDR3 for antibody 1283 (IGKV3D-7)
QQDYNLPLT

SEQ ID NO: 2566 - protein, 12 aa, Homo sapiens
  Heavy chain CDR3 for antibody 1283 (IGHV1-18)
ARILFYGDYFDY

SEQ ID NO: 2567 - protein, 9 aa, Homo sapiens
  Light chain CDR3 for antibody 1284 (IGKV3-20)
QQYGSSPYT

SEQ ID NO: 2568 - protein, 20 aa, Homo sapiens
  Heavy chain CDR3 for antibody 1284 (IGHV3-33)
ARAGDIAVAGTHYYYYGMDV

SEQ ID NO: 2569 - protein, 9 aa, Homo sapiens
  Light chain CDR3 for antibody 1285 (IGKV5-2)
LQHDNFPYT

SEQ ID NO: 2570 - protein, 10 aa, Homo sapiens
  Heavy chain CDR3 for antibody 1285 (IGHV3-33)
ARENSTPLDY

SEQ ID NO: 2571 - protein, 9 aa, Homo sapiens
  Light chain CDR3 for antibody 1286 (IGKV6-21)
HQSSSLPYT

SEQ ID NO: 2572 - protein, 15 aa, Homo sapiens
  Heavy chain CDR3 for antibody 1286 (IGHV3-23)
AKEALRYFDWSGMDV

SEQ ID NO: 2573 - protein, 9 aa, Homo sapiens
  Light chain CDR3 for antibody 1287 (IGKV6-21)
HQSSSLPYT

SEQ ID NO: 2574 - protein, 17 aa, Homo sapiens
  Heavy chain CDR3 for antibody 1287 (IGHV3-23)
AKDGIGELSYYYYGMDV

SEQ ID NO: 2575 - protein, 9 aa, Homo sapiens
  Light chain CDR3 for antibody 1288 (IGKV1D-16)
QQYNSYPYT

SEQ ID NO: 2576 - protein, 15 aa, Homo sapiens
  Heavy chain CDR3 for antibody 1288 (IGHV1-18)
ARRSPNWGHYYGMDV

SEQ ID NO: 2577 - protein, 9 aa, Homo sapiens
  Light chain CDR3 for antibody 1289 (IGKV3-20)
QQYATSPIT

SEQ ID NO: 2578 - protein, 9 aa, Homo sapiens
  Heavy chain CDR3 for antibody 1289 (IGHV3-74)
ARSEYQPTY

SEQ ID NO: 2579 - protein, 9 aa, Homo sapiens
  Light chain CDR3 for antibody 1290 (IGKV6-21)
HQSSSLPYT

SEQ ID NO: 2580 - protein, 15 aa, Homo sapiens
  Heavy chain CDR3 for antibody 1290 (IGHV3-33)
ARDRGWKAPGYGMDV

SEQ ID NO: 2581 - protein, 9 aa, Homo sapiens
  Light chain CDR3 for antibody 1291 (IGKV1-6)
LQDYNYPYT

SEQ ID NO: 2582 - protein, 15 aa, Homo sapiens
  Heavy chain CDR3 for antibody 1291 (IGHV3-23)
AKEFTMVRGVITPDY

SEQ ID NO: 2583 - protein, 9 aa, Homo sapiens
  Light chain CDR3 for antibody 1292 (IGKV3-15)
QQYNNWPLT

SEQ ID NO: 2584 - protein, 11 aa, Homo sapiens
  Heavy chain CDR3 for antibody 1292 (IGHV4-59)
AREMGHDTFDI

SEQ ID NO: 2585 - protein, 9 aa, Homo sapiens
  Light chain CDR3 for antibody 1293 (IGKV3D-7)
QQDYNLPPT

SEQ ID NO: 2586 - protein, 12 aa, Homo sapiens
  Heavy chain CDR3 for antibody 1293 (IGHV3-33)
ARERGIGRYFDL

SEQ ID NO: 2587 - protein, 9 aa, Homo sapiens
  Light chain CDR3 for antibody 1294 (IGKV5-2)
LQHDNFPWT

SEQ ID NO: 2588 - protein, 14 aa, Homo sapiens
  Heavy chain CDR3 for antibody 1294 (IGHV4-39)
ARQGTMIRGGYFDY

SEQ ID NO: 2589 - protein, 9 aa, Homo sapiens
  Light chain CDR3 for antibody 1295 (IGKV1D-16)
QQYNSYPYT

SEQ ID NO: 2590 - protein, 18 aa, Homo sapiens
  Heavy chain CDR3 for antibody 1295 (IGHV3-33)
ARGGYDILTGYYRTGMDV

SEQ ID NO: 2591 - protein, 9 aa, Homo sapiens
  Light chain CDR3 for antibody 1296 (IGKV1D-16)
QQYNSYPLT

SEQ ID NO: 2592 - protein, 19 aa, Homo sapiens
  Heavy chain CDR3 for antibody 1296 (IGHV3-33)
ARDSGYSGYDYYYYYGMDV

SEQ ID NO: 2593 - protein, 9 aa, Homo sapiens
  Light chain CDR3 for antibody 1297 (IGKV1D-16)
QQYNSYPLT

SEQ ID NO: 2594 - protein, 12 aa, Homo sapiens
  Heavy chain CDR3 for antibody 1297 (IGHV3-33)
AREGTRWVYFDY

SEQ ID NO: 2595 - protein, 9 aa, Homo sapiens
  Light chain CDR3 for antibody 1298 (IGKV1-17)
LQHNSYPYT

SEQ ID NO: 2596 - protein, 12 aa, Homo sapiens
  Heavy chain CDR3 for antibody 1298 (IGHV4-61)
ARVYSSGWLFDY

SEQ ID NO: 2597 - protein, 9 aa, Homo sapiens
  Light chain CDR3 for antibody 1299 (IGKV1-17)
LQHNSYPYT

SEQ ID NO: 2598 - protein, 15 aa, Homo sapiens
  Heavy chain CDR3 for antibody 1299 (IGHV3-33)
ARDRVVRGVMGYFDY

SEQ ID NO: 2599 - protein, 9 aa, Homo sapiens
  Light chain CDR3 for antibody 1300 (IGKV6-21)
HQSSSLPYT

SEQ ID NO: 2600 - protein, 15 aa, Homo sapiens
  Heavy chain CDR3 for antibody 1300 (IGHV3-33)
ARDSRPEIIGPPFDY

SEQ ID NO: 2601 - protein, 9 aa, Homo sapiens
  Light chain CDR3 for antibody 1301 (IGKV6-21)
HQSSSLPYT

SEQ ID NO: 2602 - protein, 14 aa, Homo sapiens
  Heavy chain CDR3 for antibody 1301 (IGHV3-33)
ARDGYDFLTGPFDY

SEQ ID NO: 2603 - protein, 9 aa, Homo sapiens
  Light chain CDR3 for antibody 1302 (IGKV1-16)
QQYNSYPYT

SEQ ID NO: 2604 - protein, 16 aa, Homo sapiens
  Heavy chain CDR3 for antibody 1302 (IGHV3-23)
ARNWNDVGDYYYGMDV

SEQ ID NO: 2605 - protein, 9 aa, Homo sapiens
  Light chain CDR3 for antibody 1303 (IGKV3D-7)
QQDYNLPLT

SEQ ID NO: 2606 - protein, 13 aa, Homo sapiens
  Heavy chain CDR3 for antibody 1303 (IGHV3-33)
ARDYCGGDCYLDY

SEQ ID NO: 2607 - protein, 10 aa, Homo sapiens
  Light chain CDR3 for antibody 1304 (IGKV3-11)
QQRSNWPPYT

SEQ ID NO: 2608 - protein, 14 aa, Homo sapiens
  Heavy chain CDR3 for antibody 1304 (IGHV3-33)
AREMVRGVPNWFDP

SEQ ID NO: 2609 - protein, 9 aa, Homo sapiens
  Light chain CDR3 for antibody 1305 (IGKV1-17)
LQHNSYPYT

SEQ ID NO: 2610 - protein, 13 aa, Homo sapiens
  Heavy chain CDR3 for antibody 1305 (IGHV3-33)
ARDSSSWYHWFDP

SEQ ID NO: 2611 - protein, 9 aa, Homo sapiens
  Light chain CDR3 for antibody 1306 (IGKV3D-20)
QQYGISPYT

SEQ ID NO: 2612 - protein, 16 aa, Homo sapiens
  Heavy chain CDR3 for antibody 1306 (IGHV3-33)
ARGAWYSNGWYGTFDI

SEQ ID NO: 2613 - protein, 9 aa, Homo sapiens
  Light chain CDR3 for antibody 1307 (IGKV6-21)
HQSSSLPYT

SEQ ID NO: 2614 - protein, 12 aa, Homo sapiens
  Heavy chain CDR3 for antibody 1307 (IGHV3-33)
ARDPGYYYGLDV

SEQ ID NO: 2615 - protein, 9 aa, Homo sapiens
  Light chain CDR3 for antibody 1308 (IGKV1-39)
QQSYSTPLT

SEQ ID NO: 2616 - protein, 17 aa, Homo sapiens
  Heavy chain CDR3 for antibody 1308 (IGHV1-18)
ARDRAFTMVRGVPPFDY

SEQ ID NO: 2617 - protein, 9 aa, Homo sapiens
  Light chain CDR3 for antibody 1309 (IGKV6-21)
HQSSSLPYT

SEQ ID NO: 2618 - protein, 13 aa, Homo sapiens
  Heavy chain CDR3 for antibody 1309 (IGHV3-33)
ARTDYYFYYGLDV

SEQ ID NO: 2619 - protein, 9 aa, Homo sapiens
  Light chain CDR3 for antibody 1310 (IGKV3D-7)
QQDYNLPIT

SEQ ID NO: 2620 - protein, 16 aa, Homo sapiens
  Heavy chain CDR3 for antibody 1310 (IGHV3-33)
ARGSVSDILTGAYFDY

SEQ ID NO: 2621 - protein, 9 aa, Homo sapiens
  Light chain CDR3 for antibody 1311 (IGKV1-6)
LQDYNYPYT

SEQ ID NO: 2622 - protein, 18 aa, Homo sapiens
  Heavy chain CDR3 for antibody 1311 (IGHV3-33)
ARGGYDILTGYYRTGMDV

SEQ ID NO: 2623 - protein, 9 aa, Homo sapiens
  Light chain CDR3 for antibody 1312 (IGKV1-17)
LQHNSYPYT

SEQ ID NO: 2624 - protein, 12 aa, Homo sapiens
  Heavy chain CDR3 for antibody 1312 (IGHV3-33)
AKDPGWQQLAEY

SEQ ID NO: 2625 - protein, 9 aa, Homo sapiens
  Light chain CDR3 for antibody 1313 (IGKV1-17)
LQHNSYPYT

SEQ ID NO: 2626 - protein, 14 aa, Homo sapiens
  Heavy chain CDR3 for antibody 1313 (IGHV3-23)
AKDRYRGYEGLFDY

SEQ ID NO: 2627 - protein, 9 aa, Homo sapiens
  Light chain CDR3 for antibody 1314 (IGKV1-6)
LQDYNYPYT

SEQ ID NO: 2628 - protein, 15 aa, Homo sapiens
  Heavy chain CDR3 for antibody 1314 (IGHV1-18)
ARRSPNWGHYYGMDV

SEQ ID NO: 2629 - protein, 9 aa, Homo sapiens
  Light chain CDR3 for antibody 1315 (IGKV5-2)
LQHDNFPYT

SEQ ID NO: 2630 - protein, 16 aa, Homo sapiens
  Heavy chain CDR3 for antibody 1315 (IGHV3-33)
ARGGRSDWLYYYGMDV

SEQ ID NO: 2631 - protein, 9 aa, Homo sapiens
  Light chain CDR3 for antibody 1316 (IGKV5-2)
LQHDNFPYT

SEQ ID NO: 2632 - protein, 14 aa, Homo sapiens
  Heavy chain CDR3 for antibody 1316 (IGHV3-23)
ANWAYDILTGYLDY

SEQ ID NO: 2633 - protein, 9 aa, Homo sapiens
  Light chain CDR3 for antibody 1317 (IGKV6-21)
HQSSSLPYT

SEQ ID NO: 2634 - protein, 14 aa, Homo sapiens
  Heavy chain CDR3 for antibody 1317 (IGHV3-33)
ARDKTYPLSYGMDV

SEQ ID NO: 2635 - protein, 9 aa, Homo sapiens
  Light chain CDR3 for antibody 1318 (IGKV3D-7)
QQDYNLPYT

SEQ ID NO: 2636 - protein, 18 aa, Homo sapiens
  Heavy chain CDR3 for antibody 1318 (IGHV4-59)
AREGHYYTSGSYYKAFDY

SEQ ID NO: 2637 - protein, 9 aa, Homo sapiens
  Light chain CDR3 for antibody 1319 (IGKV1-17)
LQHNSYPYT

SEQ ID NO: 2638 - protein, 9 aa, Homo sapiens
  Heavy chain CDR3 for antibody 1319 (IGHV3-23)
AKEQQLFDY

SEQ ID NO: 2639 - protein, 9 aa, Homo sapiens
  Light chain CDR3 for antibody 1320 (IGKV5-2)
LQHDNFPYT

SEQ ID NO: 2640 - protein, 18 aa, Homo sapiens
  Heavy chain CDR3 for antibody 1320 (IGHV3-33)
ARDRDRYGSGTYPDAIDI

SEQ ID NO: 2641 - protein, 9 aa, Homo sapiens
  Light chain CDR3 for antibody 1321 (IGKV3-11)
QQRSNWPWT

SEQ ID NO: 2642 - protein, 18 aa, Homo sapiens
  Heavy chain CDR3 for antibody 1321 (IGHV4-59)
AREGDYVWGSYRPNWFDP

SEQ ID NO: 2643 - protein, 9 aa, Homo sapiens
  Light chain CDR3 for antibody 1322 (IGKV5-2)
LQHDNFPYT

SEQ ID NO: 2644 - protein, 14 aa, Homo sapiens
  Heavy chain CDR3 for antibody 1322 (IGHV3-33)
VRDAMGATTAWFDP

SEQ ID NO: 2645 - protein, 9 aa, Homo sapiens
  Light chain CDR3 for antibody 1323 (IGKV5-2)
LQHDNFPWT

SEQ ID NO: 2646 - protein, 19 aa, Homo sapiens
  Heavy chain CDR3 for antibody 1323 (IGHV1-18)
ARDDILTGYSLYYYYGMDV

SEQ ID NO: 2647 - protein, 9 aa, Homo sapiens
  Light chain CDR3 for antibody 1324 (IGKV1-17)
LQHNSYPYT

SEQ ID NO: 2648 - protein, 13 aa, Homo sapiens
  Heavy chain CDR3 for antibody 1324 (IGHV3-23)
AKDRGGSYSYFDF

SEQ ID NO: 2649 - protein, 8 aa, Homo sapiens
  Light chain CDR3 for antibody 1325 (IGKV3D-7)
QQDYNSLT

SEQ ID NO: 2650 - protein, 10 aa, Homo sapiens
  Heavy chain CDR3 for antibody 1325 (IGHV3-33)
ARDGLRYFDW

SEQ ID NO: 2651 - protein, 9 aa, Homo sapiens
  Light chain CDR3 for antibody 1326 (IGKV1-6)
LQDYNYPYT

SEQ ID NO: 2652 - protein, 19 aa, Homo sapiens
  Heavy chain CDR3 for antibody 1326 (IGHV5-51)
ARHGEKGKRITMVRGSLDV

SEQ ID NO: 2653 - protein, 9 aa, Homo sapiens
  Light chain CDR3 for antibody 1327 (IGKV1D-16)
QQYNSYPYT

SEQ ID NO: 2654 - protein, 13 aa, Homo sapiens
  Heavy chain CDR3 for antibody 1327 (IGHV3-11)
ARDEGYSGYNLDN

SEQ ID NO: 2655 - protein, 9 aa, Homo sapiens
  Light chain CDR3 for antibody 1328 (IGKV1-17)
LQQNSYPWT

SEQ ID NO: 2656 - protein, 11 aa, Homo sapiens
  Heavy chain CDR3 for antibody 1328 (IGHV4-59)
ARSLRYSFFDY

SEQ ID NO: 2657 - protein, 9 aa, Homo sapiens
  Light chain CDR3 for antibody 1329 (IGKV5-2)
LQHDNFPWT

SEQ ID NO: 2658 - protein, 14 aa, Homo sapiens
  Heavy chain CDR3 for antibody 1329 (IGHV1-46)
ARRGIVGALDAFDI

SEQ ID NO: 2659 - protein, 9 aa, Homo sapiens
  Light chain CDR3 for antibody 1330 (IGKV1D-16)
QQYNSYPLT

SEQ ID NO: 2660 - protein, 14 aa, Homo sapiens
  Heavy chain CDR3 for antibody 1330 (IGHV3-33)
AREDYYGPLNWFDP

SEQ ID NO: 2661 - protein, 9 aa, Homo sapiens
  Light chain CDR3 for antibody 1331 (IGKV5-2)
LQHDNFPWT

SEQ ID NO: 2662 - protein, 14 aa, Homo sapiens
  Heavy chain CDR3 for antibody 1331 (IGHV3-33)
ARDREQQLVRYFDY

SEQ ID NO: 2663 - protein, 9 aa, Homo sapiens
  Light chain CDR3 for antibody 1332 (IGKV1-17)
LQHNSYPYT

SEQ ID NO: 2664 - protein, 18 aa, Homo sapiens
  Heavy chain CDR3 for antibody 1332 (IGHV3-13)
ARDYYGSGSLYYYYGMDV

SEQ ID NO: 2665 - protein, 9 aa, Homo sapiens
  Light chain CDR3 for antibody 1333 (IGKV6-21)
HQSSSLPYT

SEQ ID NO: 2666 - protein, 17 aa, Homo sapiens
  Heavy chain CDR3 for antibody 1333 (IGHV3-33)
VREGGLLWVGELSLFDY

SEQ ID NO: 2667 - protein, 9 aa, Homo sapiens
  Light chain CDR3 for antibody 1334 (IGKV1D-13)
QQFNNYPHT

SEQ ID NO: 2668 - protein, 11 aa, Homo sapiens
  Heavy chain CDR3 for antibody 1334 (IGHV3-33)
ARDRVLTPFDY

SEQ ID NO: 2669 - protein, 9 aa, Homo sapiens
  Light chain CDR3 for antibody 1335 (IGKV3-20)
QQYGSSPYT

SEQ ID NO: 2670 - protein, 9 aa, Homo sapiens
  Heavy chain CDR3 for antibody 1335 (IGHV3-13)
ARDRWYFDL

SEQ ID NO: 2671 - protein, 9 aa, Homo sapiens
  Light chain CDR3 for antibody 1336 (IGKV1-17)
LQHNSYPYT

SEQ ID NO: 2672 - protein, 10 aa, Homo sapiens
  Heavy chain CDR3 for antibody 1336 (IGHV3-30)
ARDGLESFDY

SEQ ID NO: 2673 - protein, 8 aa, Homo sapiens
  Light chain CDR3 for antibody 1337 (IGKV1-5)
QQYNSYYT

SEQ ID NO: 2674 - protein, 13 aa, Homo sapiens
  Heavy chain CDR3 for antibody 1337 (IGHV4-59)
ARDAGYSSSWFDY

SEQ ID NO: 2675 - protein, 9 aa, Homo sapiens
  Light chain CDR3 for antibody 1338 (IGKV1D-16)
QQYNSYPLT

SEQ ID NO: 2676 - protein, 20 aa, Homo sapiens
  Heavy chain CDR3 for antibody 1338 (IGHV3-33)
ARDPAQLERRYYYFYYGMDV

SEQ ID NO: 2677 - protein, 9 aa, Homo sapiens
  Light chain CDR3 for antibody 1339 (IGKV1-6)
LQDYNYPYT

SEQ ID NO: 2678 - protein, 15 aa, Homo sapiens
  Heavy chain CDR3 for antibody 1339 (IGHV1-46)
ARGAVDDYYYYGMDV

SEQ ID NO: 2679 - protein, 9 aa, Homo sapiens
  Light chain CDR3 for antibody 1340 (IGKV6-21)
HQSSILPYT

SEQ ID NO: 2680 - protein, 13 aa, Homo sapiens
  Heavy chain CDR3 for antibody 1340 (IGHV3-33)
VRRIAVAGTEGDC

SEQ ID NO: 2681 - protein, 9 aa, Homo sapiens
  Light chain CDR3 for antibody 1341 (IGKV5-2)
LQHDNFPYT

SEQ ID NO: 2682 - protein, 15 aa, Homo sapiens
  Heavy chain CDR3 for antibody 1341 (IGHV3-30)
ARRGYGSGSPDAFDL

SEQ ID NO: 2683 - protein, 9 aa, Homo sapiens
  Light chain CDR3 for antibody 1342 (IGKV1-39)
QQSYRTPLT

SEQ ID NO: 2684 - protein, 9 aa, Homo sapiens
  Heavy chain CDR3 for antibody 1342 (IGHV3-13)
ARDRWYFDL

SEQ ID NO: 2685 - protein, 9 aa, Homo sapiens
  Light chain CDR3 for antibody 1343 (IGKV3-20)
QQYGSSPYT

SEQ ID NO: 2686 - protein, 16 aa, Homo sapiens
  Heavy chain CDR3 for antibody 1343 (IGHV3-33)
ARAVYYGSGSSLIMDV

SEQ ID NO: 2687 - protein, 9 aa, Homo sapiens
  Light chain CDR3 for antibody 1344 (IGKV3D-20)
QQYGSSPYT

SEQ ID NO: 2688 - protein, 10 aa, Homo sapiens
  Heavy chain CDR3 for antibody 1344 (IGHV3-23)
AKDHYGDYPY

SEQ ID NO: 2689 - protein, 9 aa, Homo sapiens
  Light chain CDR3 for antibody 1345 (IGKV5-2)
LQHDNFPYT

SEQ ID NO: 2690 - protein, 17 aa, Homo sapiens
  Heavy chain CDR3 for antibody 1345 (IGHV3-33)
ARAYYDILTGYSYYFDY

SEQ ID NO: 2691 - protein, 9 aa, Homo sapiens
  Light chain CDR3 for antibody 1346 (IGKV3-20)
QQYGSSPYT

SEQ ID NO: 2692 - protein, 11 aa, Homo sapiens
  Heavy chain CDR3 for antibody 1346 (IGHV3-33)
AREAANWGFDY

SEQ ID NO: 2693 - protein, 9 aa, Homo sapiens
  Light chain CDR3 for antibody 1347 (IGKV1-27)
QKYNSAPYT

SEQ ID NO: 2694 - protein, 13 aa, Homo sapiens
  Heavy chain CDR3 for antibody 1347 (IGHV3-33)
ARAFTMVRGVIDY

SEQ ID NO: 2695 - protein, 9 aa, Homo sapiens
  Light chain CDR3 for antibody 1348 (IGKV1-16)
QQYNSYPYT

SEQ ID NO: 2696 - protein, 11 aa, Homo sapiens
  Heavy chain CDR3 for antibody 1348 (IGHV4-59)
ARETGDDAFDI

SEQ ID NO: 2697 - protein, 9 aa, Homo sapiens
  Light chain CDR3 for antibody 1349 (IGKV5-2)
LQHDNFPYT

SEQ ID NO: 2698 - protein, 9 aa, Homo sapiens
  Heavy chain CDR3 for antibody 1349 (IGHV3-30)
ARDYFHYDY

SEQ ID NO: 2699 - protein, 9 aa, Homo sapiens
  Light chain CDR3 for antibody 1350 (IGKV3D-7)
QQDYNLPYT

SEQ ID NO: 2700 - protein, 16 aa, Homo sapiens
  Heavy chain CDR3 for antibody 1350 (IGHV4-39)
ARRGVLVVTAIPGFDY

SEQ ID NO: 2701 - protein, 9 aa, Homo sapiens
  Light chain CDR3 for antibody 1351 (IGKV6-21)
HQSSSLPYT

SEQ ID NO: 2702 - protein, 13 aa, Homo sapiens
  Heavy chain CDR3 for antibody 1351 (IGHV4-39)
ARHEVMVRGVFDY

SEQ ID NO: 2703 - protein, 9 aa, Homo sapiens
  Light chain CDR3 for antibody 1352 (IGKV1-17)
LQHNSYPYT

SEQ ID NO: 2704 - protein, 11 aa, Homo sapiens
  Heavy chain CDR3 for antibody 1352 (IGHV3-74)
ARDRGNWGFDY

SEQ ID NO: 2705 - protein, 10 aa, Homo sapiens
  Light chain CDR3 for antibody 1353 (IGKV1-39)
QQSYSTPMYT

SEQ ID NO: 2706 - protein, 11 aa, Homo sapiens
  Heavy chain CDR3 for antibody 1353 (IGHV3-33)
ARDRSSGPFDY

SEQ ID NO: 2707 - protein, 9 aa, Homo sapiens
  Light chain CDR3 for antibody 1354 (IGKV1D-16)
QQYNSYPYT

SEQ ID NO: 2708 - protein, 19 aa, Homo sapiens
  Heavy chain CDR3 for antibody 1354 (IGHV1-24)
ATAGLQWFGEKIGYYGMDV

SEQ ID NO: 2709 - protein, 9 aa, Homo sapiens
  Light chain CDR3 for antibody 1355 (IGKV1D-13)
QQFNNYPHT

SEQ ID NO: 2710 - protein, 18 aa, Homo sapiens
  Heavy chain CDR3 for antibody 1355 (IGHV4-59)
AREGHYYTSGSYYKAFDY

SEQ ID NO: 2711 - protein, 9 aa, Homo sapiens
  Light chain CDR3 for antibody 1356 (IGKV6-21)
HQSSSLPQT

SEQ ID NO: 2712 - protein, 14 aa, Homo sapiens
  Heavy chain CDR3 for antibody 1356 (IGHV3-64)
ARGRASSGPYYFDY

SEQ ID NO: 2713 - protein, 9 aa, Homo sapiens
  Light chain CDR3 for antibody 1357 (IGKV1-6)
LQDYNYPYT

SEQ ID NO: 2714 - protein, 15 aa, Homo sapiens
  Heavy chain CDR3 for antibody 1357 (IGHV3-33)
AKDRNSGYDWGGFDY

SEQ ID NO: 2715 - protein, 10 aa, Homo sapiens
  Light chain CDR3 for antibody 1358 (IGKV3-11)
QQRSIWPPYT

SEQ ID NO: 2716 - protein, 9 aa, Homo sapiens
  Heavy chain CDR3 for antibody 1358 (IGHV3-23)
AIGRYYFDY

SEQ ID NO: 2717 - protein, 9 aa, Homo sapiens
  Light chain CDR3 for antibody 1359 (IGKV3-20)
QQYGSSPYT

SEQ ID NO: 2718 - protein, 21 aa, Homo sapiens
  Heavy chain CDR3 for antibody 1359 (IGHV3-23)
AKDIDYYGSGSYPLYYYGMDV

SEQ ID NO: 2719 - protein, 9 aa, Homo sapiens
  Light chain CDR3 for antibody 1360 (IGKV3-20)
QQYGSSPYT

SEQ ID NO: 2720 - protein, 8 aa, Homo sapiens
  Heavy chain CDR3 for antibody 1360 (IGHV3-23)
AKESLLDY

SEQ ID NO: 2721 - protein, 9 aa, Homo sapiens
  Light chain CDR3 for antibody 1361 (IGKV6-21)
HQSSSLPYT

SEQ ID NO: 2722 - protein, 17 aa, Homo sapiens
  Heavy chain CDR3 for antibody 1361 (IGHV3-33)
ARVYYDILTGYSPAFDI

SEQ ID NO: 2723 - protein, 9 aa, Homo sapiens
  Light chain CDR3 for antibody 1362 (IGKV1-6)
LQDHDYPWT

SEQ ID NO: 2724 - protein, 10 aa, Homo sapiens
  Heavy chain CDR3 for antibody 1362 (IGHV3-72)
CRDREGFGDV

SEQ ID NO: 2725 - protein, 9 aa, Homo sapiens
  Light chain CDR3 for antibody 1363 (IGKV5-2)
LQHDNFPYT

SEQ ID NO: 2726 - protein, 17 aa, Homo sapiens
  Heavy chain CDR3 for antibody 1363 (IGHV3-33)
VREGGLLWVGELSLFDY

SEQ ID NO: 2727 - protein, 9 aa, Homo sapiens
  Light chain CDR3 for antibody 1364 (IGKV3D-20)
QQYGSSPYT

SEQ ID NO: 2728 - protein, 15 aa, Homo sapiens
  Heavy chain CDR3 for antibody 1364 (IGHV3-30)
ARRGYGSGSPDAFDL

SEQ ID NO: 2729 - protein, 9 aa, Homo sapiens
  Light chain CDR3 for antibody 1365 (IGKV3-20)
QQYGSSPYT

SEQ ID NO: 2730 - protein, 13 aa, Homo sapiens
  Heavy chain CDR3 for antibody 1365 (IGHV1-46)
ARRQVGYYYGMDV

SEQ ID NO: 2731 - protein, 9 aa, Homo sapiens
  Light chain CDR3 for antibody 1366 (IGKV5-2)
LQHDNFPYT

SEQ ID NO: 2732 - protein, 10 aa, Homo sapiens
  Heavy chain CDR3 for antibody 1366 (IGHV3-23)
AKDHYGDYPY

SEQ ID NO: 2733 - protein, 9 aa, Homo sapiens
  Light chain CDR3 for antibody 1367 (IGKV1-39)
QQSYRTPLT

SEQ ID NO: 2734 - protein, 9 aa, Homo sapiens
  Heavy chain CDR3 for antibody 1367 (IGHV3-30)
ARDNWGFDY

SEQ ID NO: 2735 - protein, 9 aa, Homo sapiens
  Light chain CDR3 for antibody 1368 (IGKV5-2)
LQHDNFPWT

SEQ ID NO: 2736 - protein, 17 aa, Homo sapiens
  Heavy chain CDR3 for antibody 1368 (IGHV4-59)
ARRITMVREIIITAFDY

SEQ ID NO: 2737 - protein, 9 aa, Homo sapiens
  Light chain CDR3 for antibody 1369 (IGKV6-21)
HQSSSLPYT

SEQ ID NO: 2738 - protein, 9 aa, Homo sapiens
  Heavy chain CDR3 for antibody 1369 (IGHV3-30)
ARDYFHYDY

SEQ ID NO: 2739 - protein, 9 aa, Homo sapiens
  Light chain CDR3 for antibody 1370 (IGKV5-2)
LQHDNFPWT

SEQ ID NO: 2740 - protein, 18 aa, Homo sapiens
  Heavy chain CDR3 for antibody 1370 (IGHV4-59)
ARERGNWNDVDYYYGMDV

SEQ ID NO: 2741 - protein, 9 aa, Homo sapiens
  Light chain CDR3 for antibody 1371 (IGKV1-39)
QQSYSTPLT

SEQ ID NO: 2742 - protein, 20 aa, Homo sapiens
  Heavy chain CDR3 for antibody 1371 (IGHV3-20)
ARDLCSSTSCYGYYYYGMDV

SEQ ID NO: 2743 - protein, 9 aa, Homo sapiens
  Light chain CDR3 for antibody 1372 (IGKV6-21)
HQSSSLPYT

SEQ ID NO: 2744 - protein, 12 aa, Homo sapiens
  Heavy chain CDR3 for antibody 1372 (IGHV1-24)
ASDWAYYYGMDV

SEQ ID NO: 2745 - protein, 9 aa, Homo sapiens
  Light chain CDR3 for antibody 1373 (IGKV5-2)
LQHDNFPYT

SEQ ID NO: 2746 - protein, 14 aa, Homo sapiens
  Heavy chain CDR3 for antibody 1373 (IGHV3-33)
ARDGYDFLTGPFDY

SEQ ID NO: 2747 - protein, 9 aa, Homo sapiens
  Light chain CDR3 for antibody 1374 (IGKV1D-16)
QQYNSFPLT

SEQ ID NO: 2748 - protein, 12 aa, Homo sapiens
  Heavy chain CDR3 for antibody 1374 (IGHV4-59)
ARDRSGWAYFDY

SEQ ID NO: 2749 - protein, 9 aa, Homo sapiens
  Light chain CDR3 for antibody 1375 (IGKV1D-16)
QQYNSYPYT

SEQ ID NO: 2750 - protein, 13 aa, Homo sapiens
  Heavy chain CDR3 for antibody 1375 (IGHV1-18)
ARSYYGSGSPFDY

SEQ ID NO: 2751 - protein, 9 aa, Homo sapiens
  Light chain CDR3 for antibody 1376 (IGKV3-20)
QQYGSSPYT

SEQ ID NO: 2752 - protein, 13 aa, Homo sapiens
  Heavy chain CDR3 for antibody 1376 (IGHV4-39)
ARRDVLAPAAFDY

SEQ ID NO: 2753 - protein, 8 aa, Homo sapiens
  Light chain CDR3 for antibody 1377 (IGKV1-5)
QQYNSYWT

SEQ ID NO: 2754 - protein, 11 aa, Homo sapiens
  Heavy chain CDR3 for antibody 1377 (IGHV3-33)
ARDRSSGPFDY

SEQ ID NO: 2755 - protein, 8 aa, Homo sapiens
  Light chain CDR3 for antibody 1378 (IGKV1-5)
QQYNSYYT

SEQ ID NO: 2756 - protein, 16 aa, Homo sapiens
  Heavy chain CDR3 for antibody 1378 (IGHV3-23)
AKEGMVLRYFDWLWDY

SEQ ID NO: 2757 - protein, 9 aa, Homo sapiens
  Light chain CDR3 for antibody 1379 (IGKV1D-16)
QQYNSYPLT

SEQ ID NO: 2758 - protein, 10 aa, Homo sapiens
  Heavy chain CDR3 for antibody 1379 (IGHV3-23)
AKEQWLVLDY

SEQ ID NO: 2759 - protein, 9 aa, Homo sapiens
  Light chain CDR3 for antibody 1380 (IGKV3-20)
QQYGSSPYT

SEQ ID NO: 2760 - protein, 9 aa, Homo sapiens
  Heavy chain CDR3 for antibody 1380 (IGHV3-30)
ARDYFHYDY

SEQ ID NO: 2761 - protein, 9 aa, Homo sapiens
  Light chain CDR3 for antibody 1381 (IGKV5-2)
LQHDNFPYT

SEQ ID NO: 2762 - protein, 12 aa, Homo sapiens
  Heavy chain CDR3 for antibody 1381 (IGHV3-23)
AKDGWFGESLDY

SEQ ID NO: 2763 - protein, 9 aa, Homo sapiens
  Light chain CDR3 for antibody 1382 (IGKV1-39)
QQSYSTPLT

SEQ ID NO: 2764 - protein, 12 aa, Homo sapiens
  Heavy chain CDR3 for antibody 1382 (IGHV3-33)
ARGYFGSGYAHF

SEQ ID NO: 2765 - protein, 9 aa, Homo sapiens
  Light chain CDR3 for antibody 1383 (IGKV1D-16)
QQYNSYPYT

SEQ ID NO: 2766 - protein, 14 aa, Homo sapiens
  Heavy chain CDR3 for antibody 1383 (IGHV3-33)
ARDLNYDILNGGGY

SEQ ID NO: 2767 - protein, 9 aa, Homo sapiens
  Light chain CDR3 for antibody 1384 (IGKV1-17)
LQHNSYPYT

SEQ ID NO: 2768 - protein, 17 aa, Homo sapiens
  Heavy chain CDR3 for antibody 1384 (IGHV3-33)
ARDSYDILTGYYKPFDY

SEQ ID NO: 2769 - protein, 9 aa, Homo sapiens
  Light chain CDR3 for antibody 1385 (IGKV5-2)
LQHDNFPYT

SEQ ID NO: 2770 - protein, 16 aa, Homo sapiens
  Heavy chain CDR3 for antibody 1385 (IGHV3-33)
ARGYDMLTGDYYGMDV

SEQ ID NO: 2771 - protein, 9 aa, Homo sapiens
  Light chain CDR3 for antibody 1386 (IGKV1-6)
LQDYNYPYT

SEQ ID NO: 2772 - protein, 16 aa, Homo sapiens
  Heavy chain CDR3 for antibody 1386 (IGHV3-20)
AREGYSSSWFDRNFDY

SEQ ID NO: 2773 - protein, 9 aa, Homo sapiens
  Light chain CDR3 for antibody 1387 (IGKV1D-16)
QQYNSYPYT

SEQ ID NO: 2774 - protein, 14 aa, Homo sapiens
  Heavy chain CDR3 for antibody 1387 (IGHV3-64)
ARDHAAGGYSHSDY

SEQ ID NO: 2775 - protein, 9 aa, Homo sapiens
  Light chain CDR3 for antibody 1388 (IGKV3-20)
QQYGSSPYT

SEQ ID NO: 2776 - protein, 18 aa, Homo sapiens
  Heavy chain CDR3 for antibody 1388 (IGHV3-33)
ARDRDRYGSGTYPDAIDI

SEQ ID NO: 2777 - protein, 9 aa, Homo sapiens
  Light chain CDR3 for antibody 1389 (IGKV5-2)
LQHDNFPWT

SEQ ID NO: 2778 - protein, 18 aa, Homo sapiens
  Heavy chain CDR3 for antibody 1389 (IGHV6-1)
ARDQYSYGPYYYYYGMDV

SEQ ID NO: 2779 - protein, 9 aa, Homo sapiens
  Light chain CDR3 for antibody 1390 (IGKV3D-7)
QQDYNLPLT

SEQ ID NO: 2780 - protein, 13 aa, Homo sapiens
  Heavy chain CDR3 for antibody 1390 (IGHV4-61)
ARDGSSSGWDFDY

SEQ ID NO: 2781 - protein, 9 aa, Homo sapiens
  Light chain CDR3 for antibody 1391 (IGKV3-11)
QQRSNWPYT

SEQ ID NO: 2782 - protein, 14 aa, Homo sapiens
  Heavy chain CDR3 for antibody 1391 (IGHV3-23)
AKSRIVGALYYFDY

SEQ ID NO: 2783 - protein, 9 aa, Homo sapiens
  Light chain CDR3 for antibody 1392 (IGKV2-30)
MQGTHWPLT

SEQ ID NO: 2784 - protein, 15 aa, Homo sapiens
  Heavy chain CDR3 for antibody 1392 (IGHV3-30)
ARGAMVRGVDYGMDV

SEQ ID NO: 2785 - protein, 9 aa, Homo sapiens
  Light chain CDR3 for antibody 1393 (IGKV6-21)
HQSSSLPYT

SEQ ID NO: 2786 - protein, 14 aa, Homo sapiens
  Heavy chain CDR3 for antibody 1393 (IGHV3-33)
ARAGSGYDRDWFDP

SEQ ID NO: 2787 - protein, 9 aa, Homo sapiens
  Light chain CDR3 for antibody 1394 (IGKV1-27)
QKYNSAPYT

SEQ ID NO: 2788 - protein, 12 aa, Homo sapiens
  Heavy chain CDR3 for antibody 1394 (IGHV3-13)
AREAGIPDAFDI

SEQ ID NO: 2789 - protein, 9 aa, Homo sapiens
  Light chain CDR3 for antibody 1395 (IGKV6-21)
HQSSSLPYT

SEQ ID NO: 2790 - protein, 14 aa, Homo sapiens
  Heavy chain CDR3 for antibody 1395 (IGHV3-23)
ANWAYDILTGYLDY

SEQ ID NO: 2791 - protein, 9 aa, Homo sapiens
  Light chain CDR3 for antibody 1396 (IGKV1-39)
QQSYRTPLT

SEQ ID NO: 2792 - protein, 13 aa, Homo sapiens
  Heavy chain CDR3 for antibody 1396 (IGHV3-11)
ARDEGYRGYVLDT

SEQ ID NO: 2793 - protein, 9 aa, Homo sapiens
  Light chain CDR3 for antibody 1397 (IGKV1-39)
QQSYSTPFT

SEQ ID NO: 2794 - protein, 11 aa, Homo sapiens
  Heavy chain CDR3 for antibody 1397 (IGHV4-59)
ARSLRYSVFDY

SEQ ID NO: 2795 - protein, 9 aa, Homo sapiens
  Light chain CDR3 for antibody 1398 (IGKV6-21)
HQSSSFPHT

SEQ ID NO: 2796 - protein, 16 aa, Homo sapiens
  Heavy chain CDR3 for antibody 1398 (IGHV4-39)
ARHPLIWTGYPNWFDP

SEQ ID NO: 2797 - protein, 9 aa, Homo sapiens
  Light chain CDR3 for antibody 1399 (IGKV6-21)
HQSSSLPYT

SEQ ID NO: 2798 - protein, 12 aa, Homo sapiens
  Heavy chain CDR3 for antibody 1399 (IGHV3-33)
AREGDILTGYSL

SEQ ID NO: 2799 - protein, 9 aa, Homo sapiens
  Light chain CDR3 for antibody 1400 (IGKV3D-20)
QQYGSSPYT

SEQ ID NO: 2800 - protein, 11 aa, Homo sapiens
  Heavy chain CDR3 for antibody 1400 (IGHV3-33)
ARAGIAAVFDY

SEQ ID NO: 2801 - protein, 9 aa, Homo sapiens
  Light chain CDR3 for antibody 1401 (IGKV1D-16)
QQYNSYPLT

SEQ ID NO: 2802 - protein, 17 aa, Homo sapiens
  Heavy chain CDR3 for antibody 1401 (IGHV3-33)
ARVRGVIEGYYYYGMDV

SEQ ID NO: 2803 - protein, 9 aa, Homo sapiens
  Light chain CDR3 for antibody 1402 (IGKV5-2)
LQHDNFPYT

SEQ ID NO: 2804 - protein, 12 aa, Homo sapiens
  Heavy chain CDR3 for antibody 1402 (IGHV3-33)
AREGDILTGYSL

SEQ ID NO: 2805 - protein, 8 aa, Homo sapiens
  Light chain CDR3 for antibody 1403 (IGKV3D-7)
QQDYNLLT

SEQ ID NO: 2806 - protein, 16 aa, Homo sapiens
  Heavy chain CDR3 for antibody 1403 (IGHV3-23)
AKEGMVLRYFDWLWDY

SEQ ID NO: 2807 - protein, 9 aa, Homo sapiens
  Light chain CDR3 for antibody 1404 (IGKV1-17)
LQHNSYPYT

SEQ ID NO: 2808 - protein, 17 aa, Homo sapiens
  Heavy chain CDR3 for antibody 1404 (IGHV3-64)
ARERYYGSGSYYNWFDP

SEQ ID NO: 2809 - protein, 9 aa, Homo sapiens
  Light chain CDR3 for antibody 1405 (IGKV1D-16)
QQYNSYPYT

SEQ ID NO: 2810 - protein, 13 aa, Homo sapiens
  Heavy chain CDR3 for antibody 1405 (IGHV1-18)
ARKWEWDLLNFDY

SEQ ID NO: 2811 - protein, 9 aa, Homo sapiens
  Light chain CDR3 for antibody 1406 (IGKV5-2)
LQHDNFPYT

SEQ ID NO: 2812 - protein, 14 aa, Homo sapiens
  Heavy chain CDR3 for antibody 1406 (IGHV3-33)
ARRGSPLRPSHLDV

SEQ ID NO: 2813 - protein, 9 aa, Homo sapiens
  Light chain CDR3 for antibody 1407 (IGKV6-21)
HQSSSLPYT

SEQ ID NO: 2814 - protein, 10 aa, Homo sapiens
  Heavy chain CDR3 for antibody 1407 (IGHV3-23)
AKDHYGDYPY

SEQ ID NO: 2815 - protein, 9 aa, Homo sapiens
  Light chain CDR3 for antibody 1408 (IGKV1-17)
LQHNSYPYT

SEQ ID NO: 2816 - protein, 18 aa, Homo sapiens
  Heavy chain CDR3 for antibody 1408 (IGHV3-33)
ARDRGDILTGYYKGWFDP

SEQ ID NO: 2817 - protein, 9 aa, Homo sapiens
  Light chain CDR3 for antibody 1409 (IGKV6-21)
HQSSSLPYT

SEQ ID NO: 2818 - protein, 18 aa, Homo sapiens
  Heavy chain CDR3 for antibody 1409 (IGHV3-33)
ARDRYYDILTGYYMGFDY

SEQ ID NO: 2819 - protein, 9 aa, Homo sapiens
  Light chain CDR3 for antibody 1410 (IGKV3-20)
QQYGSSPYT

SEQ ID NO: 2820 - protein, 14 aa, Homo sapiens
  Heavy chain CDR3 for antibody 1410 (IGHV3-33)
ARDGYDFLTGPFDY

SEQ ID NO: 2821 - protein, 9 aa, Homo sapiens
  Light chain CDR3 for antibody 1411 (IGKV1-17)
LQHNSYPYT

SEQ ID NO: 2822 - protein, 18 aa, Homo sapiens
  Heavy chain CDR3 for antibody 1411 (IGHV3-33)
ARGGVLYDILTGFYGMDV

SEQ ID NO: 2823 - protein, 9 aa, Homo sapiens
  Light chain CDR3 for antibody 1412 (IGKV6-21)
HQSSSLPYT

SEQ ID NO: 2824 - protein, 12 aa, Homo sapiens
  Heavy chain CDR3 for antibody 1412 (IGHV1-46)
AREDYDIDGMDV

SEQ ID NO: 2825 - protein, 9 aa, Homo sapiens
  Light chain CDR3 for antibody 1413 (IGKV1-39)
QQSYSTPLT

SEQ ID NO: 2826 - protein, 12 aa, Homo sapiens
  Heavy chain CDR3 for antibody 1413 (IGHV3-33)
ARESGGSYSFDY

SEQ ID NO: 2827 - protein, 9 aa, Homo sapiens
  Light chain CDR3 for antibody 1414 (IGKV3-15)
QQYNNWPLT

SEQ ID NO: 2828 - protein, 16 aa, Homo sapiens
  Heavy chain CDR3 for antibody 1414 (IGHV3-23)
AKEGMVLRYFDWLWDY

SEQ ID NO: 2829 - protein, 8 aa, Homo sapiens
  Light chain CDR3 for antibody 1415 (IGKV3-20)
QQYGRSWT

SEQ ID NO: 2830 - protein, 13 aa, Homo sapiens
  Heavy chain CDR3 for antibody 1415 (IGHV3-33)
ARRGSGSPDGFDI

SEQ ID NO: 2831 - protein, 9 aa, Homo sapiens
  Light chain CDR3 for antibody 1416 (IGKV1D-16)
QQYNSYPYT

SEQ ID NO: 2832 - protein, 14 aa, Homo sapiens
  Heavy chain CDR3 for antibody 1416 (IGHV3-15)
SIYYYGSGRDFFDY

SEQ ID NO: 2833 - protein, 9 aa, Homo sapiens
  Light chain CDR3 for antibody 1417 (IGKV6-21)
HQSSSLPYT

SEQ ID NO: 2834 - protein, 13 aa, Homo sapiens
  Heavy chain CDR3 for antibody 1417 (IGHV3-33)
AKEDGDYHHYFDY

SEQ ID NO: 2835 - protein, 9 aa, Homo sapiens
  Light chain CDR3 for antibody 1418 (IGKV1-39)
QQSYSTPLT

SEQ ID NO: 2836 - protein, 13 aa, Homo sapiens
  Heavy chain CDR3 for antibody 1418 (IGHV3-33)
ARDQRYSSGWYDY

SEQ ID NO: 2837 - protein, 9 aa, Homo sapiens
  Light chain CDR3 for antibody 1419 (IGKV5-2)
LQHDNFPYT

SEQ ID NO: 2838 - protein, 18 aa, Homo sapiens
  Heavy chain CDR3 for antibody 1419 (IGHV3-23)
ARYHLYFGSGFGSDGMDV

SEQ ID NO: 2839 - protein, 9 aa, Homo sapiens
  Light chain CDR3 for antibody 1420 (IGKV1-6)
LQDYNYPYT

SEQ ID NO: 2840 - protein, 12 aa, Homo sapiens
  Heavy chain CDR3 for antibody 1420 (IGHV3-23)
AKEGLGSDYEPY

SEQ ID NO: 2841 - protein, 9 aa, Homo sapiens
  Light chain CDR3 for antibody 1421 (IGKV1-6)
LQDYKSPFT

SEQ ID NO: 2842 - protein, 16 aa, Homo sapiens
  Heavy chain CDR3 for antibody 1421 (IGHV3-23)
AKEGMVLRYFDWLWDY

SEQ ID NO: 2843 - protein, 9 aa, Homo sapiens
  Light chain CDR3 for antibody 1422 (IGKV6-21)
HQSSSLPYT

SEQ ID NO: 2844 - protein, 19 aa, Homo sapiens
  Heavy chain CDR3 for antibody 1422 (IGHV3-74)
AGTYPTFYDGSGNYYDFDY

SEQ ID NO: 2845 - protein, 8 aa, Homo sapiens
  Light chain CDR3 for antibody 1423 (IGKV3D-7)
QQDYNLVT

SEQ ID NO: 2846 - protein, 18 aa, Homo sapiens
  Heavy chain CDR3 for antibody 1423 (IGHV4-59)
AREGDYVWGSYRPNWFDP

SEQ ID NO: 2847 - protein, 9 aa, Homo sapiens
  Light chain CDR3 for antibody 1424 (IGKV3-20)
QQYGSSPYT

SEQ ID NO: 2848 - protein, 13 aa, Homo sapiens
  Heavy chain CDR3 for antibody 1424 (IGHV3-33)
ARRATLVRGVFDP

SEQ ID NO: 2849 - protein, 9 aa, Homo sapiens
  Light chain CDR3 for antibody 1425 (IGKV3-20)
QQYGSSPYT

SEQ ID NO: 2850 - protein, 12 aa, Homo sapiens
  Heavy chain CDR3 for antibody 1425 (IGHV3-33)
ARVDTAAPYFDY

SEQ ID NO: 2851 - protein, 9 aa, Homo sapiens
  Light chain CDR3 for antibody 1426 (IGKV1-17)
LQHNSYPYT

SEQ ID NO: 2852 - protein, 16 aa, Homo sapiens
  Heavy chain CDR3 for antibody 1426 (IGHV3-23)
AKEGEVLRYFDWLFNY

SEQ ID NO: 2853 - protein, 9 aa, Homo sapiens
  Light chain CDR3 for antibody 1427 (IGKV1D-13)
QQFNNYPYT

SEQ ID NO: 2854 - protein, 13 aa, Homo sapiens
  Heavy chain CDR3 for antibody 1427 (IGHV3-33)
ARAFTMVRGVIDY

SEQ ID NO: 2855 - protein, 9 aa, Homo sapiens
  Light chain CDR3 for antibody 1428 (IGKV1-17)
LQHNSYPYT

SEQ ID NO: 2856 - protein, 17 aa, Homo sapiens
  Heavy chain CDR3 for antibody 1428 (IGHV3-30)
AREGVRGLIYYYYGMDV

SEQ ID NO: 2857 - protein, 9 aa, Homo sapiens
  Light chain CDR3 for antibody 1429 (IGKV6-21)
HQSSSLPYT

SEQ ID NO: 2858 - protein, 16 aa, Homo sapiens
  Heavy chain CDR3 for antibody 1429 (IGHV3-33)
ARGYDMLTGDYYGMDV

SEQ ID NO: 2859 - protein, 9 aa, Homo sapiens
  Light chain CDR3 for antibody 1430 (IGKV6-21)
HQSSSLPYT

SEQ ID NO: 2860 - protein, 20 aa, Homo sapiens
  Heavy chain CDR3 for antibody 1430 (IGHV3-23)
AKGMGGLRYFDWPHYYGMDV

SEQ ID NO: 2861 - protein, 9 aa, Homo sapiens
  Light chain CDR3 for antibody 1431 (IGKV1-39)
QQSYSTPLT

SEQ ID NO: 2862 - protein, 13 aa, Homo sapiens
  Heavy chain CDR3 for antibody 1431 (IGHV3-33)
ARDWGYSHGYFDY

SEQ ID NO: 2863 - protein, 9 aa, Homo sapiens
  Light chain CDR3 for antibody 1432 (IGKV3-20)
QQYGSSPYT

SEQ ID NO: 2864 - protein, 13 aa, Homo sapiens
  Heavy chain CDR3 for antibody 1432 (IGHV3-33)
ARDQRYSSGWYDY

SEQ ID NO: 2865 - protein, 9 aa, Homo sapiens
  Light chain CDR3 for antibody 1433 (IGKV1D-16)
QQYNSYPLT

SEQ ID NO: 2866 - protein, 17 aa, Homo sapiens
  Heavy chain CDR3 for antibody 1433 (IGHV3-33)
ARGDGDILTGYYEWFDP

SEQ ID NO: 2867 - protein, 9 aa, Homo sapiens
  Light chain CDR3 for antibody 1434 (IGKV5-2)
LQHDNFPYT

SEQ ID NO: 2868 - protein, 15 aa, Homo sapiens
  Heavy chain CDR3 for antibody 1434 (IGHV3-33)
VCVLYDYGDYVGFDY

SEQ ID NO: 2869 - protein, 9 aa, Homo sapiens
  Light chain CDR3 for antibody 1435 (IGKV1D-16)
QQYNSYPYT

SEQ ID NO: 2870 - protein, 12 aa, Homo sapiens
  Heavy chain CDR3 for antibody 1435 (IGHV3-33)
ARDYGSGSFFDY

SEQ ID NO: 2871 - protein, 9 aa, Homo sapiens
  Light chain CDR3 for antibody 1436 (IGKV5-2)
LQHDNFPYT

SEQ ID NO: 2872 - protein, 8 aa, Homo sapiens
  Heavy chain CDR3 for antibody 1436 (IGHV3-23)
EKSAGEDV

SEQ ID NO: 2873 - protein, 9 aa, Homo sapiens
  Light chain CDR3 for antibody 1437 (IGKV1-6)
LQDYNYPYT

SEQ ID NO: 2874 - protein, 18 aa, Homo sapiens
  Heavy chain CDR3 for antibody 1437 (IGHV1-8)
ARSRIAAAGIYYYYGMDV

SEQ ID NO: 2875 - protein, 9 aa, Homo sapiens
  Light chain CDR3 for antibody 1438 (IGKV1D-16)
QQYNSYPYT

SEQ ID NO: 2876 - protein, 17 aa, Homo sapiens
  Heavy chain CDR3 for antibody 1438 (IGHV3-33)
ARDQDDILTGYYWYFDL

SEQ ID NO: 2877 - protein, 9 aa, Homo sapiens
  Light chain CDR3 for antibody 1439 (IGKV1-17)
LQHNSYPYT

SEQ ID NO: 2878 - protein, 13 aa, Homo sapiens
  Heavy chain CDR3 for antibody 1439 (IGHV3-30)
AAPFMVRGDGMDV

SEQ ID NO: 2879 - protein, 9 aa, Homo sapiens
  Light chain CDR3 for antibody 1440 (IGKV1D-13)
QQFNNYPHT

SEQ ID NO: 2880 - protein, 13 aa, Homo sapiens
  Heavy chain CDR3 for antibody 1440 (IGHV3-33)
ASTGDSYYYGMDV

SEQ ID NO: 2881 - protein, 9 aa, Homo sapiens
  Light chain CDR3 for antibody 1441 (IGKV6-21)
HQSSSLPYT

SEQ ID NO: 2882 - protein, 13 aa, Homo sapiens
  Heavy chain CDR3 for antibody 1441 (IGHV3-33)
ARGDNWNDGGFDY

SEQ ID NO: 2883 - protein, 9 aa, Homo sapiens
  Light chain CDR3 for antibody 1442 (IGKV1D-16)
QQYNSYPYT

SEQ ID NO: 2884 - protein, 14 aa, Homo sapiens
  Heavy chain CDR3 for antibody 1442 (IGHV3-33)
VSAISGSSYWYFAL

SEQ ID NO: 2885 - protein, 9 aa, Homo sapiens
  Light chain CDR3 for antibody 1443 (IGKV1-9)
QQLKSYLYT

SEQ ID NO: 2886 - protein, 13 aa, Homo sapiens
  Heavy chain CDR3 for antibody 1443 (IGHV4-59)
ARDAGYSSSWFDY

SEQ ID NO: 2887 - protein, 10 aa, Homo sapiens
  Light chain CDR3 for antibody 1444 (IGKV3-15)
QQYNNWPPIT

SEQ ID NO: 2888 - protein, 17 aa, Homo sapiens
  Heavy chain CDR3 for antibody 1444 (IGHV3-23)
AKGISVADYYYYYAFDV

SEQ ID NO: 2889 - protein, 9 aa, Homo sapiens
  Light chain CDR3 for antibody 1445 (IGKV1-27)
QKYNSAPYT

SEQ ID NO: 2890 - protein, 15 aa, Homo sapiens
  Heavy chain CDR3 for antibody 1445 (IGHV3-33)
ARDTGYSSSWNWFDP

SEQ ID NO: 2891 - protein, 9 aa, Homo sapiens
  Light chain CDR3 for antibody 1446 (IGKV1-39)
QQSYSTPFT

SEQ ID NO: 2892 - protein, 12 aa, Homo sapiens
  Heavy chain CDR3 for antibody 1446 (IGHV4-61)
ARVYSSGWLFDY

SEQ ID NO: 2893 - protein, 9 aa, Homo sapiens
  Light chain CDR3 for antibody 1447 (IGKV5-2)
LQHDNFPYT

SEQ ID NO: 2894 - protein, 15 aa, Homo sapiens
  Heavy chain CDR3 for antibody 1447 (IGHV3-33)
ARRGYNDYDPYGMDV

SEQ ID NO: 2895 - protein, 9 aa, Homo sapiens
  Light chain CDR3 for antibody 1448 (IGKV6-21)
HQSSSLPYT

SEQ ID NO: 2896 - protein, 18 aa, Homo sapiens
  Heavy chain CDR3 for antibody 1448 (IGHV3-33)
ARGLLWFGVSYYYYGMDV

SEQ ID NO: 2897 - protein, 9 aa, Homo sapiens
  Light chain CDR3 for antibody 1449 (IGKV1-17)
LQHNSYPYT

SEQ ID NO: 2898 - protein, 20 aa, Homo sapiens
  Heavy chain CDR3 for antibody 1449 (IGHV3-33)
ARDWMVRGVIITDYYYGMDV

SEQ ID NO: 2899 - protein, 9 aa, Homo sapiens
  Light chain CDR3 for antibody 1450 (IGKV5-2)
LQHDNFPYT

SEQ ID NO: 2900 - protein, 17 aa, Homo sapiens
  Heavy chain CDR3 for antibody 1450 (IGHV3-23)
AKDGIGELSYYYYGMDV

SEQ ID NO: 2901 - protein, 9 aa, Homo sapiens
  Light chain CDR3 for antibody 1451 (IGKV1-6)
LQDYNYPYT

SEQ ID NO: 2902 - protein, 24 aa, Homo sapiens
  Heavy chain CDR3 for antibody 1451 (IGHV1-46)
ARDEARGLLTGYYNMREYYYGMDV

SEQ ID NO: 2903 - protein, 9 aa, Homo sapiens
  Light chain CDR3 for antibody 1452 (IGKV5-2)
LQHDNFPYT

SEQ ID NO: 2904 - protein, 17 aa, Homo sapiens
  Heavy chain CDR3 for antibody 1452 (IGHV3-23)
AKDGSFYSSGWYDAFDI

SEQ ID NO: 2905 - protein, 9 aa, Homo sapiens
  Light chain CDR3 for antibody 1453 (IGKV1-17)
LQHNSYPYT

SEQ ID NO: 2906 - protein, 19 aa, Homo sapiens
  Heavy chain CDR3 for antibody 1453 (IGHV3-33)
ARGPYYDILTGYGYYGMDV

SEQ ID NO: 2907 - protein, 9 aa, Homo sapiens
  Light chain CDR3 for antibody 1454 (IGKV1-27)
QKYNSAPYT

SEQ ID NO: 2908 - protein, 14 aa, Homo sapiens
  Heavy chain CDR3 for antibody 1454 (IGHV3-23)
AKSRIVGALYYFDY

SEQ ID NO: 2909 - protein, 9 aa, Homo sapiens
  Light chain CDR3 for antibody 1455 (IGKV3D-20)
QQYGSSPYT

SEQ ID NO: 2910 - protein, 13 aa, Homo sapiens
  Heavy chain CDR3 for antibody 1455 (IGHV3-33)
ARVDTMVRGVMAY

SEQ ID NO: 2911 - protein, 9 aa, Homo sapiens
  Light chain CDR3 for antibody 1456 (IGKV1-17)
LQHNSYPYT

SEQ ID NO: 2912 - protein, 16 aa, Homo sapiens
  Heavy chain CDR3 for antibody 1456 (IGHV3-33)
AREVAGSYYYYYGMDV

SEQ ID NO: 2913 - protein, 9 aa, Homo sapiens
  Light chain CDR3 for antibody 1457 (IGKV3-20)
QQYGSSPYT

SEQ ID NO: 2914 - protein, 13 aa, Homo sapiens
  Heavy chain CDR3 for antibody 1457 (IGHV3-53)
ARSGSYWGYYFDY

SEQ ID NO: 2915 - protein, 9 aa, Homo sapiens
  Light chain CDR3 for antibody 1458 (IGKV1D-13)
QQFNNYPYT

SEQ ID NO: 2916 - protein, 12 aa, Homo sapiens
  Heavy chain CDR3 for antibody 1458 (IGHV3-33)
ARDRAYRGSLDY

SEQ ID NO: 2917 - protein, 9 aa, Homo sapiens
  Light chain CDR3 for antibody 1459 (IGKV1D-13)
QQFNNYPHT

SEQ ID NO: 2918 - protein, 13 aa, Homo sapiens
  Heavy chain CDR3 for antibody 1459 (IGHV3-23)
ARAFFMVRGVIDF

SEQ ID NO: 2919 - protein, 9 aa, Homo sapiens
  Light chain CDR3 for antibody 1460 (IGKV3-20)
QQYGSSPYT

SEQ ID NO: 2920 - protein, 12 aa, Homo sapiens
  Heavy chain CDR3 for antibody 1460 (IGHV3-33)
ARDPGYYYGLDV

SEQ ID NO: 2921 - protein, 8 aa, Homo sapiens
  Light chain CDR3 for antibody 1461 (IGKV3D-7)
QQDYNLLT

SEQ ID NO: 2922 - protein, 13 aa, Homo sapiens
  Heavy chain CDR3 for antibody 1461 (IGHV4-34)
ASNFYYYYYGMDV

SEQ ID NO: 2923 - protein, 9 aa, Homo sapiens
  Light chain CDR3 for antibody 1462 (IGKV1-39)
QQSYSTPLT

SEQ ID NO: 2924 - protein, 15 aa, Homo sapiens
  Heavy chain CDR3 for antibody 1462 (IGHV3-33)
ARDTGYSSSWNWFDP

SEQ ID NO: 2925 - protein, 9 aa, Homo sapiens
  Light chain CDR3 for antibody 1463 (IGKV3-20)
QQYGSSPYT

SEQ ID NO: 2926 - protein, 13 aa, Homo sapiens
  Heavy chain CDR3 for antibody 1463 (IGHV4-39)
ARHPPSRDYGMDV

SEQ ID NO: 2927 - protein, 9 aa, Homo sapiens
  Light chain CDR3 for antibody 1464 (IGKV3D-7)
QQDYNLPLT

SEQ ID NO: 2928 - protein, 9 aa, Homo sapiens
  Heavy chain CDR3 for antibody 1464 (IGHV1-18)
ARGKDWFDP

SEQ ID NO: 2929 - protein, 9 aa, Homo sapiens
  Light chain CDR3 for antibody 1465 (IGKV3-20)
QQYGSSPYT

SEQ ID NO: 2930 - protein, 14 aa, Homo sapiens
  Heavy chain CDR3 for antibody 1465 (IGHV1-2)
ARDYYGSGNYYMGY

SEQ ID NO: 2931 - protein, 9 aa, Homo sapiens
  Light chain CDR3 for antibody 1466 (IGKV1D-13)
QQFNNYPYT

SEQ ID NO: 2932 - protein, 9 aa, Homo sapiens
  Heavy chain CDR3 for antibody 1466 (IGHV3-30)
ARDYFHYDY

SEQ ID NO: 2933 - protein, 9 aa, Homo sapiens
  Light chain CDR3 for antibody 1467 (IGKV1D-16)
QQYNSYPYT

SEQ ID NO: 2934 - protein, 13 aa, Homo sapiens
  Heavy chain CDR3 for antibody 1467 (IGHV3-33)
ARALYSSSWPGDY

SEQ ID NO: 2935 - protein, 9 aa, Homo sapiens
  Light chain CDR3 for antibody 1468 (IGKV5-2)
LQHDNFPYT

SEQ ID NO: 2936 - protein, 12 aa, Homo sapiens
  Heavy chain CDR3 for antibody 1468 (IGHV3-33)
ARDPGYYYGLDV

SEQ ID NO: 2937 - protein, 9 aa, Homo sapiens
  Light chain CDR3 for antibody 1469 (IGKV5-2)
LQHDNFPYT

SEQ ID NO: 2938 - protein, 24 aa, Homo sapiens
  Heavy chain CDR3 for antibody 1469 (IGHV3-20)
ARGRITMVRGVIINPLDYYNGMDV

SEQ ID NO: 2939 - protein, 9 aa, Homo sapiens
  Light chain CDR3 for antibody 1470 (IGKV1-6)
LQDYHYPWT

SEQ ID NO: 2940 - protein, 14 aa, Homo sapiens
  Heavy chain CDR3 for antibody 1470 (IGHV3-33)
ARDGVYISSSWFDP

SEQ ID NO: 2941 - protein, 9 aa, Homo sapiens
  Light chain CDR3 for antibody 1471 (IGKV5-2)
LQHDNFPWT

SEQ ID NO: 2942 - protein, 8 aa, Homo sapiens
  Heavy chain CDR3 for antibody 1471 (IGHV4-39)
ARRGGLDY

SEQ ID NO: 2943 - protein, 9 aa, Homo sapiens
  Light chain CDR3 for antibody 1472 (IGKV1-39)
QQSYSTPFT

SEQ ID NO: 2944 - protein, 15 aa, Homo sapiens
  Heavy chain CDR3 for antibody 1472 (IGHV4-59)
ARDLGHYYGSVSIDY

SEQ ID NO: 2945 - protein, 9 aa, Homo sapiens
  Light chain CDR3 for antibody 1473 (IGKV1-39)
QQSYSTPLT

SEQ ID NO: 2946 - protein, 14 aa, Homo sapiens
  Heavy chain CDR3 for antibody 1473 (IGHV4-39)
ARQDYDILTGLFDY

SEQ ID NO: 2947 - protein, 9 aa, Homo sapiens
  Light chain CDR3 for antibody 1474 (IGKV3D-7)
QQDYNLPFT

SEQ ID NO: 2948 - protein, 9 aa, Homo sapiens
  Heavy chain CDR3 for antibody 1474 (IGHV3-23)
ATIAADFDY

SEQ ID NO: 2949 - protein, 9 aa, Homo sapiens
  Light chain CDR3 for antibody 1475 (IGKV1D-13)
QQFNNYPHT

SEQ ID NO: 2950 - protein, 15 aa, Homo sapiens
  Heavy chain CDR3 for antibody 1475 (IGHV3-33)
ARRVCSGGSCSLFDY

SEQ ID NO: 2951 - protein, 9 aa, Homo sapiens
  Light chain CDR3 for antibody 1476 (IGKV1D-13)
QQFNNYPYT

SEQ ID NO: 2952 - protein, 9 aa, Homo sapiens
  Heavy chain CDR3 for antibody 1476 (IGHV3-30)
ARDNWGFDY

SEQ ID NO: 2953 - protein, 9 aa, Homo sapiens
  Light chain CDR3 for antibody 1477 (IGKV1-9)
QQYNSYPLT

SEQ ID NO: 2954 - protein, 8 aa, Homo sapiens
  Heavy chain CDR3 for antibody 1477 (IGHV4-39)
ARRGGLDY

SEQ ID NO: 2955 - protein, 9 aa, Homo sapiens
  Light chain CDR3 for antibody 1478 (IGKV1-9)
QQLNSYPLT

SEQ ID NO: 2956 - protein, 11 aa, Homo sapiens
  Heavy chain CDR3 for antibody 1478 (IGHV3-33)
AREAANWGFDY

SEQ ID NO: 2957 - protein, 9 aa, Homo sapiens
  Light chain CDR3 for antibody 1479 (IGKV6-21)
HQSSSLPYT

SEQ ID NO: 2958 - protein, 14 aa, Homo sapiens
  Heavy chain CDR3 for antibody 1479 (IGHV3-33)
VRDAMGATTAWFDP

SEQ ID NO: 2959 - protein, 11 aa, Homo sapiens
  Light chain CDR3 for antibody 1480 (IGKV3-11)
QQRSNWPPTWT

SEQ ID NO: 2960 - protein, 13 aa, Homo sapiens
  Heavy chain CDR3 for antibody 1480 (IGHV4-34)
ASNFYYYYYGMDV

SEQ ID NO: 2961 - protein, 9 aa, Homo sapiens
  Light chain CDR3 for antibody 1481 (IGKV1-39)
QQSYSTPLT

SEQ ID NO: 2962 - protein, 15 aa, Homo sapiens
  Heavy chain CDR3 for antibody 1481 (IGHV1-18)
ARGYCSSTSCYYFDY

SEQ ID NO: 2963 - protein, 9 aa, Homo sapiens
  Light chain CDR3 for antibody 1482 (IGKV6-21)
HQSSSLPYT

SEQ ID NO: 2964 - protein, 21 aa, Homo sapiens
  Heavy chain CDR3 for antibody 1482 (IGHV3-23)
AKDIDYYGSGSYPLYYYGMDV

SEQ ID NO: 2965 - protein, 9 aa, Homo sapiens
  Light chain CDR3 for antibody 1483 (IGKV1-6)
LQDYNYPLT

SEQ ID NO: 2966 - protein, 12 aa, Homo sapiens
  Heavy chain CDR3 for antibody 1483 (IGHV1-18)
ARLGGFGEFPDC

SEQ ID NO: 2967 - protein, 9 aa, Homo sapiens
  Light chain CDR3 for antibody 1484 (IGKV1-17)
LQHNSYPYT

SEQ ID NO: 2968 - protein, 18 aa, Homo sapiens
  Heavy chain CDR3 for antibody 1484 (IGHV3-33)
ARDGRISLVRGIIDAFDI

SEQ ID NO: 2969 - protein, 9 aa, Homo sapiens
  Light chain CDR3 for antibody 1485 (IGKV1-6)
LQDYNYPYT

SEQ ID NO: 2970 - protein, 11 aa, Homo sapiens
  Heavy chain CDR3 for antibody 1485 (IGHV4-39)
AREFDWSPFDY

SEQ ID NO: 2971 - protein, 9 aa, Homo sapiens
  Light chain CDR3 for antibody 1486 (IGKV5-2)
LQHDNFPYT

SEQ ID NO: 2972 - protein, 14 aa, Homo sapiens
  Heavy chain CDR3 for antibody 1486 (IGHV3-23)
AKDRYRGYEGLFDY

SEQ ID NO: 2973 - protein, 10 aa, Homo sapiens
  Light chain CDR3 for antibody 1487 (IGKV1-17)
LQHNSYPMYT

SEQ ID NO: 2974 - protein, 16 aa, Homo sapiens
  Heavy chain CDR3 for antibody 1487 (IGHV3-23)
AKEGMVLRYFDWLWDY

SEQ ID NO: 2975 - protein, 9 aa, Homo sapiens
  Light chain CDR3 for antibody 1488 (IGKV1-9)
QQLNSYPLT

SEQ ID NO: 2976 - protein, 13 aa, Homo sapiens
  Heavy chain CDR3 for antibody 1488 (IGHV4-39)
ARRDVLAPAAFDY

SEQ ID NO: 2977 - protein, 9 aa, Homo sapiens
  Light chain CDR3 for antibody 1489 (IGKV1D-13)
QQFNNYPYT

SEQ ID NO: 2978 - protein, 18 aa, Homo sapiens
  Heavy chain CDR3 for antibody 1489 (IGHV3-33)
ARDGYSGYDYYYYYGMDV

SEQ ID NO: 2979 - protein, 8 aa, Homo sapiens
  Light chain CDR3 for antibody 1490 (IGKV3-20)
QQYGRSFT

SEQ ID NO: 2980 - protein, 13 aa, Homo sapiens
  Heavy chain CDR3 for antibody 1490 (IGHV4-59)
ARDAGYSSSWFDY

SEQ ID NO: 2981 - protein, 9 aa, Homo sapiens
  Light chain CDR3 for antibody 1491 (IGKV1-6)
LQDYNYPYT

SEQ ID NO: 2982 - protein, 10 aa, Homo sapiens
  Heavy chain CDR3 for antibody 1491 (IGHV1-18)
AREQRLGFDY

SEQ ID NO: 2983 - protein, 9 aa, Homo sapiens
  Light chain CDR3 for antibody 1492 (IGKV3-20)
QQYGSSPYT

SEQ ID NO: 2984 - protein, 12 aa, Homo sapiens
  Heavy chain CDR3 for antibody 1492 (IGHV3-33)
ASRDILTGYLGY

SEQ ID NO: 2985 - protein, 9 aa, Homo sapiens
  Light chain CDR3 for antibody 1493 (IGKV5-2)
LQHDNFPWT

SEQ ID NO: 2986 - protein, 20 aa, Homo sapiens
  Heavy chain CDR3 for antibody 1493 (IGHV1-f)
ATGLITFVRGVILTYRSFDY

SEQ ID NO: 2987 - protein, 9 aa, Homo sapiens
  Light chain CDR3 for antibody 1494 (IGKV5-2)
LQHDNFPYT

SEQ ID NO: 2988 - protein, 11 aa, Homo sapiens
  Heavy chain CDR3 for antibody 1494 (IGHV3-13)
AREAIIGPFDY

SEQ ID NO: 2989 - protein, 9 aa, Homo sapiens
  Light chain CDR3 for antibody 1495 (IGKV2-30)
AQGSYWPAS

SEQ ID NO: 2990 - protein, 10 aa, Homo sapiens
  Heavy chain CDR3 for antibody 1495 (IGHV3-72)
CRDREGFGDV

SEQ ID NO: 2991 - protein, 9 aa, Homo sapiens
  Light chain CDR3 for antibody 1496 (IGKV3D-20)
QQYGSSPYT

SEQ ID NO: 2992 - protein, 14 aa, Homo sapiens
  Heavy chain CDR3 for antibody 1496 (IGHV3-33)
ARDNILTAYYLFDY

SEQ ID NO: 2993 - protein, 9 aa, Homo sapiens
  Light chain CDR3 for antibody 1497 (IGKV1D-16)
QQYNSYPLT

SEQ ID NO: 2994 - protein, 16 aa, Homo sapiens
  Heavy chain CDR3 for antibody 1497 (IGHV3-33)
ARGDDILTHQYYGVDV

SEQ ID NO: 2995 - protein, 9 aa, Homo sapiens
  Light chain CDR3 for antibody 1498 (IGKV4-1)
QQYYSTPRT

SEQ ID NO: 2996 - protein, 17 aa, Homo sapiens
  Heavy chain CDR3 for antibody 1498 (IGHV3-23)
AKEGSSSSWYGGLYFDY

SEQ ID NO: 2997 - protein, 9 aa, Homo sapiens
  Light chain CDR3 for antibody 1499 (IGKV1-17)
LQHNSYPYT

SEQ ID NO: 2998 - protein, 17 aa, Homo sapiens
  Heavy chain CDR3 for antibody 1499 (IGHV3-30)
ARDGVGATSYYYYGMDV

SEQ ID NO: 2999 - protein, 9 aa, Homo sapiens
  Light chain CDR3 for antibody 1500 (IGKV1-9)
QQLNSYPLT

SEQ ID NO: 3000 - protein, 10 aa, Homo sapiens
  Heavy chain CDR3 for antibody 1500 (IGHV3-33)
ARDVVVYFDY

SEQ ID NO: 3001 - protein, 9 aa, Homo sapiens
  Light chain CDR3 for antibody 1501 (IGKV5-2)
LQHDNFPYT

SEQ ID NO: 3002 - protein, 14 aa, Homo sapiens
  Heavy chain CDR3 for antibody 1501 (IGHV3-33)
ARGGYSGYRYYFDY

SEQ ID NO: 3003 - protein, 9 aa, Homo sapiens
  Light chain CDR3 for antibody 1502 (IGKV5-2)
LQHDNFPYT

SEQ ID NO: 3004 - protein, 19 aa, Homo sapiens
  Heavy chain CDR3 for antibody 1502 (IGHV3-33)
ARGVRLRYFDPYYYYGMDV

SEQ ID NO: 3005 - protein, 9 aa, Homo sapiens
  Light chain CDR3 for antibody 1503 (IGKV1-17)
LQHNSYPYT

SEQ ID NO: 3006 - protein, 15 aa, Homo sapiens
  Heavy chain CDR3 for antibody 1503 (IGHV3-33)
ARRSILTGSYWYFDL

SEQ ID NO: 3007 - protein, 9 aa, Homo sapiens
  Light chain CDR3 for antibody 1504 (IGKV1-6)
LQDYNYPYT

SEQ ID NO: 3008 - protein, 17 aa, Homo sapiens
  Heavy chain CDR3 for antibody 1504 (IGHV3-23)
AKDYDILTGYSHNWFDP

SEQ ID NO: 3009 - protein, 9 aa, Homo sapiens
  Light chain CDR3 for antibody 1505 (IGKV3-20)
QQYGSSPYT

SEQ ID NO: 3010 - protein, 18 aa, Homo sapiens
  Heavy chain CDR3 for antibody 1505 (IGHV3-33)
VRDRERYGSGSYPDAFDI

SEQ ID NO: 3011 - protein, 9 aa, Homo sapiens
  Light chain CDR3 for antibody 1506 (IGKV3-20)
QQYGSSPYT

SEQ ID NO: 3012 - protein, 12 aa, Homo sapiens
  Heavy chain CDR3 for antibody 1506 (IGHV3-33)
AREGDILTGYSL

SEQ ID NO: 3013 - protein, 9 aa, Homo sapiens
  Light chain CDR3 for antibody 1507 (IGKV1D-16)
QQYNSYPLT

SEQ ID NO: 3014 - protein, 11 aa, Homo sapiens
  Heavy chain CDR3 for antibody 1507 (IGHV3-74)
ARDRGNWGFDY

SEQ ID NO: 3015 - protein, 9 aa, Homo sapiens
  Light chain CDR3 for antibody 1508 (IGKV1-39)
QQSYSTPLT

SEQ ID NO: 3016 - protein, 12 aa, Homo sapiens
  Heavy chain CDR3 for antibody 1508 (IGHV3-33)
TRGYSSKSYFDY

SEQ ID NO: 3017 - protein, 9 aa, Homo sapiens
  Light chain CDR3 for antibody 1509 (IGKV1D-16)
QQYNSYPLT

SEQ ID NO: 3018 - protein, 19 aa, Homo sapiens
  Heavy chain CDR3 for antibody 1509 (IGHV3-30)
ARRFSGYSGYDHYYYGMDV

SEQ ID NO: 3019 - protein, 9 aa, Homo sapiens
  Light chain CDR3 for antibody 1510 (IGKV1-27)
QKYNSAPYT

SEQ ID NO: 3020 - protein, 12 aa, Homo sapiens
  Heavy chain CDR3 for antibody 1510 (IGHV3-33)
TRGYSSKSYFDY

SEQ ID NO: 3021 - protein, 9 aa, Homo sapiens
  Light chain CDR3 for antibody 1511 (IGKV1-39)
QQSYSTPLT

SEQ ID NO: 3022 - protein, 13 aa, Homo sapiens
  Heavy chain CDR3 for antibody 1511 (IGHV3-33)
ARKAYGDYFYFDY

SEQ ID NO: 3023 - protein, 9 aa, Homo sapiens
  Light chain CDR3 for antibody 1512 (IGKV3D-7)
QQDYNLPYT

SEQ ID NO: 3024 - protein, 15 aa, Homo sapiens
  Heavy chain CDR3 for antibody 1512 (IGHV3-33)
ARRGGIAAAGYYFDY

SEQ ID NO: 3025 - protein, 9 aa, Homo sapiens
  Light chain CDR3 for antibody 1513 (IGKV1-39)
QQSYSTPFT

SEQ ID NO: 3026 - protein, 13 aa, Homo sapiens
  Heavy chain CDR3 for antibody 1513 (IGHV4-28)
ARKGATGYYGMDV

SEQ ID NO: 3027 - protein, 9 aa, Homo sapiens
  Light chain CDR3 for antibody 1514 (IGKV6-21)
HQSSSLPYT

SEQ ID NO: 3028 - protein, 12 aa, Homo sapiens
  Heavy chain CDR3 for antibody 1514 (IGHV3-33)
AREGTRWVYFDY

SEQ ID NO: 3029 - protein, 9 aa, Homo sapiens
  Light chain CDR3 for antibody 1515 (IGKV5-2)
LQHDNFPYT

SEQ ID NO: 3030 - protein, 17 aa, Homo sapiens
  Heavy chain CDR3 for antibody 1515 (IGHV3-66)
ARVQYDILTGYSPYFDN

SEQ ID NO: 3031 - protein, 9 aa, Homo sapiens
  Light chain CDR3 for antibody 1516 (IGKV1D-16)
QQYNSYPYT

SEQ ID NO: 3032 - protein, 17 aa, Homo sapiens
  Heavy chain CDR3 for antibody 1516 (IGHV6-1)
ARDQYSYGPYYYYGMDV

SEQ ID NO: 3033 - protein, 9 aa, Homo sapiens
  Light chain CDR3 for antibody 1517 (IGKV5-2)
LQHDNFPYT

SEQ ID NO: 3034 - protein, 11 aa, Homo sapiens
  Heavy chain CDR3 for antibody 1517 (IGHV3-33)
ARAGIAAVFDY

SEQ ID NO: 3035 - protein, 9 aa, Homo sapiens
  Light chain CDR3 for antibody 1518 (IGKV1-27)
QKYNSAPYT

SEQ ID NO: 3036 - protein, 14 aa, Homo sapiens
  Heavy chain CDR3 for antibody 1518 (IGHV3-33)
ARAISGSSYWYFDL

SEQ ID NO: 3037 - protein, 9 aa, Homo sapiens
  Light chain CDR3 for antibody 1519 (IGKV1-17)
LQHNSYPYT

SEQ ID NO: 3038 - protein, 19 aa, Homo sapiens
  Heavy chain CDR3 for antibody 1519 (IGHV3-33)
AREDYYGSGSYYNEDWFDP

SEQ ID NO: 3039 - protein, 9 aa, Homo sapiens
  Light chain CDR3 for antibody 1520 (IGKV1D-16)
QQYNSYPYT

SEQ ID NO: 3040 - protein, 17 aa, Homo sapiens
  Heavy chain CDR3 for antibody 1520 (IGHV3-33)
ARDRDDILTGFYTYFDY

SEQ ID NO: 3041 - protein, 9 aa, Homo sapiens
  Light chain CDR3 for antibody 1521 (IGKV6-21)
HQSSSLPYT

SEQ ID NO: 3042 - protein, 16 aa, Homo sapiens
  Heavy chain CDR3 for antibody 1521 (IGHV4-59)
ARYSGSYYGDYYGMDV

SEQ ID NO: 3043 - protein, 9 aa, Homo sapiens
  Light chain CDR3 for antibody 1522 (IGKV1-6)
LQDYNYPRT

SEQ ID NO: 3044 - protein, 8 aa, Homo sapiens
  Heavy chain CDR3 for antibody 1522 (IGHV4-39)
ARRGGLDY

SEQ ID NO: 3045 - protein, 9 aa, Homo sapiens
  Light chain CDR3 for antibody 1523 (IGKV3-11)
QQRSNWPRT

SEQ ID NO: 3046 - protein, 12 aa, Homo sapiens
  Heavy chain CDR3 for antibody 1523 (IGHV3-33)
AREGVMGYSGSY

SEQ ID NO: 3047 - protein, 9 aa, Homo sapiens
  Light chain CDR3 for antibody 1524 (IGKV3D-7)
QQDYNLPLT

SEQ ID NO: 3048 - protein, 9 aa, Homo sapiens
  Heavy chain CDR3 for antibody 1524 (IGHV4-59)
AREGGSGSL

SEQ ID NO: 3049 - protein, 9 aa, Homo sapiens
  Light chain CDR3 for antibody 1525 (IGKV1-39)
QQSYNTPAT

SEQ ID NO: 3050 - protein, 11 aa, Homo sapiens
  Heavy chain CDR3 for antibody 1525 (IGHV1-46)
AREQHGQAPDY

SEQ ID NO: 3051 - protein, 9 aa, Homo sapiens
  Light chain CDR3 for antibody 1526 (IGKV3-20)
QQYGSSPYT

SEQ ID NO: 3052 - protein, 13 aa, Homo sapiens
  Heavy chain CDR3 for antibody 1526 (IGHV1-18)
ARGGGVRGAPLDY

SEQ ID NO: 3053 - protein, 9 aa, Homo sapiens
  Light chain CDR3 for antibody 1527 (IGKV1-5)
QQYDSYFWT

SEQ ID NO: 3054 - protein, 15 aa, Homo sapiens
  Heavy chain CDR3 for antibody 1527 (IGHV3-15)
TTGWVRYCSGGSCRI

SEQ ID NO: 3055 - protein, 9 aa, Homo sapiens
  Light chain CDR3 for antibody 1528 (IGKV5-2)
LQHDNFPWT

SEQ ID NO: 3056 - protein, 13 aa, Homo sapiens
  Heavy chain CDR3 for antibody 1528 (IGHV4-39)
ARRDGSYYGYFDY

SEQ ID NO: 3057 - protein, 9 aa, Homo sapiens
  Light chain CDR3 for antibody 1529 (IGKV6-21)
HQSSSLPYT

SEQ ID NO: 3058 - protein, 15 aa, Homo sapiens
  Heavy chain CDR3 for antibody 1529 (IGHV3-33)
ARRGYNDYDPYGMDV

SEQ ID NO: 3059 - protein, 9 aa, Homo sapiens
  Light chain CDR3 for antibody 1530 (IGKV3D-7)
QQDYNLPLT

SEQ ID NO: 3060 - protein, 15 aa, Homo sapiens
  Heavy chain CDR3 for antibody 1530 (IGHV3-30)
ARGAMVRGVDYGMDV

SEQ ID NO: 3061 - protein, 9 aa, Homo sapiens
  Light chain CDR3 for antibody 1531 (IGKV5-2)
LQHDNFPYT

SEQ ID NO: 3062 - protein, 13 aa, Homo sapiens
  Heavy chain CDR3 for antibody 1531 (IGHV3-33)
ARGVLWFGELFDY

SEQ ID NO: 3063 - protein, 9 aa, Homo sapiens
  Light chain CDR3 for antibody 1532 (IGKV3-20)
QQYGSSPYT

SEQ ID NO: 3064 - protein, 17 aa, Homo sapiens
  Heavy chain CDR3 for antibody 1532 (IGHV3-33)
ARESLKLGIYYYYGMDV

SEQ ID NO: 3065 - protein, 9 aa, Homo sapiens
  Light chain CDR3 for antibody 1533 (IGKV1-6)
LQDFNYPRT

SEQ ID NO: 3066 - protein, 18 aa, Homo sapiens
  Heavy chain CDR3 for antibody 1533 (IGHV4-59)
AREGDYVWGSYRSNWFDP

SEQ ID NO: 3067 - protein, 9 aa, Homo sapiens
  Light chain CDR3 for antibody 1534 (IGKV1-9)
QQLKSYLYT

SEQ ID NO: 3068 - protein, 17 aa, Homo sapiens
  Heavy chain CDR3 for antibody 1534 (IGHV1-18)
ARDEGYDILTGYPHFDY

SEQ ID NO: 3069 - protein, 9 aa, Homo sapiens
  Light chain CDR3 for antibody 1535 (IGKV5-2)
LQHDNFPYT

SEQ ID NO: 3070 - protein, 12 aa, Homo sapiens
  Heavy chain CDR3 for antibody 1535 (IGHV3-h)
AREDYYYYGMDV

SEQ ID NO: 3071 - protein, 9 aa, Homo sapiens
  Light chain CDR3 for antibody 1536 (IGKV6-21)
HQSSSLPYT

SEQ ID NO: 3072 - protein, 21 aa, Homo sapiens
  Heavy chain CDR3 for antibody 1536 (IGHV3-33)
ARDEYYEIVTGYGYYHYGMDV

SEQ ID NO: 3073 - protein, 9 aa, Homo sapiens
  Light chain CDR3 for antibody 1537 (IGKV6-21)
HQSSSLPYT

SEQ ID NO: 3074 - protein, 8 aa, Homo sapiens
  Heavy chain CDR3 for antibody 1537 (IGHV3-23)
AKESLLDY

SEQ ID NO: 3075 - protein, 9 aa, Homo sapiens
  Light chain CDR3 for antibody 1538 (IGKV6-21)
HQSSSLPYT

SEQ ID NO: 3076 - protein, 12 aa, Homo sapiens
  Heavy chain CDR3 for antibody 1538 (IGHV3-h)
AREDYYYYGMDV

SEQ ID NO: 3077 - protein, 9 aa, Homo sapiens
  Light chain CDR3 for antibody 1539 (IGKV1-27)
QKYNSAPYT

SEQ ID NO: 3078 - protein, 11 aa, Homo sapiens
  Heavy chain CDR3 for antibody 1539 (IGHV3-33)
ARDKSSGWSDY

SEQ ID NO: 3079 - protein, 9 aa, Homo sapiens
  Light chain CDR3 for antibody 1540 (IGKV1-9)
QQYNSYPLT

SEQ ID NO: 3080 - protein, 13 aa, Homo sapiens
  Heavy chain CDR3 for antibody 1540 (IGHV4-59)
ANRDYYGYYGMDV

SEQ ID NO: 3081 - protein, 9 aa, Homo sapiens
  Light chain CDR3 for antibody 1541 (IGKV1D-16)
QQYNSYPYT

SEQ ID NO: 3082 - protein, 16 aa, Homo sapiens
  Heavy chain CDR3 for antibody 1541 (IGHV3-20)
ARDSSSLDYYYYGMDV

SEQ ID NO: 3083 - protein, 9 aa, Homo sapiens
  Light chain CDR3 for antibody 1542 (IGKV1-27)
QKYNSAPYT

SEQ ID NO: 3084 - protein, 12 aa, Homo sapiens
  Heavy chain CDR3 for antibody 1542 (IGHV3-33)
ARDPGYYYGLDV

SEQ ID NO: 3085 - protein, 9 aa, Homo sapiens
  Light chain CDR3 for antibody 1543 (IGKV3-20)
QQYGSSPYT

SEQ ID NO: 3086 - protein, 11 aa, Homo sapiens
  Heavy chain CDR3 for antibody 1543 (IGHV1-46)
AREEDLGAFDI

SEQ ID NO: 3087 - protein, 9 aa, Homo sapiens
  Light chain CDR3 for antibody 1544 (IGKV3-20)
QQYGSSPYT

SEQ ID NO: 3088 - protein, 17 aa, Homo sapiens
  Heavy chain CDR3 for antibody 1544 (IGHV4-34)
AGLRFFDWLFDYYGMDV

SEQ ID NO: 3089 - protein, 9 aa, Homo sapiens
  Light chain CDR3 for antibody 1545 (IGKV5-2)
LQHDNFPWT

SEQ ID NO: 3090 - protein, 15 aa, Homo sapiens
  Heavy chain CDR3 for antibody 1545 (IGHV4-39)
ARRDYDILTGYLFDY

SEQ ID NO: 3091 - protein, 9 aa, Homo sapiens
  Light chain CDR3 for antibody 1546 (IGKV5-2)
LQHDNFPWT

SEQ ID NO: 3092 - protein, 12 aa, Homo sapiens
  Heavy chain CDR3 for antibody 1546 (IGHV4-59)
ARDSGSYYYFDY

SEQ ID NO: 3093 - protein, 9 aa, Homo sapiens
  Light chain CDR3 for antibody 1547 (IGKV6-21)
HQSSSLPYT

SEQ ID NO: 3094 - protein, 12 aa, Homo sapiens
  Heavy chain CDR3 for antibody 1547 (IGHV3-33)
ARDSSGWSHFDY

SEQ ID NO: 3095 - protein, 9 aa, Homo sapiens
  Light chain CDR3 for antibody 1548 (IGKV1D-16)
QQYNSYPYT

SEQ ID NO: 3096 - protein, 14 aa, Homo sapiens
  Heavy chain CDR3 for antibody 1548 (IGHV3-33)
ARASSGSSYWYIDL

SEQ ID NO: 3097 - protein, 9 aa, Homo sapiens
  Light chain CDR3 for antibody 1549 (IGKV1D-16)
QQYNSYPLT

SEQ ID NO: 3098 - protein, 18 aa, Homo sapiens
  Heavy chain CDR3 for antibody 1549 (IGHV3-33)
ARGGYSSGWDYYYYGMDV

SEQ ID NO: 3099 - protein, 9 aa, Homo sapiens
  Light chain CDR3 for antibody 1550 (IGKV5-2)
LQHDNFPYT

SEQ ID NO: 3100 - protein, 9 aa, Homo sapiens
  Heavy chain CDR3 for antibody 1550 (IGHV3-23)
AKEQQLFDY

SEQ ID NO: 3101 - protein, 9 aa, Homo sapiens
  Light chain CDR3 for antibody 1551 (IGKV1-39)
QQSYSTPLT

SEQ ID NO: 3102 - protein, 12 aa, Homo sapiens
  Heavy chain CDR3 for antibody 1551 (IGHV1-18)
ARILFYGDYFDY

SEQ ID NO: 3103 - protein, 9 aa, Homo sapiens
  Light chain CDR3 for antibody 1552 (IGKV3-20)
QQYGSSPYT

SEQ ID NO: 3104 - protein, 7 aa, Homo sapiens
  Heavy chain CDR3 for antibody 1552 (IGHV3-33)
ARELVDY

SEQ ID NO: 3105 - protein, 9 aa, Homo sapiens
  Light chain CDR3 for antibody 1553 (IGKV3-20)
QQYGSSPYT

SEQ ID NO: 3106 - protein, 11 aa, Homo sapiens
  Heavy chain CDR3 for antibody 1553 (IGHV4-4)
AREAYYYGLDV

SEQ ID NO: 3107 - protein, 9 aa, Homo sapiens
  Light chain CDR3 for antibody 1554 (IGKV1D-13)
QQFNNYPYT

SEQ ID NO: 3108 - protein, 12 aa, Homo sapiens
  Heavy chain CDR3 for antibody 1554 (IGHV3-33)
AREGDILTGYSL

SEQ ID NO: 3109 - protein, 9 aa, Homo sapiens
  Light chain CDR3 for antibody 1555 (IGKV1-17)
LQHNSYPYT

SEQ ID NO: 3110 - protein, 17 aa, Homo sapiens
  Heavy chain CDR3 for antibody 1555 (IGHV3-33)
ARQGVLLWFGELYYFDY

SEQ ID NO: 3111 - protein, 9 aa, Homo sapiens
  Light chain CDR3 for antibody 1556 (IGKV6-21)
HQSSSLPYT

SEQ ID NO: 3112 - protein, 9 aa, Homo sapiens
  Heavy chain CDR3 for antibody 1556 (IGHV3-23)
ARIWWLKDY

SEQ ID NO: 3113 - protein, 9 aa, Homo sapiens
  Light chain CDR3 for antibody 1557 (IGKV1-6)
LQDYNYPYT

SEQ ID NO: 3114 - protein, 12 aa, Homo sapiens
  Heavy chain CDR3 for antibody 1557 (IGHV4-61)
ARVDSSGWFFDY

SEQ ID NO: 3115 - protein, 9 aa, Homo sapiens
  Light chain CDR3 for antibody 1558 (IGKV3-20)
QQYGSSPYT

SEQ ID NO: 3116 - protein, 19 aa, Homo sapiens
  Heavy chain CDR3 for antibody 1558 (IGHV3-30)
ARRFSGYSGYDHYYYGMDV

SEQ ID NO: 3117 - protein, 9 aa, Homo sapiens
  Light chain CDR3 for antibody 1559 (IGKV1D-16)
QQYNSYPYT

SEQ ID NO: 3118 - protein, 23 aa, Homo sapiens
  Heavy chain CDR3 for antibody 1559 (IGHV1-18)
ARNLHYDILTGYFPYYFYYGMDV

SEQ ID NO: 3119 - protein, 9 aa, Homo sapiens
  Light chain CDR3 for antibody 1560 (IGKV5-2)
LQHDNFPYT

SEQ ID NO: 3120 - protein, 13 aa, Homo sapiens
  Heavy chain CDR3 for antibody 1560 (IGHV3-33)
ARGDNWNDGGFDY

SEQ ID NO: 3121 - protein, 11 aa, Homo sapiens
  Light chain CDR3 for antibody 1561 (IGKV3-20)
QQYGSSPPEWT

SEQ ID NO: 3122 - protein, 13 aa, Homo sapiens
  Heavy chain CDR3 for antibody 1561 (IGHV3-33)
ARIDYYYYYGMDV

SEQ ID NO: 3123 - protein, 9 aa, Homo sapiens
  Light chain CDR3 for antibody 1562 (IGKV3-20)
QQYGSSPYT

SEQ ID NO: 3124 - protein, 18 aa, Homo sapiens
  Heavy chain CDR3 for antibody 1562 (IGHV3-13)
ARDYYGSGSLYYYYGMDV

SEQ ID NO: 3125 - protein, 9 aa, Homo sapiens
  Light chain CDR3 for antibody 1563 (IGKV6-21)
HQSSSLPYT

SEQ ID NO: 3126 - protein, 16 aa, Homo sapiens
  Heavy chain CDR3 for antibody 1563 (IGHV4-59)
ARDTPYYSGSGRPFDS

SEQ ID NO: 3127 - protein, 9 aa, Homo sapiens
  Light chain CDR3 for antibody 1564 (IGKV1-6)
LQDYNYPYT

SEQ ID NO: 3128 - protein, 17 aa, Homo sapiens
  Heavy chain CDR3 for antibody 1564 (IGHV1-24)
ATEGYDILPGYYNVLDY

SEQ ID NO: 3129 - protein, 9 aa, Homo sapiens
  Light chain CDR3 for antibody 1565 (IGKV1-27)
QKYNSAPYT

SEQ ID NO: 3130 - protein, 17 aa, Homo sapiens
  Heavy chain CDR3 for antibody 1565 (IGHV3-33)
ARGYCSRTSCYLYYFDY

SEQ ID NO: 3131 - protein, 9 aa, Homo sapiens
  Light chain CDR3 for antibody 1566 (IGKV5-2)
LQHDNFPYT

SEQ ID NO: 3132 - protein, 9 aa, Homo sapiens
  Heavy chain CDR3 for antibody 1566 (IGHV3-23)
ARIWWLKDY

SEQ ID NO: 3133 - protein, 9 aa, Homo sapiens
  Light chain CDR3 for antibody 1567 (IGKV6-21)
HQSSSLPYT

SEQ ID NO: 3134 - protein, 18 aa, Homo sapiens
  Heavy chain CDR3 for antibody 1567 (IGHV3-33)
ARREGITTIFYYYYGMDV

SEQ ID NO: 3135 - protein, 9 aa, Homo sapiens
  Light chain CDR3 for antibody 1568 (IGKV6-21)
HQSSSLPYT

SEQ ID NO: 3136 - protein, 12 aa, Homo sapiens
  Heavy chain CDR3 for antibody 1568 (IGHV3-23)
AKEYDILTGYFH

SEQ ID NO: 3137 - protein, 9 aa, Homo sapiens
  Light chain CDR3 for antibody 1569 (IGKV6-21)
HQSSSLPYT

SEQ ID NO: 3138 - protein, 11 aa, Homo sapiens
  Heavy chain CDR3 for antibody 1569 (IGHV4-59)
ARSIRYSVFDY

SEQ ID NO: 3139 - protein, 10 aa, Homo sapiens
  Light chain CDR3 for antibody 1570 (IGKV1-17)
LQHNSYPMYT

SEQ ID NO: 3140 - protein, 11 aa, Homo sapiens
  Heavy chain CDR3 for antibody 1570 (IGHV3-33)
ARDRSSGPFDY

SEQ ID NO: 3141 - protein, 9 aa, Homo sapiens
  Light chain CDR3 for antibody 1571 (IGKV1-16)
QQYNRYPYT

SEQ ID NO: 3142 - protein, 17 aa, Homo sapiens
  Heavy chain CDR3 for antibody 1571 (IGHV4-59)
ARDFLVRGEGSYYGMDV

SEQ ID NO: 3143 - protein, 8 aa, Homo sapiens
  Light chain CDR3 for antibody 1572 (IGKV3D-7)
QQDYNLLT

SEQ ID NO: 3144 - protein, 15 aa, Homo sapiens
  Heavy chain CDR3 for antibody 1572 (IGHV3-30)
ARGAMVRGVDYGMDV

SEQ ID NO: 3145 - protein, 9 aa, Homo sapiens
  Light chain CDR3 for antibody 1573 (IGKV5-2)
LQHDNFPYT

SEQ ID NO: 3146 - protein, 13 aa, Homo sapiens
  Heavy chain CDR3 for antibody 1573 (IGHV3-33)
ANTGDSYYYDMDV

SEQ ID NO: 3147 - protein, 9 aa, Homo sapiens
  Light chain CDR3 for antibody 1574 (IGKV1D-16)
QQYNSYPYT

SEQ ID NO: 3148 - protein, 12 aa, Homo sapiens
  Heavy chain CDR3 for antibody 1574 (IGHV3-23)
AKEGLGSDYEPY

SEQ ID NO: 3149 - protein, 9 aa, Homo sapiens
  Light chain CDR3 for antibody 1575 (IGKV1D-13)
QQFNNYPHT

SEQ ID NO: 3150 - protein, 13 aa, Homo sapiens
  Heavy chain CDR3 for antibody 1575 (IGHV3-33)
ARKAYGDYFYFDY

SEQ ID NO: 3151 - protein, 9 aa, Homo sapiens
  Light chain CDR3 for antibody 1576 (IGKV1-9)
QQLNSYPLT

SEQ ID NO: 3152 - protein, 26 aa, Homo sapiens
  Heavy chain CDR3 for antibody 1576 (IGHV4-39)
ARQGLLWFGDLKAYDSSGYYYGYFHH

SEQ ID NO: 3153 - protein, 9 aa, Homo sapiens
  Light chain CDR3 for antibody 1577 (IGKV1-39)
QQSYSTPLT

SEQ ID NO: 3154 - protein, 11 aa, Homo sapiens
  Heavy chain CDR3 for antibody 1577 (IGHV3-33)
ARARYTTGLDY

SEQ ID NO: 3155 - protein, 9 aa, Homo sapiens
  Light chain CDR3 for antibody 1578 (IGKV6-21)
HQSSSLPFT

SEQ ID NO: 3156 - protein, 16 aa, Homo sapiens
  Heavy chain CDR3 for antibody 1578 (IGHV3-48)
TRRRQWLAGFDWYFDL

SEQ ID NO: 3157 - protein, 9 aa, Homo sapiens
  Light chain CDR3 for antibody 1579 (IGKV5-2)
LQHDNFPYT

SEQ ID NO: 3158 - protein, 16 aa, Homo sapiens
  Heavy chain CDR3 for antibody 1579 (IGHV3-23)
AKEGEVLRYFDWLFNY

SEQ ID NO: 3159 - protein, 9 aa, Homo sapiens
  Light chain CDR3 for antibody 1580 (IGKV6-21)
HQSSSLPYT

SEQ ID NO: 3160 - protein, 9 aa, Homo sapiens
  Heavy chain CDR3 for antibody 1580 (IGHV4-59)
AGGSWDFDY

SEQ ID NO: 3161 - protein, 9 aa, Homo sapiens
  Light chain CDR3 for antibody 1581 (IGKV6-21)
HQSSSLPYT

SEQ ID NO: 3162 - protein, 24 aa, Homo sapiens
  Heavy chain CDR3 for antibody 1581 (IGHV3-20)
ARGRITMVRGVIINPLDYYNGMDV

SEQ ID NO: 3163 - protein, 9 aa, Homo sapiens
  Light chain CDR3 for antibody 1582 (IGKV3-11)
QQRSNWPWT

SEQ ID NO: 3164 - protein, 13 aa, Homo sapiens
  Heavy chain CDR3 for antibody 1582 (IGHV4-34)
ASNFYYYYYGMDV

SEQ ID NO: 3165 - protein, 9 aa, Homo sapiens
  Light chain CDR3 for antibody 1583 (IGKV1D-13)
QQFNNYPYT

SEQ ID NO: 3166 - protein, 21 aa, Homo sapiens
  Heavy chain CDR3 for antibody 1583 (IGHV3-33)
ARKRLYDILTGYYKAYYGMDV

SEQ ID NO: 3167 - protein, 9 aa, Homo sapiens
  Light chain CDR3 for antibody 1584 (IGKV1-17)
LQHNSYPYT

SEQ ID NO: 3168 - protein, 12 aa, Homo sapiens
  Heavy chain CDR3 for antibody 1584 (IGHV3-33)
ARKGYGLYVLDV

SEQ ID NO: 3169 - protein, 9 aa, Homo sapiens
  Light chain CDR3 for antibody 1585 (IGKV3-20)
QQYGSSPYT

SEQ ID NO: 3170 - protein, 10 aa, Homo sapiens
  Heavy chain CDR3 for antibody 1585 (IGHV3-30)
AREWYGGMDV

SEQ ID NO: 3171 - protein, 9 aa, Homo sapiens
  Light chain CDR3 for antibody 1586 (IGKV6-21)
HQSSSLPYT

SEQ ID NO: 3172 - protein, 13 aa, Homo sapiens
  Heavy chain CDR3 for antibody 1586 (IGHV3-33)
ARQSSGWFDAFDI

SEQ ID NO: 3173 - protein, 9 aa, Homo sapiens
  Light chain CDR3 for antibody 1587 (IGKV1-6)
LQDYNYPWT

SEQ ID NO: 3174 - protein, 13 aa, Homo sapiens
  Heavy chain CDR3 for antibody 1587 (IGHV4-61)
ASRYSSGWYPFDY

SEQ ID NO: 3175 - protein, 9 aa, Homo sapiens
  Light chain CDR3 for antibody 1588 (IGKV3D-7)
QQDYNLPYT

SEQ ID NO: 3176 - protein, 13 aa, Homo sapiens
  Heavy chain CDR3 for antibody 1588 (IGHV3-48)
AREGDPQPDAFDI

SEQ ID NO: 3177 - protein, 9 aa, Homo sapiens
  Light chain CDR3 for antibody 1589 (IGKV5-2)
LQHDNFPWT

SEQ ID NO: 3178 - protein, 17 aa, Homo sapiens
  Heavy chain CDR3 for antibody 1589 (IGHV4-39)
AGRLTYYYGSGSPSFDY

SEQ ID NO: 3179 - protein, 9 aa, Homo sapiens
  Light chain CDR3 for antibody 1590 (IGKV3-20)
QQYGSSPYT

SEQ ID NO: 3180 - protein, 5 aa, Homo sapiens
  Heavy chain CDR3 for antibody 1590 (IGHV3-33)
ARGLE

SEQ ID NO: 3181 - protein, 9 aa, Homo sapiens
  Light chain CDR3 for antibody 1591 (IGKV1D-16)
QQYNSYPLT

SEQ ID NO: 3182 - protein, 18 aa, Homo sapiens
  Heavy chain CDR3 for antibody 1591 (IGHV3-33)
AREGDYYGSGGFPNWFDP

SEQ ID NO: 3183 - protein, 9 aa, Homo sapiens
  Light chain CDR3 for antibody 1592 (IGKV1-9)
QQLNSYPRT

SEQ ID NO: 3184 - protein, 9 aa, Homo sapiens
  Heavy chain CDR3 for antibody 1592 (IGHV4-59)
ARDDGDFDY

SEQ ID NO: 3185 - protein, 9 aa, Homo sapiens
  Light chain CDR3 for antibody 1593 (IGKV6-21)
HQSSSLPYT

SEQ ID NO: 3186 - protein, 19 aa, Homo sapiens
  Heavy chain CDR3 for antibody 1593 (IGHV3-33)
ARGVRLRYFDPYYYYGMDV

SEQ ID NO: 3187 - protein, 9 aa, Homo sapiens
  Light chain CDR3 for antibody 1594 (IGKV3-20)
QQYGSSPLT

SEQ ID NO: 3188 - protein, 13 aa, Homo sapiens
  Heavy chain CDR3 for antibody 1594 (IGHV3-33)
AREYFDWLLPLDY

SEQ ID NO: 3189 - protein, 9 aa, Homo sapiens
  Light chain CDR3 for antibody 1595 (IGKV6-21)
HQSSSLPYT

SEQ ID NO: 3190 - protein, 15 aa, Homo sapiens
  Heavy chain CDR3 for antibody 1595 (IGHV3-33)
VCVLYDYGDYVGFDY

SEQ ID NO: 3191 - protein, 9 aa, Homo sapiens
  Light chain CDR3 for antibody 1596 (IGKV1D-16)
QQYNSYPLT

SEQ ID NO: 3192 - protein, 10 aa, Homo sapiens
  Heavy chain CDR3 for antibody 1596 (IGHV3-30)
AREWYGGMDV

SEQ ID NO: 3193 - protein, 9 aa, Homo sapiens
  Light chain CDR3 for antibody 1597 (IGKV5-2)
LQHDNFPYT

SEQ ID NO: 3194 - protein, 12 aa, Homo sapiens
  Heavy chain CDR3 for antibody 1597 (IGHV3-23)
AKEYDILTGYFH

SEQ ID NO: 3195 - protein, 9 aa, Homo sapiens
  Light chain CDR3 for antibody 1598 (IGKV1D-16)
QQYNSYPYT

SEQ ID NO: 3196 - protein, 14 aa, Homo sapiens
  Heavy chain CDR3 for antibody 1598 (IGHV4-39)
ARDSGYDYYYAMDV

SEQ ID NO: 3197 - protein, 9 aa, Homo sapiens
  Light chain CDR3 for antibody 1599 (IGKV1D-16)
QQYNSYPLT

SEQ ID NO: 3198 - protein, 11 aa, Homo sapiens
  Heavy chain CDR3 for antibody 1599 (IGHV3-33)
ARGTTVTHFDY

SEQ ID NO: 3199 - protein, 9 aa, Homo sapiens
  Light chain CDR3 for antibody 1600 (IGKV1-39)
QQSYSTPFT

SEQ ID NO: 3200 - protein, 16 aa, Homo sapiens
  Heavy chain CDR3 for antibody 1600 (IGHV4-59)
ARDTPYYSGSGRPFDS

SEQ ID NO: 3201 - protein, 9 aa, Homo sapiens
  Light chain CDR3 for antibody 1601 (IGKV1-9)
QQLNSYPLT

SEQ ID NO: 3202 - protein, 12 aa, Homo sapiens
  Heavy chain CDR3 for antibody 1601 (IGHV4-39)
ARMVRGVIPFDY

SEQ ID NO: 3203 - protein, 9 aa, Homo sapiens
  Light chain CDR3 for antibody 1602 (IGKV1-27)
QKYNSAPYT

SEQ ID NO: 3204 - protein, 18 aa, Homo sapiens
  Heavy chain CDR3 for antibody 1602 (IGHV3-33)
ARREGIVGATTYYYGMDV

SEQ ID NO: 3205 - protein, 9 aa, Homo sapiens
  Light chain CDR3 for antibody 1603 (IGKV1-27)
QKYNSAPYT

SEQ ID NO: 3206 - protein, 13 aa, Homo sapiens
  Heavy chain CDR3 for antibody 1603 (IGHV4-34)
ASNFYYYYYGMDV

SEQ ID NO: 3207 - protein, 9 aa, Homo sapiens
  Light chain CDR3 for antibody 1604 (IGKV1D-16)
QQYNSYPYT

SEQ ID NO: 3208 - protein, 13 aa, Homo sapiens
  Heavy chain CDR3 for antibody 1604 (IGHV3-33)
ARAFIMVRGVIDY

SEQ ID NO: 3209 - protein, 9 aa, Homo sapiens
  Light chain CDR3 for antibody 1605 (IGKV2-30)
MQGTHWPLT

SEQ ID NO: 3210 - protein, 13 aa, Homo sapiens
  Heavy chain CDR3 for antibody 1605 (IGHV4-34)
ASNFYYYYYGMDV

SEQ ID NO: 3211 - protein, 9 aa, Homo sapiens
  Light chain CDR3 for antibody 1606 (IGKV1-39)
QQSYSTPLT

SEQ ID NO: 3212 - protein, 15 aa, Homo sapiens
  Heavy chain CDR3 for antibody 1606 (IGHV3-33)
ARDHLTGYYYYGMDV

SEQ ID NO: 3213 - protein, 10 aa, Homo sapiens
  Light chain CDR3 for antibody 1607 (IGKV1-39)
QQSYSTPMYT

SEQ ID NO: 3214 - protein, 15 aa, Homo sapiens
  Heavy chain CDR3 for antibody 1607 (IGHV3-30)
ARGAMVRGVDYGMDV

SEQ ID NO: 3215 - protein, 9 aa, Homo sapiens
  Light chain CDR3 for antibody 1608 (IGKV1-39)
QQSYSTPLT

SEQ ID NO: 3216 - protein, 15 aa, Homo sapiens
  Heavy chain CDR3 for antibody 1608 (IGHV3-33)
ARDRGWKAPGYGMDV

SEQ ID NO: 3217 - protein, 9 aa, Homo sapiens
  Light chain CDR3 for antibody 1609 (IGKV1-9)
QQLNSYPLT

SEQ ID NO: 3218 - protein, 14 aa, Homo sapiens
  Heavy chain CDR3 for antibody 1609 (IGHV4-39)
ARQGTMIRGGYFDY

SEQ ID NO: 3219 - protein, 8 aa, Homo sapiens
  Light chain CDR3 for antibody 1610 (IGKV3D-7)
QQDYNLLT

SEQ ID NO: 3220 - protein, 13 aa, Homo sapiens
  Heavy chain CDR3 for antibody 1610 (IGHV3-33)
ARDYCGGDCYLDY

SEQ ID NO: 3221 - protein, 9 aa, Homo sapiens
  Light chain CDR3 for antibody 1611 (IGKV1-39)
QQSYSTPLT

SEQ ID NO: 3222 - protein, 17 aa, Homo sapiens
  Heavy chain CDR3 for antibody 1611 (IGHV3-33)
ARGYCSRTSCYLYYFDY

SEQ ID NO: 3223 - protein, 9 aa, Homo sapiens
  Light chain CDR3 for antibody 1612 (IGKV3-20)
QQYGSSPYT

SEQ ID NO: 3224 - protein, 15 aa, Homo sapiens
  Heavy chain CDR3 for antibody 1612 (IGHV1-46)
ARGAVDDYYYYGMDV

SEQ ID NO: 3225 - protein, 9 aa, Homo sapiens
  Light chain CDR3 for antibody 1613 (IGKV3-20)
QQYGSSPYT

SEQ ID NO: 3226 - protein, 17 aa, Homo sapiens
  Heavy chain CDR3 for antibody 1613 (IGHV3-33)
ARAYYDILTGYSYYFDY

SEQ ID NO: 3227 - protein, 9 aa, Homo sapiens
  Light chain CDR3 for antibody 1614 (IGKV1-39)
QQSYSTPLT

SEQ ID NO: 3228 - protein, 8 aa, Homo sapiens
  Heavy chain CDR3 for antibody 1614 (IGHV3-23)
AKETGNNY

SEQ ID NO: 3229 - protein, 9 aa, Homo sapiens
  Light chain CDR3 for antibody 1615 (IGKV1D-16)
QQYNSYPYT

SEQ ID NO: 3230 - protein, 15 aa, Homo sapiens
  Heavy chain CDR3 for antibody 1615 (IGHV3-64)
ARDGLRYFDWLFPWY

SEQ ID NO: 3231 - protein, 9 aa, Homo sapiens
  Light chain CDR3 for antibody 1616 (IGKV6-21)
HQSSSLPYT

SEQ ID NO: 3232 - protein, 15 aa, Homo sapiens
  Heavy chain CDR3 for antibody 1616 (IGHV3-30)
ARRGYGSGSPDAFDL

SEQ ID NO: 3233 - protein, 9 aa, Homo sapiens
  Light chain CDR3 for antibody 1617 (IGKV6-21)
HQSSSFPLT

SEQ ID NO: 3234 - protein, 13 aa, Homo sapiens
  Heavy chain CDR3 for antibody 1617 (IGHV3-33)
AKCIVAAIGGFDY

SEQ ID NO: 3235 - protein, 9 aa, Homo sapiens
  Light chain CDR3 for antibody 1618 (IGKV1D-16)
QQYNSYPLT

SEQ ID NO: 3236 - protein, 9 aa, Homo sapiens
  Heavy chain CDR3 for antibody 1618 (IGHV3-23)
ARIWWLKDY

SEQ ID NO: 3237 - protein, 8 aa, Homo sapiens
  Light chain CDR3 for antibody 1619 (IGKV3-20)
QQYGRSFT

SEQ ID NO: 3238 - protein, 20 aa, Homo sapiens
  Heavy chain CDR3 for antibody 1619 (IGHV3-33)
ARDNDSSGYYDYYYYYGMDV

SEQ ID NO: 3239 - protein, 9 aa, Homo sapiens
  Light chain CDR3 for antibody 1620 (IGKV3-20)
QQYGSSPYT

SEQ ID NO: 3240 - protein, 14 aa, Homo sapiens
  Heavy chain CDR3 for antibody 1620 (IGHV4-39)
ARRGVVVPPGGMDV

SEQ ID NO: 3241 - protein, 9 aa, Homo sapiens
  Light chain CDR3 for antibody 1621 (IGKV1-39)
QQSYSTPFT

SEQ ID NO: 3242 - protein, 14 aa, Homo sapiens
  Heavy chain CDR3 for antibody 1621 (IGHV4-39)
ARDSGYDYYYGMDV

SEQ ID NO: 3243 - protein, 9 aa, Homo sapiens
  Light chain CDR3 for antibody 1622 (IGKV1-9)
QQLKSYLYT

SEQ ID NO: 3244 - protein, 9 aa, Homo sapiens
  Heavy chain CDR3 for antibody 1622 (IGHV1-18)
ARGKDWFDP

SEQ ID NO: 3245 - protein, 9 aa, Homo sapiens
  Light chain CDR3 for antibody 1623 (IGKV3D-7)
QQDYNFPFT

SEQ ID NO: 3246 - protein, 19 aa, Homo sapiens
  Heavy chain CDR3 for antibody 1623 (IGHV3-74)
AREYFDILTGYYKTGFFQH

SEQ ID NO: 3247 - protein, 9 aa, Homo sapiens
  Light chain CDR3 for antibody 1624 (IGKV6-21)
HQSSSLPYT

SEQ ID NO: 3248 - protein, 8 aa, Homo sapiens
  Heavy chain CDR3 for antibody 1624 (IGHV3-23)
EKSAGEDV

SEQ ID NO: 3249 - protein, 9 aa, Homo sapiens
  Light chain CDR3 for antibody 1625 (IGKV5-2)
LQHDNFPWT

SEQ ID NO: 3250 - protein, 18 aa, Homo sapiens
  Heavy chain CDR3 for antibody 1625 (IGHV1-46)
ARDLTGRTENYYYYGMDV

SEQ ID NO: 3251 - protein, 9 aa, Homo sapiens
  Light chain CDR3 for antibody 1626 (IGKV6-21)
HQSSSLPYT

SEQ ID NO: 3252 - protein, 11 aa, Homo sapiens
  Heavy chain CDR3 for antibody 1626 (IGHV3-13)
AREAIIGPFDY

SEQ ID NO: 3253 - protein, 9 aa, Homo sapiens
  Light chain CDR3 for antibody 1627 (IGKV5-2)
LQHDNFPYT

SEQ ID NO: 3254 - protein, 19 aa, Homo sapiens
  Heavy chain CDR3 for antibody 1627 (IGHV3-30)
ARRFSGYSGYDHYYYGMDV

SEQ ID NO: 3255 - protein, 8 aa, Homo sapiens
  Light chain CDR3 for antibody 1628 (IGKV3D-7)
QQDYNLVT

SEQ ID NO: 3256 - protein, 11 aa, Homo sapiens
  Heavy chain CDR3 for antibody 1628 (IGHV4-59)
AREMGHDTFDI

SEQ ID NO: 3257 - protein, 9 aa, Homo sapiens
  Light chain CDR3 for antibody 1629 (IGKV6-21)
HQSSSLPYT

SEQ ID NO: 3258 - protein, 17 aa, Homo sapiens
  Heavy chain CDR3 for antibody 1629 (IGHV3-33)
ARESLKLGIYYYYGMDV

SEQ ID NO: 3259 - protein, 9 aa, Homo sapiens
  Light chain CDR3 for antibody 1630 (IGKV1-6)
LQDYNYPWT

SEQ ID NO: 3260 - protein, 5 aa, Homo sapiens
  Heavy chain CDR3 for antibody 1630 (IGHV3-33)
AREDY

SEQ ID NO: 3261 - protein, 9 aa, Homo sapiens
  Light chain CDR3 for antibody 1631 (IGKV5-2)
LQHDNFPYT

SEQ ID NO: 3262 - protein, 11 aa, Homo sapiens
  Heavy chain CDR3 for antibody 1631 (IGHV3-33)
AREGAVARFDY

SEQ ID NO: 3263 - protein, 9 aa, Homo sapiens
  Light chain CDR3 for antibody 1632 (IGKV3-20)
QQYGSSPYT

SEQ ID NO: 3264 - protein, 8 aa, Homo sapiens
  Heavy chain CDR3 for antibody 1632 (IGHV3-23)
AETFLFDY

SEQ ID NO: 3265 - protein, 9 aa, Homo sapiens
  Light chain CDR3 for antibody 1633 (IGKV3D-20)
QQYGSSPYT

SEQ ID NO: 3266 - protein, 19 aa, Homo sapiens
  Heavy chain CDR3 for antibody 1633 (IGHV3-33)
ARGVRLRYFDPYYYYGMDV

SEQ ID NO: 3267 - protein, 9 aa, Homo sapiens
  Light chain CDR3 for antibody 1634 (IGKV6-21)
HQSSSLPYT

SEQ ID NO: 3268 - protein, 19 aa, Homo sapiens
  Heavy chain CDR3 for antibody 1634 (IGHV3-33)
ARGPYYDILTGYGYYGMDV

SEQ ID NO: 3269 - protein, 9 aa, Homo sapiens
  Light chain CDR3 for antibody 1635 (IGKV1-6)
LQDYNYPYT

SEQ ID NO: 3270 - protein, 20 aa, Homo sapiens
  Heavy chain CDR3 for antibody 1635 (IGHV3-33)
ARRMVRGVKKTYYYYYGLDV

SEQ ID NO: 3271 - protein, 9 aa, Homo sapiens
  Light chain CDR3 for antibody 1636 (IGKV1D-16)
QQYNSYPLT

SEQ ID NO: 3272 - protein, 16 aa, Homo sapiens
  Heavy chain CDR3 for antibody 1636 (IGHV3-13)
ARDRSYESYYYYGMDV

SEQ ID NO: 3273 - protein, 9 aa, Homo sapiens
  Light chain CDR3 for antibody 1637 (IGKV1-9)
QQLKSYLYT

SEQ ID NO: 3274 - protein, 18 aa, Homo sapiens
  Heavy chain CDR3 for antibody 1637 (IGHV1-46)
ARDGDYVWGSYRSDWFDP

SEQ ID NO: 3275 - protein, 9 aa, Homo sapiens
  Light chain CDR3 for antibody 1638 (IGKV2-30)
MQGTHWPLT

SEQ ID NO: 3276 - protein, 14 aa, Homo sapiens
  Heavy chain CDR3 for antibody 1638 (IGHV3-33)
ARGAAAGNFYGLDV

SEQ ID NO: 3277 - protein, 9 aa, Homo sapiens
  Light chain CDR3 for antibody 1639 (IGKV6-21)
HQSSSLPYT

SEQ ID NO: 3278 - protein, 11 aa, Homo sapiens
  Heavy chain CDR3 for antibody 1639 (IGHV3-33)
ARGSGSYAFDS

SEQ ID NO: 3279 - protein, 9 aa, Homo sapiens
  Light chain CDR3 for antibody 1640 (IGKV1D-16)
QQYNSYPLT

SEQ ID NO: 3280 - protein, 15 aa, Homo sapiens
  Heavy chain CDR3 for antibody 1640 (IGHV3-33)
ARRSILTGSYWYFDL

SEQ ID NO: 3281 - protein, 9 aa, Homo sapiens
  Light chain CDR3 for antibody 1641 (IGKV3-20)
QQYGSSPYT

SEQ ID NO: 3282 - protein, 10 aa, Homo sapiens
  Heavy chain CDR3 for antibody 1641 (IGHV3-33)
AREWFGGFDI

SEQ ID NO: 3283 - protein, 9 aa, Homo sapiens
  Light chain CDR3 for antibody 1642 (IGKV1-9)
QQLYRYPIT

SEQ ID NO: 3284 - protein, 14 aa, Homo sapiens
  Heavy chain CDR3 for antibody 1642 (IGHV3-48)
GRDTTHDWSDGGIY

SEQ ID NO: 3285 - protein, 9 aa, Homo sapiens
  Light chain CDR3 for antibody 1643 (IGKV1D-16)
QQYNSYPYT

SEQ ID NO: 3286 - protein, 9 aa, Homo sapiens
  Heavy chain CDR3 for antibody 1643 (IGHV3-23)
AKEQLLFDY

SEQ ID NO: 3287 - protein, 9 aa, Homo sapiens
  Light chain CDR3 for antibody 1644 (IGKV5-2)
LQHDNFPWT

SEQ ID NO: 3288 - protein, 19 aa, Homo sapiens
  Heavy chain CDR3 for antibody 1644 (IGHV5-51)
ARHGEKGKRITMVRGSLDV

SEQ ID NO: 3289 - protein, 9 aa, Homo sapiens
  Light chain CDR3 for antibody 1645 (IGKV3D-7)
QQDYNLPLT

SEQ ID NO: 3290 - protein, 15 aa, Homo sapiens
  Heavy chain CDR3 for antibody 1645 (IGHV4-59)
ARDIGYYGSGSPLDY

SEQ ID NO: 3291 - protein, 9 aa, Homo sapiens
  Light chain CDR3 for antibody 1646 (IGKV5-2)
LQHDNFPYT

SEQ ID NO: 3292 - protein, 11 aa, Homo sapiens
  Heavy chain CDR3 for antibody 1646 (IGHV3-23)
AKGLWSYYFDY

SEQ ID NO: 3293 - protein, 9 aa, Homo sapiens
  Light chain CDR3 for antibody 1647 (IGKV1-39)
QQSYRTPLT

SEQ ID NO: 3294 - protein, 13 aa, Homo sapiens
  Heavy chain CDR3 for antibody 1647 (IGHV3-23)
ARAFFMVRGVIDF

SEQ ID NO: 3295 - protein, 9 aa, Homo sapiens
  Light chain CDR3 for antibody 1648 (IGKV1D-13)
QQFNNYPHT

SEQ ID NO: 3296 - protein, 15 aa, Homo sapiens
  Heavy chain CDR3 for antibody 1648 (IGHV3-33)
ARDHLTGYYYYGMDV

SEQ ID NO: 3297 - protein, 9 aa, Homo sapiens
  Light chain CDR3 for antibody 1649 (IGKV1-39)
QQSYSTPLT

SEQ ID NO: 3298 - protein, 14 aa, Homo sapiens
  Heavy chain CDR3 for antibody 1649 (IGHV3-33)
ARDRIAAASSDFDC

SEQ ID NO: 3299 - protein, 9 aa, Homo sapiens
  Light chain CDR3 for antibody 1650 (IGKV2D-28)
MQVLQTPFT

SEQ ID NO: 3300 - protein, 13 aa, Homo sapiens
  Heavy chain CDR3 for antibody 1650 (IGHV4-59)
ARDAGYSSSWFDY

SEQ ID NO: 3301 - protein, 9 aa, Homo sapiens
  Light chain CDR3 for antibody 1651 (IGKV5-2)
LQHDNFPYT

SEQ ID NO: 3302 - protein, 11 aa, Homo sapiens
  Heavy chain CDR3 for antibody 1651 (IGHV3-74)
ARDRGNWGFDY

SEQ ID NO: 3303 - protein, 8 aa, Homo sapiens
  Light chain CDR3 for antibody 1652 (IGKV3-20)
QQYTSPKT

SEQ ID NO: 3304 - protein, 14 aa, Homo sapiens
  Heavy chain CDR3 for antibody 1652 (IGHV7-4-1)
ARDNVHYGDYSLDL

SEQ ID NO: 3305 - protein, 9 aa, Homo sapiens
  Light chain CDR3 for antibody 1653 (IGKV3-20)
QQYGSSPYT

SEQ ID NO: 3306 - protein, 11 aa, Homo sapiens
  Heavy chain CDR3 for antibody 1653 (IGHV3-33)
ARGSGSYAFDS

SEQ ID NO: 3307 - protein, 9 aa, Homo sapiens
  Light chain CDR3 for antibody 1654 (IGKV1-16)
QQYNSYPYT

SEQ ID NO: 3308 - protein, 19 aa, Homo sapiens
  Heavy chain CDR3 for antibody 1654 (IGHV4-39)
ARQGDVLRYFDWLLGAFDI

SEQ ID NO: 3309 - protein, 9 aa, Homo sapiens
  Light chain CDR3 for antibody 1655 (IGKV1-39)
QQSYSTPFT

SEQ ID NO: 3310 - protein, 12 aa, Homo sapiens
  Heavy chain CDR3 for antibody 1655 (IGHV4-39)
ARHGSGSSYFDY

SEQ ID NO: 3311 - protein, 9 aa, Homo sapiens
  Light chain CDR3 for antibody 1656 (IGKV6-21)
HQSSSLPLT

SEQ ID NO: 3312 - protein, 14 aa, Homo sapiens
  Heavy chain CDR3 for antibody 1656 (IGHV3-33)
ARGGYNWNDDWFDP

SEQ ID NO: 3313 - protein, 9 aa, Homo sapiens
  Light chain CDR3 for antibody 1657 (IGKV3-20)
QQYGSSPYT

SEQ ID NO: 3314 - protein, 15 aa, Homo sapiens
  Heavy chain CDR3 for antibody 1657 (IGHV3-33)
ARGYYYGSGSFPVDY

SEQ ID NO: 3315 - protein, 9 aa, Homo sapiens
  Light chain CDR3 for antibody 1658 (IGKV5-2)
LQHDNFPYT

SEQ ID NO: 3316 - protein, 15 aa, Homo sapiens
  Heavy chain CDR3 for antibody 1658 (IGHV3-23)
AKEALRYFDWSGMDV

SEQ ID NO: 3317 - protein, 9 aa, Homo sapiens
  Light chain CDR3 for antibody 1659 (IGKV1D-16)
QQYNSYPYT

SEQ ID NO: 3318 - protein, 16 aa, Homo sapiens
  Heavy chain CDR3 for antibody 1659 (IGHV3-33)
AREVAGSYYYYYGIDV

SEQ ID NO: 3319 - protein, 9 aa, Homo sapiens
  Light chain CDR3 for antibody 1660 (IGKV1-6)
LQDYNYPRT

SEQ ID NO: 3320 - protein, 14 aa, Homo sapiens
  Heavy chain CDR3 for antibody 1660 (IGHV1-46)
ARKGIVGAFDAFDI

SEQ ID NO: 3321 - protein, 9 aa, Homo sapiens
  Light chain CDR3 for antibody 1661 (IGKV1D-16)
QQYNSYPLT

SEQ ID NO: 3322 - protein, 15 aa, Homo sapiens
  Heavy chain CDR3 for antibody 1661 (IGHV3-33)
ARDRVVRGVMGYFDY

SEQ ID NO: 3323 - protein, 9 aa, Homo sapiens
  Light chain CDR3 for antibody 1662 (IGKV1-17)
LQHNTYPYT

SEQ ID NO: 3324 - protein, 13 aa, Homo sapiens
  Heavy chain CDR3 for antibody 1662 (IGHV3-33)
ARDSGSYSYYFNY

SEQ ID NO: 3325 - protein, 9 aa, Homo sapiens
  Light chain CDR3 for antibody 1663 (IGKV5-2)
LQHDNFPWT

SEQ ID NO: 3326 - protein, 11 aa, Homo sapiens
  Heavy chain CDR3 for antibody 1663 (IGHV4-59)
VRERGYYGMDV

SEQ ID NO: 3327 - protein, 9 aa, Homo sapiens
  Light chain CDR3 for antibody 1664 (IGKV3-20)
QQYGSSPYT

SEQ ID NO: 3328 - protein, 12 aa, Homo sapiens
  Heavy chain CDR3 for antibody 1664 (IGHV3-33)
ARDYISTYGMDV

SEQ ID NO: 3329 - protein, 9 aa, Homo sapiens
  Light chain CDR3 for antibody 1665 (IGKV5-2)
LQHDNFPYT

SEQ ID NO: 3330 - protein, 12 aa, Homo sapiens
  Heavy chain CDR3 for antibody 1665 (IGHV3-33)
AREGTRWVYFDY

SEQ ID NO: 3331 - protein, 9 aa, Homo sapiens
  Light chain CDR3 for antibody 1666 (IGKV3-15)
QQYNNWPRT

SEQ ID NO: 3332 - protein, 11 aa, Homo sapiens
  Heavy chain CDR3 for antibody 1666 (IGHV3-33)
ARDRSSGPFDY

SEQ ID NO: 3333 - protein, 9 aa, Homo sapiens
  Light chain CDR3 for antibody 1667 (IGKV1D-16)
QQYNSYPYT

SEQ ID NO: 3334 - protein, 19 aa, Homo sapiens
  Heavy chain CDR3 for antibody 1667 (IGHV3-33)
ARRRDDILTGWDYYFGMDV

SEQ ID NO: 3335 - protein, 9 aa, Homo sapiens
  Light chain CDR3 for antibody 1668 (IGKV6-21)
HQSSSLPYT

SEQ ID NO: 3336 - protein, 11 aa, Homo sapiens
  Heavy chain CDR3 for antibody 1668 (IGHV3-74)
ARDRGNWGFDY

SEQ ID NO: 3337 - protein, 9 aa, Homo sapiens
  Light chain CDR3 for antibody 1669 (IGKV1D-13)
QQFNNYPYT

SEQ ID NO: 3338 - protein, 16 aa, Homo sapiens
  Heavy chain CDR3 for antibody 1669 (IGHV3-33)
ARAVYYGSGSSLIMDV

SEQ ID NO: 3339 - protein, 9 aa, Homo sapiens
  Light chain CDR3 for antibody 1670 (IGKV3-11)
QQRSNWPYT

SEQ ID NO: 3340 - protein, 20 aa, Homo sapiens
  Heavy chain CDR3 for antibody 1670 (IGHV3-33)
ARDNDSSGYYDYYYYYGMDV

SEQ ID NO: 3341 - protein, 9 aa, Homo sapiens
  Light chain CDR3 for antibody 1671 (IGKV1D-16)
QQYNSYPYT

SEQ ID NO: 3342 - protein, 17 aa, Homo sapiens
  Heavy chain CDR3 for antibody 1671 (IGHV3-23)
AKDRDWKDGYYYFGMDV

SEQ ID NO: 3343 - protein, 9 aa, Homo sapiens
  Light chain CDR3 for antibody 1672 (IGKV5-2)
LQHDNFPYT

SEQ ID NO: 3344 - protein, 8 aa, Homo sapiens
  Heavy chain CDR3 for antibody 1672 (IGHV3-23)
AKESLLDY

SEQ ID NO: 3345 - protein, 9 aa, Homo sapiens
  Light chain CDR3 for antibody 1673 (IGKV1-39)
QQSYSTPLT

SEQ ID NO: 3346 - protein, 10 aa, Homo sapiens
  Heavy chain CDR3 for antibody 1673 (IGHV3-33)
ARENSTPLDY

SEQ ID NO: 3347 - protein, 9 aa, Homo sapiens
  Light chain CDR3 for antibody 1674 (IGKV3D-7)
QQDYNLPLT

SEQ ID NO: 3348 - protein, 12 aa, Homo sapiens
  Heavy chain CDR3 for antibody 1674 (IGHV3-33)
TRGYSSKSYFDY

SEQ ID NO: 3349 - protein, 9 aa, Homo sapiens
  Light chain CDR3 for antibody 1675 (IGKV5-2)
LQHDNFPWT

SEQ ID NO: 3350 - protein, 16 aa, Homo sapiens
  Heavy chain CDR3 for antibody 1675 (IGHV4-59)
ARFYFGSGSYYWYFDL

SEQ ID NO: 3351 - protein, 9 aa, Homo sapiens
  Light chain CDR3 for antibody 1676 (IGKV1-6)
LQDYNYPFT

SEQ ID NO: 3352 - protein, 14 aa, Homo sapiens
  Heavy chain CDR3 for antibody 1676 (IGHV3-33)
ARASSGSSYWYIDL

SEQ ID NO: 3353 - protein, 11 aa, Homo sapiens
  Light chain CDR3 for antibody 1677 (IGKV1-33)
QQYDNLRRVFT

SEQ ID NO: 3354 - protein, 11 aa, Homo sapiens
  Heavy chain CDR3 for antibody 1677 (IGHV1-69)
ARDPAGRTFDI

SEQ ID NO: 3355 - protein, 9 aa, Homo sapiens
  Light chain CDR3 for antibody 1678 (IGKV3-20)
QQYGSSPYT

SEQ ID NO: 3356 - protein, 12 aa, Homo sapiens
  Heavy chain CDR3 for antibody 1678 (IGHV4-39)
ARQMVREGWFDP

SEQ ID NO: 3357 - protein, 9 aa, Homo sapiens
  Light chain CDR3 for antibody 1679 (IGKV3-20)
QQYGSSPYT

SEQ ID NO: 3358 - protein, 12 aa, Homo sapiens
  Heavy chain CDR3 for antibody 1679 (IGHV3-23)
AKEYDILTGYFH

SEQ ID NO: 3359 - protein, 9 aa, Homo sapiens
  Light chain CDR3 for antibody 1680 (IGKV1D-16)
QQYNSYPYT

SEQ ID NO: 3360 - protein, 15 aa, Homo sapiens
  Heavy chain CDR3 for antibody 1680 (IGHV1-46)
ARGRFFDWLLSPFDY

SEQ ID NO: 3361 - protein, 9 aa, Homo sapiens
  Light chain CDR3 for antibody 1681 (IGKV6-21)
HQSSSLPWT

SEQ ID NO: 3362 - protein, 17 aa, Homo sapiens
  Heavy chain CDR3 for antibody 1681 (IGHV3-33)
ARDCGSYYDYYFYGMDV

SEQ ID NO: 3363 - protein, 9 aa, Homo sapiens
  Light chain CDR3 for antibody 1682 (IGKV5-2)
LQHDNFPWT

SEQ ID NO: 3364 - protein, 20 aa, Homo sapiens
  Heavy chain CDR3 for antibody 1682 (IGHV1-18)
AREVGIAVAGTLYYYYGMDV

SEQ ID NO: 3365 - protein, 9 aa, Homo sapiens
  Light chain CDR3 for antibody 1683 (IGKV5-2)
LQHDNFPYT

SEQ ID NO: 3366 - protein, 13 aa, Homo sapiens
  Heavy chain CDR3 for antibody 1683 (IGHV3-33)
ARRYRSGWYPFDY

SEQ ID NO: 3367 - protein, 9 aa, Homo sapiens
  Light chain CDR3 for antibody 1684 (IGKV2-30)
MQGTHWPLT

SEQ ID NO: 3368 - protein, 14 aa, Homo sapiens
  Heavy chain CDR3 for antibody 1684 (IGHV3-23)
AKSRIVGALYYFDY

SEQ ID NO: 3369 - protein, 9 aa, Homo sapiens
  Light chain CDR3 for antibody 1685 (IGKV6-21)
HQSNRLPLT

SEQ ID NO: 3370 - protein, 11 aa, Homo sapiens
  Heavy chain CDR3 for antibody 1685 (IGHV3-30)
VRVGTGEFFDL

SEQ ID NO: 3371 - protein, 9 aa, Homo sapiens
  Light chain CDR3 for antibody 1686 (IGKV1-6)
LQDYNYPRT

SEQ ID NO: 3372 - protein, 12 aa, Homo sapiens
  Heavy chain CDR3 for antibody 1686 (IGHV1-18)
ARVLFDGDYFDY

SEQ ID NO: 3373 - protein, 9 aa, Homo sapiens
  Light chain CDR3 for antibody 1687 (IGKV5-2)
LQHDNFPYT

SEQ ID NO: 3374 - protein, 18 aa, Homo sapiens
  Heavy chain CDR3 for antibody 1687 (IGHV3-33)
ARERDYYGSGSYPDAFDI

SEQ ID NO: 3375 - protein, 9 aa, Homo sapiens
  Light chain CDR3 for antibody 1688 (IGKV1-39)
QQSYRTPLT

SEQ ID NO: 3376 - protein, 14 aa, Homo sapiens
  Heavy chain CDR3 for antibody 1688 (IGHV3-33)
AREGYSSNWYDFDY

SEQ ID NO: 3377 - protein, 9 aa, Homo sapiens
  Light chain CDR3 for antibody 1689 (IGKV5-2)
LQHDNFPWT

SEQ ID NO: 3378 - protein, 19 aa, Homo sapiens
  Heavy chain CDR3 for antibody 1689 (IGHV4-59)
ARDRVVGATTYYYYYGMDV

SEQ ID NO: 3379 - protein, 9 aa, Homo sapiens
  Light chain CDR3 for antibody 1690 (IGKV1-9)
QQLNSYPLT

SEQ ID NO: 3380 - protein, 7 aa, Homo sapiens
  Heavy chain CDR3 for antibody 1690 (IGHV3-33)
ARELVDY

SEQ ID NO: 3381 - protein, 9 aa, Homo sapiens
  Light chain CDR3 for antibody 1691 (IGKV1D-16)
QQYNSYPYT

SEQ ID NO: 3382 - protein, 12 aa, Homo sapiens
  Heavy chain CDR3 for antibody 1691 (IGHV3-33)
ARDGRAAAYFDN

SEQ ID NO: 3383 - protein, 9 aa, Homo sapiens
  Light chain CDR3 for antibody 1692 (IGKV3-20)
QQYGSSPYT

SEQ ID NO: 3384 - protein, 14 aa, Homo sapiens
  Heavy chain CDR3 for antibody 1692 (IGHV1-46)
ARKGIVGAFDAFDI

SEQ ID NO: 3385 - protein, 9 aa, Homo sapiens
  Light chain CDR3 for antibody 1693 (IGKV1D-16)
QQYNSYPLT

SEQ ID NO: 3386 - protein, 17 aa, Homo sapiens
  Heavy chain CDR3 for antibody 1693 (IGHV3-33)
AREDYDILTGYPFYFDY

SEQ ID NO: 3387 - protein, 9 aa, Homo sapiens
  Light chain CDR3 for antibody 1694 (IGKV1D-16)
QQYNSYPLT

SEQ ID NO: 3388 - protein, 19 aa, Homo sapiens
  Heavy chain CDR3 for antibody 1694 (IGHV3-33)
ARGPYYDILTGYGYYGMDV

SEQ ID NO: 3389 - protein, 9 aa, Homo sapiens
  Light chain CDR3 for antibody 1695 (IGKV1D-13)
QQFNNYPRT

SEQ ID NO: 3390 - protein, 17 aa, Homo sapiens
  Heavy chain CDR3 for antibody 1695 (IGHV1-18)
ARDRAFTMVRGVPPFDY

SEQ ID NO: 3391 - protein, 9 aa, Homo sapiens
  Light chain CDR3 for antibody 1696 (IGKV6-21)
HQSTSLPFT

SEQ ID NO: 3392 - protein, 11 aa, Homo sapiens
  Heavy chain CDR3 for antibody 1696 (IGHV4-59)
ARSLRYSFFDY

SEQ ID NO: 3393 - protein, 9 aa, Homo sapiens
  Light chain CDR3 for antibody 1697 (IGKV1-17)
LQHNSYPYT

SEQ ID NO: 3394 - protein, 19 aa, Homo sapiens
  Heavy chain CDR3 for antibody 1697 (IGHV3-23)
AKDGRSGSYDYYYYYGMDV

SEQ ID NO: 3395 - protein, 9 aa, Homo sapiens
  Light chain CDR3 for antibody 1698 (IGKV1-39)
QQSYSTPLT

SEQ ID NO: 3396 - protein, 14 aa, Homo sapiens
  Heavy chain CDR3 for antibody 1698 (IGHV3-33)
ARTTAAAGPRDFQH

SEQ ID NO: 3397 - protein, 9 aa, Homo sapiens
  Light chain CDR3 for antibody 1699 (IGKV3-20)
QQYGSSPYT

SEQ ID NO: 3398 - protein, 14 aa, Homo sapiens
  Heavy chain CDR3 for antibody 1699 (IGHV3-23)
ANWAYDILTGYLDY

SEQ ID NO: 3399 - protein, 9 aa, Homo sapiens
  Light chain CDR3 for antibody 1700 (IGKV1-6)
LQDHNYPYT

SEQ ID NO: 3400 - protein, 23 aa, Homo sapiens
  Heavy chain CDR3 for antibody 1700 (IGHV3-11)
ARGGDYDILTGFYNSYYYYGMDV

SEQ ID NO: 3401 - protein, 9 aa, Homo sapiens
  Light chain CDR3 for antibody 1701 (IGKV1-9)
QQLISYPLT

SEQ ID NO: 3402 - protein, 16 aa, Homo sapiens
  Heavy chain CDR3 for antibody 1701 (IGHV3-23)
AKEGMVLRYFDWLWDY

SEQ ID NO: 3403 - protein, 9 aa, Homo sapiens
  Light chain CDR3 for antibody 1702 (IGKV1-9)
QQLNSYPLT

SEQ ID NO: 3404 - protein, 13 aa, Homo sapiens
  Heavy chain CDR3 for antibody 1702 (IGHV3-23)
ASTGDSYYYGMDV

SEQ ID NO: 3405 - protein, 9 aa, Homo sapiens
  Light chain CDR3 for antibody 1703 (IGKV1D-16)
QQYNSYPYT

SEQ ID NO: 3406 - protein, 11 aa, Homo sapiens
  Heavy chain CDR3 for antibody 1703 (IGHV4-59)
ARDRGHYGMDV

SEQ ID NO: 3407 - protein, 9 aa, Homo sapiens
  Light chain CDR3 for antibody 1704 (IGKV1D-13)
QQFNNYPYT

SEQ ID NO: 3408 - protein, 18 aa, Homo sapiens
  Heavy chain CDR3 for antibody 1704 (IGHV3-33)
ARDRDRYGSGTYPDAIDI

SEQ ID NO: 3409 - protein, 9 aa, Homo sapiens
  Light chain CDR3 for antibody 1705 (IGKV1-9)
QQLNSYPRT

SEQ ID NO: 3410 - protein, 9 aa, Homo sapiens
  Heavy chain CDR3 for antibody 1705 (IGHV3-33)
ARDAVYFDY

SEQ ID NO: 3411 - protein, 9 aa, Homo sapiens
  Light chain CDR3 for antibody 1706 (IGKV1-6)
LQDYNYPYT

SEQ ID NO: 3412 - protein, 15 aa, Homo sapiens
  Heavy chain CDR3 for antibody 1706 (IGHV3-23)
AKDRDYDFLSGPFDY

SEQ ID NO: 3413 - protein, 9 aa, Homo sapiens
  Light chain CDR3 for antibody 1707 (IGKV1D-16)
QQYNSYPYT

SEQ ID NO: 3414 - protein, 16 aa, Homo sapiens
  Heavy chain CDR3 for antibody 1707 (IGHV3-33)
AKDAFYYGSGSHLFDY

SEQ ID NO: 3415 - protein, 8 aa, Homo sapiens
  Light chain CDR3 for antibody 1708 (IGKV3D-7)
QQDYNLLT

SEQ ID NO: 3416 - protein, 13 aa, Homo sapiens
  Heavy chain CDR3 for antibody 1708 (IGHV3-11)
ARDGGAAAGTWDS

SEQ ID NO: 3417 - protein, 9 aa, Homo sapiens
  Light chain CDR3 for antibody 1709 (IGKV1-17)
QQLNSYPLT

SEQ ID NO: 3418 - protein, 11 aa, Homo sapiens
  Heavy chain CDR3 for antibody 1709 (IGHV1-24)
ATELGLYYFDY

SEQ ID NO: 3419 - protein, 9 aa, Homo sapiens
  Light chain CDR3 for antibody 1710 (IGKV1-27)
QKYNSAPYT

SEQ ID NO: 3420 - protein, 17 aa, Homo sapiens
  Heavy chain CDR3 for antibody 1710 (IGHV3-33)
ARESLKLGIYYYYGMDV

SEQ ID NO: 3421 - protein, 8 aa, Homo sapiens
  Light chain CDR3 for antibody 1711 (IGKV1D-13)
QQFNNYPT

SEQ ID NO: 3422 - protein, 16 aa, Homo sapiens
  Heavy chain CDR3 for antibody 1711 (IGHV3-23)
AKEGMVLRYFDWLWDY

SEQ ID NO: 3423 - protein, 9 aa, Homo sapiens
  Light chain CDR3 for antibody 1712 (IGKV1-6)
LQDYNYPYT

SEQ ID NO: 3424 - protein, 16 aa, Homo sapiens
  Heavy chain CDR3 for antibody 1712 (IGHV3-23)
AKDGIGELSYYYGMDV

SEQ ID NO: 3425 - protein, 9 aa, Homo sapiens
  Light chain CDR3 for antibody 1713 (IGKV5-2)
LQHDNFPYT

SEQ ID NO: 3426 - protein, 13 aa, Homo sapiens
  Heavy chain CDR3 for antibody 1713 (IGHV3-33)
ASGYSGYDWYFDL

SEQ ID NO: 3427 - protein, 9 aa, Homo sapiens
  Light chain CDR3 for antibody 1714 (IGKV6-21)
HQSSSLPYT

SEQ ID NO: 3428 - protein, 18 aa, Homo sapiens
  Heavy chain CDR3 for antibody 1714 (IGHV3-33)
ARGGYSSGWDYYYYGMDV

SEQ ID NO: 3429 - protein, 9 aa, Homo sapiens
  Light chain CDR3 for antibody 1715 (IGKV3-15)
QQYNNWPLT

SEQ ID NO: 3430 - protein, 12 aa, Homo sapiens
  Heavy chain CDR3 for antibody 1715 (IGHV4-61)
ARVYSSGWLFDY

SEQ ID NO: 3431 - protein, 9 aa, Homo sapiens
  Light chain CDR3 for antibody 1716 (IGKV5-2)
LQHDNFPYT

SEQ ID NO: 3432 - protein, 10 aa, Homo sapiens
  Heavy chain CDR3 for antibody 1716 (IGHV3-33)
ARDVVVYFDY

SEQ ID NO: 3433 - protein, 9 aa, Homo sapiens
  Light chain CDR3 for antibody 1717 (IGKV1-17)
LQHNSYPWT

SEQ ID NO: 3434 - protein, 16 aa, Homo sapiens
  Heavy chain CDR3 for antibody 1717 (IGHV3-33)
ARDNFGSGSYYSHFHY

SEQ ID NO: 3435 - protein, 9 aa, Homo sapiens
  Light chain CDR3 for antibody 1718 (IGKV1-9)
QQLNSYPLT

SEQ ID NO: 3436 - protein, 17 aa, Homo sapiens
  Heavy chain CDR3 for antibody 1718 (IGHV1-18)
ARERYYGSGNYKYNMDV

SEQ ID NO: 3437 - protein, 9 aa, Homo sapiens
  Light chain CDR3 for antibody 1719 (IGKV6-21)
HQSSSLPYT

SEQ ID NO: 3438 - protein, 16 aa, Homo sapiens
  Heavy chain CDR3 for antibody 1719 (IGHV1-24)
ATEDSSSTYYYYGLDV

SEQ ID NO: 3439 - protein, 9 aa, Homo sapiens
  Light chain CDR3 for antibody 1720 (IGKV1-9)
QQYNSYPLT

SEQ ID NO: 3440 - protein, 22 aa, Homo sapiens
  Heavy chain CDR3 for antibody 1720 (IGHV4-59)
AREINYGSGSYYNEDYYYGMDV

SEQ ID NO: 3441 - protein, 9 aa, Homo sapiens
  Light chain CDR3 for antibody 1721 (IGKV1D-13)
QQFNNYPYT

SEQ ID NO: 3442 - protein, 13 aa, Homo sapiens
  Heavy chain CDR3 for antibody 1721 (IGHV3-33)
ARTDYYFYYGLDV

SEQ ID NO: 3443 - protein, 9 aa, Homo sapiens
  Light chain CDR3 for antibody 1722 (IGKV1-6)
LQDYNYPYT

SEQ ID NO: 3444 - protein, 15 aa, Homo sapiens
  Heavy chain CDR3 for antibody 1722 (IGHV3-33)
ARDGSGSYSLYGMDV

SEQ ID NO: 3445 - protein, 9 aa, Homo sapiens
  Light chain CDR3 for antibody 1723 (IGKV3-20)
QQYGSSPYT

SEQ ID NO: 3446 - protein, 21 aa, Homo sapiens
  Heavy chain CDR3 for antibody 1723 (IGHV3-33)
ARDEYYEIVTGYGYYHYGMDV

SEQ ID NO: 3447 - protein, 9 aa, Homo sapiens
  Light chain CDR3 for antibody 1724 (IGKV1D-16)
QQYNSYPYT

SEQ ID NO: 3448 - protein, 18 aa, Homo sapiens
  Heavy chain CDR3 for antibody 1724 (IGHV1-18)
ARDPNYYGSGSYYNYFDY

SEQ ID NO: 3449 - protein, 9 aa, Homo sapiens
  Light chain CDR3 for antibody 1725 (IGKV3-20)
QQYGSSPYT

SEQ ID NO: 3450 - protein, 23 aa, Homo sapiens
  Heavy chain CDR3 for antibody 1725 (IGHV3-11)
ARDEGVTMVRGVISYYYYYGMDV

SEQ ID NO: 3451 - protein, 9 aa, Homo sapiens
  Light chain CDR3 for antibody 1726 (IGKV1-39)
QQSYRTPLT

SEQ ID NO: 3452 - protein, 12 aa, Homo sapiens
  Heavy chain CDR3 for antibody 1726 (IGHV3-33)
ARDRAYRGSLDY

SEQ ID NO: 3453 - protein, 9 aa, Homo sapiens
  Light chain CDR3 for antibody 1727 (IGKV1-17)
LQHNSYPYT

SEQ ID NO: 3454 - protein, 18 aa, Homo sapiens
  Heavy chain CDR3 for antibody 1727 (IGHV3-33)
AREGYDILTGYYNVKFDY

SEQ ID NO: 3455 - protein, 9 aa, Homo sapiens
  Light chain CDR3 for antibody 1728 (IGKV1D-13)
QQFNNYPYT

SEQ ID NO: 3456 - protein, 13 aa, Homo sapiens
  Heavy chain CDR3 for antibody 1728 (IGHV3-33)
ARVDTMVRGVMAY

SEQ ID NO: 3457 - protein, 9 aa, Homo sapiens
  Light chain CDR3 for antibody 1729 (IGKV1-17)
LQHNSYPYT

SEQ ID NO: 3458 - protein, 13 aa, Homo sapiens
  Heavy chain CDR3 for antibody 1729 (IGHV1-46)
ARRQVGYYYGMDV

SEQ ID NO: 3459 - protein, 9 aa, Homo sapiens
  Light chain CDR3 for antibody 1730 (IGKV5-2)
LQHDNFPWT

SEQ ID NO: 3460 - protein, 14 aa, Homo sapiens
  Heavy chain CDR3 for antibody 1730 (IGHV4-59)
AKGGSGSYYNWFDP

SEQ ID NO: 3461 - protein, 9 aa, Homo sapiens
  Light chain CDR3 for antibody 1731 (IGKV1-39)
QQSYSTPLT

SEQ ID NO: 3462 - protein, 11 aa, Homo sapiens
  Heavy chain CDR3 for antibody 1731 (IGHV3-33)
AREAANWGFDY

SEQ ID NO: 3463 - protein, 9 aa, Homo sapiens
  Light chain CDR3 for antibody 1732 (IGKV1D-13)
QQFNNYPYT

SEQ ID NO: 3464 - protein, 8 aa, Homo sapiens
  Heavy chain CDR3 for antibody 1732 (IGHV3-23)
AKETGNNY

SEQ ID NO: 3465 - protein, 9 aa, Homo sapiens
  Light chain CDR3 for antibody 1733 (IGKV3-15)
QQYNNWPLT

SEQ ID NO: 3466 - protein, 13 aa, Homo sapiens
  Heavy chain CDR3 for antibody 1733 (IGHV4-39)
ARQWPSGYWYFDL

SEQ ID NO: 3467 - protein, 9 aa, Homo sapiens
  Light chain CDR3 for antibody 1734 (IGKV1D-13)
QQFNNYPYT

SEQ ID NO: 3468 - protein, 18 aa, Homo sapiens
  Heavy chain CDR3 for antibody 1734 (IGHV3-23)
AKEGNYYGSGSYWGYFDP

SEQ ID NO: 3469 - protein, 9 aa, Homo sapiens
  Light chain CDR3 for antibody 1735 (IGKV5-2)
LQHDNFPWT

SEQ ID NO: 3470 - protein, 23 aa, Homo sapiens
  Heavy chain CDR3 for antibody 1735 (IGHV3-11)
ARDEGVTMVRGVISYYYYYGMDV

SEQ ID NO: 3471 - protein, 9 aa, Homo sapiens
  Light chain CDR3 for antibody 1736 (IGKV3-20)
QQYGSSPYT

SEQ ID NO: 3472 - protein, 12 aa, Homo sapiens
  Heavy chain CDR3 for antibody 1736 (IGHV3-23)
AKEGLGSDYESY

SEQ ID NO: 3473 - protein, 9 aa, Homo sapiens
  Light chain CDR3 for antibody 1737 (IGKV5-2)
LQHDNFPWT

SEQ ID NO: 3474 - protein, 14 aa, Homo sapiens
  Heavy chain CDR3 for antibody 1737 (IGHV4-39)
ARQGGSGSYYNLDY

SEQ ID NO: 3475 - protein, 9 aa, Homo sapiens
  Light chain CDR3 for antibody 1738 (IGKV1-27)
QKYNSAPYT

SEQ ID NO: 3476 - protein, 14 aa, Homo sapiens
  Heavy chain CDR3 for antibody 1738 (IGHV3-33)
ARQYSYGYPYYFDY

SEQ ID NO: 3477 - protein, 9 aa, Homo sapiens
  Light chain CDR3 for antibody 1739 (IGKV6-21)
HQSSSLPYT

SEQ ID NO: 3478 - protein, 10 aa, Homo sapiens
  Heavy chain CDR3 for antibody 1739 (IGHV3-33)
ARDVVVYFDY

SEQ ID NO: 3479 - protein, 9 aa, Homo sapiens
  Light chain CDR3 for antibody 1740 (IGKV3-20)
QQYGSSIFT

SEQ ID NO: 3480 - protein, 12 aa, Homo sapiens
  Heavy chain CDR3 for antibody 1740 (IGHV3-33)
ARTDYYYYGMDV

SEQ ID NO: 3481 - protein, 9 aa, Homo sapiens
  Light chain CDR3 for antibody 1741 (IGKV1-17)
LQHNSYPYT

SEQ ID NO: 3482 - protein, 15 aa, Homo sapiens
  Heavy chain CDR3 for antibody 1741 (IGHV3-33)
ARAYDLPHYYYGMDV

SEQ ID NO: 3483 - protein, 9 aa, Homo sapiens
  Light chain CDR3 for antibody 1742 (IGKV3-15)
QQYNNWPLT

SEQ ID NO: 3484 - protein, 13 aa, Homo sapiens
  Heavy chain CDR3 for antibody 1742 (IGHV4-39)
ARREVVGGRGFDY

SEQ ID NO: 3485 - protein, 9 aa, Homo sapiens
  Light chain CDR3 for antibody 1743 (IGKV1D-13)
QQFNNYPYT

SEQ ID NO: 3486 - protein, 9 aa, Homo sapiens
  Heavy chain CDR3 for antibody 1743 (IGHV3-13)
ARDRWYFDL

SEQ ID NO: 3487 - protein, 9 aa, Homo sapiens
  Light chain CDR3 for antibody 1744 (IGKV1-9)
QQLNSYPLT

SEQ ID NO: 3488 - protein, 16 aa, Homo sapiens
  Heavy chain CDR3 for antibody 1744 (IGHV4-59)
ARFYFGSGSYYWYFDL

SEQ ID NO: 3489 - protein, 9 aa, Homo sapiens
  Light chain CDR3 for antibody 1745 (IGKV1-17)
LQHNSYPWT

SEQ ID NO: 3490 - protein, 13 aa, Homo sapiens
  Heavy chain CDR3 for antibody 1745 (IGHV3-33)
ARIDYYSYYGMDV

SEQ ID NO: 3491 - protein, 9 aa, Homo sapiens
  Light chain CDR3 for antibody 1746 (IGKV1D-16)
QQYNSYPYT

SEQ ID NO: 3492 - protein, 18 aa, Homo sapiens
  Heavy chain CDR3 for antibody 1746 (IGHV1-18)
ARDPTFYYVSGSYYKFDY

SEQ ID NO: 3493 - protein, 9 aa, Homo sapiens
  Light chain CDR3 for antibody 1747 (IGKV1D-13)
QQFNNYPYT

SEQ ID NO: 3494 - protein, 15 aa, Homo sapiens
  Heavy chain CDR3 for antibody 1747 (IGHV3-33)
ARDRGWKAPGYGMDV

SEQ ID NO: 3495 - protein, 9 aa, Homo sapiens
  Light chain CDR3 for antibody 1748 (IGKV1-39)
QQSYRVPLT

SEQ ID NO: 3496 - protein, 15 aa, Homo sapiens
  Heavy chain CDR3 for antibody 1748 (IGHV4-b)
ARHDGAVAGTGVFDT

SEQ ID NO: 3497 - protein, 9 aa, Homo sapiens
  Light chain CDR3 for antibody 1749 (IGKV1D-13)
QQFNNYPYT

SEQ ID NO: 3498 - protein, 13 aa, Homo sapiens
  Heavy chain CDR3 for antibody 1749 (IGHV3-33)
ARRYRSGWYPFDY

SEQ ID NO: 3499 - protein, 9 aa, Homo sapiens
  Light chain CDR3 for antibody 1750 (IGKV6-21)
HQSSSLPYT

SEQ ID NO: 3500 - protein, 9 aa, Homo sapiens
  Heavy chain CDR3 for antibody 1750 (IGHV4-59)
ARGGASFDY

SEQ ID NO: 3501 - protein, 9 aa, Homo sapiens
  Light chain CDR3 for antibody 1751 (IGKV1D-16)
QQYNSYPYT

SEQ ID NO: 3502 - protein, 12 aa, Homo sapiens
  Heavy chain CDR3 for antibody 1751 (IGHV3-33)
ARDPGYFFGLDV

SEQ ID NO: 3503 - protein, 9 aa, Homo sapiens
  Light chain CDR3 for antibody 1752 (IGKV1-27)
QKYNSAPYT

SEQ ID NO: 3504 - protein, 9 aa, Homo sapiens
  Heavy chain CDR3 for antibody 1752 (IGHV3-30)
ARDNWGFDY

SEQ ID NO: 3505 - protein, 9 aa, Homo sapiens
  Light chain CDR3 for antibody 1753 (IGKV1-27)
QKYNSAPYT

SEQ ID NO: 3506 - protein, 12 aa, Homo sapiens
  Heavy chain CDR3 for antibody 1753 (IGHV3-33)
ARDLVGATPFDY

SEQ ID NO: 3507 - protein, 9 aa, Homo sapiens
  Light chain CDR3 for antibody 1754 (IGKV3-20)
QQYGSSPYT

SEQ ID NO: 3508 - protein, 9 aa, Homo sapiens
  Heavy chain CDR3 for antibody 1754 (IGHV3-23)
ARIWWLKDY

SEQ ID NO: 3509 - protein, 9 aa, Homo sapiens
  Light chain CDR3 for antibody 1755 (IGKV1D-16)
QQYNSYPYT

SEQ ID NO: 3510 - protein, 15 aa, Homo sapiens
  Heavy chain CDR3 for antibody 1755 (IGHV1-2)
ARDLGYYGSGSRMDV

SEQ ID NO: 3511 - protein, 9 aa, Homo sapiens
  Light chain CDR3 for antibody 1756 (IGKV3-15)
QQYNNWPLT

SEQ ID NO: 3512 - protein, 13 aa, Homo sapiens
  Heavy chain CDR3 for antibody 1756 (IGHV3-33)
ARDYCGGDCYLDY

SEQ ID NO: 3513 - protein, 9 aa, Homo sapiens
  Light chain CDR3 for antibody 1757 (IGKV1D-13)
QQFNNYPHT

SEQ ID NO: 3514 - protein, 14 aa, Homo sapiens
  Heavy chain CDR3 for antibody 1757 (IGHV4-39)
ARDSGYDYYYGMDV

SEQ ID NO: 3515 - protein, 9 aa, Homo sapiens
  Light chain CDR3 for antibody 1758 (IGKV1-17)
LQHNSYPYT

SEQ ID NO: 3516 - protein, 11 aa, Homo sapiens
  Heavy chain CDR3 for antibody 1758 (IGHV1-46)
AREEDLGAFDI

SEQ ID NO: 3517 - protein, 9 aa, Homo sapiens
  Light chain CDR3 for antibody 1759 (IGKV6-21)
HQSSSLPYT

SEQ ID NO: 3518 - protein, 13 aa, Homo sapiens
  Heavy chain CDR3 for antibody 1759 (IGHV3-21)
ARDSTLVRGVFPY

SEQ ID NO: 3519 - protein, 9 aa, Homo sapiens
  Light chain CDR3 for antibody 1760 (IGKV1D-16)
QQYNSYPYT

SEQ ID NO: 3520 - protein, 13 aa, Homo sapiens
  Heavy chain CDR3 for antibody 1760 (IGHV3-33)
ARDPLYSGSYFDY

SEQ ID NO: 3521 - protein, 9 aa, Homo sapiens
  Light chain CDR3 for antibody 1761 (IGKV1-6)
LQDYNYPYT

SEQ ID NO: 3522 - protein, 14 aa, Homo sapiens
  Heavy chain CDR3 for antibody 1761 (IGHV3-33)
ARGYGSGSYYSFDY

SEQ ID NO: 3523 - protein, 9 aa, Homo sapiens
  Light chain CDR3 for antibody 1762 (IGKV5-2)
LQHDNFPWT

SEQ ID NO: 3524 - protein, 14 aa, Homo sapiens
  Heavy chain CDR3 for antibody 1762 (IGHV1-2)
ARDYYGSGNYYMGY

SEQ ID NO: 3525 - protein, 9 aa, Homo sapiens
  Light chain CDR3 for antibody 1763 (IGKV1-27)
QKYNSAPYT

SEQ ID NO: 3526 - protein, 18 aa, Homo sapiens
  Heavy chain CDR3 for antibody 1763 (IGHV3-23)
AKDRITGTTYGYYSGLDV

SEQ ID NO: 3527 - protein, 9 aa, Homo sapiens
  Light chain CDR3 for antibody 1764 (IGKV5-2)
LQHDNFPYT

SEQ ID NO: 3528 - protein, 16 aa, Homo sapiens
  Heavy chain CDR3 for antibody 1764 (IGHV3-33)
ARDNFGSGSYYSHFHY

SEQ ID NO: 3529 - protein, 9 aa, Homo sapiens
  Light chain CDR3 for antibody 1765 (IGKV5-2)
LQHDNFPWT

SEQ ID NO: 3530 - protein, 14 aa, Homo sapiens
  Heavy chain CDR3 for antibody 1765 (IGHV4-39)
ARHGYYGSSNWFDP

SEQ ID NO: 3531 - protein, 9 aa, Homo sapiens
  Light chain CDR3 for antibody 1766 (IGKV1-17)
LQHNSYPYT

SEQ ID NO: 3532 - protein, 12 aa, Homo sapiens
  Heavy chain CDR3 for antibody 1766 (IGHV3-33)
ARKQWLVQAFDI

SEQ ID NO: 3533 - protein, 9 aa, Homo sapiens
  Light chain CDR3 for antibody 1767 (IGKV3-20)
QQYGSSPYT

SEQ ID NO: 3534 - protein, 17 aa, Homo sapiens
  Heavy chain CDR3 for antibody 1767 (IGHV3-33)
ARDWFGELSDYYYGMDV

SEQ ID NO: 3535 - protein, 9 aa, Homo sapiens
  Light chain CDR3 for antibody 1768 (IGKV1D-13)
QQFNNYPYT

SEQ ID NO: 3536 - protein, 12 aa, Homo sapiens
  Heavy chain CDR3 for antibody 1768 (IGHV3-33)
ARVDTAAPYFDY

SEQ ID NO: 3537 - protein, 9 aa, Homo sapiens
  Light chain CDR3 for antibody 1769 (IGKV5-2)
LQHDNFPYT

SEQ ID NO: 3538 - protein, 17 aa, Homo sapiens
  Heavy chain CDR3 for antibody 1769 (IGHV3-64)
ARERYYGSGSYYNWFDP

SEQ ID NO: 3539 - protein, 9 aa, Homo sapiens
  Light chain CDR3 for antibody 1770 (IGKV2-30)
MQGTHWPLT

SEQ ID NO: 3540 - protein, 16 aa, Homo sapiens
  Heavy chain CDR3 for antibody 1770 (IGHV4-59)
ARGRYFEWLLGDVFDI

SEQ ID NO: 3541 - protein, 9 aa, Homo sapiens
  Light chain CDR3 for antibody 1771 (IGKV3-20)
QQYGSSPYT

SEQ ID NO: 3542 - protein, 20 aa, Homo sapiens
  Heavy chain CDR3 for antibody 1771 (IGHV3-33)
ARDPAQLERRYYYFYYGMDV

SEQ ID NO: 3543 - protein, 9 aa, Homo sapiens
  Light chain CDR3 for antibody 1772 (IGKV5-2)
LQHDNFPWT

SEQ ID NO: 3544 - protein, 16 aa, Homo sapiens
  Heavy chain CDR3 for antibody 1772 (IGHV1-8)
AREGTMVRGVTYAFDI

SEQ ID NO: 3545 - protein, 9 aa, Homo sapiens
  Light chain CDR3 for antibody 1773 (IGKV3-15)
QQYNNWPYT

SEQ ID NO: 3546 - protein, 18 aa, Homo sapiens
  Heavy chain CDR3 for antibody 1773 (IGHV3-33)
ARREGIVGATTYYYGMDV

SEQ ID NO: 3547 - protein, 9 aa, Homo sapiens
  Light chain CDR3 for antibody 1774 (IGKV1D-16)
QQYNSYPYT

SEQ ID NO: 3548 - protein, 17 aa, Homo sapiens
  Heavy chain CDR3 for antibody 1774 (IGHV1-24)
ATHYGSGSHYKGYGMDV

SEQ ID NO: 3549 - protein, 9 aa, Homo sapiens
  Light chain CDR3 for antibody 1775 (IGKV5-2)
LQHDNFPWT

SEQ ID NO: 3550 - protein, 11 aa, Homo sapiens
  Heavy chain CDR3 for antibody 1775 (IGHV4-59)
ARDGVRGVFDI

SEQ ID NO: 3551 - protein, 9 aa, Homo sapiens
  Light chain CDR3 for antibody 1776 (IGKV1D-16)
QQYNSYPYT

SEQ ID NO: 3552 - protein, 10 aa, Homo sapiens
  Heavy chain CDR3 for antibody 1776 (IGHV3-30)
ARGSWYGFDY

SEQ ID NO: 3553 - protein, 9 aa, Homo sapiens
  Light chain CDR3 for antibody 1777 (IGKV6-21)
HQSSSLPYT

SEQ ID NO: 3554 - protein, 20 aa, Homo sapiens
  Heavy chain CDR3 for antibody 1777 (IGHV1-f)
ATGLITFVRGVILTYRSFDY

SEQ ID NO: 3555 - protein, 9 aa, Homo sapiens
  Light chain CDR3 for antibody 1778 (IGKV3-20)
QQYGSSPYT

SEQ ID NO: 3556 - protein, 20 aa, Homo sapiens
  Heavy chain CDR3 for antibody 1778 (IGHV3-33)
ARDNDSSGYYDYYYYYGMDV

SEQ ID NO: 3557 - protein, 9 aa, Homo sapiens
  Light chain CDR3 for antibody 1779 (IGKV1-39)
QQSYSTPLT

SEQ ID NO: 3558 - protein, 8 aa, Homo sapiens
  Heavy chain CDR3 for antibody 1779 (IGHV3-23)
AETFLFDY

SEQ ID NO: 3559 - protein, 9 aa, Homo sapiens
  Light chain CDR3 for antibody 1780 (IGKV5-2)
LQHDNFPYT

SEQ ID NO: 3560 - protein, 12 aa, Homo sapiens
  Heavy chain CDR3 for antibody 1780 (IGHV3-33)
ARDGYSSRNFDY

SEQ ID NO: 3561 - protein, 10 aa, Homo sapiens
  Light chain CDR3 for antibody 1781 (IGKV3-11)
QQRSNWPIFT

SEQ ID NO: 3562 - protein, 13 aa, Homo sapiens
  Heavy chain CDR3 for antibody 1781 (IGHV3-23)
ASPFNWNDGFFDY

SEQ ID NO: 3563 - protein, 9 aa, Homo sapiens
  Light chain CDR3 for antibody 1782 (IGKV6-21)
HQSSSLPYT

SEQ ID NO: 3564 - protein, 15 aa, Homo sapiens
  Heavy chain CDR3 for antibody 1782 (IGHV3-33)
ARDRVGVKDYYSMDV

SEQ ID NO: 3565 - protein, 9 aa, Homo sapiens
  Light chain CDR3 for antibody 1783 (IGKV1-39)
QQSYSTPLT

SEQ ID NO: 3566 - protein, 12 aa, Homo sapiens
  Heavy chain CDR3 for antibody 1783 (IGHV3-33)
ARDLVGATPFDY

SEQ ID NO: 3567 - protein, 9 aa, Homo sapiens
  Light chain CDR3 for antibody 1784 (IGKV6-21)
HQSSSLPYT

SEQ ID NO: 3568 - protein, 20 aa, Homo sapiens
  Heavy chain CDR3 for antibody 1784 (IGHV3-33)
SRGGATLVRGVIDYYYGMDV

SEQ ID NO: 3569 - protein, 9 aa, Homo sapiens
  Light chain CDR3 for antibody 1785 (IGKV1-9)
QQLNSYPWT

SEQ ID NO: 3570 - protein, 15 aa, Homo sapiens
  Heavy chain CDR3 for antibody 1785 (IGHV3-33)
ARRICSGGSCSLFDY

SEQ ID NO: 3571 - protein, 9 aa, Homo sapiens
  Light chain CDR3 for antibody 1786 (IGKV3-20)
HQYGSSPLT

SEQ ID NO: 3572 - protein, 13 aa, Homo sapiens
  Heavy chain CDR3 for antibody 1786 (IGHV4-61)
ARMGREQWLGFDY

SEQ ID NO: 3573 - protein, 9 aa, Homo sapiens
  Light chain CDR3 for antibody 1787 (IGKV3-20)
QQYGSSPYT

SEQ ID NO: 3574 - protein, 17 aa, Homo sapiens
  Heavy chain CDR3 for antibody 1787 (IGHV3-33)
ARGFSGYDGYYYYGMDV

SEQ ID NO: 3575 - protein, 9 aa, Homo sapiens
  Light chain CDR3 for antibody 1788 (IGKV3-20)
QQYGSSPYT

SEQ ID NO: 3576 - protein, 14 aa, Homo sapiens
  Heavy chain CDR3 for antibody 1788 (IGHV3-20)
ARDGGSTSFDWFDP

SEQ ID NO: 3577 - protein, 9 aa, Homo sapiens
  Light chain CDR3 for antibody 1789 (IGKV3-20)
QQYGSSPLT

SEQ ID NO: 3578 - protein, 12 aa, Homo sapiens
  Heavy chain CDR3 for antibody 1789 (IGHV4-61)
ARVDSSGWFFDY

SEQ ID NO: 3579 - protein, 9 aa, Homo sapiens
  Light chain CDR3 for antibody 1790 (IGKV2D-28)
MQATQFPLT

SEQ ID NO: 3580 - protein, 18 aa, Homo sapiens
  Heavy chain CDR3 for antibody 1790 (IGHV3-33)
AREAIVVVPAAPYYGMDV

SEQ ID NO: 3581 - protein, 9 aa, Homo sapiens
  Light chain CDR3 for antibody 1791 (IGKV6-21)
HQSSSLPYT

SEQ ID NO: 3582 - protein, 20 aa, Homo sapiens
  Heavy chain CDR3 for antibody 1791 (IGHV3-33)
ARDPAQLERRYYYFYYGMDV

SEQ ID NO: 3583 - protein, 9 aa, Homo sapiens
  Light chain CDR3 for antibody 1792 (IGKV6-21)
HQSSSLPYT

SEQ ID NO: 3584 - protein, 16 aa, Homo sapiens
  Heavy chain CDR3 for antibody 1792 (IGHV3-33)
ARGDDILTHQYYGVDV

SEQ ID NO: 3585 - protein, 9 aa, Homo sapiens
  Light chain CDR3 for antibody 1793 (IGKV1D-16)
QQYNSYPYT

SEQ ID NO: 3586 - protein, 15 aa, Homo sapiens
  Heavy chain CDR3 for antibody 1793 (IGHV3-33)
ARDRGMVRGDGYLDY

SEQ ID NO: 3587 - protein, 9 aa, Homo sapiens
  Light chain CDR3 for antibody 1794 (IGKV5-2)
LQHDNFPYT

SEQ ID NO: 3588 - protein, 17 aa, Homo sapiens
  Heavy chain CDR3 for antibody 1794 (IGHV3-33)
ARVRGVIEGYYYYGMDV

SEQ ID NO: 3589 - protein, 9 aa, Homo sapiens
  Light chain CDR3 for antibody 1795 (IGKV1-6)
LQDYNYPYT

SEQ ID NO: 3590 - protein, 8 aa, Homo sapiens
  Heavy chain CDR3 for antibody 1795 (IGHV3-20)
APHWIFDY

SEQ ID NO: 3591 - protein, 9 aa, Homo sapiens
  Light chain CDR3 for antibody 1796 (IGKV5-2)
LQHDNFPWT

SEQ ID NO: 3592 - protein, 12 aa, Homo sapiens
  Heavy chain CDR3 for antibody 1796 (IGHV4-39)
ARHPRYLDAFDI

SEQ ID NO: 3593 - protein, 9 aa, Homo sapiens
  Light chain CDR3 for antibody 1797 (IGKV1-16)
QQYNSYPYT

SEQ ID NO: 3594 - protein, 16 aa, Homo sapiens
  Heavy chain CDR3 for antibody 1797 (IGHV1-24)
ATDWNDRGYYYYGMDV

SEQ ID NO: 3595 - protein, 9 aa, Homo sapiens
  Light chain CDR3 for antibody 1798 (IGKV1-39)
QQSYSTPLT

SEQ ID NO: 3596 - protein, 9 aa, Homo sapiens
  Heavy chain CDR3 for antibody 1798 (IGHV3-33)
ARATVGVDY

SEQ ID NO: 3597 - protein, 9 aa, Homo sapiens
  Light chain CDR3 for antibody 1799 (IGKV5-2)
LQHDNFPYT

SEQ ID NO: 3598 - protein, 11 aa, Homo sapiens
  Heavy chain CDR3 for antibody 1799 (IGHV3-33)
ARGTTVTHFDY

SEQ ID NO: 3599 - protein, 9 aa, Homo sapiens
  Light chain CDR3 for antibody 1800 (IGKV1-6)
LQDYNYPRT

SEQ ID NO: 3600 - protein, 13 aa, Homo sapiens
  Heavy chain CDR3 for antibody 1800 (IGHV4-39)
ARRDVLAPAAFDY

SEQ ID NO: 3601 - protein, 9 aa, Homo sapiens
  Light chain CDR3 for antibody 1801 (IGKV6-21)
HQSSSLPYT

SEQ ID NO: 3602 - protein, 11 aa, Homo sapiens
  Heavy chain CDR3 for antibody 1801 (IGHV3-23)
AKGLWSYYFDY

SEQ ID NO: 3603 - protein, 9 aa, Homo sapiens
  Light chain CDR3 for antibody 1802 (IGKV3-15)
QQYNNWPLT

SEQ ID NO: 3604 - protein, 13 aa, Homo sapiens
  Heavy chain CDR3 for antibody 1802 (IGHV3-11)
ARDGGAAAGTWDS

SEQ ID NO: 3605 - protein, 9 aa, Homo sapiens
  Light chain CDR3 for antibody 1803 (IGKV5-2)
LQHDNFPWT

SEQ ID NO: 3606 - protein, 15 aa, Homo sapiens
  Heavy chain CDR3 for antibody 1803 (IGHV4-39)
ARHSGYSSGWYPFDY

SEQ ID NO: 3607 - protein, 9 aa, Homo sapiens
  Light chain CDR3 for antibody 1804 (IGKV5-2)
LQHDNFPYT

SEQ ID NO: 3608 - protein, 12 aa, Homo sapiens
  Heavy chain CDR3 for antibody 1804 (IGHV3-33)
ASRDILTGYLGY

SEQ ID NO: 3609 - protein, 9 aa, Homo sapiens
  Light chain CDR3 for antibody 1805 (IGKV1-27)
QKYNSAPYT

SEQ ID NO: 3610 - protein, 11 aa, Homo sapiens
  Heavy chain CDR3 for antibody 1805 (IGHV4-59)
AREMGHDTFDI

SEQ ID NO: 3611 - protein, 9 aa, Homo sapiens
  Light chain CDR3 for antibody 1806 (IGKV1D-16)
QQYNSYPYT

SEQ ID NO: 3612 - protein, 9 aa, Homo sapiens
  Heavy chain CDR3 for antibody 1806 (IGHV3-13)
ARDHWYFDL

SEQ ID NO: 3613 - protein, 9 aa, Homo sapiens
  Light chain CDR3 for antibody 1807 (IGKV6-21)
HQSSSLPYT

SEQ ID NO: 3614 - protein, 15 aa, Homo sapiens
  Heavy chain CDR3 for antibody 1807 (IGHV3-23)
AKDGGWNYYYYGMDV

SEQ ID NO: 3615 - protein, 9 aa, Homo sapiens
  Light chain CDR3 for antibody 1808 (IGKV1D-16)
QQYNSYPYT

SEQ ID NO: 3616 - protein, 14 aa, Homo sapiens
  Heavy chain CDR3 for antibody 1808 (IGHV3-33)
ARDGYDILTGPMDV

SEQ ID NO: 3617 - protein, 9 aa, Homo sapiens
  Light chain CDR3 for antibody 1809 (IGKV1-6)
LQDYKSPFT

SEQ ID NO: 3618 - protein, 19 aa, Homo sapiens
  Heavy chain CDR3 for antibody 1809 (IGHV3-23)
AKDREMAATSHYYYYGMDV

SEQ ID NO: 3619 - protein, 9 aa, Homo sapiens
  Light chain CDR3 for antibody 1810 (IGKV1-27)
QKYNSAPYT

SEQ ID NO: 3620 - protein, 12 aa, Homo sapiens
  Heavy chain CDR3 for antibody 1810 (IGHV3-33)
ARDRAYRGSLDY

SEQ ID NO: 3621 - protein, 9 aa, Homo sapiens
  Light chain CDR3 for antibody 1811 (IGKV6-21)
HQSSSLPYT

SEQ ID NO: 3622 - protein, 14 aa, Homo sapiens
  Heavy chain CDR3 for antibody 1811 (IGHV1-46)
ARRGIVGALDAFDI

SEQ ID NO: 3623 - protein, 9 aa, Homo sapiens
  Light chain CDR3 for antibody 1812 (IGKV2-30)
MQASYWPNT

SEQ ID NO: 3624 - protein, 11 aa, Homo sapiens
  Heavy chain CDR3 for antibody 1812 (IGHV3-23)
AKEQKEAAMGA

SEQ ID NO: 3625 - protein, 9 aa, Homo sapiens
  Light chain CDR3 for antibody 1813 (IGKV6-21)
HQSSSLPLT

SEQ ID NO: 3626 - protein, 20 aa, Homo sapiens
  Heavy chain CDR3 for antibody 1813 (IGHV4-39)
ARHPPYYYDSSGYFYGAFDV

SEQ ID NO: 3627 - protein, 9 aa, Homo sapiens
  Light chain CDR3 for antibody 1814 (IGKV3-20)
QQYGSSPYT

SEQ ID NO: 3628 - protein, 17 aa, Homo sapiens
  Heavy chain CDR3 for antibody 1814 (IGHV3-15)
TTERYPRRYYYYFGMDV

SEQ ID NO: 3629 - protein, 9 aa, Homo sapiens
  Light chain CDR3 for antibody 1815 (IGKV1-16)
QQYNSYPYT

SEQ ID NO: 3630 - protein, 18 aa, Homo sapiens
  Heavy chain CDR3 for antibody 1815 (IGHV4-59)
ARDNHYYSSGTYSNWFDP

SEQ ID NO: 3631 - protein, 10 aa, Homo sapiens
  Light chain CDR3 for antibody 1816 (IGKV1-39)
QQSYSTPLFT

SEQ ID NO: 3632 - protein, 12 aa, Homo sapiens
  Heavy chain CDR3 for antibody 1816 (IGHV1-46)
TFSRSGGGCVDY

SEQ ID NO: 3633 - protein, 9 aa, Homo sapiens
  Light chain CDR3 for antibody 1817 (IGKV6-21)
HQSSSLPWT

SEQ ID NO: 3634 - protein, 12 aa, Homo sapiens
  Heavy chain CDR3 for antibody 1817 (IGHV3-33)
ARVIDWLKPMDV

SEQ ID NO: 3635 - protein, 10 aa, Homo sapiens
  Light chain CDR3 for antibody 1818 (IGKV1-17)
LQHNSYPMYT

SEQ ID NO: 3636 - protein, 13 aa, Homo sapiens
  Heavy chain CDR3 for antibody 1818 (IGHV4-59)
ARDAGYSSSWFDY

SEQ ID NO: 3637 - protein, 9 aa, Homo sapiens
  Light chain CDR3 for antibody 1819 (IGKV5-2)
LQHDNFPYT

SEQ ID NO: 3638 - protein, 21 aa, Homo sapiens
  Heavy chain CDR3 for antibody 1819 (IGHV3-33)
ARDEYYEIVTGYGYYHYGMDV

SEQ ID NO: 3639 - protein, 9 aa, Homo sapiens
  Light chain CDR3 for antibody 1820 (IGKV1-6)
LQDYNYPYT

SEQ ID NO: 3640 - protein, 18 aa, Homo sapiens
  Heavy chain CDR3 for antibody 1820 (IGHV3-23)
AKVGDFFASGNYWDYFDY

SEQ ID NO: 3641 - protein, 9 aa, Homo sapiens
  Light chain CDR3 for antibody 1821 (IGKV1-9)
QQLKSYLYT

SEQ ID NO: 3642 - protein, 12 aa, Homo sapiens
  Heavy chain CDR3 for antibody 1821 (IGHV1-18)
ARILFYGDYFDY

SEQ ID NO: 3643 - protein, 9 aa, Homo sapiens
  Light chain CDR3 for antibody 1822 (IGKV1D-16)
QQYNSYPYT

SEQ ID NO: 3644 - protein, 14 aa, Homo sapiens
  Heavy chain CDR3 for antibody 1822 (IGHV1-18)
AREGGSYFYYGVDV

SEQ ID NO: 3645 - protein, 9 aa, Homo sapiens
  Light chain CDR3 for antibody 1823 (IGKV3-20)
QQYGSSPYT

SEQ ID NO: 3646 - protein, 9 aa, Homo sapiens
  Heavy chain CDR3 for antibody 1823 (IGHV4-59)
ARGGASFDY

SEQ ID NO: 3647 - protein, 9 aa, Homo sapiens
  Light chain CDR3 for antibody 1824 (IGKV1-17)
LQHNSYPYT

SEQ ID NO: 3648 - protein, 12 aa, Homo sapiens
  Heavy chain CDR3 for antibody 1824 (IGHV3-23)
AKEGIVGVPFDY

SEQ ID NO: 3649 - protein, 9 aa, Homo sapiens
  Light chain CDR3 for antibody 1825 (IGKV6-21)
HQSSSLPYT

SEQ ID NO: 3650 - protein, 15 aa, Homo sapiens
  Heavy chain CDR3 for antibody 1825 (IGHV3-33)
ARGYYYGSGSFPVDY

SEQ ID NO: 3651 - protein, 9 aa, Homo sapiens
  Light chain CDR3 for antibody 1826 (IGKV1-27)
QKYNSAPYT

SEQ ID NO: 3652 - protein, 15 aa, Homo sapiens
  Heavy chain CDR3 for antibody 1826 (IGHV3-33)
ARDRGWKAPGYGMDV

SEQ ID NO: 3653 - protein, 9 aa, Homo sapiens
  Light chain CDR3 for antibody 1827 (IGKV6-21)
HQSSSLPYT

SEQ ID NO: 3654 - protein, 18 aa, Homo sapiens
  Heavy chain CDR3 for antibody 1827 (IGHV1-46)
ARDLTGRTENYYYYGMDV

SEQ ID NO: 3655 - protein, 8 aa, Homo sapiens
  Light chain CDR3 for antibody 1828 (IGKV1-5)
QQYNSYWT

SEQ ID NO: 3656 - protein, 15 aa, Homo sapiens
  Heavy chain CDR3 for antibody 1828 (IGHV3-30)
ARGAMVRGVDYGMDV

SEQ ID NO: 3657 - protein, 9 aa, Homo sapiens
  Light chain CDR3 for antibody 1829 (IGKV5-2)
LQHDNFPWT

SEQ ID NO: 3658 - protein, 18 aa, Homo sapiens
  Heavy chain CDR3 for antibody 1829 (IGHV1-18)
ARDRYYYDSGSYYYGMDV

SEQ ID NO: 3659 - protein, 8 aa, Homo sapiens
  Light chain CDR3 for antibody 1830 (IGKV3D-7)
QQDYNLPT

SEQ ID NO: 3660 - protein, 11 aa, Homo sapiens
  Heavy chain CDR3 for antibody 1830 (IGHV3-33)
ARDSAVGPKDY

SEQ ID NO: 3661 - protein, 9 aa, Homo sapiens
  Light chain CDR3 for antibody 1831 (IGKV3-20)
QQYGSSPYT

SEQ ID NO: 3662 - protein, 17 aa, Homo sapiens
  Heavy chain CDR3 for antibody 1831 (IGHV3-33)
ARGEQWLGYYYYYGMDV

SEQ ID NO: 3663 - protein, 9 aa, Homo sapiens
  Light chain CDR3 for antibody 1832 (IGKV1-17)
LQHNSYPYT

SEQ ID NO: 3664 - protein, 14 aa, Homo sapiens
  Heavy chain CDR3 for antibody 1832 (IGHV3-33)
ARKGYSGRYYYFDY

SEQ ID NO: 3665 - protein, 9 aa, Homo sapiens
  Light chain CDR3 for antibody 1833 (IGKV1-9)
QQLNSYPWT

SEQ ID NO: 3666 - protein, 14 aa, Homo sapiens
  Heavy chain CDR3 for antibody 1833 (IGHV3-33)
ARASSGSSYWYFDL

SEQ ID NO: 3667 - protein, 9 aa, Homo sapiens
  Light chain CDR3 for antibody 1834 (IGKV1-17)
LQHNSYPYT

SEQ ID NO: 3668 - protein, 16 aa, Homo sapiens
  Heavy chain CDR3 for antibody 1834 (IGHV3-33)
ARDQGILTGYYTALDY

SEQ ID NO: 3669 - protein, 9 aa, Homo sapiens
  Light chain CDR3 for antibody 1835 (IGKV3-15)
QQYNNWPRT

SEQ ID NO: 3670 - protein, 18 aa, Homo sapiens
  Heavy chain CDR3 for antibody 1835 (IGHV3-33)
AREGYYGSGSYYRGWFDP

SEQ ID NO: 3671 - protein, 9 aa, Homo sapiens
  Light chain CDR3 for antibody 1836 (IGKV1-9)
QQLNSYPLT

SEQ ID NO: 3672 - protein, 19 aa, Homo sapiens
  Heavy chain CDR3 for antibody 1836 (IGHV5-51)
ARHGEKGKRITMVRGSLDV

SEQ ID NO: 3673 - protein, 9 aa, Homo sapiens
  Light chain CDR3 for antibody 1837 (IGKV1-9)
QQLNSFPFT

SEQ ID NO: 3674 - protein, 10 aa, Homo sapiens
  Heavy chain CDR3 for antibody 1837 (IGHV3-33)
ARDPSGCFDY

SEQ ID NO: 3675 - protein, 9 aa, Homo sapiens
  Light chain CDR3 for antibody 1838 (IGKV3-15)
QQYNNWPLT

SEQ ID NO: 3676 - protein, 12 aa, Homo sapiens
  Heavy chain CDR3 for antibody 1838 (IGHV3-23)
AKDGYSYGYFDY

SEQ ID NO: 3677 - protein, 9 aa, Homo sapiens
  Light chain CDR3 for antibody 1839 (IGKV6-21)
HQSSSLPYT

SEQ ID NO: 3678 - protein, 18 aa, Homo sapiens
  Heavy chain CDR3 for antibody 1839 (IGHV3-33)
ARERDYYGSGSYPDAFDI

SEQ ID NO: 3679 - protein, 7 aa, Homo sapiens
  Light chain CDR3 for antibody 1840 (IGKV3-20)
QQYGSYT

SEQ ID NO: 3680 - protein, 10 aa, Homo sapiens
  Heavy chain CDR3 for antibody 1840 (IGHV3-21)
ARRWERYFDY

SEQ ID NO: 3681 - protein, 9 aa, Homo sapiens
  Light chain CDR3 for antibody 1841 (IGKV2-30)
MQGTHWPLT

SEQ ID NO: 3682 - protein, 12 aa, Homo sapiens
  Heavy chain CDR3 for antibody 1841 (IGHV3-33)
ARGYFGSGYAHF

SEQ ID NO: 3683 - protein, 9 aa, Homo sapiens
  Light chain CDR3 for antibody 1842 (IGKV6-21)
HQSSSLPYT

SEQ ID NO: 3684 - protein, 12 aa, Homo sapiens
  Heavy chain CDR3 for antibody 1842 (IGHV3-33)
ARKGYDMHEFDI

SEQ ID NO: 3685 - protein, 9 aa, Homo sapiens
  Light chain CDR3 for antibody 1843 (IGKV3D-7)
QQDYNLPLT

SEQ ID NO: 3686 - protein, 18 aa, Homo sapiens
  Heavy chain CDR3 for antibody 1843 (IGHV3-33)
ARREGIVGATTYYYGMDV

SEQ ID NO: 3687 - protein, 9 aa, Homo sapiens
  Light chain CDR3 for antibody 1844 (IGKV1-17)
LQHNSYPYT

SEQ ID NO: 3688 - protein, 14 aa, Homo sapiens
  Heavy chain CDR3 for antibody 1844 (IGHV3-33)
ARDNILTVYYLFDY

SEQ ID NO: 3689 - protein, 9 aa, Homo sapiens
  Light chain CDR3 for antibody 1845 (IGKV1-6)
LQDYNYPRT

SEQ ID NO: 3690 - protein, 11 aa, Homo sapiens
  Heavy chain CDR3 for antibody 1845 (IGHV4-59)
TRETLERGFDY

SEQ ID NO: 3691 - protein, 9 aa, Homo sapiens
  Light chain CDR3 for antibody 1846 (IGKV2D-28)
MQARQTPFT

SEQ ID NO: 3692 - protein, 15 aa, Homo sapiens
  Heavy chain CDR3 for antibody 1846 (IGHV3-15)
TTDLSSAPWYNCFDP

SEQ ID NO: 3693 - protein, 9 aa, Homo sapiens
  Light chain CDR3 for antibody 1847 (IGKV1-17)
LQHNSYPWT

SEQ ID NO: 3694 - protein, 14 aa, Homo sapiens
  Heavy chain CDR3 for antibody 1847 (IGHV3-33)
ARDREQQLVRYFDY

SEQ ID NO: 3695 - protein, 9 aa, Homo sapiens
  Light chain CDR3 for antibody 1848 (IGKV1-39)
QQSYSTPLT

SEQ ID NO: 3696 - protein, 17 aa, Homo sapiens
  Heavy chain CDR3 for antibody 1848 (IGHV3-33)
ARESLKLGIYYYYGMDV

SEQ ID NO: 3697 - protein, 9 aa, Homo sapiens
  Light chain CDR3 for antibody 1849 (IGKV5-2)
LQHDNFPYT

SEQ ID NO: 3698 - protein, 19 aa, Homo sapiens
  Heavy chain CDR3 for antibody 1849 (IGHV3-33)
ARGPYYDILTGYGYYGMDV

SEQ ID NO: 3699 - protein, 9 aa, Homo sapiens
  Light chain CDR3 for antibody 1850 (IGKV5-2)
LQHDNFPWT

SEQ ID NO: 3700 - protein, 19 aa, Homo sapiens
  Heavy chain CDR3 for antibody 1850 (IGHV4-39)
ARQGDVLRYFDWLLGAFDI

SEQ ID NO: 3701 - protein, 9 aa, Homo sapiens
  Light chain CDR3 for antibody 1851 (IGKV1D-13)
QQFNNYPYT

SEQ ID NO: 3702 - protein, 14 aa, Homo sapiens
  Heavy chain CDR3 for antibody 1851 (IGHV3-33)
VRDAMGATTAWFDP

SEQ ID NO: 3703 - protein, 9 aa, Homo sapiens
  Light chain CDR3 for antibody 1852 (IGKV1-6)
LQDYNYPYT

SEQ ID NO: 3704 - protein, 13 aa, Homo sapiens
  Heavy chain CDR3 for antibody 1852 (IGHV3-33)
ARALYSSSWPGDY

SEQ ID NO: 3705 - protein, 9 aa, Homo sapiens
  Light chain CDR3 for antibody 1853 (IGKV1-9)
QQLNNYPWT

SEQ ID NO: 3706 - protein, 20 aa, Homo sapiens
  Heavy chain CDR3 for antibody 1853 (IGHV3-33)
ARTMGSGSYYKAYYYYVMDV

SEQ ID NO: 3707 - protein, 9 aa, Homo sapiens
  Light chain CDR3 for antibody 1854 (IGKV3-11)
QQRSNWPWT

SEQ ID NO: 3708 - protein, 11 aa, Homo sapiens
  Heavy chain CDR3 for antibody 1854 (IGHV4-59)
AREMGHDTFDI

SEQ ID NO: 3709 - protein, 9 aa, Homo sapiens
  Light chain CDR3 for antibody 1855 (IGKV1D-16)
QQYNSYPLT

SEQ ID NO: 3710 - protein, 12 aa, Homo sapiens
  Heavy chain CDR3 for antibody 1855 (IGHV3-33)
AKDPGWQQLAEY

SEQ ID NO: 3711 - protein, 9 aa, Homo sapiens
  Light chain CDR3 for antibody 1856 (IGKV1-39)
QQSYSTPLT

SEQ ID NO: 3712 - protein, 13 aa, Homo sapiens
  Heavy chain CDR3 for antibody 1856 (IGHV3-53)
ARSGSYWGYYFDY

SEQ ID NO: 3713 - protein, 8 aa, Homo sapiens
  Light chain CDR3 for antibody 1857 (IGKV1-5)
QQYNSYYT

SEQ ID NO: 3714 - protein, 18 aa, Homo sapiens
  Heavy chain CDR3 for antibody 1857 (IGHV4-59)
AREGDYVWGSYRPNWFDP

SEQ ID NO: 3715 - protein, 9 aa, Homo sapiens
  Light chain CDR3 for antibody 1858 (IGKV3D-7)
QQDYNLPLT

SEQ ID NO: 3716 - protein, 13 aa, Homo sapiens
  Heavy chain CDR3 for antibody 1858 (IGHV4-39)
ARQWPSGYWYFDL

SEQ ID NO: 3717 - protein, 9 aa, Homo sapiens
  Light chain CDR3 for antibody 1859 (IGKV3D-20)
QQYGSSPYT

SEQ ID NO: 3718 - protein, 20 aa, Homo sapiens
  Heavy chain CDR3 for antibody 1859 (IGHV3-33)
SRGGATLVRGVIDYYYGMDV

SEQ ID NO: 3719 - protein, 9 aa, Homo sapiens
  Light chain CDR3 for antibody 1860 (IGKV1-33)
QQYDNLPFT

SEQ ID NO: 3720 - protein, 11 aa, Homo sapiens
  Heavy chain CDR3 for antibody 1860 (IGHV3-33)
ARDRSSGPFDY

SEQ ID NO: 3721 - protein, 9 aa, Homo sapiens
  Light chain CDR3 for antibody 1861 (IGKV1-39)
QQSYSTPLT

SEQ ID NO: 3722 - protein, 10 aa, Homo sapiens
  Heavy chain CDR3 for antibody 1861 (IGHV3-33)
ARDVVVYFDY

SEQ ID NO: 3723 - protein, 9 aa, Homo sapiens
  Light chain CDR3 for antibody 1862 (IGKV1-9)
QQLNSYPLT

SEQ ID NO: 3724 - protein, 18 aa, Homo sapiens
  Heavy chain CDR3 for antibody 1862 (IGHV3-13)
ARDYYGSGSLYYYYGMDV

SEQ ID NO: 3725 - protein, 9 aa, Homo sapiens
  Light chain CDR3 for antibody 1863 (IGKV1-39)
QQSYSTPLT

SEQ ID NO: 3726 - protein, 14 aa, Homo sapiens
  Heavy chain CDR3 for antibody 1863 (IGHV3-33)
ARAGSGYDRDWFDP

SEQ ID NO: 3727 - protein, 9 aa, Homo sapiens
  Light chain CDR3 for antibody 1864 (IGKV1-17)
LQHNSYPYT

SEQ ID NO: 3728 - protein, 15 aa, Homo sapiens
  Heavy chain CDR3 for antibody 1864 (IGHV3-74)
SRGSGSHYFYYGMDV

SEQ ID NO: 3729 - protein, 9 aa, Homo sapiens
  Light chain CDR3 for antibody 1865 (IGKV3D-7)
QQDYEFPLT

SEQ ID NO: 3730 - protein, 13 aa, Homo sapiens
  Heavy chain CDR3 for antibody 1865 (IGHV4-39)
ARREVVGGRGFDY

SEQ ID NO: 3731 - protein, 10 aa, Homo sapiens
  Light chain CDR3 for antibody 1866 (IGKV1-33)
QQYDTLPPWT

SEQ ID NO: 3732 - protein, 15 aa, Homo sapiens
  Heavy chain CDR3 for antibody 1866 (IGHV3-33)
TKDEYPGNQIEAFDI

SEQ ID NO: 3733 - protein, 9 aa, Homo sapiens
  Light chain CDR3 for antibody 1867 (IGKV3D-7)
QQDYNLPWT

SEQ ID NO: 3734 - protein, 21 aa, Homo sapiens
  Heavy chain CDR3 for antibody 1867 (IGHV3-23)
AKDHQWEPQLEIGYYYYGMDV

SEQ ID NO: 3735 - protein, 9 aa, Homo sapiens
  Light chain CDR3 for antibody 1868 (IGKV5-2)
LQHDNFPYT

SEQ ID NO: 3736 - protein, 13 aa, Homo sapiens
  Heavy chain CDR3 for antibody 1868 (IGHV3-23)
AKDRGYSSTSTAY

SEQ ID NO: 3737 - protein, 9 aa, Homo sapiens
  Light chain CDR3 for antibody 1869 (IGKV1-6)
LQDYNYPYT

SEQ ID NO: 3738 - protein, 17 aa, Homo sapiens
  Heavy chain CDR3 for antibody 1869 (IGHV3-30)
ARESLWFGEANHFVMDV

SEQ ID NO: 3739 - protein, 9 aa, Homo sapiens
  Light chain CDR3 for antibody 1870 (IGKV3D-7)
QQDYNLPYT

SEQ ID NO: 3740 - protein, 17 aa, Homo sapiens
  Heavy chain CDR3 for antibody 1870 (IGHV3-33)
AREKGLGIDYYYYGMDV

SEQ ID NO: 3741 - protein, 9 aa, Homo sapiens
  Light chain CDR3 for antibody 1871 (IGKV6-21)
HQSSSLPYT

SEQ ID NO: 3742 - protein, 15 aa, Homo sapiens
  Heavy chain CDR3 for antibody 1871 (IGHV3-23)
AKEFTMVRGVITPDY

SEQ ID NO: 3743 - protein, 9 aa, Homo sapiens
  Light chain CDR3 for antibody 1872 (IGKV1-6)
LQDYNYPWT

SEQ ID NO: 3744 - protein, 16 aa, Homo sapiens
  Heavy chain CDR3 for antibody 1872 (IGHV3-33)
ARESLKLGIYYYGMDV

SEQ ID NO: 3745 - protein, 9 aa, Homo sapiens
  Light chain CDR3 for antibody 1873 (IGKV1-17)
LQHNSYPYT

SEQ ID NO: 3746 - protein, 14 aa, Homo sapiens
  Heavy chain CDR3 for antibody 1873 (IGHV3-20)
ARDEGSGGYDVFDI

SEQ ID NO: 3747 - protein, 9 aa, Homo sapiens
  Light chain CDR3 for antibody 1874 (IGKV1-6)
LQDYNYPYT

SEQ ID NO: 3748 - protein, 14 aa, Homo sapiens
  Heavy chain CDR3 for antibody 1874 (IGHV1-46)
ARSYYDILTGAFDI

SEQ ID NO: 3749 - protein, 9 aa, Homo sapiens
  Light chain CDR3 for antibody 1875 (IGKV5-2)
LQHDNFPYT

SEQ ID NO: 3750 - protein, 20 aa, Homo sapiens
  Heavy chain CDR3 for antibody 1875 (IGHV3-33)
ARDNDSSGYYDYYYYYGMDV

SEQ ID NO: 3751 - protein, 9 aa, Homo sapiens
  Light chain CDR3 for antibody 1876 (IGKV5-2)
LQHDNFPYT

SEQ ID NO: 3752 - protein, 15 aa, Homo sapiens
  Heavy chain CDR3 for antibody 1876 (IGHV3-33)
ARGYYYGSGSFPVDY

SEQ ID NO: 3753 - protein, 9 aa, Homo sapiens
  Light chain CDR3 for antibody 1877 (IGKV1-39)
QQSYSTPST

SEQ ID NO: 3754 - protein, 16 aa, Homo sapiens
  Heavy chain CDR3 for antibody 1877 (IGHV3-48)
ARWFSRSSTGVSYMDV

SEQ ID NO: 3755 - protein, 9 aa, Homo sapiens
  Light chain CDR3 for antibody 1878 (IGKV1D-16)
QQYNSYPYT

SEQ ID NO: 3756 - protein, 21 aa, Homo sapiens
  Heavy chain CDR3 for antibody 1878 (IGHV1-18)
ASGVLIWFGELLSEDYYDMDV

SEQ ID NO: 3757 - protein, 9 aa, Homo sapiens
  Light chain CDR3 for antibody 1879 (IGKV1-9)
QQGNTYSRT

SEQ ID NO: 3758 - protein, 13 aa, Homo sapiens
  Heavy chain CDR3 for antibody 1879 (IGHV4-59)
ARDAGYSSSWFDY

SEQ ID NO: 3759 - protein, 9 aa, Homo sapiens
  Light chain CDR3 for antibody 1880 (IGKV3-20)
QQYGSSPYT

SEQ ID NO: 3760 - protein, 13 aa, Homo sapiens
  Heavy chain CDR3 for antibody 1880 (IGHV3-30)
AAPFMVRGDGMDV

SEQ ID NO: 3761 - protein, 9 aa, Homo sapiens
  Light chain CDR3 for antibody 1881 (IGKV5-2)
LQHDNFPYT

SEQ ID NO: 3762 - protein, 9 aa, Homo sapiens
  Heavy chain CDR3 for antibody 1881 (IGHV3-33)
AREYKEFDY

SEQ ID NO: 3763 - protein, 10 aa, Homo sapiens
  Light chain CDR3 for antibody 1882 (IGKV3-11)
QQRSNWPIFT

SEQ ID NO: 3764 - protein, 14 aa, Homo sapiens
  Heavy chain CDR3 for antibody 1882 (IGHV3-33)
ARGAAAGNFYGLDV

SEQ ID NO: 3765 - protein, 9 aa, Homo sapiens
  Light chain CDR3 for antibody 1883 (IGKV5-2)
LQHDNFPYT

SEQ ID NO: 3766 - protein, 13 aa, Homo sapiens
  Heavy chain CDR3 for antibody 1883 (IGHV3-30)
AAPFMVRGDGMDV

SEQ ID NO: 3767 - protein, 9 aa, Homo sapiens
  Light chain CDR3 for antibody 1884 (IGKV1-6)
LQDYNYPYT

SEQ ID NO: 3768 - protein, 16 aa, Homo sapiens
  Heavy chain CDR3 for antibody 1884 (IGHV3-33)
ARDQGILTGYYTALDY

SEQ ID NO: 3769 - protein, 11 aa, Homo sapiens
  Light chain CDR3 for antibody 1885 (IGKV3-11)
QQRSNWPPTWT

SEQ ID NO: 3770 - protein, 11 aa, Homo sapiens
  Heavy chain CDR3 for antibody 1885 (IGHV4-59)
AREMGHDTFDI

SEQ ID NO: 3771 - protein, 9 aa, Homo sapiens
  Light chain CDR3 for antibody 1886 (IGKV1-17)
LQHNSYPYT

SEQ ID NO: 3772 - protein, 12 aa, Homo sapiens
  Heavy chain CDR3 for antibody 1886 (IGHV3-23)
AKDRSYYYGMDV

SEQ ID NO: 3773 - protein, 9 aa, Homo sapiens
  Light chain CDR3 for antibody 1887 (IGKV5-2)
LQHDNFPWT

SEQ ID NO: 3774 - protein, 11 aa, Homo sapiens
  Heavy chain CDR3 for antibody 1887 (IGHV4-59)
TRDRGLGSFDY

SEQ ID NO: 3775 - protein, 9 aa, Homo sapiens
  Light chain CDR3 for antibody 1888 (IGKV1-39)
QQSYSTPFT

SEQ ID NO: 3776 - protein, 16 aa, Homo sapiens
  Heavy chain CDR3 for antibody 1888 (IGHV4-59)
ARYSGSYYGDYYGMDV

SEQ ID NO: 3777 - protein, 9 aa, Homo sapiens
  Light chain CDR3 for antibody 1889 (IGKV1-17)
LQHNSYPYT

SEQ ID NO: 3778 - protein, 8 aa, Homo sapiens
  Heavy chain CDR3 for antibody 1889 (IGHV3-20)
APHWIFDY

SEQ ID NO: 3779 - protein, 9 aa, Homo sapiens
  Light chain CDR3 for antibody 1890 (IGKV1D-13)
QQFNNYPYT

SEQ ID NO: 3780 - protein, 11 aa, Homo sapiens
  Heavy chain CDR3 for antibody 1890 (IGHV4-59)
ARSIRYSVFDY

SEQ ID NO: 3781 - protein, 9 aa, Homo sapiens
  Light chain CDR3 for antibody 1891 (IGKV1-9)
QQLNGYPFT

SEQ ID NO: 3782 - protein, 18 aa, Homo sapiens
  Heavy chain CDR3 for antibody 1891 (IGHV4-59)
AREGDYVWGSYRPNWFDP

SEQ ID NO: 3783 - protein, 9 aa, Homo sapiens
  Light chain CDR3 for antibody 1892 (IGKV1-39)
QQSYSTPLT

SEQ ID NO: 3784 - protein, 15 aa, Homo sapiens
  Heavy chain CDR3 for antibody 1892 (IGHV3-33)
ARRVCSGGSCSLFDY

SEQ ID NO: 3785 - protein, 9 aa, Homo sapiens
  Light chain CDR3 for antibody 1893 (IGKV5-2)
LQHDNFPYT

SEQ ID NO: 3786 - protein, 18 aa, Homo sapiens
  Heavy chain CDR3 for antibody 1893 (IGHV3-33)
ARREGITLIFYYYYGMDV

SEQ ID NO: 3787 - protein, 8 aa, Homo sapiens
  Light chain CDR3 for antibody 1894 (IGKV1D-13)
QQFNNYPT

SEQ ID NO: 3788 - protein, 13 aa, Homo sapiens
  Heavy chain CDR3 for antibody 1894 (IGHV3-33)
ARDYCGGDCYLDY

SEQ ID NO: 3789 - protein, 10 aa, Homo sapiens
  Light chain CDR3 for antibody 1895 (IGKV3-11)
QQRSNWPIFT

SEQ ID NO: 3790 - protein, 12 aa, Homo sapiens
  Heavy chain CDR3 for antibody 1895 (IGHV3-13)
AREAGIPDAFDI

SEQ ID NO: 3791 - protein, 9 aa, Homo sapiens
  Light chain CDR3 for antibody 1896 (IGKV6-21)
HQSSSLPYT

SEQ ID NO: 3792 - protein, 11 aa, Homo sapiens
  Heavy chain CDR3 for antibody 1896 (IGHV3-23)
ARDPGSITGDY

SEQ ID NO: 3793 - protein, 9 aa, Homo sapiens
  Light chain CDR3 for antibody 1897 (IGKV5-2)
LQHDNFPYT

SEQ ID NO: 3794 - protein, 16 aa, Homo sapiens
  Heavy chain CDR3 for antibody 1897 (IGHV3-23)
ARNWNDVGDYYYGMDV

SEQ ID NO: 3795 - protein, 9 aa, Homo sapiens
  Light chain CDR3 for antibody 1898 (IGKV3D-20)
QQYGSSPYT

SEQ ID NO: 3796 - protein, 12 aa, Homo sapiens
  Heavy chain CDR3 for antibody 1898 (IGHV3-33)
ARKGYDMHEFDI

SEQ ID NO: 3797 - protein, 9 aa, Homo sapiens
  Light chain CDR3 for antibody 1899 (IGKV1D-16)
QQYNSYPLT

SEQ ID NO: 3798 - protein, 12 aa, Homo sapiens
  Heavy chain CDR3 for antibody 1899 (IGHV3-33)
ARGYFTSGSAHY

SEQ ID NO: 3799 - protein, 9 aa, Homo sapiens
  Light chain CDR3 for antibody 1900 (IGKV1-17)
LQHNSYPYT

SEQ ID NO: 3800 - protein, 19 aa, Homo sapiens
  Heavy chain CDR3 for antibody 1900 (IGHV5-51)
ARHGEKGKRITMVRGSLDV

SEQ ID NO: 3801 - protein, 9 aa, Homo sapiens
  Light chain CDR3 for antibody 1901 (IGKV1-6)
LQDYNYPYT

SEQ ID NO: 3802 - protein, 20 aa, Homo sapiens
  Heavy chain CDR3 for antibody 1901 (IGHV1-f)
ATHYDILTGSPYYYYCALDV

SEQ ID NO: 3803 - protein, 9 aa, Homo sapiens
  Light chain CDR3 for antibody 1902 (IGKV5-2)
LQHDNFPYT

SEQ ID NO: 3804 - protein, 11 aa, Homo sapiens
  Heavy chain CDR3 for antibody 1902 (IGHV3-23)
ARDPGSITGDY

SEQ ID NO: 3805 - protein, 9 aa, Homo sapiens
  Light chain CDR3 for antibody 1903 (IGKV5-2)
LQHDNFPWT

SEQ ID NO: 3806 - protein, 11 aa, Homo sapiens
  Heavy chain CDR3 for antibody 1903 (IGHV4-59)
ARDRGHYGMDV

SEQ ID NO: 3807 - protein, 9 aa, Homo sapiens
  Light chain CDR3 for antibody 1904 (IGKV6-21)
HQSSSLPYT

SEQ ID NO: 3808 - protein, 13 aa, Homo sapiens
  Heavy chain CDR3 for antibody 1904 (IGHV3-23)
AKDRGYSSTSTAY

SEQ ID NO: 3809 - protein, 9 aa, Homo sapiens
  Light chain CDR3 for antibody 1905 (IGKV6-21)
HQSSSLPYT

SEQ ID NO: 3810 - protein, 17 aa, Homo sapiens
  Heavy chain CDR3 for antibody 1905 (IGHV3-66)
ARVQYDILTGYSPYFDN

SEQ ID NO: 3811 - protein, 9 aa, Homo sapiens
  Light chain CDR3 for antibody 1906 (IGKV2-30)
MQGTHWPPT

SEQ ID NO: 3812 - protein, 15 aa, Homo sapiens
  Heavy chain CDR3 for antibody 1906 (IGHV3-33)
ARDGALYGSGSSLAY

SEQ ID NO: 3813 - protein, 9 aa, Homo sapiens
  Light chain CDR3 for antibody 1907 (IGKV3D-7)
RQDYNLPWT

SEQ ID NO: 3814 - protein, 6 aa, Homo sapiens
  Heavy chain CDR3 for antibody 1907 (IGHV4-59)
ARDGDY

SEQ ID NO: 3815 - protein, 9 aa, Homo sapiens
  Light chain CDR3 for antibody 1908 (IGKV2D-28)
MQALQTPPT

SEQ ID NO: 3816 - protein, 16 aa, Homo sapiens
  Heavy chain CDR3 for antibody 1908 (IGHV3-23)
AKEGMVLRYFDWLWDY

SEQ ID NO: 3817 - protein, 9 aa, Homo sapiens
  Light chain CDR3 for antibody 1909 (IGKV1-16)
QQYNSYPYT

SEQ ID NO: 3818 - protein, 12 aa, Homo sapiens
  Heavy chain CDR3 for antibody 1909 (IGHV4-39)
ARDSGSYYFFDY

SEQ ID NO: 3819 - protein, 9 aa, Homo sapiens
  Light chain CDR3 for antibody 1910 (IGKV1D-16)
QQYNSYPYT

SEQ ID NO: 3820 - protein, 19 aa, Homo sapiens
  Heavy chain CDR3 for antibody 1910 (IGHV1-18)
ARDTTLVRGLMNYYYGMDV

SEQ ID NO: 3821 - protein, 9 aa, Homo sapiens
  Light chain CDR3 for antibody 1911 (IGKV1D-16)
QQYNSYPLT

SEQ ID NO: 3822 - protein, 14 aa, Homo sapiens
  Heavy chain CDR3 for antibody 1911 (IGHV3-23)
AKDRYRGYEGLFDY

SEQ ID NO: 3823 - protein, 9 aa, Homo sapiens
  Light chain CDR3 for antibody 1912 (IGKV5-2)
LQHDNFPYT

SEQ ID NO: 3824 - protein, 13 aa, Homo sapiens
  Heavy chain CDR3 for antibody 1912 (IGHV3-21)
ARDSTLVRGVFPY

SEQ ID NO: 3825 - protein, 9 aa, Homo sapiens
  Light chain CDR3 for antibody 1913 (IGKV3-15)
QQYNNWPYT

SEQ ID NO: 3826 - protein, 13 aa, Homo sapiens
  Heavy chain CDR3 for antibody 1913 (IGHV4-39)
ARRFDILTGAFDY

SEQ ID NO: 3827 - protein, 9 aa, Homo sapiens
  Light chain CDR3 for antibody 1914 (IGKV1-9)
QQYNSYPLT

SEQ ID NO: 3828 - protein, 17 aa, Homo sapiens
  Heavy chain CDR3 for antibody 1914 (IGHV4-59)
ARDRELLWFGEFGGMDV

SEQ ID NO: 3829 - protein, 9 aa, Homo sapiens
  Light chain CDR3 for antibody 1915 (IGKV3D-20)
QQYGSSPYT

SEQ ID NO: 3830 - protein, 15 aa, Homo sapiens
  Heavy chain CDR3 for antibody 1915 (IGHV3-66)
ARDRDYYYYYYGMDV

SEQ ID NO: 3831 - protein, 8 aa, Homo sapiens
  Light chain CDR3 for antibody 1916 (IGKV1D-13)
QQFNNYPT

SEQ ID NO: 3832 - protein, 15 aa, Homo sapiens
  Heavy chain CDR3 for antibody 1916 (IGHV3-30)
ARGAMVRGVDYGMDV

SEQ ID NO: 3833 - protein, 9 aa, Homo sapiens
  Light chain CDR3 for antibody 1917 (IGKV6-21)
HQSSSLPYT

SEQ ID NO: 3834 - protein, 19 aa, Homo sapiens
  Heavy chain CDR3 for antibody 1917 (IGHV1-18)
ARDDILTGYSLYYYYGMDV

SEQ ID NO: 3835 - protein, 9 aa, Homo sapiens
  Light chain CDR3 for antibody 1918 (IGKV6-21)
HQSSSLPLT

SEQ ID NO: 3836 - protein, 23 aa, Homo sapiens
  Heavy chain CDR3 for antibody 1918 (IGHV3-30)
ARDGDYFGSGSQRDYHYYYGLDV

SEQ ID NO: 3837 - protein, 9 aa, Homo sapiens
  Light chain CDR3 for antibody 1919 (IGKV1-6)
LQDYNYPRT

SEQ ID NO: 3838 - protein, 16 aa, Homo sapiens
  Heavy chain CDR3 for antibody 1919 (IGHV1-24)
ATEDSSSYYYYYGMDV

SEQ ID NO: 3839 - protein, 9 aa, Homo sapiens
  Light chain CDR3 for antibody 1920 (IGKV1-6)
LQDYNYPYT

SEQ ID NO: 3840 - protein, 23 aa, Homo sapiens
  Heavy chain CDR3 for antibody 1920 (IGHV1-18)
ARNLHYDILTGYFPYYFYYGMDV

SEQ ID NO: 3841 - protein, 9 aa, Homo sapiens
  Light chain CDR3 for antibody 1921 (IGKV1-6)
LQDYNYPWT

SEQ ID NO: 3842 - protein, 11 aa, Homo sapiens
  Heavy chain CDR3 for antibody 1921 (IGHV1-24)
ATGSPLLWFGD

SEQ ID NO: 3843 - protein, 9 aa, Homo sapiens
  Light chain CDR3 for antibody 1922 (IGKV6-21)
HQSSSLPYT

SEQ ID NO: 3844 - protein, 13 aa, Homo sapiens
  Heavy chain CDR3 for antibody 1922 (IGHV3-33)
AREYCSGGSCYDY

SEQ ID NO: 3845 - protein, 9 aa, Homo sapiens
  Light chain CDR3 for antibody 1923 (IGKV1-17)
LQHNSYPYT

SEQ ID NO: 3846 - protein, 17 aa, Homo sapiens
  Heavy chain CDR3 for antibody 1923 (IGHV3-23)
AKDYDILTGYSHNWFDP

SEQ ID NO: 3847 - protein, 9 aa, Homo sapiens
  Light chain CDR3 for antibody 1924 (IGKV1-9)
QQLNSYPLT

SEQ ID NO: 3848 - protein, 14 aa, Homo sapiens
  Heavy chain CDR3 for antibody 1924 (IGHV3-33)
ARDKSYPLSYGMDV

SEQ ID NO: 3849 - protein, 9 aa, Homo sapiens
  Light chain CDR3 for antibody 1925 (IGKV1-27)
QKYNSAPYT

SEQ ID NO: 3850 - protein, 18 aa, Homo sapiens
  Heavy chain CDR3 for antibody 1925 (IGHV1-46)
ARDGDYVWGSYRSNWFDP

SEQ ID NO: 3851 - protein, 9 aa, Homo sapiens
  Light chain CDR3 for antibody 1926 (IGKV1D-13)
QQFNNYPRT

SEQ ID NO: 3852 - protein, 12 aa, Homo sapiens
  Heavy chain CDR3 for antibody 1926 (IGHV3-64)
AREFPWGDYFDY

SEQ ID NO: 3853 - protein, 9 aa, Homo sapiens
  Light chain CDR3 for antibody 1927 (IGKV1D-16)
QQYNSYPLT

SEQ ID NO: 3854 - protein, 18 aa, Homo sapiens
  Heavy chain CDR3 for antibody 1927 (IGHV3-33)
AREGYDILTGYYNVKFDY

SEQ ID NO: 3855 - protein, 9 aa, Homo sapiens
  Light chain CDR3 for antibody 1928 (IGKV1-6)
LQDYNYPYT

SEQ ID NO: 3856 - protein, 17 aa, Homo sapiens
  Heavy chain CDR3 for antibody 1928 (IGHV4-59)
ARDRELLWFGEFGGMDV

SEQ ID NO: 3857 - protein, 9 aa, Homo sapiens
  Light chain CDR3 for antibody 1929 (IGKV3-20)
QQYGSSPYT

SEQ ID NO: 3858 - protein, 14 aa, Homo sapiens
  Heavy chain CDR3 for antibody 1929 (IGHV3-33)
VRDQGSMVRGGGDY

SEQ ID NO: 3859 - protein, 9 aa, Homo sapiens
  Light chain CDR3 for antibody 1930 (IGKV1-9)
QQYNSYPLT

SEQ ID NO: 3860 - protein, 17 aa, Homo sapiens
  Heavy chain CDR3 for antibody 1930 (IGHV4-59)
AREGADSGIYYHWYFDL

SEQ ID NO: 3861 - protein, 9 aa, Homo sapiens
  Light chain CDR3 for antibody 1931 (IGKV5-2)
LQHDNFPWT

SEQ ID NO: 3862 - protein, 18 aa, Homo sapiens
  Heavy chain CDR3 for antibody 1931 (IGHV3-33)
ARGGYSSGWDYYYYGMDV

SEQ ID NO: 3863 - protein, 9 aa, Homo sapiens
  Light chain CDR3 for antibody 1932 (IGKV3D-7)
QQDYNLPLT

SEQ ID NO: 3864 - protein, 18 aa, Homo sapiens
  Heavy chain CDR3 for antibody 1932 (IGHV4-59)
ARVTIVRGVTIGRGWFDP

SEQ ID NO: 3865 - protein, 9 aa, Homo sapiens
  Light chain CDR3 for antibody 1933 (IGKV3-20)
QQYGSSPYT

SEQ ID NO: 3866 - protein, 13 aa, Homo sapiens
  Heavy chain CDR3 for antibody 1933 (IGHV3-33)
ARDSSSWYHWFDP

SEQ ID NO: 3867 - protein, 9 aa, Homo sapiens
  Light chain CDR3 for antibody 1934 (IGKV1-6)
LQDYNYPYT

SEQ ID NO: 3868 - protein, 17 aa, Homo sapiens
  Heavy chain CDR3 for antibody 1934 (IGHV3-23)
AKDRPVTTLYYYFGMDV

SEQ ID NO: 3869 - protein, 9 aa, Homo sapiens
  Light chain CDR3 for antibody 1935 (IGKV3D-20)
QQYGSSPYT

SEQ ID NO: 3870 - protein, 10 aa, Homo sapiens
  Heavy chain CDR3 for antibody 1935 (IGHV3-33)
ARNILTPLDY

SEQ ID NO: 3871 - protein, 9 aa, Homo sapiens
  Light chain CDR3 for antibody 1936 (IGKV1-27)
QKYNSAPYT

SEQ ID NO: 3872 - protein, 13 aa, Homo sapiens
  Heavy chain CDR3 for antibody 1936 (IGHV3-33)
ASTGDSYYYGMDV

SEQ ID NO: 3873 - protein, 9 aa, Homo sapiens
  Light chain CDR3 for antibody 1937 (IGKV5-2)
LQHDNFPYT

SEQ ID NO: 3874 - protein, 10 aa, Homo sapiens
  Heavy chain CDR3 for antibody 1937 (IGHV3-74)
ARENWGGFDY

SEQ ID NO: 3875 - protein, 9 aa, Homo sapiens
  Light chain CDR3 for antibody 1938 (IGKV1-39)
QQGFSTPWT

SEQ ID NO: 3876 - protein, 18 aa, Homo sapiens
  Heavy chain CDR3 for antibody 1938 (IGHV4-39)
ARQYYFGSGNYYRGWFDP

SEQ ID NO: 3877 - protein, 9 aa, Homo sapiens
  Light chain CDR3 for antibody 1939 (IGKV1D-17)
LQHISYPYT

SEQ ID NO: 3878 - protein, 15 aa, Homo sapiens
  Heavy chain CDR3 for antibody 1939 (IGHV3-33)
ARDSGGGAGTLPFDY

SEQ ID NO: 3879 - protein, 9 aa, Homo sapiens
  Light chain CDR3 for antibody 1940 (IGKV1-39)
QQSYSTPLT

SEQ ID NO: 3880 - protein, 20 aa, Homo sapiens
  Heavy chain CDR3 for antibody 1940 (IGHV1-f)
ATGLITFVRGVILTYRSFDY

SEQ ID NO: 3881 - protein, 9 aa, Homo sapiens
  Light chain CDR3 for antibody 1941 (IGKV1-6)
LQDYNYPLT

SEQ ID NO: 3882 - protein, 10 aa, Homo sapiens
  Heavy chain CDR3 for antibody 1941 (IGHV3-23)
AKARNGGLDY

SEQ ID NO: 3883 - protein, 9 aa, Homo sapiens
  Light chain CDR3 for antibody 1942 (IGKV1D-13)
QQFNNYPHT

SEQ ID NO: 3884 - protein, 7 aa, Homo sapiens
  Heavy chain CDR3 for antibody 1942 (IGHV1-46)
AREGGDY

SEQ ID NO: 3885 - protein, 9 aa, Homo sapiens
  Light chain CDR3 for antibody 1943 (IGKV1D-16)
QQYNSYPYT

SEQ ID NO: 3886 - protein, 17 aa, Homo sapiens
  Heavy chain CDR3 for antibody 1943 (IGHV3-23)
AKEGSSSSWYGGLYFDY

SEQ ID NO: 3887 - protein, 9 aa, Homo sapiens
  Light chain CDR3 for antibody 1944 (IGKV6-21)
HQSSSLPYT

SEQ ID NO: 3888 - protein, 13 aa, Homo sapiens
  Heavy chain CDR3 for antibody 1944 (IGHV4-28)
ARKGATGYYGMDV

SEQ ID NO: 3889 - protein, 9 aa, Homo sapiens
  Light chain CDR3 for antibody 1945 (IGKV3-20)
QQYGSSPYT

SEQ ID NO: 3890 - protein, 14 aa, Homo sapiens
  Heavy chain CDR3 for antibody 1945 (IGHV4-39)
ARQGGSGSYYNLDY

SEQ ID NO: 3891 - protein, 9 aa, Homo sapiens
  Light chain CDR3 for antibody 1946 (IGKV1D-16)
QQYNSYPYT

SEQ ID NO: 3892 - protein, 16 aa, Homo sapiens
  Heavy chain CDR3 for antibody 1946 (IGHV3-23)
AKDLRYFDWSLYAFDI

SEQ ID NO: 3893 - protein, 9 aa, Homo sapiens
  Light chain CDR3 for antibody 1947 (IGKV5-2)
LQHDNFPYT

SEQ ID NO: 3894 - protein, 17 aa, Homo sapiens
  Heavy chain CDR3 for antibody 1947 (IGHV3-33)
ARDLIGPLSSSWYPFDY

SEQ ID NO: 3895 - protein, 9 aa, Homo sapiens
  Light chain CDR3 for antibody 1948 (IGKV1-39)
QQSYSTPLT

SEQ ID NO: 3896 - protein, 11 aa, Homo sapiens
  Heavy chain CDR3 for antibody 1948 (IGHV3-13)
AREAIIGPFDY

SEQ ID NO: 3897 - protein, 9 aa, Homo sapiens
  Light chain CDR3 for antibody 1949 (IGKV1-9)
QQLNSYPWT

SEQ ID NO: 3898 - protein, 19 aa, Homo sapiens
  Heavy chain CDR3 for antibody 1949 (IGHV3-20)
ARGGSGSYYNGYYYYGMDV

SEQ ID NO: 3899 - protein, 9 aa, Homo sapiens
  Light chain CDR3 for antibody 1950 (IGKV1-9)
QQYNSYPLT

SEQ ID NO: 3900 - protein, 14 aa, Homo sapiens
  Heavy chain CDR3 for antibody 1950 (IGHV3-23)
AKEDTAMASYYFDY

SEQ ID NO: 3901 - protein, 9 aa, Homo sapiens
  Light chain CDR3 for antibody 1951 (IGKV3-20)
QQYGSSPYT

SEQ ID NO: 3902 - protein, 14 aa, Homo sapiens
  Heavy chain CDR3 for antibody 1951 (IGHV3-33)
VRDAMGATTAWFDP

SEQ ID NO: 3903 - protein, 9 aa, Homo sapiens
  Light chain CDR3 for antibody 1952 (IGKV5-2)
LQHDNFPYT

SEQ ID NO: 3904 - protein, 15 aa, Homo sapiens
  Heavy chain CDR3 for antibody 1952 (IGHV3-23)
AKEFTMVRGVITPDY

SEQ ID NO: 3905 - protein, 9 aa, Homo sapiens
  Light chain CDR3 for antibody 1953 (IGKV1-39)
QQSYSTPLT

SEQ ID NO: 3906 - protein, 18 aa, Homo sapiens
  Heavy chain CDR3 for antibody 1953 (IGHV3-33)
ARREGIVGATTYYYGMDV

SEQ ID NO: 3907 - protein, 9 aa, Homo sapiens
  Light chain CDR3 for antibody 1954 (IGKV1-16)
QQYNRYPYT

SEQ ID NO: 3908 - protein, 15 aa, Homo sapiens
  Heavy chain CDR3 for antibody 1954 (IGHV4-59)
ARDLGHYYGSVSIDY

SEQ ID NO: 3909 - protein, 9 aa, Homo sapiens
  Light chain CDR3 for antibody 1955 (IGKV1-39)
QQSYSTPLT

SEQ ID NO: 3910 - protein, 15 aa, Homo sapiens
  Heavy chain CDR3 for antibody 1955 (IGHV3-23)
AKDGSYYDYYYGMDV

SEQ ID NO: 3911 - protein, 9 aa, Homo sapiens
  Light chain CDR3 for antibody 1956 (IGKV1-6)
LQDYNYPYT

SEQ ID NO: 3912 - protein, 10 aa, Homo sapiens
  Heavy chain CDR3 for antibody 1956 (IGHV3-33)
ARDGLRYFDW

SEQ ID NO: 3913 - protein, 9 aa, Homo sapiens
  Light chain CDR3 for antibody 1957 (IGKV5-2)
LQHDNFPYT

SEQ ID NO: 3914 - protein, 17 aa, Homo sapiens
  Heavy chain CDR3 for antibody 1957 (IGHV3-23)
AKDTITMVRGALFGMDV

SEQ ID NO: 3915 - protein, 9 aa, Homo sapiens
  Light chain CDR3 for antibody 1958 (IGKV1-39)
QQSYSTPLT

SEQ ID NO: 3916 - protein, 10 aa, Homo sapiens
  Heavy chain CDR3 for antibody 1958 (IGHV3-33)
ARDGSGSQPI

SEQ ID NO: 3917 - protein, 9 aa, Homo sapiens
  Light chain CDR3 for antibody 1959 (IGKV1D-13)
QQFNNYPYT

SEQ ID NO: 3918 - protein, 15 aa, Homo sapiens
  Heavy chain CDR3 for antibody 1959 (IGHV3-33)
ARGYYYGSGSFPVDY

SEQ ID NO: 3919 - protein, 9 aa, Homo sapiens
  Light chain CDR3 for antibody 1960 (IGKV5-2)
LQHDNFPYT

SEQ ID NO: 3920 - protein, 13 aa, Homo sapiens
  Heavy chain CDR3 for antibody 1960 (IGHV3-23)
AKDRGGSYSYFDF

SEQ ID NO: 3921 - protein, 9 aa, Homo sapiens
  Light chain CDR3 for antibody 1961 (IGKV1-39)
QQSYSTPLT

SEQ ID NO: 3922 - protein, 20 aa, Homo sapiens
  Heavy chain CDR3 for antibody 1961 (IGHV3-11)
ARGGATLIRGLIDYYYGMDV

SEQ ID NO: 3923 - protein, 9 aa, Homo sapiens
  Light chain CDR3 for antibody 1962 (IGKV1-39)
QQSYTTPYT

SEQ ID NO: 3924 - protein, 15 aa, Homo sapiens
  Heavy chain CDR3 for antibody 1962 (IGHV3-13)
ARVRAYCRGDCHPDY

SEQ ID NO: 3925 - protein, 9 aa, Homo sapiens
  Light chain CDR3 for antibody 1963 (IGKV3-20)
QQYGSSPYT

SEQ ID NO: 3926 - protein, 15 aa, Homo sapiens
  Heavy chain CDR3 for antibody 1963 (IGHV3-74)
ARGSGSHYHYYGMDV

SEQ ID NO: 3927 - protein, 9 aa, Homo sapiens
  Light chain CDR3 for antibody 1964 (IGKV3-20)
QQYGSSPYT

SEQ ID NO: 3928 - protein, 12 aa, Homo sapiens
  Heavy chain CDR3 for antibody 1964 (IGHV3-h)
AREDYYYYGMDV

SEQ ID NO: 3929 - protein, 8 aa, Homo sapiens
  Light chain CDR3 for antibody 1965 (IGKV3-20)
QQYGRSFT

SEQ ID NO: 3930 - protein, 13 aa, Homo sapiens
  Heavy chain CDR3 for antibody 1965 (IGHV4-34)
ASNFYYYYYGMDV

SEQ ID NO: 3931 - protein, 9 aa, Homo sapiens
  Light chain CDR3 for antibody 1966 (IGKV6-21)
HQSSSLPYT

SEQ ID NO: 3932 - protein, 9 aa, Homo sapiens
  Heavy chain CDR3 for antibody 1966 (IGHV3-23)
AKEQQLFDY

SEQ ID NO: 3933 - protein, 9 aa, Homo sapiens
  Light chain CDR3 for antibody 1967 (IGKV1-39)
QQSYSTPLT

SEQ ID NO: 3934 - protein, 18 aa, Homo sapiens
  Heavy chain CDR3 for antibody 1967 (IGHV3-23)
AKDRITGTTYGYYSGLDV

SEQ ID NO: 3935 - protein, 9 aa, Homo sapiens
  Light chain CDR3 for antibody 1968 (IGKV5-2)
LQHDNFPWT

SEQ ID NO: 3936 - protein, 13 aa, Homo sapiens
  Heavy chain CDR3 for antibody 1968 (IGHV1-46)
ARVKLGSLGAFDI

SEQ ID NO: 3937 - protein, 9 aa, Homo sapiens
  Light chain CDR3 for antibody 1969 (IGKV5-2)
LQHDNFPYT

SEQ ID NO: 3938 - protein, 15 aa, Homo sapiens
  Heavy chain CDR3 for antibody 1969 (IGHV3-33)
AREGLRYFHYYGMDV

SEQ ID NO: 3939 - protein, 9 aa, Homo sapiens
  Light chain CDR3 for antibody 1970 (IGKV3-15)
QQYNNWPLT

SEQ ID NO: 3940 - protein, 13 aa, Homo sapiens
  Heavy chain CDR3 for antibody 1970 (IGHV4-39)
ARHVLLWFGEFDP

SEQ ID NO: 3941 - protein, 9 aa, Homo sapiens
  Light chain CDR3 for antibody 1971 (IGKV1D-16)
QQYNSYPYT

SEQ ID NO: 3942 - protein, 18 aa, Homo sapiens
  Heavy chain CDR3 for antibody 1971 (IGHV3-33)
VREGGYYGSGSYPDAFDI

SEQ ID NO: 3943 - protein, 9 aa, Homo sapiens
  Light chain CDR3 for antibody 1972 (IGKV1-9)
QQLNSYPLT

SEQ ID NO: 3944 - protein, 13 aa, Homo sapiens
  Heavy chain CDR3 for antibody 1972 (IGHV4-39)
ARRDGSYYGYFGY

SEQ ID NO: 3945 - protein, 9 aa, Homo sapiens
  Light chain CDR3 for antibody 1973 (IGKV1-16)
QQYNSYPYT

SEQ ID NO: 3946 - protein, 17 aa, Homo sapiens
  Heavy chain CDR3 for antibody 1973 (IGHV3-33)
ARENDILTGSYYYGMDV

SEQ ID NO: 3947 - protein, 9 aa, Homo sapiens
  Light chain CDR3 for antibody 1974 (IGKV5-2)
LQHDNFPYT

SEQ ID NO: 3948 - protein, 11 aa, Homo sapiens
  Heavy chain CDR3 for antibody 1974 (IGHV1-24)
ATELGLYYFDY

SEQ ID NO: 3949 - protein, 9 aa, Homo sapiens
  Light chain CDR3 for antibody 1975 (IGKV1-39)
QQSYSTPLT

SEQ ID NO: 3950 - protein, 13 aa, Homo sapiens
  Heavy chain CDR3 for antibody 1975 (IGHV3-23)
ASTGDSYYYGMDV

SEQ ID NO: 3951 - protein, 9 aa, Homo sapiens
  Light chain CDR3 for antibody 1976 (IGKV6-21)
HQSSSLPYT

SEQ ID NO: 3952 - protein, 19 aa, Homo sapiens
  Heavy chain CDR3 for antibody 1976 (IGHV3-30)
ARRFSGYSGYDHYYYGMDV

SEQ ID NO: 3953 - protein, 9 aa, Homo sapiens
  Light chain CDR3 for antibody 1977 (IGKV3D-7)
QQDYNLPLT

SEQ ID NO: 3954 - protein, 15 aa, Homo sapiens
  Heavy chain CDR3 for antibody 1977 (IGHV4-59)
ARDLGHYYGSVSIDY

SEQ ID NO: 3955 - protein, 9 aa, Homo sapiens
  Light chain CDR3 for antibody 1978 (IGKV1-27)
QKYNSAPYT

SEQ ID NO: 3956 - protein, 14 aa, Homo sapiens
  Heavy chain CDR3 for antibody 1978 (IGHV3-33)
VRDAMGATTAWFDP

SEQ ID NO: 3957 - protein, 9 aa, Homo sapiens
  Light chain CDR3 for antibody 1979 (IGKV3-15)
QQYNNWPLT

SEQ ID NO: 3958 - protein, 15 aa, Homo sapiens
  Heavy chain CDR3 for antibody 1979 (IGHV4-59)
ARDLGHYYGSVSIDY

SEQ ID NO: 3959 - protein, 9 aa, Homo sapiens
  Light chain CDR3 for antibody 1980 (IGKV1-39)
QQSYSTPLT

SEQ ID NO: 3960 - protein, 14 aa, Homo sapiens
  Heavy chain CDR3 for antibody 1980 (IGHV3-23)
ANWAYDILTGYLDY

SEQ ID NO: 3961 - protein, 9 aa, Homo sapiens
  Light chain CDR3 for antibody 1981 (IGKV6-21)
HQSSSLPYT

SEQ ID NO: 3962 - protein, 18 aa, Homo sapiens
  Heavy chain CDR3 for antibody 1981 (IGHV3-33)
ARERGYYGSDIYPAAFDI

SEQ ID NO: 3963 - protein, 9 aa, Homo sapiens
  Light chain CDR3 for antibody 1982 (IGKV1-9)
QQLNSYPLT

SEQ ID NO: 3964 - protein, 16 aa, Homo sapiens
  Heavy chain CDR3 for antibody 1982 (IGHV1-24)
ATEDSSSYYYYYGMDV

SEQ ID NO: 3965 - protein, 9 aa, Homo sapiens
  Light chain CDR3 for antibody 1983 (IGKV1D-16)
QQYNSYPYT

SEQ ID NO: 3966 - protein, 14 aa, Homo sapiens
  Heavy chain CDR3 for antibody 1983 (IGHV3-33)
AREEDYYYYYDMDV

SEQ ID NO: 3967 - protein, 9 aa, Homo sapiens
  Light chain CDR3 for antibody 1984 (IGKV3-15)
QQYNNWPLT

SEQ ID NO: 3968 - protein, 12 aa, Homo sapiens
  Heavy chain CDR3 for antibody 1984 (IGHV4-39)
ARHGSGSSYFDY

SEQ ID NO: 3969 - protein, 9 aa, Homo sapiens
  Light chain CDR3 for antibody 1985 (IGKV1-9)
QQLNSYPLT

SEQ ID NO: 3970 - protein, 11 aa, Homo sapiens
  Heavy chain CDR3 for antibody 1985 (IGHV4-59)
VRERGYYGMDV

SEQ ID NO: 3971 - protein, 9 aa, Homo sapiens
  Light chain CDR3 for antibody 1986 (IGKV2-30)
MQGTHWPLT

SEQ ID NO: 3972 - protein, 13 aa, Homo sapiens
  Heavy chain CDR3 for antibody 1986 (IGHV3-33)
ARDWGYSHGYFDY

SEQ ID NO: 3973 - protein, 9 aa, Homo sapiens
  Light chain CDR3 for antibody 1987 (IGKV6-21)
HQSSSLPFT

SEQ ID NO: 3974 - protein, 5 aa, Homo sapiens
  Heavy chain CDR3 for antibody 1987 (IGHV4-39)
ARGDY

SEQ ID NO: 3975 - protein, 9 aa, Homo sapiens
  Light chain CDR3 for antibody 1988 (IGKV5-2)
LQHDNFPYT

SEQ ID NO: 3976 - protein, 16 aa, Homo sapiens
  Heavy chain CDR3 for antibody 1988 (IGHV3-30)
ARDIAVAGHVYYGMDV

SEQ ID NO: 3977 - protein, 9 aa, Homo sapiens
  Light chain CDR3 for antibody 1989 (IGKV1-17)
LQHNSYPYT

SEQ ID NO: 3978 - protein, 26 aa, Homo sapiens
  Heavy chain CDR3 for antibody 1989 (IGHV4-39)
ARQGLLWFGDLKAYDSSGYYYGYFHH

SEQ ID NO: 3979 - protein, 10 aa, Homo sapiens
  Light chain CDR3 for antibody 1990 (IGKV1-39)
QQSYSTPMYT

SEQ ID NO: 3980 - protein, 13 aa, Homo sapiens
  Heavy chain CDR3 for antibody 1990 (IGHV3-33)
ARDYCGGDCYLDY

SEQ ID NO: 3981 - protein, 9 aa, Homo sapiens
  Light chain CDR3 for antibody 1991 (IGKV1-16)
QQYNRYPYT

SEQ ID NO: 3982 - protein, 9 aa, Homo sapiens
  Heavy chain CDR3 for antibody 1991 (IGHV4-59)
AGGSWDFDY

SEQ ID NO: 3983 - protein, 9 aa, Homo sapiens
  Light chain CDR3 for antibody 1992 (IGKV5-2)
LQHDNFPYT

SEQ ID NO: 3984 - protein, 17 aa, Homo sapiens
  Heavy chain CDR3 for antibody 1992 (IGHV3-23)
AKEYCSGGSCYVYYFDY

SEQ ID NO: 3985 - protein, 9 aa, Homo sapiens
  Light chain CDR3 for antibody 1993 (IGKV6-21)
HQSSSLPYT

SEQ ID NO: 3986 - protein, 10 aa, Homo sapiens
  Heavy chain CDR3 for antibody 1993 (IGHV3-74)
ARENWGGFDY

SEQ ID NO: 3987 - protein, 9 aa, Homo sapiens
  Light chain CDR3 for antibody 1994 (IGKV5-2)
LQHDNFPYT

SEQ ID NO: 3988 - protein, 16 aa, Homo sapiens
  Heavy chain CDR3 for antibody 1994 (IGHV3-13)
ARDRSYESYYYYGMDV

SEQ ID NO: 3989 - protein, 9 aa, Homo sapiens
  Light chain CDR3 for antibody 1995 (IGKV3-11)
QQRSNWPYT

SEQ ID NO: 3990 - protein, 18 aa, Homo sapiens
  Heavy chain CDR3 for antibody 1995 (IGHV3-33)
ARREGITTIFYYYYGMDV

SEQ ID NO: 3991 - protein, 9 aa, Homo sapiens
  Light chain CDR3 for antibody 1996 (IGKV1D-16)
QQYNSYPLT

SEQ ID NO: 3992 - protein, 13 aa, Homo sapiens
  Heavy chain CDR3 for antibody 1996 (IGHV3-33)
ARDSSSWYHWFDP

SEQ ID NO: 3993 - protein, 9 aa, Homo sapiens
  Light chain CDR3 for antibody 1997 (IGKV6-21)
HQSSSLPYT

SEQ ID NO: 3994 - protein, 17 aa, Homo sapiens
  Heavy chain CDR3 for antibody 1997 (IGHV3-64)
ARERYYGSGSYYNWFDP

SEQ ID NO: 3995 - protein, 9 aa, Homo sapiens
  Light chain CDR3 for antibody 1998 (IGKV1D-13)
QQFNNYPYT

SEQ ID NO: 3996 - protein, 14 aa, Homo sapiens
  Heavy chain CDR3 for antibody 1998 (IGHV3-33)
ARRGSPLRPSHLDV

SEQ ID NO: 3997 - protein, 9 aa, Homo sapiens
  Light chain CDR3 for antibody 1999 (IGKV2-30)
MQGTHWPLT

SEQ ID NO: 3998 - protein, 15 aa, Homo sapiens
  Heavy chain CDR3 for antibody 1999 (IGHV3-20)
ARDRGSSGWRDWFDP

SEQ ID NO: 3999 - protein, 9 aa, Homo sapiens
  Light chain CDR3 for antibody 2000 (IGKV1-27)
QKYNSAPYT

SEQ ID NO: 4000 - protein, 9 aa, Homo sapiens
  Heavy chain CDR3 for antibody 2000 (IGHV3-13)
ARDRWYFDL

SEQ ID NO: 4001 - protein, 9 aa, Homo sapiens
  Light chain CDR3 for antibody 2001 (IGKV1-39)
QQSYSTPLT

SEQ ID NO: 4002 - protein, 14 aa, Homo sapiens
  Heavy chain CDR3 for antibody 2001 (IGHV3-33)
ARDREQQLVRYFDY

SEQ ID NO: 4003 - protein, 8 aa, Homo sapiens
  Light chain CDR3 for antibody 2002 (IGKV3D-7)
QQDYNLVT

SEQ ID NO: 4004 - protein, 16 aa, Homo sapiens
  Heavy chain CDR3 for antibody 2002 (IGHV4-59)
ARGRYFEWLLGDVFDI

SEQ ID NO: 4005 - protein, 9 aa, Homo sapiens
  Light chain CDR3 for antibody 2003 (IGKV5-2)
LQHDNFPYT

SEQ ID NO: 4006 - protein, 15 aa, Homo sapiens
  Heavy chain CDR3 for antibody 2003 (IGHV3-23)
AKDGGWNYYYYGMDV

SEQ ID NO: 4007 - protein, 9 aa, Homo sapiens
  Light chain CDR3 for antibody 2004 (IGKV1-17)
LQHNSYPYT

SEQ ID NO: 4008 - protein, 14 aa, Homo sapiens
  Heavy chain CDR3 for antibody 2004 (IGHV3-33)
ARDTVAAGFNGMDV

SEQ ID NO: 4009 - protein, 9 aa, Homo sapiens
  Light chain CDR3 for antibody 2005 (IGKV1D-13)
QQFNNYPHT

SEQ ID NO: 4010 - protein, 14 aa, Homo sapiens
  Heavy chain CDR3 for antibody 2005 (IGHV3-33)
ARDKTYPLSYGMDV

SEQ ID NO: 4011 - protein, 9 aa, Homo sapiens
  Light chain CDR3 for antibody 2006 (IGKV3-20)
QQYGSSPYT

SEQ ID NO: 4012 - protein, 15 aa, Homo sapiens
  Heavy chain CDR3 for antibody 2006 (IGHV3-23)
AKDGFYYGSGSSFDH

SEQ ID NO: 4013 - protein, 9 aa, Homo sapiens
  Light chain CDR3 for antibody 2007 (IGKV1D-13)
QQFNNYPHT

SEQ ID NO: 4014 - protein, 11 aa, Homo sapiens
  Heavy chain CDR3 for antibody 2007 (IGHV3-33)
ARARYTTGLDY

SEQ ID NO: 4015 - protein, 9 aa, Homo sapiens
  Light chain CDR3 for antibody 2008 (IGKV5-2)
LQHDNFPYT

SEQ ID NO: 4016 - protein, 14 aa, Homo sapiens
  Heavy chain CDR3 for antibody 2008 (IGHV3-20)
ARDGGSTCYDWFDP

SEQ ID NO: 4017 - protein, 9 aa, Homo sapiens
  Light chain CDR3 for antibody 2009 (IGKV1-9)
QQYNSYPLT

SEQ ID NO: 4018 - protein, 8 aa, Homo sapiens
  Heavy chain CDR3 for antibody 2009 (IGHV3-23)
AKESLLDY

SEQ ID NO: 4019 - protein, 9 aa, Homo sapiens
  Light chain CDR3 for antibody 2010 (IGKV1-39)
QQSYSTPLT

SEQ ID NO: 4020 - protein, 16 aa, Homo sapiens
  Heavy chain CDR3 for antibody 2010 (IGHV3-33)
ARGYDMLTGDYYGMDV

SEQ ID NO: 4021 - protein, 9 aa, Homo sapiens
  Light chain CDR3 for antibody 2011 (IGKV1-9)
QQLISYPLT

SEQ ID NO: 4022 - protein, 13 aa, Homo sapiens
  Heavy chain CDR3 for antibody 2011 (IGHV3-11)
ARDGGAAAGTWDS

SEQ ID NO: 4023 - protein, 9 aa, Homo sapiens
  Light chain CDR3 for antibody 2012 (IGKV1D-13)
QQFNNYPHT

SEQ ID NO: 4024 - protein, 14 aa, Homo sapiens
  Heavy chain CDR3 for antibody 2012 (IGHV3-23)
AKEDTAMASYYFDY

SEQ ID NO: 4025 - protein, 9 aa, Homo sapiens
  Light chain CDR3 for antibody 2013 (IGKV6-21)
HQSSSLPYT

SEQ ID NO: 4026 - protein, 14 aa, Homo sapiens
  Heavy chain CDR3 for antibody 2013 (IGHV3-33)
VRDQGSMVRGGGDY

SEQ ID NO: 4027 - protein, 9 aa, Homo sapiens
  Light chain CDR3 for antibody 2014 (IGKV1-39)
QQSYSTPLT

SEQ ID NO: 4028 - protein, 17 aa, Homo sapiens
  Heavy chain CDR3 for antibody 2014 (IGHV3-33)
VREGGLLWVGELSLFDY

SEQ ID NO: 4029 - protein, 9 aa, Homo sapiens
  Light chain CDR3 for antibody 2015 (IGKV5-2)
LQHDNFPWT

SEQ ID NO: 4030 - protein, 20 aa, Homo sapiens
  Heavy chain CDR3 for antibody 2015 (IGHV3-33)
ARDPAQLERRYYYFYYGMDV

SEQ ID NO: 4031 - protein, 8 aa, Homo sapiens
  Light chain CDR3 for antibody 2016 (IGKV3D-7)
QQDYNLVT

SEQ ID NO: 4032 - protein, 17 aa, Homo sapiens
  Heavy chain CDR3 for antibody 2016 (IGHV4-59)
ARRTTMVREIIVTHFDY

SEQ ID NO: 4033 - protein, 9 aa, Homo sapiens
  Light chain CDR3 for antibody 2017 (IGKV5-2)
LQHDNFPYT

SEQ ID NO: 4034 - protein, 13 aa, Homo sapiens
  Heavy chain CDR3 for antibody 2017 (IGHV3-23)
AKDRGLRYYGMDV

SEQ ID NO: 4035 - protein, 9 aa, Homo sapiens
  Light chain CDR3 for antibody 2018 (IGKV5-2)
LQHDNFPYT

SEQ ID NO: 4036 - protein, 14 aa, Homo sapiens
  Heavy chain CDR3 for antibody 2018 (IGHV3-33)
VRDQGSMVRGGGDY

SEQ ID NO: 4037 - protein, 9 aa, Homo sapiens
  Light chain CDR3 for antibody 2019 (IGKV6-21)
HQSSSLPYT

SEQ ID NO: 4038 - protein, 11 aa, Homo sapiens
  Heavy chain CDR3 for antibody 2019 (IGHV4-4)
AREAYYYGLDV

SEQ ID NO: 4039 - protein, 9 aa, Homo sapiens
  Light chain CDR3 for antibody 2020 (IGKV1D-16)
QQYNSYPYT

SEQ ID NO: 4040 - protein, 10 aa, Homo sapiens
  Heavy chain CDR3 for antibody 2020 (IGHV3-33)
AREGLRYFDH

SEQ ID NO: 4041 - protein, 9 aa, Homo sapiens
  Light chain CDR3 for antibody 2021 (IGKV5-2)
LQHDNFPWT

SEQ ID NO: 4042 - protein, 19 aa, Homo sapiens
  Heavy chain CDR3 for antibody 2021 (IGHV3-33)
TRDPHYDILTGYAYYGMDV

SEQ ID NO: 4043 - protein, 8 aa, Homo sapiens
  Light chain CDR3 for antibody 2022 (IGKV3-15)
QQYNNWLT

SEQ ID NO: 4044 - protein, 15 aa, Homo sapiens
  Heavy chain CDR3 for antibody 2022 (IGHV3-33)
ARVPNYGSGSYFFDY

SEQ ID NO: 4045 - protein, 9 aa, Homo sapiens
  Light chain CDR3 for antibody 2023 (IGKV6-21)
HQSSSLPYT

SEQ ID NO: 4046 - protein, 11 aa, Homo sapiens
  Heavy chain CDR3 for antibody 2023 (IGHV3-23)
GEFSSGWSFDY

SEQ ID NO: 4047 - protein, 9 aa, Homo sapiens
  Light chain CDR3 for antibody 2024 (IGKV5-2)
LQHDNFPYT

SEQ ID NO: 4048 - protein, 10 aa, Homo sapiens
  Heavy chain CDR3 for antibody 2024 (IGHV3-30)
AREWYGGMDV

SEQ ID NO: 4049 - protein, 9 aa, Homo sapiens
  Light chain CDR3 for antibody 2025 (IGKV1-6)
LQDYNYPYT

SEQ ID NO: 4050 - protein, 17 aa, Homo sapiens
  Heavy chain CDR3 for antibody 2025 (IGHV3-23)
AKEGSSSSWYGGLYFDY

SEQ ID NO: 4051 - protein, 9 aa, Homo sapiens
  Light chain CDR3 for antibody 2026 (IGKV1-39)
QQSYSTPLT

SEQ ID NO: 4052 - protein, 18 aa, Homo sapiens
  Heavy chain CDR3 for antibody 2026 (IGHV3-33)
ARDRDRYGSGTYPDAIDI

SEQ ID NO: 4053 - protein, 9 aa, Homo sapiens
  Light chain CDR3 for antibody 2027 (IGKV1-6)
LQDYKSPFT

SEQ ID NO: 4054 - protein, 11 aa, Homo sapiens
  Heavy chain CDR3 for antibody 2027 (IGHV3-33)
ARDRSSGPFDY

SEQ ID NO: 4055 - protein, 9 aa, Homo sapiens
  Light chain CDR3 for antibody 2028 (IGKV1-27)
QKYNSAPYT

SEQ ID NO: 4056 - protein, 18 aa, Homo sapiens
  Heavy chain CDR3 for antibody 2028 (IGHV3-33)
ARGLLWFGVSYYYYGMDV

SEQ ID NO: 4057 - protein, 9 aa, Homo sapiens
  Light chain CDR3 for antibody 2029 (IGKV1D-16)
QQYNSYPYT

SEQ ID NO: 4058 - protein, 13 aa, Homo sapiens
  Heavy chain CDR3 for antibody 2029 (IGHV3-33)
TRRIAVAGAEGDY

SEQ ID NO: 4059 - protein, 9 aa, Homo sapiens
  Light chain CDR3 for antibody 2030 (IGKV1-9)
QQLNSYPLT

SEQ ID NO: 4060 - protein, 13 aa, Homo sapiens
  Heavy chain CDR3 for antibody 2030 (IGHV3-11)
ARDEGYRGYVLDN

SEQ ID NO: 4061 - protein, 9 aa, Homo sapiens
  Light chain CDR3 for antibody 2031 (IGKV1D-13)
QHFNNYMYT

SEQ ID NO: 4062 - protein, 13 aa, Homo sapiens
  Heavy chain CDR3 for antibody 2031 (IGHV4-59)
ARDAGYSSSWFDY

SEQ ID NO: 4063 - protein, 8 aa, Homo sapiens
  Light chain CDR3 for antibody 2032 (IGKV3D-7)
QQDYNLLT

SEQ ID NO: 4064 - protein, 12 aa, Homo sapiens
  Heavy chain CDR3 for antibody 2032 (IGHV4-61)
ARVYSSGWLFDY

SEQ ID NO: 4065 - protein, 9 aa, Homo sapiens
  Light chain CDR3 for antibody 2033 (IGKV5-2)
LQHDNFPYT

SEQ ID NO: 4066 - protein, 18 aa, Homo sapiens
  Heavy chain CDR3 for antibody 2033 (IGHV3-33)
ARERGYYGSDIYPAAFDI

SEQ ID NO: 4067 - protein, 9 aa, Homo sapiens
  Light chain CDR3 for antibody 2034 (IGKV1D-16)
QQYNSYPYT

SEQ ID NO: 4068 - protein, 15 aa, Homo sapiens
  Heavy chain CDR3 for antibody 2034 (IGHV1-18)
ARIYYGSGSSYYFDY

SEQ ID NO: 4069 - protein, 9 aa, Homo sapiens
  Light chain CDR3 for antibody 2035 (IGKV1D-13)
QQFNNYPYT

SEQ ID NO: 4070 - protein, 19 aa, Homo sapiens
  Heavy chain CDR3 for antibody 2035 (IGHV1-18)
ARDDILTGYSLYYYYGMDV

SEQ ID NO: 4071 - protein, 9 aa, Homo sapiens
  Light chain CDR3 for antibody 2036 (IGKV1-16)
QQYNSYPYT

SEQ ID NO: 4072 - protein, 13 aa, Homo sapiens
  Heavy chain CDR3 for antibody 2036 (IGHV4-39)
ARREVVGGRGFDY

SEQ ID NO: 4073 - protein, 9 aa, Homo sapiens
  Light chain CDR3 for antibody 2037 (IGKV1-6)
LQDYNYPYT

SEQ ID NO: 4074 - protein, 15 aa, Homo sapiens
  Heavy chain CDR3 for antibody 2037 (IGHV1-46)
ARGRFFDWLLSPFDY

SEQ ID NO: 4075 - protein, 10 aa, Homo sapiens
  Light chain CDR3 for antibody 2038 (IGKV1-17)
LQHNSYPMYT

SEQ ID NO: 4076 - protein, 13 aa, Homo sapiens
  Heavy chain CDR3 for antibody 2038 (IGHV3-33)
ARDYCGGDCYLDY

SEQ ID NO: 4077 - protein, 9 aa, Homo sapiens
  Light chain CDR3 for antibody 2039 (IGKV3D-20)
QQYGSSPYT

SEQ ID NO: 4078 - protein, 18 aa, Homo sapiens
  Heavy chain CDR3 for antibody 2039 (IGHV3-33)
ARERDYYGSGSYPDAFDI

SEQ ID NO: 4079 - protein, 9 aa, Homo sapiens
  Light chain CDR3 for antibody 2040 (IGKV1D-13)
QQFNNYPHT

SEQ ID NO: 4080 - protein, 13 aa, Homo sapiens
  Heavy chain CDR3 for antibody 2040 (IGHV3-11)
ARDEGYRGYVLDT

SEQ ID NO: 4081 - protein, 10 aa, Homo sapiens
  Light chain CDR3 for antibody 2041 (IGKV1-27)
QKYNSAPMYT

SEQ ID NO: 4082 - protein, 13 aa, Homo sapiens
  Heavy chain CDR3 for antibody 2041 (IGHV4-59)
ARDAGYSSSWFDY

SEQ ID NO: 4083 - protein, 9 aa, Homo sapiens
  Light chain CDR3 for antibody 2042 (IGKV6-21)
HQSSSLPYT

SEQ ID NO: 4084 - protein, 13 aa, Homo sapiens
  Heavy chain CDR3 for antibody 2042 (IGHV3-66)
ANTGDSYYYGFYV

SEQ ID NO: 4085 - protein, 9 aa, Homo sapiens
  Light chain CDR3 for antibody 2043 (IGKV1-39)
QQSYSTPLT

SEQ ID NO: 4086 - protein, 13 aa, Homo sapiens
  Heavy chain CDR3 for antibody 2043 (IGHV3-33)
ARRATLVRGVFDP

SEQ ID NO: 4087 - protein, 9 aa, Homo sapiens
  Light chain CDR3 for antibody 2044 (IGKV3-20)
QQYGSSPYT

SEQ ID NO: 4088 - protein, 15 aa, Homo sapiens
  Heavy chain CDR3 for antibody 2044 (IGHV3-23)
AKDGGWNYYYYGMDV

SEQ ID NO: 4089 - protein, 9 aa, Homo sapiens
  Light chain CDR3 for antibody 2045 (IGKV1-17)
LQHNSYPYT

SEQ ID NO: 4090 - protein, 18 aa, Homo sapiens
  Heavy chain CDR3 for antibody 2045 (IGHV3-33)
ARKGGYYSGSGSYRHFDF

SEQ ID NO: 4091 - protein, 8 aa, Homo sapiens
  Light chain CDR3 for antibody 2046 (IGKV3D-7)
QQDYNLLT

SEQ ID NO: 4092 - protein, 14 aa, Homo sapiens
  Heavy chain CDR3 for antibody 2046 (IGHV3-33)
ARGAAAGNFYGLDV

SEQ ID NO: 4093 - protein, 9 aa, Homo sapiens
  Light chain CDR3 for antibody 2047 (IGKV1-9)
QQYNSYPLT

SEQ ID NO: 4094 - protein, 11 aa, Homo sapiens
  Heavy chain CDR3 for antibody 2047 (IGHV4-39)
ARLLVGATTDY

SEQ ID NO: 4095 - protein, 9 aa, Homo sapiens
  Light chain CDR3 for antibody 2048 (IGKV1D-13)
QQFNNYPYT

SEQ ID NO: 4096 - protein, 13 aa, Homo sapiens
  Heavy chain CDR3 for antibody 2048 (IGHV4-59)
ARTMVRGVAPFDY

SEQ ID NO: 4097 - protein, 9 aa, Homo sapiens
  Light chain CDR3 for antibody 2049 (IGKV1D-16)
QQYNSYPLT

SEQ ID NO: 4098 - protein, 15 aa, Homo sapiens
  Heavy chain CDR3 for antibody 2049 (IGHV1-46)
ARGAVDDYYYYGMDV

SEQ ID NO: 4099 - protein, 9 aa, Homo sapiens
  Light chain CDR3 for antibody 2050 (IGKV1-6)
LQDYNYPRT

SEQ ID NO: 4100 - protein, 7 aa, Homo sapiens
  Heavy chain CDR3 for antibody 2050 (IGHV4-59)
AELFFDY

SEQ ID NO: 4101 - protein, 9 aa, Homo sapiens
  Light chain CDR3 for antibody 2051 (IGKV1-27)
QKYNSAPYT

SEQ ID NO: 4102 - protein, 14 aa, Homo sapiens
  Heavy chain CDR3 for antibody 2051 (IGHV3-33)
ARTTAAAGPRDFQH

SEQ ID NO: 4103 - protein, 9 aa, Homo sapiens
  Light chain CDR3 for antibody 2052 (IGKV3-11)
QQRSNWPPT

SEQ ID NO: 4104 - protein, 12 aa, Homo sapiens
  Heavy chain CDR3 for antibody 2052 (IGHV3-33)
ARGYFGSGYAHF

SEQ ID NO: 4105 - protein, 9 aa, Homo sapiens
  Light chain CDR3 for antibody 2053 (IGKV5-2)
LQHDNFPYT

SEQ ID NO: 4106 - protein, 18 aa, Homo sapiens
  Heavy chain CDR3 for antibody 2053 (IGHV1-8)
ARSRIAAAGIYYYYGMDV

SEQ ID NO: 4107 - protein, 9 aa, Homo sapiens
  Light chain CDR3 for antibody 2054 (IGKV5-2)
LQHDNFPWT

SEQ ID NO: 4108 - protein, 13 aa, Homo sapiens
  Heavy chain CDR3 for antibody 2054 (IGHV4-59)
ANRDYYGYYGMDV

SEQ ID NO: 4109 - protein, 9 aa, Homo sapiens
  Light chain CDR3 for antibody 2055 (IGKV1-27)
QKYNSAPYT

SEQ ID NO: 4110 - protein, 11 aa, Homo sapiens
  Heavy chain CDR3 for antibody 2055 (IGHV3-33)
AREAANWGFDY

SEQ ID NO: 4111 - protein, 9 aa, Homo sapiens
  Light chain CDR3 for antibody 2056 (IGKV1-27)
QKYNSAPYT

SEQ ID NO: 4112 - protein, 15 aa, Homo sapiens
  Heavy chain CDR3 for antibody 2056 (IGHV3-33)
ARDHLTGYYYYGMDV

SEQ ID NO: 4113 - protein, 9 aa, Homo sapiens
  Light chain CDR3 for antibody 2057 (IGKV1-27)
QKYNSAPYT

SEQ ID NO: 4114 - protein, 11 aa, Homo sapiens
  Heavy chain CDR3 for antibody 2057 (IGHV3-33)
ARARYTTGLDY

SEQ ID NO: 4115 - protein, 8 aa, Homo sapiens
  Light chain CDR3 for antibody 2058 (IGKV3D-7)
QQDYNLLT

SEQ ID NO: 4116 - protein, 13 aa, Homo sapiens
  Heavy chain CDR3 for antibody 2058 (IGHV3-33)
ARDWGYSHGYFDY

SEQ ID NO: 4117 - protein, 9 aa, Homo sapiens
  Light chain CDR3 for antibody 2059 (IGKV5-2)
LQHDNFPYT

SEQ ID NO: 4118 - protein, 12 aa, Homo sapiens
  Heavy chain CDR3 for antibody 2059 (IGHV3-13)
ARDRGYSGYFDY

SEQ ID NO: 4119 - protein, 9 aa, Homo sapiens
  Light chain CDR3 for antibody 2060 (IGKV6-21)
HQSSSLPYT

SEQ ID NO: 4120 - protein, 14 aa, Homo sapiens
  Heavy chain CDR3 for antibody 2060 (IGHV3-23)
AKDRYRGYEGLFDY

SEQ ID NO: 4121 - protein, 9 aa, Homo sapiens
  Light chain CDR3 for antibody 2061 (IGKV1-39)
QQSYSTPLT

SEQ ID NO: 4122 - protein, 14 aa, Homo sapiens
  Heavy chain CDR3 for antibody 2061 (IGHV3-33)
ARDKTYPLSYGMDV

SEQ ID NO: 4123 - protein, 9 aa, Homo sapiens
  Light chain CDR3 for antibody 2062 (IGKV1D-16)
QQYNSYPLT

SEQ ID NO: 4124 - protein, 10 aa, Homo sapiens
  Heavy chain CDR3 for antibody 2062 (IGHV3-33)
ARNILTPLDY

SEQ ID NO: 4125 - protein, 9 aa, Homo sapiens
  Light chain CDR3 for antibody 2063 (IGKV1-9)
QQYNSYPLT

SEQ ID NO: 4126 - protein, 10 aa, Homo sapiens
  Heavy chain CDR3 for antibody 2063 (IGHV4-39)
ARQLGNWFDP

SEQ ID NO: 4127 - protein, 9 aa, Homo sapiens
  Light chain CDR3 for antibody 2064 (IGKV1-9)
QQLNSYPLT

SEQ ID NO: 4128 - protein, 16 aa, Homo sapiens
  Heavy chain CDR3 for antibody 2064 (IGHV3-33)
ARDGSMVRRIHDAFDF

SEQ ID NO: 4129 - protein, 9 aa, Homo sapiens
  Light chain CDR3 for antibody 2065 (IGKV1D-16)
QQYNSYPLT

SEQ ID NO: 4130 - protein, 18 aa, Homo sapiens
  Heavy chain CDR3 for antibody 2065 (IGHV3-33)
ARGGVLYDILTGFYGMDV

SEQ ID NO: 4131 - protein, 9 aa, Homo sapiens
  Light chain CDR3 for antibody 2066 (IGKV6-21)
HQSSSLPYT

SEQ ID NO: 4132 - protein, 16 aa, Homo sapiens
  Heavy chain CDR3 for antibody 2066 (IGHV3-13)
ARDRSYESYYYYGMDV

SEQ ID NO: 4133 - protein, 9 aa, Homo sapiens
  Light chain CDR3 for antibody 2067 (IGKV1-6)
LQDYNYPYT

SEQ ID NO: 4134 - protein, 11 aa, Homo sapiens
  Heavy chain CDR3 for antibody 2067 (IGHV3-23)
AKEGTYFDIPH

SEQ ID NO: 4135 - protein, 9 aa, Homo sapiens
  Light chain CDR3 for antibody 2068 (IGKV1D-13)
QQFNNYPYT

SEQ ID NO: 4136 - protein, 21 aa, Homo sapiens
  Heavy chain CDR3 for antibody 2068 (IGHV3-33)
ARDEYYEIVTGYGYYHYGMDV

SEQ ID NO: 4137 - protein, 9 aa, Homo sapiens
  Light chain CDR3 for antibody 2069 (IGKV1-6)
LQDYNYPYT

SEQ ID NO: 4138 - protein, 15 aa, Homo sapiens
  Heavy chain CDR3 for antibody 2069 (IGHV4-39)
ARQGLVATIKGYFQH

SEQ ID NO: 4139 - protein, 9 aa, Homo sapiens
  Light chain CDR3 for antibody 2070 (IGKV3D-7)
QQDSNLPYT

SEQ ID NO: 4140 - protein, 13 aa, Homo sapiens
  Heavy chain CDR3 for antibody 2070 (IGHV4-59)
ARDAGYSSSWFDY

SEQ ID NO: 4141 - protein, 9 aa, Homo sapiens
  Light chain CDR3 for antibody 2071 (IGKV1-17)
LQHNSYPYT

SEQ ID NO: 4142 - protein, 10 aa, Homo sapiens
  Heavy chain CDR3 for antibody 2071 (IGHV3-33)
ARDLGWSFDH

SEQ ID NO: 4143 - protein, 9 aa, Homo sapiens
  Light chain CDR3 for antibody 2072 (IGKV5-2)
LQHDNFPYT

SEQ ID NO: 4144 - protein, 20 aa, Homo sapiens
  Heavy chain CDR3 for antibody 2072 (IGHV3-33)
AREDYYGSGSYYPAYNWFDP

SEQ ID NO: 4145 - protein, 9 aa, Homo sapiens
  Light chain CDR3 for antibody 2073 (IGKV1D-16)
QQYNSYPLT

SEQ ID NO: 4146 - protein, 20 aa, Homo sapiens
  Heavy chain CDR3 for antibody 2073 (IGHV3-33)
ARDWMVRGVIITDYYYGMDV

SEQ ID NO: 4147 - protein, 9 aa, Homo sapiens
  Light chain CDR3 for antibody 2074 (IGKV6-21)
HQSSSLPYT

SEQ ID NO: 4148 - protein, 15 aa, Homo sapiens
  Heavy chain CDR3 for antibody 2074 (IGHV3-23)
AKDLSSGWYAYFFDY

SEQ ID NO: 4149 - protein, 9 aa, Homo sapiens
  Light chain CDR3 for antibody 2075 (IGKV5-2)
LQHDNFPYT

SEQ ID NO: 4150 - protein, 16 aa, Homo sapiens
  Heavy chain CDR3 for antibody 2075 (IGHV3-33)
ARGDDILTHQYYGVDV

SEQ ID NO: 4151 - protein, 9 aa, Homo sapiens
  Light chain CDR3 for antibody 2076 (IGKV1D-13)
QQFNNYPRT

SEQ ID NO: 4152 - protein, 12 aa, Homo sapiens
  Heavy chain CDR3 for antibody 2076 (IGHV1-24)
ASDWAYYYGMDV

SEQ ID NO: 4153 - protein, 9 aa, Homo sapiens
  Light chain CDR3 for antibody 2077 (IGKV1-39)
QQSYSTPLT

SEQ ID NO: 4154 - protein, 18 aa, Homo sapiens
  Heavy chain CDR3 for antibody 2077 (IGHV3-23)
ARYHLYFGSGFGSDGMDV

SEQ ID NO: 4155 - protein, 9 aa, Homo sapiens
  Light chain CDR3 for antibody 2078 (IGKV2-30)
MQGTHWPLT

SEQ ID NO: 4156 - protein, 9 aa, Homo sapiens
  Heavy chain CDR3 for antibody 2078 (IGHV1-18)
ARGKDWFDP

SEQ ID NO: 4157 - protein, 9 aa, Homo sapiens
  Light chain CDR3 for antibody 2079 (IGKV4-1)
QQYYTTPYT

SEQ ID NO: 4158 - protein, 14 aa, Homo sapiens
  Heavy chain CDR3 for antibody 2079 (IGHV3-33)
AREGILTGYYPFDY

SEQ ID NO: 4159 - protein, 9 aa, Homo sapiens
  Light chain CDR3 for antibody 2080 (IGKV1-6)
LQDYKSPFT

SEQ ID NO: 4160 - protein, 13 aa, Homo sapiens
  Heavy chain CDR3 for antibody 2080 (IGHV4-59)
ARDAGYSSSWFDY

SEQ ID NO: 4161 - protein, 9 aa, Homo sapiens
  Light chain CDR3 for antibody 2081 (IGKV1-17)
LQHNSYPYT

SEQ ID NO: 4162 - protein, 15 aa, Homo sapiens
  Heavy chain CDR3 for antibody 2081 (IGHV3-23)
AKDRDYDFLSGPFDY

SEQ ID NO: 4163 - protein, 9 aa, Homo sapiens
  Light chain CDR3 for antibody 2082 (IGKV3-20)
QQYGSSPYT

SEQ ID NO: 4164 - protein, 21 aa, Homo sapiens
  Heavy chain CDR3 for antibody 2082 (IGHV4-59)
ARGPSRYDILTGYSYYYGMDV

SEQ ID NO: 4165 - protein, 9 aa, Homo sapiens
  Light chain CDR3 for antibody 2083 (IGKV5-2)
LQHDNFPYT

SEQ ID NO: 4166 - protein, 15 aa, Homo sapiens
  Heavy chain CDR3 for antibody 2083 (IGHV3-33)
ARDRVVRGVMGYFDY

SEQ ID NO: 4167 - protein, 9 aa, Homo sapiens
  Light chain CDR3 for antibody 2084 (IGKV1-6)
LQDFNYPRT

SEQ ID NO: 4168 - protein, 16 aa, Homo sapiens
  Heavy chain CDR3 for antibody 2084 (IGHV4-59)
ARGRYFDWLLGDVFDI

SEQ ID NO: 4169 - protein, 9 aa, Homo sapiens
  Light chain CDR3 for antibody 2085 (IGKV5-2)
LQHDNFPYT

SEQ ID NO: 4170 - protein, 11 aa, Homo sapiens
  Heavy chain CDR3 for antibody 2085 (IGHV3-33)
ARDRATATVDY

SEQ ID NO: 4171 - protein, 9 aa, Homo sapiens
  Light chain CDR3 for antibody 2086 (IGKV1-39)
QQSYRTPLT

SEQ ID NO: 4172 - protein, 17 aa, Homo sapiens
  Heavy chain CDR3 for antibody 2086 (IGHV3-33)
ARGFSGYDGYYYYGMDV

SEQ ID NO: 4173 - protein, 9 aa, Homo sapiens
  Light chain CDR3 for antibody 2087 (IGKV5-2)
LQHDNFPYT

SEQ ID NO: 4174 - protein, 17 aa, Homo sapiens
  Heavy chain CDR3 for antibody 2087 (IGHV3-33)
ARGGAAAGPYLYYGLDV

SEQ ID NO: 4175 - protein, 8 aa, Homo sapiens
  Light chain CDR3 for antibody 2088 (IGKV1D-13)
QQFNNYYT

SEQ ID NO: 4176 - protein, 9 aa, Homo sapiens
  Heavy chain CDR3 for antibody 2088 (IGHV1-18)
ARGKDWFDP

SEQ ID NO: 4177 - protein, 9 aa, Homo sapiens
  Light chain CDR3 for antibody 2089 (IGKV1-6)
LQDYNYPNT

SEQ ID NO: 4178 - protein, 7 aa, Homo sapiens
  Heavy chain CDR3 for antibody 2089 (IGHV1-46)
AREGGDY

SEQ ID NO: 4179 - protein, 9 aa, Homo sapiens
  Light chain CDR3 for antibody 2090 (IGKV1-39)
QQSYRTPLT

SEQ ID NO: 4180 - protein, 17 aa, Homo sapiens
  Heavy chain CDR3 for antibody 2090 (IGHV3-33)
ARAYYDILTGYSYYFDY

SEQ ID NO: 4181 - protein, 9 aa, Homo sapiens
  Light chain CDR3 for antibody 2091 (IGKV1-9)
QQLNSYPLT

SEQ ID NO: 4182 - protein, 10 aa, Homo sapiens
  Heavy chain CDR3 for antibody 2091 (IGHV3-30)
ARDGLESFDY

SEQ ID NO: 4183 - protein, 9 aa, Homo sapiens
  Light chain CDR3 for antibody 2092 (IGKV1-39)
QQSYRTPLT

SEQ ID NO: 4184 - protein, 21 aa, Homo sapiens
  Heavy chain CDR3 for antibody 2092 (IGHV3-23)
AKDIDYYGSGSYPLYYYGMDV

SEQ ID NO: 4185 - protein, 9 aa, Homo sapiens
  Light chain CDR3 for antibody 2093 (IGKV1-27)
QKYNSAPYT

SEQ ID NO: 4186 - protein, 8 aa, Homo sapiens
  Heavy chain CDR3 for antibody 2093 (IGHV3-23)
AKETGNNY

SEQ ID NO: 4187 - protein, 9 aa, Homo sapiens
  Light chain CDR3 for antibody 2094 (IGKV1-27)
QKYNSAPYT

SEQ ID NO: 4188 - protein, 15 aa, Homo sapiens
  Heavy chain CDR3 for antibody 2094 (IGHV3-33)
ARRICSGGSCSLFDY

SEQ ID NO: 4189 - protein, 9 aa, Homo sapiens
  Light chain CDR3 for antibody 2095 (IGKV1-39)
QQSYRTPLT

SEQ ID NO: 4190 - protein, 14 aa, Homo sapiens
  Heavy chain CDR3 for antibody 2095 (IGHV3-11)
ARAISGSSYWYFDL

SEQ ID NO: 4191 - protein, 9 aa, Homo sapiens
  Light chain CDR3 for antibody 2096 (IGKV1-6)
LQDYNYPYT

SEQ ID NO: 4192 - protein, 11 aa, Homo sapiens
  Heavy chain CDR3 for antibody 2096 (IGHV3-33)
ARDRSTGWLDY

SEQ ID NO: 4193 - protein, 9 aa, Homo sapiens
  Light chain CDR3 for antibody 2097 (IGKV1-27)
QKYNSAPYT

SEQ ID NO: 4194 - protein, 16 aa, Homo sapiens
  Heavy chain CDR3 for antibody 2097 (IGHV3-33)
ARGYDMLTGDYYGMDV

SEQ ID NO: 4195 - protein, 9 aa, Homo sapiens
  Light chain CDR3 for antibody 2098 (IGKV1-6)
LQDHKHPFT

SEQ ID NO: 4196 - protein, 16 aa, Homo sapiens
  Heavy chain CDR3 for antibody 2098 (IGHV3-15)
AADLGDHADAYATLDN

SEQ ID NO: 4197 - protein, 8 aa, Homo sapiens
  Light chain CDR3 for antibody 2099 (IGKV3D-7)
QQDYNLLT

SEQ ID NO: 4198 - protein, 12 aa, Homo sapiens
  Heavy chain CDR3 for antibody 2099 (IGHV1-18)
ARILFYGDYFDY

SEQ ID NO: 4199 - protein, 8 aa, Homo sapiens
  Light chain CDR3 for antibody 2100 (IGKV1D-13)
QQFNNYYT

SEQ ID NO: 4200 - protein, 12 aa, Homo sapiens
  Heavy chain CDR3 for antibody 2100 (IGHV1-46)
ARGLTGDHAVDI

SEQ ID NO: 4201 - protein, 9 aa, Homo sapiens
  Light chain CDR3 for antibody 2101 (IGKV1-9)
QQLKSYLYT

SEQ ID NO: 4202 - protein, 17 aa, Homo sapiens
  Heavy chain CDR3 for antibody 2101 (IGHV1-18)
ARDRAFTMVRGVPPFDY

SEQ ID NO: 4203 - protein, 9 aa, Homo sapiens
  Light chain CDR3 for antibody 2102 (IGKV1-16)
QQYNSYPYT

SEQ ID NO: 4204 - protein, 9 aa, Homo sapiens
  Heavy chain CDR3 for antibody 2102 (IGHV4-59)
AREGGSGSL

SEQ ID NO: 4205 - protein, 9 aa, Homo sapiens
  Light chain CDR3 for antibody 2103 (IGKV1D-16)
QQYNSYPYT

SEQ ID NO: 4206 - protein, 13 aa, Homo sapiens
  Heavy chain CDR3 for antibody 2103 (IGHV3-30)
ARVGDSVMVPFDY

SEQ ID NO: 4207 - protein, 9 aa, Homo sapiens
  Light chain CDR3 for antibody 2104 (IGKV3-20)
QQYGSSPYT

SEQ ID NO: 4208 - protein, 11 aa, Homo sapiens
  Heavy chain CDR3 for antibody 2104 (IGHV3-33)
ARGTTVTHFDY

SEQ ID NO: 4209 - protein, 9 aa, Homo sapiens
  Light chain CDR3 for antibody 2105 (IGKV1-39)
QQSYSTPLT

SEQ ID NO: 4210 - protein, 11 aa, Homo sapiens
  Heavy chain CDR3 for antibody 2105 (IGHV3-33)
ARDTWDDYFDY

SEQ ID NO: 4211 - protein, 9 aa, Homo sapiens
  Light chain CDR3 for antibody 2106 (IGKV1D-16)
QQYNSYPLT

SEQ ID NO: 4212 - protein, 13 aa, Homo sapiens
  Heavy chain CDR3 for antibody 2106 (IGHV3-23)
AKDRGGSYSYFDF

SEQ ID NO: 4213 - protein, 9 aa, Homo sapiens
  Light chain CDR3 for antibody 2107 (IGKV5-2)
LQHDNFPYT

SEQ ID NO: 4214 - protein, 12 aa, Homo sapiens
  Heavy chain CDR3 for antibody 2107 (IGHV3-23)
AKEGLGSDYEPY

SEQ ID NO: 4215 - protein, 9 aa, Homo sapiens
  Light chain CDR3 for antibody 2108 (IGKV3-11)
QQRSNWPLT

SEQ ID NO: 4216 - protein, 14 aa, Homo sapiens
  Heavy chain CDR3 for antibody 2108 (IGHV3-33)
ARDRIAAASSDFDC

SEQ ID NO: 4217 - protein, 9 aa, Homo sapiens
  Light chain CDR3 for antibody 2109 (IGKV6-21)
HQSSSLPYT

SEQ ID NO: 4218 - protein, 13 aa, Homo sapiens
  Heavy chain CDR3 for antibody 2109 (IGHV3-33)
ARGVLWFGELFDY

SEQ ID NO: 4219 - protein, 9 aa, Homo sapiens
  Light chain CDR3 for antibody 2110 (IGKV6-21)
HQSSSLPYT

SEQ ID NO: 4220 - protein, 17 aa, Homo sapiens
  Heavy chain CDR3 for antibody 2110 (IGHV4-39)
ARQGWYYGSGSSLLFDY

SEQ ID NO: 4221 - protein, 9 aa, Homo sapiens
  Light chain CDR3 for antibody 2111 (IGKV1-39)
QQSYSTPLT

SEQ ID NO: 4222 - protein, 17 aa, Homo sapiens
  Heavy chain CDR3 for antibody 2111 (IGHV3-33)
ARGEQWLGYYYYYGMDV

SEQ ID NO: 4223 - protein, 9 aa, Homo sapiens
  Light chain CDR3 for antibody 2112 (IGKV6-21)
HQSSSLPYT

SEQ ID NO: 4224 - protein, 17 aa, Homo sapiens
  Heavy chain CDR3 for antibody 2112 (IGHV3-33)
ARDLIGPLSSSWYPFDY

SEQ ID NO: 4225 - protein, 9 aa, Homo sapiens
  Light chain CDR3 for antibody 2113 (IGKV2D-28)
MQVLQTPFT

SEQ ID NO: 4226 - protein, 18 aa, Homo sapiens
  Heavy chain CDR3 for antibody 2113 (IGHV4-59)
AREGDYVWGSYRPNWFDP

SEQ ID NO: 4227 - protein, 9 aa, Homo sapiens
  Light chain CDR3 for antibody 2114 (IGKV5-2)
LQHDNFPWT

SEQ ID NO: 4228 - protein, 12 aa, Homo sapiens
  Heavy chain CDR3 for antibody 2114 (IGHV4-39)
ARREVILGAFDY

SEQ ID NO: 4229 - protein, 9 aa, Homo sapiens
  Light chain CDR3 for antibody 2115 (IGKV1D-16)
QQYNSYPYT

SEQ ID NO: 4230 - protein, 9 aa, Homo sapiens
  Heavy chain CDR3 for antibody 2115 (IGHV1-18)
ARGGWGFEY

SEQ ID NO: 4231 - protein, 9 aa, Homo sapiens
  Light chain CDR3 for antibody 2116 (IGKV6-21)
HQSSSLPYT

SEQ ID NO: 4232 - protein, 14 aa, Homo sapiens
  Heavy chain CDR3 for antibody 2116 (IGHV1-46)
ARDGVGAKEGGFDY

SEQ ID NO: 4233 - protein, 9 aa, Homo sapiens
  Light chain CDR3 for antibody 2117 (IGKV1-39)
QQSYSTPLT

SEQ ID NO: 4234 - protein, 10 aa, Homo sapiens
  Heavy chain CDR3 for antibody 2117 (IGHV3-23)
AKEQWLVLDY

SEQ ID NO: 4235 - protein, 9 aa, Homo sapiens
  Light chain CDR3 for antibody 2118 (IGKV1-6)
LQDYNYPYT

SEQ ID NO: 4236 - protein, 12 aa, Homo sapiens
  Heavy chain CDR3 for antibody 2118 (IGHV3-33)
ARGGIAVDVCDI

SEQ ID NO: 4237 - protein, 9 aa, Homo sapiens
  Light chain CDR3 for antibody 2119 (IGKV6-21)
HQSSSLPYT

SEQ ID NO: 4238 - protein, 13 aa, Homo sapiens
  Heavy chain CDR3 for antibody 2119 (IGHV1-2)
ARDGVRGSFGMDV

SEQ ID NO: 4239 - protein, 9 aa, Homo sapiens
  Light chain CDR3 for antibody 2120 (IGKV1D-16)
QQYNSYPLT

SEQ ID NO: 4240 - protein, 19 aa, Homo sapiens
  Heavy chain CDR3 for antibody 2120 (IGHV3-23)
AKDGRSGSYDYYYYYGMDV

SEQ ID NO: 4241 - protein, 9 aa, Homo sapiens
  Light chain CDR3 for antibody 2121 (IGKV1D-16)
QQYNSYPYT

SEQ ID NO: 4242 - protein, 12 aa, Homo sapiens
  Heavy chain CDR3 for antibody 2121 (IGHV4-39)
ARHGSGSSYFDY

SEQ ID NO: 4243 - protein, 9 aa, Homo sapiens
  Light chain CDR3 for antibody 2122 (IGKV5-2)
LQHDNFPWT

SEQ ID NO: 4244 - protein, 17 aa, Homo sapiens
  Heavy chain CDR3 for antibody 2122 (IGHV4-59)
AREGADSGIYYHWYFDL

SEQ ID NO: 4245 - protein, 9 aa, Homo sapiens
  Light chain CDR3 for antibody 2123 (IGKV3-20)
QQYGSSPYT

SEQ ID NO: 4246 - protein, 17 aa, Homo sapiens
  Heavy chain CDR3 for antibody 2123 (IGHV4-59)
AREGADSGIYYHWYFDL

SEQ ID NO: 4247 - protein, 9 aa, Homo sapiens
  Light chain CDR3 for antibody 2124 (IGKV2-30)
MQGTHWPLT

SEQ ID NO: 4248 - protein, 12 aa, Homo sapiens
  Heavy chain CDR3 for antibody 2124 (IGHV1-18)
ARILFYGDYFDY

SEQ ID NO: 4249 - protein, 9 aa, Homo sapiens
  Light chain CDR3 for antibody 2125 (IGKV1-39)
QQSYSTPLT

SEQ ID NO: 4250 - protein, 19 aa, Homo sapiens
  Heavy chain CDR3 for antibody 2125 (IGHV1-18)
ARDDILTGYSLYYYYGMDV

SEQ ID NO: 4251 - protein, 9 aa, Homo sapiens
  Light chain CDR3 for antibody 2126 (IGKV1-17)
LQHNSYPYT

SEQ ID NO: 4252 - protein, 18 aa, Homo sapiens
  Heavy chain CDR3 for antibody 2126 (IGHV3-23)
AKVGDFFASGNYWDYFDY

SEQ ID NO: 4253 - protein, 9 aa, Homo sapiens
  Light chain CDR3 for antibody 2127 (IGKV6-21)
HQSSSLPYT

SEQ ID NO: 4254 - protein, 13 aa, Homo sapiens
  Heavy chain CDR3 for antibody 2127 (IGHV3-23)
AKDRGGSYSYFDF

SEQ ID NO: 4255 - protein, 9 aa, Homo sapiens
  Light chain CDR3 for antibody 2128 (IGKV5-2)
LQHDNFPYT

SEQ ID NO: 4256 - protein, 13 aa, Homo sapiens
  Heavy chain CDR3 for antibody 2128 (IGHV3-33)
ARQSSGWFDAFDI

SEQ ID NO: 4257 - protein, 9 aa, Homo sapiens
  Light chain CDR3 for antibody 2129 (IGKV3D-7)
QQDYNLPYT

SEQ ID NO: 4258 - protein, 14 aa, Homo sapiens
  Heavy chain CDR3 for antibody 2129 (IGHV4-39)
ARRGVIVPAAGFDP

SEQ ID NO: 4259 - protein, 9 aa, Homo sapiens
  Light chain CDR3 for antibody 2130 (IGKV3-20)
QQYGSSPYT

SEQ ID NO: 4260 - protein, 19 aa, Homo sapiens
  Heavy chain CDR3 for antibody 2130 (IGHV3-33)
AREDYYGSGSYYNEDWFDP

SEQ ID NO: 4261 - protein, 9 aa, Homo sapiens
  Light chain CDR3 for antibody 2131 (IGKV1-6)
QQEYNYPLT

SEQ ID NO: 4262 - protein, 12 aa, Homo sapiens
  Heavy chain CDR3 for antibody 2131 (IGHV1-46)
ARGLTGDHAVDI

SEQ ID NO: 4263 - protein, 9 aa, Homo sapiens
  Light chain CDR3 for antibody 2132 (IGKV6-21)
HQSSSLPYT

SEQ ID NO: 4264 - protein, 20 aa, Homo sapiens
  Heavy chain CDR3 for antibody 2132 (IGHV1-18)
AREVGIAVAGTLYYYYGMDV

SEQ ID NO: 4265 - protein, 9 aa, Homo sapiens
  Light chain CDR3 for antibody 2133 (IGKV5-2)
LQHDNFPYT

SEQ ID NO: 4266 - protein, 7 aa, Homo sapiens
  Heavy chain CDR3 for antibody 2133 (IGHV3-33)
ARELVDY

SEQ ID NO: 4267 - protein, 9 aa, Homo sapiens
  Light chain CDR3 for antibody 2134 (IGKV1D-16)
QQYNSYPYT

SEQ ID NO: 4268 - protein, 14 aa, Homo sapiens
  Heavy chain CDR3 for antibody 2134 (IGHV3-20)
ARDRGSSFFDAFDI

SEQ ID NO: 4269 - protein, 9 aa, Homo sapiens
  Light chain CDR3 for antibody 2135 (IGKV1D-13)
QQFNNYPHT

SEQ ID NO: 4270 - protein, 17 aa, Homo sapiens
  Heavy chain CDR3 for antibody 2135 (IGHV3-33)
VREGGLLWVGELSLFDY

SEQ ID NO: 4271 - protein, 9 aa, Homo sapiens
  Light chain CDR3 for antibody 2136 (IGKV1-39)
QQSYSTPLT

SEQ ID NO: 4272 - protein, 18 aa, Homo sapiens
  Heavy chain CDR3 for antibody 2136 (IGHV3-33)
ARDRYYDILTGYYMGFDY

SEQ ID NO: 4273 - protein, 9 aa, Homo sapiens
  Light chain CDR3 for antibody 2137 (IGKV5-2)
LQHDNFPWT

SEQ ID NO: 4274 - protein, 21 aa, Homo sapiens
  Heavy chain CDR3 for antibody 2137 (IGHV4-59)
AAGVLLWFGEPNYYYYYGMDV

SEQ ID NO: 4275 - protein, 9 aa, Homo sapiens
  Light chain CDR3 for antibody 2138 (IGKV1D-17)
LQHNSYPYT

SEQ ID NO: 4276 - protein, 18 aa, Homo sapiens
  Heavy chain CDR3 for antibody 2138 (IGHV3-23)
AKDLYYYGSGSYYPVFDY

SEQ ID NO: 4277 - protein, 9 aa, Homo sapiens
  Light chain CDR3 for antibody 2139 (IGKV1D-16)
QQYYSYPRT

SEQ ID NO: 4278 - protein, 13 aa, Homo sapiens
  Heavy chain CDR3 for antibody 2139 (IGHV4-34)
ASNFYYYYYGMDV

SEQ ID NO: 4279 - protein, 9 aa, Homo sapiens
  Light chain CDR3 for antibody 2140 (IGKV3-20)
QQYGSSPYT

SEQ ID NO: 4280 - protein, 13 aa, Homo sapiens
  Heavy chain CDR3 for antibody 2140 (IGHV3-33)
VSTGDSYYYVMDV

SEQ ID NO: 4281 - protein, 9 aa, Homo sapiens
  Light chain CDR3 for antibody 2141 (IGKV3-11)
QQRSNWPYT

SEQ ID NO: 4282 - protein, 13 aa, Homo sapiens
  Heavy chain CDR3 for antibody 2141 (IGHV3-33)
ARDQRYSSGWYDY

SEQ ID NO: 4283 - protein, 9 aa, Homo sapiens
  Light chain CDR3 for antibody 2142 (IGKV1-27)
QKYNSAPYT

SEQ ID NO: 4284 - protein, 12 aa, Homo sapiens
  Heavy chain CDR3 for antibody 2142 (IGHV3-33)
ASEYFGSGSAHY

SEQ ID NO: 4285 - protein, 9 aa, Homo sapiens
  Light chain CDR3 for antibody 2143 (IGKV1-16)
QQYNSYPYT

SEQ ID NO: 4286 - protein, 15 aa, Homo sapiens
  Heavy chain CDR3 for antibody 2143 (IGHV4-39)
ARHSGYSSGWYPFDY

SEQ ID NO: 4287 - protein, 9 aa, Homo sapiens
  Light chain CDR3 for antibody 2144 (IGKV3D-7)
QQDYEFPIT

SEQ ID NO: 4288 - protein, 13 aa, Homo sapiens
  Heavy chain CDR3 for antibody 2144 (IGHV4-59)
ARDAGYSSSWFDY

SEQ ID NO: 4289 - protein, 9 aa, Homo sapiens
  Light chain CDR3 for antibody 2145 (IGKV3-20)
QQYGGSLFT

SEQ ID NO: 4290 - protein, 13 aa, Homo sapiens
  Heavy chain CDR3 for antibody 2145 (IGHV3-33)
TRTDYYFYYGMDV

SEQ ID NO: 4291 - protein, 9 aa, Homo sapiens
  Light chain CDR3 for antibody 2146 (IGKV3-11)
QQRSNWPWT

SEQ ID NO: 4292 - protein, 18 aa, Homo sapiens
  Heavy chain CDR3 for antibody 2146 (IGHV4-59)
AREGHYYTSGSYYKAFDY

SEQ ID NO: 4293 - protein, 8 aa, Homo sapiens
  Light chain CDR3 for antibody 2147 (IGKV6-21)
HQSSSLPT

SEQ ID NO: 4294 - protein, 16 aa, Homo sapiens
  Heavy chain CDR3 for antibody 2147 (IGHV3-23)
AKEGMVLRYFDWLWDY

SEQ ID NO: 4295 - protein, 7 aa, Homo sapiens
  Light chain CDR3 for antibody 2148 (IGKV1-5)
QQYNTWT

SEQ ID NO: 4296 - protein, 12 aa, Homo sapiens
  Heavy chain CDR3 for antibody 2148 (IGHV3-74)
ARDKGGRNGMDV

SEQ ID NO: 4297 - protein, 9 aa, Homo sapiens
  Light chain CDR3 for antibody 2149 (IGKV1D-13)
QQFNNYPYT

SEQ ID NO: 4298 - protein, 18 aa, Homo sapiens
  Heavy chain CDR3 for antibody 2149 (IGHV3-33)
AREGYDILTGDYRLGFDY

SEQ ID NO: 4299 - protein, 9 aa, Homo sapiens
  Light chain CDR3 for antibody 2150 (IGKV1-39)
QQSYRTPLT

SEQ ID NO: 4300 - protein, 14 aa, Homo sapiens
  Heavy chain CDR3 for antibody 2150 (IGHV1-46)
ARRGIVGALDAFDI

SEQ ID NO: 4301 - protein, 9 aa, Homo sapiens
  Light chain CDR3 for antibody 2151 (IGKV3-15)
QQYNNWPLT

SEQ ID NO: 4302 - protein, 9 aa, Homo sapiens
  Heavy chain CDR3 for antibody 2151 (IGHV1-18)
ARGKDWFDP

SEQ ID NO: 4303 - protein, 9 aa, Homo sapiens
  Light chain CDR3 for antibody 2152 (IGKV1D-16)
QQYNSYPLT

SEQ ID NO: 4304 - protein, 19 aa, Homo sapiens
  Heavy chain CDR3 for antibody 2152 (IGHV3-33)
AREDYYGSGSYYNEDWFDP

SEQ ID NO: 4305 - protein, 9 aa, Homo sapiens
  Light chain CDR3 for antibody 2153 (IGKV1-39)
QQSYRTPLT

SEQ ID NO: 4306 - protein, 17 aa, Homo sapiens
  Heavy chain CDR3 for antibody 2153 (IGHV3-23)
AKDGIGELSYYYYGMDV

SEQ ID NO: 4307 - protein, 9 aa, Homo sapiens
  Light chain CDR3 for antibody 2154 (IGKV1D-16)
QQYITYPYT

SEQ ID NO: 4308 - protein, 17 aa, Homo sapiens
  Heavy chain CDR3 for antibody 2154 (IGHV3-64)
ARERYYGSGSYYNWFDP

SEQ ID NO: 4309 - protein, 9 aa, Homo sapiens
  Light chain CDR3 for antibody 2155 (IGKV1-27)
QKYNSAPYT

SEQ ID NO: 4310 - protein, 16 aa, Homo sapiens
  Heavy chain CDR3 for antibody 2155 (IGHV3-33)
ARAVYYGSGSSLIMDV

SEQ ID NO: 4311 - protein, 9 aa, Homo sapiens
  Light chain CDR3 for antibody 2156 (IGKV2-30)
MQGTHWPLT

SEQ ID NO: 4312 - protein, 12 aa, Homo sapiens
  Heavy chain CDR3 for antibody 2156 (IGHV1-46)
ARGLTGDHAVDI

SEQ ID NO: 4313 - protein, 9 aa, Homo sapiens
  Light chain CDR3 for antibody 2157 (IGKV1-17)
LQHNSYPYT

SEQ ID NO: 4314 - protein, 12 aa, Homo sapiens
  Heavy chain CDR3 for antibody 2157 (IGHV3-33)
ARDLVRGIRMDV

SEQ ID NO: 4315 - protein, 9 aa, Homo sapiens
  Light chain CDR3 for antibody 2158 (IGKV5-2)
LQHDNFPYT

SEQ ID NO: 4316 - protein, 17 aa, Homo sapiens
  Heavy chain CDR3 for antibody 2158 (IGHV3-33)
ARGDGDILTGYYEWFDP

SEQ ID NO: 4317 - protein, 9 aa, Homo sapiens
  Light chain CDR3 for antibody 2159 (IGKV1-39)
QQSYSTPLT

SEQ ID NO: 4318 - protein, 12 aa, Homo sapiens
  Heavy chain CDR3 for antibody 2159 (IGHV3-33)
AREGDILTGYSL

SEQ ID NO: 4319 - protein, 9 aa, Homo sapiens
  Light chain CDR3 for antibody 2160 (IGKV5-2)
LQHDNFPWT

SEQ ID NO: 4320 - protein, 13 aa, Homo sapiens
  Heavy chain CDR3 for antibody 2160 (IGHV3-23)
ASTGDSYYYGMDV

SEQ ID NO: 4321 - protein, 9 aa, Homo sapiens
  Light chain CDR3 for antibody 2161 (IGKV1-39)
QQSYSTPLT

SEQ ID NO: 4322 - protein, 21 aa, Homo sapiens
  Heavy chain CDR3 for antibody 2161 (IGHV3-33)
ARKRLYDILTGYYKAYYGMDV

SEQ ID NO: 4323 - protein, 9 aa, Homo sapiens
  Light chain CDR3 for antibody 2162 (IGKV1-17)
LQHNSYPYT

SEQ ID NO: 4324 - protein, 19 aa, Homo sapiens
  Heavy chain CDR3 for antibody 2162 (IGHV4-59)
ARDRVVGATTYYYYYGMDV

SEQ ID NO: 4325 - protein, 9 aa, Homo sapiens
  Light chain CDR3 for antibody 2163 (IGKV1D-13)
QQFNNYPHT

SEQ ID NO: 4326 - protein, 15 aa, Homo sapiens
  Heavy chain CDR3 for antibody 2163 (IGHV1-18)
ARGYCSSTSCYYFDY

SEQ ID NO: 4327 - protein, 9 aa, Homo sapiens
  Light chain CDR3 for antibody 2164 (IGKV6-21)
HQSSSLPYT

SEQ ID NO: 4328 - protein, 14 aa, Homo sapiens
  Heavy chain CDR3 for antibody 2164 (IGHV3-33)
ARRGYSGYDWYFDY

SEQ ID NO: 4329 - protein, 9 aa, Homo sapiens
  Light chain CDR3 for antibody 2165 (IGKV1-27)
QKYNSAPYT

SEQ ID NO: 4330 - protein, 12 aa, Homo sapiens
  Heavy chain CDR3 for antibody 2165 (IGHV3-33)
AREGDILTGYSL

SEQ ID NO: 4331 - protein, 9 aa, Homo sapiens
  Light chain CDR3 for antibody 2166 (IGKV1-27)
QKYNSAPYT

SEQ ID NO: 4332 - protein, 16 aa, Homo sapiens
  Heavy chain CDR3 for antibody 2166 (IGHV4-59)
ARGRYFEWLLGDVFDI

SEQ ID NO: 4333 - protein, 9 aa, Homo sapiens
  Light chain CDR3 for antibody 2167 (IGKV1D-16)
QQYNSYPLT

SEQ ID NO: 4334 - protein, 18 aa, Homo sapiens
  Heavy chain CDR3 for antibody 2167 (IGHV3-33)
ARDQGIVVLPGAPWYFDP

SEQ ID NO: 4335 - protein, 9 aa, Homo sapiens
  Light chain CDR3 for antibody 2168 (IGKV5-2)
LQHDNFPWT

SEQ ID NO: 4336 - protein, 11 aa, Homo sapiens
  Heavy chain CDR3 for antibody 2168 (IGHV4-59)
ARETGDDAFDI

SEQ ID NO: 4337 - protein, 9 aa, Homo sapiens
  Light chain CDR3 for antibody 2169 (IGKV3-11)
QQRSNWPYT

SEQ ID NO: 4338 - protein, 13 aa, Homo sapiens
  Heavy chain CDR3 for antibody 2169 (IGHV3-33)
ARDWGYSHGYFDY

SEQ ID NO: 4339 - protein, 9 aa, Homo sapiens
  Light chain CDR3 for antibody 2170 (IGKV5-2)
LQHDKFPYT

SEQ ID NO: 4340 - protein, 14 aa, Homo sapiens
  Heavy chain CDR3 for antibody 2170 (IGHV3-33)
ARAISGSSYWYFDL

SEQ ID NO: 4341 - protein, 9 aa, Homo sapiens
  Light chain CDR3 for antibody 2171 (IGKV1-17)
LQHNSYPYT

SEQ ID NO: 4342 - protein, 17 aa, Homo sapiens
  Heavy chain CDR3 for antibody 2171 (IGHV3-33)
AREGYYYGSGSYHFFDY

SEQ ID NO: 4343 - protein, 9 aa, Homo sapiens
  Light chain CDR3 for antibody 2172 (IGKV5-2)
LQHDNFPWT

SEQ ID NO: 4344 - protein, 16 aa, Homo sapiens
  Heavy chain CDR3 for antibody 2172 (IGHV1-18)
ARYFDWLLRDYYGMDV

SEQ ID NO: 4345 - protein, 9 aa, Homo sapiens
  Light chain CDR3 for antibody 2173 (IGKV1D-13)
QQFNNYPHT

SEQ ID NO: 4346 - protein, 16 aa, Homo sapiens
  Heavy chain CDR3 for antibody 2173 (IGHV3-23)
AKEGEVLRYFDWLFNY

SEQ ID NO: 4347 - protein, 9 aa, Homo sapiens
  Light chain CDR3 for antibody 2174 (IGKV3D-7)
QQDYNLPLT

SEQ ID NO: 4348 - protein, 13 aa, Homo sapiens
  Heavy chain CDR3 for antibody 2174 (IGHV3-33)
ARDQRYSSGWYDY

SEQ ID NO: 4349 - protein, 9 aa, Homo sapiens
  Light chain CDR3 for antibody 2175 (IGKV1-6)
LQDYNYPWT

SEQ ID NO: 4350 - protein, 6 aa, Homo sapiens
  Heavy chain CDR3 for antibody 2175 (IGHV3-33)
AREGDY

SEQ ID NO: 4351 - protein, 9 aa, Homo sapiens
  Light chain CDR3 for antibody 2176 (IGKV1-39)
QQSYSTPLT

SEQ ID NO: 4352 - protein, 18 aa, Homo sapiens
  Heavy chain CDR3 for antibody 2176 (IGHV3-33)
ARGLLWFGVSYYYYGMDV

SEQ ID NO: 4353 - protein, 9 aa, Homo sapiens
  Light chain CDR3 for antibody 2177 (IGKV3-20)
QQYGSSPYT

SEQ ID NO: 4354 - protein, 17 aa, Homo sapiens
  Heavy chain CDR3 for antibody 2177 (IGHV3-33)
ARVRGVIEGYYYYGMDV

SEQ ID NO: 4355 - protein, 9 aa, Homo sapiens
  Light chain CDR3 for antibody 2178 (IGKV1-39)
QQSYSTPLT

SEQ ID NO: 4356 - protein, 12 aa, Homo sapiens
  Heavy chain CDR3 for antibody 2178 (IGHV4-39)
ARQMVREGWFDP

SEQ ID NO: 4357 - protein, 9 aa, Homo sapiens
  Light chain CDR3 for antibody 2179 (IGKV1D-13)
QQFNNYPYT

SEQ ID NO: 4358 - protein, 10 aa, Homo sapiens
  Heavy chain CDR3 for antibody 2179 (IGHV3-33)
ARDVVVYFDY

SEQ ID NO: 4359 - protein, 9 aa, Homo sapiens
  Light chain CDR3 for antibody 2180 (IGKV1-17)
LQHNSYPYT

SEQ ID NO: 4360 - protein, 14 aa, Homo sapiens
  Heavy chain CDR3 for antibody 2180 (IGHV3-33)
AREGYSSGWDYFDH

SEQ ID NO: 4361 - protein, 9 aa, Homo sapiens
  Light chain CDR3 for antibody 2181 (IGKV3D-20)
QQYGSSPYT

SEQ ID NO: 4362 - protein, 16 aa, Homo sapiens
  Heavy chain CDR3 for antibody 2181 (IGHV3-33)
ARDGSMVRRIHDAFDF

SEQ ID NO: 4363 - protein, 9 aa, Homo sapiens
  Light chain CDR3 for antibody 2182 (IGKV1-6)
LQDYNYPWT

SEQ ID NO: 4364 - protein, 13 aa, Homo sapiens
  Heavy chain CDR3 for antibody 2182 (IGHV3-23)
AKERLRYFDWLAY

SEQ ID NO: 4365 - protein, 9 aa, Homo sapiens
  Light chain CDR3 for antibody 2183 (IGKV6-21)
HQSSSLPYT

SEQ ID NO: 4366 - protein, 18 aa, Homo sapiens
  Heavy chain CDR3 for antibody 2183 (IGHV3-30)
ARDRHHDILTGYSDAFEI

SEQ ID NO: 4367 - protein, 9 aa, Homo sapiens
  Light chain CDR3 for antibody 2184 (IGKV6-21)
HQSSSLPLT

SEQ ID NO: 4368 - protein, 18 aa, Homo sapiens
  Heavy chain CDR3 for antibody 2184 (IGHV4-59)
ASMVRGVIMAYDYYGMDV

SEQ ID NO: 4369 - protein, 9 aa, Homo sapiens
  Light chain CDR3 for antibody 2185 (IGKV1D-13)
QQFNNYPYT

SEQ ID NO: 4370 - protein, 21 aa, Homo sapiens
  Heavy chain CDR3 for antibody 2185 (IGHV3-23)
AKDIDYYGSGSYPLYYYGMDV

SEQ ID NO: 4371 - protein, 9 aa, Homo sapiens
  Light chain CDR3 for antibody 2186 (IGKV1-39)
QQSYRTPLT

SEQ ID NO: 4372 - protein, 13 aa, Homo sapiens
  Heavy chain CDR3 for antibody 2186 (IGHV3-11)
ARTDYYFYYGLDV

SEQ ID NO: 4373 - protein, 9 aa, Homo sapiens
  Light chain CDR3 for antibody 2187 (IGKV6-21)
HQSSSLPYT

SEQ ID NO: 4374 - protein, 18 aa, Homo sapiens
  Heavy chain CDR3 for antibody 2187 (IGHV1-18)
ARDRYYYDSGSYYYGMDV

SEQ ID NO: 4375 - protein, 9 aa, Homo sapiens
  Light chain CDR3 for antibody 2188 (IGKV3-20)
QLYGSSPYT

SEQ ID NO: 4376 - protein, 13 aa, Homo sapiens
  Heavy chain CDR3 for antibody 2188 (IGHV3-33)
ARTDYYYYYGLDA

SEQ ID NO: 4377 - protein, 11 aa, Homo sapiens
  Light chain CDR3 for antibody 2189 (IGKV3-11)
QQRSNWPPTWT

SEQ ID NO: 4378 - protein, 18 aa, Homo sapiens
  Heavy chain CDR3 for antibody 2189 (IGHV4-59)
AREGHYYTSGSYYKAFDY

SEQ ID NO: 4379 - protein, 9 aa, Homo sapiens
  Light chain CDR3 for antibody 2190 (IGKV1-6)
LQDYNYPRT

SEQ ID NO: 4380 - protein, 18 aa, Homo sapiens
  Heavy chain CDR3 for antibody 2190 (IGHV4-59)
AREGHYYRSGTYYKAFDY

SEQ ID NO: 4381 - protein, 9 aa, Homo sapiens
  Light chain CDR3 for antibody 2191 (IGKV1-39)
QQSYSTPLT

SEQ ID NO: 4382 - protein, 17 aa, Homo sapiens
  Heavy chain CDR3 for antibody 2191 (IGHV3-33)
ARVYYDILTGYSPAFDI

SEQ ID NO: 4383 - protein, 9 aa, Homo sapiens
  Light chain CDR3 for antibody 2192 (IGKV1-9)
QQYNSYPLT

SEQ ID NO: 4384 - protein, 14 aa, Homo sapiens
  Heavy chain CDR3 for antibody 2192 (IGHV3-20)
ARDGGSTSFDWFDP

SEQ ID NO: 4385 - protein, 9 aa, Homo sapiens
  Light chain CDR3 for antibody 2193 (IGKV5-2)
LQHDNFPYT

SEQ ID NO: 4386 - protein, 18 aa, Homo sapiens
  Heavy chain CDR3 for antibody 2193 (IGHV3-33)
VRDRERYGSGSYPDAFDI

SEQ ID NO: 4387 - protein, 9 aa, Homo sapiens
  Light chain CDR3 for antibody 2194 (IGKV1-9)
QQLNSYPLT

SEQ ID NO: 4388 - protein, 11 aa, Homo sapiens
  Heavy chain CDR3 for antibody 2194 (IGHV3-33)
ARAGIAALFDY

SEQ ID NO: 4389 - protein, 9 aa, Homo sapiens
  Light chain CDR3 for antibody 2195 (IGKV5-2)
LQHDNFPWT

SEQ ID NO: 4390 - protein, 17 aa, Homo sapiens
  Heavy chain CDR3 for antibody 2195 (IGHV4-59)
ARDRELLWFGEFGGMDV

SEQ ID NO: 4391 - protein, 9 aa, Homo sapiens
  Light chain CDR3 for antibody 2196 (IGKV1-39)
QQSYSTPYT

SEQ ID NO: 4392 - protein, 10 aa, Homo sapiens
  Heavy chain CDR3 for antibody 2196 (IGHV3-23)
ANSGNYYFDY

SEQ ID NO: 4393 - protein, 9 aa, Homo sapiens
  Light chain CDR3 for antibody 2197 (IGKV1-17)
LQHNSYPYT

SEQ ID NO: 4394 - protein, 12 aa, Homo sapiens
  Heavy chain CDR3 for antibody 2197 (IGHV1-18)
ARVLFDGDYFDY

SEQ ID NO: 4395 - protein, 9 aa, Homo sapiens
  Light chain CDR3 for antibody 2198 (IGKV1-27)
QKYNSAPYT

SEQ ID NO: 4396 - protein, 17 aa, Homo sapiens
  Heavy chain CDR3 for antibody 2198 (IGHV3-33)
ARVYYDILTGYSPAFDI

SEQ ID NO: 4397 - protein, 8 aa, Homo sapiens
  Light chain CDR3 for antibody 2199 (IGKV1-5)
QQYNSYYT

SEQ ID NO: 4398 - protein, 15 aa, Homo sapiens
  Heavy chain CDR3 for antibody 2199 (IGHV3-20)
ARDRGSSGWRDWFDP

SEQ ID NO: 4399 - protein, 9 aa, Homo sapiens
  Light chain CDR3 for antibody 2200 (IGKV5-2)
LQHDNFPWT

SEQ ID NO: 4400 - protein, 13 aa, Homo sapiens
  Heavy chain CDR3 for antibody 2200 (IGHV3-33)
ARIDYYSYYGMDV

SEQ ID NO: 4401 - protein, 9 aa, Homo sapiens
  Light chain CDR3 for antibody 2201 (IGKV3-20)
QQYGSSPYT

SEQ ID NO: 4402 - protein, 13 aa, Homo sapiens
  Heavy chain CDR3 for antibody 2201 (IGHV3-23)
AKDRGYSSTSTAY

SEQ ID NO: 4403 - protein, 8 aa, Homo sapiens
  Light chain CDR3 for antibody 2202 (IGKV1-5)
QQYNSYWT

SEQ ID NO: 4404 - protein, 13 aa, Homo sapiens
  Heavy chain CDR3 for antibody 2202 (IGHV3-33)
ARDYCGGDCYLDY

SEQ ID NO: 4405 - protein, 9 aa, Homo sapiens
  Light chain CDR3 for antibody 2203 (IGKV1D-13)
QQFNNYPHT

SEQ ID NO: 4406 - protein, 17 aa, Homo sapiens
  Heavy chain CDR3 for antibody 2203 (IGHV3-33)
ARAYYDILTGYSYYFDY

SEQ ID NO: 4407 - protein, 9 aa, Homo sapiens
  Light chain CDR3 for antibody 2204 (IGKV1-17)
LQHNSYPYT

SEQ ID NO: 4408 - protein, 15 aa, Homo sapiens
  Heavy chain CDR3 for antibody 2204 (IGHV3-33)
ARDEHYDILTGYWGY

SEQ ID NO: 4409 - protein, 9 aa, Homo sapiens
  Light chain CDR3 for antibody 2205 (IGKV3-20)
QQYGSSPYT

SEQ ID NO: 4410 - protein, 11 aa, Homo sapiens
  Heavy chain CDR3 for antibody 2205 (IGHV3-23)
AKGLWSYYFDY

SEQ ID NO: 4411 - protein, 9 aa, Homo sapiens
  Light chain CDR3 for antibody 2206 (IGKV3-20)
QQYGSSPLT

SEQ ID NO: 4412 - protein, 9 aa, Homo sapiens
  Heavy chain CDR3 for antibody 2206 (IGHV1-8)
ARGPRIMDV

SEQ ID NO: 4413 - protein, 9 aa, Homo sapiens
  Light chain CDR3 for antibody 2207 (IGKV3D-20)
QQYGSSPYT

SEQ ID NO: 4414 - protein, 13 aa, Homo sapiens
  Heavy chain CDR3 for antibody 2207 (IGHV3-23)
ASTGDSYYYGMDV

SEQ ID NO: 4415 - protein, 9 aa, Homo sapiens
  Light chain CDR3 for antibody 2208 (IGKV1D-16)
QQYNSYPYT

SEQ ID NO: 4416 - protein, 10 aa, Homo sapiens
  Heavy chain CDR3 for antibody 2208 (IGHV3-23)
AKDQVGATDC

SEQ ID NO: 4417 - protein, 9 aa, Homo sapiens
  Light chain CDR3 for antibody 2209 (IGKV1-6)
LQDYNYPYT

SEQ ID NO: 4418 - protein, 13 aa, Homo sapiens
  Heavy chain CDR3 for antibody 2209 (IGHV4-39)
ARRDGGYYGYFDY

SEQ ID NO: 4419 - protein, 9 aa, Homo sapiens
  Light chain CDR3 for antibody 2210 (IGKV3-20)
QQYGSSPRT

SEQ ID NO: 4420 - protein, 17 aa, Homo sapiens
  Heavy chain CDR3 for antibody 2210 (IGHV1-18)
ARERYYGSGIYKYAMDV

SEQ ID NO: 4421 - protein, 9 aa, Homo sapiens
  Light chain CDR3 for antibody 2211 (IGKV6-21)
HQSSSLPYT

SEQ ID NO: 4422 - protein, 17 aa, Homo sapiens
  Heavy chain CDR3 for antibody 2211 (IGHV3-23)
AKDYDILTGYSHNWFDP

SEQ ID NO: 4423 - protein, 9 aa, Homo sapiens
  Light chain CDR3 for antibody 2212 (IGKV5-2)
LQHDNFPYT

SEQ ID NO: 4424 - protein, 8 aa, Homo sapiens
  Heavy chain CDR3 for antibody 2212 (IGHV3-33)
ARDRGFDY

SEQ ID NO: 4425 - protein, 9 aa, Homo sapiens
  Light chain CDR3 for antibody 2213 (IGKV6-21)
HQSSSLPYT

SEQ ID NO: 4426 - protein, 18 aa, Homo sapiens
  Heavy chain CDR3 for antibody 2213 (IGHV3-33)
ARDEYYGSGIYYNYGMDV

SEQ ID NO: 4427 - protein, 9 aa, Homo sapiens
  Light chain CDR3 for antibody 2214 (IGKV1D-16)
QQYNSYPLT

SEQ ID NO: 4428 - protein, 12 aa, Homo sapiens
  Heavy chain CDR3 for antibody 2214 (IGHV3-33)
ARKQWLVQAFDI

SEQ ID NO: 4429 - protein, 9 aa, Homo sapiens
  Light chain CDR3 for antibody 2215 (IGKV3-20)
QQYGSSPYT

SEQ ID NO: 4430 - protein, 17 aa, Homo sapiens
  Heavy chain CDR3 for antibody 2215 (IGHV3-33)
ARGGAAAGPYLYYGLDV

SEQ ID NO: 4431 - protein, 9 aa, Homo sapiens
  Light chain CDR3 for antibody 2216 (IGKV6-21)
HQSFGLPYT

SEQ ID NO: 4432 - protein, 13 aa, Homo sapiens
  Heavy chain CDR3 for antibody 2216 (IGHV3-11)
AREGIAVAGDFDH

SEQ ID NO: 4433 - protein, 9 aa, Homo sapiens
  Light chain CDR3 for antibody 2217 (IGKV1-6)
LQDYNYALT

SEQ ID NO: 4434 - protein, 17 aa, Homo sapiens
  Heavy chain CDR3 for antibody 2217 (IGHV3-49)
ARRVTLVRVPIKNWFDP

SEQ ID NO: 4435 - protein, 9 aa, Homo sapiens
  Light chain CDR3 for antibody 2218 (IGKV1-33)
QQYDNLPFT

SEQ ID NO: 4436 - protein, 15 aa, Homo sapiens
  Heavy chain CDR3 for antibody 2218 (IGHV3-30)
ARGAMVRGVDYGMDV

SEQ ID NO: 4437 - protein, 9 aa, Homo sapiens
  Light chain CDR3 for antibody 2219 (IGKV1-39)
QQSYRTPLT

SEQ ID NO: 4438 - protein, 15 aa, Homo sapiens
  Heavy chain CDR3 for antibody 2219 (IGHV3-33)
ARRGYNDYDPYGMDV

SEQ ID NO: 4439 - protein, 9 aa, Homo sapiens
  Light chain CDR3 for antibody 2220 (IGKV1-16)
QQYNSYPYT

SEQ ID NO: 4440 - protein, 16 aa, Homo sapiens
  Heavy chain CDR3 for antibody 2220 (IGHV4-59)
AGGSGSYRDYYYGMDV

SEQ ID NO: 4441 - protein, 9 aa, Homo sapiens
  Light chain CDR3 for antibody 2221 (IGKV1-6)
LQDYNYPYT

SEQ ID NO: 4442 - protein, 13 aa, Homo sapiens
  Heavy chain CDR3 for antibody 2221 (IGHV1-18)
ARGGGVRGAPLDY

SEQ ID NO: 4443 - protein, 9 aa, Homo sapiens
  Light chain CDR3 for antibody 2222 (IGKV1-6)
LQDYNYPRT

SEQ ID NO: 4444 - protein, 16 aa, Homo sapiens
  Heavy chain CDR3 for antibody 2222 (IGHV3-33)
ARGFSGYDGYYYGMDV

SEQ ID NO: 4445 - protein, 9 aa, Homo sapiens
  Light chain CDR3 for antibody 2223 (IGKV3D-7)
QQDYNLPLT

SEQ ID NO: 4446 - protein, 15 aa, Homo sapiens
  Heavy chain CDR3 for antibody 2223 (IGHV3-20)
ARDRGSSGWRDWFDP

SEQ ID NO: 4447 - protein, 10 aa, Homo sapiens
  Light chain CDR3 for antibody 2224 (IGKV1-39)
QQSYSTPMYT

SEQ ID NO: 4448 - protein, 13 aa, Homo sapiens
  Heavy chain CDR3 for antibody 2224 (IGHV3-33)
ARDWGYSHGYFDY

SEQ ID NO: 4449 - protein, 9 aa, Homo sapiens
  Light chain CDR3 for antibody 2225 (IGKV5-2)
LQHDNFPWT

SEQ ID NO: 4450 - protein, 14 aa, Homo sapiens
  Heavy chain CDR3 for antibody 2225 (IGHV1-18)
ARCFGSGSYGWFDP

SEQ ID NO: 4451 - protein, 9 aa, Homo sapiens
  Light chain CDR3 for antibody 2226 (IGKV2-30)
MQGTHWPLT

SEQ ID NO: 4452 - protein, 13 aa, Homo sapiens
  Heavy chain CDR3 for antibody 2226 (IGHV3-33)
ARAFTMVRGVIDY

SEQ ID NO: 4453 - protein, 9 aa, Homo sapiens
  Light chain CDR3 for antibody 2227 (IGKV1-27)
QKYNSAPYT

SEQ ID NO: 4454 - protein, 15 aa, Homo sapiens
  Heavy chain CDR3 for antibody 2227 (IGHV3-33)
VCVLYDYGDYVGFDY

SEQ ID NO: 4455 - protein, 9 aa, Homo sapiens
  Light chain CDR3 for antibody 2228 (IGKV3-15)
QQYNNWPLT

SEQ ID NO: 4456 - protein, 17 aa, Homo sapiens
  Heavy chain CDR3 for antibody 2228 (IGHV4-59)
ARDFLVRGEGSYYGMDV

SEQ ID NO: 4457 - protein, 9 aa, Homo sapiens
  Light chain CDR3 for antibody 2229 (IGKV5-2)
LQHDNFPYT

SEQ ID NO: 4458 - protein, 13 aa, Homo sapiens
  Heavy chain CDR3 for antibody 2229 (IGHV3-33)
AREYCSGGSCYDY

SEQ ID NO: 4459 - protein, 9 aa, Homo sapiens
  Light chain CDR3 for antibody 2230 (IGKV1D-16)
QQYNSYPYT

SEQ ID NO: 4460 - protein, 13 aa, Homo sapiens
  Heavy chain CDR3 for antibody 2230 (IGHV3-33)
ARDGYSYGPYFDY

SEQ ID NO: 4461 - protein, 9 aa, Homo sapiens
  Light chain CDR3 for antibody 2231 (IGKV3-15)
QQYNNWPLT

SEQ ID NO: 4462 - protein, 17 aa, Homo sapiens
  Heavy chain CDR3 for antibody 2231 (IGHV1-18)
ARDEGYDILTGYPHFDY

SEQ ID NO: 4463 - protein, 9 aa, Homo sapiens
  Light chain CDR3 for antibody 2232 (IGKV1-39)
QQSYSTPYT

SEQ ID NO: 4464 - protein, 12 aa, Homo sapiens
  Heavy chain CDR3 for antibody 2232 (IGHV3-23)
AGGDFWGGNPLY

SEQ ID NO: 4465 - protein, 10 aa, Homo sapiens
  Light chain CDR3 for antibody 2233 (IGKV3-11)
QQRSNWPIFT

SEQ ID NO: 4466 - protein, 12 aa, Homo sapiens
  Heavy chain CDR3 for antibody 2233 (IGHV4-61)
ARVYSSGWLFDY

SEQ ID NO: 4467 - protein, 9 aa, Homo sapiens
  Light chain CDR3 for antibody 2234 (IGKV1-6)
LQDYNYPYT

SEQ ID NO: 4468 - protein, 12 aa, Homo sapiens
  Heavy chain CDR3 for antibody 2234 (IGHV3-23)
AKESLYTPTDDY

SEQ ID NO: 4469 - protein, 9 aa, Homo sapiens
  Light chain CDR3 for antibody 2235 (IGKV1D-16)
QQYNSYPYT

SEQ ID NO: 4470 - protein, 12 aa, Homo sapiens
  Heavy chain CDR3 for antibody 2235 (IGHV3-13)
AIGTMVRGIPDY

SEQ ID NO: 4471 - protein, 9 aa, Homo sapiens
  Light chain CDR3 for antibody 2236 (IGKV1D-16)
QQYNSYPLT

SEQ ID NO: 4472 - protein, 17 aa, Homo sapiens
  Heavy chain CDR3 for antibody 2236 (IGHV3-33)
ARDWFGELSDYYYGMDV

SEQ ID NO: 4473 - protein, 9 aa, Homo sapiens
  Light chain CDR3 for antibody 2237 (IGKV1-9)
QQLKSYLYT

SEQ ID NO: 4474 - protein, 12 aa, Homo sapiens
  Heavy chain CDR3 for antibody 2237 (IGHV1-46)
ARGLTGDHAVDI

SEQ ID NO: 4475 - protein, 9 aa, Homo sapiens
  Light chain CDR3 for antibody 2238 (IGKV5-2)
LQHDNFPWT

SEQ ID NO: 4476 - protein, 14 aa, Homo sapiens
  Heavy chain CDR3 for antibody 2238 (IGHV1-46)
ARDGVGAKEGGFDY

SEQ ID NO: 4477 - protein, 9 aa, Homo sapiens
  Light chain CDR3 for antibody 2239 (IGKV1D-16)
QQYNSYPLT

SEQ ID NO: 4478 - protein, 15 aa, Homo sapiens
  Heavy chain CDR3 for antibody 2239 (IGHV3-33)
ARDGSGSYSLYGMDV

SEQ ID NO: 4479 - protein, 9 aa, Homo sapiens
  Light chain CDR3 for antibody 2240 (IGKV3D-20)
QQYGSSPYT

SEQ ID NO: 4480 - protein, 17 aa, Homo sapiens
  Heavy chain CDR3 for antibody 2240 (IGHV3-23)
AKDTITMVRGALFGMDV

SEQ ID NO: 4481 - protein, 9 aa, Homo sapiens
  Light chain CDR3 for antibody 2241 (IGKV6-21)
HQSSSLPYT

SEQ ID NO: 4482 - protein, 10 aa, Homo sapiens
  Heavy chain CDR3 for antibody 2241 (IGHV3-30)
AREWYGGMDV

SEQ ID NO: 4483 - protein, 9 aa, Homo sapiens
  Light chain CDR3 for antibody 2242 (IGKV5-2)
LQHDNFPWT

SEQ ID NO: 4484 - protein, 10 aa, Homo sapiens
  Heavy chain CDR3 for antibody 2242 (IGHV4-39)
ARQLGNWFDP

SEQ ID NO: 4485 - protein, 9 aa, Homo sapiens
  Light chain CDR3 for antibody 2243 (IGKV1-39)
QQSYSTPLT

SEQ ID NO: 4486 - protein, 20 aa, Homo sapiens
  Heavy chain CDR3 for antibody 2243 (IGHV3-23)
AKDREMAATSHYYYYYGMDV

SEQ ID NO: 4487 - protein, 9 aa, Homo sapiens
  Light chain CDR3 for antibody 2244 (IGKV1-6)
LQDYNYPYT

SEQ ID NO: 4488 - protein, 15 aa, Homo sapiens
  Heavy chain CDR3 for antibody 2244 (IGHV3-33)
ARDRGMVRGDGYLDY

SEQ ID NO: 4489 - protein, 9 aa, Homo sapiens
  Light chain CDR3 for antibody 2245 (IGKV3D-7)
QQDYNLPLT

SEQ ID NO: 4490 - protein, 17 aa, Homo sapiens
  Heavy chain CDR3 for antibody 2245 (IGHV3-33)
ARGYCSRTSCYLYYFDY

SEQ ID NO: 4491 - protein, 9 aa, Homo sapiens
  Light chain CDR3 for antibody 2246 (IGKV3-20)
QQYGSSPYT

SEQ ID NO: 4492 - protein, 16 aa, Homo sapiens
  Heavy chain CDR3 for antibody 2246 (IGHV4-59)
ARFYFGSGSYYWYFDL

SEQ ID NO: 4493 - protein, 9 aa, Homo sapiens
  Light chain CDR3 for antibody 2247 (IGKV1D-16)
QQYNSYPYT

SEQ ID NO: 4494 - protein, 14 aa, Homo sapiens
  Heavy chain CDR3 for antibody 2247 (IGHV3-20)
ARDGGSGSYDGLDV

SEQ ID NO: 4495 - protein, 9 aa, Homo sapiens
  Light chain CDR3 for antibody 2248 (IGKV1-6)
QQEYNYPLT

SEQ ID NO: 4496 - protein, 18 aa, Homo sapiens
  Heavy chain CDR3 for antibody 2248 (IGHV1-46)
ARDGDYVWGSYRSDWFDP

SEQ ID NO: 4497 - protein, 9 aa, Homo sapiens
  Light chain CDR3 for antibody 2249 (IGKV1-6)
LQDYNYPWT

SEQ ID NO: 4498 - protein, 18 aa, Homo sapiens
  Heavy chain CDR3 for antibody 2249 (IGHV4-59)
AREGHYYTSGSYYKAFDY

SEQ ID NO: 4499 - protein, 9 aa, Homo sapiens
  Light chain CDR3 for antibody 2250 (IGKV1-9)
QQLNSYPLT

SEQ ID NO: 4500 - protein, 16 aa, Homo sapiens
  Heavy chain CDR3 for antibody 2250 (IGHV3-33)
ARGYDMLTGDYYGMDV

SEQ ID NO: 4501 - protein, 9 aa, Homo sapiens
  Light chain CDR3 for antibody 2251 (IGKV6-21)
HQSSSLPYT

SEQ ID NO: 4502 - protein, 19 aa, Homo sapiens
  Heavy chain CDR3 for antibody 2251 (IGHV3-33)
ARDSGYSGYDYYYYYGMDV

SEQ ID NO: 4503 - protein, 9 aa, Homo sapiens
  Light chain CDR3 for antibody 2252 (IGKV6-21)
HQSSSLPYT

SEQ ID NO: 4504 - protein, 17 aa, Homo sapiens
  Heavy chain CDR3 for antibody 2252 (IGHV3-23)
AKEYCSGGSCYVYYFDY

SEQ ID NO: 4505 - protein, 9 aa, Homo sapiens
  Light chain CDR3 for antibody 2253 (IGKV3-15)
QQYNNWPLT

SEQ ID NO: 4506 - protein, 15 aa, Homo sapiens
  Heavy chain CDR3 for antibody 2253 (IGHV3-20)
ARDRGSSGWRDWFDP

SEQ ID NO: 4507 - protein, 8 aa, Homo sapiens
  Light chain CDR3 for antibody 2254 (IGKV1-5)
QQYNSYYT

SEQ ID NO: 4508 - protein, 17 aa, Homo sapiens
  Heavy chain CDR3 for antibody 2254 (IGHV1-18)
ARDRAFTMVRGVPPFDY

SEQ ID NO: 4509 - protein, 9 aa, Homo sapiens
  Light chain CDR3 for antibody 2255 (IGKV6-21)
HQSSSLPYT

SEQ ID NO: 4510 - protein, 15 aa, Homo sapiens
  Heavy chain CDR3 for antibody 2255 (IGHV3-23)
AKDRDYDFLSGPFDY

SEQ ID NO: 4511 - protein, 10 aa, Homo sapiens
  Light chain CDR3 for antibody 2256 (IGKV3-11)
QQRSNWPIFT

SEQ ID NO: 4512 - protein, 15 aa, Homo sapiens
  Heavy chain CDR3 for antibody 2256 (IGHV3-20)
ARDRGSSGWRDWFDP

SEQ ID NO: 4513 - protein, 9 aa, Homo sapiens
  Light chain CDR3 for antibody 2257 (IGKV1-27)
QKYNSAPYT

SEQ ID NO: 4514 - protein, 18 aa, Homo sapiens
  Heavy chain CDR3 for antibody 2257 (IGHV4-59)
AREGHYYTSGSYYKAFDY

SEQ ID NO: 4515 - protein, 9 aa, Homo sapiens
  Light chain CDR3 for antibody 2258 (IGKV1-39)
QQSYSTPLT

SEQ ID NO: 4516 - protein, 12 aa, Homo sapiens
  Heavy chain CDR3 for antibody 2258 (IGHV1-24)
ASDWAYYYGMDV

SEQ ID NO: 4517 - protein, 9 aa, Homo sapiens
  Light chain CDR3 for antibody 2259 (IGKV1-6)
LQDYNYPYT

SEQ ID NO: 4518 - protein, 17 aa, Homo sapiens
  Heavy chain CDR3 for antibody 2259 (IGHV1-24)
ATHYGSGSHYKGYGMDV

SEQ ID NO: 4519 - protein, 9 aa, Homo sapiens
  Light chain CDR3 for antibody 2260 (IGKV2-30)
MQGTHWPLT

SEQ ID NO: 4520 - protein, 17 aa, Homo sapiens
  Heavy chain CDR3 for antibody 2260 (IGHV3-33)
ARGYCSRTSCYLYYFDY

SEQ ID NO: 4521 - protein, 9 aa, Homo sapiens
  Light chain CDR3 for antibody 2261 (IGKV6-21)
HQSSSLPYT

SEQ ID NO: 4522 - protein, 15 aa, Homo sapiens
  Heavy chain CDR3 for antibody 2261 (IGHV3-74)
ARGSGSHYHYYGMDV

SEQ ID NO: 4523 - protein, 9 aa, Homo sapiens
  Light chain CDR3 for antibody 2262 (IGKV1-17)
LQHNSYPYT

SEQ ID NO: 4524 - protein, 17 aa, Homo sapiens
  Heavy chain CDR3 for antibody 2262 (IGHV3-23)
AKDTITMVRGALFGMDV

SEQ ID NO: 4525 - protein, 9 aa, Homo sapiens
  Light chain CDR3 for antibody 2263 (IGKV1D-13)
QQFNNYPYT

SEQ ID NO: 4526 - protein, 12 aa, Homo sapiens
  Heavy chain CDR3 for antibody 2263 (IGHV4-61)
ARVYSSGWLFDY

SEQ ID NO: 4527 - protein, 8 aa, Homo sapiens
  Light chain CDR3 for antibody 2264 (IGKV1D-13)
QQFNNYPT

SEQ ID NO: 4528 - protein, 14 aa, Homo sapiens
  Heavy chain CDR3 for antibody 2264 (IGHV3-33)
ARGAAAGNFYGLDV

SEQ ID NO: 4529 - protein, 9 aa, Homo sapiens
  Light chain CDR3 for antibody 2265 (IGKV5-2)
LQHDNFPWT

SEQ ID NO: 4530 - protein, 15 aa, Homo sapiens
  Heavy chain CDR3 for antibody 2265 (IGHV1-24)
ATHWDLRYYYYGMDV

SEQ ID NO: 4531 - protein, 9 aa, Homo sapiens
  Light chain CDR3 for antibody 2266 (IGKV6-21)
HQSSSLPYT

SEQ ID NO: 4532 - protein, 17 aa, Homo sapiens
  Heavy chain CDR3 for antibody 2266 (IGHV3-33)
ARGGAAAGPYLYYGLDV

SEQ ID NO: 4533 - protein, 9 aa, Homo sapiens
  Light chain CDR3 for antibody 2267 (IGKV1-39)
QQSYRTPLT

SEQ ID NO: 4534 - protein, 18 aa, Homo sapiens
  Heavy chain CDR3 for antibody 2267 (IGHV1-46)
ARDGDYVWGSYRSDWFDP

SEQ ID NO: 4535 - protein, 9 aa, Homo sapiens
  Light chain CDR3 for antibody 2268 (IGKV1D-13)
QQFNNYPHT

SEQ ID NO: 4536 - protein, 13 aa, Homo sapiens
  Heavy chain CDR3 for antibody 2268 (IGHV3-33)
ARRATLVRGVFDP

SEQ ID NO: 4537 - protein, 9 aa, Homo sapiens
  Light chain CDR3 for antibody 2269 (IGKV1D-16)
QQYNSYPLT

SEQ ID NO: 4538 - protein, 16 aa, Homo sapiens
  Heavy chain CDR3 for antibody 2269 (IGHV3-23)
AKEGEVLRYFDWLFNY

SEQ ID NO: 4539 - protein, 9 aa, Homo sapiens
  Light chain CDR3 for antibody 2270 (IGKV5-2)
LQHDNFPWT

SEQ ID NO: 4540 - protein, 13 aa, Homo sapiens
  Heavy chain CDR3 for antibody 2270 (IGHV1-18)
ARSITMVRGVIGY

SEQ ID NO: 4541 - protein, 10 aa, Homo sapiens
  Light chain CDR3 for antibody 2271 (IGKV1-39)
QQSYSTPMYT

SEQ ID NO: 4542 - protein, 16 aa, Homo sapiens
  Heavy chain CDR3 for antibody 2271 (IGHV3-23)
AKEGMVLRYFDWLWDY

SEQ ID NO: 4543 - protein, 9 aa, Homo sapiens
  Light chain CDR3 for antibody 2272 (IGKV5-2)
LQHDNFPWT

SEQ ID NO: 4544 - protein, 15 aa, Homo sapiens
  Heavy chain CDR3 for antibody 2272 (IGHV4-39)
ARQGLVATIKGYFQH

SEQ ID NO: 4545 - protein, 9 aa, Homo sapiens
  Light chain CDR3 for antibody 2273 (IGKV6-21)
HQSSSLPYT

SEQ ID NO: 4546 - protein, 13 aa, Homo sapiens
  Heavy chain CDR3 for antibody 2273 (IGHV3-30)
AAPFMVRGDGMDV

SEQ ID NO: 4547 - protein, 9 aa, Homo sapiens
  Light chain CDR3 for antibody 2274 (IGKV1D-13)
QQFNNYPHT

SEQ ID NO: 4548 - protein, 17 aa, Homo sapiens
  Heavy chain CDR3 for antibody 2274 (IGHV3-23)
AKDGSFYSSGWYDAFDI

SEQ ID NO: 4549 - protein, 8 aa, Homo sapiens
  Light chain CDR3 for antibody 2275 (IGKV3D-7)
QQDYNLLT

SEQ ID NO: 4550 - protein, 18 aa, Homo sapiens
  Heavy chain CDR3 for antibody 2275 (IGHV1-46)
ARDGDYVWGSYRSDWFDP

SEQ ID NO: 4551 - protein, 9 aa, Homo sapiens
  Light chain CDR3 for antibody 2276 (IGKV1-6)
LQDYKSPFT

SEQ ID NO: 4552 - protein, 15 aa, Homo sapiens
  Heavy chain CDR3 for antibody 2276 (IGHV3-30)
ARGAMVRGVDYGMDV

SEQ ID NO: 4553 - protein, 10 aa, Homo sapiens
  Light chain CDR3 for antibody 2277 (IGKV1-39)
QQSYSTPMYT

SEQ ID NO: 4554 - protein, 13 aa, Homo sapiens
  Heavy chain CDR3 for antibody 2277 (IGHV4-59)
ARDAGYSSSWFDY

SEQ ID NO: 4555 - protein, 9 aa, Homo sapiens
  Light chain CDR3 for antibody 2278 (IGKV1-6)
LQDYNYPYT

SEQ ID NO: 4556 - protein, 18 aa, Homo sapiens
  Heavy chain CDR3 for antibody 2278 (IGHV3-23)
AKDGRSGSYDYYYYGMDV

SEQ ID NO: 4557 - protein, 9 aa, Homo sapiens
  Light chain CDR3 for antibody 2279 (IGKV1-6)
LQDYNYPYT

SEQ ID NO: 4558 - protein, 9 aa, Homo sapiens
  Heavy chain CDR3 for antibody 2279 (IGHV3-33)
AANSYGLDY

SEQ ID NO: 4559 - protein, 9 aa, Homo sapiens
  Light chain CDR3 for antibody 2280 (IGKV3D-20)
QQYGSSPYT

SEQ ID NO: 4560 - protein, 12 aa, Homo sapiens
  Heavy chain CDR3 for antibody 2280 (IGHV3-33)
AREGTGGNWFDP

SEQ ID NO: 4561 - protein, 9 aa, Homo sapiens
  Light chain CDR3 for antibody 2281 (IGKV5-2)
LQHDNFPYT

SEQ ID NO: 4562 - protein, 17 aa, Homo sapiens
  Heavy chain CDR3 for antibody 2281 (IGHV3-33)
ARDWFGELSDYYYGMDV

SEQ ID NO: 4563 - protein, 9 aa, Homo sapiens
  Light chain CDR3 for antibody 2282 (IGKV3D-7)
QQDYTLPLT

SEQ ID NO: 4564 - protein, 11 aa, Homo sapiens
  Heavy chain CDR3 for antibody 2282 (IGHV4-59)
ARSIRYSVFDY

SEQ ID NO: 4565 - protein, 9 aa, Homo sapiens
  Light chain CDR3 for antibody 2283 (IGKV3-11)
QQRSNWPYT

SEQ ID NO: 4566 - protein, 12 aa, Homo sapiens
  Heavy chain CDR3 for antibody 2283 (IGHV3-33)
TRGYSSKSYFDY

SEQ ID NO: 4567 - protein, 9 aa, Homo sapiens
  Light chain CDR3 for antibody 2284 (IGKV1D-16)
QQYNSYPLT

SEQ ID NO: 4568 - protein, 11 aa, Homo sapiens
  Heavy chain CDR3 for antibody 2284 (IGHV3-23)
AKEGTYFDIPH

SEQ ID NO: 4569 - protein, 9 aa, Homo sapiens
  Light chain CDR3 for antibody 2285 (IGKV1D-16)
QQYNSYPLT

SEQ ID NO: 4570 - protein, 18 aa, Homo sapiens
  Heavy chain CDR3 for antibody 2285 (IGHV3-33)
ARDGRISLVRGIIDAFDI

SEQ ID NO: 4571 - protein, 9 aa, Homo sapiens
  Light chain CDR3 for antibody 2286 (IGKV1-6)
LQDYNYPWT

SEQ ID NO: 4572 - protein, 15 aa, Homo sapiens
  Heavy chain CDR3 for antibody 2286 (IGHV3-64)
ARDGLRYFDWLFPWY

SEQ ID NO: 4573 - protein, 9 aa, Homo sapiens
  Light chain CDR3 for antibody 2287 (IGKV6-21)
HQSSSLPYT

SEQ ID NO: 4574 - protein, 14 aa, Homo sapiens
  Heavy chain CDR3 for antibody 2287 (IGHV1-2)
ARDYYGSGNYYMGY

SEQ ID NO: 4575 - protein, 9 aa, Homo sapiens
  Light chain CDR3 for antibody 2288 (IGKV1-17)
LQHNSYPLT

SEQ ID NO: 4576 - protein, 12 aa, Homo sapiens
  Heavy chain CDR3 for antibody 2288 (IGHV3-33)
ARAAAGTPSLDY

SEQ ID NO: 4577 - protein, 9 aa, Homo sapiens
  Light chain CDR3 for antibody 2289 (IGKV3D-20)
QQYGSSPYT

SEQ ID NO: 4578 - protein, 17 aa, Homo sapiens
  Heavy chain CDR3 for antibody 2289 (IGHV3-23)
AKGNYGSGSYYNGDFQH

SEQ ID NO: 4579 - protein, 11 aa, Homo sapiens
  Light chain CDR3 for antibody 2290 (IGKV3-11)
QQRSNWPPTWT

SEQ ID NO: 4580 - protein, 16 aa, Homo sapiens
  Heavy chain CDR3 for antibody 2290 (IGHV4-59)
ARGRYFEWLLGDVFDI

SEQ ID NO: 4581 - protein, 10 aa, Homo sapiens
  Light chain CDR3 for antibody 2291 (IGKV1-17)
LQHNSYPMYT

SEQ ID NO: 4582 - protein, 15 aa, Homo sapiens
  Heavy chain CDR3 for antibody 2291 (IGHV3-30)
ARGAMVRGVDYGMDV

SEQ ID NO: 4583 - protein, 9 aa, Homo sapiens
  Light chain CDR3 for antibody 2292 (IGKV3-20)
QQYGSSPRT

SEQ ID NO: 4584 - protein, 9 aa, Homo sapiens
  Heavy chain CDR3 for antibody 2292 (IGHV3-13)
ARDHWYFDL

SEQ ID NO: 4585 - protein, 9 aa, Homo sapiens
  Light chain CDR3 for antibody 2293 (IGKV5-2)
LQHDNFPYT

SEQ ID NO: 4586 - protein, 12 aa, Homo sapiens
  Heavy chain CDR3 for antibody 2293 (IGHV3-23)
AKEGIVGVPFDY

SEQ ID NO: 4587 - protein, 9 aa, Homo sapiens
  Light chain CDR3 for antibody 2294 (IGKV1D-13)
QQFNNYPYT

SEQ ID NO: 4588 - protein, 10 aa, Homo sapiens
  Heavy chain CDR3 for antibody 2294 (IGHV3-23)
AKEQWLVLDY

SEQ ID NO: 4589 - protein, 9 aa, Homo sapiens
  Light chain CDR3 for antibody 2295 (IGKV6-21)
HQSSSLPYT

SEQ ID NO: 4590 - protein, 18 aa, Homo sapiens
  Heavy chain CDR3 for antibody 2295 (IGHV6-1)
ARDQYSYGPYYYYYGMDV

SEQ ID NO: 4591 - protein, 9 aa, Homo sapiens
  Light chain CDR3 for antibody 2296 (IGKV5-2)
LQHDNFPYT

SEQ ID NO: 4592 - protein, 18 aa, Homo sapiens
  Heavy chain CDR3 for antibody 2296 (IGHV3-33)
ARDEYYGSGIYYNYGMDV

SEQ ID NO: 4593 - protein, 8 aa, Homo sapiens
  Light chain CDR3 for antibody 2297 (IGKV1D-13)
QQFNNYYT

SEQ ID NO: 4594 - protein, 17 aa, Homo sapiens
  Heavy chain CDR3 for antibody 2297 (IGHV1-18)
ARDEGYDILTGYPHFDY

SEQ ID NO: 4595 - protein, 9 aa, Homo sapiens
  Light chain CDR3 for antibody 2298 (IGKV1-6)
LQDYNYPWT

SEQ ID NO: 4596 - protein, 11 aa, Homo sapiens
  Heavy chain CDR3 for antibody 2298 (IGHV4-59)
ARETGDDAFDI

SEQ ID NO: 4597 - protein, 9 aa, Homo sapiens
  Light chain CDR3 for antibody 2299 (IGKV1-6)
LQDYNYPYT

SEQ ID NO: 4598 - protein, 15 aa, Homo sapiens
  Heavy chain CDR3 for antibody 2299 (IGHV3-23)
AKDGFYYGSGSSFDH

SEQ ID NO: 4599 - protein, 9 aa, Homo sapiens
  Light chain CDR3 for antibody 2300 (IGKV1D-16)
QQYNSYPYT

SEQ ID NO: 4600 - protein, 20 aa, Homo sapiens
  Heavy chain CDR3 for antibody 2300 (IGHV3-23)
AKDRETGTTSYHYYYYGMDV

SEQ ID NO: 4601 - protein, 9 aa, Homo sapiens
  Light chain CDR3 for antibody 2301 (IGKV1-17)
LQHNSYPYT

SEQ ID NO: 4602 - protein, 11 aa, Homo sapiens
  Heavy chain CDR3 for antibody 2301 (IGHV1-24)
ATYFGSGSLDY

SEQ ID NO: 4603 - protein, 9 aa, Homo sapiens
  Light chain CDR3 for antibody 2302 (IGKV6-21)
HQSSSLPYT

SEQ ID NO: 4604 - protein, 12 aa, Homo sapiens
  Heavy chain CDR3 for antibody 2302 (IGHV3-23)
AKESLYTPTDDY

SEQ ID NO: 4605 - protein, 9 aa, Homo sapiens
  Light chain CDR3 for antibody 2303 (IGKV6-21)
HQSSSLPYT

SEQ ID NO: 4606 - protein, 17 aa, Homo sapiens
  Heavy chain CDR3 for antibody 2303 (IGHV3-23)
AKDRPVTTLYYYFGMDV

SEQ ID NO: 4607 - protein, 9 aa, Homo sapiens
  Light chain CDR3 for antibody 2304 (IGKV1-39)
QQSYSTPLT

SEQ ID NO: 4608 - protein, 13 aa, Homo sapiens
  Heavy chain CDR3 for antibody 2304 (IGHV1-2)
ARDGVRGSFGMDV

SEQ ID NO: 4609 - protein, 9 aa, Homo sapiens
  Light chain CDR3 for antibody 2305 (IGKV1-17)
LQHNSYPWT

SEQ ID NO: 4610 - protein, 14 aa, Homo sapiens
  Heavy chain CDR3 for antibody 2305 (IGHV3-20)
ARDGGSTCYDWFDP

SEQ ID NO: 4611 - protein, 9 aa, Homo sapiens
  Light chain CDR3 for antibody 2306 (IGKV3D-7)
QQDYNLPLT

SEQ ID NO: 4612 - protein, 20 aa, Homo sapiens
  Heavy chain CDR3 for antibody 2306 (IGHV3-20)
ARDLCSSTSCYGYYYYGMDV

SEQ ID NO: 4613 - protein, 9 aa, Homo sapiens
  Light chain CDR3 for antibody 2307 (IGKV6-21)
HQSSSLPYT

SEQ ID NO: 4614 - protein, 10 aa, Homo sapiens
  Heavy chain CDR3 for antibody 2307 (IGHV3-33)
AREWFGGFDI

SEQ ID NO: 4615 - protein, 9 aa, Homo sapiens
  Light chain CDR3 for antibody 2308 (IGKV1-27)
QKYNSAPYT

SEQ ID NO: 4616 - protein, 13 aa, Homo sapiens
  Heavy chain CDR3 for antibody 2308 (IGHV3-33)
ARRYRSGWYPFDY

SEQ ID NO: 4617 - protein, 10 aa, Homo sapiens
  Light chain CDR3 for antibody 2309 (IGKV1-39)
QQSYSTPMYT

SEQ ID NO: 4618 - protein, 13 aa, Homo sapiens
  Heavy chain CDR3 for antibody 2309 (IGHV3-11)
ARDGGAAAGTWDS

SEQ ID NO: 4619 - protein, 9 aa, Homo sapiens
  Light chain CDR3 for antibody 2310 (IGKV3-20)
QQYGSSPYT

SEQ ID NO: 4620 - protein, 13 aa, Homo sapiens
  Heavy chain CDR3 for antibody 2310 (IGHV3-23)
AKDRGGSYSYFDF

SEQ ID NO: 4621 - protein, 9 aa, Homo sapiens
  Light chain CDR3 for antibody 2311 (IGKV2-30)
MQGTHWPLT

SEQ ID NO: 4622 - protein, 17 aa, Homo sapiens
  Heavy chain CDR3 for antibody 2311 (IGHV1-18)
ARDEGYDILTGYPHFDY

SEQ ID NO: 4623 - protein, 9 aa, Homo sapiens
  Light chain CDR3 for antibody 2312 (IGKV3D-20)
QQYGSSPYT

SEQ ID NO: 4624 - protein, 17 aa, Homo sapiens
  Heavy chain CDR3 for antibody 2312 (IGHV3-33)
ARGDGDILTGYYEWFDP

SEQ ID NO: 4625 - protein, 9 aa, Homo sapiens
  Light chain CDR3 for antibody 2313 (IGKV1D-16)
QQYNSYPYT

SEQ ID NO: 4626 - protein, 15 aa, Homo sapiens
  Heavy chain CDR3 for antibody 2313 (IGHV3-33)
ARGYYYGSGSYPLDY

SEQ ID NO: 4627 - protein, 9 aa, Homo sapiens
  Light chain CDR3 for antibody 2314 (IGKV5-2)
LQHDNFPYT

SEQ ID NO: 4628 - protein, 19 aa, Homo sapiens
  Heavy chain CDR3 for antibody 2314 (IGHV3-33)
ARDSGYSGYDYYYYYGMDV

SEQ ID NO: 4629 - protein, 9 aa, Homo sapiens
  Light chain CDR3 for antibody 2315 (IGKV1-27)
QKYNSAPYT

SEQ ID NO: 4630 - protein, 10 aa, Homo sapiens
  Heavy chain CDR3 for antibody 2315 (IGHV3-33)
ARDVVVYFDY

SEQ ID NO: 4631 - protein, 8 aa, Homo sapiens
  Light chain CDR3 for antibody 2316 (IGKV3-11)
QQRSNWLT

SEQ ID NO: 4632 - protein, 12 aa, Homo sapiens
  Heavy chain CDR3 for antibody 2316 (IGHV1-46)
ARGLTGDHAVDI

SEQ ID NO: 4633 - protein, 9 aa, Homo sapiens
  Light chain CDR3 for antibody 2317 (IGKV2-30)
MQGTHWPLT

SEQ ID NO: 4634 - protein, 13 aa, Homo sapiens
  Heavy chain CDR3 for antibody 2317 (IGHV3-33)
ARRATLVRGVFDP

SEQ ID NO: 4635 - protein, 9 aa, Homo sapiens
  Light chain CDR3 for antibody 2318 (IGKV1-27)
QKYNSAPYT

SEQ ID NO: 4636 - protein, 9 aa, Homo sapiens
  Heavy chain CDR3 for antibody 2318 (IGHV3-30)
ARDYFHYDY

SEQ ID NO: 4637 - protein, 9 aa, Homo sapiens
  Light chain CDR3 for antibody 2319 (IGKV1-17)
LQHNSYPYT

SEQ ID NO: 4638 - protein, 19 aa, Homo sapiens
  Heavy chain CDR3 for antibody 2319 (IGHV3-33)
ARDRYYDILTGYSSYYFDY

SEQ ID NO: 4639 - protein, 9 aa, Homo sapiens
  Light chain CDR3 for antibody 2320 (IGKV6-21)
HQSSSLPYT

SEQ ID NO: 4640 - protein, 16 aa, Homo sapiens
  Heavy chain CDR3 for antibody 2320 (IGHV3-30)
ARDIAVAGHVYYGMDV

SEQ ID NO: 4641 - protein, 9 aa, Homo sapiens
  Light chain CDR3 for antibody 2321 (IGKV3D-7)
QQDYNLPLT

SEQ ID NO: 4642 - protein, 18 aa, Homo sapiens
  Heavy chain CDR3 for antibody 2321 (IGHV3-33)
AREIAAAGTKGLYYGMDV

SEQ ID NO: 4643 - protein, 9 aa, Homo sapiens
  Light chain CDR3 for antibody 2322 (IGKV3-20)
QQYGSSPYT

SEQ ID NO: 4644 - protein, 10 aa, Homo sapiens
  Heavy chain CDR3 for antibody 2322 (IGHV3-23)
AKENWNDFDY

SEQ ID NO: 4645 - protein, 8 aa, Homo sapiens
  Light chain CDR3 for antibody 2323 (IGKV3D-7)
QQDYNLLT

SEQ ID NO: 4646 - protein, 12 aa, Homo sapiens
  Heavy chain CDR3 for antibody 2323 (IGHV3-33)
ARGYFGSGYAHF

SEQ ID NO: 4647 - protein, 11 aa, Homo sapiens
  Light chain CDR3 for antibody 2324 (IGKV3-11)
QQRSNWPPTWT

SEQ ID NO: 4648 - protein, 14 aa, Homo sapiens
  Heavy chain CDR3 for antibody 2324 (IGHV4-39)
ARQDYDILTGLFDY

SEQ ID NO: 4649 - protein, 9 aa, Homo sapiens
  Light chain CDR3 for antibody 2325 (IGKV1-6)
LQDYNYPYT

SEQ ID NO: 4650 - protein, 21 aa, Homo sapiens
  Heavy chain CDR3 for antibody 2325 (IGHV1-18)
ASGVLIWFGELLSEDYYDMDV

SEQ ID NO: 4651 - protein, 9 aa, Homo sapiens
  Light chain CDR3 for antibody 2326 (IGKV3-20)
QQYGSSSWT

SEQ ID NO: 4652 - protein, 12 aa, Homo sapiens
  Heavy chain CDR3 for antibody 2326 (IGHV3-30)
ARDFTGHYTSDV

SEQ ID NO: 4653 - protein, 9 aa, Homo sapiens
  Light chain CDR3 for antibody 2327 (IGKV5-2)
LQHDNFPYT

SEQ ID NO: 4654 - protein, 19 aa, Homo sapiens
  Heavy chain CDR3 for antibody 2327 (IGHV3-23)
AKDGRSGSYDYYYYYGMDV

SEQ ID NO: 4655 - protein, 9 aa, Homo sapiens
  Light chain CDR3 for antibody 2328 (IGKV1-39)
QQSYRTPLT

SEQ ID NO: 4656 - protein, 16 aa, Homo sapiens
  Heavy chain CDR3 for antibody 2328 (IGHV1-24)
ATEDSSSTYYYYGLDV

SEQ ID NO: 4657 - protein, 9 aa, Homo sapiens
  Light chain CDR3 for antibody 2329 (IGKV1-9)
QQLNSYPLT

SEQ ID NO: 4658 - protein, 14 aa, Homo sapiens
  Heavy chain CDR3 for antibody 2329 (IGHV3-33)
ARDNILTAYYLFDY

SEQ ID NO: 4659 - protein, 9 aa, Homo sapiens
  Light chain CDR3 for antibody 2330 (IGKV5-2)
LQHDNFPWT

SEQ ID NO: 4660 - protein, 16 aa, Homo sapiens
  Heavy chain CDR3 for antibody 2330 (IGHV4-59)
AGGSGSYRDYYYGMDV

SEQ ID NO: 4661 - protein, 9 aa, Homo sapiens
  Light chain CDR3 for antibody 2331 (IGKV2-30)
MQGTHWPLT

SEQ ID NO: 4662 - protein, 13 aa, Homo sapiens
  Heavy chain CDR3 for antibody 2331 (IGHV3-23)
ASPFNWNDGFFDY

SEQ ID NO: 4663 - protein, 9 aa, Homo sapiens
  Light chain CDR3 for antibody 2332 (IGKV1-39)
QQSYSTPLT

SEQ ID NO: 4664 - protein, 13 aa, Homo sapiens
  Heavy chain CDR3 for antibody 2332 (IGHV4-39)
ARHPPSRDYGMDV

SEQ ID NO: 4665 - protein, 9 aa, Homo sapiens
  Light chain CDR3 for antibody 2333 (IGKV1-9)
QQLKSYPYT

SEQ ID NO: 4666 - protein, 11 aa, Homo sapiens
  Heavy chain CDR3 for antibody 2333 (IGHV3-33)
ARDRSSGPFDY

SEQ ID NO: 4667 - protein, 9 aa, Homo sapiens
  Light chain CDR3 for antibody 2334 (IGKV3D-7)
QQDYNLPYT

SEQ ID NO: 4668 - protein, 13 aa, Homo sapiens
  Heavy chain CDR3 for antibody 2334 (IGHV3-33)
ARAFTMVRGVIDY

SEQ ID NO: 4669 - protein, 9 aa, Homo sapiens
  Light chain CDR3 for antibody 2335 (IGKV5-2)
LQHDNFPYT

SEQ ID NO: 4670 - protein, 13 aa, Homo sapiens
  Heavy chain CDR3 for antibody 2335 (IGHV3-11)
ARDEGYSGYNLDN

SEQ ID NO: 4671 - protein, 9 aa, Homo sapiens
  Light chain CDR3 for antibody 2336 (IGKV1-6)
LQDYNYPHT

SEQ ID NO: 4672 - protein, 16 aa, Homo sapiens
  Heavy chain CDR3 for antibody 2336 (IGHV3-30)
ARDGVGATSYYYGMDV

SEQ ID NO: 4673 - protein, 9 aa, Homo sapiens
  Light chain CDR3 for antibody 2337 (IGKV3-20)
QQYGSSPYT

SEQ ID NO: 4674 - protein, 14 aa, Homo sapiens
  Heavy chain CDR3 for antibody 2337 (IGHV3-33)
AREDYYGPLNWFDP

SEQ ID NO: 4675 - protein, 8 aa, Homo sapiens
  Light chain CDR3 for antibody 2338 (IGKV1-5)
QQYNSYYT

SEQ ID NO: 4676 - protein, 14 aa, Homo sapiens
  Heavy chain CDR3 for antibody 2338 (IGHV3-23)
AKSRIVGALYYFDY

SEQ ID NO: 4677 - protein, 8 aa, Homo sapiens
  Light chain CDR3 for antibody 2339 (IGKV1D-13)
QQFNNYPT

SEQ ID NO: 4678 - protein, 13 aa, Homo sapiens
  Heavy chain CDR3 for antibody 2339 (IGHV4-59)
ARDAGYSSSWFDY

SEQ ID NO: 4679 - protein, 9 aa, Homo sapiens
  Light chain CDR3 for antibody 2340 (IGKV1-6)
LQDYNYPYT

SEQ ID NO: 4680 - protein, 19 aa, Homo sapiens
  Heavy chain CDR3 for antibody 2340 (IGHV3-33)
ARRRDDILTGWDYYFGMDV

SEQ ID NO: 4681 - protein, 9 aa, Homo sapiens
  Light chain CDR3 for antibody 2341 (IGKV1-9)
QQLISYPLT

SEQ ID NO: 4682 - protein, 11 aa, Homo sapiens
  Heavy chain CDR3 for antibody 2341 (IGHV3-33)
ARDRVLTPFDY

SEQ ID NO: 4683 - protein, 9 aa, Homo sapiens
  Light chain CDR3 for antibody 2342 (IGKV5-2)
LQHDNFPYT

SEQ ID NO: 4684 - protein, 11 aa, Homo sapiens
  Heavy chain CDR3 for antibody 2342 (IGHV3-23)
GEFSSGWSFDY

SEQ ID NO: 4685 - protein, 9 aa, Homo sapiens
  Light chain CDR3 for antibody 2343 (IGKV3D-20)
QQYGSSPYT

SEQ ID NO: 4686 - protein, 17 aa, Homo sapiens
  Heavy chain CDR3 for antibody 2343 (IGHV4-34)
ARDGSGSYTHYYYGMDV

SEQ ID NO: 4687 - protein, 9 aa, Homo sapiens
  Light chain CDR3 for antibody 2344 (IGKV1-17)
LQHNSYPYT

SEQ ID NO: 4688 - protein, 16 aa, Homo sapiens
  Heavy chain CDR3 for antibody 2344 (IGHV3-64)
ARGRYFDWLLGDWFDP

SEQ ID NO: 4689 - protein, 9 aa, Homo sapiens
  Light chain CDR3 for antibody 2345 (IGKV2-30)
MQGTHWPLT

SEQ ID NO: 4690 - protein, 14 aa, Homo sapiens
  Heavy chain CDR3 for antibody 2345 (IGHV3-33)
ARDWNDVYYYGMDV

SEQ ID NO: 4691 - protein, 9 aa, Homo sapiens
  Light chain CDR3 for antibody 2346 (IGKV1-39)
QQSYSTPLT

SEQ ID NO: 4692 - protein, 17 aa, Homo sapiens
  Heavy chain CDR3 for antibody 2346 (IGHV3-23)
AKDGSFYSSGWYDAFDI

SEQ ID NO: 4693 - protein, 9 aa, Homo sapiens
  Light chain CDR3 for antibody 2347 (IGKV6-21)
HQSSSLPWT

SEQ ID NO: 4694 - protein, 14 aa, Homo sapiens
  Heavy chain CDR3 for antibody 2347 (IGHV3-23)
AKEDTAMASYYFDY

SEQ ID NO: 4695 - protein, 9 aa, Homo sapiens
  Light chain CDR3 for antibody 2348 (IGKV3-20)
QQYGSSPYT

SEQ ID NO: 4696 - protein, 20 aa, Homo sapiens
  Heavy chain CDR3 for antibody 2348 (IGHV3-33)
ARDWMVRGVIITDYYYGMDV

SEQ ID NO: 4697 - protein, 9 aa, Homo sapiens
  Light chain CDR3 for antibody 2349 (IGKV5-2)
LQHDNFPWT

SEQ ID NO: 4698 - protein, 11 aa, Homo sapiens
  Heavy chain CDR3 for antibody 2349 (IGHV4-59)
ARDGSWEPFDY

SEQ ID NO: 4699 - protein, 9 aa, Homo sapiens
  Light chain CDR3 for antibody 2350 (IGKV3-20)
QQYGSSPYT

SEQ ID NO: 4700 - protein, 17 aa, Homo sapiens
  Heavy chain CDR3 for antibody 2350 (IGHV3-33)
AREDYDILTGYPFYFDY

SEQ ID NO: 4701 - protein, 9 aa, Homo sapiens
  Light chain CDR3 for antibody 2351 (IGKV1D-16)
QQYNSYPYT

SEQ ID NO: 4702 - protein, 13 aa, Homo sapiens
  Heavy chain CDR3 for antibody 2351 (IGHV4-39)
ARRGVVAPAAFDY

SEQ ID NO: 4703 - protein, 9 aa, Homo sapiens
  Light chain CDR3 for antibody 2352 (IGKV1D-16)
QQYNSYPLT

SEQ ID NO: 4704 - protein, 19 aa, Homo sapiens
  Heavy chain CDR3 for antibody 2352 (IGHV1-18)
ARGGHIGVVTAFHGYGMDV

SEQ ID NO: 4705 - protein, 8 aa, Homo sapiens
  Light chain CDR3 for antibody 2353 (IGKV3-20)
QQYGRSFT

SEQ ID NO: 4706 - protein, 11 aa, Homo sapiens
  Heavy chain CDR3 for antibody 2353 (IGHV4-59)
AREMGHDTFDI

SEQ ID NO: 4707 - protein, 9 aa, Homo sapiens
  Light chain CDR3 for antibody 2354 (IGKV1-27)
QKYNSAPYT

SEQ ID NO: 4708 - protein, 13 aa, Homo sapiens
  Heavy chain CDR3 for antibody 2354 (IGHV3-33)
ARTDYYFYYGLDV

SEQ ID NO: 4709 - protein, 9 aa, Homo sapiens
  Light chain CDR3 for antibody 2355 (IGKV3-20)
QQYGSSPLT

SEQ ID NO: 4710 - protein, 14 aa, Homo sapiens
  Heavy chain CDR3 for antibody 2355 (IGHV1-46)
ARDGVGAKEGGFDY

SEQ ID NO: 4711 - protein, 9 aa, Homo sapiens
  Light chain CDR3 for antibody 2356 (IGKV1-9)
QQGNTYSRT

SEQ ID NO: 4712 - protein, 18 aa, Homo sapiens
  Heavy chain CDR3 for antibody 2356 (IGHV4-59)
AREGDYVWGSYRPNWFDP

SEQ ID NO: 4713 - protein, 9 aa, Homo sapiens
  Light chain CDR3 for antibody 2357 (IGKV1D-16)
QQYNSYPYT

SEQ ID NO: 4714 - protein, 14 aa, Homo sapiens
  Heavy chain CDR3 for antibody 2357 (IGHV3-23)
AKGGDVLTGYYPDY

SEQ ID NO: 4715 - protein, 9 aa, Homo sapiens
  Light chain CDR3 for antibody 2358 (IGKV3-20)
QQYGSSPYT

SEQ ID NO: 4716 - protein, 18 aa, Homo sapiens
  Heavy chain CDR3 for antibody 2358 (IGHV3-33)
ARKGGYYSGSGSYRHFDF

SEQ ID NO: 4717 - protein, 9 aa, Homo sapiens
  Light chain CDR3 for antibody 2359 (IGKV1-17)
LQHNSYPLT

SEQ ID NO: 4718 - protein, 14 aa, Homo sapiens
  Heavy chain CDR3 for antibody 2359 (IGHV1-46)
ARKGIVGGFDAFDV

SEQ ID NO: 4719 - protein, 9 aa, Homo sapiens
  Light chain CDR3 for antibody 2360 (IGKV5-2)
LQHDNFPWT

SEQ ID NO: 4720 - protein, 17 aa, Homo sapiens
  Heavy chain CDR3 for antibody 2360 (IGHV4-34)
ARDGSGSYTHYYYGMDV

SEQ ID NO: 4721 - protein, 9 aa, Homo sapiens
  Light chain CDR3 for antibody 2361 (IGKV1-6)
LQDYNYPYT

SEQ ID NO: 4722 - protein, 18 aa, Homo sapiens
  Heavy chain CDR3 for antibody 2361 (IGHV3-33)
AREGYFGSGSYYRNWFDP

SEQ ID NO: 4723 - protein, 9 aa, Homo sapiens
  Light chain CDR3 for antibody 2362 (IGKV1-39)
QQSYSTPLT

SEQ ID NO: 4724 - protein, 11 aa, Homo sapiens
  Heavy chain CDR3 for antibody 2362 (IGHV3-33)
ARDKSSGWSDY

SEQ ID NO: 4725 - protein, 9 aa, Homo sapiens
  Light chain CDR3 for antibody 2363 (IGKV3-20)
QQYGSSPYT

SEQ ID NO: 4726 - protein, 20 aa, Homo sapiens
  Heavy chain CDR3 for antibody 2363 (IGHV1-8)
ARGDGTMVRGIYYYYYGMDV

SEQ ID NO: 4727 - protein, 9 aa, Homo sapiens
  Light chain CDR3 for antibody 2364 (IGKV3-20)
QQFGSSPYT

SEQ ID NO: 4728 - protein, 5 aa, Homo sapiens
  Heavy chain CDR3 for antibody 2364 (IGHV3-33)
ARGGL

SEQ ID NO: 4729 - protein, 11 aa, Homo sapiens
  Light chain CDR3 for antibody 2365 (IGKV3-11)
QQRSNWPPTWT

SEQ ID NO: 4730 - protein, 13 aa, Homo sapiens
  Heavy chain CDR3 for antibody 2365 (IGHV4-39)
ARQWPSGYWYFDL

SEQ ID NO: 4731 - protein, 9 aa, Homo sapiens
  Light chain CDR3 for antibody 2366 (IGKV1D-13)
QQFNNYPYT

SEQ ID NO: 4732 - protein, 20 aa, Homo sapiens
  Heavy chain CDR3 for antibody 2366 (IGHV3-33)
SRGGATLVRGVIDYYYGMDV

SEQ ID NO: 4733 - protein, 9 aa, Homo sapiens
  Light chain CDR3 for antibody 2367 (IGKV3-20)
QQYGSSPYT

SEQ ID NO: 4734 - protein, 15 aa, Homo sapiens
  Heavy chain CDR3 for antibody 2367 (IGHV3-33)
ARDRVVRGVMGYFDY

SEQ ID NO: 4735 - protein, 9 aa, Homo sapiens
  Light chain CDR3 for antibody 2368 (IGKV3-20)
QQYGSSPYT

SEQ ID NO: 4736 - protein, 14 aa, Homo sapiens
  Heavy chain CDR3 for antibody 2368 (IGHV3-20)
ARDEGSGGYDVFDI

SEQ ID NO: 4737 - protein, 9 aa, Homo sapiens
  Light chain CDR3 for antibody 2369 (IGKV2-30)
MQGTHWPLT

SEQ ID NO: 4738 - protein, 11 aa, Homo sapiens
  Heavy chain CDR3 for antibody 2369 (IGHV4-59)
AREMGHDTFDI

SEQ ID NO: 4739 - protein, 9 aa, Homo sapiens
  Light chain CDR3 for antibody 2370 (IGKV6-21)
HQSSSLPYT

SEQ ID NO: 4740 - protein, 10 aa, Homo sapiens
  Heavy chain CDR3 for antibody 2370 (IGHV3-33)
ARNILTPLDY

SEQ ID NO: 4741 - protein, 9 aa, Homo sapiens
  Light chain CDR3 for antibody 2371 (IGKV3-20)
QQYGSSPYT

SEQ ID NO: 4742 - protein, 14 aa, Homo sapiens
  Heavy chain CDR3 for antibody 2371 (IGHV3-33)
ARDTVAAGFNGMDV

SEQ ID NO: 4743 - protein, 9 aa, Homo sapiens
  Light chain CDR3 for antibody 2372 (IGKV1-9)
QQLNSLPRT

SEQ ID NO: 4744 - protein, 14 aa, Homo sapiens
  Heavy chain CDR3 for antibody 2372 (IGHV3-33)
ARDHRDNSYYGMDV

SEQ ID NO: 4745 - protein, 9 aa, Homo sapiens
  Light chain CDR3 for antibody 2373 (IGKV1-17)
QQYNNWPYT

SEQ ID NO: 4746 - protein, 17 aa, Homo sapiens
  Heavy chain CDR3 for antibody 2373 (IGHV4-59)
ARDPVGATKYYYYGMDV

SEQ ID NO: 4747 - protein, 9 aa, Homo sapiens
  Light chain CDR3 for antibody 2374 (IGKV4-1)
QQYYSSPFT

SEQ ID NO: 4748 - protein, 14 aa, Homo sapiens
  Heavy chain CDR3 for antibody 2374 (IGHV3-73)
AASNSSGWLEYFQH

SEQ ID NO: 4749 - protein, 9 aa, Homo sapiens
  Light chain CDR3 for antibody 2375 (IGKV3-20)
QQYGSSPYT

SEQ ID NO: 4750 - protein, 13 aa, Homo sapiens
  Heavy chain CDR3 for antibody 2375 (IGHV3-33)
ASGYSGYDWYFDL

SEQ ID NO: 4751 - protein, 9 aa, Homo sapiens
  Light chain CDR3 for antibody 2376 (IGKV3-20)
QQYGSSPYT

SEQ ID NO: 4752 - protein, 14 aa, Homo sapiens
  Heavy chain CDR3 for antibody 2376 (IGHV3-33)
ARKGYSGRYYYFDY

SEQ ID NO: 4753 - protein, 9 aa, Homo sapiens
  Light chain CDR3 for antibody 2377 (IGKV6-21)
HQSSSLPYT

SEQ ID NO: 4754 - protein, 11 aa, Homo sapiens
  Heavy chain CDR3 for antibody 2377 (IGHV1-46)
AREEDLGAFDI

SEQ ID NO: 4755 - protein, 9 aa, Homo sapiens
  Light chain CDR3 for antibody 2378 (IGKV1D-13)
QQFNNYPHT

SEQ ID NO: 4756 - protein, 15 aa, Homo sapiens
  Heavy chain CDR3 for antibody 2378 (IGHV3-23)
AKEALRYFDWSGMDV

SEQ ID NO: 4757 - protein, 9 aa, Homo sapiens
  Light chain CDR3 for antibody 2379 (IGKV1D-16)
QQYNSYPLT

SEQ ID NO: 4758 - protein, 11 aa, Homo sapiens
  Heavy chain CDR3 for antibody 2379 (IGHV1-46)
AREEDLGAFDI

SEQ ID NO: 4759 - protein, 9 aa, Homo sapiens
  Light chain CDR3 for antibody 2380 (IGKV1D-13)
QRFNNYLYT

SEQ ID NO: 4760 - protein, 15 aa, Homo sapiens
  Heavy chain CDR3 for antibody 2380 (IGHV3-30)
ARGAMVRGVDYGMDV

SEQ ID NO: 4761 - protein, 9 aa, Homo sapiens
  Light chain CDR3 for antibody 2381 (IGKV1-9)
QQYNSYPLT

SEQ ID NO: 4762 - protein, 12 aa, Homo sapiens
  Heavy chain CDR3 for antibody 2381 (IGHV4-59)
ARHPRYLDAFDI

SEQ ID NO: 4763 - protein, 9 aa, Homo sapiens
  Light chain CDR3 for antibody 2382 (IGKV6-21)
HQSSSLPYT

SEQ ID NO: 4764 - protein, 15 aa, Homo sapiens
  Heavy chain CDR3 for antibody 2382 (IGHV3-33)
AKDRNSGYDWGGFDY

SEQ ID NO: 4765 - protein, 9 aa, Homo sapiens
  Light chain CDR3 for antibody 2383 (IGKV3-20)
QQYGSSPYT

SEQ ID NO: 4766 - protein, 18 aa, Homo sapiens
  Heavy chain CDR3 for antibody 2383 (IGHV3-33)
AREGSYYGSGSFPNWFDP

SEQ ID NO: 4767 - protein, 9 aa, Homo sapiens
  Light chain CDR3 for antibody 2384 (IGKV6-21)
HQSSSLPYT

SEQ ID NO: 4768 - protein, 26 aa, Homo sapiens
  Heavy chain CDR3 for antibody 2384 (IGHV4-39)
ARQGLLWFGDLKAYDSSGYYYGYFHH

SEQ ID NO: 4769 - protein, 10 aa, Homo sapiens
  Light chain CDR3 for antibody 2385 (IGKV3-11)
QQRSNWPIFT

SEQ ID NO: 4770 - protein, 14 aa, Homo sapiens
  Heavy chain CDR3 for antibody 2385 (IGHV4-39)
ARQDYDILTGLFDY

SEQ ID NO: 4771 - protein, 9 aa, Homo sapiens
  Light chain CDR3 for antibody 2386 (IGKV3-20)
QQYGSSPLT

SEQ ID NO: 4772 - protein, 17 aa, Homo sapiens
  Heavy chain CDR3 for antibody 2386 (IGHV1-8)
ARGDYYGSGSPYWYFDL

SEQ ID NO: 4773 - protein, 8 aa, Homo sapiens
  Light chain CDR3 for antibody 2387 (IGKV1D-13)
QQFNNYPT

SEQ ID NO: 4774 - protein, 11 aa, Homo sapiens
  Heavy chain CDR3 for antibody 2387 (IGHV3-33)
ARDRVLTPFDY

SEQ ID NO: 4775 - protein, 9 aa, Homo sapiens
  Light chain CDR3 for antibody 2388 (IGKV1-17)
LQHNSYPYT

SEQ ID NO: 4776 - protein, 13 aa, Homo sapiens
  Heavy chain CDR3 for antibody 2388 (IGHV3-11)
ARDEGYRGYVLDN

SEQ ID NO: 4777 - protein, 9 aa, Homo sapiens
  Light chain CDR3 for antibody 2389 (IGKV3-15)
QQYNNWPLT

SEQ ID NO: 4778 - protein, 11 aa, Homo sapiens
  Heavy chain CDR3 for antibody 2389 (IGHV4-59)
ARSIRYSVFDY

SEQ ID NO: 4779 - protein, 9 aa, Homo sapiens
  Light chain CDR3 for antibody 2390 (IGKV1-27)
QKYNSAPYT

SEQ ID NO: 4780 - protein, 17 aa, Homo sapiens
  Heavy chain CDR3 for antibody 2390 (IGHV4-59)
ARDFLVRGEGSYYGMDV

SEQ ID NO: 4781 - protein, 9 aa, Homo sapiens
  Light chain CDR3 for antibody 2391 (IGKV1-27)
QKYNSAPYT

SEQ ID NO: 4782 - protein, 10 aa, Homo sapiens
  Heavy chain CDR3 for antibody 2391 (IGHV3-23)
AKGDRWRFDP

SEQ ID NO: 4783 - protein, 9 aa, Homo sapiens
  Light chain CDR3 for antibody 2392 (IGKV1-39)
QQSYSTPLT

SEQ ID NO: 4784 - protein, 12 aa, Homo sapiens
  Heavy chain CDR3 for antibody 2392 (IGHV3-33)
ASRDILTGYLGY

SEQ ID NO: 4785 - protein, 9 aa, Homo sapiens
  Light chain CDR3 for antibody 2393 (IGKV1D-16)
QQYNSYPLT

SEQ ID NO: 4786 - protein, 17 aa, Homo sapiens
  Heavy chain CDR3 for antibody 2393 (IGHV3-30)
AREGVRGLIYYYYGMDV

SEQ ID NO: 4787 - protein, 9 aa, Homo sapiens
  Light chain CDR3 for antibody 2394 (IGKV6-21)
HQSSSLPYT

SEQ ID NO: 4788 - protein, 15 aa, Homo sapiens
  Heavy chain CDR3 for antibody 2394 (IGHV3-33)
AREGLRYFHYYGMDV

SEQ ID NO: 4789 - protein, 9 aa, Homo sapiens
  Light chain CDR3 for antibody 2395 (IGKV3-20)
QQYGSSPYT

SEQ ID NO: 4790 - protein, 24 aa, Homo sapiens
  Heavy chain CDR3 for antibody 2395 (IGHV1-46)
ARDEARGLLTGYYNMREYYYGMDV

SEQ ID NO: 4791 - protein, 9 aa, Homo sapiens
  Light chain CDR3 for antibody 2396 (IGKV2-30)
MQGTHWPLT

SEQ ID NO: 4792 - protein, 13 aa, Homo sapiens
  Heavy chain CDR3 for antibody 2396 (IGHV3-33)
ARDQRYSSGWYDY

SEQ ID NO: 4793 - protein, 9 aa, Homo sapiens
  Light chain CDR3 for antibody 2397 (IGKV1D-13)
QQFNNYPHT

SEQ ID NO: 4794 - protein, 13 aa, Homo sapiens
  Heavy chain CDR3 for antibody 2397 (IGHV4-39)
ARHVLLWFGEFDP

SEQ ID NO: 4795 - protein, 9 aa, Homo sapiens
  Light chain CDR3 for antibody 2398 (IGKV1-17)
LQHNSYPWT

SEQ ID NO: 4796 - protein, 13 aa, Homo sapiens
  Heavy chain CDR3 for antibody 2398 (IGHV3-21)
ARDSTLVRGVFPY

SEQ ID NO: 4797 - protein, 9 aa, Homo sapiens
  Light chain CDR3 for antibody 2399 (IGKV6-21)
HQSSSLPYT

SEQ ID NO: 4798 - protein, 13 aa, Homo sapiens
  Heavy chain CDR3 for antibody 2399 (IGHV4-39)
ARRDVLAPAAFDY

SEQ ID NO: 4799 - protein, 9 aa, Homo sapiens
  Light chain CDR3 for antibody 2400 (IGKV1-9)
QQLKSYLYT

SEQ ID NO: 4800 - protein, 18 aa, Homo sapiens
  Heavy chain CDR3 for antibody 2400 (IGHV4-59)
AREGDYVWGSYRPNWFDP

SEQ ID NO: 4801 - protein, 9 aa, Homo sapiens
  Light chain CDR3 for antibody 2401 (IGKV5-2)
LQHDNFPWT

SEQ ID NO: 4802 - protein, 19 aa, Homo sapiens
  Heavy chain CDR3 for antibody 2401 (IGHV1-24)
ATAGLQWFGEKIGYYGMDV

SEQ ID NO: 4803 - protein, 9 aa, Homo sapiens
  Light chain CDR3 for antibody 2402 (IGKV1-39)
QQSYSTPLT

SEQ ID NO: 4804 - protein, 15 aa, Homo sapiens
  Heavy chain CDR3 for antibody 2402 (IGHV3-33)
ARDSRPEIIGPPFDY

SEQ ID NO: 4805 - protein, 9 aa, Homo sapiens
  Light chain CDR3 for antibody 2403 (IGKV1-39)
QQSYSTPLT

SEQ ID NO: 4806 - protein, 13 aa, Homo sapiens
  Heavy chain CDR3 for antibody 2403 (IGHV1-46)
ARVKLGSLGAFDI

SEQ ID NO: 4807 - protein, 8 aa, Homo sapiens
  Light chain CDR3 for antibody 2404 (IGKV3-20)
QQYGSSLT

SEQ ID NO: 4808 - protein, 16 aa, Homo sapiens
  Heavy chain CDR3 for antibody 2404 (IGHV3-23)
AKEGMVLRYFDWLWDY

SEQ ID NO: 4809 - protein, 9 aa, Homo sapiens
  Light chain CDR3 for antibody 2405 (IGKV3-20)
QQYGSSPYT

SEQ ID NO: 4810 - protein, 17 aa, Homo sapiens
  Heavy chain CDR3 for antibody 2405 (IGHV3-33)
ARDPARGNVRSFYGLDV

SEQ ID NO: 4811 - protein, 9 aa, Homo sapiens
  Light chain CDR3 for antibody 2406 (IGKV1D-13)
QQFNNYPYT

SEQ ID NO: 4812 - protein, 16 aa, Homo sapiens
  Heavy chain CDR3 for antibody 2406 (IGHV3-33)
ARGDDILTHQYYGVDV

SEQ ID NO: 4813 - protein, 11 aa, Homo sapiens
  Light chain CDR3 for antibody 2407 (IGKV3-11)
QQRSNWPPTWT

SEQ ID NO: 4814 - protein, 13 aa, Homo sapiens
  Heavy chain CDR3 for antibody 2407 (IGHV4-39)
ARREVVGGRGFDY

SEQ ID NO: 4815 - protein, 10 aa, Homo sapiens
  Light chain CDR3 for antibody 2408 (IGKV3-11)
QQRSNWPIFT

SEQ ID NO: 4816 - protein, 18 aa, Homo sapiens
  Heavy chain CDR3 for antibody 2408 (IGHV1-46)
ARDGDYVWGSYRSDWFDP

SEQ ID NO: 4817 - protein, 9 aa, Homo sapiens
  Light chain CDR3 for antibody 2409 (IGKV6-21)
HQSSSLPYT

SEQ ID NO: 4818 - protein, 13 aa, Homo sapiens
  Heavy chain CDR3 for antibody 2409 (IGHV3-23)
AKDRGLRYYGMDV

SEQ ID NO: 4819 - protein, 8 aa, Homo sapiens
  Light chain CDR3 for antibody 2410 (IGKV3D-7)
QQDYNLVT

SEQ ID NO: 4820 - protein, 9 aa, Homo sapiens
  Heavy chain CDR3 for antibody 2410 (IGHV4-59)
AREGGSGSL

SEQ ID NO: 4821 - protein, 9 aa, Homo sapiens
  Light chain CDR3 for antibody 2411 (IGKV6-21)
HQSSSLPHT

SEQ ID NO: 4822 - protein, 15 aa, Homo sapiens
  Heavy chain CDR3 for antibody 2411 (IGHV1-18)
ARGSYDSSGYYYFDY

SEQ ID NO: 4823 - protein, 9 aa, Homo sapiens
  Light chain CDR3 for antibody 2412 (IGKV1-39)
QQSYRTPLT

SEQ ID NO: 4824 - protein, 12 aa, Homo sapiens
  Heavy chain CDR3 for antibody 2412 (IGHV3-33)
ARVDAAAPYFDY

SEQ ID NO: 4825 - protein, 9 aa, Homo sapiens
  Light chain CDR3 for antibody 2413 (IGKV1-6)
LQDYNYPYT

SEQ ID NO: 4826 - protein, 19 aa, Homo sapiens
  Heavy chain CDR3 for antibody 2413 (IGHV3-20)
ARDPPTQALHYYYYYGMDV

SEQ ID NO: 4827 - protein, 9 aa, Homo sapiens
  Light chain CDR3 for antibody 2414 (IGKV1-16)
QQYKSYPYT

SEQ ID NO: 4828 - protein, 18 aa, Homo sapiens
  Heavy chain CDR3 for antibody 2414 (IGHV4-59)
AREGGYVWGSYRSNWFDP

SEQ ID NO: 4829 - protein, 9 aa, Homo sapiens
  Light chain CDR3 for antibody 2415 (IGKV5-2)
LQHDNFPYT

SEQ ID NO: 4830 - protein, 13 aa, Homo sapiens
  Heavy chain CDR3 for antibody 2415 (IGHV3-33)
ARDYTMVRGVMNY

SEQ ID NO: 4831 - protein, 9 aa, Homo sapiens
  Light chain CDR3 for antibody 2416 (IGKV5-2)
LQHDNFPWT

SEQ ID NO: 4832 - protein, 20 aa, Homo sapiens
  Heavy chain CDR3 for antibody 2416 (IGHV3-33)
SRGGATLVRGVIDYYYGMDV

SEQ ID NO: 4833 - protein, 9 aa, Homo sapiens
  Light chain CDR3 for antibody 2417 (IGKV5-2)
LQHDNFPYT

SEQ ID NO: 4834 - protein, 17 aa, Homo sapiens
  Heavy chain CDR3 for antibody 2417 (IGHV1-18)
ARERYYGSGNYKYNMDV

SEQ ID NO: 4835 - protein, 9 aa, Homo sapiens
  Light chain CDR3 for antibody 2418 (IGKV1-27)
QKYNSAPYT

SEQ ID NO: 4836 - protein, 15 aa, Homo sapiens
  Heavy chain CDR3 for antibody 2418 (IGHV3-23)
AKDGSYYDYYYGMDV

SEQ ID NO: 4837 - protein, 9 aa, Homo sapiens
  Light chain CDR3 for antibody 2419 (IGKV1-17)
LQHNSYPYT

SEQ ID NO: 4838 - protein, 14 aa, Homo sapiens
  Heavy chain CDR3 for antibody 2419 (IGHV4-39)
ARQGTMIRGGYFDY

SEQ ID NO: 4839 - protein, 9 aa, Homo sapiens
  Light chain CDR3 for antibody 2420 (IGKV5-2)
LQHDNFPYT

SEQ ID NO: 4840 - protein, 16 aa, Homo sapiens
  Heavy chain CDR3 for antibody 2420 (IGHV3-33)
ARDKNTDYDILTGFDY

SEQ ID NO: 4841 - protein, 9 aa, Homo sapiens
  Light chain CDR3 for antibody 2421 (IGKV1-27)
QKYNSAPYT

SEQ ID NO: 4842 - protein, 14 aa, Homo sapiens
  Heavy chain CDR3 for antibody 2421 (IGHV3-33)
VRDQGSMVRGGGDY

SEQ ID NO: 4843 - protein, 9 aa, Homo sapiens
  Light chain CDR3 for antibody 2422 (IGKV1-27)
QKYNSAPYT

SEQ ID NO: 4844 - protein, 21 aa, Homo sapiens
  Heavy chain CDR3 for antibody 2422 (IGHV3-33)
ARKRLYDILTGYYKAYYGMDV

SEQ ID NO: 4845 - protein, 8 aa, Homo sapiens
  Light chain CDR3 for antibody 2423 (IGKV1D-13)
QQFNNYPT

SEQ ID NO: 4846 - protein, 13 aa, Homo sapiens
  Heavy chain CDR3 for antibody 2423 (IGHV4-34)
ASNFYYYYYGMDV

SEQ ID NO: 4847 - protein, 9 aa, Homo sapiens
  Light chain CDR3 for antibody 2424 (IGKV1-6)
LQDYNYPYT

SEQ ID NO: 4848 - protein, 14 aa, Homo sapiens
  Heavy chain CDR3 for antibody 2424 (IGHV3-23)
AKGGDVLTGYYPDY

SEQ ID NO: 4849 - protein, 9 aa, Homo sapiens
  Light chain CDR3 for antibody 2425 (IGKV3-20)
QQYGSSPYT

SEQ ID NO: 4850 - protein, 16 aa, Homo sapiens
  Heavy chain CDR3 for antibody 2425 (IGHV3-13)
ARDRSYESYYYYGMDV

SEQ ID NO: 4851 - protein, 9 aa, Homo sapiens
  Light chain CDR3 for antibody 2426 (IGKV3D-7)
QQDYNLPLT

SEQ ID NO: 4852 - protein, 13 aa, Homo sapiens
  Heavy chain CDR3 for antibody 2426 (IGHV3-11)
ARDEGYRGYVLDN

SEQ ID NO: 4853 - protein, 9 aa, Homo sapiens
  Light chain CDR3 for antibody 2427 (IGKV6-21)
HQSSSLPYT

SEQ ID NO: 4854 - protein, 12 aa, Homo sapiens
  Heavy chain CDR3 for antibody 2427 (IGHV3-33)
ARDGYSSRNFDY

SEQ ID NO: 4855 - protein, 9 aa, Homo sapiens
  Light chain CDR3 for antibody 2428 (IGKV1-39)
QQSYRTPLT

SEQ ID NO: 4856 - protein, 9 aa, Homo sapiens
  Heavy chain CDR3 for antibody 2428 (IGHV1-8)
ARGRLDFDY

SEQ ID NO: 4857 - protein, 9 aa, Homo sapiens
  Light chain CDR3 for antibody 2429 (IGKV1D-16)
QQYNSFPLT

SEQ ID NO: 4858 - protein, 16 aa, Homo sapiens
  Heavy chain CDR3 for antibody 2429 (IGHV4-59)
ARDTPYYSGSGRPFDS

SEQ ID NO: 4859 - protein, 9 aa, Homo sapiens
  Light chain CDR3 for antibody 2430 (IGKV1D-16)
QQYNSYPLT

SEQ ID NO: 4860 - protein, 14 aa, Homo sapiens
  Heavy chain CDR3 for antibody 2430 (IGHV3-33)
ARDTVAAGFNGMDV

SEQ ID NO: 4861 - protein, 9 aa, Homo sapiens
  Light chain CDR3 for antibody 2431 (IGKV1D-13)
QQFNNYPHT

SEQ ID NO: 4862 - protein, 18 aa, Homo sapiens
  Heavy chain CDR3 for antibody 2431 (IGHV3-33)
ARGYYGSGNFYKDSGMDV

SEQ ID NO: 4863 - protein, 9 aa, Homo sapiens
  Light chain CDR3 for antibody 2432 (IGKV3D-20)
QQYGSSPYT

SEQ ID NO: 4864 - protein, 16 aa, Homo sapiens
  Heavy chain CDR3 for antibody 2432 (IGHV3-33)
ARGDDILTHQYYGVDV

SEQ ID NO: 4865 - protein, 9 aa, Homo sapiens
  Light chain CDR3 for antibody 2433 (IGKV1-39)
QQSYRTPLT

SEQ ID NO: 4866 - protein, 17 aa, Homo sapiens
  Heavy chain CDR3 for antibody 2433 (IGHV1-18)
ARERYYGSGIYKYAMDV

SEQ ID NO: 4867 - protein, 9 aa, Homo sapiens
  Light chain CDR3 for antibody 2434 (IGKV1-16)
QHYNDYPFT

SEQ ID NO: 4868 - protein, 11 aa, Homo sapiens
  Heavy chain CDR3 for antibody 2434 (IGHV3-33)
ARDRSSGPFDY

SEQ ID NO: 4869 - protein, 9 aa, Homo sapiens
  Light chain CDR3 for antibody 2435 (IGKV5-2)
LQHDNFPWT

SEQ ID NO: 4870 - protein, 18 aa, Homo sapiens
  Heavy chain CDR3 for antibody 2435 (IGHV3-33)
ARDYDSLTTYPEDYGMDV

SEQ ID NO: 4871 - protein, 9 aa, Homo sapiens
  Light chain CDR3 for antibody 2436 (IGKV1-27)
QKYNSAPYT

SEQ ID NO: 4872 - protein, 20 aa, Homo sapiens
  Heavy chain CDR3 for antibody 2436 (IGHV3-20)
ARDLCSSTSCYGYYYYGMDV

SEQ ID NO: 4873 - protein, 9 aa, Homo sapiens
  Light chain CDR3 for antibody 2437 (IGKV3-20)
QQYGSSPYT

SEQ ID NO: 4874 - protein, 15 aa, Homo sapiens
  Heavy chain CDR3 for antibody 2437 (IGHV3-23)
AKEFTMVRGVITPDY

SEQ ID NO: 4875 - protein, 9 aa, Homo sapiens
  Light chain CDR3 for antibody 2438 (IGKV1-17)
LQHNSYPWT

SEQ ID NO: 4876 - protein, 17 aa, Homo sapiens
  Heavy chain CDR3 for antibody 2438 (IGHV4-39)
ARQGWYYGSGSSLLFDY

SEQ ID NO: 4877 - protein, 11 aa, Homo sapiens
  Light chain CDR3 for antibody 2439 (IGKV3-11)
QQRSNWPPTWT

SEQ ID NO: 4878 - protein, 9 aa, Homo sapiens
  Heavy chain CDR3 for antibody 2439 (IGHV4-59)
AREGGSGSL

SEQ ID NO: 4879 - protein, 9 aa, Homo sapiens
  Light chain CDR3 for antibody 2440 (IGKV3-20)
QQYGSSPYT

SEQ ID NO: 4880 - protein, 9 aa, Homo sapiens
  Heavy chain CDR3 for antibody 2440 (IGHV3-30)
ARDNWGFDY

SEQ ID NO: 4881 - protein, 9 aa, Homo sapiens
  Light chain CDR3 for antibody 2441 (IGKV6-21)
HQSSSLPYT

SEQ ID NO: 4882 - protein, 19 aa, Homo sapiens
  Heavy chain CDR3 for antibody 2441 (IGHV3-23)
AKDGRSGSYDYYYYYGMDV

SEQ ID NO: 4883 - protein, 9 aa, Homo sapiens
  Light chain CDR3 for antibody 2442 (IGKV6-21)
HQSSSLPYT

SEQ ID NO: 4884 - protein, 17 aa, Homo sapiens
  Heavy chain CDR3 for antibody 2442 (IGHV3-30)
AREGVRGLIYYYYGMDV

SEQ ID NO: 4885 - protein, 9 aa, Homo sapiens
  Light chain CDR3 for antibody 2443 (IGKV1-16)
QQYSRYPYT

SEQ ID NO: 4886 - protein, 18 aa, Homo sapiens
  Heavy chain CDR3 for antibody 2443 (IGHV4-59)
AREGDYVWGSYRPNWFDP

SEQ ID NO: 4887 - protein, 9 aa, Homo sapiens
  Light chain CDR3 for antibody 2444 (IGKV3-11)
QQRSNWPYT

SEQ ID NO: 4888 - protein, 8 aa, Homo sapiens
  Heavy chain CDR3 for antibody 2444 (IGHV3-23)
EKSAGEDV

SEQ ID NO: 4889 - protein, 9 aa, Homo sapiens
  Light chain CDR3 for antibody 2445 (IGKV3-11)
QQRSNWPLT

SEQ ID NO: 4890 - protein, 10 aa, Homo sapiens
  Heavy chain CDR3 for antibody 2445 (IGHV3-33)
ARDVVVYFDY

SEQ ID NO: 4891 - protein, 9 aa, Homo sapiens
  Light chain CDR3 for antibody 2446 (IGKV5-2)
LQHDNFPWT

SEQ ID NO: 4892 - protein, 22 aa, Homo sapiens
  Heavy chain CDR3 for antibody 2446 (IGHV4-59)
AREINYGSGSYYNEDYYYGMDV

SEQ ID NO: 4893 - protein, 9 aa, Homo sapiens
  Light chain CDR3 for antibody 2447 (IGKV6-21)
HQSSSLPYT

SEQ ID NO: 4894 - protein, 19 aa, Homo sapiens
  Heavy chain CDR3 for antibody 2447 (IGHV3-33)
TRDPHYDILTGYAYYGMDV

SEQ ID NO: 4895 - protein, 9 aa, Homo sapiens
  Light chain CDR3 for antibody 2448 (IGKV1-16)
QQYNSYPYT

SEQ ID NO: 4896 - protein, 17 aa, Homo sapiens
  Heavy chain CDR3 for antibody 2448 (IGHV4-39)
AGRLTYYYGSGSPSSDY

SEQ ID NO: 4897 - protein, 9 aa, Homo sapiens
  Light chain CDR3 for antibody 2449 (IGKV2-30)
MQGTHWPLT

SEQ ID NO: 4898 - protein, 13 aa, Homo sapiens
  Heavy chain CDR3 for antibody 2449 (IGHV3-33)
ARRYRSGWYPFDY

SEQ ID NO: 4899 - protein, 9 aa, Homo sapiens
  Light chain CDR3 for antibody 2450 (IGKV1-9)
QQLNSYPLT

SEQ ID NO: 4900 - protein, 17 aa, Homo sapiens
  Heavy chain CDR3 for antibody 2450 (IGHV1-18)
ARVRAFTMVRGVPPFDY

SEQ ID NO: 4901 - protein, 9 aa, Homo sapiens
  Light chain CDR3 for antibody 2451 (IGKV1-6)
LQDYNYPYT

SEQ ID NO: 4902 - protein, 18 aa, Homo sapiens
  Heavy chain CDR3 for antibody 2451 (IGHV1-18)
ARDRGYYYGSGSYSPFDY

SEQ ID NO: 4903 - protein, 9 aa, Homo sapiens
  Light chain CDR3 for antibody 2452 (IGKV1-27)
QKYNSAPYT

SEQ ID NO: 4904 - protein, 20 aa, Homo sapiens
  Heavy chain CDR3 for antibody 2452 (IGHV3-33)
SRGGATLVRGVIDYYYGMDV

SEQ ID NO: 4905 - protein, 9 aa, Homo sapiens
  Light chain CDR3 for antibody 2453 (IGKV1D-16)
QQYNSYPYT

SEQ ID NO: 4906 - protein, 12 aa, Homo sapiens
  Heavy chain CDR3 for antibody 2453 (IGHV1-46)
ARGLTGDHASDI

SEQ ID NO: 4907 - protein, 8 aa, Homo sapiens
  Light chain CDR3 for antibody 2454 (IGKV1D-16)
QQYNYPFT

SEQ ID NO: 4908 - protein, 12 aa, Homo sapiens
  Heavy chain CDR3 for antibody 2454 (IGHV3-23)
AKEYDILTGYFH

SEQ ID NO: 4909 - protein, 9 aa, Homo sapiens
  Light chain CDR3 for antibody 2455 (IGKV6-21)
HQSSSLPYT

SEQ ID NO: 4910 - protein, 16 aa, Homo sapiens
  Heavy chain CDR3 for antibody 2455 (IGHV3-23)
ARNWNDVGDYYYGMDV

SEQ ID NO: 4911 - protein, 9 aa, Homo sapiens
  Light chain CDR3 for antibody 2456 (IGKV3-20)
QQYGSSPYT

SEQ ID NO: 4912 - protein, 14 aa, Homo sapiens
  Heavy chain CDR3 for antibody 2456 (IGHV3-33)
ARDGAAAALDAFDI

SEQ ID NO: 4913 - protein, 9 aa, Homo sapiens
  Light chain CDR3 for antibody 2457 (IGKV3-20)
QQYGSSPYT

SEQ ID NO: 4914 - protein, 16 aa, Homo sapiens
  Heavy chain CDR3 for antibody 2457 (IGHV3-33)
ARDKNTDYDILTGFDY

SEQ ID NO: 4915 - protein, 9 aa, Homo sapiens
  Light chain CDR3 for antibody 2458 (IGKV1-6)
LQDYNYPYT

SEQ ID NO: 4916 - protein, 17 aa, Homo sapiens
  Heavy chain CDR3 for antibody 2458 (IGHV3-33)
ARVYYDILTGYSPAFDI

SEQ ID NO: 4917 - protein, 9 aa, Homo sapiens
  Light chain CDR3 for antibody 2459 (IGKV3-20)
QQYGSSPYT

SEQ ID NO: 4918 - protein, 19 aa, Homo sapiens
  Heavy chain CDR3 for antibody 2459 (IGHV3-33)
ARRKNYYGSGSWHYYGMDV

SEQ ID NO: 4919 - protein, 9 aa, Homo sapiens
  Light chain CDR3 for antibody 2460 (IGKV1-9)
QQLNSYPWT

SEQ ID NO: 4920 - protein, 11 aa, Homo sapiens
  Heavy chain CDR3 for antibody 2460 (IGHV4-59)
ARSLRYSFFDY

SEQ ID NO: 4921 - protein, 9 aa, Homo sapiens
  Light chain CDR3 for antibody 2461 (IGKV1-17)
LQHNSYPYT

SEQ ID NO: 4922 - protein, 15 aa, Homo sapiens
  Heavy chain CDR3 for antibody 2461 (IGHV3-23)
AKDLSSGWYAYFFDY

SEQ ID NO: 4923 - protein, 9 aa, Homo sapiens
  Light chain CDR3 for antibody 2462 (IGKV6-21)
HQSSSLPYT

SEQ ID NO: 4924 - protein, 17 aa, Homo sapiens
  Heavy chain CDR3 for antibody 2462 (IGHV3-33)
ARGDGDILTGYYEWFDP

SEQ ID NO: 4925 - protein, 9 aa, Homo sapiens
  Light chain CDR3 for antibody 2463 (IGKV1-27)
QKYNSAPYT

SEQ ID NO: 4926 - protein, 17 aa, Homo sapiens
  Heavy chain CDR3 for antibody 2463 (IGHV3-33)
ARAYYDILTGYSYYFDY

SEQ ID NO: 4927 - protein, 9 aa, Homo sapiens
  Light chain CDR3 for antibody 2464 (IGKV1-39)
QQSYSTPLT

SEQ ID NO: 4928 - protein, 13 aa, Homo sapiens
  Heavy chain CDR3 for antibody 2464 (IGHV3-33)
AKEDGDYHHYFDY

SEQ ID NO: 4929 - protein, 9 aa, Homo sapiens
  Light chain CDR3 for antibody 2465 (IGKV3-11)
QQRSNWMYT

SEQ ID NO: 4930 - protein, 18 aa, Homo sapiens
  Heavy chain CDR3 for antibody 2465 (IGHV4-59)
AREGDYVWGSYRPNWFDP

SEQ ID NO: 4931 - protein, 9 aa, Homo sapiens
  Light chain CDR3 for antibody 2466 (IGKV3D-7)
QQDYNLPWT

SEQ ID NO: 4932 - protein, 14 aa, Homo sapiens
  Heavy chain CDR3 for antibody 2466 (IGHV3-33)
AREGYSSNWYDFDY

SEQ ID NO: 4933 - protein, 9 aa, Homo sapiens
  Light chain CDR3 for antibody 2467 (IGKV1-17)
LQHNSYPLT

SEQ ID NO: 4934 - protein, 9 aa, Homo sapiens
  Heavy chain CDR3 for antibody 2467 (IGHV3-23)
ATIAADFDY

SEQ ID NO: 4935 - protein, 9 aa, Homo sapiens
  Light chain CDR3 for antibody 2468 (IGKV1D-16)
QQYNSYPYT

SEQ ID NO: 4936 - protein, 14 aa, Homo sapiens
  Heavy chain CDR3 for antibody 2468 (IGHV3-33)
ARWELPFYYSGMDV

SEQ ID NO: 4937 - protein, 9 aa, Homo sapiens
  Light chain CDR3 for antibody 2469 (IGKV1D-13)
QQFNNYPYT

SEQ ID NO: 4938 - protein, 9 aa, Homo sapiens
  Heavy chain CDR3 for antibody 2469 (IGHV3-23)
ARIWWLKDY

SEQ ID NO: 4939 - protein, 9 aa, Homo sapiens
  Light chain CDR3 for antibody 2470 (IGKV6-21)
HQSSSLPYT

SEQ ID NO: 4940 - protein, 15 aa, Homo sapiens
  Heavy chain CDR3 for antibody 2470 (IGHV3-23)
AKDPRGYYYYYGMDV

SEQ ID NO: 4941 - protein, 9 aa, Homo sapiens
  Light chain CDR3 for antibody 2471 (IGKV1-39)
QQSYSTPLT

SEQ ID NO: 4942 - protein, 14 aa, Homo sapiens
  Heavy chain CDR3 for antibody 2471 (IGHV1-2)
ARDYYGSGNYYMGY

SEQ ID NO: 4943 - protein, 9 aa, Homo sapiens
  Light chain CDR3 for antibody 2472 (IGKV5-2)
LQHDNFPWT

SEQ ID NO: 4944 - protein, 13 aa, Homo sapiens
  Heavy chain CDR3 for antibody 2472 (IGHV1-46)
ARRQVGYYYGMDV

SEQ ID NO: 4945 - protein, 8 aa, Homo sapiens
  Light chain CDR3 for antibody 2473 (IGKV3D-7)
QQDYNLLT

SEQ ID NO: 4946 - protein, 12 aa, Homo sapiens
  Heavy chain CDR3 for antibody 2473 (IGHV3-13)
AREAGIPDAFDI

SEQ ID NO: 4947 - protein, 9 aa, Homo sapiens
  Light chain CDR3 for antibody 2474 (IGKV1D-16)
QQYNSYPLT

SEQ ID NO: 4948 - protein, 12 aa, Homo sapiens
  Heavy chain CDR3 for antibody 2474 (IGHV4-59)
ARGYSSSWYFDY

SEQ ID NO: 4949 - protein, 9 aa, Homo sapiens
  Light chain CDR3 for antibody 2475 (IGKV1-39)
QQSYSTPLT

SEQ ID NO: 4950 - protein, 20 aa, Homo sapiens
  Heavy chain CDR3 for antibody 2475 (IGHV3-23)
AKGMGGLRYFDWPHYYGMDV

SEQ ID NO: 4951 - protein, 9 aa, Homo sapiens
  Light chain CDR3 for antibody 2476 (IGKV1-6)
LQDYNYPWT

SEQ ID NO: 4952 - protein, 9 aa, Homo sapiens
  Heavy chain CDR3 for antibody 2476 (IGHV3-30)
VRDDYGVDV

SEQ ID NO: 4953 - protein, 10 aa, Homo sapiens
  Light chain CDR3 for antibody 2477 (IGKV3-20)
QQYGRSPPVT

SEQ ID NO: 4954 - protein, 11 aa, Homo sapiens
  Heavy chain CDR3 for antibody 2477 (IGHV3-33)
ARDRSSGPFDY

SEQ ID NO: 4955 - protein, 9 aa, Homo sapiens
  Light chain CDR3 for antibody 2478 (IGKV1-17)
LQHNSYPYT

SEQ ID NO: 4956 - protein, 15 aa, Homo sapiens
  Heavy chain CDR3 for antibody 2478 (IGHV3-33)
ARDALAVTGTGWFDP

SEQ ID NO: 4957 - protein, 9 aa, Homo sapiens
  Light chain CDR3 for antibody 2479 (IGKV6-21)
HQSSSLPYT

SEQ ID NO: 4958 - protein, 15 aa, Homo sapiens
  Heavy chain CDR3 for antibody 2479 (IGHV3-66)
ARDRDYYYYYYGMDV

SEQ ID NO: 4959 - protein, 9 aa, Homo sapiens
  Light chain CDR3 for antibody 2480 (IGKV1-39)
QQSYSTPLT

SEQ ID NO: 4960 - protein, 20 aa, Homo sapiens
  Heavy chain CDR3 for antibody 2480 (IGHV3-33)
ARDNDSSGYYDYYYYYGMDV

SEQ ID NO: 4961 - protein, 9 aa, Homo sapiens
  Light chain CDR3 for antibody 2481 (IGKV6-21)
HQSSSLPYT

SEQ ID NO: 4962 - protein, 12 aa, Homo sapiens
  Heavy chain CDR3 for antibody 2481 (IGHV3-23)
AKEGIVGVPFDY

SEQ ID NO: 4963 - protein, 8 aa, Homo sapiens
  Light chain CDR3 for antibody 2482 (IGKV3D-20)
QQYVSSVT

SEQ ID NO: 4964 - protein, 16 aa, Homo sapiens
  Heavy chain CDR3 for antibody 2482 (IGHV3-66)
ARAYTYGSGSFPYFDY

SEQ ID NO: 4965 - protein, 9 aa, Homo sapiens
  Light chain CDR3 for antibody 2483 (IGKV1-17)
LQHNSYPYT

SEQ ID NO: 4966 - protein, 10 aa, Homo sapiens
  Heavy chain CDR3 for antibody 2483 (IGHV3-33)
ARVVDTAMAY

SEQ ID NO: 4967 - protein, 9 aa, Homo sapiens
  Light chain CDR3 for antibody 2484 (IGKV1D-13)
QQFNNYPYT

SEQ ID NO: 4968 - protein, 12 aa, Homo sapiens
  Heavy chain CDR3 for antibody 2484 (IGHV3-33)
AREGTRWVYFDY

SEQ ID NO: 4969 - protein, 9 aa, Homo sapiens
  Light chain CDR3 for antibody 2485 (IGKV1-39)
QQSYSTPLT

SEQ ID NO: 4970 - protein, 14 aa, Homo sapiens
  Heavy chain CDR3 for antibody 2485 (IGHV3-33)
VRDAMGATTAWFDP

SEQ ID NO: 4971 - protein, 9 aa, Homo sapiens
  Light chain CDR3 for antibody 2486 (IGKV1-17)
LQHNSYPYT

SEQ ID NO: 4972 - protein, 18 aa, Homo sapiens
  Heavy chain CDR3 for antibody 2486 (IGHV3-33)
ARRTAAGTGDYYYYGMDV

SEQ ID NO: 4973 - protein, 10 aa, Homo sapiens
  Light chain CDR3 for antibody 2487 (IGKV1-17)
LQHNSYPMYT

SEQ ID NO: 4974 - protein, 12 aa, Homo sapiens
  Heavy chain CDR3 for antibody 2487 (IGHV3-13)
AREAGIPDAFDI

SEQ ID NO: 4975 - protein, 8 aa, Homo sapiens
  Light chain CDR3 for antibody 2488 (IGKV3-20)
QQYGRSFT

SEQ ID NO: 4976 - protein, 13 aa, Homo sapiens
  Heavy chain CDR3 for antibody 2488 (IGHV4-39)
ARREVVGGRGFDY

SEQ ID NO: 4977 - protein, 9 aa, Homo sapiens
  Light chain CDR3 for antibody 2489 (IGKV1-17)
LQHNSYPYT

SEQ ID NO: 4978 - protein, 17 aa, Homo sapiens
  Heavy chain CDR3 for antibody 2489 (IGHV3-33)
TRDSGMVRGIIIYGMDV

SEQ ID NO: 4979 - protein, 9 aa, Homo sapiens
  Light chain CDR3 for antibody 2490 (IGKV6-21)
HQSSSLPYT

SEQ ID NO: 4980 - protein, 16 aa, Homo sapiens
  Heavy chain CDR3 for antibody 2490 (IGHV3-33)
ARDGSMVRRIHDAFDF

SEQ ID NO: 4981 - protein, 9 aa, Homo sapiens
  Light chain CDR3 for antibody 2491 (IGKV3-11)
QQRSNWPPT

SEQ ID NO: 4982 - protein, 13 aa, Homo sapiens
  Heavy chain CDR3 for antibody 2491 (IGHV3-33)
ARAFTMVRGVIDY

SEQ ID NO: 4983 - protein, 9 aa, Homo sapiens
  Light chain CDR3 for antibody 2492 (IGKV1-27)
QKYNSAPYT

SEQ ID NO: 4984 - protein, 8 aa, Homo sapiens
  Heavy chain CDR3 for antibody 2492 (IGHV3-23)
AETFLFDY

SEQ ID NO: 4985 - protein, 9 aa, Homo sapiens
  Light chain CDR3 for antibody 2493 (IGKV5-2)
LQHDNFPYT

SEQ ID NO: 4986 - protein, 14 aa, Homo sapiens
  Heavy chain CDR3 for antibody 2493 (IGHV3-15)
SIYYYGSGRDFFDY

SEQ ID NO: 4987 - protein, 9 aa, Homo sapiens
  Light chain CDR3 for antibody 2494 (IGKV3-20)
QQCDSSPFT

SEQ ID NO: 4988 - protein, 13 aa, Homo sapiens
  Heavy chain CDR3 for antibody 2494 (IGHV3-33)
ARLDYYYYYGMDV

SEQ ID NO: 4989 - protein, 9 aa, Homo sapiens
  Light chain CDR3 for antibody 2495 (IGKV3-20)
QQYGSSPYT

SEQ ID NO: 4990 - protein, 19 aa, Homo sapiens
  Heavy chain CDR3 for antibody 2495 (IGHV4-59)
ARDRVVGATTYYYYYGMDV

SEQ ID NO: 4991 - protein, 11 aa, Homo sapiens
  Light chain CDR3 for antibody 2496 (IGKV3-11)
QQRSNWPPTWT

SEQ ID NO: 4992 - protein, 12 aa, Homo sapiens
  Heavy chain CDR3 for antibody 2496 (IGHV4-39)
ARHGSGSSYFDY

SEQ ID NO: 4993 - protein, 9 aa, Homo sapiens
  Light chain CDR3 for antibody 2497 (IGKV3D-7)
QQDYNLPLT

SEQ ID NO: 4994 - protein, 17 aa, Homo sapiens
  Heavy chain CDR3 for antibody 2497 (IGHV1-18)
ARDRAFTMVRGVPPFDY

SEQ ID NO: 4995 - protein, 9 aa, Homo sapiens
  Light chain CDR3 for antibody 2498 (IGKV1-17)
QQYNSYPYT

SEQ ID NO: 4996 - protein, 17 aa, Homo sapiens
  Heavy chain CDR3 for antibody 2498 (IGHV4-59)
ARRITRVREIIITAFDY

SEQ ID NO: 4997 - protein, 8 aa, Homo sapiens
  Light chain CDR3 for antibody 2499 (IGKV3-11)
QQRSNWLT

SEQ ID NO: 4998 - protein, 18 aa, Homo sapiens
  Heavy chain CDR3 for antibody 2499 (IGHV4-59)
AREGDYVWGSYRPNWFDP

SEQ ID NO: 4999 - protein, 9 aa, Homo sapiens
  Light chain CDR3 for antibody 2500 (IGKV1D-13)
QQFNNYPST

SEQ ID NO: 5000 - protein, 11 aa, Homo sapiens
  Heavy chain CDR3 for antibody 2500 (IGHV3-33)
ARDILTGFLDH

SEQ ID NO: 5001 - protein, 8 aa, Homo sapiens
  Light chain CDR3 for antibody 2501 (IGKV1-5)
QQYNSYYT

SEQ ID NO: 5002 - protein, 14 aa, Homo sapiens
  Heavy chain CDR3 for antibody 2501 (IGHV3-33)
ARGAAAGNFYGLDV

SEQ ID NO: 5003 - protein, 9 aa, Homo sapiens
  Light chain CDR3 for antibody 2502 (IGKV3-15)
QQYNNWPLT

SEQ ID NO: 5004 - protein, 19 aa, Homo sapiens
  Heavy chain CDR3 for antibody 2502 (IGHV5-51)
ARHGEKGKRITMVRGSLDV

SEQ ID NO: 5005 - protein, 9 aa, Homo sapiens
  Light chain CDR3 for antibody 2503 (IGKV3D-7)
QQDYNLPYT

SEQ ID NO: 5006 - protein, 12 aa, Homo sapiens
  Heavy chain CDR3 for antibody 2503 (IGHV3-33)
AREKGGSYSFDY

SEQ ID NO: 5007 - protein, 9 aa, Homo sapiens
  Light chain CDR3 for antibody 2504 (IGKV3-20)
QQYGSSPYT

SEQ ID NO: 5008 - protein, 19 aa, Homo sapiens
  Heavy chain CDR3 for antibody 2504 (IGHV3-33)
ARDSGYSGYDYYYYYGMDV

SEQ ID NO: 5009 - protein, 10 aa, Homo sapiens
  Light chain CDR3 for antibody 2505 (IGKV1-17)
LQHNSYPMYT

SEQ ID NO: 5010 - protein, 14 aa, Homo sapiens
  Heavy chain CDR3 for antibody 2505 (IGHV3-23)
AKSRIVGALYYFDY

SEQ ID NO: 5011 - protein, 9 aa, Homo sapiens
  Light chain CDR3 for antibody 2506 (IGKV5-2)
LQHDNFPYT

SEQ ID NO: 5012 - protein, 18 aa, Homo sapiens
  Heavy chain CDR3 for antibody 2506 (IGHV3-33)
ARKGGYYSGSGSYRHFDF

SEQ ID NO: 5013 - protein, 9 aa, Homo sapiens
  Light chain CDR3 for antibody 2507 (IGKV1-17)
LQHNSYPYT

SEQ ID NO: 5014 - protein, 10 aa, Homo sapiens
  Heavy chain CDR3 for antibody 2507 (IGHV3-23)
AKDHWGDFDY

SEQ ID NO: 5015 - protein, 9 aa, Homo sapiens
  Light chain CDR3 for antibody 2508 (IGKV6-21)
HQSSSLPYT

SEQ ID NO: 5016 - protein, 18 aa, Homo sapiens
  Heavy chain CDR3 for antibody 2508 (IGHV3-33)
AREGDYYGSGGFPNWFDP

SEQ ID NO: 5017 - protein, 9 aa, Homo sapiens
  Light chain CDR3 for antibody 2509 (IGKV1-27)
QKYNSAPYT

SEQ ID NO: 5018 - protein, 15 aa, Homo sapiens
  Heavy chain CDR3 for antibody 2509 (IGHV3-33)
ARGYYYGSGSFPVDY

SEQ ID NO: 5019 - protein, 9 aa, Homo sapiens
  Light chain CDR3 for antibody 2510 (IGKV1-17)
LQHNSYPYT

SEQ ID NO: 5020 - protein, 20 aa, Homo sapiens
  Heavy chain CDR3 for antibody 2510 (IGHV3-33)
ARDLGWATMVRGVIRAPFDY

SEQ ID NO: 5021 - protein, 9 aa, Homo sapiens
  Light chain CDR3 for antibody 2511 (IGKV3-15)
QQYNNWPLT

SEQ ID NO: 5022 - protein, 14 aa, Homo sapiens
  Heavy chain CDR3 for antibody 2511 (IGHV4-39)
ARDSGYDYYYGMDV

SEQ ID NO: 5023 - protein, 9 aa, Homo sapiens
  Light chain CDR3 for antibody 2512 (IGKV3-15)
QQYNNWPLT

SEQ ID NO: 5024 - protein, 13 aa, Homo sapiens
  Heavy chain CDR3 for antibody 2512 (IGHV4-61)
ASRYSSGWYPFDY

SEQ ID NO: 5025 - protein, 9 aa, Homo sapiens
  Light chain CDR3 for antibody 2513 (IGKV6-21)
HQSSSLPYT

SEQ ID NO: 5026 - protein, 17 aa, Homo sapiens
  Heavy chain CDR3 for antibody 2513 (IGHV4-39)
AGRLTYYFGSGSPSFDY

SEQ ID NO: 5027 - protein, 9 aa, Homo sapiens
  Light chain CDR3 for antibody 2514 (IGKV1D-13)
QQFNNYPYT

SEQ ID NO: 5028 - protein, 11 aa, Homo sapiens
  Heavy chain CDR3 for antibody 2514 (IGHV3-23)
AKGLWSYYFDY

SEQ ID NO: 5029 - protein, 9 aa, Homo sapiens
  Light chain CDR3 for antibody 2515 (IGKV5-2)
LQHDNFPYT

SEQ ID NO: 5030 - protein, 19 aa, Homo sapiens
  Heavy chain CDR3 for antibody 2515 (IGHV3-33)
AREDYYGSGSYYNEDWFDP

SEQ ID NO: 5031 - protein, 9 aa, Homo sapiens
  Light chain CDR3 for antibody 2516 (IGKV1-39)
QQSYRTPLT

SEQ ID NO: 5032 - protein, 10 aa, Homo sapiens
  Heavy chain CDR3 for antibody 2516 (IGHV3-23)
AKDHYGDYPY

SEQ ID NO: 5033 - protein, 9 aa, Homo sapiens
  Light chain CDR3 for antibody 2517 (IGKV1-9)
QQLNSYPLT

SEQ ID NO: 5034 - protein, 23 aa, Homo sapiens
  Heavy chain CDR3 for antibody 2517 (IGHV4-59)
ARERTYSGILPGYYEDYYYGMDV

SEQ ID NO: 5035 - protein, 9 aa, Homo sapiens
  Light chain CDR3 for antibody 2518 (IGKV5-2)
LQHDNFPWT

SEQ ID NO: 5036 - protein, 17 aa, Homo sapiens
  Heavy chain CDR3 for antibody 2518 (IGHV3-15)
TTERYPRRYYYYFGMDV

SEQ ID NO: 5037 - protein, 9 aa, Homo sapiens
  Light chain CDR3 for antibody 2519 (IGKV1-6)
LQDYNYPYT

SEQ ID NO: 5038 - protein, 18 aa, Homo sapiens
  Heavy chain CDR3 for antibody 2519 (IGHV4-59)
AREGHYYTSGSYYKAFDY

SEQ ID NO: 5039 - protein, 9 aa, Homo sapiens
  Light chain CDR3 for antibody 2520 (IGKV1D-16)
QQYNSYPYT

SEQ ID NO: 5040 - protein, 12 aa, Homo sapiens
  Heavy chain CDR3 for antibody 2520 (IGHV1-46)
ARGPTGDHALDI

SEQ ID NO: 5041 - protein, 9 aa, Homo sapiens
  Light chain CDR3 for antibody 2521 (IGKV3-20)
QQYGSSPYT

SEQ ID NO: 5042 - protein, 18 aa, Homo sapiens
  Heavy chain CDR3 for antibody 2521 (IGHV1-24)
ATGLRYFDWPIISNLFDY

SEQ ID NO: 5043 - protein, 9 aa, Homo sapiens
  Light chain CDR3 for antibody 2522 (IGKV6-21)
HQSSSLPYT

SEQ ID NO: 5044 - protein, 13 aa, Homo sapiens
  Heavy chain CDR3 for antibody 2522 (IGHV1-46)
ARRQVGYYYGMDV

SEQ ID NO: 5045 - protein, 9 aa, Homo sapiens
  Light chain CDR3 for antibody 2523 (IGKV1-39)
QQSYRTPLT

SEQ ID NO: 5046 - protein, 18 aa, Homo sapiens
  Heavy chain CDR3 for antibody 2523 (IGHV3-23)
AKEGNYYGSGSYWGYFDP

SEQ ID NO: 5047 - protein, 9 aa, Homo sapiens
  Light chain CDR3 for antibody 2524 (IGKV1-39)
QQSYRTPLT

SEQ ID NO: 5048 - protein, 13 aa, Homo sapiens
  Heavy chain CDR3 for antibody 2524 (IGHV3-33)
ARGDNWNDGGFDY

SEQ ID NO: 5049 - protein, 9 aa, Homo sapiens
  Light chain CDR3 for antibody 2525 (IGKV1-17)
LQHNSYPYT

SEQ ID NO: 5050 - protein, 11 aa, Homo sapiens
  Heavy chain CDR3 for antibody 2525 (IGHV3-33)
ARDRSTGWLDY

SEQ ID NO: 5051 - protein, 8 aa, Homo sapiens
  Light chain CDR3 for antibody 2526 (IGKV1-5)
QQYNSYYT

SEQ ID NO: 5052 - protein, 13 aa, Homo sapiens
  Heavy chain CDR3 for antibody 2526 (IGHV3-23)
ASPFNWNDGFFDY

SEQ ID NO: 5053 - protein, 9 aa, Homo sapiens
  Light chain CDR3 for antibody 2527 (IGKV3-15)
QQYNNWPRT

SEQ ID NO: 5054 - protein, 13 aa, Homo sapiens
  Heavy chain CDR3 for antibody 2527 (IGHV3-33)
ARDQRYSSGWYDY

SEQ ID NO: 5055 - protein, 9 aa, Homo sapiens
  Light chain CDR3 for antibody 2528 (IGKV1D-16)
QQYNSFPLT

SEQ ID NO: 5056 - protein, 13 aa, Homo sapiens
  Heavy chain CDR3 for antibody 2528 (IGHV4-59)
ARDAGYSSSWFDY

SEQ ID NO: 5057 - protein, 9 aa, Homo sapiens
  Light chain CDR3 for antibody 2529 (IGKV2-30)
MQGTHWPLT

SEQ ID NO: 5058 - protein, 18 aa, Homo sapiens
  Heavy chain CDR3 for antibody 2529 (IGHV3-33)
ARREGIVGATTYYYGMDV

SEQ ID NO: 5059 - protein, 9 aa, Homo sapiens
  Light chain CDR3 for antibody 2530 (IGKV1-6)
LQDYNYPFT

SEQ ID NO: 5060 - protein, 13 aa, Homo sapiens
  Heavy chain CDR3 for antibody 2530 (IGHV3-64)
AREKTIFPYYFDY

SEQ ID NO: 5061 - protein, 9 aa, Homo sapiens
  Light chain CDR3 for antibody 2531 (IGKV1-27)
QKYNSAPYT

SEQ ID NO: 5062 - protein, 16 aa, Homo sapiens
  Heavy chain CDR3 for antibody 2531 (IGHV3-33)
ARGGRSDWLYYYGMDV

SEQ ID NO: 5063 - protein, 9 aa, Homo sapiens
  Light chain CDR3 for antibody 2532 (IGKV1-9)
QQLNSYPLT

SEQ ID NO: 5064 - protein, 15 aa, Homo sapiens
  Heavy chain CDR3 for antibody 2532 (IGHV3-64)
ARDSRPEITGPPFDY

SEQ ID NO: 5065 - protein, 9 aa, Homo sapiens
  Light chain CDR3 for antibody 2533 (IGKV3-15)
QQYNNWPLT

SEQ ID NO: 5066 - protein, 16 aa, Homo sapiens
  Heavy chain CDR3 for antibody 2533 (IGHV4-59)
ARYSGSYYGDYYGMDV

SEQ ID NO: 5067 - protein, 9 aa, Homo sapiens
  Light chain CDR3 for antibody 2534 (IGKV6-21)
HQSSSLPYT

SEQ ID NO: 5068 - protein, 20 aa, Homo sapiens
  Heavy chain CDR3 for antibody 2534 (IGHV3-33)
ARDWMVRGVIITDYYYGMDV

SEQ ID NO: 5069 - protein, 9 aa, Homo sapiens
  Light chain CDR3 for antibody 2535 (IGKV5-2)
LQHDNFPYT

SEQ ID NO: 5070 - protein, 10 aa, Homo sapiens
  Heavy chain CDR3 for antibody 2535 (IGHV3-30)
ARDGLESFDY

SEQ ID NO: 5071 - protein, 9 aa, Homo sapiens
  Light chain CDR3 for antibody 2536 (IGKV1D-13)
QQFNNYPHT

SEQ ID NO: 5072 - protein, 13 aa, Homo sapiens
  Heavy chain CDR3 for antibody 2536 (IGHV4-39)
ARQWPSGYWYFDL

SEQ ID NO: 5073 - protein, 9 aa, Homo sapiens
  Light chain CDR3 for antibody 2537 (IGKV1-6)
LQDYNYPRT

SEQ ID NO: 5074 - protein, 19 aa, Homo sapiens
  Heavy chain CDR3 for antibody 2537 (IGHV1-18)
ARDTTLVRGLMNYYYGMDV

SEQ ID NO: 5075 - protein, 9 aa, Homo sapiens
  Light chain CDR3 for antibody 2538 (IGKV5-2)
LQHDNFPYT

SEQ ID NO: 5076 - protein, 12 aa, Homo sapiens
  Heavy chain CDR3 for antibody 2538 (IGHV3-33)
AKDPGWQQLAEY

SEQ ID NO: 5077 - protein, 9 aa, Homo sapiens
  Light chain CDR3 for antibody 2539 (IGKV1-27)
QKYNSAPYT

SEQ ID NO: 5078 - protein, 18 aa, Homo sapiens
  Heavy chain CDR3 for antibody 2539 (IGHV3-33)
ARDRDRYGSGTYPDAIDI

SEQ ID NO: 5079 - protein, 9 aa, Homo sapiens
  Light chain CDR3 for antibody 2540 (IGKV6-21)
HQSSSLPYT

SEQ ID NO: 5080 - protein, 18 aa, Homo sapiens
  Heavy chain CDR3 for antibody 2540 (IGHV4-59)
ARERGNWNDVDYYYGMDV

SEQ ID NO: 5081 - protein, 9 aa, Homo sapiens
  Light chain CDR3 for antibody 2541 (IGKV1-39)
QQSYSTPLT

SEQ ID NO: 5082 - protein, 18 aa, Homo sapiens
  Heavy chain CDR3 for antibody 2541 (IGHV3-33)
ARREGITLIFYYYYGMDV

SEQ ID NO: 5083 - protein, 8 aa, Homo sapiens
  Light chain CDR3 for antibody 2542 (IGKV1-5)
QQYNSYWT

SEQ ID NO: 5084 - protein, 12 aa, Homo sapiens
  Heavy chain CDR3 for antibody 2542 (IGHV3-33)
ARGYFGSGYAHF

SEQ ID NO: 5085 - protein, 10 aa, Homo sapiens
  Light chain CDR3 for antibody 2543 (IGKV1-17)
LQHNSYPMYT

SEQ ID NO: 5086 - protein, 14 aa, Homo sapiens
  Heavy chain CDR3 for antibody 2543 (IGHV3-33)
ARGAAAGNFYGLDV

SEQ ID NO: 5087 - protein, 9 aa, Homo sapiens
  Light chain CDR3 for antibody 2544 (IGKV6-21)
HQSSSLPYT

SEQ ID NO: 5088 - protein, 17 aa, Homo sapiens
  Heavy chain CDR3 for antibody 2544 (IGHV3-15)
TTERYPRRYYYYFGMDV

SEQ ID NO: 5089 - protein, 9 aa, Homo sapiens
  Light chain CDR3 for antibody 2545 (IGKV2-30)
MQVTHWPRT

SEQ ID NO: 5090 - protein, 20 aa, Homo sapiens
  Heavy chain CDR3 for antibody 2545 (IGHV1-2)
ARDGWDYYDSSAYYPSAFDL

SEQ ID NO: 5091 - protein, 9 aa, Homo sapiens
  Light chain CDR3 for antibody 2546 (IGKV5-2)
LQHDNFPWT

SEQ ID NO: 5092 - protein, 11 aa, Homo sapiens
  Heavy chain CDR3 for antibody 2546 (IGHV4-39)
ARLLVGATTDY

SEQ ID NO: 5093 - protein, 9 aa, Homo sapiens
  Light chain CDR3 for antibody 2547 (IGKV1D-13)
QQFNNYPHT

SEQ ID NO: 5094 - protein, 14 aa, Homo sapiens
  Heavy chain CDR3 for antibody 2547 (IGHV3-33)
ARDREQQLVRYFDY

SEQ ID NO: 5095 - protein, 9 aa, Homo sapiens
  Light chain CDR3 for antibody 2548 (IGKV1-27)
QKYNSAPYT

SEQ ID NO: 5096 - protein, 14 aa, Homo sapiens
  Heavy chain CDR3 for antibody 2548 (IGHV3-33)
ARDNILTAYYLFDY

SEQ ID NO: 5097 - protein, 9 aa, Homo sapiens
  Light chain CDR3 for antibody 2549 (IGKV1-6)
LQDYNHVGT

SEQ ID NO: 5098 - protein, 9 aa, Homo sapiens
  Heavy chain CDR3 for antibody 2549 (IGHV3-21)
GSRRPYFDS

SEQ ID NO: 5099 - protein, 9 aa, Homo sapiens
  Light chain CDR3 for antibody 2550 (IGKV1D-13)
QQFNNYPHT

SEQ ID NO: 5100 - protein, 20 aa, Homo sapiens
  Heavy chain CDR3 for antibody 2550 (IGHV3-11)
ARGGATLIRGLIDYYYGMDV

SEQ ID NO: 5101 - protein, 9 aa, Homo sapiens
  Light chain CDR3 for antibody 2551 (IGKV3D-20)
QQYGSSPYT

SEQ ID NO: 5102 - protein, 14 aa, Homo sapiens
  Heavy chain CDR3 for antibody 2551 (IGHV3-33)
AREGYSSGWDYFDH

SEQ ID NO: 5103 - protein, 9 aa, Homo sapiens
  Light chain CDR3 for antibody 2552 (IGKV3-20)
QQYGSSPYT

SEQ ID NO: 5104 - protein, 18 aa, Homo sapiens
  Heavy chain CDR3 for antibody 2552 (IGHV1-8)
AREGAAAGSYYYYNGMDV

SEQ ID NO: 5105 - protein, 9 aa, Homo sapiens
  Light chain CDR3 for antibody 2553 (IGKV5-2)
LQHDNFPYT

SEQ ID NO: 5106 - protein, 14 aa, Homo sapiens
  Heavy chain CDR3 for antibody 2553 (IGHV3-33)
ARRGYSGYDWYFDY

SEQ ID NO: 5107 - protein, 9 aa, Homo sapiens
  Light chain CDR3 for antibody 2554 (IGKV5-2)
LQHDNFPYT

SEQ ID NO: 5108 - protein, 15 aa, Homo sapiens
  Heavy chain CDR3 for antibody 2554 (IGHV3-74)
SRGSGSHYFYYGMDV

SEQ ID NO: 5109 - protein, 9 aa, Homo sapiens
  Light chain CDR3 for antibody 2555 (IGKV3D-7)
QQDYNLPLT

SEQ ID NO: 5110 - protein, 12 aa, Homo sapiens
  Heavy chain CDR3 for antibody 2555 (IGHV1-24)
ASDWAYYYGMDV

SEQ ID NO: 5111 - protein, 9 aa, Homo sapiens
  Light chain CDR3 for antibody 2556 (IGKV1-39)
QQSYSTPLT

SEQ ID NO: 5112 - protein, 13 aa, Homo sapiens
  Heavy chain CDR3 for antibody 2556 (IGHV3-30)
AAPFMVRGDGMDV

SEQ ID NO: 5113 - protein, 9 aa, Homo sapiens
  Light chain CDR3 for antibody 2557 (IGKV6-21)
HQSSSLPYT

SEQ ID NO: 5114 - protein, 18 aa, Homo sapiens
  Heavy chain CDR3 for antibody 2557 (IGHV3-33)
ARKGGYYSGSGSYRHFDF

SEQ ID NO: 5115 - protein, 9 aa, Homo sapiens
  Light chain CDR3 for antibody 2558 (IGKV2-30)
MQGTHWPLT

SEQ ID NO: 5116 - protein, 12 aa, Homo sapiens
  Heavy chain CDR3 for antibody 2558 (IGHV3-33)
TRGYSSKSYFDY

SEQ ID NO: 5117 - protein, 9 aa, Homo sapiens
  Light chain CDR3 for antibody 2559 (IGKV1-39)
QQSYSTPLT

SEQ ID NO: 5118 - protein, 15 aa, Homo sapiens
  Heavy chain CDR3 for antibody 2559 (IGHV3-23)
AKEALRYFDWSGMDV

SEQ ID NO: 5119 - protein, 9 aa, Homo sapiens
  Light chain CDR3 for antibody 2560 (IGKV3-11)
QQRSNWPWT

SEQ ID NO: 5120 - protein, 12 aa, Homo sapiens
  Heavy chain CDR3 for antibody 2560 (IGHV4-39)
ARHGSGSSYFDY

SEQ ID NO: 5121 - protein, 8 aa, Homo sapiens
  Light chain CDR3 for antibody 2561 (IGKV3-20)
QQYGRSFT

SEQ ID NO: 5122 - protein, 18 aa, Homo sapiens
  Heavy chain CDR3 for antibody 2561 (IGHV4-59)
AREGDYVWGSYRPNWFDP

SEQ ID NO: 5123 - protein, 9 aa, Homo sapiens
  Light chain CDR3 for antibody 2562 (IGKV1-9)
QQLNSYPLT

SEQ ID NO: 5124 - protein, 17 aa, Homo sapiens
  Heavy chain CDR3 for antibody 2562 (IGHV3-23)
AKDYDILTGYSHNWFDP

SEQ ID NO: 5125 - protein, 9 aa, Homo sapiens
  Light chain CDR3 for antibody 2563 (IGKV1-9)
QQYNSYPLT

SEQ ID NO: 5126 - protein, 13 aa, Homo sapiens
  Heavy chain CDR3 for antibody 2563 (IGHV1-46)
ARRQVGYYYGMDV

SEQ ID NO: 5127 - protein, 9 aa, Homo sapiens
  Light chain CDR3 for antibody 2564 (IGKV2-30)
MQGTHWPLT

SEQ ID NO: 5128 - protein, 13 aa, Homo sapiens
  Heavy chain CDR3 for antibody 2564 (IGHV3-33)
ARKAYGDYFYFDY

SEQ ID NO: 5129 - protein, 9 aa, Homo sapiens
  Light chain CDR3 for antibody 2565 (IGKV1-17)
LQHNSYPWT

SEQ ID NO: 5130 - protein, 18 aa, Homo sapiens
  Heavy chain CDR3 for antibody 2565 (IGHV3-33)
ARDQGIVVLPGAPWYFDP

SEQ ID NO: 5131 - protein, 9 aa, Homo sapiens
  Light chain CDR3 for antibody 2566 (IGKV1-6)
LQDYKSPFT

SEQ ID NO: 5132 - protein, 13 aa, Homo sapiens
  Heavy chain CDR3 for antibody 2566 (IGHV3-11)
ARDGGAAAGTWDS

SEQ ID NO: 5133 - protein, 9 aa, Homo sapiens
  Light chain CDR3 for antibody 2567 (IGKV6-21)
HQSSSLPLT

SEQ ID NO: 5134 - protein, 12 aa, Homo sapiens
  Heavy chain CDR3 for antibody 2567 (IGHV4-61)
ARVDSSGWFFDY

SEQ ID NO: 5135 - protein, 9 aa, Homo sapiens
  Light chain CDR3 for antibody 2568 (IGKV1-16)
QQYNSYPYT

SEQ ID NO: 5136 - protein, 15 aa, Homo sapiens
  Heavy chain CDR3 for antibody 2568 (IGHV3-33)
ARDRVQLGYYYGMDV

SEQ ID NO: 5137 - protein, 8 aa, Homo sapiens
  Light chain CDR3 for antibody 2569 (IGKV1-5)
QQYNSYYT

SEQ ID NO: 5138 - protein, 13 aa, Homo sapiens
  Heavy chain CDR3 for antibody 2569 (IGHV4-34)
ASNFYYYYYGMDV

SEQ ID NO: 5139 - protein, 9 aa, Homo sapiens
  Light chain CDR3 for antibody 2570 (IGKV1-39)
QQSYRTPLT

SEQ ID NO: 5140 - protein, 14 aa, Homo sapiens
  Heavy chain CDR3 for antibody 2570 (IGHV3-33)
ARRGSPLRPSHLDV

SEQ ID NO: 5141 - protein, 9 aa, Homo sapiens
  Light chain CDR3 for antibody 2571 (IGKV3-20)
QQYGSSPYT

SEQ ID NO: 5142 - protein, 12 aa, Homo sapiens
  Heavy chain CDR3 for antibody 2571 (IGHV4-39)
ARREVILGAFDY

SEQ ID NO: 5143 - protein, 9 aa, Homo sapiens
  Light chain CDR3 for antibody 2572 (IGKV1D-13)
QQFNNYPHT

SEQ ID NO: 5144 - protein, 14 aa, Homo sapiens
  Heavy chain CDR3 for antibody 2572 (IGHV4-39)
ARQDYDILTGLFDY

SEQ ID NO: 5145 - protein, 9 aa, Homo sapiens
  Light chain CDR3 for antibody 2573 (IGKV5-2)
LQHDNFPYT

SEQ ID NO: 5146 - protein, 10 aa, Homo sapiens
  Heavy chain CDR3 for antibody 2573 (IGHV3-33)
AREWFGGFDI

SEQ ID NO: 5147 - protein, 9 aa, Homo sapiens
  Light chain CDR3 for antibody 2574 (IGKV2-30)
MQGTHWPLT

SEQ ID NO: 5148 - protein, 9 aa, Homo sapiens
  Heavy chain CDR3 for antibody 2574 (IGHV3-13)
ARDRWYFDL

SEQ ID NO: 5149 - protein, 9 aa, Homo sapiens
  Light chain CDR3 for antibody 2575 (IGKV1D-16)
QQYNSYPYT

SEQ ID NO: 5150 - protein, 13 aa, Homo sapiens
  Heavy chain CDR3 for antibody 2575 (IGHV3-11)
AREGIAVAGDFDF

SEQ ID NO: 5151 - protein, 9 aa, Homo sapiens
  Light chain CDR3 for antibody 2576 (IGKV1-27)
QKYNSAPYT

SEQ ID NO: 5152 - protein, 13 aa, Homo sapiens
  Heavy chain CDR3 for antibody 2576 (IGHV3-33)
ARVDTMVRGVMAY

SEQ ID NO: 5153 - protein, 9 aa, Homo sapiens
  Light chain CDR3 for antibody 2577 (IGKV1-6)
LQDYNYPYT

SEQ ID NO: 5154 - protein, 14 aa, Homo sapiens
  Heavy chain CDR3 for antibody 2577 (IGHV1-46)
ARAYYAFLTGAFDI

SEQ ID NO: 5155 - protein, 9 aa, Homo sapiens
  Light chain CDR3 for antibody 2578 (IGKV3D-20)
QQYGSSPYT

SEQ ID NO: 5156 - protein, 12 aa, Homo sapiens
  Heavy chain CDR3 for antibody 2578 (IGHV3-33)
ARDGYSSRNFDY

SEQ ID NO: 5157 - protein, 9 aa, Homo sapiens
  Light chain CDR3 for antibody 2579 (IGKV5-2)
LQHDNFPYT

SEQ ID NO: 5158 - protein, 17 aa, Homo sapiens
  Heavy chain CDR3 for antibody 2579 (IGHV3-33)
AREDYDILTGYPFYFDY

SEQ ID NO: 5159 - protein, 9 aa, Homo sapiens
  Light chain CDR3 for antibody 2580 (IGKV5-2)
LQHDNFPYT

SEQ ID NO: 5160 - protein, 24 aa, Homo sapiens
  Heavy chain CDR3 for antibody 2580 (IGHV1-46)
ARDEARGLLTGYYNMREYYYGMDV

SEQ ID NO: 5161 - protein, 8 aa, Homo sapiens
  Light chain CDR3 for antibody 2581 (IGKV3D-7)
QQDYNLLT

SEQ ID NO: 5162 - protein, 13 aa, Homo sapiens
  Heavy chain CDR3 for antibody 2581 (IGHV3-23)
ASPFNWNDGFFDY

SEQ ID NO: 5163 - protein, 9 aa, Homo sapiens
  Light chain CDR3 for antibody 2582 (IGKV1-39)
QQSYSTPLT

SEQ ID NO: 5164 - protein, 13 aa, Homo sapiens
  Heavy chain CDR3 for antibody 2582 (IGHV3-33)
ARGVLWFGELFDY

SEQ ID NO: 5165 - protein, 8 aa, Homo sapiens
  Light chain CDR3 for antibody 2583 (IGKV3D-7)
QQDYNLLT

SEQ ID NO: 5166 - protein, 13 aa, Homo sapiens
  Heavy chain CDR3 for antibody 2583 (IGHV4-39)
ARHVLLWFGEFDP

SEQ ID NO: 5167 - protein, 9 aa, Homo sapiens
  Light chain CDR3 for antibody 2584 (IGKV3-20)
QQYGSSPYT

SEQ ID NO: 5168 - protein, 18 aa, Homo sapiens
  Heavy chain CDR3 for antibody 2584 (IGHV3-33)
ARDQGIVVLPGAPWYFDP

SEQ ID NO: 5169 - protein, 9 aa, Homo sapiens
  Light chain CDR3 for antibody 2585 (IGKV1-17)
LQHNSYPPT

SEQ ID NO: 5170 - protein, 15 aa, Homo sapiens
  Heavy chain CDR3 for antibody 2585 (IGHV3-33)
ARGVDILTGYSSFDY

SEQ ID NO: 5171 - protein, 10 aa, Homo sapiens
  Light chain CDR3 for antibody 2586 (IGKV3-11)
QQRSNWPIFT

SEQ ID NO: 5172 - protein, 18 aa, Homo sapiens
  Heavy chain CDR3 for antibody 2586 (IGHV3-33)
ARREGIVGATTYYYGMDV

SEQ ID NO: 5173 - protein, 9 aa, Homo sapiens
  Light chain CDR3 for antibody 2587 (IGKV5-2)
LQHDNFPYT

SEQ ID NO: 5174 - protein, 17 aa, Homo sapiens
  Heavy chain CDR3 for antibody 2587 (IGHV3-23)
AKDRPVTTLYYYFGMDV

SEQ ID NO: 5175 - protein, 9 aa, Homo sapiens
  Light chain CDR3 for antibody 2588 (IGKV1-17)
LQHNSYPYT

SEQ ID NO: 5176 - protein, 13 aa, Homo sapiens
  Heavy chain CDR3 for antibody 2588 (IGHV4-39)
ARRDVLAPAAFDY

SEQ ID NO: 5177 - protein, 9 aa, Homo sapiens
  Light chain CDR3 for antibody 2589 (IGKV3-20)
QQYGSSPYT

SEQ ID NO: 5178 - protein, 17 aa, Homo sapiens
  Heavy chain CDR3 for antibody 2589 (IGHV3-30)
AREGVRGLIYYYYGMDV

SEQ ID NO: 5179 - protein, 9 aa, Homo sapiens
  Light chain CDR3 for antibody 2590 (IGKV1-39)
QQSYSTPLT

SEQ ID NO: 5180 - protein, 8 aa, Homo sapiens
  Heavy chain CDR3 for antibody 2590 (IGHV3-33)
ARDRGFDY

SEQ ID NO: 5181 - protein, 9 aa, Homo sapiens
  Light chain CDR3 for antibody 2591 (IGKV3-11)
QQRSNWPYT

SEQ ID NO: 5182 - protein, 18 aa, Homo sapiens
  Heavy chain CDR3 for antibody 2591 (IGHV1-46)
ARDGDYVWGSYRSDWFDP

SEQ ID NO: 5183 - protein, 9 aa, Homo sapiens
  Light chain CDR3 for antibody 2592 (IGKV3-11)
QQRSNWPWT

SEQ ID NO: 5184 - protein, 12 aa, Homo sapiens
  Heavy chain CDR3 for antibody 2592 (IGHV4-59)
ARDRSGWAYFDY

SEQ ID NO: 5185 - protein, 9 aa, Homo sapiens
  Light chain CDR3 for antibody 2593 (IGKV6-21)
HQSSSLPYT

SEQ ID NO: 5186 - protein, 18 aa, Homo sapiens
  Heavy chain CDR3 for antibody 2593 (IGHV3-33)
ARDGRISLVRGIIDAFDI

SEQ ID NO: 5187 - protein, 8 aa, Homo sapiens
  Light chain CDR3 for antibody 2594 (IGKV3-11)
QQRSNWLT

SEQ ID NO: 5188 - protein, 13 aa, Homo sapiens
  Heavy chain CDR3 for antibody 2594 (IGHV4-59)
ARDAGYSSSWFDY

SEQ ID NO: 5189 - protein, 9 aa, Homo sapiens
  Light chain CDR3 for antibody 2595 (IGKV1-17)
LQHNSYPYT

SEQ ID NO: 5190 - protein, 12 aa, Homo sapiens
  Heavy chain CDR3 for antibody 2595 (IGHV3-33)
ARGYFTSGSAHY

SEQ ID NO: 5191 - protein, 9 aa, Homo sapiens
  Light chain CDR3 for antibody 2596 (IGKV1D-13)
QQFNNYPYT

SEQ ID NO: 5192 - protein, 7 aa, Homo sapiens
  Heavy chain CDR3 for antibody 2596 (IGHV3-33)
ARELVDY

SEQ ID NO: 5193 - protein, 9 aa, Homo sapiens
  Light chain CDR3 for antibody 2597 (IGKV1-27)
QKYNSAPYT

SEQ ID NO: 5194 - protein, 12 aa, Homo sapiens
  Heavy chain CDR3 for antibody 2597 (IGHV3-33)
ARKGYDMHEFDI

SEQ ID NO: 5195 - protein, 9 aa, Homo sapiens
  Light chain CDR3 for antibody 2598 (IGKV1-9)
QQLNSYPYT

SEQ ID NO: 5196 - protein, 14 aa, Homo sapiens
  Heavy chain CDR3 for antibody 2598 (IGHV3-66)
ARDRDYYYYYGMDV

SEQ ID NO: 5197 - protein, 9 aa, Homo sapiens
  Light chain CDR3 for antibody 2599 (IGKV3-15)
QQYNNWPLT

SEQ ID NO: 5198 - protein, 9 aa, Homo sapiens
  Heavy chain CDR3 for antibody 2599 (IGHV4-59)
AREGGSGSL

SEQ ID NO: 5199 - protein, 9 aa, Homo sapiens
  Light chain CDR3 for antibody 2600 (IGKV1D-16)
QQYNSFPLT

SEQ ID NO: 5200 - protein, 11 aa, Homo sapiens
  Heavy chain CDR3 for antibody 2600 (IGHV4-59)
ARSLRYSFFDY

SEQ ID NO: 5201 - protein, 9 aa, Homo sapiens
  Light chain CDR3 for antibody 2601 (IGKV5-2)
LQHDNFPWT

SEQ ID NO: 5202 - protein, 18 aa, Homo sapiens
  Heavy chain CDR3 for antibody 2601 (IGHV1-8)
AREGAAAGSYYYYNGMDV

SEQ ID NO: 5203 - protein, 8 aa, Homo sapiens
  Light chain CDR3 for antibody 2602 (IGKV3D-7)
QQDYNLLT

SEQ ID NO: 5204 - protein, 14 aa, Homo sapiens
  Heavy chain CDR3 for antibody 2602 (IGHV3-33)
ARDREQQLVRYFDY

SEQ ID NO: 5205 - protein, 8 aa, Homo sapiens
  Light chain CDR3 for antibody 2603 (IGKV1D-13)
QQFNNYPT

SEQ ID NO: 5206 - protein, 12 aa, Homo sapiens
  Heavy chain CDR3 for antibody 2603 (IGHV3-33)
ARGYFGSGYAHF

SEQ ID NO: 5207 - protein, 9 aa, Homo sapiens
  Light chain CDR3 for antibody 2604 (IGKV3-15)
QQYNNWPIT

SEQ ID NO: 5208 - protein, 14 aa, Homo sapiens
  Heavy chain CDR3 for antibody 2604 (IGHV3-13)
AREVSMVRGVIFDY

SEQ ID NO: 5209 - protein, 9 aa, Homo sapiens
  Light chain CDR3 for antibody 2605 (IGKV6-21)
HQSSSLPYT

SEQ ID NO: 5210 - protein, 15 aa, Homo sapiens
  Heavy chain CDR3 for antibody 2605 (IGHV3-33)
ARDGSGSYSLYGMDV

SEQ ID NO: 5211 - protein, 9 aa, Homo sapiens
  Light chain CDR3 for antibody 2606 (IGKV5-2)
LQHDNFPWT

SEQ ID NO: 5212 - protein, 12 aa, Homo sapiens
  Heavy chain CDR3 for antibody 2606 (IGHV4-34)
ARGYSSSWYFDY

SEQ ID NO: 5213 - protein, 9 aa, Homo sapiens
  Light chain CDR3 for antibody 2607 (IGKV1-39)
QQSYSTPLT

SEQ ID NO: 5214 - protein, 9 aa, Homo sapiens
  Heavy chain CDR3 for antibody 2607 (IGHV3-30)
ARDYFHYDY

SEQ ID NO: 5215 - protein, 9 aa, Homo sapiens
  Light chain CDR3 for antibody 2608 (IGKV1-39)
QQSYSTPLT

SEQ ID NO: 5216 - protein, 11 aa, Homo sapiens
  Heavy chain CDR3 for antibody 2608 (IGHV3-33)
ARDILTGFLDH

SEQ ID NO: 5217 - protein, 9 aa, Homo sapiens
  Light chain CDR3 for antibody 2609 (IGKV1D-16)
QQYNSYPYT

SEQ ID NO: 5218 - protein, 17 aa, Homo sapiens
  Heavy chain CDR3 for antibody 2609 (IGHV3-23)
AREGYYDILTDYYGMDV

SEQ ID NO: 5219 - protein, 9 aa, Homo sapiens
  Light chain CDR3 for antibody 2610 (IGKV1-6)
QQEYNYPLT

SEQ ID NO: 5220 - protein, 17 aa, Homo sapiens
  Heavy chain CDR3 for antibody 2610 (IGHV1-18)
ARDEGYDILTGYPHFDY

SEQ ID NO: 5221 - protein, 9 aa, Homo sapiens
  Light chain CDR3 for antibody 2611 (IGKV1D-13)
QQFNNYPYT

SEQ ID NO: 5222 - protein, 17 aa, Homo sapiens
  Heavy chain CDR3 for antibody 2611 (IGHV3-64)
ARERYYGSGSYYNWFDP

SEQ ID NO: 5223 - protein, 8 aa, Homo sapiens
  Light chain CDR3 for antibody 2612 (IGKV1-5)
QQYNSYWT

SEQ ID NO: 5224 - protein, 13 aa, Homo sapiens
  Heavy chain CDR3 for antibody 2612 (IGHV3-33)
ARDWGYSHGYFDY

SEQ ID NO: 5225 - protein, 9 aa, Homo sapiens
  Light chain CDR3 for antibody 2613 (IGKV1-9)
QQLISYPLT

SEQ ID NO: 5226 - protein, 13 aa, Homo sapiens
  Heavy chain CDR3 for antibody 2613 (IGHV3-33)
ARDQRYSSGWYDY

SEQ ID NO: 5227 - protein, 9 aa, Homo sapiens
  Light chain CDR3 for antibody 2614 (IGKV5-2)
LQHDNFPYT

SEQ ID NO: 5228 - protein, 14 aa, Homo sapiens
  Heavy chain CDR3 for antibody 2614 (IGHV3-33)
ARDAYDILTGYYDY

SEQ ID NO: 5229 - protein, 9 aa, Homo sapiens
  Light chain CDR3 for antibody 2615 (IGKV1-27)
QKYNSAPYT

SEQ ID NO: 5230 - protein, 14 aa, Homo sapiens
  Heavy chain CDR3 for antibody 2615 (IGHV3-23)
ANWAYDILTGYLDY

SEQ ID NO: 5231 - protein, 9 aa, Homo sapiens
  Light chain CDR3 for antibody 2616 (IGKV3-20)
QQYGSSPYT

SEQ ID NO: 5232 - protein, 13 aa, Homo sapiens
  Heavy chain CDR3 for antibody 2616 (IGHV3-33)
AREYCSGGSCYDY

SEQ ID NO: 5233 - protein, 9 aa, Homo sapiens
  Light chain CDR3 for antibody 2617 (IGKV3-20)
QQYGSSPYT

SEQ ID NO: 5234 - protein, 17 aa, Homo sapiens
  Heavy chain CDR3 for antibody 2617 (IGHV3-33)
ARQGVLLWFGELYYFDY

SEQ ID NO: 5235 - protein, 9 aa, Homo sapiens
  Light chain CDR3 for antibody 2618 (IGKV1D-13)
QQFNNYPYT

SEQ ID NO: 5236 - protein, 19 aa, Homo sapiens
  Heavy chain CDR3 for antibody 2618 (IGHV3-33)
ARDSGYSGYDYYYYYGMDV

SEQ ID NO: 5237 - protein, 9 aa, Homo sapiens
  Light chain CDR3 for antibody 2619 (IGKV5-2)
LQHDNFPWT

SEQ ID NO: 5238 - protein, 9 aa, Homo sapiens
  Heavy chain CDR3 for antibody 2619 (IGHV4-34)
ARDLYYFDY

SEQ ID NO: 5239 - protein, 9 aa, Homo sapiens
  Light chain CDR3 for antibody 2620 (IGKV6-21)
HQSSSLPYT

SEQ ID NO: 5240 - protein, 16 aa, Homo sapiens
  Heavy chain CDR3 for antibody 2620 (IGHV3-20)
AREGYSSSWFDRNFDY

SEQ ID NO: 5241 - protein, 9 aa, Homo sapiens
  Light chain CDR3 for antibody 2621 (IGKV1-39)
QQSYSTPLT

SEQ ID NO: 5242 - protein, 11 aa, Homo sapiens
  Heavy chain CDR3 for antibody 2621 (IGHV3-23)
AKGLWSYYFDY

SEQ ID NO: 5243 - protein, 9 aa, Homo sapiens
  Light chain CDR3 for antibody 2622 (IGKV3D-20)
QQYGSGPWT

SEQ ID NO: 5244 - protein, 15 aa, Homo sapiens
  Heavy chain CDR3 for antibody 2622 (IGHV3-64)
ARDSRPEITGPPFDY

SEQ ID NO: 5245 - protein, 9 aa, Homo sapiens
  Light chain CDR3 for antibody 2623 (IGKV2-30)
MQGTHWPLT

SEQ ID NO: 5246 - protein, 12 aa, Homo sapiens
  Heavy chain CDR3 for antibody 2623 (IGHV3-13)
AREAGIPDAFDI

SEQ ID NO: 5247 - protein, 11 aa, Homo sapiens
  Light chain CDR3 for antibody 2624 (IGKV3-11)
QQRSNWPPTWT

SEQ ID NO: 5248 - protein, 16 aa, Homo sapiens
  Heavy chain CDR3 for antibody 2624 (IGHV3-23)
AKEGMVLRYFDWLWDY

SEQ ID NO: 5249 - protein, 10 aa, Homo sapiens
  Light chain CDR3 for antibody 2625 (IGKV3-11)
QQRSNWPIFT

SEQ ID NO: 5250 - protein, 13 aa, Homo sapiens
  Heavy chain CDR3 for antibody 2625 (IGHV3-11)
ARDEGYRGYVLDT

SEQ ID NO: 5251 - protein, 9 aa, Homo sapiens
  Light chain CDR3 for antibody 2626 (IGKV1-27)
QKYNSAPYT

SEQ ID NO: 5252 - protein, 14 aa, Homo sapiens
  Heavy chain CDR3 for antibody 2626 (IGHV3-33)
ARDGYDFLTGPFDY

SEQ ID NO: 5253 - protein, 9 aa, Homo sapiens
  Light chain CDR3 for antibody 2627 (IGKV1-6)
LQDYNYPYT

SEQ ID NO: 5254 - protein, 14 aa, Homo sapiens
  Heavy chain CDR3 for antibody 2627 (IGHV3-20)
ARDRGSSFFDAFDI

SEQ ID NO: 5255 - protein, 9 aa, Homo sapiens
  Light chain CDR3 for antibody 2628 (IGKV1-6)
LQDYNYPYT

SEQ ID NO: 5256 - protein, 14 aa, Homo sapiens
  Heavy chain CDR3 for antibody 2628 (IGHV1-46)
ARKGIVGGFDAFDV

SEQ ID NO: 5257 - protein, 8 aa, Homo sapiens
  Light chain CDR3 for antibody 2629 (IGKV3D-7)
QQDYNLLT

SEQ ID NO: 5258 - protein, 17 aa, Homo sapiens
  Heavy chain CDR3 for antibody 2629 (IGHV1-18)
ARDEGYDILTGYPHFDY

SEQ ID NO: 5259 - protein, 9 aa, Homo sapiens
  Light chain CDR3 for antibody 2630 (IGKV1-6)
LQDYNYPYT

SEQ ID NO: 5260 - protein, 19 aa, Homo sapiens
  Heavy chain CDR3 for antibody 2630 (IGHV4-39)
ARQGDVLRYFDWLLGAFDI

SEQ ID NO: 5261 - protein, 9 aa, Homo sapiens
  Light chain CDR3 for antibody 2631 (IGKV1-27)
QKYNSAPYT

SEQ ID NO: 5262 - protein, 14 aa, Homo sapiens
  Heavy chain CDR3 for antibody 2631 (IGHV3-33)
ARRGSPLRPSHLDV

SEQ ID NO: 5263 - protein, 10 aa, Homo sapiens
  Light chain CDR3 for antibody 2632 (IGKV3-15)
QQYNNWPPLT

SEQ ID NO: 5264 - protein, 11 aa, Homo sapiens
  Heavy chain CDR3 for antibody 2632 (IGHV3-33)
ARDRSSGPFDY

SEQ ID NO: 5265 - protein, 9 aa, Homo sapiens
  Light chain CDR3 for antibody 2633 (IGKV1-17)
LQHNSYPRT

SEQ ID NO: 5266 - protein, 9 aa, Homo sapiens
  Heavy chain CDR3 for antibody 2633 (IGHV3-33)
VGPYSGYEY

SEQ ID NO: 5267 - protein, 9 aa, Homo sapiens
  Light chain CDR3 for antibody 2634 (IGKV2-30)
MQGTHWPLT

SEQ ID NO: 5268 - protein, 18 aa, Homo sapiens
  Heavy chain CDR3 for antibody 2634 (IGHV4-59)
AREGHYYTSGSYYKAFDY

SEQ ID NO: 5269 - protein, 9 aa, Homo sapiens
  Light chain CDR3 for antibody 2635 (IGKV1-27)
QKYNSAPYT

SEQ ID NO: 5270 - protein, 18 aa, Homo sapiens
  Heavy chain CDR3 for antibody 2635 (IGHV3-33)
ARGGYSSGWDYYYYGMDV

SEQ ID NO: 5271 - protein, 9 aa, Homo sapiens
  Light chain CDR3 for antibody 2636 (IGKV3-11)
QQRSNWPLT

SEQ ID NO: 5272 - protein, 13 aa, Homo sapiens
  Heavy chain CDR3 for antibody 2636 (IGHV3-23)
ASTGDSYYYGMDV

SEQ ID NO: 5273 - protein, 9 aa, Homo sapiens
  Light chain CDR3 for antibody 2637 (IGKV1-16)
QQYNSYPYT

SEQ ID NO: 5274 - protein, 10 aa, Homo sapiens
  Heavy chain CDR3 for antibody 2637 (IGHV1-46)
AREWELLFDY

SEQ ID NO: 5275 - protein, 8 aa, Homo sapiens
  Light chain CDR3 for antibody 2638 (IGKV3-20)
QQYGSSLT

SEQ ID NO: 5276 - protein, 13 aa, Homo sapiens
  Heavy chain CDR3 for antibody 2638 (IGHV3-11)
ARDGGAAAGTWDS

SEQ ID NO: 5277 - protein, 9 aa, Homo sapiens
  Light chain CDR3 for antibody 2639 (IGKV3D-7)
QQDYNLPYT

SEQ ID NO: 5278 - protein, 13 aa, Homo sapiens
  Heavy chain CDR3 for antibody 2639 (IGHV4-61)
ASRYSSGWYPFDY

SEQ ID NO: 5279 - protein, 9 aa, Homo sapiens
  Light chain CDR3 for antibody 2640 (IGKV1-6)
LQDYNYPYT

SEQ ID NO: 5280 - protein, 14 aa, Homo sapiens
  Heavy chain CDR3 for antibody 2640 (IGHV3-33)
ARWELPFYYSGMDV

SEQ ID NO: 5281 - protein, 9 aa, Homo sapiens
  Light chain CDR3 for antibody 2641 (IGKV1-27)
QKYNSAPYT

SEQ ID NO: 5282 - protein, 14 aa, Homo sapiens
  Heavy chain CDR3 for antibody 2641 (IGHV4-39)
ARQDYDILTGLFDY

SEQ ID NO: 5283 - protein, 8 aa, Homo sapiens
  Light chain CDR3 for antibody 2642 (IGKV3D-7)
QQDYNLLT

SEQ ID NO: 5284 - protein, 18 aa, Homo sapiens
  Heavy chain CDR3 for antibody 2642 (IGHV4-59)
AREGHYYTSGSYYKAFDY

SEQ ID NO: 5285 - protein, 9 aa, Homo sapiens
  Light chain CDR3 for antibody 2643 (IGKV3D-7)
QQDYSFPLT

SEQ ID NO: 5286 - protein, 12 aa, Homo sapiens
  Heavy chain CDR3 for antibody 2643 (IGHV4-61)
ARVDSSGWYFDY

SEQ ID NO: 5287 - protein, 9 aa, Homo sapiens
  Light chain CDR3 for antibody 2644 (IGKV5-2)
LQHDNFPYT

SEQ ID NO: 5288 - protein, 17 aa, Homo sapiens
  Heavy chain CDR3 for antibody 2644 (IGHV3-33)
ARQGVLLWFGELYYFDY

SEQ ID NO: 5289 - protein, 9 aa, Homo sapiens
  Light chain CDR3 for antibody 2645 (IGKV1-17)
LQHNSYPYT

SEQ ID NO: 5290 - protein, 6 aa, Homo sapiens
  Heavy chain CDR3 for antibody 2645 (IGHV1-8)
AREGTY

SEQ ID NO: 5291 - protein, 9 aa, Homo sapiens
  Light chain CDR3 for antibody 2646 (IGKV3D-7)
QQDYNLPLT

SEQ ID NO: 5292 - protein, 18 aa, Homo sapiens
  Heavy chain CDR3 for antibody 2646 (IGHV3-23)
AKEGNYYGSGSYWGYFDP

SEQ ID NO: 5293 - protein, 9 aa, Homo sapiens
  Light chain CDR3 for antibody 2647 (IGKV5-2)
LQHDNFPYT

SEQ ID NO: 5294 - protein, 17 aa, Homo sapiens
  Heavy chain CDR3 for antibody 2647 (IGHV3-30)
AREGVRGLIYYYYGMDV

SEQ ID NO: 5295 - protein, 9 aa, Homo sapiens
  Light chain CDR3 for antibody 2648 (IGKV1D-13)
QQFNNYPYT

SEQ ID NO: 5296 - protein, 12 aa, Homo sapiens
  Heavy chain CDR3 for antibody 2648 (IGHV1-46)
AREDYDIDGMDV

SEQ ID NO: 5297 - protein, 9 aa, Homo sapiens
  Light chain CDR3 for antibody 2649 (IGKV1-9)
QQLNSYPLT

SEQ ID NO: 5298 - protein, 14 aa, Homo sapiens
  Heavy chain CDR3 for antibody 2649 (IGHV3-33)
VRDAMGATTAWFDP

SEQ ID NO: 5299 - protein, 9 aa, Homo sapiens
  Light chain CDR3 for antibody 2650 (IGKV1-39)
QQSYRTPLT

SEQ ID NO: 5300 - protein, 19 aa, Homo sapiens
  Heavy chain CDR3 for antibody 2650 (IGHV3-30)
ARRFSGYSGYDHYYYGMDV

SEQ ID NO: 5301 - protein, 9 aa, Homo sapiens
  Light chain CDR3 for antibody 2651 (IGKV6-21)
HQSSSLPYT

SEQ ID NO: 5302 - protein, 19 aa, Homo sapiens
  Heavy chain CDR3 for antibody 2651 (IGHV1-24)
ATAGLQWFGEKIGYYGMDV

SEQ ID NO: 5303 - protein, 9 aa, Homo sapiens
  Light chain CDR3 for antibody 2652 (IGKV1-39)
QQSYSTPLT

SEQ ID NO: 5304 - protein, 18 aa, Homo sapiens
  Heavy chain CDR3 for antibody 2652 (IGHV1-18)
ARDRYYYDSGSYYYGMDV

SEQ ID NO: 5305 - protein, 9 aa, Homo sapiens
  Light chain CDR3 for antibody 2653 (IGKV3D-7)
QQDYNLPLT

SEQ ID NO: 5306 - protein, 10 aa, Homo sapiens
  Heavy chain CDR3 for antibody 2653 (IGHV3-33)
ARDVVVYFDY

SEQ ID NO: 5307 - protein, 9 aa, Homo sapiens
  Light chain CDR3 for antibody 2654 (IGKV6-21)
HQSSSLPYT

SEQ ID NO: 5308 - protein, 8 aa, Homo sapiens
  Heavy chain CDR3 for antibody 2654 (IGHV4-39)
ARRGGLDY

SEQ ID NO: 5309 - protein, 9 aa, Homo sapiens
  Light chain CDR3 for antibody 2655 (IGKV3D-7)
QQDYNLPLT

SEQ ID NO: 5310 - protein, 13 aa, Homo sapiens
  Heavy chain CDR3 for antibody 2655 (IGHV3-53)
ARSGSYWGYYFDY

SEQ ID NO: 5311 - protein, 9 aa, Homo sapiens
  Light chain CDR3 for antibody 2656 (IGKV1-27)
QKYNSAPYT

SEQ ID NO: 5312 - protein, 14 aa, Homo sapiens
  Heavy chain CDR3 for antibody 2656 (IGHV4-39)
ARDSGYDYYYGMDV

SEQ ID NO: 5313 - protein, 9 aa, Homo sapiens
  Light chain CDR3 for antibody 2657 (IGKV1-39)
QQSYSTPLT

SEQ ID NO: 5314 - protein, 14 aa, Homo sapiens
  Heavy chain CDR3 for antibody 2657 (IGHV3-20)
ARDGGSTCYDWFDP

SEQ ID NO: 5315 - protein, 9 aa, Homo sapiens
  Light chain CDR3 for antibody 2658 (IGKV3-11)
QQYSNWPLT

SEQ ID NO: 5316 - protein, 10 aa, Homo sapiens
  Heavy chain CDR3 for antibody 2658 (IGHV3-33)
ARENSTPLDY

SEQ ID NO: 5317 - protein, 9 aa, Homo sapiens
  Light chain CDR3 for antibody 2659 (IGKV1-39)
QQSYRTPLT

SEQ ID NO: 5318 - protein, 15 aa, Homo sapiens
  Heavy chain CDR3 for antibody 2659 (IGHV3-33)
VCVLYDYGDYVGFDY

SEQ ID NO: 5319 - protein, 9 aa, Homo sapiens
  Light chain CDR3 for antibody 2660 (IGKV2-30)
MQGTHWPLT

SEQ ID NO: 5320 - protein, 12 aa, Homo sapiens
  Heavy chain CDR3 for antibody 2660 (IGHV3-33)
ARDLVGATPFDY

SEQ ID NO: 5321 - protein, 9 aa, Homo sapiens
  Light chain CDR3 for antibody 2661 (IGKV1-17)
LQHNSYPYT

SEQ ID NO: 5322 - protein, 12 aa, Homo sapiens
  Heavy chain CDR3 for antibody 2661 (IGHV4-34)
ARGYSSSWYFDY

SEQ ID NO: 5323 - protein, 9 aa, Homo sapiens
  Light chain CDR3 for antibody 2662 (IGKV1D-13)
QQFNNYPHT

SEQ ID NO: 5324 - protein, 10 aa, Homo sapiens
  Heavy chain CDR3 for antibody 2662 (IGHV3-33)
ARDGSGSQPI

SEQ ID NO: 5325 - protein, 9 aa, Homo sapiens
  Light chain CDR3 for antibody 2663 (IGKV6-21)
HQSSSLPYT

SEQ ID NO: 5326 - protein, 12 aa, Homo sapiens
  Heavy chain CDR3 for antibody 2663 (IGHV3-33)
AKDPGWQQLAEY

SEQ ID NO: 5327 - protein, 9 aa, Homo sapiens
  Light chain CDR3 for antibody 2664 (IGKV1D-16)
QQYNSYPYT

SEQ ID NO: 5328 - protein, 22 aa, Homo sapiens
  Heavy chain CDR3 for antibody 2664 (IGHV3-23)
AKDDLPYYDILTHSTTTGGMDV

SEQ ID NO: 5329 - protein, 9 aa, Homo sapiens
  Light chain CDR3 for antibody 2665 (IGKV1-39)
QQSYSTPYT

SEQ ID NO: 5330 - protein, 16 aa, Homo sapiens
  Heavy chain CDR3 for antibody 2665 (IGHV1-18)
ARYFDWLLRDYYGMDV

SEQ ID NO: 5331 - protein, 9 aa, Homo sapiens
  Light chain CDR3 for antibody 2666 (IGKV6-21)
HQSSSLPYT

SEQ ID NO: 5332 - protein, 18 aa, Homo sapiens
  Heavy chain CDR3 for antibody 2666 (IGHV3-33)
ARDRGDILTGYYKGWFDP

SEQ ID NO: 5333 - protein, 9 aa, Homo sapiens
  Light chain CDR3 for antibody 2667 (IGKV1-27)
QKYNSAPYT

SEQ ID NO: 5334 - protein, 21 aa, Homo sapiens
  Heavy chain CDR3 for antibody 2667 (IGHV3-33)
ARDEYYEIVTGYGYYHYGMDV

SEQ ID NO: 5335 - protein, 9 aa, Homo sapiens
  Light chain CDR3 for antibody 2668 (IGKV3-11)
QQRSNWPPT

SEQ ID NO: 5336 - protein, 15 aa, Homo sapiens
  Heavy chain CDR3 for antibody 2668 (IGHV3-33)
ARRVCSGGSCSLFDY

SEQ ID NO: 5337 - protein, 9 aa, Homo sapiens
  Light chain CDR3 for antibody 2669 (IGKV1D-13)
QQFNNYPYT

SEQ ID NO: 5338 - protein, 12 aa, Homo sapiens
  Heavy chain CDR3 for antibody 2669 (IGHV3-23)
AKEYDILTGYFH

SEQ ID NO: 5339 - protein, 8 aa, Homo sapiens
  Light chain CDR3 for antibody 2670 (IGKV1-5)
QQYNSYST

SEQ ID NO: 5340 - protein, 12 aa, Homo sapiens
  Heavy chain CDR3 for antibody 2670 (IGHV1-18)
ARILFYGDYFDY

SEQ ID NO: 5341 - protein, 9 aa, Homo sapiens
  Light chain CDR3 for antibody 2671 (IGKV5-2)
LQHDNFPWT

SEQ ID NO: 5342 - protein, 18 aa, Homo sapiens
  Heavy chain CDR3 for antibody 2671 (IGHV4-59)
ARDNHYYSSGTYSNWFDP

SEQ ID NO: 5343 - protein, 8 aa, Homo sapiens
  Light chain CDR3 for antibody 2672 (IGKV1D-13)
QQFNNYPT

SEQ ID NO: 5344 - protein, 18 aa, Homo sapiens
  Heavy chain CDR3 for antibody 2672 (IGHV1-46)
ARDGDYVWGSYRSDWFDP

SEQ ID NO: 5345 - protein, 9 aa, Homo sapiens
  Light chain CDR3 for antibody 2673 (IGKV1-33)
QQYDNLPFT

SEQ ID NO: 5346 - protein, 13 aa, Homo sapiens
  Heavy chain CDR3 for antibody 2673 (IGHV3-33)
ARDYCGGDCYLDY

SEQ ID NO: 5347 - protein, 9 aa, Homo sapiens
  Light chain CDR3 for antibody 2674 (IGKV2-30)
MQGTHWPLT

SEQ ID NO: 5348 - protein, 18 aa, Homo sapiens
  Heavy chain CDR3 for antibody 2674 (IGHV1-46)
ARDGDYVWGSYRSDWFDP

SEQ ID NO: 5349 - protein, 9 aa, Homo sapiens
  Light chain CDR3 for antibody 2675 (IGKV5-2)
LQHDNFPYT

SEQ ID NO: 5350 - protein, 18 aa, Homo sapiens
  Heavy chain CDR3 for antibody 2675 (IGHV3-23)
AKVGDFFASGNYWDYFDY

SEQ ID NO: 5351 - protein, 9 aa, Homo sapiens
  Light chain CDR3 for antibody 2676 (IGKV1D-16)
QQYNSYPLT

SEQ ID NO: 5352 - protein, 12 aa, Homo sapiens
  Heavy chain CDR3 for antibody 2676 (IGHV3-33)
ARDYISTYGMDV

SEQ ID NO: 5353 - protein, 9 aa, Homo sapiens
  Light chain CDR3 for antibody 2677 (IGKV1-27)
QKYNSAPYT

SEQ ID NO: 5354 - protein, 13 aa, Homo sapiens
  Heavy chain CDR3 for antibody 2677 (IGHV3-33)
ARQSSGWFDAFDI

SEQ ID NO: 5355 - protein, 9 aa, Homo sapiens
  Light chain CDR3 for antibody 2678 (IGKV3-20)
QQYGSSPWT

SEQ ID NO: 5356 - protein, 11 aa, Homo sapiens
  Heavy chain CDR3 for antibody 2678 (IGHV4-59)
ARSLRYSFFDY

SEQ ID NO: 5357 - protein, 9 aa, Homo sapiens
  Light chain CDR3 for antibody 2679 (IGKV3-20)
QQYGSSPYT

SEQ ID NO: 5358 - protein, 15 aa, Homo sapiens
  Heavy chain CDR3 for antibody 2679 (IGHV3-11)
ARDRAVAGTIHAFDI

SEQ ID NO: 5359 - protein, 9 aa, Homo sapiens
  Light chain CDR3 for antibody 2680 (IGKV3-11)
QQRSNWPLT

SEQ ID NO: 5360 - protein, 18 aa, Homo sapiens
  Heavy chain CDR3 for antibody 2680 (IGHV3-33)
ARGYYGSGNFYKDSGMDV

SEQ ID NO: 5361 - protein, 10 aa, Homo sapiens
  Light chain CDR3 for antibody 2681 (IGKV3-11)
QQRSNWPIFT

SEQ ID NO: 5362 - protein, 9 aa, Homo sapiens
  Heavy chain CDR3 for antibody 2681 (IGHV3-30)
ARDNWGFDY

SEQ ID NO: 5363 - protein, 9 aa, Homo sapiens
  Light chain CDR3 for antibody 2682 (IGKV2-30)
MQGTHWPLT

SEQ ID NO: 5364 - protein, 15 aa, Homo sapiens
  Heavy chain CDR3 for antibody 2682 (IGHV3-33)
ARDTGYSSSWNWFDP

SEQ ID NO: 5365 - protein, 9 aa, Homo sapiens
  Light chain CDR3 for antibody 2683 (IGKV1-6)
LQDYNYPYT

SEQ ID NO: 5366 - protein, 18 aa, Homo sapiens
  Heavy chain CDR3 for antibody 2683 (IGHV1-18)
ARDGYYGSGSFYYYGMDV

SEQ ID NO: 5367 - protein, 9 aa, Homo sapiens
  Light chain CDR3 for antibody 2684 (IGKV1D-13)
QQFNNYPYT

SEQ ID NO: 5368 - protein, 16 aa, Homo sapiens
  Heavy chain CDR3 for antibody 2684 (IGHV3-13)
ARDRSYESYYYYGMDV

SEQ ID NO: 5369 - protein, 8 aa, Homo sapiens
  Light chain CDR3 for antibody 2685 (IGKV3D-7)
QQDYNLLT

SEQ ID NO: 5370 - protein, 12 aa, Homo sapiens
  Heavy chain CDR3 for antibody 2685 (IGHV4-59)
ARDRSGWAYFDY

SEQ ID NO: 5371 - protein, 9 aa, Homo sapiens
  Light chain CDR3 for antibody 2686 (IGKV5-2)
LQHDNFPYT

SEQ ID NO: 5372 - protein, 16 aa, Homo sapiens
  Heavy chain CDR3 for antibody 2686 (IGHV3-20)
AREGYSSSWFDRNFDY

SEQ ID NO: 5373 - protein, 9 aa, Homo sapiens
  Light chain CDR3 for antibody 2687 (IGKV3D-7)
QQDYDLPYT

SEQ ID NO: 5374 - protein, 14 aa, Homo sapiens
  Heavy chain CDR3 for antibody 2687 (IGHV3-33)
ARDGSGSYPLYFDY

SEQ ID NO: 5375 - protein, 8 aa, Homo sapiens
  Light chain CDR3 for antibody 2688 (IGKV1D-13)
QQFNNYPT

SEQ ID NO: 5376 - protein, 12 aa, Homo sapiens
  Heavy chain CDR3 for antibody 2688 (IGHV1-18)
ARILFYGDYFDY

SEQ ID NO: 5377 - protein, 9 aa, Homo sapiens
  Light chain CDR3 for antibody 2689 (IGKV3-20)
QQYGSSPYT

SEQ ID NO: 5378 - protein, 15 aa, Homo sapiens
  Heavy chain CDR3 for antibody 2689 (IGHV3-33)
AREGLRYFHYYGMDV

SEQ ID NO: 5379 - protein, 9 aa, Homo sapiens
  Light chain CDR3 for antibody 2690 (IGKV3D-7)
QQDYNLPLT

SEQ ID NO: 5380 - protein, 13 aa, Homo sapiens
  Heavy chain CDR3 for antibody 2690 (IGHV3-33)
ARRATLVRGVFDP

SEQ ID NO: 5381 - protein, 9 aa, Homo sapiens
  Light chain CDR3 for antibody 2691 (IGKV6-21)
HQSSSLPYT

SEQ ID NO: 5382 - protein, 23 aa, Homo sapiens
  Heavy chain CDR3 for antibody 2691 (IGHV4-59)
ARERTYSDILPGYYEDYYYGMDV

SEQ ID NO: 5383 - protein, 9 aa, Homo sapiens
  Light chain CDR3 for antibody 2692 (IGKV1-6)
LQDYNYPWT

SEQ ID NO: 5384 - protein, 12 aa, Homo sapiens
  Heavy chain CDR3 for antibody 2692 (IGHV3-33)
AREMGGSYEVDY

SEQ ID NO: 5385 - protein, 9 aa, Homo sapiens
  Light chain CDR3 for antibody 2693 (IGKV3D-7)
QQDYNLPYT

SEQ ID NO: 5386 - protein, 18 aa, Homo sapiens
  Heavy chain CDR3 for antibody 2693 (IGHV3-33)
ARDGYSGYDYYYYYGMDV

SEQ ID NO: 5387 - protein, 9 aa, Homo sapiens
  Light chain CDR3 for antibody 2694 (IGKV6-21)
HQSSSLPYT

SEQ ID NO: 5388 - protein, 12 aa, Homo sapiens
  Heavy chain CDR3 for antibody 2694 (IGHV3-33)
ARGYFTSGSAHY

SEQ ID NO: 5389 - protein, 9 aa, Homo sapiens
  Light chain CDR3 for antibody 2695 (IGKV3D-7)
QQDYNLPLT

SEQ ID NO: 5390 - protein, 18 aa, Homo sapiens
  Heavy chain CDR3 for antibody 2695 (IGHV3-33)
ARGYYGSGNFYKDSGMDV

SEQ ID NO: 5391 - protein, 8 aa, Homo sapiens
  Light chain CDR3 for antibody 2696 (IGKV3D-7)
QQDYNLLT

SEQ ID NO: 5392 - protein, 13 aa, Homo sapiens
  Heavy chain CDR3 for antibody 2696 (IGHV3-23)
ASTGDSYYYGMDV

SEQ ID NO: 5393 - protein, 8 aa, Homo sapiens
  Light chain CDR3 for antibody 2697 (IGKV1D-13)
QQFNNYPT

SEQ ID NO: 5394 - protein, 13 aa, Homo sapiens
  Heavy chain CDR3 for antibody 2697 (IGHV3-33)
ARDWGYSHGYFDY

SEQ ID NO: 5395 - protein, 9 aa, Homo sapiens
  Light chain CDR3 for antibody 2698 (IGKV3-20)
QQYGSSPYT

SEQ ID NO: 5396 - protein, 17 aa, Homo sapiens
  Heavy chain CDR3 for antibody 2698 (IGHV3-33)
ARCGYSSSWYDPYYFDY

SEQ ID NO: 5397 - protein, 9 aa, Homo sapiens
  Light chain CDR3 for antibody 2699 (IGKV1-39)
QQSYSTPLT

SEQ ID NO: 5398 - protein, 16 aa, Homo sapiens
  Heavy chain CDR3 for antibody 2699 (IGHV3-33)
ARAVYYGSGSSLIMDV

SEQ ID NO: 5399 - protein, 9 aa, Homo sapiens
  Light chain CDR3 for antibody 2700 (IGKV1-9)
QQLISYPLT

SEQ ID NO: 5400 - protein, 12 aa, Homo sapiens
  Heavy chain CDR3 for antibody 2700 (IGHV3-33)
ARESGGSYSFDY

SEQ ID NO: 5401 - protein, 10 aa, Homo sapiens
  Light chain CDR3 for antibody 2701 (IGKV3-11)
QQRSNWPIFT

SEQ ID NO: 5402 - protein, 7 aa, Homo sapiens
  Heavy chain CDR3 for antibody 2701 (IGHV3-33)
ARELVDY

SEQ ID NO: 5403 - protein, 9 aa, Homo sapiens
  Light chain CDR3 for antibody 2702 (IGKV6-21)
HQSSSLPYT

SEQ ID NO: 5404 - protein, 17 aa, Homo sapiens
  Heavy chain CDR3 for antibody 2702 (IGHV3-23)
AKQDYYGSGTYSWFFDL

SEQ ID NO: 5405 - protein, 9 aa, Homo sapiens
  Light chain CDR3 for antibody 2703 (IGKV1D-16)
QQYNSYPYT

SEQ ID NO: 5406 - protein, 12 aa, Homo sapiens
  Heavy chain CDR3 for antibody 2703 (IGHV3-33)
AREEAVAEAFDI

SEQ ID NO: 5407 - protein, 8 aa, Homo sapiens
  Light chain CDR3 for antibody 2704 (IGKV1D-13)
QQFNNYPT

SEQ ID NO: 5408 - protein, 14 aa, Homo sapiens
  Heavy chain CDR3 for antibody 2704 (IGHV3-23)
AKSRIVGALYYFDY

SEQ ID NO: 5409 - protein, 9 aa, Homo sapiens
  Light chain CDR3 for antibody 2705 (IGKV1-17)
LQHNSYPYT

SEQ ID NO: 5410 - protein, 9 aa, Homo sapiens
  Heavy chain CDR3 for antibody 2705 (IGHV3-20)
ASIRGYFDY

SEQ ID NO: 5411 - protein, 9 aa, Homo sapiens
  Light chain CDR3 for antibody 2706 (IGKV1-39)
QQSYSTPLT

SEQ ID NO: 5412 - protein, 14 aa, Homo sapiens
  Heavy chain CDR3 for antibody 2706 (IGHV3-33)
ARQYSYGYPYYFDY

SEQ ID NO: 5413 - protein, 9 aa, Homo sapiens
  Light chain CDR3 for antibody 2707 (IGKV5-2)
LQHDNFPYT

SEQ ID NO: 5414 - protein, 15 aa, Homo sapiens
  Heavy chain CDR3 for antibody 2707 (IGHV3-33)
AKDRNSGYDWGGFDY

SEQ ID NO: 5415 - protein, 9 aa, Homo sapiens
  Light chain CDR3 for antibody 2708 (IGKV1-17)
LQHNSYPWT

SEQ ID NO: 5416 - protein, 18 aa, Homo sapiens
  Heavy chain CDR3 for antibody 2708 (IGHV3-33)
ARDYDSLTTYPEDYGMDV

SEQ ID NO: 5417 - protein, 9 aa, Homo sapiens
  Light chain CDR3 for antibody 2709 (IGKV1-39)
QQSYSTPLT

SEQ ID NO: 5418 - protein, 12 aa, Homo sapiens
  Heavy chain CDR3 for antibody 2709 (IGHV3-23)
AKEYDILTGYFH

SEQ ID NO: 5419 - protein, 9 aa, Homo sapiens
  Light chain CDR3 for antibody 2710 (IGKV1-39)
QQSYRTPLT

SEQ ID NO: 5420 - protein, 13 aa, Homo sapiens
  Heavy chain CDR3 for antibody 2710 (IGHV4-61)
ASRYSSGWYPFDY

SEQ ID NO: 5421 - protein, 9 aa, Homo sapiens
  Light chain CDR3 for antibody 2711 (IGKV6-21)
HQSSSLPYT

SEQ ID NO: 5422 - protein, 17 aa, Homo sapiens
  Heavy chain CDR3 for antibody 2711 (IGHV3-23)
AKDTITMVRGALFGMDV

SEQ ID NO: 5423 - protein, 9 aa, Homo sapiens
  Light chain CDR3 for antibody 2712 (IGKV1-27)
QKYNSAPYT

SEQ ID NO: 5424 - protein, 13 aa, Homo sapiens
  Heavy chain CDR3 for antibody 2712 (IGHV3-33)
AKEDGDYHHYFDY

SEQ ID NO: 5425 - protein, 9 aa, Homo sapiens
  Light chain CDR3 for antibody 2713 (IGKV1-16)
QQYNRYPYT

SEQ ID NO: 5426 - protein, 11 aa, Homo sapiens
  Heavy chain CDR3 for antibody 2713 (IGHV4-59)
AREMGHDTFDI

SEQ ID NO: 5427 - protein, 9 aa, Homo sapiens
  Light chain CDR3 for antibody 2714 (IGKV5-2)
LQHDNFPYT

SEQ ID NO: 5428 - protein, 10 aa, Homo sapiens
  Heavy chain CDR3 for antibody 2714 (IGHV3-23)
AKDHWGDFDY

SEQ ID NO: 5429 - protein, 9 aa, Homo sapiens
  Light chain CDR3 for antibody 2715 (IGKV5-2)
LQHDNFPYT

SEQ ID NO: 5430 - protein, 10 aa, Homo sapiens
  Heavy chain CDR3 for antibody 2715 (IGHV3-33)
ARDLGWSFDH

SEQ ID NO: 5431 - protein, 8 aa, Homo sapiens
  Light chain CDR3 for antibody 2716 (IGKV3D-7)
QQDYNLLT

SEQ ID NO: 5432 - protein, 9 aa, Homo sapiens
  Heavy chain CDR3 for antibody 2716 (IGHV1-18)
ARGKDWFDP

SEQ ID NO: 5433 - protein, 9 aa, Homo sapiens
  Light chain CDR3 for antibody 2717 (IGKV6-21)
HQSSSLPYT

SEQ ID NO: 5434 - protein, 18 aa, Homo sapiens
  Heavy chain CDR3 for antibody 2717 (IGHV3-33)
AREGYDILTGDYRLGFDY

SEQ ID NO: 5435 - protein, 9 aa, Homo sapiens
  Light chain CDR3 for antibody 2718 (IGKV1-17)
LQHNSYPYT

SEQ ID NO: 5436 - protein, 18 aa, Homo sapiens
  Heavy chain CDR3 for antibody 2718 (IGHV3-23)
AKPDYYGSGSYYNVPFDY

SEQ ID NO: 5437 - protein, 10 aa, Homo sapiens
  Light chain CDR3 for antibody 2719 (IGKV1-17)
LQHNSYPMYT

SEQ ID NO: 5438 - protein, 18 aa, Homo sapiens
  Heavy chain CDR3 for antibody 2719 (IGHV3-23)
AKDRITGTTYGYYSGLDV

SEQ ID NO: 5439 - protein, 9 aa, Homo sapiens
  Light chain CDR3 for antibody 2720 (IGKV2-30)
MQGTHWPLT

SEQ ID NO: 5440 - protein, 11 aa, Homo sapiens
  Heavy chain CDR3 for antibody 2720 (IGHV3-33)
ARDRVLTPFDY

SEQ ID NO: 5441 - protein, 9 aa, Homo sapiens
  Light chain CDR3 for antibody 2721 (IGKV1D-16)
QQYNYFPLT

SEQ ID NO: 5442 - protein, 16 aa, Homo sapiens
  Heavy chain CDR3 for antibody 2721 (IGHV4-59)
ARGRYFDWLLGDVFDI

SEQ ID NO: 5443 - protein, 8 aa, Homo sapiens
  Light chain CDR3 for antibody 2722 (IGKV3D-7)
QQDYNLLT

SEQ ID NO: 5444 - protein, 11 aa, Homo sapiens
  Heavy chain CDR3 for antibody 2722 (IGHV3-33)
ARDKSSGWSDY

SEQ ID NO: 5445 - protein, 8 aa, Homo sapiens
  Light chain CDR3 for antibody 2723 (IGKV3-20)
QQYGRSFT

SEQ ID NO: 5446 - protein, 14 aa, Homo sapiens
  Heavy chain CDR3 for antibody 2723 (IGHV4-39)
ARQDYDILTGLFDY

SEQ ID NO: 5447 - protein, 10 aa, Homo sapiens
  Light chain CDR3 for antibody 2724 (IGKV3-11)
QQRSNWPIFT

SEQ ID NO: 5448 - protein, 12 aa, Homo sapiens
  Heavy chain CDR3 for antibody 2724 (IGHV3-33)
ARESGGSYSFDY

SEQ ID NO: 5449 - protein, 10 aa, Homo sapiens
  Light chain CDR3 for antibody 2725 (IGKV1-39)
QQSYSTPMYT

SEQ ID NO: 5450 - protein, 17 aa, Homo sapiens
  Heavy chain CDR3 for antibody 2725 (IGHV3-33)
ARGYCSRTSCYLYYFDY

SEQ ID NO: 5451 - protein, 9 aa, Homo sapiens
  Light chain CDR3 for antibody 2726 (IGKV1-27)
QKYNSAPYT

SEQ ID NO: 5452 - protein, 20 aa, Homo sapiens
  Heavy chain CDR3 for antibody 2726 (IGHV3-33)
ARDNDSSGYYDYYYYYGMDV

SEQ ID NO: 5453 - protein, 9 aa, Homo sapiens
  Light chain CDR3 for antibody 2727 (IGKV6-21)
HQSSSLPYT

SEQ ID NO: 5454 - protein, 8 aa, Homo sapiens
  Heavy chain CDR3 for antibody 2727 (IGHV3-33)
ARDRGFDY

SEQ ID NO: 5455 - protein, 10 aa, Homo sapiens
  Light chain CDR3 for antibody 2728 (IGKV1-39)
QQSYSTPMYT

SEQ ID NO: 5456 - protein, 14 aa, Homo sapiens
  Heavy chain CDR3 for antibody 2728 (IGHV3-33)
ARDRIAAASSDFDC

SEQ ID NO: 5457 - protein, 9 aa, Homo sapiens
  Light chain CDR3 for antibody 2729 (IGKV1-9)
QQLISYPLT

SEQ ID NO: 5458 - protein, 12 aa, Homo sapiens
  Heavy chain CDR3 for antibody 2729 (IGHV3-33)
ARVDTAAPYFDY

SEQ ID NO: 5459 - protein, 9 aa, Homo sapiens
  Light chain CDR3 for antibody 2730 (IGKV6-21)
HQSSSLPYT

SEQ ID NO: 5460 - protein, 10 aa, Homo sapiens
  Heavy chain CDR3 for antibody 2730 (IGHV3-33)
AREGLRYFDH

SEQ ID NO: 5461 - protein, 9 aa, Homo sapiens
  Light chain CDR3 for antibody 2731 (IGKV1-39)
QQSYSTPLT

SEQ ID NO: 5462 - protein, 13 aa, Homo sapiens
  Heavy chain CDR3 for antibody 2731 (IGHV3-33)
ARVDTMVRGVMAY

SEQ ID NO: 5463 - protein, 9 aa, Homo sapiens
  Light chain CDR3 for antibody 2732 (IGKV1D-16)
QQYNSYPYT

SEQ ID NO: 5464 - protein, 18 aa, Homo sapiens
  Heavy chain CDR3 for antibody 2732 (IGHV3-33)
ARDHYDILTGYYKGWFDP

SEQ ID NO: 5465 - protein, 9 aa, Homo sapiens
  Light chain CDR3 for antibody 2733 (IGKV1-27)
QKYNSAPYT

SEQ ID NO: 5466 - protein, 12 aa, Homo sapiens
  Heavy chain CDR3 for antibody 2733 (IGHV3-33)
ARDGYSSRNFDY

SEQ ID NO: 5467 - protein, 9 aa, Homo sapiens
  Light chain CDR3 for antibody 2734 (IGKV5-2)
LQHDNFPYT

SEQ ID NO: 5468 - protein, 17 aa, Homo sapiens
  Heavy chain CDR3 for antibody 2734 (IGHV3-33)
ARSGIVGATDYYYGLDV

SEQ ID NO: 5469 - protein, 9 aa, Homo sapiens
  Light chain CDR3 for antibody 2735 (IGKV3-20)
QQYGSSPYT

SEQ ID NO: 5470 - protein, 11 aa, Homo sapiens
  Heavy chain CDR3 for antibody 2735 (IGHV4-59)
VRERGYYGMDV

SEQ ID NO: 5471 - protein, 10 aa, Homo sapiens
  Light chain CDR3 for antibody 2736 (IGKV1-39)
QQSYSTPMYT

SEQ ID NO: 5472 - protein, 18 aa, Homo sapiens
  Heavy chain CDR3 for antibody 2736 (IGHV4-59)
AREGDYVWGSYRPNWFDP

SEQ ID NO: 5473 - protein, 9 aa, Homo sapiens
  Light chain CDR3 for antibody 2737 (IGKV3D-7)
QQDYNLPLT

SEQ ID NO: 5474 - protein, 15 aa, Homo sapiens
  Heavy chain CDR3 for antibody 2737 (IGHV3-33)
ARDTGYSSSWNWFDP

SEQ ID NO: 5475 - protein, 9 aa, Homo sapiens
  Light chain CDR3 for antibody 2738 (IGKV1-6)
LQDYNYPRT

SEQ ID NO: 5476 - protein, 13 aa, Homo sapiens
  Heavy chain CDR3 for antibody 2738 (IGHV3-33)
ARVDYYNYYGLDV

SEQ ID NO: 5477 - protein, 9 aa, Homo sapiens
  Light chain CDR3 for antibody 2739 (IGKV1-6)
LQDYNYPYT

SEQ ID NO: 5478 - protein, 16 aa, Homo sapiens
  Heavy chain CDR3 for antibody 2739 (IGHV3-33)
AREGGLIAAAGTGFDY

SEQ ID NO: 5479 - protein, 9 aa, Homo sapiens
  Light chain CDR3 for antibody 2740 (IGKV1-17)
LQHNSYPYT

SEQ ID NO: 5480 - protein, 19 aa, Homo sapiens
  Heavy chain CDR3 for antibody 2740 (IGHV1-18)
ARGGHIGVVTAFHGYGMDV

SEQ ID NO: 5481 - protein, 9 aa, Homo sapiens
  Light chain CDR3 for antibody 2741 (IGKV1-6)
LQDYNYPRT

SEQ ID NO: 5482 - protein, 18 aa, Homo sapiens
  Heavy chain CDR3 for antibody 2741 (IGHV3-33)
ARDGYSGYDYYYYYGMDV

SEQ ID NO: 5483 - protein, 9 aa, Homo sapiens
  Light chain CDR3 for antibody 2742 (IGKV1-27)
QKYNSAPYT

SEQ ID NO: 5484 - protein, 13 aa, Homo sapiens
  Heavy chain CDR3 for antibody 2742 (IGHV4-39)
ARREVVGGRGFDY

SEQ ID NO: 5485 - protein, 9 aa, Homo sapiens
  Light chain CDR3 for antibody 2743 (IGKV1-6)
LQDYNYPYT

SEQ ID NO: 5486 - protein, 18 aa, Homo sapiens
  Heavy chain CDR3 for antibody 2743 (IGHV3-23)
AKDGDYFGSGSYWGYFDL

SEQ ID NO: 5487 - protein, 9 aa, Homo sapiens
  Light chain CDR3 for antibody 2744 (IGKV2-30)
MQGTHWPLT

SEQ ID NO: 5488 - protein, 13 aa, Homo sapiens
  Heavy chain CDR3 for antibody 2744 (IGHV4-39)
ARREVVGGRGFDY

SEQ ID NO: 5489 - protein, 9 aa, Homo sapiens
  Light chain CDR3 for antibody 2745 (IGKV1-39)
QQSYRTPLT

SEQ ID NO: 5490 - protein, 14 aa, Homo sapiens
  Heavy chain CDR3 for antibody 2745 (IGHV3-33)
ARGGYSGYRYYFDY

SEQ ID NO: 5491 - protein, 9 aa, Homo sapiens
  Light chain CDR3 for antibody 2746 (IGKV1-13)
QQYNSYPFT

SEQ ID NO: 5492 - protein, 13 aa, Homo sapiens
  Heavy chain CDR3 for antibody 2746 (IGHV4-59)
ARDAGYSSSWFDY

SEQ ID NO: 5493 - protein, 9 aa, Homo sapiens
  Light chain CDR3 for antibody 2747 (IGKV1-27)
QKYNSAPYT

SEQ ID NO: 5494 - protein, 11 aa, Homo sapiens
  Heavy chain CDR3 for antibody 2747 (IGHV3-33)
ARDRVLTPFDY

SEQ ID NO: 5495 - protein, 9 aa, Homo sapiens
  Light chain CDR3 for antibody 2748 (IGKV1-39)
QQSYSTPLT

SEQ ID NO: 5496 - protein, 21 aa, Homo sapiens
  Heavy chain CDR3 for antibody 2748 (IGHV3-33)
ARDEYYEIVTGYGYYHYGMDV

SEQ ID NO: 5497 - protein, 9 aa, Homo sapiens
  Light chain CDR3 for antibody 2749 (IGKV1-6)
LQDYNYPYT

SEQ ID NO: 5498 - protein, 17 aa, Homo sapiens
  Heavy chain CDR3 for antibody 2749 (IGHV3-33)
ARENDILTGSYYYGMDV

SEQ ID NO: 5499 - protein, 9 aa, Homo sapiens
  Light chain CDR3 for antibody 2750 (IGKV1-17)
LQHNSYPYT

SEQ ID NO: 5500 - protein, 14 aa, Homo sapiens
  Heavy chain CDR3 for antibody 2750 (IGHV3-33)
ARDLDIMATSPFAY

SEQ ID NO: 5501 - protein, 9 aa, Homo sapiens
  Light chain CDR3 for antibody 2751 (IGKV5-2)
LQHDNFPYT

SEQ ID NO: 5502 - protein, 11 aa, Homo sapiens
  Heavy chain CDR3 for antibody 2751 (IGHV3-33)
ARDQGGSSFDY

SEQ ID NO: 5503 - protein, 9 aa, Homo sapiens
  Light chain CDR3 for antibody 2752 (IGKV3-20)
QQYGSSPYT

SEQ ID NO: 5504 - protein, 13 aa, Homo sapiens
  Heavy chain CDR3 for antibody 2752 (IGHV3-15)
TTDRLLLFGAFDY

SEQ ID NO: 5505 - protein, 9 aa, Homo sapiens
  Light chain CDR3 for antibody 2753 (IGKV1-39)
QQSYSTPLT

SEQ ID NO: 5506 - protein, 13 aa, Homo sapiens
  Heavy chain CDR3 for antibody 2753 (IGHV3-23)
AKDRGGSYSYFDF

SEQ ID NO: 5507 - protein, 9 aa, Homo sapiens
  Light chain CDR3 for antibody 2754 (IGKV3-20)
QQYGSSPYT

SEQ ID NO: 5508 - protein, 15 aa, Homo sapiens
  Heavy chain CDR3 for antibody 2754 (IGHV3-33)
ARDALAVTGTGWFDP

SEQ ID NO: 5509 - protein, 9 aa, Homo sapiens
  Light chain CDR3 for antibody 2755 (IGKV1-33)
QQYDNLPFT

SEQ ID NO: 5510 - protein, 13 aa, Homo sapiens
  Heavy chain CDR3 for antibody 2755 (IGHV3-11)
ARDGGAAAGTWDS

SEQ ID NO: 5511 - protein, 9 aa, Homo sapiens
  Light chain CDR3 for antibody 2756 (IGKV1-9)
QQLNSYPLT

SEQ ID NO: 5512 - protein, 20 aa, Homo sapiens
  Heavy chain CDR3 for antibody 2756 (IGHV1-f)
ATHYDILTGSPYYYYCALDV

SEQ ID NO: 5513 - protein, 9 aa, Homo sapiens
  Light chain CDR3 for antibody 2757 (IGKV1-17)
LQHNSYPYT

SEQ ID NO: 5514 - protein, 13 aa, Homo sapiens
  Heavy chain CDR3 for antibody 2757 (IGHV4-39)
ARRDGGYYGYFDY

SEQ ID NO: 5515 - protein, 9 aa, Homo sapiens
  Light chain CDR3 for antibody 2758 (IGKV5-2)
LQHDNFPYT

SEQ ID NO: 5516 - protein, 18 aa, Homo sapiens
  Heavy chain CDR3 for antibody 2758 (IGHV3-13)
ARDYYGSGSLYYYYGMDV

SEQ ID NO: 5517 - protein, 9 aa, Homo sapiens
  Light chain CDR3 for antibody 2759 (IGKV3-15)
QQYNNWPLT

SEQ ID NO: 5518 - protein, 18 aa, Homo sapiens
  Heavy chain CDR3 for antibody 2759 (IGHV4-59)
AREGHYYTSGSYYKAFDY

SEQ ID NO: 5519 - protein, 9 aa, Homo sapiens
  Light chain CDR3 for antibody 2760 (IGKV1D-13)
QQFNNYPHT

SEQ ID NO: 5520 - protein, 13 aa, Homo sapiens
  Heavy chain CDR3 for antibody 2760 (IGHV3-33)
ARGDNWNDGGFDY

SEQ ID NO: 5521 - protein, 9 aa, Homo sapiens
  Light chain CDR3 for antibody 2761 (IGKV6-21)
HQSSSLPYT

SEQ ID NO: 5522 - protein, 17 aa, Homo sapiens
  Heavy chain CDR3 for antibody 2761 (IGHV3-33)
ARDPARGNVRSFYGLDV

SEQ ID NO: 5523 - protein, 9 aa, Homo sapiens
  Light chain CDR3 for antibody 2762 (IGKV1-39)
QQSYSTPLT

SEQ ID NO: 5524 - protein, 9 aa, Homo sapiens
  Heavy chain CDR3 for antibody 2762 (IGHV3-23)
ARIWWLKDY

SEQ ID NO: 5525 - protein, 9 aa, Homo sapiens
  Light chain CDR3 for antibody 2763 (IGKV5-2)
LQHDNFPWT

SEQ ID NO: 5526 - protein, 14 aa, Homo sapiens
  Heavy chain CDR3 for antibody 2763 (IGHV1-46)
ARKGIVGGFDAFDV

SEQ ID NO: 5527 - protein, 9 aa, Homo sapiens
  Light chain CDR3 for antibody 2764 (IGKV1-9)
QQLISYPLT

SEQ ID NO: 5528 - protein, 14 aa, Homo sapiens
  Heavy chain CDR3 for antibody 2764 (IGHV3-33)
ARDRIAAASSDFDC

SEQ ID NO: 5529 - protein, 9 aa, Homo sapiens
  Light chain CDR3 for antibody 2765 (IGKV1-27)
QKYNSAPYT

SEQ ID NO: 5530 - protein, 11 aa, Homo sapiens
  Heavy chain CDR3 for antibody 2765 (IGHV4-59)
ARSLRYSVFDY

SEQ ID NO: 5531 - protein, 9 aa, Homo sapiens
  Light chain CDR3 for antibody 2766 (IGKV1-9)
QQLKSYLYT

SEQ ID NO: 5532 - protein, 15 aa, Homo sapiens
  Heavy chain CDR3 for antibody 2766 (IGHV3-30)
ARGAMVRGVDYGMDV

SEQ ID NO: 5533 - protein, 9 aa, Homo sapiens
  Light chain CDR3 for antibody 2767 (IGKV6-21)
HQSSSLPYT

SEQ ID NO: 5534 - protein, 19 aa, Homo sapiens
  Heavy chain CDR3 for antibody 2767 (IGHV3-33)
AREDYYGSGSYYNEDWFDP

SEQ ID NO: 5535 - protein, 9 aa, Homo sapiens
  Light chain CDR3 for antibody 2768 (IGKV1-27)
QKYNSAPYT

SEQ ID NO: 5536 - protein, 12 aa, Homo sapiens
  Heavy chain CDR3 for antibody 2768 (IGHV3-33)
ARVDTAAPYFDY

SEQ ID NO: 5537 - protein, 9 aa, Homo sapiens
  Light chain CDR3 for antibody 2769 (IGKV1-39)
QQSYRTPLT

SEQ ID NO: 5538 - protein, 12 aa, Homo sapiens
  Heavy chain CDR3 for antibody 2769 (IGHV3-33)
AREGTRWVYFDY

SEQ ID NO: 5539 - protein, 9 aa, Homo sapiens
  Light chain CDR3 for antibody 2770 (IGKV5-2)
LQHDKFPYT

SEQ ID NO: 5540 - protein, 13 aa, Homo sapiens
  Heavy chain CDR3 for antibody 2770 (IGHV3-33)
ARDYCGGDCYLDY

SEQ ID NO: 5541 - protein, 8 aa, Homo sapiens
  Light chain CDR3 for antibody 2771 (IGKV3D-7)
QQDYNLVT

SEQ ID NO: 5542 - protein, 14 aa, Homo sapiens
  Heavy chain CDR3 for antibody 2771 (IGHV4-39)
ARQDYDILTGLFDY

SEQ ID NO: 5543 - protein, 9 aa, Homo sapiens
  Light chain CDR3 for antibody 2772 (IGKV1D-13)
QQFNNYPHT

SEQ ID NO: 5544 - protein, 14 aa, Homo sapiens
  Heavy chain CDR3 for antibody 2772 (IGHV3-33)
ARDRRDFYYYGMDV

SEQ ID NO: 5545 - protein, 10 aa, Homo sapiens
  Light chain CDR3 for antibody 2773 (IGKV1-17)
LQHNSYPMYT

SEQ ID NO: 5546 - protein, 18 aa, Homo sapiens
  Heavy chain CDR3 for antibody 2773 (IGHV4-59)
AREGDYVWGSYRPNWFDP

SEQ ID NO: 5547 - protein, 9 aa, Homo sapiens
  Light chain CDR3 for antibody 2774 (IGKV3-20)
QQYGSSPYT

SEQ ID NO: 5548 - protein, 10 aa, Homo sapiens
  Heavy chain CDR3 for antibody 2774 (IGHV3-33)
ARDLGWSFDH

SEQ ID NO: 5549 - protein, 9 aa, Homo sapiens
  Light chain CDR3 for antibody 2775 (IGKV1-6)
QQYNSYPYT

SEQ ID NO: 5550 - protein, 14 aa, Homo sapiens
  Heavy chain CDR3 for antibody 2775 (IGHV4-39)
ARQGGWYLYWYFDL

SEQ ID NO: 5551 - protein, 9 aa, Homo sapiens
  Light chain CDR3 for antibody 2776 (IGKV5-2)
LQHDNFPYT

SEQ ID NO: 5552 - protein, 10 aa, Homo sapiens
  Heavy chain CDR3 for antibody 2776 (IGHV1-18)
AREQRLGFDY

SEQ ID NO: 5553 - protein, 9 aa, Homo sapiens
  Light chain CDR3 for antibody 2777 (IGKV1-17)
LQHNSYPYT

SEQ ID NO: 5554 - protein, 11 aa, Homo sapiens
  Heavy chain CDR3 for antibody 2777 (IGHV4-59)
TRDRGLGSFDY

SEQ ID NO: 5555 - protein, 9 aa, Homo sapiens
  Light chain CDR3 for antibody 2778 (IGKV1-27)
QKYNSAPYT

SEQ ID NO: 5556 - protein, 12 aa, Homo sapiens
  Heavy chain CDR3 for antibody 2778 (IGHV3-23)
AKEYDILTGYFH

SEQ ID NO: 5557 - protein, 8 aa, Homo sapiens
  Light chain CDR3 for antibody 2779 (IGKV1D-13)
QQFNNYPT

SEQ ID NO: 5558 - protein, 14 aa, Homo sapiens
  Heavy chain CDR3 for antibody 2779 (IGHV3-33)
ARDRIAAASSDFDC

SEQ ID NO: 5559 - protein, 9 aa, Homo sapiens
  Light chain CDR3 for antibody 2780 (IGKV2-30)
MQGTHWPLT

SEQ ID NO: 5560 - protein, 9 aa, Homo sapiens
  Heavy chain CDR3 for antibody 2780 (IGHV3-30)
ARDYFHYDY

SEQ ID NO: 5561 - protein, 9 aa, Homo sapiens
  Light chain CDR3 for antibody 2781 (IGKV5-2)
LQHDNFPYT

SEQ ID NO: 5562 - protein, 15 aa, Homo sapiens
  Heavy chain CDR3 for antibody 2781 (IGHV3-33)
ARHSSGFYYYYGMDV

SEQ ID NO: 5563 - protein, 9 aa, Homo sapiens
  Light chain CDR3 for antibody 2782 (IGKV5-2)
LQHDNFPYT

SEQ ID NO: 5564 - protein, 17 aa, Homo sapiens
  Heavy chain CDR3 for antibody 2782 (IGHV3-33)
ARCGYSSSWYDPYYFDY

SEQ ID NO: 5565 - protein, 9 aa, Homo sapiens
  Light chain CDR3 for antibody 2783 (IGKV1-17)
LQQNSYPWT

SEQ ID NO: 5566 - protein, 16 aa, Homo sapiens
  Heavy chain CDR3 for antibody 2783 (IGHV4-59)
ARGRYFDWLLGDVFDI

SEQ ID NO: 5567 - protein, 9 aa, Homo sapiens
  Light chain CDR3 for antibody 2784 (IGKV3-11)
QQRSNWPLT

SEQ ID NO: 5568 - protein, 15 aa, Homo sapiens
  Heavy chain CDR3 for antibody 2784 (IGHV3-30)
ARRGYGSGSPDAFDL

SEQ ID NO: 5569 - protein, 8 aa, Homo sapiens
  Light chain CDR3 for antibody 2785 (IGKV1D-13)
QQFNNYPT

SEQ ID NO: 5570 - protein, 12 aa, Homo sapiens
  Heavy chain CDR3 for antibody 2785 (IGHV3-33)
TRGYSSKSYFDY

SEQ ID NO: 5571 - protein, 9 aa, Homo sapiens
  Light chain CDR3 for antibody 2786 (IGKV6-21)
HQSSSLPQT

SEQ ID NO: 5572 - protein, 14 aa, Homo sapiens
  Heavy chain CDR3 for antibody 2786 (IGHV3-20)
ARDRGSVWHDAFDI

SEQ ID NO: 5573 - protein, 9 aa, Homo sapiens
  Light chain CDR3 for antibody 2787 (IGKV1-27)
QKYNSAPYT

SEQ ID NO: 5574 - protein, 18 aa, Homo sapiens
  Heavy chain CDR3 for antibody 2787 (IGHV3-33)
ARERDYYGSGSYPDAFDI

SEQ ID NO: 5575 - protein, 10 aa, Homo sapiens
  Light chain CDR3 for antibody 2788 (IGKV3-15)
QQYNNWPPLT

SEQ ID NO: 5576 - protein, 13 aa, Homo sapiens
  Heavy chain CDR3 for antibody 2788 (IGHV3-33)
ARDYCGGDCYLDY

SEQ ID NO: 5577 - protein, 9 aa, Homo sapiens
  Light chain CDR3 for antibody 2789 (IGKV1-27)
QKYNSAPYT

SEQ ID NO: 5578 - protein, 11 aa, Homo sapiens
  Heavy chain CDR3 for antibody 2789 (IGHV3-33)
ARAGIAAVFDY

SEQ ID NO: 5579 - protein, 9 aa, Homo sapiens
  Light chain CDR3 for antibody 2790 (IGKV6-21)
HQSSSLPYT

SEQ ID NO: 5580 - protein, 12 aa, Homo sapiens
  Heavy chain CDR3 for antibody 2790 (IGHV3-23)
AKEGLGSDYEPY

SEQ ID NO: 5581 - protein, 9 aa, Homo sapiens
  Light chain CDR3 for antibody 2791 (IGKV1-6)
LQDYNYPWT

SEQ ID NO: 5582 - protein, 16 aa, Homo sapiens
  Heavy chain CDR3 for antibody 2791 (IGHV3-23)
ARDVGIAAAGSGWFDT

SEQ ID NO: 5583 - protein, 9 aa, Homo sapiens
  Light chain CDR3 for antibody 2792 (IGKV1-39)
QQSYSTPLT

SEQ ID NO: 5584 - protein, 17 aa, Homo sapiens
  Heavy chain CDR3 for antibody 2792 (IGHV3-33)
ARVRGVIEGYYYYGMDV

SEQ ID NO: 5585 - protein, 9 aa, Homo sapiens
  Light chain CDR3 for antibody 2793 (IGKV3D-7)
QQDYNLPLT

SEQ ID NO: 5586 - protein, 17 aa, Homo sapiens
  Heavy chain CDR3 for antibody 2793 (IGHV3-33)
ARESLKLGIYYYYGMDV

SEQ ID NO: 5587 - protein, 9 aa, Homo sapiens
  Light chain CDR3 for antibody 2794 (IGKV1-6)
LQDYNYPWT

SEQ ID NO: 5588 - protein, 18 aa, Homo sapiens
  Heavy chain CDR3 for antibody 2794 (IGHV3-64)
ARDEYYYGSGSYYNYFDW

SEQ ID NO: 5589 - protein, 9 aa, Homo sapiens
  Light chain CDR3 for antibody 2795 (IGKV1D-16)
QQYNSYPYT

SEQ ID NO: 5590 - protein, 13 aa, Homo sapiens
  Heavy chain CDR3 for antibody 2795 (IGHV4-59)
ARSWFGELLYFDY

SEQ ID NO: 5591 - protein, 9 aa, Homo sapiens
  Light chain CDR3 for antibody 2796 (IGKV1-17)
LQHNSYPYT

SEQ ID NO: 5592 - protein, 14 aa, Homo sapiens
  Heavy chain CDR3 for antibody 2796 (IGHV3-23)
AKCDYDILTGILDY

SEQ ID NO: 5593 - protein, 9 aa, Homo sapiens
  Light chain CDR3 for antibody 2797 (IGKV1-17)
LQHNSYPYT

SEQ ID NO: 5594 - protein, 13 aa, Homo sapiens
  Heavy chain CDR3 for antibody 2797 (IGHV4-39)
ARHHYGSGSLRDY

SEQ ID NO: 5595 - protein, 8 aa, Homo sapiens
  Light chain CDR3 for antibody 2798 (IGKV3D-7)
QQDYNLLT

SEQ ID NO: 5596 - protein, 17 aa, Homo sapiens
  Heavy chain CDR3 for antibody 2798 (IGHV3-33)
ARVYYDILTGYSPAFDI

SEQ ID NO: 5597 - protein, 9 aa, Homo sapiens
  Light chain CDR3 for antibody 2799 (IGKV6-21)
HQSSSLPYT

SEQ ID NO: 5598 - protein, 18 aa, Homo sapiens
  Heavy chain CDR3 for antibody 2799 (IGHV3-13)
ARDYYGSGSLYYYYGMDV

SEQ ID NO: 5599 - protein, 10 aa, Homo sapiens
  Light chain CDR3 for antibody 2800 (IGKV1-39)
QQSYSTPMYT

SEQ ID NO: 5600 - protein, 14 aa, Homo sapiens
  Heavy chain CDR3 for antibody 2800 (IGHV3-33)
ARDWNDVYYYGMDV

SEQ ID NO: 5601 - protein, 9 aa, Homo sapiens
  Light chain CDR3 for antibody 2801 (IGKV1D-13)
QQFNNYPHT

SEQ ID NO: 5602 - protein, 12 aa, Homo sapiens
  Heavy chain CDR3 for antibody 2801 (IGHV3-33)
ARDSSGWSHFDY

SEQ ID NO: 5603 - protein, 9 aa, Homo sapiens
  Light chain CDR3 for antibody 2802 (IGKV3-20)
QQYGSSPLT

SEQ ID NO: 5604 - protein, 13 aa, Homo sapiens
  Heavy chain CDR3 for antibody 2802 (IGHV1-18)
ARSYYGSGSPFDY

SEQ ID NO: 5605 - protein, 8 aa, Homo sapiens
  Light chain CDR3 for antibody 2803 (IGKV3D-7)
QQDYNLLT

SEQ ID NO: 5606 - protein, 15 aa, Homo sapiens
  Heavy chain CDR3 for antibody 2803 (IGHV3-33)
ARDHLTGYYYYGMDV

SEQ ID NO: 5607 - protein, 8 aa, Homo sapiens
  Light chain CDR3 for antibody 2804 (IGKV3-11)
QQRSNWLT

SEQ ID NO: 5608 - protein, 12 aa, Homo sapiens
  Heavy chain CDR3 for antibody 2804 (IGHV1-18)
ARILFYGDYFDY

SEQ ID NO: 5609 - protein, 11 aa, Homo sapiens
  Light chain CDR3 for antibody 2805 (IGKV3-11)
QQRSNWPPTWT

SEQ ID NO: 5610 - protein, 14 aa, Homo sapiens
  Heavy chain CDR3 for antibody 2805 (IGHV4-39)
ARDSGYDYYYGMDV

SEQ ID NO: 5611 - protein, 9 aa, Homo sapiens
  Light chain CDR3 for antibody 2806 (IGKV1-17)
LQHNSYPWT

SEQ ID NO: 5612 - protein, 19 aa, Homo sapiens
  Heavy chain CDR3 for antibody 2806 (IGHV1-24)
ATAGLQWFGEKIGYYGMDV

SEQ ID NO: 5613 - protein, 8 aa, Homo sapiens
  Light chain CDR3 for antibody 2807 (IGKV3D-7)
QQDYNLLT

SEQ ID NO: 5614 - protein, 13 aa, Homo sapiens
  Heavy chain CDR3 for antibody 2807 (IGHV3-33)
ARTDYYFYYGLDV

SEQ ID NO: 5615 - protein, 9 aa, Homo sapiens
  Light chain CDR3 for antibody 2808 (IGKV6-21)
HQSSSLPYT

SEQ ID NO: 5616 - protein, 16 aa, Homo sapiens
  Heavy chain CDR3 for antibody 2808 (IGHV3-33)
ARDRGGMTMVRGGFDY

SEQ ID NO: 5617 - protein, 8 aa, Homo sapiens
  Light chain CDR3 for antibody 2809 (IGKV3D-7)
QQDYNLLT

SEQ ID NO: 5618 - protein, 14 aa, Homo sapiens
  Heavy chain CDR3 for antibody 2809 (IGHV3-23)
AKSRIVGALYYFDY

SEQ ID NO: 5619 - protein, 9 aa, Homo sapiens
  Light chain CDR3 for antibody 2810 (IGKV3D-7)
QQDYNLPYT

SEQ ID NO: 5620 - protein, 13 aa, Homo sapiens
  Heavy chain CDR3 for antibody 2810 (IGHV4-39)
ARHEVMIRGVFDY

SEQ ID NO: 5621 - protein, 10 aa, Homo sapiens
  Light chain CDR3 for antibody 2811 (IGKV1-39)
QQSYSTPMYT

SEQ ID NO: 5622 - protein, 14 aa, Homo sapiens
  Heavy chain CDR3 for antibody 2811 (IGHV3-33)
ARGAAAGNFYGLDV

SEQ ID NO: 5623 - protein, 9 aa, Homo sapiens
  Light chain CDR3 for antibody 2812 (IGKV1-9)
QQLKSYLYT

SEQ ID NO: 5624 - protein, 14 aa, Homo sapiens
  Heavy chain CDR3 for antibody 2812 (IGHV3-33)
ARGAAAGNFYGLDV

SEQ ID NO: 5625 - protein, 9 aa, Homo sapiens
  Light chain CDR3 for antibody 2813 (IGKV1-17)
LQHNSYPWT

SEQ ID NO: 5626 - protein, 17 aa, Homo sapiens
  Heavy chain CDR3 for antibody 2813 (IGHV3-33)
ARDPARGNVRSFYGLDV

SEQ ID NO: 5627 - protein, 9 aa, Homo sapiens
  Light chain CDR3 for antibody 2814 (IGKV1-17)
LQHNSYPFT

SEQ ID NO: 5628 - protein, 10 aa, Homo sapiens
  Heavy chain CDR3 for antibody 2814 (IGHV3-33)
ARDSSGWLDY

SEQ ID NO: 5629 - protein, 11 aa, Homo sapiens
  Light chain CDR3 for antibody 2815 (IGKV3-11)
QQRSNWPPTWT

SEQ ID NO: 5630 - protein, 12 aa, Homo sapiens
  Heavy chain CDR3 for antibody 2815 (IGHV1-18)
ARILFYGDYFDY

SEQ ID NO: 5631 - protein, 9 aa, Homo sapiens
  Light chain CDR3 for antibody 2816 (IGKV1-17)
LQHNSYPWT

SEQ ID NO: 5632 - protein, 12 aa, Homo sapiens
  Heavy chain CDR3 for antibody 2816 (IGHV4-61)
ARVDSSGWFFDY

SEQ ID NO: 5633 - protein, 9 aa, Homo sapiens
  Light chain CDR3 for antibody 2817 (IGKV6-21)
HQSSSLPHT

SEQ ID NO: 5634 - protein, 16 aa, Homo sapiens
  Heavy chain CDR3 for antibody 2817 (IGHV4-39)
ASLRSGSYSLGWYFDL

SEQ ID NO: 5635 - protein, 9 aa, Homo sapiens
  Light chain CDR3 for antibody 2818 (IGKV3-20)
QQYGSSPYT

SEQ ID NO: 5636 - protein, 13 aa, Homo sapiens
  Heavy chain CDR3 for antibody 2818 (IGHV1-24)
ATGYSINWYEFDY

SEQ ID NO: 5637 - protein, 9 aa, Homo sapiens
  Light chain CDR3 for antibody 2819 (IGKV6-21)
HQSSSLPYT

SEQ ID NO: 5638 - protein, 13 aa, Homo sapiens
  Heavy chain CDR3 for antibody 2819 (IGHV3-33)
ARDSSSWYHWFDP

SEQ ID NO: 5639 - protein, 10 aa, Homo sapiens
  Light chain CDR3 for antibody 2820 (IGKV3-11)
QQRSNWPIFT

SEQ ID NO: 5640 - protein, 10 aa, Homo sapiens
  Heavy chain CDR3 for antibody 2820 (IGHV3-23)
AKEQWLVLDY

SEQ ID NO: 5641 - protein, 9 aa, Homo sapiens
  Light chain CDR3 for antibody 2821 (IGKV1-39)
QQSYSTPLT

SEQ ID NO: 5642 - protein, 12 aa, Homo sapiens
  Heavy chain CDR3 for antibody 2821 (IGHV3-h)
AREDYYYYGMDV

SEQ ID NO: 5643 - protein, 10 aa, Homo sapiens
  Light chain CDR3 for antibody 2822 (IGKV3-11)
QQRSNWPIFT

SEQ ID NO: 5644 - protein, 15 aa, Homo sapiens
  Heavy chain CDR3 for antibody 2822 (IGHV4-59)
ARDLGHYYGSVSIDY

SEQ ID NO: 5645 - protein, 9 aa, Homo sapiens
  Light chain CDR3 for antibody 2823 (IGKV1-9)
QQLNSYPWT

SEQ ID NO: 5646 - protein, 19 aa, Homo sapiens
  Heavy chain CDR3 for antibody 2823 (IGHV3-20)
ARDLCSSTSCYGYYYGMDV

SEQ ID NO: 5647 - protein, 9 aa, Homo sapiens
  Light chain CDR3 for antibody 2824 (IGKV1-27)
QKYNSAPYT

SEQ ID NO: 5648 - protein, 17 aa, Homo sapiens
  Heavy chain CDR3 for antibody 2824 (IGHV3-33)
ARVRGVIEGYYYYGMDV

SEQ ID NO: 5649 - protein, 9 aa, Homo sapiens
  Light chain CDR3 for antibody 2825 (IGKV1D-16)
QQYNSYPYT

SEQ ID NO: 5650 - protein, 16 aa, Homo sapiens
  Heavy chain CDR3 for antibody 2825 (IGHV3-33)
ARAYYYGSGSYPHFQH

SEQ ID NO: 5651 - protein, 9 aa, Homo sapiens
  Light chain CDR3 for antibody 2826 (IGKV1-5)
QQYNTYSRT

SEQ ID NO: 5652 - protein, 13 aa, Homo sapiens
  Heavy chain CDR3 for antibody 2826 (IGHV3-33)
ARDYCGGDCYLDY

SEQ ID NO: 5653 - protein, 9 aa, Homo sapiens
  Light chain CDR3 for antibody 2827 (IGKV5-2)
LQHDNFPYT

SEQ ID NO: 5654 - protein, 14 aa, Homo sapiens
  Heavy chain CDR3 for antibody 2827 (IGHV3-20)
ARDEGSGGYDVFDI

SEQ ID NO: 5655 - protein, 9 aa, Homo sapiens
  Light chain CDR3 for antibody 2828 (IGKV1-9)
QQLNSYPPT

SEQ ID NO: 5656 - protein, 11 aa, Homo sapiens
  Heavy chain CDR3 for antibody 2828 (IGHV3-33)
ARAERGGYFDY

SEQ ID NO: 5657 - protein, 10 aa, Homo sapiens
  Light chain CDR3 for antibody 2829 (IGKV3-11)
QQRSNWPIFT

SEQ ID NO: 5658 - protein, 20 aa, Homo sapiens
  Heavy chain CDR3 for antibody 2829 (IGHV3-20)
ARDLCSSTSCYGYYYYGMDV

SEQ ID NO: 5659 - protein, 9 aa, Homo sapiens
  Light chain CDR3 for antibody 2830 (IGKV1-39)
QQGFSTPWT

SEQ ID NO: 5660 - protein, 13 aa, Homo sapiens
  Heavy chain CDR3 for antibody 2830 (IGHV4-59)
ARDAGYSSSWFDY

SEQ ID NO: 5661 - protein, 9 aa, Homo sapiens
  Light chain CDR3 for antibody 2831 (IGKV3-20)
QQYGSSPRT

SEQ ID NO: 5662 - protein, 15 aa, Homo sapiens
  Heavy chain CDR3 for antibody 2831 (IGHV1-18)
ARRSPNWGHYYGMDV

SEQ ID NO: 5663 - protein, 9 aa, Homo sapiens
  Light chain CDR3 for antibody 2832 (IGKV3-11)
QQRSNWPPT

SEQ ID NO: 5664 - protein, 13 aa, Homo sapiens
  Heavy chain CDR3 for antibody 2832 (IGHV3-33)
AKEDGDYHHYFDY

SEQ ID NO: 5665 - protein, 9 aa, Homo sapiens
  Light chain CDR3 for antibody 2833 (IGKV3D-7)
QQDYNLPLT

SEQ ID NO: 5666 - protein, 14 aa, Homo sapiens
  Heavy chain CDR3 for antibody 2833 (IGHV3-33)
ARDRIAAASSDFDC

SEQ ID NO: 5667 - protein, 9 aa, Homo sapiens
  Light chain CDR3 for antibody 2834 (IGKV5-2)
LQHDNFPWT

SEQ ID NO: 5668 - protein, 12 aa, Homo sapiens
  Heavy chain CDR3 for antibody 2834 (IGHV3-33)
AREGTGGNWFDP

SEQ ID NO: 5669 - protein, 9 aa, Homo sapiens
  Light chain CDR3 for antibody 2835 (IGKV1D-16)
QQYNSYPYT

SEQ ID NO: 5670 - protein, 15 aa, Homo sapiens
  Heavy chain CDR3 for antibody 2835 (IGHV4-39)
ARRSKYTSAWYPFDY

SEQ ID NO: 5671 - protein, 10 aa, Homo sapiens
  Light chain CDR3 for antibody 2836 (IGKV3-11)
QQRSNWPIFT

SEQ ID NO: 5672 - protein, 9 aa, Homo sapiens
  Heavy chain CDR3 for antibody 2836 (IGHV1-18)
ARGKDWFDP

SEQ ID NO: 5673 - protein, 9 aa, Homo sapiens
  Light chain CDR3 for antibody 2837 (IGKV6-21)
HQSSSLPYT

SEQ ID NO: 5674 - protein, 14 aa, Homo sapiens
  Heavy chain CDR3 for antibody 2837 (IGHV3-64)
ARDHAAGGYSHSDY

SEQ ID NO: 5675 - protein, 8 aa, Homo sapiens
  Light chain CDR3 for antibody 2838 (IGKV3D-7)
QQDYNLLT

SEQ ID NO: 5676 - protein, 15 aa, Homo sapiens
  Heavy chain CDR3 for antibody 2838 (IGHV3-33)
ARDTGYSSSWNWFDP

SEQ ID NO: 5677 - protein, 9 aa, Homo sapiens
  Light chain CDR3 for antibody 2839 (IGKV6-21)
HQSSSLPYT

SEQ ID NO: 5678 - protein, 14 aa, Homo sapiens
  Heavy chain CDR3 for antibody 2839 (IGHV3-33)
ARDGYDILTGPMDV

SEQ ID NO: 5679 - protein, 9 aa, Homo sapiens
  Light chain CDR3 for antibody 2840 (IGKV3D-7)
QQDYNLPLT

SEQ ID NO: 5680 - protein, 14 aa, Homo sapiens
  Heavy chain CDR3 for antibody 2840 (IGHV3-33)
VRDAMGATTAWFDP

SEQ ID NO: 5681 - protein, 9 aa, Homo sapiens
  Light chain CDR3 for antibody 2841 (IGKV1-27)
QKYNSAPYT

SEQ ID NO: 5682 - protein, 12 aa, Homo sapiens
  Heavy chain CDR3 for antibody 2841 (IGHV1-46)
AREDYDIDGMDV

SEQ ID NO: 5683 - protein, 9 aa, Homo sapiens
  Light chain CDR3 for antibody 2842 (IGKV3-11)
QQRSSWPPT

SEQ ID NO: 5684 - protein, 16 aa, Homo sapiens
  Heavy chain CDR3 for antibody 2842 (IGHV3-23)
AKEGMVLRYFDWLWDY

SEQ ID NO: 5685 - protein, 9 aa, Homo sapiens
  Light chain CDR3 for antibody 2843 (IGKV6-21)
HQSSSLPLT

SEQ ID NO: 5686 - protein, 13 aa, Homo sapiens
  Heavy chain CDR3 for antibody 2843 (IGHV3-33)
ANTGDSYYYDMDV

SEQ ID NO: 5687 - protein, 9 aa, Homo sapiens
  Light chain CDR3 for antibody 2844 (IGKV1-27)
QKYNSAPYT

SEQ ID NO: 5688 - protein, 17 aa, Homo sapiens
  Heavy chain CDR3 for antibody 2844 (IGHV3-33)
ARGGAAAGPYLYYGLDV

SEQ ID NO: 5689 - protein, 8 aa, Homo sapiens
  Light chain CDR3 for antibody 2845 (IGKV6-21)
HQSSSFHT

SEQ ID NO: 5690 - protein, 12 aa, Homo sapiens
  Heavy chain CDR3 for antibody 2845 (IGHV3-20)
AREGWELRPFDY

SEQ ID NO: 5691 - protein, 9 aa, Homo sapiens
  Light chain CDR3 for antibody 2846 (IGKV1-39)
QQSYRTPLT

SEQ ID NO: 5692 - protein, 18 aa, Homo sapiens
  Heavy chain CDR3 for antibody 2846 (IGHV3-33)
ARDGYSGYDYYYYYGMDV

SEQ ID NO: 5693 - protein, 9 aa, Homo sapiens
  Light chain CDR3 for antibody 2847 (IGKV5-2)
LQHDNFPYT

SEQ ID NO: 5694 - protein, 15 aa, Homo sapiens
  Heavy chain CDR3 for antibody 2847 (IGHV3-66)
ARDRDYYYYYYGMDV

SEQ ID NO: 5695 - protein, 9 aa, Homo sapiens
  Light chain CDR3 for antibody 2848 (IGKV1D-13)
QQFNNYPHT

SEQ ID NO: 5696 - protein, 16 aa, Homo sapiens
  Heavy chain CDR3 for antibody 2848 (IGHV1-24)
ATEDSSSTYYYYGLDV

SEQ ID NO: 5697 - protein, 8 aa, Homo sapiens
  Light chain CDR3 for antibody 2849 (IGKV1-5)
QQYNSYWT

SEQ ID NO: 5698 - protein, 12 aa, Homo sapiens
  Heavy chain CDR3 for antibody 2849 (IGHV3-33)
TRGYSSKSYFDY

SEQ ID NO: 5699 - protein, 8 aa, Homo sapiens
  Light chain CDR3 for antibody 2850 (IGKV3D-7)
QQDYNLLT

SEQ ID NO: 5700 - protein, 13 aa, Homo sapiens
  Heavy chain CDR3 for antibody 2850 (IGHV3-53)
ARSGSYWGYYFDY

SEQ ID NO: 5701 - protein, 9 aa, Homo sapiens
  Light chain CDR3 for antibody 2851 (IGKV1-6)
LQDHNYPYT

SEQ ID NO: 5702 - protein, 14 aa, Homo sapiens
  Heavy chain CDR3 for antibody 2851 (IGHV3-33)
ARASSGSSYWYFDL

SEQ ID NO: 5703 - protein, 9 aa, Homo sapiens
  Light chain CDR3 for antibody 2852 (IGKV1-17)
LQHNSYPYT

SEQ ID NO: 5704 - protein, 15 aa, Homo sapiens
  Heavy chain CDR3 for antibody 2852 (IGHV3-33)
ARGGTGYYSYWYFDL

SEQ ID NO: 5705 - protein, 9 aa, Homo sapiens
  Light chain CDR3 for antibody 2853 (IGKV1-9)
QQYNSYPLT

SEQ ID NO: 5706 - protein, 11 aa, Homo sapiens
  Heavy chain CDR3 for antibody 2853 (IGHV4-59)
ARESFYGSGNL

SEQ ID NO: 5707 - protein, 10 aa, Homo sapiens
  Light chain CDR3 for antibody 2854 (IGKV3-11)
QQRSNWPIFT

SEQ ID NO: 5708 - protein, 18 aa, Homo sapiens
  Heavy chain CDR3 for antibody 2854 (IGHV4-59)
AREGHYYTSGSYYKAFDY

SEQ ID NO: 5709 - protein, 9 aa, Homo sapiens
  Light chain CDR3 for antibody 2855 (IGKV1-39)
QQSYRTPLT

SEQ ID NO: 5710 - protein, 11 aa, Homo sapiens
  Heavy chain CDR3 for antibody 2855 (IGHV3-74)
ARDRGNWGFDY

SEQ ID NO: 5711 - protein, 8 aa, Homo sapiens
  Light chain CDR3 for antibody 2856 (IGKV3D-7)
QQDYNLLT

SEQ ID NO: 5712 - protein, 13 aa, Homo sapiens
  Heavy chain CDR3 for antibody 2856 (IGHV4-39)
ARQWPSGYWYFDL

SEQ ID NO: 5713 - protein, 9 aa, Homo sapiens
  Light chain CDR3 for antibody 2857 (IGKV5-2)
LQHDNFPWT

SEQ ID NO: 5714 - protein, 16 aa, Homo sapiens
  Heavy chain CDR3 for antibody 2857 (IGHV4-39)
ARHPLILTGYPNWFDP

SEQ ID NO: 5715 - protein, 9 aa, Homo sapiens
  Light chain CDR3 for antibody 2858 (IGKV3-11)
QQRSNWPPT

SEQ ID NO: 5716 - protein, 9 aa, Homo sapiens
  Heavy chain CDR3 for antibody 2858 (IGHV3-13)
ARDRWYFDL

SEQ ID NO: 5717 - protein, 8 aa, Homo sapiens
  Light chain CDR3 for antibody 2859 (IGKV3D-7)
QQDYNLVT

SEQ ID NO: 5718 - protein, 17 aa, Homo sapiens
  Heavy chain CDR3 for antibody 2859 (IGHV4-59)
ARDFLVRGEGSYYGMDV

SEQ ID NO: 5719 - protein, 10 aa, Homo sapiens
  Light chain CDR3 for antibody 2860 (IGKV3-11)
QQRSNWPIFT

SEQ ID NO: 5720 - protein, 12 aa, Homo sapiens
  Heavy chain CDR3 for antibody 2860 (IGHV3-23)
AKEYDILTGYFH

SEQ ID NO: 5721 - protein, 10 aa, Homo sapiens
  Light chain CDR3 for antibody 2861 (IGKV3-11)
QQRSNWPIFT

SEQ ID NO: 5722 - protein, 17 aa, Homo sapiens
  Heavy chain CDR3 for antibody 2861 (IGHV1-18)
ARDEGYDILTGYPHFDY

SEQ ID NO: 5723 - protein, 9 aa, Homo sapiens
  Light chain CDR3 for antibody 2862 (IGKV1-17)
LQHNGYPLT

SEQ ID NO: 5724 - protein, 12 aa, Homo sapiens
  Heavy chain CDR3 for antibody 2862 (IGHV3-33)
ARESGGSYSFDY

SEQ ID NO: 5725 - protein, 10 aa, Homo sapiens
  Light chain CDR3 for antibody 2863 (IGKV3-11)
QQRSNWPIFT

SEQ ID NO: 5726 - protein, 12 aa, Homo sapiens
  Heavy chain CDR3 for antibody 2863 (IGHV3-33)
TRGYSSKSYFDY

SEQ ID NO: 5727 - protein, 9 aa, Homo sapiens
  Light chain CDR3 for antibody 2864 (IGKV1-5)
QQYNTYSRT

SEQ ID NO: 5728 - protein, 11 aa, Homo sapiens
  Heavy chain CDR3 for antibody 2864 (IGHV3-33)
ARDRSSGPFDY

SEQ ID NO: 5729 - protein, 9 aa, Homo sapiens
  Light chain CDR3 for antibody 2865 (IGKV1D-13)
QQFNNYPHT

SEQ ID NO: 5730 - protein, 15 aa, Homo sapiens
  Heavy chain CDR3 for antibody 2865 (IGHV3-33)
ARDSRPEIIGPPFDY

SEQ ID NO: 5731 - protein, 10 aa, Homo sapiens
  Light chain CDR3 for antibody 2866 (IGKV1-9)
QQLDSYPMYT

SEQ ID NO: 5732 - protein, 13 aa, Homo sapiens
  Heavy chain CDR3 for antibody 2866 (IGHV4-59)
ARDAGYSSSWFDY

SEQ ID NO: 5733 - protein, 9 aa, Homo sapiens
  Light chain CDR3 for antibody 2867 (IGKV1-6)
LQDYNYPYT

SEQ ID NO: 5734 - protein, 13 aa, Homo sapiens
  Heavy chain CDR3 for antibody 2867 (IGHV4-59)
ARESPGPYDAFDI

SEQ ID NO: 5735 - protein, 9 aa, Homo sapiens
  Light chain CDR3 for antibody 2868 (IGKV3D-7)
QQDYNLPLT

SEQ ID NO: 5736 - protein, 17 aa, Homo sapiens
  Heavy chain CDR3 for antibody 2868 (IGHV4-34)
AGLRFFDWLFDYYGMDV

SEQ ID NO: 5737 - protein, 10 aa, Homo sapiens
  Light chain CDR3 for antibody 2869 (IGKV1-17)
LQHNSYPMYT

SEQ ID NO: 5738 - protein, 15 aa, Homo sapiens
  Heavy chain CDR3 for antibody 2869 (IGHV3-23)
AKDGSYYDYYYGMDV

SEQ ID NO: 5739 - protein, 10 aa, Homo sapiens
  Light chain CDR3 for antibody 2870 (IGKV1-17)
LQHNSYPMYT

SEQ ID NO: 5740 - protein, 15 aa, Homo sapiens
  Heavy chain CDR3 for antibody 2870 (IGHV3-20)
ARDRGSSGWRDWFDP

SEQ ID NO: 5741 - protein, 8 aa, Homo sapiens
  Light chain CDR3 for antibody 2871 (IGKV3-20)
QQYGRSFT

SEQ ID NO: 5742 - protein, 12 aa, Homo sapiens
  Heavy chain CDR3 for antibody 2871 (IGHV1-18)
ARILFYGDYFDY

SEQ ID NO: 5743 - protein, 8 aa, Homo sapiens
  Light chain CDR3 for antibody 2872 (IGKV3D-7)
QQDYNLLT

SEQ ID NO: 5744 - protein, 17 aa, Homo sapiens
  Heavy chain CDR3 for antibody 2872 (IGHV3-33)
ARGYCSRTSCYLYYFDY

SEQ ID NO: 5745 - protein, 9 aa, Homo sapiens
  Light chain CDR3 for antibody 2873 (IGKV1D-13)
QQFNNYPHT

SEQ ID NO: 5746 - protein, 9 aa, Homo sapiens
  Heavy chain CDR3 for antibody 2873 (IGHV3-33)
AREYKEFDY

SEQ ID NO: 5747 - protein, 9 aa, Homo sapiens
  Light chain CDR3 for antibody 2874 (IGKV3D-7)
QQDYNLPWT

SEQ ID NO: 5748 - protein, 14 aa, Homo sapiens
  Heavy chain CDR3 for antibody 2874 (IGHV4-39)
ARQDYDILTGLFDY

SEQ ID NO: 5749 - protein, 9 aa, Homo sapiens
  Light chain CDR3 for antibody 2875 (IGKV1-17)
LQHNSYPYT

SEQ ID NO: 5750 - protein, 12 aa, Homo sapiens
  Heavy chain CDR3 for antibody 2875 (IGHV3-33)
ARDYISTYGMDV

SEQ ID NO: 5751 - protein, 9 aa, Homo sapiens
  Light chain CDR3 for antibody 2876 (IGKV5-2)
LQHDNFPYT

SEQ ID NO: 5752 - protein, 16 aa, Homo sapiens
  Heavy chain CDR3 for antibody 2876 (IGHV3-33)
ARDQGILTGYYTALDY

SEQ ID NO: 5753 - protein, 9 aa, Homo sapiens
  Light chain CDR3 for antibody 2877 (IGKV2-30)
MQGTHWPLT

SEQ ID NO: 5754 - protein, 14 aa, Homo sapiens
  Heavy chain CDR3 for antibody 2877 (IGHV3-33)
ARDKTYPLSYGMDV

SEQ ID NO: 5755 - protein, 9 aa, Homo sapiens
  Light chain CDR3 for antibody 2878 (IGKV3-11)
QQRSNWPWT

SEQ ID NO: 5756 - protein, 13 aa, Homo sapiens
  Heavy chain CDR3 for antibody 2878 (IGHV4-39)
ARHVLLWFGEFDP

SEQ ID NO: 5757 - protein, 10 aa, Homo sapiens
  Light chain CDR3 for antibody 2879 (IGKV1-9)
QQLDSYPMYT

SEQ ID NO: 5758 - protein, 11 aa, Homo sapiens
  Heavy chain CDR3 for antibody 2879 (IGHV3-33)
ARDRSSGPFDY

SEQ ID NO: 5759 - protein, 10 aa, Homo sapiens
  Light chain CDR3 for antibody 2880 (IGKV3-11)
QQRSNWPIFT

SEQ ID NO: 5760 - protein, 13 aa, Homo sapiens
  Heavy chain CDR3 for antibody 2880 (IGHV3-33)
ARRYRSGWYPFDY

SEQ ID NO: 5761 - protein, 9 aa, Homo sapiens
  Light chain CDR3 for antibody 2881 (IGKV3-11)
QQRSNWPLT

SEQ ID NO: 5762 - protein, 14 aa, Homo sapiens
  Heavy chain CDR3 for antibody 2881 (IGHV3-33)
ARDKTYPLSYGMDV

SEQ ID NO: 5763 - protein, 9 aa, Homo sapiens
  Light chain CDR3 for antibody 2882 (IGKV1-39)
QQSYSTPLT

SEQ ID NO: 5764 - protein, 15 aa, Homo sapiens
  Heavy chain CDR3 for antibody 2882 (IGHV3-30)
ARRGYGSGSPDAFDL

SEQ ID NO: 5765 - protein, 9 aa, Homo sapiens
  Light chain CDR3 for antibody 2883 (IGKV1D-16)
QQYNSYPLT

SEQ ID NO: 5766 - protein, 16 aa, Homo sapiens
  Heavy chain CDR3 for antibody 2883 (IGHV3-64)
ARGRYFDWLLGDWFDP

SEQ ID NO: 5767 - protein, 9 aa, Homo sapiens
  Light chain CDR3 for antibody 2884 (IGKV1D-13)
QQFNNYPYT

SEQ ID NO: 5768 - protein, 13 aa, Homo sapiens
  Heavy chain CDR3 for antibody 2884 (IGHV3-23)
AKDRGYSSTSTAY

SEQ ID NO: 5769 - protein, 9 aa, Homo sapiens
  Light chain CDR3 for antibody 2885 (IGKV1-27)
QKYNSAPYT

SEQ ID NO: 5770 - protein, 12 aa, Homo sapiens
  Heavy chain CDR3 for antibody 2885 (IGHV3-33)
AREGTGGNWFDP

SEQ ID NO: 5771 - protein, 9 aa, Homo sapiens
  Light chain CDR3 for antibody 2886 (IGKV5-2)
LQHDNFPWT

SEQ ID NO: 5772 - protein, 13 aa, Homo sapiens
  Heavy chain CDR3 for antibody 2886 (IGHV1-2)
ARDGVRGSFGMDV

SEQ ID NO: 5773 - protein, 9 aa, Homo sapiens
  Light chain CDR3 for antibody 2887 (IGKV5-2)
LQHDNFPYT

SEQ ID NO: 5774 - protein, 14 aa, Homo sapiens
  Heavy chain CDR3 for antibody 2887 (IGHV3-33)
ARDTVAAGFNGMDV

SEQ ID NO: 5775 - protein, 9 aa, Homo sapiens
  Light chain CDR3 for antibody 2888 (IGKV1-9)
QQLISYPLT

SEQ ID NO: 5776 - protein, 18 aa, Homo sapiens
  Heavy chain CDR3 for antibody 2888 (IGHV3-33)
ARDRYYDILTGYYMGFDY

SEQ ID NO: 5777 - protein, 9 aa, Homo sapiens
  Light chain CDR3 for antibody 2889 (IGKV2-30)
MQGTHWPLT

SEQ ID NO: 5778 - protein, 8 aa, Homo sapiens
  Heavy chain CDR3 for antibody 2889 (IGHV3-23)
AKETGNNY

SEQ ID NO: 5779 - protein, 9 aa, Homo sapiens
  Light chain CDR3 for antibody 2890 (IGKV1-16)
QQYNSYPYT

SEQ ID NO: 5780 - protein, 10 aa, Homo sapiens
  Heavy chain CDR3 for antibody 2890 (IGHV3-33)
ARDLRADFDY

SEQ ID NO: 5781 - protein, 9 aa, Homo sapiens
  Light chain CDR3 for antibody 2891 (IGKV3-15)
QQYNNWPLT

SEQ ID NO: 5782 - protein, 11 aa, Homo sapiens
  Heavy chain CDR3 for antibody 2891 (IGHV3-33)
ARDRVLTPFDY

SEQ ID NO: 5783 - protein, 9 aa, Homo sapiens
  Light chain CDR3 for antibody 2892 (IGKV3-20)
QQYGSSPLT

SEQ ID NO: 5784 - protein, 12 aa, Homo sapiens
  Heavy chain CDR3 for antibody 2892 (IGHV3-23)
AKESLYTPTDDY

SEQ ID NO: 5785 - protein, 11 aa, Homo sapiens
  Light chain CDR3 for antibody 2893 (IGKV3-11)
QQRSNWPPTWT

SEQ ID NO: 5786 - protein, 11 aa, Homo sapiens
  Heavy chain CDR3 for antibody 2893 (IGHV4-59)
ARSLRYSVFDY

SEQ ID NO: 5787 - protein, 9 aa, Homo sapiens
  Light chain CDR3 for antibody 2894 (IGKV6-21)
HQSSSLPYT

SEQ ID NO: 5788 - protein, 17 aa, Homo sapiens
  Heavy chain CDR3 for antibody 2894 (IGHV3-33)
ARDSYDILTGYYKPFDY

SEQ ID NO: 5789 - protein, 9 aa, Homo sapiens
  Light chain CDR3 for antibody 2895 (IGKV1-6)
LQDYNYPYT

SEQ ID NO: 5790 - protein, 14 aa, Homo sapiens
  Heavy chain CDR3 for antibody 2895 (IGHV3-33)
ARKPDYYGSGYFDY

SEQ ID NO: 5791 - protein, 9 aa, Homo sapiens
  Light chain CDR3 for antibody 2896 (IGKV1-39)
QQSYSTPLT

SEQ ID NO: 5792 - protein, 18 aa, Homo sapiens
  Heavy chain CDR3 for antibody 2896 (IGHV3-33)
ARERDYYGSGSYPDAFDI

SEQ ID NO: 5793 - protein, 9 aa, Homo sapiens
  Light chain CDR3 for antibody 2897 (IGKV1-6)
LQDYKSPFT

SEQ ID NO: 5794 - protein, 14 aa, Homo sapiens
  Heavy chain CDR3 for antibody 2897 (IGHV3-23)
AKSRIVGALYYFDY

SEQ ID NO: 5795 - protein, 9 aa, Homo sapiens
  Light chain CDR3 for antibody 2898 (IGKV5-2)
LQHDNFPWT

SEQ ID NO: 5796 - protein, 17 aa, Homo sapiens
  Heavy chain CDR3 for antibody 2898 (IGHV1-24)
ATHYGSGSHYKGYGMDV

SEQ ID NO: 5797 - protein, 9 aa, Homo sapiens
  Light chain CDR3 for antibody 2899 (IGKV2-30)
MQGTHWPLT

SEQ ID NO: 5798 - protein, 14 aa, Homo sapiens
  Heavy chain CDR3 for antibody 2899 (IGHV4-39)
ARQDYDILTGLFDY

SEQ ID NO: 5799 - protein, 9 aa, Homo sapiens
  Light chain CDR3 for antibody 2900 (IGKV1D-16)
QQYNSYPLT

SEQ ID NO: 5800 - protein, 20 aa, Homo sapiens
  Heavy chain CDR3 for antibody 2900 (IGHV3-33)
ARDLGWATMVRGVIRAPFDY

SEQ ID NO: 5801 - protein, 9 aa, Homo sapiens
  Light chain CDR3 for antibody 2901 (IGKV3-20)
QQYGSSPYT

SEQ ID NO: 5802 - protein, 18 aa, Homo sapiens
  Heavy chain CDR3 for antibody 2901 (IGHV3-33)
ARDGRISLVRGIIDAFDI

SEQ ID NO: 5803 - protein, 8 aa, Homo sapiens
  Light chain CDR3 for antibody 2902 (IGKV3D-7)
QQDYNLLT

SEQ ID NO: 5804 - protein, 14 aa, Homo sapiens
  Heavy chain CDR3 for antibody 2902 (IGHV3-33)
ARDWNDVYYYGMDV

SEQ ID NO: 5805 - protein, 11 aa, Homo sapiens
  Light chain CDR3 for antibody 2903 (IGKV3-11)
QQRSNWPPTWT

SEQ ID NO: 5806 - protein, 17 aa, Homo sapiens
  Heavy chain CDR3 for antibody 2903 (IGHV4-59)
ARDFLVRGEGSYYGMDV

SEQ ID NO: 5807 - protein, 8 aa, Homo sapiens
  Light chain CDR3 for antibody 2904 (IGKV6-21)
HQSSSLPT

SEQ ID NO: 5808 - protein, 13 aa, Homo sapiens
  Heavy chain CDR3 for antibody 2904 (IGHV4-59)
ARDAGYSSSWFDY

SEQ ID NO: 5809 - protein, 9 aa, Homo sapiens
  Light chain CDR3 for antibody 2905 (IGKV1D-13)
QQFNNYPHT

SEQ ID NO: 5810 - protein, 16 aa, Homo sapiens
  Heavy chain CDR3 for antibody 2905 (IGHV4-59)
ARYSGSYYGDYYGMDV

SEQ ID NO: 5811 - protein, 9 aa, Homo sapiens
  Light chain CDR3 for antibody 2906 (IGKV5-2)
LQHDNFPYT

SEQ ID NO: 5812 - protein, 11 aa, Homo sapiens
  Heavy chain CDR3 for antibody 2906 (IGHV3-23)
AKAGIVGCLDV

SEQ ID NO: 5813 - protein, 9 aa, Homo sapiens
  Light chain CDR3 for antibody 2907 (IGKV5-2)
LQHDKFPYT

SEQ ID NO: 5814 - protein, 13 aa, Homo sapiens
  Heavy chain CDR3 for antibody 2907 (IGHV3-33)
ARAFIMVRGVIDY

SEQ ID NO: 5815 - protein, 9 aa, Homo sapiens
  Light chain CDR3 for antibody 2908 (IGKV1D-16)
QQYNSYPLT

SEQ ID NO: 5816 - protein, 15 aa, Homo sapiens
  Heavy chain CDR3 for antibody 2908 (IGHV3-33)
ARDALAVTGTGWFDP

SEQ ID NO: 5817 - protein, 9 aa, Homo sapiens
  Light chain CDR3 for antibody 2909 (IGKV1-27)
QKYNSAPYT

SEQ ID NO: 5818 - protein, 18 aa, Homo sapiens
  Heavy chain CDR3 for antibody 2909 (IGHV3-33)
ARDGYSGYDYYYYYGMDV

SEQ ID NO: 5819 - protein, 9 aa, Homo sapiens
  Light chain CDR3 for antibody 2910 (IGKV3-20)
QQYGSSPYT

SEQ ID NO: 5820 - protein, 16 aa, Homo sapiens
  Heavy chain CDR3 for antibody 2910 (IGHV3-33)
ARDQGILTGYYTALDY

SEQ ID NO: 5821 - protein, 9 aa, Homo sapiens
  Light chain CDR3 for antibody 2911 (IGKV1-6)
LQDYNYPYT

SEQ ID NO: 5822 - protein, 16 aa, Homo sapiens
  Heavy chain CDR3 for antibody 2911 (IGHV3-23)
ARNDILTASGYYGMDV

SEQ ID NO: 5823 - protein, 9 aa, Homo sapiens
  Light chain CDR3 for antibody 2912 (IGKV5-2)
LQHDNFPYT

SEQ ID NO: 5824 - protein, 17 aa, Homo sapiens
  Heavy chain CDR3 for antibody 2912 (IGHV3-23)
AKDYDILTGYSHNWFDP

SEQ ID NO: 5825 - protein, 9 aa, Homo sapiens
  Light chain CDR3 for antibody 2913 (IGKV1-27)
QKYNSAPYT

SEQ ID NO: 5826 - protein, 13 aa, Homo sapiens
  Heavy chain CDR3 for antibody 2913 (IGHV3-33)
AREYCSGGSCYDY

SEQ ID NO: 5827 - protein, 9 aa, Homo sapiens
  Light chain CDR3 for antibody 2914 (IGKV6-21)
HQSSSLPYT

SEQ ID NO: 5828 - protein, 14 aa, Homo sapiens
  Heavy chain CDR3 for antibody 2914 (IGHV3-33)
ARGYGSGSYYSFDY

SEQ ID NO: 5829 - protein, 9 aa, Homo sapiens
  Light chain CDR3 for antibody 2915 (IGKV6-21)
HQSSSLPYT

SEQ ID NO: 5830 - protein, 15 aa, Homo sapiens
  Heavy chain CDR3 for antibody 2915 (IGHV4-39)
ARHSGYSSGWYPFDY

SEQ ID NO: 5831 - protein, 9 aa, Homo sapiens
  Light chain CDR3 for antibody 2916 (IGKV6-21)
HQSSSLPYT

SEQ ID NO: 5832 - protein, 17 aa, Homo sapiens
  Heavy chain CDR3 for antibody 2916 (IGHV3-33)
ARSPYDILTGYSYYFDY

SEQ ID NO: 5833 - protein, 9 aa, Homo sapiens
  Light chain CDR3 for antibody 2917 (IGKV3D-7)
QQDYNLPLT

SEQ ID NO: 5834 - protein, 18 aa, Homo sapiens
  Heavy chain CDR3 for antibody 2917 (IGHV1-46)
ARDLTGRTENYYYYGMDV

SEQ ID NO: 5835 - protein, 9 aa, Homo sapiens
  Light chain CDR3 for antibody 2918 (IGKV3-11)
QQRSNWPPT

SEQ ID NO: 5836 - protein, 13 aa, Homo sapiens
  Heavy chain CDR3 for antibody 2918 (IGHV3-11)
ARDEGYRGYVLDT

SEQ ID NO: 5837 - protein, 9 aa, Homo sapiens
  Light chain CDR3 for antibody 2919 (IGKV5-2)
LQHDNFPYT

SEQ ID NO: 5838 - protein, 12 aa, Homo sapiens
  Heavy chain CDR3 for antibody 2919 (IGHV3-33)
ARGYFTSGSAHY

SEQ ID NO: 5839 - protein, 9 aa, Homo sapiens
  Light chain CDR3 for antibody 2920 (IGKV5-2)
LQHDNFPWT

SEQ ID NO: 5840 - protein, 17 aa, Homo sapiens
  Heavy chain CDR3 for antibody 2920 (IGHV1-24)
ATEGYDILPGYYNVLDY

SEQ ID NO: 5841 - protein, 9 aa, Homo sapiens
  Light chain CDR3 for antibody 2921 (IGKV1-6)
LQDYNYPRT

SEQ ID NO: 5842 - protein, 15 aa, Homo sapiens
  Heavy chain CDR3 for antibody 2921 (IGHV3-23)
AKDRNYDFLTGPFDP

SEQ ID NO: 5843 - protein, 9 aa, Homo sapiens
  Light chain CDR3 for antibody 2922 (IGKV1-27)
QKYNSAPYT

SEQ ID NO: 5844 - protein, 17 aa, Homo sapiens
  Heavy chain CDR3 for antibody 2922 (IGHV3-64)
ARERYYGSGSYYNWFDP

SEQ ID NO: 5845 - protein, 8 aa, Homo sapiens
  Light chain CDR3 for antibody 2923 (IGKV1-6)
LQDYNYYT

SEQ ID NO: 5846 - protein, 17 aa, Homo sapiens
  Heavy chain CDR3 for antibody 2923 (IGHV3-7)
ARDKAVAVYQFYYGLDV

SEQ ID NO: 5847 - protein, 9 aa, Homo sapiens
  Light chain CDR3 for antibody 2924 (IGKV6-21)
HQSSSLPYT

SEQ ID NO: 5848 - protein, 11 aa, Homo sapiens
  Heavy chain CDR3 for antibody 2924 (IGHV3-23)
AKEGTYFDIPH

SEQ ID NO: 5849 - protein, 8 aa, Homo sapiens
  Light chain CDR3 for antibody 2925 (IGKV1D-13)
QQFNNYPT

SEQ ID NO: 5850 - protein, 13 aa, Homo sapiens
  Heavy chain CDR3 for antibody 2925 (IGHV3-11)
ARDGGAAAGTWDS

SEQ ID NO: 5851 - protein, 9 aa, Homo sapiens
  Light chain CDR3 for antibody 2926 (IGKV1-27)
QKYNSAPYT

SEQ ID NO: 5852 - protein, 15 aa, Homo sapiens
  Heavy chain CDR3 for antibody 2926 (IGHV4-59)
ARDLGHYYGSVSIDY

SEQ ID NO: 5853 - protein, 9 aa, Homo sapiens
  Light chain CDR3 for antibody 2927 (IGKV1D-13)
QQFNNYPYT

SEQ ID NO: 5854 - protein, 19 aa, Homo sapiens
  Heavy chain CDR3 for antibody 2927 (IGHV3-30)
ARRFSGYSGYDHYYYGMDV

SEQ ID NO: 5855 - protein, 9 aa, Homo sapiens
  Light chain CDR3 for antibody 2928 (IGKV2-30)
MQGTHWPLT

SEQ ID NO: 5856 - protein, 12 aa, Homo sapiens
  Heavy chain CDR3 for antibody 2928 (IGHV3-33)
ARDRAYRGSLDY

SEQ ID NO: 5857 - protein, 9 aa, Homo sapiens
  Light chain CDR3 for antibody 2929 (IGKV6-21)
HQSSSLPYT

SEQ ID NO: 5858 - protein, 16 aa, Homo sapiens
  Heavy chain CDR3 for antibody 2929 (IGHV3-33)
AREVAGSYYYYYGIDV

SEQ ID NO: 5859 - protein, 10 aa, Homo sapiens
  Light chain CDR3 for antibody 2930 (IGKV1-17)
LQHNSYPMYT

SEQ ID NO: 5860 - protein, 12 aa, Homo sapiens
  Heavy chain CDR3 for antibody 2930 (IGHV1-46)
ARGLTGDHAVDI

SEQ ID NO: 5861 - protein, 9 aa, Homo sapiens
  Light chain CDR3 for antibody 2931 (IGKV1-39)
QQSYSTPLT

SEQ ID NO: 5862 - protein, 16 aa, Homo sapiens
  Heavy chain CDR3 for antibody 2931 (IGHV3-13)
ARDRSYESYYYYGMDV

SEQ ID NO: 5863 - protein, 9 aa, Homo sapiens
  Light chain CDR3 for antibody 2932 (IGKV1-9)
QQLNNYLFT

SEQ ID NO: 5864 - protein, 13 aa, Homo sapiens
  Heavy chain CDR3 for antibody 2932 (IGHV4-59)
ARDAGYSSSWFDY

SEQ ID NO: 5865 - protein, 9 aa, Homo sapiens
  Light chain CDR3 for antibody 2933 (IGKV1-27)
QKYNSAPYT

SEQ ID NO: 5866 - protein, 10 aa, Homo sapiens
  Heavy chain CDR3 for antibody 2933 (IGHV3-23)
AKEQWLVLDY

SEQ ID NO: 5867 - protein, 8 aa, Homo sapiens
  Light chain CDR3 for antibody 2934 (IGKV1-5)
QQYNSYWT

SEQ ID NO: 5868 - protein, 12 aa, Homo sapiens
  Heavy chain CDR3 for antibody 2934 (IGHV3-13)
AREAGIPDAFDI

SEQ ID NO: 5869 - protein, 9 aa, Homo sapiens
  Light chain CDR3 for antibody 2935 (IGKV1-9)
QQLHIYPWT

SEQ ID NO: 5870 - protein, 11 aa, Homo sapiens
  Heavy chain CDR3 for antibody 2935 (IGHV3-33)
ARDRSSGPFDY

SEQ ID NO: 5871 - protein, 9 aa, Homo sapiens
  Light chain CDR3 for antibody 2936 (IGKV1-6)
LQDYNYPYT

SEQ ID NO: 5872 - protein, 15 aa, Homo sapiens
  Heavy chain CDR3 for antibody 2936 (IGHV3-33)
VRGYYYGSGSYPLNY

SEQ ID NO: 5873 - protein, 9 aa, Homo sapiens
  Light chain CDR3 for antibody 2937 (IGKV1-39)
QQSYSTPLT

SEQ ID NO: 5874 - protein, 16 aa, Homo sapiens
  Heavy chain CDR3 for antibody 2937 (IGHV3-33)
ARGGRSDWLYYYGMDV

SEQ ID NO: 5875 - protein, 9 aa, Homo sapiens
  Light chain CDR3 for antibody 2938 (IGKV3D-20)
QQYGSSPYT

SEQ ID NO: 5876 - protein, 19 aa, Homo sapiens
  Heavy chain CDR3 for antibody 2938 (IGHV3-33)
ARGRGSYYYGPGSHYGMDV

SEQ ID NO: 5877 - protein, 9 aa, Homo sapiens
  Light chain CDR3 for antibody 2939 (IGKV1-9)
QQLNSYPYT

SEQ ID NO: 5878 - protein, 9 aa, Homo sapiens
  Heavy chain CDR3 for antibody 2939 (IGHV3-30)
ARDYFHFDY

SEQ ID NO: 5879 - protein, 10 aa, Homo sapiens
  Light chain CDR3 for antibody 2940 (IGKV1-39)
QQSYSTPMYT

SEQ ID NO: 5880 - protein, 12 aa, Homo sapiens
  Heavy chain CDR3 for antibody 2940 (IGHV3-33)
ARGYFGSGYAHF

SEQ ID NO: 5881 - protein, 9 aa, Homo sapiens
  Light chain CDR3 for antibody 2941 (IGKV1D-13)
QRFNNYLYT

SEQ ID NO: 5882 - protein, 16 aa, Homo sapiens
  Heavy chain CDR3 for antibody 2941 (IGHV3-23)
AKEGMVLRYFDWLWDY

SEQ ID NO: 5883 - protein, 9 aa, Homo sapiens
  Light chain CDR3 for antibody 2942 (IGKV6-21)
HQSSSLPYT

SEQ ID NO: 5884 - protein, 18 aa, Homo sapiens
  Heavy chain CDR3 for antibody 2942 (IGHV3-33)
ARGGVLYDILTGFYGMDV

SEQ ID NO: 5885 - protein, 9 aa, Homo sapiens
  Light chain CDR3 for antibody 2943 (IGKV2-30)
MQGTHWPLT

SEQ ID NO: 5886 - protein, 7 aa, Homo sapiens
  Heavy chain CDR3 for antibody 2943 (IGHV1-46)
AREGGDY

SEQ ID NO: 5887 - protein, 9 aa, Homo sapiens
  Light chain CDR3 for antibody 2944 (IGKV1-27)
QKYNSAPYT

SEQ ID NO: 5888 - protein, 12 aa, Homo sapiens
  Heavy chain CDR3 for antibody 2944 (IGHV3-33)
AREKGGSYSFDY

SEQ ID NO: 5889 - protein, 9 aa, Homo sapiens
  Light chain CDR3 for antibody 2945 (IGKV1-39)
QQSYSTPLT

SEQ ID NO: 5890 - protein, 24 aa, Homo sapiens
  Heavy chain CDR3 for antibody 2945 (IGHV3-20)
ARGRITMVRGVIINPLDYYNGMDV

SEQ ID NO: 5891 - protein, 9 aa, Homo sapiens
  Light chain CDR3 for antibody 2946 (IGKV6-21)
HQSSSLPYT

SEQ ID NO: 5892 - protein, 14 aa, Homo sapiens
  Heavy chain CDR3 for antibody 2946 (IGHV3-33)
ARDRRDFYYYGMDV

SEQ ID NO: 5893 - protein, 9 aa, Homo sapiens
  Light chain CDR3 for antibody 2947 (IGKV2-30)
MQGTHWPLT

SEQ ID NO: 5894 - protein, 14 aa, Homo sapiens
  Heavy chain CDR3 for antibody 2947 (IGHV3-33)
AREGYSSNWYDFDY

SEQ ID NO: 5895 - protein, 9 aa, Homo sapiens
  Light chain CDR3 for antibody 2948 (IGKV3D-7)
QQDYNLPLT

SEQ ID NO: 5896 - protein, 20 aa, Homo sapiens
  Heavy chain CDR3 for antibody 2948 (IGHV1-18)
AREVGIAVAGTLYYYYGMDV

SEQ ID NO: 5897 - protein, 9 aa, Homo sapiens
  Light chain CDR3 for antibody 2949 (IGKV5-2)
LQHDKFPYT

SEQ ID NO: 5898 - protein, 18 aa, Homo sapiens
  Heavy chain CDR3 for antibody 2949 (IGHV1-46)
ARDGDYVWGSYRSNWFDP

SEQ ID NO: 5899 - protein, 9 aa, Homo sapiens
  Light chain CDR3 for antibody 2950 (IGKV1-9)
QQGNTYSRT

SEQ ID NO: 5900 - protein, 13 aa, Homo sapiens
  Heavy chain CDR3 for antibody 2950 (IGHV4-34)
ASNFYYYYYGMDV

SEQ ID NO: 5901 - protein, 9 aa, Homo sapiens
  Light chain CDR3 for antibody 2951 (IGKV3-20)
QQYGSSPYT

SEQ ID NO: 5902 - protein, 9 aa, Homo sapiens
  Heavy chain CDR3 for antibody 2951 (IGHV3-20)
ASIRGYFDY

SEQ ID NO: 5903 - protein, 9 aa, Homo sapiens
  Light chain CDR3 for antibody 2952 (IGKV1-6)
LQDYNYPRT

SEQ ID NO: 5904 - protein, 17 aa, Homo sapiens
  Heavy chain CDR3 for antibody 2952 (IGHV3-33)
ARELRYFDWLLSDAFDI

SEQ ID NO: 5905 - protein, 9 aa, Homo sapiens
  Light chain CDR3 for antibody 2953 (IGKV1-17)
LQHNGYPLT

SEQ ID NO: 5906 - protein, 12 aa, Homo sapiens
  Heavy chain CDR3 for antibody 2953 (IGHV3-13)
VREAGIPDAFDI

SEQ ID NO: 5907 - protein, 9 aa, Homo sapiens
  Light chain CDR3 for antibody 2954 (IGKV5-2)
LQHDNFPYT

SEQ ID NO: 5908 - protein, 14 aa, Homo sapiens
  Heavy chain CDR3 for antibody 2954 (IGHV3-33)
ARDRDIMATSYFDY

SEQ ID NO: 5909 - protein, 8 aa, Homo sapiens
  Light chain CDR3 for antibody 2955 (IGKV1-5)
QQYNSYWT

SEQ ID NO: 5910 - protein, 13 aa, Homo sapiens
  Heavy chain CDR3 for antibody 2955 (IGHV3-33)
ARKAYGDYFYFDY

SEQ ID NO: 5911 - protein, 8 aa, Homo sapiens
  Light chain CDR3 for antibody 2956 (IGKV1D-13)
QQFNNYPT

SEQ ID NO: 5912 - protein, 18 aa, Homo sapiens
  Heavy chain CDR3 for antibody 2956 (IGHV3-33)
ARREGIVGATTYYYGMDV

SEQ ID NO: 5913 - protein, 9 aa, Homo sapiens
  Light chain CDR3 for antibody 2957 (IGKV1D-16)
QQYNSYPYT

SEQ ID NO: 5914 - protein, 13 aa, Homo sapiens
  Heavy chain CDR3 for antibody 2957 (IGHV3-33)
ARVDYYNYYGLDV

SEQ ID NO: 5915 - protein, 9 aa, Homo sapiens
  Light chain CDR3 for antibody 2958 (IGKV5-2)
LQHDNFPWT

SEQ ID NO: 5916 - protein, 18 aa, Homo sapiens
  Heavy chain CDR3 for antibody 2958 (IGHV3-33)
ARDRGDILTGYYKGWFDP

SEQ ID NO: 5917 - protein, 9 aa, Homo sapiens
  Light chain CDR3 for antibody 2959 (IGKV1D-13)
QQFNNYPHT

SEQ ID NO: 5918 - protein, 14 aa, Homo sapiens
  Heavy chain CDR3 for antibody 2959 (IGHV3-23)
ANWAYDILTGYLDY

SEQ ID NO: 5919 - protein, 9 aa, Homo sapiens
  Light chain CDR3 for antibody 2960 (IGKV1-9)
QQLNSYPWT

SEQ ID NO: 5920 - protein, 9 aa, Homo sapiens
  Heavy chain CDR3 for antibody 2960 (IGHV3-30)
VRDNWGFDY

SEQ ID NO: 5921 - protein, 9 aa, Homo sapiens
  Light chain CDR3 for antibody 2961 (IGKV1-16)
QQYNSYPLT

SEQ ID NO: 5922 - protein, 12 aa, Homo sapiens
  Heavy chain CDR3 for antibody 2961 (IGHV3-33)
ARKGYGLYVLDV

SEQ ID NO: 5923 - protein, 9 aa, Homo sapiens
  Light chain CDR3 for antibody 2962 (IGKV5-2)
LQHDNFPWT

SEQ ID NO: 5924 - protein, 19 aa, Homo sapiens
  Heavy chain CDR3 for antibody 2962 (IGHV3-33)
ARDRYYDILTGYSSYYFDY

SEQ ID NO: 5925 - protein, 9 aa, Homo sapiens
  Light chain CDR3 for antibody 2963 (IGKV1-9)
QQLNSYPYT

SEQ ID NO: 5926 - protein, 13 aa, Homo sapiens
  Heavy chain CDR3 for antibody 2963 (IGHV3-33)
ARTDYYSYYGLDV

SEQ ID NO: 5927 - protein, 9 aa, Homo sapiens
  Light chain CDR3 for antibody 2964 (IGKV5-2)
LQHDNFPYT

SEQ ID NO: 5928 - protein, 12 aa, Homo sapiens
  Heavy chain CDR3 for antibody 2964 (IGHV3-33)
ARAGMGAPYFDY

SEQ ID NO: 5929 - protein, 9 aa, Homo sapiens
  Light chain CDR3 for antibody 2965 (IGKV3D-20)
QQYGSSPYT

SEQ ID NO: 5930 - protein, 15 aa, Homo sapiens
  Heavy chain CDR3 for antibody 2965 (IGHV3-23)
AKVFTMVRGMGYFDL

SEQ ID NO: 5931 - protein, 9 aa, Homo sapiens
  Light chain CDR3 for antibody 2966 (IGKV1-9)
QQLKSYLYT

SEQ ID NO: 5932 - protein, 20 aa, Homo sapiens
  Heavy chain CDR3 for antibody 2966 (IGHV1-18)
AREVGIAVAGTLYYYYGMDV

SEQ ID NO: 5933 - protein, 9 aa, Homo sapiens
  Light chain CDR3 for antibody 2967 (IGKV3-15)
QQYNNWPLT

SEQ ID NO: 5934 - protein, 15 aa, Homo sapiens
  Heavy chain CDR3 for antibody 2967 (IGHV3-66)
ARDSRPEIIGPPFDY

SEQ ID NO: 5935 - protein, 9 aa, Homo sapiens
  Light chain CDR3 for antibody 2968 (IGKV1-6)
LQDYNYPWT

SEQ ID NO: 5936 - protein, 24 aa, Homo sapiens
  Heavy chain CDR3 for antibody 2968 (IGHV3-11)
ARDGEIITPRTIVIPPYYYYGMDV

SEQ ID NO: 5937 - protein, 8 aa, Homo sapiens
  Light chain CDR3 for antibody 2969 (IGKV1D-13)
QQFNNYPT

SEQ ID NO: 5938 - protein, 12 aa, Homo sapiens
  Heavy chain CDR3 for antibody 2969 (IGHV3-33)
ARESGGSYSFDY

SEQ ID NO: 5939 - protein, 9 aa, Homo sapiens
  Light chain CDR3 for antibody 2970 (IGKV5-2)
LQHDNFPYT

SEQ ID NO: 5940 - protein, 10 aa, Homo sapiens
  Heavy chain CDR3 for antibody 2970 (IGHV3-33)
ARNILTPLDY

SEQ ID NO: 5941 - protein, 9 aa, Homo sapiens
  Light chain CDR3 for antibody 2971 (IGKV6-21)
HQSSSLPYT

SEQ ID NO: 5942 - protein, 15 aa, Homo sapiens
  Heavy chain CDR3 for antibody 2971 (IGHV3-23)
AKDRYFDWLSDAFDI

SEQ ID NO: 5943 - protein, 9 aa, Homo sapiens
  Light chain CDR3 for antibody 2972 (IGKV3D-7)
QQDYNLPLT

SEQ ID NO: 5944 - protein, 13 aa, Homo sapiens
  Heavy chain CDR3 for antibody 2972 (IGHV3-33)
ARVDTMVRGVMAY

SEQ ID NO: 5945 - protein, 9 aa, Homo sapiens
  Light chain CDR3 for antibody 2973 (IGKV6-21)
HQSSSLPYT

SEQ ID NO: 5946 - protein, 13 aa, Homo sapiens
  Heavy chain CDR3 for antibody 2973 (IGHV1-18)
ARSITMVRGVIGY

SEQ ID NO: 5947 - protein, 9 aa, Homo sapiens
  Light chain CDR3 for antibody 2974 (IGKV3-20)
QQYGSSPYT

SEQ ID NO: 5948 - protein, 12 aa, Homo sapiens
  Heavy chain CDR3 for antibody 2974 (IGHV3-33)
ARKQWLVQAFDI

SEQ ID NO: 5949 - protein, 9 aa, Homo sapiens
  Light chain CDR3 for antibody 2975 (IGKV1-39)
QQSYSTPLT

SEQ ID NO: 5950 - protein, 13 aa, Homo sapiens
  Heavy chain CDR3 for antibody 2975 (IGHV4-39)
ARHHYGSGSLRDY

SEQ ID NO: 5951 - protein, 9 aa, Homo sapiens
  Light chain CDR3 for antibody 2976 (IGKV4-1)
QQYYSTPLT

SEQ ID NO: 5952 - protein, 12 aa, Homo sapiens
  Heavy chain CDR3 for antibody 2976 (IGHV1-18)
ARVLFDGDYFDY

SEQ ID NO: 5953 - protein, 9 aa, Homo sapiens
  Light chain CDR3 for antibody 2977 (IGKV2-30)
MQGTHWPLT

SEQ ID NO: 5954 - protein, 18 aa, Homo sapiens
  Heavy chain CDR3 for antibody 2977 (IGHV3-33)
ARGYYGSGNFYKDSGMDV

SEQ ID NO: 5955 - protein, 9 aa, Homo sapiens
  Light chain CDR3 for antibody 2978 (IGKV1-16)
QQYNSYPYT

SEQ ID NO: 5956 - protein, 16 aa, Homo sapiens
  Heavy chain CDR3 for antibody 2978 (IGHV3-20)
ARLLRYFDWPLGAFDI

SEQ ID NO: 5957 - protein, 9 aa, Homo sapiens
  Light chain CDR3 for antibody 2979 (IGKV1-9)
QQLNSYPLT

SEQ ID NO: 5958 - protein, 13 aa, Homo sapiens
  Heavy chain CDR3 for antibody 2979 (IGHV3-33)
ARGYFDWLLPLDY

SEQ ID NO: 5959 - protein, 9 aa, Homo sapiens
  Light chain CDR3 for antibody 2980 (IGKV6-21)
HQSSSLPFT

SEQ ID NO: 5960 - protein, 11 aa, Homo sapiens
  Heavy chain CDR3 for antibody 2980 (IGHV4-59)
ARDGVRGVFDI

SEQ ID NO: 5961 - protein, 9 aa, Homo sapiens
  Light chain CDR3 for antibody 2981 (IGKV1-39)
QQGFSTPWT

SEQ ID NO: 5962 - protein, 18 aa, Homo sapiens
  Heavy chain CDR3 for antibody 2981 (IGHV4-59)
AREGDYVWGSYRPNWFDP

SEQ ID NO: 5963 - protein, 10 aa, Homo sapiens
  Light chain CDR3 for antibody 2982 (IGKV3-11)
QQRSNWPIFT

SEQ ID NO: 5964 - protein, 17 aa, Homo sapiens
  Heavy chain CDR3 for antibody 2982 (IGHV4-59)
ARDFLVRGEGSYYGMDV

SEQ ID NO: 5965 - protein, 9 aa, Homo sapiens
  Light chain CDR3 for antibody 2983 (IGKV3-11)
QQRSNWPLT

SEQ ID NO: 5966 - protein, 14 aa, Homo sapiens
  Heavy chain CDR3 for antibody 2983 (IGHV3-33)
ARTTAAAGPRDFQH

SEQ ID NO: 5967 - protein, 9 aa, Homo sapiens
  Light chain CDR3 for antibody 2984 (IGKV3D-7)
QQDYNLPYT

SEQ ID NO: 5968 - protein, 11 aa, Homo sapiens
  Heavy chain CDR3 for antibody 2984 (IGHV4-59)
AREMGHDTFDI

SEQ ID NO: 5969 - protein, 9 aa, Homo sapiens
  Light chain CDR3 for antibody 2985 (IGKV1D-13)
QQFNNYPHT

SEQ ID NO: 5970 - protein, 15 aa, Homo sapiens
  Heavy chain CDR3 for antibody 2985 (IGHV3-33)
ARRGYNDYDPYGMDV

SEQ ID NO: 5971 - protein, 9 aa, Homo sapiens
  Light chain CDR3 for antibody 2986 (IGKV6-21)
HQSSSLPYT

SEQ ID NO: 5972 - protein, 12 aa, Homo sapiens
  Heavy chain CDR3 for antibody 2986 (IGHV3-33)
ARAGMGAPYFDY

SEQ ID NO: 5973 - protein, 9 aa, Homo sapiens
  Light chain CDR3 for antibody 2987 (IGKV5-2)
LQHDNFPYT

SEQ ID NO: 5974 - protein, 15 aa, Homo sapiens
  Heavy chain CDR3 for antibody 2987 (IGHV3-23)
AKDGFYYGSGSSFDH

SEQ ID NO: 5975 - protein, 10 aa, Homo sapiens
  Light chain CDR3 for antibody 2988 (IGKV3-15)
QQYNNWPPYT

SEQ ID NO: 5976 - protein, 18 aa, Homo sapiens
  Heavy chain CDR3 for antibody 2988 (IGHV3-33)
ARGSYSSGWNDYHYGMDV

SEQ ID NO: 5977 - protein, 9 aa, Homo sapiens
  Light chain CDR3 for antibody 2989 (IGKV5-2)
LQHDNFPWT

SEQ ID NO: 5978 - protein, 9 aa, Homo sapiens
  Heavy chain CDR3 for antibody 2989 (IGHV4-59)
ARSGSGIYT

SEQ ID NO: 5979 - protein, 9 aa, Homo sapiens
  Light chain CDR3 for antibody 2990 (IGKV5-2)
LQHDNFPWT

SEQ ID NO: 5980 - protein, 12 aa, Homo sapiens
  Heavy chain CDR3 for antibody 2990 (IGHV4-28)
ARKDSGYDWFDY

SEQ ID NO: 5981 - protein, 9 aa, Homo sapiens
  Light chain CDR3 for antibody 2991 (IGKV1-9)
QQLKSYLYT

SEQ ID NO: 5982 - protein, 11 aa, Homo sapiens
  Heavy chain CDR3 for antibody 2991 (IGHV4-59)
AREMGHDTFDI

SEQ ID NO: 5983 - protein, 9 aa, Homo sapiens
  Light chain CDR3 for antibody 2992 (IGKV6-21)
HQSSSLPHT

SEQ ID NO: 5984 - protein, 18 aa, Homo sapiens
  Heavy chain CDR3 for antibody 2992 (IGHV3-33)
ARDQYSGYDFYYYYGMDV

SEQ ID NO: 5985 - protein, 9 aa, Homo sapiens
  Light chain CDR3 for antibody 2993 (IGKV1D-16)
QQYNSYPLT

SEQ ID NO: 5986 - protein, 17 aa, Homo sapiens
  Heavy chain CDR3 for antibody 2993 (IGHV3-23)
AKDTITMVRGALFGMDV

SEQ ID NO: 5987 - protein, 9 aa, Homo sapiens
  Light chain CDR3 for antibody 2994 (IGKV1-16)
QQYNRYPYT

SEQ ID NO: 5988 - protein, 11 aa, Homo sapiens
  Heavy chain CDR3 for antibody 2994 (IGHV4-4)
AREAYYYGLDV

SEQ ID NO: 5989 - protein, 9 aa, Homo sapiens
  Light chain CDR3 for antibody 2995 (IGKV3-20)
QQYGSSPRT

SEQ ID NO: 5990 - protein, 23 aa, Homo sapiens
  Heavy chain CDR3 for antibody 2995 (IGHV1-18)
ARNLHYDILTGYFPYYFYYGMDV

SEQ ID NO: 5991 - protein, 9 aa, Homo sapiens
  Light chain CDR3 for antibody 2996 (IGKV1-17)
LQQNSYPWT

SEQ ID NO: 5992 - protein, 18 aa, Homo sapiens
  Heavy chain CDR3 for antibody 2996 (IGHV1-46)
ARDGDYVWGSYRSDWFDP

SEQ ID NO: 5993 - protein, 9 aa, Homo sapiens
  Light chain CDR3 for antibody 2997 (IGKV1D-13)
QQFNNYPHT

SEQ ID NO: 5994 - protein, 24 aa, Homo sapiens
  Heavy chain CDR3 for antibody 2997 (IGHV3-20)
ARGRITMVRGVIINPLDYYNGMDV

SEQ ID NO: 5995 - protein, 9 aa, Homo sapiens
  Light chain CDR3 for antibody 2998 (IGKV4-1)
QQYYSTPWT

SEQ ID NO: 5996 - protein, 11 aa, Homo sapiens
  Heavy chain CDR3 for antibody 2998 (IGHV3-33)
ARDRSSGPFDY

SEQ ID NO: 5997 - protein, 8 aa, Homo sapiens
  Light chain CDR3 for antibody 2999 (IGKV3D-7)
QQDYNLLT

SEQ ID NO: 5998 - protein, 12 aa, Homo sapiens
  Heavy chain CDR3 for antibody 2999 (IGHV3-33)
AREKGGSYSFDY

SEQ ID NO: 5999 - protein, 9 aa, Homo sapiens
  Light chain CDR3 for antibody 3000 (IGKV1-6)
LQDYNYPYT

SEQ ID NO: 6000 - protein, 13 aa, Homo sapiens
  Heavy chain CDR3 for antibody 3000 (IGHV4-39)
ARRGVVAPAAFDY

SEQ ID NO: 6001 - protein, 8 aa, Homo sapiens
  Light chain CDR3 for antibody 3001 (IGKV6-21)
HQSSSLPT

SEQ ID NO: 6002 - protein, 13 aa, Homo sapiens
  Heavy chain CDR3 for antibody 3001 (IGHV3-33)
ARDYCGGDCYLDY

SEQ ID NO: 6003 - protein, 9 aa, Homo sapiens
  Light chain CDR3 for antibody 3002 (IGKV3-15)
QQYNNWPLT

SEQ ID NO: 6004 - protein, 17 aa, Homo sapiens
  Heavy chain CDR3 for antibody 3002 (IGHV1-18)
ARDRAFTMVRGVPPFDY

SEQ ID NO: 6005 - protein, 9 aa, Homo sapiens
  Light chain CDR3 for antibody 3003 (IGKV1-17)
LQHNSYPYT

SEQ ID NO: 6006 - protein, 16 aa, Homo sapiens
  Heavy chain CDR3 for antibody 3003 (IGHV3-11)
ARDSELRYFDWFGMDV

SEQ ID NO: 6007 - protein, 9 aa, Homo sapiens
  Light chain CDR3 for antibody 3004 (IGKV3D-7)
QQDYNLPLT

SEQ ID NO: 6008 - protein, 11 aa, Homo sapiens
  Heavy chain CDR3 for antibody 3004 (IGHV3-33)
ARARYTTGLDY

SEQ ID NO: 6009 - protein, 9 aa, Homo sapiens
  Light chain CDR3 for antibody 3005 (IGKV1-6)
QQEYNYPLT

SEQ ID NO: 6010 - protein, 13 aa, Homo sapiens
  Heavy chain CDR3 for antibody 3005 (IGHV4-59)
ARDAGYSSSWFDY

SEQ ID NO: 6011 - protein, 9 aa, Homo sapiens
  Light chain CDR3 for antibody 3006 (IGKV1D-16)
QQYNSYPLT

SEQ ID NO: 6012 - protein, 10 aa, Homo sapiens
  Heavy chain CDR3 for antibody 3006 (IGHV3-33)
ARDGLRYFDW

SEQ ID NO: 6013 - protein, 10 aa, Homo sapiens
  Light chain CDR3 for antibody 3007 (IGKV1-17)
LQHNSYPMYT

SEQ ID NO: 6014 - protein, 13 aa, Homo sapiens
  Heavy chain CDR3 for antibody 3007 (IGHV3-23)
ASPFNWNDGFFDY

SEQ ID NO: 6015 - protein, 9 aa, Homo sapiens
  Light chain CDR3 for antibody 3008 (IGKV3-20)
QQYGSSPYT

SEQ ID NO: 6016 - protein, 18 aa, Homo sapiens
  Heavy chain CDR3 for antibody 3008 (IGHV3-33)
AREGYDILTGDYRLGFDY

SEQ ID NO: 6017 - protein, 9 aa, Homo sapiens
  Light chain CDR3 for antibody 3009 (IGKV1-6)
LQDYNYPYT

SEQ ID NO: 6018 - protein, 14 aa, Homo sapiens
  Heavy chain CDR3 for antibody 3009 (IGHV1-18)
AREGGSYFYYGVDV

SEQ ID NO: 6019 - protein, 9 aa, Homo sapiens
  Light chain CDR3 for antibody 3010 (IGKV1-9)
QQLNSYPLT

SEQ ID NO: 6020 - protein, 17 aa, Homo sapiens
  Heavy chain CDR3 for antibody 3010 (IGHV3-33)
TRDSGMVRGIIIYGMDV

SEQ ID NO: 6021 - protein, 9 aa, Homo sapiens
  Light chain CDR3 for antibody 3011 (IGKV1-6)
QQLNSYPYT

SEQ ID NO: 6022 - protein, 14 aa, Homo sapiens
  Heavy chain CDR3 for antibody 3011 (IGHV1-46)
ARKGIVGAFDAFDI

SEQ ID NO: 6023 - protein, 9 aa, Homo sapiens
  Light chain CDR3 for antibody 3012 (IGKV2-30)
MQGTHWPLT

SEQ ID NO: 6024 - protein, 14 aa, Homo sapiens
  Heavy chain CDR3 for antibody 3012 (IGHV3-33)
ARTTAAAGPRDFQH

SEQ ID NO: 6025 - protein, 10 aa, Homo sapiens
  Light chain CDR3 for antibody 3013 (IGKV1-39)
QQSYSTPMYT

SEQ ID NO: 6026 - protein, 13 aa, Homo sapiens
  Heavy chain CDR3 for antibody 3013 (IGHV4-34)
ASNFYYYYYGMDV

SEQ ID NO: 6027 - protein, 9 aa, Homo sapiens
  Light chain CDR3 for antibody 3014 (IGKV1-39)
QQSYSTPLT

SEQ ID NO: 6028 - protein, 20 aa, Homo sapiens
  Heavy chain CDR3 for antibody 3014 (IGHV1-18)
AREVGIAVAGTLYYYYGMDV

SEQ ID NO: 6029 - protein, 9 aa, Homo sapiens
  Light chain CDR3 for antibody 3015 (IGKV1-6)
LQDYKSPFT

SEQ ID NO: 6030 - protein, 18 aa, Homo sapiens
  Heavy chain CDR3 for antibody 3015 (IGHV4-59)
AREGDYVWGSYRPNWFDP

SEQ ID NO: 6031 - protein, 9 aa, Homo sapiens
  Light chain CDR3 for antibody 3016 (IGKV1-27)
QKYNSAPYT

SEQ ID NO: 6032 - protein, 12 aa, Homo sapiens
  Heavy chain CDR3 for antibody 3016 (IGHV3-33)
AREGTRWVYFDY

SEQ ID NO: 6033 - protein, 9 aa, Homo sapiens
  Light chain CDR3 for antibody 3017 (IGKV5-2)
LQHDNFPYT

SEQ ID NO: 6034 - protein, 10 aa, Homo sapiens
  Heavy chain CDR3 for antibody 3017 (IGHV3-23)
AKENWNDFDY

SEQ ID NO: 6035 - protein, 9 aa, Homo sapiens
  Light chain CDR3 for antibody 3018 (IGKV1-39)
QQSYSTPLT

SEQ ID NO: 6036 - protein, 17 aa, Homo sapiens
  Heavy chain CDR3 for antibody 3018 (IGHV4-39)
ARQGWYYGSGSSLLFDY

SEQ ID NO: 6037 - protein, 9 aa, Homo sapiens
  Light chain CDR3 for antibody 3019 (IGKV3-20)
QQYGSSPLT

SEQ ID NO: 6038 - protein, 17 aa, Homo sapiens
  Heavy chain CDR3 for antibody 3019 (IGHV3-64)
ARERYYGSGSYYNWFDP

SEQ ID NO: 6039 - protein, 9 aa, Homo sapiens
  Light chain CDR3 for antibody 3020 (IGKV2-30)
MQGTHWPLT

SEQ ID NO: 6040 - protein, 17 aa, Homo sapiens
  Heavy chain CDR3 for antibody 3020 (IGHV4-59)
ARDFLVRGEGSYYGMDV

SEQ ID NO: 6041 - protein, 9 aa, Homo sapiens
  Light chain CDR3 for antibody 3021 (IGKV1-6)
LQDYNYPYT

SEQ ID NO: 6042 - protein, 15 aa, Homo sapiens
  Heavy chain CDR3 for antibody 3021 (IGHV3-13)
ARDRSYESYYYGMDV

SEQ ID NO: 6043 - protein, 9 aa, Homo sapiens
  Light chain CDR3 for antibody 3022 (IGKV1-27)
QKYNSAPYT

SEQ ID NO: 6044 - protein, 17 aa, Homo sapiens
  Heavy chain CDR3 for antibody 3022 (IGHV3-30)
AREGVRGLIYYYYGMDV

SEQ ID NO: 6045 - protein, 9 aa, Homo sapiens
  Light chain CDR3 for antibody 3023 (IGKV3D-20)
QQYGSSPYT

SEQ ID NO: 6046 - protein, 11 aa, Homo sapiens
  Heavy chain CDR3 for antibody 3023 (IGHV3-33)
ARDRGYSYFDY

SEQ ID NO: 6047 - protein, 9 aa, Homo sapiens
  Light chain CDR3 for antibody 3024 (IGKV1-27)
QKYNSAPYT

SEQ ID NO: 6048 - protein, 15 aa, Homo sapiens
  Heavy chain CDR3 for antibody 3024 (IGHV3-30)
ARRGYGSGSPDAFDL

SEQ ID NO: 6049 - protein, 8 aa, Homo sapiens
  Light chain CDR3 for antibody 3025 (IGKV1D-13)
QQFNNYPT

SEQ ID NO: 6050 - protein, 18 aa, Homo sapiens
  Heavy chain CDR3 for antibody 3025 (IGHV4-59)
AREGDYVWGSYRPNWFDP

SEQ ID NO: 6051 - protein, 8 aa, Homo sapiens
  Light chain CDR3 for antibody 3026 (IGKV1D-13)
QQFNNYPT

SEQ ID NO: 6052 - protein, 17 aa, Homo sapiens
  Heavy chain CDR3 for antibody 3026 (IGHV3-33)
ARGYCSRTSCYLYYFDY

SEQ ID NO: 6053 - protein, 9 aa, Homo sapiens
  Light chain CDR3 for antibody 3027 (IGKV3-11)
QQRSNWPPT

SEQ ID NO: 6054 - protein, 12 aa, Homo sapiens
  Heavy chain CDR3 for antibody 3027 (IGHV3-33)
AREGDILTGYSL

SEQ ID NO: 6055 - protein, 10 aa, Homo sapiens
  Light chain CDR3 for antibody 3028 (IGKV1-17)
LQHNSYPMYT

SEQ ID NO: 6056 - protein, 12 aa, Homo sapiens
  Heavy chain CDR3 for antibody 3028 (IGHV3-33)
ARESGGSYSFDY

SEQ ID NO: 6057 - protein, 9 aa, Homo sapiens
  Light chain CDR3 for antibody 3029 (IGKV2D-28)
MQALQTPPT

SEQ ID NO: 6058 - protein, 13 aa, Homo sapiens
  Heavy chain CDR3 for antibody 3029 (IGHV3-33)
ARDYCGGDCYLDY

SEQ ID NO: 6059 - protein, 9 aa, Homo sapiens
  Light chain CDR3 for antibody 3030 (IGKV3-11)
QQRSNWPPT

SEQ ID NO: 6060 - protein, 17 aa, Homo sapiens
  Heavy chain CDR3 for antibody 3030 (IGHV3-33)
ARGFSGYDGYYYYGMDV

SEQ ID NO: 6061 - protein, 9 aa, Homo sapiens
  Light chain CDR3 for antibody 3031 (IGKV5-2)
LQHDNFPWT

SEQ ID NO: 6062 - protein, 11 aa, Homo sapiens
  Heavy chain CDR3 for antibody 3031 (IGHV4-59)
AREDYGVPFDY

SEQ ID NO: 6063 - protein, 9 aa, Homo sapiens
  Light chain CDR3 for antibody 3032 (IGKV5-2)
LQHDNFPYT

SEQ ID NO: 6064 - protein, 15 aa, Homo sapiens
  Heavy chain CDR3 for antibody 3032 (IGHV3-33)
ARRSILTGSYWYFDL

SEQ ID NO: 6065 - protein, 9 aa, Homo sapiens
  Light chain CDR3 for antibody 3033 (IGKV5-2)
LQHDNFPWT

SEQ ID NO: 6066 - protein, 14 aa, Homo sapiens
  Heavy chain CDR3 for antibody 3033 (IGHV3-20)
ARDGGSTSFDWFDP

SEQ ID NO: 6067 - protein, 9 aa, Homo sapiens
  Light chain CDR3 for antibody 3034 (IGKV6-21)
HQSSSLPYT

SEQ ID NO: 6068 - protein, 17 aa, Homo sapiens
  Heavy chain CDR3 for antibody 3034 (IGHV3-33)
ARDWFGELSDYYYGMDV

SEQ ID NO: 6069 - protein, 8 aa, Homo sapiens
  Light chain CDR3 for antibody 3035 (IGKV3D-7)
QQDYNLLT

SEQ ID NO: 6070 - protein, 8 aa, Homo sapiens
  Heavy chain CDR3 for antibody 3035 (IGHV3-23)
AKETGNNY

SEQ ID NO: 6071 - protein, 9 aa, Homo sapiens
  Light chain CDR3 for antibody 3036 (IGKV1-17)
LQHNSYPYT

SEQ ID NO: 6072 - protein, 12 aa, Homo sapiens
  Heavy chain CDR3 for antibody 3036 (IGHV3-33)
ARNYDILDYFDY

SEQ ID NO: 6073 - protein, 9 aa, Homo sapiens
  Light chain CDR3 for antibody 3037 (IGKV6-21)
HQSSSLPYT

SEQ ID NO: 6074 - protein, 11 aa, Homo sapiens
  Heavy chain CDR3 for antibody 3037 (IGHV4-59)
VRERGYYGMDV

SEQ ID NO: 6075 - protein, 9 aa, Homo sapiens
  Light chain CDR3 for antibody 3038 (IGKV5-2)
LQHDNFPWT

SEQ ID NO: 6076 - protein, 21 aa, Homo sapiens
  Heavy chain CDR3 for antibody 3038 (IGHV1-18)
ASGVLIWFGELLSEDYYDMDV

SEQ ID NO: 6077 - protein, 9 aa, Homo sapiens
  Light chain CDR3 for antibody 3039 (IGKV1-6)
LQDYKSPFT

SEQ ID NO: 6078 - protein, 14 aa, Homo sapiens
  Heavy chain CDR3 for antibody 3039 (IGHV3-33)
ARGAAAGNFYGLDV

SEQ ID NO: 6079 - protein, 9 aa, Homo sapiens
  Light chain CDR3 for antibody 3040 (IGKV1-27)
QKYNSAPYT

SEQ ID NO: 6080 - protein, 7 aa, Homo sapiens
  Heavy chain CDR3 for antibody 3040 (IGHV3-33)
ARELFDY

SEQ ID NO: 6081 - protein, 9 aa, Homo sapiens
  Light chain CDR3 for antibody 3041 (IGKV3-15)
QQYNNWPRT

SEQ ID NO: 6082 - protein, 14 aa, Homo sapiens
  Heavy chain CDR3 for antibody 3041 (IGHV3-33)
ARDWNDVYYYGMDV

SEQ ID NO: 6083 - protein, 9 aa, Homo sapiens
  Light chain CDR3 for antibody 3042 (IGKV6-21)
HQSSSLPYT

SEQ ID NO: 6084 - protein, 18 aa, Homo sapiens
  Heavy chain CDR3 for antibody 3042 (IGHV3-33)
VRDRERYGSGSYPDAFDI

SEQ ID NO: 6085 - protein, 8 aa, Homo sapiens
  Light chain CDR3 for antibody 3043 (IGKV1D-13)
QQFNNYPT

SEQ ID NO: 6086 - protein, 13 aa, Homo sapiens
  Heavy chain CDR3 for antibody 3043 (IGHV3-33)
ARAFTMVRGVIDY

SEQ ID NO: 6087 - protein, 8 aa, Homo sapiens
  Light chain CDR3 for antibody 3044 (IGKV1-5)
QQYNSYWT

SEQ ID NO: 6088 - protein, 18 aa, Homo sapiens
  Heavy chain CDR3 for antibody 3044 (IGHV3-33)
ARREGIVGATTYYYGMDV

SEQ ID NO: 6089 - protein, 9 aa, Homo sapiens
  Light chain CDR3 for antibody 3045 (IGKV5-2)
LQHDNFPWT

SEQ ID NO: 6090 - protein, 15 aa, Homo sapiens
  Heavy chain CDR3 for antibody 3045 (IGHV1-18)
ARRSPNWGHYYGMDV

SEQ ID NO: 6091 - protein, 9 aa, Homo sapiens
  Light chain CDR3 for antibody 3046 (IGKV3D-7)
QQDYNLPLT

SEQ ID NO: 6092 - protein, 14 aa, Homo sapiens
  Heavy chain CDR3 for antibody 3046 (IGHV3-33)
ARTTAAAGPRDFQH

SEQ ID NO: 6093 - protein, 9 aa, Homo sapiens
  Light chain CDR3 for antibody 3047 (IGKV6-21)
HQSSSLPYT

SEQ ID NO: 6094 - protein, 12 aa, Homo sapiens
  Heavy chain CDR3 for antibody 3047 (IGHV3-33)
AREGTGGNWFDP

SEQ ID NO: 6095 - protein, 9 aa, Homo sapiens
  Light chain CDR3 for antibody 3048 (IGKV3-15)
QQYNNWPLT

SEQ ID NO: 6096 - protein, 9 aa, Homo sapiens
  Heavy chain CDR3 for antibody 3048 (IGHV4-59)
AGGSWDFDY

SEQ ID NO: 6097 - protein, 9 aa, Homo sapiens
  Light chain CDR3 for antibody 3049 (IGKV3D-7)
QQDYNLPLT

SEQ ID NO: 6098 - protein, 12 aa, Homo sapiens
  Heavy chain CDR3 for antibody 3049 (IGHV1-46)
AREDYDIDGMDV

SEQ ID NO: 6099 - protein, 9 aa, Homo sapiens
  Light chain CDR3 for antibody 3050 (IGKV1-6)
LQDYNYPRT

SEQ ID NO: 6100 - protein, 17 aa, Homo sapiens
  Heavy chain CDR3 for antibody 3050 (IGHV4-34)
ARDGSGSYTHYYYGMDV

SEQ ID NO: 6101 - protein, 9 aa, Homo sapiens
  Light chain CDR3 for antibody 3051 (IGKV3D-7)
QQDYNLPWT

SEQ ID NO: 6102 - protein, 14 aa, Homo sapiens
  Heavy chain CDR3 for antibody 3051 (IGHV3-33)
ARDWNDVYYYGMDV

SEQ ID NO: 6103 - protein, 9 aa, Homo sapiens
  Light chain CDR3 for antibody 3052 (IGKV5-2)
LQHDNFPYT

SEQ ID NO: 6104 - protein, 17 aa, Homo sapiens
  Heavy chain CDR3 for antibody 3052 (IGHV3-33)
ARGGGYENDHYYYGMDV

SEQ ID NO: 6105 - protein, 9 aa, Homo sapiens
  Light chain CDR3 for antibody 3053 (IGKV1-27)
QKYNSAPYT

SEQ ID NO: 6106 - protein, 19 aa, Homo sapiens
  Heavy chain CDR3 for antibody 3053 (IGHV3-30)
ARRFSGYSGYDHYYYGMDV

SEQ ID NO: 6107 - protein, 9 aa, Homo sapiens
  Light chain CDR3 for antibody 3054 (IGKV1-27)
QKYNSAPYT

SEQ ID NO: 6108 - protein, 16 aa, Homo sapiens
  Heavy chain CDR3 for antibody 3054 (IGHV3-33)
ARDGSMVRRIHDAFDF

SEQ ID NO: 6109 - protein, 9 aa, Homo sapiens
  Light chain CDR3 for antibody 3055 (IGKV1-16)
QQYNSYPYT

SEQ ID NO: 6110 - protein, 12 aa, Homo sapiens
  Heavy chain CDR3 for antibody 3055 (IGHV1-46)
ARGLTGDHAFDI

SEQ ID NO: 6111 - protein, 9 aa, Homo sapiens
  Light chain CDR3 for antibody 3056 (IGKV1-6)
LQDYNYPYT

SEQ ID NO: 6112 - protein, 14 aa, Homo sapiens
  Heavy chain CDR3 for antibody 3056 (IGHV1-24)
ATWLPLYYYYGMDV

SEQ ID NO: 6113 - protein, 9 aa, Homo sapiens
  Light chain CDR3 for antibody 3057 (IGKV1-5)
LQYDSYPWT

SEQ ID NO: 6114 - protein, 10 aa, Homo sapiens
  Heavy chain CDR3 for antibody 3057 (IGHV3-72)
CRDREGFGDV

SEQ ID NO: 6115 - protein, 9 aa, Homo sapiens
  Light chain CDR3 for antibody 3058 (IGKV6-21)
HQSSSLPFT

SEQ ID NO: 6116 - protein, 14 aa, Homo sapiens
  Heavy chain CDR3 for antibody 3058 (IGHV3-23)
AKGGDILTGYYTDY

SEQ ID NO: 6117 - protein, 9 aa, Homo sapiens
  Light chain CDR3 for antibody 3059 (IGKV6-21)
HQSSSLPYT

SEQ ID NO: 6118 - protein, 17 aa, Homo sapiens
  Heavy chain CDR3 for antibody 3059 (IGHV4-59)
ARRITMVREIIITAFDY

SEQ ID NO: 6119 - protein, 9 aa, Homo sapiens
  Light chain CDR3 for antibody 3060 (IGKV1-17)
LQHNSYPYT

SEQ ID NO: 6120 - protein, 9 aa, Homo sapiens
  Heavy chain CDR3 for antibody 3060 (IGHV3-33)
AANSYGLDY

SEQ ID NO: 6121 - protein, 9 aa, Homo sapiens
  Light chain CDR3 for antibody 3061 (IGKV3D-7)
QQDYTLPLT

SEQ ID NO: 6122 - protein, 14 aa, Homo sapiens
  Heavy chain CDR3 for antibody 3061 (IGHV4-39)
ARDSGYDYYYGMDV

SEQ ID NO: 6123 - protein, 9 aa, Homo sapiens
  Light chain CDR3 for antibody 3062 (IGKV6-21)
HQSSSLPYT

SEQ ID NO: 6124 - protein, 15 aa, Homo sapiens
  Heavy chain CDR3 for antibody 3062 (IGHV3-33)
ARAYDLPHYYYGMDV

SEQ ID NO: 6125 - protein, 9 aa, Homo sapiens
  Light chain CDR3 for antibody 3063 (IGKV3-20)
QQYGSSPYT

SEQ ID NO: 6126 - protein, 10 aa, Homo sapiens
  Heavy chain CDR3 for antibody 3063 (IGHV4-59)
ARQLGNWFDP

SEQ ID NO: 6127 - protein, 8 aa, Homo sapiens
  Light chain CDR3 for antibody 3064 (IGKV1-5)
QQYNSYWT

SEQ ID NO: 6128 - protein, 12 aa, Homo sapiens
  Heavy chain CDR3 for antibody 3064 (IGHV3-33)
ARDPGYYYGLDV

SEQ ID NO: 6129 - protein, 9 aa, Homo sapiens
  Light chain CDR3 for antibody 3065 (IGKV1D-13)
QQFNNYPHT

SEQ ID NO: 6130 - protein, 19 aa, Homo sapiens
  Heavy chain CDR3 for antibody 3065 (IGHV3-33)
ARGVRLRYFDPYYYYGMDV

SEQ ID NO: 6131 - protein, 9 aa, Homo sapiens
  Light chain CDR3 for antibody 3066 (IGKV5-2)
LQHDNFPYT

SEQ ID NO: 6132 - protein, 20 aa, Homo sapiens
  Heavy chain CDR3 for antibody 3066 (IGHV3-33)
ARDWMVRGVIITDYYYGMDV

SEQ ID NO: 6133 - protein, 9 aa, Homo sapiens
  Light chain CDR3 for antibody 3067 (IGKV6-21)
HQSSSLPYT

SEQ ID NO: 6134 - protein, 17 aa, Homo sapiens
  Heavy chain CDR3 for antibody 3067 (IGHV4-59)
AREGADSGIYYHWYFDL

SEQ ID NO: 6135 - protein, 8 aa, Homo sapiens
  Light chain CDR3 for antibody 3068 (IGKV1D-13)
QQFNNYPT

SEQ ID NO: 6136 - protein, 18 aa, Homo sapiens
  Heavy chain CDR3 for antibody 3068 (IGHV4-59)
AREGHYYTSGSYYKAFDY

SEQ ID NO: 6137 - protein, 9 aa, Homo sapiens
  Light chain CDR3 for antibody 3069 (IGKV1-6)
LQDYNYPYT

SEQ ID NO: 6138 - protein, 22 aa, Homo sapiens
  Heavy chain CDR3 for antibody 3069 (IGHV3-11)
AREAYYDILTGYYTGYYYGMDV

SEQ ID NO: 6139 - protein, 9 aa, Homo sapiens
  Light chain CDR3 for antibody 3070 (IGKV1-9)
QQLNSYPLT

SEQ ID NO: 6140 - protein, 20 aa, Homo sapiens
  Heavy chain CDR3 for antibody 3070 (IGHV4-59)
ARDRGYDILTGYYGYYGMDV

SEQ ID NO: 6141 - protein, 10 aa, Homo sapiens
  Light chain CDR3 for antibody 3071 (IGKV1-39)
QQSYSAPLFT

SEQ ID NO: 6142 - protein, 10 aa, Homo sapiens
  Heavy chain CDR3 for antibody 3071 (IGHV3-21)
ARETWWRFDP

SEQ ID NO: 6143 - protein, 9 aa, Homo sapiens
  Light chain CDR3 for antibody 3072 (IGKV1-9)
QQYNSYPFT

SEQ ID NO: 6144 - protein, 13 aa, Homo sapiens
  Heavy chain CDR3 for antibody 3072 (IGHV4-39)
ARRDGGYYGYFDY

SEQ ID NO: 6145 - protein, 9 aa, Homo sapiens
  Light chain CDR3 for antibody 3073 (IGKV1-6)
LQDYKSPFT

SEQ ID NO: 6146 - protein, 13 aa, Homo sapiens
  Heavy chain CDR3 for antibody 3073 (IGHV3-33)
ARDYCGGDCYLDY

SEQ ID NO: 6147 - protein, 9 aa, Homo sapiens
  Light chain CDR3 for antibody 3074 (IGKV2-30)
MQGTHWPLT

SEQ ID NO: 6148 - protein, 13 aa, Homo sapiens
  Heavy chain CDR3 for antibody 3074 (IGHV3-23)
ASTGDSYYYGMDV

SEQ ID NO: 6149 - protein, 9 aa, Homo sapiens
  Light chain CDR3 for antibody 3075 (IGKV1-6)
LQDYNYPYT

SEQ ID NO: 6150 - protein, 12 aa, Homo sapiens
  Heavy chain CDR3 for antibody 3075 (IGHV3-33)
ARDGPVAGLFDY

SEQ ID NO: 6151 - protein, 8 aa, Homo sapiens
  Light chain CDR3 for antibody 3076 (IGKV1-5)
QQYNSYWT

SEQ ID NO: 6152 - protein, 15 aa, Homo sapiens
  Heavy chain CDR3 for antibody 3076 (IGHV3-33)
ARDTGYSSSWNWFDP

SEQ ID NO: 6153 - protein, 10 aa, Homo sapiens
  Light chain CDR3 for antibody 3077 (IGKV3-11)
QQRSNWPIFT

SEQ ID NO: 6154 - protein, 14 aa, Homo sapiens
  Heavy chain CDR3 for antibody 3077 (IGHV3-33)
ARDKSYPLSYGMDV

SEQ ID NO: 6155 - protein, 9 aa, Homo sapiens
  Light chain CDR3 for antibody 3078 (IGKV5-2)
LQHDNFPWT

SEQ ID NO: 6156 - protein, 17 aa, Homo sapiens
  Heavy chain CDR3 for antibody 3078 (IGHV3-33)
ARSPYDILTGYSYYFDY

SEQ ID NO: 6157 - protein, 9 aa, Homo sapiens
  Light chain CDR3 for antibody 3079 (IGKV1-6)
LQDYNYPRT

SEQ ID NO: 6158 - protein, 12 aa, Homo sapiens
  Heavy chain CDR3 for antibody 3079 (IGHV4-34)
ARGYSSSWYFDY

SEQ ID NO: 6159 - protein, 8 aa, Homo sapiens
  Light chain CDR3 for antibody 3080 (IGKV3D-7)
QQDYNLLT

SEQ ID NO: 6160 - protein, 14 aa, Homo sapiens
  Heavy chain CDR3 for antibody 3080 (IGHV3-33)
ARDRIAAASSDFDC

SEQ ID NO: 6161 - protein, 9 aa, Homo sapiens
  Light chain CDR3 for antibody 3081 (IGKV2-30)
MQGTHWPLT

SEQ ID NO: 6162 - protein, 15 aa, Homo sapiens
  Heavy chain CDR3 for antibody 3081 (IGHV3-23)
AKDGSYYDYYYGMDV

SEQ ID NO: 6163 - protein, 9 aa, Homo sapiens
  Light chain CDR3 for antibody 3082 (IGKV2-30)
MQGTHWPLT

SEQ ID NO: 6164 - protein, 8 aa, Homo sapiens
  Heavy chain CDR3 for antibody 3082 (IGHV3-23)
EKSAGEDV

SEQ ID NO: 6165 - protein, 9 aa, Homo sapiens
  Light chain CDR3 for antibody 3083 (IGKV3-11)
QQRSNWPYT

SEQ ID NO: 6166 - protein, 12 aa, Homo sapiens
  Heavy chain CDR3 for antibody 3083 (IGHV3-23)
AKDGWFGESLDY

SEQ ID NO: 6167 - protein, 9 aa, Homo sapiens
  Light chain CDR3 for antibody 3084 (IGKV1-17)
LQHNSYPYT

SEQ ID NO: 6168 - protein, 22 aa, Homo sapiens
  Heavy chain CDR3 for antibody 3084 (IGHV3-11)
AREAYYDILTGYYTGYYYGMDV

SEQ ID NO: 6169 - protein, 9 aa, Homo sapiens
  Light chain CDR3 for antibody 3085 (IGKV5-2)
LQHDNFPWT

SEQ ID NO: 6170 - protein, 18 aa, Homo sapiens
  Heavy chain CDR3 for antibody 3085 (IGHV3-33)
ARDQYSGYDFYYYYGMDV

SEQ ID NO: 6171 - protein, 9 aa, Homo sapiens
  Light chain CDR3 for antibody 3086 (IGKV6-21)
HQSSSLPYT

SEQ ID NO: 6172 - protein, 18 aa, Homo sapiens
  Heavy chain CDR3 for antibody 3086 (IGHV1-8)
ARSRIAAAGIYYYYGMDV

SEQ ID NO: 6173 - protein, 9 aa, Homo sapiens
  Light chain CDR3 for antibody 3087 (IGKV1-27)
QKYNSAPYT

SEQ ID NO: 6174 - protein, 19 aa, Homo sapiens
  Heavy chain CDR3 for antibody 3087 (IGHV3-33)
ARGVRLRYFDPYYYYGMDV

SEQ ID NO: 6175 - protein, 9 aa, Homo sapiens
  Light chain CDR3 for antibody 3088 (IGKV3D-7)
QQDYNLPLT

SEQ ID NO: 6176 - protein, 11 aa, Homo sapiens
  Heavy chain CDR3 for antibody 3088 (IGHV3-33)
ARDKSSGWSDY

SEQ ID NO: 6177 - protein, 9 aa, Homo sapiens
  Light chain CDR3 for antibody 3089 (IGKV1-17)
LQHNSYPYT

SEQ ID NO: 6178 - protein, 17 aa, Homo sapiens
  Heavy chain CDR3 for antibody 3089 (IGHV3-33)
AREGTMVRGYYYYGMDV

SEQ ID NO: 6179 - protein, 9 aa, Homo sapiens
  Light chain CDR3 for antibody 3090 (IGKV6-21)
HQSTSLPFT

SEQ ID NO: 6180 - protein, 13 aa, Homo sapiens
  Heavy chain CDR3 for antibody 3090 (IGHV4-61)
ASRYSSGWYPFDY

SEQ ID NO: 6181 - protein, 9 aa, Homo sapiens
  Light chain CDR3 for antibody 3091 (IGKV3-11)
QQRSNWPLT

SEQ ID NO: 6182 - protein, 18 aa, Homo sapiens
  Heavy chain CDR3 for antibody 3091 (IGHV1-8)
ARSRIAAAGIYYYYGMDV

SEQ ID NO: 6183 - protein, 9 aa, Homo sapiens
  Light chain CDR3 for antibody 3092 (IGKV2-30)
MQGTHWPLT

SEQ ID NO: 6184 - protein, 15 aa, Homo sapiens
  Heavy chain CDR3 for antibody 3092 (IGHV3-33)
ARDRGWKAPGYGMDV

SEQ ID NO: 6185 - protein, 9 aa, Homo sapiens
  Light chain CDR3 for antibody 3093 (IGKV1-39)
QQSYSTPLT

SEQ ID NO: 6186 - protein, 17 aa, Homo sapiens
  Heavy chain CDR3 for antibody 3093 (IGHV3-33)
ARGGAAAGPYLYYGLDV

SEQ ID NO: 6187 - protein, 9 aa, Homo sapiens
  Light chain CDR3 for antibody 3094 (IGKV1-16)
QHYNDYPFT

SEQ ID NO: 6188 - protein, 14 aa, Homo sapiens
  Heavy chain CDR3 for antibody 3094 (IGHV3-33)
ARGAAAGNFYGLDV

SEQ ID NO: 6189 - protein, 9 aa, Homo sapiens
  Light chain CDR3 for antibody 3095 (IGKV1-6)
LQDYKSPFT

SEQ ID NO: 6190 - protein, 13 aa, Homo sapiens
  Heavy chain CDR3 for antibody 3095 (IGHV3-23)
ASPFNWNDGFFDY

SEQ ID NO: 6191 - protein, 9 aa, Homo sapiens
  Light chain CDR3 for antibody 3096 (IGKV3D-20)
QQYGSSPYT

SEQ ID NO: 6192 - protein, 15 aa, Homo sapiens
  Heavy chain CDR3 for antibody 3096 (IGHV3-33)
ARAYDLPHYYYGMDV

SEQ ID NO: 6193 - protein, 9 aa, Homo sapiens
  Light chain CDR3 for antibody 3097 (IGKV2-30)
MQGTHWPLT

SEQ ID NO: 6194 - protein, 17 aa, Homo sapiens
  Heavy chain CDR3 for antibody 3097 (IGHV3-33)
ARGFSGYDGYYYYGMDV

SEQ ID NO: 6195 - protein, 9 aa, Homo sapiens
  Light chain CDR3 for antibody 3098 (IGKV3D-7)
QQDYNLPFT

SEQ ID NO: 6196 - protein, 18 aa, Homo sapiens
  Heavy chain CDR3 for antibody 3098 (IGHV3-33)
ARDHCSGGSCYYYYGMDV

SEQ ID NO: 6197 - protein, 9 aa, Homo sapiens
  Light chain CDR3 for antibody 3099 (IGKV3-11)
QQRSNWPYT

SEQ ID NO: 6198 - protein, 11 aa, Homo sapiens
  Heavy chain CDR3 for antibody 3099 (IGHV3-33)
ARARYTTGLDY

SEQ ID NO: 6199 - protein, 9 aa, Homo sapiens
  Light chain CDR3 for antibody 3100 (IGKV1-17)
LQHNSYPYT

SEQ ID NO: 6200 - protein, 14 aa, Homo sapiens
  Heavy chain CDR3 for antibody 3100 (IGHV3-33)
ARDAMGTSTAWFDP

SEQ ID NO: 6201 - protein, 9 aa, Homo sapiens
  Light chain CDR3 for antibody 3101 (IGKV6-21)
HQSSSLPYT

SEQ ID NO: 6202 - protein, 17 aa, Homo sapiens
  Heavy chain CDR3 for antibody 3101 (IGHV3-33)
ARSGIVGATDYYYGLDV

SEQ ID NO: 6203 - protein, 9 aa, Homo sapiens
  Light chain CDR3 for antibody 3102 (IGKV5-2)
LQHDNFPYT

SEQ ID NO: 6204 - protein, 15 aa, Homo sapiens
  Heavy chain CDR3 for antibody 3102 (IGHV3-33)
ARAYDLPHYYYGMDV

SEQ ID NO: 6205 - protein, 8 aa, Homo sapiens
  Light chain CDR3 for antibody 3103 (IGKV1D-13)
QQFNNYPT

SEQ ID NO: 6206 - protein, 17 aa, Homo sapiens
  Heavy chain CDR3 for antibody 3103 (IGHV1-18)
ARDRAFTMVRGVPPFDY

SEQ ID NO: 6207 - protein, 9 aa, Homo sapiens
  Light chain CDR3 for antibody 3104 (IGKV1-39)
QQSYRTPLT

SEQ ID NO: 6208 - protein, 19 aa, Homo sapiens
  Heavy chain CDR3 for antibody 3104 (IGHV3-33)
ARDSGYSGYDYYYYYGMDV

SEQ ID NO: 6209 - protein, 9 aa, Homo sapiens
  Light chain CDR3 for antibody 3105 (IGKV3-15)
QQYNNWPLT

SEQ ID NO: 6210 - protein, 12 aa, Homo sapiens
  Heavy chain CDR3 for antibody 3105 (IGHV4-39)
ARQMVREGWFDP

SEQ ID NO: 6211 - protein, 9 aa, Homo sapiens
  Light chain CDR3 for antibody 3106 (IGKV1-39)
QQSYSTPFT

SEQ ID NO: 6212 - protein, 14 aa, Homo sapiens
  Heavy chain CDR3 for antibody 3106 (IGHV4-39)
ARRGVVVPPGGMDV

SEQ ID NO: 6213 - protein, 9 aa, Homo sapiens
  Light chain CDR3 for antibody 3107 (IGKV3D-7)
QQDYNLPLT

SEQ ID NO: 6214 - protein, 14 aa, Homo sapiens
  Heavy chain CDR3 for antibody 3107 (IGHV3-33)
ARDNILTAYYLFDY

SEQ ID NO: 6215 - protein, 9 aa, Homo sapiens
  Light chain CDR3 for antibody 3108 (IGKV1-9)
QQLNSYPYT

SEQ ID NO: 6216 - protein, 18 aa, Homo sapiens
  Heavy chain CDR3 for antibody 3108 (IGHV3-33)
ARERYYYGSGSYPDAFDI

SEQ ID NO: 6217 - protein, 9 aa, Homo sapiens
  Light chain CDR3 for antibody 3109 (IGKV3-11)
QQRSNWPWT

SEQ ID NO: 6218 - protein, 17 aa, Homo sapiens
  Heavy chain CDR3 for antibody 3109 (IGHV4-59)
ARDFLVRGEGSYYGMDV

SEQ ID NO: 6219 - protein, 9 aa, Homo sapiens
  Light chain CDR3 for antibody 3110 (IGKV5-2)
LQHDNFPWT

SEQ ID NO: 6220 - protein, 13 aa, Homo sapiens
  Heavy chain CDR3 for antibody 3110 (IGHV4-4)
ARERGIAAAGPDY

SEQ ID NO: 6221 - protein, 8 aa, Homo sapiens
  Light chain CDR3 for antibody 3111 (IGKV3D-7)
QQDYNLLT

SEQ ID NO: 6222 - protein, 12 aa, Homo sapiens
  Heavy chain CDR3 for antibody 3111 (IGHV1-46)
ARGLTGDHAVDI

SEQ ID NO: 6223 - protein, 9 aa, Homo sapiens
  Light chain CDR3 for antibody 3112 (IGKV5-2)
LQHDNFPWT

SEQ ID NO: 6224 - protein, 14 aa, Homo sapiens
  Heavy chain CDR3 for antibody 3112 (IGHV3-33)
AREDYYGPLNWFDP

SEQ ID NO: 6225 - protein, 8 aa, Homo sapiens
  Light chain CDR3 for antibody 3113 (IGKV3D-7)
QQDYNLLT

SEQ ID NO: 6226 - protein, 13 aa, Homo sapiens
  Heavy chain CDR3 for antibody 3113 (IGHV4-59)
ARTMVRGVAPFDY

SEQ ID NO: 6227 - protein, 9 aa, Homo sapiens
  Light chain CDR3 for antibody 3114 (IGKV1-17)
LQHNSYPYT

SEQ ID NO: 6228 - protein, 14 aa, Homo sapiens
  Heavy chain CDR3 for antibody 3114 (IGHV3-33)
AREEDYYYHYDMDV

SEQ ID NO: 6229 - protein, 9 aa, Homo sapiens
  Light chain CDR3 for antibody 3115 (IGKV6-21)
HQSTSLPFT

SEQ ID NO: 6230 - protein, 16 aa, Homo sapiens
  Heavy chain CDR3 for antibody 3115 (IGHV4-59)
ARGRYFDWLLGDVFDI

SEQ ID NO: 6231 - protein, 9 aa, Homo sapiens
  Light chain CDR3 for antibody 3116 (IGKV3-15)
QQYNNWPLT

SEQ ID NO: 6232 - protein, 13 aa, Homo sapiens
  Heavy chain CDR3 for antibody 3116 (IGHV4-59)
ARTMVRGVAPFDY

SEQ ID NO: 6233 - protein, 9 aa, Homo sapiens
  Light chain CDR3 for antibody 3117 (IGKV1D-13)
QQFNNYPYT

SEQ ID NO: 6234 - protein, 17 aa, Homo sapiens
  Heavy chain CDR3 for antibody 3117 (IGHV3-33)
ARQGVLLWFGELYYFDY

SEQ ID NO: 6235 - protein, 10 aa, Homo sapiens
  Light chain CDR3 for antibody 3118 (IGKV3-11)
QQRSNWPIFT

SEQ ID NO: 6236 - protein, 11 aa, Homo sapiens
  Heavy chain CDR3 for antibody 3118 (IGHV3-13)
AREAIIGPFDY

SEQ ID NO: 6237 - protein, 8 aa, Homo sapiens
  Light chain CDR3 for antibody 3119 (IGKV3-20)
QQYGRSFT

SEQ ID NO: 6238 - protein, 17 aa, Homo sapiens
  Heavy chain CDR3 for antibody 3119 (IGHV4-59)
ARDFLVRGEGSYYGMDV

SEQ ID NO: 6239 - protein, 9 aa, Homo sapiens
  Light chain CDR3 for antibody 3120 (IGKV2-30)
MQGTHWPLT

SEQ ID NO: 6240 - protein, 9 aa, Homo sapiens
  Heavy chain CDR3 for antibody 3120 (IGHV3-30)
ARDNWGFDY

SEQ ID NO: 6241 - protein, 9 aa, Homo sapiens
  Light chain CDR3 for antibody 3121 (IGKV1-6)
LQDFHYPWT

SEQ ID NO: 6242 - protein, 13 aa, Homo sapiens
  Heavy chain CDR3 for antibody 3121 (IGHV4-59)
ARDAGYSSSWFDY

SEQ ID NO: 6243 - protein, 9 aa, Homo sapiens
  Light chain CDR3 for antibody 3122 (IGKV1-39)
QQSYSTPLT

SEQ ID NO: 6244 - protein, 16 aa, Homo sapiens
  Heavy chain CDR3 for antibody 3122 (IGHV3-33)
ARDNFGSGSYYSHFHY

SEQ ID NO: 6245 - protein, 9 aa, Homo sapiens
  Light chain CDR3 for antibody 3123 (IGKV1D-13)
QQFNNYPHT

SEQ ID NO: 6246 - protein, 11 aa, Homo sapiens
  Heavy chain CDR3 for antibody 3123 (IGHV3-33)
AREGAVARFDY

SEQ ID NO: 6247 - protein, 8 aa, Homo sapiens
  Light chain CDR3 for antibody 3124 (IGKV1D-13)
QQFNNYPT

SEQ ID NO: 6248 - protein, 15 aa, Homo sapiens
  Heavy chain CDR3 for antibody 3124 (IGHV3-33)
ARDTGYSSSWNWFDP

SEQ ID NO: 6249 - protein, 10 aa, Homo sapiens
  Light chain CDR3 for antibody 3125 (IGKV1-39)
QQSYSTPMYT

SEQ ID NO: 6250 - protein, 13 aa, Homo sapiens
  Heavy chain CDR3 for antibody 3125 (IGHV3-33)
ARDQRYSSGWYDY

SEQ ID NO: 6251 - protein, 9 aa, Homo sapiens
  Light chain CDR3 for antibody 3126 (IGKV1-39)
QQSYSTPLT

SEQ ID NO: 6252 - protein, 18 aa, Homo sapiens
  Heavy chain CDR3 for antibody 3126 (IGHV3-13)
ARDYYGSGSLYYYYGMDV

SEQ ID NO: 6253 - protein, 9 aa, Homo sapiens
  Light chain CDR3 for antibody 3127 (IGKV2-30)
MQGTHWPLT

SEQ ID NO: 6254 - protein, 17 aa, Homo sapiens
  Heavy chain CDR3 for antibody 3127 (IGHV3-33)
ARGEQWLGYYYYYGMDV

SEQ ID NO: 6255 - protein, 9 aa, Homo sapiens
  Light chain CDR3 for antibody 3128 (IGKV1-39)
QQSYSTPLT

SEQ ID NO: 6256 - protein, 17 aa, Homo sapiens
  Heavy chain CDR3 for antibody 3128 (IGHV3-33)
ARDLIGPLSSSWYPFDY

SEQ ID NO: 6257 - protein, 9 aa, Homo sapiens
  Light chain CDR3 for antibody 3129 (IGKV1-39)
QQSYSTPFT

SEQ ID NO: 6258 - protein, 12 aa, Homo sapiens
  Heavy chain CDR3 for antibody 3129 (IGHV4-59)
ARDSGSYYFFDY

SEQ ID NO: 6259 - protein, 8 aa, Homo sapiens
  Light chain CDR3 for antibody 3130 (IGKV1-5)
QQYNSYWT

SEQ ID NO: 6260 - protein, 18 aa, Homo sapiens
  Heavy chain CDR3 for antibody 3130 (IGHV1-46)
ARDGDYVWGSYRSNWFDP

SEQ ID NO: 6261 - protein, 9 aa, Homo sapiens
  Light chain CDR3 for antibody 3131 (IGKV3-15)
QQYNNWPLT

SEQ ID NO: 6262 - protein, 18 aa, Homo sapiens
  Heavy chain CDR3 for antibody 3131 (IGHV4-39)
ARQYYFGSGNYYRGWFDP

SEQ ID NO: 6263 - protein, 9 aa, Homo sapiens
  Light chain CDR3 for antibody 3132 (IGKV3D-20)
QQYGSSPYT

SEQ ID NO: 6264 - protein, 11 aa, Homo sapiens
  Heavy chain CDR3 for antibody 3132 (IGHV3-23)
AKKVYDYGSDY

SEQ ID NO: 6265 - protein, 9 aa, Homo sapiens
  Light chain CDR3 for antibody 3133 (IGKV1-9)
QQLNGYPFT

SEQ ID NO: 6266 - protein, 16 aa, Homo sapiens
  Heavy chain CDR3 for antibody 3133 (IGHV4-59)
ARGRYFEWLLGDVFDI

SEQ ID NO: 6267 - protein, 9 aa, Homo sapiens
  Light chain CDR3 for antibody 3134 (IGKV1-17)
LQHNSYPYT

SEQ ID NO: 6268 - protein, 10 aa, Homo sapiens
  Heavy chain CDR3 for antibody 3134 (IGHV3-33)
ARKGMNAFDI

SEQ ID NO: 6269 - protein, 8 aa, Homo sapiens
  Light chain CDR3 for antibody 3135 (IGKV3D-7)
QQDYNLLT

SEQ ID NO: 6270 - protein, 15 aa, Homo sapiens
  Heavy chain CDR3 for antibody 3135 (IGHV3-33)
ARDSRPEIIGPPFDY

SEQ ID NO: 6271 - protein, 9 aa, Homo sapiens
  Light chain CDR3 for antibody 3136 (IGKV6-21)
HQSSSLPYT

SEQ ID NO: 6272 - protein, 24 aa, Homo sapiens
  Heavy chain CDR3 for antibody 3136 (IGHV1-46)
ARDEARGLLTGYYNMREYYYGMDV

SEQ ID NO: 6273 - protein, 10 aa, Homo sapiens
  Light chain CDR3 for antibody 3137 (IGKV3-11)
QQRSNWPIFT

SEQ ID NO: 6274 - protein, 15 aa, Homo sapiens
  Heavy chain CDR3 for antibody 3137 (IGHV3-33)
ARDTGYSSSWNWFDP

SEQ ID NO: 6275 - protein, 9 aa, Homo sapiens
  Light chain CDR3 for antibody 3138 (IGKV1-27)
QKYNSAPYT

SEQ ID NO: 6276 - protein, 12 aa, Homo sapiens
  Heavy chain CDR3 for antibody 3138 (IGHV4-59)
ARDRSGWAYFDY

SEQ ID NO: 6277 - protein, 9 aa, Homo sapiens
  Light chain CDR3 for antibody 3139 (IGKV1-17)
LQHNSYPYT

SEQ ID NO: 6278 - protein, 13 aa, Homo sapiens
  Heavy chain CDR3 for antibody 3139 (IGHV3-33)
ARDYGDYLNWFDP

SEQ ID NO: 6279 - protein, 9 aa, Homo sapiens
  Light chain CDR3 for antibody 3140 (IGKV5-2)
LQHDNFPYT

SEQ ID NO: 6280 - protein, 14 aa, Homo sapiens
  Heavy chain CDR3 for antibody 3140 (IGHV3-33)
ARSTLVRGANWFDP

SEQ ID NO: 6281 - protein, 9 aa, Homo sapiens
  Light chain CDR3 for antibody 3141 (IGKV1-39)
QQSYSTPLT

SEQ ID NO: 6282 - protein, 9 aa, Homo sapiens
  Heavy chain CDR3 for antibody 3141 (IGHV3-20)
AREYKEFDY

SEQ ID NO: 6283 - protein, 9 aa, Homo sapiens
  Light chain CDR3 for antibody 3142 (IGKV1-27)
QKYNSAPYT

SEQ ID NO: 6284 - protein, 19 aa, Homo sapiens
  Heavy chain CDR3 for antibody 3142 (IGHV1-18)
ARDDILTGYSLYYYYGMDV

SEQ ID NO: 6285 - protein, 9 aa, Homo sapiens
  Light chain CDR3 for antibody 3143 (IGKV1-6)
LQDYNYPYT

SEQ ID NO: 6286 - protein, 12 aa, Homo sapiens
  Heavy chain CDR3 for antibody 3143 (IGHV3-11)
ARVLLWFGETDY

SEQ ID NO: 6287 - protein, 9 aa, Homo sapiens
  Light chain CDR3 for antibody 3144 (IGKV3-11)
QQRSNWPPT

SEQ ID NO: 6288 - protein, 15 aa, Homo sapiens
  Heavy chain CDR3 for antibody 3144 (IGHV3-33)
ARDRGWKAPGYGMDV

SEQ ID NO: 6289 - protein, 9 aa, Homo sapiens
  Light chain CDR3 for antibody 3145 (IGKV1-6)
LQDFHYPWT

SEQ ID NO: 6290 - protein, 13 aa, Homo sapiens
  Heavy chain CDR3 for antibody 3145 (IGHV3-33)
ARDYCGGDCYLDY

SEQ ID NO: 6291 - protein, 8 aa, Homo sapiens
  Light chain CDR3 for antibody 3146 (IGKV1D-13)
QQFNNYPT

SEQ ID NO: 6292 - protein, 13 aa, Homo sapiens
  Heavy chain CDR3 for antibody 3146 (IGHV3-33)
ASTGDSYYYGMDV

SEQ ID NO: 6293 - protein, 9 aa, Homo sapiens
  Light chain CDR3 for antibody 3147 (IGKV5-2)
LQHDNFPYT

SEQ ID NO: 6294 - protein, 22 aa, Homo sapiens
  Heavy chain CDR3 for antibody 3147 (IGHV3-23)
AKDDLPYYDILTHSTTTGGMDV

SEQ ID NO: 6295 - protein, 9 aa, Homo sapiens
  Light chain CDR3 for antibody 3148 (IGKV1-27)
QKYNSAPYT

SEQ ID NO: 6296 - protein, 18 aa, Homo sapiens
  Heavy chain CDR3 for antibody 3148 (IGHV3-33)
VRDRERYGSGSYPDAFDI

SEQ ID NO: 6297 - protein, 9 aa, Homo sapiens
  Light chain CDR3 for antibody 3149 (IGKV1-27)
QKYNSAPYT

SEQ ID NO: 6298 - protein, 13 aa, Homo sapiens
  Heavy chain CDR3 for antibody 3149 (IGHV4-39)
ARHEVMVRGVFDY

SEQ ID NO: 6299 - protein, 9 aa, Homo sapiens
  Light chain CDR3 for antibody 3150 (IGKV6-21)
HQSSSLPYT

SEQ ID NO: 6300 - protein, 14 aa, Homo sapiens
  Heavy chain CDR3 for antibody 3150 (IGHV3-33)
ARDAYDILTGYYDY

SEQ ID NO: 6301 - protein, 9 aa, Homo sapiens
  Light chain CDR3 for antibody 3151 (IGKV1-6)
LQDYNYPWT

SEQ ID NO: 6302 - protein, 9 aa, Homo sapiens
  Heavy chain CDR3 for antibody 3151 (IGHV4-59)
ARSGSGIYT

SEQ ID NO: 6303 - protein, 9 aa, Homo sapiens
  Light chain CDR3 for antibody 3152 (IGKV5-2)
LQHDNFPYT

SEQ ID NO: 6304 - protein, 13 aa, Homo sapiens
  Heavy chain CDR3 for antibody 3152 (IGHV3-66)
ANTGDSYYYGFYV

SEQ ID NO: 6305 - protein, 9 aa, Homo sapiens
  Light chain CDR3 for antibody 3153 (IGKV1-9)
QQLNSYPLT

SEQ ID NO: 6306 - protein, 20 aa, Homo sapiens
  Heavy chain CDR3 for antibody 3153 (IGHV1-8)
ARGDGTMVRGIYYYYYGMDV

SEQ ID NO: 6307 - protein, 9 aa, Homo sapiens
  Light chain CDR3 for antibody 3154 (IGKV3-20)
QQYGRSPRT

SEQ ID NO: 6308 - protein, 18 aa, Homo sapiens
  Heavy chain CDR3 for antibody 3154 (IGHV1-46)
ARDGDYVWGSYRSNWFDP

SEQ ID NO: 6309 - protein, 8 aa, Homo sapiens
  Light chain CDR3 for antibody 3155 (IGKV1-5)
QQYNSYYT

SEQ ID NO: 6310 - protein, 11 aa, Homo sapiens
  Heavy chain CDR3 for antibody 3155 (IGHV4-59)
AREMGHDTFDI

SEQ ID NO: 6311 - protein, 9 aa, Homo sapiens
  Light chain CDR3 for antibody 3156 (IGKV2-30)
MQGTHWPLT

SEQ ID NO: 6312 - protein, 15 aa, Homo sapiens
  Heavy chain CDR3 for antibody 3156 (IGHV3-33)
ARDSRPEIIGPPFDY

SEQ ID NO: 6313 - protein, 8 aa, Homo sapiens
  Light chain CDR3 for antibody 3157 (IGKV1-5)
QQYNSYWT

SEQ ID NO: 6314 - protein, 14 aa, Homo sapiens
  Heavy chain CDR3 for antibody 3157 (IGHV3-33)
AREGYSSNWYDFDY

SEQ ID NO: 6315 - protein, 9 aa, Homo sapiens
  Light chain CDR3 for antibody 3158 (IGKV1-39)
QQSYSTPLT

SEQ ID NO: 6316 - protein, 18 aa, Homo sapiens
  Heavy chain CDR3 for antibody 3158 (IGHV4-59)
ARERGNWNDVDYYYGMDV

SEQ ID NO: 6317 - protein, 9 aa, Homo sapiens
  Light chain CDR3 for antibody 3159 (IGKV3D-20)
QQYGSSPYT

SEQ ID NO: 6318 - protein, 18 aa, Homo sapiens
  Heavy chain CDR3 for antibody 3159 (IGHV3-53)
AKAGDYYVSGSYWGYFDL

SEQ ID NO: 6319 - protein, 9 aa, Homo sapiens
  Light chain CDR3 for antibody 3160 (IGKV1D-16)
QQYNSFPLT

SEQ ID NO: 6320 - protein, 13 aa, Homo sapiens
  Heavy chain CDR3 for antibody 3160 (IGHV4-39)
ARHPPSRDYGMDV

SEQ ID NO: 6321 - protein, 9 aa, Homo sapiens
  Light chain CDR3 for antibody 3161 (IGKV1D-16)
QQYNSYPLT

SEQ ID NO: 6322 - protein, 16 aa, Homo sapiens
  Heavy chain CDR3 for antibody 3161 (IGHV3-33)
AREGGLIAAAGTGFDY

SEQ ID NO: 6323 - protein, 9 aa, Homo sapiens
  Light chain CDR3 for antibody 3162 (IGKV4-1)
QQYYTTPPT

SEQ ID NO: 6324 - protein, 16 aa, Homo sapiens
  Heavy chain CDR3 for antibody 3162 (IGHV3-23)
AKEGMVLRYFDWLWDY

SEQ ID NO: 6325 - protein, 9 aa, Homo sapiens
  Light chain CDR3 for antibody 3163 (IGKV1-6)
LQDFHYPWT

SEQ ID NO: 6326 - protein, 11 aa, Homo sapiens
  Heavy chain CDR3 for antibody 3163 (IGHV3-33)
ARDRSSGPFDY

SEQ ID NO: 6327 - protein, 9 aa, Homo sapiens
  Light chain CDR3 for antibody 3164 (IGKV3D-7)
QQDYNLPLT

SEQ ID NO: 6328 - protein, 13 aa, Homo sapiens
  Heavy chain CDR3 for antibody 3164 (IGHV3-33)
ARRYRSGWYPFDY

SEQ ID NO: 6329 - protein, 9 aa, Homo sapiens
  Light chain CDR3 for antibody 3165 (IGKV1-17)
LQHNSYPWT

SEQ ID NO: 6330 - protein, 24 aa, Homo sapiens
  Heavy chain CDR3 for antibody 3165 (IGHV1-46)
ARDEARGLLTGYYNMREYYYGMDV

SEQ ID NO: 6331 - protein, 8 aa, Homo sapiens
  Light chain CDR3 for antibody 3166 (IGKV3D-7)
QQDYNLLT

SEQ ID NO: 6332 - protein, 10 aa, Homo sapiens
  Heavy chain CDR3 for antibody 3166 (IGHV3-23)
AKEQWLVLDY

SEQ ID NO: 6333 - protein, 9 aa, Homo sapiens
  Light chain CDR3 for antibody 3167 (IGKV3D-7)
QQDYNLPLT

SEQ ID NO: 6334 - protein, 16 aa, Homo sapiens
  Heavy chain CDR3 for antibody 3167 (IGHV4-59)
ARYSGSYYGDYYGMDV

SEQ ID NO: 6335 - protein, 9 aa, Homo sapiens
  Light chain CDR3 for antibody 3168 (IGKV5-2)
LQHDNFPYT

SEQ ID NO: 6336 - protein, 14 aa, Homo sapiens
  Heavy chain CDR3 for antibody 3168 (IGHV3-33)
AREGYSSGWDYFDH

SEQ ID NO: 6337 - protein, 9 aa, Homo sapiens
  Light chain CDR3 for antibody 3169 (IGKV3-20)
QQYGSSPRT

SEQ ID NO: 6338 - protein, 18 aa, Homo sapiens
  Heavy chain CDR3 for antibody 3169 (IGHV3-11)
ARDGYSSGWNYYYFGLDV

SEQ ID NO: 6339 - protein, 9 aa, Homo sapiens
  Light chain CDR3 for antibody 3170 (IGKV1-6)
LQDYNYPWT

SEQ ID NO: 6340 - protein, 10 aa, Homo sapiens
  Heavy chain CDR3 for antibody 3170 (IGHV3-33)
AREGLRYFDH

SEQ ID NO: 6341 - protein, 9 aa, Homo sapiens
  Light chain CDR3 for antibody 3171 (IGKV3D-7)
QQDYNLPLT

SEQ ID NO: 6342 - protein, 9 aa, Homo sapiens
  Heavy chain CDR3 for antibody 3171 (IGHV4-59)
AGGSWDFDY

SEQ ID NO: 6343 - protein, 9 aa, Homo sapiens
  Light chain CDR3 for antibody 3172 (IGKV1-27)
QKYNSAPYT

SEQ ID NO: 6344 - protein, 18 aa, Homo sapiens
  Heavy chain CDR3 for antibody 3172 (IGHV3-23)
AKEGNYYGSGSYWGYFDP

SEQ ID NO: 6345 - protein, 9 aa, Homo sapiens
  Light chain CDR3 for antibody 3173 (IGKV3-11)
QQRSNWPLT

SEQ ID NO: 6346 - protein, 17 aa, Homo sapiens
  Heavy chain CDR3 for antibody 3173 (IGHV3-23)
AKDGSFYSSGWYDAFDI

SEQ ID NO: 6347 - protein, 9 aa, Homo sapiens
  Light chain CDR3 for antibody 3174 (IGKV3D-7)
QQDYNLPLT

SEQ ID NO: 6348 - protein, 13 aa, Homo sapiens
  Heavy chain CDR3 for antibody 3174 (IGHV3-33)
ARIDYYSYYGMDV

SEQ ID NO: 6349 - protein, 9 aa, Homo sapiens
  Light chain CDR3 for antibody 3175 (IGKV3-20)
QQYGSSPYT

SEQ ID NO: 6350 - protein, 8 aa, Homo sapiens
  Heavy chain CDR3 for antibody 3175 (IGHV3-20)
APHWIFDY

SEQ ID NO: 6351 - protein, 9 aa, Homo sapiens
  Light chain CDR3 for antibody 3176 (IGKV1-39)
QQSYSTPLT

SEQ ID NO: 6352 - protein, 14 aa, Homo sapiens
  Heavy chain CDR3 for antibody 3176 (IGHV1-18)
ARCFGSGSYGWFDP

SEQ ID NO: 6353 - protein, 8 aa, Homo sapiens
  Light chain CDR3 for antibody 3177 (IGKV1D-13)
QQFNNYPT

SEQ ID NO: 6354 - protein, 17 aa, Homo sapiens
  Heavy chain CDR3 for antibody 3177 (IGHV3-33)
ARGFSGYDGYYYYGMDV

SEQ ID NO: 6355 - protein, 10 aa, Homo sapiens
  Light chain CDR3 for antibody 3178 (IGKV1-9)
QQLNSFLMYT

SEQ ID NO: 6356 - protein, 13 aa, Homo sapiens
  Heavy chain CDR3 for antibody 3178 (IGHV4-59)
ARDAGYSSSWFDY

SEQ ID NO: 6357 - protein, 9 aa, Homo sapiens
  Light chain CDR3 for antibody 3179 (IGKV1-9)
QQLNSYPLT

SEQ ID NO: 6358 - protein, 12 aa, Homo sapiens
  Heavy chain CDR3 for antibody 3179 (IGHV1-18)
ARVLFDGDYFDY

SEQ ID NO: 6359 - protein, 8 aa, Homo sapiens
  Light chain CDR3 for antibody 3180 (IGKV3D-7)
QQDYNLLT

SEQ ID NO: 6360 - protein, 13 aa, Homo sapiens
  Heavy chain CDR3 for antibody 3180 (IGHV3-33)
ARRATLVRGVFDP

SEQ ID NO: 6361 - protein, 9 aa, Homo sapiens
  Light chain CDR3 for antibody 3181 (IGKV2-30)
MQGTHWPLT

SEQ ID NO: 6362 - protein, 17 aa, Homo sapiens
  Heavy chain CDR3 for antibody 3181 (IGHV1-18)
ARDRAFTMVRGVPPFDY

SEQ ID NO: 6363 - protein, 9 aa, Homo sapiens
  Light chain CDR3 for antibody 3182 (IGKV1-17)
LQHNSYPYT

SEQ ID NO: 6364 - protein, 17 aa, Homo sapiens
  Heavy chain CDR3 for antibody 3182 (IGHV3-33)
ARGYSGYVGYYYYGMDV

SEQ ID NO: 6365 - protein, 11 aa, Homo sapiens
  Light chain CDR3 for antibody 3183 (IGKV3-11)
QQRSNWPPTWT

SEQ ID NO: 6366 - protein, 12 aa, Homo sapiens
  Heavy chain CDR3 for antibody 3183 (IGHV4-59)
ARDRSGWAYFDY

SEQ ID NO: 6367 - protein, 8 aa, Homo sapiens
  Light chain CDR3 for antibody 3184 (IGKV3D-7)
QQDYNLVT

SEQ ID NO: 6368 - protein, 13 aa, Homo sapiens
  Heavy chain CDR3 for antibody 3184 (IGHV4-39)
ARREVVGGRGFDY

SEQ ID NO: 6369 - protein, 9 aa, Homo sapiens
  Light chain CDR3 for antibody 3185 (IGKV1-17)
QQHNSYPYT

SEQ ID NO: 6370 - protein, 9 aa, Homo sapiens
  Heavy chain CDR3 for antibody 3185 (IGHV3-33)
ARGSGWSDY

SEQ ID NO: 6371 - protein, 9 aa, Homo sapiens
  Light chain CDR3 for antibody 3186 (IGKV5-2)
LQHDNFPYT

SEQ ID NO: 6372 - protein, 23 aa, Homo sapiens
  Heavy chain CDR3 for antibody 3186 (IGHV1-18)
ARNLHYDILTGYFPYYFYYGMDV

SEQ ID NO: 6373 - protein, 9 aa, Homo sapiens
  Light chain CDR3 for antibody 3187 (IGKV1-9)
QQLNGYPFT

SEQ ID NO: 6374 - protein, 13 aa, Homo sapiens
  Heavy chain CDR3 for antibody 3187 (IGHV4-39)
ARQWPSGYWYFDL

SEQ ID NO: 6375 - protein, 9 aa, Homo sapiens
  Light chain CDR3 for antibody 3188 (IGKV1-39)
QQYNSYPLT

SEQ ID NO: 6376 - protein, 15 aa, Homo sapiens
  Heavy chain CDR3 for antibody 3188 (IGHV3-23)
AKDGFYYGSGSSFDH

SEQ ID NO: 6377 - protein, 9 aa, Homo sapiens
  Light chain CDR3 for antibody 3189 (IGKV5-2)
LQHDNFPYT

SEQ ID NO: 6378 - protein, 11 aa, Homo sapiens
  Heavy chain CDR3 for antibody 3189 (IGHV3-23)
AKKVYDYGSDY

SEQ ID NO: 6379 - protein, 9 aa, Homo sapiens
  Light chain CDR3 for antibody 3190 (IGKV5-2)
LQHDNFPYT

SEQ ID NO: 6380 - protein, 17 aa, Homo sapiens
  Heavy chain CDR3 for antibody 3190 (IGHV3-23)
AKEGSSSSWYGGLYFDY

SEQ ID NO: 6381 - protein, 10 aa, Homo sapiens
  Light chain CDR3 for antibody 3191 (IGKV1-39)
QQSYSTPMYT

SEQ ID NO: 6382 - protein, 15 aa, Homo sapiens
  Heavy chain CDR3 for antibody 3191 (IGHV3-33)
ARDHLTGYYYYGMDV

SEQ ID NO: 6383 - protein, 9 aa, Homo sapiens
  Light chain CDR3 for antibody 3192 (IGKV3D-7)
QQDYEFPLT

SEQ ID NO: 6384 - protein, 13 aa, Homo sapiens
  Heavy chain CDR3 for antibody 3192 (IGHV4-39)
ARHVLLWFGEFDP

SEQ ID NO: 6385 - protein, 9 aa, Homo sapiens
  Light chain CDR3 for antibody 3193 (IGKV1-6)
LQDYKSPFT

SEQ ID NO: 6386 - protein, 13 aa, Homo sapiens
  Heavy chain CDR3 for antibody 3193 (IGHV4-34)
ASNFYYYYYGMDV

SEQ ID NO: 6387 - protein, 9 aa, Homo sapiens
  Light chain CDR3 for antibody 3194 (IGKV1-39)
QQSYSTPLT

SEQ ID NO: 6388 - protein, 11 aa, Homo sapiens
  Heavy chain CDR3 for antibody 3194 (IGHV1-24)
ATELGLYYFDY

SEQ ID NO: 6389 - protein, 8 aa, Homo sapiens
  Light chain CDR3 for antibody 3195 (IGKV3D-7)
QQDYNLLT

SEQ ID NO: 6390 - protein, 13 aa, Homo sapiens
  Heavy chain CDR3 for antibody 3195 (IGHV3-33)
ARRYRSGWYPFDY

SEQ ID NO: 6391 - protein, 9 aa, Homo sapiens
  Light chain CDR3 for antibody 3196 (IGKV2-30)
MQGTHWPLT

SEQ ID NO: 6392 - protein, 14 aa, Homo sapiens
  Heavy chain CDR3 for antibody 3196 (IGHV3-33)
ARAISGSSYWYFDL

SEQ ID NO: 6393 - protein, 9 aa, Homo sapiens
  Light chain CDR3 for antibody 3197 (IGKV3-20)
QQYGSSPYT

SEQ ID NO: 6394 - protein, 15 aa, Homo sapiens
  Heavy chain CDR3 for antibody 3197 (IGHV3-33)
ARRSILTGSYWYFDL

SEQ ID NO: 6395 - protein, 8 aa, Homo sapiens
  Light chain CDR3 for antibody 3198 (IGKV3D-7)
QQDYNLLT

SEQ ID NO: 6396 - protein, 12 aa, Homo sapiens
  Heavy chain CDR3 for antibody 3198 (IGHV3-33)
TRGYSSKSYFDY

SEQ ID NO: 6397 - protein, 9 aa, Homo sapiens
  Light chain CDR3 for antibody 3199 (IGKV1-9)
QQLNTYPYT

SEQ ID NO: 6398 - protein, 18 aa, Homo sapiens
  Heavy chain CDR3 for antibody 3199 (IGHV3-23)
AKDRITGTTYGYYSGLDV

SEQ ID NO: 6399 - protein, 9 aa, Homo sapiens
  Light chain CDR3 for antibody 3200 (IGKV3-11)
QQRSNWPYT

SEQ ID NO: 6400 - protein, 17 aa, Homo sapiens
  Heavy chain CDR3 for antibody 3200 (IGHV3-23)
AKDGIGELSYYYYGMDV

SEQ ID NO: 6401 - protein, 9 aa, Homo sapiens
  Light chain CDR3 for antibody 3201 (IGKV1-39)
QQSYRTPLT

SEQ ID NO: 6402 - protein, 23 aa, Homo sapiens
  Heavy chain CDR3 for antibody 3201 (IGHV3-11)
ARDEGVTMVRGVISYYYYYGMDV

SEQ ID NO: 6403 - protein, 9 aa, Homo sapiens
  Light chain CDR3 for antibody 3202 (IGKV1-6)
LQDYNYPWT

SEQ ID NO: 6404 - protein, 14 aa, Homo sapiens
  Heavy chain CDR3 for antibody 3202 (IGHV3-20)
ARGGSSGWYDWFDP

SEQ ID NO: 6405 - protein, 9 aa, Homo sapiens
  Light chain CDR3 for antibody 3203 (IGKV3-20)
QQYGSSPLT

SEQ ID NO: 6406 - protein, 18 aa, Homo sapiens
  Heavy chain CDR3 for antibody 3203 (IGHV3-33)
ARDQYSGYDFYYYYGMDV

SEQ ID NO: 6407 - protein, 9 aa, Homo sapiens
  Light chain CDR3 for antibody 3204 (IGKV1D-13)
QQFNNYPYT

SEQ ID NO: 6408 - protein, 15 aa, Homo sapiens
  Heavy chain CDR3 for antibody 3204 (IGHV3-23)
AKEFTMVRGVITPDY

SEQ ID NO: 6409 - protein, 9 aa, Homo sapiens
  Light chain CDR3 for antibody 3205 (IGKV1-9)
QQLISYPLT

SEQ ID NO: 6410 - protein, 10 aa, Homo sapiens
  Heavy chain CDR3 for antibody 3205 (IGHV3-33)
ARENSTPLDY

SEQ ID NO: 6411 - protein, 9 aa, Homo sapiens
  Light chain CDR3 for antibody 3206 (IGKV5-2)
LQHDNFPYT

SEQ ID NO: 6412 - protein, 17 aa, Homo sapiens
  Heavy chain CDR3 for antibody 3206 (IGHV3-33)
ARDPARGNVRSFYGLDV

SEQ ID NO: 6413 - protein, 9 aa, Homo sapiens
  Light chain CDR3 for antibody 3207 (IGKV3-20)
QQYGSSPYT

SEQ ID NO: 6414 - protein, 12 aa, Homo sapiens
  Heavy chain CDR3 for antibody 3207 (IGHV3-33)
AKDPGWQQLAEY

SEQ ID NO: 6415 - protein, 9 aa, Homo sapiens
  Light chain CDR3 for antibody 3208 (IGKV6-21)
HQSSSLPYT

SEQ ID NO: 6416 - protein, 17 aa, Homo sapiens
  Heavy chain CDR3 for antibody 3208 (IGHV3-23)
AKEGSSSSWYGGLYFDY

SEQ ID NO: 6417 - protein, 8 aa, Homo sapiens
  Light chain CDR3 for antibody 3209 (IGKV3-11)
QQRSNWLT

SEQ ID NO: 6418 - protein, 16 aa, Homo sapiens
  Heavy chain CDR3 for antibody 3209 (IGHV3-23)
AKEGMVLRYFDWLWDY

SEQ ID NO: 6419 - protein, 9 aa, Homo sapiens
  Light chain CDR3 for antibody 3210 (IGKV3-20)
QQYGSSPLT

SEQ ID NO: 6420 - protein, 22 aa, Homo sapiens
  Heavy chain CDR3 for antibody 3210 (IGHV1-18)
ARDRYNNQSKYRNRDYYYGLDV

SEQ ID NO: 6421 - protein, 8 aa, Homo sapiens
  Light chain CDR3 for antibody 3211 (IGKV3D-7)
QQDYNLLT

SEQ ID NO: 6422 - protein, 8 aa, Homo sapiens
  Heavy chain CDR3 for antibody 3211 (IGHV3-23)
EKSAGEDV

SEQ ID NO: 6423 - protein, 9 aa, Homo sapiens
  Light chain CDR3 for antibody 3212 (IGKV1D-16)
QQYNSYPLT

SEQ ID NO: 6424 - protein, 16 aa, Homo sapiens
  Heavy chain CDR3 for antibody 3212 (IGHV4-39)
ARRVPYYDILTGYLDY

SEQ ID NO: 6425 - protein, 9 aa, Homo sapiens
  Light chain CDR3 for antibody 3213 (IGKV1-17)
LQHNSYPYT

SEQ ID NO: 6426 - protein, 12 aa, Homo sapiens
  Heavy chain CDR3 for antibody 3213 (IGHV3-33)
ARDIVGTSYFDY

SEQ ID NO: 6427 - protein, 9 aa, Homo sapiens
  Light chain CDR3 for antibody 3214 (IGKV1-17)
LQHNSYPRT

SEQ ID NO: 6428 - protein, 13 aa, Homo sapiens
  Heavy chain CDR3 for antibody 3214 (IGHV3-23)
AREYCSSTSCYDH

SEQ ID NO: 6429 - protein, 9 aa, Homo sapiens
  Light chain CDR3 for antibody 3215 (IGKV6-21)
HQSSSLPYT

SEQ ID NO: 6430 - protein, 17 aa, Homo sapiens
  Heavy chain CDR3 for antibody 3215 (IGHV3-33)
ARCGYSSSWYDPYYFDY

SEQ ID NO: 6431 - protein, 9 aa, Homo sapiens
  Light chain CDR3 for antibody 3216 (IGKV1D-13)
QQFNNYPHT

SEQ ID NO: 6432 - protein, 13 aa, Homo sapiens
  Heavy chain CDR3 for antibody 3216 (IGHV3-33)
ARDYTMVRGVMNY

SEQ ID NO: 6433 - protein, 9 aa, Homo sapiens
  Light chain CDR3 for antibody 3217 (IGKV1-39)
QQSYSTPIT

SEQ ID NO: 6434 - protein, 12 aa, Homo sapiens
  Heavy chain CDR3 for antibody 3217 (IGHV1-46)
ARGLIGDHAVDI

SEQ ID NO: 6435 - protein, 9 aa, Homo sapiens
  Light chain CDR3 for antibody 3218 (IGKV1D-13)
QQFNNYPHT

SEQ ID NO: 6436 - protein, 18 aa, Homo sapiens
  Heavy chain CDR3 for antibody 3218 (IGHV3-33)
AREGDYYGSGGFPNWFDP

SEQ ID NO: 6437 - protein, 9 aa, Homo sapiens
  Light chain CDR3 for antibody 3219 (IGKV5-2)
LQHDNFPYT

SEQ ID NO: 6438 - protein, 16 aa, Homo sapiens
  Heavy chain CDR3 for antibody 3219 (IGHV3-20)
ARDSSSLDYYYYGMDV

SEQ ID NO: 6439 - protein, 9 aa, Homo sapiens
  Light chain CDR3 for antibody 3220 (IGKV1-27)
QKYNSAPYT

SEQ ID NO: 6440 - protein, 10 aa, Homo sapiens
  Heavy chain CDR3 for antibody 3220 (IGHV3-33)
ARDLGWSFDF

SEQ ID NO: 6441 - protein, 9 aa, Homo sapiens
  Light chain CDR3 for antibody 3221 (IGKV1-16)
QQYNRYPYT

SEQ ID NO: 6442 - protein, 13 aa, Homo sapiens
  Heavy chain CDR3 for antibody 3221 (IGHV4-39)
ARHVLLWFGEFDP

SEQ ID NO: 6443 - protein, 9 aa, Homo sapiens
  Light chain CDR3 for antibody 3222 (IGKV2-30)
MQGTHWPLT

SEQ ID NO: 6444 - protein, 12 aa, Homo sapiens
  Heavy chain CDR3 for antibody 3222 (IGHV3-33)
ARESGGSYSFDY

SEQ ID NO: 6445 - protein, 9 aa, Homo sapiens
  Light chain CDR3 for antibody 3223 (IGKV1D-13)
QQFFNYPYT

SEQ ID NO: 6446 - protein, 11 aa, Homo sapiens
  Heavy chain CDR3 for antibody 3223 (IGHV3-33)
ARDPRIAGFDC

SEQ ID NO: 6447 - protein, 8 aa, Homo sapiens
  Light chain CDR3 for antibody 3224 (IGKV1-5)
QQYNSYWT

SEQ ID NO: 6448 - protein, 18 aa, Homo sapiens
  Heavy chain CDR3 for antibody 3224 (IGHV3-33)
ARDGYSGYDYYYYYGMDV

SEQ ID NO: 6449 - protein, 9 aa, Homo sapiens
  Light chain CDR3 for antibody 3225 (IGKV5-2)
LQHDNFPYT

SEQ ID NO: 6450 - protein, 15 aa, Homo sapiens
  Heavy chain CDR3 for antibody 3225 (IGHV3-7)
ARDRAVAGTIHAFDI

SEQ ID NO: 6451 - protein, 10 aa, Homo sapiens
  Light chain CDR3 for antibody 3226 (IGKV3-15)
QQYNNWPPLT

SEQ ID NO: 6452 - protein, 12 aa, Homo sapiens
  Heavy chain CDR3 for antibody 3226 (IGHV1-46)
ARGLTGDHAVDI

SEQ ID NO: 6453 - protein, 9 aa, Homo sapiens
  Light chain CDR3 for antibody 3227 (IGKV5-2)
LQHDNFPWT

SEQ ID NO: 6454 - protein, 14 aa, Homo sapiens
  Heavy chain CDR3 for antibody 3227 (IGHV3-33)
ARDLNYDILNGGGY

SEQ ID NO: 6455 - protein, 9 aa, Homo sapiens
  Light chain CDR3 for antibody 3228 (IGKV1-9)
QQLISYPLT

SEQ ID NO: 6456 - protein, 14 aa, Homo sapiens
  Heavy chain CDR3 for antibody 3228 (IGHV3-33)
AREGYSSNWYDFDY

SEQ ID NO: 6457 - protein, 9 aa, Homo sapiens
  Light chain CDR3 for antibody 3229 (IGKV1D-13)
QQFNNYPHT

SEQ ID NO: 6458 - protein, 12 aa, Homo sapiens
  Heavy chain CDR3 for antibody 3229 (IGHV4-59)
ARDRSGWAYFDY

SEQ ID NO: 6459 - protein, 9 aa, Homo sapiens
  Light chain CDR3 for antibody 3230 (IGKV5-2)
LQHDNFPYT

SEQ ID NO: 6460 - protein, 15 aa, Homo sapiens
  Heavy chain CDR3 for antibody 3230 (IGHV3-64)
ARDGLRYFDWLFPWY

SEQ ID NO: 6461 - protein, 9 aa, Homo sapiens
  Light chain CDR3 for antibody 3231 (IGKV2D-28)
MQALQTPPT

SEQ ID NO: 6462 - protein, 11 aa, Homo sapiens
  Heavy chain CDR3 for antibody 3231 (IGHV3-33)
ARDRSSGPFDY

SEQ ID NO: 6463 - protein, 9 aa, Homo sapiens
  Light chain CDR3 for antibody 3232 (IGKV6-21)
HQSTSLPFT

SEQ ID NO: 6464 - protein, 18 aa, Homo sapiens
  Heavy chain CDR3 for antibody 3232 (IGHV4-59)
AREGDYVWGSYRSNWFDP

SEQ ID NO: 6465 - protein, 9 aa, Homo sapiens
  Light chain CDR3 for antibody 3233 (IGKV3-15)
QQYNNWPFT

SEQ ID NO: 6466 - protein, 9 aa, Homo sapiens
  Heavy chain CDR3 for antibody 3233 (IGHV1-8)
ARGRLDFDY

SEQ ID NO: 6467 - protein, 9 aa, Homo sapiens
  Light chain CDR3 for antibody 3234 (IGKV2-30)
MQGTHWPLT

SEQ ID NO: 6468 - protein, 15 aa, Homo sapiens
  Heavy chain CDR3 for antibody 3234 (IGHV3-33)
ARRICSGGSCSLFDY

SEQ ID NO: 6469 - protein, 9 aa, Homo sapiens
  Light chain CDR3 for antibody 3235 (IGKV2-30)
MQGTHWPLT

SEQ ID NO: 6470 - protein, 13 aa, Homo sapiens
  Heavy chain CDR3 for antibody 3235 (IGHV3-33)
ARTDYYFYYGLDV

SEQ ID NO: 6471 - protein, 9 aa, Homo sapiens
  Light chain CDR3 for antibody 3236 (IGKV5-2)
LQHDNFPYT

SEQ ID NO: 6472 - protein, 14 aa, Homo sapiens
  Heavy chain CDR3 for antibody 3236 (IGHV3-23)
AKDDIVRATGAFDI

SEQ ID NO: 6473 - protein, 9 aa, Homo sapiens
  Light chain CDR3 for antibody 3237 (IGKV1-6)
LQDYNYPRT

SEQ ID NO: 6474 - protein, 18 aa, Homo sapiens
  Heavy chain CDR3 for antibody 3237 (IGHV1-24)
ATGLRYFDWPIISNLFDY

SEQ ID NO: 6475 - protein, 9 aa, Homo sapiens
  Light chain CDR3 for antibody 3238 (IGKV1-6)
LQDYNYPYT

SEQ ID NO: 6476 - protein, 16 aa, Homo sapiens
  Heavy chain CDR3 for antibody 3238 (IGHV3-11)
ARYHYGSGSYYNVGDY

SEQ ID NO: 6477 - protein, 9 aa, Homo sapiens
  Light chain CDR3 for antibody 3239 (IGKV1-39)
QQSYSTPLT

SEQ ID NO: 6478 - protein, 18 aa, Homo sapiens
  Heavy chain CDR3 for antibody 3239 (IGHV6-1)
ARDQYSYGPYYYYYGMDV

SEQ ID NO: 6479 - protein, 9 aa, Homo sapiens
  Light chain CDR3 for antibody 3240 (IGKV3-11)
QQRSNWPLT

SEQ ID NO: 6480 - protein, 13 aa, Homo sapiens
  Heavy chain CDR3 for antibody 3240 (IGHV4-39)
APFRVMVRGVLDY

SEQ ID NO: 6481 - protein, 9 aa, Homo sapiens
  Light chain CDR3 for antibody 3241 (IGKV1-27)
QKYNSAPYT

SEQ ID NO: 6482 - protein, 11 aa, Homo sapiens
  Heavy chain CDR3 for antibody 3241 (IGHV1-24)
ATELGLYYFDY

SEQ ID NO: 6483 - protein, 9 aa, Homo sapiens
  Light chain CDR3 for antibody 3242 (IGKV1-6)
LQDYNYPYT

SEQ ID NO: 6484 - protein, 19 aa, Homo sapiens
  Heavy chain CDR3 for antibody 3242 (IGHV3-20)
ARDLCSSTSCYGYYYGMDV

SEQ ID NO: 6485 - protein, 9 aa, Homo sapiens
  Light chain CDR3 for antibody 3243 (IGKV3-11)
QQRSNWPLT

SEQ ID NO: 6486 - protein, 9 aa, Homo sapiens
  Heavy chain CDR3 for antibody 3243 (IGHV3-30)
ARDYFHYDY

SEQ ID NO: 6487 - protein, 9 aa, Homo sapiens
  Light chain CDR3 for antibody 3244 (IGKV3D-7)
QQDYNLPLT

SEQ ID NO: 6488 - protein, 12 aa, Homo sapiens
  Heavy chain CDR3 for antibody 3244 (IGHV3-33)
ARGYFGSGYAHF

SEQ ID NO: 6489 - protein, 9 aa, Homo sapiens
  Light chain CDR3 for antibody 3245 (IGKV1-9)
QQLNSYPLT

SEQ ID NO: 6490 - protein, 18 aa, Homo sapiens
  Heavy chain CDR3 for antibody 3245 (IGHV3-23)
AKVGDFFASGNYWDYFDY

SEQ ID NO: 6491 - protein, 9 aa, Homo sapiens
  Light chain CDR3 for antibody 3246 (IGKV3-15)
QQYNNWPLT

SEQ ID NO: 6492 - protein, 7 aa, Homo sapiens
  Heavy chain CDR3 for antibody 3246 (IGHV1-46)
AREGGDY

SEQ ID NO: 6493 - protein, 9 aa, Homo sapiens
  Light chain CDR3 for antibody 3247 (IGKV1-6)
LQDYNYPWT

SEQ ID NO: 6494 - protein, 14 aa, Homo sapiens
  Heavy chain CDR3 for antibody 3247 (IGHV3-33)
ARDAMGTSTAWFDP

SEQ ID NO: 6495 - protein, 9 aa, Homo sapiens
  Light chain CDR3 for antibody 3248 (IGKV5-2)
LQHDNFPWT

SEQ ID NO: 6496 - protein, 15 aa, Homo sapiens
  Heavy chain CDR3 for antibody 3248 (IGHV1-2)
ARDLGYYGSGSRMDV

SEQ ID NO: 6497 - protein, 8 aa, Homo sapiens
  Light chain CDR3 for antibody 3249 (IGKV2D-28)
MQALQTPT

SEQ ID NO: 6498 - protein, 11 aa, Homo sapiens
  Heavy chain CDR3 for antibody 3249 (IGHV3-33)
ARDRSSGPFDY

SEQ ID NO: 6499 - protein, 10 aa, Homo sapiens
  Light chain CDR3 for antibody 3250 (IGKV1-39)
QQSYSTPMYT

SEQ ID NO: 6500 - protein, 18 aa, Homo sapiens
  Heavy chain CDR3 for antibody 3250 (IGHV3-33)
ARDGYSGYDYYYYYGMDV

SEQ ID NO: 6501 - protein, 8 aa, Homo sapiens
  Light chain CDR3 for antibody 3251 (IGKV1-5)
QQYNSYYT

SEQ ID NO: 6502 - protein, 14 aa, Homo sapiens
  Heavy chain CDR3 for antibody 3251 (IGHV3-33)
ARDRIAAASSDFDC

SEQ ID NO: 6503 - protein, 10 aa, Homo sapiens
  Light chain CDR3 for antibody 3252 (IGKV3-11)
QQRSNWPIFT

SEQ ID NO: 6504 - protein, 11 aa, Homo sapiens
  Heavy chain CDR3 for antibody 3252 (IGHV3-33)
ARDKSSGWSDY

SEQ ID NO: 6505 - protein, 9 aa, Homo sapiens
  Light chain CDR3 for antibody 3253 (IGKV6-21)
HQSSSLPYT

SEQ ID NO: 6506 - protein, 14 aa, Homo sapiens
  Heavy chain CDR3 for antibody 3253 (IGHV3-33)
ARDRDIMATSYFDY

SEQ ID NO: 6507 - protein, 9 aa, Homo sapiens
  Light chain CDR3 for antibody 3254 (IGKV1-27)
QKYNSAPYT

SEQ ID NO: 6508 - protein, 16 aa, Homo sapiens
  Heavy chain CDR3 for antibody 3254 (IGHV3-30)
ARDIAVAGHVYYGMDV

SEQ ID NO: 6509 - protein, 10 aa, Homo sapiens
  Light chain CDR3 for antibody 3255 (IGKV1-17)
LQHNSYPMYT

SEQ ID NO: 6510 - protein, 11 aa, Homo sapiens
  Heavy chain CDR3 for antibody 3255 (IGHV4-59)
AREMGHDTFDI

SEQ ID NO: 6511 - protein, 9 aa, Homo sapiens
  Light chain CDR3 for antibody 3256 (IGKV1-9)
QQLNTYPWT

SEQ ID NO: 6512 - protein, 15 aa, Homo sapiens
  Heavy chain CDR3 for antibody 3256 (IGHV3-30)
ARGAMVRGVDYGMDV

SEQ ID NO: 6513 - protein, 9 aa, Homo sapiens
  Light chain CDR3 for antibody 3257 (IGKV1-6)
LQDYNYPYT

SEQ ID NO: 6514 - protein, 17 aa, Homo sapiens
  Heavy chain CDR3 for antibody 3257 (IGHV3-66)
ARVQYDILTGYSPYFDN

SEQ ID NO: 6515 - protein, 9 aa, Homo sapiens
  Light chain CDR3 for antibody 3258 (IGKV1-39)
QQSYSTPLT

SEQ ID NO: 6516 - protein, 10 aa, Homo sapiens
  Heavy chain CDR3 for antibody 3258 (IGHV3-74)
ARENWGGFDY

SEQ ID NO: 6517 - protein, 9 aa, Homo sapiens
  Light chain CDR3 for antibody 3259 (IGKV1-6)
QQYNSYPLT

SEQ ID NO: 6518 - protein, 16 aa, Homo sapiens
  Heavy chain CDR3 for antibody 3259 (IGHV3-33)
ARDAGYPNYDYYGMDV

SEQ ID NO: 6519 - protein, 9 aa, Homo sapiens
  Light chain CDR3 for antibody 3260 (IGKV1D-13)
QHFNNYMYT

SEQ ID NO: 6520 - protein, 18 aa, Homo sapiens
  Heavy chain CDR3 for antibody 3260 (IGHV4-59)
AREGDYVWGSYRPNWFDP

SEQ ID NO: 6521 - protein, 9 aa, Homo sapiens
  Light chain CDR3 for antibody 3261 (IGKV3D-7)
QQDYNLPLT

SEQ ID NO: 6522 - protein, 10 aa, Homo sapiens
  Heavy chain CDR3 for antibody 3261 (IGHV3-33)
AREWFGGFDI

SEQ ID NO: 6523 - protein, 9 aa, Homo sapiens
  Light chain CDR3 for antibody 3262 (IGKV1-9)
QQLNSYPLT

SEQ ID NO: 6524 - protein, 9 aa, Homo sapiens
  Heavy chain CDR3 for antibody 3262 (IGHV4-59)
ARSGSGIYT

SEQ ID NO: 6525 - protein, 9 aa, Homo sapiens
  Light chain CDR3 for antibody 3263 (IGKV5-2)
LQHDNFPWT

SEQ ID NO: 6526 - protein, 10 aa, Homo sapiens
  Heavy chain CDR3 for antibody 3263 (IGHV4-39)
ASSNWNDGPL

SEQ ID NO: 6527 - protein, 9 aa, Homo sapiens
  Light chain CDR3 for antibody 3264 (IGKV1-6)
LQDYNYPWT

SEQ ID NO: 6528 - protein, 15 aa, Homo sapiens
  Heavy chain CDR3 for antibody 3264 (IGHV3-33)
ARRVCSGGSCSLFDY

SEQ ID NO: 6529 - protein, 9 aa, Homo sapiens
  Light chain CDR3 for antibody 3265 (IGKV1-9)
QQLNSYPWT

SEQ ID NO: 6530 - protein, 13 aa, Homo sapiens
  Heavy chain CDR3 for antibody 3265 (IGHV3-33)
ARAFIMVRGVIDY

SEQ ID NO: 6531 - protein, 9 aa, Homo sapiens
  Light chain CDR3 for antibody 3266 (IGKV5-2)
LQHDNFPWT

SEQ ID NO: 6532 - protein, 12 aa, Homo sapiens
  Heavy chain CDR3 for antibody 3266 (IGHV1-18)
ARRDGSGTSFDY

SEQ ID NO: 6533 - protein, 9 aa, Homo sapiens
  Light chain CDR3 for antibody 3267 (IGKV1-39)
QQSYSTPLT

SEQ ID NO: 6534 - protein, 20 aa, Homo sapiens
  Heavy chain CDR3 for antibody 3267 (IGHV3-33)
AREDYYGSGSYYPAYNWFDP

SEQ ID NO: 6535 - protein, 9 aa, Homo sapiens
  Light chain CDR3 for antibody 3268 (IGKV6-21)
HQSSSLPYT

SEQ ID NO: 6536 - protein, 15 aa, Homo sapiens
  Heavy chain CDR3 for antibody 3268 (IGHV1-24)
ATHWDLRYYYYGMDV

SEQ ID NO: 6537 - protein, 9 aa, Homo sapiens
  Light chain CDR3 for antibody 3269 (IGKV3-11)
QQRSNWPPT

SEQ ID NO: 6538 - protein, 17 aa, Homo sapiens
  Heavy chain CDR3 for antibody 3269 (IGHV3-33)
VREGGLLWVGELSLFDY

SEQ ID NO: 6539 - protein, 9 aa, Homo sapiens
  Light chain CDR3 for antibody 3270 (IGKV5-2)
LQHDNFPYT

SEQ ID NO: 6540 - protein, 16 aa, Homo sapiens
  Heavy chain CDR3 for antibody 3270 (IGHV3-33)
ARDGSMVRRIHDAFDF

SEQ ID NO: 6541 - protein, 8 aa, Homo sapiens
  Light chain CDR3 for antibody 3271 (IGKV3-11)
QQRSNWLT

SEQ ID NO: 6542 - protein, 9 aa, Homo sapiens
  Heavy chain CDR3 for antibody 3271 (IGHV1-18)
ARGKDWFDP

SEQ ID NO: 6543 - protein, 9 aa, Homo sapiens
  Light chain CDR3 for antibody 3272 (IGKV1D-13)
QQFNNYPYT

SEQ ID NO: 6544 - protein, 17 aa, Homo sapiens
  Heavy chain CDR3 for antibody 3272 (IGHV3-30)
ARDGVGATSYYYYGMDV

SEQ ID NO: 6545 - protein, 9 aa, Homo sapiens
  Light chain CDR3 for antibody 3273 (IGKV2-30)
MQGTHWPLT

SEQ ID NO: 6546 - protein, 10 aa, Homo sapiens
  Heavy chain CDR3 for antibody 3273 (IGHV3-33)
ARENSTPLDY

SEQ ID NO: 6547 - protein, 9 aa, Homo sapiens
  Light chain CDR3 for antibody 3274 (IGKV6-21)
HQSSSLPYT

SEQ ID NO: 6548 - protein, 18 aa, Homo sapiens
  Heavy chain CDR3 for antibody 3274 (IGHV3-33)
ARGGYDILTGYYRTGMDV

SEQ ID NO: 6549 - protein, 8 aa, Homo sapiens
  Light chain CDR3 for antibody 3275 (IGKV1D-13)
QQFNNYPT

SEQ ID NO: 6550 - protein, 13 aa, Homo sapiens
  Heavy chain CDR3 for antibody 3275 (IGHV3-23)
ASPFNWNDGFFDY

SEQ ID NO: 6551 - protein, 11 aa, Homo sapiens
  Light chain CDR3 for antibody 3276 (IGKV3-11)
QQRSNWPPTWT

SEQ ID NO: 6552 - protein, 13 aa, Homo sapiens
  Heavy chain CDR3 for antibody 3276 (IGHV3-33)
ARDYCGGDCYLDY

SEQ ID NO: 6553 - protein, 9 aa, Homo sapiens
  Light chain CDR3 for antibody 3277 (IGKV5-2)
LQHDNFPYT

SEQ ID NO: 6554 - protein, 13 aa, Homo sapiens
  Heavy chain CDR3 for antibody 3277 (IGHV3-33)
ARDSSSWYHWFDP

SEQ ID NO: 6555 - protein, 8 aa, Homo sapiens
  Light chain CDR3 for antibody 3278 (IGKV6-21)
QQSSSLST

SEQ ID NO: 6556 - protein, 15 aa, Homo sapiens
  Heavy chain CDR3 for antibody 3278 (IGHV3-20)
ARDRGSSGWYDAFDI

SEQ ID NO: 6557 - protein, 9 aa, Homo sapiens
  Light chain CDR3 for antibody 3279 (IGKV1-17)
LQHNSYPYT

SEQ ID NO: 6558 - protein, 14 aa, Homo sapiens
  Heavy chain CDR3 for antibody 3279 (IGHV1-24)
ATWLPLYYYYGMDV

SEQ ID NO: 6559 - protein, 9 aa, Homo sapiens
  Light chain CDR3 for antibody 3280 (IGKV5-2)
LQHDNFPWT

SEQ ID NO: 6560 - protein, 8 aa, Homo sapiens
  Heavy chain CDR3 for antibody 3280 (IGHV3-20)
APHWIFDY

SEQ ID NO: 6561 - protein, 9 aa, Homo sapiens
  Light chain CDR3 for antibody 3281 (IGKV1D-16)
QQYNSYPYT

SEQ ID NO: 6562 - protein, 14 aa, Homo sapiens
  Heavy chain CDR3 for antibody 3281 (IGHV1-18)
ARDQPTVPSGYFDY

SEQ ID NO: 6563 - protein, 9 aa, Homo sapiens
  Light chain CDR3 for antibody 3282 (IGKV3-20)
QQYGSSPYT

SEQ ID NO: 6564 - protein, 18 aa, Homo sapiens
  Heavy chain CDR3 for antibody 3282 (IGHV3-33)
ARGGVLYDILTGFYGMDV

SEQ ID NO: 6565 - protein, 9 aa, Homo sapiens
  Light chain CDR3 for antibody 3283 (IGKV1-39)
QQSYSTPLT

SEQ ID NO: 6566 - protein, 12 aa, Homo sapiens
  Heavy chain CDR3 for antibody 3283 (IGHV3-23)
AKEGLGSDYEPY

SEQ ID NO: 6567 - protein, 9 aa, Homo sapiens
  Light chain CDR3 for antibody 3284 (IGKV5-2)
LQHDNFPYT

SEQ ID NO: 6568 - protein, 14 aa, Homo sapiens
  Heavy chain CDR3 for antibody 3284 (IGHV3-33)
ARDGYDILTGPMDV

SEQ ID NO: 6569 - protein, 9 aa, Homo sapiens
  Light chain CDR3 for antibody 3285 (IGKV1-39)
QQSYRTPLT

SEQ ID NO: 6570 - protein, 15 aa, Homo sapiens
  Heavy chain CDR3 for antibody 3285 (IGHV3-74)
ARGSGSHYHYYGMDV

SEQ ID NO: 6571 - protein, 9 aa, Homo sapiens
  Light chain CDR3 for antibody 3286 (IGKV2-30)
MQGTHWPLT

SEQ ID NO: 6572 - protein, 9 aa, Homo sapiens
  Heavy chain CDR3 for antibody 3286 (IGHV4-59)
AREGGSGSL

SEQ ID NO: 6573 - protein, 10 aa, Homo sapiens
  Light chain CDR3 for antibody 3287 (IGKV3-11)
QQRSNWPIFT

SEQ ID NO: 6574 - protein, 14 aa, Homo sapiens
  Heavy chain CDR3 for antibody 3287 (IGHV3-33)
ARDNILTAYYLFDY

SEQ ID NO: 6575 - protein, 10 aa, Homo sapiens
  Light chain CDR3 for antibody 3288 (IGKV3-11)
QQRSNWPIFT

SEQ ID NO: 6576 - protein, 13 aa, Homo sapiens
  Heavy chain CDR3 for antibody 3288 (IGHV3-53)
ARSGSYWGYYFDY

SEQ ID NO: 6577 - protein, 9 aa, Homo sapiens
  Light chain CDR3 for antibody 3289 (IGKV1-33)
QQYDNLPFT

SEQ ID NO: 6578 - protein, 12 aa, Homo sapiens
  Heavy chain CDR3 for antibody 3289 (IGHV3-33)
ARGYFGSGYAHF

SEQ ID NO: 6579 - protein, 10 aa, Homo sapiens
  Light chain CDR3 for antibody 3290 (IGKV1-39)
QQSYSTPMYT

SEQ ID NO: 6580 - protein, 12 aa, Homo sapiens
  Heavy chain CDR3 for antibody 3290 (IGHV3-13)
AREAGIPDAFDI

SEQ ID NO: 6581 - protein, 9 aa, Homo sapiens
  Light chain CDR3 for antibody 3291 (IGKV1-33)
QQYDNLPFT

SEQ ID NO: 6582 - protein, 14 aa, Homo sapiens
  Heavy chain CDR3 for antibody 3291 (IGHV3-33)
ARGAAAGNFYGLDV

SEQ ID NO: 6583 - protein, 9 aa, Homo sapiens
  Light chain CDR3 for antibody 3292 (IGKV3-20)
QQYGSSPYT

SEQ ID NO: 6584 - protein, 10 aa, Homo sapiens
  Heavy chain CDR3 for antibody 3292 (IGHV3-30)
ARVVDTAMAY

SEQ ID NO: 6585 - protein, 11 aa, Homo sapiens
  Light chain CDR3 for antibody 3293 (IGKV3-11)
QQRSNWPPTWT

SEQ ID NO: 6586 - protein, 12 aa, Homo sapiens
  Heavy chain CDR3 for antibody 3293 (IGHV4-61)
ARVYSSGWLFDY

SEQ ID NO: 6587 - protein, 9 aa, Homo sapiens
  Light chain CDR3 for antibody 3294 (IGKV1-9)
QQLNSYPLT

SEQ ID NO: 6588 - protein, 17 aa, Homo sapiens
  Heavy chain CDR3 for antibody 3294 (IGHV3-33)
ARDSYDILTGYYKPFDY

SEQ ID NO: 6589 - protein, 9 aa, Homo sapiens
  Light chain CDR3 for antibody 3295 (IGKV1-17)
LQHNSYPYT

SEQ ID NO: 6590 - protein, 18 aa, Homo sapiens
  Heavy chain CDR3 for antibody 3295 (IGHV3-33)
AREGYFGSGSYYRNWFDP

SEQ ID NO: 6591 - protein, 9 aa, Homo sapiens
  Light chain CDR3 for antibody 3296 (IGKV1D-13)
QQFNNYPYT

SEQ ID NO: 6592 - protein, 18 aa, Homo sapiens
  Heavy chain CDR3 for antibody 3296 (IGHV3-13)
ARDYYGSGSLYYYYGMDV

SEQ ID NO: 6593 - protein, 8 aa, Homo sapiens
  Light chain CDR3 for antibody 3297 (IGKV3D-7)
QQDYNLLT

SEQ ID NO: 6594 - protein, 13 aa, Homo sapiens
  Heavy chain CDR3 for antibody 3297 (IGHV3-33)
ARKAYGDYFYFDY

SEQ ID NO: 6595 - protein, 9 aa, Homo sapiens
  Light chain CDR3 for antibody 3298 (IGKV1-27)
QKYNSAPYT

SEQ ID NO: 6596 - protein, 21 aa, Homo sapiens
  Heavy chain CDR3 for antibody 3298 (IGHV3-23)
AKDIDYYGSGSYPLYYYGMDV

SEQ ID NO: 6597 - protein, 9 aa, Homo sapiens
  Light chain CDR3 for antibody 3299 (IGKV1D-13)
QRFNNYLYT

SEQ ID NO: 6598 - protein, 13 aa, Homo sapiens
  Heavy chain CDR3 for antibody 3299 (IGHV3-33)
ARDQRYSSGWYDY

SEQ ID NO: 6599 - protein, 9 aa, Homo sapiens
  Light chain CDR3 for antibody 3300 (IGKV1-17)
LQHNSYPYT

SEQ ID NO: 6600 - protein, 17 aa, Homo sapiens
  Heavy chain CDR3 for antibody 3300 (IGHV3-23)
AKGDYYGSGSYSTFFDY

SEQ ID NO: 6601 - protein, 9 aa, Homo sapiens
  Light chain CDR3 for antibody 3301 (IGKV1D-13)
QQFNNYPHT

SEQ ID NO: 6602 - protein, 23 aa, Homo sapiens
  Heavy chain CDR3 for antibody 3301 (IGHV3-11)
ARDEGVTMVRGVISYYYYYGMDV

SEQ ID NO: 6603 - protein, 9 aa, Homo sapiens
  Light chain CDR3 for antibody 3302 (IGKV1-6)
LQDYNYPYT

SEQ ID NO: 6604 - protein, 10 aa, Homo sapiens
  Heavy chain CDR3 for antibody 3302 (IGHV4-31)
ARHGVAGTNY

SEQ ID NO: 6605 - protein, 9 aa, Homo sapiens
  Light chain CDR3 for antibody 3303 (IGKV2-30)
MQGTHWPLT

SEQ ID NO: 6606 - protein, 11 aa, Homo sapiens
  Heavy chain CDR3 for antibody 3303 (IGHV3-33)
AREAANWGFDY

SEQ ID NO: 6607 - protein, 9 aa, Homo sapiens
  Light chain CDR3 for antibody 3304 (IGKV3D-20)
QQYGSSPYT

SEQ ID NO: 6608 - protein, 11 aa, Homo sapiens
  Heavy chain CDR3 for antibody 3304 (IGHV3-23)
AKAGIVGCLDV

SEQ ID NO: 6609 - protein, 8 aa, Homo sapiens
  Light chain CDR3 for antibody 3305 (IGKV1-5)
QQYNSYYT

SEQ ID NO: 6610 - protein, 15 aa, Homo sapiens
  Heavy chain CDR3 for antibody 3305 (IGHV1-18)
ARGYCSSTSCYYFDY

SEQ ID NO: 6611 - protein, 10 aa, Homo sapiens
  Light chain CDR3 for antibody 3306 (IGKV1-17)
LQHNSYPMYT

SEQ ID NO: 6612 - protein, 13 aa, Homo sapiens
  Heavy chain CDR3 for antibody 3306 (IGHV3-11)
ARDGGAAAGTWDS

SEQ ID NO: 6613 - protein, 9 aa, Homo sapiens
  Light chain CDR3 for antibody 3307 (IGKV2-30)
MQGTHWPLT

SEQ ID NO: 6614 - protein, 13 aa, Homo sapiens
  Heavy chain CDR3 for antibody 3307 (IGHV3-53)
ARSGSYWGYYFDY

SEQ ID NO: 6615 - protein, 9 aa, Homo sapiens
  Light chain CDR3 for antibody 3308 (IGKV1D-16)
QQYNSYPLT

SEQ ID NO: 6616 - protein, 16 aa, Homo sapiens
  Heavy chain CDR3 for antibody 3308 (IGHV4-61)
ARGRYFEWLLGDVLDI

SEQ ID NO: 6617 - protein, 9 aa, Homo sapiens
  Light chain CDR3 for antibody 3309 (IGKV1-39)
QQSYRTPLT

SEQ ID NO: 6618 - protein, 15 aa, Homo sapiens
  Heavy chain CDR3 for antibody 3309 (IGHV3-23)
AKDGGWNYYYYGMDV

SEQ ID NO: 6619 - protein, 9 aa, Homo sapiens
  Light chain CDR3 for antibody 3310 (IGKV2-30)
MQGTHWPLT

SEQ ID NO: 6620 - protein, 9 aa, Homo sapiens
  Heavy chain CDR3 for antibody 3310 (IGHV3-33)
ARATVGVDY

SEQ ID NO: 6621 - protein, 9 aa, Homo sapiens
  Light chain CDR3 for antibody 3311 (IGKV3D-7)
QQDYNLPLT

SEQ ID NO: 6622 - protein, 16 aa, Homo sapiens
  Heavy chain CDR3 for antibody 3311 (IGHV3-33)
ARAVYYGSGSSLIMDV

SEQ ID NO: 6623 - protein, 9 aa, Homo sapiens
  Light chain CDR3 for antibody 3312 (IGKV3-15)
QQYNNWPLT

SEQ ID NO: 6624 - protein, 17 aa, Homo sapiens
  Heavy chain CDR3 for antibody 3312 (IGHV4-59)
ARRITMVREIIITAFDY

SEQ ID NO: 6625 - protein, 9 aa, Homo sapiens
  Light chain CDR3 for antibody 3313 (IGKV1-39)
QQSYSTPLT

SEQ ID NO: 6626 - protein, 17 aa, Homo sapiens
  Heavy chain CDR3 for antibody 3313 (IGHV3-33)
ARCGYSSSWYDPYYFDY

SEQ ID NO: 6627 - protein, 9 aa, Homo sapiens
  Light chain CDR3 for antibody 3314 (IGKV1-6)
LQDYKSPFT

SEQ ID NO: 6628 - protein, 18 aa, Homo sapiens
  Heavy chain CDR3 for antibody 3314 (IGHV3-33)
ARDGYSGYDYYYYYGMDV

SEQ ID NO: 6629 - protein, 9 aa, Homo sapiens
  Light chain CDR3 for antibody 3315 (IGKV5-2)
LQHDNFPYT

SEQ ID NO: 6630 - protein, 12 aa, Homo sapiens
  Heavy chain CDR3 for antibody 3315 (IGHV3-33)
VRKWFGELYFDY

SEQ ID NO: 6631 - protein, 8 aa, Homo sapiens
  Light chain CDR3 for antibody 3316 (IGKV1D-13)
QQFNNYPT

SEQ ID NO: 6632 - protein, 14 aa, Homo sapiens
  Heavy chain CDR3 for antibody 3316 (IGHV3-33)
ARDWNDVYYYGMDV

SEQ ID NO: 6633 - protein, 9 aa, Homo sapiens
  Light chain CDR3 for antibody 3317 (IGKV5-2)
LQHDNFPYT

SEQ ID NO: 6634 - protein, 14 aa, Homo sapiens
  Heavy chain CDR3 for antibody 3317 (IGHV3-33)
ARDLDIMATSPFAY

SEQ ID NO: 6635 - protein, 9 aa, Homo sapiens
  Light chain CDR3 for antibody 3318 (IGKV1-9)
QQLNSYPLT

SEQ ID NO: 6636 - protein, 18 aa, Homo sapiens
  Heavy chain CDR3 for antibody 3318 (IGHV1-24)
ATGLRYFDWPIISNLFDY

SEQ ID NO: 6637 - protein, 10 aa, Homo sapiens
  Light chain CDR3 for antibody 3319 (IGKV1-27)
QKYNSAPMYT

SEQ ID NO: 6638 - protein, 18 aa, Homo sapiens
  Heavy chain CDR3 for antibody 3319 (IGHV4-59)
AREGDYVWGSYRPNWFDP

SEQ ID NO: 6639 - protein, 9 aa, Homo sapiens
  Light chain CDR3 for antibody 3320 (IGKV1-6)
LQDYNYPYT

SEQ ID NO: 6640 - protein, 18 aa, Homo sapiens
  Heavy chain CDR3 for antibody 3320 (IGHV3-11)
ARDGYFSGWNYYYFGMDV

SEQ ID NO: 6641 - protein, 9 aa, Homo sapiens
  Light chain CDR3 for antibody 3321 (IGKV3-15)
QQYNNWPRT

SEQ ID NO: 6642 - protein, 14 aa, Homo sapiens
  Heavy chain CDR3 for antibody 3321 (IGHV3-33)
ARAISGSSYWYFDL

SEQ ID NO: 6643 - protein, 9 aa, Homo sapiens
  Light chain CDR3 for antibody 3322 (IGKV3-20)
QQYGSSPYT

SEQ ID NO: 6644 - protein, 19 aa, Homo sapiens
  Heavy chain CDR3 for antibody 3322 (IGHV3-23)
AKDGRSGSYDYYYYYGMDV

SEQ ID NO: 6645 - protein, 9 aa, Homo sapiens
  Light chain CDR3 for antibody 3323 (IGKV5-2)
LQHDNFPWT

SEQ ID NO: 6646 - protein, 11 aa, Homo sapiens
  Heavy chain CDR3 for antibody 3323 (IGHV1-46)
AREEDLGAFDI

SEQ ID NO: 6647 - protein, 10 aa, Homo sapiens
  Light chain CDR3 for antibody 3324 (IGKV1-39)
QQSYSSPMYT

SEQ ID NO: 6648 - protein, 11 aa, Homo sapiens
  Heavy chain CDR3 for antibody 3324 (IGHV3-33)
ARDRVLAPFDF

SEQ ID NO: 6649 - protein, 8 aa, Homo sapiens
  Light chain CDR3 for antibody 3325 (IGKV3D-7)
QQDYNLLT

SEQ ID NO: 6650 - protein, 13 aa, Homo sapiens
  Heavy chain CDR3 for antibody 3325 (IGHV3-11)
ARDEGYRGYVLDT

SEQ ID NO: 6651 - protein, 9 aa, Homo sapiens
  Light chain CDR3 for antibody 3326 (IGKV1D-13)
QQFNNYPHT

SEQ ID NO: 6652 - protein, 17 aa, Homo sapiens
  Heavy chain CDR3 for antibody 3326 (IGHV3-33)
ARDLIGPLSSSWYPFDY

SEQ ID NO: 6653 - protein, 9 aa, Homo sapiens
  Light chain CDR3 for antibody 3327 (IGKV5-2)
LQHDNFPYT

SEQ ID NO: 6654 - protein, 16 aa, Homo sapiens
  Heavy chain CDR3 for antibody 3327 (IGHV3-33)
ARAYYYGSGSYPHFQH

SEQ ID NO: 6655 - protein, 10 aa, Homo sapiens
  Light chain CDR3 for antibody 3328 (IGKV3-11)
QQRSNWPIFT

SEQ ID NO: 6656 - protein, 12 aa, Homo sapiens
  Heavy chain CDR3 for antibody 3328 (IGHV4-39)
ARHGSGSSYFDY

SEQ ID NO: 6657 - protein, 8 aa, Homo sapiens
  Light chain CDR3 for antibody 3329 (IGKV3D-7)
QQDYNLLT

SEQ ID NO: 6658 - protein, 14 aa, Homo sapiens
  Heavy chain CDR3 for antibody 3329 (IGHV3-33)
ARDKTYPLSYGMDV

SEQ ID NO: 6659 - protein, 9 aa, Homo sapiens
  Light chain CDR3 for antibody 3330 (IGKV1-37)
QRTYNAPFT

SEQ ID NO: 6660 - protein, 11 aa, Homo sapiens
  Heavy chain CDR3 for antibody 3330 (IGHV3-33)
ARDRSSGPFDY

SEQ ID NO: 6661 - protein, 9 aa, Homo sapiens
  Light chain CDR3 for antibody 3331 (IGKV1-39)
QQSYSTPLT

SEQ ID NO: 6662 - protein, 17 aa, Homo sapiens
  Heavy chain CDR3 for antibody 3331 (IGHV3-64)
ARERYYGSGSYYNWFDP

SEQ ID NO: 6663 - protein, 9 aa, Homo sapiens
  Light chain CDR3 for antibody 3332 (IGKV1-17)
LQHNSYPYT

SEQ ID NO: 6664 - protein, 10 aa, Homo sapiens
  Heavy chain CDR3 for antibody 3332 (IGHV3-33)
ARDGLRYFDW

SEQ ID NO: 6665 - protein, 8 aa, Homo sapiens
  Light chain CDR3 for antibody 3333 (IGKV3D-7)
QQDYNLLT

SEQ ID NO: 6666 - protein, 17 aa, Homo sapiens
  Heavy chain CDR3 for antibody 3333 (IGHV3-33)
VREGGLLWVGELSLFDY

SEQ ID NO: 6667 - protein, 9 aa, Homo sapiens
  Light chain CDR3 for antibody 3334 (IGKV1-6)
LQDYNYPYT

SEQ ID NO: 6668 - protein, 19 aa, Homo sapiens
  Heavy chain CDR3 for antibody 3334 (IGHV4-39)
ARLDYDFLTDYYRPYFFAY

SEQ ID NO: 6669 - protein, 9 aa, Homo sapiens
  Light chain CDR3 for antibody 3335 (IGKV1-9)
QQLISYPLT

SEQ ID NO: 6670 - protein, 13 aa, Homo sapiens
  Heavy chain CDR3 for antibody 3335 (IGHV3-33)
ARKAYGDYFYFDY

SEQ ID NO: 6671 - protein, 9 aa, Homo sapiens
  Light chain CDR3 for antibody 3336 (IGKV1-17)
LQHNSYPRT

SEQ ID NO: 6672 - protein, 14 aa, Homo sapiens
  Heavy chain CDR3 for antibody 3336 (IGHV3-33)
VSAISGSSYWYFAL

SEQ ID NO: 6673 - protein, 8 aa, Homo sapiens
  Light chain CDR3 for antibody 3337 (IGKV1D-13)
QQFNNYPT

SEQ ID NO: 6674 - protein, 13 aa, Homo sapiens
  Heavy chain CDR3 for antibody 3337 (IGHV3-53)
ARSGSYWGYYFDY

SEQ ID NO: 6675 - protein, 9 aa, Homo sapiens
  Light chain CDR3 for antibody 3338 (IGKV6-21)
HQSSSLPYT

SEQ ID NO: 6676 - protein, 15 aa, Homo sapiens
  Heavy chain CDR3 for antibody 3338 (IGHV4-39)
ARRDYDILTGYLFDY

SEQ ID NO: 6677 - protein, 10 aa, Homo sapiens
  Light chain CDR3 for antibody 3339 (IGKV1-39)
QQSYSTPMYT

SEQ ID NO: 6678 - protein, 12 aa, Homo sapiens
  Heavy chain CDR3 for antibody 3339 (IGHV1-46)
ARGLTGDHAVDI

SEQ ID NO: 6679 - protein, 9 aa, Homo sapiens
  Light chain CDR3 for antibody 3340 (IGKV2D-28)
MQVLQTPFT

SEQ ID NO: 6680 - protein, 16 aa, Homo sapiens
  Heavy chain CDR3 for antibody 3340 (IGHV4-59)
ARGRYFEWLLGDVFDI

SEQ ID NO: 6681 - protein, 9 aa, Homo sapiens
  Light chain CDR3 for antibody 3341 (IGKV1D-13)
QQFNNYPYT

SEQ ID NO: 6682 - protein, 16 aa, Homo sapiens
  Heavy chain CDR3 for antibody 3341 (IGHV1-24)
ATEDSSSYYYYYGMDV

SEQ ID NO: 6683 - protein, 9 aa, Homo sapiens
  Light chain CDR3 for antibody 3342 (IGKV1D-13)
QQFNNYPHT

SEQ ID NO: 6684 - protein, 17 aa, Homo sapiens
  Heavy chain CDR3 for antibody 3342 (IGHV3-23)
AKDGIGELSYYYYGMDV

SEQ ID NO: 6685 - protein, 9 aa, Homo sapiens
  Light chain CDR3 for antibody 3343 (IGKV1-9)
QQLISYPLT

SEQ ID NO: 6686 - protein, 14 aa, Homo sapiens
  Heavy chain CDR3 for antibody 3343 (IGHV3-33)
ARAGSGYDRDWFDP

SEQ ID NO: 6687 - protein, 9 aa, Homo sapiens
  Light chain CDR3 for antibody 3344 (IGKV3-11)
QQRSNWPYT

SEQ ID NO: 6688 - protein, 9 aa, Homo sapiens
  Heavy chain CDR3 for antibody 3344 (IGHV3-33)
ARATVGVDY

SEQ ID NO: 6689 - protein, 9 aa, Homo sapiens
  Light chain CDR3 for antibody 3345 (IGKV1-6)
LQDYNYPYT

SEQ ID NO: 6690 - protein, 16 aa, Homo sapiens
  Heavy chain CDR3 for antibody 3345 (IGHV4-39)
ARHPLILTGYPNWFDP

SEQ ID NO: 6691 - protein, 9 aa, Homo sapiens
  Light chain CDR3 for antibody 3346 (IGKV1-6)
LQDYNYPYT

SEQ ID NO: 6692 - protein, 17 aa, Homo sapiens
  Heavy chain CDR3 for antibody 3346 (IGHV3-33)
ARDPWIYSGYGGGWFDP

SEQ ID NO: 6693 - protein, 9 aa, Homo sapiens
  Light chain CDR3 for antibody 3347 (IGKV6-21)
HQSSSLPYT

SEQ ID NO: 6694 - protein, 17 aa, Homo sapiens
  Heavy chain CDR3 for antibody 3347 (IGHV3-23)
AKDRDWKDGYYYFGMDV

SEQ ID NO: 6695 - protein, 9 aa, Homo sapiens
  Light chain CDR3 for antibody 3348 (IGKV3D-20)
QQYGSSPYT

SEQ ID NO: 6696 - protein, 15 aa, Homo sapiens
  Heavy chain CDR3 for antibody 3348 (IGHV3-23)
AKDPRGYYYYYGMDV

SEQ ID NO: 6697 - protein, 9 aa, Homo sapiens
  Light chain CDR3 for antibody 3349 (IGKV1D-16)
QQYNSYPLT

SEQ ID NO: 6698 - protein, 17 aa, Homo sapiens
  Heavy chain CDR3 for antibody 3349 (IGHV3-33)
VRCGYSSSWYDPYYFDY

SEQ ID NO: 6699 - protein, 10 aa, Homo sapiens
  Light chain CDR3 for antibody 3350 (IGKV3-11)
QQRSNWPIFT

SEQ ID NO: 6700 - protein, 12 aa, Homo sapiens
  Heavy chain CDR3 for antibody 3350 (IGHV3-33)
ARDRAYRGSLDY

SEQ ID NO: 6701 - protein, 9 aa, Homo sapiens
  Light chain CDR3 for antibody 3351 (IGKV1-39)
QQSYSTPLT

SEQ ID NO: 6702 - protein, 10 aa, Homo sapiens
  Heavy chain CDR3 for antibody 3351 (IGHV3-33)
AREWFGGFDI

SEQ ID NO: 6703 - protein, 9 aa, Homo sapiens
  Light chain CDR3 for antibody 3352 (IGKV1-39)
QQSYSTPLT

SEQ ID NO: 6704 - protein, 23 aa, Homo sapiens
  Heavy chain CDR3 for antibody 3352 (IGHV4-59)
ARERTYSDILPGYYEDYYYGMDV

SEQ ID NO: 6705 - protein, 9 aa, Homo sapiens
  Light chain CDR3 for antibody 3353 (IGKV3D-7)
QQDYNLPYT

SEQ ID NO: 6706 - protein, 14 aa, Homo sapiens
  Heavy chain CDR3 for antibody 3353 (IGHV3-33)
ARDKTYPLSYGMDV

SEQ ID NO: 6707 - protein, 9 aa, Homo sapiens
  Light chain CDR3 for antibody 3354 (IGKV1-17)
LQHNSYPYT

SEQ ID NO: 6708 - protein, 13 aa, Homo sapiens
  Heavy chain CDR3 for antibody 3354 (IGHV3-33)
AKRYSSGWYPFDF

SEQ ID NO: 6709 - protein, 9 aa, Homo sapiens
  Light chain CDR3 for antibody 3355 (IGKV1-9)
QQLKSYLYT

SEQ ID NO: 6710 - protein, 17 aa, Homo sapiens
  Heavy chain CDR3 for antibody 3355 (IGHV4-59)
ARDFLVRGEGSYYGMDV

SEQ ID NO: 6711 - protein, 9 aa, Homo sapiens
  Light chain CDR3 for antibody 3356 (IGKV3D-20)
QQYGSSPYT

SEQ ID NO: 6712 - protein, 19 aa, Homo sapiens
  Heavy chain CDR3 for antibody 3356 (IGHV3-33)
ARDRYYDILTGYSSYYFDY

SEQ ID NO: 6713 - protein, 9 aa, Homo sapiens
  Light chain CDR3 for antibody 3357 (IGKV1-39)
QQSYRTPLT

SEQ ID NO: 6714 - protein, 11 aa, Homo sapiens
  Heavy chain CDR3 for antibody 3357 (IGHV3-33)
AREGAVARFDY

SEQ ID NO: 6715 - protein, 9 aa, Homo sapiens
  Light chain CDR3 for antibody 3358 (IGKV5-2)
LQHDNFPYT

SEQ ID NO: 6716 - protein, 16 aa, Homo sapiens
  Heavy chain CDR3 for antibody 3358 (IGHV3-33)
ARDRGGMTMVRGGFDY

SEQ ID NO: 6717 - protein, 10 aa, Homo sapiens
  Light chain CDR3 for antibody 3359 (IGKV1-39)
QQSYSTPMYT

SEQ ID NO: 6718 - protein, 12 aa, Homo sapiens
  Heavy chain CDR3 for antibody 3359 (IGHV3-33)
ARESGGSYSFDY

SEQ ID NO: 6719 - protein, 9 aa, Homo sapiens
  Light chain CDR3 for antibody 3360 (IGKV1-9)
QQLISYPLT

SEQ ID NO: 6720 - protein, 13 aa, Homo sapiens
  Heavy chain CDR3 for antibody 3360 (IGHV3-23)
ARAFFMVRGVIDF

SEQ ID NO: 6721 - protein, 9 aa, Homo sapiens
  Light chain CDR3 for antibody 3361 (IGKV2-30)
MQGTHWPLT

SEQ ID NO: 6722 - protein, 10 aa, Homo sapiens
  Heavy chain CDR3 for antibody 3361 (IGHV3-23)
AKDHYGDYPY

SEQ ID NO: 6723 - protein, 8 aa, Homo sapiens
  Light chain CDR3 for antibody 3362 (IGKV3-11)
QQRSNWLT

SEQ ID NO: 6724 - protein, 11 aa, Homo sapiens
  Heavy chain CDR3 for antibody 3362 (IGHV3-33)
ARDRSSGPFDY

SEQ ID NO: 6725 - protein, 9 aa, Homo sapiens
  Light chain CDR3 for antibody 3363 (IGKV1-9)
QQLNSYPYT

SEQ ID NO: 6726 - protein, 15 aa, Homo sapiens
  Heavy chain CDR3 for antibody 3363 (IGHV3-74)
SRGSGSHYFYYGMDV

SEQ ID NO: 6727 - protein, 9 aa, Homo sapiens
  Light chain CDR3 for antibody 3364 (IGKV1-6)
LQDYNYPYT

SEQ ID NO: 6728 - protein, 10 aa, Homo sapiens
  Heavy chain CDR3 for antibody 3364 (IGHV3-33)
ARDHGYYFDY

SEQ ID NO: 6729 - protein, 9 aa, Homo sapiens
  Light chain CDR3 for antibody 3365 (IGKV3D-20)
QQYGSSPYT

SEQ ID NO: 6730 - protein, 15 aa, Homo sapiens
  Heavy chain CDR3 for antibody 3365 (IGHV3-33)
ARGGTGYYSYWYFDL

SEQ ID NO: 6731 - protein, 9 aa, Homo sapiens
  Light chain CDR3 for antibody 3366 (IGKV3-20)
QQYGSSPYT

SEQ ID NO: 6732 - protein, 18 aa, Homo sapiens
  Heavy chain CDR3 for antibody 3366 (IGHV3-33)
ARERGYYGSDIYPAAFDI

SEQ ID NO: 6733 - protein, 9 aa, Homo sapiens
  Light chain CDR3 for antibody 3367 (IGKV3-11)
QQRSNWPPT

SEQ ID NO: 6734 - protein, 11 aa, Homo sapiens
  Heavy chain CDR3 for antibody 3367 (IGHV3-33)
ARDILTGFLDH

SEQ ID NO: 6735 - protein, 9 aa, Homo sapiens
  Light chain CDR3 for antibody 3368 (IGKV6-21)
HQSSSLPYT

SEQ ID NO: 6736 - protein, 18 aa, Homo sapiens
  Heavy chain CDR3 for antibody 3368 (IGHV3-33)
VREGGYYGSGSYPDAFDI

SEQ ID NO: 6737 - protein, 10 aa, Homo sapiens
  Light chain CDR3 for antibody 3369 (IGKV3-11)
QQRSNWPMFT

SEQ ID NO: 6738 - protein, 12 aa, Homo sapiens
  Heavy chain CDR3 for antibody 3369 (IGHV1-24)
ASDWAYYYGMDV

SEQ ID NO: 6739 - protein, 9 aa, Homo sapiens
  Light chain CDR3 for antibody 3370 (IGKV1-17)
LQHNSYPYT

SEQ ID NO: 6740 - protein, 11 aa, Homo sapiens
  Heavy chain CDR3 for antibody 3370 (IGHV3-33)
ARDRATAGLDY

SEQ ID NO: 6741 - protein, 9 aa, Homo sapiens
  Light chain CDR3 for antibody 3371 (IGKV5-2)
LQHDNFPYT

SEQ ID NO: 6742 - protein, 15 aa, Homo sapiens
  Heavy chain CDR3 for antibody 3371 (IGHV3-23)
AKDLSSGWYAYFFDY

SEQ ID NO: 6743 - protein, 9 aa, Homo sapiens
  Light chain CDR3 for antibody 3372 (IGKV1-27)
QKYNSAPYT

SEQ ID NO: 6744 - protein, 15 aa, Homo sapiens
  Heavy chain CDR3 for antibody 3372 (IGHV3-74)
ARGSGSHYHYYGMDV

SEQ ID NO: 6745 - protein, 10 aa, Homo sapiens
  Light chain CDR3 for antibody 3373 (IGKV1-17)
LQHNSYPMYT

SEQ ID NO: 6746 - protein, 8 aa, Homo sapiens
  Heavy chain CDR3 for antibody 3373 (IGHV3-23)
AKETGNNY

SEQ ID NO: 6747 - protein, 9 aa, Homo sapiens
  Light chain CDR3 for antibody 3374 (IGKV1-6)
LQDYNYPYT

SEQ ID NO: 6748 - protein, 12 aa, Homo sapiens
  Heavy chain CDR3 for antibody 3374 (IGHV1-46)
ARRMVATNWFDP

SEQ ID NO: 6749 - protein, 9 aa, Homo sapiens
  Light chain CDR3 for antibody 3375 (IGKV6-21)
HQSSSLPYT

SEQ ID NO: 6750 - protein, 12 aa, Homo sapiens
  Heavy chain CDR3 for antibody 3375 (IGHV3-33)
ARDYGSGSFFDY

SEQ ID NO: 6751 - protein, 9 aa, Homo sapiens
  Light chain CDR3 for antibody 3376 (IGKV1D-16)
QQYNSYPYT

SEQ ID NO: 6752 - protein, 20 aa, Homo sapiens
  Heavy chain CDR3 for antibody 3376 (IGHV3-23)
TKDRYSDSSGYYLYYNDMDV

SEQ ID NO: 6753 - protein, 9 aa, Homo sapiens
  Light chain CDR3 for antibody 3377 (IGKV1-17)
LQHNSYPYT

SEQ ID NO: 6754 - protein, 13 aa, Homo sapiens
  Heavy chain CDR3 for antibody 3377 (IGHV1-18)
ARGGGVRGAPLDY

SEQ ID NO: 6755 - protein, 9 aa, Homo sapiens
  Light chain CDR3 for antibody 3378 (IGKV6-21)
HQSSSLPFT

SEQ ID NO: 6756 - protein, 19 aa, Homo sapiens
  Heavy chain CDR3 for antibody 3378 (IGHV4-39)
ARQGDVLRYFDWLLGAFDI

SEQ ID NO: 6757 - protein, 9 aa, Homo sapiens
  Light chain CDR3 for antibody 3379 (IGKV1-6)
LQDYNYPRT

SEQ ID NO: 6758 - protein, 13 aa, Homo sapiens
  Heavy chain CDR3 for antibody 3379 (IGHV4-39)
ARRDGSYYGYFGY

SEQ ID NO: 6759 - protein, 9 aa, Homo sapiens
  Light chain CDR3 for antibody 3380 (IGKV1-6)
LQDYKSPFT

SEQ ID NO: 6760 - protein, 12 aa, Homo sapiens
  Heavy chain CDR3 for antibody 3380 (IGHV3-33)
ARESGGSYSFDY

SEQ ID NO: 6761 - protein, 9 aa, Homo sapiens
  Light chain CDR3 for antibody 3381 (IGKV3-20)
QQYGSSPYT

SEQ ID NO: 6762 - protein, 13 aa, Homo sapiens
  Heavy chain CDR3 for antibody 3381 (IGHV3-21)
ARDSTLVRGVFPY

SEQ ID NO: 6763 - protein, 8 aa, Homo sapiens
  Light chain CDR3 for antibody 3382 (IGKV1-5)
QQYNSYWT

SEQ ID NO: 6764 - protein, 12 aa, Homo sapiens
  Heavy chain CDR3 for antibody 3382 (IGHV3-33)
AREKGGSYSFDY

SEQ ID NO: 6765 - protein, 9 aa, Homo sapiens
  Light chain CDR3 for antibody 3383 (IGKV5-2)
LQHDNFPWT

SEQ ID NO: 6766 - protein, 18 aa, Homo sapiens
  Heavy chain CDR3 for antibody 3383 (IGHV1-18)
ARDPNYYGSGSYYNYFDY

SEQ ID NO: 6767 - protein, 9 aa, Homo sapiens
  Light chain CDR3 for antibody 3384 (IGKV3-15)
QQYNNWPRT

SEQ ID NO: 6768 - protein, 12 aa, Homo sapiens
  Heavy chain CDR3 for antibody 3384 (IGHV3-13)
AREAGIPDAFDI

SEQ ID NO: 6769 - protein, 9 aa, Homo sapiens
  Light chain CDR3 for antibody 3385 (IGKV1-39)
QQSYSTPLT

SEQ ID NO: 6770 - protein, 18 aa, Homo sapiens
  Heavy chain CDR3 for antibody 3385 (IGHV3-33)
ARDEYYGSGIYYNYGMDV

SEQ ID NO: 6771 - protein, 9 aa, Homo sapiens
  Light chain CDR3 for antibody 3386 (IGKV1-33)
QQYDNLPFT

SEQ ID NO: 6772 - protein, 12 aa, Homo sapiens
  Heavy chain CDR3 for antibody 3386 (IGHV3-13)
VREAGIPDAFDI

SEQ ID NO: 6773 - protein, 9 aa, Homo sapiens
  Light chain CDR3 for antibody 3387 (IGKV1-6)
LQDYNYPWT

SEQ ID NO: 6774 - protein, 13 aa, Homo sapiens
  Heavy chain CDR3 for antibody 3387 (IGHV3-33)
ARDYGDYLNWFDP

SEQ ID NO: 6775 - protein, 10 aa, Homo sapiens
  Light chain CDR3 for antibody 3388 (IGKV1-17)
LQHNSYPMYT

SEQ ID NO: 6776 - protein, 12 aa, Homo sapiens
  Heavy chain CDR3 for antibody 3388 (IGHV3-33)
ARGYFGSGYAHF

SEQ ID NO: 6777 - protein, 9 aa, Homo sapiens
  Light chain CDR3 for antibody 3389 (IGKV1D-13)
QHFNNYMYT

SEQ ID NO: 6778 - protein, 14 aa, Homo sapiens
  Heavy chain CDR3 for antibody 3389 (IGHV4-39)
ARDSGYDYYYGMDV

SEQ ID NO: 6779 - protein, 9 aa, Homo sapiens
  Light chain CDR3 for antibody 3390 (IGKV1D-16)
QQYNSYPLT

SEQ ID NO: 6780 - protein, 15 aa, Homo sapiens
  Heavy chain CDR3 for antibody 3390 (IGHV3-23)
AKDRDYDFLSGPFDY

SEQ ID NO: 6781 - protein, 9 aa, Homo sapiens
  Light chain CDR3 for antibody 3391 (IGKV3-15)
QQYNNWPLT

SEQ ID NO: 6782 - protein, 13 aa, Homo sapiens
  Heavy chain CDR3 for antibody 3391 (IGHV3-11)
ARDEGYRGYVLDT

SEQ ID NO: 6783 - protein, 8 aa, Homo sapiens
  Light chain CDR3 for antibody 3392 (IGKV1-5)
QQYNSYWT

SEQ ID NO: 6784 - protein, 13 aa, Homo sapiens
  Heavy chain CDR3 for antibody 3392 (IGHV3-23)
ASTGDSYYYGMDV

SEQ ID NO: 6785 - protein, 9 aa, Homo sapiens
  Light chain CDR3 for antibody 3393 (IGKV3-11)
QQRSNWPPT

SEQ ID NO: 6786 - protein, 10 aa, Homo sapiens
  Heavy chain CDR3 for antibody 3393 (IGHV3-23)
AKDHYGDYPY

SEQ ID NO: 6787 - protein, 9 aa, Homo sapiens
  Light chain CDR3 for antibody 3394 (IGKV1-16)
QHYNDYPFT

SEQ ID NO: 6788 - protein, 15 aa, Homo sapiens
  Heavy chain CDR3 for antibody 3394 (IGHV3-30)
ARGAMVRGVDYGMDV

SEQ ID NO: 6789 - protein, 9 aa, Homo sapiens
  Light chain CDR3 for antibody 3395 (IGKV1-27)
QKYNSAPYT

SEQ ID NO: 6790 - protein, 9 aa, Homo sapiens
  Heavy chain CDR3 for antibody 3395 (IGHV4-59)
AREGGSGSL

SEQ ID NO: 6791 - protein, 9 aa, Homo sapiens
  Light chain CDR3 for antibody 3396 (IGKV5-2)
LQHDNFPYT

SEQ ID NO: 6792 - protein, 18 aa, Homo sapiens
  Heavy chain CDR3 for antibody 3396 (IGHV3-33)
ARGGYDILTGYYRTGMDV

SEQ ID NO: 6793 - protein, 10 aa, Homo sapiens
  Light chain CDR3 for antibody 3397 (IGKV1-39)
QQSYSTPMYT

SEQ ID NO: 6794 - protein, 13 aa, Homo sapiens
  Heavy chain CDR3 for antibody 3397 (IGHV3-53)
ARSGSYWGYYFDY

SEQ ID NO: 6795 - protein, 9 aa, Homo sapiens
  Light chain CDR3 for antibody 3398 (IGKV6-21)
HQSSSLPYT

SEQ ID NO: 6796 - protein, 14 aa, Homo sapiens
  Heavy chain CDR3 for antibody 3398 (IGHV4-59)
AKGGSGSYYNWFDP

SEQ ID NO: 6797 - protein, 9 aa, Homo sapiens
  Light chain CDR3 for antibody 3399 (IGKV1-6)
LQDYNYPRT

SEQ ID NO: 6798 - protein, 10 aa, Homo sapiens
  Heavy chain CDR3 for antibody 3399 (IGHV4-59)
VSSGTSLLAY

SEQ ID NO: 6799 - protein, 9 aa, Homo sapiens
  Light chain CDR3 for antibody 3400 (IGKV1-27)
QKYNSAPYT

SEQ ID NO: 6800 - protein, 10 aa, Homo sapiens
  Heavy chain CDR3 for antibody 3400 (IGHV3-30)
ARDGLESFDY

SEQ ID NO: 6801 - protein, 9 aa, Homo sapiens
  Light chain CDR3 for antibody 3401 (IGKV1-9)
QQLKSYLYT

SEQ ID NO: 6802 - protein, 13 aa, Homo sapiens
  Heavy chain CDR3 for antibody 3401 (IGHV4-34)
ASNFYYYYYGMDV

SEQ ID NO: 6803 - protein, 9 aa, Homo sapiens
  Light chain CDR3 for antibody 3402 (IGKV1-17)
LQHNSYPWT

SEQ ID NO: 6804 - protein, 14 aa, Homo sapiens
  Heavy chain CDR3 for antibody 3402 (IGHV3-33)
ARDAYDILTGYYDY

SEQ ID NO: 6805 - protein, 9 aa, Homo sapiens
  Light chain CDR3 for antibody 3403 (IGKV1D-16)
QQYNSYPYT

SEQ ID NO: 6806 - protein, 18 aa, Homo sapiens
  Heavy chain CDR3 for antibody 3403 (IGHV3-23)
AKDGDYFGSGSYWGYFDL

SEQ ID NO: 6807 - protein, 9 aa, Homo sapiens
  Light chain CDR3 for antibody 3404 (IGKV1-17)
LQHNSYPYT

SEQ ID NO: 6808 - protein, 15 aa, Homo sapiens
  Heavy chain CDR3 for antibody 3404 (IGHV3-33)
ARERYSSAWSSGMDV

SEQ ID NO: 6809 - protein, 9 aa, Homo sapiens
  Light chain CDR3 for antibody 3405 (IGKV5-2)
LQHDNFPWT

SEQ ID NO: 6810 - protein, 20 aa, Homo sapiens
  Heavy chain CDR3 for antibody 3405 (IGHV4-59)
ARDRGYDILTGYYGYYGMDV

SEQ ID NO: 6811 - protein, 9 aa, Homo sapiens
  Light chain CDR3 for antibody 3406 (IGKV1-39)
QQSYSTPLT

SEQ ID NO: 6812 - protein, 12 aa, Homo sapiens
  Heavy chain CDR3 for antibody 3406 (IGHV3-13)
ARDRGYSGYFDY

SEQ ID NO: 6813 - protein, 10 aa, Homo sapiens
  Light chain CDR3 for antibody 3407 (IGKV1-9)
QQLDSYPMYT

SEQ ID NO: 6814 - protein, 12 aa, Homo sapiens
  Heavy chain CDR3 for antibody 3407 (IGHV3-13)
AREAGIPDAFDI

SEQ ID NO: 6815 - protein, 9 aa, Homo sapiens
  Light chain CDR3 for antibody 3408 (IGKV3-20)
QQYGSSPYT

SEQ ID NO: 6816 - protein, 18 aa, Homo sapiens
  Heavy chain CDR3 for antibody 3408 (IGHV1-46)
ARDGDYVWGSYRSNWFDP

SEQ ID NO: 6817 - protein, 8 aa, Homo sapiens
  Light chain CDR3 for antibody 3409 (IGKV3D-7)
QQDYNLLT

SEQ ID NO: 6818 - protein, 12 aa, Homo sapiens
  Heavy chain CDR3 for antibody 3409 (IGHV3-33)
ARDLVGATPFDY

SEQ ID NO: 6819 - protein, 9 aa, Homo sapiens
  Light chain CDR3 for antibody 3410 (IGKV1-17)
LQHNSYPYT

SEQ ID NO: 6820 - protein, 16 aa, Homo sapiens
  Heavy chain CDR3 for antibody 3410 (IGHV3-33)
ARGANYYGSGIPNFEY

SEQ ID NO: 6821 - protein, 9 aa, Homo sapiens
  Light chain CDR3 for antibody 3411 (IGKV1-6)
LQDFNYPRT

SEQ ID NO: 6822 - protein, 13 aa, Homo sapiens
  Heavy chain CDR3 for antibody 3411 (IGHV4-59)
ARDAGYSSSWFDY

SEQ ID NO: 6823 - protein, 9 aa, Homo sapiens
  Light chain CDR3 for antibody 3412 (IGKV1-17)
LQHNSYPYT

SEQ ID NO: 6824 - protein, 9 aa, Homo sapiens
  Heavy chain CDR3 for antibody 3412 (IGHV3-30)
VRDDYGVDV

SEQ ID NO: 6825 - protein, 9 aa, Homo sapiens
  Light chain CDR3 for antibody 3413 (IGKV1-9)
QQLISYPLT

SEQ ID NO: 6826 - protein, 15 aa, Homo sapiens
  Heavy chain CDR3 for antibody 3413 (IGHV3-20)
ARDRGSSGWRDWFDP

SEQ ID NO: 6827 - protein, 9 aa, Homo sapiens
  Light chain CDR3 for antibody 3414 (IGKV6-21)
HQSSSLPYT

SEQ ID NO: 6828 - protein, 13 aa, Homo sapiens
  Heavy chain CDR3 for antibody 3414 (IGHV1-24)
ATGYSINWYEFDY

SEQ ID NO: 6829 - protein, 9 aa, Homo sapiens
  Light chain CDR3 for antibody 3415 (IGKV1D-13)
QQFNNYPYT

SEQ ID NO: 6830 - protein, 26 aa, Homo sapiens
  Heavy chain CDR3 for antibody 3415 (IGHV4-39)
ARQGLLWFGDLKAYDSSGYYYGYFHH

SEQ ID NO: 6831 - protein, 9 aa, Homo sapiens
  Light chain CDR3 for antibody 3416 (IGKV5-2)
LQHDNFPYT

SEQ ID NO: 6832 - protein, 15 aa, Homo sapiens
  Heavy chain CDR3 for antibody 3416 (IGHV3-23)
AKDRNYDFLTGPFDP

SEQ ID NO: 6833 - protein, 9 aa, Homo sapiens
  Light chain CDR3 for antibody 3417 (IGKV3-15)
QQYNNWPLT

SEQ ID NO: 6834 - protein, 13 aa, Homo sapiens
  Heavy chain CDR3 for antibody 3417 (IGHV4-39)
ARHHYGSGSLRDY

SEQ ID NO: 6835 - protein, 9 aa, Homo sapiens
  Light chain CDR3 for antibody 3418 (IGKV1D-16)
QQYNSYPLT

SEQ ID NO: 6836 - protein, 17 aa, Homo sapiens
  Heavy chain CDR3 for antibody 3418 (IGHV3-15)
TTERYPRRYYYYFGMDV

SEQ ID NO: 6837 - protein, 9 aa, Homo sapiens
  Light chain CDR3 for antibody 3419 (IGKV1-6)
LQDYNYPRT

SEQ ID NO: 6838 - protein, 17 aa, Homo sapiens
  Heavy chain CDR3 for antibody 3419 (IGHV3-13)
AREGWFGELWGYYGMDV

SEQ ID NO: 6839 - protein, 9 aa, Homo sapiens
  Light chain CDR3 for antibody 3420 (IGKV1-9)
QQGNTYSRT

SEQ ID NO: 6840 - protein, 11 aa, Homo sapiens
  Heavy chain CDR3 for antibody 3420 (IGHV4-4)
AREMGHDTFDI

SEQ ID NO: 6841 - protein, 9 aa, Homo sapiens
  Light chain CDR3 for antibody 3421 (IGKV1D-16)
QQYNSYPFT

SEQ ID NO: 6842 - protein, 12 aa, Homo sapiens
  Heavy chain CDR3 for antibody 3421 (IGHV1-46)
ARGLIGDHAVDI

SEQ ID NO: 6843 - protein, 9 aa, Homo sapiens
  Light chain CDR3 for antibody 3422 (IGKV1-17)
LQHNSYPWT

SEQ ID NO: 6844 - protein, 17 aa, Homo sapiens
  Heavy chain CDR3 for antibody 3422 (IGHV3-15)
TTERYPRRYYYYFGMDV

SEQ ID NO: 6845 - protein, 9 aa, Homo sapiens
  Light chain CDR3 for antibody 3423 (IGKV1-39)
QQSYSTPFT

SEQ ID NO: 6846 - protein, 14 aa, Homo sapiens
  Heavy chain CDR3 for antibody 3423 (IGHV3-33)
ARASSGSSYWYFDL

SEQ ID NO: 6847 - protein, 9 aa, Homo sapiens
  Light chain CDR3 for antibody 3424 (IGKV2-30)
MQGTHWPLT

SEQ ID NO: 6848 - protein, 15 aa, Homo sapiens
  Heavy chain CDR3 for antibody 3424 (IGHV4-59)
ARDLGHYYGSVSIDY

SEQ ID NO: 6849 - protein, 9 aa, Homo sapiens
  Light chain CDR3 for antibody 3425 (IGKV1-39)
QQSYSTPLT

SEQ ID NO: 6850 - protein, 13 aa, Homo sapiens
  Heavy chain CDR3 for antibody 3425 (IGHV3-33)
ARIDYYSYYGMDV

SEQ ID NO: 6851 - protein, 8 aa, Homo sapiens
  Light chain CDR3 for antibody 3426 (IGKV1-5)
QQYNSYWT

SEQ ID NO: 6852 - protein, 12 aa, Homo sapiens
  Heavy chain CDR3 for antibody 3426 (IGHV3-33)
ARDLVGATPFDY

SEQ ID NO: 6853 - protein, 9 aa, Homo sapiens
  Light chain CDR3 for antibody 3427 (IGKV1-6)
LQDYNYPWT

SEQ ID NO: 6854 - protein, 12 aa, Homo sapiens
  Heavy chain CDR3 for antibody 3427 (IGHV3-21)
AREGFGESSFDY

SEQ ID NO: 6855 - protein, 9 aa, Homo sapiens
  Light chain CDR3 for antibody 3428 (IGKV1D-16)
QQYNSYPLT

SEQ ID NO: 6856 - protein, 10 aa, Homo sapiens
  Heavy chain CDR3 for antibody 3428 (IGHV3-33)
ARDLGWSFDF

SEQ ID NO: 6857 - protein, 9 aa, Homo sapiens
  Light chain CDR3 for antibody 3429 (IGKV1D-13)
QQFNNYPHT

SEQ ID NO: 6858 - protein, 17 aa, Homo sapiens
  Heavy chain CDR3 for antibody 3429 (IGHV3-33)
ARVRGVIEGYYYYGMDV

SEQ ID NO: 6859 - protein, 8 aa, Homo sapiens
  Light chain CDR3 for antibody 3430 (IGKV1-5)
QQYNSYWT

SEQ ID NO: 6860 - protein, 13 aa, Homo sapiens
  Heavy chain CDR3 for antibody 3430 (IGHV3-53)
ARSGSYWGYYFDY

SEQ ID NO: 6861 - protein, 9 aa, Homo sapiens
  Light chain CDR3 for antibody 3431 (IGKV6-21)
HQSYSLPHT

SEQ ID NO: 6862 - protein, 12 aa, Homo sapiens
  Heavy chain CDR3 for antibody 3431 (IGHV3-33)
AREKGGSYSFDY

SEQ ID NO: 6863 - protein, 9 aa, Homo sapiens
  Light chain CDR3 for antibody 3432 (IGKV6-21)
HQSSSLPLT

SEQ ID NO: 6864 - protein, 16 aa, Homo sapiens
  Heavy chain CDR3 for antibody 3432 (IGHV1-24)
ATEDSSSYYYYYGMDV

SEQ ID NO: 6865 - protein, 10 aa, Homo sapiens
  Light chain CDR3 for antibody 3433 (IGKV3-11)
QQRSNWPPFT

SEQ ID NO: 6866 - protein, 13 aa, Homo sapiens
  Heavy chain CDR3 for antibody 3433 (IGHV3-23)
AKEDGDYHHYFDY

SEQ ID NO: 6867 - protein, 9 aa, Homo sapiens
  Light chain CDR3 for antibody 3434 (IGKV1-6)
LQDYNYPYT

SEQ ID NO: 6868 - protein, 10 aa, Homo sapiens
  Heavy chain CDR3 for antibody 3434 (IGHV1-46)
AREWELLFDY

SEQ ID NO: 6869 - protein, 9 aa, Homo sapiens
  Light chain CDR3 for antibody 3435 (IGKV1-39)
QQSYRTPLT

SEQ ID NO: 6870 - protein, 17 aa, Homo sapiens
  Heavy chain CDR3 for antibody 3435 (IGHV3-33)
ARSGIVGATDYYYGLDV

SEQ ID NO: 6871 - protein, 9 aa, Homo sapiens
  Light chain CDR3 for antibody 3436 (IGKV3D-7)
QQDYNLPYT

SEQ ID NO: 6872 - protein, 23 aa, Homo sapiens
  Heavy chain CDR3 for antibody 3436 (IGHV4-59)
ARERTYSDILPGYYEDYYYGMDV

SEQ ID NO: 6873 - protein, 9 aa, Homo sapiens
  Light chain CDR3 for antibody 3437 (IGKV5-2)
LQHDNFPYT

SEQ ID NO: 6874 - protein, 13 aa, Homo sapiens
  Heavy chain CDR3 for antibody 3437 (IGHV3-33)
AREYFDWLLPLDY

SEQ ID NO: 6875 - protein, 8 aa, Homo sapiens
  Light chain CDR3 for antibody 3438 (IGKV3D-7)
QQDYNLLT

SEQ ID NO: 6876 - protein, 13 aa, Homo sapiens
  Heavy chain CDR3 for antibody 3438 (IGHV3-33)
ARGDNWNDGGFDY

SEQ ID NO: 6877 - protein, 9 aa, Homo sapiens
  Light chain CDR3 for antibody 3439 (IGKV1-17)
LQHNSYPWT

SEQ ID NO: 6878 - protein, 17 aa, Homo sapiens
  Heavy chain CDR3 for antibody 3439 (IGHV3-33)
ARENDILTGSYYYGMDV

SEQ ID NO: 6879 - protein, 9 aa, Homo sapiens
  Light chain CDR3 for antibody 3440 (IGKV1-9)
QQLNSYPYT

SEQ ID NO: 6880 - protein, 17 aa, Homo sapiens
  Heavy chain CDR3 for antibody 3440 (IGHV3-23)
SKERNWNDGYYYFGMDA

SEQ ID NO: 6881 - protein, 9 aa, Homo sapiens
  Light chain CDR3 for antibody 3441 (IGKV1D-13)
QQFNNYPHT

SEQ ID NO: 6882 - protein, 8 aa, Homo sapiens
  Heavy chain CDR3 for antibody 3441 (IGHV3-23)
AKESLLDY

SEQ ID NO: 6883 - protein, 9 aa, Homo sapiens
  Light chain CDR3 for antibody 3442 (IGKV3-11)
QQRSNWPYT

SEQ ID NO: 6884 - protein, 16 aa, Homo sapiens
  Heavy chain CDR3 for antibody 3442 (IGHV1-24)
ATEDSSSTYYYYGLDV

SEQ ID NO: 6885 - protein, 9 aa, Homo sapiens
  Light chain CDR3 for antibody 3443 (IGKV1-17)
LQHNSYPYT

SEQ ID NO: 6886 - protein, 18 aa, Homo sapiens
  Heavy chain CDR3 for antibody 3443 (IGHV1-18)
ARDDILTGYSLYYYGMDV

SEQ ID NO: 6887 - protein, 9 aa, Homo sapiens
  Light chain CDR3 for antibody 3444 (IGKV3D-7)
QQDYNLPWT

SEQ ID NO: 6888 - protein, 9 aa, Homo sapiens
  Heavy chain CDR3 for antibody 3444 (IGHV3-13)
ARDRWYFDL

SEQ ID NO: 6889 - protein, 9 aa, Homo sapiens
  Light chain CDR3 for antibody 3445 (IGKV1-39)
QQSYSTPLT

SEQ ID NO: 6890 - protein, 18 aa, Homo sapiens
  Heavy chain CDR3 for antibody 3445 (IGHV3-33)
ARGGYSSGWDYYYYGMDV

SEQ ID NO: 6891 - protein, 9 aa, Homo sapiens
  Light chain CDR3 for antibody 3446 (IGKV3-20)
QQYGSSPYT

SEQ ID NO: 6892 - protein, 16 aa, Homo sapiens
  Heavy chain CDR3 for antibody 3446 (IGHV3-33)
ARDNFGSGSYYSHFHY

SEQ ID NO: 6893 - protein, 10 aa, Homo sapiens
  Light chain CDR3 for antibody 3447 (IGKV1-17)
LQHNSYPMYT

SEQ ID NO: 6894 - protein, 14 aa, Homo sapiens
  Heavy chain CDR3 for antibody 3447 (IGHV3-33)
ARDRIAAASSDFDC

SEQ ID NO: 6895 - protein, 9 aa, Homo sapiens
  Light chain CDR3 for antibody 3448 (IGKV1D-13)
QQFNNYPHT

SEQ ID NO: 6896 - protein, 16 aa, Homo sapiens
  Heavy chain CDR3 for antibody 3448 (IGHV3-30)
ARDIAVAGHVYYGMDV

SEQ ID NO: 6897 - protein, 9 aa, Homo sapiens
  Light chain CDR3 for antibody 3449 (IGKV5-2)
LQHDNFPWT

SEQ ID NO: 6898 - protein, 13 aa, Homo sapiens
  Heavy chain CDR3 for antibody 3449 (IGHV4-39)
ARPGIVAAGWFDP

SEQ ID NO: 6899 - protein, 9 aa, Homo sapiens
  Light chain CDR3 for antibody 3450 (IGKV3D-7)
QQDYNLPLT

SEQ ID NO: 6900 - protein, 17 aa, Homo sapiens
  Heavy chain CDR3 for antibody 3450 (IGHV1-18)
ARERYYGSGNYKYNMDV

SEQ ID NO: 6901 - protein, 9 aa, Homo sapiens
  Light chain CDR3 for antibody 3451 (IGKV2-30)
MQGTHWPLT

SEQ ID NO: 6902 - protein, 10 aa, Homo sapiens
  Heavy chain CDR3 for antibody 3451 (IGHV3-33)
ARDGSGSQPI

SEQ ID NO: 6903 - protein, 9 aa, Homo sapiens
  Light chain CDR3 for antibody 3452 (IGKV1-6)
LQDNNYPWT

SEQ ID NO: 6904 - protein, 11 aa, Homo sapiens
  Heavy chain CDR3 for antibody 3452 (IGHV4-61)
AREMGHDIFDI

SEQ ID NO: 6905 - protein, 9 aa, Homo sapiens
  Light chain CDR3 for antibody 3453 (IGKV1-39)
QQSYSTPLT

SEQ ID NO: 6906 - protein, 17 aa, Homo sapiens
  Heavy chain CDR3 for antibody 3453 (IGHV1-24)
ATEGYDILPGYYNVLDY

SEQ ID NO: 6907 - protein, 9 aa, Homo sapiens
  Light chain CDR3 for antibody 3454 (IGKV1-16)
QQYNSYPYT

SEQ ID NO: 6908 - protein, 8 aa, Homo sapiens
  Heavy chain CDR3 for antibody 3454 (IGHV4-39)
ARRGGLDY

SEQ ID NO: 6909 - protein, 9 aa, Homo sapiens
  Light chain CDR3 for antibody 3455 (IGKV3D-7)
QQDYNLPLT

SEQ ID NO: 6910 - protein, 13 aa, Homo sapiens
  Heavy chain CDR3 for antibody 3455 (IGHV3-33)
ARTDYYFYYGLDV

SEQ ID NO: 6911 - protein, 9 aa, Homo sapiens
  Light chain CDR3 for antibody 3456 (IGKV3D-7)
QQDYEFPLT

SEQ ID NO: 6912 - protein, 17 aa, Homo sapiens
  Heavy chain CDR3 for antibody 3456 (IGHV4-59)
ARRITMVREIIITAFDY

SEQ ID NO: 6913 - protein, 10 aa, Homo sapiens
  Light chain CDR3 for antibody 3457 (IGKV3-11)
QQRSNWPIFT

SEQ ID NO: 6914 - protein, 15 aa, Homo sapiens
  Heavy chain CDR3 for antibody 3457 (IGHV3-33)
ARDHLTGYYYYGMDV

SEQ ID NO: 6915 - protein, 9 aa, Homo sapiens
  Light chain CDR3 for antibody 3458 (IGKV1D-13)
QQFNNYPHT

SEQ ID NO: 6916 - protein, 15 aa, Homo sapiens
  Heavy chain CDR3 for antibody 3458 (IGHV4-39)
ARRDYDILTGYLFDY

SEQ ID NO: 6917 - protein, 9 aa, Homo sapiens
  Light chain CDR3 for antibody 3459 (IGKV1-9)
QQLISYPLT

SEQ ID NO: 6918 - protein, 9 aa, Homo sapiens
  Heavy chain CDR3 for antibody 3459 (IGHV3-30)
ARDYFHYDY

SEQ ID NO: 6919 - protein, 9 aa, Homo sapiens
  Light chain CDR3 for antibody 3460 (IGKV2-30)
MQGTHWPLT

SEQ ID NO: 6920 - protein, 21 aa, Homo sapiens
  Heavy chain CDR3 for antibody 3460 (IGHV3-33)
ARKRLYDILTGYYKAYYGMDV

SEQ ID NO: 6921 - protein, 9 aa, Homo sapiens
  Light chain CDR3 for antibody 3461 (IGKV3-11)
QQRSNWMYT

SEQ ID NO: 6922 - protein, 21 aa, Homo sapiens
  Heavy chain CDR3 for antibody 3461 (IGHV3-23)
AKDIDYYGSGSYPLYYYGMDV

SEQ ID NO: 6923 - protein, 8 aa, Homo sapiens
  Light chain CDR3 for antibody 3462 (IGKV1-5)
QQYNSYYT

SEQ ID NO: 6924 - protein, 11 aa, Homo sapiens
  Heavy chain CDR3 for antibody 3462 (IGHV3-33)
ARDRVLTPFDY

SEQ ID NO: 6925 - protein, 9 aa, Homo sapiens
  Light chain CDR3 for antibody 3463 (IGKV5-2)
LQHDNFPYT

SEQ ID NO: 6926 - protein, 13 aa, Homo sapiens
  Heavy chain CDR3 for antibody 3463 (IGHV3-33)
ARALYSSSWPGDY

SEQ ID NO: 6927 - protein, 9 aa, Homo sapiens
  Light chain CDR3 for antibody 3464 (IGKV6-21)
HQSSSLPYT

SEQ ID NO: 6928 - protein, 8 aa, Homo sapiens
  Heavy chain CDR3 for antibody 3464 (IGHV3-20)
APHWIFDY

SEQ ID NO: 6929 - protein, 9 aa, Homo sapiens
  Light chain CDR3 for antibody 3465 (IGKV1D-16)
QQYNSYPYT

SEQ ID NO: 6930 - protein, 16 aa, Homo sapiens
  Heavy chain CDR3 for antibody 3465 (IGHV3-33)
ARPTYYDILTGYPFDY

SEQ ID NO: 6931 - protein, 9 aa, Homo sapiens
  Light chain CDR3 for antibody 3466 (IGKV6-21)
HQSTSLPFT

SEQ ID NO: 6932 - protein, 11 aa, Homo sapiens
  Heavy chain CDR3 for antibody 3466 (IGHV4-59)
AREMGHDIFDI

SEQ ID NO: 6933 - protein, 9 aa, Homo sapiens
  Light chain CDR3 for antibody 3467 (IGKV6-21)
HQSSSLPLT

SEQ ID NO: 6934 - protein, 13 aa, Homo sapiens
  Heavy chain CDR3 for antibody 3467 (IGHV1-24)
ATPGSGSYYNVDY

SEQ ID NO: 6935 - protein, 9 aa, Homo sapiens
  Light chain CDR3 for antibody 3468 (IGKV1D-13)
QQFNNYPHT

SEQ ID NO: 6936 - protein, 13 aa, Homo sapiens
  Heavy chain CDR3 for antibody 3468 (IGHV4-61)
ASRYSSGWYPFDY

SEQ ID NO: 6937 - protein, 9 aa, Homo sapiens
  Light chain CDR3 for antibody 3469 (IGKV1-5)
QQYNSYPYT

SEQ ID NO: 6938 - protein, 12 aa, Homo sapiens
  Heavy chain CDR3 for antibody 3469 (IGHV4-39)
ARQMVREGWFDP

SEQ ID NO: 6939 - protein, 9 aa, Homo sapiens
  Light chain CDR3 for antibody 3470 (IGKV1-17)
LQHNSYPYT

SEQ ID NO: 6940 - protein, 16 aa, Homo sapiens
  Heavy chain CDR3 for antibody 3470 (IGHV3-33)
ARIAAPGSEYYYGMDV

SEQ ID NO: 6941 - protein, 9 aa, Homo sapiens
  Light chain CDR3 for antibody 3471 (IGKV5-2)
LQHDKFPYT

SEQ ID NO: 6942 - protein, 17 aa, Homo sapiens
  Heavy chain CDR3 for antibody 3471 (IGHV3-33)
ARENDILTGSYYYGMDV

SEQ ID NO: 6943 - protein, 9 aa, Homo sapiens
  Light chain CDR3 for antibody 3472 (IGKV2D-24)
TQATQFPHT

SEQ ID NO: 6944 - protein, 13 aa, Homo sapiens
  Heavy chain CDR3 for antibody 3472 (IGHV4-59)
ARDAGYSSSWFDY

SEQ ID NO: 6945 - protein, 9 aa, Homo sapiens
  Light chain CDR3 for antibody 3473 (IGKV3-15)
QQYNNWPLT

SEQ ID NO: 6946 - protein, 15 aa, Homo sapiens
  Heavy chain CDR3 for antibody 3473 (IGHV3-33)
ARDRGWKAPGYGMDV

SEQ ID NO: 6947 - protein, 9 aa, Homo sapiens
  Light chain CDR3 for antibody 3474 (IGKV1-17)
LQHNSYPLT

SEQ ID NO: 6948 - protein, 12 aa, Homo sapiens
  Heavy chain CDR3 for antibody 3474 (IGHV3-23)
AKEGLGSDYEPY

SEQ ID NO: 6949 - protein, 9 aa, Homo sapiens
  Light chain CDR3 for antibody 3475 (IGKV1D-13)
QQFNNYPYT

SEQ ID NO: 6950 - protein, 18 aa, Homo sapiens
  Heavy chain CDR3 for antibody 3475 (IGHV3-33)
ARDQGIVVLPGAPWYFDL

SEQ ID NO: 6951 - protein, 9 aa, Homo sapiens
  Light chain CDR3 for antibody 3476 (IGKV6-21)
HQSSSLPYT

SEQ ID NO: 6952 - protein, 18 aa, Homo sapiens
  Heavy chain CDR3 for antibody 3476 (IGHV3-23)
AKPDYYGSGSYYNVPFDY

SEQ ID NO: 6953 - protein, 9 aa, Homo sapiens
  Light chain CDR3 for antibody 3477 (IGKV3-15)
QQYNNWPLT

SEQ ID NO: 6954 - protein, 14 aa, Homo sapiens
  Heavy chain CDR3 for antibody 3477 (IGHV3-33)
ARDREQQLVRYFDY

SEQ ID NO: 6955 - protein, 10 aa, Homo sapiens
  Light chain CDR3 for antibody 3478 (IGKV3-11)
QQRSNWPIFT

SEQ ID NO: 6956 - protein, 18 aa, Homo sapiens
  Heavy chain CDR3 for antibody 3478 (IGHV3-33)
ARDGYSGYDYYYYYGMDV

SEQ ID NO: 6957 - protein, 9 aa, Homo sapiens
  Light chain CDR3 for antibody 3479 (IGKV3D-20)
QQYGSSPRT

SEQ ID NO: 6958 - protein, 14 aa, Homo sapiens
  Heavy chain CDR3 for antibody 3479 (IGHV1-24)
ATDRSSYYYYGMDV

SEQ ID NO: 6959 - protein, 8 aa, Homo sapiens
  Light chain CDR3 for antibody 3480 (IGKV3D-7)
QQDYNLLT

SEQ ID NO: 6960 - protein, 18 aa, Homo sapiens
  Heavy chain CDR3 for antibody 3480 (IGHV3-33)
ARDGYSGYDYYYYYGMDV

SEQ ID NO: 6961 - protein, 9 aa, Homo sapiens
  Light chain CDR3 for antibody 3481 (IGKV3-11)
QQRSNWPLT

SEQ ID NO: 6962 - protein, 14 aa, Homo sapiens
  Heavy chain CDR3 for antibody 3481 (IGHV3-33)
ARQYSYGYPYYFDY

SEQ ID NO: 6963 - protein, 8 aa, Homo sapiens
  Light chain CDR3 for antibody 3482 (IGKV3D-7)
QQDYNLLT

SEQ ID NO: 6964 - protein, 13 aa, Homo sapiens
  Heavy chain CDR3 for antibody 3482 (IGHV3-33)
ARVDTMVRGVMAY

SEQ ID NO: 6965 - protein, 9 aa, Homo sapiens
  Light chain CDR3 for antibody 3483 (IGKV1-27)
QKYNSAPYT

SEQ ID NO: 6966 - protein, 18 aa, Homo sapiens
  Heavy chain CDR3 for antibody 3483 (IGHV3-33)
ARDQGIVVLPGAPWYFDP

SEQ ID NO: 6967 - protein, 9 aa, Homo sapiens
  Light chain CDR3 for antibody 3484 (IGKV3-15)
QQYNNWPLT

SEQ ID NO: 6968 - protein, 13 aa, Homo sapiens
  Heavy chain CDR3 for antibody 3484 (IGHV4-28)
ARKGATGYYGMDV

SEQ ID NO: 6969 - protein, 9 aa, Homo sapiens
  Light chain CDR3 for antibody 3485 (IGKV1-17)
LQHNSYPYT

SEQ ID NO: 6970 - protein, 15 aa, Homo sapiens
  Heavy chain CDR3 for antibody 3485 (IGHV3-23)
AKDPRGYYYYYGMDV

SEQ ID NO: 6971 - protein, 9 aa, Homo sapiens
  Light chain CDR3 for antibody 3486 (IGKV1-6)
LQDYNYPWT

SEQ ID NO: 6972 - protein, 16 aa, Homo sapiens
  Heavy chain CDR3 for antibody 3486 (IGHV3-23)
AKYYDILTGYYELLDY

SEQ ID NO: 6973 - protein, 9 aa, Homo sapiens
  Light chain CDR3 for antibody 3487 (IGKV1-39)
QQSYRTPLT

SEQ ID NO: 6974 - protein, 13 aa, Homo sapiens
  Heavy chain CDR3 for antibody 3487 (IGHV3-21)
ARDSTLVRGVFPY

SEQ ID NO: 6975 - protein, 10 aa, Homo sapiens
  Light chain CDR3 for antibody 3488 (IGKV3-11)
QQRSNWPIFT

SEQ ID NO: 6976 - protein, 13 aa, Homo sapiens
  Heavy chain CDR3 for antibody 3488 (IGHV3-33)
ARTDYYFYYGLDV

SEQ ID NO: 6977 - protein, 9 aa, Homo sapiens
  Light chain CDR3 for antibody 3489 (IGKV5-2)
LQHDNFPWT

SEQ ID NO: 6978 - protein, 14 aa, Homo sapiens
  Heavy chain CDR3 for antibody 3489 (IGHV4-39)
ARQGGWYLYWYFDL

SEQ ID NO: 6979 - protein, 9 aa, Homo sapiens
  Light chain CDR3 for antibody 3490 (IGKV1-6)
LQDFNYPRT

SEQ ID NO: 6980 - protein, 12 aa, Homo sapiens
  Heavy chain CDR3 for antibody 3490 (IGHV1-46)
ARGLTGDHAFDI

SEQ ID NO: 6981 - protein, 9 aa, Homo sapiens
  Light chain CDR3 for antibody 3491 (IGKV1-16)
QQYNSYPLT

SEQ ID NO: 6982 - protein, 16 aa, Homo sapiens
  Heavy chain CDR3 for antibody 3491 (IGHV3-33)
AREMAGSYYYYYGMDV

SEQ ID NO: 6983 - protein, 9 aa, Homo sapiens
  Light chain CDR3 for antibody 3492 (IGKV3-15)
QQYNNWPYT

SEQ ID NO: 6984 - protein, 15 aa, Homo sapiens
  Heavy chain CDR3 for antibody 3492 (IGHV3-23)
AKDGSYYDYYYGMDV

SEQ ID NO: 6985 - protein, 9 aa, Homo sapiens
  Light chain CDR3 for antibody 3493 (IGKV6-21)
HQSSSLPYT

SEQ ID NO: 6986 - protein, 18 aa, Homo sapiens
  Heavy chain CDR3 for antibody 3493 (IGHV3-33)
ARGYNQGSGSYYNVCFDY

SEQ ID NO: 6987 - protein, 11 aa, Homo sapiens
  Light chain CDR3 for antibody 3494 (IGKV3-11)
QQRSNWPPTWT

SEQ ID NO: 6988 - protein, 15 aa, Homo sapiens
  Heavy chain CDR3 for antibody 3494 (IGHV4-59)
ARDLGHYYGSVSIDY

SEQ ID NO: 6989 - protein, 9 aa, Homo sapiens
  Light chain CDR3 for antibody 3495 (IGKV5-2)
LQHDNFPYT

SEQ ID NO: 6990 - protein, 14 aa, Homo sapiens
  Heavy chain CDR3 for antibody 3495 (IGHV3-20)
AREGWFGDYYGMDV

SEQ ID NO: 6991 - protein, 9 aa, Homo sapiens
  Light chain CDR3 for antibody 3496 (IGKV3D-7)
QQDYEFPLT

SEQ ID NO: 6992 - protein, 12 aa, Homo sapiens
  Heavy chain CDR3 for antibody 3496 (IGHV4-39)
ARHGSGSSYFDY

SEQ ID NO: 6993 - protein, 9 aa, Homo sapiens
  Light chain CDR3 for antibody 3497 (IGKV1-39)
QQSYSTPLT

SEQ ID NO: 6994 - protein, 17 aa, Homo sapiens
  Heavy chain CDR3 for antibody 3497 (IGHV3-23)
AKEYCSGGSCYVYYFDY

SEQ ID NO: 6995 - protein, 10 aa, Homo sapiens
  Light chain CDR3 for antibody 3498 (IGKV1-39)
QQSYSTPMYT

SEQ ID NO: 6996 - protein, 14 aa, Homo sapiens
  Heavy chain CDR3 for antibody 3498 (IGHV3-33)
ARDKTYPLSYGMDV

SEQ ID NO: 6997 - protein, 9 aa, Homo sapiens
  Light chain CDR3 for antibody 3499 (IGKV2-30)
MQGTHWPLT

SEQ ID NO: 6998 - protein, 14 aa, Homo sapiens
  Heavy chain CDR3 for antibody 3499 (IGHV3-33)
ARRGSPLRPSHLDV

SEQ ID NO: 6999 - protein, 9 aa, Homo sapiens
  Light chain CDR3 for antibody 3500 (IGKV3-15)
QQYNNWPLT

SEQ ID NO: 7000 - protein, 8 aa, Homo sapiens
  Heavy chain CDR3 for antibody 3500 (IGHV3-23)
EKSAGEDV

SEQ ID NO: 7001 - protein, 9 aa, Homo sapiens
  Light chain CDR3 for antibody 3501 (IGKV5-2)
LQHDNFPWT

SEQ ID NO: 7002 - protein, 18 aa, Homo sapiens
  Heavy chain CDR3 for antibody 3501 (IGHV3-33)
AREGDYYGSGGFPNWFDP

SEQ ID NO: 7003 - protein, 9 aa, Homo sapiens
  Light chain CDR3 for antibody 3502 (IGKV3-11)
QQRSNWPPT

SEQ ID NO: 7004 - protein, 18 aa, Homo sapiens
  Heavy chain CDR3 for antibody 3502 (IGHV1-46)
ARDGDYVWGSYRSNWFDP

SEQ ID NO: 7005 - protein, 9 aa, Homo sapiens
  Light chain CDR3 for antibody 3503 (IGKV3-20)
QQYGSSPYT

SEQ ID NO: 7006 - protein, 12 aa, Homo sapiens
  Heavy chain CDR3 for antibody 3503 (IGHV3-33)
ARDLVRGIRMDV

SEQ ID NO: 7007 - protein, 9 aa, Homo sapiens
  Light chain CDR3 for antibody 3504 (IGKV1D-13)
QQFNNYPHT

SEQ ID NO: 7008 - protein, 9 aa, Homo sapiens
  Heavy chain CDR3 for antibody 3504 (IGHV4-59)
AGGSWDFDY

SEQ ID NO: 7009 - protein, 9 aa, Homo sapiens
  Light chain CDR3 for antibody 3505 (IGKV1-33)
QQYDNLPYT

SEQ ID NO: 7010 - protein, 12 aa, Homo sapiens
  Heavy chain CDR3 for antibody 3505 (IGHV4-61)
ARAVAGYWYFDL

SEQ ID NO: 7011 - protein, 8 aa, Homo sapiens
  Light chain CDR3 for antibody 3506 (IGKV1D-13)
QQFNNYPT

SEQ ID NO: 7012 - protein, 15 aa, Homo sapiens
  Heavy chain CDR3 for antibody 3506 (IGHV3-33)
ARDHLTGYYYYGMDV

SEQ ID NO: 7013 - protein, 10 aa, Homo sapiens
  Light chain CDR3 for antibody 3507 (IGKV3-11)
QQRSNWPIFT

SEQ ID NO: 7014 - protein, 13 aa, Homo sapiens
  Heavy chain CDR3 for antibody 3507 (IGHV4-39)
ARQWPSGYWYFDL

SEQ ID NO: 7015 - protein, 9 aa, Homo sapiens
  Light chain CDR3 for antibody 3508 (IGKV1D-13)
QQFNNYPHT

SEQ ID NO: 7016 - protein, 17 aa, Homo sapiens
  Heavy chain CDR3 for antibody 3508 (IGHV3-33)
ARGDGDILTGYYEWFDP

SEQ ID NO: 7017 - protein, 9 aa, Homo sapiens
  Light chain CDR3 for antibody 3509 (IGKV1-16)
QQYNSYPYT

SEQ ID NO: 7018 - protein, 13 aa, Homo sapiens
  Heavy chain CDR3 for antibody 3509 (IGHV3-33)
ARYYCGGDCYLDY

SEQ ID NO: 7019 - protein, 9 aa, Homo sapiens
  Light chain CDR3 for antibody 3510 (IGKV1-9)
QQLNSYPYT

SEQ ID NO: 7020 - protein, 18 aa, Homo sapiens
  Heavy chain CDR3 for antibody 3510 (IGHV1-18)
ARDRGYYYGSGSYSPFDY

SEQ ID NO: 7021 - protein, 9 aa, Homo sapiens
  Light chain CDR3 for antibody 3511 (IGKV5-2)
LQHDNFPYT

SEQ ID NO: 7022 - protein, 18 aa, Homo sapiens
  Heavy chain CDR3 for antibody 3511 (IGHV3-33)
ARDQGIVVLPGAPWYFDP

SEQ ID NO: 7023 - protein, 9 aa, Homo sapiens
  Light chain CDR3 for antibody 3512 (IGKV1-9)
QQLNSYPYT

SEQ ID NO: 7024 - protein, 14 aa, Homo sapiens
  Heavy chain CDR3 for antibody 3512 (IGHV3-33)
ARDGAAAALDAFDI

SEQ ID NO: 7025 - protein, 8 aa, Homo sapiens
  Light chain CDR3 for antibody 3513 (IGKV1-5)
QQYNSYYT

SEQ ID NO: 7026 - protein, 13 aa, Homo sapiens
  Heavy chain CDR3 for antibody 3513 (IGHV4-39)
ARQWPSGYWYFDL

SEQ ID NO: 7027 - protein, 9 aa, Homo sapiens
  Light chain CDR3 for antibody 3514 (IGKV3D-7)
QQDYNLPYT

SEQ ID NO: 7028 - protein, 12 aa, Homo sapiens
  Heavy chain CDR3 for antibody 3514 (IGHV4-39)
ARQMVREGWFDP

SEQ ID NO: 7029 - protein, 9 aa, Homo sapiens
  Light chain CDR3 for antibody 3515 (IGKV1-17)
LQHHSYPYT

SEQ ID NO: 7030 - protein, 20 aa, Homo sapiens
  Heavy chain CDR3 for antibody 3515 (IGHV3-20)
ARDPPRIVGTTYYYYYVMDV

SEQ ID NO: 7031 - protein, 9 aa, Homo sapiens
  Light chain CDR3 for antibody 3516 (IGKV1-39)
QQSYRTPLT

SEQ ID NO: 7032 - protein, 9 aa, Homo sapiens
  Heavy chain CDR3 for antibody 3516 (IGHV3-23)
AKEQQLFDY

SEQ ID NO: 7033 - protein, 9 aa, Homo sapiens
  Light chain CDR3 for antibody 3517 (IGKV6-21)
HQSSSLPYT

SEQ ID NO: 7034 - protein, 15 aa, Homo sapiens
  Heavy chain CDR3 for antibody 3517 (IGHV3-23)
AKAGGRYFDWFPFDY

SEQ ID NO: 7035 - protein, 9 aa, Homo sapiens
  Light chain CDR3 for antibody 3518 (IGKV3-11)
QQRSNWMYT

SEQ ID NO: 7036 - protein, 13 aa, Homo sapiens
  Heavy chain CDR3 for antibody 3518 (IGHV4-34)
ASNFYYYYYGMDV

SEQ ID NO: 7037 - protein, 10 aa, Homo sapiens
  Light chain CDR3 for antibody 3519 (IGKV3-11)
QQRSNWPMYT

SEQ ID NO: 7038 - protein, 13 aa, Homo sapiens
  Heavy chain CDR3 for antibody 3519 (IGHV3-33)
ARDQRYSSGWYDY

SEQ ID NO: 7039 - protein, 9 aa, Homo sapiens
  Light chain CDR3 for antibody 3520 (IGKV1D-16)
QQYNSYPYT

SEQ ID NO: 7040 - protein, 17 aa, Homo sapiens
  Heavy chain CDR3 for antibody 3520 (IGHV3-33)
ARAYYDILTGYYIHCDY

SEQ ID NO: 7041 - protein, 9 aa, Homo sapiens
  Light chain CDR3 for antibody 3521 (IGKV1-17)
LQHNSYPYT

SEQ ID NO: 7042 - protein, 11 aa, Homo sapiens
  Heavy chain CDR3 for antibody 3521 (IGHV3-23)
AKEGTYFDIPH

SEQ ID NO: 7043 - protein, 9 aa, Homo sapiens
  Light chain CDR3 for antibody 3522 (IGKV2-30)
MQGTHWPLT

SEQ ID NO: 7044 - protein, 14 aa, Homo sapiens
  Heavy chain CDR3 for antibody 3522 (IGHV3-33)
ARDRIAAASSDFDC

SEQ ID NO: 7045 - protein, 9 aa, Homo sapiens
  Light chain CDR3 for antibody 3523 (IGKV1-9)
QQLNTYPWT

SEQ ID NO: 7046 - protein, 13 aa, Homo sapiens
  Heavy chain CDR3 for antibody 3523 (IGHV3-11)
ARDGGAAAGTWDS

SEQ ID NO: 7047 - protein, 9 aa, Homo sapiens
  Light chain CDR3 for antibody 3524 (IGKV1-17)
LQHNSYPYT

SEQ ID NO: 7048 - protein, 15 aa, Homo sapiens
  Heavy chain CDR3 for antibody 3524 (IGHV3-23)
AKAGGRYFDWFPFDY

SEQ ID NO: 7049 - protein, 9 aa, Homo sapiens
  Light chain CDR3 for antibody 3525 (IGKV3-11)
QQRSNWPYT

SEQ ID NO: 7050 - protein, 19 aa, Homo sapiens
  Heavy chain CDR3 for antibody 3525 (IGHV5-51)
ARHGEKGKRITMVRGSLDV

SEQ ID NO: 7051 - protein, 10 aa, Homo sapiens
  Light chain CDR3 for antibody 3526 (IGKV3-11)
QQRSNWPIFT

SEQ ID NO: 7052 - protein, 14 aa, Homo sapiens
  Heavy chain CDR3 for antibody 3526 (IGHV3-33)
ARAGSGYDRDWFDP

SEQ ID NO: 7053 - protein, 10 aa, Homo sapiens
  Light chain CDR3 for antibody 3527 (IGKV1-39)
QQSYSTPMYT

SEQ ID NO: 7054 - protein, 18 aa, Homo sapiens
  Heavy chain CDR3 for antibody 3527 (IGHV3-33)
ARREGIVGATTYYYGMDV

SEQ ID NO: 7055 - protein, 9 aa, Homo sapiens
  Light chain CDR3 for antibody 3528 (IGKV6-21)
HQSSSLPYT

SEQ ID NO: 7056 - protein, 14 aa, Homo sapiens
  Heavy chain CDR3 for antibody 3528 (IGHV1-46)
ARKGIVGGFDAFDV

SEQ ID NO: 7057 - protein, 9 aa, Homo sapiens
  Light chain CDR3 for antibody 3529 (IGKV1D-13)
QRFNNYLYT

SEQ ID NO: 7058 - protein, 14 aa, Homo sapiens
  Heavy chain CDR3 for antibody 3529 (IGHV3-33)
ARGAAAGNFYGLDV

SEQ ID NO: 7059 - protein, 9 aa, Homo sapiens
  Light chain CDR3 for antibody 3530 (IGKV1-9)
QQLNGYPFT

SEQ ID NO: 7060 - protein, 9 aa, Homo sapiens
  Heavy chain CDR3 for antibody 3530 (IGHV1-18)
ARGKDWFDP

SEQ ID NO: 7061 - protein, 9 aa, Homo sapiens
  Light chain CDR3 for antibody 3531 (IGKV5-2)
LQHDNFPYT

SEQ ID NO: 7062 - protein, 12 aa, Homo sapiens
  Heavy chain CDR3 for antibody 3531 (IGHV3-33)
ARKQWLVQAFDI

SEQ ID NO: 7063 - protein, 8 aa, Homo sapiens
  Light chain CDR3 for antibody 3532 (IGKV3D-7)
QQDYNLLT

SEQ ID NO: 7064 - protein, 18 aa, Homo sapiens
  Heavy chain CDR3 for antibody 3532 (IGHV3-23)
AKDRITGTTYGYYSGLDV

SEQ ID NO: 7065 - protein, 10 aa, Homo sapiens
  Light chain CDR3 for antibody 3533 (IGKV3-11)
QQRSNWPIFT

SEQ ID NO: 7066 - protein, 13 aa, Homo sapiens
  Heavy chain CDR3 for antibody 3533 (IGHV3-23)
ARAFFMVRGVIDF

SEQ ID NO: 7067 - protein, 9 aa, Homo sapiens
  Light chain CDR3 for antibody 3534 (IGKV1-27)
QKYNSAPYT

SEQ ID NO: 7068 - protein, 13 aa, Homo sapiens
  Heavy chain CDR3 for antibody 3534 (IGHV3-33)
ARGDNWNDGGFDY

SEQ ID NO: 7069 - protein, 9 aa, Homo sapiens
  Light chain CDR3 for antibody 3535 (IGKV5-2)
LQHDNFPYT

SEQ ID NO: 7070 - protein, 12 aa, Homo sapiens
  Heavy chain CDR3 for antibody 3535 (IGHV3-23)
AKESLYTPTDDY

SEQ ID NO: 7071 - protein, 9 aa, Homo sapiens
  Light chain CDR3 for antibody 3536 (IGKV1D-16)
QQYNSYPLT

SEQ ID NO: 7072 - protein, 16 aa, Homo sapiens
  Heavy chain CDR3 for antibody 3536 (IGHV4-59)
AREPLRYFDWPDAFDI

SEQ ID NO: 7073 - protein, 9 aa, Homo sapiens
  Light chain CDR3 for antibody 3537 (IGKV2D-28)
MQALQTPPT

SEQ ID NO: 7074 - protein, 15 aa, Homo sapiens
  Heavy chain CDR3 for antibody 3537 (IGHV3-30)
ARGAMVRGVDYGMDV

SEQ ID NO: 7075 - protein, 9 aa, Homo sapiens
  Light chain CDR3 for antibody 3538 (IGKV1D-13)
QQFNNYPYT

SEQ ID NO: 7076 - protein, 13 aa, Homo sapiens
  Heavy chain CDR3 for antibody 3538 (IGHV3-33)
ARQSSGWFDAFDI

SEQ ID NO: 7077 - protein, 11 aa, Homo sapiens
  Light chain CDR3 for antibody 3539 (IGKV3-11)
QQRSNWPPTWT

SEQ ID NO: 7078 - protein, 12 aa, Homo sapiens
  Heavy chain CDR3 for antibody 3539 (IGHV1-46)
ARGLTGDHAVDI

SEQ ID NO: 7079 - protein, 9 aa, Homo sapiens
  Light chain CDR3 for antibody 3540 (IGKV1-27)
QKYNSAPYT

SEQ ID NO: 7080 - protein, 12 aa, Homo sapiens
  Heavy chain CDR3 for antibody 3540 (IGHV3-h)
AREDYYYYGMDV

SEQ ID NO: 7081 - protein, 9 aa, Homo sapiens
  Light chain CDR3 for antibody 3541 (IGKV1-6)
LQDYNYPWT

SEQ ID NO: 7082 - protein, 15 aa, Homo sapiens
  Heavy chain CDR3 for antibody 3541 (IGHV3-33)
SRDHLTGYNYYGMDV

SEQ ID NO: 7083 - protein, 9 aa, Homo sapiens
  Light chain CDR3 for antibody 3542 (IGKV1D-13)
QQFNNYPRT

SEQ ID NO: 7084 - protein, 14 aa, Homo sapiens
  Heavy chain CDR3 for antibody 3542 (IGHV1-18)
ARCFGSGSYGWFDP

SEQ ID NO: 7085 - protein, 9 aa, Homo sapiens
  Light chain CDR3 for antibody 3543 (IGKV3-20)
QQYGSSPYT

SEQ ID NO: 7086 - protein, 11 aa, Homo sapiens
  Heavy chain CDR3 for antibody 3543 (IGHV3-33)
ARDRSTGWLDY

SEQ ID NO: 7087 - protein, 9 aa, Homo sapiens
  Light chain CDR3 for antibody 3544 (IGKV5-2)
LQHDNFPYT

SEQ ID NO: 7088 - protein, 14 aa, Homo sapiens
  Heavy chain CDR3 for antibody 3544 (IGHV3-64)
ARDHAAGGYSHSDY

SEQ ID NO: 7089 - protein, 9 aa, Homo sapiens
  Light chain CDR3 for antibody 3545 (IGKV6-21)
HQSSSLPYT

SEQ ID NO: 7090 - protein, 15 aa, Homo sapiens
  Heavy chain CDR3 for antibody 3545 (IGHV3-33)
ARRSILTGSYWYFDL

SEQ ID NO: 7091 - protein, 9 aa, Homo sapiens
  Light chain CDR3 for antibody 3546 (IGKV1-39)
QQSYRTPLT

SEQ ID NO: 7092 - protein, 12 aa, Homo sapiens
  Heavy chain CDR3 for antibody 3546 (IGHV3-33)
ARDSSGWSHFDY

SEQ ID NO: 7093 - protein, 9 aa, Homo sapiens
  Light chain CDR3 for antibody 3547 (IGKV1D-16)
QQYNSYPLT

SEQ ID NO: 7094 - protein, 18 aa, Homo sapiens
  Heavy chain CDR3 for antibody 3547 (IGHV3-23)
AKPDYYGSGSYYNVPFDY

SEQ ID NO: 7095 - protein, 9 aa, Homo sapiens
  Light chain CDR3 for antibody 3548 (IGKV1D-16)
QQYNSYPLT

SEQ ID NO: 7096 - protein, 15 aa, Homo sapiens
  Heavy chain CDR3 for antibody 3548 (IGHV3-33)
ARPPIAVAGPEYFQH

SEQ ID NO: 7097 - protein, 9 aa, Homo sapiens
  Light chain CDR3 for antibody 3549 (IGKV3-11)
QQRSNWPLT

SEQ ID NO: 7098 - protein, 20 aa, Homo sapiens
  Heavy chain CDR3 for antibody 3549 (IGHV1-18)
AREVGIAVAGTLYYYYGMDV

SEQ ID NO: 7099 - protein, 9 aa, Homo sapiens
  Light chain CDR3 for antibody 3550 (IGKV1D-13)
QQFNNYPHT

SEQ ID NO: 7100 - protein, 19 aa, Homo sapiens
  Heavy chain CDR3 for antibody 3550 (IGHV5-51)
ARHGEKGKRITMVRGSLDV

SEQ ID NO: 7101 - protein, 9 aa, Homo sapiens
  Light chain CDR3 for antibody 3551 (IGKV1-6)
LQDYNYPYT

SEQ ID NO: 7102 - protein, 12 aa, Homo sapiens
  Heavy chain CDR3 for antibody 3551 (IGHV3-33)
ARDIVGTSYFDY

SEQ ID NO: 7103 - protein, 9 aa, Homo sapiens
  Light chain CDR3 for antibody 3552 (IGKV1D-13)
QQFNNYPYT

SEQ ID NO: 7104 - protein, 12 aa, Homo sapiens
  Heavy chain CDR3 for antibody 3552 (IGHV3-23)
AKESLYTPTDDY

SEQ ID NO: 7105 - protein, 9 aa, Homo sapiens
  Light chain CDR3 for antibody 3553 (IGKV6-21)
HQSSSLPYT

SEQ ID NO: 7106 - protein, 13 aa, Homo sapiens
  Heavy chain CDR3 for antibody 3553 (IGHV4-39)
ARRDGSYYGYFDY

SEQ ID NO: 7107 - protein, 9 aa, Homo sapiens
  Light chain CDR3 for antibody 3554 (IGKV1-17)
LQHNSYPWT

SEQ ID NO: 7108 - protein, 14 aa, Homo sapiens
  Heavy chain CDR3 for antibody 3554 (IGHV3-33)
ARDIYYSGSYYLDY

SEQ ID NO: 7109 - protein, 10 aa, Homo sapiens
  Light chain CDR3 for antibody 3555 (IGKV1-39)
QQSYSTPMYT

SEQ ID NO: 7110 - protein, 13 aa, Homo sapiens
  Heavy chain CDR3 for antibody 3555 (IGHV3-23)
ASTGDSYYYGMDV

SEQ ID NO: 7111 - protein, 9 aa, Homo sapiens
  Light chain CDR3 for antibody 3556 (IGKV2-30)
MQGTHWPLT

SEQ ID NO: 7112 - protein, 11 aa, Homo sapiens
  Heavy chain CDR3 for antibody 3556 (IGHV3-33)
ARDTWDDYFDY

SEQ ID NO: 7113 - protein, 9 aa, Homo sapiens
  Light chain CDR3 for antibody 3557 (IGKV3-20)
QQYGSSPYT

SEQ ID NO: 7114 - protein, 16 aa, Homo sapiens
  Heavy chain CDR3 for antibody 3557 (IGHV3-20)
AREGYSSSWFDRNFDY

SEQ ID NO: 7115 - protein, 9 aa, Homo sapiens
  Light chain CDR3 for antibody 3558 (IGKV1-27)
QKYNSAPYT

SEQ ID NO: 7116 - protein, 17 aa, Homo sapiens
  Heavy chain CDR3 for antibody 3558 (IGHV3-33)
ARDPARGNVRSFYGLDV

SEQ ID NO: 7117 - protein, 9 aa, Homo sapiens
  Light chain CDR3 for antibody 3559 (IGKV2-30)
MQGTHWPLT

SEQ ID NO: 7118 - protein, 19 aa, Homo sapiens
  Heavy chain CDR3 for antibody 3559 (IGHV1-18)
ARDDILTGYSLYYYYGMDV

SEQ ID NO: 7119 - protein, 9 aa, Homo sapiens
  Light chain CDR3 for antibody 3560 (IGKV6-21)
HQSSSLPYT

SEQ ID NO: 7120 - protein, 9 aa, Homo sapiens
  Heavy chain CDR3 for antibody 3560 (IGHV3-20)
ASIRGYFDY

SEQ ID NO: 7121 - protein, 9 aa, Homo sapiens
  Light chain CDR3 for antibody 3561 (IGKV5-2)
LQHDNFPYT

SEQ ID NO: 7122 - protein, 18 aa, Homo sapiens
  Heavy chain CDR3 for antibody 3561 (IGHV3-33)
ARDGRISLVRGIIDAFDI

SEQ ID NO: 7123 - protein, 9 aa, Homo sapiens
  Light chain CDR3 for antibody 3562 (IGKV3D-7)
QQDYNLPLT

SEQ ID NO: 7124 - protein, 13 aa, Homo sapiens
  Heavy chain CDR3 for antibody 3562 (IGHV3-33)
AKEDGDYHHYFDY

SEQ ID NO: 7125 - protein, 9 aa, Homo sapiens
  Light chain CDR3 for antibody 3563 (IGKV1-9)
QQLNSYPRT

SEQ ID NO: 7126 - protein, 15 aa, Homo sapiens
  Heavy chain CDR3 for antibody 3563 (IGHV1-46)
ARGAVDDYYYYGMDV

SEQ ID NO: 7127 - protein, 9 aa, Homo sapiens
  Light chain CDR3 for antibody 3564 (IGKV1-9)
QQLNSYPLT

SEQ ID NO: 7128 - protein, 15 aa, Homo sapiens
  Heavy chain CDR3 for antibody 3564 (IGHV4-59)
ARDGGYSGYPIGMDV

SEQ ID NO: 7129 - protein, 10 aa, Homo sapiens
  Light chain CDR3 for antibody 3565 (IGKV1-39)
QQSYSTPMYT

SEQ ID NO: 7130 - protein, 17 aa, Homo sapiens
  Heavy chain CDR3 for antibody 3565 (IGHV3-33)
ARGFSGYDGYYYYGMDV

SEQ ID NO: 7131 - protein, 9 aa, Homo sapiens
  Light chain CDR3 for antibody 3566 (IGKV3-15)
QQYNNWPLT

SEQ ID NO: 7132 - protein, 13 aa, Homo sapiens
  Heavy chain CDR3 for antibody 3566 (IGHV4-39)
ARHEVMVRGVFDY

SEQ ID NO: 7133 - protein, 9 aa, Homo sapiens
  Light chain CDR3 for antibody 3567 (IGKV5-2)
LQHDNFPWT

SEQ ID NO: 7134 - protein, 17 aa, Homo sapiens
  Heavy chain CDR3 for antibody 3567 (IGHV1-8)
ARGDYYGSGSPYWYFDL

SEQ ID NO: 7135 - protein, 9 aa, Homo sapiens
  Light chain CDR3 for antibody 3568 (IGKV1-27)
QKYNSAPYT

SEQ ID NO: 7136 - protein, 19 aa, Homo sapiens
  Heavy chain CDR3 for antibody 3568 (IGHV3-33)
ARGPYYDILTGYGYYGMDV

SEQ ID NO: 7137 - protein, 9 aa, Homo sapiens
  Light chain CDR3 for antibody 3569 (IGKV2-30)
MQGTHWPLT

SEQ ID NO: 7138 - protein, 10 aa, Homo sapiens
  Heavy chain CDR3 for antibody 3569 (IGHV3-23)
AKGDRWRFDP

SEQ ID NO: 7139 - protein, 9 aa, Homo sapiens
  Light chain CDR3 for antibody 3570 (IGKV3D-7)
QQDYKLPLT

SEQ ID NO: 7140 - protein, 14 aa, Homo sapiens
  Heavy chain CDR3 for antibody 3570 (IGHV1-46)
ARRGIVGALDAFDI

SEQ ID NO: 7141 - protein, 9 aa, Homo sapiens
  Light chain CDR3 for antibody 3571 (IGKV1D-13)
QQFNNYPYT

SEQ ID NO: 7142 - protein, 12 aa, Homo sapiens
  Heavy chain CDR3 for antibody 3571 (IGHV3-33)
ARAGMGAPYFDY

SEQ ID NO: 7143 - protein, 9 aa, Homo sapiens
  Light chain CDR3 for antibody 3572 (IGKV2-30)
MQGTHWPLT

SEQ ID NO: 7144 - protein, 15 aa, Homo sapiens
  Heavy chain CDR3 for antibody 3572 (IGHV3-30)
ARRGYGSGSPDAFDL

SEQ ID NO: 7145 - protein, 9 aa, Homo sapiens
  Light chain CDR3 for antibody 3573 (IGKV5-2)
LQHDKFPYT

SEQ ID NO: 7146 - protein, 12 aa, Homo sapiens
  Heavy chain CDR3 for antibody 3573 (IGHV3-33)
ARDPGYFFGLDV

SEQ ID NO: 7147 - protein, 9 aa, Homo sapiens
  Light chain CDR3 for antibody 3574 (IGKV1-17)
LQHNSYPYT

SEQ ID NO: 7148 - protein, 18 aa, Homo sapiens
  Heavy chain CDR3 for antibody 3574 (IGHV3-64)
ARDEYYYGSGSYYNYFDW

SEQ ID NO: 7149 - protein, 9 aa, Homo sapiens
  Light chain CDR3 for antibody 3575 (IGKV1-16)
QQYNSYPYT

SEQ ID NO: 7150 - protein, 9 aa, Homo sapiens
  Heavy chain CDR3 for antibody 3575 (IGHV3-23)
AKDYGSESP

SEQ ID NO: 7151 - protein, 9 aa, Homo sapiens
  Light chain CDR3 for antibody 3576 (IGKV1-6)
LQDYNYPYT

SEQ ID NO: 7152 - protein, 17 aa, Homo sapiens
  Heavy chain CDR3 for antibody 3576 (IGHV3-33)
AREGTMVRGYYYYGMDV

SEQ ID NO: 7153 - protein, 9 aa, Homo sapiens
  Light chain CDR3 for antibody 3577 (IGKV6-21)
HQSSSLPYT

SEQ ID NO: 7154 - protein, 15 aa, Homo sapiens
  Heavy chain CDR3 for antibody 3577 (IGHV1-46)
ARGAVDDYYYYGMDV

SEQ ID NO: 7155 - protein, 9 aa, Homo sapiens
  Light chain CDR3 for antibody 3578 (IGKV1-6)
LQDYNYPYT

SEQ ID NO: 7156 - protein, 7 aa, Homo sapiens
  Heavy chain CDR3 for antibody 3578 (IGHV3-33)
ARELFNY

SEQ ID NO: 7157 - protein, 9 aa, Homo sapiens
  Light chain CDR3 for antibody 3579 (IGKV1-17)
QQLNSYPYT

SEQ ID NO: 7158 - protein, 14 aa, Homo sapiens
  Heavy chain CDR3 for antibody 3579 (IGHV3-64)
ARKPDYYGSGYFDY

SEQ ID NO: 7159 - protein, 9 aa, Homo sapiens
  Light chain CDR3 for antibody 3580 (IGKV1-9)
QQYNSYPLT

SEQ ID NO: 7160 - protein, 12 aa, Homo sapiens
  Heavy chain CDR3 for antibody 3580 (IGHV3-33)
ARDLVRGIRMDV

SEQ ID NO: 7161 - protein, 9 aa, Homo sapiens
  Light chain CDR3 for antibody 3581 (IGKV1-16)
QQYNRYPYT

SEQ ID NO: 7162 - protein, 11 aa, Homo sapiens
  Heavy chain CDR3 for antibody 3581 (IGHV4-59)
ARSLRYSFFDY

SEQ ID NO: 7163 - protein, 9 aa, Homo sapiens
  Light chain CDR3 for antibody 3582 (IGKV1-33)
QQYDNLPFT

SEQ ID NO: 7164 - protein, 11 aa, Homo sapiens
  Heavy chain CDR3 for antibody 3582 (IGHV3-33)
ARDKSSGWSDY

SEQ ID NO: 7165 - protein, 9 aa, Homo sapiens
  Light chain CDR3 for antibody 3583 (IGKV6-21)
HQSSSLPYT

SEQ ID NO: 7166 - protein, 19 aa, Homo sapiens
  Heavy chain CDR3 for antibody 3583 (IGHV1-18)
ARDTTLVRGLMNYYYGMDV

SEQ ID NO: 7167 - protein, 9 aa, Homo sapiens
  Light chain CDR3 for antibody 3584 (IGKV2-30)
MQGTHWPLT

SEQ ID NO: 7168 - protein, 21 aa, Homo sapiens
  Heavy chain CDR3 for antibody 3584 (IGHV3-23)
AKDIDYYGSGSYPLYYYGMDV

SEQ ID NO: 7169 - protein, 9 aa, Homo sapiens
  Light chain CDR3 for antibody 3585 (IGKV3D-20)
QQYGSSPYT

SEQ ID NO: 7170 - protein, 12 aa, Homo sapiens
  Heavy chain CDR3 for antibody 3585 (IGHV3-33)
ARNYDILDYFDY

SEQ ID NO: 7171 - protein, 9 aa, Homo sapiens
  Light chain CDR3 for antibody 3586 (IGKV3-11)
QQRSNWPYT

SEQ ID NO: 7172 - protein, 17 aa, Homo sapiens
  Heavy chain CDR3 for antibody 3586 (IGHV3-33)
AKSYCSSTTCYNGYFDY

SEQ ID NO: 7173 - protein, 9 aa, Homo sapiens
  Light chain CDR3 for antibody 3587 (IGKV3-15)
QQYNNWPLT

SEQ ID NO: 7174 - protein, 16 aa, Homo sapiens
  Heavy chain CDR3 for antibody 3587 (IGHV1-24)
ATEDSSSTYYYYGLDV

SEQ ID NO: 7175 - protein, 9 aa, Homo sapiens
  Light chain CDR3 for antibody 3588 (IGKV1-17)
LQHNSYPYT

SEQ ID NO: 7176 - protein, 20 aa, Homo sapiens
  Heavy chain CDR3 for antibody 3588 (IGHV3-23)
AKDRMTTVTSYYYYYYGMDV

SEQ ID NO: 7177 - protein, 9 aa, Homo sapiens
  Light chain CDR3 for antibody 3589 (IGKV3D-20)
QQYGSSPYT

SEQ ID NO: 7178 - protein, 22 aa, Homo sapiens
  Heavy chain CDR3 for antibody 3589 (IGHV3-33)
ARMYYDILTGYYKDYYYYGMDV

SEQ ID NO: 7179 - protein, 9 aa, Homo sapiens
  Light chain CDR3 for antibody 3590 (IGKV5-2)
LQHDNFPWT

SEQ ID NO: 7180 - protein, 12 aa, Homo sapiens
  Heavy chain CDR3 for antibody 3590 (IGHV3-33)
ARKGYGLYVLDV

SEQ ID NO: 7181 - protein, 10 aa, Homo sapiens
  Light chain CDR3 for antibody 3591 (IGKV1-17)
LQHNSYPMYT

SEQ ID NO: 7182 - protein, 13 aa, Homo sapiens
  Heavy chain CDR3 for antibody 3591 (IGHV4-34)
ASNFYYYYYGMDV

SEQ ID NO: 7183 - protein, 9 aa, Homo sapiens
  Light chain CDR3 for antibody 3592 (IGKV3-11)
QQRSNWPPT

SEQ ID NO: 7184 - protein, 13 aa, Homo sapiens
  Heavy chain CDR3 for antibody 3592 (IGHV3-53)
ARSGSYWGYYFDY

SEQ ID NO: 7185 - protein, 9 aa, Homo sapiens
  Light chain CDR3 for antibody 3593 (IGKV5-2)
LQHDNFPYT

SEQ ID NO: 7186 - protein, 9 aa, Homo sapiens
  Heavy chain CDR3 for antibody 3593 (IGHV3-20)
ASIRGYFDY

SEQ ID NO: 7187 - protein, 9 aa, Homo sapiens
  Light chain CDR3 for antibody 3594 (IGKV5-2)
LQHDNFPYT

SEQ ID NO: 7188 - protein, 14 aa, Homo sapiens
  Heavy chain CDR3 for antibody 3594 (IGHV3-33)
AREEDYYYYYDMDV

SEQ ID NO: 7189 - protein, 9 aa, Homo sapiens
  Light chain CDR3 for antibody 3595 (IGKV1D-13)
QQFNNYPRT

SEQ ID NO: 7190 - protein, 13 aa, Homo sapiens
  Heavy chain CDR3 for antibody 3595 (IGHV1-2)
ARDGVRGSFGMDV

SEQ ID NO: 7191 - protein, 9 aa, Homo sapiens
  Light chain CDR3 for antibody 3596 (IGKV2-30)
MQGTHWPLT

SEQ ID NO: 7192 - protein, 12 aa, Homo sapiens
  Heavy chain CDR3 for antibody 3596 (IGHV4-61)
ARVYSSGWLFDY

SEQ ID NO: 7193 - protein, 9 aa, Homo sapiens
  Light chain CDR3 for antibody 3597 (IGKV3D-7)
QQDYTLPLT

SEQ ID NO: 7194 - protein, 16 aa, Homo sapiens
  Heavy chain CDR3 for antibody 3597 (IGHV4-59)
ARDTPYYSGSGRPFDS

SEQ ID NO: 7195 - protein, 10 aa, Homo sapiens
  Light chain CDR3 for antibody 3598 (IGKV3-20)
QQYGRSPPVT

SEQ ID NO: 7196 - protein, 14 aa, Homo sapiens
  Heavy chain CDR3 for antibody 3598 (IGHV3-23)
AKSRIVGALYYFDY

SEQ ID NO: 7197 - protein, 9 aa, Homo sapiens
  Light chain CDR3 for antibody 3599 (IGKV1D-13)
QHFNNYMYT

SEQ ID NO: 7198 - protein, 11 aa, Homo sapiens
  Heavy chain CDR3 for antibody 3599 (IGHV4-59)
AREMGHDTFDI

SEQ ID NO: 7199 - protein, 9 aa, Homo sapiens
  Light chain CDR3 for antibody 3600 (IGKV1-39)
QQSYSTPLT

SEQ ID NO: 7200 - protein, 16 aa, Homo sapiens
  Heavy chain CDR3 for antibody 3600 (IGHV3-20)
AREGYSSSWFDRNFDY

SEQ ID NO: 7201 - protein, 10 aa, Homo sapiens
  Light chain CDR3 for antibody 3601 (IGKV3-11)
QQRSNWPIFT

SEQ ID NO: 7202 - protein, 10 aa, Homo sapiens
  Heavy chain CDR3 for antibody 3601 (IGHV3-33)
ARDGSGSQPI

SEQ ID NO: 7203 - protein, 9 aa, Homo sapiens
  Light chain CDR3 for antibody 3602 (IGKV3-11)
QQRSNWMYT

SEQ ID NO: 7204 - protein, 18 aa, Homo sapiens
  Heavy chain CDR3 for antibody 3602 (IGHV3-33)
ARGLLWFGVSYYYYGMDV

SEQ ID NO: 7205 - protein, 9 aa, Homo sapiens
  Light chain CDR3 for antibody 3603 (IGKV3-20)
LQYGSSPYT

SEQ ID NO: 7206 - protein, 12 aa, Homo sapiens
  Heavy chain CDR3 for antibody 3603 (IGHV1-46)
ARGLTGDHASDI

SEQ ID NO: 7207 - protein, 9 aa, Homo sapiens
  Light chain CDR3 for antibody 3604 (IGKV5-2)
LQHDNFPWT

SEQ ID NO: 7208 - protein, 19 aa, Homo sapiens
  Heavy chain CDR3 for antibody 3604 (IGHV1-18)
ARDTTLVRGLMNYYYGMDV

SEQ ID NO: 7209 - protein, 9 aa, Homo sapiens
  Light chain CDR3 for antibody 3605 (IGKV3-15)
QQYNNWPLT

SEQ ID NO: 7210 - protein, 14 aa, Homo sapiens
  Heavy chain CDR3 for antibody 3605 (IGHV3-33)
ARAGSGYDRDWFDP

SEQ ID NO: 7211 - protein, 9 aa, Homo sapiens
  Light chain CDR3 for antibody 3606 (IGKV3-20)
QQYGSSPRT

SEQ ID NO: 7212 - protein, 13 aa, Homo sapiens
  Heavy chain CDR3 for antibody 3606 (IGHV4-39)
ARRGVVAPAAFDY

SEQ ID NO: 7213 - protein, 9 aa, Homo sapiens
  Light chain CDR3 for antibody 3607 (IGKV2-30)
MQGTHWPLT

SEQ ID NO: 7214 - protein, 18 aa, Homo sapiens
  Heavy chain CDR3 for antibody 3607 (IGHV3-23)
AKEGNYYGSGSYWGYFDP

SEQ ID NO: 7215 - protein, 9 aa, Homo sapiens
  Light chain CDR3 for antibody 3608 (IGKV1D-13)
QQFNNYPYT

SEQ ID NO: 7216 - protein, 19 aa, Homo sapiens
  Heavy chain CDR3 for antibody 3608 (IGHV3-23)
AKDGRSGSYDYYYYYGMDV

SEQ ID NO: 7217 - protein, 9 aa, Homo sapiens
  Light chain CDR3 for antibody 3609 (IGKV6-21)
HQSSSLPYT

SEQ ID NO: 7218 - protein, 10 aa, Homo sapiens
  Heavy chain CDR3 for antibody 3609 (IGHV3-30)
ARGSWYGFDY

SEQ ID NO: 7219 - protein, 9 aa, Homo sapiens
  Light chain CDR3 for antibody 3610 (IGKV1D-13)
QHFNNYMYT

SEQ ID NO: 7220 - protein, 12 aa, Homo sapiens
  Heavy chain CDR3 for antibody 3610 (IGHV4-39)
ARHGSGSSYFDY

SEQ ID NO: 7221 - protein, 8 aa, Homo sapiens
  Light chain CDR3 for antibody 3611 (IGKV6-21)
HQSSSLPT

SEQ ID NO: 7222 - protein, 15 aa, Homo sapiens
  Heavy chain CDR3 for antibody 3611 (IGHV3-30)
ARGAMVRGVDYGMDV

SEQ ID NO: 7223 - protein, 9 aa, Homo sapiens
  Light chain CDR3 for antibody 3612 (IGKV3-11)
QQRSNWPLT

SEQ ID NO: 7224 - protein, 19 aa, Homo sapiens
  Heavy chain CDR3 for antibody 3612 (IGHV3-33)
ARGVRLRYFDPYYYYGMDV

SEQ ID NO: 7225 - protein, 9 aa, Homo sapiens
  Light chain CDR3 for antibody 3613 (IGKV1-39)
QQSYSTPLT

SEQ ID NO: 7226 - protein, 16 aa, Homo sapiens
  Heavy chain CDR3 for antibody 3613 (IGHV3-33)
ARGDDILTHQYYGVDV

SEQ ID NO: 7227 - protein, 9 aa, Homo sapiens
  Light chain CDR3 for antibody 3614 (IGKV3-11)
QQRSNWPYT

SEQ ID NO: 7228 - protein, 13 aa, Homo sapiens
  Heavy chain CDR3 for antibody 3614 (IGHV3-33)
ARRATLVRGVFDP

SEQ ID NO: 7229 - protein, 9 aa, Homo sapiens
  Light chain CDR3 for antibody 3615 (IGKV1-9)
QQLNSYPYT

SEQ ID NO: 7230 - protein, 14 aa, Homo sapiens
  Heavy chain CDR3 for antibody 3615 (IGHV3-64)
ARGGGAVTGTNFDY

SEQ ID NO: 7231 - protein, 9 aa, Homo sapiens
  Light chain CDR3 for antibody 3616 (IGKV3-11)
QQRSNWPLT

SEQ ID NO: 7232 - protein, 14 aa, Homo sapiens
  Heavy chain CDR3 for antibody 3616 (IGHV3-33)
ARAISGSSYWYFDL

SEQ ID NO: 7233 - protein, 9 aa, Homo sapiens
  Light chain CDR3 for antibody 3617 (IGKV1-17)
LQHNSYPYT

SEQ ID NO: 7234 - protein, 11 aa, Homo sapiens
  Heavy chain CDR3 for antibody 3617 (IGHV3-23)
AKKVYDYGSDY

SEQ ID NO: 7235 - protein, 9 aa, Homo sapiens
  Light chain CDR3 for antibody 3618 (IGKV2D-28)
MQVLQTPYT

SEQ ID NO: 7236 - protein, 19 aa, Homo sapiens
  Heavy chain CDR3 for antibody 3618 (IGHV3-33)
ARGGVVRGVIEYYYYGMDV

SEQ ID NO: 7237 - protein, 11 aa, Homo sapiens
  Light chain CDR3 for antibody 3619 (IGKV3-11)
QQRSNWPPTWT

SEQ ID NO: 7238 - protein, 13 aa, Homo sapiens
  Heavy chain CDR3 for antibody 3619 (IGHV4-39)
ARHEVMVRGVFDY

SEQ ID NO: 7239 - protein, 10 aa, Homo sapiens
  Light chain CDR3 for antibody 3620 (IGKV3-11)
QQRSNWPALT

SEQ ID NO: 7240 - protein, 14 aa, Homo sapiens
  Heavy chain CDR3 for antibody 3620 (IGHV3-23)
AKDRYRGYEGLFDY

SEQ ID NO: 7241 - protein, 9 aa, Homo sapiens
  Light chain CDR3 for antibody 3621 (IGKV4-1)
QQYYSTPWT

SEQ ID NO: 7242 - protein, 15 aa, Homo sapiens
  Heavy chain CDR3 for antibody 3621 (IGHV3-30)
ARGAMVRGVDYGMDV

SEQ ID NO: 7243 - protein, 9 aa, Homo sapiens
  Light chain CDR3 for antibody 3622 (IGKV2-30)
MQGTHWPLT

SEQ ID NO: 7244 - protein, 20 aa, Homo sapiens
  Heavy chain CDR3 for antibody 3622 (IGHV3-20)
ARDLCSSTSCYGYYYYGMDV

SEQ ID NO: 7245 - protein, 9 aa, Homo sapiens
  Light chain CDR3 for antibody 3623 (IGKV6-21)
HQSTSLPFT

SEQ ID NO: 7246 - protein, 11 aa, Homo sapiens
  Heavy chain CDR3 for antibody 3623 (IGHV4-59)
ARDGSWEPFDY

SEQ ID NO: 7247 - protein, 9 aa, Homo sapiens
  Light chain CDR3 for antibody 3624 (IGKV1-17)
LQHNSYPWT

SEQ ID NO: 7248 - protein, 14 aa, Homo sapiens
  Heavy chain CDR3 for antibody 3624 (IGHV3-23)
AKGGDVLTGYYPDY

SEQ ID NO: 7249 - protein, 8 aa, Homo sapiens
  Light chain CDR3 for antibody 3625 (IGKV1D-13)
QQFNNYPT

SEQ ID NO: 7250 - protein, 9 aa, Homo sapiens
  Heavy chain CDR3 for antibody 3625 (IGHV1-8)
ARGRLDFDY

SEQ ID NO: 7251 - protein, 9 aa, Homo sapiens
  Light chain CDR3 for antibody 3626 (IGKV1-17)
LQHNSYPYT

SEQ ID NO: 7252 - protein, 15 aa, Homo sapiens
  Heavy chain CDR3 for antibody 3626 (IGHV3-23)
AKDRGWYDYYYGMDV

SEQ ID NO: 7253 - protein, 9 aa, Homo sapiens
  Light chain CDR3 for antibody 3627 (IGKV3-15)
QQYNNWPYT

SEQ ID NO: 7254 - protein, 14 aa, Homo sapiens
  Heavy chain CDR3 for antibody 3627 (IGHV4-39)
ARRGVVVPPGGMDV

SEQ ID NO: 7255 - protein, 9 aa, Homo sapiens
  Light chain CDR3 for antibody 3628 (IGKV5-2)
LQHDNFPYT

SEQ ID NO: 7256 - protein, 14 aa, Homo sapiens
  Heavy chain CDR3 for antibody 3628 (IGHV3-33)
VSAISGSSYWYFAL

SEQ ID NO: 7257 - protein, 10 aa, Homo sapiens
  Light chain CDR3 for antibody 3629 (IGKV3-11)
QQRSNWPIFT

SEQ ID NO: 7258 - protein, 9 aa, Homo sapiens
  Heavy chain CDR3 for antibody 3629 (IGHV3-13)
ARDRWYFDL

SEQ ID NO: 7259 - protein, 9 aa, Homo sapiens
  Light chain CDR3 for antibody 3630 (IGKV1-16)
QQYNSYPYT

SEQ ID NO: 7260 - protein, 16 aa, Homo sapiens
  Heavy chain CDR3 for antibody 3630 (IGHV1-46)
ARYHYGSGSYYNVGDY

SEQ ID NO: 7261 - protein, 8 aa, Homo sapiens
  Light chain CDR3 for antibody 3631 (IGKV3-20)
QQYGSSLT

SEQ ID NO: 7262 - protein, 15 aa, Homo sapiens
  Heavy chain CDR3 for antibody 3631 (IGHV3-30)
ARGAMVRGVDYGMDV

SEQ ID NO: 7263 - protein, 9 aa, Homo sapiens
  Light chain CDR3 for antibody 3632 (IGKV3-15)
QQYNNWPLT

SEQ ID NO: 7264 - protein, 13 aa, Homo sapiens
  Heavy chain CDR3 for antibody 3632 (IGHV3-33)
ARIDYYSYYGMDV

SEQ ID NO: 7265 - protein, 9 aa, Homo sapiens
  Light chain CDR3 for antibody 3633 (IGKV3D-7)
QQDYNLPLT

SEQ ID NO: 7266 - protein, 13 aa, Homo sapiens
  Heavy chain CDR3 for antibody 3633 (IGHV1-18)
ARSITMVRGVIGY

SEQ ID NO: 7267 - protein, 9 aa, Homo sapiens
  Light chain CDR3 for antibody 3634 (IGKV5-2)
LQHDNFPYT

SEQ ID NO: 7268 - protein, 13 aa, Homo sapiens
  Heavy chain CDR3 for antibody 3634 (IGHV3-33)
ARGRGYNYGYGDY

SEQ ID NO: 7269 - protein, 9 aa, Homo sapiens
  Light chain CDR3 for antibody 3635 (IGKV3-20)
QQYGSSPYT

SEQ ID NO: 7270 - protein, 17 aa, Homo sapiens
  Heavy chain CDR3 for antibody 3635 (IGHV3-30)
ARDGVGATSYYYYGMDV

SEQ ID NO: 7271 - protein, 9 aa, Homo sapiens
  Light chain CDR3 for antibody 3636 (IGKV1D-13)
QQFNNYPYT

SEQ ID NO: 7272 - protein, 12 aa, Homo sapiens
  Heavy chain CDR3 for antibody 3636 (IGHV3-33)
AKDPGWQQLAEY

SEQ ID NO: 7273 - protein, 10 aa, Homo sapiens
  Light chain CDR3 for antibody 3637 (IGKV3-20)
QQYGRSPPVT

SEQ ID NO: 7274 - protein, 14 aa, Homo sapiens
  Heavy chain CDR3 for antibody 3637 (IGHV3-33)
ARGAAAGNFYGLDV

SEQ ID NO: 7275 - protein, 8 aa, Homo sapiens
  Light chain CDR3 for antibody 3638 (IGKV3-20)
QQYGSSLT

SEQ ID NO: 7276 - protein, 11 aa, Homo sapiens
  Heavy chain CDR3 for antibody 3638 (IGHV3-33)
ARDRSSGPFDY

SEQ ID NO: 7277 - protein, 9 aa, Homo sapiens
  Light chain CDR3 for antibody 3639 (IGKV1-6)
LQDYNYPWT

SEQ ID NO: 7278 - protein, 17 aa, Homo sapiens
  Heavy chain CDR3 for antibody 3639 (IGHV3-33)
ARVYYDILTGYSPAFDI

SEQ ID NO: 7279 - protein, 9 aa, Homo sapiens
  Light chain CDR3 for antibody 3640 (IGKV1D-16)
QQYNSYPPT

SEQ ID NO: 7280 - protein, 14 aa, Homo sapiens
  Heavy chain CDR3 for antibody 3640 (IGHV3-33)
ARDHSGSYFNWFDP

SEQ ID NO: 7281 - protein, 9 aa, Homo sapiens
  Light chain CDR3 for antibody 3641 (IGKV3D-7)
QQDYNLPLT

SEQ ID NO: 7282 - protein, 13 aa, Homo sapiens
  Heavy chain CDR3 for antibody 3641 (IGHV3-33)
ARQSSGWFDAFDI

SEQ ID NO: 7283 - protein, 8 aa, Homo sapiens
  Light chain CDR3 for antibody 3642 (IGKV1D-13)
QQFNNYPT

SEQ ID NO: 7284 - protein, 13 aa, Homo sapiens
  Heavy chain CDR3 for antibody 3642 (IGHV3-33)
ARDQRYSSGWYDY

SEQ ID NO: 7285 - protein, 9 aa, Homo sapiens
  Light chain CDR3 for antibody 3643 (IGKV1-9)
QQLKSYLYT

SEQ ID NO: 7286 - protein, 13 aa, Homo sapiens
  Heavy chain CDR3 for antibody 3643 (IGHV3-11)
ARDGGAAAGTWDS

SEQ ID NO: 7287 - protein, 9 aa, Homo sapiens
  Light chain CDR3 for antibody 3644 (IGKV3D-7)
QQDYEFPLT

SEQ ID NO: 7288 - protein, 18 aa, Homo sapiens
  Heavy chain CDR3 for antibody 3644 (IGHV4-59)
AREGHYYTSGSYYKAFDY

SEQ ID NO: 7289 - protein, 9 aa, Homo sapiens
  Light chain CDR3 for antibody 3645 (IGKV5-2)
LQHDNFPWT

SEQ ID NO: 7290 - protein, 19 aa, Homo sapiens
  Heavy chain CDR3 for antibody 3645 (IGHV4-39)
ARLDYDFLTDYYRPYFFAY

SEQ ID NO: 7291 - protein, 9 aa, Homo sapiens
  Light chain CDR3 for antibody 3646 (IGKV3-15)
QQYNNWPLT

SEQ ID NO: 7292 - protein, 12 aa, Homo sapiens
  Heavy chain CDR3 for antibody 3646 (IGHV1-18)
ARVLFDGDYFDY

SEQ ID NO: 7293 - protein, 9 aa, Homo sapiens
  Light chain CDR3 for antibody 3647 (IGKV1-6)
LQDYNYPYT

SEQ ID NO: 7294 - protein, 13 aa, Homo sapiens
  Heavy chain CDR3 for antibody 3647 (IGHV3-33)
ARAFTMVRGVIDY

SEQ ID NO: 7295 - protein, 8 aa, Homo sapiens
  Light chain CDR3 for antibody 3648 (IGKV3-20)
QQYGRSFT

SEQ ID NO: 7296 - protein, 13 aa, Homo sapiens
  Heavy chain CDR3 for antibody 3648 (IGHV4-39)
ARHVLLWFGEFDP

SEQ ID NO: 7297 - protein, 9 aa, Homo sapiens
  Light chain CDR3 for antibody 3649 (IGKV6-21)
HQSSSLPYT

SEQ ID NO: 7298 - protein, 12 aa, Homo sapiens
  Heavy chain CDR3 for antibody 3649 (IGHV4-39)
ARDSGSYYFFDY

SEQ ID NO: 7299 - protein, 9 aa, Homo sapiens
  Light chain CDR3 for antibody 3650 (IGKV1-33)
QQYDNLPFT

SEQ ID NO: 7300 - protein, 16 aa, Homo sapiens
  Heavy chain CDR3 for antibody 3650 (IGHV3-23)
AKEGMVLRYFDWLWDY

SEQ ID NO: 7301 - protein, 9 aa, Homo sapiens
  Light chain CDR3 for antibody 3651 (IGKV1-6)
LQDYNYPYT

SEQ ID NO: 7302 - protein, 17 aa, Homo sapiens
  Heavy chain CDR3 for antibody 3651 (IGHV3-33)
ARAYYDILTGYYIHCDY

SEQ ID NO: 7303 - protein, 9 aa, Homo sapiens
  Light chain CDR3 for antibody 3652 (IGKV1D-13)
QQFNNYPHT

SEQ ID NO: 7304 - protein, 16 aa, Homo sapiens
  Heavy chain CDR3 for antibody 3652 (IGHV4-59)
ARDTPYYSGSGRPFDS

SEQ ID NO: 7305 - protein, 9 aa, Homo sapiens
  Light chain CDR3 for antibody 3653 (IGKV1-27)
QKYNSAPYT

SEQ ID NO: 7306 - protein, 14 aa, Homo sapiens
  Heavy chain CDR3 for antibody 3653 (IGHV3-33)
ARDRRDFYYYGMDV

SEQ ID NO: 7307 - protein, 9 aa, Homo sapiens
  Light chain CDR3 for antibody 3654 (IGKV3D-20)
QQYGSSPYT

SEQ ID NO: 7308 - protein, 15 aa, Homo sapiens
  Heavy chain CDR3 for antibody 3654 (IGHV3-33)
ARDEHYDILTGYWGY

SEQ ID NO: 7309 - protein, 8 aa, Homo sapiens
  Light chain CDR3 for antibody 3655 (IGKV3D-7)
QQDYNLLT

SEQ ID NO: 7310 - protein, 17 aa, Homo sapiens
  Heavy chain CDR3 for antibody 3655 (IGHV3-33)
ARESLKLGIYYYYGMDV

SEQ ID NO: 7311 - protein, 9 aa, Homo sapiens
  Light chain CDR3 for antibody 3656 (IGKV3D-20)
QQYGSSPYT

SEQ ID NO: 7312 - protein, 13 aa, Homo sapiens
  Heavy chain CDR3 for antibody 3656 (IGHV3-33)
ARDDDYGDYPFDY

SEQ ID NO: 7313 - protein, 9 aa, Homo sapiens
  Light chain CDR3 for antibody 3657 (IGKV1-6)
QQEYNYPLT

SEQ ID NO: 7314 - protein, 14 aa, Homo sapiens
  Heavy chain CDR3 for antibody 3657 (IGHV1-2)
ARDYYGSGNYYMGY

SEQ ID NO: 7315 - protein, 9 aa, Homo sapiens
  Light chain CDR3 for antibody 3658 (IGKV5-2)
LQHDNFPWT

SEQ ID NO: 7316 - protein, 11 aa, Homo sapiens
  Heavy chain CDR3 for antibody 3658 (IGHV1-24)
ATYFGSGSLDY

SEQ ID NO: 7317 - protein, 9 aa, Homo sapiens
  Light chain CDR3 for antibody 3659 (IGKV1-9)
QQLISYPLT

SEQ ID NO: 7318 - protein, 17 aa, Homo sapiens
  Heavy chain CDR3 for antibody 3659 (IGHV1-18)
ARDEGYDILTGYPHFDY

SEQ ID NO: 7319 - protein, 10 aa, Homo sapiens
  Light chain CDR3 for antibody 3660 (IGKV3-15)
QQYNNWPPYT

SEQ ID NO: 7320 - protein, 15 aa, Homo sapiens
  Heavy chain CDR3 for antibody 3660 (IGHV3-30)
ARGAMVRGVDYGMDV

SEQ ID NO: 7321 - protein, 9 aa, Homo sapiens
  Light chain CDR3 for antibody 3661 (IGKV1-6)
LQDYNYPYT

SEQ ID NO: 7322 - protein, 20 aa, Homo sapiens
  Heavy chain CDR3 for antibody 3661 (IGHV3-33)
ARDRCSSTSCYGYYYYGMDV

SEQ ID NO: 7323 - protein, 9 aa, Homo sapiens
  Light chain CDR3 for antibody 3662 (IGKV3-11)
QQRSNWPYT

SEQ ID NO: 7324 - protein, 19 aa, Homo sapiens
  Heavy chain CDR3 for antibody 3662 (IGHV1-18)
ARDDILTGYSLYYYYGMDV

SEQ ID NO: 7325 - protein, 8 aa, Homo sapiens
  Light chain CDR3 for antibody 3663 (IGKV1-5)
QQYNSYYT

SEQ ID NO: 7326 - protein, 14 aa, Homo sapiens
  Heavy chain CDR3 for antibody 3663 (IGHV3-33)
ARDWNDVYYYGMDV

SEQ ID NO: 7327 - protein, 9 aa, Homo sapiens
  Light chain CDR3 for antibody 3664 (IGKV2-30)
MQGTHWPLT

SEQ ID NO: 7328 - protein, 13 aa, Homo sapiens
  Heavy chain CDR3 for antibody 3664 (IGHV4-59)
ARTMVRGVAPFDY

SEQ ID NO: 7329 - protein, 9 aa, Homo sapiens
  Light chain CDR3 for antibody 3665 (IGKV1-39)
QQSYSTPLT

SEQ ID NO: 7330 - protein, 20 aa, Homo sapiens
  Heavy chain CDR3 for antibody 3665 (IGHV3-33)
ARDPAQLERRYYYFYYGMDV

SEQ ID NO: 7331 - protein, 9 aa, Homo sapiens
  Light chain CDR3 for antibody 3666 (IGKV1-33)
QQYDNLPFT

SEQ ID NO: 7332 - protein, 13 aa, Homo sapiens
  Heavy chain CDR3 for antibody 3666 (IGHV4-34)
ASNFYYYYYGMDV

SEQ ID NO: 7333 - protein, 9 aa, Homo sapiens
  Light chain CDR3 for antibody 3667 (IGKV1-17)
LQHNSYPYT

SEQ ID NO: 7334 - protein, 14 aa, Homo sapiens
  Heavy chain CDR3 for antibody 3667 (IGHV1-46)
ARAYYAFLTGALDI

SEQ ID NO: 7335 - protein, 9 aa, Homo sapiens
  Light chain CDR3 for antibody 3668 (IGKV1-39)
QQSYSTPFT

SEQ ID NO: 7336 - protein, 17 aa, Homo sapiens
  Heavy chain CDR3 for antibody 3668 (IGHV3-23)
AKKGILTGYYPSYGMDV

SEQ ID NO: 7337 - protein, 9 aa, Homo sapiens
  Light chain CDR3 for antibody 3669 (IGKV1-17)
LQHNSYPYT

SEQ ID NO: 7338 - protein, 14 aa, Homo sapiens
  Heavy chain CDR3 for antibody 3669 (IGHV3-20)
ARGGSSGWYDWFDP

SEQ ID NO: 7339 - protein, 9 aa, Homo sapiens
  Light chain CDR3 for antibody 3670 (IGKV1D-13)
QQFNNYPHT

SEQ ID NO: 7340 - protein, 17 aa, Homo sapiens
  Heavy chain CDR3 for antibody 3670 (IGHV4-39)
ARVLRYFDWLSHDAFDI

SEQ ID NO: 7341 - protein, 10 aa, Homo sapiens
  Light chain CDR3 for antibody 3671 (IGKV1-39)
QQSYSTPMYT

SEQ ID NO: 7342 - protein, 12 aa, Homo sapiens
  Heavy chain CDR3 for antibody 3671 (IGHV3-33)
TRGYSSKSYFDY

SEQ ID NO: 7343 - protein, 9 aa, Homo sapiens
  Light chain CDR3 for antibody 3672 (IGKV1-39)
QQSYSTPLT

SEQ ID NO: 7344 - protein, 15 aa, Homo sapiens
  Heavy chain CDR3 for antibody 3672 (IGHV3-23)
AKEFTMVRGVITPDY

SEQ ID NO: 7345 - protein, 9 aa, Homo sapiens
  Light chain CDR3 for antibody 3673 (IGKV3D-7)
QQDYNLPLT

SEQ ID NO: 7346 - protein, 18 aa, Homo sapiens
  Heavy chain CDR3 for antibody 3673 (IGHV3-33)
ARDRYYDILTGYYMGFDY

SEQ ID NO: 7347 - protein, 10 aa, Homo sapiens
  Light chain CDR3 for antibody 3674 (IGKV1-17)
LQHNSYPMYT

SEQ ID NO: 7348 - protein, 11 aa, Homo sapiens
  Heavy chain CDR3 for antibody 3674 (IGHV3-33)
ARDKSSGWSDY

SEQ ID NO: 7349 - protein, 9 aa, Homo sapiens
  Light chain CDR3 for antibody 3675 (IGKV3D-7)
QQDYNLPLT

SEQ ID NO: 7350 - protein, 14 aa, Homo sapiens
  Heavy chain CDR3 for antibody 3675 (IGHV3-15)
SIYYYGSGRDFFDY

SEQ ID NO: 7351 - protein, 9 aa, Homo sapiens
  Light chain CDR3 for antibody 3676 (IGKV1D-16)
QQYNSYPLT

SEQ ID NO: 7352 - protein, 17 aa, Homo sapiens
  Heavy chain CDR3 for antibody 3676 (IGHV3-33)
ARKDYGILSGYYSPFDY

SEQ ID NO: 7353 - protein, 9 aa, Homo sapiens
  Light chain CDR3 for antibody 3677 (IGKV5-2)
LQHDNFPYT

SEQ ID NO: 7354 - protein, 12 aa, Homo sapiens
  Heavy chain CDR3 for antibody 3677 (IGHV3-33)
ARDYISTYGMDV

SEQ ID NO: 7355 - protein, 9 aa, Homo sapiens
  Light chain CDR3 for antibody 3678 (IGKV2-30)
MQGTHWPLT

SEQ ID NO: 7356 - protein, 17 aa, Homo sapiens
  Heavy chain CDR3 for antibody 3678 (IGHV1-18)
ARERYYGSGIYKYAMDV

SEQ ID NO: 7357 - protein, 9 aa, Homo sapiens
  Light chain CDR3 for antibody 3679 (IGKV3D-7)
QQDYNLPWT

SEQ ID NO: 7358 - protein, 17 aa, Homo sapiens
  Heavy chain CDR3 for antibody 3679 (IGHV3-66)
ARVQYDILTGYSPYFDN

SEQ ID NO: 7359 - protein, 9 aa, Homo sapiens
  Light chain CDR3 for antibody 3680 (IGKV1-9)
QQLNSYPLT

SEQ ID NO: 7360 - protein, 11 aa, Homo sapiens
  Heavy chain CDR3 for antibody 3680 (IGHV3-23)
AKKVYDYGSDY

SEQ ID NO: 7361 - protein, 9 aa, Homo sapiens
  Light chain CDR3 for antibody 3681 (IGKV1D-13)
QQFNNYPHT

SEQ ID NO: 7362 - protein, 18 aa, Homo sapiens
  Heavy chain CDR3 for antibody 3681 (IGHV3-33)
ARERGYYGSDIYPAAFDI

SEQ ID NO: 7363 - protein, 9 aa, Homo sapiens
  Light chain CDR3 for antibody 3682 (IGKV1D-13)
QQFNNYPYT

SEQ ID NO: 7364 - protein, 18 aa, Homo sapiens
  Heavy chain CDR3 for antibody 3682 (IGHV3-30)
ARDRHHDILTGYSDAFEI

SEQ ID NO: 7365 - protein, 10 aa, Homo sapiens
  Light chain CDR3 for antibody 3683 (IGKV3-11)
QQRSNWPALT

SEQ ID NO: 7366 - protein, 14 aa, Homo sapiens
  Heavy chain CDR3 for antibody 3683 (IGHV3-33)
ARDGYDFLTGPFDY

SEQ ID NO: 7367 - protein, 9 aa, Homo sapiens
  Light chain CDR3 for antibody 3684 (IGKV3D-20)
QQYGSSPYT

SEQ ID NO: 7368 - protein, 14 aa, Homo sapiens
  Heavy chain CDR3 for antibody 3684 (IGHV3-33)
ARDRGRHNYFGMDV

SEQ ID NO: 7369 - protein, 8 aa, Homo sapiens
  Light chain CDR3 for antibody 3685 (IGKV1D-13)
QQFNNYPT

SEQ ID NO: 7370 - protein, 14 aa, Homo sapiens
  Heavy chain CDR3 for antibody 3685 (IGHV3-33)
AREGYSSNWYDFDY

SEQ ID NO: 7371 - protein, 8 aa, Homo sapiens
  Light chain CDR3 for antibody 3686 (IGKV1D-13)
QQFNNYPT

SEQ ID NO: 7372 - protein, 15 aa, Homo sapiens
  Heavy chain CDR3 for antibody 3686 (IGHV1-18)
ARGYCSSTSCYYFDY

SEQ ID NO: 7373 - protein, 9 aa, Homo sapiens
  Light chain CDR3 for antibody 3687 (IGKV5-2)
LQHDKFPYT

SEQ ID NO: 7374 - protein, 20 aa, Homo sapiens
  Heavy chain CDR3 for antibody 3687 (IGHV3-33)
ARDLGWATMVRGVIRAPFDY

SEQ ID NO: 7375 - protein, 9 aa, Homo sapiens
  Light chain CDR3 for antibody 3688 (IGKV3D-7)
QQDYNLPYT

SEQ ID NO: 7376 - protein, 12 aa, Homo sapiens
  Heavy chain CDR3 for antibody 3688 (IGHV3-33)
AREGDILTGYSL

SEQ ID NO: 7377 - protein, 9 aa, Homo sapiens
  Light chain CDR3 for antibody 3689 (IGKV6-21)
HQSSSLPYT

SEQ ID NO: 7378 - protein, 12 aa, Homo sapiens
  Heavy chain CDR3 for antibody 3689 (IGHV3-33)
AREEAVAEAFDI

SEQ ID NO: 7379 - protein, 9 aa, Homo sapiens
  Light chain CDR3 for antibody 3690 (IGKV1-17)
LQHNSYPYT

SEQ ID NO: 7380 - protein, 17 aa, Homo sapiens
  Heavy chain CDR3 for antibody 3690 (IGHV3-33)
ARGEQWLGYYYYYGMDV

SEQ ID NO: 7381 - protein, 9 aa, Homo sapiens
  Light chain CDR3 for antibody 3691 (IGKV5-2)
LQHDNFPWT

SEQ ID NO: 7382 - protein, 17 aa, Homo sapiens
  Heavy chain CDR3 for antibody 3691 (IGHV3-33)
ARDQDDILTGYYWYFDL

SEQ ID NO: 7383 - protein, 8 aa, Homo sapiens
  Light chain CDR3 for antibody 3692 (IGKV3D-7)
QQDYNLLT

SEQ ID NO: 7384 - protein, 16 aa, Homo sapiens
  Heavy chain CDR3 for antibody 3692 (IGHV3-33)
ARGGRSDWLYYYGMDV

SEQ ID NO: 7385 - protein, 9 aa, Homo sapiens
  Light chain CDR3 for antibody 3693 (IGKV6-21)
HQSSSLPYT

SEQ ID NO: 7386 - protein, 11 aa, Homo sapiens
  Heavy chain CDR3 for antibody 3693 (IGHV3-23)
AKAGIVGCLDV

SEQ ID NO: 7387 - protein, 9 aa, Homo sapiens
  Light chain CDR3 for antibody 3694 (IGKV3-11)
QQRSNWPLT

SEQ ID NO: 7388 - protein, 11 aa, Homo sapiens
  Heavy chain CDR3 for antibody 3694 (IGHV3-13)
AREAIIGPFDY

SEQ ID NO: 7389 - protein, 8 aa, Homo sapiens
  Light chain CDR3 for antibody 3695 (IGKV6-21)
HQSSSLPT

SEQ ID NO: 7390 - protein, 11 aa, Homo sapiens
  Heavy chain CDR3 for antibody 3695 (IGHV3-33)
ARDRSSGPFDY

SEQ ID NO: 7391 - protein, 8 aa, Homo sapiens
  Light chain CDR3 for antibody 3696 (IGKV1-5)
QQYNSYST

SEQ ID NO: 7392 - protein, 9 aa, Homo sapiens
  Heavy chain CDR3 for antibody 3696 (IGHV1-18)
ARGKDWFDP

SEQ ID NO: 7393 - protein, 9 aa, Homo sapiens
  Light chain CDR3 for antibody 3697 (IGKV1-17)
LQHNSYPYT

SEQ ID NO: 7394 - protein, 14 aa, Homo sapiens
  Heavy chain CDR3 for antibody 3697 (IGHV3-23)
AKDDIVRATGAFDI

SEQ ID NO: 7395 - protein, 8 aa, Homo sapiens
  Light chain CDR3 for antibody 3698 (IGKV1D-13)
QQFNNYPT

SEQ ID NO: 7396 - protein, 11 aa, Homo sapiens
  Heavy chain CDR3 for antibody 3698 (IGHV4-59)
AREMGHDTFDI

SEQ ID NO: 7397 - protein, 9 aa, Homo sapiens
  Light chain CDR3 for antibody 3699 (IGKV3-15)
QQYNNWPLT

SEQ ID NO: 7398 - protein, 15 aa, Homo sapiens
  Heavy chain CDR3 for antibody 3699 (IGHV1-18)
ARGYCSSTSCYYFDY

SEQ ID NO: 7399 - protein, 9 aa, Homo sapiens
  Light chain CDR3 for antibody 3700 (IGKV1-9)
QQLNSYPWT

SEQ ID NO: 7400 - protein, 19 aa, Homo sapiens
  Heavy chain CDR3 for antibody 3700 (IGHV3-33)
ARDRYYDILTGYSSYYFDY

SEQ ID NO: 7401 - protein, 9 aa, Homo sapiens
  Light chain CDR3 for antibody 3701 (IGKV3D-20)
QQYGSSPYT

SEQ ID NO: 7402 - protein, 12 aa, Homo sapiens
  Heavy chain CDR3 for antibody 3701 (IGHV3-33)
ARGYFTSGSAHY

SEQ ID NO: 7403 - protein, 9 aa, Homo sapiens
  Light chain CDR3 for antibody 3702 (IGKV1-9)
QQYNSYPLT

SEQ ID NO: 7404 - protein, 13 aa, Homo sapiens
  Heavy chain CDR3 for antibody 3702 (IGHV4-39)
ARPGIVAAGWFDP

SEQ ID NO: 7405 - protein, 9 aa, Homo sapiens
  Light chain CDR3 for antibody 3703 (IGKV5-2)
LQHDNFPYT

SEQ ID NO: 7406 - protein, 15 aa, Homo sapiens
  Heavy chain CDR3 for antibody 3703 (IGHV3-23)
AKDRDYDFLSGPFDY

SEQ ID NO: 7407 - protein, 10 aa, Homo sapiens
  Light chain CDR3 for antibody 3704 (IGKV3-11)
QQRSNWPIFT

SEQ ID NO: 7408 - protein, 10 aa, Homo sapiens
  Heavy chain CDR3 for antibody 3704 (IGHV3-23)
AKDHYGDYPY

SEQ ID NO: 7409 - protein, 9 aa, Homo sapiens
  Light chain CDR3 for antibody 3705 (IGKV2-30)
MQGTHWPLT

SEQ ID NO: 7410 - protein, 14 aa, Homo sapiens
  Heavy chain CDR3 for antibody 3705 (IGHV3-33)
ARQYSYGYPYYFDY

SEQ ID NO: 7411 - protein, 8 aa, Homo sapiens
  Light chain CDR3 for antibody 3706 (IGKV3D-7)
QQDYNLLT

SEQ ID NO: 7412 - protein, 15 aa, Homo sapiens
  Heavy chain CDR3 for antibody 3706 (IGHV3-20)
ARDRGSSGWRDWFDP

SEQ ID NO: 7413 - protein, 8 aa, Homo sapiens
  Light chain CDR3 for antibody 3707 (IGKV3D-7)
QQDYNLLT

SEQ ID NO: 7414 - protein, 19 aa, Homo sapiens
  Heavy chain CDR3 for antibody 3707 (IGHV3-33)
ARGVRLRYFDPYYYYGMDV

SEQ ID NO: 7415 - protein, 9 aa, Homo sapiens
  Light chain CDR3 for antibody 3708 (IGKV3-11)
QQRSNWPLT

SEQ ID NO: 7416 - protein, 12 aa, Homo sapiens
  Heavy chain CDR3 for antibody 3708 (IGHV4-59)
ARVDSSGWFFDY

SEQ ID NO: 7417 - protein, 9 aa, Homo sapiens
  Light chain CDR3 for antibody 3709 (IGKV6-21)
HQSSSLPYT

SEQ ID NO: 7418 - protein, 11 aa, Homo sapiens
  Heavy chain CDR3 for antibody 3709 (IGHV3-33)
ARDQGGSSFDY

SEQ ID NO: 7419 - protein, 9 aa, Homo sapiens
  Light chain CDR3 for antibody 3710 (IGKV3D-7)
QQDYNLPLT

SEQ ID NO: 7420 - protein, 14 aa, Homo sapiens
  Heavy chain CDR3 for antibody 3710 (IGHV1-18)
ARCFGSGSYGWFDP

SEQ ID NO: 7421 - protein, 9 aa, Homo sapiens
  Light chain CDR3 for antibody 3711 (IGKV1-6)
LQDYNYPYT

SEQ ID NO: 7422 - protein, 13 aa, Homo sapiens
  Heavy chain CDR3 for antibody 3711 (IGHV3-33)
ARDSGSYSYYFNY

SEQ ID NO: 7423 - protein, 9 aa, Homo sapiens
  Light chain CDR3 for antibody 3712 (IGKV6-21)
HQSSSLPYT

SEQ ID NO: 7424 - protein, 12 aa, Homo sapiens
  Heavy chain CDR3 for antibody 3712 (IGHV4-39)
ARREVILGAFDY

SEQ ID NO: 7425 - protein, 9 aa, Homo sapiens
  Light chain CDR3 for antibody 3713 (IGKV6-21)
HQSSSLPHT

SEQ ID NO: 7426 - protein, 10 aa, Homo sapiens
  Heavy chain CDR3 for antibody 3713 (IGHV3-33)
ARDHGWCFDY

SEQ ID NO: 7427 - protein, 9 aa, Homo sapiens
  Light chain CDR3 for antibody 3714 (IGKV1D-13)
QQFNNYPYT

SEQ ID NO: 7428 - protein, 10 aa, Homo sapiens
  Heavy chain CDR3 for antibody 3714 (IGHV3-30)
AREWYGGMDV

SEQ ID NO: 7429 - protein, 9 aa, Homo sapiens
  Light chain CDR3 for antibody 3715 (IGKV3-20)
QQYGSSPYT

SEQ ID NO: 7430 - protein, 17 aa, Homo sapiens
  Heavy chain CDR3 for antibody 3715 (IGHV3-33)
AREGYYYGSGSYHFFDY

SEQ ID NO: 7431 - protein, 9 aa, Homo sapiens
  Light chain CDR3 for antibody 3716 (IGKV6-21)
HQSSSLPYT

SEQ ID NO: 7432 - protein, 14 aa, Homo sapiens
  Heavy chain CDR3 for antibody 3716 (IGHV3-20)
ARGGSSGWYDWFDP

SEQ ID NO: 7433 - protein, 9 aa, Homo sapiens
  Light chain CDR3 for antibody 3717 (IGKV3-20)
QQYGSSPYT

SEQ ID NO: 7434 - protein, 13 aa, Homo sapiens
  Heavy chain CDR3 for antibody 3717 (IGHV4-39)
ARRDGSYYGYFGY

SEQ ID NO: 7435 - protein, 9 aa, Homo sapiens
  Light chain CDR3 for antibody 3718 (IGKV1-9)
LQDYNSPFT

SEQ ID NO: 7436 - protein, 18 aa, Homo sapiens
  Heavy chain CDR3 for antibody 3718 (IGHV4-59)
AREGHYYTSGSYYKAFDY

SEQ ID NO: 7437 - protein, 8 aa, Homo sapiens
  Light chain CDR3 for antibody 3719 (IGKV3D-7)
QQDYNLLT

SEQ ID NO: 7438 - protein, 15 aa, Homo sapiens
  Heavy chain CDR3 for antibody 3719 (IGHV1-18)
ARGYCSSTSCYYFDY

SEQ ID NO: 7439 - protein, 8 aa, Homo sapiens
  Light chain CDR3 for antibody 3720 (IGKV1D-13)
QQFNNYPT

SEQ ID NO: 7440 - protein, 11 aa, Homo sapiens
  Heavy chain CDR3 for antibody 3720 (IGHV3-33)
AREAANWGFDY

SEQ ID NO: 7441 - protein, 9 aa, Homo sapiens
  Light chain CDR3 for antibody 3721 (IGKV1-17)
LQHNSYPYT

SEQ ID NO: 7442 - protein, 10 aa, Homo sapiens
  Heavy chain CDR3 for antibody 3721 (IGHV3-23)
ATIVGPFLDV

SEQ ID NO: 7443 - protein, 9 aa, Homo sapiens
  Light chain CDR3 for antibody 3722 (IGKV3-20)
QQYGSSPYT

SEQ ID NO: 7444 - protein, 12 aa, Homo sapiens
  Heavy chain CDR3 for antibody 3722 (IGHV3-33)
ARKGYGLYVLDV

SEQ ID NO: 7445 - protein, 9 aa, Homo sapiens
  Light chain CDR3 for antibody 3723 (IGKV1D-13)
QQFNNYPHT

SEQ ID NO: 7446 - protein, 11 aa, Homo sapiens
  Heavy chain CDR3 for antibody 3723 (IGHV3-74)
ARDRGNWGFDY

SEQ ID NO: 7447 - protein, 9 aa, Homo sapiens
  Light chain CDR3 for antibody 3724 (IGKV1-39)
QQSYSTPLT

SEQ ID NO: 7448 - protein, 13 aa, Homo sapiens
  Heavy chain CDR3 for antibody 3724 (IGHV3-33)
ARDSSSWYHWFDP

SEQ ID NO: 7449 - protein, 9 aa, Homo sapiens
  Light chain CDR3 for antibody 3725 (IGKV1-27)
QKYNSAPYT

SEQ ID NO: 7450 - protein, 17 aa, Homo sapiens
  Heavy chain CDR3 for antibody 3725 (IGHV4-34)
AGLRFFDWLFDYYGMDV

SEQ ID NO: 7451 - protein, 9 aa, Homo sapiens
  Light chain CDR3 for antibody 3726 (IGKV6-21)
HQSSSLPYT

SEQ ID NO: 7452 - protein, 12 aa, Homo sapiens
  Heavy chain CDR3 for antibody 3726 (IGHV4-39)
ARHPRYLDAFDI

SEQ ID NO: 7453 - protein, 9 aa, Homo sapiens
  Light chain CDR3 for antibody 3727 (IGKV1D-16)
QQYNSFPLT

SEQ ID NO: 7454 - protein, 18 aa, Homo sapiens
  Heavy chain CDR3 for antibody 3727 (IGHV4-59)
AREGHYYTSGSYYKAFDY

SEQ ID NO: 7455 - protein, 9 aa, Homo sapiens
  Light chain CDR3 for antibody 3728 (IGKV5-2)
LQHDNFPYT

SEQ ID NO: 7456 - protein, 17 aa, Homo sapiens
  Heavy chain CDR3 for antibody 3728 (IGHV3-30)
ARDGVGATSYYYYGMDV

SEQ ID NO: 7457 - protein, 9 aa, Homo sapiens
  Light chain CDR3 for antibody 3729 (IGKV3-11)
QQRSNWMYT

SEQ ID NO: 7458 - protein, 13 aa, Homo sapiens
  Heavy chain CDR3 for antibody 3729 (IGHV3-33)
ARRYRSGWYPFDY

SEQ ID NO: 7459 - protein, 9 aa, Homo sapiens
  Light chain CDR3 for antibody 3730 (IGKV1-17)
LQHNSYPYT

SEQ ID NO: 7460 - protein, 10 aa, Homo sapiens
  Heavy chain CDR3 for antibody 3730 (IGHV3-30)
ARDNFEGMDV

SEQ ID NO: 7461 - protein, 10 aa, Homo sapiens
  Light chain CDR3 for antibody 3731 (IGKV3-11)
QQRSNWPIFT

SEQ ID NO: 7462 - protein, 13 aa, Homo sapiens
  Heavy chain CDR3 for antibody 3731 (IGHV4-39)
ARREVVGGRGFDY

SEQ ID NO: 7463 - protein, 9 aa, Homo sapiens
  Light chain CDR3 for antibody 3732 (IGKV1D-13)
QQFNNYPYT

SEQ ID NO: 7464 - protein, 17 aa, Homo sapiens
  Heavy chain CDR3 for antibody 3732 (IGHV3-15)
TTERYPRRYYYYFGMDV

SEQ ID NO: 7465 - protein, 9 aa, Homo sapiens
  Light chain CDR3 for antibody 3733 (IGKV1-39)
QQSYRTPLT

SEQ ID NO: 7466 - protein, 17 aa, Homo sapiens
  Heavy chain CDR3 for antibody 3733 (IGHV3-15)
TTERYPRRYYYYFGMDV

SEQ ID NO: 7467 - protein, 9 aa, Homo sapiens
  Light chain CDR3 for antibody 3734 (IGKV1-6)
QQEYNYPLT

SEQ ID NO: 7468 - protein, 15 aa, Homo sapiens
  Heavy chain CDR3 for antibody 3734 (IGHV1-18)
ARGYCSSTSCYYFDY

SEQ ID NO: 7469 - protein, 9 aa, Homo sapiens
  Light chain CDR3 for antibody 3735 (IGKV2D-28)
MQALQTPPT

SEQ ID NO: 7470 - protein, 13 aa, Homo sapiens
  Heavy chain CDR3 for antibody 3735 (IGHV3-11)
ARDGGAAAGTWDS

SEQ ID NO: 7471 - protein, 9 aa, Homo sapiens
  Light chain CDR3 for antibody 3736 (IGKV1D-13)
QQFNNYPYT

SEQ ID NO: 7472 - protein, 10 aa, Homo sapiens
  Heavy chain CDR3 for antibody 3736 (IGHV3-33)
ARDLGWSFDH

SEQ ID NO: 7473 - protein, 8 aa, Homo sapiens
  Light chain CDR3 for antibody 3737 (IGKV1D-13)
QQFNNYPT

SEQ ID NO: 7474 - protein, 11 aa, Homo sapiens
  Heavy chain CDR3 for antibody 3737 (IGHV3-33)
ARDTWDDYFDY

SEQ ID NO: 7475 - protein, 9 aa, Homo sapiens
  Light chain CDR3 for antibody 3738 (IGKV1-9)
QQVKSYPYT

SEQ ID NO: 7476 - protein, 15 aa, Homo sapiens
  Heavy chain CDR3 for antibody 3738 (IGHV1-46)
ARGAVDDYYYYGMDV

SEQ ID NO: 7477 - protein, 9 aa, Homo sapiens
  Light chain CDR3 for antibody 3739 (IGKV1-6)
LQDYNYPFT

SEQ ID NO: 7478 - protein, 16 aa, Homo sapiens
  Heavy chain CDR3 for antibody 3739 (IGHV1-46)
ARGGGYSGSYSNWFDP

SEQ ID NO: 7479 - protein, 9 aa, Homo sapiens
  Light chain CDR3 for antibody 3740 (IGKV3D-7)
QQDYNLPLT

SEQ ID NO: 7480 - protein, 16 aa, Homo sapiens
  Heavy chain CDR3 for antibody 3740 (IGHV3-33)
ARGGRSDWLYYYGMDV

SEQ ID NO: 7481 - protein, 9 aa, Homo sapiens
  Light chain CDR3 for antibody 3741 (IGKV5-2)
LQHDNFPYT

SEQ ID NO: 7482 - protein, 17 aa, Homo sapiens
  Heavy chain CDR3 for antibody 3741 (IGHV3-23)
AKGNYGSGSYYNGDFQH

SEQ ID NO: 7483 - protein, 9 aa, Homo sapiens
  Light chain CDR3 for antibody 3742 (IGKV3-11)
QQRSNWPYT

SEQ ID NO: 7484 - protein, 18 aa, Homo sapiens
  Heavy chain CDR3 for antibody 3742 (IGHV3-23)
AKDRITGTTYGYYSGLDV

SEQ ID NO: 7485 - protein, 9 aa, Homo sapiens
  Light chain CDR3 for antibody 3743 (IGKV1-27)
QKYNSAPYT

SEQ ID NO: 7486 - protein, 10 aa, Homo sapiens
  Heavy chain CDR3 for antibody 3743 (IGHV3-23)
AKDHYGDYPY

SEQ ID NO: 7487 - protein, 10 aa, Homo sapiens
  Light chain CDR3 for antibody 3744 (IGKV1-39)
QQSYSTPMYT

SEQ ID NO: 7488 - protein, 13 aa, Homo sapiens
  Heavy chain CDR3 for antibody 3744 (IGHV3-33)
ARTDYYFYYGLDV

SEQ ID NO: 7489 - protein, 9 aa, Homo sapiens
  Light chain CDR3 for antibody 3745 (IGKV5-2)
LQHDNFPYT

SEQ ID NO: 7490 - protein, 12 aa, Homo sapiens
  Heavy chain CDR3 for antibody 3745 (IGHV3-23)
AKGAVVTAIFDY

SEQ ID NO: 7491 - protein, 9 aa, Homo sapiens
  Light chain CDR3 for antibody 3746 (IGKV5-2)
LQHDNFPYT

SEQ ID NO: 7492 - protein, 13 aa, Homo sapiens
  Heavy chain CDR3 for antibody 3746 (IGHV3-33)
ASAGNSYYNVMDV

SEQ ID NO: 7493 - protein, 9 aa, Homo sapiens
  Light chain CDR3 for antibody 3747 (IGKV3-11)
QQRSNWMYT

SEQ ID NO: 7494 - protein, 24 aa, Homo sapiens
  Heavy chain CDR3 for antibody 3747 (IGHV3-20)
ARGRITMVRGVIINPLDYYNGMDV

SEQ ID NO: 7495 - protein, 9 aa, Homo sapiens
  Light chain CDR3 for antibody 3748 (IGKV3D-7)
QQDYNLPLT

SEQ ID NO: 7496 - protein, 15 aa, Homo sapiens
  Heavy chain CDR3 for antibody 3748 (IGHV3-23)
AKEALRYFDWSGMDV

SEQ ID NO: 7497 - protein, 9 aa, Homo sapiens
  Light chain CDR3 for antibody 3749 (IGKV2-30)
MQGTHWPLT

SEQ ID NO: 7498 - protein, 18 aa, Homo sapiens
  Heavy chain CDR3 for antibody 3749 (IGHV3-33)
ARDGYSGYDYYYYYGMDV

SEQ ID NO: 7499 - protein, 9 aa, Homo sapiens
  Light chain CDR3 for antibody 3750 (IGKV1-9)
QQLNSYPLT

SEQ ID NO: 7500 - protein, 15 aa, Homo sapiens
  Heavy chain CDR3 for antibody 3750 (IGHV4-39)
ARRDYDISTGYLFDY

SEQ ID NO: 7501 - protein, 9 aa, Homo sapiens
  Light chain CDR3 for antibody 3751 (IGKV3-20)
QQYGSSPLT

SEQ ID NO: 7502 - protein, 14 aa, Homo sapiens
  Heavy chain CDR3 for antibody 3751 (IGHV3-33)
ARASSGSSYWYIDL

SEQ ID NO: 7503 - protein, 9 aa, Homo sapiens
  Light chain CDR3 for antibody 3752 (IGKV3-15)
QQYNNWPYT

SEQ ID NO: 7504 - protein, 13 aa, Homo sapiens
  Heavy chain CDR3 for antibody 3752 (IGHV4-39)
ARRDVLAPAAFDY

SEQ ID NO: 7505 - protein, 9 aa, Homo sapiens
  Light chain CDR3 for antibody 3753 (IGKV2-30)
MQGTHWPLT

SEQ ID NO: 7506 - protein, 13 aa, Homo sapiens
  Heavy chain CDR3 for antibody 3753 (IGHV3-33)
ARGDNWNDGGFDY

SEQ ID NO: 7507 - protein, 9 aa, Homo sapiens
  Light chain CDR3 for antibody 3754 (IGKV3-20)
QQYGSSPYT

SEQ ID NO: 7508 - protein, 19 aa, Homo sapiens
  Heavy chain CDR3 for antibody 3754 (IGHV3-33)
ARIPGIAVAGGYYYYGMDV

SEQ ID NO: 7509 - protein, 8 aa, Homo sapiens
  Light chain CDR3 for antibody 3755 (IGKV3D-7)
QQDYNLLT

SEQ ID NO: 7510 - protein, 13 aa, Homo sapiens
  Heavy chain CDR3 for antibody 3755 (IGHV3-33)
ARAFTMVRGVIDY

SEQ ID NO: 7511 - protein, 9 aa, Homo sapiens
  Light chain CDR3 for antibody 3756 (IGKV1-39)
QQSYSTPLT

SEQ ID NO: 7512 - protein, 18 aa, Homo sapiens
  Heavy chain CDR3 for antibody 3756 (IGHV1-8)
ARSRIAAAGIYYYYGMDV

SEQ ID NO: 7513 - protein, 9 aa, Homo sapiens
  Light chain CDR3 for antibody 3757 (IGKV1-39)
QQSYRTPLT

SEQ ID NO: 7514 - protein, 11 aa, Homo sapiens
  Heavy chain CDR3 for antibody 3757 (IGHV3-33)
ARGSGSYAFDS

SEQ ID NO: 7515 - protein, 9 aa, Homo sapiens
  Light chain CDR3 for antibody 3758 (IGKV2-30)
MQGTHWPLT

SEQ ID NO: 7516 - protein, 18 aa, Homo sapiens
  Heavy chain CDR3 for antibody 3758 (IGHV3-23)
AKDRITGTTYGYYSGLDV

SEQ ID NO: 7517 - protein, 9 aa, Homo sapiens
  Light chain CDR3 for antibody 3759 (IGKV1-6)
LQDYNYPYT

SEQ ID NO: 7518 - protein, 14 aa, Homo sapiens
  Heavy chain CDR3 for antibody 3759 (IGHV3-33)
ARDGAAAALDAFDI

SEQ ID NO: 7519 - protein, 9 aa, Homo sapiens
  Light chain CDR3 for antibody 3760 (IGKV1-6)
LQDYNYPYT

SEQ ID NO: 7520 - protein, 15 aa, Homo sapiens
  Heavy chain CDR3 for antibody 3760 (IGHV3-11)
AREYSSGWYGDAFDI

SEQ ID NO: 7521 - protein, 9 aa, Homo sapiens
  Light chain CDR3 for antibody 3761 (IGKV3-20)
QQYGSSPLT

SEQ ID NO: 7522 - protein, 17 aa, Homo sapiens
  Heavy chain CDR3 for antibody 3761 (IGHV3-33)
ARDQDDILTGYYWYFDL

SEQ ID NO: 7523 - protein, 9 aa, Homo sapiens
  Light chain CDR3 for antibody 3762 (IGKV3D-7)
QQDYNLPLT

SEQ ID NO: 7524 - protein, 21 aa, Homo sapiens
  Heavy chain CDR3 for antibody 3762 (IGHV3-33)
ARDEYYEIVTGYGYYHYGMDV

SEQ ID NO: 7525 - protein, 9 aa, Homo sapiens
  Light chain CDR3 for antibody 3763 (IGKV1-6)
LQDYNYPYT

SEQ ID NO: 7526 - protein, 13 aa, Homo sapiens
  Heavy chain CDR3 for antibody 3763 (IGHV3-33)
AKRYSSGWYPFDF

SEQ ID NO: 7527 - protein, 9 aa, Homo sapiens
  Light chain CDR3 for antibody 3764 (IGKV3-20)
QQYGSSPYT

SEQ ID NO: 7528 - protein, 12 aa, Homo sapiens
  Heavy chain CDR3 for antibody 3764 (IGHV3-21)
AREGFGESSFDY

SEQ ID NO: 7529 - protein, 9 aa, Homo sapiens
  Light chain CDR3 for antibody 3765 (IGKV3D-7)
QQDYNLPYT

SEQ ID NO: 7530 - protein, 17 aa, Homo sapiens
  Heavy chain CDR3 for antibody 3765 (IGHV3-33)
ARVYYDILTGYSPAFDI

SEQ ID NO: 7531 - protein, 9 aa, Homo sapiens
  Light chain CDR3 for antibody 3766 (IGKV1D-13)
QQFNNYPRT

SEQ ID NO: 7532 - protein, 13 aa, Homo sapiens
  Heavy chain CDR3 for antibody 3766 (IGHV1-24)
ARVKLGSLGAFDI

SEQ ID NO: 7533 - protein, 9 aa, Homo sapiens
  Light chain CDR3 for antibody 3767 (IGKV1-27)
QKYNSAPYT

SEQ ID NO: 7534 - protein, 20 aa, Homo sapiens
  Heavy chain CDR3 for antibody 3767 (IGHV3-33)
ARDPAQLERRYYYFYYGMDV

SEQ ID NO: 7535 - protein, 9 aa, Homo sapiens
  Light chain CDR3 for antibody 3768 (IGKV1D-16)
QQYNSFPLT

SEQ ID NO: 7536 - protein, 20 aa, Homo sapiens
  Heavy chain CDR3 for antibody 3768 (IGHV3-20)
ARDLCSSTSCYGYYYYGMDV

SEQ ID NO: 7537 - protein, 9 aa, Homo sapiens
  Light chain CDR3 for antibody 3769 (IGKV3D-7)
QQDYNLPLT

SEQ ID NO: 7538 - protein, 15 aa, Homo sapiens
  Heavy chain CDR3 for antibody 3769 (IGHV3-33)
VCVLYDYGDYVGFDY

SEQ ID NO: 7539 - protein, 9 aa, Homo sapiens
  Light chain CDR3 for antibody 3770 (IGKV5-2)
LQHDNFPYT

SEQ ID NO: 7540 - protein, 12 aa, Homo sapiens
  Heavy chain CDR3 for antibody 3770 (IGHV3-33)
AREGIAVAGVDP

SEQ ID NO: 7541 - protein, 9 aa, Homo sapiens
  Light chain CDR3 for antibody 3771 (IGKV1D-13)
QQFNNYPYT

SEQ ID NO: 7542 - protein, 16 aa, Homo sapiens
  Heavy chain CDR3 for antibody 3771 (IGHV3-33)
AREVAGSYYYYYGMDV

SEQ ID NO: 7543 - protein, 9 aa, Homo sapiens
  Light chain CDR3 for antibody 3772 (IGKV1D-13)
QQFNNYPST

SEQ ID NO: 7544 - protein, 15 aa, Homo sapiens
  Heavy chain CDR3 for antibody 3772 (IGHV3-30)
ARRGYGSGSPDAFDL

SEQ ID NO: 7545 - protein, 9 aa, Homo sapiens
  Light chain CDR3 for antibody 3773 (IGKV1-17)
LQHNSYPYT

SEQ ID NO: 7546 - protein, 11 aa, Homo sapiens
  Heavy chain CDR3 for antibody 3773 (IGHV3-33)
ASWDILTGSGY

SEQ ID NO: 7547 - protein, 9 aa, Homo sapiens
  Light chain CDR3 for antibody 3774 (IGKV1-39)
QQSYSTPLT

SEQ ID NO: 7548 - protein, 14 aa, Homo sapiens
  Heavy chain CDR3 for antibody 3774 (IGHV4-39)
ARQGGSGSYYNLDY

SEQ ID NO: 7549 - protein, 9 aa, Homo sapiens
  Light chain CDR3 for antibody 3775 (IGKV3D-20)
QQYGSSPYT

SEQ ID NO: 7550 - protein, 14 aa, Homo sapiens
  Heavy chain CDR3 for antibody 3775 (IGHV3-33)
ARDLNYDILNGGGY

SEQ ID NO: 7551 - protein, 9 aa, Homo sapiens
  Light chain CDR3 for antibody 3776 (IGKV6-21)
HQSSSLPYT

SEQ ID NO: 7552 - protein, 16 aa, Homo sapiens
  Heavy chain CDR3 for antibody 3776 (IGHV3-23)
AKDLRYFDWSLYAFDI

SEQ ID NO: 7553 - protein, 9 aa, Homo sapiens
  Light chain CDR3 for antibody 3777 (IGKV5-2)
LQHDNFPYT

SEQ ID NO: 7554 - protein, 13 aa, Homo sapiens
  Heavy chain CDR3 for antibody 3777 (IGHV3-33)
ARDGYSYGPYFDY

SEQ ID NO: 7555 - protein, 11 aa, Homo sapiens
  Light chain CDR3 for antibody 3778 (IGKV3-11)
QQRSNWPPTWT

SEQ ID NO: 7556 - protein, 14 aa, Homo sapiens
  Heavy chain CDR3 for antibody 3778 (IGHV3-23)
AKSRIVGALYYFDY

SEQ ID NO: 7557 - protein, 9 aa, Homo sapiens
  Light chain CDR3 for antibody 3779 (IGKV1-27)
QKYNSAPYT

SEQ ID NO: 7558 - protein, 11 aa, Homo sapiens
  Heavy chain CDR3 for antibody 3779 (IGHV3-23)
AKGLWSYYFDY

SEQ ID NO: 7559 - protein, 9 aa, Homo sapiens
  Light chain CDR3 for antibody 3780 (IGKV3-15)
QQYNNWPLT

SEQ ID NO: 7560 - protein, 14 aa, Homo sapiens
  Heavy chain CDR3 for antibody 3780 (IGHV4-39)
ARHGYYGSSNWFDP

SEQ ID NO: 7561 - protein, 9 aa, Homo sapiens
  Light chain CDR3 for antibody 3781 (IGKV1D-16)
QQYYSYPRT

SEQ ID NO: 7562 - protein, 15 aa, Homo sapiens
  Heavy chain CDR3 for antibody 3781 (IGHV3-30)
ARRGYGSGSPDAFDL

SEQ ID NO: 7563 - protein, 9 aa, Homo sapiens
  Light chain CDR3 for antibody 3782 (IGKV1D-16)
QQYNSYPYT

SEQ ID NO: 7564 - protein, 10 aa, Homo sapiens
  Heavy chain CDR3 for antibody 3782 (IGHV3-33)
ARDHGWCFDY

SEQ ID NO: 7565 - protein, 9 aa, Homo sapiens
  Light chain CDR3 for antibody 3783 (IGKV1-6)
LQDFNYPRT

SEQ ID NO: 7566 - protein, 7 aa, Homo sapiens
  Heavy chain CDR3 for antibody 3783 (IGHV1-46)
AREGGDY

SEQ ID NO: 7567 - protein, 9 aa, Homo sapiens
  Light chain CDR3 for antibody 3784 (IGKV1-16)
QQYNSYPYT

SEQ ID NO: 7568 - protein, 11 aa, Homo sapiens
  Heavy chain CDR3 for antibody 3784 (IGHV1-18)
SRGGFSVGYDS

SEQ ID NO: 7569 - protein, 9 aa, Homo sapiens
  Light chain CDR3 for antibody 3785 (IGKV1-39)
QQSYSTPFT

SEQ ID NO: 7570 - protein, 15 aa, Homo sapiens
  Heavy chain CDR3 for antibody 3785 (IGHV3-33)
ARDRVVRGVMGYFDY

SEQ ID NO: 7571 - protein, 9 aa, Homo sapiens
  Light chain CDR3 for antibody 3786 (IGKV3D-7)
QQDYEFPIT

SEQ ID NO: 7572 - protein, 11 aa, Homo sapiens
  Heavy chain CDR3 for antibody 3786 (IGHV4-59)
AREMGHDTFDI

SEQ ID NO: 7573 - protein, 9 aa, Homo sapiens
  Light chain CDR3 for antibody 3787 (IGKV1-27)
QKYNSAPYT

SEQ ID NO: 7574 - protein, 16 aa, Homo sapiens
  Heavy chain CDR3 for antibody 3787 (IGHV3-33)
ARDKNTDYDILTGFDY

SEQ ID NO: 7575 - protein, 9 aa, Homo sapiens
  Light chain CDR3 for antibody 3788 (IGKV1-9)
QQLNSYPLT

SEQ ID NO: 7576 - protein, 10 aa, Homo sapiens
  Heavy chain CDR3 for antibody 3788 (IGHV3-23)
AKDRYGDYVY

SEQ ID NO: 7577 - protein, 9 aa, Homo sapiens
  Light chain CDR3 for antibody 3789 (IGKV1-39)
QQSYRTPLT

SEQ ID NO: 7578 - protein, 13 aa, Homo sapiens
  Heavy chain CDR3 for antibody 3789 (IGHV3-33)
ANTGDSYYYDMDV

SEQ ID NO: 7579 - protein, 8 aa, Homo sapiens
  Light chain CDR3 for antibody 3790 (IGKV1-5)
QQYNSYWT

SEQ ID NO: 7580 - protein, 15 aa, Homo sapiens
  Heavy chain CDR3 for antibody 3790 (IGHV3-33)
ARDRGWKAPGYGMDV

SEQ ID NO: 7581 - protein, 10 aa, Homo sapiens
  Light chain CDR3 for antibody 3791 (IGKV3-11)
QQRSNWPIFT

SEQ ID NO: 7582 - protein, 16 aa, Homo sapiens
  Heavy chain CDR3 for antibody 3791 (IGHV3-33)
ARAVYYGSGSSLIMDV

SEQ ID NO: 7583 - protein, 9 aa, Homo sapiens
  Light chain CDR3 for antibody 3792 (IGKV3-15)
QQYNNWPLT

SEQ ID NO: 7584 - protein, 13 aa, Homo sapiens
  Heavy chain CDR3 for antibody 3792 (IGHV3-53)
ARSGSYWGYYFDY

SEQ ID NO: 7585 - protein, 9 aa, Homo sapiens
  Light chain CDR3 for antibody 3793 (IGKV3D-7)
QQDYNLPLT

SEQ ID NO: 7586 - protein, 18 aa, Homo sapiens
  Heavy chain CDR3 for antibody 3793 (IGHV3-33)
ARGGYSSGWDYYYYGMDV

SEQ ID NO: 7587 - protein, 9 aa, Homo sapiens
  Light chain CDR3 for antibody 3794 (IGKV2-30)
MQGTHWPYT

SEQ ID NO: 7588 - protein, 12 aa, Homo sapiens
  Heavy chain CDR3 for antibody 3794 (IGHV4-39)
ARHGSGSSYFDY

SEQ ID NO: 7589 - protein, 9 aa, Homo sapiens
  Light chain CDR3 for antibody 3795 (IGKV1-39)
QQSYSTPLT

SEQ ID NO: 7590 - protein, 11 aa, Homo sapiens
  Heavy chain CDR3 for antibody 3795 (IGHV3-21)
ARDRATATVDY

SEQ ID NO: 7591 - protein, 9 aa, Homo sapiens
  Light chain CDR3 for antibody 3796 (IGKV6-21)
HQSSSLPYT

SEQ ID NO: 7592 - protein, 13 aa, Homo sapiens
  Heavy chain CDR3 for antibody 3796 (IGHV3-33)
AKRYSSGWYPFDF

SEQ ID NO: 7593 - protein, 9 aa, Homo sapiens
  Light chain CDR3 for antibody 3797 (IGKV1-6)
LQDYNYPWT

SEQ ID NO: 7594 - protein, 17 aa, Homo sapiens
  Heavy chain CDR3 for antibody 3797 (IGHV4-59)
AREEDYFGSGSFGTFDI

SEQ ID NO: 7595 - protein, 9 aa, Homo sapiens
  Light chain CDR3 for antibody 3798 (IGKV3-15)
QQYNNWPLT

SEQ ID NO: 7596 - protein, 13 aa, Homo sapiens
  Heavy chain CDR3 for antibody 3798 (IGHV3-33)
ARGDNWNDGGFDY

SEQ ID NO: 7597 - protein, 9 aa, Homo sapiens
  Light chain CDR3 for antibody 3799 (IGKV1D-16)
QQYKSYPLT

SEQ ID NO: 7598 - protein, 16 aa, Homo sapiens
  Heavy chain CDR3 for antibody 3799 (IGHV4-59)
ARGRYFEWLLGDVFDI

SEQ ID NO: 7599 - protein, 9 aa, Homo sapiens
  Light chain CDR3 for antibody 3800 (IGKV1-6)
LQDFHYPWT

SEQ ID NO: 7600 - protein, 16 aa, Homo sapiens
  Heavy chain CDR3 for antibody 3800 (IGHV3-23)
AKEGMVLRYFDWLWDY

SEQ ID NO: 7601 - protein, 10 aa, Homo sapiens
  Light chain CDR3 for antibody 3801 (IGKV1-39)
QQSYSTPMYT

SEQ ID NO: 7602 - protein, 11 aa, Homo sapiens
  Heavy chain CDR3 for antibody 3801 (IGHV3-33)
ARDKSSGWSDY

SEQ ID NO: 7603 - protein, 9 aa, Homo sapiens
  Light chain CDR3 for antibody 3802 (IGKV5-2)
LQHDNFPYT

SEQ ID NO: 7604 - protein, 18 aa, Homo sapiens
  Heavy chain CDR3 for antibody 3802 (IGHV3-33)
ARGYNQGSGSYYNVCFDY

SEQ ID NO: 7605 - protein, 9 aa, Homo sapiens
  Light chain CDR3 for antibody 3803 (IGKV1D-13)
QQFNNYPHT

SEQ ID NO: 7606 - protein, 14 aa, Homo sapiens
  Heavy chain CDR3 for antibody 3803 (IGHV3-33)
ARDRDIMATSYFDY

SEQ ID NO: 7607 - protein, 8 aa, Homo sapiens
  Light chain CDR3 for antibody 3804 (IGKV3-20)
QQYGSSFT

SEQ ID NO: 7608 - protein, 13 aa, Homo sapiens
  Heavy chain CDR3 for antibody 3804 (IGHV3-33)
ARDYCGGDCYLDY

SEQ ID NO: 7609 - protein, 9 aa, Homo sapiens
  Light chain CDR3 for antibody 3805 (IGKV1-6)
LQDYNYPWT

SEQ ID NO: 7610 - protein, 18 aa, Homo sapiens
  Heavy chain CDR3 for antibody 3805 (IGHV3-33)
ARRSAAGTWDYYYCGMDV

SEQ ID NO: 7611 - protein, 9 aa, Homo sapiens
  Light chain CDR3 for antibody 3806 (IGKV6-21)
HQSSSLPHT

SEQ ID NO: 7612 - protein, 17 aa, Homo sapiens
  Heavy chain CDR3 for antibody 3806 (IGHV3-23)
AKGNYGSGSYYNGDFQH

SEQ ID NO: 7613 - protein, 9 aa, Homo sapiens
  Light chain CDR3 for antibody 3807 (IGKV6-21)
HQSSSLPYT

SEQ ID NO: 7614 - protein, 14 aa, Homo sapiens
  Heavy chain CDR3 for antibody 3807 (IGHV3-33)
ARDLDIMATSPFAY

SEQ ID NO: 7615 - protein, 9 aa, Homo sapiens
  Light chain CDR3 for antibody 3808 (IGKV1D-16)
QQYNSYPLT

SEQ ID NO: 7616 - protein, 17 aa, Homo sapiens
  Heavy chain CDR3 for antibody 3808 (IGHV3-11)
ARAGPRYDSSGHDAFDI

SEQ ID NO: 7617 - protein, 8 aa, Homo sapiens
  Light chain CDR3 for antibody 3809 (IGKV6-21)
HQSSSLPT

SEQ ID NO: 7618 - protein, 17 aa, Homo sapiens
  Heavy chain CDR3 for antibody 3809 (IGHV3-33)
ARGYCSRTSCYLYYFDY

SEQ ID NO: 7619 - protein, 10 aa, Homo sapiens
  Light chain CDR3 for antibody 3810 (IGKV1-33)
QQYDNLPPYT

SEQ ID NO: 7620 - protein, 16 aa, Homo sapiens
  Heavy chain CDR3 for antibody 3810 (IGHV3-30)
AKHGYSYGYWLGYFDY

SEQ ID NO: 7621 - protein, 9 aa, Homo sapiens
  Light chain CDR3 for antibody 3811 (IGKV1D-13)
QQFNNYPHT

SEQ ID NO: 7622 - protein, 14 aa, Homo sapiens
  Heavy chain CDR3 for antibody 3811 (IGHV3-20)
ARDGGSTCYDWFDP

SEQ ID NO: 7623 - protein, 9 aa, Homo sapiens
  Light chain CDR3 for antibody 3812 (IGKV3-11)
QQRSNWPYT

SEQ ID NO: 7624 - protein, 8 aa, Homo sapiens
  Heavy chain CDR3 for antibody 3812 (IGHV3-23)
AKESLLDY

SEQ ID NO: 7625 - protein, 9 aa, Homo sapiens
  Light chain CDR3 for antibody 3813 (IGKV1-9)
QQLKSYLYT

SEQ ID NO: 7626 - protein, 16 aa, Homo sapiens
  Heavy chain CDR3 for antibody 3813 (IGHV4-59)
ARGRYFEWLLGDVFDI

SEQ ID NO: 7627 - protein, 9 aa, Homo sapiens
  Light chain CDR3 for antibody 3814 (IGKV1D-13)
QQFNNYPHT

SEQ ID NO: 7628 - protein, 14 aa, Homo sapiens
  Heavy chain CDR3 for antibody 3814 (IGHV3-33)
AREDYYGPLNWFDP

SEQ ID NO: 7629 - protein, 9 aa, Homo sapiens
  Light chain CDR3 for antibody 3815 (IGKV6-21)
HQSSSLPYT

SEQ ID NO: 7630 - protein, 15 aa, Homo sapiens
  Heavy chain CDR3 for antibody 3815 (IGHV3-23)
AKDGFYYGSGSSFDH

SEQ ID NO: 7631 - protein, 9 aa, Homo sapiens
  Light chain CDR3 for antibody 3816 (IGKV3D-20)
QQYGSSPYT

SEQ ID NO: 7632 - protein, 10 aa, Homo sapiens
  Heavy chain CDR3 for antibody 3816 (IGHV3-33)
AREGLRYFDH

SEQ ID NO: 7633 - protein, 9 aa, Homo sapiens
  Light chain CDR3 for antibody 3817 (IGKV2-30)
MQGTHWPLT

SEQ ID NO: 7634 - protein, 16 aa, Homo sapiens
  Heavy chain CDR3 for antibody 3817 (IGHV4-39)
ARDTPYYSGSGRPFDY

SEQ ID NO: 7635 - protein, 9 aa, Homo sapiens
  Light chain CDR3 for antibody 3818 (IGKV1-6)
LQDYNYPYT

SEQ ID NO: 7636 - protein, 12 aa, Homo sapiens
  Heavy chain CDR3 for antibody 3818 (IGHV1-46)
ARALTVGASFDY

SEQ ID NO: 7637 - protein, 9 aa, Homo sapiens
  Light chain CDR3 for antibody 3819 (IGKV1-6)
LQDYNYPWT

SEQ ID NO: 7638 - protein, 12 aa, Homo sapiens
  Heavy chain CDR3 for antibody 3819 (IGHV3-13)
VREAGIPDAFDI

SEQ ID NO: 7639 - protein, 9 aa, Homo sapiens
  Light chain CDR3 for antibody 3820 (IGKV2D-24)
TQATQFPHT

SEQ ID NO: 7640 - protein, 12 aa, Homo sapiens
  Heavy chain CDR3 for antibody 3820 (IGHV1-46)
ARGLTGDHAVDI

SEQ ID NO: 7641 - protein, 9 aa, Homo sapiens
  Light chain CDR3 for antibody 3821 (IGKV1-6)
LQDYNYPYT

SEQ ID NO: 7642 - protein, 9 aa, Homo sapiens
  Heavy chain CDR3 for antibody 3821 (IGHV1-18)
ARDEGYDIL

SEQ ID NO: 7643 - protein, 8 aa, Homo sapiens
  Light chain CDR3 for antibody 3822 (IGKV1-5)
QQYNSYWT

SEQ ID NO: 7644 - protein, 17 aa, Homo sapiens
  Heavy chain CDR3 for antibody 3822 (IGHV3-33)
ARGYCSRTSCYLYYFDY

SEQ ID NO: 7645 - protein, 9 aa, Homo sapiens
  Light chain CDR3 for antibody 3823 (IGKV1-27)
QKYNSAPYT

SEQ ID NO: 7646 - protein, 12 aa, Homo sapiens
  Heavy chain CDR3 for antibody 3823 (IGHV3-33)
AKDPGWQQLAEY

SEQ ID NO: 7647 - protein, 10 aa, Homo sapiens
  Light chain CDR3 for antibody 3824 (IGKV1-39)
QQSYSTPMYT

SEQ ID NO: 7648 - protein, 9 aa, Homo sapiens
  Heavy chain CDR3 for antibody 3824 (IGHV3-30)
ARDNWGFDY

SEQ ID NO: 7649 - protein, 9 aa, Homo sapiens
  Light chain CDR3 for antibody 3825 (IGKV1-16)
LQDYNYPRT

SEQ ID NO: 7650 - protein, 17 aa, Homo sapiens
  Heavy chain CDR3 for antibody 3825 (IGHV3-33)
ARVRGVIEGYYYYGMDV

SEQ ID NO: 7651 - protein, 9 aa, Homo sapiens
  Light chain CDR3 for antibody 3826 (IGKV1-39)
QQSYSTPLT

SEQ ID NO: 7652 - protein, 13 aa, Homo sapiens
  Heavy chain CDR3 for antibody 3826 (IGHV3-11)
ARDEGYSGYNLDN

SEQ ID NO: 7653 - protein, 10 aa, Homo sapiens
  Light chain CDR3 for antibody 3827 (IGKV3-11)
QQRSNWPIFT

SEQ ID NO: 7654 - protein, 13 aa, Homo sapiens
  Heavy chain CDR3 for antibody 3827 (IGHV4-39)
ARHEVMIRGVFDY

SEQ ID NO: 7655 - protein, 9 aa, Homo sapiens
  Light chain CDR3 for antibody 3828 (IGKV6-21)
HQSSSLPYT

SEQ ID NO: 7656 - protein, 15 aa, Homo sapiens
  Heavy chain CDR3 for antibody 3828 (IGHV3-20)
AREGPYYYGSGSLDY

SEQ ID NO: 7657 - protein, 9 aa, Homo sapiens
  Light chain CDR3 for antibody 3829 (IGKV1-16)
QHYNDYPFT

SEQ ID NO: 7658 - protein, 17 aa, Homo sapiens
  Heavy chain CDR3 for antibody 3829 (IGHV3-33)
ARGYCSRTSCYLYYFDY

SEQ ID NO: 7659 - protein, 9 aa, Homo sapiens
  Light chain CDR3 for antibody 3830 (IGKV3-11)
QQRSNWPWT

SEQ ID NO: 7660 - protein, 7 aa, Homo sapiens
  Heavy chain CDR3 for antibody 3830 (IGHV3-33)
ARELVDY

SEQ ID NO: 7661 - protein, 9 aa, Homo sapiens
  Light chain CDR3 for antibody 3831 (IGKV3-20)
QQYGSSPYT

SEQ ID NO: 7662 - protein, 8 aa, Homo sapiens
  Heavy chain CDR3 for antibody 3831 (IGHV4-39)
ARRGGLDY

SEQ ID NO: 7663 - protein, 9 aa, Homo sapiens
  Light chain CDR3 for antibody 3832 (IGKV3-20)
QQYGSSPRT

SEQ ID NO: 7664 - protein, 6 aa, Homo sapiens
  Heavy chain CDR3 for antibody 3832 (IGHV3-23)
AKEGDY

SEQ ID NO: 7665 - protein, 9 aa, Homo sapiens
  Light chain CDR3 for antibody 3833 (IGKV1D-13)
QQFNNYPYT

SEQ ID NO: 7666 - protein, 14 aa, Homo sapiens
  Heavy chain CDR3 for antibody 3833 (IGHV1-46)
ARRFRIAVAAPFDY

SEQ ID NO: 7667 - protein, 8 aa, Homo sapiens
  Light chain CDR3 for antibody 3834 (IGKV3-20)
QQYGRSFT

SEQ ID NO: 7668 - protein, 18 aa, Homo sapiens
  Heavy chain CDR3 for antibody 3834 (IGHV4-59)
AREGHYYTSGSYYKAFDY

SEQ ID NO: 7669 - protein, 9 aa, Homo sapiens
  Light chain CDR3 for antibody 3835 (IGKV1D-13)
QQFNNYPHT

SEQ ID NO: 7670 - protein, 18 aa, Homo sapiens
  Heavy chain CDR3 for antibody 3835 (IGHV3-33)
AREGYDILTGYYNVKFDY

SEQ ID NO: 7671 - protein, 9 aa, Homo sapiens
  Light chain CDR3 for antibody 3836 (IGKV1-16)
QQYNSYPYT

SEQ ID NO: 7672 - protein, 18 aa, Homo sapiens
  Heavy chain CDR3 for antibody 3836 (IGHV3-23)
AREYYDFLTGYYKGAFDI

SEQ ID NO: 7673 - protein, 9 aa, Homo sapiens
  Light chain CDR3 for antibody 3837 (IGKV3-20)
QQYGSSPYT

SEQ ID NO: 7674 - protein, 17 aa, Homo sapiens
  Heavy chain CDR3 for antibody 3837 (IGHV3-33)
ARENDILTGSYYYGMDV

SEQ ID NO: 7675 - protein, 10 aa, Homo sapiens
  Light chain CDR3 for antibody 3838 (IGKV3-20)
QQYGRSPPVT

SEQ ID NO: 7676 - protein, 16 aa, Homo sapiens
  Heavy chain CDR3 for antibody 3838 (IGHV3-23)
AKEGMVLRYFDWLWDY

SEQ ID NO: 7677 - protein, 9 aa, Homo sapiens
  Light chain CDR3 for antibody 3839 (IGKV2-30)
MQGTHWPLT

SEQ ID NO: 7678 - protein, 12 aa, Homo sapiens
  Heavy chain CDR3 for antibody 3839 (IGHV3-33)
AREGDILTGYSL

SEQ ID NO: 7679 - protein, 9 aa, Homo sapiens
  Light chain CDR3 for antibody 3840 (IGKV1-9)
QQLNSYPLT

SEQ ID NO: 7680 - protein, 22 aa, Homo sapiens
  Heavy chain CDR3 for antibody 3840 (IGHV3-h)
AREAYYDILTGYYTGYYYGMDV

SEQ ID NO: 7681 - protein, 9 aa, Homo sapiens
  Light chain CDR3 for antibody 3841 (IGKV1-9)
QQLISYPLT

SEQ ID NO: 7682 - protein, 10 aa, Homo sapiens
  Heavy chain CDR3 for antibody 3841 (IGHV3-33)
ARDGSGSQPI

SEQ ID NO: 7683 - protein, 10 aa, Homo sapiens
  Light chain CDR3 for antibody 3842 (IGKV3-11)
QQRSNWPTWT

SEQ ID NO: 7684 - protein, 13 aa, Homo sapiens
  Heavy chain CDR3 for antibody 3842 (IGHV3-33)
ARGDNWNDGGFDY

SEQ ID NO: 7685 - protein, 9 aa, Homo sapiens
  Light chain CDR3 for antibody 3843 (IGKV5-2)
LQHDNFPYT

SEQ ID NO: 7686 - protein, 18 aa, Homo sapiens
  Heavy chain CDR3 for antibody 3843 (IGHV3-33)
VREGGYYGSGSYPDAFDI

SEQ ID NO: 7687 - protein, 9 aa, Homo sapiens
  Light chain CDR3 for antibody 3844 (IGKV1-39)
QQSYSTPLT

SEQ ID NO: 7688 - protein, 14 aa, Homo sapiens
  Heavy chain CDR3 for antibody 3844 (IGHV3-33)
AREDYYGPLNWFDP

SEQ ID NO: 7689 - protein, 8 aa, Homo sapiens
  Light chain CDR3 for antibody 3845 (IGKV3D-7)
QQDYNLLT

SEQ ID NO: 7690 - protein, 11 aa, Homo sapiens
  Heavy chain CDR3 for antibody 3845 (IGHV3-33)
ARDILTGFLDH

SEQ ID NO: 7691 - protein, 9 aa, Homo sapiens
  Light chain CDR3 for antibody 3846 (IGKV5-2)
LQHDNFPYT

SEQ ID NO: 7692 - protein, 19 aa, Homo sapiens
  Heavy chain CDR3 for antibody 3846 (IGHV3-33)
ARIPGIAVAGGYYYYGMDV

SEQ ID NO: 7693 - protein, 9 aa, Homo sapiens
  Light chain CDR3 for antibody 3847 (IGKV1-27)
QKYNSAPYT

SEQ ID NO: 7694 - protein, 15 aa, Homo sapiens
  Heavy chain CDR3 for antibody 3847 (IGHV3-33)
ARRSILTGSYWYFDL

SEQ ID NO: 7695 - protein, 9 aa, Homo sapiens
  Light chain CDR3 for antibody 3848 (IGKV5-2)
LQHDNFPYT

SEQ ID NO: 7696 - protein, 18 aa, Homo sapiens
  Heavy chain CDR3 for antibody 3848 (IGHV3-33)
ARGGVLYDILTGFYGMDV

SEQ ID NO: 7697 - protein, 9 aa, Homo sapiens
  Light chain CDR3 for antibody 3849 (IGKV1-17)
LQHNSYPRT

SEQ ID NO: 7698 - protein, 15 aa, Homo sapiens
  Heavy chain CDR3 for antibody 3849 (IGHV4-39)
ARRDYDILTGYLFDY

SEQ ID NO: 7699 - protein, 9 aa, Homo sapiens
  Light chain CDR3 for antibody 3850 (IGKV1-39)
QQSYSTPLT

SEQ ID NO: 7700 - protein, 19 aa, Homo sapiens
  Heavy chain CDR3 for antibody 3850 (IGHV5-51)
ARHGEKGKRITMVRGSLDV

SEQ ID NO: 7701 - protein, 9 aa, Homo sapiens
  Light chain CDR3 for antibody 3851 (IGKV1-6)
LQDYKSPFT

SEQ ID NO: 7702 - protein, 14 aa, Homo sapiens
  Heavy chain CDR3 for antibody 3851 (IGHV3-33)
ARDNILTAYYLFDY

SEQ ID NO: 7703 - protein, 9 aa, Homo sapiens
  Light chain CDR3 for antibody 3852 (IGKV1D-16)
HQYNSYPFT

SEQ ID NO: 7704 - protein, 13 aa, Homo sapiens
  Heavy chain CDR3 for antibody 3852 (IGHV3-64)
ARERWAANTCFDY

SEQ ID NO: 7705 - protein, 8 aa, Homo sapiens
  Light chain CDR3 for antibody 3853 (IGKV3D-7)
QQDYNLLT

SEQ ID NO: 7706 - protein, 14 aa, Homo sapiens
  Heavy chain CDR3 for antibody 3853 (IGHV3-33)
AREGYSSNWYDFDY

SEQ ID NO: 7707 - protein, 9 aa, Homo sapiens
  Light chain CDR3 for antibody 3854 (IGKV3D-7)
QQDYNLPLT

SEQ ID NO: 7708 - protein, 19 aa, Homo sapiens
  Heavy chain CDR3 for antibody 3854 (IGHV1-18)
ARDDILTGYSLYYYYGMDV

SEQ ID NO: 7709 - protein, 9 aa, Homo sapiens
  Light chain CDR3 for antibody 3855 (IGKV1-17)
LQHNSYPWT

SEQ ID NO: 7710 - protein, 13 aa, Homo sapiens
  Heavy chain CDR3 for antibody 3855 (IGHV4-61)
ASRYSSGWYPFDY

SEQ ID NO: 7711 - protein, 9 aa, Homo sapiens
  Light chain CDR3 for antibody 3856 (IGKV1-39)
QQSYSTPYT

SEQ ID NO: 7712 - protein, 18 aa, Homo sapiens
  Heavy chain CDR3 for antibody 3856 (IGHV3-33)
VRDRERYGSGSYPDAFDI

SEQ ID NO: 7713 - protein, 10 aa, Homo sapiens
  Light chain CDR3 for antibody 3857 (IGKV1-39)
QQSYSTPMYT

SEQ ID NO: 7714 - protein, 13 aa, Homo sapiens
  Heavy chain CDR3 for antibody 3857 (IGHV4-39)
ARQWPSGYWYFDL

SEQ ID NO: 7715 - protein, 9 aa, Homo sapiens
  Light chain CDR3 for antibody 3858 (IGKV3-20)
QQYGSSPYT

SEQ ID NO: 7716 - protein, 15 aa, Homo sapiens
  Heavy chain CDR3 for antibody 3858 (IGHV3-33)
ARDGGPDGDYKAFDI

SEQ ID NO: 7717 - protein, 9 aa, Homo sapiens
  Light chain CDR3 for antibody 3859 (IGKV1-39)
QQSYRTPLT

SEQ ID NO: 7718 - protein, 17 aa, Homo sapiens
  Heavy chain CDR3 for antibody 3859 (IGHV3-66)
ARVQYDILTGYSPYFDN

SEQ ID NO: 7719 - protein, 9 aa, Homo sapiens
  Light chain CDR3 for antibody 3860 (IGKV1-17)
LQHNSYPWT

SEQ ID NO: 7720 - protein, 15 aa, Homo sapiens
  Heavy chain CDR3 for antibody 3860 (IGHV3-33)
ARDRGMVRGDGYLDY

SEQ ID NO: 7721 - protein, 9 aa, Homo sapiens
  Light chain CDR3 for antibody 3861 (IGKV1-6)
LQDYKSPFT

SEQ ID NO: 7722 - protein, 11 aa, Homo sapiens
  Heavy chain CDR3 for antibody 3861 (IGHV4-59)
AREMGHDTFDI

SEQ ID NO: 7723 - protein, 9 aa, Homo sapiens
  Light chain CDR3 for antibody 3862 (IGKV2D-28)
MQVLQTPFT

SEQ ID NO: 7724 - protein, 18 aa, Homo sapiens
  Heavy chain CDR3 for antibody 3862 (IGHV4-59)
AREGHYYTSGSYYKAFDY

SEQ ID NO: 7725 - protein, 9 aa, Homo sapiens
  Light chain CDR3 for antibody 3863 (IGKV1-9)
QQLKSYPYT

SEQ ID NO: 7726 - protein, 12 aa, Homo sapiens
  Heavy chain CDR3 for antibody 3863 (IGHV3-33)
ARGYFGSGYAHF

SEQ ID NO: 7727 - protein, 8 aa, Homo sapiens
  Light chain CDR3 for antibody 3864 (IGKV3-11)
QQRSNWLT

SEQ ID NO: 7728 - protein, 18 aa, Homo sapiens
  Heavy chain CDR3 for antibody 3864 (IGHV1-46)
ARDGDYVWGSYRSDWFDP

SEQ ID NO: 7729 - protein, 9 aa, Homo sapiens
  Light chain CDR3 for antibody 3865 (IGKV2-30)
MQGTHWPLT

SEQ ID NO: 7730 - protein, 12 aa, Homo sapiens
  Heavy chain CDR3 for antibody 3865 (IGHV1-24)
ASDWAYYYGMDV

SEQ ID NO: 7731 - protein, 9 aa, Homo sapiens
  Light chain CDR3 for antibody 3866 (IGKV1D-13)
QQFNNYPYT

SEQ ID NO: 7732 - protein, 18 aa, Homo sapiens
  Heavy chain CDR3 for antibody 3866 (IGHV3-33)
ARKGGYYSGSGSYRHFDF

SEQ ID NO: 7733 - protein, 10 aa, Homo sapiens
  Light chain CDR3 for antibody 3867 (IGKV1-39)
QQSYSTPMYT

SEQ ID NO: 7734 - protein, 15 aa, Homo sapiens
  Heavy chain CDR3 for antibody 3867 (IGHV3-20)
ARDRGSSGWRDWFDP

SEQ ID NO: 7735 - protein, 9 aa, Homo sapiens
  Light chain CDR3 for antibody 3868 (IGKV5-2)
LQHDNFPYT

SEQ ID NO: 7736 - protein, 19 aa, Homo sapiens
  Heavy chain CDR3 for antibody 3868 (IGHV3-33)
ARRRDDILTGWDYYFGMDV

SEQ ID NO: 7737 - protein, 9 aa, Homo sapiens
  Light chain CDR3 for antibody 3869 (IGKV1-39)
QQSYSTPLT

SEQ ID NO: 7738 - protein, 17 aa, Homo sapiens
  Heavy chain CDR3 for antibody 3869 (IGHV3-23)
AKDTITMVRGALFGMDV

SEQ ID NO: 7739 - protein, 9 aa, Homo sapiens
  Light chain CDR3 for antibody 3870 (IGKV3-15)
QQYNNWPFT

SEQ ID NO: 7740 - protein, 16 aa, Homo sapiens
  Heavy chain CDR3 for antibody 3870 (IGHV1-18)
ARYFDWLLRDYYGMDV

SEQ ID NO: 7741 - protein, 9 aa, Homo sapiens
  Light chain CDR3 for antibody 3871 (IGKV1-6)
LQDYKSPFT

SEQ ID NO: 7742 - protein, 15 aa, Homo sapiens
  Heavy chain CDR3 for antibody 3871 (IGHV4-59)
ARDLGHYYGSVSIDY

SEQ ID NO: 7743 - protein, 9 aa, Homo sapiens
  Light chain CDR3 for antibody 3872 (IGKV6-21)
HQSSSLPYT

SEQ ID NO: 7744 - protein, 17 aa, Homo sapiens
  Heavy chain CDR3 for antibody 3872 (IGHV1-24)
ATHYGSGSHYKGYGMDV

SEQ ID NO: 7745 - protein, 9 aa, Homo sapiens
  Light chain CDR3 for antibody 3873 (IGKV1-6)
LQDYNYPWT

SEQ ID NO: 7746 - protein, 16 aa, Homo sapiens
  Heavy chain CDR3 for antibody 3873 (IGHV3-33)
ARGYDMLTGDYHGMDV

SEQ ID NO: 7747 - protein, 9 aa, Homo sapiens
  Light chain CDR3 for antibody 3874 (IGKV1D-16)
QQYHSYPYT

SEQ ID NO: 7748 - protein, 20 aa, Homo sapiens
  Heavy chain CDR3 for antibody 3874 (IGHV1-f)
ATHYDILTGSPYYYYCALDV

SEQ ID NO: 7749 - protein, 9 aa, Homo sapiens
  Light chain CDR3 for antibody 3875 (IGKV5-2)
LQHDNFPYT

SEQ ID NO: 7750 - protein, 18 aa, Homo sapiens
  Heavy chain CDR3 for antibody 3875 (IGHV3-33)
AREGYDILTGDYRLGFDY

SEQ ID NO: 7751 - protein, 9 aa, Homo sapiens
  Light chain CDR3 for antibody 3876 (IGKV1-6)
QQEYNYPLT

SEQ ID NO: 7752 - protein, 9 aa, Homo sapiens
  Heavy chain CDR3 for antibody 3876 (IGHV1-8)
ARGRLDFDY

SEQ ID NO: 7753 - protein, 9 aa, Homo sapiens
  Light chain CDR3 for antibody 3877 (IGKV1-17)
LQHNSYPYT

SEQ ID NO: 7754 - protein, 13 aa, Homo sapiens
  Heavy chain CDR3 for antibody 3877 (IGHV1-24)
ATGYSINWYEFDY

SEQ ID NO: 7755 - protein, 9 aa, Homo sapiens
  Light chain CDR3 for antibody 3878 (IGKV1-9)
QQYNSYPLT

SEQ ID NO: 7756 - protein, 12 aa, Homo sapiens
  Heavy chain CDR3 for antibody 3878 (IGHV3-23)
AKGYTSFWYFDL

SEQ ID NO: 7757 - protein, 10 aa, Homo sapiens
  Light chain CDR3 for antibody 3879 (IGKV3-15)
QQYNNWPPYT

SEQ ID NO: 7758 - protein, 16 aa, Homo sapiens
  Heavy chain CDR3 for antibody 3879 (IGHV3-23)
AKEGMVLRYFDWLWDY

SEQ ID NO: 7759 - protein, 9 aa, Homo sapiens
  Light chain CDR3 for antibody 3880 (IGKV1-6)
LQDYNYPYT

SEQ ID NO: 7760 - protein, 13 aa, Homo sapiens
  Heavy chain CDR3 for antibody 3880 (IGHV3-23)
ARGELLWFGEFAC

SEQ ID NO: 7761 - protein, 9 aa, Homo sapiens
  Light chain CDR3 for antibody 3881 (IGKV3D-7)
QQDYNLPLT

SEQ ID NO: 7762 - protein, 18 aa, Homo sapiens
  Heavy chain CDR3 for antibody 3881 (IGHV1-8)
ARSRIAAAGIYYYYGMDV

SEQ ID NO: 7763 - protein, 9 aa, Homo sapiens
  Light chain CDR3 for antibody 3882 (IGKV5-2)
LQHDNFPYT

SEQ ID NO: 7764 - protein, 16 aa, Homo sapiens
  Heavy chain CDR3 for antibody 3882 (IGHV3-33)
ARGANYYGSGIPNFEY

SEQ ID NO: 7765 - protein, 10 aa, Homo sapiens
  Light chain CDR3 for antibody 3883 (IGKV1-39)
QQSYSTPMYT

SEQ ID NO: 7766 - protein, 18 aa, Homo sapiens
  Heavy chain CDR3 for antibody 3883 (IGHV3-23)
AKDRITGTTYGYYSGLDV

SEQ ID NO: 7767 - protein, 9 aa, Homo sapiens
  Light chain CDR3 for antibody 3884 (IGKV1D-13)
QQFNNYPYT

SEQ ID NO: 7768 - protein, 24 aa, Homo sapiens
  Heavy chain CDR3 for antibody 3884 (IGHV3-11)
AREWEGNYGSGSYYKSAYYYGMDV

SEQ ID NO: 7769 - protein, 9 aa, Homo sapiens
  Light chain CDR3 for antibody 3885 (IGKV3-11)
QQRSNWPLT

SEQ ID NO: 7770 - protein, 13 aa, Homo sapiens
  Heavy chain CDR3 for antibody 3885 (IGHV1-18)
ARSITMVRGVIGY

SEQ ID NO: 7771 - protein, 10 aa, Homo sapiens
  Light chain CDR3 for antibody 3886 (IGKV1-39)
QQSYSTPMYT

SEQ ID NO: 7772 - protein, 15 aa, Homo sapiens
  Heavy chain CDR3 for antibody 3886 (IGHV3-33)
ARRVCSGGSCSLFDY

SEQ ID NO: 7773 - protein, 9 aa, Homo sapiens
  Light chain CDR3 for antibody 3887 (IGKV5-2)
LQHDNFPYT

SEQ ID NO: 7774 - protein, 13 aa, Homo sapiens
  Heavy chain CDR3 for antibody 3887 (IGHV3-33)
ARVHFDWLDAFDI

SEQ ID NO: 7775 - protein, 9 aa, Homo sapiens
  Light chain CDR3 for antibody 3888 (IGKV1-17)
LQHNSYPWT

SEQ ID NO: 7776 - protein, 14 aa, Homo sapiens
  Heavy chain CDR3 for antibody 3888 (IGHV3-33)
ARKPDYYGSGYFDY

SEQ ID NO: 7777 - protein, 9 aa, Homo sapiens
  Light chain CDR3 for antibody 3889 (IGKV3D-7)
QQDYNLPLT

SEQ ID NO: 7778 - protein, 13 aa, Homo sapiens
  Heavy chain CDR3 for antibody 3889 (IGHV4-59)
ANRDYYGYYGMDV

SEQ ID NO: 7779 - protein, 9 aa, Homo sapiens
  Light chain CDR3 for antibody 3890 (IGKV1-17)
LQHNSYPYT

SEQ ID NO: 7780 - protein, 16 aa, Homo sapiens
  Heavy chain CDR3 for antibody 3890 (IGHV3-23)
ARDVGIAAAGSGWFDP

SEQ ID NO: 7781 - protein, 9 aa, Homo sapiens
  Light chain CDR3 for antibody 3891 (IGKV1-9)
QQLNSYPYT

SEQ ID NO: 7782 - protein, 18 aa, Homo sapiens
  Heavy chain CDR3 for antibody 3891 (IGHV3-33)
ARGYNQGSGSYYNVCFDY

SEQ ID NO: 7783 - protein, 9 aa, Homo sapiens
  Light chain CDR3 for antibody 3892 (IGKV3D-20)
QQYGSSPYT

SEQ ID NO: 7784 - protein, 15 aa, Homo sapiens
  Heavy chain CDR3 for antibody 3892 (IGHV3-64)
ARDSRPEITGPPFDY

SEQ ID NO: 7785 - protein, 9 aa, Homo sapiens
  Light chain CDR3 for antibody 3893 (IGKV1-27)
QKYNSAPYT

SEQ ID NO: 7786 - protein, 16 aa, Homo sapiens
  Heavy chain CDR3 for antibody 3893 (IGHV3-33)
ARGDDILTHQYYGVDV

SEQ ID NO: 7787 - protein, 9 aa, Homo sapiens
  Light chain CDR3 for antibody 3894 (IGKV1-39)
QQSYRTPLT

SEQ ID NO: 7788 - protein, 12 aa, Homo sapiens
  Heavy chain CDR3 for antibody 3894 (IGHV3-33)
ARDPGYYYGLDV

SEQ ID NO: 7789 - protein, 9 aa, Homo sapiens
  Light chain CDR3 for antibody 3895 (IGKV3D-20)
QQYGSSPRT

SEQ ID NO: 7790 - protein, 20 aa, Homo sapiens
  Heavy chain CDR3 for antibody 3895 (IGHV3-23)
AKGMGGLRYFDWPHYYGMDV

SEQ ID NO: 7791 - protein, 9 aa, Homo sapiens
  Light chain CDR3 for antibody 3896 (IGKV1-39)
QQSYSTPLT

SEQ ID NO: 7792 - protein, 14 aa, Homo sapiens
  Heavy chain CDR3 for antibody 3896 (IGHV4-59)
AKGGSGSYYNWFDP

SEQ ID NO: 7793 - protein, 9 aa, Homo sapiens
  Light chain CDR3 for antibody 3897 (IGKV1-39)
QQSYSTPYT

SEQ ID NO: 7794 - protein, 12 aa, Homo sapiens
  Heavy chain CDR3 for antibody 3897 (IGHV1-46)
ARGLTGDHAFDI

SEQ ID NO: 7795 - protein, 9 aa, Homo sapiens
  Light chain CDR3 for antibody 3898 (IGKV1-39)
QQSYSTPLT

SEQ ID NO: 7796 - protein, 16 aa, Homo sapiens
  Heavy chain CDR3 for antibody 3898 (IGHV3-23)
AKEGEVLRYFDWLFNY

SEQ ID NO: 7797 - protein, 9 aa, Homo sapiens
  Light chain CDR3 for antibody 3899 (IGKV1-6)
LQDYNYPYT

SEQ ID NO: 7798 - protein, 17 aa, Homo sapiens
  Heavy chain CDR3 for antibody 3899 (IGHV1-18)
ARERYYGSGNYKYNMDV

SEQ ID NO: 7799 - protein, 9 aa, Homo sapiens
  Light chain CDR3 for antibody 3900 (IGKV1D-16)
QQYYSYPRT

SEQ ID NO: 7800 - protein, 15 aa, Homo sapiens
  Heavy chain CDR3 for antibody 3900 (IGHV3-33)
ARDRGWKAPGYGMDV

SEQ ID NO: 7801 - protein, 9 aa, Homo sapiens
  Light chain CDR3 for antibody 3901 (IGKV1-6)
LQDYNYPRT

SEQ ID NO: 7802 - protein, 12 aa, Homo sapiens
  Heavy chain CDR3 for antibody 3901 (IGHV4-39)
ARQGAYSRFFDY

SEQ ID NO: 7803 - protein, 9 aa, Homo sapiens
  Light chain CDR3 for antibody 3902 (IGKV1-17)
LQHNGYPLT

SEQ ID NO: 7804 - protein, 13 aa, Homo sapiens
  Heavy chain CDR3 for antibody 3902 (IGHV3-11)
ARDEGYRGYVLDT

SEQ ID NO: 7805 - protein, 9 aa, Homo sapiens
  Light chain CDR3 for antibody 3903 (IGKV1-39)
QQSYSTPLT

SEQ ID NO: 7806 - protein, 12 aa, Homo sapiens
  Heavy chain CDR3 for antibody 3903 (IGHV3-23)
AKEGIVGVPFDY

SEQ ID NO: 7807 - protein, 9 aa, Homo sapiens
  Light chain CDR3 for antibody 3904 (IGKV5-2)
LQHDNFPWT

SEQ ID NO: 7808 - protein, 17 aa, Homo sapiens
  Heavy chain CDR3 for antibody 3904 (IGHV4-59)
AREEDYFGSGSFGTFDI

SEQ ID NO: 7809 - protein, 8 aa, Homo sapiens
  Light chain CDR3 for antibody 3905 (IGKV1-5)
QQYNSYWT

SEQ ID NO: 7810 - protein, 17 aa, Homo sapiens
  Heavy chain CDR3 for antibody 3905 (IGHV3-33)
VREGGLLWVGELSLFDY

SEQ ID NO: 7811 - protein, 9 aa, Homo sapiens
  Light chain CDR3 for antibody 3906 (IGKV1D-16)
QQYNSYPYT

SEQ ID NO: 7812 - protein, 9 aa, Homo sapiens
  Heavy chain CDR3 for antibody 3906 (IGHV3-64)
VRYYYGMDV

SEQ ID NO: 7813 - protein, 9 aa, Homo sapiens
  Light chain CDR3 for antibody 3907 (IGKV3D-7)
QQDYTLPLT

SEQ ID NO: 7814 - protein, 13 aa, Homo sapiens
  Heavy chain CDR3 for antibody 3907 (IGHV1-46)
ARVKLGSLGAFDI

SEQ ID NO: 7815 - protein, 9 aa, Homo sapiens
  Light chain CDR3 for antibody 3908 (IGKV1-39)
QQSYSTPYT

SEQ ID NO: 7816 - protein, 13 aa, Homo sapiens
  Heavy chain CDR3 for antibody 3908 (IGHV3-33)
ARRYRSGWYPFDY

SEQ ID NO: 7817 - protein, 9 aa, Homo sapiens
  Light chain CDR3 for antibody 3909 (IGKV1-16)
QQYNSYPLT

SEQ ID NO: 7818 - protein, 18 aa, Homo sapiens
  Heavy chain CDR3 for antibody 3909 (IGHV3-33)
VRERGHYGSGSFPDAFDI

SEQ ID NO: 7819 - protein, 9 aa, Homo sapiens
  Light chain CDR3 for antibody 3910 (IGKV5-2)
LQHDNFPWT

SEQ ID NO: 7820 - protein, 20 aa, Homo sapiens
  Heavy chain CDR3 for antibody 3910 (IGHV1-f)
ATHYDILTGSPYYYYCALDV

SEQ ID NO: 7821 - protein, 9 aa, Homo sapiens
  Light chain CDR3 for antibody 3911 (IGKV1-39)
QQSYSTPFT

SEQ ID NO: 7822 - protein, 7 aa, Homo sapiens
  Heavy chain CDR3 for antibody 3911 (IGHV3-33)
ARELFDY

SEQ ID NO: 7823 - protein, 9 aa, Homo sapiens
  Light chain CDR3 for antibody 3912 (IGKV3D-7)
QQDYNLPLT

SEQ ID NO: 7824 - protein, 17 aa, Homo sapiens
  Heavy chain CDR3 for antibody 3912 (IGHV3-33)
ARGGAAAGPYLYYGLDV

SEQ ID NO: 7825 - protein, 9 aa, Homo sapiens
  Light chain CDR3 for antibody 3913 (IGKV1-33)
QQYDNLPFT

SEQ ID NO: 7826 - protein, 21 aa, Homo sapiens
  Heavy chain CDR3 for antibody 3913 (IGHV3-33)
ARKRLYDILTGYYKAYYGMDV

SEQ ID NO: 7827 - protein, 9 aa, Homo sapiens
  Light chain CDR3 for antibody 3914 (IGKV5-2)
LQHDNFPYT

SEQ ID NO: 7828 - protein, 11 aa, Homo sapiens
  Heavy chain CDR3 for antibody 3914 (IGHV3-23)
AKEGTYFDIPH

SEQ ID NO: 7829 - protein, 9 aa, Homo sapiens
  Light chain CDR3 for antibody 3915 (IGKV1-6)
LQDYKSPFT

SEQ ID NO: 7830 - protein, 14 aa, Homo sapiens
  Heavy chain CDR3 for antibody 3915 (IGHV3-33)
ARAISGSSYWYFDL

SEQ ID NO: 7831 - protein, 9 aa, Homo sapiens
  Light chain CDR3 for antibody 3916 (IGKV3-15)
QQYNNWPLT

SEQ ID NO: 7832 - protein, 9 aa, Homo sapiens
  Heavy chain CDR3 for antibody 3916 (IGHV4-59)
ARGGASFDY

SEQ ID NO: 7833 - protein, 8 aa, Homo sapiens
  Light chain CDR3 for antibody 3917 (IGKV1D-13)
QQFNNYPT

SEQ ID NO: 7834 - protein, 10 aa, Homo sapiens
  Heavy chain CDR3 for antibody 3917 (IGHV3-33)
ARDGSGSQPI

SEQ ID NO: 7835 - protein, 9 aa, Homo sapiens
  Light chain CDR3 for antibody 3918 (IGKV1-27)
QKYNSAPYT

SEQ ID NO: 7836 - protein, 17 aa, Homo sapiens
  Heavy chain CDR3 for antibody 3918 (IGHV1-18)
ARERYYGSGSYKYNMDV

SEQ ID NO: 7837 - protein, 9 aa, Homo sapiens
  Light chain CDR3 for antibody 3919 (IGKV1D-16)
QQYDSYPWT

SEQ ID NO: 7838 - protein, 12 aa, Homo sapiens
  Heavy chain CDR3 for antibody 3919 (IGHV3-13)
VREAGIPDAFDI

SEQ ID NO: 7839 - protein, 9 aa, Homo sapiens
  Light chain CDR3 for antibody 3920 (IGKV5-2)
LQHDNFPWT

SEQ ID NO: 7840 - protein, 14 aa, Homo sapiens
  Heavy chain CDR3 for antibody 3920 (IGHV3-33)
ARKGYSGRYYYFDY

SEQ ID NO: 7841 - protein, 9 aa, Homo sapiens
  Light chain CDR3 for antibody 3921 (IGKV5-2)
LQHDNFPWT

SEQ ID NO: 7842 - protein, 16 aa, Homo sapiens
  Heavy chain CDR3 for antibody 3921 (IGHV3-33)
ARIAAPGSEYYYGMDV

SEQ ID NO: 7843 - protein, 9 aa, Homo sapiens
  Light chain CDR3 for antibody 3922 (IGKV1-39)
QQSYSTPLT

SEQ ID NO: 7844 - protein, 11 aa, Homo sapiens
  Heavy chain CDR3 for antibody 3922 (IGHV3-23)
ARDPGSITGDY

SEQ ID NO: 7845 - protein, 9 aa, Homo sapiens
  Light chain CDR3 for antibody 3923 (IGKV3D-7)
QQDYEFPLT

SEQ ID NO: 7846 - protein, 13 aa, Homo sapiens
  Heavy chain CDR3 for antibody 3923 (IGHV4-28)
ARKGATGYYGMDV

SEQ ID NO: 7847 - protein, 9 aa, Homo sapiens
  Light chain CDR3 for antibody 3924 (IGKV1-9)
QQLKSYLYT

SEQ ID NO: 7848 - protein, 14 aa, Homo sapiens
  Heavy chain CDR3 for antibody 3924 (IGHV1-46)
ARRGIVGALDAFDI

SEQ ID NO: 7849 - protein, 9 aa, Homo sapiens
  Light chain CDR3 for antibody 3925 (IGKV1-27)
QKYNSAPLT

SEQ ID NO: 7850 - protein, 8 aa, Homo sapiens
  Heavy chain CDR3 for antibody 3925 (IGHV3-11)
ARTGPLDY

SEQ ID NO: 7851 - protein, 9 aa, Homo sapiens
  Light chain CDR3 for antibody 3926 (IGKV1-6)
LQDYNYPYT

SEQ ID NO: 7852 - protein, 9 aa, Homo sapiens
  Heavy chain CDR3 for antibody 3926 (IGHV1-18)
ARGNTWFDY

SEQ ID NO: 7853 - protein, 9 aa, Homo sapiens
  Light chain CDR3 for antibody 3927 (IGKV6-21)
HQSSSLPYT

SEQ ID NO: 7854 - protein, 9 aa, Homo sapiens
  Heavy chain CDR3 for antibody 3927 (IGHV3-33)
AANSYGLDY

SEQ ID NO: 7855 - protein, 9 aa, Homo sapiens
  Light chain CDR3 for antibody 3928 (IGKV1-39)
QQSYRTPLT

SEQ ID NO: 7856 - protein, 13 aa, Homo sapiens
  Heavy chain CDR3 for antibody 3928 (IGHV3-33)
ASGYSGYDWYFDL

SEQ ID NO: 7857 - protein, 9 aa, Homo sapiens
  Light chain CDR3 for antibody 3929 (IGKV1-16)
QHYNDYPFT

SEQ ID NO: 7858 - protein, 16 aa, Homo sapiens
  Heavy chain CDR3 for antibody 3929 (IGHV3-23)
AKEGMVLRYFDWLWDY

SEQ ID NO: 7859 - protein, 9 aa, Homo sapiens
  Light chain CDR3 for antibody 3930 (IGKV1-17)
LQQNSYPWT

SEQ ID NO: 7860 - protein, 13 aa, Homo sapiens
  Heavy chain CDR3 for antibody 3930 (IGHV4-59)
ARDAGYSSSWFDY

SEQ ID NO: 7861 - protein, 9 aa, Homo sapiens
  Light chain CDR3 for antibody 3931 (IGKV3-20)
QQYGSSPYT

SEQ ID NO: 7862 - protein, 13 aa, Homo sapiens
  Heavy chain CDR3 for antibody 3931 (IGHV3-53)
ARDEGYSGYNLDN

SEQ ID NO: 7863 - protein, 9 aa, Homo sapiens
  Light chain CDR3 for antibody 3932 (IGKV3D-7)
QQDYTLPLT

SEQ ID NO: 7864 - protein, 11 aa, Homo sapiens
  Heavy chain CDR3 for antibody 3932 (IGHV4-4)
AREAYYYGLDV

SEQ ID NO: 7865 - protein, 8 aa, Homo sapiens
  Light chain CDR3 for antibody 3933 (IGKV1-5)
QQYNSYYT

SEQ ID NO: 7866 - protein, 10 aa, Homo sapiens
  Heavy chain CDR3 for antibody 3933 (IGHV3-33)
ARENSTPLDY

SEQ ID NO: 7867 - protein, 9 aa, Homo sapiens
  Light chain CDR3 for antibody 3934 (IGKV3-11)
QQRSNWPPT

SEQ ID NO: 7868 - protein, 14 aa, Homo sapiens
  Heavy chain CDR3 for antibody 3934 (IGHV3-33)
VRDAMGATTAWFDP

SEQ ID NO: 7869 - protein, 8 aa, Homo sapiens
  Light chain CDR3 for antibody 3935 (IGKV3D-7)
QQDYNLLT

SEQ ID NO: 7870 - protein, 9 aa, Homo sapiens
  Heavy chain CDR3 for antibody 3935 (IGHV3-13)
ARDRWYFDL

SEQ ID NO: 7871 - protein, 9 aa, Homo sapiens
  Light chain CDR3 for antibody 3936 (IGKV3-11)
QQRINWPWT

SEQ ID NO: 7872 - protein, 11 aa, Homo sapiens
  Heavy chain CDR3 for antibody 3936 (IGHV4-59)
ARSIRYSVFDY

SEQ ID NO: 7873 - protein, 9 aa, Homo sapiens
  Light chain CDR3 for antibody 3937 (IGKV5-2)
LQHDNFPYT

SEQ ID NO: 7874 - protein, 9 aa, Homo sapiens
  Heavy chain CDR3 for antibody 3937 (IGHV3-33)
ARELAYFDY

SEQ ID NO: 7875 - protein, 9 aa, Homo sapiens
  Light chain CDR3 for antibody 3938 (IGKV1-6)
LQDYNYPYT

SEQ ID NO: 7876 - protein, 10 aa, Homo sapiens
  Heavy chain CDR3 for antibody 3938 (IGHV1-18)
ARGPTSDVDY

SEQ ID NO: 7877 - protein, 9 aa, Homo sapiens
  Light chain CDR3 for antibody 3939 (IGKV1-6)
LQDYNYPYT

SEQ ID NO: 7878 - protein, 16 aa, Homo sapiens
  Heavy chain CDR3 for antibody 3939 (IGHV4-59)
AREPLRYFDWPDAFDI

SEQ ID NO: 7879 - protein, 9 aa, Homo sapiens
  Light chain CDR3 for antibody 3940 (IGKV1-6)
LQDYNYPYT

SEQ ID NO: 7880 - protein, 13 aa, Homo sapiens
  Heavy chain CDR3 for antibody 3940 (IGHV3-15)
TTDRLLLFGAFDY

SEQ ID NO: 7881 - protein, 8 aa, Homo sapiens
  Light chain CDR3 for antibody 3941 (IGKV3D-7)
QQDYNLLT

SEQ ID NO: 7882 - protein, 9 aa, Homo sapiens
  Heavy chain CDR3 for antibody 3941 (IGHV3-30)
ARDNWGFDY

SEQ ID NO: 7883 - protein, 10 aa, Homo sapiens
  Light chain CDR3 for antibody 3942 (IGKV3-11)
QQRSNWPIFT

SEQ ID NO: 7884 - protein, 17 aa, Homo sapiens
  Heavy chain CDR3 for antibody 3942 (IGHV3-33)
ARVYYDILTGYSPAFDI

SEQ ID NO: 7885 - protein, 9 aa, Homo sapiens
  Light chain CDR3 for antibody 3943 (IGKV1-6)
LQDYNYPYT

SEQ ID NO: 7886 - protein, 17 aa, Homo sapiens
  Heavy chain CDR3 for antibody 3943 (IGHV3-23)
ANGGFGESHYNYYGMDV

SEQ ID NO: 7887 - protein, 9 aa, Homo sapiens
  Light chain CDR3 for antibody 3944 (IGKV1-6)
LQDYKSPFT

SEQ ID NO: 7888 - protein, 12 aa, Homo sapiens
  Heavy chain CDR3 for antibody 3944 (IGHV3-13)
AREAGIPDAFDI

SEQ ID NO: 7889 - protein, 9 aa, Homo sapiens
  Light chain CDR3 for antibody 3945 (IGKV1-6)
LQDFHYPWT

SEQ ID NO: 7890 - protein, 13 aa, Homo sapiens
  Heavy chain CDR3 for antibody 3945 (IGHV3-11)
ARDGGAAAGTWDS

SEQ ID NO: 7891 - protein, 8 aa, Homo sapiens
  Light chain CDR3 for antibody 3946 (IGKV3D-7)
QQDYNLLT

SEQ ID NO: 7892 - protein, 15 aa, Homo sapiens
  Heavy chain CDR3 for antibody 3946 (IGHV3-33)
ARRICSGGSCSLFDY

SEQ ID NO: 7893 - protein, 9 aa, Homo sapiens
  Light chain CDR3 for antibody 3947 (IGKV1-6)
LQDYNYPYT

SEQ ID NO: 7894 - protein, 24 aa, Homo sapiens
  Heavy chain CDR3 for antibody 3947 (IGHV1-24)
ATEAHYDILTGYYNPHYYYYGMDV

SEQ ID NO: 7895 - protein, 9 aa, Homo sapiens
  Light chain CDR3 for antibody 3948 (IGKV1-9)
QQLISYPLT

SEQ ID NO: 7896 - protein, 11 aa, Homo sapiens
  Heavy chain CDR3 for antibody 3948 (IGHV3-33)
ARDTWDDYFDY

SEQ ID NO: 7897 - protein, 10 aa, Homo sapiens
  Light chain CDR3 for antibody 3949 (IGKV1-39)
QQSYSTPMYT

SEQ ID NO: 7898 - protein, 13 aa, Homo sapiens
  Heavy chain CDR3 for antibody 3949 (IGHV3-33)
ARRATLVRGVFDP

SEQ ID NO: 7899 - protein, 9 aa, Homo sapiens
  Light chain CDR3 for antibody 3950 (IGKV1D-13)
QQFYNYPHT

SEQ ID NO: 7900 - protein, 13 aa, Homo sapiens
  Heavy chain CDR3 for antibody 3950 (IGHV3-33)
GRFLEGIGGAFDI

SEQ ID NO: 7901 - protein, 10 aa, Homo sapiens
  Light chain CDR3 for antibody 3951 (IGKV1-39)
QQSYSTPMYT

SEQ ID NO: 7902 - protein, 15 aa, Homo sapiens
  Heavy chain CDR3 for antibody 3951 (IGHV3-23)
AKDGSYYDYYYGMDV

SEQ ID NO: 7903 - protein, 9 aa, Homo sapiens
  Light chain CDR3 for antibody 3952 (IGKV1-17)
LQHNSYPLT

SEQ ID NO: 7904 - protein, 13 aa, Homo sapiens
  Heavy chain CDR3 for antibody 3952 (IGHV3-33)
ARDPLYSGSYFDY

SEQ ID NO: 7905 - protein, 9 aa, Homo sapiens
  Light chain CDR3 for antibody 3953 (IGKV1D-16)
QQYNSYPLT

SEQ ID NO: 7906 - protein, 18 aa, Homo sapiens
  Heavy chain CDR3 for antibody 3953 (IGHV3-64)
ARDEYYYGSGSYYNYFDW

SEQ ID NO: 7907 - protein, 9 aa, Homo sapiens
  Light chain CDR3 for antibody 3954 (IGKV1-27)
QKYNSAPYT

SEQ ID NO: 7908 - protein, 19 aa, Homo sapiens
  Heavy chain CDR3 for antibody 3954 (IGHV3-33)
ARIPGIAVAGGYYYYGMDV

SEQ ID NO: 7909 - protein, 10 aa, Homo sapiens
  Light chain CDR3 for antibody 3955 (IGKV3-11)
QQRSNWPIFT

SEQ ID NO: 7910 - protein, 17 aa, Homo sapiens
  Heavy chain CDR3 for antibody 3955 (IGHV3-23)
AKEYCSGGSCYVYYFDY

SEQ ID NO: 7911 - protein, 9 aa, Homo sapiens
  Light chain CDR3 for antibody 3956 (IGKV1-39)
QQSYRTPLT

SEQ ID NO: 7912 - protein, 19 aa, Homo sapiens
  Heavy chain CDR3 for antibody 3956 (IGHV3-23)
AKDGRSGSYDYYYYYGMDV

SEQ ID NO: 7913 - protein, 9 aa, Homo sapiens
  Light chain CDR3 for antibody 3957 (IGKV1-9)
QQLNSYPLT

SEQ ID NO: 7914 - protein, 17 aa, Homo sapiens
  Heavy chain CDR3 for antibody 3957 (IGHV4-59)
AREEDYFGSGSFGTFDI

SEQ ID NO: 7915 - protein, 9 aa, Homo sapiens
  Light chain CDR3 for antibody 3958 (IGKV1-6)
LQDYNYPYT

SEQ ID NO: 7916 - protein, 14 aa, Homo sapiens
  Heavy chain CDR3 for antibody 3958 (IGHV1-18)
ARDQPTVPSGYFDY

SEQ ID NO: 7917 - protein, 8 aa, Homo sapiens
  Light chain CDR3 for antibody 3959 (IGKV3D-7)
QQDYNLVT

SEQ ID NO: 7918 - protein, 11 aa, Homo sapiens
  Heavy chain CDR3 for antibody 3959 (IGHV4-59)
ARSIRYSVFDY

SEQ ID NO: 7919 - protein, 8 aa, Homo sapiens
  Light chain CDR3 for antibody 3960 (IGKV1-5)
QQYNSYWT

SEQ ID NO: 7920 - protein, 17 aa, Homo sapiens
  Heavy chain CDR3 for antibody 3960 (IGHV3-33)
ARGFSGYDGYYYYGMDV

SEQ ID NO: 7921 - protein, 9 aa, Homo sapiens
  Light chain CDR3 for antibody 3961 (IGKV6-21)
HQSSSLPYT

SEQ ID NO: 7922 - protein, 10 aa, Homo sapiens
  Heavy chain CDR3 for antibody 3961 (IGHV3-23)
AKDHWGDFDY

SEQ ID NO: 7923 - protein, 9 aa, Homo sapiens
  Light chain CDR3 for antibody 3962 (IGKV1-6)
LQDYNYPYT

SEQ ID NO: 7924 - protein, 18 aa, Homo sapiens
  Heavy chain CDR3 for antibody 3962 (IGHV4-59)
ARDNHYYSSGTYSNWFDP

SEQ ID NO: 7925 - protein, 9 aa, Homo sapiens
  Light chain CDR3 for antibody 3963 (IGKV6-21)
HQSSSLPYT

SEQ ID NO: 7926 - protein, 14 aa, Homo sapiens
  Heavy chain CDR3 for antibody 3963 (IGHV4-39)
ARQGTMIRGGYFDY

SEQ ID NO: 7927 - protein, 9 aa, Homo sapiens
  Light chain CDR3 for antibody 3964 (IGKV1-6)
LQDYNYPYT

SEQ ID NO: 7928 - protein, 18 aa, Homo sapiens
  Heavy chain CDR3 for antibody 3964 (IGHV3-33)
AGGGSGSYSSYYYYGMDV

SEQ ID NO: 7929 - protein, 9 aa, Homo sapiens
  Light chain CDR3 for antibody 3965 (IGKV5-2)
LQHDNFPWT

SEQ ID NO: 7930 - protein, 13 aa, Homo sapiens
  Heavy chain CDR3 for antibody 3965 (IGHV4-59)
ARESPGPYDAFDI

SEQ ID NO: 7931 - protein, 9 aa, Homo sapiens
  Light chain CDR3 for antibody 3966 (IGKV1D-13)
QQFNNYPYT

SEQ ID NO: 7932 - protein, 15 aa, Homo sapiens
  Heavy chain CDR3 for antibody 3966 (IGHV3-33)
ARDRVVRGVMGYFDY

SEQ ID NO: 7933 - protein, 9 aa, Homo sapiens
  Light chain CDR3 for antibody 3967 (IGKV2-30)
MQGTHWPLT

SEQ ID NO: 7934 - protein, 16 aa, Homo sapiens
  Heavy chain CDR3 for antibody 3967 (IGHV3-33)
ARGGRSDWLYYYGMDV

SEQ ID NO: 7935 - protein, 9 aa, Homo sapiens
  Light chain CDR3 for antibody 3968 (IGKV1-39)
QQSYSTPLT

SEQ ID NO: 7936 - protein, 14 aa, Homo sapiens
  Heavy chain CDR3 for antibody 3968 (IGHV3-33)
ARDAYDILTGYYDY

SEQ ID NO: 7937 - protein, 9 aa, Homo sapiens
  Light chain CDR3 for antibody 3969 (IGKV4-1)
QQYYSTPWT

SEQ ID NO: 7938 - protein, 14 aa, Homo sapiens
  Heavy chain CDR3 for antibody 3969 (IGHV4-39)
ARQDYDILTGLFDY

SEQ ID NO: 7939 - protein, 8 aa, Homo sapiens
  Light chain CDR3 for antibody 3970 (IGKV6-21)
HQSSSLPT

SEQ ID NO: 7940 - protein, 12 aa, Homo sapiens
  Heavy chain CDR3 for antibody 3970 (IGHV3-33)
TRGYSSKSYFDY

SEQ ID NO: 7941 - protein, 8 aa, Homo sapiens
  Light chain CDR3 for antibody 3971 (IGKV3-11)
QQRSNWLT

SEQ ID NO: 7942 - protein, 17 aa, Homo sapiens
  Heavy chain CDR3 for antibody 3971 (IGHV1-18)
ARDRAFTMVRGVPPFDY

SEQ ID NO: 7943 - protein, 8 aa, Homo sapiens
  Light chain CDR3 for antibody 3972 (IGKV3-11)
LQRGNWPT

SEQ ID NO: 7944 - protein, 14 aa, Homo sapiens
  Heavy chain CDR3 for antibody 3972 (IGHV4-39)
ARQDYDILTGLFDY

SEQ ID NO: 7945 - protein, 9 aa, Homo sapiens
  Light chain CDR3 for antibody 3973 (IGKV3D-7)
QQDYNLPLT

SEQ ID NO: 7946 - protein, 15 aa, Homo sapiens
  Heavy chain CDR3 for antibody 3973 (IGHV3-33)
ARDHLTGYYYYGMDV

SEQ ID NO: 7947 - protein, 9 aa, Homo sapiens
  Light chain CDR3 for antibody 3974 (IGKV1D-13)
QQFNNYPHT

SEQ ID NO: 7948 - protein, 11 aa, Homo sapiens
  Heavy chain CDR3 for antibody 3974 (IGHV4-4)
AREAYYYGLDV

SEQ ID NO: 7949 - protein, 9 aa, Homo sapiens
  Light chain CDR3 for antibody 3975 (IGKV2-30)
MQGTHWPLT

SEQ ID NO: 7950 - protein, 13 aa, Homo sapiens
  Heavy chain CDR3 for antibody 3975 (IGHV3-33)
AKEDGDYHHYFDY

SEQ ID NO: 7951 - protein, 9 aa, Homo sapiens
  Light chain CDR3 for antibody 3976 (IGKV6-21)
HQSSSLPYT

SEQ ID NO: 7952 - protein, 15 aa, Homo sapiens
  Heavy chain CDR3 for antibody 3976 (IGHV3-33)
ARHSSGFYYYYGMDV

SEQ ID NO: 7953 - protein, 9 aa, Homo sapiens
  Light chain CDR3 for antibody 3977 (IGKV2-30)
MQGTHWPLT

SEQ ID NO: 7954 - protein, 18 aa, Homo sapiens
  Heavy chain CDR3 for antibody 3977 (IGHV3-33)
ARDRDRYGSGTYPDAIDI

SEQ ID NO: 7955 - protein, 10 aa, Homo sapiens
  Light chain CDR3 for antibody 3978 (IGKV1-17)
LQHNSYPMYT

SEQ ID NO: 7956 - protein, 13 aa, Homo sapiens
  Heavy chain CDR3 for antibody 3978 (IGHV3-33)
ARDWGYSHGYFDY

SEQ ID NO: 7957 - protein, 9 aa, Homo sapiens
  Light chain CDR3 for antibody 3979 (IGKV1-39)
QQSYSTPLT

SEQ ID NO: 7958 - protein, 13 aa, Homo sapiens
  Heavy chain CDR3 for antibody 3979 (IGHV3-33)
ARQSSGWFDAFDI

SEQ ID NO: 7959 - protein, 9 aa, Homo sapiens
  Light chain CDR3 for antibody 3980 (IGKV1-39)
QQSYSTPLT

SEQ ID NO: 7960 - protein, 13 aa, Homo sapiens
  Heavy chain CDR3 for antibody 3980 (IGHV3-23)
AKDRGYSSTSTAY

SEQ ID NO: 7961 - protein, 10 aa, Homo sapiens
  Light chain CDR3 for antibody 3981 (IGKV3-11)
QQRSNWPALT

SEQ ID NO: 7962 - protein, 16 aa, Homo sapiens
  Heavy chain CDR3 for antibody 3981 (IGHV4-59)
ARGRYFEWLLGDVFDI

SEQ ID NO: 7963 - protein, 9 aa, Homo sapiens
  Light chain CDR3 for antibody 3982 (IGKV1-17)
LQHNSYPRT

SEQ ID NO: 7964 - protein, 13 aa, Homo sapiens
  Heavy chain CDR3 for antibody 3982 (IGHV3-33)
ARTDYYYYYGMDV

SEQ ID NO: 7965 - protein, 9 aa, Homo sapiens
  Light chain CDR3 for antibody 3983 (IGKV3-20)
QQYGSSPYT

SEQ ID NO: 7966 - protein, 11 aa, Homo sapiens
  Heavy chain CDR3 for antibody 3983 (IGHV3-23)
AKEGTYFDIPH

SEQ ID NO: 7967 - protein, 9 aa, Homo sapiens
  Light chain CDR3 for antibody 3984 (IGKV1D-16)
QQYNSYPYT

SEQ ID NO: 7968 - protein, 11 aa, Homo sapiens
  Heavy chain CDR3 for antibody 3984 (IGHV4-39)
ARLSGEGHFDS

SEQ ID NO: 7969 - protein, 9 aa, Homo sapiens
  Light chain CDR3 for antibody 3985 (IGKV3-11)
QQRSNWPYT

SEQ ID NO: 7970 - protein, 14 aa, Homo sapiens
  Heavy chain CDR3 for antibody 3985 (IGHV3-23)
ANWAYDILTGYLDY

SEQ ID NO: 7971 - protein, 9 aa, Homo sapiens
  Light chain CDR3 for antibody 3986 (IGKV1D-16)
QQYFSYPYT

SEQ ID NO: 7972 - protein, 12 aa, Homo sapiens
  Heavy chain CDR3 for antibody 3986 (IGHV3-33)
ARDNIAAPYFDY

SEQ ID NO: 7973 - protein, 9 aa, Homo sapiens
  Light chain CDR3 for antibody 3987 (IGKV1D-13)
QQFYNYPRT

SEQ ID NO: 7974 - protein, 12 aa, Homo sapiens
  Heavy chain CDR3 for antibody 3987 (IGHV3-33)
ARDWGIGGGMDV

SEQ ID NO: 7975 - protein, 9 aa, Homo sapiens
  Light chain CDR3 for antibody 3988 (IGKV1-27)
QKYNSAPYT

SEQ ID NO: 7976 - protein, 18 aa, Homo sapiens
  Heavy chain CDR3 for antibody 3988 (IGHV3-33)
AREGDYVWGSYRPNWFDP

SEQ ID NO: 7977 - protein, 9 aa, Homo sapiens
  Light chain CDR3 for antibody 3989 (IGKV1D-16)
QQYNSFPLT

SEQ ID NO: 7978 - protein, 9 aa, Homo sapiens
  Heavy chain CDR3 for antibody 3989 (IGHV4-59)
AREGGSGNL

SEQ ID NO: 7979 - protein, 9 aa, Homo sapiens
  Light chain CDR3 for antibody 3990 (IGKV3-11)
QQRSNWPYT

SEQ ID NO: 7980 - protein, 18 aa, Homo sapiens
  Heavy chain CDR3 for antibody 3990 (IGHV3-33)
ARDRYYDILTGYYMGFDY

SEQ ID NO: 7981 - protein, 9 aa, Homo sapiens
  Light chain CDR3 for antibody 3991 (IGKV3D-7)
QQDYNFPLT

SEQ ID NO: 7982 - protein, 14 aa, Homo sapiens
  Heavy chain CDR3 for antibody 3991 (IGHV3-33)
ARDREQQLVRYFDY

SEQ ID NO: 7983 - protein, 9 aa, Homo sapiens
  Light chain CDR3 for antibody 3992 (IGKV3D-7)
QQDYNLPLT

SEQ ID NO: 7984 - protein, 13 aa, Homo sapiens
  Heavy chain CDR3 for antibody 3992 (IGHV3-66)
ASTGDSYYYGMDV

SEQ ID NO: 7985 - protein, 8 aa, Homo sapiens
  Light chain CDR3 for antibody 3993 (IGKV1-5)
QQYNSYWT

SEQ ID NO: 7986 - protein, 13 aa, Homo sapiens
  Heavy chain CDR3 for antibody 3993 (IGHV3-11)
ARDEGYRGYVLDT

SEQ ID NO: 7987 - protein, 9 aa, Homo sapiens
  Light chain CDR3 for antibody 3994 (IGKV6-21)
HQSSSLPYT

SEQ ID NO: 7988 - protein, 12 aa, Homo sapiens
  Heavy chain CDR3 for antibody 3994 (IGHV3-33)
AREGIAVAGVDP

SEQ ID NO: 7989 - protein, 9 aa, Homo sapiens
  Light chain CDR3 for antibody 3995 (IGKV6-21)
HQSSSLPYT

SEQ ID NO: 7990 - protein, 18 aa, Homo sapiens
  Heavy chain CDR3 for antibody 3995 (IGHV3-11)
ARDGYYGSGSFYYYGMDV

SEQ ID NO: 7991 - protein, 9 aa, Homo sapiens
  Light chain CDR3 for antibody 3996 (IGKV6-21)
HQSSSLPYT

SEQ ID NO: 7992 - protein, 12 aa, Homo sapiens
  Heavy chain CDR3 for antibody 3996 (IGHV3-23)
AKGYTSFWYFDL

SEQ ID NO: 7993 - protein, 9 aa, Homo sapiens
  Light chain CDR3 for antibody 3997 (IGKV3-11)
QQRSNWPWT

SEQ ID NO: 7994 - protein, 16 aa, Homo sapiens
  Heavy chain CDR3 for antibody 3997 (IGHV4-59)
ARYSGSYYGDYYGMDV

SEQ ID NO: 7995 - protein, 9 aa, Homo sapiens
  Light chain CDR3 for antibody 3998 (IGKV1-39)
QQSYSTPYT

SEQ ID NO: 7996 - protein, 10 aa, Homo sapiens
  Heavy chain CDR3 for antibody 3998 (IGHV3-33)
ARNILTPLDY

SEQ ID NO: 7997 - protein, 10 aa, Homo sapiens
  Light chain CDR3 for antibody 3999 (IGKV3-15)
QQYNNWPPYT

SEQ ID NO: 7998 - protein, 9 aa, Homo sapiens
  Heavy chain CDR3 for antibody 3999 (IGHV1-18)
ARGKDWFDP

SEQ ID NO: 7999 - protein, 11 aa, Homo sapiens
  Light chain CDR3 for antibody 4000 (IGKV3-11)
QQRSNWPPTWT

SEQ ID NO: 8000 - protein, 18 aa, Homo sapiens
  Heavy chain CDR3 for antibody 4000 (IGHV1-46)
ARDGDYVWGSYRSDWFDP

SEQ ID NO: 8001 - protein, 9 aa, Homo sapiens
  Light chain CDR3 for antibody 4001 (IGKV1-33)
QQYDNLPFT

SEQ ID NO: 8002 - protein, 12 aa, Homo sapiens
  Heavy chain CDR3 for antibody 4001 (IGHV3-33)
ARESGGSYSFDY

SEQ ID NO: 8003 - protein, 9 aa, Homo sapiens
  Light chain CDR3 for antibody 4002 (IGKV3D-20)
QQYGSSPLT

SEQ ID NO: 8004 - protein, 14 aa, Homo sapiens
  Heavy chain CDR3 for antibody 4002 (IGHV4-39)
ARQGTMIRGGYFDY

SEQ ID NO: 8005 - protein, 9 aa, Homo sapiens
  Light chain CDR3 for antibody 4003 (IGKV5-2)
LQHDNFPWT

SEQ ID NO: 8006 - protein, 15 aa, Homo sapiens
  Heavy chain CDR3 for antibody 4003 (IGHV1-18)
ARIYYGSGSSYYFDY

SEQ ID NO: 8007 - protein, 9 aa, Homo sapiens
  Light chain CDR3 for antibody 4004 (IGKV5-2)
LQHDNFPWT

SEQ ID NO: 8008 - protein, 9 aa, Homo sapiens
  Heavy chain CDR3 for antibody 4004 (IGHV4-59)
ARGGVHFDS

SEQ ID NO: 8009 - protein, 9 aa, Homo sapiens
  Light chain CDR3 for antibody 4005 (IGKV1-39)
QQSYSTPLT

SEQ ID NO: 8010 - protein, 13 aa, Homo sapiens
  Heavy chain CDR3 for antibody 4005 (IGHV3-33)
ARDYTMVRGVMNY

SEQ ID NO: 8011 - protein, 9 aa, Homo sapiens
  Light chain CDR3 for antibody 4006 (IGKV1-27)
QKYNSAPYT

SEQ ID NO: 8012 - protein, 13 aa, Homo sapiens
  Heavy chain CDR3 for antibody 4006 (IGHV1-46)
ARRQVGYYYGMDV

SEQ ID NO: 8013 - protein, 9 aa, Homo sapiens
  Light chain CDR3 for antibody 4007 (IGKV1-39)
QQSYSTPLT

SEQ ID NO: 8014 - protein, 15 aa, Homo sapiens
  Heavy chain CDR3 for antibody 4007 (IGHV3-33)
ARDEHYDILTGYWGY

SEQ ID NO: 8015 - protein, 9 aa, Homo sapiens
  Light chain CDR3 for antibody 4008 (IGKV2-30)
MQGTHWPLT

SEQ ID NO: 8016 - protein, 17 aa, Homo sapiens
  Heavy chain CDR3 for antibody 4008 (IGHV3-33)
ARESLKLGIYYYYGMDV

SEQ ID NO: 8017 - protein, 9 aa, Homo sapiens
  Light chain CDR3 for antibody 4009 (IGKV1D-13)
QQFNNYPHT

SEQ ID NO: 8018 - protein, 11 aa, Homo sapiens
  Heavy chain CDR3 for antibody 4009 (IGHV3-33)
ARGTTVTHFDY

SEQ ID NO: 8019 - protein, 9 aa, Homo sapiens
  Light chain CDR3 for antibody 4010 (IGKV1D-16)
QQYNSYPYT

SEQ ID NO: 8020 - protein, 15 aa, Homo sapiens
  Heavy chain CDR3 for antibody 4010 (IGHV3-33)
ARDRGSSGYDRYFDY

SEQ ID NO: 8021 - protein, 9 aa, Homo sapiens
  Light chain CDR3 for antibody 4011 (IGKV6-21)
HQSSSLPYT

SEQ ID NO: 8022 - protein, 14 aa, Homo sapiens
  Heavy chain CDR3 for antibody 4011 (IGHV3-33)
VSAISGSSYWYFAL

SEQ ID NO: 8023 - protein, 9 aa, Homo sapiens
  Light chain CDR3 for antibody 4012 (IGKV5-2)
LQHDNFPWT

SEQ ID NO: 8024 - protein, 19 aa, Homo sapiens
  Heavy chain CDR3 for antibody 4012 (IGHV1-18)
ARGGHIGVVTAFHGYGMDV

SEQ ID NO: 8025 - protein, 9 aa, Homo sapiens
  Light chain CDR3 for antibody 4013 (IGKV1-39)
QQSYSTPFT

SEQ ID NO: 8026 - protein, 17 aa, Homo sapiens
  Heavy chain CDR3 for antibody 4013 (IGHV1-18)
ARDRAFTMVRGVPPFDY

SEQ ID NO: 8027 - protein, 9 aa, Homo sapiens
  Light chain CDR3 for antibody 4014 (IGKV3-15)
QQYNNWPYT

SEQ ID NO: 8028 - protein, 12 aa, Homo sapiens
  Heavy chain CDR3 for antibody 4014 (IGHV3-33)
ARDLVGATPFDY

SEQ ID NO: 8029 - protein, 9 aa, Homo sapiens
  Light chain CDR3 for antibody 4015 (IGKV3D-20)
QQYGSSPWT

SEQ ID NO: 8030 - protein, 14 aa, Homo sapiens
  Heavy chain CDR3 for antibody 4015 (IGHV3-64)
ARDHAAGGYSHSDY

SEQ ID NO: 8031 - protein, 11 aa, Homo sapiens
  Light chain CDR3 for antibody 4016 (IGKV3-11)
QQRSNWPPTWT

SEQ ID NO: 8032 - protein, 16 aa, Homo sapiens
  Heavy chain CDR3 for antibody 4016 (IGHV4-59)
ARYSGSYYGDYYGMDV

SEQ ID NO: 8033 - protein, 9 aa, Homo sapiens
  Light chain CDR3 for antibody 4017 (IGKV1-17)
LQHNSYPYT

SEQ ID NO: 8034 - protein, 15 aa, Homo sapiens
  Heavy chain CDR3 for antibody 4017 (IGHV3-23)
AKDRNYDFLTGPFDP

SEQ ID NO: 8035 - protein, 10 aa, Homo sapiens
  Light chain CDR3 for antibody 4018 (IGKV3-11)
QQRSNWPIFT

SEQ ID NO: 8036 - protein, 13 aa, Homo sapiens
  Heavy chain CDR3 for antibody 4018 (IGHV3-23)
AKDRGGSYSYFDF

SEQ ID NO: 8037 - protein, 9 aa, Homo sapiens
  Light chain CDR3 for antibody 4019 (IGKV5-2)
LQHDNFPYT

SEQ ID NO: 8038 - protein, 18 aa, Homo sapiens
  Heavy chain CDR3 for antibody 4019 (IGHV3-33)
AREGSYYGSGSFPNWFDP

SEQ ID NO: 8039 - protein, 9 aa, Homo sapiens
  Light chain CDR3 for antibody 4020 (IGKV3-20)
QQYGSSPYT

SEQ ID NO: 8040 - protein, 12 aa, Homo sapiens
  Heavy chain CDR3 for antibody 4020 (IGHV1-18)
ARVLFDGDYFDY

SEQ ID NO: 8041 - protein, 10 aa, Homo sapiens
  Light chain CDR3 for antibody 4021 (IGKV1-17)
LQHNSYPMYT

SEQ ID NO: 8042 - protein, 13 aa, Homo sapiens
  Heavy chain CDR3 for antibody 4021 (IGHV3-33)
ARDQRYSSGWYDY

SEQ ID NO: 8043 - protein, 9 aa, Homo sapiens
  Light chain CDR3 for antibody 4022 (IGKV5-2)
LQHDNFPWT

SEQ ID NO: 8044 - protein, 13 aa, Homo sapiens
  Heavy chain CDR3 for antibody 4022 (IGHV3-33)
ARDPLYSGSYFDY

SEQ ID NO: 8045 - protein, 9 aa, Homo sapiens
  Light chain CDR3 for antibody 4023 (IGKV3D-7)
QQDYNLPLT

SEQ ID NO: 8046 - protein, 17 aa, Homo sapiens
  Heavy chain CDR3 for antibody 4023 (IGHV3-33)
VREGGLLWVGELSLFDY

SEQ ID NO: 8047 - protein, 9 aa, Homo sapiens
  Light chain CDR3 for antibody 4024 (IGKV1-17)
LQHNSYPYT

SEQ ID NO: 8048 - protein, 15 aa, Homo sapiens
  Heavy chain CDR3 for antibody 4024 (IGHV3-20)
AREGSSSWYLYYFDY

SEQ ID NO: 8049 - protein, 9 aa, Homo sapiens
  Light chain CDR3 for antibody 4025 (IGKV1-27)
QKYNSAPYT

SEQ ID NO: 8050 - protein, 10 aa, Homo sapiens
  Heavy chain CDR3 for antibody 4025 (IGHV3-33)
AREWFGGFDI

SEQ ID NO: 8051 - protein, 9 aa, Homo sapiens
  Light chain CDR3 for antibody 4026 (IGKV3D-7)
QQDYEFPLT

SEQ ID NO: 8052 - protein, 11 aa, Homo sapiens
  Heavy chain CDR3 for antibody 4026 (IGHV3-33)
ARDRSSGPFDY

SEQ ID NO: 8053 - protein, 9 aa, Homo sapiens
  Light chain CDR3 for antibody 4027 (IGKV1-39)
QQSYSTPLT

SEQ ID NO: 8054 - protein, 13 aa, Homo sapiens
  Heavy chain CDR3 for antibody 4027 (IGHV4-39)
APFRVMVRGVLDY

SEQ ID NO: 8055 - protein, 9 aa, Homo sapiens
  Light chain CDR3 for antibody 4028 (IGKV6-21)
HQSSSLPYT

SEQ ID NO: 8056 - protein, 15 aa, Homo sapiens
  Heavy chain CDR3 for antibody 4028 (IGHV3-11)
ARDRAVAGTIHAFDI

SEQ ID NO: 8057 - protein, 9 aa, Homo sapiens
  Light chain CDR3 for antibody 4029 (IGKV2-30)
MQGTHWPYT

SEQ ID NO: 8058 - protein, 13 aa, Homo sapiens
  Heavy chain CDR3 for antibody 4029 (IGHV4-39)
ARQWPSGYWYFDL

SEQ ID NO: 8059 - protein, 10 aa, Homo sapiens
  Light chain CDR3 for antibody 4030 (IGKV1-17)
LQHNSYPMYT

SEQ ID NO: 8060 - protein, 14 aa, Homo sapiens
  Heavy chain CDR3 for antibody 4030 (IGHV3-33)
ARDWNDVYYYGMDV

SEQ ID NO: 8061 - protein, 9 aa, Homo sapiens
  Light chain CDR3 for antibody 4031 (IGKV6-21)
HQSSSLPYT

SEQ ID NO: 8062 - protein, 18 aa, Homo sapiens
  Heavy chain CDR3 for antibody 4031 (IGHV3-23)
AKERGYYGSGSYSNWFDP

SEQ ID NO: 8063 - protein, 8 aa, Homo sapiens
  Light chain CDR3 for antibody 4032 (IGKV3D-7)
QQDYNLLT

SEQ ID NO: 8064 - protein, 16 aa, Homo sapiens
  Heavy chain CDR3 for antibody 4032 (IGHV1-24)
ATEDSSSTYYYYGLDV

SEQ ID NO: 8065 - protein, 9 aa, Homo sapiens
  Light chain CDR3 for antibody 4033 (IGKV3-11)
QQRSNWPYT

SEQ ID NO: 8066 - protein, 11 aa, Homo sapiens
  Heavy chain CDR3 for antibody 4033 (IGHV3-33)
ARDKSSGWSDY

SEQ ID NO: 8067 - protein, 9 aa, Homo sapiens
  Light chain CDR3 for antibody 4034 (IGKV3D-7)
QQDYNLPWT

SEQ ID NO: 8068 - protein, 18 aa, Homo sapiens
  Heavy chain CDR3 for antibody 4034 (IGHV3-23)
ARYHLYFGSGFGSDGMDV

SEQ ID NO: 8069 - protein, 9 aa, Homo sapiens
  Light chain CDR3 for antibody 4035 (IGKV3D-7)
QQDYNLPLT

SEQ ID NO: 8070 - protein, 15 aa, Homo sapiens
  Heavy chain CDR3 for antibody 4035 (IGHV3-33)
ARDRGWKAPGYGMDV

SEQ ID NO: 8071 - protein, 9 aa, Homo sapiens
  Light chain CDR3 for antibody 4036 (IGKV1D-13)
QQFNNYPHT

SEQ ID NO: 8072 - protein, 24 aa, Homo sapiens
  Heavy chain CDR3 for antibody 4036 (IGHV1-46)
ARDEARGLLTGYYNMREYYYGMDV

SEQ ID NO: 8073 - protein, 9 aa, Homo sapiens
  Light chain CDR3 for antibody 4037 (IGKV1-39)
QQSYSTPFT

SEQ ID NO: 8074 - protein, 15 aa, Homo sapiens
  Heavy chain CDR3 for antibody 4037 (IGHV4-39)
ARRDYDILTGYLFDY

SEQ ID NO: 8075 - protein, 8 aa, Homo sapiens
  Light chain CDR3 for antibody 4038 (IGKV1-5)
QQYNSYYT

SEQ ID NO: 8076 - protein, 13 aa, Homo sapiens
  Heavy chain CDR3 for antibody 4038 (IGHV3-33)
ARDQRYSSGWYDY

SEQ ID NO: 8077 - protein, 10 aa, Homo sapiens
  Light chain CDR3 for antibody 4039 (IGKV3-11)
QQRSNWPIFT

SEQ ID NO: 8078 - protein, 13 aa, Homo sapiens
  Heavy chain CDR3 for antibody 4039 (IGHV3-23)
AKDRGLRYYGMDV

SEQ ID NO: 8079 - protein, 9 aa, Homo sapiens
  Light chain CDR3 for antibody 4040 (IGKV5-2)
LQHDNFPYT

SEQ ID NO: 8080 - protein, 10 aa, Homo sapiens
  Heavy chain CDR3 for antibody 4040 (IGHV3-11)
ARGQWPPLDY

SEQ ID NO: 8081 - protein, 8 aa, Homo sapiens
  Light chain CDR3 for antibody 4041 (IGKV1D-13)
QQFNNYPT

SEQ ID NO: 8082 - protein, 14 aa, Homo sapiens
  Heavy chain CDR3 for antibody 4041 (IGHV3-33)
ARDNILTAYYLFDY

SEQ ID NO: 8083 - protein, 9 aa, Homo sapiens
  Light chain CDR3 for antibody 4042 (IGKV1D-16)
QQYNSYPYT

SEQ ID NO: 8084 - protein, 12 aa, Homo sapiens
  Heavy chain CDR3 for antibody 4042 (IGHV3-33)
ASGYFGSGSAHY

SEQ ID NO: 8085 - protein, 9 aa, Homo sapiens
  Light chain CDR3 for antibody 4043 (IGKV1-39)
QQSYSTPYT

SEQ ID NO: 8086 - protein, 14 aa, Homo sapiens
  Heavy chain CDR3 for antibody 4043 (IGHV3-23)
AKDRYRGYEGLFDY

SEQ ID NO: 8087 - protein, 9 aa, Homo sapiens
  Light chain CDR3 for antibody 4044 (IGKV1-9)
KQLNSYPYI

SEQ ID NO: 8088 - protein, 19 aa, Homo sapiens
  Heavy chain CDR3 for antibody 4044 (IGHV3-33)
ARGVRLRFFDPYYYYGLDV

SEQ ID NO: 8089 - protein, 8 aa, Homo sapiens
  Light chain CDR3 for antibody 4045 (IGKV3D-7)
QQDYNLLT

SEQ ID NO: 8090 - protein, 10 aa, Homo sapiens
  Heavy chain CDR3 for antibody 4045 (IGHV3-23)
AKGDRWRFDP

SEQ ID NO: 8091 - protein, 9 aa, Homo sapiens
  Light chain CDR3 for antibody 4046 (IGKV3-20)
QQYGSSPYT

SEQ ID NO: 8092 - protein, 17 aa, Homo sapiens
  Heavy chain CDR3 for antibody 4046 (IGHV3-33)
AREGTMVRGYYYYGMDV

SEQ ID NO: 8093 - protein, 9 aa, Homo sapiens
  Light chain CDR3 for antibody 4047 (IGKV1-27)
QKYNSAPYT

SEQ ID NO: 8094 - protein, 14 aa, Homo sapiens
  Heavy chain CDR3 for antibody 4047 (IGHV3-33)
ARDKSYPLSYGMDV

SEQ ID NO: 8095 - protein, 9 aa, Homo sapiens
  Light chain CDR3 for antibody 4048 (IGKV6-21)
HQSSSLPYT

SEQ ID NO: 8096 - protein, 16 aa, Homo sapiens
  Heavy chain CDR3 for antibody 4048 (IGHV3-20)
ARDSSSLDYYYYGMDV

SEQ ID NO: 8097 - protein, 9 aa, Homo sapiens
  Light chain CDR3 for antibody 4049 (IGKV6-21)
HQSSSLPYT

SEQ ID NO: 8098 - protein, 18 aa, Homo sapiens
  Heavy chain CDR3 for antibody 4049 (IGHV3-53)
AKAGDYYVSGSYWGYFDL

SEQ ID NO: 8099 - protein, 10 aa, Homo sapiens
  Light chain CDR3 for antibody 4050 (IGKV3-20)
QQYGRSPPVT

SEQ ID NO: 8100 - protein, 13 aa, Homo sapiens
  Heavy chain CDR3 for antibody 4050 (IGHV3-33)
ARDYCGGDCYLDY

SEQ ID NO: 8101 - protein, 9 aa, Homo sapiens
  Light chain CDR3 for antibody 4051 (IGKV3-11)
QQRSNWPPT

SEQ ID NO: 8102 - protein, 17 aa, Homo sapiens
  Heavy chain CDR3 for antibody 4051 (IGHV3-33)
ARVYYDILTGYSPAFDI

SEQ ID NO: 8103 - protein, 9 aa, Homo sapiens
  Light chain CDR3 for antibody 4052 (IGKV1-17)
LQHNSYPYT

SEQ ID NO: 8104 - protein, 15 aa, Homo sapiens
  Heavy chain CDR3 for antibody 4052 (IGHV3-33)
ARHSSGFYYYYGMDV

SEQ ID NO: 8105 - protein, 10 aa, Homo sapiens
  Light chain CDR3 for antibody 4053 (IGKV1-39)
QQSYSTPMYT

SEQ ID NO: 8106 - protein, 12 aa, Homo sapiens
  Heavy chain CDR3 for antibody 4053 (IGHV3-33)
ARDLVGATPFDY

SEQ ID NO: 8107 - protein, 9 aa, Homo sapiens
  Light chain CDR3 for antibody 4054 (IGKV6-21)
HQSSSLPYT

SEQ ID NO: 8108 - protein, 11 aa, Homo sapiens
  Heavy chain CDR3 for antibody 4054 (IGHV1-24)
ATYFGSGSLDY

SEQ ID NO: 8109 - protein, 10 aa, Homo sapiens
  Light chain CDR3 for antibody 4055 (IGKV3-11)
QQRSNWPIFT

SEQ ID NO: 8110 - protein, 19 aa, Homo sapiens
  Heavy chain CDR3 for antibody 4055 (IGHV5-51)
ARHGEKGKRITMVRGSLDV

SEQ ID NO: 8111 - protein, 10 aa, Homo sapiens
  Light chain CDR3 for antibody 4056 (IGKV1-39)
QQSYSTPMYT

SEQ ID NO: 8112 - protein, 12 aa, Homo sapiens
  Heavy chain CDR3 for antibody 4056 (IGHV3-33)
ARVDAAAPYFDY

SEQ ID NO: 8113 - protein, 8 aa, Homo sapiens
  Light chain CDR3 for antibody 4057 (IGKV3D-7)
QQDYNLLT

SEQ ID NO: 8114 - protein, 13 aa, Homo sapiens
  Heavy chain CDR3 for antibody 4057 (IGHV4-39)
ARRDVLAPAAFDY

SEQ ID NO: 8115 - protein, 9 aa, Homo sapiens
  Light chain CDR3 for antibody 4058 (IGKV1-39)
QQSYSTPLT

SEQ ID NO: 8116 - protein, 14 aa, Homo sapiens
  Heavy chain CDR3 for antibody 4058 (IGHV3-33)
ARDRRDFYYYGMDV

SEQ ID NO: 8117 - protein, 9 aa, Homo sapiens
  Light chain CDR3 for antibody 4059 (IGKV1-17)
LQHNSYPYT

SEQ ID NO: 8118 - protein, 13 aa, Homo sapiens
  Heavy chain CDR3 for antibody 4059 (IGHV3-33)
ARGRGYNYGYGDY

SEQ ID NO: 8119 - protein, 9 aa, Homo sapiens
  Light chain CDR3 for antibody 4060 (IGKV5-2)
LQHDNFPWT

SEQ ID NO: 8120 - protein, 15 aa, Homo sapiens
  Heavy chain CDR3 for antibody 4060 (IGHV1-46)
ARGRFFDWLLSPFDY

SEQ ID NO: 8121 - protein, 8 aa, Homo sapiens
  Light chain CDR3 for antibody 4061 (IGKV3-20)
QQYGRSFT

SEQ ID NO: 8122 - protein, 12 aa, Homo sapiens
  Heavy chain CDR3 for antibody 4061 (IGHV4-39)
ARHGSGSSYFDY

SEQ ID NO: 8123 - protein, 9 aa, Homo sapiens
  Light chain CDR3 for antibody 4062 (IGKV3D-20)
QQYGSSPWT

SEQ ID NO: 8124 - protein, 11 aa, Homo sapiens
  Heavy chain CDR3 for antibody 4062 (IGHV1-46)
ARDPGSITGDY

SEQ ID NO: 8125 - protein, 8 aa, Homo sapiens
  Light chain CDR3 for antibody 4063 (IGKV3D-7)
QQDYNLVT

SEQ ID NO: 8126 - protein, 19 aa, Homo sapiens
  Heavy chain CDR3 for antibody 4063 (IGHV4-59)
ARDRVVGATTYYYYYGMDV

SEQ ID NO: 8127 - protein, 9 aa, Homo sapiens
  Light chain CDR3 for antibody 4064 (IGKV2D-28)
MQVLQTPFT

SEQ ID NO: 8128 - protein, 11 aa, Homo sapiens
  Heavy chain CDR3 for antibody 4064 (IGHV4-59)
AREMGHDTFDI

SEQ ID NO: 8129 - protein, 9 aa, Homo sapiens
  Light chain CDR3 for antibody 4065 (IGKV1-6)
LQDYNYPYT

SEQ ID NO: 8130 - protein, 17 aa, Homo sapiens
  Heavy chain CDR3 for antibody 4065 (IGHV3-23)
AKGDYYGSGSYSTFFDY

SEQ ID NO: 8131 - protein, 9 aa, Homo sapiens
  Light chain CDR3 for antibody 4066 (IGKV3-11)
QQRSNWPLT

SEQ ID NO: 8132 - protein, 16 aa, Homo sapiens
  Heavy chain CDR3 for antibody 4066 (IGHV1-24)
ATEDSSSYYYYYGMDV

SEQ ID NO: 8133 - protein, 10 aa, Homo sapiens
  Light chain CDR3 for antibody 4067 (IGKV3-20)
QQYGRSPPVT

SEQ ID NO: 8134 - protein, 18 aa, Homo sapiens
  Heavy chain CDR3 for antibody 4067 (IGHV4-59)
AREGDYVWGSYRPNWFDP

SEQ ID NO: 8135 - protein, 9 aa, Homo sapiens
  Light chain CDR3 for antibody 4068 (IGKV6-21)
HQSSSLPYT

SEQ ID NO: 8136 - protein, 22 aa, Homo sapiens
  Heavy chain CDR3 for antibody 4068 (IGHV4-59)
AREINYGSGSYYNEDYYYGMDV

SEQ ID NO: 8137 - protein, 9 aa, Homo sapiens
  Light chain CDR3 for antibody 4069 (IGKV1-9)
QQGNTYSRT

SEQ ID NO: 8138 - protein, 11 aa, Homo sapiens
  Heavy chain CDR3 for antibody 4069 (IGHV4-59)
ARSIRYSVFDY

SEQ ID NO: 8139 - protein, 8 aa, Homo sapiens
  Light chain CDR3 for antibody 4070 (IGKV1D-13)
QQFNNYPT

SEQ ID NO: 8140 - protein, 12 aa, Homo sapiens
  Heavy chain CDR3 for antibody 4070 (IGHV3-13)
AREAGIPDAFDI

SEQ ID NO: 8141 - protein, 9 aa, Homo sapiens
  Light chain CDR3 for antibody 4071 (IGKV1-9)
QQLISYPLT

SEQ ID NO: 8142 - protein, 13 aa, Homo sapiens
  Heavy chain CDR3 for antibody 4071 (IGHV3-23)
ASPFNWNDGFFDY

SEQ ID NO: 8143 - protein, 9 aa, Homo sapiens
  Light chain CDR3 for antibody 4072 (IGKV1D-13)
QQFNNYPHT

SEQ ID NO: 8144 - protein, 13 aa, Homo sapiens
  Heavy chain CDR3 for antibody 4072 (IGHV3-33)
ARGVLWFGELFDY

SEQ ID NO: 8145 - protein, 9 aa, Homo sapiens
  Light chain CDR3 for antibody 4073 (IGKV6-21)
HQSSSLPYT

SEQ ID NO: 8146 - protein, 14 aa, Homo sapiens
  Heavy chain CDR3 for antibody 4073 (IGHV1-46)
ARSYYDILTGAFDI

SEQ ID NO: 8147 - protein, 9 aa, Homo sapiens
  Light chain CDR3 for antibody 4074 (IGKV3-20)
QQYGSSPYT

SEQ ID NO: 8148 - protein, 15 aa, Homo sapiens
  Heavy chain CDR3 for antibody 4074 (IGHV4-59)
ARDLGYYGSGSPLAY

SEQ ID NO: 8149 - protein, 9 aa, Homo sapiens
  Light chain CDR3 for antibody 4075 (IGKV1-39)
QQSYRTPLT

SEQ ID NO: 8150 - protein, 16 aa, Homo sapiens
  Heavy chain CDR3 for antibody 4075 (IGHV4-59)
ARGRYFDWLLGDVFDI

SEQ ID NO: 8151 - protein, 9 aa, Homo sapiens
  Light chain CDR3 for antibody 4076 (IGKV1-17)
LQHNSYPYT

SEQ ID NO: 8152 - protein, 20 aa, Homo sapiens
  Heavy chain CDR3 for antibody 4076 (IGHV1-8)
ARGDGTMVRGIYYYYYGMDV

SEQ ID NO: 8153 - protein, 9 aa, Homo sapiens
  Light chain CDR3 for antibody 4077 (IGKV3-20)
QQYGSSPYT

SEQ ID NO: 8154 - protein, 14 aa, Homo sapiens
  Heavy chain CDR3 for antibody 4077 (IGHV3-20)
AREGWFGDYYGMDV

SEQ ID NO: 8155 - protein, 9 aa, Homo sapiens
  Light chain CDR3 for antibody 4078 (IGKV6-21)
HQSSSLPYT

SEQ ID NO: 8156 - protein, 17 aa, Homo sapiens
  Heavy chain CDR3 for antibody 4078 (IGHV3-23)
SKERNWNDGYYYFGMDA

SEQ ID NO: 8157 - protein, 9 aa, Homo sapiens
  Light chain CDR3 for antibody 4079 (IGKV6-21)
HQSSSLPYT

SEQ ID NO: 8158 - protein, 17 aa, Homo sapiens
  Heavy chain CDR3 for antibody 4079 (IGHV3-30)
ARDGVGATSYYYYGMDV

SEQ ID NO: 8159 - protein, 8 aa, Homo sapiens
  Light chain CDR3 for antibody 4080 (IGKV3-20)
QQYGRSFT

SEQ ID NO: 8160 - protein, 17 aa, Homo sapiens
  Heavy chain CDR3 for antibody 4080 (IGHV3-33)
ARGYCSRTSCYLYYFDY

SEQ ID NO: 8161 - protein, 9 aa, Homo sapiens
  Light chain CDR3 for antibody 4081 (IGKV1D-16)
QQFNNYPRT

SEQ ID NO: 8162 - protein, 16 aa, Homo sapiens
  Heavy chain CDR3 for antibody 4081 (IGHV1-18)
ARYFDWLLRDYYGMDV

SEQ ID NO: 8163 - protein, 9 aa, Homo sapiens
  Light chain CDR3 for antibody 4082 (IGKV1D-13)
QQFNNYPYT

SEQ ID NO: 8164 - protein, 12 aa, Homo sapiens
  Heavy chain CDR3 for antibody 4082 (IGHV3-33)
ARDYISTYGMDV

SEQ ID NO: 8165 - protein, 9 aa, Homo sapiens
  Light chain CDR3 for antibody 4083 (IGKV1-9)
QQLNSYPYT

SEQ ID NO: 8166 - protein, 14 aa, Homo sapiens
  Heavy chain CDR3 for antibody 4083 (IGHV3-33)
ARDGYDILTGPFDY

SEQ ID NO: 8167 - protein, 9 aa, Homo sapiens
  Light chain CDR3 for antibody 4084 (IGKV6-21)
HQSSSLPYT

SEQ ID NO: 8168 - protein, 21 aa, Homo sapiens
  Heavy chain CDR3 for antibody 4084 (IGHV1-18)
ASGVLIWFGELLSEDYYDMDV

SEQ ID NO: 8169 - protein, 8 aa, Homo sapiens
  Light chain CDR3 for antibody 4085 (IGKV1D-13)
QQFNNYPT

SEQ ID NO: 8170 - protein, 16 aa, Homo sapiens
  Heavy chain CDR3 for antibody 4085 (IGHV3-33)
ARAVYYGSGSSLIMDV

SEQ ID NO: 8171 - protein, 9 aa, Homo sapiens
  Light chain CDR3 for antibody 4086 (IGKV1D-16)
QQYNSYPYT

SEQ ID NO: 8172 - protein, 16 aa, Homo sapiens
  Heavy chain CDR3 for antibody 4086 (IGHV3-33)
ARGSVSDILTGAYFDY

SEQ ID NO: 8173 - protein, 9 aa, Homo sapiens
  Light chain CDR3 for antibody 4087 (IGKV3D-7)
QQDYEFPIT

SEQ ID NO: 8174 - protein, 16 aa, Homo sapiens
  Heavy chain CDR3 for antibody 4087 (IGHV3-23)
AKEGMVLRYFDWLWDY

SEQ ID NO: 8175 - protein, 8 aa, Homo sapiens
  Light chain CDR3 for antibody 4088 (IGKV3D-7)
QQDYNLLT

SEQ ID NO: 8176 - protein, 11 aa, Homo sapiens
  Heavy chain CDR3 for antibody 4088 (IGHV3-33)
ARDTWDDYFDY

SEQ ID NO: 8177 - protein, 9 aa, Homo sapiens
  Light chain CDR3 for antibody 4089 (IGKV3-15)
QQYNNWPLT

SEQ ID NO: 8178 - protein, 15 aa, Homo sapiens
  Heavy chain CDR3 for antibody 4089 (IGHV4-39)
ARHSKYSSGWYPFDY

SEQ ID NO: 8179 - protein, 8 aa, Homo sapiens
  Light chain CDR3 for antibody 4090 (IGKV3D-7)
QQDYNLLT

SEQ ID NO: 8180 - protein, 14 aa, Homo sapiens
  Heavy chain CDR3 for antibody 4090 (IGHV4-39)
ARDSGYDYYYGMDV

SEQ ID NO: 8181 - protein, 9 aa, Homo sapiens
  Light chain CDR3 for antibody 4091 (IGKV3-11)
QQRSNWPPT

SEQ ID NO: 8182 - protein, 15 aa, Homo sapiens
  Heavy chain CDR3 for antibody 4091 (IGHV3-33)
ARDRVVRGVMGYFDY

SEQ ID NO: 8183 - protein, 9 aa, Homo sapiens
  Light chain CDR3 for antibody 4092 (IGKV5-2)
LQHDNFPYT

SEQ ID NO: 8184 - protein, 16 aa, Homo sapiens
  Heavy chain CDR3 for antibody 4092 (IGHV1-24)
ATDWNDRGYYYYGMDV

SEQ ID NO: 8185 - protein, 9 aa, Homo sapiens
  Light chain CDR3 for antibody 4093 (IGKV1-9)
QQLNSYPLT

SEQ ID NO: 8186 - protein, 16 aa, Homo sapiens
  Heavy chain CDR3 for antibody 4093 (IGHV4-39)
ARGANYYGSGIPNFEY

SEQ ID NO: 8187 - protein, 9 aa, Homo sapiens
  Light chain CDR3 for antibody 4094 (IGKV3D-7)
QQDYNLPYT

SEQ ID NO: 8188 - protein, 14 aa, Homo sapiens
  Heavy chain CDR3 for antibody 4094 (IGHV3-33)
ARRGSPLRPSHLDV

SEQ ID NO: 8189 - protein, 10 aa, Homo sapiens
  Light chain CDR3 for antibody 4095 (IGKV1-17)
LQHNSYPMYT

SEQ ID NO: 8190 - protein, 17 aa, Homo sapiens
  Heavy chain CDR3 for antibody 4095 (IGHV1-18)
ARDEGYDILTGYPHFDY

SEQ ID NO: 8191 - protein, 9 aa, Homo sapiens
  Light chain CDR3 for antibody 4096 (IGKV1-39)
QQCYSTPRT

SEQ ID NO: 8192 - protein, 20 aa, Homo sapiens
  Heavy chain CDR3 for antibody 4096 (IGHV3-11)
ARDAGVWFVDPYYYYNGMDV

SEQ ID NO: 8193 - protein, 9 aa, Homo sapiens
  Light chain CDR3 for antibody 4097 (IGKV3D-7)
QQDYNLPWT

SEQ ID NO: 8194 - protein, 14 aa, Homo sapiens
  Heavy chain CDR3 for antibody 4097 (IGHV3-33)
ARDREQQLVRYFDY

SEQ ID NO: 8195 - protein, 10 aa, Homo sapiens
  Light chain CDR3 for antibody 4098 (IGKV1-39)
QQSYSTPMYT

SEQ ID NO: 8196 - protein, 18 aa, Homo sapiens
  Heavy chain CDR3 for antibody 4098 (IGHV3-33)
ARDRYYDILTGYYMGFDY

SEQ ID NO: 8197 - protein, 9 aa, Homo sapiens
  Light chain CDR3 for antibody 4099 (IGKV1D-13)
QQFNNYPRT

SEQ ID NO: 8198 - protein, 15 aa, Homo sapiens
  Heavy chain CDR3 for antibody 4099 (IGHV1-24)
ATHWDLRYYYYGMDV

SEQ ID NO: 8199 - protein, 10 aa, Homo sapiens
  Light chain CDR3 for antibody 4100 (IGKV1-39)
QQSYSTPMYT

SEQ ID NO: 8200 - protein, 14 aa, Homo sapiens
  Heavy chain CDR3 for antibody 4100 (IGHV3-33)
ARRGSPLRPSHLDV

SEQ ID NO: 8201 - protein, 9 aa, Homo sapiens
  Light chain CDR3 for antibody 4101 (IGKV1D-16)
QQYYSYPRT

SEQ ID NO: 8202 - protein, 14 aa, Homo sapiens
  Heavy chain CDR3 for antibody 4101 (IGHV3-33)
ARASSGSSYWYFDL

SEQ ID NO: 8203 - protein, 9 aa, Homo sapiens
  Light chain CDR3 for antibody 4102 (IGKV6-21)
HQSSSLPYT

SEQ ID NO: 8204 - protein, 12 aa, Homo sapiens
  Heavy chain CDR3 for antibody 4102 (IGHV1-18)
ARRDGSGTSFDY

SEQ ID NO: 8205 - protein, 8 aa, Homo sapiens
  Light chain CDR3 for antibody 4103 (IGKV3D-7)
QQDYNLLT

SEQ ID NO: 8206 - protein, 17 aa, Homo sapiens
  Heavy chain CDR3 for antibody 4103 (IGHV3-33)
ARGFSGYDGYYYYGMDV

SEQ ID NO: 8207 - protein, 9 aa, Homo sapiens
  Light chain CDR3 for antibody 4104 (IGKV1-39)
QQSYRTPLT

SEQ ID NO: 8208 - protein, 19 aa, Homo sapiens
  Heavy chain CDR3 for antibody 4104 (IGHV3-33)
ARGPYYDILTGYGYYGMDV

SEQ ID NO: 8209 - protein, 9 aa, Homo sapiens
  Light chain CDR3 for antibody 4105 (IGKV1D-16)
QQYNSFPLT

SEQ ID NO: 8210 - protein, 18 aa, Homo sapiens
  Heavy chain CDR3 for antibody 4105 (IGHV1-46)
ARDGDYVWGSYRSNWFDP

SEQ ID NO: 8211 - protein, 8 aa, Homo sapiens
  Light chain CDR3 for antibody 4106 (IGKV3D-7)
QQDYNLLT

SEQ ID NO: 8212 - protein, 20 aa, Homo sapiens
  Heavy chain CDR3 for antibody 4106 (IGHV3-20)
ARDLCSSTSCYGYYYYGMDV

SEQ ID NO: 8213 - protein, 10 aa, Homo sapiens
  Light chain CDR3 for antibody 4107 (IGKV3-11)
QQRSNWPTLT

SEQ ID NO: 8214 - protein, 15 aa, Homo sapiens
  Heavy chain CDR3 for antibody 4107 (IGHV3-30)
ARRGYGSGSPDAFDL

SEQ ID NO: 8215 - protein, 10 aa, Homo sapiens
  Light chain CDR3 for antibody 4108 (IGKV3-11)
QQRSNWPIFT

SEQ ID NO: 8216 - protein, 11 aa, Homo sapiens
  Heavy chain CDR3 for antibody 4108 (IGHV3-74)
ARDRGNWGFDY

SEQ ID NO: 8217 - protein, 9 aa, Homo sapiens
  Light chain CDR3 for antibody 4109 (IGKV3-11)
QQRINWPWT

SEQ ID NO: 8218 - protein, 15 aa, Homo sapiens
  Heavy chain CDR3 for antibody 4109 (IGHV3-33)
ARDSRPEIIGPPFDY

SEQ ID NO: 8219 - protein, 11 aa, Homo sapiens
  Light chain CDR3 for antibody 4110 (IGKV3-11)
QQRSNWPPTWT

SEQ ID NO: 8220 - protein, 16 aa, Homo sapiens
  Heavy chain CDR3 for antibody 4110 (IGHV1-24)
ATEDSSSTYYYYGLDV

SEQ ID NO: 8221 - protein, 9 aa, Homo sapiens
  Light chain CDR3 for antibody 4111 (IGKV1D-16)
QQYNSYPYT

SEQ ID NO: 8222 - protein, 16 aa, Homo sapiens
  Heavy chain CDR3 for antibody 4111 (IGHV3-33)
ARGGLTGGGDYDAFDI

SEQ ID NO: 8223 - protein, 9 aa, Homo sapiens
  Light chain CDR3 for antibody 4112 (IGKV1D-13)
QQFNNYPYT

SEQ ID NO: 8224 - protein, 18 aa, Homo sapiens
  Heavy chain CDR3 for antibody 4112 (IGHV3-33)
ARDRGDILTGYYKGWFDP

SEQ ID NO: 8225 - protein, 9 aa, Homo sapiens
  Light chain CDR3 for antibody 4113 (IGKV1-39)
QQSYSTPLT

SEQ ID NO: 8226 - protein, 16 aa, Homo sapiens
  Heavy chain CDR3 for antibody 4113 (IGHV1-8)
AREGTMVRGVTYAFDI

SEQ ID NO: 8227 - protein, 9 aa, Homo sapiens
  Light chain CDR3 for antibody 4114 (IGKV3-11)
QQRSNWPYT

SEQ ID NO: 8228 - protein, 12 aa, Homo sapiens
  Heavy chain CDR3 for antibody 4114 (IGHV3-33)
ARDPGYYYGLDV

SEQ ID NO: 8229 - protein, 9 aa, Homo sapiens
  Light chain CDR3 for antibody 4115 (IGKV3-15)
QQYNNWPLT

SEQ ID NO: 8230 - protein, 14 aa, Homo sapiens
  Heavy chain CDR3 for antibody 4115 (IGHV4-39)
ARQGTMIRGGYFDY

SEQ ID NO: 8231 - protein, 9 aa, Homo sapiens
  Light chain CDR3 for antibody 4116 (IGKV1-27)
QKYNSAPYT

SEQ ID NO: 8232 - protein, 15 aa, Homo sapiens
  Heavy chain CDR3 for antibody 4116 (IGHV3-33)
AREGLRYFHYYGMDV

SEQ ID NO: 8233 - protein, 9 aa, Homo sapiens
  Light chain CDR3 for antibody 4117 (IGKV1-9)
QQLNSYPWT

SEQ ID NO: 8234 - protein, 13 aa, Homo sapiens
  Heavy chain CDR3 for antibody 4117 (IGHV3-33)
ASAGNSYYNVMDV

SEQ ID NO: 8235 - protein, 10 aa, Homo sapiens
  Light chain CDR3 for antibody 4118 (IGKV1-39)
QQSYSTPMYT

SEQ ID NO: 8236 - protein, 15 aa, Homo sapiens
  Heavy chain CDR3 for antibody 4118 (IGHV3-33)
ARDTGYSSSWNWFDP

SEQ ID NO: 8237 - protein, 9 aa, Homo sapiens
  Light chain CDR3 for antibody 4119 (IGKV5-2)
LQHDNFPWT

SEQ ID NO: 8238 - protein, 12 aa, Homo sapiens
  Heavy chain CDR3 for antibody 4119 (IGHV3-33)
ARESGGSFGMDV

SEQ ID NO: 8239 - protein, 9 aa, Homo sapiens
  Light chain CDR3 for antibody 4120 (IGKV1-9)
QQLNSYPYT

SEQ ID NO: 8240 - protein, 11 aa, Homo sapiens
  Heavy chain CDR3 for antibody 4120 (IGHV3-h)
AREDYYYGMDV

SEQ ID NO: 8241 - protein, 10 aa, Homo sapiens
  Light chain CDR3 for antibody 4121 (IGKV3-11)
QQRSNWPIFT

SEQ ID NO: 8242 - protein, 16 aa, Homo sapiens
  Heavy chain CDR3 for antibody 4121 (IGHV1-24)
ATEDSSSTYYYYGLDV

SEQ ID NO: 8243 - protein, 10 aa, Homo sapiens
  Light chain CDR3 for antibody 4122 (IGKV1-39)
QQSYSTPMYT

SEQ ID NO: 8244 - protein, 18 aa, Homo sapiens
  Heavy chain CDR3 for antibody 4122 (IGHV1-46)
ARDGDYVWGSYRSDWFDP

SEQ ID NO: 8245 - protein, 8 aa, Homo sapiens
  Light chain CDR3 for antibody 4123 (IGKV3D-7)
QQDYNLLT

SEQ ID NO: 8246 - protein, 17 aa, Homo sapiens
  Heavy chain CDR3 for antibody 4123 (IGHV4-34)
AGLRFFDWLFDYYGMDV

SEQ ID NO: 8247 - protein, 9 aa, Homo sapiens
  Light chain CDR3 for antibody 4124 (IGKV5-2)
LQHDNFPYT

SEQ ID NO: 8248 - protein, 12 aa, Homo sapiens
  Heavy chain CDR3 for antibody 4124 (IGHV4-61)
ARVDSSGWFFDY

SEQ ID NO: 8249 - protein, 9 aa, Homo sapiens
  Light chain CDR3 for antibody 4125 (IGKV5-2)
LQHDKFPYT

SEQ ID NO: 8250 - protein, 11 aa, Homo sapiens
  Heavy chain CDR3 for antibody 4125 (IGHV3-33)
ARAGIAALFDY

SEQ ID NO: 8251 - protein, 9 aa, Homo sapiens
  Light chain CDR3 for antibody 4126 (IGKV1D-13)
QQFNNYPHT

SEQ ID NO: 8252 - protein, 12 aa, Homo sapiens
  Heavy chain CDR3 for antibody 4126 (IGHV4-59)
ARDSGSYYYFDY

SEQ ID NO: 8253 - protein, 9 aa, Homo sapiens
  Light chain CDR3 for antibody 4127 (IGKV3D-20)
QQYGSSPYT

SEQ ID NO: 8254 - protein, 21 aa, Homo sapiens
  Heavy chain CDR3 for antibody 4127 (IGHV3-33)
AREGYDILTGMGYYYYYGMDV

SEQ ID NO: 8255 - protein, 9 aa, Homo sapiens
  Light chain CDR3 for antibody 4128 (IGKV1D-13)
QQFNNYPHT

SEQ ID NO: 8256 - protein, 16 aa, Homo sapiens
  Heavy chain CDR3 for antibody 4128 (IGHV3-23)
ARNWNDVGDYYYGMDV

SEQ ID NO: 8257 - protein, 9 aa, Homo sapiens
  Light chain CDR3 for antibody 4129 (IGKV3D-7)
QQDYNLPWT

SEQ ID NO: 8258 - protein, 13 aa, Homo sapiens
  Heavy chain CDR3 for antibody 4129 (IGHV4-39)
ARRDGSYYGYFDY

SEQ ID NO: 8259 - protein, 9 aa, Homo sapiens
  Light chain CDR3 for antibody 4130 (IGKV1-17)
LQHNSYPPT

SEQ ID NO: 8260 - protein, 17 aa, Homo sapiens
  Heavy chain CDR3 for antibody 4130 (IGHV1-8)
ARGDYYGSGSPYWYFDL

SEQ ID NO: 8261 - protein, 9 aa, Homo sapiens
  Light chain CDR3 for antibody 4131 (IGKV1-17)
LQHNSYPYT

SEQ ID NO: 8262 - protein, 11 aa, Homo sapiens
  Heavy chain CDR3 for antibody 4131 (IGHV3-64)
ARERGSYAFDI

SEQ ID NO: 8263 - protein, 9 aa, Homo sapiens
  Light chain CDR3 for antibody 4132 (IGKV1-6)
LQDYNYPYT

SEQ ID NO: 8264 - protein, 19 aa, Homo sapiens
  Heavy chain CDR3 for antibody 4132 (IGHV1-24)
ATEGGIVGGTRYYYYGMDV

SEQ ID NO: 8265 - protein, 9 aa, Homo sapiens
  Light chain CDR3 for antibody 4133 (IGKV1-9)
QQLNSYPLT

SEQ ID NO: 8266 - protein, 16 aa, Homo sapiens
  Heavy chain CDR3 for antibody 4133 (IGHV4-59)
ARYSGSYYGDYYGMDV

SEQ ID NO: 8267 - protein, 9 aa, Homo sapiens
  Light chain CDR3 for antibody 4134 (IGKV6-21)
HQSSSLPYT

SEQ ID NO: 8268 - protein, 20 aa, Homo sapiens
  Heavy chain CDR3 for antibody 4134 (IGHV1-f)
ATHYDILTGSPYYYYCALDV

SEQ ID NO: 8269 - protein, 9 aa, Homo sapiens
  Light chain CDR3 for antibody 4135 (IGKV1-27)
QKYNSAPYT

SEQ ID NO: 8270 - protein, 15 aa, Homo sapiens
  Heavy chain CDR3 for antibody 4135 (IGHV3-23)
AKEFTMVRGVITPDY

SEQ ID NO: 8271 - protein, 9 aa, Homo sapiens
  Light chain CDR3 for antibody 4136 (IGKV3D-7)
QQDYNLPYT

SEQ ID NO: 8272 - protein, 17 aa, Homo sapiens
  Heavy chain CDR3 for antibody 4136 (IGHV3-33)
ARGFSGYDGYYYYGMDV

SEQ ID NO: 8273 - protein, 10 aa, Homo sapiens
  Light chain CDR3 for antibody 4137 (IGKV1-9)
QQLDSYPMYT

SEQ ID NO: 8274 - protein, 13 aa, Homo sapiens
  Heavy chain CDR3 for antibody 4137 (IGHV3-33)
ARAFTMVRGVIDY

SEQ ID NO: 8275 - protein, 9 aa, Homo sapiens
  Light chain CDR3 for antibody 4138 (IGKV3-15)
QQYINWPLT

SEQ ID NO: 8276 - protein, 16 aa, Homo sapiens
  Heavy chain CDR3 for antibody 4138 (IGHV4-59)
ARGRYFEWLLGDVFDI

SEQ ID NO: 8277 - protein, 9 aa, Homo sapiens
  Light chain CDR3 for antibody 4139 (IGKV1D-13)
QQFNNYPYT

SEQ ID NO: 8278 - protein, 11 aa, Homo sapiens
  Heavy chain CDR3 for antibody 4139 (IGHV3-23)
ARDPGSITGDY

SEQ ID NO: 8279 - protein, 9 aa, Homo sapiens
  Light chain CDR3 for antibody 4140 (IGKV1-27)
QKYNSAPYT

SEQ ID NO: 8280 - protein, 8 aa, Homo sapiens
  Heavy chain CDR3 for antibody 4140 (IGHV3-23)
AKESLLDY

SEQ ID NO: 8281 - protein, 8 aa, Homo sapiens
  Light chain CDR3 for antibody 4141 (IGKV3D-7)
QQDYNLLT

SEQ ID NO: 8282 - protein, 11 aa, Homo sapiens
  Heavy chain CDR3 for antibody 4141 (IGHV3-33)
AREAANWGFDY

SEQ ID NO: 8283 - protein, 9 aa, Homo sapiens
  Light chain CDR3 for antibody 4142 (IGKV1D-13)
QQFNNYPHT

SEQ ID NO: 8284 - protein, 13 aa, Homo sapiens
  Heavy chain CDR3 for antibody 4142 (IGHV4-39)
ARHPPSRDYGMDV

SEQ ID NO: 8285 - protein, 9 aa, Homo sapiens
  Light chain CDR3 for antibody 4143 (IGKV1D-13)
QRFNNYLYT

SEQ ID NO: 8286 - protein, 13 aa, Homo sapiens
  Heavy chain CDR3 for antibody 4143 (IGHV3-11)
ARDGGAAAGTWDS

SEQ ID NO: 8287 - protein, 9 aa, Homo sapiens
  Light chain CDR3 for antibody 4144 (IGKV6-21)
HQSTSLPFT

SEQ ID NO: 8288 - protein, 13 aa, Homo sapiens
  Heavy chain CDR3 for antibody 4144 (IGHV4-39)
ARHEVMIRGVFDY

SEQ ID NO: 8289 - protein, 9 aa, Homo sapiens
  Light chain CDR3 for antibody 4145 (IGKV1D-13)
QQFNNYPYT

SEQ ID NO: 8290 - protein, 19 aa, Homo sapiens
  Heavy chain CDR3 for antibody 4145 (IGHV3-33)
ARDRYYDILTGYSSYYFDY

SEQ ID NO: 8291 - protein, 9 aa, Homo sapiens
  Light chain CDR3 for antibody 4146 (IGKV3-20)
QQYGSSPYT

SEQ ID NO: 8292 - protein, 14 aa, Homo sapiens
  Heavy chain CDR3 for antibody 4146 (IGHV3-33)
ARGYGSGSYYSFDY

SEQ ID NO: 8293 - protein, 9 aa, Homo sapiens
  Light chain CDR3 for antibody 4147 (IGKV1-39)
QQSYSTPFT

SEQ ID NO: 8294 - protein, 13 aa, Homo sapiens
  Heavy chain CDR3 for antibody 4147 (IGHV4-39)
ARRGVVAPAAFDY

SEQ ID NO: 8295 - protein, 9 aa, Homo sapiens
  Light chain CDR3 for antibody 4148 (IGKV1-27)
QKYNSAPYT

SEQ ID NO: 8296 - protein, 15 aa, Homo sapiens
  Heavy chain CDR3 for antibody 4148 (IGHV3-23)
AKDPRGYYYYYGMDV

SEQ ID NO: 8297 - protein, 10 aa, Homo sapiens
  Light chain CDR3 for antibody 4149 (IGKV1-39)
QQSYSTPMYT

SEQ ID NO: 8298 - protein, 14 aa, Homo sapiens
  Heavy chain CDR3 for antibody 4149 (IGHV3-33)
AREGYSSNWYDFDY

SEQ ID NO: 8299 - protein, 9 aa, Homo sapiens
  Light chain CDR3 for antibody 4150 (IGKV3-11)
QQRSNWMYT

SEQ ID NO: 8300 - protein, 13 aa, Homo sapiens
  Heavy chain CDR3 for antibody 4150 (IGHV3-23)
ARAFFMVRGVIDF

SEQ ID NO: 8301 - protein, 9 aa, Homo sapiens
  Light chain CDR3 for antibody 4151 (IGKV5-2)
LQHDNFPWT

SEQ ID NO: 8302 - protein, 20 aa, Homo sapiens
  Heavy chain CDR3 for antibody 4151 (IGHV1-8)
ARGDGTMVRGIYYYYYGMDV

SEQ ID NO: 8303 - protein, 10 aa, Homo sapiens
  Light chain CDR3 for antibody 4152 (IGKV3-20)
QQYGRSPPVT

SEQ ID NO: 8304 - protein, 15 aa, Homo sapiens
  Heavy chain CDR3 for antibody 4152 (IGHV3-30)
ARGAMVRGVDYGMDV

SEQ ID NO: 8305 - protein, 9 aa, Homo sapiens
  Light chain CDR3 for antibody 4153 (IGKV3-20)
QQYGSSPYT

SEQ ID NO: 8306 - protein, 15 aa, Homo sapiens
  Heavy chain CDR3 for antibody 4153 (IGHV3-33)
ARDGLRYFDWLFPWY

SEQ ID NO: 8307 - protein, 8 aa, Homo sapiens
  Light chain CDR3 for antibody 4154 (IGKV1-5)
QQYNSYWT

SEQ ID NO: 8308 - protein, 11 aa, Homo sapiens
  Heavy chain CDR3 for antibody 4154 (IGHV3-33)
ARDTWDDYFDY

SEQ ID NO: 8309 - protein, 9 aa, Homo sapiens
  Light chain CDR3 for antibody 4155 (IGKV2-30)
MQGTHWPLT

SEQ ID NO: 8310 - protein, 11 aa, Homo sapiens
  Heavy chain CDR3 for antibody 4155 (IGHV3-13)
AREAIIGPFDY

SEQ ID NO: 8311 - protein, 8 aa, Homo sapiens
  Light chain CDR3 for antibody 4156 (IGKV1D-13)
QQFNNYPT

SEQ ID NO: 8312 - protein, 7 aa, Homo sapiens
  Heavy chain CDR3 for antibody 4156 (IGHV3-33)
ARELVDY

SEQ ID NO: 8313 - protein, 9 aa, Homo sapiens
  Light chain CDR3 for antibody 4157 (IGKV3-11)
QQRSNWPPT

SEQ ID NO: 8314 - protein, 18 aa, Homo sapiens
  Heavy chain CDR3 for antibody 4157 (IGHV3-33)
ARDGYSGYDYYYYYGMDV

SEQ ID NO: 8315 - protein, 9 aa, Homo sapiens
  Light chain CDR3 for antibody 4158 (IGKV2-30)
MQGTHWPLT

SEQ ID NO: 8316 - protein, 13 aa, Homo sapiens
  Heavy chain CDR3 for antibody 4158 (IGHV3-30)
AAPFMVRGDGMDV

SEQ ID NO: 8317 - protein, 8 aa, Homo sapiens
  Light chain CDR3 for antibody 4159 (IGKV3-20)
QQYGSSLT

SEQ ID NO: 8318 - protein, 14 aa, Homo sapiens
  Heavy chain CDR3 for antibody 4159 (IGHV3-33)
ARGAAAGNFYGLDV

SEQ ID NO: 8319 - protein, 9 aa, Homo sapiens
  Light chain CDR3 for antibody 4160 (IGKV3-11)
QQRSNWPYT

SEQ ID NO: 8320 - protein, 11 aa, Homo sapiens
  Heavy chain CDR3 for antibody 4160 (IGHV3-74)
ARDRGNWGFDY

SEQ ID NO: 8321 - protein, 10 aa, Homo sapiens
  Light chain CDR3 for antibody 4161 (IGKV1-39)
QQSYSTPMYT

SEQ ID NO: 8322 - protein, 18 aa, Homo sapiens
  Heavy chain CDR3 for antibody 4161 (IGHV3-33)
ARGLLWFGVSYYYYGMDV

SEQ ID NO: 8323 - protein, 9 aa, Homo sapiens
  Light chain CDR3 for antibody 4162 (IGKV1-17)
PQHNSYPHT

SEQ ID NO: 8324 - protein, 12 aa, Homo sapiens
  Heavy chain CDR3 for antibody 4162 (IGHV3-33)
ARDRAYRGSLDH

SEQ ID NO: 8325 - protein, 9 aa, Homo sapiens
  Light chain CDR3 for antibody 4163 (IGKV1D-13)
QQFNNYPST

SEQ ID NO: 8326 - protein, 13 aa, Homo sapiens
  Heavy chain CDR3 for antibody 4163 (IGHV3-66)
ANTGDSYYYGFYV

SEQ ID NO: 8327 - protein, 9 aa, Homo sapiens
  Light chain CDR3 for antibody 4164 (IGKV3D-7)
QQDYNLPLT

SEQ ID NO: 8328 - protein, 13 aa, Homo sapiens
  Heavy chain CDR3 for antibody 4164 (IGHV4-39)
ARHHYGSGSLRDY

SEQ ID NO: 8329 - protein, 8 aa, Homo sapiens
  Light chain CDR3 for antibody 4165 (IGKV1-5)
QQYNSYWT

SEQ ID NO: 8330 - protein, 14 aa, Homo sapiens
  Heavy chain CDR3 for antibody 4165 (IGHV3-33)
ARDKTYPLSYGMDV

SEQ ID NO: 8331 - protein, 9 aa, Homo sapiens
  Light chain CDR3 for antibody 4166 (IGKV1-27)
QKYNSAPYT

SEQ ID NO: 8332 - protein, 19 aa, Homo sapiens
  Heavy chain CDR3 for antibody 4166 (IGHV3-33)
ARDSGYSGYDYYYYYGMDV

SEQ ID NO: 8333 - protein, 8 aa, Homo sapiens
  Light chain CDR3 for antibody 4167 (IGKV1-5)
QQYNSYWT

SEQ ID NO: 8334 - protein, 9 aa, Homo sapiens
  Heavy chain CDR3 for antibody 4167 (IGHV3-33)
ARATVGVDY

SEQ ID NO: 8335 - protein, 9 aa, Homo sapiens
  Light chain CDR3 for antibody 4168 (IGKV3-20)
QQYGSSPYT

SEQ ID NO: 8336 - protein, 15 aa, Homo sapiens
  Heavy chain CDR3 for antibody 4168 (IGHV3-33)
ARDGSGSYSLYGMDV

SEQ ID NO: 8337 - protein, 9 aa, Homo sapiens
  Light chain CDR3 for antibody 4169 (IGKV3D-7)
QQDYNLPLT

SEQ ID NO: 8338 - protein, 15 aa, Homo sapiens
  Heavy chain CDR3 for antibody 4169 (IGHV1-18)
ARGYCSSTSCYYFDY

SEQ ID NO: 8339 - protein, 8 aa, Homo sapiens
  Light chain CDR3 for antibody 4170 (IGKV1-5)
QQYNSYYT

SEQ ID NO: 8340 - protein, 10 aa, Homo sapiens
  Heavy chain CDR3 for antibody 4170 (IGHV3-23)
AKGDRWRFDP

SEQ ID NO: 8341 - protein, 9 aa, Homo sapiens
  Light chain CDR3 for antibody 4171 (IGKV1-39)
QQSYSTPLT

SEQ ID NO: 8342 - protein, 14 aa, Homo sapiens
  Heavy chain CDR3 for antibody 4171 (IGHV3-20)
ARDGGSGSYDGLDV

SEQ ID NO: 8343 - protein, 8 aa, Homo sapiens
  Light chain CDR3 for antibody 4172 (IGKV3D-7)
QQDYNLLT

SEQ ID NO: 8344 - protein, 11 aa, Homo sapiens
  Heavy chain CDR3 for antibody 4172 (IGHV3-74)
ARDRGNWGFDY

SEQ ID NO: 8345 - protein, 9 aa, Homo sapiens
  Light chain CDR3 for antibody 4173 (IGKV1-39)
QQSYRTPLT

SEQ ID NO: 8346 - protein, 17 aa, Homo sapiens
  Heavy chain CDR3 for antibody 4173 (IGHV3-30)
AREGVRGLIYYYYGMDV

SEQ ID NO: 8347 - protein, 9 aa, Homo sapiens
  Light chain CDR3 for antibody 4174 (IGKV1-27)
QKYNSAPYT

SEQ ID NO: 8348 - protein, 15 aa, Homo sapiens
  Heavy chain CDR3 for antibody 4174 (IGHV3-33)
ARDGSGSYSLYGMDV

SEQ ID NO: 8349 - protein, 9 aa, Homo sapiens
  Light chain CDR3 for antibody 4175 (IGKV1D-16)
QQYNSYPLT

SEQ ID NO: 8350 - protein, 13 aa, Homo sapiens
  Heavy chain CDR3 for antibody 4175 (IGHV1-18)
ARGGGVRGAPLDY

SEQ ID NO: 8351 - protein, 9 aa, Homo sapiens
  Light chain CDR3 for antibody 4176 (IGKV6-21)
HQSSSLPYT

SEQ ID NO: 8352 - protein, 18 aa, Homo sapiens
  Heavy chain CDR3 for antibody 4176 (IGHV3-23)
AKVGDFFASGNYWDYFDY

SEQ ID NO: 8353 - protein, 9 aa, Homo sapiens
  Light chain CDR3 for antibody 4177 (IGKV1-5)
QQYNTYSRT

SEQ ID NO: 8354 - protein, 13 aa, Homo sapiens
  Heavy chain CDR3 for antibody 4177 (IGHV3-11)
ARDGGAAAGTWDS

SEQ ID NO: 8355 - protein, 9 aa, Homo sapiens
  Light chain CDR3 for antibody 4178 (IGKV6-21)
HQSSSLPYT

SEQ ID NO: 8356 - protein, 14 aa, Homo sapiens
  Heavy chain CDR3 for antibody 4178 (IGHV3-23)
AKDDIVRATGAFDI

SEQ ID NO: 8357 - protein, 9 aa, Homo sapiens
  Light chain CDR3 for antibody 4179 (IGKV1-6)
LQDYNYPRT

SEQ ID NO: 8358 - protein, 12 aa, Homo sapiens
  Heavy chain CDR3 for antibody 4179 (IGHV4-28)
ARKDSGYDWFDY

SEQ ID NO: 8359 - protein, 9 aa, Homo sapiens
  Light chain CDR3 for antibody 4180 (IGKV3D-7)
QQDYNLPWT

SEQ ID NO: 8360 - protein, 11 aa, Homo sapiens
  Heavy chain CDR3 for antibody 4180 (IGHV3-33)
ARDTWDDYFDY

SEQ ID NO: 8361 - protein, 9 aa, Homo sapiens
  Light chain CDR3 for antibody 4181 (IGKV6-21)
HQSSSLPYT

SEQ ID NO: 8362 - protein, 12 aa, Homo sapiens
  Heavy chain CDR3 for antibody 4181 (IGHV3-33)
ARDLVRGIRMDV

SEQ ID NO: 8363 - protein, 10 aa, Homo sapiens
  Light chain CDR3 for antibody 4182 (IGKV1-17)
LQHNSYPMYT

SEQ ID NO: 8364 - protein, 18 aa, Homo sapiens
  Heavy chain CDR3 for antibody 4182 (IGHV1-46)
ARDGDYVWGSYRSDWFDP

SEQ ID NO: 8365 - protein, 8 aa, Homo sapiens
  Light chain CDR3 for antibody 4183 (IGKV3D-7)
QQDYNLLT

SEQ ID NO: 8366 - protein, 13 aa, Homo sapiens
  Heavy chain CDR3 for antibody 4183 (IGHV3-33)
ARDQRYSSGWYDY

SEQ ID NO: 8367 - protein, 9 aa, Homo sapiens
  Light chain CDR3 for antibody 4184 (IGKV2-30)
MQGTHWPLT

SEQ ID NO: 8368 - protein, 15 aa, Homo sapiens
  Heavy chain CDR3 for antibody 4184 (IGHV3-33)
ARDHLTGYYYYGMDV

SEQ ID NO: 8369 - protein, 9 aa, Homo sapiens
  Light chain CDR3 for antibody 4185 (IGKV1-9)
QQLKSYLYT

SEQ ID NO: 8370 - protein, 18 aa, Homo sapiens
  Heavy chain CDR3 for antibody 4185 (IGHV1-18)
ARDRYYYDSGSYYYGMDV

SEQ ID NO: 8371 - protein, 9 aa, Homo sapiens
  Light chain CDR3 for antibody 4186 (IGKV5-2)
LQHDNFPYT

SEQ ID NO: 8372 - protein, 14 aa, Homo sapiens
  Heavy chain CDR3 for antibody 4186 (IGHV3-20)
ARGGSSGWYDWFDP

SEQ ID NO: 8373 - protein, 9 aa, Homo sapiens
  Light chain CDR3 for antibody 4187 (IGKV1-17)
LQHNSYPYT

SEQ ID NO: 8374 - protein, 19 aa, Homo sapiens
  Heavy chain CDR3 for antibody 4187 (IGHV3-33)
ARIPGIAVAGGYYYYGMDV

SEQ ID NO: 8375 - protein, 9 aa, Homo sapiens
  Light chain CDR3 for antibody 4188 (IGKV1D-16)
QQYDSYPWT

SEQ ID NO: 8376 - protein, 13 aa, Homo sapiens
  Heavy chain CDR3 for antibody 4188 (IGHV4-39)
ARREVVGGRGFDY

SEQ ID NO: 8377 - protein, 9 aa, Homo sapiens
  Light chain CDR3 for antibody 4189 (IGKV1-17)
LQHNSYPYT

SEQ ID NO: 8378 - protein, 17 aa, Homo sapiens
  Heavy chain CDR3 for antibody 4189 (IGHV3-33)
ARDPWIYSGYGGGWFDP

SEQ ID NO: 8379 - protein, 9 aa, Homo sapiens
  Light chain CDR3 for antibody 4190 (IGKV1-9)
QQLNSYPRT

SEQ ID NO: 8380 - protein, 11 aa, Homo sapiens
  Heavy chain CDR3 for antibody 4190 (IGHV3-11)
ARDRRYYGMDV

SEQ ID NO: 8381 - protein, 9 aa, Homo sapiens
  Light chain CDR3 for antibody 4191 (IGKV5-2)
LQHDNFPWT

SEQ ID NO: 8382 - protein, 17 aa, Homo sapiens
  Heavy chain CDR3 for antibody 4191 (IGHV3-33)
TRDSGMVRGIIIYGMDV

SEQ ID NO: 8383 - protein, 8 aa, Homo sapiens
  Light chain CDR3 for antibody 4192 (IGKV3-20)
QQYGRSFT

SEQ ID NO: 8384 - protein, 12 aa, Homo sapiens
  Heavy chain CDR3 for antibody 4192 (IGHV1-46)
ARGLTGDHAVDI

SEQ ID NO: 8385 - protein, 6 aa, Homo sapiens
  Light chain CDR3 for antibody 4193 (IGKV3-20)
QQYGST

SEQ ID NO: 8386 - protein, 13 aa, Homo sapiens
  Heavy chain CDR3 for antibody 4193 (IGHV3-11)
ARDGGAAAGTWDS

SEQ ID NO: 8387 - protein, 9 aa, Homo sapiens
  Light chain CDR3 for antibody 4194 (IGKV1-27)
QKYNSAPYT

SEQ ID NO: 8388 - protein, 14 aa, Homo sapiens
  Heavy chain CDR3 for antibody 4194 (IGHV1-2)
ARDYYGSGNYYMGY

SEQ ID NO: 8389 - protein, 8 aa, Homo sapiens
  Light chain CDR3 for antibody 4195 (IGKV1-5)
QQYNSYWT

SEQ ID NO: 8390 - protein, 12 aa, Homo sapiens
  Heavy chain CDR3 for antibody 4195 (IGHV3-23)
AKDGWFGESLDY

SEQ ID NO: 8391 - protein, 9 aa, Homo sapiens
  Light chain CDR3 for antibody 4196 (IGKV1-39)
QQSYSTPLT

SEQ ID NO: 8392 - protein, 14 aa, Homo sapiens
  Heavy chain CDR3 for antibody 4196 (IGHV3-33)
AREEDYYYYYDMDV

SEQ ID NO: 8393 - protein, 9 aa, Homo sapiens
  Light chain CDR3 for antibody 4197 (IGKV1-27)
QKYNSAPYT

SEQ ID NO: 8394 - protein, 12 aa, Homo sapiens
  Heavy chain CDR3 for antibody 4197 (IGHV3-33)
ARAGMGAPYFDY

SEQ ID NO: 8395 - protein, 9 aa, Homo sapiens
  Light chain CDR3 for antibody 4198 (IGKV1-6)
LQDYKSPFT

SEQ ID NO: 8396 - protein, 17 aa, Homo sapiens
  Heavy chain CDR3 for antibody 4198 (IGHV4-59)
ARDFLVRGEGSYYGMDV

SEQ ID NO: 8397 - protein, 9 aa, Homo sapiens
  Light chain CDR3 for antibody 4199 (IGKV3D-20)
QQYGSSPYT

SEQ ID NO: 8398 - protein, 16 aa, Homo sapiens
  Heavy chain CDR3 for antibody 4199 (IGHV3-11)
ARDSELRYFDWFGMDV

SEQ ID NO: 8399 - protein, 9 aa, Homo sapiens
  Light chain CDR3 for antibody 4200 (IGKV1-39)
QQSYSTPYT

SEQ ID NO: 8400 - protein, 11 aa, Homo sapiens
  Heavy chain CDR3 for antibody 4200 (IGHV1-46)
AREEDLGAFDI

SEQ ID NO: 8401 - protein, 8 aa, Homo sapiens
  Light chain CDR3 for antibody 4201 (IGKV1-5)
QQYNSYWT

SEQ ID NO: 8402 - protein, 7 aa, Homo sapiens
  Heavy chain CDR3 for antibody 4201 (IGHV3-33)
ARELVDY

SEQ ID NO: 8403 - protein, 8 aa, Homo sapiens
  Light chain CDR3 for antibody 4202 (IGKV1D-13)
QQFNNYYT

SEQ ID NO: 8404 - protein, 12 aa, Homo sapiens
  Heavy chain CDR3 for antibody 4202 (IGHV1-24)
ASDWAYYYGMDV

SEQ ID NO: 8405 - protein, 8 aa, Homo sapiens
  Light chain CDR3 for antibody 4203 (IGKV3D-7)
QQDYNLLT

SEQ ID NO: 8406 - protein, 17 aa, Homo sapiens
  Heavy chain CDR3 for antibody 4203 (IGHV3-66)
ARVQYDILTGYSPYFDN

SEQ ID NO: 8407 - protein, 9 aa, Homo sapiens
  Light chain CDR3 for antibody 4204 (IGKV5-2)
LQHDKFPYT

SEQ ID NO: 8408 - protein, 14 aa, Homo sapiens
  Heavy chain CDR3 for antibody 4204 (IGHV3-33)
ARDGYDILTGPFDY

SEQ ID NO: 8409 - protein, 10 aa, Homo sapiens
  Light chain CDR3 for antibody 4205 (IGKV1-17)
LQHNSYPMYT

SEQ ID NO: 8410 - protein, 9 aa, Homo sapiens
  Heavy chain CDR3 for antibody 4205 (IGHV1-18)
ARGKDWFDP

SEQ ID NO: 8411 - protein, 9 aa, Homo sapiens
  Light chain CDR3 for antibody 4206 (IGKV6-21)
HQSTSLPFT

SEQ ID NO: 8412 - protein, 21 aa, Homo sapiens
  Heavy chain CDR3 for antibody 4206 (IGHV4-59)
AAGVLLWFGEPNYYYYYGMDV

SEQ ID NO: 8413 - protein, 8 aa, Homo sapiens
  Light chain CDR3 for antibody 4207 (IGKV3D-7)
QQDYNLLT

SEQ ID NO: 8414 - protein, 11 aa, Homo sapiens
  Heavy chain CDR3 for antibody 4207 (IGHV3-33)
ARGSGSYAFDY

SEQ ID NO: 8415 - protein, 9 aa, Homo sapiens
  Light chain CDR3 for antibody 4208 (IGKV5-2)
LQHDNFPWT

SEQ ID NO: 8416 - protein, 15 aa, Homo sapiens
  Heavy chain CDR3 for antibody 4208 (IGHV4-59)
ARDLGYYGSGSPLAY

SEQ ID NO: 8417 - protein, 9 aa, Homo sapiens
  Light chain CDR3 for antibody 4209 (IGKV1-27)
QKYNSAPYT

SEQ ID NO: 8418 - protein, 9 aa, Homo sapiens
  Heavy chain CDR3 for antibody 4209 (IGHV4-59)
AGGSWDFDY

SEQ ID NO: 8419 - protein, 8 aa, Homo sapiens
  Light chain CDR3 for antibody 4210 (IGKV3D-7)
QQDYNLLT

SEQ ID NO: 8420 - protein, 12 aa, Homo sapiens
  Heavy chain CDR3 for antibody 4210 (IGHV3-33)
ARDPGYYYGLDV

SEQ ID NO: 8421 - protein, 9 aa, Homo sapiens
  Light chain CDR3 for antibody 4211 (IGKV1D-13)
QHFNNYMYT

SEQ ID NO: 8422 - protein, 13 aa, Homo sapiens
  Heavy chain CDR3 for antibody 4211 (IGHV4-39)
ARREVVGGRGFDY

SEQ ID NO: 8423 - protein, 9 aa, Homo sapiens
  Light chain CDR3 for antibody 4212 (IGKV5-2)
LQHDNFPWT

SEQ ID NO: 8424 - protein, 17 aa, Homo sapiens
  Heavy chain CDR3 for antibody 4212 (IGHV3-33)
AREGTMVRGYYYYGMDV

SEQ ID NO: 8425 - protein, 9 aa, Homo sapiens
  Light chain CDR3 for antibody 4213 (IGKV3D-7)
QQDYTLPLT

SEQ ID NO: 8426 - protein, 19 aa, Homo sapiens
  Heavy chain CDR3 for antibody 4213 (IGHV4-59)
ARDRVVGATTYYYYYGMDV

SEQ ID NO: 8427 - protein, 9 aa, Homo sapiens
  Light chain CDR3 for antibody 4214 (IGKV3-20)
QQYGSSPLT

SEQ ID NO: 8428 - protein, 18 aa, Homo sapiens
  Heavy chain CDR3 for antibody 4214 (IGHV1-18)
ARDRGYYYGSGSYSPFDY

SEQ ID NO: 8429 - protein, 9 aa, Homo sapiens
  Light chain CDR3 for antibody 4215 (IGKV3-15)
QQYNNWPRT

SEQ ID NO: 8430 - protein, 11 aa, Homo sapiens
  Heavy chain CDR3 for antibody 4215 (IGHV3-33)
AREGAVARFDY

SEQ ID NO: 8431 - protein, 9 aa, Homo sapiens
  Light chain CDR3 for antibody 4216 (IGKV1-27)
QKYNSAPYT

SEQ ID NO: 8432 - protein, 19 aa, Homo sapiens
  Heavy chain CDR3 for antibody 4216 (IGHV3-33)
ARDRYYDILTGYSSYYFDY

SEQ ID NO: 8433 - protein, 9 aa, Homo sapiens
  Light chain CDR3 for antibody 4217 (IGKV1D-13)
QQFNNYPST

SEQ ID NO: 8434 - protein, 20 aa, Homo sapiens
  Heavy chain CDR3 for antibody 4217 (IGHV1-f)
ATHYDILTGSPYYYYCALDV

SEQ ID NO: 8435 - protein, 9 aa, Homo sapiens
  Light chain CDR3 for antibody 4218 (IGKV1-6)
LQDYNYPWT

SEQ ID NO: 8436 - protein, 12 aa, Homo sapiens
  Heavy chain CDR3 for antibody 4218 (IGHV3-64)
ARVNSGSPYFDY

SEQ ID NO: 8437 - protein, 9 aa, Homo sapiens
  Light chain CDR3 for antibody 4219 (IGKV1-17)
LQHNSYPWT

SEQ ID NO: 8438 - protein, 17 aa, Homo sapiens
  Heavy chain CDR3 for antibody 4219 (IGHV4-59)
ARDRELLWFGEFGGMDV

SEQ ID NO: 8439 - protein, 11 aa, Homo sapiens
  Light chain CDR3 for antibody 4220 (IGKV3-11)
QQRSNWPPMYT

SEQ ID NO: 8440 - protein, 13 aa, Homo sapiens
  Heavy chain CDR3 for antibody 4220 (IGHV4-59)
ARDAGYSSSWFDY

SEQ ID NO: 8441 - protein, 9 aa, Homo sapiens
  Light chain CDR3 for antibody 4221 (IGKV1D-13)
QQFNNYPRT

SEQ ID NO: 8442 - protein, 19 aa, Homo sapiens
  Heavy chain CDR3 for antibody 4221 (IGHV1-24)
ATAGLQWFGEKIGYYGMDV

SEQ ID NO: 8443 - protein, 8 aa, Homo sapiens
  Light chain CDR3 for antibody 4222 (IGKV1-5)
QQYNSYWT

SEQ ID NO: 8444 - protein, 13 aa, Homo sapiens
  Heavy chain CDR3 for antibody 4222 (IGHV3-23)
ARAFFMVRGVIDY

SEQ ID NO: 8445 - protein, 9 aa, Homo sapiens
  Light chain CDR3 for antibody 4223 (IGKV2-30)
MQGTHWPLT

SEQ ID NO: 8446 - protein, 12 aa, Homo sapiens
  Heavy chain CDR3 for antibody 4223 (IGHV3-33)
ARDPGYYYGLDV

SEQ ID NO: 8447 - protein, 9 aa, Homo sapiens
  Light chain CDR3 for antibody 4224 (IGKV6-21)
HQSSSLPYT

SEQ ID NO: 8448 - protein, 18 aa, Homo sapiens
  Heavy chain CDR3 for antibody 4224 (IGHV3-33)
ARDQGIVVLPGAPWYFDP

SEQ ID NO: 8449 - protein, 9 aa, Homo sapiens
  Light chain CDR3 for antibody 4225 (IGKV1-9)
QQLNSYPLT

SEQ ID NO: 8450 - protein, 12 aa, Homo sapiens
  Heavy chain CDR3 for antibody 4225 (IGHV4-39)
ARREVILGAFDY

SEQ ID NO: 8451 - protein, 9 aa, Homo sapiens
  Light chain CDR3 for antibody 4226 (IGKV1D-16)
QQYNSYPFT

SEQ ID NO: 8452 - protein, 17 aa, Homo sapiens
  Heavy chain CDR3 for antibody 4226 (IGHV3-23)
AKERNWNDGYYYYGMDV

SEQ ID NO: 8453 - protein, 8 aa, Homo sapiens
  Light chain CDR3 for antibody 4227 (IGKV3D-7)
QQDYNLLT

SEQ ID NO: 8454 - protein, 13 aa, Homo sapiens
  Heavy chain CDR3 for antibody 4227 (IGHV4-39)
ARHPPSRDYGMDV

SEQ ID NO: 8455 - protein, 9 aa, Homo sapiens
  Light chain CDR3 for antibody 4228 (IGKV3-11)
QQRSNWMYT

SEQ ID NO: 8456 - protein, 9 aa, Homo sapiens
  Heavy chain CDR3 for antibody 4228 (IGHV3-30)
ARDNWGFDY

SEQ ID NO: 8457 - protein, 9 aa, Homo sapiens
  Light chain CDR3 for antibody 4229 (IGKV1-16)
QQYNSYPYT

SEQ ID NO: 8458 - protein, 9 aa, Homo sapiens
  Heavy chain CDR3 for antibody 4229 (IGHV4-59)
ARGNTWFDY

SEQ ID NO: 8459 - protein, 11 aa, Homo sapiens
  Light chain CDR3 for antibody 4230 (IGKV3-11)
QQRSNWPPTWT

SEQ ID NO: 8460 - protein, 17 aa, Homo sapiens
  Heavy chain CDR3 for antibody 4230 (IGHV1-18)
ARDRAFTMVRGVPPFDY

SEQ ID NO: 8461 - protein, 9 aa, Homo sapiens
  Light chain CDR3 for antibody 4231 (IGKV2-30)
MQGTHWPLT

SEQ ID NO: 8462 - protein, 11 aa, Homo sapiens
  Heavy chain CDR3 for antibody 4231 (IGHV3-33)
AREGAVARFDY

SEQ ID NO: 8463 - protein, 9 aa, Homo sapiens
  Light chain CDR3 for antibody 4232 (IGKV1-39)
QQSYRTPLT

SEQ ID NO: 8464 - protein, 18 aa, Homo sapiens
  Heavy chain CDR3 for antibody 4232 (IGHV3-33)
ARDRGDILTGYYKGWFDP

SEQ ID NO: 8465 - protein, 9 aa, Homo sapiens
  Light chain CDR3 for antibody 4233 (IGKV5-2)
LQHDNFPWT

SEQ ID NO: 8466 - protein, 18 aa, Homo sapiens
  Heavy chain CDR3 for antibody 4233 (IGHV4-39)
ARGALTYYDILTGYFFDY

SEQ ID NO: 8467 - protein, 9 aa, Homo sapiens
  Light chain CDR3 for antibody 4234 (IGKV3D-7)
QQDYNLPLT

SEQ ID NO: 8468 - protein, 14 aa, Homo sapiens
  Heavy chain CDR3 for antibody 4234 (IGHV3-20)
ARDGGSTSFDWFDP

SEQ ID NO: 8469 - protein, 9 aa, Homo sapiens
  Light chain CDR3 for antibody 4235 (IGKV1D-13)
QQFNNYPHT

SEQ ID NO: 8470 - protein, 14 aa, Homo sapiens
  Heavy chain CDR3 for antibody 4235 (IGHV1-46)
ARRGIVGALDAFDI

SEQ ID NO: 8471 - protein, 9 aa, Homo sapiens
  Light chain CDR3 for antibody 4236 (IGKV1-9)
QQLNSYPLT

SEQ ID NO: 8472 - protein, 13 aa, Homo sapiens
  Heavy chain CDR3 for antibody 4236 (IGHV4-4)
ARERGIAAAGPDY

SEQ ID NO: 8473 - protein, 9 aa, Homo sapiens
  Light chain CDR3 for antibody 4237 (IGKV1-9)
QQYNSYPLT

SEQ ID NO: 8474 - protein, 8 aa, Homo sapiens
  Heavy chain CDR3 for antibody 4237 (IGHV4-4)
ARGARFDP

SEQ ID NO: 8475 - protein, 9 aa, Homo sapiens
  Light chain CDR3 for antibody 4238 (IGKV1-39)
QQSYSTPLT

SEQ ID NO: 8476 - protein, 15 aa, Homo sapiens
  Heavy chain CDR3 for antibody 4238 (IGHV3-33)
ARRSILTGSYWYFDL

SEQ ID NO: 8477 - protein, 9 aa, Homo sapiens
  Light chain CDR3 for antibody 4239 (IGKV3D-7)
QQDYEFPLT

SEQ ID NO: 8478 - protein, 13 aa, Homo sapiens
  Heavy chain CDR3 for antibody 4239 (IGHV4-39)
ARQWPSGYWYFDL

SEQ ID NO: 8479 - protein, 9 aa, Homo sapiens
  Light chain CDR3 for antibody 4240 (IGKV1D-16)
QQYNSFPLT

SEQ ID NO: 8480 - protein, 14 aa, Homo sapiens
  Heavy chain CDR3 for antibody 4240 (IGHV4-39)
ARRGVLVPPGGMDV

SEQ ID NO: 8481 - protein, 9 aa, Homo sapiens
  Light chain CDR3 for antibody 4241 (IGKV3D-20)
QQYGSSPYT

SEQ ID NO: 8482 - protein, 12 aa, Homo sapiens
  Heavy chain CDR3 for antibody 4241 (IGHV3-33)
ARESGGSFGMDV

SEQ ID NO: 8483 - protein, 9 aa, Homo sapiens
  Light chain CDR3 for antibody 4242 (IGKV1-5)
QQYNTYSRT

SEQ ID NO: 8484 - protein, 16 aa, Homo sapiens
  Heavy chain CDR3 for antibody 4242 (IGHV3-23)
AKEGMVLRYFDWLWDY

SEQ ID NO: 8485 - protein, 9 aa, Homo sapiens
  Light chain CDR3 for antibody 4243 (IGKV2-30)
MQGTHWPLT

SEQ ID NO: 8486 - protein, 16 aa, Homo sapiens
  Heavy chain CDR3 for antibody 4243 (IGHV4-59)
ARYSGSYYGDYYGMDV

SEQ ID NO: 8487 - protein, 9 aa, Homo sapiens
  Light chain CDR3 for antibody 4244 (IGKV1-27)
QKYNSAPYT

SEQ ID NO: 8488 - protein, 13 aa, Homo sapiens
  Heavy chain CDR3 for antibody 4244 (IGHV4-39)
ARHPPSRDYGMDV

SEQ ID NO: 8489 - protein, 9 aa, Homo sapiens
  Light chain CDR3 for antibody 4245 (IGKV1-16)
QQYNSYPLT

SEQ ID NO: 8490 - protein, 14 aa, Homo sapiens
  Heavy chain CDR3 for antibody 4245 (IGHV3-33)
ARDDILTGYSYFQH

SEQ ID NO: 8491 - protein, 9 aa, Homo sapiens
  Light chain CDR3 for antibody 4246 (IGKV1D-16)
QQYNSYPYT

SEQ ID NO: 8492 - protein, 18 aa, Homo sapiens
  Heavy chain CDR3 for antibody 4246 (IGHV3-33)
ARRGVGARGYYYYYGMDV

SEQ ID NO: 8493 - protein, 9 aa, Homo sapiens
  Light chain CDR3 for antibody 4247 (IGKV1D-16)
QQYNSYPYT

SEQ ID NO: 8494 - protein, 18 aa, Homo sapiens
  Heavy chain CDR3 for antibody 4247 (IGHV3-33)
ARDPYSSGWYDYYFGMDV

SEQ ID NO: 8495 - protein, 8 aa, Homo sapiens
  Light chain CDR3 for antibody 4248 (IGKV1-5)
QQYNSYWT

SEQ ID NO: 8496 - protein, 15 aa, Homo sapiens
  Heavy chain CDR3 for antibody 4248 (IGHV3-33)
ARDSRPEIIGPPFDY

SEQ ID NO: 8497 - protein, 9 aa, Homo sapiens
  Light chain CDR3 for antibody 4249 (IGKV1-6)
LQDYNYPYT

SEQ ID NO: 8498 - protein, 13 aa, Homo sapiens
  Heavy chain CDR3 for antibody 4249 (IGHV3-21)
ATGAWASSWWGDY

SEQ ID NO: 8499 - protein, 9 aa, Homo sapiens
  Light chain CDR3 for antibody 4250 (IGKV1-39)
QQSYRTPLT

SEQ ID NO: 8500 - protein, 19 aa, Homo sapiens
  Heavy chain CDR3 for antibody 4250 (IGHV1-24)
ATAGLQWFGEKIGYYGMDV

SEQ ID NO: 8501 - protein, 9 aa, Homo sapiens
  Light chain CDR3 for antibody 4251 (IGKV1-17)
LQHNSYPYT

SEQ ID NO: 8502 - protein, 11 aa, Homo sapiens
  Heavy chain CDR3 for antibody 4251 (IGHV3-33)
ARDILTGYFDY

SEQ ID NO: 8503 - protein, 9 aa, Homo sapiens
  Light chain CDR3 for antibody 4252 (IGKV1D-13)
QQFNNYPHT

SEQ ID NO: 8504 - protein, 13 aa, Homo sapiens
  Heavy chain CDR3 for antibody 4252 (IGHV4-39)
APFRVMVRGVLDY

SEQ ID NO: 8505 - protein, 9 aa, Homo sapiens
  Light chain CDR3 for antibody 4253 (IGKV1-6)
LQDYNYPYT

SEQ ID NO: 8506 - protein, 16 aa, Homo sapiens
  Heavy chain CDR3 for antibody 4253 (IGHV4-59)
ARQLLWFGELKGVFDY

SEQ ID NO: 8507 - protein, 11 aa, Homo sapiens
  Light chain CDR3 for antibody 4254 (IGKV3-11)
QQRSNWPPTWT

SEQ ID NO: 8508 - protein, 13 aa, Homo sapiens
  Heavy chain CDR3 for antibody 4254 (IGHV4-61)
ASRYSSGWYPFDY

SEQ ID NO: 8509 - protein, 9 aa, Homo sapiens
  Light chain CDR3 for antibody 4255 (IGKV1D-13)
QHFNNYMYT

SEQ ID NO: 8510 - protein, 13 aa, Homo sapiens
  Heavy chain CDR3 for antibody 4255 (IGHV4-39)
ARQWPSGYWYFDL

SEQ ID NO: 8511 - protein, 9 aa, Homo sapiens
  Light chain CDR3 for antibody 4256 (IGKV3-20)
QQYGSSPYT

SEQ ID NO: 8512 - protein, 14 aa, Homo sapiens
  Heavy chain CDR3 for antibody 4256 (IGHV3-33)
AREEDYYYHYDMDV

SEQ ID NO: 8513 - protein, 9 aa, Homo sapiens
  Light chain CDR3 for antibody 4257 (IGKV1-9)
QQLNSYPLT

SEQ ID NO: 8514 - protein, 13 aa, Homo sapiens
  Heavy chain CDR3 for antibody 4257 (IGHV3-33)
ARTDYYYYYGMDV

SEQ ID NO: 8515 - protein, 9 aa, Homo sapiens
  Light chain CDR3 for antibody 4258 (IGKV2-30)
MQGTHWPLT

SEQ ID NO: 8516 - protein, 10 aa, Homo sapiens
  Heavy chain CDR3 for antibody 4258 (IGHV3-33)
ARDVVVYFDY

SEQ ID NO: 8517 - protein, 9 aa, Homo sapiens
  Light chain CDR3 for antibody 4259 (IGKV2-30)
MQGTHWPLT

SEQ ID NO: 8518 - protein, 19 aa, Homo sapiens
  Heavy chain CDR3 for antibody 4259 (IGHV3-33)
ARGVRLRYFDPYYYYGMDV

SEQ ID NO: 8519 - protein, 9 aa, Homo sapiens
  Light chain CDR3 for antibody 4260 (IGKV5-2)
LQHDNFPYT

SEQ ID NO: 8520 - protein, 17 aa, Homo sapiens
  Heavy chain CDR3 for antibody 4260 (IGHV3-33)
ARKDYGILSGYYSPFDY

SEQ ID NO: 8521 - protein, 9 aa, Homo sapiens
  Light chain CDR3 for antibody 4261 (IGKV1-16)
QHYNDYPFT

SEQ ID NO: 8522 - protein, 13 aa, Homo sapiens
  Heavy chain CDR3 for antibody 4261 (IGHV3-11)
ARDGGAAAGTWDS

SEQ ID NO: 8523 - protein, 9 aa, Homo sapiens
  Light chain CDR3 for antibody 4262 (IGKV1-9)
QQLNSYPYT

SEQ ID NO: 8524 - protein, 4 aa, Homo sapiens
  Heavy chain CDR3 for antibody 4262 (IGHV1-2)
ARDY

SEQ ID NO: 8525 - protein, 10 aa, Homo sapiens
  Light chain CDR3 for antibody 4263 (IGKV1-39)
QQSYSTPMYT

SEQ ID NO: 8526 - protein, 11 aa, Homo sapiens
  Heavy chain CDR3 for antibody 4263 (IGHV3-33)
ARDTWDDYFDY

SEQ ID NO: 8527 - protein, 9 aa, Homo sapiens
  Light chain CDR3 for antibody 4264 (IGKV1-39)
QQSYSTPLT

SEQ ID NO: 8528 - protein, 15 aa, Homo sapiens
  Heavy chain CDR3 for antibody 4264 (IGHV3-20)
AREGPYYYGSGSLDY

SEQ ID NO: 8529 - protein, 9 aa, Homo sapiens
  Light chain CDR3 for antibody 4265 (IGKV1-16)
QQYNSYPLT

SEQ ID NO: 8530 - protein, 17 aa, Homo sapiens
  Heavy chain CDR3 for antibody 4265 (IGHV3-30)
ARDGVGATSYYYYGMDV

SEQ ID NO: 8531 - protein, 9 aa, Homo sapiens
  Light chain CDR3 for antibody 4266 (IGKV5-2)
LQHDNFPWT

SEQ ID NO: 8532 - protein, 15 aa, Homo sapiens
  Heavy chain CDR3 for antibody 4266 (IGHV3-33)
ARGYYYGSGSFPFDY

SEQ ID NO: 8533 - protein, 9 aa, Homo sapiens
  Light chain CDR3 for antibody 4267 (IGKV6-21)
HQSSSLPYT

SEQ ID NO: 8534 - protein, 16 aa, Homo sapiens
  Heavy chain CDR3 for antibody 4267 (IGHV1-8)
AREGTMVRGVTYALDI

SEQ ID NO: 8535 - protein, 9 aa, Homo sapiens
  Light chain CDR3 for antibody 4268 (IGKV1-9)
QQYNSYPLT

SEQ ID NO: 8536 - protein, 10 aa, Homo sapiens
  Heavy chain CDR3 for antibody 4268 (IGHV4-59)
VSSGTSLLAY

SEQ ID NO: 8537 - protein, 9 aa, Homo sapiens
  Light chain CDR3 for antibody 4269 (IGKV5-2)
LQHDNFPYT

SEQ ID NO: 8538 - protein, 16 aa, Homo sapiens
  Heavy chain CDR3 for antibody 4269 (IGHV3-33)
AREMAGSYYYYYGMDV

SEQ ID NO: 8539 - protein, 10 aa, Homo sapiens
  Light chain CDR3 for antibody 4270 (IGKV3-11)
QQRSNWPIFT

SEQ ID NO: 8540 - protein, 15 aa, Homo sapiens
  Heavy chain CDR3 for antibody 4270 (IGHV3-33)
ARRICSGGSCSLFDY

SEQ ID NO: 8541 - protein, 9 aa, Homo sapiens
  Light chain CDR3 for antibody 4271 (IGKV1-33)
QQYDNLPFT

SEQ ID NO: 8542 - protein, 18 aa, Homo sapiens
  Heavy chain CDR3 for antibody 4271 (IGHV4-59)
AREGDYVWGSYRPNWFDP

SEQ ID NO: 8543 - protein, 10 aa, Homo sapiens
  Light chain CDR3 for antibody 4272 (IGKV1-17)
LQHNSYPMYT

SEQ ID NO: 8544 - protein, 10 aa, Homo sapiens
  Heavy chain CDR3 for antibody 4272 (IGHV3-23)
AKEQWLVLDY

SEQ ID NO: 8545 - protein, 10 aa, Homo sapiens
  Light chain CDR3 for antibody 4273 (IGKV3-11)
QQRSNWPIFT

SEQ ID NO: 8546 - protein, 13 aa, Homo sapiens
  Heavy chain CDR3 for antibody 4273 (IGHV3-33)
ARRATLVRGVFDP

SEQ ID NO: 8547 - protein, 9 aa, Homo sapiens
  Light chain CDR3 for antibody 4274 (IGKV1D-16)
QQYNSYPYT

SEQ ID NO: 8548 - protein, 16 aa, Homo sapiens
  Heavy chain CDR3 for antibody 4274 (IGHV3-33)
ARAFTMVRGVDYGMDV

SEQ ID NO: 8549 - protein, 8 aa, Homo sapiens
  Light chain CDR3 for antibody 4275 (IGKV6-21)
HQSSSLPT

SEQ ID NO: 8550 - protein, 13 aa, Homo sapiens
  Heavy chain CDR3 for antibody 4275 (IGHV4-34)
ASNFYYYYYGMDV

SEQ ID NO: 8551 - protein, 9 aa, Homo sapiens
  Light chain CDR3 for antibody 4276 (IGKV1-9)
QQYNTYSRT

SEQ ID NO: 8552 - protein, 18 aa, Homo sapiens
  Heavy chain CDR3 for antibody 4276 (IGHV4-59)
AREGHYYTSGSYYKAFDY

SEQ ID NO: 8553 - protein, 9 aa, Homo sapiens
  Light chain CDR3 for antibody 4277 (IGKV2D-28)
MQALQTPPT

SEQ ID NO: 8554 - protein, 13 aa, Homo sapiens
  Heavy chain CDR3 for antibody 4277 (IGHV3-23)
ASPFNWNDGFFDY

SEQ ID NO: 8555 - protein, 10 aa, Homo sapiens
  Light chain CDR3 for antibody 4278 (IGKV3-11)
QQRSNWPIFT

SEQ ID NO: 8556 - protein, 17 aa, Homo sapiens
  Heavy chain CDR3 for antibody 4278 (IGHV3-33)
VREGGLLWVGELSLFDY

SEQ ID NO: 8557 - protein, 8 aa, Homo sapiens
  Light chain CDR3 for antibody 4279 (IGKV2D-28)
MQALQTPT

SEQ ID NO: 8558 - protein, 16 aa, Homo sapiens
  Heavy chain CDR3 for antibody 4279 (IGHV3-23)
AKEGMVLRYFDWLWDY

SEQ ID NO: 8559 - protein, 9 aa, Homo sapiens
  Light chain CDR3 for antibody 4280 (IGKV6-21)
HQSSSLPYT

SEQ ID NO: 8560 - protein, 12 aa, Homo sapiens
  Heavy chain CDR3 for antibody 4280 (IGHV3-33)
ARESGGSFGMDV

SEQ ID NO: 8561 - protein, 9 aa, Homo sapiens
  Light chain CDR3 for antibody 4281 (IGKV1-39)
QQSYSTPFT

SEQ ID NO: 8562 - protein, 15 aa, Homo sapiens
  Heavy chain CDR3 for antibody 4281 (IGHV3-33)
ARRICSGGSCSLFDY

SEQ ID NO: 8563 - protein, 9 aa, Homo sapiens
  Light chain CDR3 for antibody 4282 (IGKV1D-13)
QQFNNYPYT

SEQ ID NO: 8564 - protein, 17 aa, Homo sapiens
  Heavy chain CDR3 for antibody 4282 (IGHV3-33)
AREDYDILTGYPFYFDY

SEQ ID NO: 8565 - protein, 9 aa, Homo sapiens
  Light chain CDR3 for antibody 4283 (IGKV3-11)
QQRSNWPLT

SEQ ID NO: 8566 - protein, 15 aa, Homo sapiens
  Heavy chain CDR3 for antibody 4283 (IGHV3-33)
VCVLYDYGDYVGFDY

SEQ ID NO: 8567 - protein, 9 aa, Homo sapiens
  Light chain CDR3 for antibody 4284 (IGKV1D-16)
QQYNSYPYT

SEQ ID NO: 8568 - protein, 14 aa, Homo sapiens
  Heavy chain CDR3 for antibody 4284 (IGHV1-2)
AREGGSGSSPGMDV

SEQ ID NO: 8569 - protein, 9 aa, Homo sapiens
  Light chain CDR3 for antibody 4285 (IGKV3D-7)
QQDYNLPYT

SEQ ID NO: 8570 - protein, 13 aa, Homo sapiens
  Heavy chain CDR3 for antibody 4285 (IGHV4-39)
ARHVLLWFGEFDP

SEQ ID NO: 8571 - protein, 9 aa, Homo sapiens
  Light chain CDR3 for antibody 4286 (IGKV1-17)
LQHNGYPLT

SEQ ID NO: 8572 - protein, 15 aa, Homo sapiens
  Heavy chain CDR3 for antibody 4286 (IGHV3-33)
ARRVCSGGSCSLFDY

SEQ ID NO: 8573 - protein, 9 aa, Homo sapiens
  Light chain CDR3 for antibody 4287 (IGKV1D-13)
QQFNNYPST

SEQ ID NO: 8574 - protein, 13 aa, Homo sapiens
  Heavy chain CDR3 for antibody 4287 (IGHV3-33)
ANTGDSYYYDMDV

SEQ ID NO: 8575 - protein, 9 aa, Homo sapiens
  Light chain CDR3 for antibody 4288 (IGKV1-9)
QQLNSYPLT

SEQ ID NO: 8576 - protein, 15 aa, Homo sapiens
  Heavy chain CDR3 for antibody 4288 (IGHV4-59)
ARDLGYYGSGSPLAY

SEQ ID NO: 8577 - protein, 9 aa, Homo sapiens
  Light chain CDR3 for antibody 4289 (IGKV1-39)
QQSYSTPLT

SEQ ID NO: 8578 - protein, 18 aa, Homo sapiens
  Heavy chain CDR3 for antibody 4289 (IGHV3-30)
ARDRHHDILTGYSDAFEI

SEQ ID NO: 8579 - protein, 9 aa, Homo sapiens
  Light chain CDR3 for antibody 4290 (IGKV2-30)
MQGTHWPLT

SEQ ID NO: 8580 - protein, 18 aa, Homo sapiens
  Heavy chain CDR3 for antibody 4290 (IGHV3-33)
ARGLLWFGVSYYYYGMDV

SEQ ID NO: 8581 - protein, 9 aa, Homo sapiens
  Light chain CDR3 for antibody 4291 (IGKV2D-28)
MQALQTPFT

SEQ ID NO: 8582 - protein, 13 aa, Homo sapiens
  Heavy chain CDR3 for antibody 4291 (IGHV4-39)
ARQWPSGYWYFDL

SEQ ID NO: 8583 - protein, 9 aa, Homo sapiens
  Light chain CDR3 for antibody 4292 (IGKV6-21)
HQSSSLPYT

SEQ ID NO: 8584 - protein, 19 aa, Homo sapiens
  Heavy chain CDR3 for antibody 4292 (IGHV3-33)
ARRRDDILTGWDYYFGMDV

SEQ ID NO: 8585 - protein, 8 aa, Homo sapiens
  Light chain CDR3 for antibody 4293 (IGKV1-5)
QQYNSYWT

SEQ ID NO: 8586 - protein, 18 aa, Homo sapiens
  Heavy chain CDR3 for antibody 4293 (IGHV3-33)
ARGLLWFGVSYYYYGMDV

SEQ ID NO: 8587 - protein, 9 aa, Homo sapiens
  Light chain CDR3 for antibody 4294 (IGKV1-6)
LQDYNYPWT

SEQ ID NO: 8588 - protein, 12 aa, Homo sapiens
  Heavy chain CDR3 for antibody 4294 (IGHV3-33)
ASGYFGSGSAHY

SEQ ID NO: 8589 - protein, 9 aa, Homo sapiens
  Light chain CDR3 for antibody 4295 (IGKV1-6)
LQDYNYPWT

SEQ ID NO: 8590 - protein, 11 aa, Homo sapiens
  Heavy chain CDR3 for antibody 4295 (IGHV1-18)
SRGGFSVGYDS

SEQ ID NO: 8591 - protein, 8 aa, Homo sapiens
  Light chain CDR3 for antibody 4296 (IGKV3D-7)
QQDYNLLT

SEQ ID NO: 8592 - protein, 11 aa, Homo sapiens
  Heavy chain CDR3 for antibody 4296 (IGHV3-33)
ARDRVLTPFDY

SEQ ID NO: 8593 - protein, 9 aa, Homo sapiens
  Light chain CDR3 for antibody 4297 (IGKV5-2)
LQHDNFPWT

SEQ ID NO: 8594 - protein, 6 aa, Homo sapiens
  Heavy chain CDR3 for antibody 4297 (IGHV1-8)
AREGTY

SEQ ID NO: 8595 - protein, 8 aa, Homo sapiens
  Light chain CDR3 for antibody 4298 (IGKV6-21)
HQSSSLPT

SEQ ID NO: 8596 - protein, 18 aa, Homo sapiens
  Heavy chain CDR3 for antibody 4298 (IGHV4-59)
AREGDYVWGSYRPNWFDP

SEQ ID NO: 8597 - protein, 9 aa, Homo sapiens
  Light chain CDR3 for antibody 4299 (IGKV1-39)
QQSYSTPLT

SEQ ID NO: 8598 - protein, 14 aa, Homo sapiens
  Heavy chain CDR3 for antibody 4299 (IGHV3-33)
ARKGYSGRYYYFDY

SEQ ID NO: 8599 - protein, 9 aa, Homo sapiens
  Light chain CDR3 for antibody 4300 (IGKV1-9)
QQLNSYPLT

SEQ ID NO: 8600 - protein, 14 aa, Homo sapiens
  Heavy chain CDR3 for antibody 4300 (IGHV4-39)
ARQGDILTGYSFDN

SEQ ID NO: 8601 - protein, 8 aa, Homo sapiens
  Light chain CDR3 for antibody 4301 (IGKV1D-13)
QQFNNYPT

SEQ ID NO: 8602 - protein, 18 aa, Homo sapiens
  Heavy chain CDR3 for antibody 4301 (IGHV3-23)
AKDRITGTTYGYYSGLDV

SEQ ID NO: 8603 - protein, 9 aa, Homo sapiens
  Light chain CDR3 for antibody 4302 (IGKV3-15)
QQYNNWPLT

SEQ ID NO: 8604 - protein, 15 aa, Homo sapiens
  Heavy chain CDR3 for antibody 4302 (IGHV3-23)
AKEALRYFDWSGMDV

SEQ ID NO: 8605 - protein, 10 aa, Homo sapiens
  Light chain CDR3 for antibody 4303 (IGKV3-11)
QQRSNWPIFT

SEQ ID NO: 8606 - protein, 21 aa, Homo sapiens
  Heavy chain CDR3 for antibody 4303 (IGHV3-23)
AKDIDYYGSGSYPLYYYGMDV

SEQ ID NO: 8607 - protein, 9 aa, Homo sapiens
  Light chain CDR3 for antibody 4304 (IGKV3D-20)
QQYGSSPWT

SEQ ID NO: 8608 - protein, 13 aa, Homo sapiens
  Heavy chain CDR3 for antibody 4304 (IGHV3-33)
ARGVLWFGELFDY

SEQ ID NO: 8609 - protein, 9 aa, Homo sapiens
  Light chain CDR3 for antibody 4305 (IGKV3D-7)
QQDYNLPFT

SEQ ID NO: 8610 - protein, 19 aa, Homo sapiens
  Heavy chain CDR3 for antibody 4305 (IGHV3-33)
ARGVRLRYFDPYYYYGMDV

SEQ ID NO: 8611 - protein, 10 aa, Homo sapiens
  Light chain CDR3 for antibody 4306 (IGKV1-17)
LQHNSYPMYT

SEQ ID NO: 8612 - protein, 13 aa, Homo sapiens
  Heavy chain CDR3 for antibody 4306 (IGHV3-33)
VSTGDSYYYVMDV

SEQ ID NO: 8613 - protein, 8 aa, Homo sapiens
  Light chain CDR3 for antibody 4307 (IGKV3D-7)
QQDYNLLT

SEQ ID NO: 8614 - protein, 14 aa, Homo sapiens
  Heavy chain CDR3 for antibody 4307 (IGHV3-33)
ARQYSYGYPYYFDY

SEQ ID NO: 8615 - protein, 9 aa, Homo sapiens
  Light chain CDR3 for antibody 4308 (IGKV3-11)
QQRSNWPPT

SEQ ID NO: 8616 - protein, 18 aa, Homo sapiens
  Heavy chain CDR3 for antibody 4308 (IGHV3-33)
ARDRDRYGSGTYPDAIDI

SEQ ID NO: 8617 - protein, 9 aa, Homo sapiens
  Light chain CDR3 for antibody 4309 (IGKV3-15)
QQYNNWPRT

SEQ ID NO: 8618 - protein, 21 aa, Homo sapiens
  Heavy chain CDR3 for antibody 4309 (IGHV3-33)
ARKRLYDILTGYYKAYYGMDV

SEQ ID NO: 8619 - protein, 10 aa, Homo sapiens
  Light chain CDR3 for antibody 4310 (IGKV3-11)
QQRSNWPMYT

SEQ ID NO: 8620 - protein, 11 aa, Homo sapiens
  Heavy chain CDR3 for antibody 4310 (IGHV3-33)
ARARYTTGLDY

SEQ ID NO: 8621 - protein, 9 aa, Homo sapiens
  Light chain CDR3 for antibody 4311 (IGKV1-9)
QQLNSYPLT

SEQ ID NO: 8622 - protein, 18 aa, Homo sapiens
  Heavy chain CDR3 for antibody 4311 (IGHV1-46)
ARDLTGRTENYYFYGMDV

SEQ ID NO: 8623 - protein, 9 aa, Homo sapiens
  Light chain CDR3 for antibody 4312 (IGKV3-11)
QQRSNWPPT

SEQ ID NO: 8624 - protein, 14 aa, Homo sapiens
  Heavy chain CDR3 for antibody 4312 (IGHV3-33)
ARDNILTVYYLFDY

SEQ ID NO: 8625 - protein, 9 aa, Homo sapiens
  Light chain CDR3 for antibody 4313 (IGKV5-2)
LQHDNFPWT

SEQ ID NO: 8626 - protein, 10 aa, Homo sapiens
  Heavy chain CDR3 for antibody 4313 (IGHV3-30)
ARGSWYGFDY

SEQ ID NO: 8627 - protein, 9 aa, Homo sapiens
  Light chain CDR3 for antibody 4314 (IGKV5-2)
LQHDNFPWT

SEQ ID NO: 8628 - protein, 9 aa, Homo sapiens
  Heavy chain CDR3 for antibody 4314 (IGHV1-18)
ARGGWGFEY

SEQ ID NO: 8629 - protein, 9 aa, Homo sapiens
  Light chain CDR3 for antibody 4315 (IGKV3D-7)
QQDYNLPLT

SEQ ID NO: 8630 - protein, 20 aa, Homo sapiens
  Heavy chain CDR3 for antibody 4315 (IGHV3-33)
SRGGATLVRGVIDYYYGMDV

SEQ ID NO: 8631 - protein, 8 aa, Homo sapiens
  Light chain CDR3 for antibody 4316 (IGKV1-5)
QQYNSYWT

SEQ ID NO: 8632 - protein, 11 aa, Homo sapiens
  Heavy chain CDR3 for antibody 4316 (IGHV3-33)
AREAANWGFDY

SEQ ID NO: 8633 - protein, 9 aa, Homo sapiens
  Light chain CDR3 for antibody 4317 (IGKV3-20)
QQYGSSPLT

SEQ ID NO: 8634 - protein, 9 aa, Homo sapiens
  Heavy chain CDR3 for antibody 4317 (IGHV3-30)
VRDNWGFDY

SEQ ID NO: 8635 - protein, 10 aa, Homo sapiens
  Light chain CDR3 for antibody 4318 (IGKV3-11)
QQRSNWPIFT

SEQ ID NO: 8636 - protein, 14 aa, Homo sapiens
  Heavy chain CDR3 for antibody 4318 (IGHV3-33)
ARDRIAAASSDFDC

SEQ ID NO: 8637 - protein, 9 aa, Homo sapiens
  Light chain CDR3 for antibody 4319 (IGKV1-27)
QKYNSAPYT

SEQ ID NO: 8638 - protein, 19 aa, Homo sapiens
  Heavy chain CDR3 for antibody 4319 (IGHV3-33)
TRDPHYDILTGYAYYGMDV

SEQ ID NO: 8639 - protein, 9 aa, Homo sapiens
  Light chain CDR3 for antibody 4320 (IGKV1-39)
QQGFSTPWT

SEQ ID NO: 8640 - protein, 16 aa, Homo sapiens
  Heavy chain CDR3 for antibody 4320 (IGHV4-59)
ARGRYFEWLLGDVFDI

SEQ ID NO: 8641 - protein, 9 aa, Homo sapiens
  Light chain CDR3 for antibody 4321 (IGKV3-20)
QQYGSSPYT

SEQ ID NO: 8642 - protein, 16 aa, Homo sapiens
  Heavy chain CDR3 for antibody 4321 (IGHV1-8)
ARGHYYGSGSYYNFDY

SEQ ID NO: 8643 - protein, 9 aa, Homo sapiens
  Light chain CDR3 for antibody 4322 (IGKV1D-13)
QQFNNYPHT

SEQ ID NO: 8644 - protein, 13 aa, Homo sapiens
  Heavy chain CDR3 for antibody 4322 (IGHV3-30)
AAPFMVRGDGMDV

SEQ ID NO: 8645 - protein, 9 aa, Homo sapiens
  Light chain CDR3 for antibody 4323 (IGKV5-2)
LQHDNFPWT

SEQ ID NO: 8646 - protein, 13 aa, Homo sapiens
  Heavy chain CDR3 for antibody 4323 (IGHV3-11)
AREGIAVAGDFDH

SEQ ID NO: 8647 - protein, 9 aa, Homo sapiens
  Light chain CDR3 for antibody 4324 (IGKV3-20)
QQYGSSPYT

SEQ ID NO: 8648 - protein, 13 aa, Homo sapiens
  Heavy chain CDR3 for antibody 4324 (IGHV3-33)
ARALYSSSWPGDY

SEQ ID NO: 8649 - protein, 9 aa, Homo sapiens
  Light chain CDR3 for antibody 4325 (IGKV5-2)
LQHDNFPYT

SEQ ID NO: 8650 - protein, 14 aa, Homo sapiens
  Heavy chain CDR3 for antibody 4325 (IGHV3-33)
ARWELPFYYSGMDV

SEQ ID NO: 8651 - protein, 9 aa, Homo sapiens
  Light chain CDR3 for antibody 4326 (IGKV3-11)
QQRSNWPLT

SEQ ID NO: 8652 - protein, 12 aa, Homo sapiens
  Heavy chain CDR3 for antibody 4326 (IGHV3-33)
ARKGYDMHAFDI

SEQ ID NO: 8653 - protein, 9 aa, Homo sapiens
  Light chain CDR3 for antibody 4327 (IGKV1-6)
LQDYKSPFT

SEQ ID NO: 8654 - protein, 8 aa, Homo sapiens
  Heavy chain CDR3 for antibody 4327 (IGHV3-23)
AKETGNNY

SEQ ID NO: 8655 - protein, 9 aa, Homo sapiens
  Light chain CDR3 for antibody 4328 (IGKV1-17)
LQHNSYPRT

SEQ ID NO: 8656 - protein, 13 aa, Homo sapiens
  Heavy chain CDR3 for antibody 4328 (IGHV3-11)
ARDEGYSGYNLDN

SEQ ID NO: 8657 - protein, 8 aa, Homo sapiens
  Light chain CDR3 for antibody 4329 (IGKV1D-13)
QQFNNYPT

SEQ ID NO: 8658 - protein, 15 aa, Homo sapiens
  Heavy chain CDR3 for antibody 4329 (IGHV3-33)
ARDRGWKAPGYGMDV

SEQ ID NO: 8659 - protein, 9 aa, Homo sapiens
  Light chain CDR3 for antibody 4330 (IGKV3-15)
QQYNNWPLT

SEQ ID NO: 8660 - protein, 9 aa, Homo sapiens
  Heavy chain CDR3 for antibody 4330 (IGHV3-33)
AREYKEFDY

SEQ ID NO: 8661 - protein, 9 aa, Homo sapiens
  Light chain CDR3 for antibody 4331 (IGKV1-6)
LQDYNYPYT

SEQ ID NO: 8662 - protein, 19 aa, Homo sapiens
  Heavy chain CDR3 for antibody 4331 (IGHV3-33)
ARGRGSYYYGPGSHNGMDV

SEQ ID NO: 8663 - protein, 9 aa, Homo sapiens
  Light chain CDR3 for antibody 4332 (IGKV1-6)
LQDYNYPWT

SEQ ID NO: 8664 - protein, 18 aa, Homo sapiens
  Heavy chain CDR3 for antibody 4332 (IGHV1-46)
ARDGDYVWGSYRSNWFDP

SEQ ID NO: 8665 - protein, 9 aa, Homo sapiens
  Light chain CDR3 for antibody 4333 (IGKV1D-13)
QQFNNYPHT

SEQ ID NO: 8666 - protein, 11 aa, Homo sapiens
  Heavy chain CDR3 for antibody 4333 (IGHV3-33)
ARGSGSYAFDS

SEQ ID NO: 8667 - protein, 9 aa, Homo sapiens
  Light chain CDR3 for antibody 4334 (IGKV3-11)
QQRSNWPPT

SEQ ID NO: 8668 - protein, 21 aa, Homo sapiens
  Heavy chain CDR3 for antibody 4334 (IGHV3-33)
ARKRLYDILTGYYKAYYGMDV

SEQ ID NO: 8669 - protein, 10 aa, Homo sapiens
  Light chain CDR3 for antibody 4335 (IGKV3-11)
QQRSNWPIFT

SEQ ID NO: 8670 - protein, 11 aa, Homo sapiens
  Heavy chain CDR3 for antibody 4335 (IGHV3-33)
AREGAVARFDY

SEQ ID NO: 8671 - protein, 9 aa, Homo sapiens
  Light chain CDR3 for antibody 4336 (IGKV5-2)
LQHDNFPYT

SEQ ID NO: 8672 - protein, 17 aa, Homo sapiens
  Heavy chain CDR3 for antibody 4336 (IGHV3-23)
AKDRDWKDGYYYFGMDV

SEQ ID NO: 8673 - protein, 9 aa, Homo sapiens
  Light chain CDR3 for antibody 4337 (IGKV1D-13)
QQFNNYPHT

SEQ ID NO: 8674 - protein, 20 aa, Homo sapiens
  Heavy chain CDR3 for antibody 4337 (IGHV1-18)
AREVGIAVAGTLYYYYGMDV

SEQ ID NO: 8675 - protein, 8 aa, Homo sapiens
  Light chain CDR3 for antibody 4338 (IGKV3D-7)
QQDYNLLT

SEQ ID NO: 8676 - protein, 18 aa, Homo sapiens
  Heavy chain CDR3 for antibody 4338 (IGHV3-33)
ARGLLWFGVSYYYYGMDV

SEQ ID NO: 8677 - protein, 9 aa, Homo sapiens
  Light chain CDR3 for antibody 4339 (IGKV6-21)
HQSSSLPYT

SEQ ID NO: 8678 - protein, 16 aa, Homo sapiens
  Heavy chain CDR3 for antibody 4339 (IGHV3-33)
AREGGLIAAAGTGFDY

SEQ ID NO: 8679 - protein, 9 aa, Homo sapiens
  Light chain CDR3 for antibody 4340 (IGKV1D-16)
QQYNSYPYT

SEQ ID NO: 8680 - protein, 14 aa, Homo sapiens
  Heavy chain CDR3 for antibody 4340 (IGHV3-20)
ARDGGSSSFDWFDP

SEQ ID NO: 8681 - protein, 9 aa, Homo sapiens
  Light chain CDR3 for antibody 4341 (IGKV3D-20)
QQYGSSPYT

SEQ ID NO: 8682 - protein, 13 aa, Homo sapiens
  Heavy chain CDR3 for antibody 4341 (IGHV3-21)
ATGAWASSWWGDY

SEQ ID NO: 8683 - protein, 9 aa, Homo sapiens
  Light chain CDR3 for antibody 4342 (IGKV1-6)
LQDYNYPYT

SEQ ID NO: 8684 - protein, 15 aa, Homo sapiens
  Heavy chain CDR3 for antibody 4342 (IGHV1-18)
ARLRWFGELSGWFDP

SEQ ID NO: 8685 - protein, 8 aa, Homo sapiens
  Light chain CDR3 for antibody 4343 (IGKV3D-7)
QQDYNLLT

SEQ ID NO: 8686 - protein, 14 aa, Homo sapiens
  Heavy chain CDR3 for antibody 4343 (IGHV3-33)
ARDNILTAYYLFDY

SEQ ID NO: 8687 - protein, 10 aa, Homo sapiens
  Light chain CDR3 for antibody 4344 (IGKV1-39)
QQSYSTPMYT

SEQ ID NO: 8688 - protein, 14 aa, Homo sapiens
  Heavy chain CDR3 for antibody 4344 (IGHV3-33)
ARDNILTAYYLFDY

SEQ ID NO: 8689 - protein, 9 aa, Homo sapiens
  Light chain CDR3 for antibody 4345 (IGKV2-30)
MQGTHWPLT

SEQ ID NO: 8690 - protein, 20 aa, Homo sapiens
  Heavy chain CDR3 for antibody 4345 (IGHV1-f)
ATGLITFVRGVILTYRSFDY

SEQ ID NO: 8691 - protein, 9 aa, Homo sapiens
  Light chain CDR3 for antibody 4346 (IGKV1-27)
QKYNSAPYT

SEQ ID NO: 8692 - protein, 13 aa, Homo sapiens
  Heavy chain CDR3 for antibody 4346 (IGHV3-30)
AAPFMVRGDGMDV

SEQ ID NO: 8693 - protein, 9 aa, Homo sapiens
  Light chain CDR3 for antibody 4347 (IGKV1D-16)
QQYNSFPLT

SEQ ID NO: 8694 - protein, 18 aa, Homo sapiens
  Heavy chain CDR3 for antibody 4347 (IGHV4-59)
AREGDYVWGSYRPNWFDP

SEQ ID NO: 8695 - protein, 9 aa, Homo sapiens
  Light chain CDR3 for antibody 4348 (IGKV1-9)
QQYNSFPLT

SEQ ID NO: 8696 - protein, 15 aa, Homo sapiens
  Heavy chain CDR3 for antibody 4348 (IGHV3-30)
ARRGYGSGSPDAFDL

SEQ ID NO: 8697 - protein, 9 aa, Homo sapiens
  Light chain CDR3 for antibody 4349 (IGKV1D-16)
QQYDSYPWT

SEQ ID NO: 8698 - protein, 18 aa, Homo sapiens
  Heavy chain CDR3 for antibody 4349 (IGHV4-59)
AREGHYYTSGSYYKAFDY

SEQ ID NO: 8699 - protein, 9 aa, Homo sapiens
  Light chain CDR3 for antibody 4350 (IGKV6-21)
HQSSSLPLT

SEQ ID NO: 8700 - protein, 15 aa, Homo sapiens
  Heavy chain CDR3 for antibody 4350 (IGHV3-11)
AREYSSGWYGDAFDI

SEQ ID NO: 8701 - protein, 9 aa, Homo sapiens
  Light chain CDR3 for antibody 4351 (IGKV1-16)
QQYNSYPLT

SEQ ID NO: 8702 - protein, 16 aa, Homo sapiens
  Heavy chain CDR3 for antibody 4351 (IGHV4-59)
AREGYNWNDGVNWFDP

SEQ ID NO: 8703 - protein, 9 aa, Homo sapiens
  Light chain CDR3 for antibody 4352 (IGKV3-15)
QQYNNWPYT

SEQ ID NO: 8704 - protein, 20 aa, Homo sapiens
  Heavy chain CDR3 for antibody 4352 (IGHV3-20)
ARDLCSSTSCYGYYYYGMDV

SEQ ID NO: 8705 - protein, 10 aa, Homo sapiens
  Light chain CDR3 for antibody 4353 (IGKV3-11)
QQRSNWPIFT

SEQ ID NO: 8706 - protein, 11 aa, Homo sapiens
  Heavy chain CDR3 for antibody 4353 (IGHV3-33)
ARGSGSYAFDS

SEQ ID NO: 8707 - protein, 9 aa, Homo sapiens
  Light chain CDR3 for antibody 4354 (IGKV3-15)
QQYNNWPRT

SEQ ID NO: 8708 - protein, 17 aa, Homo sapiens
  Heavy chain CDR3 for antibody 4354 (IGHV3-33)
ARGYCSRTSCYLYYFDY

SEQ ID NO: 8709 - protein, 9 aa, Homo sapiens
  Light chain CDR3 for antibody 4355 (IGKV1-27)
QKYNSAPYT

SEQ ID NO: 8710 - protein, 18 aa, Homo sapiens
  Heavy chain CDR3 for antibody 4355 (IGHV3-33)
ARDRGDILTGYYKGWFDP

SEQ ID NO: 8711 - protein, 9 aa, Homo sapiens
  Light chain CDR3 for antibody 4356 (IGKV1-6)
LQDYNYPYT

SEQ ID NO: 8712 - protein, 18 aa, Homo sapiens
  Heavy chain CDR3 for antibody 4356 (IGHV3-23)
AKEGDYYSSGSYWGYFDL

SEQ ID NO: 8713 - protein, 9 aa, Homo sapiens
  Light chain CDR3 for antibody 4357 (IGKV1-27)
QKYNSAPYT

SEQ ID NO: 8714 - protein, 15 aa, Homo sapiens
  Heavy chain CDR3 for antibody 4357 (IGHV3-20)
ARDRGSSGWRDWFDP

SEQ ID NO: 8715 - protein, 9 aa, Homo sapiens
  Light chain CDR3 for antibody 4358 (IGKV1-39)
QQSYSTPLT

SEQ ID NO: 8716 - protein, 11 aa, Homo sapiens
  Heavy chain CDR3 for antibody 4358 (IGHV4-59)
ARDGVRGVFDI

SEQ ID NO: 8717 - protein, 9 aa, Homo sapiens
  Light chain CDR3 for antibody 4359 (IGKV5-2)
LQHDNFPWT

SEQ ID NO: 8718 - protein, 10 aa, Homo sapiens
  Heavy chain CDR3 for antibody 4359 (IGHV3-30)
ARDNFEGMDV

SEQ ID NO: 8719 - protein, 9 aa, Homo sapiens
  Light chain CDR3 for antibody 4360 (IGKV3-15)
QQYNNWPYT

SEQ ID NO: 8720 - protein, 11 aa, Homo sapiens
  Heavy chain CDR3 for antibody 4360 (IGHV3-74)
ARDRGNWGFDY

SEQ ID NO: 8721 - protein, 9 aa, Homo sapiens
  Light chain CDR3 for antibody 4361 (IGKV1-27)
QKYNSAPYT

SEQ ID NO: 8722 - protein, 18 aa, Homo sapiens
  Heavy chain CDR3 for antibody 4361 (IGHV3-33)
VRERGHYGSGSFPDAFDI

SEQ ID NO: 8723 - protein, 9 aa, Homo sapiens
  Light chain CDR3 for antibody 4362 (IGKV1-27)
QKYNSAPYT

SEQ ID NO: 8724 - protein, 12 aa, Homo sapiens
  Heavy chain CDR3 for antibody 4362 (IGHV3-23)
AKEGLGSDYESY

SEQ ID NO: 8725 - protein, 9 aa, Homo sapiens
  Light chain CDR3 for antibody 4363 (IGKV3-15)
QQYNNWPLT

SEQ ID NO: 8726 - protein, 12 aa, Homo sapiens
  Heavy chain CDR3 for antibody 4363 (IGHV4-59)
ARDSGSYYYFDY

SEQ ID NO: 8727 - protein, 9 aa, Homo sapiens
  Light chain CDR3 for antibody 4364 (IGKV1D-13)
QQFNNYPST

SEQ ID NO: 8728 - protein, 13 aa, Homo sapiens
  Heavy chain CDR3 for antibody 4364 (IGHV3-33)
VSTGDSYYYVMDV

SEQ ID NO: 8729 - protein, 9 aa, Homo sapiens
  Light chain CDR3 for antibody 4365 (IGKV1D-13)
QQFNNYPHT

SEQ ID NO: 8730 - protein, 13 aa, Homo sapiens
  Heavy chain CDR3 for antibody 4365 (IGHV3-23)
AKDRGLRYYGMDV

SEQ ID NO: 8731 - protein, 9 aa, Homo sapiens
  Light chain CDR3 for antibody 4366 (IGKV6-21)
HQSSSLPYT

SEQ ID NO: 8732 - protein, 11 aa, Homo sapiens
  Heavy chain CDR3 for antibody 4366 (IGHV4-59)
ARETGDDAFDI

SEQ ID NO: 8733 - protein, 9 aa, Homo sapiens
  Light chain CDR3 for antibody 4367 (IGKV1-6)
LQDYNYPYT

SEQ ID NO: 8734 - protein, 13 aa, Homo sapiens
  Heavy chain CDR3 for antibody 4367 (IGHV3-33)
ARDRDSSGSYFDY

SEQ ID NO: 8735 - protein, 9 aa, Homo sapiens
  Light chain CDR3 for antibody 4368 (IGKV3D-7)
QQDYNLPLT

SEQ ID NO: 8736 - protein, 14 aa, Homo sapiens
  Heavy chain CDR3 for antibody 4368 (IGHV3-33)
ARDGYDFLTGPFDY

SEQ ID NO: 8737 - protein, 9 aa, Homo sapiens
  Light chain CDR3 for antibody 4369 (IGKV1-9)
QQLISYPLT

SEQ ID NO: 8738 - protein, 13 aa, Homo sapiens
  Heavy chain CDR3 for antibody 4369 (IGHV3-33)
AKEDGDYHHYFDY

SEQ ID NO: 8739 - protein, 9 aa, Homo sapiens
  Light chain CDR3 for antibody 4370 (IGKV5-2)
LQHDNFPWT

SEQ ID NO: 8740 - protein, 15 aa, Homo sapiens
  Heavy chain CDR3 for antibody 4370 (IGHV3-23)
AKDRYFDWLSDAFDI

SEQ ID NO: 8741 - protein, 9 aa, Homo sapiens
  Light chain CDR3 for antibody 4371 (IGKV2-30)
MQGTHWPLT

SEQ ID NO: 8742 - protein, 14 aa, Homo sapiens
  Heavy chain CDR3 for antibody 4371 (IGHV1-18)
ARCFGSGSYGWFDP

SEQ ID NO: 8743 - protein, 9 aa, Homo sapiens
  Light chain CDR3 for antibody 4372 (IGKV5-2)
LQHDNFPWT

SEQ ID NO: 8744 - protein, 14 aa, Homo sapiens
  Heavy chain CDR3 for antibody 4372 (IGHV1-24)
ATWLPLYYYYGMDV

SEQ ID NO: 8745 - protein, 9 aa, Homo sapiens
  Light chain CDR3 for antibody 4373 (IGKV5-2)
LQHDNFPYT

SEQ ID NO: 8746 - protein, 14 aa, Homo sapiens
  Heavy chain CDR3 for antibody 4373 (IGHV1-46)
ARKGIVGAFDAFDI

SEQ ID NO: 8747 - protein, 9 aa, Homo sapiens
  Light chain CDR3 for antibody 4374 (IGKV1-39)
QQSYSTPFT

SEQ ID NO: 8748 - protein, 17 aa, Homo sapiens
  Heavy chain CDR3 for antibody 4374 (IGHV4-39)
AGRLTYYYGSGSPSFDY

SEQ ID NO: 8749 - protein, 9 aa, Homo sapiens
  Light chain CDR3 for antibody 4375 (IGKV6-21)
HQSSSLPYT

SEQ ID NO: 8750 - protein, 10 aa, Homo sapiens
  Heavy chain CDR3 for antibody 4375 (IGHV3-23)
AKDQVGATDC

SEQ ID NO: 8751 - protein, 9 aa, Homo sapiens
  Light chain CDR3 for antibody 4376 (IGKV1-6)
LQDYKSPFT

SEQ ID NO: 8752 - protein, 18 aa, Homo sapiens
  Heavy chain CDR3 for antibody 4376 (IGHV1-46)
ARDGDYVWGSYRSDWFDP

SEQ ID NO: 8753 - protein, 9 aa, Homo sapiens
  Light chain CDR3 for antibody 4377 (IGKV2D-28)
MQALQTPFT

SEQ ID NO: 8754 - protein, 17 aa, Homo sapiens
  Heavy chain CDR3 for antibody 4377 (IGHV4-59)
ARDFLVRGEGSYYGMDV

SEQ ID NO: 8755 - protein, 9 aa, Homo sapiens
  Light chain CDR3 for antibody 4378 (IGKV3-20)
QQYGSSPYT

SEQ ID NO: 8756 - protein, 15 aa, Homo sapiens
  Heavy chain CDR3 for antibody 4378 (IGHV3-23)
AKDRYFDWLSDAFDI

SEQ ID NO: 8757 - protein, 9 aa, Homo sapiens
  Light chain CDR3 for antibody 4379 (IGKV2-30)
MQGTHWPLT

SEQ ID NO: 8758 - protein, 14 aa, Homo sapiens
  Heavy chain CDR3 for antibody 4379 (IGHV3-33)
VRDAMGATTAWFDP

SEQ ID NO: 8759 - protein, 9 aa, Homo sapiens
  Light chain CDR3 for antibody 4380 (IGKV3D-7)
QQDYNLPWT

SEQ ID NO: 8760 - protein, 8 aa, Homo sapiens
  Heavy chain CDR3 for antibody 4380 (IGHV3-23)
AETFLFDY

SEQ ID NO: 8761 - protein, 9 aa, Homo sapiens
  Light chain CDR3 for antibody 4381 (IGKV1D-13)
QQFNNYPYT

SEQ ID NO: 8762 - protein, 7 aa, Homo sapiens
  Heavy chain CDR3 for antibody 4381 (IGHV3-33)
ARDRGPY

SEQ ID NO: 8763 - protein, 10 aa, Homo sapiens
  Light chain CDR3 for antibody 4382 (IGKV3-20)
QQYGRSPPVT

SEQ ID NO: 8764 - protein, 12 aa, Homo sapiens
  Heavy chain CDR3 for antibody 4382 (IGHV1-18)
ARILFYGDYFDY

SEQ ID NO: 8765 - protein, 9 aa, Homo sapiens
  Light chain CDR3 for antibody 4383 (IGKV1-39)
QQSYSTPLT

SEQ ID NO: 8766 - protein, 13 aa, Homo sapiens
  Heavy chain CDR3 for antibody 4383 (IGHV3-66)
ANTGDSYYYGFYV

SEQ ID NO: 8767 - protein, 8 aa, Homo sapiens
  Light chain CDR3 for antibody 4384 (IGKV1D-13)
QQFNNYPT

SEQ ID NO: 8768 - protein, 11 aa, Homo sapiens
  Heavy chain CDR3 for antibody 4384 (IGHV3-33)
ARDKSSGWSDY

SEQ ID NO: 8769 - protein, 9 aa, Homo sapiens
  Light chain CDR3 for antibody 4385 (IGKV3-20)
QQYGSSPLT

SEQ ID NO: 8770 - protein, 14 aa, Homo sapiens
  Heavy chain CDR3 for antibody 4385 (IGHV1-46)
ARKGIVGGFDAFDV

SEQ ID NO: 8771 - protein, 9 aa, Homo sapiens
  Light chain CDR3 for antibody 4386 (IGKV5-2)
LQHDNFPYT

SEQ ID NO: 8772 - protein, 9 aa, Homo sapiens
  Heavy chain CDR3 for antibody 4386 (IGHV1-8)
ARGPRIMDV

SEQ ID NO: 8773 - protein, 9 aa, Homo sapiens
  Light chain CDR3 for antibody 4387 (IGKV1-17)
LQHNSYPYT

SEQ ID NO: 8774 - protein, 18 aa, Homo sapiens
  Heavy chain CDR3 for antibody 4387 (IGHV3-53)
AKAGDYYVSGSYWGYFDL

SEQ ID NO: 8775 - protein, 9 aa, Homo sapiens
  Light chain CDR3 for antibody 4388 (IGKV1-39)
QQSYSTPLT

SEQ ID NO: 8776 - protein, 16 aa, Homo sapiens
  Heavy chain CDR3 for antibody 4388 (IGHV3-30)
ARDIAVAGHVYYGMDV

SEQ ID NO: 8777 - protein, 9 aa, Homo sapiens
  Light chain CDR3 for antibody 4389 (IGKV4-1)
QQYYSTPYT

SEQ ID NO: 8778 - protein, 9 aa, Homo sapiens
  Heavy chain CDR3 for antibody 4389 (IGHV3-30)
ARDNWGFDY

SEQ ID NO: 8779 - protein, 9 aa, Homo sapiens
  Light chain CDR3 for antibody 4390 (IGKV1-17)
LQHNSYPYT

SEQ ID NO: 8780 - protein, 23 aa, Homo sapiens
  Heavy chain CDR3 for antibody 4390 (IGHV3-11)
ARGGDYDILTGFYNSYYYYGMDV

SEQ ID NO: 8781 - protein, 9 aa, Homo sapiens
  Light chain CDR3 for antibody 4391 (IGKV3-15)
QQYNNWPRT

SEQ ID NO: 8782 - protein, 13 aa, Homo sapiens
  Heavy chain CDR3 for antibody 4391 (IGHV3-33)
ARKAYGDYFYFDY

SEQ ID NO: 8783 - protein, 9 aa, Homo sapiens
  Light chain CDR3 for antibody 4392 (IGKV1-16)
QQYIRYPYT

SEQ ID NO: 8784 - protein, 11 aa, Homo sapiens
  Heavy chain CDR3 for antibody 4392 (IGHV3-33)
ARDRSSGPFDY

SEQ ID NO: 8785 - protein, 8 aa, Homo sapiens
  Light chain CDR3 for antibody 4393 (IGKV3-20)
QQYGSSLT

SEQ ID NO: 8786 - protein, 13 aa, Homo sapiens
  Heavy chain CDR3 for antibody 4393 (IGHV3-33)
ARQSSGWFDAFDI

SEQ ID NO: 8787 - protein, 9 aa, Homo sapiens
  Light chain CDR3 for antibody 4394 (IGKV1-39)
QQSYRTPLT

SEQ ID NO: 8788 - protein, 10 aa, Homo sapiens
  Heavy chain CDR3 for antibody 4394 (IGHV3-23)
AKDHWGDFDY

SEQ ID NO: 8789 - protein, 9 aa, Homo sapiens
  Light chain CDR3 for antibody 4395 (IGKV1-9)
QQLHIYPWT

SEQ ID NO: 8790 - protein, 15 aa, Homo sapiens
  Heavy chain CDR3 for antibody 4395 (IGHV3-33)
ARDTGYSSSWNWFDP

SEQ ID NO: 8791 - protein, 9 aa, Homo sapiens
  Light chain CDR3 for antibody 4396 (IGKV1-6)
LQDYNYPYT

SEQ ID NO: 8792 - protein, 19 aa, Homo sapiens
  Heavy chain CDR3 for antibody 4396 (IGHV3-74)
AREYFDILTGYYKTGFFQH

SEQ ID NO: 8793 - protein, 9 aa, Homo sapiens
  Light chain CDR3 for antibody 4397 (IGKV3-15)
QQYNNWPLT

SEQ ID NO: 8794 - protein, 11 aa, Homo sapiens
  Heavy chain CDR3 for antibody 4397 (IGHV3-33)
ARDTWDDYFDY

SEQ ID NO: 8795 - protein, 9 aa, Homo sapiens
  Light chain CDR3 for antibody 4398 (IGKV1-39)
QQSYRTPLT

SEQ ID NO: 8796 - protein, 13 aa, Homo sapiens
  Heavy chain CDR3 for antibody 4398 (IGHV4-59)
ARDAGYSSSWFDY

SEQ ID NO: 8797 - protein, 9 aa, Homo sapiens
  Light chain CDR3 for antibody 4399 (IGKV1D-13)
QQFNNYPYT

SEQ ID NO: 8798 - protein, 12 aa, Homo sapiens
  Heavy chain CDR3 for antibody 4399 (IGHV3-33)
ARGYFTSGSAHY

SEQ ID NO: 8799 - protein, 9 aa, Homo sapiens
  Light chain CDR3 for antibody 4400 (IGKV1-6)
LQDFHYPWT

SEQ ID NO: 8800 - protein, 14 aa, Homo sapiens
  Heavy chain CDR3 for antibody 4400 (IGHV3-48)
ARGAAAGNFYGLDV

SEQ ID NO: 8801 - protein, 9 aa, Homo sapiens
  Light chain CDR3 for antibody 4401 (IGKV3-11)
QQRSNWPPT

SEQ ID NO: 8802 - protein, 9 aa, Homo sapiens
  Heavy chain CDR3 for antibody 4401 (IGHV3-23)
AKEQLLFDY

SEQ ID NO: 8803 - protein, 9 aa, Homo sapiens
  Light chain CDR3 for antibody 4402 (IGKV1-17)
LQHNSYPLT

SEQ ID NO: 8804 - protein, 13 aa, Homo sapiens
  Heavy chain CDR3 for antibody 4402 (IGHV3-33)
ARALYSSSWPGDY

SEQ ID NO: 8805 - protein, 9 aa, Homo sapiens
  Light chain CDR3 for antibody 4403 (IGKV3-11)
QQRSNWPWT

SEQ ID NO: 8806 - protein, 17 aa, Homo sapiens
  Heavy chain CDR3 for antibody 4403 (IGHV4-39)
ARVLRYFDWLSHDAFDI

SEQ ID NO: 8807 - protein, 9 aa, Homo sapiens
  Light chain CDR3 for antibody 4404 (IGKV2-30)
MQGTHWPLT

SEQ ID NO: 8808 - protein, 10 aa, Homo sapiens
  Heavy chain CDR3 for antibody 4404 (IGHV3-23)
AKEQWLVLDY

SEQ ID NO: 8809 - protein, 9 aa, Homo sapiens
  Light chain CDR3 for antibody 4405 (IGKV1-16)
QQYNSYPLT

SEQ ID NO: 8810 - protein, 12 aa, Homo sapiens
  Heavy chain CDR3 for antibody 4405 (IGHV3-33)
AREDYYYYGMDV

SEQ ID NO: 8811 - protein, 8 aa, Homo sapiens
  Light chain CDR3 for antibody 4406 (IGKV1-5)
QQYNSYWT

SEQ ID NO: 8812 - protein, 16 aa, Homo sapiens
  Heavy chain CDR3 for antibody 4406 (IGHV4-59)
ARGRYFEWLLGDVFDI

SEQ ID NO: 8813 - protein, 9 aa, Homo sapiens
  Light chain CDR3 for antibody 4407 (IGKV1-6)
LQDYKSPFT

SEQ ID NO: 8814 - protein, 13 aa, Homo sapiens
  Heavy chain CDR3 for antibody 4407 (IGHV3-33)
ARDWGYSHGYFDY

SEQ ID NO: 8815 - protein, 9 aa, Homo sapiens
  Light chain CDR3 for antibody 4408 (IGKV2-30)
MQGTHWPLT

SEQ ID NO: 8816 - protein, 13 aa, Homo sapiens
  Heavy chain CDR3 for antibody 4408 (IGHV3-23)
AKDRGYSSTSTAY

SEQ ID NO: 8817 - protein, 9 aa, Homo sapiens
  Light chain CDR3 for antibody 4409 (IGKV1-27)
QKYNSAPYT

SEQ ID NO: 8818 - protein, 18 aa, Homo sapiens
  Heavy chain CDR3 for antibody 4409 (IGHV3-13)
ARDYYGSGSLYYYYGMDV

SEQ ID NO: 8819 - protein, 9 aa, Homo sapiens
  Light chain CDR3 for antibody 4410 (IGKV3D-20)
QQYGSSPLT

SEQ ID NO: 8820 - protein, 15 aa, Homo sapiens
  Heavy chain CDR3 for antibody 4410 (IGHV3-33)
AKDRNSGYDWGGFDY

SEQ ID NO: 8821 - protein, 9 aa, Homo sapiens
  Light chain CDR3 for antibody 4411 (IGKV1-9)
QQLHSYPYT

SEQ ID NO: 8822 - protein, 17 aa, Homo sapiens
  Heavy chain CDR3 for antibody 4411 (IGHV3-33)
VRCGYSSSWYDPYYFDY

SEQ ID NO: 8823 - protein, 9 aa, Homo sapiens
  Light chain CDR3 for antibody 4412 (IGKV1-9)
QQLNTYPYT

SEQ ID NO: 8824 - protein, 13 aa, Homo sapiens
  Heavy chain CDR3 for antibody 4412 (IGHV3-33)
ARDWGYSHGYFDY

SEQ ID NO: 8825 - protein, 9 aa, Homo sapiens
  Light chain CDR3 for antibody 4413 (IGKV6-21)
HQSSSLPLT

SEQ ID NO: 8826 - protein, 14 aa, Homo sapiens
  Heavy chain CDR3 for antibody 4413 (IGHV1-46)
ARKGIVGAFDAFDI

SEQ ID NO: 8827 - protein, 9 aa, Homo sapiens
  Light chain CDR3 for antibody 4414 (IGKV1-6)
LQDYNYPRT

SEQ ID NO: 8828 - protein, 11 aa, Homo sapiens
  Heavy chain CDR3 for antibody 4414 (IGHV3-11)
ARASRGSYYDY

SEQ ID NO: 8829 - protein, 9 aa, Homo sapiens
  Light chain CDR3 for antibody 4415 (IGKV1-17)
LQHNSYPRT

SEQ ID NO: 8830 - protein, 16 aa, Homo sapiens
  Heavy chain CDR3 for antibody 4415 (IGHV3-33)
ARDRGGMTMVRGGFDY

SEQ ID NO: 8831 - protein, 10 aa, Homo sapiens
  Light chain CDR3 for antibody 4416 (IGKV1-39)
QQSYSTPMYT

SEQ ID NO: 8832 - protein, 10 aa, Homo sapiens
  Heavy chain CDR3 for antibody 4416 (IGHV3-33)
ARENSTPLDY

SEQ ID NO: 8833 - protein, 8 aa, Homo sapiens
  Light chain CDR3 for antibody 4417 (IGKV3D-7)
QQDYNLLT

SEQ ID NO: 8834 - protein, 15 aa, Homo sapiens
  Heavy chain CDR3 for antibody 4417 (IGHV4-59)
ARDLGHYYGSVSIDY

SEQ ID NO: 8835 - protein, 9 aa, Homo sapiens
  Light chain CDR3 for antibody 4418 (IGKV6-21)
HQSSSLPYT

SEQ ID NO: 8836 - protein, 18 aa, Homo sapiens
  Heavy chain CDR3 for antibody 4418 (IGHV3-33)
AREGYDILTGYYNVKFDY

SEQ ID NO: 8837 - protein, 9 aa, Homo sapiens
  Light chain CDR3 for antibody 4419 (IGKV5-2)
LQHDNFPWT

SEQ ID NO: 8838 - protein, 16 aa, Homo sapiens
  Heavy chain CDR3 for antibody 4419 (IGHV4-39)
ARRVPYYDILTGYLDY

SEQ ID NO: 8839 - protein, 10 aa, Homo sapiens
  Light chain CDR3 for antibody 4420 (IGKV1-39)
QQSYSTPMYT

SEQ ID NO: 8840 - protein, 17 aa, Homo sapiens
  Heavy chain CDR3 for antibody 4420 (IGHV1-18)
ARDEGYDILTGYPHFDY

SEQ ID NO: 8841 - protein, 9 aa, Homo sapiens
  Light chain CDR3 for antibody 4421 (IGKV1D-16)
QQYHSYPYT

SEQ ID NO: 8842 - protein, 13 aa, Homo sapiens
  Heavy chain CDR3 for antibody 4421 (IGHV1-46)
ANRDYYGYYGMDV

SEQ ID NO: 8843 - protein, 9 aa, Homo sapiens
  Light chain CDR3 for antibody 4422 (IGKV1-27)
QKYNSAPYT

SEQ ID NO: 8844 - protein, 13 aa, Homo sapiens
  Heavy chain CDR3 for antibody 4422 (IGHV3-11)
ARDEGYRGYVLDN

SEQ ID NO: 8845 - protein, 9 aa, Homo sapiens
  Light chain CDR3 for antibody 4423 (IGKV3-20)
QQYGSSPYT

SEQ ID NO: 8846 - protein, 16 aa, Homo sapiens
  Heavy chain CDR3 for antibody 4423 (IGHV3-33)
AREGGLIAAAGTGFDY

SEQ ID NO: 8847 - protein, 9 aa, Homo sapiens
  Light chain CDR3 for antibody 4424 (IGKV1D-13)
QQFNNYPYT

SEQ ID NO: 8848 - protein, 15 aa, Homo sapiens
  Heavy chain CDR3 for antibody 4424 (IGHV3-74)
SRGSGSHYFYYGMDV

SEQ ID NO: 8849 - protein, 9 aa, Homo sapiens
  Light chain CDR3 for antibody 4425 (IGKV1-17)
QQYNSYPYT

SEQ ID NO: 8850 - protein, 16 aa, Homo sapiens
  Heavy chain CDR3 for antibody 4425 (IGHV3-33)
ARGFSGYDGYYYGMDV

SEQ ID NO: 8851 - protein, 9 aa, Homo sapiens
  Light chain CDR3 for antibody 4426 (IGKV6-21)
HQSSSLPYT

SEQ ID NO: 8852 - protein, 13 aa, Homo sapiens
  Heavy chain CDR3 for antibody 4426 (IGHV1-18)
ARSYYGSGSPFDY

SEQ ID NO: 8853 - protein, 10 aa, Homo sapiens
  Light chain CDR3 for antibody 4427 (IGKV3-11)
QQRSNWPIFT

SEQ ID NO: 8854 - protein, 16 aa, Homo sapiens
  Heavy chain CDR3 for antibody 4427 (IGHV3-33)
ARGYDMLTGDYYGMDV

SEQ ID NO: 8855 - protein, 8 aa, Homo sapiens
  Light chain CDR3 for antibody 4428 (IGKV1D-13)
QQFNNYYT

SEQ ID NO: 8856 - protein, 20 aa, Homo sapiens
  Heavy chain CDR3 for antibody 4428 (IGHV1-18)
AREVGIAVAGTLYYYYGMDV

SEQ ID NO: 8857 - protein, 8 aa, Homo sapiens
  Light chain CDR3 for antibody 4429 (IGKV3D-7)
QQDYNLLT

SEQ ID NO: 8858 - protein, 16 aa, Homo sapiens
  Heavy chain CDR3 for antibody 4429 (IGHV3-33)
ARAVYYGSGSSLIMDV

SEQ ID NO: 8859 - protein, 8 aa, Homo sapiens
  Light chain CDR3 for antibody 4430 (IGKV1-5)
QQYNSYYT

SEQ ID NO: 8860 - protein, 14 aa, Homo sapiens
  Heavy chain CDR3 for antibody 4430 (IGHV3-33)
ARDGYDFLTGPFDY

SEQ ID NO: 8861 - protein, 9 aa, Homo sapiens
  Light chain CDR3 for antibody 4431 (IGKV1-6)
LQDFHYPWT

SEQ ID NO: 8862 - protein, 18 aa, Homo sapiens
  Heavy chain CDR3 for antibody 4431 (IGHV4-59)
AREGDYVWGSYRPNWFDP

SEQ ID NO: 8863 - protein, 9 aa, Homo sapiens
  Light chain CDR3 for antibody 4432 (IGKV2D-24)
TQATQFPHT

SEQ ID NO: 8864 - protein, 12 aa, Homo sapiens
  Heavy chain CDR3 for antibody 4432 (IGHV1-18)
ARILFYGDYFDY

SEQ ID NO: 8865 - protein, 9 aa, Homo sapiens
  Light chain CDR3 for antibody 4433 (IGKV1D-16)
QQYNSFPLT

SEQ ID NO: 8866 - protein, 12 aa, Homo sapiens
  Heavy chain CDR3 for antibody 4433 (IGHV3-33)
ARVDTAAPYFDY

SEQ ID NO: 8867 - protein, 9 aa, Homo sapiens
  Light chain CDR3 for antibody 4434 (IGKV2-30)
MQGTHWPLT

SEQ ID NO: 8868 - protein, 11 aa, Homo sapiens
  Heavy chain CDR3 for antibody 4434 (IGHV3-33)
ARDRATATVDY

SEQ ID NO: 8869 - protein, 9 aa, Homo sapiens
  Light chain CDR3 for antibody 4435 (IGKV1-17)
LQHNSYPYT

SEQ ID NO: 8870 - protein, 15 aa, Homo sapiens
  Heavy chain CDR3 for antibody 4435 (IGHV3-33)
SRDHLTGYNYYGMDV

SEQ ID NO: 8871 - protein, 9 aa, Homo sapiens
  Light chain CDR3 for antibody 4436 (IGKV1-17)
LQHNSYPYT

SEQ ID NO: 8872 - protein, 18 aa, Homo sapiens
  Heavy chain CDR3 for antibody 4436 (IGHV3-33)
VRERGHYGSGSFPDAFDI

SEQ ID NO: 8873 - protein, 9 aa, Homo sapiens
  Light chain CDR3 for antibody 4437 (IGKV1D-16)
QQYNSYPLT

SEQ ID NO: 8874 - protein, 16 aa, Homo sapiens
  Heavy chain CDR3 for antibody 4437 (IGHV3-23)
ARDLGIAAAGTGWFDP

SEQ ID NO: 8875 - protein, 9 aa, Homo sapiens
  Light chain CDR3 for antibody 4438 (IGKV3-15)
QQYNNWPLT

SEQ ID NO: 8876 - protein, 17 aa, Homo sapiens
  Heavy chain CDR3 for antibody 4438 (IGHV4-39)
AGRLTYYFGSGSPSFDY

SEQ ID NO: 8877 - protein, 9 aa, Homo sapiens
  Light chain CDR3 for antibody 4439 (IGKV1-17)
LQHNGYPLT

SEQ ID NO: 8878 - protein, 14 aa, Homo sapiens
  Heavy chain CDR3 for antibody 4439 (IGHV3-33)
ARATSGSSYWYFDL

SEQ ID NO: 8879 - protein, 9 aa, Homo sapiens
  Light chain CDR3 for antibody 4440 (IGKV3D-7)
QQDYEFPIT

SEQ ID NO: 8880 - protein, 15 aa, Homo sapiens
  Heavy chain CDR3 for antibody 4440 (IGHV4-59)
ARDLGHYYGSVSIDY

SEQ ID NO: 8881 - protein, 9 aa, Homo sapiens
  Light chain CDR3 for antibody 4441 (IGKV3D-7)
QQDYNLPYT

SEQ ID NO: 8882 - protein, 16 aa, Homo sapiens
  Heavy chain CDR3 for antibody 4441 (IGHV3-33)
ARDNFGSGSYYSHFHY

SEQ ID NO: 8883 - protein, 9 aa, Homo sapiens
  Light chain CDR3 for antibody 4442 (IGKV1D-13)
QQFNNYPYT

SEQ ID NO: 8884 - protein, 14 aa, Homo sapiens
  Heavy chain CDR3 for antibody 4442 (IGHV3-33)
ARDRGRHNYFGMDV

SEQ ID NO: 8885 - protein, 9 aa, Homo sapiens
  Light chain CDR3 for antibody 4443 (IGKV1-17)
LQHNSYPYT

SEQ ID NO: 8886 - protein, 13 aa, Homo sapiens
  Heavy chain CDR3 for antibody 4443 (IGHV3-33)
ARCIVAAMGGFDY

SEQ ID NO: 8887 - protein, 9 aa, Homo sapiens
  Light chain CDR3 for antibody 4444 (IGKV1D-13)
QQFNNYPHT

SEQ ID NO: 8888 - protein, 18 aa, Homo sapiens
  Heavy chain CDR3 for antibody 4444 (IGHV3-33)
ARDYDSLTTYPEDYGMDV

SEQ ID NO: 8889 - protein, 9 aa, Homo sapiens
  Light chain CDR3 for antibody 4445 (IGKV1-39)
QQSYSTPLT

SEQ ID NO: 8890 - protein, 11 aa, Homo sapiens
  Heavy chain CDR3 for antibody 4445 (IGHV4-59)
TRDRGLGSFDY

SEQ ID NO: 8891 - protein, 9 aa, Homo sapiens
  Light chain CDR3 for antibody 4446 (IGKV3D-20)
QQYGSYPYT

SEQ ID NO: 8892 - protein, 16 aa, Homo sapiens
  Heavy chain CDR3 for antibody 4446 (IGHV3-30)
ARDSSYYGSGYYGMDV

SEQ ID NO: 8893 - protein, 8 aa, Homo sapiens
  Light chain CDR3 for antibody 4447 (IGKV3-11)
QQRSNWLT

SEQ ID NO: 8894 - protein, 13 aa, Homo sapiens
  Heavy chain CDR3 for antibody 4447 (IGHV4-34)
ASNFYYYYYGMDV

SEQ ID NO: 8895 - protein, 9 aa, Homo sapiens
  Light chain CDR3 for antibody 4448 (IGKV3-11)
QQRSNWPPT

SEQ ID NO: 8896 - protein, 20 aa, Homo sapiens
  Heavy chain CDR3 for antibody 4448 (IGHV3-33)
ARDPAQLERRYYYFYYGMDV

SEQ ID NO: 8897 - protein, 9 aa, Homo sapiens
  Light chain CDR3 for antibody 4449 (IGKV1-27)
QKYNSAPYT

SEQ ID NO: 8898 - protein, 13 aa, Homo sapiens
  Heavy chain CDR3 for antibody 4449 (IGHV3-53)
ARDRDSSGSYFDY

SEQ ID NO: 8899 - protein, 9 aa, Homo sapiens
  Light chain CDR3 for antibody 4450 (IGKV2-30)
MQGTHWPLT

SEQ ID NO: 8900 - protein, 15 aa, Homo sapiens
  Heavy chain CDR3 for antibody 4450 (IGHV1-46)
ARGRFFDWLLSPFDY

SEQ ID NO: 8901 - protein, 8 aa, Homo sapiens
  Light chain CDR3 for antibody 4451 (IGKV3-11)
QQRSNWLT

SEQ ID NO: 8902 - protein, 16 aa, Homo sapiens
  Heavy chain CDR3 for antibody 4451 (IGHV4-59)
ARGRYFDWLLGDVFDI

SEQ ID NO: 8903 - protein, 9 aa, Homo sapiens
  Light chain CDR3 for antibody 4452 (IGKV1-39)
QQSYSTPLT

SEQ ID NO: 8904 - protein, 8 aa, Homo sapiens
  Heavy chain CDR3 for antibody 4452 (IGHV4-39)
ARRGGLDY

SEQ ID NO: 8905 - protein, 8 aa, Homo sapiens
  Light chain CDR3 for antibody 4453 (IGKV3-11)
QQRSNWLT

SEQ ID NO: 8906 - protein, 11 aa, Homo sapiens
  Heavy chain CDR3 for antibody 4453 (IGHV4-59)
AREMGHDTFDI

SEQ ID NO: 8907 - protein, 9 aa, Homo sapiens
  Light chain CDR3 for antibody 4454 (IGKV1D-13)
QQFNNYPRT

SEQ ID NO: 8908 - protein, 13 aa, Homo sapiens
  Heavy chain CDR3 for antibody 4454 (IGHV4-59)
ANRDYYGYYGMDV

SEQ ID NO: 8909 - protein, 9 aa, Homo sapiens
  Light chain CDR3 for antibody 4455 (IGKV1-27)
QKYNSAPYT

SEQ ID NO: 8910 - protein, 15 aa, Homo sapiens
  Heavy chain CDR3 for antibody 4455 (IGHV3-33)
ARAYDLPHYYYGMDV

SEQ ID NO: 8911 - protein, 9 aa, Homo sapiens
  Light chain CDR3 for antibody 4456 (IGKV3-20)
QQYGSSPYT

SEQ ID NO: 8912 - protein, 14 aa, Homo sapiens
  Heavy chain CDR3 for antibody 4456 (IGHV3-23)
AKCDYDILTGILDY

SEQ ID NO: 8913 - protein, 9 aa, Homo sapiens
  Light chain CDR3 for antibody 4457 (IGKV1-6)
QQEYNYPLT

SEQ ID NO: 8914 - protein, 14 aa, Homo sapiens
  Heavy chain CDR3 for antibody 4457 (IGHV1-46)
ARRGIVGALDAFDI

SEQ ID NO: 8915 - protein, 10 aa, Homo sapiens
  Light chain CDR3 for antibody 4458 (IGKV1-17)
LQHNSYPMYT

SEQ ID NO: 8916 - protein, 10 aa, Homo sapiens
  Heavy chain CDR3 for antibody 4458 (IGHV3-23)
AKGDRWRFDP

SEQ ID NO: 8917 - protein, 9 aa, Homo sapiens
  Light chain CDR3 for antibody 4459 (IGKV1-9)
LQHNSYPYT

SEQ ID NO: 8918 - protein, 16 aa, Homo sapiens
  Heavy chain CDR3 for antibody 4459 (IGHV4-39)
ARHPLIWTGYPNWFDP

SEQ ID NO: 8919 - protein, 9 aa, Homo sapiens
  Light chain CDR3 for antibody 4460 (IGKV1-9)
QQLNSYPYT

SEQ ID NO: 8920 - protein, 12 aa, Homo sapiens
  Heavy chain CDR3 for antibody 4460 (IGHV3-33)
ARGYSSKSYFDY

SEQ ID NO: 8921 - protein, 9 aa, Homo sapiens
  Light chain CDR3 for antibody 4461 (IGKV3-11)
QQRSNWMYT

SEQ ID NO: 8922 - protein, 14 aa, Homo sapiens
  Heavy chain CDR3 for antibody 4461 (IGHV4-39)
ARDSGYDYYYGMDV

SEQ ID NO: 8923 - protein, 9 aa, Homo sapiens
  Light chain CDR3 for antibody 4462 (IGKV6-21)
HQSSSLPYT

SEQ ID NO: 8924 - protein, 16 aa, Homo sapiens
  Heavy chain CDR3 for antibody 4462 (IGHV3-33)
ARAYYYGSGSYPHFQH

SEQ ID NO: 8925 - protein, 9 aa, Homo sapiens
  Light chain CDR3 for antibody 4463 (IGKV3D-20)
QQYGSSPWT

SEQ ID NO: 8926 - protein, 17 aa, Homo sapiens
  Heavy chain CDR3 for antibody 4463 (IGHV3-23)
AKEGSSSSWYGGLYFDY

SEQ ID NO: 8927 - protein, 9 aa, Homo sapiens
  Light chain CDR3 for antibody 4464 (IGKV3-20)
QQYGSSPLT

SEQ ID NO: 8928 - protein, 11 aa, Homo sapiens
  Heavy chain CDR3 for antibody 4464 (IGHV3-11)
ARASRGSYYDY

SEQ ID NO: 8929 - protein, 8 aa, Homo sapiens
  Light chain CDR3 for antibody 4465 (IGKV3-11)
QQRSNWLT

SEQ ID NO: 8930 - protein, 19 aa, Homo sapiens
  Heavy chain CDR3 for antibody 4465 (IGHV1-18)
ARDDILTGYSLYYYYGMDV

SEQ ID NO: 8931 - protein, 8 aa, Homo sapiens
  Light chain CDR3 for antibody 4466 (IGKV3D-7)
QQDYNLLT

SEQ ID NO: 8932 - protein, 9 aa, Homo sapiens
  Heavy chain CDR3 for antibody 4466 (IGHV4-59)
AGGSWDFDY

SEQ ID NO: 8933 - protein, 9 aa, Homo sapiens
  Light chain CDR3 for antibody 4467 (IGKV1-9)
QQLNSYPLT

SEQ ID NO: 8934 - protein, 12 aa, Homo sapiens
  Heavy chain CDR3 for antibody 4467 (IGHV3-33)
ARDGPVAGLFDY

SEQ ID NO: 8935 - protein, 9 aa, Homo sapiens
  Light chain CDR3 for antibody 4468 (IGKV3D-7)
QQDYTLPLT

SEQ ID NO: 8936 - protein, 18 aa, Homo sapiens
  Heavy chain CDR3 for antibody 4468 (IGHV4-39)
ARQYYFGSGNYYRGWFDP

SEQ ID NO: 8937 - protein, 8 aa, Homo sapiens
  Light chain CDR3 for antibody 4469 (IGKV3D-7)
QQDYNLLT

SEQ ID NO: 8938 - protein, 13 aa, Homo sapiens
  Heavy chain CDR3 for antibody 4469 (IGHV3-33)
ARIDYYSYYGMDV

SEQ ID NO: 8939 - protein, 10 aa, Homo sapiens
  Light chain CDR3 for antibody 4470 (IGKV3-11)
QQRSNWPIWT

SEQ ID NO: 8940 - protein, 13 aa, Homo sapiens
  Heavy chain CDR3 for antibody 4470 (IGHV3-23)
AKDRGYSSTSTAY

SEQ ID NO: 8941 - protein, 9 aa, Homo sapiens
  Light chain CDR3 for antibody 4471 (IGKV1-27)
QKYNSAPHT

SEQ ID NO: 8942 - protein, 13 aa, Homo sapiens
  Heavy chain CDR3 for antibody 4471 (IGHV3-33)
ARKAYGDYFYFDY

SEQ ID NO: 8943 - protein, 9 aa, Homo sapiens
  Light chain CDR3 for antibody 4472 (IGKV6-21)
HQSSSLPYT

SEQ ID NO: 8944 - protein, 10 aa, Homo sapiens
  Heavy chain CDR3 for antibody 4472 (IGHV1-46)
AREWELLFDY

SEQ ID NO: 8945 - protein, 8 aa, Homo sapiens
  Light chain CDR3 for antibody 4473 (IGKV3-20)
QQYGSSLT

SEQ ID NO: 8946 - protein, 13 aa, Homo sapiens
  Heavy chain CDR3 for antibody 4473 (IGHV3-23)
ASPFNWNDGFFDY

SEQ ID NO: 8947 - protein, 9 aa, Homo sapiens
  Light chain CDR3 for antibody 4474 (IGKV1D-16)
QQYDSYPWT

SEQ ID NO: 8948 - protein, 15 aa, Homo sapiens
  Heavy chain CDR3 for antibody 4474 (IGHV4-59)
ARDLGHYYGSVSIDY

SEQ ID NO: 8949 - protein, 9 aa, Homo sapiens
  Light chain CDR3 for antibody 4475 (IGKV1-17)
LQLNSFPWT

SEQ ID NO: 8950 - protein, 16 aa, Homo sapiens
  Heavy chain CDR3 for antibody 4475 (IGHV3-23)
AKEGMVLRYFDWLWDY

SEQ ID NO: 8951 - protein, 8 aa, Homo sapiens
  Light chain CDR3 for antibody 4476 (IGKV3D-7)
QQDYNLLT

SEQ ID NO: 8952 - protein, 15 aa, Homo sapiens
  Heavy chain CDR3 for antibody 4476 (IGHV3-33)
VCVLYDYGDYVGFDY

SEQ ID NO: 8953 - protein, 9 aa, Homo sapiens
  Light chain CDR3 for antibody 4477 (IGKV3-15)
QQYNNWPYT

SEQ ID NO: 8954 - protein, 19 aa, Homo sapiens
  Heavy chain CDR3 for antibody 4477 (IGHV3-33)
TRDPHYDILTGYAYYGMDV

SEQ ID NO: 8955 - protein, 9 aa, Homo sapiens
  Light chain CDR3 for antibody 4478 (IGKV6-21)
HQSSSLPYT

SEQ ID NO: 8956 - protein, 9 aa, Homo sapiens
  Heavy chain CDR3 for antibody 4478 (IGHV1-18)
ARGGWGFEY

SEQ ID NO: 8957 - protein, 9 aa, Homo sapiens
  Light chain CDR3 for antibody 4479 (IGKV1D-16)
QQYNSYPYT

SEQ ID NO: 8958 - protein, 11 aa, Homo sapiens
  Heavy chain CDR3 for antibody 4479 (IGHV1-24)
ATYFGSGSLDY

SEQ ID NO: 8959 - protein, 9 aa, Homo sapiens
  Light chain CDR3 for antibody 4480 (IGKV3-15)
QQYNNWPLT

SEQ ID NO: 8960 - protein, 17 aa, Homo sapiens
  Heavy chain CDR3 for antibody 4480 (IGHV4-39)
ARQGWYYGSGSSLLFDY

SEQ ID NO: 8961 - protein, 9 aa, Homo sapiens
  Light chain CDR3 for antibody 4481 (IGKV1-9)
QQLNSYPLT

SEQ ID NO: 8962 - protein, 10 aa, Homo sapiens
  Heavy chain CDR3 for antibody 4481 (IGHV3-23)
AKDHWGDFDY

SEQ ID NO: 8963 - protein, 10 aa, Homo sapiens
  Light chain CDR3 for antibody 4482 (IGKV3-11)
QQRSNWPIFT

SEQ ID NO: 8964 - protein, 15 aa, Homo sapiens
  Heavy chain CDR3 for antibody 4482 (IGHV3-23)
AKEALRYFDWSGMDV

SEQ ID NO: 8965 - protein, 9 aa, Homo sapiens
  Light chain CDR3 for antibody 4483 (IGKV1D-13)
QQFNNYPYT

SEQ ID NO: 8966 - protein, 18 aa, Homo sapiens
  Heavy chain CDR3 for antibody 4483 (IGHV1-8)
AREGAAAGSYYYYNGMDV

SEQ ID NO: 8967 - protein, 9 aa, Homo sapiens
  Light chain CDR3 for antibody 4484 (IGKV1-16)
QHYNDYPFT

SEQ ID NO: 8968 - protein, 12 aa, Homo sapiens
  Heavy chain CDR3 for antibody 4484 (IGHV3-33)
TRGYSSKSYFDY

SEQ ID NO: 8969 - protein, 9 aa, Homo sapiens
  Light chain CDR3 for antibody 4485 (IGKV5-2)
LQHDNFPYT

SEQ ID NO: 8970 - protein, 17 aa, Homo sapiens
  Heavy chain CDR3 for antibody 4485 (IGHV3-23)
AKGDYYGSGSYSTFFDY

SEQ ID NO: 8971 - protein, 8 aa, Homo sapiens
  Light chain CDR3 for antibody 4486 (IGKV3-11)
QQRSNWWT

SEQ ID NO: 8972 - protein, 13 aa, Homo sapiens
  Heavy chain CDR3 for antibody 4486 (IGHV3-33)
ARDYCGGDCYLDY

SEQ ID NO: 8973 - protein, 9 aa, Homo sapiens
  Light chain CDR3 for antibody 4487 (IGKV2-30)
MQGTHWPLT

SEQ ID NO: 8974 - protein, 15 aa, Homo sapiens
  Heavy chain CDR3 for antibody 4487 (IGHV3-23)
AKEALRYFDWSGMDV

SEQ ID NO: 8975 - protein, 9 aa, Homo sapiens
  Light chain CDR3 for antibody 4488 (IGKV3-20)
QQYGSSPYT

SEQ ID NO: 8976 - protein, 17 aa, Homo sapiens
  Heavy chain CDR3 for antibody 4488 (IGHV3-33)
ARDSYDILTGYYKPFDY

SEQ ID NO: 8977 - protein, 9 aa, Homo sapiens
  Light chain CDR3 for antibody 4489 (IGKV2-30)
MQGTHWPLT

SEQ ID NO: 8978 - protein, 12 aa, Homo sapiens
  Heavy chain CDR3 for antibody 4489 (IGHV3-13)
ARDRGYSGYFDY

SEQ ID NO: 8979 - protein, 9 aa, Homo sapiens
  Light chain CDR3 for antibody 4490 (IGKV5-2)
LQHDNFPYT

SEQ ID NO: 8980 - protein, 10 aa, Homo sapiens
  Heavy chain CDR3 for antibody 4490 (IGHV3-23)
AKDQVGATDC

SEQ ID NO: 8981 - protein, 9 aa, Homo sapiens
  Light chain CDR3 for antibody 4491 (IGKV1-39)
QQSYSTPLT

SEQ ID NO: 8982 - protein, 13 aa, Homo sapiens
  Heavy chain CDR3 for antibody 4491 (IGHV3-33)
AREYCSGGSCYDY

SEQ ID NO: 8983 - protein, 9 aa, Homo sapiens
  Light chain CDR3 for antibody 4492 (IGKV3-20)
QQYGSSPLT

SEQ ID NO: 8984 - protein, 16 aa, Homo sapiens
  Heavy chain CDR3 for antibody 4492 (IGHV1-46)
ARGGGYSGSYSNWFDP

SEQ ID NO: 8985 - protein, 8 aa, Homo sapiens
  Light chain CDR3 for antibody 4493 (IGKV1D-13)
QQFNNYPT

SEQ ID NO: 8986 - protein, 17 aa, Homo sapiens
  Heavy chain CDR3 for antibody 4493 (IGHV3-23)
AKDGIGELSYYYYGMDV

SEQ ID NO: 8987 - protein, 9 aa, Homo sapiens
  Light chain CDR3 for antibody 4494 (IGKV1-17)
LQHNSYPRT

SEQ ID NO: 8988 - protein, 13 aa, Homo sapiens
  Heavy chain CDR3 for antibody 4494 (IGHV3-33)
AREYFDWLLPLDY

SEQ ID NO: 8989 - protein, 9 aa, Homo sapiens
  Light chain CDR3 for antibody 4495 (IGKV1D-13)
QQFNNYPST

SEQ ID NO: 8990 - protein, 19 aa, Homo sapiens
  Heavy chain CDR3 for antibody 4495 (IGHV3-33)
TRDPHYDILTGYAYYGMDV

SEQ ID NO: 8991 - protein, 9 aa, Homo sapiens
  Light chain CDR3 for antibody 4496 (IGKV3D-20)
QQYGSSPYT

SEQ ID NO: 8992 - protein, 18 aa, Homo sapiens
  Heavy chain CDR3 for antibody 4496 (IGHV3-33)
AREGYFGSGSYYRNWFDP

SEQ ID NO: 8993 - protein, 9 aa, Homo sapiens
  Light chain CDR3 for antibody 4497 (IGKV1-39)
QQSYSTPLT

SEQ ID NO: 8994 - protein, 13 aa, Homo sapiens
  Heavy chain CDR3 for antibody 4497 (IGHV3-33)
ASAGNSYYNVMDV

SEQ ID NO: 8995 - protein, 9 aa, Homo sapiens
  Light chain CDR3 for antibody 4498 (IGKV1-27)
QKYNSAPYT

SEQ ID NO: 8996 - protein, 13 aa, Homo sapiens
  Heavy chain CDR3 for antibody 4498 (IGHV4-39)
ARHVLLWFGEFDP

SEQ ID NO: 8997 - protein, 9 aa, Homo sapiens
  Light chain CDR3 for antibody 4499 (IGKV1-16)
QHYNDYPFT

SEQ ID NO: 8998 - protein, 14 aa, Homo sapiens
  Heavy chain CDR3 for antibody 4499 (IGHV3-33)
ARDWNDVYYYGMDV

SEQ ID NO: 8999 - protein, 9 aa, Homo sapiens
  Light chain CDR3 for antibody 4500 (IGKV3-20)
QQYGSSPLT

SEQ ID NO: 9000 - protein, 15 aa, Homo sapiens
  Heavy chain CDR3 for antibody 4500 (IGHV4-59)
ARDGHGNWGSGTFDY

SEQ ID NO: 9001 - protein, 9 aa, Homo sapiens
  Light chain CDR3 for antibody 4501 (IGKV1-6)
LQDYNYPWT

SEQ ID NO: 9002 - protein, 16 aa, Homo sapiens
  Heavy chain CDR3 for antibody 4501 (IGHV3-11)
ARDSELRYFDWFGMDV

SEQ ID NO: 9003 - protein, 9 aa, Homo sapiens
  Light chain CDR3 for antibody 4502 (IGKV3-11)
QQRSNWPLT

SEQ ID NO: 9004 - protein, 17 aa, Homo sapiens
  Heavy chain CDR3 for antibody 4502 (IGHV3-33)
ARGGAAAGPYLYYGLDV

SEQ ID NO: 9005 - protein, 9 aa, Homo sapiens
  Light chain CDR3 for antibody 4503 (IGKV1-27)
QKYNSAPYT

SEQ ID NO: 9006 - protein, 18 aa, Homo sapiens
  Heavy chain CDR3 for antibody 4503 (IGHV3-33)
AREGYDILTGYYNVKFDY

SEQ ID NO: 9007 - protein, 9 aa, Homo sapiens
  Light chain CDR3 for antibody 4504 (IGKV1-17)
LQHNSYPWT

SEQ ID NO: 9008 - protein, 19 aa, Homo sapiens
  Heavy chain CDR3 for antibody 4504 (IGHV3-33)
ARRRDDILTGWDYYFGMDV

SEQ ID NO: 9009 - protein, 8 aa, Homo sapiens
  Light chain CDR3 for antibody 4505 (IGKV3-20)
QQYGSSFT

SEQ ID NO: 9010 - protein, 13 aa, Homo sapiens
  Heavy chain CDR3 for antibody 4505 (IGHV4-39)
ARQWPSGYWYFDL

SEQ ID NO: 9011 - protein, 9 aa, Homo sapiens
  Light chain CDR3 for antibody 4506 (IGKV1-6)
LQDYKSPFT

SEQ ID NO: 9012 - protein, 17 aa, Homo sapiens
  Heavy chain CDR3 for antibody 4506 (IGHV1-18)
ARERYYGSGNYKYNMDV

SEQ ID NO: 9013 - protein, 9 aa, Homo sapiens
  Light chain CDR3 for antibody 4507 (IGKV3-15)
QQYNNWPFT

SEQ ID NO: 9014 - protein, 14 aa, Homo sapiens
  Heavy chain CDR3 for antibody 4507 (IGHV1-18)
ARRGIVGALDAFDI

SEQ ID NO: 9015 - protein, 9 aa, Homo sapiens
  Light chain CDR3 for antibody 4508 (IGKV1-39)
QQSYSTPLT

SEQ ID NO: 9016 - protein, 18 aa, Homo sapiens
  Heavy chain CDR3 for antibody 4508 (IGHV1-8)
AREGAAAGSYYYYNGMDV

SEQ ID NO: 9017 - protein, 9 aa, Homo sapiens
  Light chain CDR3 for antibody 4509 (IGKV1-17)
LQHNSYPPT

SEQ ID NO: 9018 - protein, 17 aa, Homo sapiens
  Heavy chain CDR3 for antibody 4509 (IGHV3-33)
AREGNDILTGYYHAFDI

SEQ ID NO: 9019 - protein, 9 aa, Homo sapiens
  Light chain CDR3 for antibody 4510 (IGKV5-2)
LQHDNFPWT

SEQ ID NO: 9020 - protein, 18 aa, Homo sapiens
  Heavy chain CDR3 for antibody 4510 (IGHV4-39)
VKYITMVRGDIITGPFAY

SEQ ID NO: 9021 - protein, 9 aa, Homo sapiens
  Light chain CDR3 for antibody 4511 (IGKV1-17)
LQHNGYPLT

SEQ ID NO: 9022 - protein, 15 aa, Homo sapiens
  Heavy chain CDR3 for antibody 4511 (IGHV3-30)
ARRGYGSGSPDAFDL

SEQ ID NO: 9023 - protein, 9 aa, Homo sapiens
  Light chain CDR3 for antibody 4512 (IGKV1D-16)
QQLNSYPLT

SEQ ID NO: 9024 - protein, 10 aa, Homo sapiens
  Heavy chain CDR3 for antibody 4512 (IGHV3-23)
AKENWNDFDY

SEQ ID NO: 9025 - protein, 9 aa, Homo sapiens
  Light chain CDR3 for antibody 4513 (IGKV1D-16)
QQYNSYPYT

SEQ ID NO: 9026 - protein, 9 aa, Homo sapiens
  Heavy chain CDR3 for antibody 4513 (IGHV3-23)
AIGRYYFDY

SEQ ID NO: 9027 - protein, 9 aa, Homo sapiens
  Light chain CDR3 for antibody 4514 (IGKV2D-24)
TQATQFPHT

SEQ ID NO: 9028 - protein, 9 aa, Homo sapiens
  Heavy chain CDR3 for antibody 4514 (IGHV1-18)
ARGKDWFDP

SEQ ID NO: 9029 - protein, 9 aa, Homo sapiens
  Light chain CDR3 for antibody 4515 (IGKV1-6)
LQDYNYPRT

SEQ ID NO: 9030 - protein, 15 aa, Homo sapiens
  Heavy chain CDR3 for antibody 4515 (IGHV4-39)
ARRVRGLIITRYFDY

SEQ ID NO: 9031 - protein, 9 aa, Homo sapiens
  Light chain CDR3 for antibody 4516 (IGKV3-15)
QQYNNWPLT

SEQ ID NO: 9032 - protein, 20 aa, Homo sapiens
  Heavy chain CDR3 for antibody 4516 (IGHV3-23)
AKGMGGLRYFDWPHYYGMDV

SEQ ID NO: 9033 - protein, 9 aa, Homo sapiens
  Light chain CDR3 for antibody 4517 (IGKV1-6)
QQEYNYPLT

SEQ ID NO: 9034 - protein, 7 aa, Homo sapiens
  Heavy chain CDR3 for antibody 4517 (IGHV1-46)
AREGGDY

SEQ ID NO: 9035 - protein, 9 aa, Homo sapiens
  Light chain CDR3 for antibody 4518 (IGKV1-17)
QQYNSYPLT

SEQ ID NO: 9036 - protein, 10 aa, Homo sapiens
  Heavy chain CDR3 for antibody 4518 (IGHV3-33)
ARKGMNAFDI

SEQ ID NO: 9037 - protein, 8 aa, Homo sapiens
  Light chain CDR3 for antibody 4519 (IGKV3D-7)
QQDYNLVT

SEQ ID NO: 9038 - protein, 13 aa, Homo sapiens
  Heavy chain CDR3 for antibody 4519 (IGHV4-28)
ARKGATGYYGMDV

SEQ ID NO: 9039 - protein, 9 aa, Homo sapiens
  Light chain CDR3 for antibody 4520 (IGKV1D-16)
QQYDSYPWT

SEQ ID NO: 9040 - protein, 12 aa, Homo sapiens
  Heavy chain CDR3 for antibody 4520 (IGHV3-33)
AREKGGSYSFDY

SEQ ID NO: 9041 - protein, 9 aa, Homo sapiens
  Light chain CDR3 for antibody 4521 (IGKV1-17)
LQHNSYPPT

SEQ ID NO: 9042 - protein, 16 aa, Homo sapiens
  Heavy chain CDR3 for antibody 4521 (IGHV1-24)
ATDWNDRGYYYYGMDV

SEQ ID NO: 9043 - protein, 10 aa, Homo sapiens
  Light chain CDR3 for antibody 4522 (IGKV3-15)
QQYNNWPPYT

SEQ ID NO: 9044 - protein, 13 aa, Homo sapiens
  Heavy chain CDR3 for antibody 4522 (IGHV3-33)
ARDWGYSHGYFDY

SEQ ID NO: 9045 - protein, 9 aa, Homo sapiens
  Light chain CDR3 for antibody 4523 (IGKV1-39)
QQSYSTPLT

SEQ ID NO: 9046 - protein, 15 aa, Homo sapiens
  Heavy chain CDR3 for antibody 4523 (IGHV1-18)
ARRSPNWGHYYGMDV

SEQ ID NO: 9047 - protein, 9 aa, Homo sapiens
  Light chain CDR3 for antibody 4524 (IGKV1-17)
LQHNSYPRT

SEQ ID NO: 9048 - protein, 14 aa, Homo sapiens
  Heavy chain CDR3 for antibody 4524 (IGHV3-15)
SIYYYGSGRDFFDY

SEQ ID NO: 9049 - protein, 9 aa, Homo sapiens
  Light chain CDR3 for antibody 4525 (IGKV1D-16)
QQYNSYPYT

SEQ ID NO: 9050 - protein, 14 aa, Homo sapiens
  Heavy chain CDR3 for antibody 4525 (IGHV1-46)
ARAYYAFLTGALDI

SEQ ID NO: 9051 - protein, 10 aa, Homo sapiens
  Light chain CDR3 for antibody 4526 (IGKV1-39)
QQSYSTPMYT

SEQ ID NO: 9052 - protein, 10 aa, Homo sapiens
  Heavy chain CDR3 for antibody 4526 (IGHV3-30)
AREWYGGMDV

SEQ ID NO: 9053 - protein, 9 aa, Homo sapiens
  Light chain CDR3 for antibody 4527 (IGKV2-30)
MQGTHWPLT

SEQ ID NO: 9054 - protein, 14 aa, Homo sapiens
  Heavy chain CDR3 for antibody 4527 (IGHV3-33)
ARDNILTAYYLFDY

SEQ ID NO: 9055 - protein, 8 aa, Homo sapiens
  Light chain CDR3 for antibody 4528 (IGKV3D-7)
QQDYNLLT

SEQ ID NO: 9056 - protein, 20 aa, Homo sapiens
  Heavy chain CDR3 for antibody 4528 (IGHV3-11)
ARGGATLIRGLIDYYYGMDV

SEQ ID NO: 9057 - protein, 9 aa, Homo sapiens
  Light chain CDR3 for antibody 4529 (IGKV3-20)
QQYGSSPYT

SEQ ID NO: 9058 - protein, 12 aa, Homo sapiens
  Heavy chain CDR3 for antibody 4529 (IGHV3-33)
ARDGPVAGLFDY

SEQ ID NO: 9059 - protein, 9 aa, Homo sapiens
  Light chain CDR3 for antibody 4530 (IGKV3D-20)
QQYGSSPWT

SEQ ID NO: 9060 - protein, 16 aa, Homo sapiens
  Heavy chain CDR3 for antibody 4530 (IGHV3-23)
ARNWNDVGDYYYGMDV

SEQ ID NO: 9061 - protein, 9 aa, Homo sapiens
  Light chain CDR3 for antibody 4531 (IGKV3-11)
QQRSNWPPT

SEQ ID NO: 9062 - protein, 12 aa, Homo sapiens
  Heavy chain CDR3 for antibody 4531 (IGHV3-33)
ARDGYSSRNFDY

SEQ ID NO: 9063 - protein, 8 aa, Homo sapiens
  Light chain CDR3 for antibody 4532 (IGKV3D-7)
QQDYNLLT

SEQ ID NO: 9064 - protein, 14 aa, Homo sapiens
  Heavy chain CDR3 for antibody 4532 (IGHV3-23)
AKDRYRGYEGLFDY

SEQ ID NO: 9065 - protein, 9 aa, Homo sapiens
  Light chain CDR3 for antibody 4533 (IGKV5-2)
LQHDNFPWT

SEQ ID NO: 9066 - protein, 14 aa, Homo sapiens
  Heavy chain CDR3 for antibody 4533 (IGHV1-46)
ARSYYDILTGAFDI

SEQ ID NO: 9067 - protein, 9 aa, Homo sapiens
  Light chain CDR3 for antibody 4534 (IGKV5-2)
LQHDNFPWT

SEQ ID NO: 9068 - protein, 12 aa, Homo sapiens
  Heavy chain CDR3 for antibody 4534 (IGHV3-21)
AREGFGESSFDY

SEQ ID NO: 9069 - protein, 9 aa, Homo sapiens
  Light chain CDR3 for antibody 4535 (IGKV2-30)
MQGTHWPLT

SEQ ID NO: 9070 - protein, 11 aa, Homo sapiens
  Heavy chain CDR3 for antibody 4535 (IGHV3-33)
ARAGIAALFDY

SEQ ID NO: 9071 - protein, 9 aa, Homo sapiens
  Light chain CDR3 for antibody 4536 (IGKV6-21)
HQSSSLPWT

SEQ ID NO: 9072 - protein, 16 aa, Homo sapiens
  Heavy chain CDR3 for antibody 4536 (IGHV4-59)
ARFYYGSGSYHWYFDL

SEQ ID NO: 9073 - protein, 10 aa, Homo sapiens
  Light chain CDR3 for antibody 4537 (IGKV1-17)
LQHNSYPMYT

SEQ ID NO: 9074 - protein, 15 aa, Homo sapiens
  Heavy chain CDR3 for antibody 4537 (IGHV3-33)
ARDHLTGYYYYGMDV

SEQ ID NO: 9075 - protein, 9 aa, Homo sapiens
  Light chain CDR3 for antibody 4538 (IGKV2-30)
MQGTHWPLT

SEQ ID NO: 9076 - protein, 9 aa, Homo sapiens
  Heavy chain CDR3 for antibody 4538 (IGHV3-23)
ARIWWLKDY

SEQ ID NO: 9077 - protein, 9 aa, Homo sapiens
  Light chain CDR3 for antibody 4539 (IGKV1-9)
QQLHIYPWT

SEQ ID NO: 9078 - protein, 16 aa, Homo sapiens
  Heavy chain CDR3 for antibody 4539 (IGHV3-23)
AKEGMVLRYFDWLWDY

SEQ ID NO: 9079 - protein, 9 aa, Homo sapiens
  Light chain CDR3 for antibody 4540 (IGKV3-11)
QQRSNWPYT

SEQ ID NO: 9080 - protein, 13 aa, Homo sapiens
  Heavy chain CDR3 for antibody 4540 (IGHV3-33)
ARQSSGWFDAFDI

SEQ ID NO: 9081 - protein, 9 aa, Homo sapiens
  Light chain CDR3 for antibody 4541 (IGKV1-17)
LQHNSYPYT

SEQ ID NO: 9082 - protein, 20 aa, Homo sapiens
  Heavy chain CDR3 for antibody 4541 (IGHV4-59)
ARDRGYDILTGYYGYYGMDV

SEQ ID NO: 9083 - protein, 8 aa, Homo sapiens
  Light chain CDR3 for antibody 4542 (IGKV1-5)
QQYNSYWT

SEQ ID NO: 9084 - protein, 13 aa, Homo sapiens
  Heavy chain CDR3 for antibody 4542 (IGHV3-23)
AKDRGYSSTSTAY

SEQ ID NO: 9085 - protein, 9 aa, Homo sapiens
  Light chain CDR3 for antibody 4543 (IGKV1D-13)
QQFNNYPHT

SEQ ID NO: 9086 - protein, 16 aa, Homo sapiens
  Heavy chain CDR3 for antibody 4543 (IGHV3-33)
ARDNFGSGSYYSHFHY

SEQ ID NO: 9087 - protein, 8 aa, Homo sapiens
  Light chain CDR3 for antibody 4544 (IGKV1D-13)
QQFNNYPT

SEQ ID NO: 9088 - protein, 18 aa, Homo sapiens
  Heavy chain CDR3 for antibody 4544 (IGHV3-33)
ARGYYGSGNFYKDSGMDV

SEQ ID NO: 9089 - protein, 9 aa, Homo sapiens
  Light chain CDR3 for antibody 4545 (IGKV1-17)
LQHNSYPWT

SEQ ID NO: 9090 - protein, 12 aa, Homo sapiens
  Heavy chain CDR3 for antibody 4545 (IGHV3-33)
VRKWFGELYFDY

SEQ ID NO: 9091 - protein, 9 aa, Homo sapiens
  Light chain CDR3 for antibody 4546 (IGKV2-30)
MQGTHWPLT

SEQ ID NO: 9092 - protein, 17 aa, Homo sapiens
  Heavy chain CDR3 for antibody 4546 (IGHV3-33)
ARDWFGELSDYYYGMDV

SEQ ID NO: 9093 - protein, 9 aa, Homo sapiens
  Light chain CDR3 for antibody 4547 (IGKV1D-13)
QQFNNYPYT

SEQ ID NO: 9094 - protein, 17 aa, Homo sapiens
  Heavy chain CDR3 for antibody 4547 (IGHV3-23)
AKDYDILTGYSHNWFDP

SEQ ID NO: 9095 - protein, 9 aa, Homo sapiens
  Light chain CDR3 for antibody 4548 (IGKV5-2)
LQHDNFPLT

SEQ ID NO: 9096 - protein, 16 aa, Homo sapiens
  Heavy chain CDR3 for antibody 4548 (IGHV3-23)
AKGMGGLRYFDWLWDY

SEQ ID NO: 9097 - protein, 9 aa, Homo sapiens
  Light chain CDR3 for antibody 4549 (IGKV1-9)
QQGNTYSRT

SEQ ID NO: 9098 - protein, 9 aa, Homo sapiens
  Heavy chain CDR3 for antibody 4549 (IGHV4-59)
AREGGSGSL

SEQ ID NO: 9099 - protein, 9 aa, Homo sapiens
  Light chain CDR3 for antibody 4550 (IGKV1D-16)
QQYNSYPYT

SEQ ID NO: 9100 - protein, 19 aa, Homo sapiens
  Heavy chain CDR3 for antibody 4550 (IGHV3-33)
ARVLDGLSPPYYYYDGLDV

SEQ ID NO: 9101 - protein, 9 aa, Homo sapiens
  Light chain CDR3 for antibody 4551 (IGKV6-21)
HQSSSLPYT

SEQ ID NO: 9102 - protein, 16 aa, Homo sapiens
  Heavy chain CDR3 for antibody 4551 (IGHV3-30)
ARDSSYYGSGYYGMDV

SEQ ID NO: 9103 - protein, 9 aa, Homo sapiens
  Light chain CDR3 for antibody 4552 (IGKV1-17)
QQRSNWMYT

SEQ ID NO: 9104 - protein, 12 aa, Homo sapiens
  Heavy chain CDR3 for antibody 4552 (IGHV3-23)
AKEGLGSDYESY

SEQ ID NO: 9105 - protein, 9 aa, Homo sapiens
  Light chain CDR3 for antibody 4553 (IGKV1-16)
QQYNSYPYT

SEQ ID NO: 9106 - protein, 16 aa, Homo sapiens
  Heavy chain CDR3 for antibody 4553 (IGHV1-18)
TRGTFYYGSGSSFFDY

SEQ ID NO: 9107 - protein, 9 aa, Homo sapiens
  Light chain CDR3 for antibody 4554 (IGKV1-39)
QQSYSTPLT

SEQ ID NO: 9108 - protein, 18 aa, Homo sapiens
  Heavy chain CDR3 for antibody 4554 (IGHV3-33)
ARKGGYYSGSGSYRHFDF

SEQ ID NO: 9109 - protein, 9 aa, Homo sapiens
  Light chain CDR3 for antibody 4555 (IGKV1D-16)
QQYNSYPLT

SEQ ID NO: 9110 - protein, 12 aa, Homo sapiens
  Heavy chain CDR3 for antibody 4555 (IGHV3-33)
ARESGGSFGMDV

SEQ ID NO: 9111 - protein, 11 aa, Homo sapiens
  Light chain CDR3 for antibody 4556 (IGKV3-11)
QQRSNWPPTWT

SEQ ID NO: 9112 - protein, 26 aa, Homo sapiens
  Heavy chain CDR3 for antibody 4556 (IGHV4-39)
ARQGLLWFGDLKAYDSSGYYYGYFHH

SEQ ID NO: 9113 - protein, 9 aa, Homo sapiens
  Light chain CDR3 for antibody 4557 (IGKV1-6)
QQYNSFPLT

SEQ ID NO: 9114 - protein, 13 aa, Homo sapiens
  Heavy chain CDR3 for antibody 4557 (IGHV4-34)
ASNFYYYYYGMNV

SEQ ID NO: 9115 - protein, 9 aa, Homo sapiens
  Light chain CDR3 for antibody 4558 (IGKV2D-24)
TQATQFPHT

SEQ ID NO: 9116 - protein, 15 aa, Homo sapiens
  Heavy chain CDR3 for antibody 4558 (IGHV1-18)
ARGYCSSTSCYYFDY

SEQ ID NO: 9117 - protein, 9 aa, Homo sapiens
  Light chain CDR3 for antibody 4559 (IGKV1-33)
QQYDNLPFT

SEQ ID NO: 9118 - protein, 17 aa, Homo sapiens
  Heavy chain CDR3 for antibody 4559 (IGHV3-33)
ARGEQWLGYYYYYGMDV

SEQ ID NO: 9119 - protein, 8 aa, Homo sapiens
  Light chain CDR3 for antibody 4560 (IGKV1D-13)
QQFNNYPT

SEQ ID NO: 9120 - protein, 17 aa, Homo sapiens
  Heavy chain CDR3 for antibody 4560 (IGHV3-33)
VREGGLLWVGELSLFDY

SEQ ID NO: 9121 - protein, 9 aa, Homo sapiens
  Light chain CDR3 for antibody 4561 (IGKV1-6)
LQDYNYPWT

SEQ ID NO: 9122 - protein, 8 aa, Homo sapiens
  Heavy chain CDR3 for antibody 4561 (IGHV3-33)
ARDDPPRY

SEQ ID NO: 9123 - protein, 9 aa, Homo sapiens
  Light chain CDR3 for antibody 4562 (IGKV1-9)
QQYNSYPYT

SEQ ID NO: 9124 - protein, 22 aa, Homo sapiens
  Heavy chain CDR3 for antibody 4562 (IGHV1-18)
ARDRYNNQSKYRNRDYYYGLDV

SEQ ID NO: 9125 - protein, 8 aa, Homo sapiens
  Light chain CDR3 for antibody 4563 (IGKV1-5)
QQYNSYYT

SEQ ID NO: 9126 - protein, 13 aa, Homo sapiens
  Heavy chain CDR3 for antibody 4563 (IGHV4-39)
ARHVLLWFGEFDP

SEQ ID NO: 9127 - protein, 9 aa, Homo sapiens
  Light chain CDR3 for antibody 4564 (IGKV6-21)
HQSSSLPLT

SEQ ID NO: 9128 - protein, 12 aa, Homo sapiens
  Heavy chain CDR3 for antibody 4564 (IGHV3-33)
ARDPGYFFGLDV

SEQ ID NO: 9129 - protein, 10 aa, Homo sapiens
  Light chain CDR3 for antibody 4565 (IGKV1-17)
LQHNSYPMYT

SEQ ID NO: 9130 - protein, 13 aa, Homo sapiens
  Heavy chain CDR3 for antibody 4565 (IGHV3-23)
AKDRGLRYYGMDV

SEQ ID NO: 9131 - protein, 8 aa, Homo sapiens
  Light chain CDR3 for antibody 4566 (IGKV1D-13)
QQFNNYPT

SEQ ID NO: 9132 - protein, 13 aa, Homo sapiens
  Heavy chain CDR3 for antibody 4566 (IGHV3-33)
ARVDTMVRGVMAY

SEQ ID NO: 9133 - protein, 8 aa, Homo sapiens
  Light chain CDR3 for antibody 4567 (IGKV3-15)
QQYNNWPT

SEQ ID NO: 9134 - protein, 9 aa, Homo sapiens
  Heavy chain CDR3 for antibody 4567 (IGHV4-59)
AREGGSGSL

SEQ ID NO: 9135 - protein, 8 aa, Homo sapiens
  Light chain CDR3 for antibody 4568 (IGKV3D-7)
QQDYNLLT

SEQ ID NO: 9136 - protein, 18 aa, Homo sapiens
  Heavy chain CDR3 for antibody 4568 (IGHV3-33)
ARDRDRYGSGTYPDAIDI

SEQ ID NO: 9137 - protein, 9 aa, Homo sapiens
  Light chain CDR3 for antibody 4569 (IGKV6-21)
HQSSSLPYT

SEQ ID NO: 9138 - protein, 16 aa, Homo sapiens
  Heavy chain CDR3 for antibody 4569 (IGHV3-33)
ARGANYYGSGIPNFEY

SEQ ID NO: 9139 - protein, 9 aa, Homo sapiens
  Light chain CDR3 for antibody 4570 (IGKV3D-7)
QQDYNLPYT

SEQ ID NO: 9140 - protein, 14 aa, Homo sapiens
  Heavy chain CDR3 for antibody 4570 (IGHV4-39)
ARQGTMIRGGYFDY

SEQ ID NO: 9141 - protein, 9 aa, Homo sapiens
  Light chain CDR3 for antibody 4571 (IGKV3-15)
QQYNNWPLT

SEQ ID NO: 9142 - protein, 17 aa, Homo sapiens
  Heavy chain CDR3 for antibody 4571 (IGHV4-34)
AGLRFFDWLFDYYGMDV

SEQ ID NO: 9143 - protein, 10 aa, Homo sapiens
  Light chain CDR3 for antibody 4572 (IGKV1-39)
QQSYSTPMYT

SEQ ID NO: 9144 - protein, 17 aa, Homo sapiens
  Heavy chain CDR3 for antibody 4572 (IGHV1-18)
ARDRAFTMVRGVPPFDY

SEQ ID NO: 9145 - protein, 9 aa, Homo sapiens
  Light chain CDR3 for antibody 4573 (IGKV1-17)
LQHNSYPWT

SEQ ID NO: 9146 - protein, 9 aa, Homo sapiens
  Heavy chain CDR3 for antibody 4573 (IGHV1-18)
ARGGWGFEY

SEQ ID NO: 9147 - protein, 8 aa, Homo sapiens
  Light chain CDR3 for antibody 4574 (IGKV3-11)
QQRSNWLT

SEQ ID NO: 9148 - protein, 17 aa, Homo sapiens
  Heavy chain CDR3 for antibody 4574 (IGHV1-18)
ARDEGYDILTGYPHFDY

SEQ ID NO: 9149 - protein, 9 aa, Homo sapiens
  Light chain CDR3 for antibody 4575 (IGKV3-11)
QQRSNWPPT

SEQ ID NO: 9150 - protein, 14 aa, Homo sapiens
  Heavy chain CDR3 for antibody 4575 (IGHV3-33)
ARAGSGYDRDWFDP

SEQ ID NO: 9151 - protein, 9 aa, Homo sapiens
  Light chain CDR3 for antibody 4576 (IGKV1D-13)
QQFNNYPYT

SEQ ID NO: 9152 - protein, 10 aa, Homo sapiens
  Heavy chain CDR3 for antibody 4576 (IGHV3-33)
AREWFGGFDI

SEQ ID NO: 9153 - protein, 10 aa, Homo sapiens
  Light chain CDR3 for antibody 4577 (IGKV3-11)
QQRSNWPIFT

SEQ ID NO: 9154 - protein, 10 aa, Homo sapiens
  Heavy chain CDR3 for antibody 4577 (IGHV3-30)
AREWYGGMDV

SEQ ID NO: 9155 - protein, 10 aa, Homo sapiens
  Light chain CDR3 for antibody 4578 (IGKV3-11)
QQRSNWPIFT

SEQ ID NO: 9156 - protein, 12 aa, Homo sapiens
  Heavy chain CDR3 for antibody 4578 (IGHV4-59)
ARDRSGWAYFDY

SEQ ID NO: 9157 - protein, 9 aa, Homo sapiens
  Light chain CDR3 for antibody 4579 (IGKV1-33)
QQYDNLPFT

SEQ ID NO: 9158 - protein, 11 aa, Homo sapiens
  Heavy chain CDR3 for antibody 4579 (IGHV3-33)
ARDILTGFLDH

SEQ ID NO: 9159 - protein, 9 aa, Homo sapiens
  Light chain CDR3 for antibody 4580 (IGKV2D-28)
MQVLQTPFT

SEQ ID NO: 9160 - protein, 16 aa, Homo sapiens
  Heavy chain CDR3 for antibody 4580 (IGHV4-59)
ARDTPYYSGSGRPFDS

SEQ ID NO: 9161 - protein, 9 aa, Homo sapiens
  Light chain CDR3 for antibody 4581 (IGKV5-2)
LQHDNFPWT

SEQ ID NO: 9162 - protein, 14 aa, Homo sapiens
  Heavy chain CDR3 for antibody 4581 (IGHV3-33)
ARDRGRHNYFGMDV

SEQ ID NO: 9163 - protein, 9 aa, Homo sapiens
  Light chain CDR3 for antibody 4582 (IGKV3-20)
QQYGSSPYT

SEQ ID NO: 9164 - protein, 9 aa, Homo sapiens
  Heavy chain CDR3 for antibody 4582 (IGHV3-30)
ARGRVSLDV

SEQ ID NO: 9165 - protein, 9 aa, Homo sapiens
  Light chain CDR3 for antibody 4583 (IGKV5-2)
LQHDKFPYT

SEQ ID NO: 9166 - protein, 14 aa, Homo sapiens
  Heavy chain CDR3 for antibody 4583 (IGHV3-33)
ARGYGSGSYYSFDY

SEQ ID NO: 9167 - protein, 9 aa, Homo sapiens
  Light chain CDR3 for antibody 4584 (IGKV1-39)
QQSYSTPLT

SEQ ID NO: 9168 - protein, 11 aa, Homo sapiens
  Heavy chain CDR3 for antibody 4584 (IGHV4-59)
VRERGYYGMDV

SEQ ID NO: 9169 - protein, 9 aa, Homo sapiens
  Light chain CDR3 for antibody 4585 (IGKV1-6)
LQDYNYPYT

SEQ ID NO: 9170 - protein, 20 aa, Homo sapiens
  Heavy chain CDR3 for antibody 4585 (IGHV3-33)
ARTMGSGSYYKAYYYYVMDV

SEQ ID NO: 9171 - protein, 8 aa, Homo sapiens
  Light chain CDR3 for antibody 4586 (IGKV3-11)
QQRSNWLT

SEQ ID NO: 9172 - protein, 16 aa, Homo sapiens
  Heavy chain CDR3 for antibody 4586 (IGHV1-24)
ATEDSSSYYYYYGMDV

SEQ ID NO: 9173 - protein, 9 aa, Homo sapiens
  Light chain CDR3 for antibody 4587 (IGKV3-11)
QQRINWPWT

SEQ ID NO: 9174 - protein, 13 aa, Homo sapiens
  Heavy chain CDR3 for antibody 4587 (IGHV4-39)
ARRDVLAPAAFDY

SEQ ID NO: 9175 - protein, 9 aa, Homo sapiens
  Light chain CDR3 for antibody 4588 (IGKV1-9)
QQVKSYPYT

SEQ ID NO: 9176 - protein, 14 aa, Homo sapiens
  Heavy chain CDR3 for antibody 4588 (IGHV3-33)
ARDWNDVYYYGMDV

SEQ ID NO: 9177 - protein, 9 aa, Homo sapiens
  Light chain CDR3 for antibody 4589 (IGKV1D-13)
QQFNNYPHT

SEQ ID NO: 9178 - protein, 12 aa, Homo sapiens
  Heavy chain CDR3 for antibody 4589 (IGHV3-33)
AREGTGGNWFDP

SEQ ID NO: 9179 - protein, 9 aa, Homo sapiens
  Light chain CDR3 for antibody 4590 (IGKV3D-7)
QQDYNLPYT

SEQ ID NO: 9180 - protein, 14 aa, Homo sapiens
  Heavy chain CDR3 for antibody 4590 (IGHV3-33)
ARAGSGYDRDWFDP

SEQ ID NO: 9181 - protein, 9 aa, Homo sapiens
  Light chain CDR3 for antibody 4591 (IGKV1D-16)
QQYNSYPYT

SEQ ID NO: 9182 - protein, 12 aa, Homo sapiens
  Heavy chain CDR3 for antibody 4591 (IGHV1-18)
ARAPYNWNDPDY

SEQ ID NO: 9183 - protein, 9 aa, Homo sapiens
  Light chain CDR3 for antibody 4592 (IGKV1-9)
QQLNGYPFT

SEQ ID NO: 9184 - protein, 11 aa, Homo sapiens
  Heavy chain CDR3 for antibody 4592 (IGHV3-33)
ARARYTTGLDY

SEQ ID NO: 9185 - protein, 10 aa, Homo sapiens
  Light chain CDR3 for antibody 4593 (IGKV1-17)
LQHNSYPMYT

SEQ ID NO: 9186 - protein, 15 aa, Homo sapiens
  Heavy chain CDR3 for antibody 4593 (IGHV3-33)
ARGYYYGSGSFPVDY

SEQ ID NO: 9187 - protein, 8 aa, Homo sapiens
  Light chain CDR3 for antibody 4594 (IGKV3-20)
QQYGRSFT

SEQ ID NO: 9188 - protein, 13 aa, Homo sapiens
  Heavy chain CDR3 for antibody 4594 (IGHV3-33)
ARDWGYSHGYFDY

SEQ ID NO: 9189 - protein, 9 aa, Homo sapiens
  Light chain CDR3 for antibody 4595 (IGKV6-21)
HQSTSLPFT

SEQ ID NO: 9190 - protein, 14 aa, Homo sapiens
  Heavy chain CDR3 for antibody 4595 (IGHV4-39)
ARDSGYDYYYAMDV

SEQ ID NO: 9191 - protein, 9 aa, Homo sapiens
  Light chain CDR3 for antibody 4596 (IGKV1-39)
QQSYSTPLT

SEQ ID NO: 9192 - protein, 18 aa, Homo sapiens
  Heavy chain CDR3 for antibody 4596 (IGHV1-18)
ARDPNYYGSGSYYNYFDY

SEQ ID NO: 9193 - protein, 9 aa, Homo sapiens
  Light chain CDR3 for antibody 4597 (IGKV6-21)
HQSSSLPYT

SEQ ID NO: 9194 - protein, 16 aa, Homo sapiens
  Heavy chain CDR3 for antibody 4597 (IGHV3-33)
ARPTYYDILTGYPFDY

SEQ ID NO: 9195 - protein, 9 aa, Homo sapiens
  Light chain CDR3 for antibody 4598 (IGKV6-21)
HQSSSLPYT

SEQ ID NO: 9196 - protein, 15 aa, Homo sapiens
  Heavy chain CDR3 for antibody 4598 (IGHV1-18)
ARRSPNWGHYYGMDV

SEQ ID NO: 9197 - protein, 9 aa, Homo sapiens
  Light chain CDR3 for antibody 4599 (IGKV3-20)
QQYGSSPYT

SEQ ID NO: 9198 - protein, 18 aa, Homo sapiens
  Heavy chain CDR3 for antibody 4599 (IGHV3-33)
AREGYDILTGYYNVKFDY

SEQ ID NO: 9199 - protein, 9 aa, Homo sapiens
  Light chain CDR3 for antibody 4600 (IGKV6-21)
HQSSSLPYT

SEQ ID NO: 9200 - protein, 11 aa, Homo sapiens
  Heavy chain CDR3 for antibody 4600 (IGHV4-39)
ARLLVGATTDY

SEQ ID NO: 9201 - protein, 9 aa, Homo sapiens
  Light chain CDR3 for antibody 4601 (IGKV2-30)
MQGTHWPLT

SEQ ID NO: 9202 - protein, 16 aa, Homo sapiens
  Heavy chain CDR3 for antibody 4601 (IGHV3-23)
ARNWNDVGDYYYGMDV

SEQ ID NO: 9203 - protein, 9 aa, Homo sapiens
  Light chain CDR3 for antibody 4602 (IGKV3-11)
QQRSNWPPT

SEQ ID NO: 9204 - protein, 20 aa, Homo sapiens
  Heavy chain CDR3 for antibody 4602 (IGHV3-11)
ARGGATLIRGLIDYYYGMDV

SEQ ID NO: 9205 - protein, 9 aa, Homo sapiens
  Light chain CDR3 for antibody 4603 (IGKV1-9)
QQLISYPLT

SEQ ID NO: 9206 - protein, 15 aa, Homo sapiens
  Heavy chain CDR3 for antibody 4603 (IGHV3-33)
ARRGYNDYDPYGMDV

SEQ ID NO: 9207 - protein, 8 aa, Homo sapiens
  Light chain CDR3 for antibody 4604 (IGKV3-15)
QQYNNWPT

SEQ ID NO: 9208 - protein, 13 aa, Homo sapiens
  Heavy chain CDR3 for antibody 4604 (IGHV3-33)
ARKAYGDYFYFDY

SEQ ID NO: 9209 - protein, 9 aa, Homo sapiens
  Light chain CDR3 for antibody 4605 (IGKV3D-7)
QQDYNLPYT

SEQ ID NO: 9210 - protein, 13 aa, Homo sapiens
  Heavy chain CDR3 for antibody 4605 (IGHV1-24)
ATSMITFGGAFDY

SEQ ID NO: 9211 - protein, 9 aa, Homo sapiens
  Light chain CDR3 for antibody 4606 (IGKV6-21)
HQSSSLPHT

SEQ ID NO: 9212 - protein, 10 aa, Homo sapiens
  Heavy chain CDR3 for antibody 4606 (IGHV3-33)
ARDPWIYSGY

SEQ ID NO: 9213 - protein, 9 aa, Homo sapiens
  Light chain CDR3 for antibody 4607 (IGKV1D-13)
QQFNNYPHT

SEQ ID NO: 9214 - protein, 11 aa, Homo sapiens
  Heavy chain CDR3 for antibody 4607 (IGHV3-23)
AKAGIVGCLDV

SEQ ID NO: 9215 - protein, 9 aa, Homo sapiens
  Light chain CDR3 for antibody 4608 (IGKV2D-28)
MQALQTPPT

SEQ ID NO: 9216 - protein, 14 aa, Homo sapiens
  Heavy chain CDR3 for antibody 4608 (IGHV3-33)
ARGAAAGNFYGLDV

SEQ ID NO: 9217 - protein, 9 aa, Homo sapiens
  Light chain CDR3 for antibody 4609 (IGKV1-27)
QKYNSAPYT

SEQ ID NO: 9218 - protein, 12 aa, Homo sapiens
  Heavy chain CDR3 for antibody 4609 (IGHV4-39)
ARHGSGSSYFDY

SEQ ID NO: 9219 - protein, 8 aa, Homo sapiens
  Light chain CDR3 for antibody 4610 (IGKV3-11)
QQRSNWLT

SEQ ID NO: 9220 - protein, 17 aa, Homo sapiens
  Heavy chain CDR3 for antibody 4610 (IGHV4-59)
ARDFLVRGEGSYYGMDV

SEQ ID NO: 9221 - protein, 9 aa, Homo sapiens
  Light chain CDR3 for antibody 4611 (IGKV3-11)
QQRSNWPLT

SEQ ID NO: 9222 - protein, 18 aa, Homo sapiens
  Heavy chain CDR3 for antibody 4611 (IGHV3-30)
ARDRHHDILTGYSDAFEI

SEQ ID NO: 9223 - protein, 9 aa, Homo sapiens
  Light chain CDR3 for antibody 4612 (IGKV1-9)
QQLNSYPLT

SEQ ID NO: 9224 - protein, 12 aa, Homo sapiens
  Heavy chain CDR3 for antibody 4612 (IGHV3-23)
AKEGLGSDYESY

SEQ ID NO: 9225 - protein, 10 aa, Homo sapiens
  Light chain CDR3 for antibody 4613 (IGKV3-11)
QQRSNWPIFT

SEQ ID NO: 9226 - protein, 15 aa, Homo sapiens
  Heavy chain CDR3 for antibody 4613 (IGHV3-66)
ARDSRPEITGPPFDY

SEQ ID NO: 9227 - protein, 9 aa, Homo sapiens
  Light chain CDR3 for antibody 4614 (IGKV1D-13)
QQFNNYPYT

SEQ ID NO: 9228 - protein, 17 aa, Homo sapiens
  Heavy chain CDR3 for antibody 4614 (IGHV1-8)
ARGDYYGSGSPYWYFDL

SEQ ID NO: 9229 - protein, 9 aa, Homo sapiens
  Light chain CDR3 for antibody 4615 (IGKV1-17)
LQHNSYPYT

SEQ ID NO: 9230 - protein, 14 aa, Homo sapiens
  Heavy chain CDR3 for antibody 4615 (IGHV3-33)
ARDGIVRATDAFAI

SEQ ID NO: 9231 - protein, 9 aa, Homo sapiens
  Light chain CDR3 for antibody 4616 (IGKV1-27)
QKYNSAPYT

SEQ ID NO: 9232 - protein, 23 aa, Homo sapiens
  Heavy chain CDR3 for antibody 4616 (IGHV3-11)
ARDEGVTMVRGVISYYYYYGMDV

SEQ ID NO: 9233 - protein, 9 aa, Homo sapiens
  Light chain CDR3 for antibody 4617 (IGKV5-2)
LQHDNFPYT

SEQ ID NO: 9234 - protein, 11 aa, Homo sapiens
  Heavy chain CDR3 for antibody 4617 (IGHV4-59)
ARSLRYSFFDY

SEQ ID NO: 9235 - protein, 9 aa, Homo sapiens
  Light chain CDR3 for antibody 4618 (IGKV5-2)
LQHDKFPYT

SEQ ID NO: 9236 - protein, 16 aa, Homo sapiens
  Heavy chain CDR3 for antibody 4618 (IGHV3-64)
ARGRYFDWLLGDWFDP

SEQ ID NO: 9237 - protein, 9 aa, Homo sapiens
  Light chain CDR3 for antibody 4619 (IGKV1-5)
QQYNSYPYT

SEQ ID NO: 9238 - protein, 13 aa, Homo sapiens
  Heavy chain CDR3 for antibody 4619 (IGHV4-61)
ASRYSSGWYPFDY

SEQ ID NO: 9239 - protein, 9 aa, Homo sapiens
  Light chain CDR3 for antibody 4620 (IGKV1-6)
LQDYNYPYT

SEQ ID NO: 9240 - protein, 14 aa, Homo sapiens
  Heavy chain CDR3 for antibody 4620 (IGHV3-64)
ARGGGAVTGTNFDY

SEQ ID NO: 9241 - protein, 9 aa, Homo sapiens
  Light chain CDR3 for antibody 4621 (IGKV1-9)
QQYNTYSRT

SEQ ID NO: 9242 - protein, 12 aa, Homo sapiens
  Heavy chain CDR3 for antibody 4621 (IGHV3-13)
VREAGIPDAFDI

SEQ ID NO: 9243 - protein, 9 aa, Homo sapiens
  Light chain CDR3 for antibody 4622 (IGKV2-30)
MQGTHWPLT

SEQ ID NO: 9244 - protein, 8 aa, Homo sapiens
  Heavy chain CDR3 for antibody 4622 (IGHV3-33)
ARDRGFDY

SEQ ID NO: 9245 - protein, 8 aa, Homo sapiens
  Light chain CDR3 for antibody 4623 (IGKV3-20)
QQYGRSFT

SEQ ID NO: 9246 - protein, 14 aa, Homo sapiens
  Heavy chain CDR3 for antibody 4623 (IGHV4-39)
ARDSGYDYYYGMDV

SEQ ID NO: 9247 - protein, 9 aa, Homo sapiens
  Light chain CDR3 for antibody 4624 (IGKV1-39)
QQSYSTPWT

SEQ ID NO: 9248 - protein, 14 aa, Homo sapiens
  Heavy chain CDR3 for antibody 4624 (IGHV3-33)
ARDKSYPLSYGMDV

SEQ ID NO: 9249 - protein, 9 aa, Homo sapiens
  Light chain CDR3 for antibody 4625 (IGKV3D-7)
QQDYNLPLT

SEQ ID NO: 9250 - protein, 15 aa, Homo sapiens
  Heavy chain CDR3 for antibody 4625 (IGHV3-23)
AKDGGWNYYYYGMDV

SEQ ID NO: 9251 - protein, 9 aa, Homo sapiens
  Light chain CDR3 for antibody 4626 (IGKV6-21)
HQSSSLPYT

SEQ ID NO: 9252 - protein, 10 aa, Homo sapiens
  Heavy chain CDR3 for antibody 4626 (IGHV3-33)
ARDLRADFDY

SEQ ID NO: 9253 - protein, 9 aa, Homo sapiens
  Light chain CDR3 for antibody 4627 (IGKV2-30)
MQGTHWPLT

SEQ ID NO: 9254 - protein, 18 aa, Homo sapiens
  Heavy chain CDR3 for antibody 4627 (IGHV3-33)
ARGGYSSGWDYYYYGMDV

SEQ ID NO: 9255 - protein, 9 aa, Homo sapiens
  Light chain CDR3 for antibody 4628 (IGKV1-39)
QQSYSTPLT

SEQ ID NO: 9256 - protein, 8 aa, Homo sapiens
  Heavy chain CDR3 for antibody 4628 (IGHV3-23)
AKESLLDY

SEQ ID NO: 9257 - protein, 9 aa, Homo sapiens
  Light chain CDR3 for antibody 4629 (IGKV1-6)
LQDYNYPWT

SEQ ID NO: 9258 - protein, 14 aa, Homo sapiens
  Heavy chain CDR3 for antibody 4629 (IGHV3-23)
AKGGDILTGYYTDY

SEQ ID NO: 9259 - protein, 9 aa, Homo sapiens
  Light chain CDR3 for antibody 4630 (IGKV1D-16)
QQYNSYPLT

SEQ ID NO: 9260 - protein, 16 aa, Homo sapiens
  Heavy chain CDR3 for antibody 4630 (IGHV4-39)
ARHPLILTGYPNWFDP

SEQ ID NO: 9261 - protein, 9 aa, Homo sapiens
  Light chain CDR3 for antibody 4631 (IGKV1-17)
LQHNSYPWT

SEQ ID NO: 9262 - protein, 17 aa, Homo sapiens
  Heavy chain CDR3 for antibody 4631 (IGHV4-39)
AGRLTYYYGSGSPSFDY

SEQ ID NO: 9263 - protein, 9 aa, Homo sapiens
  Light chain CDR3 for antibody 4632 (IGKV1D-13)
QQFNNYPHT

SEQ ID NO: 9264 - protein, 17 aa, Homo sapiens
  Heavy chain CDR3 for antibody 4632 (IGHV4-39)
ARQGWYYGSGSSLLFDY

SEQ ID NO: 9265 - protein, 9 aa, Homo sapiens
  Light chain CDR3 for antibody 4633 (IGKV3-20)
QQYGSSPYT

SEQ ID NO: 9266 - protein, 11 aa, Homo sapiens
  Heavy chain CDR3 for antibody 4633 (IGHV3-33)
ARDQGGSSFDY

SEQ ID NO: 9267 - protein, 9 aa, Homo sapiens
  Light chain CDR3 for antibody 4634 (IGKV2-30)
MQGTHWPLT

SEQ ID NO: 9268 - protein, 18 aa, Homo sapiens
  Heavy chain CDR3 for antibody 4634 (IGHV3-33)
ARERGYYGSDIYPAAFDI

SEQ ID NO: 9269 - protein, 8 aa, Homo sapiens
  Light chain CDR3 for antibody 4635 (IGKV6-21)
HQSSSLPT

SEQ ID NO: 9270 - protein, 12 aa, Homo sapiens
  Heavy chain CDR3 for antibody 4635 (IGHV4-39)
ARHGSGSSYFDY

SEQ ID NO: 9271 - protein, 9 aa, Homo sapiens
  Light chain CDR3 for antibody 4636 (IGKV3-20)
QQYGSSPYT

SEQ ID NO: 9272 - protein, 9 aa, Homo sapiens
  Heavy chain CDR3 for antibody 4636 (IGHV3-33)
AANSYGLDY

SEQ ID NO: 9273 - protein, 9 aa, Homo sapiens
  Light chain CDR3 for antibody 4637 (IGKV1-17)
LQHNSYPPT

SEQ ID NO: 9274 - protein, 18 aa, Homo sapiens
  Heavy chain CDR3 for antibody 4637 (IGHV3-33)
VREGGYYGSGSYPDAFDI

SEQ ID NO: 9275 - protein, 9 aa, Homo sapiens
  Light chain CDR3 for antibody 4638 (IGKV1-9)
QQLKSYLYT

SEQ ID NO: 9276 - protein, 20 aa, Homo sapiens
  Heavy chain CDR3 for antibody 4638 (IGHV3-20)
ARDLCSSTSCYGYYYYGMDV

SEQ ID NO: 9277 - protein, 8 aa, Homo sapiens
  Light chain CDR3 for antibody 4639 (IGKV3-20)
QQYGRSFT

SEQ ID NO: 9278 - protein, 13 aa, Homo sapiens
  Heavy chain CDR3 for antibody 4639 (IGHV4-39)
ARHEVMIRGVFDY

SEQ ID NO: 9279 - protein, 9 aa, Homo sapiens
  Light chain CDR3 for antibody 4640 (IGKV6-21)
HQSSSLPYT

SEQ ID NO: 9280 - protein, 17 aa, Homo sapiens
  Heavy chain CDR3 for antibody 4640 (IGHV3-33)
ARENDILTGSYYYGMDV

SEQ ID NO: 9281 - protein, 9 aa, Homo sapiens
  Light chain CDR3 for antibody 4641 (IGKV2-30)
MQGTHWPLT

SEQ ID NO: 9282 - protein, 17 aa, Homo sapiens
  Heavy chain CDR3 for antibody 4641 (IGHV3-23)
AKDGSFYSSGWYDAFDI

SEQ ID NO: 9283 - protein, 9 aa, Homo sapiens
  Light chain CDR3 for antibody 4642 (IGKV6-21)
HQSSSLPYT

SEQ ID NO: 9284 - protein, 20 aa, Homo sapiens
  Heavy chain CDR3 for antibody 4642 (IGHV3-33)
ARDLGWATMVRGVIRAPFDY

SEQ ID NO: 9285 - protein, 9 aa, Homo sapiens
  Light chain CDR3 for antibody 4643 (IGKV1-16)
QQYNRYPYT

SEQ ID NO: 9286 - protein, 13 aa, Homo sapiens
  Heavy chain CDR3 for antibody 4643 (IGHV4-39)
ARHHYGSGSLRDY

SEQ ID NO: 9287 - protein, 8 aa, Homo sapiens
  Light chain CDR3 for antibody 4644 (IGKV3-11)
LQRGNWPT

SEQ ID NO: 9288 - protein, 13 aa, Homo sapiens
  Heavy chain CDR3 for antibody 4644 (IGHV3-33)
ARDYCGGDCYLDY

SEQ ID NO: 9289 - protein, 9 aa, Homo sapiens
  Light chain CDR3 for antibody 4645 (IGKV1-16)
QQYDSYPPT

SEQ ID NO: 9290 - protein, 17 aa, Homo sapiens
  Heavy chain CDR3 for antibody 4645 (IGHV4-59)
ARDFLVRGEGSYYGMDV

SEQ ID NO: 9291 - protein, 9 aa, Homo sapiens
  Light chain CDR3 for antibody 4646 (IGKV1-6)
LQDYKSPFT

SEQ ID NO: 9292 - protein, 8 aa, Homo sapiens
  Heavy chain CDR3 for antibody 4646 (IGHV3-23)
AETFLFDY

SEQ ID NO: 9293 - protein, 9 aa, Homo sapiens
  Light chain CDR3 for antibody 4647 (IGKV1-9)
QQLNSYPLT

SEQ ID NO: 9294 - protein, 20 aa, Homo sapiens
  Heavy chain CDR3 for antibody 4647 (IGHV3-33)
ARDNDSSGYYDYYYYYGMDV

SEQ ID NO: 9295 - protein, 9 aa, Homo sapiens
  Light chain CDR3 for antibody 4648 (IGKV2-30)
MQGTHWPLT

SEQ ID NO: 9296 - protein, 16 aa, Homo sapiens
  Heavy chain CDR3 for antibody 4648 (IGHV1-24)
ATEDSSSTYYYYGLDV

SEQ ID NO: 9297 - protein, 8 aa, Homo sapiens
  Light chain CDR3 for antibody 4649 (IGKV1-5)
QQYNSYWT

SEQ ID NO: 9298 - protein, 14 aa, Homo sapiens
  Heavy chain CDR3 for antibody 4649 (IGHV3-33)
ARQYSYGYPYYFDY

SEQ ID NO: 9299 - protein, 9 aa, Homo sapiens
  Light chain CDR3 for antibody 4650 (IGKV1-27)
QKYNSAPHT

SEQ ID NO: 9300 - protein, 14 aa, Homo sapiens
  Heavy chain CDR3 for antibody 4650 (IGHV3-33)
ARAGSGYDRDWFDP

SEQ ID NO: 9301 - protein, 9 aa, Homo sapiens
  Light chain CDR3 for antibody 4651 (IGKV3D-20)
QQYGSSPYT

SEQ ID NO: 9302 - protein, 11 aa, Homo sapiens
  Heavy chain CDR3 for antibody 4651 (IGHV4-39)
ARLLVGATTDY

SEQ ID NO: 9303 - protein, 9 aa, Homo sapiens
  Light chain CDR3 for antibody 4652 (IGKV1-27)
QKYNSAPYT

SEQ ID NO: 9304 - protein, 16 aa, Homo sapiens
  Heavy chain CDR3 for antibody 4652 (IGHV3-33)
AREGGLIAAAGTGFDY

SEQ ID NO: 9305 - protein, 9 aa, Homo sapiens
  Light chain CDR3 for antibody 4653 (IGKV1D-13)
QQFNNYPYT

SEQ ID NO: 9306 - protein, 11 aa, Homo sapiens
  Heavy chain CDR3 for antibody 4653 (IGHV4-4)
ARDGVRGVFDI

SEQ ID NO: 9307 - protein, 9 aa, Homo sapiens
  Light chain CDR3 for antibody 4654 (IGKV3-11)
QQRSNWPPT

SEQ ID NO: 9308 - protein, 17 aa, Homo sapiens
  Heavy chain CDR3 for antibody 4654 (IGHV3-64)
ARERYYGSGSYYNWFDP

SEQ ID NO: 9309 - protein, 9 aa, Homo sapiens
  Light chain CDR3 for antibody 4655 (IGKV6-21)
HQSSSLPYT

SEQ ID NO: 9310 - protein, 14 aa, Homo sapiens
  Heavy chain CDR3 for antibody 4655 (IGHV3-33)
ARDGIVRATDAFAI

SEQ ID NO: 9311 - protein, 11 aa, Homo sapiens
  Light chain CDR3 for antibody 4656 (IGKV3-11)
QQRSNWPPTWT

SEQ ID NO: 9312 - protein, 14 aa, Homo sapiens
  Heavy chain CDR3 for antibody 4656 (IGHV3-33)
ARDWNDVYYYGMDV

SEQ ID NO: 9313 - protein, 9 aa, Homo sapiens
  Light chain CDR3 for antibody 4657 (IGKV4-1)
QQYYSTPWT

SEQ ID NO: 9314 - protein, 14 aa, Homo sapiens
  Heavy chain CDR3 for antibody 4657 (IGHV3-33)
ARGAAAGNFYGLDV

SEQ ID NO: 9315 - protein, 9 aa, Homo sapiens
  Light chain CDR3 for antibody 4658 (IGKV1-39)
QQSYSTPLT

SEQ ID NO: 9316 - protein, 15 aa, Homo sapiens
  Heavy chain CDR3 for antibody 4658 (IGHV3-11)
AREYSSGWYGDAFDI

SEQ ID NO: 9317 - protein, 8 aa, Homo sapiens
  Light chain CDR3 for antibody 4659 (IGKV1D-13)
QQFNNYPT

SEQ ID NO: 9318 - protein, 14 aa, Homo sapiens
  Heavy chain CDR3 for antibody 4659 (IGHV3-33)
ARAISGSSYWYFDL

SEQ ID NO: 9319 - protein, 8 aa, Homo sapiens
  Light chain CDR3 for antibody 4660 (IGKV1D-13)
QQFNNYPT

SEQ ID NO: 9320 - protein, 17 aa, Homo sapiens
  Heavy chain CDR3 for antibody 4660 (IGHV3-33)
ARVYYDILTGYSPAFDI

SEQ ID NO: 9321 - protein, 7 aa, Homo sapiens
  Light chain CDR3 for antibody 4661 (IGKV1-17)
LQHNSYP

SEQ ID NO: 9322 - protein, 18 aa, Homo sapiens
  Heavy chain CDR3 for antibody 4661 (IGHV1-46)
ARDGDYVWGSYRSDWFDP

SEQ ID NO: 9323 - protein, 11 aa, Homo sapiens
  Light chain CDR3 for antibody 4662 (IGKV3-11)
QQRSNWPPTWT

SEQ ID NO: 9324 - protein, 18 aa, Homo sapiens
  Heavy chain CDR3 for antibody 4662 (IGHV4-39)
ARQYYFGSGNYYRGWFDP

SEQ ID NO: 9325 - protein, 9 aa, Homo sapiens
  Light chain CDR3 for antibody 4663 (IGKV1D-16)
QQYNSYPYT

SEQ ID NO: 9326 - protein, 9 aa, Homo sapiens
  Heavy chain CDR3 for antibody 4663 (IGHV1-8)
ARGPRIMDV

SEQ ID NO: 9327 - protein, 9 aa, Homo sapiens
  Light chain CDR3 for antibody 4664 (IGKV1-39)
QQSYSTPLT

SEQ ID NO: 9328 - protein, 14 aa, Homo sapiens
  Heavy chain CDR3 for antibody 4664 (IGHV3-20)
AREGWFGDYYGMDV

SEQ ID NO: 9329 - protein, 9 aa, Homo sapiens
  Light chain CDR3 for antibody 4665 (IGKV2-30)
MQGTHWPLT

SEQ ID NO: 9330 - protein, 8 aa, Homo sapiens
  Heavy chain CDR3 for antibody 4665 (IGHV3-23)
AETFLFDY

SEQ ID NO: 9331 - protein, 8 aa, Homo sapiens
  Light chain CDR3 for antibody 4666 (IGKV1-6)
QQYNSYWT

SEQ ID NO: 9332 - protein, 16 aa, Homo sapiens
  Heavy chain CDR3 for antibody 4666 (IGHV3-33)
ARGYDMLTGDYYGMDV

SEQ ID NO: 9333 - protein, 9 aa, Homo sapiens
  Light chain CDR3 for antibody 4667 (IGKV3-20)
QQYGSSPYT

SEQ ID NO: 9334 - protein, 11 aa, Homo sapiens
  Heavy chain CDR3 for antibody 4667 (IGHV4-59)
AREDYGVPFDY

SEQ ID NO: 9335 - protein, 9 aa, Homo sapiens
  Light chain CDR3 for antibody 4668 (IGKV5-2)
LQHDNFPYT

SEQ ID NO: 9336 - protein, 17 aa, Homo sapiens
  Heavy chain CDR3 for antibody 4668 (IGHV3-23)
SKERNWNDGYYYFGMDA

SEQ ID NO: 9337 - protein, 9 aa, Homo sapiens
  Light chain CDR3 for antibody 4669 (IGKV1-27)
QKYNSAPYT

SEQ ID NO: 9338 - protein, 14 aa, Homo sapiens
  Heavy chain CDR3 for antibody 4669 (IGHV3-33)
AREGYSSGWDYFDH

SEQ ID NO: 9339 - protein, 9 aa, Homo sapiens
  Light chain CDR3 for antibody 4670 (IGKV1D-13)
QQFNNYPHT

SEQ ID NO: 9340 - protein, 17 aa, Homo sapiens
  Heavy chain CDR3 for antibody 4670 (IGHV3-33)
ARCGYSSSWYDPYYFDY

SEQ ID NO: 9341 - protein, 9 aa, Homo sapiens
  Light chain CDR3 for antibody 4671 (IGKV1-39)
QQSYRTPLT

SEQ ID NO: 9342 - protein, 11 aa, Homo sapiens
  Heavy chain CDR3 for antibody 4671 (IGHV4-59)
ARDRGHYGMDV

SEQ ID NO: 9343 - protein, 9 aa, Homo sapiens
  Light chain CDR3 for antibody 4672 (IGKV1-9)
QQLNSYPHT

SEQ ID NO: 9344 - protein, 14 aa, Homo sapiens
  Heavy chain CDR3 for antibody 4672 (IGHV3-33)
ARDLDIMATSPFAY

SEQ ID NO: 9345 - protein, 9 aa, Homo sapiens
  Light chain CDR3 for antibody 4673 (IGKV1D-16)
QQYNSYPYT

SEQ ID NO: 9346 - protein, 16 aa, Homo sapiens
  Heavy chain CDR3 for antibody 4673 (IGHV1-18)
ARGGGYSESYSNWFDP

SEQ ID NO: 9347 - protein, 9 aa, Homo sapiens
  Light chain CDR3 for antibody 4674 (IGKV3D-7)
QQDYNLPWT

SEQ ID NO: 9348 - protein, 10 aa, Homo sapiens
  Heavy chain CDR3 for antibody 4674 (IGHV3-23)
AKDHYGDYPY

SEQ ID NO: 9349 - protein, 9 aa, Homo sapiens
  Light chain CDR3 for antibody 4675 (IGKV1D-13)
QQFNNYPST

SEQ ID NO: 9350 - protein, 18 aa, Homo sapiens
  Heavy chain CDR3 for antibody 4675 (IGHV3-33)
ARGGYSSGWDYYYYGMDV

SEQ ID NO: 9351 - protein, 9 aa, Homo sapiens
  Light chain CDR3 for antibody 4676 (IGKV3D-7)
QQDYNLPLT

SEQ ID NO: 9352 - protein, 17 aa, Homo sapiens
  Heavy chain CDR3 for antibody 4676 (IGHV3-33)
ARCGYSSSWYDPYYFDY

SEQ ID NO: 9353 - protein, 10 aa, Homo sapiens
  Light chain CDR3 for antibody 4677 (IGKV1-27)
QKYNSAPMYT

SEQ ID NO: 9354 - protein, 11 aa, Homo sapiens
  Heavy chain CDR3 for antibody 4677 (IGHV4-59)
ARSIRYSVFDY

SEQ ID NO: 9355 - protein, 9 aa, Homo sapiens
  Light chain CDR3 for antibody 4678 (IGKV1-9)
QQLISYPLT

SEQ ID NO: 9356 - protein, 12 aa, Homo sapiens
  Heavy chain CDR3 for antibody 4678 (IGHV3-23)
AKDGWFGESLDY

SEQ ID NO: 9357 - protein, 9 aa, Homo sapiens
  Light chain CDR3 for antibody 4679 (IGKV6-21)
HQSSSLPYT

SEQ ID NO: 9358 - protein, 9 aa, Homo sapiens
  Heavy chain CDR3 for antibody 4679 (IGHV4-34)
AREKYYFDY

SEQ ID NO: 9359 - protein, 9 aa, Homo sapiens
  Light chain CDR3 for antibody 4680 (IGKV3D-20)
QQYGSSPYT

SEQ ID NO: 9360 - protein, 14 aa, Homo sapiens
  Heavy chain CDR3 for antibody 4680 (IGHV1-46)
ARAYYAFLTGAFDI

SEQ ID NO: 9361 - protein, 10 aa, Homo sapiens
  Light chain CDR3 for antibody 4681 (IGKV3-11)
QQRSNWPALT

SEQ ID NO: 9362 - protein, 12 aa, Homo sapiens
  Heavy chain CDR3 for antibody 4681 (IGHV4-61)
ARVDSSGWFFDY

SEQ ID NO: 9363 - protein, 11 aa, Homo sapiens
  Light chain CDR3 for antibody 4682 (IGKV3-11)
QQRSNWPPTWT

SEQ ID NO: 9364 - protein, 15 aa, Homo sapiens
  Heavy chain CDR3 for antibody 4682 (IGHV3-20)
ARDRGSSGWRDWFDP

SEQ ID NO: 9365 - protein, 8 aa, Homo sapiens
  Light chain CDR3 for antibody 4683 (IGKV3-11)
QQRSNWLT

SEQ ID NO: 9366 - protein, 7 aa, Homo sapiens
  Heavy chain CDR3 for antibody 4683 (IGHV1-46)
AREGGDY

SEQ ID NO: 9367 - protein, 9 aa, Homo sapiens
  Light chain CDR3 for antibody 4684 (IGKV1-33)
QQYDNLPFT

SEQ ID NO: 9368 - protein, 10 aa, Homo sapiens
  Heavy chain CDR3 for antibody 4684 (IGHV3-33)
ARDGSGSQPI

SEQ ID NO: 9369 - protein, 9 aa, Homo sapiens
  Light chain CDR3 for antibody 4685 (IGKV1-9)
QQLKSYLYT

SEQ ID NO: 9370 - protein, 14 aa, Homo sapiens
  Heavy chain CDR3 for antibody 4685 (IGHV1-18)
ARCFGSGSYGWFDP

SEQ ID NO: 9371 - protein, 9 aa, Homo sapiens
  Light chain CDR3 for antibody 4686 (IGKV1D-13)
QQFNNYPYT

SEQ ID NO: 9372 - protein, 19 aa, Homo sapiens
  Heavy chain CDR3 for antibody 4686 (IGHV4-59)
ARDRVVGATTYYYYYGMDV

SEQ ID NO: 9373 - protein, 10 aa, Homo sapiens
  Light chain CDR3 for antibody 4687 (IGKV3-11)
QQRSNWLMYT

SEQ ID NO: 9374 - protein, 16 aa, Homo sapiens
  Heavy chain CDR3 for antibody 4687 (IGHV3-23)
AKEGMVLRYFDWLWDY

SEQ ID NO: 9375 - protein, 9 aa, Homo sapiens
  Light chain CDR3 for antibody 4688 (IGKV1-16)
QQYNTYPLT

SEQ ID NO: 9376 - protein, 12 aa, Homo sapiens
  Heavy chain CDR3 for antibody 4688 (IGHV3-72)
ARVAQVEYYLDF

SEQ ID NO: 9377 - protein, 9 aa, Homo sapiens
  Light chain CDR3 for antibody 4689 (IGKV2-30)
MQGTHWPLT

SEQ ID NO: 9378 - protein, 13 aa, Homo sapiens
  Heavy chain CDR3 for antibody 4689 (IGHV3-33)
ARQSSGWFDAFDI

SEQ ID NO: 9379 - protein, 9 aa, Homo sapiens
  Light chain CDR3 for antibody 4690 (IGKV3-15)
QQYNNWPLT

SEQ ID NO: 9380 - protein, 17 aa, Homo sapiens
  Heavy chain CDR3 for antibody 4690 (IGHV1-18)
ARERYYGSGSYKYNMDV

SEQ ID NO: 9381 - protein, 9 aa, Homo sapiens
  Light chain CDR3 for antibody 4691 (IGKV1D-13)
QQFNNYPHT

SEQ ID NO: 9382 - protein, 12 aa, Homo sapiens
  Heavy chain CDR3 for antibody 4691 (IGHV3-23)
AKEGLGSDYEPY

SEQ ID NO: 9383 - protein, 9 aa, Homo sapiens
  Light chain CDR3 for antibody 4692 (IGKV2-30)
MQGTHWPLT

SEQ ID NO: 9384 - protein, 19 aa, Homo sapiens
  Heavy chain CDR3 for antibody 4692 (IGHV3-23)
AKDGRSGSYDYYYYYGMDV

SEQ ID NO: 9385 - protein, 9 aa, Homo sapiens
  Light chain CDR3 for antibody 4693 (IGKV1D-13)
QQFNNYPHT

SEQ ID NO: 9386 - protein, 15 aa, Homo sapiens
  Heavy chain CDR3 for antibody 4693 (IGHV3-33)
AKDRNSGYDWGGFDY

SEQ ID NO: 9387 - protein, 9 aa, Homo sapiens
  Light chain CDR3 for antibody 4694 (IGKV1D-13)
QHFNNYMYT

SEQ ID NO: 9388 - protein, 15 aa, Homo sapiens
  Heavy chain CDR3 for antibody 4694 (IGHV4-59)
ARDLGHYYGSVSIDY

SEQ ID NO: 9389 - protein, 9 aa, Homo sapiens
  Light chain CDR3 for antibody 4695 (IGKV3-20)
QQYGSSPYT

SEQ ID NO: 9390 - protein, 11 aa, Homo sapiens
  Heavy chain CDR3 for antibody 4695 (IGHV3-33)
ATERDMVRGDY

SEQ ID NO: 9391 - protein, 9 aa, Homo sapiens
  Light chain CDR3 for antibody 4696 (IGKV5-2)
LQHDNFPWT

SEQ ID NO: 9392 - protein, 13 aa, Homo sapiens
  Heavy chain CDR3 for antibody 4696 (IGHV1-24)
ATGYSINWYEFDY

SEQ ID NO: 9393 - protein, 9 aa, Homo sapiens
  Light chain CDR3 for antibody 4697 (IGKV1D-16)
QQYDSYPWT

SEQ ID NO: 9394 - protein, 12 aa, Homo sapiens
  Heavy chain CDR3 for antibody 4697 (IGHV3-33)
ASRDILTGYLGY

SEQ ID NO: 9395 - protein, 9 aa, Homo sapiens
  Light chain CDR3 for antibody 4698 (IGKV1-9)
QQLNSYPLT

SEQ ID NO: 9396 - protein, 14 aa, Homo sapiens
  Heavy chain CDR3 for antibody 4698 (IGHV1-24)
ATWLPLYYYYGMDV

SEQ ID NO: 9397 - protein, 9 aa, Homo sapiens
  Light chain CDR3 for antibody 4699 (IGKV6-21)
HQSSSLPHT

SEQ ID NO: 9398 - protein, 5 aa, Homo sapiens
  Heavy chain CDR3 for antibody 4699 (IGHV4-39)
ASLDY

SEQ ID NO: 9399 - protein, 10 aa, Homo sapiens
  Light chain CDR3 for antibody 4700 (IGKV1-39)
QQSYSTPMYT

SEQ ID NO: 9400 - protein, 19 aa, Homo sapiens
  Heavy chain CDR3 for antibody 4700 (IGHV3-33)
ARGVRLRFFDPYYYYGLDV

SEQ ID NO: 9401 - protein, 9 aa, Homo sapiens
  Light chain CDR3 for antibody 4701 (IGKV1-6)
LQDYNHPFT

SEQ ID NO: 9402 - protein, 18 aa, Homo sapiens
  Heavy chain CDR3 for antibody 4701 (IGHV3-33)
ARREGITLIFYYYYGMDV

SEQ ID NO: 9403 - protein, 9 aa, Homo sapiens
  Light chain CDR3 for antibody 4702 (IGKV3D-7)
QQDYEFPIT

SEQ ID NO: 9404 - protein, 16 aa, Homo sapiens
  Heavy chain CDR3 for antibody 4702 (IGHV4-59)
ARGRYFEWLLGDVFDI

SEQ ID NO: 9405 - protein, 8 aa, Homo sapiens
  Light chain CDR3 for antibody 4703 (IGKV1D-13)
QQFNNYPT

SEQ ID NO: 9406 - protein, 9 aa, Homo sapiens
  Heavy chain CDR3 for antibody 4703 (IGHV3-30)
ARDYFHFDY

SEQ ID NO: 9407 - protein, 8 aa, Homo sapiens
  Light chain CDR3 for antibody 4704 (IGKV1D-13)
QQFNNYPT

SEQ ID NO: 9408 - protein, 16 aa, Homo sapiens
  Heavy chain CDR3 for antibody 4704 (IGHV3-33)
ARDKNTDYDILTGFDY

SEQ ID NO: 9409 - protein, 9 aa, Homo sapiens
  Light chain CDR3 for antibody 4705 (IGKV5-2)
LQHDNFPYT

SEQ ID NO: 9410 - protein, 15 aa, Homo sapiens
  Heavy chain CDR3 for antibody 4705 (IGHV3-33)
ARDALAVTGTGWFDP

SEQ ID NO: 9411 - protein, 10 aa, Homo sapiens
  Light chain CDR3 for antibody 4706 (IGKV1-39)
QQSYSTPMYT

SEQ ID NO: 9412 - protein, 9 aa, Homo sapiens
  Heavy chain CDR3 for antibody 4706 (IGHV3-13)
ARDRWYFDL

SEQ ID NO: 9413 - protein, 9 aa, Homo sapiens
  Light chain CDR3 for antibody 4707 (IGKV2-30)
MQGTHWPLT

SEQ ID NO: 9414 - protein, 15 aa, Homo sapiens
  Heavy chain CDR3 for antibody 4707 (IGHV1-18)
ARGYCSSTSCYYFDY

SEQ ID NO: 9415 - protein, 9 aa, Homo sapiens
  Light chain CDR3 for antibody 4708 (IGKV1D-16)
QQYYSYPWT

SEQ ID NO: 9416 - protein, 9 aa, Homo sapiens
  Heavy chain CDR3 for antibody 4708 (IGHV4-59)
AREGGSGSL

SEQ ID NO: 9417 - protein, 8 aa, Homo sapiens
  Light chain CDR3 for antibody 4709 (IGKV1-5)
QQYNSYWT

SEQ ID NO: 9418 - protein, 18 aa, Homo sapiens
  Heavy chain CDR3 for antibody 4709 (IGHV3-33)
ARDYDSLTTYPEDYGMDV

SEQ ID NO: 9419 - protein, 9 aa, Homo sapiens
  Light chain CDR3 for antibody 4710 (IGKV1-39)
QQSYSTPIT

SEQ ID NO: 9420 - protein, 18 aa, Homo sapiens
  Heavy chain CDR3 for antibody 4710 (IGHV3-33)
ARGGYDILTGYYRTGMDV

SEQ ID NO: 9421 - protein, 9 aa, Homo sapiens
  Light chain CDR3 for antibody 4711 (IGKV3-20)
QQYGSYPYT

SEQ ID NO: 9422 - protein, 12 aa, Homo sapiens
  Heavy chain CDR3 for antibody 4711 (IGHV3-23)
AKGYTSFWYFDL

SEQ ID NO: 9423 - protein, 9 aa, Homo sapiens
  Light chain CDR3 for antibody 4712 (IGKV1D-13)
QQFNNYPYT

SEQ ID NO: 9424 - protein, 13 aa, Homo sapiens
  Heavy chain CDR3 for antibody 4712 (IGHV3-33)
ARVHFDWLDAFDI

SEQ ID NO: 9425 - protein, 9 aa, Homo sapiens
  Light chain CDR3 for antibody 4713 (IGKV5-2)
LQHDNFPWT

SEQ ID NO: 9426 - protein, 20 aa, Homo sapiens
  Heavy chain CDR3 for antibody 4713 (IGHV4-34)
ARRMVRGVKKTYYYYYGLDV

SEQ ID NO: 9427 - protein, 9 aa, Homo sapiens
  Light chain CDR3 for antibody 4714 (IGKV6-21)
HQSSSLPYT

SEQ ID NO: 9428 - protein, 15 aa, Homo sapiens
  Heavy chain CDR3 for antibody 4714 (IGHV1-18)
ARIYYGSGSSYYFDY

SEQ ID NO: 9429 - protein, 9 aa, Homo sapiens
  Light chain CDR3 for antibody 4715 (IGKV2-30)
MQGTHWPLT

SEQ ID NO: 9430 - protein, 10 aa, Homo sapiens
  Heavy chain CDR3 for antibody 4715 (IGHV3-33)
AREWFGGFDI

SEQ ID NO: 9431 - protein, 8 aa, Homo sapiens
  Light chain CDR3 for antibody 4716 (IGKV1-5)
QQYNSYYT

SEQ ID NO: 9432 - protein, 14 aa, Homo sapiens
  Heavy chain CDR3 for antibody 4716 (IGHV3-33)
ARTTAAAGPRDFQH

SEQ ID NO: 9433 - protein, 9 aa, Homo sapiens
  Light chain CDR3 for antibody 4717 (IGKV3-11)
QQRSNWMYT

SEQ ID NO: 9434 - protein, 11 aa, Homo sapiens
  Heavy chain CDR3 for antibody 4717 (IGHV3-33)
AREAANWGFDY

SEQ ID NO: 9435 - protein, 8 aa, Homo sapiens
  Light chain CDR3 for antibody 4718 (IGKV1D-13)
QQFNNYPT

SEQ ID NO: 9436 - protein, 16 aa, Homo sapiens
  Heavy chain CDR3 for antibody 4718 (IGHV4-59)
ARDTPYYSGSGRPFDS

SEQ ID NO: 9437 - protein, 9 aa, Homo sapiens
  Light chain CDR3 for antibody 4719 (IGKV1-9)
QQLNSYPLT

SEQ ID NO: 9438 - protein, 11 aa, Homo sapiens
  Heavy chain CDR3 for antibody 4719 (IGHV3-64)
ARERGSYAFDI

SEQ ID NO: 9439 - protein, 9 aa, Homo sapiens
  Light chain CDR3 for antibody 4720 (IGKV3-11)
QQRSNWPWT

SEQ ID NO: 9440 - protein, 13 aa, Homo sapiens
  Heavy chain CDR3 for antibody 4720 (IGHV4-39)
ARHEVMIRGVFDY

SEQ ID NO: 9441 - protein, 8 aa, Homo sapiens
  Light chain CDR3 for antibody 4721 (IGKV3D-7)
QQDYNLLT

SEQ ID NO: 9442 - protein, 13 aa, Homo sapiens
  Heavy chain CDR3 for antibody 4721 (IGHV3-33)
ARQSSGWFDAFDI

SEQ ID NO: 9443 - protein, 9 aa, Homo sapiens
  Light chain CDR3 for antibody 4722 (IGKV5-2)
LQHDNFPYT

SEQ ID NO: 9444 - protein, 18 aa, Homo sapiens
  Heavy chain CDR3 for antibody 4722 (IGHV3-33)
ARRGVGARGYYYYYGMDV

SEQ ID NO: 9445 - protein, 10 aa, Homo sapiens
  Light chain CDR3 for antibody 4723 (IGKV1-27)
QKYNSAPMYT

SEQ ID NO: 9446 - protein, 13 aa, Homo sapiens
  Heavy chain CDR3 for antibody 4723 (IGHV4-34)
ASNFYYYYYGMDV

SEQ ID NO: 9447 - protein, 9 aa, Homo sapiens
  Light chain CDR3 for antibody 4724 (IGKV3-20)
QQYGSSPYT

SEQ ID NO: 9448 - protein, 10 aa, Homo sapiens
  Heavy chain CDR3 for antibody 4724 (IGHV1-18)
ARGPTSDVDY

SEQ ID NO: 9449 - protein, 9 aa, Homo sapiens
  Light chain CDR3 for antibody 4725 (IGKV3-11)
QQRINWPWT

SEQ ID NO: 9450 - protein, 12 aa, Homo sapiens
  Heavy chain CDR3 for antibody 4725 (IGHV4-39)
ARQMVREGWFDP

SEQ ID NO: 9451 - protein, 10 aa, Homo sapiens
  Light chain CDR3 for antibody 4726 (IGKV3-11)
QQRSNWPIFT

SEQ ID NO: 9452 - protein, 14 aa, Homo sapiens
  Heavy chain CDR3 for antibody 4726 (IGHV3-23)
ANWAYDILTGYLDY

SEQ ID NO: 9453 - protein, 8 aa, Homo sapiens
  Light chain CDR3 for antibody 4727 (IGKV3D-7)
QQDYNLLT

SEQ ID NO: 9454 - protein, 9 aa, Homo sapiens
  Heavy chain CDR3 for antibody 4727 (IGHV3-33)
ARATVGVDY

SEQ ID NO: 9455 - protein, 9 aa, Homo sapiens
  Light chain CDR3 for antibody 4728 (IGKV3-11)
QQRINWPWT

SEQ ID NO: 9456 - protein, 9 aa, Homo sapiens
  Heavy chain CDR3 for antibody 4728 (IGHV4-59)
ARGGASFDY

SEQ ID NO: 9457 - protein, 10 aa, Homo sapiens
  Light chain CDR3 for antibody 4729 (IGKV1-17)
LQHNSYPMYT

SEQ ID NO: 9458 - protein, 14 aa, Homo sapiens
  Heavy chain CDR3 for antibody 4729 (IGHV3-33)
ARDNILTVYYLFDY

SEQ ID NO: 9459 - protein, 9 aa, Homo sapiens
  Light chain CDR3 for antibody 4730 (IGKV3D-20)
QQYGSSPYT

SEQ ID NO: 9460 - protein, 20 aa, Homo sapiens
  Heavy chain CDR3 for antibody 4730 (IGHV3-33)
ARDLGWATMVRGVIRAPFDY

SEQ ID NO: 9461 - protein, 8 aa, Homo sapiens
  Light chain CDR3 for antibody 4731 (IGKV3D-7)
QQDYNLLT

SEQ ID NO: 9462 - protein, 14 aa, Homo sapiens
  Heavy chain CDR3 for antibody 4731 (IGHV3-33)
ARAGSGYDRDWFDP

SEQ ID NO: 9463 - protein, 9 aa, Homo sapiens
  Light chain CDR3 for antibody 4732 (IGKV1-39)
QQSYRTPLT

SEQ ID NO: 9464 - protein, 14 aa, Homo sapiens
  Heavy chain CDR3 for antibody 4732 (IGHV3-20)
ARDGGSTSFDWFDP

SEQ ID NO: 9465 - protein, 8 aa, Homo sapiens
  Light chain CDR3 for antibody 4733 (IGKV6-21)
HQSSSLPT

SEQ ID NO: 9466 - protein, 13 aa, Homo sapiens
  Heavy chain CDR3 for antibody 4733 (IGHV3-11)
ARDGGAAAGTWDS

SEQ ID NO: 9467 - protein, 9 aa, Homo sapiens
  Light chain CDR3 for antibody 4734 (IGKV4-1)
QQYYSTPWT

SEQ ID NO: 9468 - protein, 12 aa, Homo sapiens
  Heavy chain CDR3 for antibody 4734 (IGHV3-33)
ARGYFGSGYAHF

SEQ ID NO: 9469 - protein, 9 aa, Homo sapiens
  Light chain CDR3 for antibody 4735 (IGKV1-39)
QQSYSTPLT

SEQ ID NO: 9470 - protein, 17 aa, Homo sapiens
  Heavy chain CDR3 for antibody 4735 (IGHV3-33)
ARSPYDILTGYSYYFDY

SEQ ID NO: 9471 - protein, 9 aa, Homo sapiens
  Light chain CDR3 for antibody 4736 (IGKV1D-16)
QQYNSYPYT

SEQ ID NO: 9472 - protein, 10 aa, Homo sapiens
  Heavy chain CDR3 for antibody 4736 (IGHV3-33)
VRDVVVYFDY

SEQ ID NO: 9473 - protein, 10 aa, Homo sapiens
  Light chain CDR3 for antibody 4737 (IGKV3-11)
QQRSNWPIFT

SEQ ID NO: 9474 - protein, 12 aa, Homo sapiens
  Heavy chain CDR3 for antibody 4737 (IGHV3-23)
AKEGLGSDYEPY

SEQ ID NO: 9475 - protein, 9 aa, Homo sapiens
  Light chain CDR3 for antibody 4738 (IGKV1-33)
QQYDNLPFT

SEQ ID NO: 9476 - protein, 18 aa, Homo sapiens
  Heavy chain CDR3 for antibody 4738 (IGHV3-33)
ARDRDRYGSGTYPDAIDI

SEQ ID NO: 9477 - protein, 9 aa, Homo sapiens
  Light chain CDR3 for antibody 4739 (IGKV1-16)
QQYNRYPYT

SEQ ID NO: 9478 - protein, 17 aa, Homo sapiens
  Heavy chain CDR3 for antibody 4739 (IGHV4-34)
AGLRFFDWLFDYYGMDV

SEQ ID NO: 9479 - protein, 9 aa, Homo sapiens
  Light chain CDR3 for antibody 4740 (IGKV3-15)
QQYNNWPRT

SEQ ID NO: 9480 - protein, 9 aa, Homo sapiens
  Heavy chain CDR3 for antibody 4740 (IGHV3-13)
ARDRWYFDL

SEQ ID NO: 9481 - protein, 8 aa, Homo sapiens
  Light chain CDR3 for antibody 4741 (IGKV1D-13)
QQFNNYPT

SEQ ID NO: 9482 - protein, 12 aa, Homo sapiens
  Heavy chain CDR3 for antibody 4741 (IGHV3-33)
ARDRAYRGSLDY

SEQ ID NO: 9483 - protein, 9 aa, Homo sapiens
  Light chain CDR3 for antibody 4742 (IGKV6-21)
HQSTSLPFT

SEQ ID NO: 9484 - protein, 16 aa, Homo sapiens
  Heavy chain CDR3 for antibody 4742 (IGHV1-8)
AREGTMVRGVTYAFDI

SEQ ID NO: 9485 - protein, 9 aa, Homo sapiens
  Light chain CDR3 for antibody 4743 (IGKV3-20)
QQYGSSPYT

SEQ ID NO: 9486 - protein, 10 aa, Homo sapiens
  Heavy chain CDR3 for antibody 4743 (IGHV3-30)
ARDNFEGMDV

SEQ ID NO: 9487 - protein, 8 aa, Homo sapiens
  Light chain CDR3 for antibody 4744 (IGKV3D-7)
QQDYNLLT

SEQ ID NO: 9488 - protein, 19 aa, Homo sapiens
  Heavy chain CDR3 for antibody 4744 (IGHV1-18)
ARDDILTGYSLYYYYGMDV

SEQ ID NO: 9489 - protein, 10 aa, Homo sapiens
  Light chain CDR3 for antibody 4745 (IGKV1-9)
QQLDSYPMYT

SEQ ID NO: 9490 - protein, 13 aa, Homo sapiens
  Heavy chain CDR3 for antibody 4745 (IGHV3-11)
ARDGGAAAGTWDS

SEQ ID NO: 9491 - protein, 11 aa, Homo sapiens
  Light chain CDR3 for antibody 4746 (IGKV3-11)
QQRSNWPPTWT

SEQ ID NO: 9492 - protein, 9 aa, Homo sapiens
  Heavy chain CDR3 for antibody 4746 (IGHV1-18)
ARGKDWFDP

SEQ ID NO: 9493 - protein, 9 aa, Homo sapiens
  Light chain CDR3 for antibody 4747 (IGKV2-30)
MQGTHWPLT

SEQ ID NO: 9494 - protein, 13 aa, Homo sapiens
  Heavy chain CDR3 for antibody 4747 (IGHV4-28)
ARKGATGYYGMDV

SEQ ID NO: 9495 - protein, 9 aa, Homo sapiens
  Light chain CDR3 for antibody 4748 (IGKV1-27)
QKYNSAPYT

SEQ ID NO: 9496 - protein, 9 aa, Homo sapiens
  Heavy chain CDR3 for antibody 4748 (IGHV4-59)
ARGGASFDY

SEQ ID NO: 9497 - protein, 9 aa, Homo sapiens
  Light chain CDR3 for antibody 4749 (IGKV1-17)
LQHNSYPYT

SEQ ID NO: 9498 - protein, 14 aa, Homo sapiens
  Heavy chain CDR3 for antibody 4749 (IGHV3-23)
VRDRIAAASSDFDN

SEQ ID NO: 9499 - protein, 9 aa, Homo sapiens
  Light chain CDR3 for antibody 4750 (IGKV3D-7)
QQDYNLPLT

SEQ ID NO: 9500 - protein, 20 aa, Homo sapiens
  Heavy chain CDR3 for antibody 4750 (IGHV1-f)
ATGLITFVRGVILTYRSFDY

SEQ ID NO: 9501 - protein, 9 aa, Homo sapiens
  Light chain CDR3 for antibody 4751 (IGKV3-11)
QQRSNWPWT

SEQ ID NO: 9502 - protein, 11 aa, Homo sapiens
  Heavy chain CDR3 for antibody 4751 (IGHV1-46)
AREEDLGAFDI

SEQ ID NO: 9503 - protein, 9 aa, Homo sapiens
  Light chain CDR3 for antibody 4752 (IGKV3-15)
QQYHNWPLT

SEQ ID NO: 9504 - protein, 16 aa, Homo sapiens
  Heavy chain CDR3 for antibody 4752 (IGHV3-33)
ARAVYYGSGSSLIMDV

SEQ ID NO: 9505 - protein, 9 aa, Homo sapiens
  Light chain CDR3 for antibody 4753 (IGKV1-6)
QQEYNYPLT

SEQ ID NO: 9506 - protein, 17 aa, Homo sapiens
  Heavy chain CDR3 for antibody 4753 (IGHV1-18)
ARERYYGSGSYKYNMDV

SEQ ID NO: 9507 - protein, 9 aa, Homo sapiens
  Light chain CDR3 for antibody 4754 (IGKV1-17)
LQHNSYPYT

SEQ ID NO: 9508 - protein, 9 aa, Homo sapiens
  Heavy chain CDR3 for antibody 4754 (IGHV3-30)
ARGRVSLDV

SEQ ID NO: 9509 - protein, 8 aa, Homo sapiens
  Light chain CDR3 for antibody 4755 (IGKV3-11)
QQRSNWLT

SEQ ID NO: 9510 - protein, 14 aa, Homo sapiens
  Heavy chain CDR3 for antibody 4755 (IGHV3-23)
AKSRIVGALYYFDY

SEQ ID NO: 9511 - protein, 10 aa, Homo sapiens
  Light chain CDR3 for antibody 4756 (IGKV1-39)
QQSYSTPMYT

SEQ ID NO: 9512 - protein, 9 aa, Homo sapiens
  Heavy chain CDR3 for antibody 4756 (IGHV3-33)
ARATVGVDY

SEQ ID NO: 9513 - protein, 9 aa, Homo sapiens
  Light chain CDR3 for antibody 4757 (IGKV5-2)
LQHDNFPWT

SEQ ID NO: 9514 - protein, 17 aa, Homo sapiens
  Heavy chain CDR3 for antibody 4757 (IGHV4-39)
ARERILWFGEFTYYFDY

SEQ ID NO: 9515 - protein, 9 aa, Homo sapiens
  Light chain CDR3 for antibody 4758 (IGKV5-2)
LQHDKFPYT

SEQ ID NO: 9516 - protein, 12 aa, Homo sapiens
  Heavy chain CDR3 for antibody 4758 (IGHV3-33)
ARDLVRGIRMDV

SEQ ID NO: 9517 - protein, 9 aa, Homo sapiens
  Light chain CDR3 for antibody 4759 (IGKV1D-16)
QQYDSYPYT

SEQ ID NO: 9518 - protein, 12 aa, Homo sapiens
  Heavy chain CDR3 for antibody 4759 (IGHV3-33)
ARKGYDMHAFDI

SEQ ID NO: 9519 - protein, 9 aa, Homo sapiens
  Light chain CDR3 for antibody 4760 (IGKV1-6)
LQDYNYPRT

SEQ ID NO: 9520 - protein, 9 aa, Homo sapiens
  Heavy chain CDR3 for antibody 4760 (IGHV3-20)
ARDGGGGSY

SEQ ID NO: 9521 - protein, 9 aa, Homo sapiens
  Light chain CDR3 for antibody 4761 (IGKV1-17)
LQHNSYPYT

SEQ ID NO: 9522 - protein, 11 aa, Homo sapiens
  Heavy chain CDR3 for antibody 4761 (IGHV4-39)
ARLLVGATTDY

SEQ ID NO: 9523 - protein, 11 aa, Homo sapiens
  Light chain CDR3 for antibody 4762 (IGKV3-11)
QQRSNWPPTWT

SEQ ID NO: 9524 - protein, 16 aa, Homo sapiens
  Heavy chain CDR3 for antibody 4762 (IGHV4-39)
ARDTPYYSGSGRPFDY

SEQ ID NO: 9525 - protein, 8 aa, Homo sapiens
  Light chain CDR3 for antibody 4763 (IGKV1D-13)
QQFNNYPT

SEQ ID NO: 9526 - protein, 17 aa, Homo sapiens
  Heavy chain CDR3 for antibody 4763 (IGHV3-33)
ARGEQWLGYYYYYGMDV

SEQ ID NO: 9527 - protein, 9 aa, Homo sapiens
  Light chain CDR3 for antibody 4764 (IGKV3D-7)
QQDYNLPFT

SEQ ID NO: 9528 - protein, 14 aa, Homo sapiens
  Heavy chain CDR3 for antibody 4764 (IGHV3-23)
AKDRYRGYEGLFDY

SEQ ID NO: 9529 - protein, 9 aa, Homo sapiens
  Light chain CDR3 for antibody 4765 (IGKV1-27)
QKYNSAPYT

SEQ ID NO: 9530 - protein, 17 aa, Homo sapiens
  Heavy chain CDR3 for antibody 4765 (IGHV3-33)
ARQGVLLWFGELYYFDY

SEQ ID NO: 9531 - protein, 9 aa, Homo sapiens
  Light chain CDR3 for antibody 4766 (IGKV3-11)
QQRSNWMYT

SEQ ID NO: 9532 - protein, 15 aa, Homo sapiens
  Heavy chain CDR3 for antibody 4766 (IGHV3-33)
ARDTGYSSSWNWFDP

SEQ ID NO: 9533 - protein, 9 aa, Homo sapiens
  Light chain CDR3 for antibody 4767 (IGKV1-39)
QQSYSTPIT

SEQ ID NO: 9534 - protein, 24 aa, Homo sapiens
  Heavy chain CDR3 for antibody 4767 (IGHV1-46)
ARDEARGLLTGYYNMREYYYGMDV

SEQ ID NO: 9535 - protein, 8 aa, Homo sapiens
  Light chain CDR3 for antibody 4768 (IGKV3D-7)
QQDYNLLT

SEQ ID NO: 9536 - protein, 12 aa, Homo sapiens
  Heavy chain CDR3 for antibody 4768 (IGHV3-33)
ARDRAYRGSLDY

SEQ ID NO: 9537 - protein, 9 aa, Homo sapiens
  Light chain CDR3 for antibody 4769 (IGKV3D-7)
QQDYEFPLT

SEQ ID NO: 9538 - protein, 11 aa, Homo sapiens
  Heavy chain CDR3 for antibody 4769 (IGHV4-59)
ARSLRYSVFDY

SEQ ID NO: 9539 - protein, 9 aa, Homo sapiens
  Light chain CDR3 for antibody 4770 (IGKV1-39)
QQSYSTPLT

SEQ ID NO: 9540 - protein, 10 aa, Homo sapiens
  Heavy chain CDR3 for antibody 4770 (IGHV4-39)
ARQLGNWFDP

SEQ ID NO: 9541 - protein, 9 aa, Homo sapiens
  Light chain CDR3 for antibody 4771 (IGKV5-2)
LQHDNFPWT

SEQ ID NO: 9542 - protein, 17 aa, Homo sapiens
  Heavy chain CDR3 for antibody 4771 (IGHV3-33)
AREGYYYGSGSYHFFDY

SEQ ID NO: 9543 - protein, 9 aa, Homo sapiens
  Light chain CDR3 for antibody 4772 (IGKV1-9)
QQLISYPLT

SEQ ID NO: 9544 - protein, 17 aa, Homo sapiens
  Heavy chain CDR3 for antibody 4772 (IGHV3-33)
ARGFSGYDGYYYYGMDV

SEQ ID NO: 9545 - protein, 9 aa, Homo sapiens
  Light chain CDR3 for antibody 4773 (IGKV2-30)
MQGTHWPLT

SEQ ID NO: 9546 - protein, 14 aa, Homo sapiens
  Heavy chain CDR3 for antibody 4773 (IGHV4-39)
ARDSGYDYYYGMDV

SEQ ID NO: 9547 - protein, 9 aa, Homo sapiens
  Light chain CDR3 for antibody 4774 (IGKV1-16)
QHYNDYPFT

SEQ ID NO: 9548 - protein, 18 aa, Homo sapiens
  Heavy chain CDR3 for antibody 4774 (IGHV4-59)
AREGDYVWGSYRPNWFDP

SEQ ID NO: 9549 - protein, 8 aa, Homo sapiens
  Light chain CDR3 for antibody 4775 (IGKV1D-13)
QQFNNYPT

SEQ ID NO: 9550 - protein, 9 aa, Homo sapiens
  Heavy chain CDR3 for antibody 4775 (IGHV3-30)
ARDNWGFDY

SEQ ID NO: 9551 - protein, 9 aa, Homo sapiens
  Light chain CDR3 for antibody 4776 (IGKV1-9)
QQLNSYPLT

SEQ ID NO: 9552 - protein, 19 aa, Homo sapiens
  Heavy chain CDR3 for antibody 4776 (IGHV1-24)
ATEGGIVGGTRYYYYGMDV

SEQ ID NO: 9553 - protein, 8 aa, Homo sapiens
  Light chain CDR3 for antibody 4777 (IGKV3-20)
QQYGRSFT

SEQ ID NO: 9554 - protein, 13 aa, Homo sapiens
  Heavy chain CDR3 for antibody 4777 (IGHV3-33)
ARRYRSGWYPFDY

SEQ ID NO: 9555 - protein, 8 aa, Homo sapiens
  Light chain CDR3 for antibody 4778 (IGKV1-5)
QQYNSYYT

SEQ ID NO: 9556 - protein, 8 aa, Homo sapiens
  Heavy chain CDR3 for antibody 4778 (IGHV3-23)
AKETGNNY

SEQ ID NO: 9557 - protein, 8 aa, Homo sapiens
  Light chain CDR3 for antibody 4779 (IGKV6-21)
HQSSSLPT

SEQ ID NO: 9558 - protein, 15 aa, Homo sapiens
  Heavy chain CDR3 for antibody 4779 (IGHV3-20)
ARDRGSSGWRDWFDP

SEQ ID NO: 9559 - protein, 9 aa, Homo sapiens
  Light chain CDR3 for antibody 4780 (IGKV1-17)
LQHNSYPYT

SEQ ID NO: 9560 - protein, 14 aa, Homo sapiens
  Heavy chain CDR3 for antibody 4780 (IGHV1-46)
ARGAVDDYYYGMDV

SEQ ID NO: 9561 - protein, 9 aa, Homo sapiens
  Light chain CDR3 for antibody 4781 (IGKV1D-13)
QQFNNYPYT

SEQ ID NO: 9562 - protein, 18 aa, Homo sapiens
  Heavy chain CDR3 for antibody 4781 (IGHV3-33)
AREGSYYGSGSFPNWFDP

SEQ ID NO: 9563 - protein, 9 aa, Homo sapiens
  Light chain CDR3 for antibody 4782 (IGKV1-6)
LQDYKSPFT

SEQ ID NO: 9564 - protein, 18 aa, Homo sapiens
  Heavy chain CDR3 for antibody 4782 (IGHV3-23)
AKEGNYYGSGSYWGYFDP

SEQ ID NO: 9565 - protein, 9 aa, Homo sapiens
  Light chain CDR3 for antibody 4783 (IGKV5-2)
LQHDNFPWT

SEQ ID NO: 9566 - protein, 17 aa, Homo sapiens
  Heavy chain CDR3 for antibody 4783 (IGHV3-33)
ARDSYDILTGYYKPFDY

SEQ ID NO: 9567 - protein, 8 aa, Homo sapiens
  Light chain CDR3 for antibody 4784 (IGKV1D-13)
QQFNNYYT

SEQ ID NO: 9568 - protein, 20 aa, Homo sapiens
  Heavy chain CDR3 for antibody 4784 (IGHV1-f)
ATGLITFVRGVILTYRSFDY

SEQ ID NO: 9569 - protein, 9 aa, Homo sapiens
  Light chain CDR3 for antibody 4785 (IGKV4-1)
QQYYSTPWT

SEQ ID NO: 9570 - protein, 14 aa, Homo sapiens
  Heavy chain CDR3 for antibody 4785 (IGHV3-23)
AKSRIVGALYYFDY

SEQ ID NO: 9571 - protein, 9 aa, Homo sapiens
  Light chain CDR3 for antibody 4786 (IGKV1-27)
QKYNSAPYT

SEQ ID NO: 9572 - protein, 16 aa, Homo sapiens
  Heavy chain CDR3 for antibody 4786 (IGHV3-13)
ARDRSYESYYYYGMDV

SEQ ID NO: 9573 - protein, 10 aa, Homo sapiens
  Light chain CDR3 for antibody 4787 (IGKV3-15)
QQYNNWPPIT

SEQ ID NO: 9574 - protein, 17 aa, Homo sapiens
  Heavy chain CDR3 for antibody 4787 (IGHV3-33)
ARGYCSRTSCYLYYFDY

SEQ ID NO: 9575 - protein, 11 aa, Homo sapiens
  Light chain CDR3 for antibody 4788 (IGKV3-11)
QQRSNWPPTWT

SEQ ID NO: 9576 - protein, 17 aa, Homo sapiens
  Heavy chain CDR3 for antibody 4788 (IGHV3-33)
ARGYCSRTSCYLYYFDY

SEQ ID NO: 9577 - protein, 8 aa, Homo sapiens
  Light chain CDR3 for antibody 4789 (IGKV3-11)
QQRSNWLT

SEQ ID NO: 9578 - protein, 16 aa, Homo sapiens
  Heavy chain CDR3 for antibody 4789 (IGHV1-18)
ARYFDWLLRDYYGMDV

SEQ ID NO: 9579 - protein, 8 aa, Homo sapiens
  Light chain CDR3 for antibody 4790 (IGKV1-5)
QQYNSYWT

SEQ ID NO: 9580 - protein, 13 aa, Homo sapiens
  Heavy chain CDR3 for antibody 4790 (IGHV3-33)
ARRATLVRGVFDP

SEQ ID NO: 9581 - protein, 9 aa, Homo sapiens
  Light chain CDR3 for antibody 4791 (IGKV1D-13)
QQFNNYPHT

SEQ ID NO: 9582 - protein, 8 aa, Homo sapiens
  Heavy chain CDR3 for antibody 4791 (IGHV3-23)
EKSAGEDV

SEQ ID NO: 9583 - protein, 9 aa, Homo sapiens
  Light chain CDR3 for antibody 4792 (IGKV1-16)
QHYNDYPFT

SEQ ID NO: 9584 - protein, 11 aa, Homo sapiens
  Heavy chain CDR3 for antibody 4792 (IGHV3-33)
ARDKSSGWSDY

SEQ ID NO: 9585 - protein, 9 aa, Homo sapiens
  Light chain CDR3 for antibody 4793 (IGKV1-17)
LQHNSYPYT

SEQ ID NO: 9586 - protein, 13 aa, Homo sapiens
  Heavy chain CDR3 for antibody 4793 (IGHV3-15)
TTDRLLLFGAFDY

SEQ ID NO: 9587 - protein, 9 aa, Homo sapiens
  Light chain CDR3 for antibody 4794 (IGKV3-15)
QQYNNWPLT

SEQ ID NO: 9588 - protein, 18 aa, Homo sapiens
  Heavy chain CDR3 for antibody 4794 (IGHV1-46)
ARDLTGRTENYYYYGMDV

SEQ ID NO: 9589 - protein, 9 aa, Homo sapiens
  Light chain CDR3 for antibody 4795 (IGKV1-27)
QKYNSAPYT

SEQ ID NO: 9590 - protein, 13 aa, Homo sapiens
  Heavy chain CDR3 for antibody 4795 (IGHV3-33)
ARDQRYSSGWYDY

SEQ ID NO: 9591 - protein, 9 aa, Homo sapiens
  Light chain CDR3 for antibody 4796 (IGKV3-15)
QQYNNWPLT

SEQ ID NO: 9592 - protein, 17 aa, Homo sapiens
  Heavy chain CDR3 for antibody 4796 (IGHV3-33)
ARESLKLGIYYYYGMDV

SEQ ID NO: 9593 - protein, 8 aa, Homo sapiens
  Light chain CDR3 for antibody 4797 (IGKV3D-7)
QQDYNLLT

SEQ ID NO: 9594 - protein, 14 aa, Homo sapiens
  Heavy chain CDR3 for antibody 4797 (IGHV1-18)
ARCFGSGSYGWFDP

SEQ ID NO: 9595 - protein, 9 aa, Homo sapiens
  Light chain CDR3 for antibody 4798 (IGKV1-27)
QKYNSAPYT

SEQ ID NO: 9596 - protein, 13 aa, Homo sapiens
  Heavy chain CDR3 for antibody 4798 (IGHV4-59)
ARTMVRGVAPFDY

SEQ ID NO: 9597 - protein, 9 aa, Homo sapiens
  Light chain CDR3 for antibody 4799 (IGKV1-6)
LQDYKSPFT

SEQ ID NO: 9598 - protein, 14 aa, Homo sapiens
  Heavy chain CDR3 for antibody 4799 (IGHV3-33)
ARDRIAAASSDFDC

SEQ ID NO: 9599 - protein, 10 aa, Homo sapiens
  Light chain CDR3 for antibody 4800 (IGKV3-11)
QQRSNWPIFT

SEQ ID NO: 9600 - protein, 13 aa, Homo sapiens
  Heavy chain CDR3 for antibody 4800 (IGHV4-59)
ARTMVRGVAPFDY

SEQ ID NO: 9601 - protein, 9 aa, Homo sapiens
  Light chain CDR3 for antibody 4801 (IGKV1-39)
QQSYSTPLT

SEQ ID NO: 9602 - protein, 12 aa, Homo sapiens
  Heavy chain CDR3 for antibody 4801 (IGHV3-33)
ARGYFTSGSAHY

SEQ ID NO: 9603 - protein, 9 aa, Homo sapiens
  Light chain CDR3 for antibody 4802 (IGKV1D-13)
QQFNNYPHT

SEQ ID NO: 9604 - protein, 13 aa, Homo sapiens
  Heavy chain CDR3 for antibody 4802 (IGHV3-23)
AKDRGGSYSYFDF

SEQ ID NO: 9605 - protein, 9 aa, Homo sapiens
  Light chain CDR3 for antibody 4803 (IGKV3-11)
QQRSNWPRT

SEQ ID NO: 9606 - protein, 13 aa, Homo sapiens
  Heavy chain CDR3 for antibody 4803 (IGHV3-33)
ANTGDSYYYDMDV

SEQ ID NO: 9607 - protein, 9 aa, Homo sapiens
  Light chain CDR3 for antibody 4804 (IGKV1-39)
QQSYRTPLT

SEQ ID NO: 9608 - protein, 13 aa, Homo sapiens
  Heavy chain CDR3 for antibody 4804 (IGHV3-23)
AKDRGLRYYGMDV

SEQ ID NO: 9609 - protein, 9 aa, Homo sapiens
  Light chain CDR3 for antibody 4805 (IGKV3-20)
HQSSSLPYT

SEQ ID NO: 9610 - protein, 19 aa, Homo sapiens
  Heavy chain CDR3 for antibody 4805 (IGHV3-33)
ARIPGIAVAGGYYYYGMDV

SEQ ID NO: 9611 - protein, 9 aa, Homo sapiens
  Light chain CDR3 for antibody 4806 (IGKV3-15)
QQYNNWPRT

SEQ ID NO: 9612 - protein, 11 aa, Homo sapiens
  Heavy chain CDR3 for antibody 4806 (IGHV3-33)
ARGTTVTHFDY

SEQ ID NO: 9613 - protein, 9 aa, Homo sapiens
  Light chain CDR3 for antibody 4807 (IGKV1-16)
QQYISYPFT

SEQ ID NO: 9614 - protein, 13 aa, Homo sapiens
  Heavy chain CDR3 for antibody 4807 (IGHV1-24)
AADYGDYQYYFDY

SEQ ID NO: 9615 - protein, 9 aa, Homo sapiens
  Light chain CDR3 for antibody 4808 (IGKV1D-13)
QQFNNYPHT

SEQ ID NO: 9616 - protein, 18 aa, Homo sapiens
  Heavy chain CDR3 for antibody 4808 (IGHV6-1)
ARDQYSYGPYYYYYGMDV

SEQ ID NO: 9617 - protein, 8 aa, Homo sapiens
  Light chain CDR3 for antibody 4809 (IGKV1D-13)
QQFNNYPT

SEQ ID NO: 9618 - protein, 12 aa, Homo sapiens
  Heavy chain CDR3 for antibody 4809 (IGHV3-33)
ARDLVGATPFDY

SEQ ID NO: 9619 - protein, 8 aa, Homo sapiens
  Light chain CDR3 for antibody 4810 (IGKV3-20)
QQYGRSFT

SEQ ID NO: 9620 - protein, 13 aa, Homo sapiens
  Heavy chain CDR3 for antibody 4810 (IGHV4-59)
ARTMVRGVAPFDY

SEQ ID NO: 9621 - protein, 8 aa, Homo sapiens
  Light chain CDR3 for antibody 4811 (IGKV1-13)
QQFNTYPT

SEQ ID NO: 9622 - protein, 18 aa, Homo sapiens
  Heavy chain CDR3 for antibody 4811 (IGHV3-33)
ARDRYHDILTGYYMGFDY

SEQ ID NO: 9623 - protein, 9 aa, Homo sapiens
  Light chain CDR3 for antibody 4812 (IGKV1-9)
QQLNSYPYT

SEQ ID NO: 9624 - protein, 13 aa, Homo sapiens
  Heavy chain CDR3 for antibody 4812 (IGHV3-13)
ARAITMVRGVIDY

SEQ ID NO: 9625 - protein, 9 aa, Homo sapiens
  Light chain CDR3 for antibody 4813 (IGKV3D-7)
QQDYNLPYS

SEQ ID NO: 9626 - protein, 12 aa, Homo sapiens
  Heavy chain CDR3 for antibody 4813 (IGHV1-46)
ARGLTGDHAVDI

SEQ ID NO: 9627 - protein, 9 aa, Homo sapiens
  Light chain CDR3 for antibody 4814 (IGKV1-6)
LQDYNYPWT

SEQ ID NO: 9628 - protein, 13 aa, Homo sapiens
  Heavy chain CDR3 for antibody 4814 (IGHV3-66)
AREYSGYDAHFDY

SEQ ID NO: 9629 - protein, 9 aa, Homo sapiens
  Light chain CDR3 for antibody 4815 (IGKV1-39)
QQSYSTPLT

SEQ ID NO: 9630 - protein, 15 aa, Homo sapiens
  Heavy chain CDR3 for antibody 4815 (IGHV3-33)
AREGLRYFHYYGMDV

SEQ ID NO: 9631 - protein, 9 aa, Homo sapiens
  Light chain CDR3 for antibody 4816 (IGKV1-9)
QQLNSYPLT

SEQ ID NO: 9632 - protein, 6 aa, Homo sapiens
  Heavy chain CDR3 for antibody 4816 (IGHV1-8)
AREGTY

SEQ ID NO: 9633 - protein, 11 aa, Homo sapiens
  Light chain CDR3 for antibody 4817 (IGKV3-11)
QQRSNWPPTWT

SEQ ID NO: 9634 - protein, 13 aa, Homo sapiens
  Heavy chain CDR3 for antibody 4817 (IGHV4-39)
ARRGVVAPAAFDY

SEQ ID NO: 9635 - protein, 10 aa, Homo sapiens
  Light chain CDR3 for antibody 4818 (IGKV3-11)
QQRSNWPIFT

SEQ ID NO: 9636 - protein, 14 aa, Homo sapiens
  Heavy chain CDR3 for antibody 4818 (IGHV3-33)
ARTTAAAGPRDFQH

SEQ ID NO: 9637 - protein, 9 aa, Homo sapiens
  Light chain CDR3 for antibody 4819 (IGKV1-27)
QKYNSAPYT

SEQ ID NO: 9638 - protein, 17 aa, Homo sapiens
  Heavy chain CDR3 for antibody 4819 (IGHV3-33)
ARCGYSSSWYDPYYFDY

SEQ ID NO: 9639 - protein, 9 aa, Homo sapiens
  Light chain CDR3 for antibody 4820 (IGKV3D-7)
QQDYNLPLT

SEQ ID NO: 9640 - protein, 14 aa, Homo sapiens
  Heavy chain CDR3 for antibody 4820 (IGHV3-33)
ARQYSYGYPYYFDY

SEQ ID NO: 9641 - protein, 8 aa, Homo sapiens
  Light chain CDR3 for antibody 4821 (IGKV1-5)
QQYNSYWT

SEQ ID NO: 9642 - protein, 14 aa, Homo sapiens
  Heavy chain CDR3 for antibody 4821 (IGHV3-33)
VRDQGSMVRGGGDY

SEQ ID NO: 9643 - protein, 9 aa, Homo sapiens
  Light chain CDR3 for antibody 4822 (IGKV1-16)
QHYNDYPFT

SEQ ID NO: 9644 - protein, 12 aa, Homo sapiens
  Heavy chain CDR3 for antibody 4822 (IGHV1-46)
ARGLTGDHAVDI

SEQ ID NO: 9645 - protein, 9 aa, Homo sapiens
  Light chain CDR3 for antibody 4823 (IGKV1-33)
QQYDNLPFT

SEQ ID NO: 9646 - protein, 17 aa, Homo sapiens
  Heavy chain CDR3 for antibody 4823 (IGHV3-64)
ARERYYGSGSYYNWFDP

SEQ ID NO: 9647 - protein, 9 aa, Homo sapiens
  Light chain CDR3 for antibody 4824 (IGKV3-11)
QQRINWPWT

SEQ ID NO: 9648 - protein, 16 aa, Homo sapiens
  Heavy chain CDR3 for antibody 4824 (IGHV3-23)
AKEGMVLRYFDWLWDY

SEQ ID NO: 9649 - protein, 9 aa, Homo sapiens
  Light chain CDR3 for antibody 4825 (IGKV1-6)
LQDYNHPFT

SEQ ID NO: 9650 - protein, 12 aa, Homo sapiens
  Heavy chain CDR3 for antibody 4825 (IGHV3-13)
VREAGIPDAFDI

SEQ ID NO: 9651 - protein, 9 aa, Homo sapiens
  Light chain CDR3 for antibody 4826 (IGKV1-39)
QQSYSTPFT

SEQ ID NO: 9652 - protein, 16 aa, Homo sapiens
  Heavy chain CDR3 for antibody 4826 (IGHV4-59)
ARFYFGSGSYYWYFDL

SEQ ID NO: 9653 - protein, 9 aa, Homo sapiens
  Light chain CDR3 for antibody 4827 (IGKV1D-13)
QHFNNYMYT

SEQ ID NO: 9654 - protein, 16 aa, Homo sapiens
  Heavy chain CDR3 for antibody 4827 (IGHV4-59)
ARGRYFEWLLGDVFDI

SEQ ID NO: 9655 - protein, 9 aa, Homo sapiens
  Light chain CDR3 for antibody 4828 (IGKV3D-20)
QQYGYSPLT

SEQ ID NO: 9656 - protein, 13 aa, Homo sapiens
  Heavy chain CDR3 for antibody 4828 (IGHV3-33)
ARTDYYFYYGLDV

SEQ ID NO: 9657 - protein, 9 aa, Homo sapiens
  Light chain CDR3 for antibody 4829 (IGKV1-17)
LQHNSFPLT

SEQ ID NO: 9658 - protein, 14 aa, Homo sapiens
  Heavy chain CDR3 for antibody 4829 (IGHV3-33)
ARDKSYPLSYGMDV

SEQ ID NO: 9659 - protein, 9 aa, Homo sapiens
  Light chain CDR3 for antibody 4830 (IGKV2D-28)
MQALQTPFT

SEQ ID NO: 9660 - protein, 15 aa, Homo sapiens
  Heavy chain CDR3 for antibody 4830 (IGHV3-33)
VCVLYDYGDYVGFDY

SEQ ID NO: 9661 - protein, 8 aa, Homo sapiens
  Light chain CDR3 for antibody 4831 (IGKV6-21)
HQSSSLPT

SEQ ID NO: 9662 - protein, 12 aa, Homo sapiens
  Heavy chain CDR3 for antibody 4831 (IGHV3-h)
ARESGGSYSFDY

SEQ ID NO: 9663 - protein, 8 aa, Homo sapiens
  Light chain CDR3 for antibody 4832 (IGKV3-20)
QQYGRSFT

SEQ ID NO: 9664 - protein, 8 aa, Homo sapiens
  Heavy chain CDR3 for antibody 4832 (IGHV3-23)
AKETGNNY

SEQ ID NO: 9665 - protein, 9 aa, Homo sapiens
  Light chain CDR3 for antibody 4833 (IGKV1D-16)
QQYNSYPYT

SEQ ID NO: 9666 - protein, 17 aa, Homo sapiens
  Heavy chain CDR3 for antibody 4833 (IGHV4-39)
ARERILWFGEFTYYFDY

SEQ ID NO: 9667 - protein, 9 aa, Homo sapiens
  Light chain CDR3 for antibody 4834 (IGKV5-2)
LQHDNFPWT

SEQ ID NO: 9668 - protein, 15 aa, Homo sapiens
  Heavy chain CDR3 for antibody 4834 (IGHV3-74)
ARGSGSHYHYYGMDV

SEQ ID NO: 9669 - protein, 9 aa, Homo sapiens
  Light chain CDR3 for antibody 4835 (IGKV5-2)
LQHDNFPYT

SEQ ID NO: 9670 - protein, 12 aa, Homo sapiens
  Heavy chain CDR3 for antibody 4835 (IGHV4-34)
ARDYGSGSFFDY

SEQ ID NO: 9671 - protein, 9 aa, Homo sapiens
  Light chain CDR3 for antibody 4836 (IGKV2-30)
MQGTHWPLT

SEQ ID NO: 9672 - protein, 24 aa, Homo sapiens
  Heavy chain CDR3 for antibody 4836 (IGHV3-20)
ARGRITMVRGVIINPLDYYNGMDV

SEQ ID NO: 9673 - protein, 9 aa, Homo sapiens
  Light chain CDR3 for antibody 4837 (IGKV1-27)
QKYNSAPYT

SEQ ID NO: 9674 - protein, 9 aa, Homo sapiens
  Heavy chain CDR3 for antibody 4837 (IGHV3-23)
ARIWWLKDY

SEQ ID NO: 9675 - protein, 9 aa, Homo sapiens
  Light chain CDR3 for antibody 4838 (IGKV3-20)
QQYGSSPYT

SEQ ID NO: 9676 - protein, 15 aa, Homo sapiens
  Heavy chain CDR3 for antibody 4838 (IGHV3-20)
AREGPYYYGSGSLDY

SEQ ID NO: 9677 - protein, 9 aa, Homo sapiens
  Light chain CDR3 for antibody 4839 (IGKV3-15)
QQYNNWPYT

SEQ ID NO: 9678 - protein, 14 aa, Homo sapiens
  Heavy chain CDR3 for antibody 4839 (IGHV1-2)
ARDYYGSGNYYMGY

SEQ ID NO: 9679 - protein, 9 aa, Homo sapiens
  Light chain CDR3 for antibody 4840 (IGKV3-15)
QQYNNWPLT

SEQ ID NO: 9680 - protein, 12 aa, Homo sapiens
  Heavy chain CDR3 for antibody 4840 (IGHV3-23)
AKDGWFGESLDY

SEQ ID NO: 9681 - protein, 9 aa, Homo sapiens
  Light chain CDR3 for antibody 4841 (IGKV3-20)
QQYGSSPRT

SEQ ID NO: 9682 - protein, 18 aa, Homo sapiens
  Heavy chain CDR3 for antibody 4841 (IGHV1-18)
ARDPTFYYVSGSYYKFDY

SEQ ID NO: 9683 - protein, 8 aa, Homo sapiens
  Light chain CDR3 for antibody 4842 (IGKV3D-7)
QQDYNLLT

SEQ ID NO: 9684 - protein, 18 aa, Homo sapiens
  Heavy chain CDR3 for antibody 4842 (IGHV3-33)
ARGYYGSGNFYKDSGMDV

SEQ ID NO: 9685 - protein, 9 aa, Homo sapiens
  Light chain CDR3 for antibody 4843 (IGKV2-30)
MQGTHWPLT

SEQ ID NO: 9686 - protein, 13 aa, Homo sapiens
  Heavy chain CDR3 for antibody 4843 (IGHV3-23)
AKDRGLRYYGMDV

SEQ ID NO: 9687 - protein, 9 aa, Homo sapiens
  Light chain CDR3 for antibody 4844 (IGKV3-20)
QQYGSSPYT

SEQ ID NO: 9688 - protein, 12 aa, Homo sapiens
  Heavy chain CDR3 for antibody 4844 (IGHV3-33)
ARGGIAVDVCDI

SEQ ID NO: 9689 - protein, 9 aa, Homo sapiens
  Light chain CDR3 for antibody 4845 (IGKV5-2)
LQHDNFPYT

SEQ ID NO: 9690 - protein, 9 aa, Homo sapiens
  Heavy chain CDR3 for antibody 4845 (IGHV3-33)
AANSYGLDY

SEQ ID NO: 9691 - protein, 9 aa, Homo sapiens
  Light chain CDR3 for antibody 4846 (IGKV2-30)
MQGTHWPLT

SEQ ID NO: 9692 - protein, 13 aa, Homo sapiens
  Heavy chain CDR3 for antibody 4846 (IGHV4-39)
ARHVLLWFGEFDP

SEQ ID NO: 9693 - protein, 9 aa, Homo sapiens
  Light chain CDR3 for antibody 4847 (IGKV1-6)
LQDYNYPYT

SEQ ID NO: 9694 - protein, 14 aa, Homo sapiens
  Heavy chain CDR3 for antibody 4847 (IGHV3-33)
ARDKSYPRSYGMDV

SEQ ID NO: 9695 - protein, 9 aa, Homo sapiens
  Light chain CDR3 for antibody 4848 (IGKV1-9)
QQYNSYPWT

SEQ ID NO: 9696 - protein, 15 aa, Homo sapiens
  Heavy chain CDR3 for antibody 4848 (IGHV3-11)
AREYSSGWYGDAFDI

SEQ ID NO: 9697 - protein, 9 aa, Homo sapiens
  Light chain CDR3 for antibody 4849 (IGKV5-2)
LQHDNFPYT

SEQ ID NO: 9698 - protein, 13 aa, Homo sapiens
  Heavy chain CDR3 for antibody 4849 (IGHV3-15)
TTDRLLLFGAFDY

SEQ ID NO: 9699 - protein, 8 aa, Homo sapiens
  Light chain CDR3 for antibody 4850 (IGKV3-11)
QQRSNWLT

SEQ ID NO: 9700 - protein, 13 aa, Homo sapiens
  Heavy chain CDR3 for antibody 4850 (IGHV4-39)
ARHVLLWFGEFDP

SEQ ID NO: 9701 - protein, 9 aa, Homo sapiens
  Light chain CDR3 for antibody 4851 (IGKV1-17)
LQHNSYPYT

SEQ ID NO: 9702 - protein, 17 aa, Homo sapiens
  Heavy chain CDR3 for antibody 4851 (IGHV1-24)
TTVVLYYDILPGYSFDY

SEQ ID NO: 9703 - protein, 9 aa, Homo sapiens
  Light chain CDR3 for antibody 4852 (IGKV1-17)
QQYNNWPLT

SEQ ID NO: 9704 - protein, 16 aa, Homo sapiens
  Heavy chain CDR3 for antibody 4852 (IGHV4-59)
ARDTPYYSGSGRPFDS

SEQ ID NO: 9705 - protein, 9 aa, Homo sapiens
  Light chain CDR3 for antibody 4853 (IGKV1D-13)
QHFNNYMYT

SEQ ID NO: 9706 - protein, 13 aa, Homo sapiens
  Heavy chain CDR3 for antibody 4853 (IGHV4-39)
ARHEVMVRGVFDY

SEQ ID NO: 9707 - protein, 9 aa, Homo sapiens
  Light chain CDR3 for antibody 4854 (IGKV1D-13)
QQFNNYPYT

SEQ ID NO: 9708 - protein, 11 aa, Homo sapiens
  Heavy chain CDR3 for antibody 4854 (IGHV4-59)
TRDRGLGSFDY

SEQ ID NO: 9709 - protein, 9 aa, Homo sapiens
  Light chain CDR3 for antibody 4855 (IGKV1D-16)
QQYNSYPYT

SEQ ID NO: 9710 - protein, 13 aa, Homo sapiens
  Heavy chain CDR3 for antibody 4855 (IGHV3-33)
ARDSGSYSYYFNY

SEQ ID NO: 9711 - protein, 9 aa, Homo sapiens
  Light chain CDR3 for antibody 4856 (IGKV6-21)
HQSSSLPLT

SEQ ID NO: 9712 - protein, 19 aa, Homo sapiens
  Heavy chain CDR3 for antibody 4856 (IGHV3-33)
ARGVRLRFFDPYYYYGLDV

SEQ ID NO: 9713 - protein, 8 aa, Homo sapiens
  Light chain CDR3 for antibody 4857 (IGKV1-5)
QQYNSYWT

SEQ ID NO: 9714 - protein, 17 aa, Homo sapiens
  Heavy chain CDR3 for antibody 4857 (IGHV4-59)
ARDFLVRGEGSYYGMDV

SEQ ID NO: 9715 - protein, 9 aa, Homo sapiens
  Light chain CDR3 for antibody 4858 (IGKV5-2)
LQHDNFPYT

SEQ ID NO: 9716 - protein, 13 aa, Homo sapiens
  Heavy chain CDR3 for antibody 4858 (IGHV4-39)
ARRGVVAPAAFDY

SEQ ID NO: 9717 - protein, 9 aa, Homo sapiens
  Light chain CDR3 for antibody 4859 (IGKV2-30)
MQGTHWPLT

SEQ ID NO: 9718 - protein, 14 aa, Homo sapiens
  Heavy chain CDR3 for antibody 4859 (IGHV3-23)
ANWAYDILTGYLDY

SEQ ID NO: 9719 - protein, 9 aa, Homo sapiens
  Light chain CDR3 for antibody 4860 (IGKV1D-13)
QQFNNYPHT

SEQ ID NO: 9720 - protein, 18 aa, Homo sapiens
  Heavy chain CDR3 for antibody 4860 (IGHV3-33)
ARDQYSGYDFYYYYGMDV

SEQ ID NO: 9721 - protein, 9 aa, Homo sapiens
  Light chain CDR3 for antibody 4861 (IGKV1D-13)
QQFNNYPYT

SEQ ID NO: 9722 - protein, 8 aa, Homo sapiens
  Heavy chain CDR3 for antibody 4861 (IGHV3-20)
APHWIFDY

SEQ ID NO: 9723 - protein, 8 aa, Homo sapiens
  Light chain CDR3 for antibody 4862 (IGKV6-21)
HQSSSLPT

SEQ ID NO: 9724 - protein, 9 aa, Homo sapiens
  Heavy chain CDR3 for antibody 4862 (IGHV4-34)
AREKYYFDH

SEQ ID NO: 9725 - protein, 9 aa, Homo sapiens
  Light chain CDR3 for antibody 4863 (IGKV2-30)
MQGTHWPLT

SEQ ID NO: 9726 - protein, 12 aa, Homo sapiens
  Heavy chain CDR3 for antibody 4863 (IGHV4-59)
ARDRSGWAYFDY

SEQ ID NO: 9727 - protein, 8 aa, Homo sapiens
  Light chain CDR3 for antibody 4864 (IGKV3-11)
LQRGNWPT

SEQ ID NO: 9728 - protein, 14 aa, Homo sapiens
  Heavy chain CDR3 for antibody 4864 (IGHV3-23)
AKSRIVGALYYFDY

SEQ ID NO: 9729 - protein, 8 aa, Homo sapiens
  Light chain CDR3 for antibody 4865 (IGKV1D-13)
QQFNNYPT

SEQ ID NO: 9730 - protein, 9 aa, Homo sapiens
  Heavy chain CDR3 for antibody 4865 (IGHV3-13)
ARDRWYFDL

SEQ ID NO: 9731 - protein, 9 aa, Homo sapiens
  Light chain CDR3 for antibody 4866 (IGKV1-6)
LQDYNYPRT

SEQ ID NO: 9732 - protein, 11 aa, Homo sapiens
  Heavy chain CDR3 for antibody 4866 (IGHV4-59)
ARESFYGSGNL

SEQ ID NO: 9733 - protein, 9 aa, Homo sapiens
  Light chain CDR3 for antibody 4867 (IGKV1-6)
LQDFHYPWT

SEQ ID NO: 9734 - protein, 13 aa, Homo sapiens
  Heavy chain CDR3 for antibody 4867 (IGHV3-33)
ARDWGYSHGYFDY

SEQ ID NO: 9735 - protein, 9 aa, Homo sapiens
  Light chain CDR3 for antibody 4868 (IGKV6-21)
HQSSSLPLT

SEQ ID NO: 9736 - protein, 12 aa, Homo sapiens
  Heavy chain CDR3 for antibody 4868 (IGHV3-33)
ARNYDILDYFDY

SEQ ID NO: 9737 - protein, 9 aa, Homo sapiens
  Light chain CDR3 for antibody 4869 (IGKV1-9)
QQLNSYPYT

SEQ ID NO: 9738 - protein, 18 aa, Homo sapiens
  Heavy chain CDR3 for antibody 4869 (IGHV3-11)
ARDGYSSGWNYYYFGLDV

SEQ ID NO: 9739 - protein, 10 aa, Homo sapiens
  Light chain CDR3 for antibody 4870 (IGKV1-17)
LQHNSYPMYT

SEQ ID NO: 9740 - protein, 12 aa, Homo sapiens
  Heavy chain CDR3 for antibody 4870 (IGHV3-33)
TRGYSSKSYFDY

SEQ ID NO: 9741 - protein, 9 aa, Homo sapiens
  Light chain CDR3 for antibody 4871 (IGKV3-11)
QQRSNWMYT

SEQ ID NO: 9742 - protein, 10 aa, Homo sapiens
  Heavy chain CDR3 for antibody 4871 (IGHV3-23)
AKGDRWRFDP

SEQ ID NO: 9743 - protein, 9 aa, Homo sapiens
  Light chain CDR3 for antibody 4872 (IGKV6-21)
HQSSSLPYT

SEQ ID NO: 9744 - protein, 18 aa, Homo sapiens
  Heavy chain CDR3 for antibody 4872 (IGHV3-33)
ARRTAAGTGDYYYYGMDV

SEQ ID NO: 9745 - protein, 9 aa, Homo sapiens
  Light chain CDR3 for antibody 4873 (IGKV1D-13)
QQFNNYPHT

SEQ ID NO: 9746 - protein, 17 aa, Homo sapiens
  Heavy chain CDR3 for antibody 4873 (IGHV3-33)
ARSGIVGATDYYYGLDV

SEQ ID NO: 9747 - protein, 9 aa, Homo sapiens
  Light chain CDR3 for antibody 4874 (IGKV1-6)
LQDYKSPFT

SEQ ID NO: 9748 - protein, 10 aa, Homo sapiens
  Heavy chain CDR3 for antibody 4874 (IGHV3-33)
ARENSTPLDY

SEQ ID NO: 9749 - protein, 9 aa, Homo sapiens
  Light chain CDR3 for antibody 4875 (IGKV1-17)
LQHNSYPYT

SEQ ID NO: 9750 - protein, 12 aa, Homo sapiens
  Heavy chain CDR3 for antibody 4875 (IGHV3-23)
AKGAVVTAIFDY

SEQ ID NO: 9751 - protein, 11 aa, Homo sapiens
  Light chain CDR3 for antibody 4876 (IGKV3-11)
QQRSNWPPTWT

SEQ ID NO: 9752 - protein, 13 aa, Homo sapiens
  Heavy chain CDR3 for antibody 4876 (IGHV3-53)
ARSGSYWGYYFDY

SEQ ID NO: 9753 - protein, 9 aa, Homo sapiens
  Light chain CDR3 for antibody 4877 (IGKV1-9)
QQLNTYPWT

SEQ ID NO: 9754 - protein, 17 aa, Homo sapiens
  Heavy chain CDR3 for antibody 4877 (IGHV1-18)
ARDRAFTMVRGVPPFDY

SEQ ID NO: 9755 - protein, 9 aa, Homo sapiens
  Light chain CDR3 for antibody 4878 (IGKV1-6)
LQDYNYPYT

SEQ ID NO: 9756 - protein, 13 aa, Homo sapiens
  Heavy chain CDR3 for antibody 4878 (IGHV4-39)
ARPGIVAAGWFDP

SEQ ID NO: 9757 - protein, 9 aa, Homo sapiens
  Light chain CDR3 for antibody 4879 (IGKV5-2)
LQHDNFPLT

SEQ ID NO: 9758 - protein, 12 aa, Homo sapiens
  Heavy chain CDR3 for antibody 4879 (IGHV3-23)
AKGYTSFWYFDL

SEQ ID NO: 9759 - protein, 9 aa, Homo sapiens
  Light chain CDR3 for antibody 4880 (IGKV1D-13)
QQFNNYPHT

SEQ ID NO: 9760 - protein, 17 aa, Homo sapiens
  Heavy chain CDR3 for antibody 4880 (IGHV3-30)
AREGVRGLIYYYYGMDV

SEQ ID NO: 9761 - protein, 9 aa, Homo sapiens
  Light chain CDR3 for antibody 4881 (IGKV2-30)
MQGTHWPLT

SEQ ID NO: 9762 - protein, 18 aa, Homo sapiens
  Heavy chain CDR3 for antibody 4881 (IGHV3-23)
ARYHLYFGSGFGSDGMDV

SEQ ID NO: 9763 - protein, 9 aa, Homo sapiens
  Light chain CDR3 for antibody 4882 (IGKV5-2)
LQHDNFPYT

SEQ ID NO: 9764 - protein, 14 aa, Homo sapiens
  Heavy chain CDR3 for antibody 4882 (IGHV3-64)
ARGGGAVTGTNFDY

SEQ ID NO: 9765 - protein, 9 aa, Homo sapiens
  Light chain CDR3 for antibody 4883 (IGKV1D-13)
QQFNNYPHT

SEQ ID NO: 9766 - protein, 15 aa, Homo sapiens
  Heavy chain CDR3 for antibody 4883 (IGHV3-23)
AKDRDYDFLSGPFDY

SEQ ID NO: 9767 - protein, 9 aa, Homo sapiens
  Light chain CDR3 for antibody 4884 (IGKV1-27)
QKYNSAPYT

SEQ ID NO: 9768 - protein, 19 aa, Homo sapiens
  Heavy chain CDR3 for antibody 4884 (IGHV4-59)
ARDRVVGATTYYYYYGMDV

SEQ ID NO: 9769 - protein, 9 aa, Homo sapiens
  Light chain CDR3 for antibody 4885 (IGKV5-2)
LQHDNFPYT

SEQ ID NO: 9770 - protein, 14 aa, Homo sapiens
  Heavy chain CDR3 for antibody 4885 (IGHV3-23)
AKCDYDILTGILDY

SEQ ID NO: 9771 - protein, 10 aa, Homo sapiens
  Light chain CDR3 for antibody 4886 (IGKV3-11)
QQRSNWPIFT

SEQ ID NO: 9772 - protein, 17 aa, Homo sapiens
  Heavy chain CDR3 for antibody 4886 (IGHV3-33)
ARDLIGPLSSSWYPFDY

SEQ ID NO: 9773 - protein, 9 aa, Homo sapiens
  Light chain CDR3 for antibody 4887 (IGKV1-6)
LQVYSYPWT

SEQ ID NO: 9774 - protein, 11 aa, Homo sapiens
  Heavy chain CDR3 for antibody 4887 (IGHV3-33)
ARDRSSGPFDY

SEQ ID NO: 9775 - protein, 9 aa, Homo sapiens
  Light chain CDR3 for antibody 4888 (IGKV6-21)
HQSSSLPYT

SEQ ID NO: 9776 - protein, 14 aa, Homo sapiens
  Heavy chain CDR3 for antibody 4888 (IGHV3-23)
ATWLPLYYYYGMDV

SEQ ID NO: 9777 - protein, 9 aa, Homo sapiens
  Light chain CDR3 for antibody 4889 (IGKV1-6)
LQDFNYPRT

SEQ ID NO: 9778 - protein, 15 aa, Homo sapiens
  Heavy chain CDR3 for antibody 4889 (IGHV4-59)
ARDLGYYGSGSPLAY

SEQ ID NO: 9779 - protein, 9 aa, Homo sapiens
  Light chain CDR3 for antibody 4890 (IGKV1D-13)
QQFNNYPHT

SEQ ID NO: 9780 - protein, 14 aa, Homo sapiens
  Heavy chain CDR3 for antibody 4890 (IGHV1-46)
ARDGVGAKEGGFDY

SEQ ID NO: 9781 - protein, 9 aa, Homo sapiens
  Light chain CDR3 for antibody 4891 (IGKV1-6)
LQDYNYPWT

SEQ ID NO: 9782 - protein, 18 aa, Homo sapiens
  Heavy chain CDR3 for antibody 4891 (IGHV3-11)
ARDGYSSGWNYYYFGLDV

SEQ ID NO: 9783 - protein, 9 aa, Homo sapiens
  Light chain CDR3 for antibody 4892 (IGKV1-17)
LHSNNYPWT

SEQ ID NO: 9784 - protein, 16 aa, Homo sapiens
  Heavy chain CDR3 for antibody 4892 (IGHV3-23)
AKEGMVLRYFDWLWDY

SEQ ID NO: 9785 - protein, 8 aa, Homo sapiens
  Light chain CDR3 for antibody 4893 (IGKV3D-7)
QQDYNLLT

SEQ ID NO: 9786 - protein, 20 aa, Homo sapiens
  Heavy chain CDR3 for antibody 4893 (IGHV1-f)
ATGLITFVRGVILTYRSFDY

SEQ ID NO: 9787 - protein, 11 aa, Homo sapiens
  Light chain CDR3 for antibody 4894 (IGKV3-11)
QQRSNWPPTWT

SEQ ID NO: 9788 - protein, 14 aa, Homo sapiens
  Heavy chain CDR3 for antibody 4894 (IGHV3-33)
ARDGYDFLTGPFDY

SEQ ID NO: 9789 - protein, 9 aa, Homo sapiens
  Light chain CDR3 for antibody 4895 (IGKV1-27)
QKYNSAPYT

SEQ ID NO: 9790 - protein, 18 aa, Homo sapiens
  Heavy chain CDR3 for antibody 4895 (IGHV4-39)
ARQYYFGSGNYYRGWFDP

SEQ ID NO: 9791 - protein, 10 aa, Homo sapiens
  Light chain CDR3 for antibody 4896 (IGKV1-17)
LQHNSYPMYT

SEQ ID NO: 9792 - protein, 14 aa, Homo sapiens
  Heavy chain CDR3 for antibody 4896 (IGHV3-33)
ARASSGSSYWYFDL

SEQ ID NO: 9793 - protein, 9 aa, Homo sapiens
  Light chain CDR3 for antibody 4897 (IGKV1-6)
LQDYNYPYT

SEQ ID NO: 9794 - protein, 15 aa, Homo sapiens
  Heavy chain CDR3 for antibody 4897 (IGHV3-23)
AKAGGRYFDWFPFDY

SEQ ID NO: 9795 - protein, 9 aa, Homo sapiens
  Light chain CDR3 for antibody 4898 (IGKV3-20)
QQYGSSPYT

SEQ ID NO: 9796 - protein, 17 aa, Homo sapiens
  Heavy chain CDR3 for antibody 4898 (IGHV3-33)
ARSMVTTYGYYYYGMDV

SEQ ID NO: 9797 - protein, 9 aa, Homo sapiens
  Light chain CDR3 for antibody 4899 (IGKV3-15)
QQYNNWPLT

SEQ ID NO: 9798 - protein, 14 aa, Homo sapiens
  Heavy chain CDR3 for antibody 4899 (IGHV3-33)
ARGGYSGYRYYFDY

SEQ ID NO: 9799 - protein, 9 aa, Homo sapiens
  Light chain CDR3 for antibody 4900 (IGKV1-9)
QQLNTYPWT

SEQ ID NO: 9800 - protein, 13 aa, Homo sapiens
  Heavy chain CDR3 for antibody 4900 (IGHV3-33)
AKEDGDYHHYFDY

SEQ ID NO: 9801 - protein, 8 aa, Homo sapiens
  Light chain CDR3 for antibody 4901 (IGKV1-5)
QQYNSYWT

SEQ ID NO: 9802 - protein, 11 aa, Homo sapiens
  Heavy chain CDR3 for antibody 4901 (IGHV3-33)
ARDILTGFLDH

SEQ ID NO: 9803 - protein, 9 aa, Homo sapiens
  Light chain CDR3 for antibody 4902 (IGKV1D-16)
QQYDSYPWT

SEQ ID NO: 9804 - protein, 12 aa, Homo sapiens
  Heavy chain CDR3 for antibody 4902 (IGHV4-61)
ARVYSSGWLFDY

SEQ ID NO: 9805 - protein, 9 aa, Homo sapiens
  Light chain CDR3 for antibody 4903 (IGKV5-2)
LQHDNFPYT

SEQ ID NO: 9806 - protein, 18 aa, Homo sapiens
  Heavy chain CDR3 for antibody 4903 (IGHV3-11)
ARDGYSSGWNYYYFGLDV

SEQ ID NO: 9807 - protein, 9 aa, Homo sapiens
  Light chain CDR3 for antibody 4904 (IGKV6-21)
HQSSSLPYT

SEQ ID NO: 9808 - protein, 18 aa, Homo sapiens
  Heavy chain CDR3 for antibody 4904 (IGHV3-11)
ARDGYSSGWNYYYFGLDV

SEQ ID NO: 9809 - protein, 10 aa, Homo sapiens
  Light chain CDR3 for antibody 4905 (IGKV3-11)
QQRSNWPIFT

SEQ ID NO: 9810 - protein, 13 aa, Homo sapiens
  Heavy chain CDR3 for antibody 4905 (IGHV4-28)
ARKGATGYYGMDV

SEQ ID NO: 9811 - protein, 9 aa, Homo sapiens
  Light chain CDR3 for antibody 4906 (IGKV1-6)
LQDFNYPRT

SEQ ID NO: 9812 - protein, 12 aa, Homo sapiens
  Heavy chain CDR3 for antibody 4906 (IGHV3-13)
VREAGIPDAFDI

SEQ ID NO: 9813 - protein, 10 aa, Homo sapiens
  Light chain CDR3 for antibody 4907 (IGKV3-11)
QQRSNWPIFT

SEQ ID NO: 9814 - protein, 14 aa, Homo sapiens
  Heavy chain CDR3 for antibody 4907 (IGHV3-33)
VRDQGSMVRGGGDY

SEQ ID NO: 9815 - protein, 9 aa, Homo sapiens
  Light chain CDR3 for antibody 4908 (IGKV2-30)
MQGTHWPLT

SEQ ID NO: 9816 - protein, 20 aa, Homo sapiens
  Heavy chain CDR3 for antibody 4908 (IGHV3-11)
ARGGATLIRGLIDYYYGMDV

SEQ ID NO: 9817 - protein, 9 aa, Homo sapiens
  Light chain CDR3 for antibody 4909 (IGKV1-33)
QQYDNLPFT

SEQ ID NO: 9818 - protein, 20 aa, Homo sapiens
  Heavy chain CDR3 for antibody 4909 (IGHV3-23)
AKGMGGLRYFDWPHYYGMDV

SEQ ID NO: 9819 - protein, 9 aa, Homo sapiens
  Light chain CDR3 for antibody 4910 (IGKV5-2)
LQHDNFPYT

SEQ ID NO: 9820 - protein, 13 aa, Homo sapiens
  Heavy chain CDR3 for antibody 4910 (IGHV3-33)
TRRIAVAGAEGDY

SEQ ID NO: 9821 - protein, 9 aa, Homo sapiens
  Light chain CDR3 for antibody 4911 (IGKV1-33)
QQYDNLPFT

SEQ ID NO: 9822 - protein, 14 aa, Homo sapiens
  Heavy chain CDR3 for antibody 4911 (IGHV3-33)
ARAGSGYDRDWFDP

SEQ ID NO: 9823 - protein, 9 aa, Homo sapiens
  Light chain CDR3 for antibody 4912 (IGKV3-11)
QQRSNWPPT

SEQ ID NO: 9824 - protein, 17 aa, Homo sapiens
  Heavy chain CDR3 for antibody 4912 (IGHV3-33)
ARGEQWLGYYYYYGMDV

SEQ ID NO: 9825 - protein, 9 aa, Homo sapiens
  Light chain CDR3 for antibody 4913 (IGKV5-2)
LQHDNFPWT

SEQ ID NO: 9826 - protein, 14 aa, Homo sapiens
  Heavy chain CDR3 for antibody 4913 (IGHV3-20)
ARDRGSSFFDAFDI

SEQ ID NO: 9827 - protein, 11 aa, Homo sapiens
  Light chain CDR3 for antibody 4914 (IGKV3-11)
QQRSNWPPTWT

SEQ ID NO: 9828 - protein, 14 aa, Homo sapiens
  Heavy chain CDR3 for antibody 4914 (IGHV4-39)
ARRGVVVPPGGMDV

SEQ ID NO: 9829 - protein, 8 aa, Homo sapiens
  Light chain CDR3 for antibody 4915 (IGKV1-5)
QQYNSYWT

SEQ ID NO: 9830 - protein, 15 aa, Homo sapiens
  Heavy chain CDR3 for antibody 4915 (IGHV3-23)
AKDGSYYDYYYGMDV

SEQ ID NO: 9831 - protein, 9 aa, Homo sapiens
  Light chain CDR3 for antibody 4916 (IGKV3-7)
QQDYELPLT

SEQ ID NO: 9832 - protein, 18 aa, Homo sapiens
  Heavy chain CDR3 for antibody 4916 (IGHV6-1)
ARDQYSYGPYYYYYGMDV

SEQ ID NO: 9833 - protein, 8 aa, Homo sapiens
  Light chain CDR3 for antibody 4917 (IGKV1D-13)
QQFNNYPT

SEQ ID NO: 9834 - protein, 11 aa, Homo sapiens
  Heavy chain CDR3 for antibody 4917 (IGHV3-33)
ARARYTTGLDY

SEQ ID NO: 9835 - protein, 9 aa, Homo sapiens
  Light chain CDR3 for antibody 4918 (IGKV1-39)
QQSYSTPLT

SEQ ID NO: 9836 - protein, 14 aa, Homo sapiens
  Heavy chain CDR3 for antibody 4918 (IGHV4-39)
ARHGYYGSSNWFDP

SEQ ID NO: 9837 - protein, 8 aa, Homo sapiens
  Light chain CDR3 for antibody 4919 (IGKV3D-7)
QQDYNLLT

SEQ ID NO: 9838 - protein, 11 aa, Homo sapiens
  Heavy chain CDR3 for antibody 4919 (IGHV3-33)
ARARYTTGLDY

SEQ ID NO: 9839 - protein, 9 aa, Homo sapiens
  Light chain CDR3 for antibody 4920 (IGKV1-16)
QHYNDYPFT

SEQ ID NO: 9840 - protein, 13 aa, Homo sapiens
  Heavy chain CDR3 for antibody 4920 (IGHV3-33)
ARDYCGGDCYLDY

SEQ ID NO: 9841 - protein, 9 aa, Homo sapiens
  Light chain CDR3 for antibody 4921 (IGKV6-21)
HQSSSLPYT

SEQ ID NO: 9842 - protein, 15 aa, Homo sapiens
  Heavy chain CDR3 for antibody 4921 (IGHV1-46)
ARGRFFDWLLSPFDY

SEQ ID NO: 9843 - protein, 6 aa, Homo sapiens
  Light chain CDR3 for antibody 4922 (IGKV3-20)
QQYGST

SEQ ID NO: 9844 - protein, 11 aa, Homo sapiens
  Heavy chain CDR3 for antibody 4922 (IGHV3-33)
ARDRSSGPFDY

SEQ ID NO: 9845 - protein, 8 aa, Homo sapiens
  Light chain CDR3 for antibody 4923 (IGKV3D-7)
QQDYNLLT

SEQ ID NO: 9846 - protein, 17 aa, Homo sapiens
  Heavy chain CDR3 for antibody 4923 (IGHV3-33)
ARGEQWLGYYYYYGMDV

SEQ ID NO: 9847 - protein, 8 aa, Homo sapiens
  Light chain CDR3 for antibody 4924 (IGKV3D-7)
QQDYNLLT

SEQ ID NO: 9848 - protein, 17 aa, Homo sapiens
  Heavy chain CDR3 for antibody 4924 (IGHV1-18)
ARERYYGSGSYKYNMDV

SEQ ID NO: 9849 - protein, 8 aa, Homo sapiens
  Light chain CDR3 for antibody 4925 (IGKV1-5)
QQYNSYYT

SEQ ID NO: 9850 - protein, 13 aa, Homo sapiens
  Heavy chain CDR3 for antibody 4925 (IGHV3-33)
AREYCSGGSCYDY

SEQ ID NO: 9851 - protein, 8 aa, Homo sapiens
  Light chain CDR3 for antibody 4926 (IGKV3D-7)
QQDYNLLT

SEQ ID NO: 9852 - protein, 18 aa, Homo sapiens
  Heavy chain CDR3 for antibody 4926 (IGHV4-39)
ARQYYFGSGNYYRGWFDP

SEQ ID NO: 9853 - protein, 9 aa, Homo sapiens
  Light chain CDR3 for antibody 4927 (IGKV4-1)
QQYYSTPWT

SEQ ID NO: 9854 - protein, 13 aa, Homo sapiens
  Heavy chain CDR3 for antibody 4927 (IGHV3-11)
ARDGGAAAGTWDS

SEQ ID NO: 9855 - protein, 9 aa, Homo sapiens
  Light chain CDR3 for antibody 4928 (IGKV1-17)
LQHNSYPWT

SEQ ID NO: 9856 - protein, 14 aa, Homo sapiens
  Heavy chain CDR3 for antibody 4928 (IGHV3-33)
ARASSGSSYWYIDL

SEQ ID NO: 9857 - protein, 9 aa, Homo sapiens
  Light chain CDR3 for antibody 4929 (IGKV1-6)
LQDYNYPWT

SEQ ID NO: 9858 - protein, 17 aa, Homo sapiens
  Heavy chain CDR3 for antibody 4929 (IGHV3-66)
ARVQYDILTGYSPYFDN

SEQ ID NO: 9859 - protein, 9 aa, Homo sapiens
  Light chain CDR3 for antibody 4930 (IGKV1-9)
QQLKSYLYT

SEQ ID NO: 9860 - protein, 20 aa, Homo sapiens
  Heavy chain CDR3 for antibody 4930 (IGHV1-f)
ATGLITFVRGVILTYRSFDY

SEQ ID NO: 9861 - protein, 9 aa, Homo sapiens
  Light chain CDR3 for antibody 4931 (IGKV1-9)
QQLISYPLT

SEQ ID NO: 9862 - protein, 9 aa, Homo sapiens
  Heavy chain CDR3 for antibody 4931 (IGHV3-33)
AREYKEFDY

SEQ ID NO: 9863 - protein, 9 aa, Homo sapiens
  Light chain CDR3 for antibody 4932 (IGKV1-27)
QKYNSAPYT

SEQ ID NO: 9864 - protein, 10 aa, Homo sapiens
  Heavy chain CDR3 for antibody 4932 (IGHV3-33)
ARNILTPLDY

SEQ ID NO: 9865 - protein, 9 aa, Homo sapiens
  Light chain CDR3 for antibody 4933 (IGKV2-30)
MQGTHWPLT

SEQ ID NO: 9866 - protein, 14 aa, Homo sapiens
  Heavy chain CDR3 for antibody 4933 (IGHV3-20)
ARDGGSTCYDWFDP

SEQ ID NO: 9867 - protein, 10 aa, Homo sapiens
  Light chain CDR3 for antibody 4934 (IGKV1-39)
QQSYSTPMYT

SEQ ID NO: 9868 - protein, 10 aa, Homo sapiens
  Heavy chain CDR3 for antibody 4934 (IGHV3-23)
AKEQWLVLDY

SEQ ID NO: 9869 - protein, 9 aa, Homo sapiens
  Light chain CDR3 for antibody 4935 (IGKV5-2)
LQHDNFPWT

SEQ ID NO: 9870 - protein, 14 aa, Homo sapiens
  Heavy chain CDR3 for antibody 4935 (IGHV4-39)
ARQGDILTGYSFDN

SEQ ID NO: 9871 - protein, 9 aa, Homo sapiens
  Light chain CDR3 for antibody 4936 (IGKV1-6)
LQDYNYPRT

SEQ ID NO: 9872 - protein, 14 aa, Homo sapiens
  Heavy chain CDR3 for antibody 4936 (IGHV1-46)
ARDGVGAKEGGSDY

SEQ ID NO: 9873 - protein, 9 aa, Homo sapiens
  Light chain CDR3 for antibody 4937 (IGKV1D-16)
QQYNSYPYT

SEQ ID NO: 9874 - protein, 13 aa, Homo sapiens
  Heavy chain CDR3 for antibody 4937 (IGHV3-33)
ARQSSGWFDVFDI

SEQ ID NO: 9875 - protein, 9 aa, Homo sapiens
  Light chain CDR3 for antibody 4938 (IGKV2-30)
MQGTHWPLT

SEQ ID NO: 9876 - protein, 15 aa, Homo sapiens
  Heavy chain CDR3 for antibody 4938 (IGHV3-33)
AREGLRYFHYYGMDV

SEQ ID NO: 9877 - protein, 9 aa, Homo sapiens
  Light chain CDR3 for antibody 4939 (IGKV1D-13)
QQFNNYPHT

SEQ ID NO: 9878 - protein, 18 aa, Homo sapiens
  Heavy chain CDR3 for antibody 4939 (IGHV3-33)
ARGGYDILTGYYRTGMDV

SEQ ID NO: 9879 - protein, 9 aa, Homo sapiens
  Light chain CDR3 for antibody 4940 (IGKV1-6)
LQDYNYPWT

SEQ ID NO: 9880 - protein, 13 aa, Homo sapiens
  Heavy chain CDR3 for antibody 4940 (IGHV3-33)
ARGGYYGSGSLDY

SEQ ID NO: 9881 - protein, 10 aa, Homo sapiens
  Light chain CDR3 for antibody 4941 (IGKV1-17)
LQHNSYPMYT

SEQ ID NO: 9882 - protein, 11 aa, Homo sapiens
  Heavy chain CDR3 for antibody 4941 (IGHV3-33)
ARDILTGFLDH

SEQ ID NO: 9883 - protein, 11 aa, Homo sapiens
  Light chain CDR3 for antibody 4942 (IGKV3-11)
QQRSNWPPTWT

SEQ ID NO: 9884 - protein, 17 aa, Homo sapiens
  Heavy chain CDR3 for antibody 4942 (IGHV3-33)
ARDLIGPLSSSWYPFDY

SEQ ID NO: 9885 - protein, 9 aa, Homo sapiens
  Light chain CDR3 for antibody 4943 (IGKV1-16)
QQYDSYPWT

SEQ ID NO: 9886 - protein, 17 aa, Homo sapiens
  Heavy chain CDR3 for antibody 4943 (IGHV4-34)
AGLRFFDWLFDYYGMDV

SEQ ID NO: 9887 - protein, 8 aa, Homo sapiens
  Light chain CDR3 for antibody 4944 (IGKV3-11)
QQRSNWLT

SEQ ID NO: 9888 - protein, 15 aa, Homo sapiens
  Heavy chain CDR3 for antibody 4944 (IGHV3-30)
ARGAMVRGVDYGMDV

SEQ ID NO: 9889 - protein, 8 aa, Homo sapiens
  Light chain CDR3 for antibody 4945 (IGKV3D-7)
QQDYNLLT

SEQ ID NO: 9890 - protein, 10 aa, Homo sapiens
  Heavy chain CDR3 for antibody 4945 (IGHV3-23)
AKDHYGDYPY

SEQ ID NO: 9891 - protein, 8 aa, Homo sapiens
  Light chain CDR3 for antibody 4946 (IGKV6-21)
HQSSSLPT

SEQ ID NO: 9892 - protein, 11 aa, Homo sapiens
  Heavy chain CDR3 for antibody 4946 (IGHV3-33)
ARDRVLTPFDY

SEQ ID NO: 9893 - protein, 10 aa, Homo sapiens
  Light chain CDR3 for antibody 4947 (IGKV1-17)
LQHNSYPMYT

SEQ ID NO: 9894 - protein, 12 aa, Homo sapiens
  Heavy chain CDR3 for antibody 4947 (IGHV1-18)
ARILFYGDYFDY

SEQ ID NO: 9895 - protein, 9 aa, Homo sapiens
  Light chain CDR3 for antibody 4948 (IGKV3-11)
QQRSNWPLT

SEQ ID NO: 9896 - protein, 14 aa, Homo sapiens
  Heavy chain CDR3 for antibody 4948 (IGHV3-33)
ARRGYSGYDWYFDY

SEQ ID NO: 9897 - protein, 9 aa, Homo sapiens
  Light chain CDR3 for antibody 4949 (IGKV2-30)
MQGTHWPLT

SEQ ID NO: 9898 - protein, 17 aa, Homo sapiens
  Heavy chain CDR3 for antibody 4949 (IGHV3-23)
AKDTITMVRGALFGMDV

SEQ ID NO: 9899 - protein, 9 aa, Homo sapiens
  Light chain CDR3 for antibody 4950 (IGKV1-16)
QHYNDYPFT

SEQ ID NO: 9900 - protein, 14 aa, Homo sapiens
  Heavy chain CDR3 for antibody 4950 (IGHV3-23)
AKSRIVGALYYFDY

SEQ ID NO: 9901 - protein, 9 aa, Homo sapiens
  Light chain CDR3 for antibody 4951 (IGKV3-11)
QQRSNWPLT

SEQ ID NO: 9902 - protein, 14 aa, Homo sapiens
  Heavy chain CDR3 for antibody 4951 (IGHV3-23)
ARDRRDFYYYGMDV

SEQ ID NO: 9903 - protein, 9 aa, Homo sapiens
  Light chain CDR3 for antibody 4952 (IGKV6-21)
HQSSSLPYT

SEQ ID NO: 9904 - protein, 17 aa, Homo sapiens
  Heavy chain CDR3 for antibody 4952 (IGHV4-39)
ARNTMVGTWQRQGNLDH

SEQ ID NO: 9905 - protein, 10 aa, Homo sapiens
  Light chain CDR3 for antibody 4953 (IGKV1-17)
LQHNSYPMYT

SEQ ID NO: 9906 - protein, 11 aa, Homo sapiens
  Heavy chain CDR3 for antibody 4953 (IGHV3-33)
AREAANWGFDY

SEQ ID NO: 9907 - protein, 10 aa, Homo sapiens
  Light chain CDR3 for antibody 4954 (IGKV3-15)
QQYNNWPPYT

SEQ ID NO: 9908 - protein, 17 aa, Homo sapiens
  Heavy chain CDR3 for antibody 4954 (IGHV1-18)
ARDRAFTMVRGVPPFDY

SEQ ID NO: 9909 - protein, 9 aa, Homo sapiens
  Light chain CDR3 for antibody 4955 (IGKV3-11)
QQRSNWPPT

SEQ ID NO: 9910 - protein, 17 aa, Homo sapiens
  Heavy chain CDR3 for antibody 4955 (IGHV3-33)
ARGDGDILTGYYEWFDP

SEQ ID NO: 9911 - protein, 8 aa, Homo sapiens
  Light chain CDR3 for antibody 4956 (IGKV1-5)
QQYNSYWT

SEQ ID NO: 9912 - protein, 20 aa, Homo sapiens
  Heavy chain CDR3 for antibody 4956 (IGHV3-23)
AKDREMAATSHYYYYYGMDV

SEQ ID NO: 9913 - protein, 9 aa, Homo sapiens
  Light chain CDR3 for antibody 4957 (IGKV6-21)
HQSSSLPYT

SEQ ID NO: 9914 - protein, 13 aa, Homo sapiens
  Heavy chain CDR3 for antibody 4957 (IGHV3-33)
ARAFTMVRGVIDY

SEQ ID NO: 9915 - protein, 9 aa, Homo sapiens
  Light chain CDR3 for antibody 4958 (IGKV1-33)
QQYDNLPFT

SEQ ID NO: 9916 - protein, 9 aa, Homo sapiens
  Heavy chain CDR3 for antibody 4958 (IGHV3-30)
ARDNWGFDY

SEQ ID NO: 9917 - protein, 8 aa, Homo sapiens
  Light chain CDR3 for antibody 4959 (IGKV1D-13)
QQFNNYPT

SEQ ID NO: 9918 - protein, 14 aa, Homo sapiens
  Heavy chain CDR3 for antibody 4959 (IGHV3-33)
ARDRRDFYYYGMDV

SEQ ID NO: 9919 - protein, 9 aa, Homo sapiens
  Light chain CDR3 for antibody 4960 (IGKV1D-13)
QQFNNYPYT

SEQ ID NO: 9920 - protein, 15 aa, Homo sapiens
  Heavy chain CDR3 for antibody 4960 (IGHV3-33)
ARDGSGSYSLYGMDV

SEQ ID NO: 9921 - protein, 9 aa, Homo sapiens
  Light chain CDR3 for antibody 4961 (IGKV1-9)
QQYGSSPYT

SEQ ID NO: 9922 - protein, 17 aa, Homo sapiens
  Heavy chain CDR3 for antibody 4961 (IGHV3-33)
ARSPYDILTGYSYYFDY

SEQ ID NO: 9923 - protein, 8 aa, Homo sapiens
  Light chain CDR3 for antibody 4962 (IGKV3D-7)
QQDYNLLT

SEQ ID NO: 9924 - protein, 14 aa, Homo sapiens
  Heavy chain CDR3 for antibody 4962 (IGHV3-33)
ARGGYSGYRYYFDY

SEQ ID NO: 9925 - protein, 10 aa, Homo sapiens
  Light chain CDR3 for antibody 4963 (IGKV3-11)
QQRSNWPIFT

SEQ ID NO: 9926 - protein, 13 aa, Homo sapiens
  Heavy chain CDR3 for antibody 4963 (IGHV3-33)
VSTGDSYYYVMDV

SEQ ID NO: 9927 - protein, 11 aa, Homo sapiens
  Light chain CDR3 for antibody 4964 (IGKV3-11)
QQRSNWPPTWT

SEQ ID NO: 9928 - protein, 11 aa, Homo sapiens
  Heavy chain CDR3 for antibody 4964 (IGHV3-33)
ARDRSSGPFDY

SEQ ID NO: 9929 - protein, 9 aa, Homo sapiens
  Light chain CDR3 for antibody 4965 (IGKV6-21)
HQSTSLPFT

SEQ ID NO: 9930 - protein, 12 aa, Homo sapiens
  Heavy chain CDR3 for antibody 4965 (IGHV1-46)
ARGLTGDHAFDI

SEQ ID NO: 9931 - protein, 9 aa, Homo sapiens
  Light chain CDR3 for antibody 4966 (IGKV6-21)
HQSSSLPYT

SEQ ID NO: 9932 - protein, 15 aa, Homo sapiens
  Heavy chain CDR3 for antibody 4966 (IGHV1-2)
ARDLGYYGSGSRMDV

SEQ ID NO: 9933 - protein, 9 aa, Homo sapiens
  Light chain CDR3 for antibody 4967 (IGKV1-6)
LQDYNYPYT

SEQ ID NO: 9934 - protein, 13 aa, Homo sapiens
  Heavy chain CDR3 for antibody 4967 (IGHV3-33)
ARGRGYNYGYGDY

SEQ ID NO: 9935 - protein, 9 aa, Homo sapiens
  Light chain CDR3 for antibody 4968 (IGKV1-9)
QQLKSYLYT

SEQ ID NO: 9936 - protein, 19 aa, Homo sapiens
  Heavy chain CDR3 for antibody 4968 (IGHV1-18)
ARDDILTGYSLYYYYGMDV

SEQ ID NO: 9937 - protein, 9 aa, Homo sapiens
  Light chain CDR3 for antibody 4969 (IGKV3D-7)
QQDSNLPYT

SEQ ID NO: 9938 - protein, 13 aa, Homo sapiens
  Heavy chain CDR3 for antibody 4969 (IGHV4-34)
ASNFYYYYYGMDV

SEQ ID NO: 9939 - protein, 9 aa, Homo sapiens
  Light chain CDR3 for antibody 4970 (IGKV1-6)
LQDYNYPWT

SEQ ID NO: 9940 - protein, 14 aa, Homo sapiens
  Heavy chain CDR3 for antibody 4970 (IGHV3-11)
AGRHYDILTGFSDY

SEQ ID NO: 9941 - protein, 9 aa, Homo sapiens
  Light chain CDR3 for antibody 4971 (IGKV1-33)
QQYDNLPFT

SEQ ID NO: 9942 - protein, 17 aa, Homo sapiens
  Heavy chain CDR3 for antibody 4971 (IGHV3-33)
ARGFSGYDGYYYYGMDV

SEQ ID NO: 9943 - protein, 9 aa, Homo sapiens
  Light chain CDR3 for antibody 4972 (IGKV1-17)
LQHNSYPWT

SEQ ID NO: 9944 - protein, 23 aa, Homo sapiens
  Heavy chain CDR3 for antibody 4972 (IGHV3-11)
ARDRGITMVRGVITYYYFYGMDV

SEQ ID NO: 9945 - protein, 9 aa, Homo sapiens
  Light chain CDR3 for antibody 4973 (IGKV3D-7)
QQDYNLPLT

SEQ ID NO: 9946 - protein, 13 aa, Homo sapiens
  Heavy chain CDR3 for antibody 4973 (IGHV3-33)
ARDYTMVRGVMNY

SEQ ID NO: 9947 - protein, 10 aa, Homo sapiens
  Light chain CDR3 for antibody 4974 (IGKV3-11)
QQRSNWPTWT

SEQ ID NO: 9948 - protein, 17 aa, Homo sapiens
  Heavy chain CDR3 for antibody 4974 (IGHV3-33)
ARGFSGYDGYYYYGMDV

SEQ ID NO: 9949 - protein, 9 aa, Homo sapiens
  Light chain CDR3 for antibody 4975 (IGKV1-39)
QQSYSTPLT

SEQ ID NO: 9950 - protein, 14 aa, Homo sapiens
  Heavy chain CDR3 for antibody 4975 (IGHV3-20)
ARDEGSGGYDVFDI

SEQ ID NO: 9951 - protein, 9 aa, Homo sapiens
  Light chain CDR3 for antibody 4976 (IGKV1-39)
QQSYSTPWT

SEQ ID NO: 9952 - protein, 15 aa, Homo sapiens
  Heavy chain CDR3 for antibody 4976 (IGHV4-39)
ARQGLVATIKGYFQH

SEQ ID NO: 9953 - protein, 9 aa, Homo sapiens
  Light chain CDR3 for antibody 4977 (IGKV3-11)
QQRSNWPLT

SEQ ID NO: 9954 - protein, 12 aa, Homo sapiens
  Heavy chain CDR3 for antibody 4977 (IGHV3-23)
AKESLYTPTDDY

SEQ ID NO: 9955 - protein, 9 aa, Homo sapiens
  Light chain CDR3 for antibody 4978 (IGKV1-9)
QQLISYPLT

SEQ ID NO: 9956 - protein, 14 aa, Homo sapiens
  Heavy chain CDR3 for antibody 4978 (IGHV1-46)
ARDGVGAKEGGSDY

SEQ ID NO: 9957 - protein, 9 aa, Homo sapiens
  Light chain CDR3 for antibody 4979 (IGKV1-9)
QQLKSYLYT

SEQ ID NO: 9958 - protein, 12 aa, Homo sapiens
  Heavy chain CDR3 for antibody 4979 (IGHV1-24)
ASDWAYYYGMDV

SEQ ID NO: 9959 - protein, 9 aa, Homo sapiens
  Light chain CDR3 for antibody 4980 (IGKV3-11)
QQRSNWPPT

SEQ ID NO: 9960 - protein, 13 aa, Homo sapiens
  Heavy chain CDR3 for antibody 4980 (IGHV4-61)
ARRYSSGWYPFDY

SEQ ID NO: 9961 - protein, 9 aa, Homo sapiens
  Light chain CDR3 for antibody 4981 (IGKV3-15)
QQYNNWPLT

SEQ ID NO: 9962 - protein, 19 aa, Homo sapiens
  Heavy chain CDR3 for antibody 4981 (IGHV1-18)
ARDDILTGYSLYYYYGMDV

SEQ ID NO: 9963 - protein, 9 aa, Homo sapiens
  Light chain CDR3 for antibody 4982 (IGKV1-39)
QQSYRTPLT

SEQ ID NO: 9964 - protein, 13 aa, Homo sapiens
  Heavy chain CDR3 for antibody 4982 (IGHV3-11)
AREGIAVAGDFDH

SEQ ID NO: 9965 - protein, 10 aa, Homo sapiens
  Light chain CDR3 for antibody 4983 (IGKV1-17)
LQHNSYPMYT

SEQ ID NO: 9966 - protein, 16 aa, Homo sapiens
  Heavy chain CDR3 for antibody 4983 (IGHV3-23)
AKEGEVLRYFDWLFNY

SEQ ID NO: 9967 - protein, 9 aa, Homo sapiens
  Light chain CDR3 for antibody 4984 (IGKV1D-13)
QQFNNYMYT

SEQ ID NO: 9968 - protein, 14 aa, Homo sapiens
  Heavy chain CDR3 for antibody 4984 (IGHV4-39)
ARQGTMIRGGYFDY

SEQ ID NO: 9969 - protein, 9 aa, Homo sapiens
  Light chain CDR3 for antibody 4985 (IGKV5-2)
LQHDNFPWT

SEQ ID NO: 9970 - protein, 13 aa, Homo sapiens
  Heavy chain CDR3 for antibody 4985 (IGHV1-18)
ARSYYGSGSPFDY

SEQ ID NO: 9971 - protein, 9 aa, Homo sapiens
  Light chain CDR3 for antibody 4986 (IGKV3D-7)
QQDYKLPLT

SEQ ID NO: 9972 - protein, 10 aa, Homo sapiens
  Heavy chain CDR3 for antibody 4986 (IGHV1-18)
AREQRLGFDY

SEQ ID NO: 9973 - protein, 9 aa, Homo sapiens
  Light chain CDR3 for antibody 4987 (IGKV3-11)
QQRSNWPLT

SEQ ID NO: 9974 - protein, 17 aa, Homo sapiens
  Heavy chain CDR3 for antibody 4987 (IGHV1-18)
ARERYYGSGIYKYAMDV

SEQ ID NO: 9975 - protein, 9 aa, Homo sapiens
  Light chain CDR3 for antibody 4988 (IGKV1-6)
LQDYNYPYT

SEQ ID NO: 9976 - protein, 16 aa, Homo sapiens
  Heavy chain CDR3 for antibody 4988 (IGHV3-33)
ARAPGGDYYFYFGMDV

SEQ ID NO: 9977 - protein, 9 aa, Homo sapiens
  Light chain CDR3 for antibody 4989 (IGKV1-39)
QQSYSTPLT

SEQ ID NO: 9978 - protein, 19 aa, Homo sapiens
  Heavy chain CDR3 for antibody 4989 (IGHV3-33)
TRDPHYDILTGYAYYGMDV

SEQ ID NO: 9979 - protein, 9 aa, Homo sapiens
  Light chain CDR3 for antibody 4990 (IGKV1D-16)
QQYNSYPLT

SEQ ID NO: 9980 - protein, 18 aa, Homo sapiens
  Heavy chain CDR3 for antibody 4990 (IGHV3-33)
AREGYFGSGSYYRNWFDP

SEQ ID NO: 9981 - protein, 9 aa, Homo sapiens
  Light chain CDR3 for antibody 4991 (IGKV6-21)
HQSSSLPLT

SEQ ID NO: 9982 - protein, 13 aa, Homo sapiens
  Heavy chain CDR3 for antibody 4991 (IGHV3-33)
ARVDYYNYYGLDV

SEQ ID NO: 9983 - protein, 9 aa, Homo sapiens
  Light chain CDR3 for antibody 4992 (IGKV5-2)
LQHDNFPYT

SEQ ID NO: 9984 - protein, 23 aa, Homo sapiens
  Heavy chain CDR3 for antibody 4992 (IGHV3-11)
ARDRGITMVRGVITYYYFYGMDV

SEQ ID NO: 9985 - protein, 9 aa, Homo sapiens
  Light chain CDR3 for antibody 4993 (IGKV1-6)
LQDYNYPYT

SEQ ID NO: 9986 - protein, 12 aa, Homo sapiens
  Heavy chain CDR3 for antibody 4993 (IGHV1-18)
ARKGIEVGGFDY

SEQ ID NO: 9987 - protein, 9 aa, Homo sapiens
  Light chain CDR3 for antibody 4994 (IGKV1-39)
QQGFSTPWT

SEQ ID NO: 9988 - protein, 13 aa, Homo sapiens
  Heavy chain CDR3 for antibody 4994 (IGHV4-34)
ASNFYYYYYGMDV

SEQ ID NO: 9989 - protein, 9 aa, Homo sapiens
  Light chain CDR3 for antibody 4995 (IGKV1-17)
QQHNSYPYT

SEQ ID NO: 9990 - protein, 18 aa, Homo sapiens
  Heavy chain CDR3 for antibody 4995 (IGHV4-39)
VKYITMVRGDIITGPFAY

SEQ ID NO: 9991 - protein, 9 aa, Homo sapiens
  Light chain CDR3 for antibody 4996 (IGKV3-15)
QQYNNWPLT

SEQ ID NO: 9992 - protein, 10 aa, Homo sapiens
  Heavy chain CDR3 for antibody 4996 (IGHV1-18)
AREQRLGFDY

SEQ ID NO: 9993 - protein, 9 aa, Homo sapiens
  Light chain CDR3 for antibody 4997 (IGKV5-2)
LQHDNFPYT

SEQ ID NO: 9994 - protein, 18 aa, Homo sapiens
  Heavy chain CDR3 for antibody 4997 (IGHV3-33)
ARRTAAGTGDYYYYGMDV

SEQ ID NO: 9995 - protein, 9 aa, Homo sapiens
  Light chain CDR3 for antibody 4998 (IGKV3D-7)
QQDYNLPLT

SEQ ID NO: 9996 - protein, 8 aa, Homo sapiens
  Heavy chain CDR3 for antibody 4998 (IGHV3-23)
AKESLLDY

SEQ ID NO: 9997 - protein, 8 aa, Homo sapiens
  Light chain CDR3 for antibody 4999 (IGKV3D-7)
QQDYNLYT

SEQ ID NO: 9998 - protein, 22 aa, Homo sapiens
  Heavy chain CDR3 for antibody 4999 (IGHV3-33)
ARREHIVVVTAIPGYYYYGMDV

SEQ ID NO: 9999 - protein, 9 aa, Homo sapiens
  Light chain CDR3 for antibody 5000 (IGKV3D-7)
QQDYNLPLT

SEQ ID NO: 10000 - protein, 11 aa, Homo sapiens
  Heavy chain CDR3 for antibody 5000 (IGHV3-33)
ARGSGSYAFDY

SEQ ID NO: 10001 - protein, 8 aa, Homo sapiens
  Light chain CDR3 for antibody 5001 (IGKV3D-7)
QQDYNLLT

SEQ ID NO: 10002 - protein, 11 aa, Homo sapiens
  Heavy chain CDR3 for antibody 5001 (IGHV3-13)
AREAIIGPFDY

SEQ ID NO: 10003 - protein, 9 aa, Homo sapiens
  Light chain CDR3 for antibody 5002 (IGKV1-39)
QQSYSTPLT

SEQ ID NO: 10004 - protein, 14 aa, Homo sapiens
  Heavy chain CDR3 for antibody 5002 (IGHV3-33)
AREGYSSGWDYFDH

SEQ ID NO: 10005 - protein, 9 aa, Homo sapiens
  Light chain CDR3 for antibody 5003 (IGKV1D-16)
QQYDSYPWT

SEQ ID NO: 10006 - protein, 15 aa, Homo sapiens
  Heavy chain CDR3 for antibody 5003 (IGHV3-23)
AKDLSSGWFAYFFDY

SEQ ID NO: 10007 - protein, 9 aa, Homo sapiens
  Light chain CDR3 for antibody 5004 (IGKV3-11)
QQRSNWPLT

SEQ ID NO: 10008 - protein, 14 aa, Homo sapiens
  Heavy chain CDR3 for antibody 5004 (IGHV3-33)
ARDGYDILTGPFDY

SEQ ID NO: 10009 - protein, 8 aa, Homo sapiens
  Light chain CDR3 for antibody 5005 (IGKV3D-7)
QQDYNLLT

SEQ ID NO: 10010 - protein, 7 aa, Homo sapiens
  Heavy chain CDR3 for antibody 5005 (IGHV3-33)
ARELVDY

SEQ ID NO: 10011 - protein, 9 aa, Homo sapiens
  Light chain CDR3 for antibody 5006 (IGKV1-6)
LQDYKSPFT

SEQ ID NO: 10012 - protein, 13 aa, Homo sapiens
  Heavy chain CDR3 for antibody 5006 (IGHV3-23)
ARAFFMVRGVIDF

SEQ ID NO: 10013 - protein, 9 aa, Homo sapiens
  Light chain CDR3 for antibody 5007 (IGKV1-6)
LQDYNYPWT

SEQ ID NO: 10014 - protein, 9 aa, Homo sapiens
  Heavy chain CDR3 for antibody 5007 (IGHV3-33)
ARDAVYFDY

SEQ ID NO: 10015 - protein, 9 aa, Homo sapiens
  Light chain CDR3 for antibody 5008 (IGKV2-30)
MQGTHWPLT

SEQ ID NO: 10016 - protein, 18 aa, Homo sapiens
  Heavy chain CDR3 for antibody 5008 (IGHV3-33)
ARREGITLIFYYYYGMDV

SEQ ID NO: 10017 - protein, 9 aa, Homo sapiens
  Light chain CDR3 for antibody 5009 (IGKV1D-13)
QQFNNYPHT

SEQ ID NO: 10018 - protein, 9 aa, Homo sapiens
  Heavy chain CDR3 for antibody 5009 (IGHV3-23)
AKEQQLFDY

SEQ ID NO: 10019 - protein, 9 aa, Homo sapiens
  Light chain CDR3 for antibody 5010 (IGKV1-16)
QQYNRYPYT

SEQ ID NO: 10020 - protein, 22 aa, Homo sapiens
  Heavy chain CDR3 for antibody 5010 (IGHV4-59)
AREINYGSGSYYNEDYYYGMDV

SEQ ID NO: 10021 - protein, 9 aa, Homo sapiens
  Light chain CDR3 for antibody 5011 (IGKV1-9)
QQLNTYPWT

SEQ ID NO: 10022 - protein, 14 aa, Homo sapiens
  Heavy chain CDR3 for antibody 5011 (IGHV3-33)
ARQYSYGYPYYFDY

SEQ ID NO: 10023 - protein, 9 aa, Homo sapiens
  Light chain CDR3 for antibody 5012 (IGKV5-2)
LQHDKFPYT

SEQ ID NO: 10024 - protein, 13 aa, Homo sapiens
  Heavy chain CDR3 for antibody 5012 (IGHV4-34)
ASNFYYYYYGMDV

SEQ ID NO: 10025 - protein, 9 aa, Homo sapiens
  Light chain CDR3 for antibody 5013 (IGKV1-5)
QQYNTYSRT

SEQ ID NO: 10026 - protein, 13 aa, Homo sapiens
  Heavy chain CDR3 for antibody 5013 (IGHV3-23)
ASPFNWNDGFFDY

SEQ ID NO: 10027 - protein, 9 aa, Homo sapiens
  Light chain CDR3 for antibody 5014 (IGKV3D-7)
QQDYNLPLT

SEQ ID NO: 10028 - protein, 9 aa, Homo sapiens
  Heavy chain CDR3 for antibody 5014 (IGHV1-18)
ARGGWGFEY

SEQ ID NO: 10029 - protein, 9 aa, Homo sapiens
  Light chain CDR3 for antibody 5015 (IGKV5-2)
LQHDNFPYT

SEQ ID NO: 10030 - protein, 14 aa, Homo sapiens
  Heavy chain CDR3 for antibody 5015 (IGHV3-33)
ARDGAAAALDAFDI

SEQ ID NO: 10031 - protein, 9 aa, Homo sapiens
  Light chain CDR3 for antibody 5016 (IGKV1-17)
LQHNSYPLT

SEQ ID NO: 10032 - protein, 22 aa, Homo sapiens
  Heavy chain CDR3 for antibody 5016 (IGHV3-48)
ARGDYDILTGYRGYYSYYGMDV

SEQ ID NO: 10033 - protein, 9 aa, Homo sapiens
  Light chain CDR3 for antibody 5017 (IGKV3-20)
QQYGSSPYT

SEQ ID NO: 10034 - protein, 19 aa, Homo sapiens
  Heavy chain CDR3 for antibody 5017 (IGHV3-33)
ARGVRLRFFDPYYYYGLDV

SEQ ID NO: 10035 - protein, 9 aa, Homo sapiens
  Light chain CDR3 for antibody 5018 (IGKV6-21)
HQSSSLPYT

SEQ ID NO: 10036 - protein, 16 aa, Homo sapiens
  Heavy chain CDR3 for antibody 5018 (IGHV3-64)
ARGRYFDWLLGDWFDP

SEQ ID NO: 10037 - protein, 9 aa, Homo sapiens
  Light chain CDR3 for antibody 5019 (IGKV6-21)
HQSSSLPYT

SEQ ID NO: 10038 - protein, 17 aa, Homo sapiens
  Heavy chain CDR3 for antibody 5019 (IGHV3-33)
ARKDYGILSGYYSPFDY

SEQ ID NO: 10039 - protein, 10 aa, Homo sapiens
  Light chain CDR3 for antibody 5020 (IGKV1-17)
LQHNSYPMYT

SEQ ID NO: 10040 - protein, 13 aa, Homo sapiens
  Heavy chain CDR3 for antibody 5020 (IGHV3-11)
ARDEGYRGYVLDT

SEQ ID NO: 10041 - protein, 9 aa, Homo sapiens
  Light chain CDR3 for antibody 5021 (IGKV6-21)
HQSSSLPYT

SEQ ID NO: 10042 - protein, 20 aa, Homo sapiens
  Heavy chain CDR3 for antibody 5021 (IGHV3-23)
AKDRMTTVTSYYYYSYGMDV

SEQ ID NO: 10043 - protein, 9 aa, Homo sapiens
  Light chain CDR3 for antibody 5022 (IGKV1-6)
LQDFHYPWT

SEQ ID NO: 10044 - protein, 12 aa, Homo sapiens
  Heavy chain CDR3 for antibody 5022 (IGHV3-13)
AREAGIPDAFDI

SEQ ID NO: 10045 - protein, 9 aa, Homo sapiens
  Light chain CDR3 for antibody 5023 (IGKV3-20)
QQYGSSPWT

SEQ ID NO: 10046 - protein, 14 aa, Homo sapiens
  Heavy chain CDR3 for antibody 5023 (IGHV3-23)
AKGGDILTGYYTDY

SEQ ID NO: 10047 - protein, 10 aa, Homo sapiens
  Light chain CDR3 for antibody 5024 (IGKV3-11)
QQRSNWPIFT

SEQ ID NO: 10048 - protein, 12 aa, Homo sapiens
  Heavy chain CDR3 for antibody 5024 (IGHV3-33)
ARVDTAAPYFDY

SEQ ID NO: 10049 - protein, 8 aa, Homo sapiens
  Light chain CDR3 for antibody 5025 (IGKV1D-13)
QQFNNYPT

SEQ ID NO: 10050 - protein, 10 aa, Homo sapiens
  Heavy chain CDR3 for antibody 5025 (IGHV3-23)
AKGDRWRFDP

SEQ ID NO: 10051 - protein, 9 aa, Homo sapiens
  Light chain CDR3 for antibody 5026 (IGKV1D-13)
QQFNNYPYT

SEQ ID NO: 10052 - protein, 15 aa, Homo sapiens
  Heavy chain CDR3 for antibody 5026 (IGHV1-18)
ARRSPNWGHYYGMDV

SEQ ID NO: 10053 - protein, 8 aa, Homo sapiens
  Light chain CDR3 for antibody 5027 (IGKV1-13)
QQYNSYYT

SEQ ID NO: 10054 - protein, 18 aa, Homo sapiens
  Heavy chain CDR3 for antibody 5027 (IGHV3-33)
ARERDYYGSGSYPDAFDI

SEQ ID NO: 10055 - protein, 9 aa, Homo sapiens
  Light chain CDR3 for antibody 5028 (IGKV1-9)
QQLKSYLYT

SEQ ID NO: 10056 - protein, 16 aa, Homo sapiens
  Heavy chain CDR3 for antibody 5028 (IGHV3-23)
AKEGMVLRYFDWLWDY

SEQ ID NO: 10057 - protein, 9 aa, Homo sapiens
  Light chain CDR3 for antibody 5029 (IGKV6-21)
HQSSSLPYT

SEQ ID NO: 10058 - protein, 17 aa, Homo sapiens
  Heavy chain CDR3 for antibody 5029 (IGHV3-33)
ARDRDDILTGFYTYFDY

SEQ ID NO: 10059 - protein, 9 aa, Homo sapiens
  Light chain CDR3 for antibody 5030 (IGKV1D-13)
QQFNNYPYT

SEQ ID NO: 10060 - protein, 18 aa, Homo sapiens
  Heavy chain CDR3 for antibody 5030 (IGHV3-23)
AKVGDFFASGNYWDYFDY

SEQ ID NO: 10061 - protein, 9 aa, Homo sapiens
  Light chain CDR3 for antibody 5031 (IGKV1-9)
QQLISYPLT

SEQ ID NO: 10062 - protein, 17 aa, Homo sapiens
  Heavy chain CDR3 for antibody 5031 (IGHV3-33)
ARGEQWLGYYYYYGMDV

SEQ ID NO: 10063 - protein, 9 aa, Homo sapiens
  Light chain CDR3 for antibody 5032 (IGKV1-6)
LQDYKSPFT

SEQ ID NO: 10064 - protein, 9 aa, Homo sapiens
  Heavy chain CDR3 for antibody 5032 (IGHV3-13)
ARDRWYFDL

SEQ ID NO: 10065 - protein, 9 aa, Homo sapiens
  Light chain CDR3 for antibody 5033 (IGKV5-2)
LQHDNFPYT

SEQ ID NO: 10066 - protein, 14 aa, Homo sapiens
  Heavy chain CDR3 for antibody 5033 (IGHV3-23)
AKGGDVLTGYYPDY

SEQ ID NO: 10067 - protein, 9 aa, Homo sapiens
  Light chain CDR3 for antibody 5034 (IGKV3-15)
QQYNNWPLT

SEQ ID NO: 10068 - protein, 13 aa, Homo sapiens
  Heavy chain CDR3 for antibody 5034 (IGHV3-21)
ARDSTLVRGVFPY

SEQ ID NO: 10069 - protein, 9 aa, Homo sapiens
  Light chain CDR3 for antibody 5035 (IGKV1-16)
QQYNSYPYT

SEQ ID NO: 10070 - protein, 10 aa, Homo sapiens
  Heavy chain CDR3 for antibody 5035 (IGHV3-72)
CRDREGFGDV

SEQ ID NO: 10071 - protein, 9 aa, Homo sapiens
  Light chain CDR3 for antibody 5036 (IGKV1D-13)
QHFNNYMYT

SEQ ID NO: 10072 - protein, 15 aa, Homo sapiens
  Heavy chain CDR3 for antibody 5036 (IGHV1-18)
ARGYCSSTSCYYFDY

SEQ ID NO: 10073 - protein, 9 aa, Homo sapiens
  Light chain CDR3 for antibody 5037 (IGKV5-2)
LQHDNFPWT

SEQ ID NO: 10074 - protein, 15 aa, Homo sapiens
  Heavy chain CDR3 for antibody 5037 (IGHV3-33)
ARDEHYDILTGYWGY

SEQ ID NO: 10075 - protein, 10 aa, Homo sapiens
  Light chain CDR3 for antibody 5038 (IGKV1-17)
LQHNSYPMYT

SEQ ID NO: 10076 - protein, 14 aa, Homo sapiens
  Heavy chain CDR3 for antibody 5038 (IGHV3-33)
ARDKSYPLSYGMDV

SEQ ID NO: 10077 - protein, 9 aa, Homo sapiens
  Light chain CDR3 for antibody 5039 (IGKV1-37)
QRTSNAPYT

SEQ ID NO: 10078 - protein, 16 aa, Homo sapiens
  Heavy chain CDR3 for antibody 5039 (IGHV3-23)
AKEGMVLRYFDWLWDY

SEQ ID NO: 10079 - protein, 9 aa, Homo sapiens
  Light chain CDR3 for antibody 5040 (IGKV1-27)
QKYNSAPYT

SEQ ID NO: 10080 - protein, 9 aa, Homo sapiens
  Heavy chain CDR3 for antibody 5040 (IGHV3-30)
ARDDYGVDV

SEQ ID NO: 10081 - protein, 9 aa, Homo sapiens
  Light chain CDR3 for antibody 5041 (IGKV1D-16)
QQYNSYPFT

SEQ ID NO: 10082 - protein, 10 aa, Homo sapiens
  Heavy chain CDR3 for antibody 5041 (IGHV3-33)
ARDHGYYFDY

SEQ ID NO: 10083 - protein, 9 aa, Homo sapiens
  Light chain CDR3 for antibody 5042 (IGKV1-17)
LQHNSYPWT

SEQ ID NO: 10084 - protein, 21 aa, Homo sapiens
  Heavy chain CDR3 for antibody 5042 (IGHV4-59)
AAGVLLWFGEPNYYYYYGMDV

SEQ ID NO: 10085 - protein, 11 aa, Homo sapiens
  Light chain CDR3 for antibody 5043 (IGKV3-11)
QQRSNWPPTWT

SEQ ID NO: 10086 - protein, 17 aa, Homo sapiens
  Heavy chain CDR3 for antibody 5043 (IGHV4-59)
ARRITMVREIIITAFDY

SEQ ID NO: 10087 - protein, 8 aa, Homo sapiens
  Light chain CDR3 for antibody 5044 (IGKV1D-13)
QQFNNYPT

SEQ ID NO: 10088 - protein, 15 aa, Homo sapiens
  Heavy chain CDR3 for antibody 5044 (IGHV3-30)
ARRGYGSGSPDAFDL

SEQ ID NO: 10089 - protein, 9 aa, Homo sapiens
  Light chain CDR3 for antibody 5045 (IGKV1-9)
QQLISYPLT

SEQ ID NO: 10090 - protein, 9 aa, Homo sapiens
  Heavy chain CDR3 for antibody 5045 (IGHV3-33)
ARATVGVDY

SEQ ID NO: 10091 - protein, 9 aa, Homo sapiens
  Light chain CDR3 for antibody 5046 (IGKV2-30)
MQGTHWPLT

SEQ ID NO: 10092 - protein, 20 aa, Homo sapiens
  Heavy chain CDR3 for antibody 5046 (IGHV3-23)
AKDREMAATSHYYYYYGMDV

SEQ ID NO: 10093 - protein, 10 aa, Homo sapiens
  Light chain CDR3 for antibody 5047 (IGKV3-11)
QQRSNWPTWT

SEQ ID NO: 10094 - protein, 9 aa, Homo sapiens
  Heavy chain CDR3 for antibody 5047 (IGHV3-30)
ARDYFHYDY

SEQ ID NO: 10095 - protein, 10 aa, Homo sapiens
  Light chain CDR3 for antibody 5048 (IGKV3-15)
QQYNNWPPLT

SEQ ID NO: 10096 - protein, 12 aa, Homo sapiens
  Heavy chain CDR3 for antibody 5048 (IGHV3-33)
AREKGGSYSFDY

SEQ ID NO: 10097 - protein, 9 aa, Homo sapiens
  Light chain CDR3 for antibody 5049 (IGKV2-30)
MQGTHWPLT

SEQ ID NO: 10098 - protein, 16 aa, Homo sapiens
  Heavy chain CDR3 for antibody 5049 (IGHV3-30)
ARDIAVAGHVYYGMDV

SEQ ID NO: 10099 - protein, 9 aa, Homo sapiens
  Light chain CDR3 for antibody 5050 (IGKV1-9)
QQLISYPLT

SEQ ID NO: 10100 - protein, 20 aa, Homo sapiens
  Heavy chain CDR3 for antibody 5050 (IGHV3-11)
ARGGATLIRGLIDYYYGMDV

SEQ ID NO: 10101 - protein, 9 aa, Homo sapiens
  Light chain CDR3 for antibody 5051 (IGKV1-39)
QQSYSTPFT

SEQ ID NO: 10102 - protein, 19 aa, Homo sapiens
  Heavy chain CDR3 for antibody 5051 (IGHV4-39)
ARQGDVLRYFDWLLGAFDI

SEQ ID NO: 10103 - protein, 9 aa, Homo sapiens
  Light chain CDR3 for antibody 5052 (IGKV1D-16)
QQYNSYPLT

SEQ ID NO: 10104 - protein, 12 aa, Homo sapiens
  Heavy chain CDR3 for antibody 5052 (IGHV1-46)
ARALTVGASFDY

SEQ ID NO: 10105 - protein, 9 aa, Homo sapiens
  Light chain CDR3 for antibody 5053 (IGKV1D-16)
QQYNSWPLT

SEQ ID NO: 10106 - protein, 15 aa, Homo sapiens
  Heavy chain CDR3 for antibody 5053 (IGHV3-33)
ARRICSGGSCSLFDY

SEQ ID NO: 10107 - protein, 10 aa, Homo sapiens
  Light chain CDR3 for antibody 5054 (IGKV3-11)
QQRSNWPMYT

SEQ ID NO: 10108 - protein, 13 aa, Homo sapiens
  Heavy chain CDR3 for antibody 5054 (IGHV3-33)
AREYCSGGSCYDY

SEQ ID NO: 10109 - protein, 9 aa, Homo sapiens
  Light chain CDR3 for antibody 5055 (IGKV1-6)
LQDYKSPFT

SEQ ID NO: 10110 - protein, 15 aa, Homo sapiens
  Heavy chain CDR3 for antibody 5055 (IGHV3-33)
ARDRGWKAPGYGMDV

SEQ ID NO: 10111 - protein, 9 aa, Homo sapiens
  Light chain CDR3 for antibody 5056 (IGKV1-39)
QQSYSTPLT

SEQ ID NO: 10112 - protein, 9 aa, Homo sapiens
  Heavy chain CDR3 for antibody 5056 (IGHV3-33)
ARELAYFDY

SEQ ID NO: 10113 - protein, 9 aa, Homo sapiens
  Light chain CDR3 for antibody 5057 (IGKV3-20)
QQYGSSPYT

SEQ ID NO: 10114 - protein, 19 aa, Homo sapiens
  Heavy chain CDR3 for antibody 5057 (IGHV1-18)
ARGGHIGVVTAFHGYGMDV

SEQ ID NO: 10115 - protein, 9 aa, Homo sapiens
  Light chain CDR3 for antibody 5058 (IGKV2D-24)
TQATQFPHT

SEQ ID NO: 10116 - protein, 18 aa, Homo sapiens
  Heavy chain CDR3 for antibody 5058 (IGHV4-59)
AREGDYVWGSYRPNWFDP

SEQ ID NO: 10117 - protein, 8 aa, Homo sapiens
  Light chain CDR3 for antibody 5059 (IGKV1-5)
QQYNSYYT

SEQ ID NO: 10118 - protein, 17 aa, Homo sapiens
  Heavy chain CDR3 for antibody 5059 (IGHV3-33)
ARESLKLGIYYYYGMDV

SEQ ID NO: 10119 - protein, 10 aa, Homo sapiens
  Light chain CDR3 for antibody 5060 (IGKV3-11)
QQRSNWPIFT

SEQ ID NO: 10120 - protein, 17 aa, Homo sapiens
  Heavy chain CDR3 for antibody 5060 (IGHV1-24)
ATEGYDILPGYYNVLDY

SEQ ID NO: 10121 - protein, 8 aa, Homo sapiens
  Light chain CDR3 for antibody 5061 (IGKV3-11)
QQRSNWLT

SEQ ID NO: 10122 - protein, 12 aa, Homo sapiens
  Heavy chain CDR3 for antibody 5061 (IGHV1-18)
ARVLFDGDYFDY

SEQ ID NO: 10123 - protein, 9 aa, Homo sapiens
  Light chain CDR3 for antibody 5062 (IGKV3D-7)
QQDYNLPLT

SEQ ID NO: 10124 - protein, 18 aa, Homo sapiens
  Heavy chain CDR3 for antibody 5062 (IGHV3-23)
AKVGDFFASGNYWDYFDY

SEQ ID NO: 10125 - protein, 9 aa, Homo sapiens
  Light chain CDR3 for antibody 5063 (IGKV1-16)
QHYNDYPFT

SEQ ID NO: 10126 - protein, 12 aa, Homo sapiens
  Heavy chain CDR3 for antibody 5063 (IGHV3-33)
ARGYFGSGYAHF

SEQ ID NO: 10127 - protein, 9 aa, Homo sapiens
  Light chain CDR3 for antibody 5064 (IGKV5-2)
LQHDNFPWT

SEQ ID NO: 10128 - protein, 15 aa, Homo sapiens
  Heavy chain CDR3 for antibody 5064 (IGHV3-33)
ARDGSGSYSLYGMDV

SEQ ID NO: 10129 - protein, 9 aa, Homo sapiens
  Light chain CDR3 for antibody 5065 (IGKV3D-11)
QQRSNWPYT

SEQ ID NO: 10130 - protein, 7 aa, Homo sapiens
  Heavy chain CDR3 for antibody 5065 (IGHV1-46)
AREGGDY

SEQ ID NO: 10131 - protein, 10 aa, Homo sapiens
  Light chain CDR3 for antibody 5066 (IGKV3-20)
QQYGSSPPYT

SEQ ID NO: 10132 - protein, 18 aa, Homo sapiens
  Heavy chain CDR3 for antibody 5066 (IGHV3-11)
ARDGYFSGWNYYYCGMDV

SEQ ID NO: 10133 - protein, 9 aa, Homo sapiens
  Light chain CDR3 for antibody 5067 (IGKV1-6)
LQDYKSPFT

SEQ ID NO: 10134 - protein, 18 aa, Homo sapiens
  Heavy chain CDR3 for antibody 5067 (IGHV3-33)
ARGYYGSGNFYKDSGMDV

SEQ ID NO: 10135 - protein, 9 aa, Homo sapiens
  Light chain CDR3 for antibody 5068 (IGKV3-11)
QQRSNWPWT

SEQ ID NO: 10136 - protein, 23 aa, Homo sapiens
  Heavy chain CDR3 for antibody 5068 (IGHV4-59)
ARERTYSGILPGYYEDYYYGMDV

SEQ ID NO: 10137 - protein, 9 aa, Homo sapiens
  Light chain CDR3 for antibody 5069 (IGKV1-9)
QQLISYPLT

SEQ ID NO: 10138 - protein, 9 aa, Homo sapiens
  Heavy chain CDR3 for antibody 5069 (IGHV1-18)
ARGKDWFDP

SEQ ID NO: 10139 - protein, 9 aa, Homo sapiens
  Light chain CDR3 for antibody 5070 (IGKV2-30)
MQGTHWPLT

SEQ ID NO: 10140 - protein, 12 aa, Homo sapiens
  Heavy chain CDR3 for antibody 5070 (IGHV3-h)
AREDYYYYGMDV

SEQ ID NO: 10141 - protein, 9 aa, Homo sapiens
  Light chain CDR3 for antibody 5071 (IGKV1-17)
LQHNSYPIT

SEQ ID NO: 10142 - protein, 12 aa, Homo sapiens
  Heavy chain CDR3 for antibody 5071 (IGHV3-13)
AIGTMVRGIPDY

SEQ ID NO: 10143 - protein, 9 aa, Homo sapiens
  Light chain CDR3 for antibody 5072 (IGKV3-11)
QQRSNWPLT

SEQ ID NO: 10144 - protein, 11 aa, Homo sapiens
  Heavy chain CDR3 for antibody 5072 (IGHV3-33)
ARGTTVTHFDY

SEQ ID NO: 10145 - protein, 8 aa, Homo sapiens
  Light chain CDR3 for antibody 5073 (IGKV1D-16)
QQDYNLLT

SEQ ID NO: 10146 - protein, 12 aa, Homo sapiens
  Heavy chain CDR3 for antibody 5073 (IGHV4-39)
ARHGSGSSYFDY

SEQ ID NO: 10147 - protein, 9 aa, Homo sapiens
  Light chain CDR3 for antibody 5074 (IGKV1-9)
QQLISYPLT

SEQ ID NO: 10148 - protein, 11 aa, Homo sapiens
  Heavy chain CDR3 for antibody 5074 (IGHV3-33)
ARGSGSYAFDS

SEQ ID NO: 10149 - protein, 9 aa, Homo sapiens
  Light chain CDR3 for antibody 5075 (IGKV3-20)
QQYGSSPRT

SEQ ID NO: 10150 - protein, 15 aa, Homo sapiens
  Heavy chain CDR3 for antibody 5075 (IGHV3-23)
AKDRGWYDYYYGMDV

SEQ ID NO: 10151 - protein, 9 aa, Homo sapiens
  Light chain CDR3 for antibody 5076 (IGKV5-2)
LQHDNFPYT

SEQ ID NO: 10152 - protein, 15 aa, Homo sapiens
  Heavy chain CDR3 for antibody 5076 (IGHV3-33)
ARDRGMVRGDGYLDY

SEQ ID NO: 10153 - protein, 9 aa, Homo sapiens
  Light chain CDR3 for antibody 5077 (IGKV1-39)
QQSYSTPLT

SEQ ID NO: 10154 - protein, 12 aa, Homo sapiens
  Heavy chain CDR3 for antibody 5077 (IGHV3-33)
ARDYISTYGMDV

SEQ ID NO: 10155 - protein, 10 aa, Homo sapiens
  Light chain CDR3 for antibody 5078 (IGKV3-11)
QQRSNWPIFT

SEQ ID NO: 10156 - protein, 21 aa, Homo sapiens
  Heavy chain CDR3 for antibody 5078 (IGHV3-33)
ARDEYYEIVTGYGYYHYGMDV

SEQ ID NO: 10157 - protein, 9 aa, Homo sapiens
  Light chain CDR3 for antibody 5079 (IGKV2-30)
MQGTHWPLT

SEQ ID NO: 10158 - protein, 15 aa, Homo sapiens
  Heavy chain CDR3 for antibody 5079 (IGHV3-33)
VCVLYDYGDYVGFDY

SEQ ID NO: 10159 - protein, 9 aa, Homo sapiens
  Light chain CDR3 for antibody 5080 (IGKV1D-13)
QQFNNYPHT

SEQ ID NO: 10160 - protein, 14 aa, Homo sapiens
  Heavy chain CDR3 for antibody 5080 (IGHV1-46)
ARSYYDILTGAFDI

SEQ ID NO: 10161 - protein, 9 aa, Homo sapiens
  Light chain CDR3 for antibody 5081 (IGKV1-6)
LQDYKSPFT

SEQ ID NO: 10162 - protein, 18 aa, Homo sapiens
  Heavy chain CDR3 for antibody 5081 (IGHV3-33)
ARDRDRYGSGTYPDAIDI

SEQ ID NO: 10163 - protein, 9 aa, Homo sapiens
  Light chain CDR3 for antibody 5082 (IGKV1-39)
QQSYSTPLT

SEQ ID NO: 10164 - protein, 11 aa, Homo sapiens
  Heavy chain CDR3 for antibody 5082 (IGHV4-39)
ARLLVGATTDY

SEQ ID NO: 10165 - protein, 9 aa, Homo sapiens
  Light chain CDR3 for antibody 5083 (IGKV1-6)
LQDYNYPWT

SEQ ID NO: 10166 - protein, 21 aa, Homo sapiens
  Heavy chain CDR3 for antibody 5083 (IGHV3-33)
ARDGGITMGRGVYYYYYGMDV

SEQ ID NO: 10167 - protein, 9 aa, Homo sapiens
  Light chain CDR3 for antibody 5084 (IGKV2-30)
MQGTHWPLT

SEQ ID NO: 10168 - protein, 12 aa, Homo sapiens
  Heavy chain CDR3 for antibody 5084 (IGHV3-23)
AKEYDILTGYFH

SEQ ID NO: 10169 - protein, 9 aa, Homo sapiens
  Light chain CDR3 for antibody 5085 (IGKV1D-13)
QQFNNYPYT

SEQ ID NO: 10170 - protein, 16 aa, Homo sapiens
  Heavy chain CDR3 for antibody 5085 (IGHV3-30)
ARDSSYYGSGYYGMDV

SEQ ID NO: 10171 - protein, 9 aa, Homo sapiens
  Light chain CDR3 for antibody 5086 (IGKV1-9)
QQGNTYSRT

SEQ ID NO: 10172 - protein, 14 aa, Homo sapiens
  Heavy chain CDR3 for antibody 5086 (IGHV4-39)
ARDSGYDYYYGMDV

SEQ ID NO: 10173 - protein, 9 aa, Homo sapiens
  Light chain CDR3 for antibody 5087 (IGKV5-2)
LQHDNFPYT

SEQ ID NO: 10174 - protein, 13 aa, Homo sapiens
  Heavy chain CDR3 for antibody 5087 (IGHV3-23)
ARGELLWFGEFAC

SEQ ID NO: 10175 - protein, 9 aa, Homo sapiens
  Light chain CDR3 for antibody 5088 (IGKV6-21)
HQSSSLPYT

SEQ ID NO: 10176 - protein, 15 aa, Homo sapiens
  Heavy chain CDR3 for antibody 5088 (IGHV3-23)
AKDRGWYDYYYGMDV

SEQ ID NO: 10177 - protein, 9 aa, Homo sapiens
  Light chain CDR3 for antibody 5089 (IGKV1-16)
QKYNSAPLT

SEQ ID NO: 10178 - protein, 18 aa, Homo sapiens
  Heavy chain CDR3 for antibody 5089 (IGHV4-59)
AREGDYVWGSYRPNWFDP

SEQ ID NO: 10179 - protein, 9 aa, Homo sapiens
  Light chain CDR3 for antibody 5090 (IGKV3-15)
QQYNNWPFT

SEQ ID NO: 10180 - protein, 13 aa, Homo sapiens
  Heavy chain CDR3 for antibody 5090 (IGHV1-2)
ARDGVRGSFGMDV

SEQ ID NO: 10181 - protein, 9 aa, Homo sapiens
  Light chain CDR3 for antibody 5091 (IGKV6-21)
HQSRGLPQT

SEQ ID NO: 10182 - protein, 13 aa, Homo sapiens
  Heavy chain CDR3 for antibody 5091 (IGHV3-66)
VRDGVNGYNDLDS

SEQ ID NO: 10183 - protein, 9 aa, Homo sapiens
  Light chain CDR3 for antibody 5092 (IGKV1-33)
QQYDNLPFT

SEQ ID NO: 10184 - protein, 13 aa, Homo sapiens
  Heavy chain CDR3 for antibody 5092 (IGHV3-33)
ARDWGYSHGYFDY

SEQ ID NO: 10185 - protein, 8 aa, Homo sapiens
  Light chain CDR3 for antibody 5093 (IGKV3-20)
QQYGRSFT

SEQ ID NO: 10186 - protein, 18 aa, Homo sapiens
  Heavy chain CDR3 for antibody 5093 (IGHV4-39)
ARQYYFGSGNYYRGWFDP

SEQ ID NO: 10187 - protein, 9 aa, Homo sapiens
  Light chain CDR3 for antibody 5094 (IGKV1-6)
LQDYKSPFT

SEQ ID NO: 10188 - protein, 12 aa, Homo sapiens
  Heavy chain CDR3 for antibody 5094 (IGHV3-33)
ARDRAYRGSLDY

SEQ ID NO: 10189 - protein, 9 aa, Homo sapiens
  Light chain CDR3 for antibody 5095 (IGKV1-17)
LQHNSYPYT

SEQ ID NO: 10190 - protein, 15 aa, Homo sapiens
  Heavy chain CDR3 for antibody 5095 (IGHV3-33)
AREYSSGWYGDAFDI

SEQ ID NO: 10191 - protein, 10 aa, Homo sapiens
  Light chain CDR3 for antibody 5096 (IGKV1-17)
LQHNSYPMYT

SEQ ID NO: 10192 - protein, 11 aa, Homo sapiens
  Heavy chain CDR3 for antibody 5096 (IGHV3-33)
ARAGIAAVFDY

SEQ ID NO: 10193 - protein, 9 aa, Homo sapiens
  Light chain CDR3 for antibody 5097 (IGKV1-33)
QQYDNLPFT

SEQ ID NO: 10194 - protein, 12 aa, Homo sapiens
  Heavy chain CDR3 for antibody 5097 (IGHV4-59)
ARDRSGWAYFDY

SEQ ID NO: 10195 - protein, 11 aa, Homo sapiens
  Light chain CDR3 for antibody 5098 (IGKV3-11)
QQRSNWPPTWT

SEQ ID NO: 10196 - protein, 13 aa, Homo sapiens
  Heavy chain CDR3 for antibody 5098 (IGHV3-23)
ASPFNWNDGFFDY

SEQ ID NO: 10197 - protein, 9 aa, Homo sapiens
  Light chain CDR3 for antibody 5099 (IGKV1-16)
QQYNSYPLT

SEQ ID NO: 10198 - protein, 17 aa, Homo sapiens
  Heavy chain CDR3 for antibody 5099 (IGHV3-33)
ARSMVTTYGYYYYGMDV

SEQ ID NO: 10199 - protein, 10 aa, Homo sapiens
  Light chain CDR3 for antibody 5100 (IGKV1-9)
QQLDSYPMYT

SEQ ID NO: 10200 - protein, 14 aa, Homo sapiens
  Heavy chain CDR3 for antibody 5100 (IGHV3-33)
ARGAAAGNFYGLDV

SEQ ID NO: 10201 - protein, 9 aa, Homo sapiens
  Light chain CDR3 for antibody 5101 (IGKV1D-13)
QQFNNYPYT

SEQ ID NO: 10202 - protein, 18 aa, Homo sapiens
  Heavy chain CDR3 for antibody 5101 (IGHV3-33)
ARGGVLYDILTGFYGMDV

SEQ ID NO: 10203 - protein, 9 aa, Homo sapiens
  Light chain CDR3 for antibody 5102 (IGKV1-33)
QQYDNLPFT

SEQ ID NO: 10204 - protein, 12 aa, Homo sapiens
  Heavy chain CDR3 for antibody 5102 (IGHV3-64)
ARDLVGATPFDY

SEQ ID NO: 10205 - protein, 9 aa, Homo sapiens
  Light chain CDR3 for antibody 5103 (IGKV1-9)
QQLNSYPRT

SEQ ID NO: 10206 - protein, 18 aa, Homo sapiens
  Heavy chain CDR3 for antibody 5103 (IGHV3-23)
AKDQHILTGLYYYYGMDV

SEQ ID NO: 10207 - protein, 9 aa, Homo sapiens
  Light chain CDR3 for antibody 5104 (IGKV3-15)
QQYNNWPWT

SEQ ID NO: 10208 - protein, 13 aa, Homo sapiens
  Heavy chain CDR3 for antibody 5104 (IGHV3-33)
ARRATLVRGVFDP

SEQ ID NO: 10209 - protein, 8 aa, Homo sapiens
  Light chain CDR3 for antibody 5105 (IGKV1D-13)
QQFNNYPT

SEQ ID NO: 10210 - protein, 14 aa, Homo sapiens
  Heavy chain CDR3 for antibody 5105 (IGHV3-33)
ARAGSGYDRDWFDP

SEQ ID NO: 10211 - protein, 9 aa, Homo sapiens
  Light chain CDR3 for antibody 5106 (IGKV1D-13)
QQFNNYPHT

SEQ ID NO: 10212 - protein, 8 aa, Homo sapiens
  Heavy chain CDR3 for antibody 5106 (IGHV4-39)
ARRGGLDY

SEQ ID NO: 10213 - protein, 9 aa, Homo sapiens
  Light chain CDR3 for antibody 5107 (IGKV2-30)
MQGTHWPLT

SEQ ID NO: 10214 - protein, 11 aa, Homo sapiens
  Heavy chain CDR3 for antibody 5107 (IGHV3-23)
GEFSSGWSFDY

SEQ ID NO: 10215 - protein, 8 aa, Homo sapiens
  Light chain CDR3 for antibody 5108 (IGKV1-5)
QQYNSYYT

SEQ ID NO: 10216 - protein, 21 aa, Homo sapiens
  Heavy chain CDR3 for antibody 5108 (IGHV3-33)
ARDEYYEIVTGYGYYHYGMDV

SEQ ID NO: 10217 - protein, 10 aa, Homo sapiens
  Light chain CDR3 for antibody 5109 (IGKV3-20)
QQYGRSPPVT

SEQ ID NO: 10218 - protein, 13 aa, Homo sapiens
  Heavy chain CDR3 for antibody 5109 (IGHV3-23)
ASPFNWNDGFFDY

SEQ ID NO: 10219 - protein, 9 aa, Homo sapiens
  Light chain CDR3 for antibody 5110 (IGKV1-39)
QQSYSTPFT

SEQ ID NO: 10220 - protein, 13 aa, Homo sapiens
  Heavy chain CDR3 for antibody 5110 (IGHV4-4)
ARERGIAAAGPDY

SEQ ID NO: 10221 - protein, 10 aa, Homo sapiens
  Light chain CDR3 for antibody 5111 (IGKV1-39)
QQSYSTPMYT

SEQ ID NO: 10222 - protein, 21 aa, Homo sapiens
  Heavy chain CDR3 for antibody 5111 (IGHV3-33)
ARDEYYEIVTGYGYYHYGMDV

SEQ ID NO: 10223 - protein, 9 aa, Homo sapiens
  Light chain CDR3 for antibody 5112 (IGKV1-6)
LQDYNYPRT

SEQ ID NO: 10224 - protein, 17 aa, Homo sapiens
  Heavy chain CDR3 for antibody 5112 (IGHV3-64)
ARVQYDILTGYSPYFDN

SEQ ID NO: 10225 - protein, 9 aa, Homo sapiens
  Light chain CDR3 for antibody 5113 (IGKV1-16)
QHYNDYPFT

SEQ ID NO: 10226 - protein, 14 aa, Homo sapiens
  Heavy chain CDR3 for antibody 5113 (IGHV3-33)
ARAGSGYDRDWFDP

SEQ ID NO: 10227 - protein, 9 aa, Homo sapiens
  Light chain CDR3 for antibody 5114 (IGKV3D-7)
QQDYNLPLT

SEQ ID NO: 10228 - protein, 18 aa, Homo sapiens
  Heavy chain CDR3 for antibody 5114 (IGHV3-33)
ARGLLWFGVSYYYYGMDV

SEQ ID NO: 10229 - protein, 9 aa, Homo sapiens
  Light chain CDR3 for antibody 5115 (IGKV2-30)
MQGTHWPLT

SEQ ID NO: 10230 - protein, 12 aa, Homo sapiens
  Heavy chain CDR3 for antibody 5115 (IGHV3-23)
AKDGWFGESLDY

SEQ ID NO: 10231 - protein, 9 aa, Homo sapiens
  Light chain CDR3 for antibody 5116 (IGKV1-33)
QQYDNLPFT

SEQ ID NO: 10232 - protein, 12 aa, Homo sapiens
  Heavy chain CDR3 for antibody 5116 (IGHV3-23)
AKDGWFGESLDY

SEQ ID NO: 10233 - protein, 9 aa, Homo sapiens
  Light chain CDR3 for antibody 5117 (IGKV6-21)
HQSSSLPYT

SEQ ID NO: 10234 - protein, 19 aa, Homo sapiens
  Heavy chain CDR3 for antibody 5117 (IGHV3-33)
ARRKNYYGSGSWHYYGMDV

SEQ ID NO: 10235 - protein, 8 aa, Homo sapiens
  Light chain CDR3 for antibody 5118 (IGKV3D-7)
QQDYNLLT

SEQ ID NO: 10236 - protein, 14 aa, Homo sapiens
  Heavy chain CDR3 for antibody 5118 (IGHV3-33)
ARAISGSSYWYFDL

SEQ ID NO: 10237 - protein, 8 aa, Homo sapiens
  Light chain CDR3 for antibody 5119 (IGKV1-5)
QQYNSYYT

SEQ ID NO: 10238 - protein, 12 aa, Homo sapiens
  Heavy chain CDR3 for antibody 5119 (IGHV3-33)
ARVDAAAPYFDY

SEQ ID NO: 10239 - protein, 9 aa, Homo sapiens
  Light chain CDR3 for antibody 5120 (IGKV1-9)
QQLISYPLT

SEQ ID NO: 10240 - protein, 18 aa, Homo sapiens
  Heavy chain CDR3 for antibody 5120 (IGHV3-33)
ARDEYYGSGIYYNYGMDV

SEQ ID NO: 10241 - protein, 9 aa, Homo sapiens
  Light chain CDR3 for antibody 5121 (IGKV3D-7)
QQDYNLPWT

SEQ ID NO: 10242 - protein, 15 aa, Homo sapiens
  Heavy chain CDR3 for antibody 5121 (IGHV3-33)
ARGYYYGSGSFPVDY

SEQ ID NO: 10243 - protein, 9 aa, Homo sapiens
  Light chain CDR3 for antibody 5122 (IGKV6-21)
HQSSSLPYT

SEQ ID NO: 10244 - protein, 18 aa, Homo sapiens
  Heavy chain CDR3 for antibody 5122 (IGHV3-33)
VRERGHYGSGSFPDAFDI

SEQ ID NO: 10245 - protein, 10 aa, Homo sapiens
  Light chain CDR3 for antibody 5123 (IGKV3-11)
QQRSNWPIFT

SEQ ID NO: 10246 - protein, 14 aa, Homo sapiens
  Heavy chain CDR3 for antibody 5123 (IGHV3-15)
SIYYYGSGRDFFDY

SEQ ID NO: 10247 - protein, 9 aa, Homo sapiens
  Light chain CDR3 for antibody 5124 (IGKV1-16)
QHYNDYPFT

SEQ ID NO: 10248 - protein, 15 aa, Homo sapiens
  Heavy chain CDR3 for antibody 5124 (IGHV3-33)
ARDRGSSGWRDWFDP

SEQ ID NO: 10249 - protein, 9 aa, Homo sapiens
  Light chain CDR3 for antibody 5125 (IGKV3D-20)
QQYGSSPYT

SEQ ID NO: 10250 - protein, 15 aa, Homo sapiens
  Heavy chain CDR3 for antibody 5125 (IGHV3-23)
AKDLSSGWYAYFFDY

SEQ ID NO: 10251 - protein, 9 aa, Homo sapiens
  Light chain CDR3 for antibody 5126 (IGKV3-11)
QQRSNWPLT

SEQ ID NO: 10252 - protein, 13 aa, Homo sapiens
  Heavy chain CDR3 for antibody 5126 (IGHV3-33)
AREYCSGGSCYDY

SEQ ID NO: 10253 - protein, 11 aa, Homo sapiens
  Light chain CDR3 for antibody 5127 (IGKV3-11)
QQRSNWPPTWT

SEQ ID NO: 10254 - protein, 13 aa, Homo sapiens
  Heavy chain CDR3 for antibody 5127 (IGHV3-11)
ARDGGAAAGTWDS

SEQ ID NO: 10255 - protein, 8 aa, Homo sapiens
  Light chain CDR3 for antibody 5128 (IGKV3D-7)
QQDYNLLT

SEQ ID NO: 10256 - protein, 18 aa, Homo sapiens
  Heavy chain CDR3 for antibody 5128 (IGHV3-33)
ARERDYYGSGSYPDAFDI

SEQ ID NO: 10257 - protein, 9 aa, Homo sapiens
  Light chain CDR3 for antibody 5129 (IGKV1-27)
QKYNSAPYT

SEQ ID NO: 10258 - protein, 14 aa, Homo sapiens
  Heavy chain CDR3 for antibody 5129 (IGHV3-33)
AREDYYGPLNWFDP

SEQ ID NO: 10259 - protein, 8 aa, Homo sapiens
  Light chain CDR3 for antibody 5130 (IGKV3D-7)
QQDYNLLT

SEQ ID NO: 10260 - protein, 20 aa, Homo sapiens
  Heavy chain CDR3 for antibody 5130 (IGHV3-23)
AKDREMAATSHYYYYYGMDV

SEQ ID NO: 10261 - protein, 9 aa, Homo sapiens
  Light chain CDR3 for antibody 5131 (IGKV2-30)
MQGTHWPLT

SEQ ID NO: 10262 - protein, 15 aa, Homo sapiens
  Heavy chain CDR3 for antibody 5131 (IGHV3-33)
ARGYYYGSGSFPVDY

SEQ ID NO: 10263 - protein, 8 aa, Homo sapiens
  Light chain CDR3 for antibody 5132 (IGKV3D-7)
QQDYNLLT

SEQ ID NO: 10264 - protein, 10 aa, Homo sapiens
  Heavy chain CDR3 for antibody 5132 (IGHV3-33)
ARDVVVYFDY

SEQ ID NO: 10265 - protein, 9 aa, Homo sapiens
  Light chain CDR3 for antibody 5133 (IGKV1-6)
LQDYNYPYT

SEQ ID NO: 10266 - protein, 14 aa, Homo sapiens
  Heavy chain CDR3 for antibody 5133 (IGHV3-23)
ANWAYDILTGYLDY

SEQ ID NO: 10267 - protein, 9 aa, Homo sapiens
  Light chain CDR3 for antibody 5134 (IGKV3-15)
QQYNNWPLT

SEQ ID NO: 10268 - protein, 15 aa, Homo sapiens
  Heavy chain CDR3 for antibody 5134 (IGHV4-39)
ARQGLVATIKGYFQH

SEQ ID NO: 10269 - protein, 8 aa, Homo sapiens
  Light chain CDR3 for antibody 5135 (IGKV1-5)
QQYNSYWT

SEQ ID NO: 10270 - protein, 12 aa, Homo sapiens
  Heavy chain CDR3 for antibody 5135 (IGHV4-59)
ARDSGSYYYFDY

SEQ ID NO: 10271 - protein, 9 aa, Homo sapiens
  Light chain CDR3 for antibody 5136 (IGKV1-17)
LQHNSYPYT

SEQ ID NO: 10272 - protein, 14 aa, Homo sapiens
  Heavy chain CDR3 for antibody 5136 (IGHV3-20)
ARDRGSSFFDAFDI

SEQ ID NO: 10273 - protein, 9 aa, Homo sapiens
  Light chain CDR3 for antibody 5137 (IGKV1-6)
QQEYNYPLT

SEQ ID NO: 10274 - protein, 11 aa, Homo sapiens
  Heavy chain CDR3 for antibody 5137 (IGHV3-33)
ARDRSSGPFDY

SEQ ID NO: 10275 - protein, 9 aa, Homo sapiens
  Light chain CDR3 for antibody 5138 (IGKV3-20)
QQYGSSPYT

SEQ ID NO: 10276 - protein, 12 aa, Homo sapiens
  Heavy chain CDR3 for antibody 5138 (IGHV4-39)
ARQGAYSRFFDY

SEQ ID NO: 10277 - protein, 9 aa, Homo sapiens
  Light chain CDR3 for antibody 5139 (IGKV1D-16)
QQYNSYPLT

SEQ ID NO: 10278 - protein, 18 aa, Homo sapiens
  Heavy chain CDR3 for antibody 5139 (IGHV4-59)
ARDRVVGATTYYYYGMDV

SEQ ID NO: 10279 - protein, 9 aa, Homo sapiens
  Light chain CDR3 for antibody 5140 (IGKV2D-28)
MQALQTPPT

SEQ ID NO: 10280 - protein, 13 aa, Homo sapiens
  Heavy chain CDR3 for antibody 5140 (IGHV3-33)
ARDWGYSHGYFDY

SEQ ID NO: 10281 - protein, 9 aa, Homo sapiens
  Light chain CDR3 for antibody 5141 (IGKV1-39)
QQSYRTPLT

SEQ ID NO: 10282 - protein, 10 aa, Homo sapiens
  Heavy chain CDR3 for antibody 5141 (IGHV3-30)
AREWYGGMDV

SEQ ID NO: 10283 - protein, 9 aa, Homo sapiens
  Light chain CDR3 for antibody 5142 (IGKV1-6)
LQDYNYPRT

SEQ ID NO: 10284 - protein, 16 aa, Homo sapiens
  Heavy chain CDR3 for antibody 5142 (IGHV3-33)
ARGYDMLTGDYHCMDV

SEQ ID NO: 10285 - protein, 9 aa, Homo sapiens
  Light chain CDR3 for antibody 5143 (IGKV3-11)
QQRSNWPLT

SEQ ID NO: 10286 - protein, 14 aa, Homo sapiens
  Heavy chain CDR3 for antibody 5143 (IGHV3-33)
ARDRDIMATSYFDY

SEQ ID NO: 10287 - protein, 10 aa, Homo sapiens
  Light chain CDR3 for antibody 5144 (IGKV3-20)
QQYGRSPPVT

SEQ ID NO: 10288 - protein, 14 aa, Homo sapiens
  Heavy chain CDR3 for antibody 5144 (IGHV3-53)
ARAISGSSYWYFDL

SEQ ID NO: 10289 - protein, 9 aa, Homo sapiens
  Light chain CDR3 for antibody 5145 (IGKV1-9)
QQLKSYPYT

SEQ ID NO: 10290 - protein, 9 aa, Homo sapiens
  Heavy chain CDR3 for antibody 5145 (IGHV1-8)
ARGPRIMDV

SEQ ID NO: 10291 - protein, 9 aa, Homo sapiens
  Light chain CDR3 for antibody 5146 (IGKV1-6)
LQDYNYPYT

SEQ ID NO: 10292 - protein, 15 aa, Homo sapiens
  Heavy chain CDR3 for antibody 5146 (IGHV3-33)
ARDRGSSGYDRYFDY

SEQ ID NO: 10293 - protein, 9 aa, Homo sapiens
  Light chain CDR3 for antibody 5147 (IGKV1-6)
LQDFNYPRT

SEQ ID NO: 10294 - protein, 18 aa, Homo sapiens
  Heavy chain CDR3 for antibody 5147 (IGHV3-33)
ARREGITLIFYYYYGMDV

SEQ ID NO: 10295 - protein, 9 aa, Homo sapiens
  Light chain CDR3 for antibody 5148 (IGKV1-6)
LQDFHYPWT

SEQ ID NO: 10296 - protein, 15 aa, Homo sapiens
  Heavy chain CDR3 for antibody 5148 (IGHV3-30)
ARGAMVRGVDYGMDV

SEQ ID NO: 10297 - protein, 11 aa, Homo sapiens
  Light chain CDR3 for antibody 5149 (IGKV3-11)
QQRSNWPPTWT

SEQ ID NO: 10298 - protein, 12 aa, Homo sapiens
  Heavy chain CDR3 for antibody 5149 (IGHV3-33)
ARESGGSYSFDY

SEQ ID NO: 10299 - protein, 9 aa, Homo sapiens
  Light chain CDR3 for antibody 5150 (IGKV2-30)
MQGTHWPLT

SEQ ID NO: 10300 - protein, 12 aa, Homo sapiens
  Heavy chain CDR3 for antibody 5150 (IGHV1-46)
AREDYDIDGMDV

SEQ ID NO: 10301 - protein, 9 aa, Homo sapiens
  Light chain CDR3 for antibody 5151 (IGKV3D-7)
QQDYNLPLT

SEQ ID NO: 10302 - protein, 18 aa, Homo sapiens
  Heavy chain CDR3 for antibody 5151 (IGHV1-8)
AREGAAAGSYYYYNGMDV

SEQ ID NO: 10303 - protein, 9 aa, Homo sapiens
  Light chain CDR3 for antibody 5152 (IGKV1-39)
QQSYSTPLT

SEQ ID NO: 10304 - protein, 13 aa, Homo sapiens
  Heavy chain CDR3 for antibody 5152 (IGHV4-39)
ARRDVLAPAAFDY

SEQ ID NO: 10305 - protein, 9 aa, Homo sapiens
  Light chain CDR3 for antibody 5153 (IGKV4-1)
QQYYSTPWT

SEQ ID NO: 10306 - protein, 18 aa, Homo sapiens
  Heavy chain CDR3 for antibody 5153 (IGHV3-33)
ARREGIVGATTYYYGMDV

SEQ ID NO: 10307 - protein, 9 aa, Homo sapiens
  Light chain CDR3 for antibody 5154 (IGKV5-2)
LQHDNFPWT

SEQ ID NO: 10308 - protein, 14 aa, Homo sapiens
  Heavy chain CDR3 for antibody 5154 (IGHV1-18)
AREGGSYFYYGVDV

SEQ ID NO: 10309 - protein, 9 aa, Homo sapiens
  Light chain CDR3 for antibody 5155 (IGKV1-5)
QQYNTYSRT

SEQ ID NO: 10310 - protein, 14 aa, Homo sapiens
  Heavy chain CDR3 for antibody 5155 (IGHV3-33)
AREGYSSNWYDFDY

SEQ ID NO: 10311 - protein, 9 aa, Homo sapiens
  Light chain CDR3 for antibody 5156 (IGKV3-11)
QQRSNWPPT

SEQ ID NO: 10312 - protein, 16 aa, Homo sapiens
  Heavy chain CDR3 for antibody 5156 (IGHV3-33)
ARDRGGMTMVRGGFDY

SEQ ID NO: 10313 - protein, 9 aa, Homo sapiens
  Light chain CDR3 for antibody 5157 (IGKV1-39)
QQSYRTPLT

SEQ ID NO: 10314 - protein, 9 aa, Homo sapiens
  Heavy chain CDR3 for antibody 5157 (IGHV3-20)
ASIRGYFDY

SEQ ID NO: 10315 - protein, 9 aa, Homo sapiens
  Light chain CDR3 for antibody 5158 (IGKV2-30)
MQGTHWPLT

SEQ ID NO: 10316 - protein, 15 aa, Homo sapiens
  Heavy chain CDR3 for antibody 5158 (IGHV3-33)
ARRGYNDYDPYGMDV

SEQ ID NO: 10317 - protein, 8 aa, Homo sapiens
  Light chain CDR3 for antibody 5159 (IGKV1D-16)
QQFNNYPT

SEQ ID NO: 10318 - protein, 17 aa, Homo sapiens
  Heavy chain CDR3 for antibody 5159 (IGHV3-33)
ARESLKLGIYYYYGMDV

SEQ ID NO: 10319 - protein, 9 aa, Homo sapiens
  Light chain CDR3 for antibody 5160 (IGKV6-21)
HQSSSLPYT

SEQ ID NO: 10320 - protein, 10 aa, Homo sapiens
  Heavy chain CDR3 for antibody 5160 (IGHV3-23)
ATIVGPFLDV

SEQ ID NO: 10321 - protein, 9 aa, Homo sapiens
  Light chain CDR3 for antibody 5161 (IGKV1D-16)
QQYNSFPLT

SEQ ID NO: 10322 - protein, 9 aa, Homo sapiens
  Heavy chain CDR3 for antibody 5161 (IGHV3-13)
ARDHWYFDL

SEQ ID NO: 10323 - protein, 9 aa, Homo sapiens
  Light chain CDR3 for antibody 5162 (IGKV1-17)
LQHNSYPYT

SEQ ID NO: 10324 - protein, 19 aa, Homo sapiens
  Heavy chain CDR3 for antibody 5162 (IGHV3-33)
ARDKYYDILTGYPWNGMDV

SEQ ID NO: 10325 - protein, 10 aa, Homo sapiens
  Light chain CDR3 for antibody 5163 (IGKV3-15)
QQYNNWPPLT

SEQ ID NO: 10326 - protein, 12 aa, Homo sapiens
  Heavy chain CDR3 for antibody 5163 (IGHV1-18)
ARILFYGDYFDY

SEQ ID NO: 10327 - protein, 9 aa, Homo sapiens
  Light chain CDR3 for antibody 5164 (IGKV3D-7)
QQDYNLPYT

SEQ ID NO: 10328 - protein, 14 aa, Homo sapiens
  Heavy chain CDR3 for antibody 5164 (IGHV4-39)
ARQGGWYLYWYFDL

SEQ ID NO: 10329 - protein, 9 aa, Homo sapiens
  Light chain CDR3 for antibody 5165 (IGKV1-39)
QQSYSTPYT

SEQ ID NO: 10330 - protein, 14 aa, Homo sapiens
  Heavy chain CDR3 for antibody 5165 (IGHV1-46)
ARKGIVGAFDAFDI

SEQ ID NO: 10331 - protein, 9 aa, Homo sapiens
  Light chain CDR3 for antibody 5166 (IGKV3-15)
QQYNNWPFT

SEQ ID NO: 10332 - protein, 20 aa, Homo sapiens
  Heavy chain CDR3 for antibody 5166 (IGHV1-18)
AREVGIAVAGTLYYYYGMDV

SEQ ID NO: 10333 - protein, 8 aa, Homo sapiens
  Light chain CDR3 for antibody 5167 (IGKV1-5)
QQYNSYYT

SEQ ID NO: 10334 - protein, 13 aa, Homo sapiens
  Heavy chain CDR3 for antibody 5167 (IGHV3-33)
AKEDGDYHHYFDY

SEQ ID NO: 10335 - protein, 8 aa, Homo sapiens
  Light chain CDR3 for antibody 5168 (IGKV3D-7)
QQDYNLLT

SEQ ID NO: 10336 - protein, 21 aa, Homo sapiens
  Heavy chain CDR3 for antibody 5168 (IGHV3-33)
ARDEYYEIVTGYGYYHYGMDV

SEQ ID NO: 10337 - protein, 8 aa, Homo sapiens
  Light chain CDR3 for antibody 5169 (IGKV1-13)
QQFNDYYT

SEQ ID NO: 10338 - protein, 10 aa, Homo sapiens
  Heavy chain CDR3 for antibody 5169 (IGHV4-59)
ARINSGRFDY

SEQ ID NO: 10339 - protein, 9 aa, Homo sapiens
  Light chain CDR3 for antibody 5170 (IGKV6-21)
HQSSSLPYT

SEQ ID NO: 10340 - protein, 16 aa, Homo sapiens
  Heavy chain CDR3 for antibody 5170 (IGHV1-24)
ATDWNDRGYYYYGMDV

SEQ ID NO: 10341 - protein, 9 aa, Homo sapiens
  Light chain CDR3 for antibody 5171 (IGKV3-15)
QQYNNWPYT

SEQ ID NO: 10342 - protein, 18 aa, Homo sapiens
  Heavy chain CDR3 for antibody 5171 (IGHV3-23)
AKDRITGTTYGYYSGLDV

SEQ ID NO: 10343 - protein, 8 aa, Homo sapiens
  Light chain CDR3 for antibody 5172 (IGKV3-11)
LQRGNWPT

SEQ ID NO: 10344 - protein, 12 aa, Homo sapiens
  Heavy chain CDR3 for antibody 5172 (IGHV1-46)
ARGLTGDHAVDI

SEQ ID NO: 10345 - protein, 8 aa, Homo sapiens
  Light chain CDR3 for antibody 5173 (IGKV3D-7)
QQDYNLLT

SEQ ID NO: 10346 - protein, 21 aa, Homo sapiens
  Heavy chain CDR3 for antibody 5173 (IGHV3-33)
ARKRLYDILTGYYKAYYGMDV

SEQ ID NO: 10347 - protein, 9 aa, Homo sapiens
  Light chain CDR3 for antibody 5174 (IGKV3D-7)
QQDYEFPLT

SEQ ID NO: 10348 - protein, 16 aa, Homo sapiens
  Heavy chain CDR3 for antibody 5174 (IGHV4-59)
ARYSGSYYGDYYGMDV

SEQ ID NO: 10349 - protein, 9 aa, Homo sapiens
  Light chain CDR3 for antibody 5175 (IGKV1-9)
QQLKSYLYT

SEQ ID NO: 10350 - protein, 9 aa, Homo sapiens
  Heavy chain CDR3 for antibody 5175 (IGHV4-59)
AREGGSGSL

SEQ ID NO: 10351 - protein, 9 aa, Homo sapiens
  Light chain CDR3 for antibody 5176 (IGKV6-21)
HQSSSLPYT

SEQ ID NO: 10352 - protein, 12 aa, Homo sapiens
  Heavy chain CDR3 for antibody 5176 (IGHV3-33)
ARDGPVAGLFDY

SEQ ID NO: 10353 - protein, 8 aa, Homo sapiens
  Light chain CDR3 for antibody 5177 (IGKV1D-13)
QQFNNYPT

SEQ ID NO: 10354 - protein, 15 aa, Homo sapiens
  Heavy chain CDR3 for antibody 5177 (IGHV3-33)
ARRICSGGSCSLFDY

SEQ ID NO: 10355 - protein, 9 aa, Homo sapiens
  Light chain CDR3 for antibody 5178 (IGKV2-30)
MQGTHWPLT

SEQ ID NO: 10356 - protein, 10 aa, Homo sapiens
  Heavy chain CDR3 for antibody 5178 (IGHV3-74)
ARENWGGFDY

SEQ ID NO: 10357 - protein, 10 aa, Homo sapiens
  Light chain CDR3 for antibody 5179 (IGKV1-27)
QKYNSAPMYT

SEQ ID NO: 10358 - protein, 11 aa, Homo sapiens
  Heavy chain CDR3 for antibody 5179 (IGHV4-59)
AREMGHDTFDI

SEQ ID NO: 10359 - protein, 8 aa, Homo sapiens
  Light chain CDR3 for antibody 5180 (IGKV1D-13)
QQFNNYPT

SEQ ID NO: 10360 - protein, 14 aa, Homo sapiens
  Heavy chain CDR3 for antibody 5180 (IGHV4-39)
ARRGVVVPPGGMDV

SEQ ID NO: 10361 - protein, 10 aa, Homo sapiens
  Light chain CDR3 for antibody 5181 (IGKV3-11)
QQRSNWPPFT

SEQ ID NO: 10362 - protein, 14 aa, Homo sapiens
  Heavy chain CDR3 for antibody 5181 (IGHV3-33)
ARATSGSSYWYFDL

SEQ ID NO: 10363 - protein, 10 aa, Homo sapiens
  Light chain CDR3 for antibody 5182 (IGKV3-15)
QQYNNWPPLT

SEQ ID NO: 10364 - protein, 15 aa, Homo sapiens
  Heavy chain CDR3 for antibody 5182 (IGHV3-20)
ARDRGSSGWRDWFDP

SEQ ID NO: 10365 - protein, 9 aa, Homo sapiens
  Light chain CDR3 for antibody 5183 (IGKV1D-13)
QQFNNYPHT

SEQ ID NO: 10366 - protein, 17 aa, Homo sapiens
  Heavy chain CDR3 for antibody 5183 (IGHV3-33)
TRDSGMVRGIIIYGMDV

SEQ ID NO: 10367 - protein, 9 aa, Homo sapiens
  Light chain CDR3 for antibody 5184 (IGKV5-2)
LQHDKFPYT

SEQ ID NO: 10368 - protein, 12 aa, Homo sapiens
  Heavy chain CDR3 for antibody 5184 (IGHV3-13)
AIGTMVRGIPDY

SEQ ID NO: 10369 - protein, 10 aa, Homo sapiens
  Light chain CDR3 for antibody 5185 (IGKV1-39)
QQSYSTPMYT

SEQ ID NO: 10370 - protein, 12 aa, Homo sapiens
  Heavy chain CDR3 for antibody 5185 (IGHV3-33)
ARDRAYRGSLDY

SEQ ID NO: 10371 - protein, 9 aa, Homo sapiens
  Light chain CDR3 for antibody 5186 (IGKV1D-13)
QQFNNYLYT

SEQ ID NO: 10372 - protein, 14 aa, Homo sapiens
  Heavy chain CDR3 for antibody 5186 (IGHV3-23)
AKDRYRGYEGLFDY

SEQ ID NO: 10373 - protein, 9 aa, Homo sapiens
  Light chain CDR3 for antibody 5187 (IGKV1-39)
QQGFSTPWT

SEQ ID NO: 10374 - protein, 12 aa, Homo sapiens
  Heavy chain CDR3 for antibody 5187 (IGHV4-39)
ARHGSGSSYFDY

SEQ ID NO: 10375 - protein, 9 aa, Homo sapiens
  Light chain CDR3 for antibody 5188 (IGKV1-16)
QQYNSYPLT

SEQ ID NO: 10376 - protein, 15 aa, Homo sapiens
  Heavy chain CDR3 for antibody 5188 (IGHV3-64)
ARDSHHDLLTGHYEY

SEQ ID NO: 10377 - protein, 9 aa, Homo sapiens
  Light chain CDR3 for antibody 5189 (IGKV3-11)
QQRINWPWT

SEQ ID NO: 10378 - protein, 17 aa, Homo sapiens
  Heavy chain CDR3 for antibody 5189 (IGHV4-59)
AREGADSGIYYHWYFDL

SEQ ID NO: 10379 - protein, 9 aa, Homo sapiens
  Light chain CDR3 for antibody 5190 (IGKV3-15)
QQYNSWPLT

SEQ ID NO: 10380 - protein, 15 aa, Homo sapiens
  Heavy chain CDR3 for antibody 5190 (IGHV3-33)
ARGGTGYYSYWYFDL

SEQ ID NO: 10381 - protein, 9 aa, Homo sapiens
  Light chain CDR3 for antibody 5191 (IGKV1D-16)
QQYYSYPRT

SEQ ID NO: 10382 - protein, 14 aa, Homo sapiens
  Heavy chain CDR3 for antibody 5191 (IGHV3-33)
ARDNILTAYYLFDY

SEQ ID NO: 10383 - protein, 9 aa, Homo sapiens
  Light chain CDR3 for antibody 5192 (IGKV5-2)
LQHDNFPWT

SEQ ID NO: 10384 - protein, 11 aa, Homo sapiens
  Heavy chain CDR3 for antibody 5192 (IGHV1-18)
SRGGFSVGYDS

SEQ ID NO: 10385 - protein, 9 aa, Homo sapiens
  Light chain CDR3 for antibody 5193 (IGKV1-9)
QQLKSYLYT

SEQ ID NO: 10386 - protein, 13 aa, Homo sapiens
  Heavy chain CDR3 for antibody 5193 (IGHV4-39)
ARQWPSGYWYFDL

SEQ ID NO: 10387 - protein, 9 aa, Homo sapiens
  Light chain CDR3 for antibody 5194 (IGKV1D-13)
QQFNNYPYT

SEQ ID NO: 10388 - protein, 11 aa, Homo sapiens
  Heavy chain CDR3 for antibody 5194 (IGHV3-33)
ARDQGGSSFDY

SEQ ID NO: 10389 - protein, 9 aa, Homo sapiens
  Light chain CDR3 for antibody 5195 (IGKV1-9)
QQLNGYPFT

SEQ ID NO: 10390 - protein, 18 aa, Homo sapiens
  Heavy chain CDR3 for antibody 5195 (IGHV3-33)
ARREGIVGATTYYYGMDV

SEQ ID NO: 10391 - protein, 9 aa, Homo sapiens
  Light chain CDR3 for antibody 5196 (IGKV1-27)
QKYNSAPYT

SEQ ID NO: 10392 - protein, 15 aa, Homo sapiens
  Heavy chain CDR3 for antibody 5196 (IGHV3-33)
ARDEHYDILTGYWGY

SEQ ID NO: 10393 - protein, 9 aa, Homo sapiens
  Light chain CDR3 for antibody 5197 (IGKV3-11)
QQRSNWMYT

SEQ ID NO: 10394 - protein, 18 aa, Homo sapiens
  Heavy chain CDR3 for antibody 5197 (IGHV4-59)
AREGHYYTSGSYYKAFDY

SEQ ID NO: 10395 - protein, 9 aa, Homo sapiens
  Light chain CDR3 for antibody 5198 (IGKV2D-28)
MQALQTPPT

SEQ ID NO: 10396 - protein, 15 aa, Homo sapiens
  Heavy chain CDR3 for antibody 5198 (IGHV3-33)
ARDTGYSSSWNWFDP

SEQ ID NO: 10397 - protein, 9 aa, Homo sapiens
  Light chain CDR3 for antibody 5199 (IGKV2-30)
MQGTHWPLT

SEQ ID NO: 10398 - protein, 14 aa, Homo sapiens
  Heavy chain CDR3 for antibody 5199 (IGHV3-33)
ARAGSGYDRDWFDP

SEQ ID NO: 10399 - protein, 9 aa, Homo sapiens
  Light chain CDR3 for antibody 5200 (IGKV1-17)
LQHNSYPYT

SEQ ID NO: 10400 - protein, 12 aa, Homo sapiens
  Heavy chain CDR3 for antibody 5200 (IGHV4-39)
ARREVILGAFDY

SEQ ID NO: 10401 - protein, 9 aa, Homo sapiens
  Light chain CDR3 for antibody 5201 (IGKV1-39)
QQSYRTPLT

SEQ ID NO: 10402 - protein, 18 aa, Homo sapiens
  Heavy chain CDR3 for antibody 5201 (IGHV3-33)
ARRTAAGTGDYYYYGMDV

SEQ ID NO: 10403 - protein, 9 aa, Homo sapiens
  Light chain CDR3 for antibody 5202 (IGKV1-17)
LQHNSYPYT

SEQ ID NO: 10404 - protein, 16 aa, Homo sapiens
  Heavy chain CDR3 for antibody 5202 (IGHV3-33)
ARDAGYPNYDYYGMDV

SEQ ID NO: 10405 - protein, 9 aa, Homo sapiens
  Light chain CDR3 for antibody 5203 (IGKV1-16)
QHYNDYPFT

SEQ ID NO: 10406 - protein, 17 aa, Homo sapiens
  Heavy chain CDR3 for antibody 5203 (IGHV1-18)
ARERYYGSGIYKYAMDV

SEQ ID NO: 10407 - protein, 9 aa, Homo sapiens
  Light chain CDR3 for antibody 5204 (IGKV1-39)
QQSYSTPLT

SEQ ID NO: 10408 - protein, 15 aa, Homo sapiens
  Heavy chain CDR3 for antibody 5204 (IGHV3-23)
AKDRDYDFLSGPFDY

SEQ ID NO: 10409 - protein, 8 aa, Homo sapiens
  Light chain CDR3 for antibody 5205 (IGKV3D-7)
QQDYNLLT

SEQ ID NO: 10410 - protein, 21 aa, Homo sapiens
  Heavy chain CDR3 for antibody 5205 (IGHV3-23)
AKDIDYYGSGSYPLYYYGMDV

SEQ ID NO: 10411 - protein, 10 aa, Homo sapiens
  Light chain CDR3 for antibody 5206 (IGKV1-39)
QQSYSTPMYT

SEQ ID NO: 10412 - protein, 17 aa, Homo sapiens
  Heavy chain CDR3 for antibody 5206 (IGHV3-33)
VREGGLLWVGELSLFDY

SEQ ID NO: 10413 - protein, 9 aa, Homo sapiens
  Light chain CDR3 for antibody 5207 (IGKV6-21)
HQSSSLPYT

SEQ ID NO: 10414 - protein, 18 aa, Homo sapiens
  Heavy chain CDR3 for antibody 5207 (IGHV3-64)
ARDEYYYGSGSYYNYFDW

SEQ ID NO: 10415 - protein, 9 aa, Homo sapiens
  Light chain CDR3 for antibody 5208 (IGKV1-6)
LQDYKSPFT

SEQ ID NO: 10416 - protein, 18 aa, Homo sapiens
  Heavy chain CDR3 for antibody 5208 (IGHV3-33)
ARDRYYDILTGYYMGFDY

SEQ ID NO: 10417 - protein, 8 aa, Homo sapiens
  Light chain CDR3 for antibody 5209 (IGKV3-20)
QQYGRSFT

SEQ ID NO: 10418 - protein, 12 aa, Homo sapiens
  Heavy chain CDR3 for antibody 5209 (IGHV4-61)
ARVYSSGWLFDY

SEQ ID NO: 10419 - protein, 9 aa, Homo sapiens
  Light chain CDR3 for antibody 5210 (IGKV3-20)
QQYGSSPYT

SEQ ID NO: 10420 - protein, 18 aa, Homo sapiens
  Heavy chain CDR3 for antibody 5210 (IGHV3-33)
ARGALTYYDILTGYFFDY

SEQ ID NO: 10421 - protein, 9 aa, Homo sapiens
  Light chain CDR3 for antibody 5211 (IGKV3-11)
QQRINWPWT

SEQ ID NO: 10422 - protein, 15 aa, Homo sapiens
  Heavy chain CDR3 for antibody 5211 (IGHV4-39)
ARHSGYSSGWYPFDY

SEQ ID NO: 10423 - protein, 9 aa, Homo sapiens
  Light chain CDR3 for antibody 5212 (IGKV1D-13)
QQFNNYPHT

SEQ ID NO: 10424 - protein, 14 aa, Homo sapiens
  Heavy chain CDR3 for antibody 5212 (IGHV3-20)
ARDEGSGGYDVFDI

SEQ ID NO: 10425 - protein, 9 aa, Homo sapiens
  Light chain CDR3 for antibody 5213 (IGKV3D-7)
QQDYNLPYT

SEQ ID NO: 10426 - protein, 13 aa, Homo sapiens
  Heavy chain CDR3 for antibody 5213 (IGHV3-33)
ANTGDSYYYDMDV

SEQ ID NO: 10427 - protein, 9 aa, Homo sapiens
  Light chain CDR3 for antibody 5214 (IGKV3-20)
QQYGSSPYT

SEQ ID NO: 10428 - protein, 11 aa, Homo sapiens
  Heavy chain CDR3 for antibody 5214 (IGHV3-33)
ASWDILTGSGY

SEQ ID NO: 10429 - protein, 9 aa, Homo sapiens
  Light chain CDR3 for antibody 5215 (IGKV1D-13)
QQFNNYPHT

SEQ ID NO: 10430 - protein, 16 aa, Homo sapiens
  Heavy chain CDR3 for antibody 5215 (IGHV3-33)
ARDQGILTGYYTALDY

SEQ ID NO: 10431 - protein, 9 aa, Homo sapiens
  Light chain CDR3 for antibody 5216 (IGKV1-9)
QQLNSYPRT

SEQ ID NO: 10432 - protein, 16 aa, Homo sapiens
  Heavy chain CDR3 for antibody 5216 (IGHV3-33)
ARIAAPGSEYYYGMDV

SEQ ID NO: 10433 - protein, 9 aa, Homo sapiens
  Light chain CDR3 for antibody 5217 (IGKV1-6)
LQDYNYPWT

SEQ ID NO: 10434 - protein, 15 aa, Homo sapiens
  Heavy chain CDR3 for antibody 5217 (IGHV3-33)
ARGYYYGSGSFPFDY

SEQ ID NO: 10435 - protein, 9 aa, Homo sapiens
  Light chain CDR3 for antibody 5218 (IGKV1D-16)
QQYDSYPYT

SEQ ID NO: 10436 - protein, 11 aa, Homo sapiens
  Heavy chain CDR3 for antibody 5218 (IGHV3-33)
ARDRSSGPFDY

SEQ ID NO: 10437 - protein, 9 aa, Homo sapiens
  Light chain CDR3 for antibody 5219 (IGKV1-27)
QKYNSAPYT

SEQ ID NO: 10438 - protein, 15 aa, Homo sapiens
  Heavy chain CDR3 for antibody 5219 (IGHV3-23)
AKDGGWNYYYYGMDV

SEQ ID NO: 10439 - protein, 9 aa, Homo sapiens
  Light chain CDR3 for antibody 5220 (IGKV5-2)
LQHDNFPWT

SEQ ID NO: 10440 - protein, 11 aa, Homo sapiens
  Heavy chain CDR3 for antibody 5220 (IGHV4-39)
ARLSGEGHFDS

SEQ ID NO: 10441 - protein, 9 aa, Homo sapiens
  Light chain CDR3 for antibody 5221 (IGKV3-15)
QQYNNWPFT

SEQ ID NO: 10442 - protein, 16 aa, Homo sapiens
  Heavy chain CDR3 for antibody 5221 (IGHV1-8)
AREGTMVRGVTYAFDI

SEQ ID NO: 10443 - protein, 9 aa, Homo sapiens
  Light chain CDR3 for antibody 5222 (IGKV1-6)
LQDYKSPFT

SEQ ID NO: 10444 - protein, 9 aa, Homo sapiens
  Heavy chain CDR3 for antibody 5222 (IGHV3-23)
AREGGSGSL

SEQ ID NO: 10445 - protein, 10 aa, Homo sapiens
  Light chain CDR3 for antibody 5223 (IGKV1-39)
QQSYSTPMYT

SEQ ID NO: 10446 - protein, 11 aa, Homo sapiens
  Heavy chain CDR3 for antibody 5223 (IGHV3-33)
AREGAVASFDY

SEQ ID NO: 10447 - protein, 8 aa, Homo sapiens
  Light chain CDR3 for antibody 5224 (IGKV3D-7)
QQDYNLLT

SEQ ID NO: 10448 - protein, 17 aa, Homo sapiens
  Heavy chain CDR3 for antibody 5224 (IGHV3-33)
ARDLIGPLSSSWYPFDY

SEQ ID NO: 10449 - protein, 9 aa, Homo sapiens
  Light chain CDR3 for antibody 5225 (IGKV3D-7)
QQDYNLPWT

SEQ ID NO: 10450 - protein, 16 aa, Homo sapiens
  Heavy chain CDR3 for antibody 5225 (IGHV3-23)
AKEGEVLRYFDWLFNY

SEQ ID NO: 10451 - protein, 9 aa, Homo sapiens
  Light chain CDR3 for antibody 5226 (IGKV1-39)
QQSYSTPLT

SEQ ID NO: 10452 - protein, 8 aa, Homo sapiens
  Heavy chain CDR3 for antibody 5226 (IGHV3-20)
APHWIFDY

SEQ ID NO: 10453 - protein, 10 aa, Homo sapiens
  Light chain CDR3 for antibody 5227 (IGKV3-11)
QQRSNWPIFT

SEQ ID NO: 10454 - protein, 13 aa, Homo sapiens
  Heavy chain CDR3 for antibody 5227 (IGHV3-13)
ARAITMVRGVIDY

SEQ ID NO: 10455 - protein, 9 aa, Homo sapiens
  Light chain CDR3 for antibody 5228 (IGKV3D-7)
QQDYNLPFT

SEQ ID NO: 10456 - protein, 13 aa, Homo sapiens
  Heavy chain CDR3 for antibody 5228 (IGHV3-33)
ARGDNWNDGGFDY

SEQ ID NO: 10457 - protein, 9 aa, Homo sapiens
  Light chain CDR3 for antibody 5229 (IGKV3-11)
QQRSNWMYT

SEQ ID NO: 10458 - protein, 12 aa, Homo sapiens
  Heavy chain CDR3 for antibody 5229 (IGHV3-23)
AKEYDILTGYFH

SEQ ID NO: 10459 - protein, 9 aa, Homo sapiens
  Light chain CDR3 for antibody 5230 (IGKV1-6)
LQDYKSPFT

SEQ ID NO: 10460 - protein, 17 aa, Homo sapiens
  Heavy chain CDR3 for antibody 5230 (IGHV1-18)
ARDRAFTMVRGVPPFDY

SEQ ID NO: 10461 - protein, 8 aa, Homo sapiens
  Light chain CDR3 for antibody 5231 (IGKV3D-7)
QQDYNLLT

SEQ ID NO: 10462 - protein, 14 aa, Homo sapiens
  Heavy chain CDR3 for antibody 5231 (IGHV3-33)
ARRGSPLRPSHLDV

SEQ ID NO: 10463 - protein, 9 aa, Homo sapiens
  Light chain CDR3 for antibody 5232 (IGKV3D-7)
QQDYNLPLT

SEQ ID NO: 10464 - protein, 14 aa, Homo sapiens
  Heavy chain CDR3 for antibody 5232 (IGHV4-39)
ARHGYYGSSNWFDP

SEQ ID NO: 10465 - protein, 9 aa, Homo sapiens
  Light chain CDR3 for antibody 5233 (IGKV1-6)
LQDYNYPYT

SEQ ID NO: 10466 - protein, 19 aa, Homo sapiens
  Heavy chain CDR3 for antibody 5233 (IGHV3-33)
ARDNDSSGYYDYYYYGMDV

SEQ ID NO: 10467 - protein, 8 aa, Homo sapiens
  Light chain CDR3 for antibody 5234 (IGKV1D-13)
QQFNNYPT

SEQ ID NO: 10468 - protein, 11 aa, Homo sapiens
  Heavy chain CDR3 for antibody 5234 (IGHV3-33)
ARDRATATVDY

SEQ ID NO: 10469 - protein, 9 aa, Homo sapiens
  Light chain CDR3 for antibody 5235 (IGKV1-9)
QQLNTYPYT

SEQ ID NO: 10470 - protein, 18 aa, Homo sapiens
  Heavy chain CDR3 for antibody 5235 (IGHV1-46)
ARDGDYVWGSYRSNWFDP

SEQ ID NO: 10471 - protein, 9 aa, Homo sapiens
  Light chain CDR3 for antibody 5236 (IGKV1-6)
LQDYKSPFT

SEQ ID NO: 10472 - protein, 14 aa, Homo sapiens
  Heavy chain CDR3 for antibody 5236 (IGHV3-33)
ARDWNDVYYYGMDV

SEQ ID NO: 10473 - protein, 9 aa, Homo sapiens
  Light chain CDR3 for antibody 5237 (IGKV3D-7)
QQDYNLPYT

SEQ ID NO: 10474 - protein, 14 aa, Homo sapiens
  Heavy chain CDR3 for antibody 5237 (IGHV3-23)
ANWAYDILTGYLDY

SEQ ID NO: 10475 - protein, 9 aa, Homo sapiens
  Light chain CDR3 for antibody 5238 (IGKV1-39)
QQSYRTPLT

SEQ ID NO: 10476 - protein, 16 aa, Homo sapiens
  Heavy chain CDR3 for antibody 5238 (IGHV3-33)
ARDKNTDYDILTGFDY

SEQ ID NO: 10477 - protein, 9 aa, Homo sapiens
  Light chain CDR3 for antibody 5239 (IGKV1D-13)
QRFNNYLYT

SEQ ID NO: 10478 - protein, 10 aa, Homo sapiens
  Heavy chain CDR3 for antibody 5239 (IGHV3-33)
ARENSTPLDY

SEQ ID NO: 10479 - protein, 9 aa, Homo sapiens
  Light chain CDR3 for antibody 5240 (IGKV1-39)
QQSYSTPLT

SEQ ID NO: 10480 - protein, 14 aa, Homo sapiens
  Heavy chain CDR3 for antibody 5240 (IGHV3-15)
SIYYYGSGRDFFDY

SEQ ID NO: 10481 - protein, 8 aa, Homo sapiens
  Light chain CDR3 for antibody 5241 (IGKV1-5)
QQYNSYYT

SEQ ID NO: 10482 - protein, 10 aa, Homo sapiens
  Heavy chain CDR3 for antibody 5241 (IGHV3-23)
AKDHYGDYPY

SEQ ID NO: 10483 - protein, 9 aa, Homo sapiens
  Light chain CDR3 for antibody 5242 (IGKV3-11)
QQRSNWPYT

SEQ ID NO: 10484 - protein, 15 aa, Homo sapiens
  Heavy chain CDR3 for antibody 5242 (IGHV3-33)
ARDHLTGYYYYGMDV

SEQ ID NO: 10485 - protein, 9 aa, Homo sapiens
  Light chain CDR3 for antibody 5243 (IGKV1-33)
QQYDNLPFT

SEQ ID NO: 10486 - protein, 15 aa, Homo sapiens
  Heavy chain CDR3 for antibody 5243 (IGHV3-33)
ARDHLTGYYYYGMDV

SEQ ID NO: 10487 - protein, 9 aa, Homo sapiens
  Light chain CDR3 for antibody 5244 (IGKV3-11)
QQRSNWPLT

SEQ ID NO: 10488 - protein, 11 aa, Homo sapiens
  Heavy chain CDR3 for antibody 5244 (IGHV4-59)
ARETGDDAFDI

SEQ ID NO: 10489 - protein, 9 aa, Homo sapiens
  Light chain CDR3 for antibody 5245 (IGKV1-39)
QQSYSTPLT

SEQ ID NO: 10490 - protein, 17 aa, Homo sapiens
  Heavy chain CDR3 for antibody 5245 (IGHV3-33)
ARDSYDILTGYYKPFDY

SEQ ID NO: 10491 - protein, 9 aa, Homo sapiens
  Light chain CDR3 for antibody 5246 (IGKV1-27)
QKYNSAPYT

SEQ ID NO: 10492 - protein, 8 aa, Homo sapiens
  Heavy chain CDR3 for antibody 5246 (IGHV4-39)
ARRGGLDY

SEQ ID NO: 10493 - protein, 9 aa, Homo sapiens
  Light chain CDR3 for antibody 5247 (IGKV3D-7)
QQDYNLPWT

SEQ ID NO: 10494 - protein, 23 aa, Homo sapiens
  Heavy chain CDR3 for antibody 5247 (IGHV3-11)
ARDEGVTMVRGVISYYYYYGMDV

SEQ ID NO: 10495 - protein, 10 aa, Homo sapiens
  Light chain CDR3 for antibody 5248 (IGKV1-39)
QQSYSTPMYT

SEQ ID NO: 10496 - protein, 13 aa, Homo sapiens
  Heavy chain CDR3 for antibody 5248 (IGHV3-33)
ARKAYGDYFYFDY

SEQ ID NO: 10497 - protein, 9 aa, Homo sapiens
  Light chain CDR3 for antibody 5249 (IGKV1-17)
LQHNSYPYT

SEQ ID NO: 10498 - protein, 14 aa, Homo sapiens
  Heavy chain CDR3 for antibody 5249 (IGHV1-18)
ARDDILTGYPHFDY

SEQ ID NO: 10499 - protein, 9 aa, Homo sapiens
  Light chain CDR3 for antibody 5250 (IGKV1-39)
QQSYSTPLT

SEQ ID NO: 10500 - protein, 15 aa, Homo sapiens
  Heavy chain CDR3 for antibody 5250 (IGHV3-21)
ARDGLRYFDWLFPWY

SEQ ID NO: 10501 - protein, 9 aa, Homo sapiens
  Light chain CDR3 for antibody 5251 (IGKV1D-13)
QQFNNYPHT

SEQ ID NO: 10502 - protein, 14 aa, Homo sapiens
  Heavy chain CDR3 for antibody 5251 (IGHV3-33)
ARGYGSGSYYSFDY

SEQ ID NO: 10503 - protein, 9 aa, Homo sapiens
  Light chain CDR3 for antibody 5252 (IGKV6-21)
HQSSSLPYT

SEQ ID NO: 10504 - protein, 22 aa, Homo sapiens
  Heavy chain CDR3 for antibody 5252 (IGHV3-11)
AREAYYDILTGYYTGYYYGMDV

SEQ ID NO: 10505 - protein, 9 aa, Homo sapiens
  Light chain CDR3 for antibody 5253 (IGKV3D-7)
QQDYNLPLT

SEQ ID NO: 10506 - protein, 19 aa, Homo sapiens
  Heavy chain CDR3 for antibody 5253 (IGHV3-23)
AKDGRSGSYDYYYYYGMDV

SEQ ID NO: 10507 - protein, 10 aa, Homo sapiens
  Light chain CDR3 for antibody 5254 (IGKV3-11)
QQRSNWPALT

SEQ ID NO: 10508 - protein, 10 aa, Homo sapiens
  Heavy chain CDR3 for antibody 5254 (IGHV3-33)
ARDVVVYFDY

SEQ ID NO: 10509 - protein, 9 aa, Homo sapiens
  Light chain CDR3 for antibody 5255 (IGKV6-21)
HQSSSLPYT

SEQ ID NO: 10510 - protein, 12 aa, Homo sapiens
  Heavy chain CDR3 for antibody 5255 (IGHV3-23)
AKGAVVTAIFDY

SEQ ID NO: 10511 - protein, 10 aa, Homo sapiens
  Light chain CDR3 for antibody 5256 (IGKV3-11)
QQRSNWPIFT

SEQ ID NO: 10512 - protein, 12 aa, Homo sapiens
  Heavy chain CDR3 for antibody 5256 (IGHV3-33)
ARDGYSSRNFDY

SEQ ID NO: 10513 - protein, 9 aa, Homo sapiens
  Light chain CDR3 for antibody 5257 (IGKV3D-7)
QQDYNLPWT

SEQ ID NO: 10514 - protein, 12 aa, Homo sapiens
  Heavy chain CDR3 for antibody 5257 (IGHV4-61)
ARVDSSGWYFDY

SEQ ID NO: 10515 - protein, 11 aa, Homo sapiens
  Light chain CDR3 for antibody 5258 (IGKV3-11)
QQRSNWPPTWT

SEQ ID NO: 10516 - protein, 12 aa, Homo sapiens
  Heavy chain CDR3 for antibody 5258 (IGHV4-39)
ARQMVREGWFDP

SEQ ID NO: 10517 - protein, 10 aa, Homo sapiens
  Light chain CDR3 for antibody 5259 (IGKV3-20)
QQYGRSPPVT

SEQ ID NO: 10518 - protein, 15 aa, Homo sapiens
  Heavy chain CDR3 for antibody 5259 (IGHV1-18)
ARGYCSSTSCYYFDY

SEQ ID NO: 10519 - protein, 9 aa, Homo sapiens
  Light chain CDR3 for antibody 5260 (IGKV3D-7)
QQDYNLPLT

SEQ ID NO: 10520 - protein, 21 aa, Homo sapiens
  Heavy chain CDR3 for antibody 5260 (IGHV3-33)
ARKRLYDILTGYYKAYYGMDV

SEQ ID NO: 10521 - protein, 10 aa, Homo sapiens
  Light chain CDR3 for antibody 5261 (IGKV3-11)
QQRSNWPMYT

SEQ ID NO: 10522 - protein, 15 aa, Homo sapiens
  Heavy chain CDR3 for antibody 5261 (IGHV3-33)
ARRVCSGGSCSLFDY

SEQ ID NO: 10523 - protein, 9 aa, Homo sapiens
  Light chain CDR3 for antibody 5262 (IGKV3D-7)
QQDYNLPWT

SEQ ID NO: 10524 - protein, 20 aa, Homo sapiens
  Heavy chain CDR3 for antibody 5262 (IGHV3-33)
ARDPAQLERRYYYFYYGMDV

SEQ ID NO: 10525 - protein, 9 aa, Homo sapiens
  Light chain CDR3 for antibody 5263 (IGKV6-21)
HQSSSLPYT

SEQ ID NO: 10526 - protein, 15 aa, Homo sapiens
  Heavy chain CDR3 for antibody 5263 (IGHV3-23)
AKDRNYDFLTGPFDP

SEQ ID NO: 10527 - protein, 8 aa, Homo sapiens
  Light chain CDR3 for antibody 5264 (IGKV1D-13)
QQFNNYPT

SEQ ID NO: 10528 - protein, 18 aa, Homo sapiens
  Heavy chain CDR3 for antibody 5264 (IGHV3-33)
ARGLLWFGVSYYYYGMDV

SEQ ID NO: 10529 - protein, 10 aa, Homo sapiens
  Light chain CDR3 for antibody 5265 (IGKV3-11)
QQRSNWPIFT

SEQ ID NO: 10530 - protein, 18 aa, Homo sapiens
  Heavy chain CDR3 for antibody 5265 (IGHV3-33)
ARGYYGSGNFYKDSGMDV

SEQ ID NO: 10531 - protein, 9 aa, Homo sapiens
  Light chain CDR3 for antibody 5266 (IGKV2-30)
LQYAHWPHT

SEQ ID NO: 10532 - protein, 10 aa, Homo sapiens
  Heavy chain CDR3 for antibody 5266 (IGHV3-h)
ARDVWWSFDY

SEQ ID NO: 10533 - protein, 9 aa, Homo sapiens
  Light chain CDR3 for antibody 5267 (IGKV3-15)
QQYNNWPYT

SEQ ID NO: 10534 - protein, 14 aa, Homo sapiens
  Heavy chain CDR3 for antibody 5267 (IGHV3-33)
ARTTAAAGPRDFQH

SEQ ID NO: 10535 - protein, 8 aa, Homo sapiens
  Light chain CDR3 for antibody 5268 (IGKV1-5)
QQYNSYWT

SEQ ID NO: 10536 - protein, 14 aa, Homo sapiens
  Heavy chain CDR3 for antibody 5268 (IGHV3-33)
ARDNILTAYYLFDY

SEQ ID NO: 10537 - protein, 9 aa, Homo sapiens
  Light chain CDR3 for antibody 5269 (IGKV5-2)
LQHDNFPYT

SEQ ID NO: 10538 - protein, 20 aa, Homo sapiens
  Heavy chain CDR3 for antibody 5269 (IGHV3-23)
AKDRMTTVTSYYYYSYGMDV

SEQ ID NO: 10539 - protein, 9 aa, Homo sapiens
  Light chain CDR3 for antibody 5270 (IGKV1-17)
LQHNSYPWT

SEQ ID NO: 10540 - protein, 17 aa, Homo sapiens
  Heavy chain CDR3 for antibody 5270 (IGHV3-23)
AKGNYGSGSYYNGDFQH

SEQ ID NO: 10541 - protein, 10 aa, Homo sapiens
  Light chain CDR3 for antibody 5271 (IGKV1-39)
QQSYSTPMYT

SEQ ID NO: 10542 - protein, 17 aa, Homo sapiens
  Heavy chain CDR3 for antibody 5271 (IGHV3-33)
ARVYYDILTGYSPAFDI

SEQ ID NO: 10543 - protein, 9 aa, Homo sapiens
  Light chain CDR3 for antibody 5272 (IGKV1D-16)
QQYNSYPYT

SEQ ID NO: 10544 - protein, 10 aa, Homo sapiens
  Heavy chain CDR3 for antibody 5272 (IGHV1-18)
ARGPTSDVDY

SEQ ID NO: 10545 - protein, 9 aa, Homo sapiens
  Light chain CDR3 for antibody 5273 (IGKV3D-7)
QQDYNLPWT

SEQ ID NO: 10546 - protein, 20 aa, Homo sapiens
  Heavy chain CDR3 for antibody 5273 (IGHV3-23)
AKDREMAATSHYYYYYGMDV

SEQ ID NO: 10547 - protein, 9 aa, Homo sapiens
  Light chain CDR3 for antibody 5274 (IGKV3D-7)
QQDYKLPLT

SEQ ID NO: 10548 - protein, 15 aa, Homo sapiens
  Heavy chain CDR3 for antibody 5274 (IGHV1-46)
ARGAVDDYYYYGMDV

SEQ ID NO: 10549 - protein, 9 aa, Homo sapiens
  Light chain CDR3 for antibody 5275 (IGKV2-30)
MQGTHWPLT

SEQ ID NO: 10550 - protein, 17 aa, Homo sapiens
  Heavy chain CDR3 for antibody 5275 (IGHV3-33)
ARGGAAAGPYLYYGLDV

SEQ ID NO: 10551 - protein, 9 aa, Homo sapiens
  Light chain CDR3 for antibody 5276 (IGKV3-11)
QQRSNWMYT

SEQ ID NO: 10552 - protein, 20 aa, Homo sapiens
  Heavy chain CDR3 for antibody 5276 (IGHV1-f)
ATHYDILTGSPYYYYCALDV

SEQ ID NO: 10553 - protein, 9 aa, Homo sapiens
  Light chain CDR3 for antibody 5277 (IGKV2-30)
MQGTHWPLT

SEQ ID NO: 10554 - protein, 11 aa, Homo sapiens
  Heavy chain CDR3 for antibody 5277 (IGHV4-4)
AREAYYYGLDV

SEQ ID NO: 10555 - protein, 9 aa, Homo sapiens
  Light chain CDR3 for antibody 5278 (IGKV1-39)
QQSYSTPLT

SEQ ID NO: 10556 - protein, 14 aa, Homo sapiens
  Heavy chain CDR3 for antibody 5278 (IGHV3-33)
ARGYGSGSYYSFDY

SEQ ID NO: 10557 - protein, 9 aa, Homo sapiens
  Light chain CDR3 for antibody 5279 (IGKV3D-7)
QQDYNLPLT

SEQ ID NO: 10558 - protein, 15 aa, Homo sapiens
  Heavy chain CDR3 for antibody 5279 (IGHV4-39)
ARQGLVATIKGYFQH

SEQ ID NO: 10559 - protein, 9 aa, Homo sapiens
  Light chain CDR3 for antibody 5280 (IGKV1-33)
QQYDNLPFT

SEQ ID NO: 10560 - protein, 17 aa, Homo sapiens
  Heavy chain CDR3 for antibody 5280 (IGHV1-18)
ARDRAFTMVRGVPPFDY

SEQ ID NO: 10561 - protein, 9 aa, Homo sapiens
  Light chain CDR3 for antibody 5281 (IGKV1D-16)
QQYITYPYT

SEQ ID NO: 10562 - protein, 15 aa, Homo sapiens
  Heavy chain CDR3 for antibody 5281 (IGHV3-30)
ARGAMVRGVDYGMDV

SEQ ID NO: 10563 - protein, 9 aa, Homo sapiens
  Light chain CDR3 for antibody 5282 (IGKV2-30)
MQGTHWPLT

SEQ ID NO: 10564 - protein, 20 aa, Homo sapiens
  Heavy chain CDR3 for antibody 5282 (IGHV3-33)
AREDYYGSGSYYPAYNWFDP

SEQ ID NO: 10565 - protein, 9 aa, Homo sapiens
  Light chain CDR3 for antibody 5283 (IGKV2-30)
MQGTHWPLT

SEQ ID NO: 10566 - protein, 11 aa, Homo sapiens
  Heavy chain CDR3 for antibody 5283 (IGHV3-33)
ARDKSSGWSDY

SEQ ID NO: 10567 - protein, 9 aa, Homo sapiens
  Light chain CDR3 for antibody 5284 (IGKV3D-7)
QQDYNLPYT

SEQ ID NO: 10568 - protein, 14 aa, Homo sapiens
  Heavy chain CDR3 for antibody 5284 (IGHV3-33)
AREDYYGPLNWFDP

SEQ ID NO: 10569 - protein, 8 aa, Homo sapiens
  Light chain CDR3 for antibody 5285 (IGKV3D-7)
QQDYNLLT

SEQ ID NO: 10570 - protein, 10 aa, Homo sapiens
  Heavy chain CDR3 for antibody 5285 (IGHV3-33)
ARDGSGSQPI

SEQ ID NO: 10571 - protein, 9 aa, Homo sapiens
  Light chain CDR3 for antibody 5286 (IGKV3-11)
QQRSNWPYT

SEQ ID NO: 10572 - protein, 13 aa, Homo sapiens
  Heavy chain CDR3 for antibody 5286 (IGHV1-46)
ARRQVGYYYGMDV

SEQ ID NO: 10573 - protein, 9 aa, Homo sapiens
  Light chain CDR3 for antibody 5287 (IGKV1-6)
LQDYNYPYT

SEQ ID NO: 10574 - protein, 19 aa, Homo sapiens
  Heavy chain CDR3 for antibody 5287 (IGHV3-33)
AGTYPTFYDGSGNYYDFDY

SEQ ID NO: 10575 - protein, 9 aa, Homo sapiens
  Light chain CDR3 for antibody 5288 (IGKV6-21)
HQSSSLPLT

SEQ ID NO: 10576 - protein, 19 aa, Homo sapiens
  Heavy chain CDR3 for antibody 5288 (IGHV3-33)
ARDRYYDILTGYSSYYFDY

SEQ ID NO: 10577 - protein, 8 aa, Homo sapiens
  Light chain CDR3 for antibody 5289 (IGKV3-20)
QQYGSSLT

SEQ ID NO: 10578 - protein, 15 aa, Homo sapiens
  Heavy chain CDR3 for antibody 5289 (IGHV3-20)
ARDRGSSGWRDWFDP

SEQ ID NO: 10579 - protein, 9 aa, Homo sapiens
  Light chain CDR3 for antibody 5290 (IGKV3-20)
QQYGSSPYT

SEQ ID NO: 10580 - protein, 12 aa, Homo sapiens
  Heavy chain CDR3 for antibody 5290 (IGHV4-34)
ARGYSSSWYFDY

SEQ ID NO: 10581 - protein, 9 aa, Homo sapiens
  Light chain CDR3 for antibody 5291 (IGKV1-9)
QQYNSYPLT

SEQ ID NO: 10582 - protein, 15 aa, Homo sapiens
  Heavy chain CDR3 for antibody 5291 (IGHV3-33)
ARHSSGFYYYYGMDV

SEQ ID NO: 10583 - protein, 9 aa, Homo sapiens
  Light chain CDR3 for antibody 5292 (IGKV3D-7)
QQDYNLPLT

SEQ ID NO: 10584 - protein, 15 aa, Homo sapiens
  Heavy chain CDR3 for antibody 5292 (IGHV1-24)
ATHWDLRYYYYGMDV

SEQ ID NO: 10585 - protein, 9 aa, Homo sapiens
  Light chain CDR3 for antibody 5293 (IGKV3D-7)
QQDYNLPYT

SEQ ID NO: 10586 - protein, 21 aa, Homo sapiens
  Heavy chain CDR3 for antibody 5293 (IGHV4-59)
AAGVLLWFGEPNYYYYYGMDV

SEQ ID NO: 10587 - protein, 9 aa, Homo sapiens
  Light chain CDR3 for antibody 5294 (IGKV1-39)
QQSYSTPLT

SEQ ID NO: 10588 - protein, 15 aa, Homo sapiens
  Heavy chain CDR3 for antibody 5294 (IGHV3-23)
AKDLSSGWYAYFFDY

SEQ ID NO: 10589 - protein, 10 aa, Homo sapiens
  Light chain CDR3 for antibody 5295 (IGKV3-11)
QQRSNWPTWT

SEQ ID NO: 10590 - protein, 17 aa, Homo sapiens
  Heavy chain CDR3 for antibody 5295 (IGHV1-18)
ARERYYGSGSYKYNMDV

SEQ ID NO: 10591 - protein, 8 aa, Homo sapiens
  Light chain CDR3 for antibody 5296 (IGKV1-5)
QQYNSYWT

SEQ ID NO: 10592 - protein, 9 aa, Homo sapiens
  Heavy chain CDR3 for antibody 5296 (IGHV3-30)
ARDNWGFDY

SEQ ID NO: 10593 - protein, 9 aa, Homo sapiens
  Light chain CDR3 for antibody 5297 (IGKV1-6)
LQDYNYPWT

SEQ ID NO: 10594 - protein, 16 aa, Homo sapiens
  Heavy chain CDR3 for antibody 5297 (IGHV4-59)
ARGRYFDWLLGDVFDI

SEQ ID NO: 10595 - protein, 9 aa, Homo sapiens
  Light chain CDR3 for antibody 5298 (IGKV1-9)
QQLNSYPLT

SEQ ID NO: 10596 - protein, 9 aa, Homo sapiens
  Heavy chain CDR3 for antibody 5298 (IGHV3-20)
ASIRGYFDY

SEQ ID NO: 10597 - protein, 8 aa, Homo sapiens
  Light chain CDR3 for antibody 5299 (IGKV1D-13)
QQFNNYPT

SEQ ID NO: 10598 - protein, 10 aa, Homo sapiens
  Heavy chain CDR3 for antibody 5299 (IGHV3-33)
ARENSTPLDY

SEQ ID NO: 10599 - protein, 9 aa, Homo sapiens
  Light chain CDR3 for antibody 5300 (IGKV1-33)
QQYDNLPFT

SEQ ID NO: 10600 - protein, 21 aa, Homo sapiens
  Heavy chain CDR3 for antibody 5300 (IGHV3-23)
AKDIDYYGSGSYPLYYYGMDV

SEQ ID NO: 10601 - protein, 9 aa, Homo sapiens
  Light chain CDR3 for antibody 5301 (IGKV1-9)
QQLNRYPYT

SEQ ID NO: 10602 - protein, 14 aa, Homo sapiens
  Heavy chain CDR3 for antibody 5301 (IGHV3-23)
AKSRIVGALYYFDY

SEQ ID NO: 10603 - protein, 9 aa, Homo sapiens
  Light chain CDR3 for antibody 5302 (IGKV1-9)
QQGNTYSRT

SEQ ID NO: 10604 - protein, 12 aa, Homo sapiens
  Heavy chain CDR3 for antibody 5302 (IGHV4-39)
ARHGSGSSYFDY

SEQ ID NO: 10605 - protein, 10 aa, Homo sapiens
  Light chain CDR3 for antibody 5303 (IGKV1-17)
LQHNSYPMYT

SEQ ID NO: 10606 - protein, 9 aa, Homo sapiens
  Heavy chain CDR3 for antibody 5303 (IGHV3-30)
ARDNWGFDY

SEQ ID NO: 10607 - protein, 9 aa, Homo sapiens
  Light chain CDR3 for antibody 5304 (IGKV2-30)
MQGTHWPLT

SEQ ID NO: 10608 - protein, 16 aa, Homo sapiens
  Heavy chain CDR3 for antibody 5304 (IGHV3-33)
ARGYDMLTGDYYGMDV

SEQ ID NO: 10609 - protein, 9 aa, Homo sapiens
  Light chain CDR3 for antibody 5305 (IGKV1-39)
QQSYSTPLT

SEQ ID NO: 10610 - protein, 20 aa, Homo sapiens
  Heavy chain CDR3 for antibody 5305 (IGHV4-59)
ARDRGYDILTGYYGYYGMDV

SEQ ID NO: 10611 - protein, 9 aa, Homo sapiens
  Light chain CDR3 for antibody 5306 (IGKV6-21)
HQSSSLPHT

SEQ ID NO: 10612 - protein, 13 aa, Homo sapiens
  Heavy chain CDR3 for antibody 5306 (IGHV4-39)
ARRGVVAPAAFDY

SEQ ID NO: 10613 - protein, 9 aa, Homo sapiens
  Light chain CDR3 for antibody 5307 (IGKV1-39)
QQSYRTPLT

SEQ ID NO: 10614 - protein, 14 aa, Homo sapiens
  Heavy chain CDR3 for antibody 5307 (IGHV3-33)
ARDGYDILTGPFDY

SEQ ID NO: 10615 - protein, 9 aa, Homo sapiens
  Light chain CDR3 for antibody 5308 (IGKV3-11)
QQRSNWPPT

SEQ ID NO: 10616 - protein, 10 aa, Homo sapiens
  Heavy chain CDR3 for antibody 5308 (IGHV3-33)
ARDGSGSQPI

SEQ ID NO: 10617 - protein, 9 aa, Homo sapiens
  Light chain CDR3 for antibody 5309 (IGKV3D-7)
QQDYNLPWT

SEQ ID NO: 10618 - protein, 14 aa, Homo sapiens
  Heavy chain CDR3 for antibody 5309 (IGHV3-64)
ARDHAAGGYSHSDY

SEQ ID NO: 10619 - protein, 9 aa, Homo sapiens
  Light chain CDR3 for antibody 5310 (IGKV1-39)
QQSYSTPFT

SEQ ID NO: 10620 - protein, 13 aa, Homo sapiens
  Heavy chain CDR3 for antibody 5310 (IGHV4-39)
ARRDGSYYGYFGY

SEQ ID NO: 10621 - protein, 9 aa, Homo sapiens
  Light chain CDR3 for antibody 5311 (IGKV1-6)
LQDYKSPFT

SEQ ID NO: 10622 - protein, 16 aa, Homo sapiens
  Heavy chain CDR3 for antibody 5311 (IGHV4-59)
ARGRYFEWLLGDVFDI

SEQ ID NO: 10623 - protein, 9 aa, Homo sapiens
  Light chain CDR3 for antibody 5312 (IGKV3-11)
QQRSNWPYT

SEQ ID NO: 10624 - protein, 14 aa, Homo sapiens
  Heavy chain CDR3 for antibody 5312 (IGHV1-46)
ARRGIVGALDAFDI

SEQ ID NO: 10625 - protein, 9 aa, Homo sapiens
  Light chain CDR3 for antibody 5313 (IGKV3-11)
QQRSNWPLT

SEQ ID NO: 10626 - protein, 13 aa, Homo sapiens
  Heavy chain CDR3 for antibody 5313 (IGHV3-23)
AKDRGYSSTSTAY

SEQ ID NO: 10627 - protein, 9 aa, Homo sapiens
  Light chain CDR3 for antibody 5314 (IGKV3-20)
QQYGSSPRT

SEQ ID NO: 10628 - protein, 16 aa, Homo sapiens
  Heavy chain CDR3 for antibody 5314 (IGHV1-24)
ATEDSSSYYYCCGMDV

SEQ ID NO: 10629 - protein, 11 aa, Homo sapiens
  Light chain CDR3 for antibody 5315 (IGKV3-11)
QQRSNWPPTWT

SEQ ID NO: 10630 - protein, 13 aa, Homo sapiens
  Heavy chain CDR3 for antibody 5315 (IGHV4-59)
ARTMVRGVAPFDY

SEQ ID NO: 10631 - protein, 10 aa, Homo sapiens
  Light chain CDR3 for antibody 5316 (IGKV1-17)
LQHNSYPMYT

SEQ ID NO: 10632 - protein, 9 aa, Homo sapiens
  Heavy chain CDR3 for antibody 5316 (IGHV3-30)
ARDYFHYDY

SEQ ID NO: 10633 - protein, 9 aa, Homo sapiens
  Light chain CDR3 for antibody 5317 (IGKV1-9)
QQYNSYPWT

SEQ ID NO: 10634 - protein, 13 aa, Homo sapiens
  Heavy chain CDR3 for antibody 5317 (IGHV3-33)
ARDDDYGDYPFDY

SEQ ID NO: 10635 - protein, 8 aa, Homo sapiens
  Light chain CDR3 for antibody 5318 (IGKV3-15)
QQYNNWPT

SEQ ID NO: 10636 - protein, 12 aa, Homo sapiens
  Heavy chain CDR3 for antibody 5318 (IGHV3-23)
AKDGWFGESLDY

SEQ ID NO: 10637 - protein, 9 aa, Homo sapiens
  Light chain CDR3 for antibody 5319 (IGKV1-6)
LQDYNYPWT

SEQ ID NO: 10638 - protein, 14 aa, Homo sapiens
  Heavy chain CDR3 for antibody 5319 (IGHV3-33)
AGDGYYILTGPFDY

SEQ ID NO: 10639 - protein, 9 aa, Homo sapiens
  Light chain CDR3 for antibody 5320 (IGKV1-27)
QKYNSAPYT

SEQ ID NO: 10640 - protein, 17 aa, Homo sapiens
  Heavy chain CDR3 for antibody 5320 (IGHV3-33)
ARDWFGELSDYYYGMDV

SEQ ID NO: 10641 - protein, 9 aa, Homo sapiens
  Light chain CDR3 for antibody 5321 (IGKV2-30)
MQGTHWPLT

SEQ ID NO: 10642 - protein, 16 aa, Homo sapiens
  Heavy chain CDR3 for antibody 5321 (IGHV3-13)
ARDRSYESYYYYGMDV

SEQ ID NO: 10643 - protein, 8 aa, Homo sapiens
  Light chain CDR3 for antibody 5322 (IGKV3D-7)
QQDYNLLT

SEQ ID NO: 10644 - protein, 24 aa, Homo sapiens
  Heavy chain CDR3 for antibody 5322 (IGHV3-20)
ARGRITMVRGVIINPLDYYNGMDV

SEQ ID NO: 10645 - protein, 10 aa, Homo sapiens
  Light chain CDR3 for antibody 5323 (IGKV3D-7)
QQRSNWPMYT

SEQ ID NO: 10646 - protein, 18 aa, Homo sapiens
  Heavy chain CDR3 for antibody 5323 (IGHV3-33)
ARGLLWFGVSYYYYGMDV

SEQ ID NO: 10647 - protein, 9 aa, Homo sapiens
  Light chain CDR3 for antibody 5324 (IGKV3-15)
QQYNNWPLT

SEQ ID NO: 10648 - protein, 12 aa, Homo sapiens
  Heavy chain CDR3 for antibody 5324 (IGHV3-23)
AKEGLGSDYEPY

SEQ ID NO: 10649 - protein, 9 aa, Homo sapiens
  Light chain CDR3 for antibody 5325 (IGKV3-15)
QQYNNWPLT

SEQ ID NO: 10650 - protein, 18 aa, Homo sapiens
  Heavy chain CDR3 for antibody 5325 (IGHV3-33)
ARDQYSGYDFYYYYGMDV

SEQ ID NO: 10651 - protein, 9 aa, Homo sapiens
  Light chain CDR3 for antibody 5326 (IGKV1-6)
QQEYNYPLT

SEQ ID NO: 10652 - protein, 18 aa, Homo sapiens
  Heavy chain CDR3 for antibody 5326 (IGHV3-23)
AKDRITGTTYGYYSGLDV

SEQ ID NO: 10653 - protein, 9 aa, Homo sapiens
  Light chain CDR3 for antibody 5327 (IGKV1-39)
QQSYRTPLT

SEQ ID NO: 10654 - protein, 16 aa, Homo sapiens
  Heavy chain CDR3 for antibody 5327 (IGHV3-11)
ARDSELRYFDWFGMDV

SEQ ID NO: 10655 - protein, 8 aa, Homo sapiens
  Light chain CDR3 for antibody 5328 (IGKV3D-7)
QQDYNLLT

SEQ ID NO: 10656 - protein, 12 aa, Homo sapiens
  Heavy chain CDR3 for antibody 5328 (IGHV3-33)
AREGDILTGYSL

SEQ ID NO: 10657 - protein, 9 aa, Homo sapiens
  Light chain CDR3 for antibody 5329 (IGKV3-20)
QQYGSSPYT

SEQ ID NO: 10658 - protein, 14 aa, Homo sapiens
  Heavy chain CDR3 for antibody 5329 (IGHV3-23)
AKDRYRGYEGLFDY

SEQ ID NO: 10659 - protein, 10 aa, Homo sapiens
  Light chain CDR3 for antibody 5330 (IGKV3-11)
QQRSNWPIFT

SEQ ID NO: 10660 - protein, 15 aa, Homo sapiens
  Heavy chain CDR3 for antibody 5330 (IGHV1-18)
ARGYCSSTSCYYFDY

SEQ ID NO: 10661 - protein, 8 aa, Homo sapiens
  Light chain CDR3 for antibody 5331 (IGKV3-11)
LQRGNWPT

SEQ ID NO: 10662 - protein, 16 aa, Homo sapiens
  Heavy chain CDR3 for antibody 5331 (IGHV3-23)
AKEGMVLRYFDWLWDY

SEQ ID NO: 10663 - protein, 10 aa, Homo sapiens
  Light chain CDR3 for antibody 5332 (IGKV1-17)
LQHNSYPMYT

SEQ ID NO: 10664 - protein, 13 aa, Homo sapiens
  Heavy chain CDR3 for antibody 5332 (IGHV3-33)
ARGDNWNDGGFDY

SEQ ID NO: 10665 - protein, 10 aa, Homo sapiens
  Light chain CDR3 for antibody 5333 (IGKV1-17)
LQHNSYPMYT

SEQ ID NO: 10666 - protein, 11 aa, Homo sapiens
  Heavy chain CDR3 for antibody 5333 (IGHV3-33)
ARDRVLTPFDY

SEQ ID NO: 10667 - protein, 9 aa, Homo sapiens
  Light chain CDR3 for antibody 5334 (IGKV1D-16)
LQHNSYPRT

SEQ ID NO: 10668 - protein, 13 aa, Homo sapiens
  Heavy chain CDR3 for antibody 5334 (IGHV1-18)
ARSYYGSGSPFDY

SEQ ID NO: 10669 - protein, 9 aa, Homo sapiens
  Light chain CDR3 for antibody 5335 (IGKV1-17)
QQLKSYLYT

SEQ ID NO: 10670 - protein, 13 aa, Homo sapiens
  Heavy chain CDR3 for antibody 5335 (IGHV3-23)
ASTGDSYYYGMDV

SEQ ID NO: 10671 - protein, 9 aa, Homo sapiens
  Light chain CDR3 for antibody 5336 (IGKV3-20)
QQYGSSPLT

SEQ ID NO: 10672 - protein, 17 aa, Homo sapiens
  Heavy chain CDR3 for antibody 5336 (IGHV1-24)
TTVVLYYDILPGYSFDY

SEQ ID NO: 10673 - protein, 10 aa, Homo sapiens
  Light chain CDR3 for antibody 5337 (IGKV3-11)
QQRSNWPALT

SEQ ID NO: 10674 - protein, 14 aa, Homo sapiens
  Heavy chain CDR3 for antibody 5337 (IGHV1-18)
ARCFGSGSYGWFDP

SEQ ID NO: 10675 - protein, 9 aa, Homo sapiens
  Light chain CDR3 for antibody 5338 (IGKV6-21)
HQSSSLPLT

SEQ ID NO: 10676 - protein, 13 aa, Homo sapiens
  Heavy chain CDR3 for antibody 5338 (IGHV3-33)
ARTDYYYYYGMDV

SEQ ID NO: 10677 - protein, 8 aa, Homo sapiens
  Light chain CDR3 for antibody 5339 (IGKV1D-13)
QQFNNYPT

SEQ ID NO: 10678 - protein, 12 aa, Homo sapiens
  Heavy chain CDR3 for antibody 5339 (IGHV3-33)
AKDPGWQQLAEY

SEQ ID NO: 10679 - protein, 9 aa, Homo sapiens
  Light chain CDR3 for antibody 5340 (IGKV1-17)
LQQNSYPWT

SEQ ID NO: 10680 - protein, 11 aa, Homo sapiens
  Heavy chain CDR3 for antibody 5340 (IGHV4-59)
ARDRGHYGMDV

SEQ ID NO: 10681 - protein, 10 aa, Homo sapiens
  Light chain CDR3 for antibody 5341 (IGKV3-15)
QQYNNWPPYT

SEQ ID NO: 10682 - protein, 18 aa, Homo sapiens
  Heavy chain CDR3 for antibody 5341 (IGHV3-33)
ARREGIVGATTYYYGMDV

SEQ ID NO: 10683 - protein, 9 aa, Homo sapiens
  Light chain CDR3 for antibody 5342 (IGKV3-20)
QQYGSSPYT

SEQ ID NO: 10684 - protein, 18 aa, Homo sapiens
  Heavy chain CDR3 for antibody 5342 (IGHV3-64)
ARDEYYYGSGSYYNYFDW

SEQ ID NO: 10685 - protein, 9 aa, Homo sapiens
  Light chain CDR3 for antibody 5343 (IGKV1-17)
LQHNSYPYT

SEQ ID NO: 10686 - protein, 13 aa, Homo sapiens
  Heavy chain CDR3 for antibody 5343 (IGHV3-33)
ARDDDYGDYPFDY

SEQ ID NO: 10687 - protein, 10 aa, Homo sapiens
  Light chain CDR3 for antibody 5344 (IGKV1-39)
QQSYSTPMYT

SEQ ID NO: 10688 - protein, 16 aa, Homo sapiens
  Heavy chain CDR3 for antibody 5344 (IGHV3-33)
ARDNFGSGSYYSHFHY

SEQ ID NO: 10689 - protein, 9 aa, Homo sapiens
  Light chain CDR3 for antibody 5345 (IGKV1-9)
QQLISYPLT

SEQ ID NO: 10690 - protein, 13 aa, Homo sapiens
  Heavy chain CDR3 for antibody 5345 (IGHV3-33)
ARGVLWFGELFDY

SEQ ID NO: 10691 - protein, 9 aa, Homo sapiens
  Light chain CDR3 for antibody 5346 (IGKV1-39)
QQSYSTPLT

SEQ ID NO: 10692 - protein, 14 aa, Homo sapiens
  Heavy chain CDR3 for antibody 5346 (IGHV3-20)
ARDRGSSFFDAFDI

SEQ ID NO: 10693 - protein, 9 aa, Homo sapiens
  Light chain CDR3 for antibody 5347 (IGKV1-39)
QQSYSTPLT

SEQ ID NO: 10694 - protein, 16 aa, Homo sapiens
  Heavy chain CDR3 for antibody 5347 (IGHV3-20)
ARDSSSLDYYYYGMDV

SEQ ID NO: 10695 - protein, 9 aa, Homo sapiens
  Light chain CDR3 for antibody 5348 (IGKV1D-13)
QQFNNYPYT

SEQ ID NO: 10696 - protein, 16 aa, Homo sapiens
  Heavy chain CDR3 for antibody 5348 (IGHV3-64)
ARGRYFDWLLGDWFDP

SEQ ID NO: 10697 - protein, 9 aa, Homo sapiens
  Light chain CDR3 for antibody 5349 (IGKV1-16)
QQYNSYPLT

SEQ ID NO: 10698 - protein, 19 aa, Homo sapiens
  Heavy chain CDR3 for antibody 5349 (IGHV3-33)
ARRKNYYGSGSWHYYGMDV

SEQ ID NO: 10699 - protein, 8 aa, Homo sapiens
  Light chain CDR3 for antibody 5350 (IGKV3-20)
QQYGRSFT

SEQ ID NO: 10700 - protein, 16 aa, Homo sapiens
  Heavy chain CDR3 for antibody 5350 (IGHV4-59)
ARGRYFDWLLGDVFDI

SEQ ID NO: 10701 - protein, 9 aa, Homo sapiens
  Light chain CDR3 for antibody 5351 (IGKV5-2)
LQHDNFPYT

SEQ ID NO: 10702 - protein, 17 aa, Homo sapiens
  Heavy chain CDR3 for antibody 5351 (IGHV3-23)
ANGGFGESHYNYYGMDV

SEQ ID NO: 10703 - protein, 9 aa, Homo sapiens
  Light chain CDR3 for antibody 5352 (IGKV1-39)
QQSYSTPLT

SEQ ID NO: 10704 - protein, 15 aa, Homo sapiens
  Heavy chain CDR3 for antibody 5352 (IGHV3-66)
ARDRDYYYYYYGMDV

SEQ ID NO: 10705 - protein, 10 aa, Homo sapiens
  Light chain CDR3 for antibody 5353 (IGKV3-11)
QQRSNWLMYT

SEQ ID NO: 10706 - protein, 13 aa, Homo sapiens
  Heavy chain CDR3 for antibody 5353 (IGHV4-59)
ARDAGYSSSWFDY

SEQ ID NO: 10707 - protein, 9 aa, Homo sapiens
  Light chain CDR3 for antibody 5354 (IGKV3D-7)
QQDYELPLT

SEQ ID NO: 10708 - protein, 16 aa, Homo sapiens
  Heavy chain CDR3 for antibody 5354 (IGHV4-59)
ARDTPYYSGSGRPFDH

SEQ ID NO: 10709 - protein, 8 aa, Homo sapiens
  Light chain CDR3 for antibody 5355 (IGKV3D-7)
QQDYNLLT

SEQ ID NO: 10710 - protein, 17 aa, Homo sapiens
  Heavy chain CDR3 for antibody 5355 (IGHV3-33)
ARAYYDILTGYSYYFDY

SEQ ID NO: 10711 - protein, 9 aa, Homo sapiens
  Light chain CDR3 for antibody 5356 (IGKV1D-16)
QQYSSYPYT

SEQ ID NO: 10712 - protein, 18 aa, Homo sapiens
  Heavy chain CDR3 for antibody 5356 (IGHV3-33)
ARREGIVGTTTYYYGMDV

SEQ ID NO: 10713 - protein, 9 aa, Homo sapiens
  Light chain CDR3 for antibody 5357 (IGKV3D-7)
QQDYSFPLT

SEQ ID NO: 10714 - protein, 13 aa, Homo sapiens
  Heavy chain CDR3 for antibody 5357 (IGHV3-33)
ARGVLWFGELFDY

SEQ ID NO: 10715 - protein, 9 aa, Homo sapiens
  Light chain CDR3 for antibody 5358 (IGKV1-17)
LQHNSYPYT

SEQ ID NO: 10716 - protein, 13 aa, Homo sapiens
  Heavy chain CDR3 for antibody 5358 (IGHV3-33)
GRTDYYSYYGVDV

SEQ ID NO: 10717 - protein, 11 aa, Homo sapiens
  Light chain CDR3 for antibody 5359 (IGKV3-11)
QQRSNWPPTWT

SEQ ID NO: 10718 - protein, 15 aa, Homo sapiens
  Heavy chain CDR3 for antibody 5359 (IGHV1-18)
ARGYCSSTSCYYFDY

SEQ ID NO: 10719 - protein, 8 aa, Homo sapiens
  Light chain CDR3 for antibody 5360 (IGKV1-5)
QQYNSYWT

SEQ ID NO: 10720 - protein, 11 aa, Homo sapiens
  Heavy chain CDR3 for antibody 5360 (IGHV3-74)
ARDRGNWGFDY

SEQ ID NO: 10721 - protein, 9 aa, Homo sapiens
  Light chain CDR3 for antibody 5361 (IGKV6-21)
HQSSSLPYT

SEQ ID NO: 10722 - protein, 15 aa, Homo sapiens
  Heavy chain CDR3 for antibody 5361 (IGHV3-23)
AKDRSGSGSYNLFDY

SEQ ID NO: 10723 - protein, 9 aa, Homo sapiens
  Light chain CDR3 for antibody 5362 (IGKV1-6)
LQDFHYPWT

SEQ ID NO: 10724 - protein, 22 aa, Homo sapiens
  Heavy chain CDR3 for antibody 5362 (IGHV3-11)
ARDEGVTMVRGVISYYYYGMDV

SEQ ID NO: 10725 - protein, 9 aa, Homo sapiens
  Light chain CDR3 for antibody 5363 (IGKV1D-13)
QQFNNYPHT

SEQ ID NO: 10726 - protein, 17 aa, Homo sapiens
  Heavy chain CDR3 for antibody 5363 (IGHV3-33)
ARGGGYENDHYYYGMDV

SEQ ID NO: 10727 - protein, 9 aa, Homo sapiens
  Light chain CDR3 for antibody 5364 (IGKV3D-7)
QQDYNLPFT

SEQ ID NO: 10728 - protein, 12 aa, Homo sapiens
  Heavy chain CDR3 for antibody 5364 (IGHV1-46)
ARGLTGDHAFDI

SEQ ID NO: 10729 - protein, 9 aa, Homo sapiens
  Light chain CDR3 for antibody 5365 (IGKV3-15)
QQYNNWPRT

SEQ ID NO: 10730 - protein, 14 aa, Homo sapiens
  Heavy chain CDR3 for antibody 5365 (IGHV3-23)
ANWAYDILTGYLDY

SEQ ID NO: 10731 - protein, 9 aa, Homo sapiens
  Light chain CDR3 for antibody 5366 (IGKV1-9)
QQLNTYPWT

SEQ ID NO: 10732 - protein, 14 aa, Homo sapiens
  Heavy chain CDR3 for antibody 5366 (IGHV3-33)
AREGYSSNWYDFDY

SEQ ID NO: 10733 - protein, 9 aa, Homo sapiens
  Light chain CDR3 for antibody 5367 (IGKV3-11)
QQRSNWPPT

SEQ ID NO: 10734 - protein, 16 aa, Homo sapiens
  Heavy chain CDR3 for antibody 5367 (IGHV3-33)
ARGYDMLTGDYHGMDV

SEQ ID NO: 10735 - protein, 9 aa, Homo sapiens
  Light chain CDR3 for antibody 5368 (IGKV1-9)
QQYNSYPLT

SEQ ID NO: 10736 - protein, 10 aa, Homo sapiens
  Heavy chain CDR3 for antibody 5368 (IGHV4-39)
ASSNWNDGPL

SEQ ID NO: 10737 - protein, 8 aa, Homo sapiens
  Light chain CDR3 for antibody 5369 (IGKV3D-7)
QQDYNLLT

SEQ ID NO: 10738 - protein, 13 aa, Homo sapiens
  Heavy chain CDR3 for antibody 5369 (IGHV4-39)
ARHEVMVRGVFDY

SEQ ID NO: 10739 - protein, 9 aa, Homo sapiens
  Light chain CDR3 for antibody 5370 (IGKV1-39)
QQSYRTPLT

SEQ ID NO: 10740 - protein, 20 aa, Homo sapiens
  Heavy chain CDR3 for antibody 5370 (IGHV3-33)
ARRMVRGVKKTYYYYYGLDV

SEQ ID NO: 10741 - protein, 8 aa, Homo sapiens
  Light chain CDR3 for antibody 5371 (IGKV1D-13)
QQFNNYPT

SEQ ID NO: 10742 - protein, 12 aa, Homo sapiens
  Heavy chain CDR3 for antibody 5371 (IGHV3-33)
ARDSSGWSHFDY

SEQ ID NO: 10743 - protein, 9 aa, Homo sapiens
  Light chain CDR3 for antibody 5372 (IGKV3-15)
QQYNNWPLT

SEQ ID NO: 10744 - protein, 12 aa, Homo sapiens
  Heavy chain CDR3 for antibody 5372 (IGHV3-66)
VREKDILTGSDY

SEQ ID NO: 10745 - protein, 9 aa, Homo sapiens
  Light chain CDR3 for antibody 5373 (IGKV1D-13)
QRFNNYLYT

SEQ ID NO: 10746 - protein, 12 aa, Homo sapiens
  Heavy chain CDR3 for antibody 5373 (IGHV3-33)
ARESGGSYSFDY

SEQ ID NO: 10747 - protein, 9 aa, Homo sapiens
  Light chain CDR3 for antibody 5374 (IGKV1-9)
QQLNSYPLT

SEQ ID NO: 10748 - protein, 19 aa, Homo sapiens
  Heavy chain CDR3 for antibody 5374 (IGHV4-39)
ARLDYDFLTDYYRPYFFAY

SEQ ID NO: 10749 - protein, 9 aa, Homo sapiens
  Light chain CDR3 for antibody 5375 (IGKV1-17)
LQRNSYPWT

SEQ ID NO: 10750 - protein, 15 aa, Homo sapiens
  Heavy chain CDR3 for antibody 5375 (IGHV3-33)
ARDGSSSWSPSWFDP

SEQ ID NO: 10751 - protein, 9 aa, Homo sapiens
  Light chain CDR3 for antibody 5376 (IGKV1-27)
QKYNSAPYT

SEQ ID NO: 10752 - protein, 17 aa, Homo sapiens
  Heavy chain CDR3 for antibody 5376 (IGHV3-33)
ARGDGDILTGYYEWFDP

SEQ ID NO: 10753 - protein, 9 aa, Homo sapiens
  Light chain CDR3 for antibody 5377 (IGKV3D-7)
QQDYNLPLT

SEQ ID NO: 10754 - protein, 19 aa, Homo sapiens
  Heavy chain CDR3 for antibody 5377 (IGHV3-33)
ARGPYYDILTGYGYYGMDV

SEQ ID NO: 10755 - protein, 9 aa, Homo sapiens
  Light chain CDR3 for antibody 5378 (IGKV3-15)
QQYNNWPYT

SEQ ID NO: 10756 - protein, 19 aa, Homo sapiens
  Heavy chain CDR3 for antibody 5378 (IGHV3-33)
ARGPYYDILTGYGYYGMDV

SEQ ID NO: 10757 - protein, 7 aa, Homo sapiens
  Light chain CDR3 for antibody 5379 (IGKV1-17)
LQHNSYP

SEQ ID NO: 10758 - protein, 12 aa, Homo sapiens
  Heavy chain CDR3 for antibody 5379 (IGHV1-18)
ARILFYGDYFDY

SEQ ID NO: 10759 - protein, 10 aa, Homo sapiens
  Light chain CDR3 for antibody 5380 (IGKV3-11)
QQRSNWPIFT

SEQ ID NO: 10760 - protein, 19 aa, Homo sapiens
  Heavy chain CDR3 for antibody 5380 (IGHV3-33)
ARGVRLRYFDPYYYYGMDV

SEQ ID NO: 10761 - protein, 10 aa, Homo sapiens
  Light chain CDR3 for antibody 5381 (IGKV1-39)
QQSYSTPMYT

SEQ ID NO: 10762 - protein, 11 aa, Homo sapiens
  Heavy chain CDR3 for antibody 5381 (IGHV4-59)
AREMGHDTFDI

SEQ ID NO: 10763 - protein, 9 aa, Homo sapiens
  Light chain CDR3 for antibody 5382 (IGKV1-9)
QQLISYPLT

SEQ ID NO: 10764 - protein, 9 aa, Homo sapiens
  Heavy chain CDR3 for antibody 5382 (IGHV3-33)
ARKRLYDIL

SEQ ID NO: 10765 - protein, 9 aa, Homo sapiens
  Light chain CDR3 for antibody 5383 (IGKV3-11)
QQRINWPWT

SEQ ID NO: 10766 - protein, 18 aa, Homo sapiens
  Heavy chain CDR3 for antibody 5383 (IGHV1-46)
ARDGDYVWGSYRSDWFDP

SEQ ID NO: 10767 - protein, 9 aa, Homo sapiens
  Light chain CDR3 for antibody 5384 (IGKV1-6)
LQDYKSPFT

SEQ ID NO: 10768 - protein, 20 aa, Homo sapiens
  Heavy chain CDR3 for antibody 5384 (IGHV3-20)
ARDLCSSTSCYGYYYYGMDV

SEQ ID NO: 10769 - protein, 9 aa, Homo sapiens
  Light chain CDR3 for antibody 5385 (IGKV1D-13)
QQFNNYPYT

SEQ ID NO: 10770 - protein, 14 aa, Homo sapiens
  Heavy chain CDR3 for antibody 5385 (IGHV3-33)
AREEDYYYHYDMDV

SEQ ID NO: 10771 - protein, 9 aa, Homo sapiens
  Light chain CDR3 for antibody 5386 (IGKV6-21)
HQSSSLPYT

SEQ ID NO: 10772 - protein, 20 aa, Homo sapiens
  Heavy chain CDR3 for antibody 5386 (IGHV3-23)
AKEGMVLRYFDWPHYYGMDV

SEQ ID NO: 10773 - protein, 8 aa, Homo sapiens
  Light chain CDR3 for antibody 5387 (IGKV1D-13)
QQFNNYPT

SEQ ID NO: 10774 - protein, 14 aa, Homo sapiens
  Heavy chain CDR3 for antibody 5387 (IGHV3-33)
ARDGYDFLTGPFDY

SEQ ID NO: 10775 - protein, 9 aa, Homo sapiens
  Light chain CDR3 for antibody 5388 (IGKV2-30)
MQGTHWPLT

SEQ ID NO: 10776 - protein, 18 aa, Homo sapiens
  Heavy chain CDR3 for antibody 5388 (IGHV3-33)
ARDRYYDILTGYYMGFDY

SEQ ID NO: 10777 - protein, 9 aa, Homo sapiens
  Light chain CDR3 for antibody 5389 (IGKV1-27)
QKYNSAPYT

SEQ ID NO: 10778 - protein, 17 aa, Homo sapiens
  Heavy chain CDR3 for antibody 5389 (IGHV3-33)
AREGYYYGSGSYHFFDY

SEQ ID NO: 10779 - protein, 10 aa, Homo sapiens
  Light chain CDR3 for antibody 5390 (IGKV3-11)
QQRSNWPALT

SEQ ID NO: 10780 - protein, 12 aa, Homo sapiens
  Heavy chain CDR3 for antibody 5390 (IGHV1-46)
AREDYDIDGMDV

SEQ ID NO: 10781 - protein, 9 aa, Homo sapiens
  Light chain CDR3 for antibody 5391 (IGKV1-9)
QQLISYPLT

SEQ ID NO: 10782 - protein, 13 aa, Homo sapiens
  Heavy chain CDR3 for antibody 5391 (IGHV3-33)
ARRATLVRGVFDP

SEQ ID NO: 10783 - protein, 9 aa, Homo sapiens
  Light chain CDR3 for antibody 5392 (IGKV1-5)
QQYNSYSYT

SEQ ID NO: 10784 - protein, 18 aa, Homo sapiens
  Heavy chain CDR3 for antibody 5392 (IGHV4-39)
ARQYYFGSGNYYRGWFDP

SEQ ID NO: 10785 - protein, 9 aa, Homo sapiens
  Light chain CDR3 for antibody 5393 (IGKV3D-7)
QQDYNLPLT

SEQ ID NO: 10786 - protein, 18 aa, Homo sapiens
  Heavy chain CDR3 for antibody 5393 (IGHV3-33)
ARERGYYGSDIYPAAFDI

SEQ ID NO: 10787 - protein, 9 aa, Homo sapiens
  Light chain CDR3 for antibody 5394 (IGKV3-15)
QQYNNWPLT

SEQ ID NO: 10788 - protein, 9 aa, Homo sapiens
  Heavy chain CDR3 for antibody 5394 (IGHV3-33)
ARATVGVDY

SEQ ID NO: 10789 - protein, 8 aa, Homo sapiens
  Light chain CDR3 for antibody 5395 (IGKV1D-13)
QQYNSYYT

SEQ ID NO: 10790 - protein, 7 aa, Homo sapiens
  Heavy chain CDR3 for antibody 5395 (IGHV1-46)
AREGGDY

SEQ ID NO: 10791 - protein, 9 aa, Homo sapiens
  Light chain CDR3 for antibody 5396 (IGKV1-27)
QKYNSAPYT

SEQ ID NO: 10792 - protein, 17 aa, Homo sapiens
  Heavy chain CDR3 for antibody 5396 (IGHV3-33)
AREDYDILTGYPFYFDY

SEQ ID NO: 10793 - protein, 9 aa, Homo sapiens
  Light chain CDR3 for antibody 5397 (IGKV1-39)
QQSYRTPLT

SEQ ID NO: 10794 - protein, 11 aa, Homo sapiens
  Heavy chain CDR3 for antibody 5397 (IGHV4-59)
ARSLRYSFFDY

SEQ ID NO: 10795 - protein, 10 aa, Homo sapiens
  Light chain CDR3 for antibody 5398 (IGKV1-39)
QQSYSTPMYT

SEQ ID NO: 10796 - protein, 14 aa, Homo sapiens
  Heavy chain CDR3 for antibody 5398 (IGHV3-23)
AKSRIVGALYYFDY

SEQ ID NO: 10797 - protein, 9 aa, Homo sapiens
  Light chain CDR3 for antibody 5399 (IGKV1-17)
LQHNSYPYT

SEQ ID NO: 10798 - protein, 13 aa, Homo sapiens
  Heavy chain CDR3 for antibody 5399 (IGHV3-33)
ARVHFDWLDAFDI

SEQ ID NO: 10799 - protein, 9 aa, Homo sapiens
  Light chain CDR3 for antibody 5400 (IGKV1-27)
QKYNSAPYT

SEQ ID NO: 10800 - protein, 16 aa, Homo sapiens
  Heavy chain CDR3 for antibody 5400 (IGHV3-33)
ARDQGILTGYYTALDY

SEQ ID NO: 10801 - protein, 8 aa, Homo sapiens
  Light chain CDR3 for antibody 5401 (IGKV6-21)
HQSSSLPT

SEQ ID NO: 10802 - protein, 14 aa, Homo sapiens
  Heavy chain CDR3 for antibody 5401 (IGHV3-33)
ARGAAAGNFYGLDV

SEQ ID NO: 10803 - protein, 9 aa, Homo sapiens
  Light chain CDR3 for antibody 5402 (IGKV1-27)
QKYNSAPYT

SEQ ID NO: 10804 - protein, 26 aa, Homo sapiens
  Heavy chain CDR3 for antibody 5402 (IGHV4-39)
ARQGLLWFGDLKAYDSSGYYYGYFHH

SEQ ID NO: 10805 - protein, 9 aa, Homo sapiens
  Light chain CDR3 for antibody 5403 (IGKV1D-13)
QRFNNYLYT

SEQ ID NO: 10806 - protein, 18 aa, Homo sapiens
  Heavy chain CDR3 for antibody 5403 (IGHV3-33)
ARGYYGSGNFYKDSGMDV

SEQ ID NO: 10807 - protein, 9 aa, Homo sapiens
  Light chain CDR3 for antibody 5404 (IGKV3-20)
QQYGSSPYT

SEQ ID NO: 10808 - protein, 13 aa, Homo sapiens
  Heavy chain CDR3 for antibody 5404 (IGHV3-11)
AREGIAVAGDFDH

SEQ ID NO: 10809 - protein, 9 aa, Homo sapiens
  Light chain CDR3 for antibody 5405 (IGKV1-33)
QQYDNLPFT

SEQ ID NO: 10810 - protein, 10 aa, Homo sapiens
  Heavy chain CDR3 for antibody 5405 (IGHV3-33)
ARENSTPLDY

SEQ ID NO: 10811 - protein, 8 aa, Homo sapiens
  Light chain CDR3 for antibody 5406 (IGKV3-11)
LQRGNWPT

SEQ ID NO: 10812 - protein, 13 aa, Homo sapiens
  Heavy chain CDR3 for antibody 5406 (IGHV3-11)
ARDGGAAAGTWDS

SEQ ID NO: 10813 - protein, 9 aa, Homo sapiens
  Light chain CDR3 for antibody 5407 (IGKV1-6)
LQDYKSPFT

SEQ ID NO: 10814 - protein, 13 aa, Homo sapiens
  Heavy chain CDR3 for antibody 5407 (IGHV3-33)
ARDQRYSSGWYDY

SEQ ID NO: 10815 - protein, 9 aa, Homo sapiens
  Light chain CDR3 for antibody 5408 (IGKV1-39)
QQSYSSPFT

SEQ ID NO: 10816 - protein, 17 aa, Homo sapiens
  Heavy chain CDR3 for antibody 5408 (IGHV1-18)
ARDEGYDILTGYPHFDY

SEQ ID NO: 10817 - protein, 10 aa, Homo sapiens
  Light chain CDR3 for antibody 5409 (IGKV3-11)
QQRSNWPIFT

SEQ ID NO: 10818 - protein, 11 aa, Homo sapiens
  Heavy chain CDR3 for antibody 5409 (IGHV3-23)
ARDPGSITGDY

SEQ ID NO: 10819 - protein, 9 aa, Homo sapiens
  Light chain CDR3 for antibody 5410 (IGKV1-17)
LQHNSYPYT

SEQ ID NO: 10820 - protein, 15 aa, Homo sapiens
  Heavy chain CDR3 for antibody 5410 (IGHV3-23)
AKDRSGSGSYNLLDY

SEQ ID NO: 10821 - protein, 8 aa, Homo sapiens
  Light chain CDR3 for antibody 5411 (IGKV1D-13)
QQFNNYPT

SEQ ID NO: 10822 - protein, 14 aa, Homo sapiens
  Heavy chain CDR3 for antibody 5411 (IGHV4-39)
ARQDYDILTGLFDY

SEQ ID NO: 10823 - protein, 9 aa, Homo sapiens
  Light chain CDR3 for antibody 5412 (IGKV3-11)
QQRSNWMYT

SEQ ID NO: 10824 - protein, 17 aa, Homo sapiens
  Heavy chain CDR3 for antibody 5412 (IGHV1-18)
ARERYYGSGNYKYNMDV

SEQ ID NO: 10825 - protein, 9 aa, Homo sapiens
  Light chain CDR3 for antibody 5413 (IGKV1D-13)
QQFNNYPHT

SEQ ID NO: 10826 - protein, 19 aa, Homo sapiens
  Heavy chain CDR3 for antibody 5413 (IGHV3-33)
ARRRDDILTGWDYYFGMDV

SEQ ID NO: 10827 - protein, 9 aa, Homo sapiens
  Light chain CDR3 for antibody 5414 (IGKV1-33)
QQYDNLPFT

SEQ ID NO: 10828 - protein, 13 aa, Homo sapiens
  Heavy chain CDR3 for antibody 5414 (IGHV3-23)
ARAFFMVRGVIDF

SEQ ID NO: 10829 - protein, 9 aa, Homo sapiens
  Light chain CDR3 for antibody 5415 (IGKV5-2)
LQHDNFPWT

SEQ ID NO: 10830 - protein, 13 aa, Homo sapiens
  Heavy chain CDR3 for antibody 5415 (IGHV3-33)
ARVDYYNYYGLDV

SEQ ID NO: 10831 - protein, 8 aa, Homo sapiens
  Light chain CDR3 for antibody 5416 (IGKV3-11)
QQRSNWLT

SEQ ID NO: 10832 - protein, 16 aa, Homo sapiens
  Heavy chain CDR3 for antibody 5416 (IGHV1-8)
AREGTMVRGVTYAFDI

SEQ ID NO: 10833 - protein, 9 aa, Homo sapiens
  Light chain CDR3 for antibody 5417 (IGKV1-17)
LQHNSYPYT

SEQ ID NO: 10834 - protein, 19 aa, Homo sapiens
  Heavy chain CDR3 for antibody 5417 (IGHV3-33)
ARGSDYDILTGYSSDAFDI

SEQ ID NO: 10835 - protein, 8 aa, Homo sapiens
  Light chain CDR3 for antibody 5418 (IGKV1-5)
QQYNSYYT

SEQ ID NO: 10836 - protein, 9 aa, Homo sapiens
  Heavy chain CDR3 for antibody 5418 (IGHV4-59)
AREGGSGSL

SEQ ID NO: 10837 - protein, 8 aa, Homo sapiens
  Light chain CDR3 for antibody 5419 (IGKV3D-7)
QQDYNLLT

SEQ ID NO: 10838 - protein, 15 aa, Homo sapiens
  Heavy chain CDR3 for antibody 5419 (IGHV3-30)
ARRGYGSGSPDAFDL

SEQ ID NO: 10839 - protein, 10 aa, Homo sapiens
  Light chain CDR3 for antibody 5420 (IGKV1-17)
LQHNSYPMYT

SEQ ID NO: 10840 - protein, 17 aa, Homo sapiens
  Heavy chain CDR3 for antibody 5420 (IGHV3-33)
ARGEQWLGYYYYYGMDV

SEQ ID NO: 10841 - protein, 9 aa, Homo sapiens
  Light chain CDR3 for antibody 5421 (IGKV1-16)
QQYNSYPLT

SEQ ID NO: 10842 - protein, 14 aa, Homo sapiens
  Heavy chain CDR3 for antibody 5421 (IGHV3-23)
AKCDYDILTGILDY

SEQ ID NO: 10843 - protein, 10 aa, Homo sapiens
  Light chain CDR3 for antibody 5422 (IGKV1-9)
QQLDSYPMYT

SEQ ID NO: 10844 - protein, 13 aa, Homo sapiens
  Heavy chain CDR3 for antibody 5422 (IGHV3-23)
ASPFNWNDGFFDY

SEQ ID NO: 10845 - protein, 9 aa, Homo sapiens
  Light chain CDR3 for antibody 5423 (IGKV1D-13)
QQFNNYPYT

SEQ ID NO: 10846 - protein, 14 aa, Homo sapiens
  Heavy chain CDR3 for antibody 5423 (IGHV3-33)
ARGLEWGGDNWFDP

SEQ ID NO: 10847 - protein, 9 aa, Homo sapiens
  Light chain CDR3 for antibody 5424 (IGKV1-9)
QQLKSYLYT

SEQ ID NO: 10848 - protein, 18 aa, Homo sapiens
  Heavy chain CDR3 for antibody 5424 (IGHV4-59)
AREGHYYTSGSYYKAFDY

SEQ ID NO: 10849 - protein, 9 aa, Homo sapiens
  Light chain CDR3 for antibody 5425 (IGKV1D-13)
QQFNNYPHT

SEQ ID NO: 10850 - protein, 15 aa, Homo sapiens
  Heavy chain CDR3 for antibody 5425 (IGHV4-39)
ARHSGYSSGWYPFDY

SEQ ID NO: 10851 - protein, 9 aa, Homo sapiens
  Light chain CDR3 for antibody 5426 (IGKV1-16)
QQYNSYPYT

SEQ ID NO: 10852 - protein, 11 aa, Homo sapiens
  Heavy chain CDR3 for antibody 5426 (IGHV4-59)
VRERGYYGMDV

SEQ ID NO: 10853 - protein, 8 aa, Homo sapiens
  Light chain CDR3 for antibody 5427 (IGKV1D-13)
QQFNNYPT

SEQ ID NO: 10854 - protein, 17 aa, Homo sapiens
  Heavy chain CDR3 for antibody 5427 (IGHV1-18)
ARERYYGSGIYKYAMDV

SEQ ID NO: 10855 - protein, 9 aa, Homo sapiens
  Light chain CDR3 for antibody 5428 (IGKV1-17)
LQHNSYPYT

SEQ ID NO: 10856 - protein, 11 aa, Homo sapiens
  Heavy chain CDR3 for antibody 5428 (IGHV4-59)
ARDGSWEPFDY

SEQ ID NO: 10857 - protein, 9 aa, Homo sapiens
  Light chain CDR3 for antibody 5429 (IGKV1-9)
QQLISYPLT

SEQ ID NO: 10858 - protein, 11 aa, Homo sapiens
  Heavy chain CDR3 for antibody 5429 (IGHV3-33)
AREGAVARFDY

SEQ ID NO: 10859 - protein, 10 aa, Homo sapiens
  Light chain CDR3 for antibody 5430 (IGKV1-39)
QQSYSTPMYT

SEQ ID NO: 10860 - protein, 18 aa, Homo sapiens
  Heavy chain CDR3 for antibody 5430 (IGHV3-33)
ARGYYGSGNFYKDSGMDV

SEQ ID NO: 10861 - protein, 9 aa, Homo sapiens
  Light chain CDR3 for antibody 5431 (IGKV3D-7)
QQDYNLPLT

SEQ ID NO: 10862 - protein, 16 aa, Homo sapiens
  Heavy chain CDR3 for antibody 5431 (IGHV1-24)
ATEDSSSYYYYYGMDV

SEQ ID NO: 10863 - protein, 9 aa, Homo sapiens
  Light chain CDR3 for antibody 5432 (IGKV5-2)
LQHDNFPWT

SEQ ID NO: 10864 - protein, 9 aa, Homo sapiens
  Heavy chain CDR3 for antibody 5432 (IGHV4-59)
ARGRSNFRI

SEQ ID NO: 10865 - protein, 9 aa, Homo sapiens
  Light chain CDR3 for antibody 5433 (IGKV1-9)
QQLNSYPLT

SEQ ID NO: 10866 - protein, 11 aa, Homo sapiens
  Heavy chain CDR3 for antibody 5433 (IGHV3-33)
ARDRSTGWLDY

SEQ ID NO: 10867 - protein, 9 aa, Homo sapiens
  Light chain CDR3 for antibody 5434 (IGKV1-6)
LQDYNYPYT

SEQ ID NO: 10868 - protein, 12 aa, Homo sapiens
  Heavy chain CDR3 for antibody 5434 (IGHV1-18)
AGVLFDGDYSDY

SEQ ID NO: 10869 - protein, 8 aa, Homo sapiens
  Light chain CDR3 for antibody 5435 (IGKV1-5)
QQYNSYYT

SEQ ID NO: 10870 - protein, 17 aa, Homo sapiens
  Heavy chain CDR3 for antibody 5435 (IGHV3-23)
AKDGSFYSSGWYDAFDI

SEQ ID NO: 10871 - protein, 9 aa, Homo sapiens
  Light chain CDR3 for antibody 5436 (IGKV3-20)
QQYGSSPRT

SEQ ID NO: 10872 - protein, 14 aa, Homo sapiens
  Heavy chain CDR3 for antibody 5436 (IGHV1-18)
AREGGSYFYYGVDV

SEQ ID NO: 10873 - protein, 9 aa, Homo sapiens
  Light chain CDR3 for antibody 5437 (IGKV3-20)
QQYGSSPYT

SEQ ID NO: 10874 - protein, 17 aa, Homo sapiens
  Heavy chain CDR3 for antibody 5437 (IGHV3-23)
AKERNWNDGYYYYGMDV

SEQ ID NO: 10875 - protein, 9 aa, Homo sapiens
  Light chain CDR3 for antibody 5438 (IGKV1-16)
QHYNDYPFT

SEQ ID NO: 10876 - protein, 7 aa, Homo sapiens
  Heavy chain CDR3 for antibody 5438 (IGHV3-33)
ARELVDY

SEQ ID NO: 10877 - protein, 9 aa, Homo sapiens
  Light chain CDR3 for antibody 5439 (IGKV3D-20)
QQYGSSPYT

SEQ ID NO: 10878 - protein, 18 aa, Homo sapiens
  Heavy chain CDR3 for antibody 5439 (IGHV3-11)
ARDGYFSGWNYYYFGMDV

SEQ ID NO: 10879 - protein, 9 aa, Homo sapiens
  Light chain CDR3 for antibody 5440 (IGKV3-20)
QQYGSSPYT

SEQ ID NO: 10880 - protein, 11 aa, Homo sapiens
  Heavy chain CDR3 for antibody 5440 (IGHV3-33)
ARDRATAGLDY

SEQ ID NO: 10881 - protein, 9 aa, Homo sapiens
  Light chain CDR3 for antibody 5441 (IGKV1-9)
QQLNGYPFT

SEQ ID NO: 10882 - protein, 18 aa, Homo sapiens
  Heavy chain CDR3 for antibody 5441 (IGHV1-46)
ARDGDYVWGSYRSDWFDP

SEQ ID NO: 10883 - protein, 9 aa, Homo sapiens
  Light chain CDR3 for antibody 5442 (IGKV3-15)
QQYNNWPLT

SEQ ID NO: 10884 - protein, 21 aa, Homo sapiens
  Heavy chain CDR3 for antibody 5442 (IGHV4-59)
AAGVLLWFGEPNYYYYYGMDV

SEQ ID NO: 10885 - protein, 9 aa, Homo sapiens
  Light chain CDR3 for antibody 5443 (IGKV3D-7)
QQDYEFPLT

SEQ ID NO: 10886 - protein, 17 aa, Homo sapiens
  Heavy chain CDR3 for antibody 5443 (IGHV1-24)
ATEGYDILPGYYNVLDY

SEQ ID NO: 10887 - protein, 9 aa, Homo sapiens
  Light chain CDR3 for antibody 5444 (IGKV1-17)
LQHNGYPLT

SEQ ID NO: 10888 - protein, 12 aa, Homo sapiens
  Heavy chain CDR3 for antibody 5444 (IGHV3-33)
ARVDAAAPYFDY

SEQ ID NO: 10889 - protein, 9 aa, Homo sapiens
  Light chain CDR3 for antibody 5445 (IGKV1-9)
QQLISYPLT

SEQ ID NO: 10890 - protein, 9 aa, Homo sapiens
  Heavy chain CDR3 for antibody 5445 (IGHV3-33)
ARELAYFDY

SEQ ID NO: 10891 - protein, 9 aa, Homo sapiens
  Light chain CDR3 for antibody 5446 (IGKV1-27)
QKYNSAPYT

SEQ ID NO: 10892 - protein, 17 aa, Homo sapiens
  Heavy chain CDR3 for antibody 5446 (IGHV3-33)
ARDSYDILTGYYKPFDY

SEQ ID NO: 10893 - protein, 9 aa, Homo sapiens
  Light chain CDR3 for antibody 5447 (IGKV2-30)
MQGTHWPLT

SEQ ID NO: 10894 - protein, 12 aa, Homo sapiens
  Heavy chain CDR3 for antibody 5447 (IGHV3-33)
AREGTRWVYFDY

SEQ ID NO: 10895 - protein, 9 aa, Homo sapiens
  Light chain CDR3 for antibody 5448 (IGKV1-39)
QQSYSTPLT

SEQ ID NO: 10896 - protein, 17 aa, Homo sapiens
  Heavy chain CDR3 for antibody 5448 (IGHV3-23)
AKDRPVTTLYYYFGMDV

SEQ ID NO: 10897 - protein, 10 aa, Homo sapiens
  Light chain CDR3 for antibody 5449 (IGKV1-17)
LQHNSYPMYT

SEQ ID NO: 10898 - protein, 21 aa, Homo sapiens
  Heavy chain CDR3 for antibody 5449 (IGHV3-23)
AKDIDYYGSGSYPLYYYGMDV

SEQ ID NO: 10899 - protein, 9 aa, Homo sapiens
  Light chain CDR3 for antibody 5450 (IGKV2-30)
MQGTHWPLT

SEQ ID NO: 10900 - protein, 17 aa, Homo sapiens
  Heavy chain CDR3 for antibody 5450 (IGHV3-23)
AKDGIGELSYYYYGMDV

SEQ ID NO: 10901 - protein, 8 aa, Homo sapiens
  Light chain CDR3 for antibody 5451 (IGKV1D-13)
QQFNNYPT

SEQ ID NO: 10902 - protein, 14 aa, Homo sapiens
  Heavy chain CDR3 for antibody 5451 (IGHV3-33)
ARDKSYPLSYGMDV

SEQ ID NO: 10903 - protein, 9 aa, Homo sapiens
  Light chain CDR3 for antibody 5452 (IGKV3-11)
QQRSNWPRT

SEQ ID NO: 10904 - protein, 12 aa, Homo sapiens
  Heavy chain CDR3 for antibody 5452 (IGHV1-18)
ARVLFDGDYFDY

SEQ ID NO: 10905 - protein, 9 aa, Homo sapiens
  Light chain CDR3 for antibody 5453 (IGKV1D-16)
QQYNSYPLT

SEQ ID NO: 10906 - protein, 12 aa, Homo sapiens
  Heavy chain CDR3 for antibody 5453 (IGHV3-33)
ARNYDILDYFDY

SEQ ID NO: 10907 - protein, 9 aa, Homo sapiens
  Light chain CDR3 for antibody 5454 (IGKV3D-20)
QQYGSSPYT

SEQ ID NO: 10908 - protein, 9 aa, Homo sapiens
  Heavy chain CDR3 for antibody 5454 (IGHV4-34)
ARDLYYFDY

SEQ ID NO: 10909 - protein, 8 aa, Homo sapiens
  Light chain CDR3 for antibody 5455 (IGKV3-20)
QQYGSSLT

SEQ ID NO: 10910 - protein, 14 aa, Homo sapiens
  Heavy chain CDR3 for antibody 5455 (IGHV3-23)
AKSRIVGALYYFDY

SEQ ID NO: 10911 - protein, 10 aa, Homo sapiens
  Light chain CDR3 for antibody 5456 (IGKV1-17)
LQHNSYPMYT

SEQ ID NO: 10912 - protein, 13 aa, Homo sapiens
  Heavy chain CDR3 for antibody 5456 (IGHV3-33)
ARRYRSGWYPFDY

SEQ ID NO: 10913 - protein, 9 aa, Homo sapiens
  Light chain CDR3 for antibody 5457 (IGKV2D-28)
MQVLQTPFT

SEQ ID NO: 10914 - protein, 14 aa, Homo sapiens
  Heavy chain CDR3 for antibody 5457 (IGHV4-39)
ARQDYDILTGLFDY

SEQ ID NO: 10915 - protein, 10 aa, Homo sapiens
  Light chain CDR3 for antibody 5458 (IGKV1-17)
LQHNSYPMYT

SEQ ID NO: 10916 - protein, 14 aa, Homo sapiens
  Heavy chain CDR3 for antibody 5458 (IGHV3-33)
AREGYSSNWYDFDY

SEQ ID NO: 10917 - protein, 9 aa, Homo sapiens
  Light chain CDR3 for antibody 5459 (IGKV1-6)
LQDYNYPWT

SEQ ID NO: 10918 - protein, 11 aa, Homo sapiens
  Heavy chain CDR3 for antibody 5459 (IGHV3-33)
ARDRATAGLDY

SEQ ID NO: 10919 - protein, 8 aa, Homo sapiens
  Light chain CDR3 for antibody 5460 (IGKV3D-7)
QQDYNLLT

SEQ ID NO: 10920 - protein, 18 aa, Homo sapiens
  Heavy chain CDR3 for antibody 5460 (IGHV1-46)
ARDLTGRTENYYYYGMDV

SEQ ID NO: 10921 - protein, 9 aa, Homo sapiens
  Light chain CDR3 for antibody 5461 (IGKV2-30)
MQGTHWPLT

SEQ ID NO: 10922 - protein, 20 aa, Homo sapiens
  Heavy chain CDR3 for antibody 5461 (IGHV3-23)
AKGMGGLRYFDWPHYYGMDV

SEQ ID NO: 10923 - protein, 9 aa, Homo sapiens
  Light chain CDR3 for antibody 5462 (IGKV3-20)
QQYGSSPRT

SEQ ID NO: 10924 - protein, 14 aa, Homo sapiens
  Heavy chain CDR3 for antibody 5462 (IGHV3-20)
ARDRGSSGHDAFDI

SEQ ID NO: 10925 - protein, 9 aa, Homo sapiens
  Light chain CDR3 for antibody 5463 (IGKV1-16)
QHYNDYPFT

SEQ ID NO: 10926 - protein, 13 aa, Homo sapiens
  Heavy chain CDR3 for antibody 5463 (IGHV4-59)
ARDAGYSSSWFDY

SEQ ID NO: 10927 - protein, 8 aa, Homo sapiens
  Light chain CDR3 for antibody 5464 (IGKV3-15)
QQYNNWPT

SEQ ID NO: 10928 - protein, 12 aa, Homo sapiens
  Heavy chain CDR3 for antibody 5464 (IGHV4-61)
ARVYSSGWLFDY

SEQ ID NO: 10929 - protein, 9 aa, Homo sapiens
  Light chain CDR3 for antibody 5465 (IGKV6-21)
HQSSSLPYT

SEQ ID NO: 10930 - protein, 18 aa, Homo sapiens
  Heavy chain CDR3 for antibody 5465 (IGHV3-23)
AKDGDYFGSGSYWGYFDL

SEQ ID NO: 10931 - protein, 9 aa, Homo sapiens
  Light chain CDR3 for antibody 5466 (IGKV3D-7)
QQDYNLPFT

SEQ ID NO: 10932 - protein, 15 aa, Homo sapiens
  Heavy chain CDR3 for antibody 5466 (IGHV3-33)
ARDRRGIAAAGTGDY

SEQ ID NO: 10933 - protein, 9 aa, Homo sapiens
  Light chain CDR3 for antibody 5467 (IGKV3D-7)
QQDYNLPLT

SEQ ID NO: 10934 - protein, 11 aa, Homo sapiens
  Heavy chain CDR3 for antibody 5467 (IGHV3-33)
ARDRATATVDY

SEQ ID NO: 10935 - protein, 9 aa, Homo sapiens
  Light chain CDR3 for antibody 5468 (IGKV2-30)
MQGTHWPLT

SEQ ID NO: 10936 - protein, 17 aa, Homo sapiens
  Heavy chain CDR3 for antibody 5468 (IGHV3-23)
AKDYDILTGYSHNWFDP

SEQ ID NO: 10937 - protein, 9 aa, Homo sapiens
  Light chain CDR3 for antibody 5469 (IGKV1-6)
LQVYSYPWT

SEQ ID NO: 10938 - protein, 14 aa, Homo sapiens
  Heavy chain CDR3 for antibody 5469 (IGHV3-33)
ARGAAAGNFYGLDV

SEQ ID NO: 10939 - protein, 9 aa, Homo sapiens
  Light chain CDR3 for antibody 5470 (IGKV1-16)
QHYNDYPFT

SEQ ID NO: 10940 - protein, 13 aa, Homo sapiens
  Heavy chain CDR3 for antibody 5470 (IGHV3-53)
ARSGSYWGYYFDY

SEQ ID NO: 10941 - protein, 9 aa, Homo sapiens
  Light chain CDR3 for antibody 5471 (IGKV3D-7)
QQDYNLPWT

SEQ ID NO: 10942 - protein, 18 aa, Homo sapiens
  Heavy chain CDR3 for antibody 5471 (IGHV1-18)
ARDPNYYGSGSYYNYFDY

SEQ ID NO: 10943 - protein, 10 aa, Homo sapiens
  Light chain CDR3 for antibody 5472 (IGKV1-17)
LQHNSYPMYT

SEQ ID NO: 10944 - protein, 17 aa, Homo sapiens
  Heavy chain CDR3 for antibody 5472 (IGHV1-18)
ARDRAFTMVRGVPPFDY

SEQ ID NO: 10945 - protein, 8 aa, Homo sapiens
  Light chain CDR3 for antibody 5473 (IGKV3D-7)
QQDYNLLT

SEQ ID NO: 10946 - protein, 12 aa, Homo sapiens
  Heavy chain CDR3 for antibody 5473 (IGHV3-33)
ASRDILTGYLGY

SEQ ID NO: 10947 - protein, 9 aa, Homo sapiens
  Light chain CDR3 for antibody 5474 (IGKV1D-13)
QQFNNYPHT

SEQ ID NO: 10948 - protein, 13 aa, Homo sapiens
  Heavy chain CDR3 for antibody 5474 (IGHV3-33)
ARALYSSSWPGDY

SEQ ID NO: 10949 - protein, 9 aa, Homo sapiens
  Light chain CDR3 for antibody 5475 (IGKV1D-16)
QQFNNYPRT

SEQ ID NO: 10950 - protein, 10 aa, Homo sapiens
  Heavy chain CDR3 for antibody 5475 (IGHV1-18)
AREQRLGFDY

SEQ ID NO: 10951 - protein, 8 aa, Homo sapiens
  Light chain CDR3 for antibody 5476 (IGKV6-21)
HQSSSLPT

SEQ ID NO: 10952 - protein, 13 aa, Homo sapiens
  Heavy chain CDR3 for antibody 5476 (IGHV3-53)
ARSGSYWGYYFDY

SEQ ID NO: 10953 - protein, 9 aa, Homo sapiens
  Light chain CDR3 for antibody 5477 (IGKV1-6)
QQFNNYPYT

SEQ ID NO: 10954 - protein, 18 aa, Homo sapiens
  Heavy chain CDR3 for antibody 5477 (IGHV4-59)
ARERGNWNDVDYYYGMDV

SEQ ID NO: 10955 - protein, 9 aa, Homo sapiens
  Light chain CDR3 for antibody 5478 (IGKV1-16)
QHYNDYPFT

SEQ ID NO: 10956 - protein, 17 aa, Homo sapiens
  Heavy chain CDR3 for antibody 5478 (IGHV3-33)
ARGFSGYDGYYYYGMDV

SEQ ID NO: 10957 - protein, 9 aa, Homo sapiens
  Light chain CDR3 for antibody 5479 (IGKV1-39)
QQSYSTPLT

SEQ ID NO: 10958 - protein, 13 aa, Homo sapiens
  Heavy chain CDR3 for antibody 5479 (IGHV1-24)
ATGYSINWYEFDY

SEQ ID NO: 10959 - protein, 9 aa, Homo sapiens
  Light chain CDR3 for antibody 5480 (IGKV3-20)
QQYGSSPYT

SEQ ID NO: 10960 - protein, 16 aa, Homo sapiens
  Heavy chain CDR3 for antibody 5480 (IGHV4-39)
ARHPLIWTGYPNWFDP

SEQ ID NO: 10961 - protein, 9 aa, Homo sapiens
  Light chain CDR3 for antibody 5481 (IGKV3-20)
QQFGRSPRT

SEQ ID NO: 10962 - protein, 12 aa, Homo sapiens
  Heavy chain CDR3 for antibody 5481 (IGHV1-46)
ARGLTGDHAVDI

SEQ ID NO: 10963 - protein, 8 aa, Homo sapiens
  Light chain CDR3 for antibody 5482 (IGKV1-5)
QQYNSYYT

SEQ ID NO: 10964 - protein, 11 aa, Homo sapiens
  Heavy chain CDR3 for antibody 5482 (IGHV3-13)
AREAIIGPFDY

SEQ ID NO: 10965 - protein, 9 aa, Homo sapiens
  Light chain CDR3 for antibody 5483 (IGKV3D-7)
QQDYNLPLT

SEQ ID NO: 10966 - protein, 19 aa, Homo sapiens
  Heavy chain CDR3 for antibody 5483 (IGHV3-33)
TRDPHYDILTGYAYYGMDV

SEQ ID NO: 10967 - protein, 10 aa, Homo sapiens
  Light chain CDR3 for antibody 5484 (IGKV1-17)
LQHNSYPMYT

SEQ ID NO: 10968 - protein, 10 aa, Homo sapiens
  Heavy chain CDR3 for antibody 5484 (IGHV3-33)
ARDGSGSQPI

SEQ ID NO: 10969 - protein, 9 aa, Homo sapiens
  Light chain CDR3 for antibody 5485 (IGKV1-33)
QQYDNLPFT

SEQ ID NO: 10970 - protein, 13 aa, Homo sapiens
  Heavy chain CDR3 for antibody 5485 (IGHV3-33)
ANTGDSYYYDMDV

SEQ ID NO: 10971 - protein, 9 aa, Homo sapiens
  Light chain CDR3 for antibody 5486 (IGKV1D-13)
QQFNNYPYT

SEQ ID NO: 10972 - protein, 17 aa, Homo sapiens
  Heavy chain CDR3 for antibody 5486 (IGHV3-33)
AREGYYYGSGSYHFFDY

SEQ ID NO: 10973 - protein, 9 aa, Homo sapiens
  Light chain CDR3 for antibody 5487 (IGKV1-39)
QQSYSTPLT

SEQ ID NO: 10974 - protein, 17 aa, Homo sapiens
  Heavy chain CDR3 for antibody 5487 (IGHV3-23)
AKDYDILTGYSHNWFDP

SEQ ID NO: 10975 - protein, 9 aa, Homo sapiens
  Light chain CDR3 for antibody 5488 (IGKV1-16)
QQYNSYPYT

SEQ ID NO: 10976 - protein, 16 aa, Homo sapiens
  Heavy chain CDR3 for antibody 5488 (IGHV1-24)
ATDGYYYGSGSYLFDY

SEQ ID NO: 10977 - protein, 9 aa, Homo sapiens
  Light chain CDR3 for antibody 5489 (IGKV3-15)
QQYNNWPRT

SEQ ID NO: 10978 - protein, 17 aa, Homo sapiens
  Heavy chain CDR3 for antibody 5489 (IGHV3-33)
VREGGLLWVGELSLFDY

SEQ ID NO: 10979 - protein, 10 aa, Homo sapiens
  Light chain CDR3 for antibody 5490 (IGKV3-11)
QQRSNWPALT

SEQ ID NO: 10980 - protein, 11 aa, Homo sapiens
  Heavy chain CDR3 for antibody 5490 (IGHV3-23)
AKKVYDYGSDY

SEQ ID NO: 10981 - protein, 10 aa, Homo sapiens
  Light chain CDR3 for antibody 5491 (IGKV1-39)
QQSYSTPMYT

SEQ ID NO: 10982 - protein, 15 aa, Homo sapiens
  Heavy chain CDR3 for antibody 5491 (IGHV4-59)
ARDLGHYYGSVSIDY

SEQ ID NO: 10983 - protein, 9 aa, Homo sapiens
  Light chain CDR3 for antibody 5492 (IGKV3-15)
QQYNNWPYT

SEQ ID NO: 10984 - protein, 13 aa, Homo sapiens
  Heavy chain CDR3 for antibody 5492 (IGHV3-33)
ARQSSGWFDAFDI

SEQ ID NO: 10985 - protein, 8 aa, Homo sapiens
  Light chain CDR3 for antibody 5493 (IGKV6-21)
HQSSSLPT

SEQ ID NO: 10986 - protein, 17 aa, Homo sapiens
  Heavy chain CDR3 for antibody 5493 (IGHV1-18)
ARDRAFTMVRGVPPFDY

SEQ ID NO: 10987 - protein, 9 aa, Homo sapiens
  Light chain CDR3 for antibody 5494 (IGKV1D-16)
QQYNSYPLT

SEQ ID NO: 10988 - protein, 11 aa, Homo sapiens
  Heavy chain CDR3 for antibody 5494 (IGHV3-33)
ASWDILTGSGY

SEQ ID NO: 10989 - protein, 10 aa, Homo sapiens
  Light chain CDR3 for antibody 5495 (IGKV3-11)
QQRSNWPMYT

SEQ ID NO: 10990 - protein, 14 aa, Homo sapiens
  Heavy chain CDR3 for antibody 5495 (IGHV3-20)
ARDGGSTCYDWFDP

SEQ ID NO: 10991 - protein, 9 aa, Homo sapiens
  Light chain CDR3 for antibody 5496 (IGKV1-9)
QQLKSYLYT

SEQ ID NO: 10992 - protein, 13 aa, Homo sapiens
  Heavy chain CDR3 for antibody 5496 (IGHV3-33)
ARDWGYSHGYFDY

SEQ ID NO: 10993 - protein, 10 aa, Homo sapiens
  Light chain CDR3 for antibody 5497 (IGKV1-9)
QQLDSYPMYT

SEQ ID NO: 10994 - protein, 15 aa, Homo sapiens
  Heavy chain CDR3 for antibody 5497 (IGHV3-20)
ARDRGSSGWRDWFDP

SEQ ID NO: 10995 - protein, 9 aa, Homo sapiens
  Light chain CDR3 for antibody 5498 (IGKV1-16)
QQYNSYPLT

SEQ ID NO: 10996 - protein, 17 aa, Homo sapiens
  Heavy chain CDR3 for antibody 5498 (IGHV3-23)
AREGWFGELWGYYGMDV

SEQ ID NO: 10997 - protein, 9 aa, Homo sapiens
  Light chain CDR3 for antibody 5499 (IGKV1-33)
QQYDNLPFT

SEQ ID NO: 10998 - protein, 17 aa, Homo sapiens
  Heavy chain CDR3 for antibody 5499 (IGHV3-33)
ARVYYDILTGYSPAFDI

SEQ ID NO: 10999 - protein, 9 aa, Homo sapiens
  Light chain CDR3 for antibody 5500 (IGKV3-20)
QQYGSSPYT

SEQ ID NO: 11000 - protein, 10 aa, Homo sapiens
  Heavy chain CDR3 for antibody 5500 (IGHV3-33)
ARDLRADFDY

SEQ ID NO: 11001 - protein, 9 aa, Homo sapiens
  Light chain CDR3 for antibody 5501 (IGKV1-6)
LQDYNYPFT

SEQ ID NO: 11002 - protein, 18 aa, Homo sapiens
  Heavy chain CDR3 for antibody 5501 (IGHV4-59)
AREGHYYTSGGYYKAFDY

SEQ ID NO: 11003 - protein, 9 aa, Homo sapiens
  Light chain CDR3 for antibody 5502 (IGKV1-17)
LQHNSYPWT

SEQ ID NO: 11004 - protein, 18 aa, Homo sapiens
  Heavy chain CDR3 for antibody 5502 (IGHV1-24)
ATGLRYFDWPIISNLFDY

SEQ ID NO: 11005 - protein, 9 aa, Homo sapiens
  Light chain CDR3 for antibody 5503 (IGKV1-27)
QKYNSAPYT

SEQ ID NO: 11006 - protein, 14 aa, Homo sapiens
  Heavy chain CDR3 for antibody 5503 (IGHV3-23)
AKDDIVRATGAFDI

SEQ ID NO: 11007 - protein, 9 aa, Homo sapiens
  Light chain CDR3 for antibody 5504 (IGKV1-27)
QKYNSAPYT

SEQ ID NO: 11008 - protein, 11 aa, Homo sapiens
  Heavy chain CDR3 for antibody 5504 (IGHV3-33)
ARDRSTGWLDY

SEQ ID NO: 11009 - protein, 9 aa, Homo sapiens
  Light chain CDR3 for antibody 5505 (IGKV2-30)
MQGTHWPLT

SEQ ID NO: 11010 - protein, 11 aa, Homo sapiens
  Heavy chain CDR3 for antibody 5505 (IGHV3-33)
ARDILTGFLDH

SEQ ID NO: 11011 - protein, 10 aa, Homo sapiens
  Light chain CDR3 for antibody 5506 (IGKV3-11)
QQRSNWPIWT

SEQ ID NO: 11012 - protein, 12 aa, Homo sapiens
  Heavy chain CDR3 for antibody 5506 (IGHV1-46)
ARGLTGDHAFDI

SEQ ID NO: 11013 - protein, 9 aa, Homo sapiens
  Light chain CDR3 for antibody 5507 (IGKV1-27)
QKYNSAPHT

SEQ ID NO: 11014 - protein, 17 aa, Homo sapiens
  Heavy chain CDR3 for antibody 5507 (IGHV3-33)
ARGEQWLGYYYYYGMDV

SEQ ID NO: 11015 - protein, 9 aa, Homo sapiens
  Light chain CDR3 for antibody 5508 (IGKV3-11)
QQRSNWMYT

SEQ ID NO: 11016 - protein, 17 aa, Homo sapiens
  Heavy chain CDR3 for antibody 5508 (IGHV3-33)
ARAYYDILTGYSYYFDY

SEQ ID NO: 11017 - protein, 9 aa, Homo sapiens
  Light chain CDR3 for antibody 5509 (IGKV1-17)
LQHNSYPYT

SEQ ID NO: 11018 - protein, 10 aa, Homo sapiens
  Heavy chain CDR3 for antibody 5509 (IGHV3-33)
ARENSTPLDY

SEQ ID NO: 11019 - protein, 9 aa, Homo sapiens
  Light chain CDR3 for antibody 5510 (IGKV3D-20)
QQYGYSPLT

SEQ ID NO: 11020 - protein, 18 aa, Homo sapiens
  Heavy chain CDR3 for antibody 5510 (IGHV3-23)
AKPDYYGSGSYYNVPFDY

SEQ ID NO: 11021 - protein, 9 aa, Homo sapiens
  Light chain CDR3 for antibody 5511 (IGKV3D-7)
QQDSNLPYT

SEQ ID NO: 11022 - protein, 11 aa, Homo sapiens
  Heavy chain CDR3 for antibody 5511 (IGHV4-59)
ARSLRYSFFDY

SEQ ID NO: 11023 - protein, 10 aa, Homo sapiens
  Light chain CDR3 for antibody 5512 (IGKV1-39)
QQSYSTPMYT

SEQ ID NO: 11024 - protein, 11 aa, Homo sapiens
  Heavy chain CDR3 for antibody 5512 (IGHV3-33)
ARAGIAALFDY

SEQ ID NO: 11025 - protein, 9 aa, Homo sapiens
  Light chain CDR3 for antibody 5513 (IGKV3-15)
QQYNNWPLT

SEQ ID NO: 11026 - protein, 15 aa, Homo sapiens
  Heavy chain CDR3 for antibody 5513 (IGHV4-39)
ARGYYYGSGSFPVDY

SEQ ID NO: 11027 - protein, 9 aa, Homo sapiens
  Light chain CDR3 for antibody 5514 (IGKV1-9)
QQLNSYPRT

SEQ ID NO: 11028 - protein, 11 aa, Homo sapiens
  Heavy chain CDR3 for antibody 5514 (IGHV3-33)
ARDRVLAPFDY

SEQ ID NO: 11029 - protein, 9 aa, Homo sapiens
  Light chain CDR3 for antibody 5515 (IGKV1-39)
QQSYSTPYT

SEQ ID NO: 11030 - protein, 13 aa, Homo sapiens
  Heavy chain CDR3 for antibody 5515 (IGHV3-33)
ARDGYSYGPYFDY

SEQ ID NO: 11031 - protein, 9 aa, Homo sapiens
  Light chain CDR3 for antibody 5516 (IGKV2-30)
MQGTHWPLT

SEQ ID NO: 11032 - protein, 17 aa, Homo sapiens
  Heavy chain CDR3 for antibody 5516 (IGHV1-24)
ATEGYDILPGYYNVLDY

SEQ ID NO: 11033 - protein, 8 aa, Homo sapiens
  Light chain CDR3 for antibody 5517 (IGKV3D-7)
QQDYNLLT

SEQ ID NO: 11034 - protein, 19 aa, Homo sapiens
  Heavy chain CDR3 for antibody 5517 (IGHV5-51)
ARHGEKGKRITMVRGSLDV

SEQ ID NO: 11035 - protein, 10 aa, Homo sapiens
  Light chain CDR3 for antibody 5518 (IGKV3-11)
QQRSNWPIFT

SEQ ID NO: 11036 - protein, 17 aa, Homo sapiens
  Heavy chain CDR3 for antibody 5518 (IGHV4-34)
AGLRFFDWLFDYYGMDV

SEQ ID NO: 11037 - protein, 10 aa, Homo sapiens
  Light chain CDR3 for antibody 5519 (IGKV3-11)
QQRSNWPIFT

SEQ ID NO: 11038 - protein, 12 aa, Homo sapiens
  Heavy chain CDR3 for antibody 5519 (IGHV3-13)
ARDRGYSGYFDY

SEQ ID NO: 11039 - protein, 9 aa, Homo sapiens
  Light chain CDR3 for antibody 5520 (IGKV3-15)
QQYNNWPRT

SEQ ID NO: 11040 - protein, 14 aa, Homo sapiens
  Heavy chain CDR3 for antibody 5520 (IGHV3-33)
ARDGYDFLTGPFDY

SEQ ID NO: 11041 - protein, 9 aa, Homo sapiens
  Light chain CDR3 for antibody 5521 (IGKV1-6)
LQDYNYPYT

SEQ ID NO: 11042 - protein, 9 aa, Homo sapiens
  Heavy chain CDR3 for antibody 5521 (IGHV3-20)
ATWGSAFDV

SEQ ID NO: 11043 - protein, 9 aa, Homo sapiens
  Light chain CDR3 for antibody 5522 (IGKV1D-13)
QQFNNYPYT

SEQ ID NO: 11044 - protein, 13 aa, Homo sapiens
  Heavy chain CDR3 for antibody 5522 (IGHV3-33)
ARGRGYNYGYGDY

SEQ ID NO: 11045 - protein, 9 aa, Homo sapiens
  Light chain CDR3 for antibody 5523 (IGKV1-9)
QQLNSYPWT

SEQ ID NO: 11046 - protein, 19 aa, Homo sapiens
  Heavy chain CDR3 for antibody 5523 (IGHV3-33)
ARDSGYSGYDYYYYYGMDV

SEQ ID NO: 11047 - protein, 9 aa, Homo sapiens
  Light chain CDR3 for antibody 5524 (IGKV1D-13)
QQFNNYPST

SEQ ID NO: 11048 - protein, 12 aa, Homo sapiens
  Heavy chain CDR3 for antibody 5524 (IGHV3-23)
AKEGIVGVPFDY

SEQ ID NO: 11049 - protein, 9 aa, Homo sapiens
  Light chain CDR3 for antibody 5525 (IGKV3D-11)
QQRSNWPYT

SEQ ID NO: 11050 - protein, 11 aa, Homo sapiens
  Heavy chain CDR3 for antibody 5525 (IGHV3-64)
ARERGSYAFDI

SEQ ID NO: 11051 - protein, 8 aa, Homo sapiens
  Light chain CDR3 for antibody 5526 (IGKV3-11)
QQRSNWLT

SEQ ID NO: 11052 - protein, 20 aa, Homo sapiens
  Heavy chain CDR3 for antibody 5526 (IGHV1-f)
ATGLITFVRGVILTYRSFDY

SEQ ID NO: 11053 - protein, 9 aa, Homo sapiens
  Light chain CDR3 for antibody 5527 (IGKV1-39)
QQSYSTPLT

SEQ ID NO: 11054 - protein, 13 aa, Homo sapiens
  Heavy chain CDR3 for antibody 5527 (IGHV1-18)
ARGGGVRGAPLDY

SEQ ID NO: 11055 - protein, 10 aa, Homo sapiens
  Light chain CDR3 for antibody 5528 (IGKV1-39)
QQSYSTPMYT

SEQ ID NO: 11056 - protein, 15 aa, Homo sapiens
  Heavy chain CDR3 for antibody 5528 (IGHV1-18)
ARGYCSSTSCYYFDY

SEQ ID NO: 11057 - protein, 9 aa, Homo sapiens
  Light chain CDR3 for antibody 5529 (IGKV5-2)
LQHDNFPYT

SEQ ID NO: 11058 - protein, 16 aa, Homo sapiens
  Heavy chain CDR3 for antibody 5529 (IGHV3-33)
AREGGLIAAAGTGFDY

SEQ ID NO: 11059 - protein, 8 aa, Homo sapiens
  Light chain CDR3 for antibody 5530 (IGKV6-21)
HQSSSLPT

SEQ ID NO: 11060 - protein, 11 aa, Homo sapiens
  Heavy chain CDR3 for antibody 5530 (IGHV3-33)
AREAANWGFDY

SEQ ID NO: 11061 - protein, 10 aa, Homo sapiens
  Light chain CDR3 for antibody 5531 (IGKV1-17)
LQHNSYPMYT

SEQ ID NO: 11062 - protein, 18 aa, Homo sapiens
  Heavy chain CDR3 for antibody 5531 (IGHV3-33)
ARDRDRYGSGTYPDAIDI

SEQ ID NO: 11063 - protein, 9 aa, Homo sapiens
  Light chain CDR3 for antibody 5532 (IGKV3-11)
QQRSNWPPT

SEQ ID NO: 11064 - protein, 12 aa, Homo sapiens
  Heavy chain CDR3 for antibody 5532 (IGHV3-33)
ARDRAYRGSLDY

SEQ ID NO: 11065 - protein, 9 aa, Homo sapiens
  Light chain CDR3 for antibody 5533 (IGKV3-11)
QQRSNWPYT

SEQ ID NO: 11066 - protein, 17 aa, Homo sapiens
  Heavy chain CDR3 for antibody 5533 (IGHV3-33)
ARESLKLGIYYYYGMDV

SEQ ID NO: 11067 - protein, 9 aa, Homo sapiens
  Light chain CDR3 for antibody 5534 (IGKV1-27)
QKYNSAPYT

SEQ ID NO: 11068 - protein, 15 aa, Homo sapiens
  Heavy chain CDR3 for antibody 5534 (IGHV3-33)
ARDRVVRGVMGYFDY

SEQ ID NO: 11069 - protein, 9 aa, Homo sapiens
  Light chain CDR3 for antibody 5535 (IGKV3D-7)
QQDYNLPWT

SEQ ID NO: 11070 - protein, 17 aa, Homo sapiens
  Heavy chain CDR3 for antibody 5535 (IGHV3-23)
AKDGIGELSYYYYGMDV

SEQ ID NO: 11071 - protein, 9 aa, Homo sapiens
  Light chain CDR3 for antibody 5536 (IGKV3-15)
QQYNNWPRT

SEQ ID NO: 11072 - protein, 12 aa, Homo sapiens
  Heavy chain CDR3 for antibody 5536 (IGHV3-33)
ASRDILTGYLGY

SEQ ID NO: 11073 - protein, 10 aa, Homo sapiens
  Light chain CDR3 for antibody 5537 (IGKV1-17)
LQHNSYPMYT

SEQ ID NO: 11074 - protein, 24 aa, Homo sapiens
  Heavy chain CDR3 for antibody 5537 (IGHV3-20)
ARGRITMVRGVIINPLDYYNGMDV

SEQ ID NO: 11075 - protein, 9 aa, Homo sapiens
  Light chain CDR3 for antibody 5538 (IGKV3-11)
QQRSNWPPT

SEQ ID NO: 11076 - protein, 15 aa, Homo sapiens
  Heavy chain CDR3 for antibody 5538 (IGHV3-33)
ARAYDLPHYYYGMDV

SEQ ID NO: 11077 - protein, 9 aa, Homo sapiens
  Light chain CDR3 for antibody 5539 (IGKV1-6)
LQDYKSPFT

SEQ ID NO: 11078 - protein, 13 aa, Homo sapiens
  Heavy chain CDR3 for antibody 5539 (IGHV3-33)
ANTGDSYYYDMDV

SEQ ID NO: 11079 - protein, 9 aa, Homo sapiens
  Light chain CDR3 for antibody 5540 (IGKV3D-20)
QQYGSSPWT

SEQ ID NO: 11080 - protein, 9 aa, Homo sapiens
  Heavy chain CDR3 for antibody 5540 (IGHV3-33)
ARELGYFDF

SEQ ID NO: 11081 - protein, 9 aa, Homo sapiens
  Light chain CDR3 for antibody 5541 (IGKV3-20)
QQYGSSPYT

SEQ ID NO: 11082 - protein, 9 aa, Homo sapiens
  Heavy chain CDR3 for antibody 5541 (IGHV3-30)
ARDDYGVDV

SEQ ID NO: 11083 - protein, 9 aa, Homo sapiens
  Light chain CDR3 for antibody 5542 (IGKV3-11)
QQRSNWPYT

SEQ ID NO: 11084 - protein, 18 aa, Homo sapiens
  Heavy chain CDR3 for antibody 5542 (IGHV6-1)
ARDQYSYGPYYYYYGMDV

SEQ ID NO: 11085 - protein, 10 aa, Homo sapiens
  Light chain CDR3 for antibody 5543 (IGKV3-11)
QQRSNWPPFT

SEQ ID NO: 11086 - protein, 18 aa, Homo sapiens
  Heavy chain CDR3 for antibody 5543 (IGHV3-33)
ARERDYYGSGSYPDAFDI

SEQ ID NO: 11087 - protein, 9 aa, Homo sapiens
  Light chain CDR3 for antibody 5544 (IGKV1-6)
LQDYNYPYT

SEQ ID NO: 11088 - protein, 19 aa, Homo sapiens
  Heavy chain CDR3 for antibody 5544 (IGHV3-33)
ARDSSYYDILTGSPYGMDV

SEQ ID NO: 11089 - protein, 10 aa, Homo sapiens
  Light chain CDR3 for antibody 5545 (IGKV3-11)
QQRSNWPALT

SEQ ID NO: 11090 - protein, 7 aa, Homo sapiens
  Heavy chain CDR3 for antibody 5545 (IGHV1-46)
AREGGDY

SEQ ID NO: 11091 - protein, 9 aa, Homo sapiens
  Light chain CDR3 for antibody 5546 (IGKV3-11)
QQRSNWPPT

SEQ ID NO: 11092 - protein, 18 aa, Homo sapiens
  Heavy chain CDR3 for antibody 5546 (IGHV3-33)
ARDEYYGSGIYYNYGMDV

SEQ ID NO: 11093 - protein, 10 aa, Homo sapiens
  Light chain CDR3 for antibody 5547 (IGKV1-17)
LQHNSYPMYT

SEQ ID NO: 11094 - protein, 15 aa, Homo sapiens
  Heavy chain CDR3 for antibody 5547 (IGHV3-33)
ARRICSGGSCSLFDY

SEQ ID NO: 11095 - protein, 9 aa, Homo sapiens
  Light chain CDR3 for antibody 5548 (IGKV2D-28)
MQVLQTPFT

SEQ ID NO: 11096 - protein, 15 aa, Homo sapiens
  Heavy chain CDR3 for antibody 5548 (IGHV4-59)
ARDLGHYYGSVSIDY

SEQ ID NO: 11097 - protein, 9 aa, Homo sapiens
  Light chain CDR3 for antibody 5549 (IGKV1-39)
QQSYSTPYT

SEQ ID NO: 11098 - protein, 9 aa, Homo sapiens
  Heavy chain CDR3 for antibody 5549 (IGHV3-13)
ARDHWYFDL

SEQ ID NO: 11099 - protein, 8 aa, Homo sapiens
  Light chain CDR3 for antibody 5550 (IGKV1-5)
QQYNSYWT

SEQ ID NO: 11100 - protein, 11 aa, Homo sapiens
  Heavy chain CDR3 for antibody 5550 (IGHV4-59)
ARSLRYSVFDY

SEQ ID NO: 11101 - protein, 9 aa, Homo sapiens
  Light chain CDR3 for antibody 5551 (IGKV1-6)
LQDFHYPWT

SEQ ID NO: 11102 - protein, 11 aa, Homo sapiens
  Heavy chain CDR3 for antibody 5551 (IGHV3-33)
ARDRVLTPFDY

SEQ ID NO: 11103 - protein, 10 aa, Homo sapiens
  Light chain CDR3 for antibody 5552 (IGKV1-17)
LQHNSYPMYT

SEQ ID NO: 11104 - protein, 13 aa, Homo sapiens
  Heavy chain CDR3 for antibody 5552 (IGHV3-33)
ARKAYGDYFYFDY

SEQ ID NO: 11105 - protein, 10 aa, Homo sapiens
  Light chain CDR3 for antibody 5553 (IGKV1-39)
QQSYSTPMYT

SEQ ID NO: 11106 - protein, 17 aa, Homo sapiens
  Heavy chain CDR3 for antibody 5553 (IGHV3-33)
ARSPYDILTGYSYYFDY

SEQ ID NO: 11107 - protein, 9 aa, Homo sapiens
  Light chain CDR3 for antibody 5554 (IGKV1-6)
LQDYNYPYT

SEQ ID NO: 11108 - protein, 16 aa, Homo sapiens
  Heavy chain CDR3 for antibody 5554 (IGHV3-33)
ARGGLTGGGDYDAFDI

SEQ ID NO: 11109 - protein, 9 aa, Homo sapiens
  Light chain CDR3 for antibody 5555 (IGKV5-2)
LQHDNFPWT

SEQ ID NO: 11110 - protein, 18 aa, Homo sapiens
  Heavy chain CDR3 for antibody 5555 (IGHV3-23)
AKEGDYYSSGSYWGYFDL

SEQ ID NO: 11111 - protein, 9 aa, Homo sapiens
  Light chain CDR3 for antibody 5556 (IGKV3-20)
QQYGSSPWT

SEQ ID NO: 11112 - protein, 9 aa, Homo sapiens
  Heavy chain CDR3 for antibody 5556 (IGHV4-59)
ARGGVHFDS

SEQ ID NO: 11113 - protein, 9 aa, Homo sapiens
  Light chain CDR3 for antibody 5557 (IGKV1D-13)
QQFNNYPYT

SEQ ID NO: 11114 - protein, 13 aa, Homo sapiens
  Heavy chain CDR3 for antibody 5557 (IGHV4-4)
ARERGIAAAGPDY

SEQ ID NO: 11115 - protein, 10 aa, Homo sapiens
  Light chain CDR3 for antibody 5558 (IGKV3-20)
QQRSNWPPFT

SEQ ID NO: 11116 - protein, 18 aa, Homo sapiens
  Heavy chain CDR3 for antibody 5558 (IGHV1-46)
ARDLTGRTENYYYYGMDV

SEQ ID NO: 11117 - protein, 9 aa, Homo sapiens
  Light chain CDR3 for antibody 5559 (IGKV1D-16)
QQYDSYPWT

SEQ ID NO: 11118 - protein, 10 aa, Homo sapiens
  Heavy chain CDR3 for antibody 5559 (IGHV3-33)
ARDVVVYFDY

SEQ ID NO: 11119 - protein, 9 aa, Homo sapiens
  Light chain CDR3 for antibody 5560 (IGKV2-30)
MQGTHWPLT

SEQ ID NO: 11120 - protein, 19 aa, Homo sapiens
  Heavy chain CDR3 for antibody 5560 (IGHV3-33)
ARGPYYDILTGYGYYGMDV

SEQ ID NO: 11121 - protein, 9 aa, Homo sapiens
  Light chain CDR3 for antibody 5561 (IGKV1-27)
QKYNSAPYT

SEQ ID NO: 11122 - protein, 17 aa, Homo sapiens
  Heavy chain CDR3 for antibody 5561 (IGHV1-18)
ARDRAFTMVRGVPPFDY

SEQ ID NO: 11123 - protein, 9 aa, Homo sapiens
  Light chain CDR3 for antibody 5562 (IGKV1-6)
LQDYNYPWT

SEQ ID NO: 11124 - protein, 18 aa, Homo sapiens
  Heavy chain CDR3 for antibody 5562 (IGHV3-23)
AKERGYYGSGSYSNWFDP

SEQ ID NO: 11125 - protein, 9 aa, Homo sapiens
  Light chain CDR3 for antibody 5563 (IGKV3-11)
QQRSNWPPT

SEQ ID NO: 11126 - protein, 11 aa, Homo sapiens
  Heavy chain CDR3 for antibody 5563 (IGHV3-33)
AREGAVARFDY

SEQ ID NO: 11127 - protein, 10 aa, Homo sapiens
  Light chain CDR3 for antibody 5564 (IGKV3-11)
QQRSNWPIFT

SEQ ID NO: 11128 - protein, 15 aa, Homo sapiens
  Heavy chain CDR3 for antibody 5564 (IGHV3-23)
AKEFTMVRGVITPDY

SEQ ID NO: 11129 - protein, 9 aa, Homo sapiens
  Light chain CDR3 for antibody 5565 (IGKV3D-7)
QQDYNLPFT

SEQ ID NO: 11130 - protein, 17 aa, Homo sapiens
  Heavy chain CDR3 for antibody 5565 (IGHV3-23)
AKEYCSGGSCYVYYFDY

SEQ ID NO: 11131 - protein, 9 aa, Homo sapiens
  Light chain CDR3 for antibody 5566 (IGKV1-16)
QHYNDYPFT

SEQ ID NO: 11132 - protein, 10 aa, Homo sapiens
  Heavy chain CDR3 for antibody 5566 (IGHV3-23)
AKGDRWRFDP

SEQ ID NO: 11133 - protein, 9 aa, Homo sapiens
  Light chain CDR3 for antibody 5567 (IGKV1-5)
LQDYNYPYT

SEQ ID NO: 11134 - protein, 12 aa, Homo sapiens
  Heavy chain CDR3 for antibody 5567 (IGHV3-64)
AREFPWGDYFDY

SEQ ID NO: 11135 - protein, 9 aa, Homo sapiens
  Light chain CDR3 for antibody 5568 (IGKV3-15)
QQYNNWPYT

SEQ ID NO: 11136 - protein, 12 aa, Homo sapiens
  Heavy chain CDR3 for antibody 5568 (IGHV3-33)
ARKGYDMHEFDI

SEQ ID NO: 11137 - protein, 8 aa, Homo sapiens
  Light chain CDR3 for antibody 5569 (IGKV3-11)
QQRSNWWT

SEQ ID NO: 11138 - protein, 17 aa, Homo sapiens
  Heavy chain CDR3 for antibody 5569 (IGHV4-39)
ARVLRYFDWLSHDAFDI

SEQ ID NO: 11139 - protein, 9 aa, Homo sapiens
  Light chain CDR3 for antibody 5570 (IGKV5-2)
LQHDKFPYT

SEQ ID NO: 11140 - protein, 13 aa, Homo sapiens
  Heavy chain CDR3 for antibody 5570 (IGHV3-33)
AKRYSSGWYPFDF

SEQ ID NO: 11141 - protein, 9 aa, Homo sapiens
  Light chain CDR3 for antibody 5571 (IGKV1D-13)
QQFNNYPYT

SEQ ID NO: 11142 - protein, 10 aa, Homo sapiens
  Heavy chain CDR3 for antibody 5571 (IGHV3-33)
ARDYGDYFDY

SEQ ID NO: 11143 - protein, 9 aa, Homo sapiens
  Light chain CDR3 for antibody 5572 (IGKV1-39)
QQSYSTPFT

SEQ ID NO: 11144 - protein, 15 aa, Homo sapiens
  Heavy chain CDR3 for antibody 5572 (IGHV4-59)
ARRSKYSSAWYPFDY

SEQ ID NO: 11145 - protein, 9 aa, Homo sapiens
  Light chain CDR3 for antibody 5573 (IGKV6-21)
HQSSSLPYT

SEQ ID NO: 11146 - protein, 22 aa, Homo sapiens
  Heavy chain CDR3 for antibody 5573 (IGHV3-23)
AKDDLPYYDILTHSTTTGGMDV

SEQ ID NO: 11147 - protein, 9 aa, Homo sapiens
  Light chain CDR3 for antibody 5574 (IGKV6-21)
HQSTSLPFT

SEQ ID NO: 11148 - protein, 23 aa, Homo sapiens
  Heavy chain CDR3 for antibody 5574 (IGHV1-18)
ARNLHYDILTGYFPYYFYYGMDV

SEQ ID NO: 11149 - protein, 9 aa, Homo sapiens
  Light chain CDR3 for antibody 5575 (IGKV3-20)
QQYGSSPRT

SEQ ID NO: 11150 - protein, 12 aa, Homo sapiens
  Heavy chain CDR3 for antibody 5575 (IGHV1-18)
ARKGIEVGGFDY

SEQ ID NO: 11151 - protein, 9 aa, Homo sapiens
  Light chain CDR3 for antibody 5576 (IGKV1-27)
QKYNSAPYT

SEQ ID NO: 11152 - protein, 14 aa, Homo sapiens
  Heavy chain CDR3 for antibody 5576 (IGHV3-33)
ARDGAAAALDAFDI

SEQ ID NO: 11153 - protein, 9 aa, Homo sapiens
  Light chain CDR3 for antibody 5577 (IGKV1-16)
QQYDSYPPT

SEQ ID NO: 11154 - protein, 14 aa, Homo sapiens
  Heavy chain CDR3 for antibody 5577 (IGHV3-33)
ARAVSGSSYWYFDL

SEQ ID NO: 11155 - protein, 9 aa, Homo sapiens
  Light chain CDR3 for antibody 5578 (IGKV1D-13)
QHFNNYMYT

SEQ ID NO: 11156 - protein, 12 aa, Homo sapiens
  Heavy chain CDR3 for antibody 5578 (IGHV4-39)
ARHPRYLDAFDI

SEQ ID NO: 11157 - protein, 10 aa, Homo sapiens
  Light chain CDR3 for antibody 5579 (IGKV1-6)
LQDYNYPMYT

SEQ ID NO: 11158 - protein, 13 aa, Homo sapiens
  Heavy chain CDR3 for antibody 5579 (IGHV3-11)
ARDGGAAAGTWDS

SEQ ID NO: 11159 - protein, 10 aa, Homo sapiens
  Light chain CDR3 for antibody 5580 (IGKV1-17)
LQHNSYPMYT

SEQ ID NO: 11160 - protein, 18 aa, Homo sapiens
  Heavy chain CDR3 for antibody 5580 (IGHV3-33)
ARGGVLYDILTGFYGMDV

SEQ ID NO: 11161 - protein, 8 aa, Homo sapiens
  Light chain CDR3 for antibody 5581 (IGKV1D-13)
QQFNNYPT

SEQ ID NO: 11162 - protein, 17 aa, Homo sapiens
  Heavy chain CDR3 for antibody 5581 (IGHV3-23)
AKDGSFYSSGWYDAFDI

SEQ ID NO: 11163 - protein, 9 aa, Homo sapiens
  Light chain CDR3 for antibody 5582 (IGKV3-20)
QQYGSSPYT

SEQ ID NO: 11164 - protein, 14 aa, Homo sapiens
  Heavy chain CDR3 for antibody 5582 (IGHV3-64)
ARGGGAVTGTNFDY

SEQ ID NO: 11165 - protein, 9 aa, Homo sapiens
  Light chain CDR3 for antibody 5583 (IGKV5-2)
LQHDNFPWT

SEQ ID NO: 11166 - protein, 24 aa, Homo sapiens
  Heavy chain CDR3 for antibody 5583 (IGHV1-24)
ATEAHYDILTGYYNPHYYYYGMDV

SEQ ID NO: 11167 - protein, 9 aa, Homo sapiens
  Light chain CDR3 for antibody 5584 (IGKV1-39)
QQSYSTPLT

SEQ ID NO: 11168 - protein, 12 aa, Homo sapiens
  Heavy chain CDR3 for antibody 5584 (IGHV3-11)
VRKWFGELYFDY

SEQ ID NO: 11169 - protein, 9 aa, Homo sapiens
  Light chain CDR3 for antibody 5585 (IGKV1-6)
LQDYNYPWT

SEQ ID NO: 11170 - protein, 14 aa, Homo sapiens
  Heavy chain CDR3 for antibody 5585 (IGHV3-23)
AKDRNIPAAGPFDY

SEQ ID NO: 11171 - protein, 9 aa, Homo sapiens
  Light chain CDR3 for antibody 5586 (IGKV1-27)
QKYNSAPHT

SEQ ID NO: 11172 - protein, 17 aa, Homo sapiens
  Heavy chain CDR3 for antibody 5586 (IGHV1-18)
ARDEGYDILTGYPHFDY

SEQ ID NO: 11173 - protein, 11 aa, Homo sapiens
  Light chain CDR3 for antibody 5587 (IGKV3-11)
QQRSNWPPTWT

SEQ ID NO: 11174 - protein, 19 aa, Homo sapiens
  Heavy chain CDR3 for antibody 5587 (IGHV4-59)
ARDRVVGATTYYYYYGMDV

SEQ ID NO: 11175 - protein, 9 aa, Homo sapiens
  Light chain CDR3 for antibody 5588 (IGKV3-11)
QQRSNWPYT

SEQ ID NO: 11176 - protein, 17 aa, Homo sapiens
  Heavy chain CDR3 for antibody 5588 (IGHV4-59)
ARDRELLWFGEFGGMDV

SEQ ID NO: 11177 - protein, 9 aa, Homo sapiens
  Light chain CDR3 for antibody 5589 (IGKV3D-7)
QQDYKLPLT

SEQ ID NO: 11178 - protein, 15 aa, Homo sapiens
  Heavy chain CDR3 for antibody 5589 (IGHV1-46)
ARGRFFDWLLSPFDY

SEQ ID NO: 11179 - protein, 9 aa, Homo sapiens
  Light chain CDR3 for antibody 5590 (IGKV1-27)
QKYNSAPYT

SEQ ID NO: 11180 - protein, 11 aa, Homo sapiens
  Heavy chain CDR3 for antibody 5590 (IGHV3-33)
AREGAVARFDY

SEQ ID NO: 11181 - protein, 8 aa, Homo sapiens
  Light chain CDR3 for antibody 5591 (IGKV1-5)
QQYNSYYT

SEQ ID NO: 11182 - protein, 20 aa, Homo sapiens
  Heavy chain CDR3 for antibody 5591 (IGHV3-20)
ARDLCSSTSCYGYYYYGMDV

SEQ ID NO: 11183 - protein, 9 aa, Homo sapiens
  Light chain CDR3 for antibody 5592 (IGKV1-9)
QQLNTYPWT

SEQ ID NO: 11184 - protein, 17 aa, Homo sapiens
  Heavy chain CDR3 for antibody 5592 (IGHV3-33)
ARSPYDILTGYSYYFDY

SEQ ID NO: 11185 - protein, 9 aa, Homo sapiens
  Light chain CDR3 for antibody 5593 (IGKV3D-20)
QQYGSSPLT

SEQ ID NO: 11186 - protein, 12 aa, Homo sapiens
  Heavy chain CDR3 for antibody 5593 (IGHV4-28)
ARKDSGYDWFDY

SEQ ID NO: 11187 - protein, 7 aa, Homo sapiens
  Light chain CDR3 for antibody 5594 (IGKV1-17)
LQHNSYP

SEQ ID NO: 11188 - protein, 15 aa, Homo sapiens
  Heavy chain CDR3 for antibody 5594 (IGHV1-18)
ARGYCSSTSCYYFDY

SEQ ID NO: 11189 - protein, 9 aa, Homo sapiens
  Light chain CDR3 for antibody 5595 (IGKV1-6)
LQDYNYPWT

SEQ ID NO: 11190 - protein, 12 aa, Homo sapiens
  Heavy chain CDR3 for antibody 5595 (IGHV3-33)
ARVDTAAHYFDY

SEQ ID NO: 11191 - protein, 9 aa, Homo sapiens
  Light chain CDR3 for antibody 5596 (IGKV5-2)
LQHDNFPYT

SEQ ID NO: 11192 - protein, 14 aa, Homo sapiens
  Heavy chain CDR3 for antibody 5596 (IGHV3-33)
ARDGIVRATDAFAI

SEQ ID NO: 11193 - protein, 9 aa, Homo sapiens
  Light chain CDR3 for antibody 5597 (IGKV1-27)
QKYNSAPYT

SEQ ID NO: 11194 - protein, 12 aa, Homo sapiens
  Heavy chain CDR3 for antibody 5597 (IGHV3-23)
AKESLYTPTDDY

SEQ ID NO: 11195 - protein, 8 aa, Homo sapiens
  Light chain CDR3 for antibody 5598 (IGKV1-39)
QQYNSYWT

SEQ ID NO: 11196 - protein, 26 aa, Homo sapiens
  Heavy chain CDR3 for antibody 5598 (IGHV3-11)
ARQGLLWFGDLKAYDSSGYYYGYFHH

SEQ ID NO: 11197 - protein, 9 aa, Homo sapiens
  Light chain CDR3 for antibody 5599 (IGKV1-17)
LQHNSYPWT

SEQ ID NO: 11198 - protein, 17 aa, Homo sapiens
  Heavy chain CDR3 for antibody 5599 (IGHV3-23)
AKEGSSSSWYGGLYFDY

SEQ ID NO: 11199 - protein, 9 aa, Homo sapiens
  Light chain CDR3 for antibody 5600 (IGKV2-30)
MQGTHWPLT

SEQ ID NO: 11200 - protein, 12 aa, Homo sapiens
  Heavy chain CDR3 for antibody 5600 (IGHV3-33)
ASRDILTGYLGY

SEQ ID NO: 11201 - protein, 9 aa, Homo sapiens
  Light chain CDR3 for antibody 5601 (IGKV1-6)
LQDYNHPFT

SEQ ID NO: 11202 - protein, 9 aa, Homo sapiens
  Heavy chain CDR3 for antibody 5601 (IGHV3-30)
ARDYFHFDY

SEQ ID NO: 11203 - protein, 9 aa, Homo sapiens
  Light chain CDR3 for antibody 5602 (IGKV1-33)
QQYDNLPFT

SEQ ID NO: 11204 - protein, 11 aa, Homo sapiens
  Heavy chain CDR3 for antibody 5602 (IGHV3-33)
ARDRVLTPFDY

SEQ ID NO: 11205 - protein, 9 aa, Homo sapiens
  Light chain CDR3 for antibody 5603 (IGKV3D-7)
QQDYNLPLT

SEQ ID NO: 11206 - protein, 16 aa, Homo sapiens
  Heavy chain CDR3 for antibody 5603 (IGHV3-13)
ARDRSYESYYYYGMDV

SEQ ID NO: 11207 - protein, 9 aa, Homo sapiens
  Light chain CDR3 for antibody 5604 (IGKV1-27)
QKYNSAPYT

SEQ ID NO: 11208 - protein, 12 aa, Homo sapiens
  Heavy chain CDR3 for antibody 5604 (IGHV3-11)
ARVLLWFGETDY

SEQ ID NO: 11209 - protein, 9 aa, Homo sapiens
  Light chain CDR3 for antibody 5605 (IGKV1-9)
QQLNGYPFT

SEQ ID NO: 11210 - protein, 12 aa, Homo sapiens
  Heavy chain CDR3 for antibody 5605 (IGHV4-28)
ARDLVGATPFDY

SEQ ID NO: 11211 - protein, 10 aa, Homo sapiens
  Light chain CDR3 for antibody 5606 (IGKV1-9)
QQLDSYPMYT

SEQ ID NO: 11212 - protein, 14 aa, Homo sapiens
  Heavy chain CDR3 for antibody 5606 (IGHV3-33)
ARDKTYPLSYGMDV

SEQ ID NO: 11213 - protein, 9 aa, Homo sapiens
  Light chain CDR3 for antibody 5607 (IGKV1-33)
QQYDNLPFT

SEQ ID NO: 11214 - protein, 20 aa, Homo sapiens
  Heavy chain CDR3 for antibody 5607 (IGHV1-f)
ATGLITFVRGVILTYRSFDY

SEQ ID NO: 11215 - protein, 10 aa, Homo sapiens
  Light chain CDR3 for antibody 5608 (IGKV1-39)
QQSYSTPMYT

SEQ ID NO: 11216 - protein, 15 aa, Homo sapiens
  Heavy chain CDR3 for antibody 5608 (IGHV3-33)
ARDRGWKAPGYGMDV

SEQ ID NO: 11217 - protein, 9 aa, Homo sapiens
  Light chain CDR3 for antibody 5609 (IGKV3-11)
QQRSNWMYT

SEQ ID NO: 11218 - protein, 18 aa, Homo sapiens
  Heavy chain CDR3 for antibody 5609 (IGHV3-23)
ARYHLYFGSGFGSDGMDV

SEQ ID NO: 11219 - protein, 9 aa, Homo sapiens
  Light chain CDR3 for antibody 5610 (IGKV1-6)
LQDYNYPWT

SEQ ID NO: 11220 - protein, 18 aa, Homo sapiens
  Heavy chain CDR3 for antibody 5610 (IGHV2-5)
AHYSGYSYGYPRAYGMDV

SEQ ID NO: 11221 - protein, 9 aa, Homo sapiens
  Light chain CDR3 for antibody 5611 (IGKV1-17)
LQHNSYPRT

SEQ ID NO: 11222 - protein, 15 aa, Homo sapiens
  Heavy chain CDR3 for antibody 5611 (IGHV3-30)
ARRGYGSGSPDAFDL

SEQ ID NO: 11223 - protein, 9 aa, Homo sapiens
  Light chain CDR3 for antibody 5612 (IGKV1D-16)
QQYNSYPLT

SEQ ID NO: 11224 - protein, 13 aa, Homo sapiens
  Heavy chain CDR3 for antibody 5612 (IGHV3-53)
ARDRDSSGSYFDY

SEQ ID NO: 11225 - protein, 9 aa, Homo sapiens
  Light chain CDR3 for antibody 5613 (IGKV3-20)
QQYGSSPYT

SEQ ID NO: 11226 - protein, 16 aa, Homo sapiens
  Heavy chain CDR3 for antibody 5613 (IGHV3-23)
ARNDILTASGYYGMDV

SEQ ID NO: 11227 - protein, 9 aa, Homo sapiens
  Light chain CDR3 for antibody 5614 (IGKV3-15)
QQYNNWPLT

SEQ ID NO: 11228 - protein, 17 aa, Homo sapiens
  Heavy chain CDR3 for antibody 5614 (IGHV1-24)
ATEGYDILPGYYNVLDY

SEQ ID NO: 11229 - protein, 9 aa, Homo sapiens
  Light chain CDR3 for antibody 5615 (IGKV1-16)
QQYNSYPLT

SEQ ID NO: 11230 - protein, 17 aa, Homo sapiens
  Heavy chain CDR3 for antibody 5615 (IGHV3-23)
AKGDYYGSGTYSTFFDY

SEQ ID NO: 11231 - protein, 9 aa, Homo sapiens
  Light chain CDR3 for antibody 5616 (IGKV1-17)
LQHNSYPYT

SEQ ID NO: 11232 - protein, 17 aa, Homo sapiens
  Heavy chain CDR3 for antibody 5616 (IGHV3-11)
ARAGPRYDSSGHDAFDI

SEQ ID NO: 11233 - protein, 9 aa, Homo sapiens
  Light chain CDR3 for antibody 5617 (IGKV3D-7)
QQDYNLPYT

SEQ ID NO: 11234 - protein, 17 aa, Homo sapiens
  Heavy chain CDR3 for antibody 5617 (IGHV3-33)
ARSPYDILTGYSYYFDY

SEQ ID NO: 11235 - protein, 9 aa, Homo sapiens
  Light chain CDR3 for antibody 5618 (IGKV3-11)
QQRSNWPPT

SEQ ID NO: 11236 - protein, 12 aa, Homo sapiens
  Heavy chain CDR3 for antibody 5618 (IGHV3-13)
ARDRGYSGYFDY

SEQ ID NO: 11237 - protein, 9 aa, Homo sapiens
  Light chain CDR3 for antibody 5619 (IGKV3-15)
QQYNNWPLT

SEQ ID NO: 11238 - protein, 20 aa, Homo sapiens
  Heavy chain CDR3 for antibody 5619 (IGHV3-23)
AKDREMAATSHYYYYYGMDV

SEQ ID NO: 11239 - protein, 10 aa, Homo sapiens
  Light chain CDR3 for antibody 5620 (IGKV3-11)
QQRSNWPIFT

SEQ ID NO: 11240 - protein, 17 aa, Homo sapiens
  Heavy chain CDR3 for antibody 5620 (IGHV3-23)
AKDGSFYSSGWYDAFDI

SEQ ID NO: 11241 - protein, 9 aa, Homo sapiens
  Light chain CDR3 for antibody 5621 (IGKV1-5)
QQYNTYSRT

SEQ ID NO: 11242 - protein, 14 aa, Homo sapiens
  Heavy chain CDR3 for antibody 5621 (IGHV3-33)
ARGAAAGNFYGLDV

SEQ ID NO: 11243 - protein, 9 aa, Homo sapiens
  Light chain CDR3 for antibody 5622 (IGKV1-6)
LQDYNYPRT

SEQ ID NO: 11244 - protein, 17 aa, Homo sapiens
  Heavy chain CDR3 for antibody 5622 (IGHV3-33)
ARVYYDILTGYSPAFDI

SEQ ID NO: 11245 - protein, 10 aa, Homo sapiens
  Light chain CDR3 for antibody 5623 (IGKV1-17)
LQHNSYPMYT

SEQ ID NO: 11246 - protein, 15 aa, Homo sapiens
  Heavy chain CDR3 for antibody 5623 (IGHV3-33)
ARDTGYSSSWNWFDP

SEQ ID NO: 11247 - protein, 9 aa, Homo sapiens
  Light chain CDR3 for antibody 5624 (IGKV1-9)
QQLKSYLYT

SEQ ID NO: 11248 - protein, 13 aa, Homo sapiens
  Heavy chain CDR3 for antibody 5624 (IGHV3-33)
ARRYRSGWYPFDY

SEQ ID NO: 11249 - protein, 10 aa, Homo sapiens
  Light chain CDR3 for antibody 5625 (IGKV1-27)
QKYNSAPMYT

SEQ ID NO: 11250 - protein, 13 aa, Homo sapiens
  Heavy chain CDR3 for antibody 5625 (IGHV4-39)
ARHEVMVRGVFDY

SEQ ID NO: 11251 - protein, 9 aa, Homo sapiens
  Light chain CDR3 for antibody 5626 (IGKV1-17)
LQHNSYPPT

SEQ ID NO: 11252 - protein, 19 aa, Homo sapiens
  Heavy chain CDR3 for antibody 5626 (IGHV3-9)
AKDYYDVLTGYYNDEYFQY

SEQ ID NO: 11253 - protein, 9 aa, Homo sapiens
  Light chain CDR3 for antibody 5627 (IGKV1-17)
LQHNSYPWT

SEQ ID NO: 11254 - protein, 10 aa, Homo sapiens
  Heavy chain CDR3 for antibody 5627 (IGHV3-33)
AREGLRYFDH

SEQ ID NO: 11255 - protein, 9 aa, Homo sapiens
  Light chain CDR3 for antibody 5628 (IGKV3-15)
QQDYNLPLT

SEQ ID NO: 11256 - protein, 17 aa, Homo sapiens
  Heavy chain CDR3 for antibody 5628 (IGHV3-30)
ARDLIGPLSSSWYPFDY

SEQ ID NO: 11257 - protein, 9 aa, Homo sapiens
  Light chain CDR3 for antibody 5629 (IGKV1-39)
QQSYSTPYT

SEQ ID NO: 11258 - protein, 12 aa, Homo sapiens
  Heavy chain CDR3 for antibody 5629 (IGHV4-61)
ARVGSSGWYFDY

SEQ ID NO: 11259 - protein, 10 aa, Homo sapiens
  Light chain CDR3 for antibody 5630 (IGKV1-39)
QQSYSTPMYT

SEQ ID NO: 11260 - protein, 13 aa, Homo sapiens
  Heavy chain CDR3 for antibody 5630 (IGHV3-33)
ASGYSGYDWYFDL

SEQ ID NO: 11261 - protein, 9 aa, Homo sapiens
  Light chain CDR3 for antibody 5631 (IGKV3D-7)
QQDYNLPLT

SEQ ID NO: 11262 - protein, 17 aa, Homo sapiens
  Heavy chain CDR3 for antibody 5631 (IGHV3-33)
ARGGGYENDHYYYGMDV

SEQ ID NO: 11263 - protein, 9 aa, Homo sapiens
  Light chain CDR3 for antibody 5632 (IGKV3-11)
QQRSNWMYT

SEQ ID NO: 11264 - protein, 13 aa, Homo sapiens
  Heavy chain CDR3 for antibody 5632 (IGHV3-33)
ARGVLWFGELFDY

SEQ ID NO: 11265 - protein, 9 aa, Homo sapiens
  Light chain CDR3 for antibody 5633 (IGKV1-6)
LQDYNYPYT

SEQ ID NO: 11266 - protein, 14 aa, Homo sapiens
  Heavy chain CDR3 for antibody 5633 (IGHV3-33)
ARDGLVGASSWFDP

SEQ ID NO: 11267 - protein, 8 aa, Homo sapiens
  Light chain CDR3 for antibody 5634 (IGKV1D-13)
QQFNNYYT

SEQ ID NO: 11268 - protein, 19 aa, Homo sapiens
  Heavy chain CDR3 for antibody 5634 (IGHV1-18)
ARDDILTGYSLYYYYGMDV

SEQ ID NO: 11269 - protein, 9 aa, Homo sapiens
  Light chain CDR3 for antibody 5635 (IGKV1-9)
QQLKSYLYT

SEQ ID NO: 11270 - protein, 13 aa, Homo sapiens
  Heavy chain CDR3 for antibody 5635 (IGHV3-33)
ARDYCGGDCYLDY

SEQ ID NO: 11271 - protein, 8 aa, Homo sapiens
  Light chain CDR3 for antibody 5636 (IGKV3-20)
QQYGRSFT

SEQ ID NO: 11272 - protein, 11 aa, Homo sapiens
  Heavy chain CDR3 for antibody 5636 (IGHV4-59)
ARSIRYSVFDY

SEQ ID NO: 11273 - protein, 9 aa, Homo sapiens
  Light chain CDR3 for antibody 5637 (IGKV3-11)
QQRSNWPYT

SEQ ID NO: 11274 - protein, 15 aa, Homo sapiens
  Heavy chain CDR3 for antibody 5637 (IGHV3-33)
ARDGSGSYSLYGMDV

SEQ ID NO: 11275 - protein, 9 aa, Homo sapiens
  Light chain CDR3 for antibody 5638 (IGKV1-6)
LQDYNYPYT

SEQ ID NO: 11276 - protein, 18 aa, Homo sapiens
  Heavy chain CDR3 for antibody 5638 (IGHV3-33)
ARERYYYGSGSYPDAFDI

SEQ ID NO: 11277 - protein, 9 aa, Homo sapiens
  Light chain CDR3 for antibody 5639 (IGKV1-17)
LQHNSYPYT

SEQ ID NO: 11278 - protein, 12 aa, Homo sapiens
  Heavy chain CDR3 for antibody 5639 (IGHV3-66)
VRDRAAAPYFDL

SEQ ID NO: 11279 - protein, 9 aa, Homo sapiens
  Light chain CDR3 for antibody 5640 (IGKV1-6)
LQDYNYPRT

SEQ ID NO: 11280 - protein, 13 aa, Homo sapiens
  Heavy chain CDR3 for antibody 5640 (IGHV4-59)
ARGYYDIFGWFDP

SEQ ID NO: 11281 - protein, 9 aa, Homo sapiens
  Light chain CDR3 for antibody 5641 (IGKV1D-13)
QQFNNYPRT

SEQ ID NO: 11282 - protein, 15 aa, Homo sapiens
  Heavy chain CDR3 for antibody 5641 (IGHV3-66)
ARDRDYYYYYYGMDV

SEQ ID NO: 11283 - protein, 9 aa, Homo sapiens
  Light chain CDR3 for antibody 5642 (IGKV2-30)
MQGTHWPLT

SEQ ID NO: 11284 - protein, 17 aa, Homo sapiens
  Heavy chain CDR3 for antibody 5642 (IGHV3-33)
ARVYYDILTGYSPAFDI

SEQ ID NO: 11285 - protein, 8 aa, Homo sapiens
  Light chain CDR3 for antibody 5643 (IGKV2D-28)
MQALQTPT

SEQ ID NO: 11286 - protein, 13 aa, Homo sapiens
  Heavy chain CDR3 for antibody 5643 (IGHV3-23)
ASPFNWNDGFFDY

SEQ ID NO: 11287 - protein, 9 aa, Homo sapiens
  Light chain CDR3 for antibody 5644 (IGKV3D-7)
QQDYNLPLT

SEQ ID NO: 11288 - protein, 14 aa, Homo sapiens
  Heavy chain CDR3 for antibody 5644 (IGHV3-33)
ARDRRDFYYYGMDV

SEQ ID NO: 11289 - protein, 9 aa, Homo sapiens
  Light chain CDR3 for antibody 5645 (IGKV1-17)
LQHNSFPLT

SEQ ID NO: 11290 - protein, 13 aa, Homo sapiens
  Heavy chain CDR3 for antibody 5645 (IGHV3-33)
ARAFIMVRGVIDY

SEQ ID NO: 11291 - protein, 9 aa, Homo sapiens
  Light chain CDR3 for antibody 5646 (IGKV3-20)
QQYGSSPYT

SEQ ID NO: 11292 - protein, 14 aa, Homo sapiens
  Heavy chain CDR3 for antibody 5646 (IGHV3-33)
ARSTLVRGANWFDP

SEQ ID NO: 11293 - protein, 10 aa, Homo sapiens
  Light chain CDR3 for antibody 5647 (IGKV3-11)
QQRSNWPIFT

SEQ ID NO: 11294 - protein, 12 aa, Homo sapiens
  Heavy chain CDR3 for antibody 5647 (IGHV3-33)
AREGDILTGYSL

SEQ ID NO: 11295 - protein, 9 aa, Homo sapiens
  Light chain CDR3 for antibody 5648 (IGKV1-6)
LQDFHYPWT

SEQ ID NO: 11296 - protein, 21 aa, Homo sapiens
  Heavy chain CDR3 for antibody 5648 (IGHV3-33)
ARKRLYDILTGYYKAYYGMDV

SEQ ID NO: 11297 - protein, 9 aa, Homo sapiens
  Light chain CDR3 for antibody 5649 (IGKV1-39)
QQSYSTPLT

SEQ ID NO: 11298 - protein, 14 aa, Homo sapiens
  Heavy chain CDR3 for antibody 5649 (IGHV1-24)
ATWLPLYYYYGMDV

SEQ ID NO: 11299 - protein, 9 aa, Homo sapiens
  Light chain CDR3 for antibody 5650 (IGKV1D-16)
QQYNSYPYT

SEQ ID NO: 11300 - protein, 14 aa, Homo sapiens
  Heavy chain CDR3 for antibody 5650 (IGHV3-33)
AKSYDILTGEAFDI

SEQ ID NO: 11301 - protein, 9 aa, Homo sapiens
  Light chain CDR3 for antibody 5651 (IGKV4-1)
QQYYTTPPT

SEQ ID NO: 11302 - protein, 13 aa, Homo sapiens
  Heavy chain CDR3 for antibody 5651 (IGHV4-59)
ARDAGYSSSWFDY

SEQ ID NO: 11303 - protein, 9 aa, Homo sapiens
  Light chain CDR3 for antibody 5652 (IGKV2-30)
MQGTHWPLT

SEQ ID NO: 11304 - protein, 11 aa, Homo sapiens
  Heavy chain CDR3 for antibody 5652 (IGHV1-46)
AREEDLGAFDI

SEQ ID NO: 11305 - protein, 9 aa, Homo sapiens
  Light chain CDR3 for antibody 5653 (IGKV1-9)
QQGNTYSRT

SEQ ID NO: 11306 - protein, 14 aa, Homo sapiens
  Heavy chain CDR3 for antibody 5653 (IGHV3-33)
ARDWNDVYYYGMDV

SEQ ID NO: 11307 - protein, 10 aa, Homo sapiens
  Light chain CDR3 for antibody 5654 (IGKV1-39)
QQSYSTPMYT

SEQ ID NO: 11308 - protein, 20 aa, Homo sapiens
  Heavy chain CDR3 for antibody 5654 (IGHV3-33)
ARDPAQLERRYYYFYYGMDV

SEQ ID NO: 11309 - protein, 9 aa, Homo sapiens
  Light chain CDR3 for antibody 5655 (IGKV1-16)
QHYNDYPFT

SEQ ID NO: 11310 - protein, 19 aa, Homo sapiens
  Heavy chain CDR3 for antibody 5655 (IGHV3-33)
ARGVRLRYFDPYYYYGMDV

SEQ ID NO: 11311 - protein, 9 aa, Homo sapiens
  Light chain CDR3 for antibody 5656 (IGKV3-11)
QQRSNWPPT

SEQ ID NO: 11312 - protein, 14 aa, Homo sapiens
  Heavy chain CDR3 for antibody 5656 (IGHV3-33)
ARDLNYDILNGGGY

SEQ ID NO: 11313 - protein, 10 aa, Homo sapiens
  Light chain CDR3 for antibody 5657 (IGKV1-39)
QQSYSTPMYT

SEQ ID NO: 11314 - protein, 18 aa, Homo sapiens
  Heavy chain CDR3 for antibody 5657 (IGHV3-33)
AREGDYYGSGGFPNWFDP

SEQ ID NO: 11315 - protein, 10 aa, Homo sapiens
  Light chain CDR3 for antibody 5658 (IGKV3-20)
QQYGSSPPYT

SEQ ID NO: 11316 - protein, 15 aa, Homo sapiens
  Heavy chain CDR3 for antibody 5658 (IGHV3-33)
ARRICSGGSCSLFDY

SEQ ID NO: 11317 - protein, 9 aa, Homo sapiens
  Light chain CDR3 for antibody 5659 (IGKV1-9)
QQLISYPLT

SEQ ID NO: 11318 - protein, 15 aa, Homo sapiens
  Heavy chain CDR3 for antibody 5659 (IGHV3-30)
ARGAMVRGVDYGMDV

SEQ ID NO: 11319 - protein, 9 aa, Homo sapiens
  Light chain CDR3 for antibody 5660 (IGKV3-11)
QQRSNWPRT

SEQ ID NO: 11320 - protein, 9 aa, Homo sapiens
  Heavy chain CDR3 for antibody 5660 (IGHV3-23)
ARIWWLKDY

SEQ ID NO: 11321 - protein, 9 aa, Homo sapiens
  Light chain CDR3 for antibody 5661 (IGKV1-17)
LQHNSYPPT

SEQ ID NO: 11322 - protein, 15 aa, Homo sapiens
  Heavy chain CDR3 for antibody 5661 (IGHV1-2)
ARDLGYYGSGSRMDV

SEQ ID NO: 11323 - protein, 8 aa, Homo sapiens
  Light chain CDR3 for antibody 5662 (IGKV3-20)
QQYGSSLT

SEQ ID NO: 11324 - protein, 11 aa, Homo sapiens
  Heavy chain CDR3 for antibody 5662 (IGHV3-33)
ARDRVLTPFDY

SEQ ID NO: 11325 - protein, 8 aa, Homo sapiens
  Light chain CDR3 for antibody 5663 (IGKV3-15)
QQYNNWPT

SEQ ID NO: 11326 - protein, 9 aa, Homo sapiens
  Heavy chain CDR3 for antibody 5663 (IGHV3-33)
ARATVGVDY

SEQ ID NO: 11327 - protein, 9 aa, Homo sapiens
  Light chain CDR3 for antibody 5664 (IGKV2-30)
MQGTHWPLT

SEQ ID NO: 11328 - protein, 11 aa, Homo sapiens
  Heavy chain CDR3 for antibody 5664 (IGHV3-33)
ARARYTTGLDY

SEQ ID NO: 11329 - protein, 9 aa, Homo sapiens
  Light chain CDR3 for antibody 5665 (IGKV1-9)
QQLKSYPYT

SEQ ID NO: 11330 - protein, 10 aa, Homo sapiens
  Heavy chain CDR3 for antibody 5665 (IGHV3-23)
AKEQWLVLDY

SEQ ID NO: 11331 - protein, 9 aa, Homo sapiens
  Light chain CDR3 for antibody 5666 (IGKV6-21)
HQSSSLPYT

SEQ ID NO: 11332 - protein, 18 aa, Homo sapiens
  Heavy chain CDR3 for antibody 5666 (IGHV1-18)
ARDPTFYYVSGSYYKFDY

SEQ ID NO: 11333 - protein, 9 aa, Homo sapiens
  Light chain CDR3 for antibody 5667 (IGKV1-39)
QQGFSTPWT

SEQ ID NO: 11334 - protein, 13 aa, Homo sapiens
  Heavy chain CDR3 for antibody 5667 (IGHV4-39)
ARQWPSGYWYFDL

SEQ ID NO: 11335 - protein, 7 aa, Homo sapiens
  Light chain CDR3 for antibody 5668 (IGKV3-20)
QQYGSSL

SEQ ID NO: 11336 - protein, 11 aa, Homo sapiens
  Heavy chain CDR3 for antibody 5668 (IGHV3-53)
ARGHWEYYFDY

SEQ ID NO: 11337 - protein, 9 aa, Homo sapiens
  Light chain CDR3 for antibody 5669 (IGKV1-6)
LQDYNYPRT

SEQ ID NO: 11338 - protein, 17 aa, Homo sapiens
  Heavy chain CDR3 for antibody 5669 (IGHV3-23)
AKDRDWNDGQYYFGMDV

SEQ ID NO: 11339 - protein, 8 aa, Homo sapiens
  Light chain CDR3 for antibody 5670 (IGKV1D-13)
QQFNNYPT

SEQ ID NO: 11340 - protein, 11 aa, Homo sapiens
  Heavy chain CDR3 for antibody 5670 (IGHV3-33)
AREGAVARFDY

SEQ ID NO: 11341 - protein, 9 aa, Homo sapiens
  Light chain CDR3 for antibody 5671 (IGKV1D-13)
QRFNNYLYT

SEQ ID NO: 11342 - protein, 13 aa, Homo sapiens
  Heavy chain CDR3 for antibody 5671 (IGHV4-39)
ARHPPSRDYGMDV

SEQ ID NO: 11343 - protein, 9 aa, Homo sapiens
  Light chain CDR3 for antibody 5672 (IGKV1-39)
QQSYSSPFT

SEQ ID NO: 11344 - protein, 9 aa, Homo sapiens
  Heavy chain CDR3 for antibody 5672 (IGHV1-18)
ARGKDWFDP

SEQ ID NO: 11345 - protein, 9 aa, Homo sapiens
  Light chain CDR3 for antibody 5673 (IGKV1-9)
QQLNTYPLT

SEQ ID NO: 11346 - protein, 9 aa, Homo sapiens
  Heavy chain CDR3 for antibody 5673 (IGHV4-59)
ARKKGTFDY

SEQ ID NO: 11347 - protein, 10 aa, Homo sapiens
  Light chain CDR3 for antibody 5674 (IGKV1-39)
QQSYSTPMYT

SEQ ID NO: 11348 - protein, 9 aa, Homo sapiens
  Heavy chain CDR3 for antibody 5674 (IGHV3-30)
ARDYFHYDY

SEQ ID NO: 11349 - protein, 9 aa, Homo sapiens
  Light chain CDR3 for antibody 5675 (IGKV3-11)
QQRSNWPPT

SEQ ID NO: 11350 - protein, 11 aa, Homo sapiens
  Heavy chain CDR3 for antibody 5675 (IGHV4-59)
AREMGHDTFDI

SEQ ID NO: 11351 - protein, 9 aa, Homo sapiens
  Light chain CDR3 for antibody 5676 (IGKV6-21)
HQSSSLPYT

SEQ ID NO: 11352 - protein, 9 aa, Homo sapiens
  Heavy chain CDR3 for antibody 5676 (IGHV1-8)
ARGPRIMDV

SEQ ID NO: 11353 - protein, 10 aa, Homo sapiens
  Light chain CDR3 for antibody 5677 (IGKV3-11)
QQRSNWPMYT

SEQ ID NO: 11354 - protein, 11 aa, Homo sapiens
  Heavy chain CDR3 for antibody 5677 (IGHV1-24)
ATYFGSGSLDY

SEQ ID NO: 11355 - protein, 9 aa, Homo sapiens
  Light chain CDR3 for antibody 5678 (IGKV1D-13)
QQFNNYPYT

SEQ ID NO: 11356 - protein, 20 aa, Homo sapiens
  Heavy chain CDR3 for antibody 5678 (IGHV3-33)
ARDPAQLERRYYYFYYGMDV

SEQ ID NO: 11357 - protein, 8 aa, Homo sapiens
  Light chain CDR3 for antibody 5679 (IGKV3D-7)
QQDYNLLT

SEQ ID NO: 11358 - protein, 23 aa, Homo sapiens
  Heavy chain CDR3 for antibody 5679 (IGHV3-11)
ARDEGVTMVRGVISYYYYYGMDV

SEQ ID NO: 11359 - protein, 9 aa, Homo sapiens
  Light chain CDR3 for antibody 5680 (IGKV1-27)
QKYNSAPYT

SEQ ID NO: 11360 - protein, 11 aa, Homo sapiens
  Heavy chain CDR3 for antibody 5680 (IGHV3-74)
ARDRGNWGFDY

SEQ ID NO: 11361 - protein, 9 aa, Homo sapiens
  Light chain CDR3 for antibody 5681 (IGKV1-17)
LQHNSYPPT

SEQ ID NO: 11362 - protein, 11 aa, Homo sapiens
  Heavy chain CDR3 for antibody 5681 (IGHV3-23)
GEFSSGWSFDY

SEQ ID NO: 11363 - protein, 9 aa, Homo sapiens
  Light chain CDR3 for antibody 5682 (IGKV1-9)
QQLISYPLT

SEQ ID NO: 11364 - protein, 11 aa, Homo sapiens
  Heavy chain CDR3 for antibody 5682 (IGHV3-33)
ARDRATATVDY

SEQ ID NO: 11365 - protein, 9 aa, Homo sapiens
  Light chain CDR3 for antibody 5683 (IGKV1-39)
QQSYSTPLT

SEQ ID NO: 11366 - protein, 12 aa, Homo sapiens
  Heavy chain CDR3 for antibody 5683 (IGHV3-33)
ARGGIAVDVCDI

SEQ ID NO: 11367 - protein, 9 aa, Homo sapiens
  Light chain CDR3 for antibody 5684 (IGKV1-9)
QQLISYPLT

SEQ ID NO: 11368 - protein, 20 aa, Homo sapiens
  Heavy chain CDR3 for antibody 5684 (IGHV3-33)
ARDRCSSTSCYGYYYYGMDV

SEQ ID NO: 11369 - protein, 9 aa, Homo sapiens
  Light chain CDR3 for antibody 5685 (IGKV3-15)
QQYNNWPYT

SEQ ID NO: 11370 - protein, 16 aa, Homo sapiens
  Heavy chain CDR3 for antibody 5685 (IGHV4-59)
ARGRYFDWLLGDVFDI

SEQ ID NO: 11371 - protein, 8 aa, Homo sapiens
  Light chain CDR3 for antibody 5686 (IGKV3-11)
QQRSNWLT

SEQ ID NO: 11372 - protein, 13 aa, Homo sapiens
  Heavy chain CDR3 for antibody 5686 (IGHV3-11)
ARDGGAAAGTWDS

SEQ ID NO: 11373 - protein, 10 aa, Homo sapiens
  Light chain CDR3 for antibody 5687 (IGKV1-9)
QQLDSYPMYT

SEQ ID NO: 11374 - protein, 11 aa, Homo sapiens
  Heavy chain CDR3 for antibody 5687 (IGHV4-59)
AREMGHDTFDI

SEQ ID NO: 11375 - protein, 9 aa, Homo sapiens
  Light chain CDR3 for antibody 5688 (IGKV6-21)
HQSSSLPYT

SEQ ID NO: 11376 - protein, 10 aa, Homo sapiens
  Heavy chain CDR3 for antibody 5688 (IGHV3-23)
AKENWNDFDY

SEQ ID NO: 11377 - protein, 9 aa, Homo sapiens
  Light chain CDR3 for antibody 5689 (IGKV3D-7)
QQDYNLPLT

SEQ ID NO: 11378 - protein, 15 aa, Homo sapiens
  Heavy chain CDR3 for antibody 5689 (IGHV3-23)
AKEFTMVRGVITPDY

SEQ ID NO: 11379 - protein, 9 aa, Homo sapiens
  Light chain CDR3 for antibody 5690 (IGKV3D-7)
QQYHNWPLT

SEQ ID NO: 11380 - protein, 12 aa, Homo sapiens
  Heavy chain CDR3 for antibody 5690 (IGHV1-46)
ARGLTGDHAFDI

SEQ ID NO: 11381 - protein, 9 aa, Homo sapiens
  Light chain CDR3 for antibody 5691 (IGKV1-27)
QKYNSAPYT

SEQ ID NO: 11382 - protein, 15 aa, Homo sapiens
  Heavy chain CDR3 for antibody 5691 (IGHV3-33)
ARDALAVTGTGWFDP

SEQ ID NO: 11383 - protein, 9 aa, Homo sapiens
  Light chain CDR3 for antibody 5692 (IGKV3-11)
QQRINWPWT

SEQ ID NO: 11384 - protein, 9 aa, Homo sapiens
  Heavy chain CDR3 for antibody 5692 (IGHV3-30)
ARPNWGFDY

SEQ ID NO: 11385 - protein, 8 aa, Homo sapiens
  Light chain CDR3 for antibody 5693 (IGKV1-5)
QQYNSYWT

SEQ ID NO: 11386 - protein, 14 aa, Homo sapiens
  Heavy chain CDR3 for antibody 5693 (IGHV3-33)
AREDYYGPLNWFDP

SEQ ID NO: 11387 - protein, 8 aa, Homo sapiens
  Light chain CDR3 for antibody 5694 (IGKV6-21)
HQSSSLPT

SEQ ID NO: 11388 - protein, 9 aa, Homo sapiens
  Heavy chain CDR3 for antibody 5694 (IGHV1-18)
ARGKDWFDP

SEQ ID NO: 11389 - protein, 9 aa, Homo sapiens
  Light chain CDR3 for antibody 5695 (IGKV1-16)
QQYNSYPYT

SEQ ID NO: 11390 - protein, 20 aa, Homo sapiens
  Heavy chain CDR3 for antibody 5695 (IGHV3-33)
ARTMGSGSYYKAYYYYVMDV

SEQ ID NO: 11391 - protein, 9 aa, Homo sapiens
  Light chain CDR3 for antibody 5696 (IGKV1-6)
LQDYNYPYT

SEQ ID NO: 11392 - protein, 14 aa, Homo sapiens
  Heavy chain CDR3 for antibody 5696 (IGHV3-33)
ARDDILTGYSYFQH

SEQ ID NO: 11393 - protein, 9 aa, Homo sapiens
  Light chain CDR3 for antibody 5697 (IGKV3-11)
QQRSNWPLT

SEQ ID NO: 11394 - protein, 15 aa, Homo sapiens
  Heavy chain CDR3 for antibody 5697 (IGHV3-23)
AKDRDYDFLSGPFDY

SEQ ID NO: 11395 - protein, 9 aa, Homo sapiens
  Light chain CDR3 for antibody 5698 (IGKV1D-13)
QRFNNYLYT

SEQ ID NO: 11396 - protein, 15 aa, Homo sapiens
  Heavy chain CDR3 for antibody 5698 (IGHV3-30)
ARRGYGSGSPDAFDL

SEQ ID NO: 11397 - protein, 8 aa, Homo sapiens
  Light chain CDR3 for antibody 5699 (IGKV3-11)
LQRGNWPT

SEQ ID NO: 11398 - protein, 15 aa, Homo sapiens
  Heavy chain CDR3 for antibody 5699 (IGHV3-20)
ARDRGSSGWRDWFDP

SEQ ID NO: 11399 - protein, 9 aa, Homo sapiens
  Light chain CDR3 for antibody 5700 (IGKV1D-16)
QQLNSYPLT

SEQ ID NO: 11400 - protein, 8 aa, Homo sapiens
  Heavy chain CDR3 for antibody 5700 (IGHV3-20)
APHWIFDY

SEQ ID NO: 11401 - protein, 8 aa, Homo sapiens
  Light chain CDR3 for antibody 5701 (IGKV6-21)
HQSSSLPT

SEQ ID NO: 11402 - protein, 13 aa, Homo sapiens
  Heavy chain CDR3 for antibody 5701 (IGHV3-23)
ARAFFMVRGVIDF

SEQ ID NO: 11403 - protein, 9 aa, Homo sapiens
  Light chain CDR3 for antibody 5702 (IGKV3-11)
QQRSNWPLT

SEQ ID NO: 11404 - protein, 18 aa, Homo sapiens
  Heavy chain CDR3 for antibody 5702 (IGHV1-18)
ARDPTFYYVSGSYYKFDY

SEQ ID NO: 11405 - protein, 9 aa, Homo sapiens
  Light chain CDR3 for antibody 5703 (IGKV1-9)
QQLKSYLYT

SEQ ID NO: 11406 - protein, 17 aa, Homo sapiens
  Heavy chain CDR3 for antibody 5703 (IGHV1-18)
TTVVLYYDILPGYSFDY

SEQ ID NO: 11407 - protein, 9 aa, Homo sapiens
  Light chain CDR3 for antibody 5704 (IGKV3-15)
QQYNNWPRT

SEQ ID NO: 11408 - protein, 12 aa, Homo sapiens
  Heavy chain CDR3 for antibody 5704 (IGHV1-46)
AREDYDIDGMDV

SEQ ID NO: 11409 - protein, 9 aa, Homo sapiens
  Light chain CDR3 for antibody 5705 (IGKV5-2)
LQHDKFPYT

SEQ ID NO: 11410 - protein, 14 aa, Homo sapiens
  Heavy chain CDR3 for antibody 5705 (IGHV3-23)
VRDRIAAASSDFDN

SEQ ID NO: 11411 - protein, 9 aa, Homo sapiens
  Light chain CDR3 for antibody 5706 (IGKV1-39)
QQSYSTPYT

SEQ ID NO: 11412 - protein, 17 aa, Homo sapiens
  Heavy chain CDR3 for antibody 5706 (IGHV3-33)
ARDWFGELSDYYYGMDV

SEQ ID NO: 11413 - protein, 10 aa, Homo sapiens
  Light chain CDR3 for antibody 5707 (IGKV1-9)
QQLDSYPMYT

SEQ ID NO: 11414 - protein, 13 aa, Homo sapiens
  Heavy chain CDR3 for antibody 5707 (IGHV4-34)
ASNFYYYYYGMDV

SEQ ID NO: 11415 - protein, 9 aa, Homo sapiens
  Light chain CDR3 for antibody 5708 (IGKV1-9)
QQVKSYPYT

SEQ ID NO: 11416 - protein, 16 aa, Homo sapiens
  Heavy chain CDR3 for antibody 5708 (IGHV1-46)
ARGRYFEWLLGDVFDI

SEQ ID NO: 11417 - protein, 9 aa, Homo sapiens
  Light chain CDR3 for antibody 5709 (IGKV3-20)
QQYGSSPYT

SEQ ID NO: 11418 - protein, 16 aa, Homo sapiens
  Heavy chain CDR3 for antibody 5709 (IGHV4-59)
AREGYNWNDGVNWFDP

SEQ ID NO: 11419 - protein, 10 aa, Homo sapiens
  Light chain CDR3 for antibody 5710 (IGKV1-9)
QQLDSYPMYT

SEQ ID NO: 11420 - protein, 15 aa, Homo sapiens
  Heavy chain CDR3 for antibody 5710 (IGHV3-30)
ARGAMVRGVDYGMDV

SEQ ID NO: 11421 - protein, 9 aa, Homo sapiens
  Light chain CDR3 for antibody 5711 (IGKV3-11)
QQRSNWPLT

SEQ ID NO: 11422 - protein, 11 aa, Homo sapiens
  Heavy chain CDR3 for antibody 5711 (IGHV3-23)
ARDPGSITGDY

SEQ ID NO: 11423 - protein, 8 aa, Homo sapiens
  Light chain CDR3 for antibody 5712 (IGKV3-20)
QQYGSSFT

SEQ ID NO: 11424 - protein, 12 aa, Homo sapiens
  Heavy chain CDR3 for antibody 5712 (IGHV4-39)
ARQMVREGWFDP

SEQ ID NO: 11425 - protein, 9 aa, Homo sapiens
  Light chain CDR3 for antibody 5713 (IGKV5-2)
LQHDKFPYT

SEQ ID NO: 11426 - protein, 18 aa, Homo sapiens
  Heavy chain CDR3 for antibody 5713 (IGHV3-64)
ARDEYYYGSGSYYNYFDW

SEQ ID NO: 11427 - protein, 9 aa, Homo sapiens
  Light chain CDR3 for antibody 5714 (IGKV1-17)
LQHNSYPRT

SEQ ID NO: 11428 - protein, 18 aa, Homo sapiens
  Heavy chain CDR3 for antibody 5714 (IGHV3-33)
ARGAYSSGWDYYYYGLDV

SEQ ID NO: 11429 - protein, 9 aa, Homo sapiens
  Light chain CDR3 for antibody 5715 (IGKV1-9)
QQYNSYPLT

SEQ ID NO: 11430 - protein, 15 aa, Homo sapiens
  Heavy chain CDR3 for antibody 5715 (IGHV3-20)
AREGSSSWYLYYFDY

SEQ ID NO: 11431 - protein, 8 aa, Homo sapiens
  Light chain CDR3 for antibody 5716 (IGKV1D-13)
QQFNNYPT

SEQ ID NO: 11432 - protein, 14 aa, Homo sapiens
  Heavy chain CDR3 for antibody 5716 (IGHV1-18)
ARCFGSGSYGWFDP

SEQ ID NO: 11433 - protein, 10 aa, Homo sapiens
  Light chain CDR3 for antibody 5717 (IGKV3-15)
QQYNNWPPLT

SEQ ID NO: 11434 - protein, 8 aa, Homo sapiens
  Heavy chain CDR3 for antibody 5717 (IGHV3-23)
AKETGNNY

SEQ ID NO: 11435 - protein, 9 aa, Homo sapiens
  Light chain CDR3 for antibody 5718 (IGKV1D-13)
QHFNNYMYT

SEQ ID NO: 11436 - protein, 16 aa, Homo sapiens
  Heavy chain CDR3 for antibody 5718 (IGHV4-59)
ARYSGSYYGDYYGMDV

SEQ ID NO: 11437 - protein, 9 aa, Homo sapiens
  Light chain CDR3 for antibody 5719 (IGKV1-16)
QHYNDYPFT

SEQ ID NO: 11438 - protein, 13 aa, Homo sapiens
  Heavy chain CDR3 for antibody 5719 (IGHV3-23)
ARAFTMVRGVIDY

SEQ ID NO: 11439 - protein, 9 aa, Homo sapiens
  Light chain CDR3 for antibody 5720 (IGKV3-15)
QQYNNWPLT

SEQ ID NO: 11440 - protein, 9 aa, Homo sapiens
  Heavy chain CDR3 for antibody 5720 (IGHV1-18)
ARGGWGFEY

SEQ ID NO: 11441 - protein, 9 aa, Homo sapiens
  Light chain CDR3 for antibody 5721 (IGKV1-17)
LQHNSYPWT

SEQ ID NO: 11442 - protein, 11 aa, Homo sapiens
  Heavy chain CDR3 for antibody 5721 (IGHV4-59)
ARETGDDAFDI

SEQ ID NO: 11443 - protein, 9 aa, Homo sapiens
  Light chain CDR3 for antibody 5722 (IGKV1D-16)
QQYNSYPLT

SEQ ID NO: 11444 - protein, 22 aa, Homo sapiens
  Heavy chain CDR3 for antibody 5722 (IGHV3-33)
ARMYYDILTGYYKDYYYYGMDV

SEQ ID NO: 11445 - protein, 9 aa, Homo sapiens
  Light chain CDR3 for antibody 5723 (IGKV3-11)
QQRSNWMYT

SEQ ID NO: 11446 - protein, 20 aa, Homo sapiens
  Heavy chain CDR3 for antibody 5723 (IGHV3-23)
AKDREMAATSHYYYYYGMDV

SEQ ID NO: 11447 - protein, 9 aa, Homo sapiens
  Light chain CDR3 for antibody 5724 (IGKV6-21)
HQSSSLPLT

SEQ ID NO: 11448 - protein, 13 aa, Homo sapiens
  Heavy chain CDR3 for antibody 5724 (IGHV3-33)
TRRIAVAGAEGDY

SEQ ID NO: 11449 - protein, 9 aa, Homo sapiens
  Light chain CDR3 for antibody 5725 (IGKV1-9)
QQLNSYPLT

SEQ ID NO: 11450 - protein, 12 aa, Homo sapiens
  Heavy chain CDR3 for antibody 5725 (IGHV3-33)
ARAGMGAPYFDY

SEQ ID NO: 11451 - protein, 9 aa, Homo sapiens
  Light chain CDR3 for antibody 5726 (IGKV3D-7)
QQDYNLPLT

SEQ ID NO: 11452 - protein, 11 aa, Homo sapiens
  Heavy chain CDR3 for antibody 5726 (IGHV3-23)
AKAGIVGCLDV

SEQ ID NO: 11453 - protein, 9 aa, Homo sapiens
  Light chain CDR3 for antibody 5727 (IGKV1-39)
QQSYSTPLT

SEQ ID NO: 11454 - protein, 15 aa, Homo sapiens
  Heavy chain CDR3 for antibody 5727 (IGHV1-24)
ATHWDLRYYYYGMDV

SEQ ID NO: 11455 - protein, 9 aa, Homo sapiens
  Light chain CDR3 for antibody 5728 (IGKV1D-16)
QQYNSYPFT

SEQ ID NO: 11456 - protein, 12 aa, Homo sapiens
  Heavy chain CDR3 for antibody 5728 (IGHV4-28)
ARKDSGYDWFDY

SEQ ID NO: 11457 - protein, 9 aa, Homo sapiens
  Light chain CDR3 for antibody 5729 (IGKV6-21)
HQSSSLPYT

SEQ ID NO: 11458 - protein, 17 aa, Homo sapiens
  Heavy chain CDR3 for antibody 5729 (IGHV3-23)
AKERNWNDGYYYYGMDV

SEQ ID NO: 11459 - protein, 9 aa, Homo sapiens
  Light chain CDR3 for antibody 5730 (IGKV3-15)
QQYNNWPLT

SEQ ID NO: 11460 - protein, 12 aa, Homo sapiens
  Heavy chain CDR3 for antibody 5730 (IGHV3-33)
ARVDAAAPYFDY

SEQ ID NO: 11461 - protein, 9 aa, Homo sapiens
  Light chain CDR3 for antibody 5731 (IGKV3-15)
QQYNNWPLT

SEQ ID NO: 11462 - protein, 13 aa, Homo sapiens
  Heavy chain CDR3 for antibody 5731 (IGHV3-66)
ANTGDSYYYGFYV

SEQ ID NO: 11463 - protein, 9 aa, Homo sapiens
  Light chain CDR3 for antibody 5732 (IGKV1-9)
QQLISYPLT

SEQ ID NO: 11464 - protein, 13 aa, Homo sapiens
  Heavy chain CDR3 for antibody 5732 (IGHV3-53)
ARSGSYWGYYFDY

SEQ ID NO: 11465 - protein, 9 aa, Homo sapiens
  Light chain CDR3 for antibody 5733 (IGKV3D-20)
QQYGSSPRT

SEQ ID NO: 11466 - protein, 6 aa, Homo sapiens
  Heavy chain CDR3 for antibody 5733 (IGHV1-8)
AREGTY

SEQ ID NO: 11467 - protein, 9 aa, Homo sapiens
  Light chain CDR3 for antibody 5734 (IGKV6-21)
HQSSSLPYT

SEQ ID NO: 11468 - protein, 14 aa, Homo sapiens
  Heavy chain CDR3 for antibody 5734 (IGHV1-18)
AREGGSYFYYGVDV

SEQ ID NO: 11469 - protein, 9 aa, Homo sapiens
  Light chain CDR3 for antibody 5735 (IGKV1-9)
QQLNTYPYT

SEQ ID NO: 11470 - protein, 16 aa, Homo sapiens
  Heavy chain CDR3 for antibody 5735 (IGHV3-23)
AKEGMVLRYFDWFWDY

SEQ ID NO: 11471 - protein, 9 aa, Homo sapiens
  Light chain CDR3 for antibody 5736 (IGKV1-17)
LQHNSYPWT

SEQ ID NO: 11472 - protein, 16 aa, Homo sapiens
  Heavy chain CDR3 for antibody 5736 (IGHV3-33)
ARAPGGDYYFYFGMDV

SEQ ID NO: 11473 - protein, 9 aa, Homo sapiens
  Light chain CDR3 for antibody 5737 (IGKV1-6)
LQDYNHPFT

SEQ ID NO: 11474 - protein, 11 aa, Homo sapiens
  Heavy chain CDR3 for antibody 5737 (IGHV3-33)
ARGSGSYAFDY

SEQ ID NO: 11475 - protein, 9 aa, Homo sapiens
  Light chain CDR3 for antibody 5738 (IGKV5-2)
LQHDNFPYT

SEQ ID NO: 11476 - protein, 11 aa, Homo sapiens
  Heavy chain CDR3 for antibody 5738 (IGHV3-33)
ARDILTGYFDY

SEQ ID NO: 11477 - protein, 9 aa, Homo sapiens
  Light chain CDR3 for antibody 5739 (IGKV1D-13)
LQDYNYPYT

SEQ ID NO: 11478 - protein, 14 aa, Homo sapiens
  Heavy chain CDR3 for antibody 5739 (IGHV3-33)
ARDDYVSGSYYFDY

SEQ ID NO: 11479 - protein, 9 aa, Homo sapiens
  Light chain CDR3 for antibody 5740 (IGKV2-30)
MQGTHWPLT

SEQ ID NO: 11480 - protein, 14 aa, Homo sapiens
  Heavy chain CDR3 for antibody 5740 (IGHV3-33)
ARDREQQLVRYFDY

SEQ ID NO: 11481 - protein, 10 aa, Homo sapiens
  Light chain CDR3 for antibody 5741 (IGKV3-20)
QQYGRSPPVT

SEQ ID NO: 11482 - protein, 8 aa, Homo sapiens
  Heavy chain CDR3 for antibody 5741 (IGHV3-23)
AKETGNNY

SEQ ID NO: 11483 - protein, 9 aa, Homo sapiens
  Light chain CDR3 for antibody 5742 (IGKV1-27)
QKYNSAPYT

SEQ ID NO: 11484 - protein, 12 aa, Homo sapiens
  Heavy chain CDR3 for antibody 5742 (IGHV3-33)
ARKQWLVQAFDI

SEQ ID NO: 11485 - protein, 10 aa, Homo sapiens
  Light chain CDR3 for antibody 5743 (IGKV3-11)
QQRSNWPIFT

SEQ ID NO: 11486 - protein, 8 aa, Homo sapiens
  Heavy chain CDR3 for antibody 5743 (IGHV3-23)
AKEAGSDY

SEQ ID NO: 11487 - protein, 9 aa, Homo sapiens
  Light chain CDR3 for antibody 5744 (IGKV1-6)
LQDYNYPWT

SEQ ID NO: 11488 - protein, 14 aa, Homo sapiens
  Heavy chain CDR3 for antibody 5744 (IGHV3-33)
ARASSGSSYWYFDL

SEQ ID NO: 11489 - protein, 10 aa, Homo sapiens
  Light chain CDR3 for antibody 5745 (IGKV3-15)
QQYNNWPPLT

SEQ ID NO: 11490 - protein, 16 aa, Homo sapiens
  Heavy chain CDR3 for antibody 5745 (IGHV3-33)
ARGGRSDWLYYYGMDV

SEQ ID NO: 11491 - protein, 9 aa, Homo sapiens
  Light chain CDR3 for antibody 5746 (IGKV1D-16)
QQYYSYPRT

SEQ ID NO: 11492 - protein, 15 aa, Homo sapiens
  Heavy chain CDR3 for antibody 5746 (IGHV3-66)
ARDRDYYYYYYGMDV

SEQ ID NO: 11493 - protein, 9 aa, Homo sapiens
  Light chain CDR3 for antibody 5747 (IGKV1D-13)
QQFNNYPYT

SEQ ID NO: 11494 - protein, 14 aa, Homo sapiens
  Heavy chain CDR3 for antibody 5747 (IGHV3-23)
AKDGGWNYYYGMDV

SEQ ID NO: 11495 - protein, 9 aa, Homo sapiens
  Light chain CDR3 for antibody 5748 (IGKV1-17)
LQHNSYPWT

SEQ ID NO: 11496 - protein, 12 aa, Homo sapiens
  Heavy chain CDR3 for antibody 5748 (IGHV3-33)
ARDGPVAGLFDY

SEQ ID NO: 11497 - protein, 10 aa, Homo sapiens
  Light chain CDR3 for antibody 5749 (IGKV1-17)
LQHNSYPMYT

SEQ ID NO: 11498 - protein, 12 aa, Homo sapiens
  Heavy chain CDR3 for antibody 5749 (IGHV3-23)
AKEYDILTGYFH

SEQ ID NO: 11499 - protein, 9 aa, Homo sapiens
  Light chain CDR3 for antibody 5750 (IGKV3-15)
QQYNNWPRT

SEQ ID NO: 11500 - protein, 12 aa, Homo sapiens
  Heavy chain CDR3 for antibody 5750 (IGHV3-33)
ARDRAYRGSLDY

SEQ ID NO: 11501 - protein, 9 aa, Homo sapiens
  Light chain CDR3 for antibody 5751 (IGKV3-11)
QQRSNWPWT

SEQ ID NO: 11502 - protein, 18 aa, Homo sapiens
  Heavy chain CDR3 for antibody 5751 (IGHV4-39)
ARQYYFGSGNYYRGWFDP

SEQ ID NO: 11503 - protein, 9 aa, Homo sapiens
  Light chain CDR3 for antibody 5752 (IGKV1D-13)
QQFNNYPHT

SEQ ID NO: 11504 - protein, 18 aa, Homo sapiens
  Heavy chain CDR3 for antibody 5752 (IGHV1-18)
ARDPNYYGSGSYYNYFDY

SEQ ID NO: 11505 - protein, 8 aa, Homo sapiens
  Light chain CDR3 for antibody 5753 (IGKV1D-13)
QQFNNYPT

SEQ ID NO: 11506 - protein, 12 aa, Homo sapiens
  Heavy chain CDR3 for antibody 5753 (IGHV3-33)
ARVDTAAPYFDY

SEQ ID NO: 11507 - protein, 8 aa, Homo sapiens
  Light chain CDR3 for antibody 5754 (IGKV1-9)
QQFNSYPT

SEQ ID NO: 11508 - protein, 13 aa, Homo sapiens
  Heavy chain CDR3 for antibody 5754 (IGHV4-59)
ARDVTGTTSGFDY

SEQ ID NO: 11509 - protein, 9 aa, Homo sapiens
  Light chain CDR3 for antibody 5755 (IGKV3-20)
QQYGSSPYT

SEQ ID NO: 11510 - protein, 16 aa, Homo sapiens
  Heavy chain CDR3 for antibody 5755 (IGHV3-33)
AKDAFYYGSGSHLFDY

SEQ ID NO: 11511 - protein, 9 aa, Homo sapiens
  Light chain CDR3 for antibody 5756 (IGKV1-9)
QQLNTYPWT

SEQ ID NO: 11512 - protein, 14 aa, Homo sapiens
  Heavy chain CDR3 for antibody 5756 (IGHV3-33)
ARDWNDVYYYGMDV

SEQ ID NO: 11513 - protein, 9 aa, Homo sapiens
  Light chain CDR3 for antibody 5757 (IGKV3-20)
QQYGSSPYT

SEQ ID NO: 11514 - protein, 17 aa, Homo sapiens
  Heavy chain CDR3 for antibody 5757 (IGHV3-23)
SKERNWNDGYYYFGMDA

SEQ ID NO: 11515 - protein, 9 aa, Homo sapiens
  Light chain CDR3 for antibody 5758 (IGKV1-6)
LQDYNYPWT

SEQ ID NO: 11516 - protein, 11 aa, Homo sapiens
  Heavy chain CDR3 for antibody 5758 (IGHV3-23)
AKAGIVGCLDV

SEQ ID NO: 11517 - protein, 9 aa, Homo sapiens
  Light chain CDR3 for antibody 5759 (IGKV1D-16)
QQYNSYPYT

SEQ ID NO: 11518 - protein, 17 aa, Homo sapiens
  Heavy chain CDR3 for antibody 5759 (IGHV3-33)
AKGISVADYYYYYAFDV

SEQ ID NO: 11519 - protein, 9 aa, Homo sapiens
  Light chain CDR3 for antibody 5760 (IGKV3D-7)
QQDYNLPYT

SEQ ID NO: 11520 - protein, 18 aa, Homo sapiens
  Heavy chain CDR3 for antibody 5760 (IGHV3-33)
ARREGITLIFYYYYGMDV

SEQ ID NO: 11521 - protein, 10 aa, Homo sapiens
  Light chain CDR3 for antibody 5761 (IGKV3-15)
QQYNNWPPLT

SEQ ID NO: 11522 - protein, 15 aa, Homo sapiens
  Heavy chain CDR3 for antibody 5761 (IGHV3-33)
ARDRGWKAPGYGMDV

SEQ ID NO: 11523 - protein, 8 aa, Homo sapiens
  Light chain CDR3 for antibody 5762 (IGKV3-20)
QQYGSSFT

SEQ ID NO: 11524 - protein, 17 aa, Homo sapiens
  Heavy chain CDR3 for antibody 5762 (IGHV3-33)
ARESLKLGIYYYYGMDV

SEQ ID NO: 11525 - protein, 9 aa, Homo sapiens
  Light chain CDR3 for antibody 5763 (IGKV5-2)
LQHDNFPYT

SEQ ID NO: 11526 - protein, 13 aa, Homo sapiens
  Heavy chain CDR3 for antibody 5763 (IGHV1-18)
ARGGGVRGAPLDY

SEQ ID NO: 11527 - protein, 8 aa, Homo sapiens
  Light chain CDR3 for antibody 5764 (IGKV3-20)
QQYGRSFT

SEQ ID NO: 11528 - protein, 12 aa, Homo sapiens
  Heavy chain CDR3 for antibody 5764 (IGHV4-59)
ARDRSGWAYFDY

SEQ ID NO: 11529 - protein, 8 aa, Homo sapiens
  Light chain CDR3 for antibody 5765 (IGKV1D-13)
QQFNNYPT

SEQ ID NO: 11530 - protein, 18 aa, Homo sapiens
  Heavy chain CDR3 for antibody 5765 (IGHV3-23)
AKEGNYYGSGSYWGYFDP

SEQ ID NO: 11531 - protein, 9 aa, Homo sapiens
  Light chain CDR3 for antibody 5766 (IGKV1-16)
QHYNDYPFT

SEQ ID NO: 11532 - protein, 18 aa, Homo sapiens
  Heavy chain CDR3 for antibody 5766 (IGHV3-33)
ARDRDRYGSGTYPDAIDI

SEQ ID NO: 11533 - protein, 10 aa, Homo sapiens
  Light chain CDR3 for antibody 5767 (IGKV3-11)
QQRSNWPILT

SEQ ID NO: 11534 - protein, 13 aa, Homo sapiens
  Heavy chain CDR3 for antibody 5767 (IGHV3-21)
ARDSTLVRGVFPY

SEQ ID NO: 11535 - protein, 10 aa, Homo sapiens
  Light chain CDR3 for antibody 5768 (IGKV3-11)
QQRSNWPIFT

SEQ ID NO: 11536 - protein, 11 aa, Homo sapiens
  Heavy chain CDR3 for antibody 5768 (IGHV3-33)
ARDTWDDYFDY

SEQ ID NO: 11537 - protein, 9 aa, Homo sapiens
  Light chain CDR3 for antibody 5769 (IGKV1-9)
QQLKSYLYT

SEQ ID NO: 11538 - protein, 23 aa, Homo sapiens
  Heavy chain CDR3 for antibody 5769 (IGHV1-18)
ARNLHYDILTGYFPYYFYYGMDV

SEQ ID NO: 11539 - protein, 9 aa, Homo sapiens
  Light chain CDR3 for antibody 5770 (IGKV1-17)
LQHNSYPYT

SEQ ID NO: 11540 - protein, 14 aa, Homo sapiens
  Heavy chain CDR3 for antibody 5770 (IGHV3-33)
AREMVRGVPNWFDP

SEQ ID NO: 11541 - protein, 10 aa, Homo sapiens
  Light chain CDR3 for antibody 5771 (IGKV1-17)
LQHNSYPMYT

SEQ ID NO: 11542 - protein, 16 aa, Homo sapiens
  Heavy chain CDR3 for antibody 5771 (IGHV3-33)
ARGYDMLTGDYYGMDV

SEQ ID NO: 11543 - protein, 9 aa, Homo sapiens
  Light chain CDR3 for antibody 5772 (IGKV1-39)
QQSYSTPLT

SEQ ID NO: 11544 - protein, 12 aa, Homo sapiens
  Heavy chain CDR3 for antibody 5772 (IGHV3-33)
ARDLVRGIRMDV

SEQ ID NO: 11545 - protein, 9 aa, Homo sapiens
  Light chain CDR3 for antibody 5773 (IGKV1-17)
LQHNSYPRT

SEQ ID NO: 11546 - protein, 19 aa, Homo sapiens
  Heavy chain CDR3 for antibody 5773 (IGHV4-39)
ARQGDVLRYFDWLLGAFDI

SEQ ID NO: 11547 - protein, 9 aa, Homo sapiens
  Light chain CDR3 for antibody 5774 (IGKV1-6)
LQDYNYPLT

SEQ ID NO: 11548 - protein, 10 aa, Homo sapiens
  Heavy chain CDR3 for antibody 5774 (IGHV3-33)
VRMTTVIFDY

SEQ ID NO: 11549 - protein, 9 aa, Homo sapiens
  Light chain CDR3 for antibody 5775 (IGKV1-9)
QQGNTYSRT

SEQ ID NO: 11550 - protein, 13 aa, Homo sapiens
  Heavy chain CDR3 for antibody 5775 (IGHV4-59)
ARREVVGGRGFDY

SEQ ID NO: 11551 - protein, 9 aa, Homo sapiens
  Light chain CDR3 for antibody 5776 (IGKV3D-7)
QQDYNLPYT

SEQ ID NO: 11552 - protein, 18 aa, Homo sapiens
  Heavy chain CDR3 for antibody 5776 (IGHV3-33)
VREGGYYGSGSYPDAFDI

SEQ ID NO: 11553 - protein, 9 aa, Homo sapiens
  Light chain CDR3 for antibody 5777 (IGKV1-16)
QQYNSYPYT

SEQ ID NO: 11554 - protein, 11 aa, Homo sapiens
  Heavy chain CDR3 for antibody 5777 (IGHV3-33)
AREAANWGFDY

SEQ ID NO: 11555 - protein, 9 aa, Homo sapiens
  Light chain CDR3 for antibody 5778 (IGKV2D-28)
MQVLQTPFT

SEQ ID NO: 11556 - protein, 12 aa, Homo sapiens
  Heavy chain CDR3 for antibody 5778 (IGHV4-39)
ARHGSGSSYFDY

SEQ ID NO: 11557 - protein, 8 aa, Homo sapiens
  Light chain CDR3 for antibody 5779 (IGKV1-5)
QQYNSYYT

SEQ ID NO: 11558 - protein, 12 aa, Homo sapiens
  Heavy chain CDR3 for antibody 5779 (IGHV3-33)
ARDSSGWSHFDY

SEQ ID NO: 11559 - protein, 9 aa, Homo sapiens
  Light chain CDR3 for antibody 5780 (IGKV1-6)
LQDYKSPFT

SEQ ID NO: 11560 - protein, 12 aa, Homo sapiens
  Heavy chain CDR3 for antibody 5780 (IGHV3-23)
AKEYDILTGYFH

SEQ ID NO: 11561 - protein, 9 aa, Homo sapiens
  Light chain CDR3 for antibody 5781 (IGKV3D-7)
QQDYEFPLT

SEQ ID NO: 11562 - protein, 11 aa, Homo sapiens
  Heavy chain CDR3 for antibody 5781 (IGHV4-59)
TRDRGLGSFDY

SEQ ID NO: 11563 - protein, 9 aa, Homo sapiens
  Light chain CDR3 for antibody 5782 (IGKV6-21)
HQSSSLPYT

SEQ ID NO: 11564 - protein, 10 aa, Homo sapiens
  Heavy chain CDR3 for antibody 5782 (IGHV1-18)
ARGPTSDVDY

SEQ ID NO: 11565 - protein, 9 aa, Homo sapiens
  Light chain CDR3 for antibody 5783 (IGKV3D-20)
QQYGSGPWT

SEQ ID NO: 11566 - protein, 13 aa, Homo sapiens
  Heavy chain CDR3 for antibody 5783 (IGHV3-33)
ARTDYYFYYGLDV

SEQ ID NO: 11567 - protein, 9 aa, Homo sapiens
  Light chain CDR3 for antibody 5784 (IGKV1-27)
QKYNSAPYT

SEQ ID NO: 11568 - protein, 11 aa, Homo sapiens
  Heavy chain CDR3 for antibody 5784 (IGHV3-33)
ARGSGSYAFDY

SEQ ID NO: 11569 - protein, 9 aa, Homo sapiens
  Light chain CDR3 for antibody 5785 (IGKV1-9)
QQLNSYPLT

SEQ ID NO: 11570 - protein, 17 aa, Homo sapiens
  Heavy chain CDR3 for antibody 5785 (IGHV3-33)
VREGGLLWVGELALFDY

SEQ ID NO: 11571 - protein, 9 aa, Homo sapiens
  Light chain CDR3 for antibody 5786 (IGKV1D-13)
QQFNNYPYT

SEQ ID NO: 11572 - protein, 17 aa, Homo sapiens
  Heavy chain CDR3 for antibody 5786 (IGHV3-23)
AKDTITMVRGALFGMDV

SEQ ID NO: 11573 - protein, 9 aa, Homo sapiens
  Light chain CDR3 for antibody 5787 (IGKV3-11)
QQRSNWMYT

SEQ ID NO: 11574 - protein, 13 aa, Homo sapiens
  Heavy chain CDR3 for antibody 5787 (IGHV3-33)
ARIDYYSYYGMDV

SEQ ID NO: 11575 - protein, 9 aa, Homo sapiens
  Light chain CDR3 for antibody 5788 (IGKV5-2)
LQHDNFPYT

SEQ ID NO: 11576 - protein, 12 aa, Homo sapiens
  Heavy chain CDR3 for antibody 5788 (IGHV1-18)
ARVLFDGDYFDY

SEQ ID NO: 11577 - protein, 9 aa, Homo sapiens
  Light chain CDR3 for antibody 5789 (IGKV1D-13)
QQFNNYPHT

SEQ ID NO: 11578 - protein, 14 aa, Homo sapiens
  Heavy chain CDR3 for antibody 5789 (IGHV3-23)
ARDLNYDILNGGGY

SEQ ID NO: 11579 - protein, 9 aa, Homo sapiens
  Light chain CDR3 for antibody 5790 (IGKV1-17)
LQHNSYPRT

SEQ ID NO: 11580 - protein, 18 aa, Homo sapiens
  Heavy chain CDR3 for antibody 5790 (IGHV4-59)
ARDNHYYSSGTYSNWFDP

SEQ ID NO: 11581 - protein, 9 aa, Homo sapiens
  Light chain CDR3 for antibody 5791 (IGKV6-21)
HQSSSLPYT

SEQ ID NO: 11582 - protein, 11 aa, Homo sapiens
  Heavy chain CDR3 for antibody 5791 (IGHV3-64)
ARERGSYAFDI

SEQ ID NO: 11583 - protein, 9 aa, Homo sapiens
  Light chain CDR3 for antibody 5792 (IGKV3-11)
QQRSNWPLT

SEQ ID NO: 11584 - protein, 18 aa, Homo sapiens
  Heavy chain CDR3 for antibody 5792 (IGHV3-33)
VRDRERYGSGSYPDAFDI

SEQ ID NO: 11585 - protein, 8 aa, Homo sapiens
  Light chain CDR3 for antibody 5793 (IGKV1-5)
QQYNSYWT

SEQ ID NO: 11586 - protein, 14 aa, Homo sapiens
  Heavy chain CDR3 for antibody 5793 (IGHV3-33)
ARAGSGYDRDWFDP

SEQ ID NO: 11587 - protein, 9 aa, Homo sapiens
  Light chain CDR3 for antibody 5794 (IGKV3-11)
QQRSNWPYT

SEQ ID NO: 11588 - protein, 13 aa, Homo sapiens
  Heavy chain CDR3 for antibody 5794 (IGHV3-33)
ARDSSSWYHWFDP

SEQ ID NO: 11589 - protein, 9 aa, Homo sapiens
  Light chain CDR3 for antibody 5795 (IGKV3-11)
QQRSNWMYT

SEQ ID NO: 11590 - protein, 13 aa, Homo sapiens
  Heavy chain CDR3 for antibody 5795 (IGHV4-39)
ARHPPSRDYGMDV

SEQ ID NO: 11591 - protein, 9 aa, Homo sapiens
  Light chain CDR3 for antibody 5796 (IGKV1-6)
LQDYKSPFT

SEQ ID NO: 11592 - protein, 12 aa, Homo sapiens
  Heavy chain CDR3 for antibody 5796 (IGHV3-33)
ARGYFGSGYAHF

SEQ ID NO: 11593 - protein, 10 aa, Homo sapiens
  Light chain CDR3 for antibody 5797 (IGKV1-17)
LQHNSYPMYT

SEQ ID NO: 11594 - protein, 15 aa, Homo sapiens
  Heavy chain CDR3 for antibody 5797 (IGHV1-18)
ARGYCSSTSCYYFDY

SEQ ID NO: 11595 - protein, 9 aa, Homo sapiens
  Light chain CDR3 for antibody 5798 (IGKV3-15)
QQYNNWPRT

SEQ ID NO: 11596 - protein, 10 aa, Homo sapiens
  Heavy chain CDR3 for antibody 5798 (IGHV3-33)
ARDGSGSQPI

SEQ ID NO: 11597 - protein, 9 aa, Homo sapiens
  Light chain CDR3 for antibody 5799 (IGKV1-6)
LQDYNYPWT

SEQ ID NO: 11598 - protein, 13 aa, Homo sapiens
  Heavy chain CDR3 for antibody 5799 (IGHV4-61)
ARDGSSSGWDFDY

SEQ ID NO: 11599 - protein, 9 aa, Homo sapiens
  Light chain CDR3 for antibody 5800 (IGKV1-9)
QQLNSYPWP

SEQ ID NO: 11600 - protein, 11 aa, Homo sapiens
  Heavy chain CDR3 for antibody 5800 (IGHV3-33)
ARDRSSGPFDY

SEQ ID NO: 11601 - protein, 8 aa, Homo sapiens
  Light chain CDR3 for antibody 5801 (IGKV3-11)
QQRSNWWT

SEQ ID NO: 11602 - protein, 13 aa, Homo sapiens
  Heavy chain CDR3 for antibody 5801 (IGHV3-33)
ARDWGYSHGYFDY

SEQ ID NO: 11603 - protein, 9 aa, Homo sapiens
  Light chain CDR3 for antibody 5802 (IGKV1-5)
QQYNTYSRT

SEQ ID NO: 11604 - protein, 14 aa, Homo sapiens
  Heavy chain CDR3 for antibody 5802 (IGHV3-23)
AKSRIVGALYYFDY

SEQ ID NO: 11605 - protein, 9 aa, Homo sapiens
  Light chain CDR3 for antibody 5803 (IGKV3D-20)
QQYGSSPYT

SEQ ID NO: 11606 - protein, 16 aa, Homo sapiens
  Heavy chain CDR3 for antibody 5803 (IGHV3-33)
AREVGAKDYYYYGMDV

SEQ ID NO: 11607 - protein, 9 aa, Homo sapiens
  Light chain CDR3 for antibody 5804 (IGKV3-11)
QQRINWPWT

SEQ ID NO: 11608 - protein, 11 aa, Homo sapiens
  Heavy chain CDR3 for antibody 5804 (IGHV4-4)
AREAYYYGLDV

SEQ ID NO: 11609 - protein, 9 aa, Homo sapiens
  Light chain CDR3 for antibody 5805 (IGKV2D-28)
MQALQTPPT

SEQ ID NO: 11610 - protein, 12 aa, Homo sapiens
  Heavy chain CDR3 for antibody 5805 (IGHV3-23)
AKDGWFGESLDY

SEQ ID NO: 11611 - protein, 10 aa, Homo sapiens
  Light chain CDR3 for antibody 5806 (IGKV3-20)
QQYGRSPPVT

SEQ ID NO: 11612 - protein, 12 aa, Homo sapiens
  Heavy chain CDR3 for antibody 5806 (IGHV3-33)
ARGYFGSGYAHF

SEQ ID NO: 11613 - protein, 9 aa, Homo sapiens
  Light chain CDR3 for antibody 5807 (IGKV3D-7)
QQDYNLPWT

SEQ ID NO: 11614 - protein, 14 aa, Homo sapiens
  Heavy chain CDR3 for antibody 5807 (IGHV3-20)
ARDEGSGGYDVFDI

SEQ ID NO: 11615 - protein, 9 aa, Homo sapiens
  Light chain CDR3 for antibody 5808 (IGKV1-9)
QQLISYPLT

SEQ ID NO: 11616 - protein, 13 aa, Homo sapiens
  Heavy chain CDR3 for antibody 5808 (IGHV3-33)
ARVDTMVRGVMAY

SEQ ID NO: 11617 - protein, 9 aa, Homo sapiens
  Light chain CDR3 for antibody 5809 (IGKV5-2)
LQHDNFPWT

SEQ ID NO: 11618 - protein, 10 aa, Homo sapiens
  Heavy chain CDR3 for antibody 5809 (IGHV4-34)
ARHGVAGTNY

SEQ ID NO: 11619 - protein, 9 aa, Homo sapiens
  Light chain CDR3 for antibody 5810 (IGKV3-15)
QQYNNWPLT

SEQ ID NO: 11620 - protein, 26 aa, Homo sapiens
  Heavy chain CDR3 for antibody 5810 (IGHV4-39)
ARQGLLWFGDLKAYDSSGYYYGYFHH

SEQ ID NO: 11621 - protein, 10 aa, Homo sapiens
  Light chain CDR3 for antibody 5811 (IGKV3-11)
QQRSNWPALT

SEQ ID NO: 11622 - protein, 13 aa, Homo sapiens
  Heavy chain CDR3 for antibody 5811 (IGHV1-46)
ARVKLGSLGAFDI

SEQ ID NO: 11623 - protein, 9 aa, Homo sapiens
  Light chain CDR3 for antibody 5812 (IGKV3D-7)
QQDYNLPLT

SEQ ID NO: 11624 - protein, 15 aa, Homo sapiens
  Heavy chain CDR3 for antibody 5812 (IGHV3-11)
ARDRAVAGTIHAFGI

SEQ ID NO: 11625 - protein, 9 aa, Homo sapiens
  Light chain CDR3 for antibody 5813 (IGKV5-2)
LQHDKFPYT

SEQ ID NO: 11626 - protein, 17 aa, Homo sapiens
  Heavy chain CDR3 for antibody 5813 (IGHV3-33)
ARDRDDILTGFYTYFDY

SEQ ID NO: 11627 - protein, 9 aa, Homo sapiens
  Light chain CDR3 for antibody 5814 (IGKV3-11)
QQRSNWPPT

SEQ ID NO: 11628 - protein, 17 aa, Homo sapiens
  Heavy chain CDR3 for antibody 5814 (IGHV3-33)
ARVQYDILTGYSPYFDN

SEQ ID NO: 11629 - protein, 9 aa, Homo sapiens
  Light chain CDR3 for antibody 5815 (IGKV2D-24)
TQATQFPHT

SEQ ID NO: 11630 - protein, 17 aa, Homo sapiens
  Heavy chain CDR3 for antibody 5815 (IGHV1-18)
ARDEGYDILTGYPHFDY

SEQ ID NO: 11631 - protein, 9 aa, Homo sapiens
  Light chain CDR3 for antibody 5816 (IGKV1-17)
LQQNSYPWT

SEQ ID NO: 11632 - protein, 14 aa, Homo sapiens
  Heavy chain CDR3 for antibody 5816 (IGHV4-39)
ARDSGYDYYYAMDV

SEQ ID NO: 11633 - protein, 9 aa, Homo sapiens
  Light chain CDR3 for antibody 5817 (IGKV1-33)
QQYDNLPFT

SEQ ID NO: 11634 - protein, 12 aa, Homo sapiens
  Heavy chain CDR3 for antibody 5817 (IGHV3-33)
TRGYSSKSYFDY

SEQ ID NO: 11635 - protein, 9 aa, Homo sapiens
  Light chain CDR3 for antibody 5818 (IGKV3D-7)
QQDYNLPYT

SEQ ID NO: 11636 - protein, 14 aa, Homo sapiens
  Heavy chain CDR3 for antibody 5818 (IGHV4-39)
ARDSGYDYYYAMDV

SEQ ID NO: 11637 - protein, 9 aa, Homo sapiens
  Light chain CDR3 for antibody 5819 (IGKV1D-13)
QQFNNYPRT

SEQ ID NO: 11638 - protein, 17 aa, Homo sapiens
  Heavy chain CDR3 for antibody 5819 (IGHV3-33)
AREHIVVVTAINDAFDI

SEQ ID NO: 11639 - protein, 8 aa, Homo sapiens
  Light chain CDR3 for antibody 5820 (IGKV3-11)
QQRSNWLT

SEQ ID NO: 11640 - protein, 18 aa, Homo sapiens
  Heavy chain CDR3 for antibody 5820 (IGHV3-33)
ARREGIVGATTYYYGMDV

SEQ ID NO: 11641 - protein, 9 aa, Homo sapiens
  Light chain CDR3 for antibody 5821 (IGKV3D-7)
QQDYNLPYT

SEQ ID NO: 11642 - protein, 12 aa, Homo sapiens
  Heavy chain CDR3 for antibody 5821 (IGHV3-33)
ARKGYDMHAFDI

SEQ ID NO: 11643 - protein, 9 aa, Homo sapiens
  Light chain CDR3 for antibody 5822 (IGKV1D-13)
QQFNNYPHT

SEQ ID NO: 11644 - protein, 10 aa, Homo sapiens
  Heavy chain CDR3 for antibody 5822 (IGHV3-74)
ARENWGGFDY

SEQ ID NO: 11645 - protein, 9 aa, Homo sapiens
  Light chain CDR3 for antibody 5823 (IGKV1-17)
LQHNSYPYT

SEQ ID NO: 11646 - protein, 11 aa, Homo sapiens
  Heavy chain CDR3 for antibody 5823 (IGHV3-23)
AKEQKEAAMGA

SEQ ID NO: 11647 - protein, 9 aa, Homo sapiens
  Light chain CDR3 for antibody 5824 (IGKV3-15)
QQYNNWPLT

SEQ ID NO: 11648 - protein, 13 aa, Homo sapiens
  Heavy chain CDR3 for antibody 5824 (IGHV3-33)
AKEDGDYHHYFDY

SEQ ID NO: 11649 - protein, 9 aa, Homo sapiens
  Light chain CDR3 for antibody 5825 (IGKV1-17)
LQHNSYPYT

SEQ ID NO: 11650 - protein, 16 aa, Homo sapiens
  Heavy chain CDR3 for antibody 5825 (IGHV4-59)
AREGYNWNDGVNWFDP

SEQ ID NO: 11651 - protein, 9 aa, Homo sapiens
  Light chain CDR3 for antibody 5826 (IGKV2-30)
MQGTHWPLT

SEQ ID NO: 11652 - protein, 9 aa, Homo sapiens
  Heavy chain CDR3 for antibody 5826 (IGHV3-23)
AKEQQLFDY

SEQ ID NO: 11653 - protein, 9 aa, Homo sapiens
  Light chain CDR3 for antibody 5827 (IGKV1-27)
QKYNSAPYT

SEQ ID NO: 11654 - protein, 14 aa, Homo sapiens
  Heavy chain CDR3 for antibody 5827 (IGHV4-39)
ARQGGSGSYYNLDY

SEQ ID NO: 11655 - protein, 9 aa, Homo sapiens
  Light chain CDR3 for antibody 5828 (IGKV6-21)
HQSTSLPFT

SEQ ID NO: 11656 - protein, 12 aa, Homo sapiens
  Heavy chain CDR3 for antibody 5828 (IGHV4-61)
ARVDSSGWYFDY

SEQ ID NO: 11657 - protein, 9 aa, Homo sapiens
  Light chain CDR3 for antibody 5829 (IGKV1-6)
LQNYNYPYT

SEQ ID NO: 11658 - protein, 13 aa, Homo sapiens
  Heavy chain CDR3 for antibody 5829 (IGHV3-33)
ARDLAVAGYPFDF

SEQ ID NO: 11659 - protein, 9 aa, Homo sapiens
  Light chain CDR3 for antibody 5830 (IGKV1D-16)
QQYSSYPYT

SEQ ID NO: 11660 - protein, 9 aa, Homo sapiens
  Heavy chain CDR3 for antibody 5830 (IGHV3-30)
VRDNWGFDY

SEQ ID NO: 11661 - protein, 9 aa, Homo sapiens
  Light chain CDR3 for antibody 5831 (IGKV1-9)
QQLNSYPYT

SEQ ID NO: 11662 - protein, 15 aa, Homo sapiens
  Heavy chain CDR3 for antibody 5831 (IGHV3-33)
VCVLYDYGDYVGFDY

SEQ ID NO: 11663 - protein, 9 aa, Homo sapiens
  Light chain CDR3 for antibody 5832 (IGKV1-39)
QQSYSTPLT

SEQ ID NO: 11664 - protein, 16 aa, Homo sapiens
  Heavy chain CDR3 for antibody 5832 (IGHV3-33)
AREGGLIAAAGTGFDY

SEQ ID NO: 11665 - protein, 9 aa, Homo sapiens
  Light chain CDR3 for antibody 5833 (IGKV1-27)
QKYNSAPYT

SEQ ID NO: 11666 - protein, 14 aa, Homo sapiens
  Heavy chain CDR3 for antibody 5833 (IGHV4-39)
ARRGVVVPPGGMDV

SEQ ID NO: 11667 - protein, 9 aa, Homo sapiens
  Light chain CDR3 for antibody 5834 (IGKV1-27)
QKYNSAPYT

SEQ ID NO: 11668 - protein, 16 aa, Homo sapiens
  Heavy chain CDR3 for antibody 5834 (IGHV3-33)
AREVAGSYYYYYGMDV

SEQ ID NO: 11669 - protein, 9 aa, Homo sapiens
  Light chain CDR3 for antibody 5835 (IGKV3D-20)
QQYGSSPLT

SEQ ID NO: 11670 - protein, 14 aa, Homo sapiens
  Heavy chain CDR3 for antibody 5835 (IGHV3-20)
ARDRGSSFFDAFDI

SEQ ID NO: 11671 - protein, 9 aa, Homo sapiens
  Light chain CDR3 for antibody 5836 (IGKV1D-16)
QQYNSYPYT

SEQ ID NO: 11672 - protein, 5 aa, Homo sapiens
  Heavy chain CDR3 for antibody 5836 (IGHV1-18)
AREDY

SEQ ID NO: 11673 - protein, 9 aa, Homo sapiens
  Light chain CDR3 for antibody 5837 (IGKV1D-16)
QQYYSYPRT

SEQ ID NO: 11674 - protein, 13 aa, Homo sapiens
  Heavy chain CDR3 for antibody 5837 (IGHV4-59)
ARTMVRGVAPFDY

SEQ ID NO: 11675 - protein, 9 aa, Homo sapiens
  Light chain CDR3 for antibody 5838 (IGKV1-39)
QQSYRTPLT

SEQ ID NO: 11676 - protein, 13 aa, Homo sapiens
  Heavy chain CDR3 for antibody 5838 (IGHV1-46)
ARRQVGYYYGMDV

SEQ ID NO: 11677 - protein, 9 aa, Homo sapiens
  Light chain CDR3 for antibody 5839 (IGKV1D-16)
QQYNSFPLT

SEQ ID NO: 11678 - protein, 12 aa, Homo sapiens
  Heavy chain CDR3 for antibody 5839 (IGHV4-59)
ARGRYFDWLWDY

SEQ ID NO: 11679 - protein, 9 aa, Homo sapiens
  Light chain CDR3 for antibody 5840 (IGKV2-30)
MQGTHWPLT

SEQ ID NO: 11680 - protein, 9 aa, Homo sapiens
  Heavy chain CDR3 for antibody 5840 (IGHV3-33)
AREYKEFDY

SEQ ID NO: 11681 - protein, 9 aa, Homo sapiens
  Light chain CDR3 for antibody 5841 (IGKV1-16)
QHYNDYPFT

SEQ ID NO: 11682 - protein, 16 aa, Homo sapiens
  Heavy chain CDR3 for antibody 5841 (IGHV4-59)
ARGRYFEWLLGDVFDI

SEQ ID NO: 11683 - protein, 9 aa, Homo sapiens
  Light chain CDR3 for antibody 5842 (IGKV1-33)
QQYDNLPFT

SEQ ID NO: 11684 - protein, 14 aa, Homo sapiens
  Heavy chain CDR3 for antibody 5842 (IGHV3-33)
ARAISGSSYWYFDL

SEQ ID NO: 11685 - protein, 9 aa, Homo sapiens
  Light chain CDR3 for antibody 5843 (IGKV3-11)
QQRSNWPYT

SEQ ID NO: 11686 - protein, 14 aa, Homo sapiens
  Heavy chain CDR3 for antibody 5843 (IGHV3-20)
ARDGGSTCYDWFDP

SEQ ID NO: 11687 - protein, 8 aa, Homo sapiens
  Light chain CDR3 for antibody 5844 (IGKV2D-28)
MQALQTPT

SEQ ID NO: 11688 - protein, 15 aa, Homo sapiens
  Heavy chain CDR3 for antibody 5844 (IGHV3-30)
ARGAMVRGVDYGMDV

SEQ ID NO: 11689 - protein, 9 aa, Homo sapiens
  Light chain CDR3 for antibody 5845 (IGKV1-9)
QQLHIYPWT

SEQ ID NO: 11690 - protein, 12 aa, Homo sapiens
  Heavy chain CDR3 for antibody 5845 (IGHV3-33)
VRKGYALYGLDV

SEQ ID NO: 11691 - protein, 9 aa, Homo sapiens
  Light chain CDR3 for antibody 5846 (IGKV2D-28)
MQVLQTPFT

SEQ ID NO: 11692 - protein, 12 aa, Homo sapiens
  Heavy chain CDR3 for antibody 5846 (IGHV4-61)
ARVYSSGWLFDY

SEQ ID NO: 11693 - protein, 9 aa, Homo sapiens
  Light chain CDR3 for antibody 5847 (IGKV1-6)
LQDYNYPYT

SEQ ID NO: 11694 - protein, 19 aa, Homo sapiens
  Heavy chain CDR3 for antibody 5847 (IGHV3-33)
ARGGVVRGVIEYYYYGMDV

SEQ ID NO: 11695 - protein, 9 aa, Homo sapiens
  Light chain CDR3 for antibody 5848 (IGKV1-17)
LQHNSYPWT

SEQ ID NO: 11696 - protein, 14 aa, Homo sapiens
  Heavy chain CDR3 for antibody 5848 (IGHV4-39)
ARQGGSGSYYNLDY

SEQ ID NO: 11697 - protein, 9 aa, Homo sapiens
  Light chain CDR3 for antibody 5849 (IGKV1-39)
QQSYSTPFT

SEQ ID NO: 11698 - protein, 15 aa, Homo sapiens
  Heavy chain CDR3 for antibody 5849 (IGHV3-33)
ARDSRPEITGPPFDY

SEQ ID NO: 11699 - protein, 9 aa, Homo sapiens
  Light chain CDR3 for antibody 5850 (IGKV3D-7)
QQDYNLPLT

SEQ ID NO: 11700 - protein, 17 aa, Homo sapiens
  Heavy chain CDR3 for antibody 5850 (IGHV4-59)
AREGADSGIYYHWYFDL

SEQ ID NO: 11701 - protein, 9 aa, Homo sapiens
  Light chain CDR3 for antibody 5851 (IGKV4-1)
QQSYSTPLT

SEQ ID NO: 11702 - protein, 10 aa, Homo sapiens
  Heavy chain CDR3 for antibody 5851 (IGHV1-18)
AREQRLGFDY

SEQ ID NO: 11703 - protein, 8 aa, Homo sapiens
  Light chain CDR3 for antibody 5852 (IGKV3-20)
QQYGSSRT

SEQ ID NO: 11704 - protein, 17 aa, Homo sapiens
  Heavy chain CDR3 for antibody 5852 (IGHV1-18)
ARDRAFTMVRGVPPFDY

SEQ ID NO: 11705 - protein, 9 aa, Homo sapiens
  Light chain CDR3 for antibody 5853 (IGKV1-9)
QQLNSYPWT

SEQ ID NO: 11706 - protein, 13 aa, Homo sapiens
  Heavy chain CDR3 for antibody 5853 (IGHV3-33)
ARKAYGDYFYFDY

SEQ ID NO: 11707 - protein, 9 aa, Homo sapiens
  Light chain CDR3 for antibody 5854 (IGKV1D-13)
QQFNNYPIT

SEQ ID NO: 11708 - protein, 23 aa, Homo sapiens
  Heavy chain CDR3 for antibody 5854 (IGHV3-23)
AKDAGLPYDLLTGPYYYYFGINV

SEQ ID NO: 11709 - protein, 9 aa, Homo sapiens
  Light chain CDR3 for antibody 5855 (IGKV3D-7)
QQDYEFPLT

SEQ ID NO: 11710 - protein, 17 aa, Homo sapiens
  Heavy chain CDR3 for antibody 5855 (IGHV4-39)
ARQGWYYGSGSSLLFDY

SEQ ID NO: 11711 - protein, 9 aa, Homo sapiens
  Light chain CDR3 for antibody 5856 (IGKV3-15)
QQYNNWPLT

SEQ ID NO: 11712 - protein, 14 aa, Homo sapiens
  Heavy chain CDR3 for antibody 5856 (IGHV1-46)
ARDGVGAKEGGFDY

SEQ ID NO: 11713 - protein, 9 aa, Homo sapiens
  Light chain CDR3 for antibody 5857 (IGKV1-16)
QKYNSNPLT

SEQ ID NO: 11714 - protein, 14 aa, Homo sapiens
  Heavy chain CDR3 for antibody 5857 (IGHV3-33)
AREGYSSNWYDFDY

SEQ ID NO: 11715 - protein, 10 aa, Homo sapiens
  Light chain CDR3 for antibody 5858 (IGKV1-39)
QQSYSTPMYT

SEQ ID NO: 11716 - protein, 13 aa, Homo sapiens
  Heavy chain CDR3 for antibody 5858 (IGHV3-33)
ARDSSSWYHWFDP

SEQ ID NO: 11717 - protein, 9 aa, Homo sapiens
  Light chain CDR3 for antibody 5859 (IGKV1-17)
QQLNSYPLT

SEQ ID NO: 11718 - protein, 17 aa, Homo sapiens
  Heavy chain CDR3 for antibody 5859 (IGHV3-33)
ARGYSGYVGYYYYGMDV

SEQ ID NO: 11719 - protein, 9 aa, Homo sapiens
  Light chain CDR3 for antibody 5860 (IGKV3D-20)
QQYGSSPYT

SEQ ID NO: 11720 - protein, 18 aa, Homo sapiens
  Heavy chain CDR3 for antibody 5860 (IGHV3-33)
ARGAYSSGWDYYYYGLDV

SEQ ID NO: 11721 - protein, 9 aa, Homo sapiens
  Light chain CDR3 for antibody 5861 (IGKV1-6)
LQDYNYPFT

SEQ ID NO: 11722 - protein, 15 aa, Homo sapiens
  Heavy chain CDR3 for antibody 5861 (IGHV1-46)
ARAPLLLWFGEFIDY

SEQ ID NO: 11723 - protein, 8 aa, Homo sapiens
  Light chain CDR3 for antibody 5862 (IGKV3-11)
QQRSNWWT

SEQ ID NO: 11724 - protein, 12 aa, Homo sapiens
  Heavy chain CDR3 for antibody 5862 (IGHV3-33)
TRGYSSKSYFDY

SEQ ID NO: 11725 - protein, 9 aa, Homo sapiens
  Light chain CDR3 for antibody 5863 (IGKV1-16)
QHYNDYPFT

SEQ ID NO: 11726 - protein, 13 aa, Homo sapiens
  Heavy chain CDR3 for antibody 5863 (IGHV3-33)
ARKAYGDYFYFDY

SEQ ID NO: 11727 - protein, 9 aa, Homo sapiens
  Light chain CDR3 for antibody 5864 (IGKV1-6)
LQDYKSPFT

SEQ ID NO: 11728 - protein, 12 aa, Homo sapiens
  Heavy chain CDR3 for antibody 5864 (IGHV3-33)
ARDLVGATPFDY

SEQ ID NO: 11729 - protein, 9 aa, Homo sapiens
  Light chain CDR3 for antibody 5865 (IGKV3D-7)
QQDYNLPLT

SEQ ID NO: 11730 - protein, 11 aa, Homo sapiens
  Heavy chain CDR3 for antibody 5865 (IGHV3-33)
ARAGIAALFDY

SEQ ID NO: 11731 - protein, 9 aa, Homo sapiens
  Light chain CDR3 for antibody 5866 (IGKV2-30)
MQGTHWPLT

SEQ ID NO: 11732 - protein, 12 aa, Homo sapiens
  Heavy chain CDR3 for antibody 5866 (IGHV3-33)
ARAGMGAPYFDY

SEQ ID NO: 11733 - protein, 9 aa, Homo sapiens
  Light chain CDR3 for antibody 5867 (IGKV1-27)
QKYNSAPYT

SEQ ID NO: 11734 - protein, 13 aa, Homo sapiens
  Heavy chain CDR3 for antibody 5867 (IGHV3-33)
ARDSSSWYHWFDP

SEQ ID NO: 11735 - protein, 9 aa, Homo sapiens
  Light chain CDR3 for antibody 5868 (IGKV3-11)
QQRSNWPLT

SEQ ID NO: 11736 - protein, 22 aa, Homo sapiens
  Heavy chain CDR3 for antibody 5868 (IGHV4-59)
AREINYGSGSYYNEDYYYGMDV

SEQ ID NO: 11737 - protein, 6 aa, Homo sapiens
  Light chain CDR3 for antibody 5869 (IGKV3-20)
QQYGST

SEQ ID NO: 11738 - protein, 13 aa, Homo sapiens
  Heavy chain CDR3 for antibody 5869 (IGHV4-59)
ARDAGYSSSWFDY

SEQ ID NO: 11739 - protein, 11 aa, Homo sapiens
  Light chain CDR3 for antibody 5870 (IGKV3-11)
QQRSNWPPTWT

SEQ ID NO: 11740 - protein, 10 aa, Homo sapiens
  Heavy chain CDR3 for antibody 5870 (IGHV3-23)
AKEQWLVLDY

SEQ ID NO: 11741 - protein, 10 aa, Homo sapiens
  Light chain CDR3 for antibody 5871 (IGKV3-11)
QQRSNWPALT

SEQ ID NO: 11742 - protein, 18 aa, Homo sapiens
  Heavy chain CDR3 for antibody 5871 (IGHV3-33)
ARGGYSSGWDYYYYGMDV

SEQ ID NO: 11743 - protein, 10 aa, Homo sapiens
  Light chain CDR3 for antibody 5872 (IGKV3-15)
QQYNNWPPYT

SEQ ID NO: 11744 - protein, 11 aa, Homo sapiens
  Heavy chain CDR3 for antibody 5872 (IGHV4-59)
ARLYGGRLFDY

SEQ ID NO: 11745 - protein, 10 aa, Homo sapiens
  Light chain CDR3 for antibody 5873 (IGKV3-15)
QQYNNWPPLT

SEQ ID NO: 11746 - protein, 14 aa, Homo sapiens
  Heavy chain CDR3 for antibody 5873 (IGHV4-39)
ARQDYDILTGLFDY

SEQ ID NO: 11747 - protein, 9 aa, Homo sapiens
  Light chain CDR3 for antibody 5874 (IGKV3D-7)
QQDYNLPLT

SEQ ID NO: 11748 - protein, 24 aa, Homo sapiens
  Heavy chain CDR3 for antibody 5874 (IGHV1-46)
ARDEARGLLTGYYNMREYYYGMDV

SEQ ID NO: 11749 - protein, 9 aa, Homo sapiens
  Light chain CDR3 for antibody 5875 (IGKV3D-7)
QQDYNLPLT

SEQ ID NO: 11750 - protein, 16 aa, Homo sapiens
  Heavy chain CDR3 for antibody 5875 (IGHV3-33)
ARDGSMVRRIHDAFDF

SEQ ID NO: 11751 - protein, 10 aa, Homo sapiens
  Light chain CDR3 for antibody 5876 (IGKV3-11)
QQRSNWPALT

SEQ ID NO: 11752 - protein, 13 aa, Homo sapiens
  Heavy chain CDR3 for antibody 5876 (IGHV3-33)
ASGYSGYDWYFDL

SEQ ID NO: 11753 - protein, 9 aa, Homo sapiens
  Light chain CDR3 for antibody 5877 (IGKV2-30)
MQGTHWPLT

SEQ ID NO: 11754 - protein, 19 aa, Homo sapiens
  Heavy chain CDR3 for antibody 5877 (IGHV3-33)
TRDPHYDILTGYAYYGMDV

SEQ ID NO: 11755 - protein, 9 aa, Homo sapiens
  Light chain CDR3 for antibody 5878 (IGKV1D-16)
QQYDSYPWT

SEQ ID NO: 11756 - protein, 14 aa, Homo sapiens
  Heavy chain CDR3 for antibody 5878 (IGHV4-39)
ARDSGYDYYYGMDV

SEQ ID NO: 11757 - protein, 9 aa, Homo sapiens
  Light chain CDR3 for antibody 5879 (IGKV1-6)
LQDYNYPYT

SEQ ID NO: 11758 - protein, 16 aa, Homo sapiens
  Heavy chain CDR3 for antibody 5879 (IGHV3-33)
ARGAWYSNGWYGTFDI

SEQ ID NO: 11759 - protein, 9 aa, Homo sapiens
  Light chain CDR3 for antibody 5880 (IGKV1D-16)
QQYNSYPYT

SEQ ID NO: 11760 - protein, 11 aa, Homo sapiens
  Heavy chain CDR3 for antibody 5880 (IGHV4-59)
AREMGHDIFDI

SEQ ID NO: 11761 - protein, 9 aa, Homo sapiens
  Light chain CDR3 for antibody 5881 (IGKV1-27)
QKYNSAPYT

SEQ ID NO: 11762 - protein, 16 aa, Homo sapiens
  Heavy chain CDR3 for antibody 5881 (IGHV4-59)
ARDTPYYSGSGRPFDS

SEQ ID NO: 11763 - protein, 9 aa, Homo sapiens
  Light chain CDR3 for antibody 5882 (IGKV1-9)
QQLNTYPWT

SEQ ID NO: 11764 - protein, 11 aa, Homo sapiens
  Heavy chain CDR3 for antibody 5882 (IGHV3-33)
ARDTWDDYFDY

SEQ ID NO: 11765 - protein, 8 aa, Homo sapiens
  Light chain CDR3 for antibody 5883 (IGKV1-5)
QQYNSYWT

SEQ ID NO: 11766 - protein, 19 aa, Homo sapiens
  Heavy chain CDR3 for antibody 5883 (IGHV3-33)
TRDPHYDILTGYAYYGMDV

SEQ ID NO: 11767 - protein, 8 aa, Homo sapiens
  Light chain CDR3 for antibody 5884 (IGKV1-5)
QQYNSYWT

SEQ ID NO: 11768 - protein, 12 aa, Homo sapiens
  Heavy chain CDR3 for antibody 5884 (IGHV3-33)
AREGDILTGYSL

SEQ ID NO: 11769 - protein, 9 aa, Homo sapiens
  Light chain CDR3 for antibody 5885 (IGKV1-39)
QQSYSTPLT

SEQ ID NO: 11770 - protein, 16 aa, Homo sapiens
  Heavy chain CDR3 for antibody 5885 (IGHV3-33)
ARDRGGMTMVRGGFDY

SEQ ID NO: 11771 - protein, 9 aa, Homo sapiens
  Light chain CDR3 for antibody 5886 (IGKV3-20)
QQYGSSPYT

SEQ ID NO: 11772 - protein, 18 aa, Homo sapiens
  Heavy chain CDR3 for antibody 5886 (IGHV3-33)
VREGGYYGSGSYPDAFDI

SEQ ID NO: 11773 - protein, 8 aa, Homo sapiens
  Light chain CDR3 for antibody 5887 (IGKV1-17)
QQYNSYYT

SEQ ID NO: 11774 - protein, 14 aa, Homo sapiens
  Heavy chain CDR3 for antibody 5887 (IGHV3-33)
ARRGSPLRPSHLDV

SEQ ID NO: 11775 - protein, 9 aa, Homo sapiens
  Light chain CDR3 for antibody 5888 (IGKV1-9)
QQLKSYLYT

SEQ ID NO: 11776 - protein, 10 aa, Homo sapiens
  Heavy chain CDR3 for antibody 5888 (IGHV1-18)
AREQRLGFDY

SEQ ID NO: 11777 - protein, 9 aa, Homo sapiens
  Light chain CDR3 for antibody 5889 (IGKV2D-28)
MQALQTPPT

SEQ ID NO: 11778 - protein, 13 aa, Homo sapiens
  Heavy chain CDR3 for antibody 5889 (IGHV3-11)
ARDEGYRGYVLDT

SEQ ID NO: 11779 - protein, 9 aa, Homo sapiens
  Light chain CDR3 for antibody 5890 (IGKV1-16)
QQYNRYPYT

SEQ ID NO: 11780 - protein, 18 aa, Homo sapiens
  Heavy chain CDR3 for antibody 5890 (IGHV4-59)
AREGDYVWGSYRPNCFDP

SEQ ID NO: 11781 - protein, 9 aa, Homo sapiens
  Light chain CDR3 for antibody 5891 (IGKV1-39)
QQSYSTPLT

SEQ ID NO: 11782 - protein, 17 aa, Homo sapiens
  Heavy chain CDR3 for antibody 5891 (IGHV3-11)
ARQGVLLWFGELYYFDY

SEQ ID NO: 11783 - protein, 9 aa, Homo sapiens
  Light chain CDR3 for antibody 5892 (IGKV1-9)
QQLNTYPWT

SEQ ID NO: 11784 - protein, 18 aa, Homo sapiens
  Heavy chain CDR3 for antibody 5892 (IGHV3-33)
ARGLLWFGVSYYYYGMDV

SEQ ID NO: 11785 - protein, 9 aa, Homo sapiens
  Light chain CDR3 for antibody 5893 (IGKV1D-13)
QRFNNYLYT

SEQ ID NO: 11786 - protein, 14 aa, Homo sapiens
  Heavy chain CDR3 for antibody 5893 (IGHV3-33)
ARDRIAAASSDFDC

SEQ ID NO: 11787 - protein, 9 aa, Homo sapiens
  Light chain CDR3 for antibody 5894 (IGKV2-30)
MQGTHWPLT

SEQ ID NO: 11788 - protein, 15 aa, Homo sapiens
  Heavy chain CDR3 for antibody 5894 (IGHV3-23)
AKEFTMVRGVITPDY

SEQ ID NO: 11789 - protein, 8 aa, Homo sapiens
  Light chain CDR3 for antibody 5895 (IGKV3-11)
LQRGNWPT

SEQ ID NO: 11790 - protein, 13 aa, Homo sapiens
  Heavy chain CDR3 for antibody 5895 (IGHV4-59)
ARDAGYSSSWFDY

SEQ ID NO: 11791 - protein, 9 aa, Homo sapiens
  Light chain CDR3 for antibody 5896 (IGKV3D-20)
QQYGSSPRT

SEQ ID NO: 11792 - protein, 17 aa, Homo sapiens
  Heavy chain CDR3 for antibody 5896 (IGHV3-33)
ARGYSGYVGYYYYGMDV

SEQ ID NO: 11793 - protein, 9 aa, Homo sapiens
  Light chain CDR3 for antibody 5897 (IGKV1-17)
LQDYNYPYT

SEQ ID NO: 11794 - protein, 13 aa, Homo sapiens
  Heavy chain CDR3 for antibody 5897 (IGHV3-33)
ARDDDYGDYPFDY

SEQ ID NO: 11795 - protein, 8 aa, Homo sapiens
  Light chain CDR3 for antibody 5898 (IGKV1-5)
QQYNSYYT

SEQ ID NO: 11796 - protein, 13 aa, Homo sapiens
  Heavy chain CDR3 for antibody 5898 (IGHV3-33)
ARIDYYSYYGMDV

SEQ ID NO: 11797 - protein, 8 aa, Homo sapiens
  Light chain CDR3 for antibody 5899 (IGKV3D-7)
QQDYNLLT

SEQ ID NO: 11798 - protein, 19 aa, Homo sapiens
  Heavy chain CDR3 for antibody 5899 (IGHV3-33)
ARGPYYDILTGYGYYGMDV

SEQ ID NO: 11799 - protein, 9 aa, Homo sapiens
  Light chain CDR3 for antibody 5900 (IGKV1-33)
QQYDNLPFT

SEQ ID NO: 11800 - protein, 14 aa, Homo sapiens
  Heavy chain CDR3 for antibody 5900 (IGHV3-33)
ARDWNDVYYYGMDV

SEQ ID NO: 11801 - protein, 9 aa, Homo sapiens
  Light chain CDR3 for antibody 5901 (IGKV6-21)
HQSSRLPLT

SEQ ID NO: 11802 - protein, 15 aa, Homo sapiens
  Heavy chain CDR3 for antibody 5901 (IGHV4-39)
ARDEGLYGSGSYFDS

SEQ ID NO: 11803 - protein, 9 aa, Homo sapiens
  Light chain CDR3 for antibody 5902 (IGKV1-27)
QKYNSAPYT

SEQ ID NO: 11804 - protein, 10 aa, Homo sapiens
  Heavy chain CDR3 for antibody 5902 (IGHV3-33)
ARDGSGSYPI

SEQ ID NO: 11805 - protein, 8 aa, Homo sapiens
  Light chain CDR3 for antibody 5903 (IGKV3D-7)
QQDYNLLT

SEQ ID NO: 11806 - protein, 19 aa, Homo sapiens
  Heavy chain CDR3 for antibody 5903 (IGHV3-33)
ARRFSGYSGYDHYYYGMDV

SEQ ID NO: 11807 - protein, 10 aa, Homo sapiens
  Light chain CDR3 for antibody 5904 (IGKV3-20)
QQYGRSPPVT

SEQ ID NO: 11808 - protein, 13 aa, Homo sapiens
  Heavy chain CDR3 for antibody 5904 (IGHV3-33)
ARAFIMVRGVIDY

SEQ ID NO: 11809 - protein, 9 aa, Homo sapiens
  Light chain CDR3 for antibody 5905 (IGKV1D-16)
QQYDSYPYT

SEQ ID NO: 11810 - protein, 14 aa, Homo sapiens
  Heavy chain CDR3 for antibody 5905 (IGHV3-23)
ARGRRDFYYYGMDV

SEQ ID NO: 11811 - protein, 9 aa, Homo sapiens
  Light chain CDR3 for antibody 5906 (IGKV1D-13)
QRFNNYLYT

SEQ ID NO: 11812 - protein, 13 aa, Homo sapiens
  Heavy chain CDR3 for antibody 5906 (IGHV3-33)
ANTGDSYYYDMDV

SEQ ID NO: 11813 - protein, 11 aa, Homo sapiens
  Light chain CDR3 for antibody 5907 (IGKV3-11)
QQRSNWPPTWT

SEQ ID NO: 11814 - protein, 17 aa, Homo sapiens
  Heavy chain CDR3 for antibody 5907 (IGHV1-18)
ARDEGYDILTGYPHFDY

SEQ ID NO: 11815 - protein, 9 aa, Homo sapiens
  Light chain CDR3 for antibody 5908 (IGKV3-15)
QQYNNWPLT

SEQ ID NO: 11816 - protein, 15 aa, Homo sapiens
  Heavy chain CDR3 for antibody 5908 (IGHV3-33)
ARHSSGFYYYYGMDV

SEQ ID NO: 11817 - protein, 9 aa, Homo sapiens
  Light chain CDR3 for antibody 5909 (IGKV3-20)
QQYGSSPYT

SEQ ID NO: 11818 - protein, 12 aa, Homo sapiens
  Heavy chain CDR3 for antibody 5909 (IGHV3-33)
AREEAVAEAFDI

SEQ ID NO: 11819 - protein, 9 aa, Homo sapiens
  Light chain CDR3 for antibody 5910 (IGKV3D-20)
QQYGSSPYT

SEQ ID NO: 11820 - protein, 13 aa, Homo sapiens
  Heavy chain CDR3 for antibody 5910 (IGHV3-33)
ARCIVAAMGGFDY

SEQ ID NO: 11821 - protein, 9 aa, Homo sapiens
  Light chain CDR3 for antibody 5911 (IGKV3-15)
QQYNNWPLT

SEQ ID NO: 11822 - protein, 17 aa, Homo sapiens
  Heavy chain CDR3 for antibody 5911 (IGHV3-23)
AKDYDILTGYSHNWFDP

SEQ ID NO: 11823 - protein, 9 aa, Homo sapiens
  Light chain CDR3 for antibody 5912 (IGKV1-9)
QRFNNYMYT

SEQ ID NO: 11824 - protein, 12 aa, Homo sapiens
  Heavy chain CDR3 for antibody 5912 (IGHV1-46)
ARGLTGDHAVDI

SEQ ID NO: 11825 - protein, 8 aa, Homo sapiens
  Light chain CDR3 for antibody 5913 (IGKV3D-7)
QQDYNLLT

SEQ ID NO: 11826 - protein, 16 aa, Homo sapiens
  Heavy chain CDR3 for antibody 5913 (IGHV3-33)
ARDNFGSGSYYSHFHY

SEQ ID NO: 11827 - protein, 8 aa, Homo sapiens
  Light chain CDR3 for antibody 5914 (IGKV6-21)
HQSSSLPT

SEQ ID NO: 11828 - protein, 14 aa, Homo sapiens
  Heavy chain CDR3 for antibody 5914 (IGHV3-33)
AREGYSSNWYDFDY

SEQ ID NO: 11829 - protein, 10 aa, Homo sapiens
  Light chain CDR3 for antibody 5915 (IGKV1-39)
QQSYSTPMYT

SEQ ID NO: 11830 - protein, 13 aa, Homo sapiens
  Heavy chain CDR3 for antibody 5915 (IGHV3-33)
ARQSSGWFDAFDI

SEQ ID NO: 11831 - protein, 9 aa, Homo sapiens
  Light chain CDR3 for antibody 5916 (IGKV1-33)
QQYDNLPFT

SEQ ID NO: 11832 - protein, 13 aa, Homo sapiens
  Heavy chain CDR3 for antibody 5916 (IGHV3-33)
AKEDGDYHHYFDY

SEQ ID NO: 11833 - protein, 9 aa, Homo sapiens
  Light chain CDR3 for antibody 5917 (IGKV1D-13)
QRFNNYLYT

SEQ ID NO: 11834 - protein, 15 aa, Homo sapiens
  Heavy chain CDR3 for antibody 5917 (IGHV3-20)
ARDRGSSGWRDWFDP

SEQ ID NO: 11835 - protein, 9 aa, Homo sapiens
  Light chain CDR3 for antibody 5918 (IGKV1-27)
QKYNSAPYT

SEQ ID NO: 11836 - protein, 18 aa, Homo sapiens
  Heavy chain CDR3 for antibody 5918 (IGHV1-18)
ARDRYYYDSGSYYYGMDV

SEQ ID NO: 11837 - protein, 9 aa, Homo sapiens
  Light chain CDR3 for antibody 5919 (IGKV5-2)
LQHDNFPWT

SEQ ID NO: 11838 - protein, 13 aa, Homo sapiens
  Heavy chain CDR3 for antibody 5919 (IGHV1-18)
ARKWEWDLLNFDY

SEQ ID NO: 11839 - protein, 9 aa, Homo sapiens
  Light chain CDR3 for antibody 5920 (IGKV4-1)
QQYYSTPWT

SEQ ID NO: 11840 - protein, 15 aa, Homo sapiens
  Heavy chain CDR3 for antibody 5920 (IGHV3-33)
ARRGYNDYDPYGMDV

SEQ ID NO: 11841 - protein, 10 aa, Homo sapiens
  Light chain CDR3 for antibody 5921 (IGKV3-11)
QQRSNWPIFT

SEQ ID NO: 11842 - protein, 14 aa, Homo sapiens
  Heavy chain CDR3 for antibody 5921 (IGHV3-33)
VRDAMGATTAWFDP

SEQ ID NO: 11843 - protein, 8 aa, Homo sapiens
  Light chain CDR3 for antibody 5922 (IGKV3-20)
QQYGSSLT

SEQ ID NO: 11844 - protein, 15 aa, Homo sapiens
  Heavy chain CDR3 for antibody 5922 (IGHV4-59)
ARDLGHYYGSVSIDY

SEQ ID NO: 11845 - protein, 9 aa, Homo sapiens
  Light chain CDR3 for antibody 5923 (IGKV3-15)
QQYNNWPLT

SEQ ID NO: 11846 - protein, 23 aa, Homo sapiens
  Heavy chain CDR3 for antibody 5923 (IGHV3-11)
ARDEGVTMVRGVISYYYYYGMDV

SEQ ID NO: 11847 - protein, 9 aa, Homo sapiens
  Light chain CDR3 for antibody 5924 (IGKV2-30)
MQGTHWPLT

SEQ ID NO: 11848 - protein, 16 aa, Homo sapiens
  Heavy chain CDR3 for antibody 5924 (IGHV1-8)
AREGTMVRGVTYAFDI

SEQ ID NO: 11849 - protein, 9 aa, Homo sapiens
  Light chain CDR3 for antibody 5925 (IGKV3-15)
QQYNNWPLT

SEQ ID NO: 11850 - protein, 13 aa, Homo sapiens
  Heavy chain CDR3 for antibody 5925 (IGHV1-46)
ARRQVGYYYGMDV

SEQ ID NO: 11851 - protein, 9 aa, Homo sapiens
  Light chain CDR3 for antibody 5926 (IGKV1-17)
LQHNSYPYT

SEQ ID NO: 11852 - protein, 16 aa, Homo sapiens
  Heavy chain CDR3 for antibody 5926 (IGHV3-23)
AKDGSGSYYLTEYFQH

SEQ ID NO: 11853 - protein, 9 aa, Homo sapiens
  Light chain CDR3 for antibody 5927 (IGKV1-39)
QQSYRTPLT

SEQ ID NO: 11854 - protein, 17 aa, Homo sapiens
  Heavy chain CDR3 for antibody 5927 (IGHV3-23)
AKGNYGSGSYYNGDFQH

SEQ ID NO: 11855 - protein, 9 aa, Homo sapiens
  Light chain CDR3 for antibody 5928 (IGKV1-6)
LQDYSYPFT

SEQ ID NO: 11856 - protein, 7 aa, Homo sapiens
  Heavy chain CDR3 for antibody 5928 (IGHV3-33)
ARELFDY

SEQ ID NO: 11857 - protein, 8 aa, Homo sapiens
  Light chain CDR3 for antibody 5929 (IGKV3-11)
LQRGNWPT

SEQ ID NO: 11858 - protein, 17 aa, Homo sapiens
  Heavy chain CDR3 for antibody 5929 (IGHV3-33)
ARGYCSRTSCYLYYFDY

SEQ ID NO: 11859 - protein, 9 aa, Homo sapiens
  Light chain CDR3 for antibody 5930 (IGKV6-21)
HQSSSLPYT

SEQ ID NO: 11860 - protein, 12 aa, Homo sapiens
  Heavy chain CDR3 for antibody 5930 (IGHV3-33)
ARKQWLVQAFDI

SEQ ID NO: 11861 - protein, 9 aa, Homo sapiens
  Light chain CDR3 for antibody 5931 (IGKV5-2)
LQHDNFPYT

SEQ ID NO: 11862 - protein, 10 aa, Homo sapiens
  Heavy chain CDR3 for antibody 5931 (IGHV3-33)
ARVVDTAMAY

SEQ ID NO: 11863 - protein, 10 aa, Homo sapiens
  Light chain CDR3 for antibody 5932 (IGKV3-20)
QQYGRSPPVT

SEQ ID NO: 11864 - protein, 13 aa, Homo sapiens
  Heavy chain CDR3 for antibody 5932 (IGHV3-33)
ARKAYGDYFYFDY

SEQ ID NO: 11865 - protein, 9 aa, Homo sapiens
  Light chain CDR3 for antibody 5933 (IGKV1-33)
QQYDNLPFT

SEQ ID NO: 11866 - protein, 13 aa, Homo sapiens
  Heavy chain CDR3 for antibody 5933 (IGHV3-23)
ASPFNWNDGFFDY

SEQ ID NO: 11867 - protein, 10 aa, Homo sapiens
  Light chain CDR3 for antibody 5934 (IGKV3-11)
QQRSNWPMYT

SEQ ID NO: 11868 - protein, 18 aa, Homo sapiens
  Heavy chain CDR3 for antibody 5934 (IGHV1-46)
ARDGDYVWGSYRSNWFDP

SEQ ID NO: 11869 - protein, 8 aa, Homo sapiens
  Light chain CDR3 for antibody 5935 (IGKV3D-7)
QQDYNLLT

SEQ ID NO: 11870 - protein, 17 aa, Homo sapiens
  Heavy chain CDR3 for antibody 5935 (IGHV1-18)
ARDRAFTMVRGVPPFDY

SEQ ID NO: 11871 - protein, 8 aa, Homo sapiens
  Light chain CDR3 for antibody 5936 (IGKV1D-13)
QQFNNYYT

SEQ ID NO: 11872 - protein, 13 aa, Homo sapiens
  Heavy chain CDR3 for antibody 5936 (IGHV1-18)
ARSITMVRGVIGY

SEQ ID NO: 11873 - protein, 9 aa, Homo sapiens
  Light chain CDR3 for antibody 5937 (IGKV1-6)
LQDYNYPYT

SEQ ID NO: 11874 - protein, 16 aa, Homo sapiens
  Heavy chain CDR3 for antibody 5937 (IGHV3-33)
ARPTYYDILTGYPFDY

SEQ ID NO: 11875 - protein, 11 aa, Homo sapiens
  Light chain CDR3 for antibody 5938 (IGKV3-11)
QQRSNWPPTWT

SEQ ID NO: 11876 - protein, 23 aa, Homo sapiens
  Heavy chain CDR3 for antibody 5938 (IGHV4-59)
ARERTYSDILPGYYEDYYYGMDV

SEQ ID NO: 11877 - protein, 9 aa, Homo sapiens
  Light chain CDR3 for antibody 5939 (IGKV2-30)
MQGTHWPLT

SEQ ID NO: 11878 - protein, 12 aa, Homo sapiens
  Heavy chain CDR3 for antibody 5939 (IGHV3-33)
ARVDAAAPYFDY

SEQ ID NO: 11879 - protein, 9 aa, Homo sapiens
  Light chain CDR3 for antibody 5940 (IGKV3-20)
LQYGSSPYT

SEQ ID NO: 11880 - protein, 18 aa, Homo sapiens
  Heavy chain CDR3 for antibody 5940 (IGHV1-46)
ARDLTGRTENYYYYGMDV

SEQ ID NO: 11881 - protein, 9 aa, Homo sapiens
  Light chain CDR3 for antibody 5941 (IGKV2-30)
MQGTHWPLT

SEQ ID NO: 11882 - protein, 17 aa, Homo sapiens
  Heavy chain CDR3 for antibody 5941 (IGHV3-33)
ARAYYDILTGYSYYFDY

SEQ ID NO: 11883 - protein, 9 aa, Homo sapiens
  Light chain CDR3 for antibody 5942 (IGKV1-6)
LQDYKSPFT

SEQ ID NO: 11884 - protein, 9 aa, Homo sapiens
  Heavy chain CDR3 for antibody 5942 (IGHV3-30)
ARDNWGFDY

SEQ ID NO: 11885 - protein, 9 aa, Homo sapiens
  Light chain CDR3 for antibody 5943 (IGKV3-15)
QQYNNWPLT

SEQ ID NO: 11886 - protein, 15 aa, Homo sapiens
  Heavy chain CDR3 for antibody 5943 (IGHV1-46)
ARGRFFDWLLSPFDY

SEQ ID NO: 11887 - protein, 8 aa, Homo sapiens
  Light chain CDR3 for antibody 5944 (IGKV1-5)
QQYNSYWT

SEQ ID NO: 11888 - protein, 16 aa, Homo sapiens
  Heavy chain CDR3 for antibody 5944 (IGHV3-33)
ARGDDILTHQYYGVDV

SEQ ID NO: 11889 - protein, 9 aa, Homo sapiens
  Light chain CDR3 for antibody 5945 (IGKV1D-13)
QQFNNYPRT

SEQ ID NO: 11890 - protein, 14 aa, Homo sapiens
  Heavy chain CDR3 for antibody 5945 (IGHV1-46)
ARKGIVGAFDAFDI

SEQ ID NO: 11891 - protein, 8 aa, Homo sapiens
  Light chain CDR3 for antibody 5946 (IGKV3-20)
QQYGSSLT

SEQ ID NO: 11892 - protein, 12 aa, Homo sapiens
  Heavy chain CDR3 for antibody 5946 (IGHV3-33)
ARESGGSYSFDY

SEQ ID NO: 11893 - protein, 9 aa, Homo sapiens
  Light chain CDR3 for antibody 5947 (IGKV3D-20)
QQYGSSPLT

SEQ ID NO: 11894 - protein, 13 aa, Homo sapiens
  Heavy chain CDR3 for antibody 5947 (IGHV4-39)
ARPGIVAAGWFDP

SEQ ID NO: 11895 - protein, 9 aa, Homo sapiens
  Light chain CDR3 for antibody 5948 (IGKV1-39)
QQSYSTPLT

SEQ ID NO: 11896 - protein, 18 aa, Homo sapiens
  Heavy chain CDR3 for antibody 5948 (IGHV3-33)
AREGYDILTGDYRLGFDY

SEQ ID NO: 11897 - protein, 9 aa, Homo sapiens
  Light chain CDR3 for antibody 5949 (IGKV3D-7)
QQDYEFPLT

SEQ ID NO: 11898 - protein, 12 aa, Homo sapiens
  Heavy chain CDR3 for antibody 5949 (IGHV3-33)
ARESGGSYSFDY

SEQ ID NO: 11899 - protein, 9 aa, Homo sapiens
  Light chain CDR3 for antibody 5950 (IGKV1-39)
QQSYSTPLT

SEQ ID NO: 11900 - protein, 12 aa, Homo sapiens
  Heavy chain CDR3 for antibody 5950 (IGHV3-33)
AKDPGWQQLAEY

SEQ ID NO: 11901 - protein, 9 aa, Homo sapiens
  Light chain CDR3 for antibody 5951 (IGKV3D-7)
QQDYKLPLT

SEQ ID NO: 11902 - protein, 15 aa, Homo sapiens
  Heavy chain CDR3 for antibody 5951 (IGHV3-33)
ARDEHYDILTGYWGY

SEQ ID NO: 11903 - protein, 9 aa, Homo sapiens
  Light chain CDR3 for antibody 5952 (IGKV1-39)
QQSYSTPYT

SEQ ID NO: 11904 - protein, 10 aa, Homo sapiens
  Heavy chain CDR3 for antibody 5952 (IGHV3-23)
ATIVGPFLDV

SEQ ID NO: 11905 - protein, 10 aa, Homo sapiens
  Light chain CDR3 for antibody 5953 (IGKV3-11)
QQRSNWPIFT

SEQ ID NO: 11906 - protein, 12 aa, Homo sapiens
  Heavy chain CDR3 for antibody 5953 (IGHV3-33)
ARDYISTYGMDV

SEQ ID NO: 11907 - protein, 9 aa, Homo sapiens
  Light chain CDR3 for antibody 5954 (IGKV5-2)
LQHDNFPWT

SEQ ID NO: 11908 - protein, 12 aa, Homo sapiens
  Heavy chain CDR3 for antibody 5954 (IGHV4-39)
ARQGAYSRFFDY

SEQ ID NO: 11909 - protein, 9 aa, Homo sapiens
  Light chain CDR3 for antibody 5955 (IGKV1-39)
QQSYSTPLT

SEQ ID NO: 11910 - protein, 17 aa, Homo sapiens
  Heavy chain CDR3 for antibody 5955 (IGHV3-33)
TRDSGMVRGIIIYGMDV

SEQ ID NO: 11911 - protein, 9 aa, Homo sapiens
  Light chain CDR3 for antibody 5956 (IGKV3-11)
QQRSNWPLT

SEQ ID NO: 11912 - protein, 16 aa, Homo sapiens
  Heavy chain CDR3 for antibody 5956 (IGHV3-33)
ARGDDILTHQYYGVDV

SEQ ID NO: 11913 - protein, 10 aa, Homo sapiens
  Light chain CDR3 for antibody 5957 (IGKV3-11)
QQRSNWPIFT

SEQ ID NO: 11914 - protein, 13 aa, Homo sapiens
  Heavy chain CDR3 for antibody 5957 (IGHV3-23)
ARGELLWFGEFAC

SEQ ID NO: 11915 - protein, 9 aa, Homo sapiens
  Light chain CDR3 for antibody 5958 (IGKV5-2)
LQHDNFPYT

SEQ ID NO: 11916 - protein, 15 aa, Homo sapiens
  Heavy chain CDR3 for antibody 5958 (IGHV3-23)
AKDRSGSGSYNLFDY

SEQ ID NO: 11917 - protein, 8 aa, Homo sapiens
  Light chain CDR3 for antibody 5959 (IGKV1D-13)
QQFNNYYT

SEQ ID NO: 11918 - protein, 14 aa, Homo sapiens
  Heavy chain CDR3 for antibody 5959 (IGHV1-46)
ARRGIVGALDAFDI

SEQ ID NO: 11919 - protein, 9 aa, Homo sapiens
  Light chain CDR3 for antibody 5960 (IGKV1-6)
LQDYNYPYT

SEQ ID NO: 11920 - protein, 12 aa, Homo sapiens
  Heavy chain CDR3 for antibody 5960 (IGHV1-18)
ARERGIGRYFDL

SEQ ID NO: 11921 - protein, 8 aa, Homo sapiens
  Light chain CDR3 for antibody 5961 (IGKV1-5)
QQYNSYWT

SEQ ID NO: 11922 - protein, 18 aa, Homo sapiens
  Heavy chain CDR3 for antibody 5961 (IGHV3-33)
ARREGITLIFYYYYGMDV

SEQ ID NO: 11923 - protein, 9 aa, Homo sapiens
  Light chain CDR3 for antibody 5962 (IGKV2D-28)
MQVLQTPFT

SEQ ID NO: 11924 - protein, 13 aa, Homo sapiens
  Heavy chain CDR3 for antibody 5962 (IGHV4-39)
ARREVVGGRGFDY

SEQ ID NO: 11925 - protein, 9 aa, Homo sapiens
  Light chain CDR3 for antibody 5963 (IGKV1-16)
QHYNDYPFT

SEQ ID NO: 11926 - protein, 12 aa, Homo sapiens
  Heavy chain CDR3 for antibody 5963 (IGHV3-33)
AREGDILTGYSL

SEQ ID NO: 11927 - protein, 10 aa, Homo sapiens
  Light chain CDR3 for antibody 5964 (IGKV3-11)
QQRSNWPIFT

SEQ ID NO: 11928 - protein, 17 aa, Homo sapiens
  Heavy chain CDR3 for antibody 5964 (IGHV3-33)
ARESLKLGIYYYYGMDV

SEQ ID NO: 11929 - protein, 9 aa, Homo sapiens
  Light chain CDR3 for antibody 5965 (IGKV5-2)
LQHDNFPYT

SEQ ID NO: 11930 - protein, 10 aa, Homo sapiens
  Heavy chain CDR3 for antibody 5965 (IGHV3-33)
ARKGMNAFDI

SEQ ID NO: 11931 - protein, 9 aa, Homo sapiens
  Light chain CDR3 for antibody 5966 (IGKV1-17)
LQHNSYPYT

SEQ ID NO: 11932 - protein, 6 aa, Homo sapiens
  Heavy chain CDR3 for antibody 5966 (IGHV3-33)
ASRDIL

SEQ ID NO: 11933 - protein, 8 aa, Homo sapiens
  Light chain CDR3 for antibody 5967 (IGKV1-5)
QQYNSYYT

SEQ ID NO: 11934 - protein, 13 aa, Homo sapiens
  Heavy chain CDR3 for antibody 5967 (IGHV4-39)
ARREVVGGRGFDY

SEQ ID NO: 11935 - protein, 9 aa, Homo sapiens
  Light chain CDR3 for antibody 5968 (IGKV5-2)
LQHDKFPYT

SEQ ID NO: 11936 - protein, 13 aa, Homo sapiens
  Heavy chain CDR3 for antibody 5968 (IGHV3-33)
ARDWGYSHGYFDY

SEQ ID NO: 11937 - protein, 9 aa, Homo sapiens
  Light chain CDR3 for antibody 5969 (IGKV1-39)
QQSYSTPLT

SEQ ID NO: 11938 - protein, 9 aa, Homo sapiens
  Heavy chain CDR3 for antibody 5969 (IGHV3-33)
AANSYGLDY

SEQ ID NO: 11939 - protein, 9 aa, Homo sapiens
  Light chain CDR3 for antibody 5970 (IGKV1-27)
QKYNSAPYT

SEQ ID NO: 11940 - protein, 18 aa, Homo sapiens
  Heavy chain CDR3 for antibody 5970 (IGHV3-33)
ARDGRISLVRGIIDAFDI

SEQ ID NO: 11941 - protein, 8 aa, Homo sapiens
  Light chain CDR3 for antibody 5971 (IGKV1D-13)
QQFNNYPT

SEQ ID NO: 11942 - protein, 15 aa, Homo sapiens
  Heavy chain CDR3 for antibody 5971 (IGHV3-33)
VCVLYDYGDYVGFDY

SEQ ID NO: 11943 - protein, 10 aa, Homo sapiens
  Light chain CDR3 for antibody 5972 (IGKV3-20)
QQYGRSPPVT

SEQ ID NO: 11944 - protein, 13 aa, Homo sapiens
  Heavy chain CDR3 for antibody 5972 (IGHV3-11)
ARDGGAAAGTWDS

SEQ ID NO: 11945 - protein, 8 aa, Homo sapiens
  Light chain CDR3 for antibody 5973 (IGKV3D-7)
QQDYNLLT

SEQ ID NO: 11946 - protein, 15 aa, Homo sapiens
  Heavy chain CDR3 for antibody 5973 (IGHV3-74)
ARGSGSHYHYYGMDV

SEQ ID NO: 11947 - protein, 8 aa, Homo sapiens
  Light chain CDR3 for antibody 5974 (IGKV3-20)
QQYGSSLT

SEQ ID NO: 11948 - protein, 12 aa, Homo sapiens
  Heavy chain CDR3 for antibody 5974 (IGHV3-13)
VREAGIPDAFDI

SEQ ID NO: 11949 - protein, 9 aa, Homo sapiens
  Light chain CDR3 for antibody 5975 (IGKV1-16)
QHYNDYPFT

SEQ ID NO: 11950 - protein, 18 aa, Homo sapiens
  Heavy chain CDR3 for antibody 5975 (IGHV3-33)
ARREGIVGATTYYYGMDV

SEQ ID NO: 11951 - protein, 9 aa, Homo sapiens
  Light chain CDR3 for antibody 5976 (IGKV5-2)
LQHDNFPWT

SEQ ID NO: 11952 - protein, 19 aa, Homo sapiens
  Heavy chain CDR3 for antibody 5976 (IGHV3-33)
ARRKNYYGSGSWHYYGMDV

SEQ ID NO: 11953 - protein, 9 aa, Homo sapiens
  Light chain CDR3 for antibody 5977 (IGKV1-39)
QQSYSTPLT

SEQ ID NO: 11954 - protein, 19 aa, Homo sapiens
  Heavy chain CDR3 for antibody 5977 (IGHV3-33)
ARRRDDILTGWDYYFGMDV

SEQ ID NO: 11955 - protein, 9 aa, Homo sapiens
  Light chain CDR3 for antibody 5978 (IGKV6-21)
HQSSSLPLT

SEQ ID NO: 11956 - protein, 13 aa, Homo sapiens
  Heavy chain CDR3 for antibody 5978 (IGHV3-33)
GRTDYYSYYGVDV

SEQ ID NO: 11957 - protein, 9 aa, Homo sapiens
  Light chain CDR3 for antibody 5979 (IGKV5-2)
LQHDKFPYT

SEQ ID NO: 11958 - protein, 17 aa, Homo sapiens
  Heavy chain CDR3 for antibody 5979 (IGHV3-33)
ARGYSGYVGYYYYGMDV

SEQ ID NO: 11959 - protein, 9 aa, Homo sapiens
  Light chain CDR3 for antibody 5980 (IGKV1-6)
LQDYKSPFT

SEQ ID NO: 11960 - protein, 11 aa, Homo sapiens
  Heavy chain CDR3 for antibody 5980 (IGHV3-23)
AKGLWSYYFDY

SEQ ID NO: 11961 - protein, 8 aa, Homo sapiens
  Light chain CDR3 for antibody 5981 (IGKV1-5)
QQYNSYWT

SEQ ID NO: 11962 - protein, 19 aa, Homo sapiens
  Heavy chain CDR3 for antibody 5981 (IGHV3-33)
ARDSGYSGYDYYYYYGMDV

SEQ ID NO: 11963 - protein, 9 aa, Homo sapiens
  Light chain CDR3 for antibody 5982 (IGKV1-27)
QKYNSAPYT

SEQ ID NO: 11964 - protein, 11 aa, Homo sapiens
  Heavy chain CDR3 for antibody 5982 (IGHV3-33)
ARDILTGFLDH

SEQ ID NO: 11965 - protein, 9 aa, Homo sapiens
  Light chain CDR3 for antibody 5983 (IGKV1-6)
LQDYNYPWT

SEQ ID NO: 11966 - protein, 14 aa, Homo sapiens
  Heavy chain CDR3 for antibody 5983 (IGHV3-30)
ARGLLWFGGYGLDV

SEQ ID NO: 11967 - protein, 9 aa, Homo sapiens
  Light chain CDR3 for antibody 5984 (IGKV3D-7)
QQDYNLPWT

SEQ ID NO: 11968 - protein, 16 aa, Homo sapiens
  Heavy chain CDR3 for antibody 5984 (IGHV4-59)
ARDTPYYSGSGRPFDY

SEQ ID NO: 11969 - protein, 8 aa, Homo sapiens
  Light chain CDR3 for antibody 5985 (IGKV1D-13)
QQFNNYPT

SEQ ID NO: 11970 - protein, 12 aa, Homo sapiens
  Heavy chain CDR3 for antibody 5985 (IGHV4-59)
ARDRSGWAYFDY

SEQ ID NO: 11971 - protein, 9 aa, Homo sapiens
  Light chain CDR3 for antibody 5986 (IGKV1-6)
LQDYKSPFT

SEQ ID NO: 11972 - protein, 13 aa, Homo sapiens
  Heavy chain CDR3 for antibody 5986 (IGHV3-53)
ARDEGYRGYVLDT

SEQ ID NO: 11973 - protein, 9 aa, Homo sapiens
  Light chain CDR3 for antibody 5987 (IGKV1D-16)
QQYNSYPFT

SEQ ID NO: 11974 - protein, 15 aa, Homo sapiens
  Heavy chain CDR3 for antibody 5987 (IGHV3-23)
AKDRNYDFLTGPFDP

SEQ ID NO: 11975 - protein, 9 aa, Homo sapiens
  Light chain CDR3 for antibody 5988 (IGKV3-11)
QQRSNWMYT

SEQ ID NO: 11976 - protein, 12 aa, Homo sapiens
  Heavy chain CDR3 for antibody 5988 (IGHV3-33)
ARESGGSYSFDY

SEQ ID NO: 11977 - protein, 11 aa, Homo sapiens
  Light chain CDR3 for antibody 5989 (IGKV3-11)
QQRSNWPPTWT

SEQ ID NO: 11978 - protein, 18 aa, Homo sapiens
  Heavy chain CDR3 for antibody 5989 (IGHV3-33)
ARREGIVGATTYYYGMDV

SEQ ID NO: 11979 - protein, 10 aa, Homo sapiens
  Light chain CDR3 for antibody 5990 (IGKV3-15)
QQYNNWPPIT

SEQ ID NO: 11980 - protein, 14 aa, Homo sapiens
  Heavy chain CDR3 for antibody 5990 (IGHV3-33)
AREGYSSNWYDFDY

SEQ ID NO: 11981 - protein, 8 aa, Homo sapiens
  Light chain CDR3 for antibody 5991 (IGKV1-5)
QQYNSYWT

SEQ ID NO: 11982 - protein, 13 aa, Homo sapiens
  Heavy chain CDR3 for antibody 5991 (IGHV3-33)
ARVDTMVRGVMAY

SEQ ID NO: 11983 - protein, 9 aa, Homo sapiens
  Light chain CDR3 for antibody 5992 (IGKV2-30)
MQGTHWPLT

SEQ ID NO: 11984 - protein, 9 aa, Homo sapiens
  Heavy chain CDR3 for antibody 5992 (IGHV1-8)
ARGRLDFDY

SEQ ID NO: 11985 - protein, 9 aa, Homo sapiens
  Light chain CDR3 for antibody 5993 (IGKV6-21)
HQSSSLPYT

SEQ ID NO: 11986 - protein, 14 aa, Homo sapiens
  Heavy chain CDR3 for antibody 5993 (IGHV3-33)
ARDGAAAALDAFDI

SEQ ID NO: 11987 - protein, 8 aa, Homo sapiens
  Light chain CDR3 for antibody 5994 (IGKV1-5)
QQYNSYYT

SEQ ID NO: 11988 - protein, 17 aa, Homo sapiens
  Heavy chain CDR3 for antibody 5994 (IGHV1-18)
ARERYYGSGSYKYNMDV

SEQ ID NO: 11989 - protein, 9 aa, Homo sapiens
  Light chain CDR3 for antibody 5995 (IGKV1D-13)
QQFNNYPHT

SEQ ID NO: 11990 - protein, 13 aa, Homo sapiens
  Heavy chain CDR3 for antibody 5995 (IGHV4-39)
ARRGVVAPAAFDY

SEQ ID NO: 11991 - protein, 8 aa, Homo sapiens
  Light chain CDR3 for antibody 5996 (IGKV3D-7)
QQDYNLLT

SEQ ID NO: 11992 - protein, 13 aa, Homo sapiens
  Heavy chain CDR3 for antibody 5996 (IGHV3-23)
AKDRGLRYYGMDV

SEQ ID NO: 11993 - protein, 9 aa, Homo sapiens
  Light chain CDR3 for antibody 5997 (IGKV2-30)
MQGTHWPLT

SEQ ID NO: 11994 - protein, 12 aa, Homo sapiens
  Heavy chain CDR3 for antibody 5997 (IGHV6-1)
ARLDWNYRAFDI

SEQ ID NO: 11995 - protein, 9 aa, Homo sapiens
  Light chain CDR3 for antibody 5998 (IGKV1-39)
QQSYSTPLT

SEQ ID NO: 11996 - protein, 15 aa, Homo sapiens
  Heavy chain CDR3 for antibody 5998 (IGHV3-33)
ARDGSGSYSLYGMDV

SEQ ID NO: 11997 - protein, 9 aa, Homo sapiens
  Light chain CDR3 for antibody 5999 (IGKV5-2)
LQHDNFPYT

SEQ ID NO: 11998 - protein, 18 aa, Homo sapiens
  Heavy chain CDR3 for antibody 5999 (IGHV3-11)
ARDGYYGSGSFYYYGMDV

SEQ ID NO: 11999 - protein, 9 aa, Homo sapiens
  Light chain CDR3 for antibody 6000 (IGKV2-30)
MQGTHWPLT

SEQ ID NO: 12000 - protein, 14 aa, Homo sapiens
  Heavy chain CDR3 for antibody 6000 (IGHV3-33)
ARRGYSGYDWYFDY

SEQ ID NO: 12001 - protein, 10 aa, Homo sapiens
  Light chain CDR3 for antibody 6001 (IGKV1-39)
QQSYSTPMYT

SEQ ID NO: 12002 - protein, 17 aa, Homo sapiens
  Heavy chain CDR3 for antibody 6001 (IGHV3-33)
ARDLIGPLSSSWYPFDY

SEQ ID NO: 12003 - protein, 9 aa, Homo sapiens
  Light chain CDR3 for antibody 6002 (IGKV1-6)
LQDYNYPYT

SEQ ID NO: 12004 - protein, 19 aa, Homo sapiens
  Heavy chain CDR3 for antibody 6002 (IGHV3-20)
ARGGSGSYYNGYYYYGMDV

SEQ ID NO: 12005 - protein, 9 aa, Homo sapiens
  Light chain CDR3 for antibody 6003 (IGKV3D-20)
QQYGSSPFT

SEQ ID NO: 12006 - protein, 17 aa, Homo sapiens
  Heavy chain CDR3 for antibody 6003 (IGHV4-39)
AGRLTYYYGSGSPSFDY

SEQ ID NO: 12007 - protein, 9 aa, Homo sapiens
  Light chain CDR3 for antibody 6004 (IGKV1-9)
QQLNTYPWT

SEQ ID NO: 12008 - protein, 14 aa, Homo sapiens
  Heavy chain CDR3 for antibody 6004 (IGHV1-46)
ARRGIVGALDAFDI

SEQ ID NO: 12009 - protein, 8 aa, Homo sapiens
  Light chain CDR3 for antibody 6005 (IGKV1-5)
QQYNSYWT

SEQ ID NO: 12010 - protein, 15 aa, Homo sapiens
  Heavy chain CDR3 for antibody 6005 (IGHV3-33)
ARRGYNDYDPYGMDV

SEQ ID NO: 12011 - protein, 9 aa, Homo sapiens
  Light chain CDR3 for antibody 6006 (IGKV1-17)
LQHNSYPYT

SEQ ID NO: 12012 - protein, 15 aa, Homo sapiens
  Heavy chain CDR3 for antibody 6006 (IGHV3-33)
ATERAYGSGSSYCDY

SEQ ID NO: 12013 - protein, 9 aa, Homo sapiens
  Light chain CDR3 for antibody 6007 (IGKV1-9)
QQLKSYLYT

SEQ ID NO: 12014 - protein, 13 aa, Homo sapiens
  Heavy chain CDR3 for antibody 6007 (IGHV3-23)
ASPFNWNDGFFDY

SEQ ID NO: 12015 - protein, 9 aa, Homo sapiens
  Light chain CDR3 for antibody 6008 (IGKV1-6)
LQDYNYPYT

SEQ ID NO: 12016 - protein, 14 aa, Homo sapiens
  Heavy chain CDR3 for antibody 6008 (IGHV3-23)
VRDRIAAASSDFDN

SEQ ID NO: 12017 - protein, 11 aa, Homo sapiens
  Light chain CDR3 for antibody 6009 (IGKV3-11)
QQRSNWPPTWT

SEQ ID NO: 12018 - protein, 14 aa, Homo sapiens
  Heavy chain CDR3 for antibody 6009 (IGHV4-39)
ARQGGSGSYYNLDY

SEQ ID NO: 12019 - protein, 9 aa, Homo sapiens
  Light chain CDR3 for antibody 6010 (IGKV1-16)
QQYNSYPLT

SEQ ID NO: 12020 - protein, 18 aa, Homo sapiens
  Heavy chain CDR3 for antibody 6010 (IGHV3-23)
AKEGDYYSSGSYWGYFDL

SEQ ID NO: 12021 - protein, 9 aa, Homo sapiens
  Light chain CDR3 for antibody 6011 (IGKV3-11)
QQRSNWMYT

SEQ ID NO: 12022 - protein, 9 aa, Homo sapiens
  Heavy chain CDR3 for antibody 6011 (IGHV4-59)
AREGGSGSL

SEQ ID NO: 12023 - protein, 8 aa, Homo sapiens
  Light chain CDR3 for antibody 6012 (IGKV3D-7)
QQDYNLLT

SEQ ID NO: 12024 - protein, 20 aa, Homo sapiens
  Heavy chain CDR3 for antibody 6012 (IGHV3-33)
ARDNDSSGYYDYYYYYGMDV

SEQ ID NO: 12025 - protein, 9 aa, Homo sapiens
  Light chain CDR3 for antibody 6013 (IGKV1D-16)
QQYYSYPPT

SEQ ID NO: 12026 - protein, 13 aa, Homo sapiens
  Heavy chain CDR3 for antibody 6013 (IGHV3-11)
ARDEGYRGYVLDN

SEQ ID NO: 12027 - protein, 8 aa, Homo sapiens
  Light chain CDR3 for antibody 6014 (IGKV1-5)
QQYNSYWT

SEQ ID NO: 12028 - protein, 14 aa, Homo sapiens
  Heavy chain CDR3 for antibody 6014 (IGHV1-2)
ARDYYGSGNYYMGY

SEQ ID NO: 12029 - protein, 9 aa, Homo sapiens
  Light chain CDR3 for antibody 6015 (IGKV1-27)
QKYNSAPYT

SEQ ID NO: 12030 - protein, 10 aa, Homo sapiens
  Heavy chain CDR3 for antibody 6015 (IGHV3-30)
AREWYGGMDV

SEQ ID NO: 12031 - protein, 8 aa, Homo sapiens
  Light chain CDR3 for antibody 6016 (IGKV3D-7)
QQDYNLLT

SEQ ID NO: 12032 - protein, 10 aa, Homo sapiens
  Heavy chain CDR3 for antibody 6016 (IGHV3-33)
ARENSTPLDY

SEQ ID NO: 12033 - protein, 9 aa, Homo sapiens
  Light chain CDR3 for antibody 6017 (IGKV1D-13)
QQFNNYPYT

SEQ ID NO: 12034 - protein, 10 aa, Homo sapiens
  Heavy chain CDR3 for antibody 6017 (IGHV3-33)
ARDLRADFDY

SEQ ID NO: 12035 - protein, 9 aa, Homo sapiens
  Light chain CDR3 for antibody 6018 (IGKV3D-7)
QQDYNLPLT

SEQ ID NO: 12036 - protein, 13 aa, Homo sapiens
  Heavy chain CDR3 for antibody 6018 (IGHV3-23)
AKDRGGSYSYFDF

SEQ ID NO: 12037 - protein, 9 aa, Homo sapiens
  Light chain CDR3 for antibody 6019 (IGKV6-21)
HQSSSLPYT

SEQ ID NO: 12038 - protein, 12 aa, Homo sapiens
  Heavy chain CDR3 for antibody 6019 (IGHV3-21)
AREGFGESSFDY

SEQ ID NO: 12039 - protein, 9 aa, Homo sapiens
  Light chain CDR3 for antibody 6020 (IGKV3-11)
QQRSNWPLT

SEQ ID NO: 12040 - protein, 18 aa, Homo sapiens
  Heavy chain CDR3 for antibody 6020 (IGHV1-18)
ARDPNYYGSGSYYNYFDY

SEQ ID NO: 12041 - protein, 9 aa, Homo sapiens
  Light chain CDR3 for antibody 6021 (IGKV1-9)
QQLNTYPWT

SEQ ID NO: 12042 - protein, 17 aa, Homo sapiens
  Heavy chain CDR3 for antibody 6021 (IGHV3-33)
ARGEQWLGYYYYYGMDV

SEQ ID NO: 12043 - protein, 9 aa, Homo sapiens
  Light chain CDR3 for antibody 6022 (IGKV3D-7)
QQDYTLPLT

SEQ ID NO: 12044 - protein, 19 aa, Homo sapiens
  Heavy chain CDR3 for antibody 6022 (IGHV4-39)
ARQGDVLRYFDWLLGAFDI

SEQ ID NO: 12045 - protein, 8 aa, Homo sapiens
  Light chain CDR3 for antibody 6023 (IGKV3D-7)
QQDYNLLT

SEQ ID NO: 12046 - protein, 18 aa, Homo sapiens
  Heavy chain CDR3 for antibody 6023 (IGHV3-23)
AKEGNYYGSGSYWGYFDP

SEQ ID NO: 12047 - protein, 9 aa, Homo sapiens
  Light chain CDR3 for antibody 6024 (IGKV1-9)
QQLKSYLYT

SEQ ID NO: 12048 - protein, 9 aa, Homo sapiens
  Heavy chain CDR3 for antibody 6024 (IGHV1-8)
ARGRLDFDY

SEQ ID NO: 12049 - protein, 10 aa, Homo sapiens
  Light chain CDR3 for antibody 6025 (IGKV3-11)
QQRSNWPIFT

SEQ ID NO: 12050 - protein, 11 aa, Homo sapiens
  Heavy chain CDR3 for antibody 6025 (IGHV3-33)
ARAGIAAVFDY

SEQ ID NO: 12051 - protein, 8 aa, Homo sapiens
  Light chain CDR3 for antibody 6026 (IGKV3D-7)
QQDYNLLT

SEQ ID NO: 12052 - protein, 19 aa, Homo sapiens
  Heavy chain CDR3 for antibody 6026 (IGHV3-33)
TRDPHYDILTGYAYYGMDV

SEQ ID NO: 12053 - protein, 9 aa, Homo sapiens
  Light chain CDR3 for antibody 6027 (IGKV1-6)
LQDYKSPFT

SEQ ID NO: 12054 - protein, 17 aa, Homo sapiens
  Heavy chain CDR3 for antibody 6027 (IGHV3-33)
ARGFSGYDGYYYYGMDV

SEQ ID NO: 12055 - protein, 9 aa, Homo sapiens
  Light chain CDR3 for antibody 6028 (IGKV3-15)
QQYNNWPRT

SEQ ID NO: 12056 - protein, 18 aa, Homo sapiens
  Heavy chain CDR3 for antibody 6028 (IGHV3-33)
ARGYYGSGNFYKDSGMDV

SEQ ID NO: 12057 - protein, 9 aa, Homo sapiens
  Light chain CDR3 for antibody 6029 (IGKV3-20)
QQFGRSPRT

SEQ ID NO: 12058 - protein, 17 aa, Homo sapiens
  Heavy chain CDR3 for antibody 6029 (IGHV1-18)
ARDRAFTMVRGVPPFDY

SEQ ID NO: 12059 - protein, 9 aa, Homo sapiens
  Light chain CDR3 for antibody 6030 (IGKV1-9)
QQLKSYLYT

SEQ ID NO: 12060 - protein, 11 aa, Homo sapiens
  Heavy chain CDR3 for antibody 6030 (IGHV3-33)
ARARYTTGLDY

SEQ ID NO: 12061 - protein, 10 aa, Homo sapiens
  Light chain CDR3 for antibody 6031 (IGKV3-11)
QQRSNWPIFT

SEQ ID NO: 12062 - protein, 18 aa, Homo sapiens
  Heavy chain CDR3 for antibody 6031 (IGHV1-18)
ARDPNYYGSGSYYNYFDY

SEQ ID NO: 12063 - protein, 10 aa, Homo sapiens
  Light chain CDR3 for antibody 6032 (IGKV1-9)
QQLNSFLMYT

SEQ ID NO: 12064 - protein, 18 aa, Homo sapiens
  Heavy chain CDR3 for antibody 6032 (IGHV4-59)
AREGDYVWGSYRPNWFDP

SEQ ID NO: 12065 - protein, 8 aa, Homo sapiens
  Light chain CDR3 for antibody 6033 (IGKV1-5)
QQYNSYST

SEQ ID NO: 12066 - protein, 12 aa, Homo sapiens
  Heavy chain CDR3 for antibody 6033 (IGHV1-24)
ASDWAYYYGMDV

SEQ ID NO: 12067 - protein, 9 aa, Homo sapiens
  Light chain CDR3 for antibody 6034 (IGKV3D-7)
QQDYNLPYT

SEQ ID NO: 12068 - protein, 14 aa, Homo sapiens
  Heavy chain CDR3 for antibody 6034 (IGHV3-33)
ARGGYSGYRYYFDY

SEQ ID NO: 12069 - protein, 9 aa, Homo sapiens
  Light chain CDR3 for antibody 6035 (IGKV2-30)
MQGTHWPLT

SEQ ID NO: 12070 - protein, 14 aa, Homo sapiens
  Heavy chain CDR3 for antibody 6035 (IGHV1-46)
ARRGIVGALDAFDI

SEQ ID NO: 12071 - protein, 9 aa, Homo sapiens
  Light chain CDR3 for antibody 6036 (IGKV5-2)
LQHDNFPWT

SEQ ID NO: 12072 - protein, 9 aa, Homo sapiens
  Heavy chain CDR3 for antibody 6036 (IGHV4-59)
ARDDGDFDY

SEQ ID NO: 12073 - protein, 9 aa, Homo sapiens
  Light chain CDR3 for antibody 6037 (IGKV3-11)
QQRSNWMYT

SEQ ID NO: 12074 - protein, 16 aa, Homo sapiens
  Heavy chain CDR3 for antibody 6037 (IGHV3-23)
AKEGEVLRYFDWLFNY

SEQ ID NO: 12075 - protein, 9 aa, Homo sapiens
  Light chain CDR3 for antibody 6038 (IGKV1-9)
QQLNSYPYT

SEQ ID NO: 12076 - protein, 11 aa, Homo sapiens
  Heavy chain CDR3 for antibody 6038 (IGHV3-33)
ARDRSSGPFDY

SEQ ID NO: 12077 - protein, 8 aa, Homo sapiens
  Light chain CDR3 for antibody 6039 (IGKV3-20)
QQYGRSFT

SEQ ID NO: 12078 - protein, 9 aa, Homo sapiens
  Heavy chain CDR3 for antibody 6039 (IGHV4-39)
AREGGSGSL

SEQ ID NO: 12079 - protein, 9 aa, Homo sapiens
  Light chain CDR3 for antibody 6040 (IGKV2-30)
MQGTHWPLT

SEQ ID NO: 12080 - protein, 18 aa, Homo sapiens
  Heavy chain CDR3 for antibody 6040 (IGHV3-33)
AREGDYYGSGGFPNWFDP

SEQ ID NO: 12081 - protein, 9 aa, Homo sapiens
  Light chain CDR3 for antibody 6041 (IGKV1D-16)
QQYNSYPLT

SEQ ID NO: 12082 - protein, 14 aa, Homo sapiens
  Heavy chain CDR3 for antibody 6041 (IGHV3-33)
ARGLEWGGDNWFDP

SEQ ID NO: 12083 - protein, 9 aa, Homo sapiens
  Light chain CDR3 for antibody 6042 (IGKV1-9)
QQLNSYPWT

SEQ ID NO: 12084 - protein, 13 aa, Homo sapiens
  Heavy chain CDR3 for antibody 6042 (IGHV3-33)
AGDWGYSHGYFDY

SEQ ID NO: 12085 - protein, 8 aa, Homo sapiens
  Light chain CDR3 for antibody 6043 (IGKV3-20)
QQYGSSLT

SEQ ID NO: 12086 - protein, 12 aa, Homo sapiens
  Heavy chain CDR3 for antibody 6043 (IGHV3-33)
ARGYFGSGYAHF

SEQ ID NO: 12087 - protein, 9 aa, Homo sapiens
  Light chain CDR3 for antibody 6044 (IGKV3D-7)
QQDYTLPLT

SEQ ID NO: 12088 - protein, 17 aa, Homo sapiens
  Heavy chain CDR3 for antibody 6044 (IGHV3-23)
AKDYDILTGYSHNWFDP

SEQ ID NO: 12089 - protein, 9 aa, Homo sapiens
  Light chain CDR3 for antibody 6045 (IGKV3-15)
QQYNNWPLT

SEQ ID NO: 12090 - protein, 17 aa, Homo sapiens
  Heavy chain CDR3 for antibody 6045 (IGHV4-59)
ARVLRYFDWLSHDAFDI

SEQ ID NO: 12091 - protein, 9 aa, Homo sapiens
  Light chain CDR3 for antibody 6046 (IGKV3-11)
QQRSNWPPT

SEQ ID NO: 12092 - protein, 8 aa, Homo sapiens
  Heavy chain CDR3 for antibody 6046 (IGHV3-33)
ARDRGFDY

SEQ ID NO: 12093 - protein, 9 aa, Homo sapiens
  Light chain CDR3 for antibody 6047 (IGKV1-39)
QQSYSTPYT

SEQ ID NO: 12094 - protein, 15 aa, Homo sapiens
  Heavy chain CDR3 for antibody 6047 (IGHV3-23)
AKDRYFDWLSDAFDI

SEQ ID NO: 12095 - protein, 8 aa, Homo sapiens
  Light chain CDR3 for antibody 6048 (IGKV3-11)
QQRSNWLT

SEQ ID NO: 12096 - protein, 12 aa, Homo sapiens
  Heavy chain CDR3 for antibody 6048 (IGHV1-24)
ASDWAYYYGMDV

SEQ ID NO: 12097 - protein, 9 aa, Homo sapiens
  Light chain CDR3 for antibody 6049 (IGKV5-2)
LQHDNFPWT

SEQ ID NO: 12098 - protein, 15 aa, Homo sapiens
  Heavy chain CDR3 for antibody 6049 (IGHV4-39)
ARRVRGLIITRYFDY

SEQ ID NO: 12099 - protein, 8 aa, Homo sapiens
  Light chain CDR3 for antibody 6050 (IGKV3-11)
LQRGNWPT

SEQ ID NO: 12100 - protein, 18 aa, Homo sapiens
  Heavy chain CDR3 for antibody 6050 (IGHV1-46)
ARDGDYVWGSYRSDWFDP

SEQ ID NO: 12101 - protein, 8 aa, Homo sapiens
  Light chain CDR3 for antibody 6051 (IGKV3-20)
QQYGRSFT

SEQ ID NO: 12102 - protein, 17 aa, Homo sapiens
  Heavy chain CDR3 for antibody 6051 (IGHV3-33)
ARGEQWLGYYYYYGMDV

SEQ ID NO: 12103 - protein, 9 aa, Homo sapiens
  Light chain CDR3 for antibody 6052 (IGKV3-11)
QQRINWPWT

SEQ ID NO: 12104 - protein, 13 aa, Homo sapiens
  Heavy chain CDR3 for antibody 6052 (IGHV4-61)
ASRYSSGWYPFDY

SEQ ID NO: 12105 - protein, 9 aa, Homo sapiens
  Light chain CDR3 for antibody 6053 (IGKV3D-7)
QQDYEFPIT

SEQ ID NO: 12106 - protein, 17 aa, Homo sapiens
  Heavy chain CDR3 for antibody 6053 (IGHV1-18)
ARDEGYDILTGYPHFDY

SEQ ID NO: 12107 - protein, 8 aa, Homo sapiens
  Light chain CDR3 for antibody 6054 (IGKV1-5)
QQYNSYWT

SEQ ID NO: 12108 - protein, 15 aa, Homo sapiens
  Heavy chain CDR3 for antibody 6054 (IGHV3-33)
ARGYYYGSGSFPVDY

SEQ ID NO: 12109 - protein, 9 aa, Homo sapiens
  Light chain CDR3 for antibody 6055 (IGKV2-30)
MQGTHWPLT

SEQ ID NO: 12110 - protein, 17 aa, Homo sapiens
  Heavy chain CDR3 for antibody 6055 (IGHV3-11)
ARDLIGPLSSSWYPFDY

SEQ ID NO: 12111 - protein, 9 aa, Homo sapiens
  Light chain CDR3 for antibody 6056 (IGKV3-20)
QQYGSSPYT

SEQ ID NO: 12112 - protein, 20 aa, Homo sapiens
  Heavy chain CDR3 for antibody 6056 (IGHV3-23)
AKDRMTTVTSYYYYSYGMDV

SEQ ID NO: 12113 - protein, 9 aa, Homo sapiens
  Light chain CDR3 for antibody 6057 (IGKV3D-7)
QQDYSFPLT

SEQ ID NO: 12114 - protein, 11 aa, Homo sapiens
  Heavy chain CDR3 for antibody 6057 (IGHV4-59)
ARDGSWEPFDY

SEQ ID NO: 12115 - protein, 10 aa, Homo sapiens
  Light chain CDR3 for antibody 6058 (IGKV3-11)
QQRSNWPPFT

SEQ ID NO: 12116 - protein, 9 aa, Homo sapiens
  Heavy chain CDR3 for antibody 6058 (IGHV3-23)
AKEQLLFDY

SEQ ID NO: 12117 - protein, 9 aa, Homo sapiens
  Light chain CDR3 for antibody 6059 (IGKV3-11)
QQRSSWPPT

SEQ ID NO: 12118 - protein, 14 aa, Homo sapiens
  Heavy chain CDR3 for antibody 6059 (IGHV3-33)
ARGAAAGNFYGLDV

SEQ ID NO: 12119 - protein, 10 aa, Homo sapiens
  Light chain CDR3 for antibody 6060 (IGKV1-17)
LQHNSYPMYT

SEQ ID NO: 12120 - protein, 17 aa, Homo sapiens
  Heavy chain CDR3 for antibody 6060 (IGHV3-23)
AKDGSFYSSGWYDAFDI

SEQ ID NO: 12121 - protein, 9 aa, Homo sapiens
  Light chain CDR3 for antibody 6061 (IGKV5-2)
LQHDKFPYT

SEQ ID NO: 12122 - protein, 12 aa, Homo sapiens
  Heavy chain CDR3 for antibody 6061 (IGHV3-33)
ARVDTAAPYFDY

SEQ ID NO: 12123 - protein, 8 aa, Homo sapiens
  Light chain CDR3 for antibody 6062 (IGKV1D-13)
QQFNNYPT

SEQ ID NO: 12124 - protein, 19 aa, Homo sapiens
  Heavy chain CDR3 for antibody 6062 (IGHV3-33)
ARGVRLRYFDPYYYYGMDV

SEQ ID NO: 12125 - protein, 9 aa, Homo sapiens
  Light chain CDR3 for antibody 6063 (IGKV1-6)
LQDYKSPFT

SEQ ID NO: 12126 - protein, 10 aa, Homo sapiens
  Heavy chain CDR3 for antibody 6063 (IGHV3-23)
AKEQWLVLDY

SEQ ID NO: 12127 - protein, 9 aa, Homo sapiens
  Light chain CDR3 for antibody 6064 (IGKV3D-7)
QQDYNLPLT

SEQ ID NO: 12128 - protein, 12 aa, Homo sapiens
  Heavy chain CDR3 for antibody 6064 (IGHV1-18)
AGVLFDGDYFDY

SEQ ID NO: 12129 - protein, 8 aa, Homo sapiens
  Light chain CDR3 for antibody 6065 (IGKV1D-13)
QQFNNYPT

SEQ ID NO: 12130 - protein, 18 aa, Homo sapiens
  Heavy chain CDR3 for antibody 6065 (IGHV3-33)
ARKGGYYSGSGSYRHFDF

SEQ ID NO: 12131 - protein, 9 aa, Homo sapiens
  Light chain CDR3 for antibody 6066 (IGKV3-15)
QQYNNWPLT

SEQ ID NO: 12132 - protein, 14 aa, Homo sapiens
  Heavy chain CDR3 for antibody 6066 (IGHV1-18)
ARCFGSGSYGWFDP

SEQ ID NO: 12133 - protein, 9 aa, Homo sapiens
  Light chain CDR3 for antibody 6067 (IGKV1-6)
LQDYNYPYT

SEQ ID NO: 12134 - protein, 11 aa, Homo sapiens
  Heavy chain CDR3 for antibody 6067 (IGHV3-30)
VRVGTGEFFDL

SEQ ID NO: 12135 - protein, 9 aa, Homo sapiens
  Light chain CDR3 for antibody 6068 (IGKV1D-16)
QQYNSYPRT

SEQ ID NO: 12136 - protein, 21 aa, Homo sapiens
  Heavy chain CDR3 for antibody 6068 (IGHV3-33)
ARDGGITMGRGVYYYYYGMDV

SEQ ID NO: 12137 - protein, 9 aa, Homo sapiens
  Light chain CDR3 for antibody 6069 (IGKV1-6)
LQDYNYPYT

SEQ ID NO: 12138 - protein, 14 aa, Homo sapiens
  Heavy chain CDR3 for antibody 6069 (IGHV3-33)
AREGILTGYYPFDY

SEQ ID NO: 12139 - protein, 9 aa, Homo sapiens
  Light chain CDR3 for antibody 6070 (IGKV2-30)
MQGTHWPLT

SEQ ID NO: 12140 - protein, 17 aa, Homo sapiens
  Heavy chain CDR3 for antibody 6070 (IGHV3-33)
VREGGLLWVGELSLFDY

SEQ ID NO: 12141 - protein, 8 aa, Homo sapiens
  Light chain CDR3 for antibody 6071 (IGKV1-5)
QQYNSYWT

SEQ ID NO: 12142 - protein, 16 aa, Homo sapiens
  Heavy chain CDR3 for antibody 6071 (IGHV4-59)
ARDTPYYSGSGRPFDH

SEQ ID NO: 12143 - protein, 9 aa, Homo sapiens
  Light chain CDR3 for antibody 6072 (IGKV2-30)
MQGTHWPLT

SEQ ID NO: 12144 - protein, 12 aa, Homo sapiens
  Heavy chain CDR3 for antibody 6072 (IGHV3-33)
ARGYFTSGSAHY

SEQ ID NO: 12145 - protein, 9 aa, Homo sapiens
  Light chain CDR3 for antibody 6073 (IGKV1D-13)
QRFNNYLYT

SEQ ID NO: 12146 - protein, 9 aa, Homo sapiens
  Heavy chain CDR3 for antibody 6073 (IGHV1-18)
ARGKDWFDP

SEQ ID NO: 12147 - protein, 9 aa, Homo sapiens
  Light chain CDR3 for antibody 6074 (IGKV1-17)
LQHNSYPWT

SEQ ID NO: 12148 - protein, 11 aa, Homo sapiens
  Heavy chain CDR3 for antibody 6074 (IGHV3-33)
ATERDMVRGDY

SEQ ID NO: 12149 - protein, 9 aa, Homo sapiens
  Light chain CDR3 for antibody 6075 (IGKV1-39)
QQSYRTPLT

SEQ ID NO: 12150 - protein, 16 aa, Homo sapiens
  Heavy chain CDR3 for antibody 6075 (IGHV3-33)
AREVAGSYYYYYGMDV

SEQ ID NO: 12151 - protein, 9 aa, Homo sapiens
  Light chain CDR3 for antibody 6076 (IGKV1-17)
LQHNGYPLT

SEQ ID NO: 12152 - protein, 15 aa, Homo sapiens
  Heavy chain CDR3 for antibody 6076 (IGHV3-33)
ARGYYYGSGSFPVDY

SEQ ID NO: 12153 - protein, 9 aa, Homo sapiens
  Light chain CDR3 for antibody 6077 (IGKV1-9)
LQHNSYPYT

SEQ ID NO: 12154 - protein, 17 aa, Homo sapiens
  Heavy chain CDR3 for antibody 6077 (IGHV3-33)
ARKDYGILSGYYSPFDY

SEQ ID NO: 12155 - protein, 9 aa, Homo sapiens
  Light chain CDR3 for antibody 6078 (IGKV2D-28)
MQALQTPPT

SEQ ID NO: 12156 - protein, 14 aa, Homo sapiens
  Heavy chain CDR3 for antibody 6078 (IGHV3-23)
ANWAYDILTGYLDY

SEQ ID NO: 12157 - protein, 8 aa, Homo sapiens
  Light chain CDR3 for antibody 6079 (IGKV1D-13)
QQFNNYYT

SEQ ID NO: 12158 - protein, 16 aa, Homo sapiens
  Heavy chain CDR3 for antibody 6079 (IGHV1-18)
ARYFDWLLRDYYGMDV

SEQ ID NO: 12159 - protein, 9 aa, Homo sapiens
  Light chain CDR3 for antibody 6080 (IGKV3-15)
QQYNNWPRT

SEQ ID NO: 12160 - protein, 12 aa, Homo sapiens
  Heavy chain CDR3 for antibody 6080 (IGHV4-59)
ARDRSGWAYFDY

SEQ ID NO: 12161 - protein, 9 aa, Homo sapiens
  Light chain CDR3 for antibody 6081 (IGKV1-9)
QQLISYPLT

SEQ ID NO: 12162 - protein, 15 aa, Homo sapiens
  Heavy chain CDR3 for antibody 6081 (IGHV1-18)
ARGYCSSTSCYYFDY

SEQ ID NO: 12163 - protein, 9 aa, Homo sapiens
  Light chain CDR3 for antibody 6082 (IGKV3D-20)
QQYGNSPRT

SEQ ID NO: 12164 - protein, 13 aa, Homo sapiens
  Heavy chain CDR3 for antibody 6082 (IGHV3-33)
ARRATLVRGVFDP

SEQ ID NO: 12165 - protein, 9 aa, Homo sapiens
  Light chain CDR3 for antibody 6083 (IGKV1-17)
QQLNSYPWT

SEQ ID NO: 12166 - protein, 13 aa, Homo sapiens
  Heavy chain CDR3 for antibody 6083 (IGHV3-23)
ASPFNWNDGFFDY

SEQ ID NO: 12167 - protein, 10 aa, Homo sapiens
  Light chain CDR3 for antibody 6084 (IGKV3-11)
QQRSNWPIFT

SEQ ID NO: 12168 - protein, 9 aa, Homo sapiens
  Heavy chain CDR3 for antibody 6084 (IGHV4-59)
AGGSWDFDY

SEQ ID NO: 12169 - protein, 9 aa, Homo sapiens
  Light chain CDR3 for antibody 6085 (IGKV2-30)
MQGTHWPLT

SEQ ID NO: 12170 - protein, 13 aa, Homo sapiens
  Heavy chain CDR3 for antibody 6085 (IGHV3-33)
AREYFDWLLPLDY

SEQ ID NO: 12171 - protein, 9 aa, Homo sapiens
  Light chain CDR3 for antibody 6086 (IGKV3D-7)
QQDYNLPLT

SEQ ID NO: 12172 - protein, 18 aa, Homo sapiens
  Heavy chain CDR3 for antibody 6086 (IGHV3-33)
ARERDYYGSGSYPDAFDI

SEQ ID NO: 12173 - protein, 9 aa, Homo sapiens
  Light chain CDR3 for antibody 6087 (IGKV6-21)
HQSSSLPYT

SEQ ID NO: 12174 - protein, 13 aa, Homo sapiens
  Heavy chain CDR3 for antibody 6087 (IGHV3-33)
ASAGNSYYNVMDV

SEQ ID NO: 12175 - protein, 9 aa, Homo sapiens
  Light chain CDR3 for antibody 6088 (IGKV1-6)
LQGFNYPRT

SEQ ID NO: 12176 - protein, 13 aa, Homo sapiens
  Heavy chain CDR3 for antibody 6088 (IGHV4-34)
ASNFYYYYYGMDV

SEQ ID NO: 12177 - protein, 9 aa, Homo sapiens
  Light chain CDR3 for antibody 6089 (IGKV1-39)
QQSYSTPYT

SEQ ID NO: 12178 - protein, 18 aa, Homo sapiens
  Heavy chain CDR3 for antibody 6089 (IGHV3-33)
ARGGVLYDILTGFYGMDV

SEQ ID NO: 12179 - protein, 10 aa, Homo sapiens
  Light chain CDR3 for antibody 6090 (IGKV1-17)
LQHNSYPMYT

SEQ ID NO: 12180 - protein, 14 aa, Homo sapiens
  Heavy chain CDR3 for antibody 6090 (IGHV3-33)
ARAGSGYDRDWFDP

SEQ ID NO: 12181 - protein, 9 aa, Homo sapiens
  Light chain CDR3 for antibody 6091 (IGKV5-2)
LQHDNFPYT

SEQ ID NO: 12182 - protein, 9 aa, Homo sapiens
  Heavy chain CDR3 for antibody 6091 (IGHV3-30)
ARGRVSLDV

SEQ ID NO: 12183 - protein, 9 aa, Homo sapiens
  Light chain CDR3 for antibody 6092 (IGKV1D-13)
QQFNNYPST

SEQ ID NO: 12184 - protein, 6 aa, Homo sapiens
  Heavy chain CDR3 for antibody 6092 (IGHV1-8)
AREGTY

SEQ ID NO: 12185 - protein, 8 aa, Homo sapiens
  Light chain CDR3 for antibody 6093 (IGKV3-11)
LQRGNWPT

SEQ ID NO: 12186 - protein, 11 aa, Homo sapiens
  Heavy chain CDR3 for antibody 6093 (IGHV3-33)
ARDRSSGPFDY

SEQ ID NO: 12187 - protein, 9 aa, Homo sapiens
  Light chain CDR3 for antibody 6094 (IGKV1-16)
QHYNDYPFT

SEQ ID NO: 12188 - protein, 13 aa, Homo sapiens
  Heavy chain CDR3 for antibody 6094 (IGHV4-34)
ASNFYYYYYGMDV

SEQ ID NO: 12189 - protein, 9 aa, Homo sapiens
  Light chain CDR3 for antibody 6095 (IGKV3-11)
QQRSNWMYT

SEQ ID NO: 12190 - protein, 10 aa, Homo sapiens
  Heavy chain CDR3 for antibody 6095 (IGHV3-74)
ARENWGGFDY

SEQ ID NO: 12191 - protein, 9 aa, Homo sapiens
  Light chain CDR3 for antibody 6096 (IGKV3-11)
QQRSNWPYT

SEQ ID NO: 12192 - protein, 18 aa, Homo sapiens
  Heavy chain CDR3 for antibody 6096 (IGHV3-33)
ARERGYYGSDIYPAAFDI

SEQ ID NO: 12193 - protein, 9 aa, Homo sapiens
  Light chain CDR3 for antibody 6097 (IGKV6-21)
HQSSSLPYT

SEQ ID NO: 12194 - protein, 12 aa, Homo sapiens
  Heavy chain CDR3 for antibody 6097 (IGHV3-13)
AIGTMVRGIPDY

SEQ ID NO: 12195 - protein, 8 aa, Homo sapiens
  Light chain CDR3 for antibody 6098 (IGKV3D-7)
QQDYNLLT

SEQ ID NO: 12196 - protein, 17 aa, Homo sapiens
  Heavy chain CDR3 for antibody 6098 (IGHV3-23)
AKDGIGELSYYYYGMDV

SEQ ID NO: 12197 - protein, 10 aa, Homo sapiens
  Light chain CDR3 for antibody 6099 (IGKV1-17)
LQHNSYPMYT

SEQ ID NO: 12198 - protein, 14 aa, Homo sapiens
  Heavy chain CDR3 for antibody 6099 (IGHV3-33)
ARTTAAAGPRDFQH

SEQ ID NO: 12199 - protein, 9 aa, Homo sapiens
  Light chain CDR3 for antibody 6100 (IGKV1D-16)
QQYAGYPPT

SEQ ID NO: 12200 - protein, 18 aa, Homo sapiens
  Heavy chain CDR3 for antibody 6100 (IGHV4-59)
AREGDYVWGSYRPNWFDP

SEQ ID NO: 12201 - protein, 10 aa, Homo sapiens
  Light chain CDR3 for antibody 6101 (IGKV1-17)
LQHNSYPMYT

SEQ ID NO: 12202 - protein, 10 aa, Homo sapiens
  Heavy chain CDR3 for antibody 6101 (IGHV3-33)
ARENSTPLDY

SEQ ID NO: 12203 - protein, 8 aa, Homo sapiens
  Light chain CDR3 for antibody 6102 (IGKV3D-7)
QQDYNLLT

SEQ ID NO: 12204 - protein, 15 aa, Homo sapiens
  Heavy chain CDR3 for antibody 6102 (IGHV3-23)
AKDGSYYDYYYGMDV

SEQ ID NO: 12205 - protein, 9 aa, Homo sapiens
  Light chain CDR3 for antibody 6103 (IGKV1-9)
QQLNSYPLT

SEQ ID NO: 12206 - protein, 9 aa, Homo sapiens
  Heavy chain CDR3 for antibody 6103 (IGHV3-23)
AKEQQLFDY

SEQ ID NO: 12207 - protein, 10 aa, Homo sapiens
  Light chain CDR3 for antibody 6104 (IGKV3-11)
QQRSNWPIFT

SEQ ID NO: 12208 - protein, 14 aa, Homo sapiens
  Heavy chain CDR3 for antibody 6104 (IGHV3-33)
ARRGYSGYDWYFDY

SEQ ID NO: 12209 - protein, 9 aa, Homo sapiens
  Light chain CDR3 for antibody 6105 (IGKV4-1)
QQYYSTPWT

SEQ ID NO: 12210 - protein, 12 aa, Homo sapiens
  Heavy chain CDR3 for antibody 6105 (IGHV3-33)
TRGYSSKSYFDY

SEQ ID NO: 12211 - protein, 9 aa, Homo sapiens
  Light chain CDR3 for antibody 6106 (IGKV3D-7)
QQDYEFPIT

SEQ ID NO: 12212 - protein, 16 aa, Homo sapiens
  Heavy chain CDR3 for antibody 6106 (IGHV1-24)
ATEDSSSTYYYYGLDV

SEQ ID NO: 12213 - protein, 9 aa, Homo sapiens
  Light chain CDR3 for antibody 6107 (IGKV1-17)
LQHNSYPYT

SEQ ID NO: 12214 - protein, 17 aa, Homo sapiens
  Heavy chain CDR3 for antibody 6107 (IGHV3-13)
AREGWFGELWGYYGMDV

SEQ ID NO: 12215 - protein, 9 aa, Homo sapiens
  Light chain CDR3 for antibody 6108 (IGKV1-27)
QKYNSAPYT

SEQ ID NO: 12216 - protein, 16 aa, Homo sapiens
  Heavy chain CDR3 for antibody 6108 (IGHV1-24)
ATEDSSSYYYYYGMDV

SEQ ID NO: 12217 - protein, 8 aa, Homo sapiens
  Light chain CDR3 for antibody 6109 (IGKV3D-7)
QQDYNLVT

SEQ ID NO: 12218 - protein, 14 aa, Homo sapiens
  Heavy chain CDR3 for antibody 6109 (IGHV1-46)
ARRGIVGALDAFDI

SEQ ID NO: 12219 - protein, 9 aa, Homo sapiens
  Light chain CDR3 for antibody 6110 (IGKV3-11)
QQRSNWMYT

SEQ ID NO: 12220 - protein, 13 aa, Homo sapiens
  Heavy chain CDR3 for antibody 6110 (IGHV3-21)
ARDSTLVRGVFPY

SEQ ID NO: 12221 - protein, 9 aa, Homo sapiens
  Light chain CDR3 for antibody 6111 (IGKV1-39)
QQSYSTPFT

SEQ ID NO: 12222 - protein, 17 aa, Homo sapiens
  Heavy chain CDR3 for antibody 6111 (IGHV1-46)
AREGADSGIYYHWYFDL

SEQ ID NO: 12223 - protein, 8 aa, Homo sapiens
  Light chain CDR3 for antibody 6112 (IGKV3D-7)
QQDYNLLT

SEQ ID NO: 12224 - protein, 11 aa, Homo sapiens
  Heavy chain CDR3 for antibody 6112 (IGHV3-33)
AREGAVARFDY

SEQ ID NO: 12225 - protein, 9 aa, Homo sapiens
  Light chain CDR3 for antibody 6113 (IGKV1-39)
QQSYSTPYT

SEQ ID NO: 12226 - protein, 15 aa, Homo sapiens
  Heavy chain CDR3 for antibody 6113 (IGHV3-33)
ARHSSGFYYYYGMDV

SEQ ID NO: 12227 - protein, 9 aa, Homo sapiens
  Light chain CDR3 for antibody 6114 (IGKV1D-13)
QQFNNYPRT

SEQ ID NO: 12228 - protein, 17 aa, Homo sapiens
  Heavy chain CDR3 for antibody 6114 (IGHV1-18)
ARERYYGSGIYKYAMDV

SEQ ID NO: 12229 - protein, 9 aa, Homo sapiens
  Light chain CDR3 for antibody 6115 (IGKV3-11)
QQRSNWPLT

SEQ ID NO: 12230 - protein, 17 aa, Homo sapiens
  Heavy chain CDR3 for antibody 6115 (IGHV3-33)
AREDYDILTGYPFYFDY

SEQ ID NO: 12231 - protein, 10 aa, Homo sapiens
  Light chain CDR3 for antibody 6116 (IGKV1-17)
LQHNSYPMYT

SEQ ID NO: 12232 - protein, 12 aa, Homo sapiens
  Heavy chain CDR3 for antibody 6116 (IGHV3-33)
ARDRAYRGSLDY

SEQ ID NO: 12233 - protein, 9 aa, Homo sapiens
  Light chain CDR3 for antibody 6117 (IGKV3-20)
QQYGSSPYT

SEQ ID NO: 12234 - protein, 18 aa, Homo sapiens
  Heavy chain CDR3 for antibody 6117 (IGHV3-33)
VRERGHYGSGSFPDAFDI

SEQ ID NO: 12235 - protein, 8 aa, Homo sapiens
  Light chain CDR3 for antibody 6118 (IGKV6-21)
HQSSSLPT

SEQ ID NO: 12236 - protein, 14 aa, Homo sapiens
  Heavy chain CDR3 for antibody 6118 (IGHV3-23)
AKSRIVGALYYFDY

SEQ ID NO: 12237 - protein, 9 aa, Homo sapiens
  Light chain CDR3 for antibody 6119 (IGKV1-39)
QQSYRTPLT

SEQ ID NO: 12238 - protein, 18 aa, Homo sapiens
  Heavy chain CDR3 for antibody 6119 (IGHV1-46)
ARDLTGRTENYYFYGMDV

SEQ ID NO: 12239 - protein, 11 aa, Homo sapiens
  Light chain CDR3 for antibody 6120 (IGKV3-11)
QQRSNWPPTWT

SEQ ID NO: 12240 - protein, 9 aa, Homo sapiens
  Heavy chain CDR3 for antibody 6120 (IGHV1-8)
ARGRLDFDY

SEQ ID NO: 12241 - protein, 9 aa, Homo sapiens
  Light chain CDR3 for antibody 6121 (IGKV1D-16)
QQYITYPYT

SEQ ID NO: 12242 - protein, 13 aa, Homo sapiens
  Heavy chain CDR3 for antibody 6121 (IGHV3-33)
ARAFTMVRGVIDY

SEQ ID NO: 12243 - protein, 9 aa, Homo sapiens
  Light chain CDR3 for antibody 6122 (IGKV5-2)
LQHDKFPYT

SEQ ID NO: 12244 - protein, 9 aa, Homo sapiens
  Heavy chain CDR3 for antibody 6122 (IGHV3-30)
ARDYFHFDY

SEQ ID NO: 12245 - protein, 9 aa, Homo sapiens
  Light chain CDR3 for antibody 6123 (IGKV1-39)
QQSYSTPLT

SEQ ID NO: 12246 - protein, 15 aa, Homo sapiens
  Heavy chain CDR3 for antibody 6123 (IGHV3-64)
ARDSHHDLLTGHYEY

SEQ ID NO: 12247 - protein, 9 aa, Homo sapiens
  Light chain CDR3 for antibody 6124 (IGKV1-6)
LQDYKSPFT

SEQ ID NO: 12248 - protein, 9 aa, Homo sapiens
  Heavy chain CDR3 for antibody 6124 (IGHV3-33)
ARATVGVDY

SEQ ID NO: 12249 - protein, 9 aa, Homo sapiens
  Light chain CDR3 for antibody 6125 (IGKV1-39)
QQSYSTPYT

SEQ ID NO: 12250 - protein, 18 aa, Homo sapiens
  Heavy chain CDR3 for antibody 6125 (IGHV3-33)
ARDYDSLTTYPEDYGMDV

SEQ ID NO: 12251 - protein, 9 aa, Homo sapiens
  Light chain CDR3 for antibody 6126 (IGKV1D-13)
QRFNNYLYT

SEQ ID NO: 12252 - protein, 11 aa, Homo sapiens
  Heavy chain CDR3 for antibody 6126 (IGHV3-33)
ARDTWDDYFDY

SEQ ID NO: 12253 - protein, 9 aa, Homo sapiens
  Light chain CDR3 for antibody 6127 (IGKV4-1)
QQYYTTPPT

SEQ ID NO: 12254 - protein, 13 aa, Homo sapiens
  Heavy chain CDR3 for antibody 6127 (IGHV3-33)
ARTDYYFYYGLDV

SEQ ID NO: 12255 - protein, 9 aa, Homo sapiens
  Light chain CDR3 for antibody 6128 (IGKV5-2)
LQHDNFPYT

SEQ ID NO: 12256 - protein, 15 aa, Homo sapiens
  Heavy chain CDR3 for antibody 6128 (IGHV3-20)
AREGSSSWYLYYFDY

SEQ ID NO: 12257 - protein, 9 aa, Homo sapiens
  Light chain CDR3 for antibody 6129 (IGKV1-39)
QQSYSTPYT

SEQ ID NO: 12258 - protein, 15 aa, Homo sapiens
  Heavy chain CDR3 for antibody 6129 (IGHV3-23)
AKAGGRYFDWFPFDY

SEQ ID NO: 12259 - protein, 9 aa, Homo sapiens
  Light chain CDR3 for antibody 6130 (IGKV3-15)
QQYNNWPLT

SEQ ID NO: 12260 - protein, 11 aa, Homo sapiens
  Heavy chain CDR3 for antibody 6130 (IGHV4-59)
ARDGVRGVFDI

SEQ ID NO: 12261 - protein, 9 aa, Homo sapiens
  Light chain CDR3 for antibody 6131 (IGKV2D-28)
MQALQTPPT

SEQ ID NO: 12262 - protein, 12 aa, Homo sapiens
  Heavy chain CDR3 for antibody 6131 (IGHV3-33)
TRGYSSKSYFDY

SEQ ID NO: 12263 - protein, 9 aa, Homo sapiens
  Light chain CDR3 for antibody 6132 (IGKV1D-13)
QRFNNYLYT

SEQ ID NO: 12264 - protein, 13 aa, Homo sapiens
  Heavy chain CDR3 for antibody 6132 (IGHV3-33)
ARRATLVRGVFDP

SEQ ID NO: 12265 - protein, 9 aa, Homo sapiens
  Light chain CDR3 for antibody 6133 (IGKV1-39)
QQSYSTPLT

SEQ ID NO: 12266 - protein, 21 aa, Homo sapiens
  Heavy chain CDR3 for antibody 6133 (IGHV4-59)
AAGVLLWFGEPNYYYYYGMDV

SEQ ID NO: 12267 - protein, 9 aa, Homo sapiens
  Light chain CDR3 for antibody 6134 (IGKV6-21)
HQSSSLPLT

SEQ ID NO: 12268 - protein, 14 aa, Homo sapiens
  Heavy chain CDR3 for antibody 6134 (IGHV3-15)
SIYYYGSGRDFFDY

SEQ ID NO: 12269 - protein, 10 aa, Homo sapiens
  Light chain CDR3 for antibody 6135 (IGKV3-11)
QQRSNWLMYT

SEQ ID NO: 12270 - protein, 15 aa, Homo sapiens
  Heavy chain CDR3 for antibody 6135 (IGHV3-30)
ARGAMVRGVDYGMDV

SEQ ID NO: 12271 - protein, 9 aa, Homo sapiens
  Light chain CDR3 for antibody 6136 (IGKV1-39)
QQSYSTPIT

SEQ ID NO: 12272 - protein, 14 aa, Homo sapiens
  Heavy chain CDR3 for antibody 6136 (IGHV1-46)
ARAYYAFLTGAFDI

SEQ ID NO: 12273 - protein, 8 aa, Homo sapiens
  Light chain CDR3 for antibody 6137 (IGKV1-5)
QQYNSYWT

SEQ ID NO: 12274 - protein, 9 aa, Homo sapiens
  Heavy chain CDR3 for antibody 6137 (IGHV3-23)
AKEQQLFDY

SEQ ID NO: 12275 - protein, 8 aa, Homo sapiens
  Light chain CDR3 for antibody 6138 (IGKV1-5)
QQYNSYYT

SEQ ID NO: 12276 - protein, 18 aa, Homo sapiens
  Heavy chain CDR3 for antibody 6138 (IGHV4-59)
AREGHYYTSGSYYKAFDY

SEQ ID NO: 12277 - protein, 9 aa, Homo sapiens
  Light chain CDR3 for antibody 6139 (IGKV5-2)
LQHDNFPWT

SEQ ID NO: 12278 - protein, 9 aa, Homo sapiens
  Heavy chain CDR3 for antibody 6139 (IGHV1-18)
ARGNTWFDY

SEQ ID NO: 12279 - protein, 9 aa, Homo sapiens
  Light chain CDR3 for antibody 6140 (IGKV1D-13)
QQFNNYPHT

SEQ ID NO: 12280 - protein, 14 aa, Homo sapiens
  Heavy chain CDR3 for antibody 6140 (IGHV4-39)
ARQGTMIRGGYFDY

SEQ ID NO: 12281 - protein, 10 aa, Homo sapiens
  Light chain CDR3 for antibody 6141 (IGKV1-17)
LQHNSYPMYT

SEQ ID NO: 12282 - protein, 12 aa, Homo sapiens
  Heavy chain CDR3 for antibody 6141 (IGHV3-33)
ARDLVGATPFDY

SEQ ID NO: 12283 - protein, 9 aa, Homo sapiens
  Light chain CDR3 for antibody 6142 (IGKV1-6)
LQDFHYPWT

SEQ ID NO: 12284 - protein, 16 aa, Homo sapiens
  Heavy chain CDR3 for antibody 6142 (IGHV4-59)
ARGRYFEWLLGDVFDI

SEQ ID NO: 12285 - protein, 9 aa, Homo sapiens
  Light chain CDR3 for antibody 6143 (IGKV1-9)
QQLKSYLYT

SEQ ID NO: 12286 - protein, 16 aa, Homo sapiens
  Heavy chain CDR3 for antibody 6143 (IGHV1-24)
ATEDSSSTYYYYGLDV

SEQ ID NO: 12287 - protein, 9 aa, Homo sapiens
  Light chain CDR3 for antibody 6144 (IGKV1-6)
LQDFHYPWT

SEQ ID NO: 12288 - protein, 13 aa, Homo sapiens
  Heavy chain CDR3 for antibody 6144 (IGHV4-34)
ASNFYYYYYGMDV

SEQ ID NO: 12289 - protein, 10 aa, Homo sapiens
  Light chain CDR3 for antibody 6145 (IGKV3-15)
QQYNNWPPYT

SEQ ID NO: 12290 - protein, 14 aa, Homo sapiens
  Heavy chain CDR3 for antibody 6145 (IGHV3-23)
AKSRIVGALYYFDY

SEQ ID NO: 12291 - protein, 10 aa, Homo sapiens
  Light chain CDR3 for antibody 6146 (IGKV1-6)
LQDYNYPMYT

SEQ ID NO: 12292 - protein, 8 aa, Homo sapiens
  Heavy chain CDR3 for antibody 6146 (IGHV3-23)
AETFLFDY

SEQ ID NO: 12293 - protein, 9 aa, Homo sapiens
  Light chain CDR3 for antibody 6147 (IGKV3-15)
QQYNNWPYT

SEQ ID NO: 12294 - protein, 15 aa, Homo sapiens
  Heavy chain CDR3 for antibody 6147 (IGHV3-33)
ARAYDLPHYYYGMDV

SEQ ID NO: 12295 - protein, 9 aa, Homo sapiens
  Light chain CDR3 for antibody 6148 (IGKV1-9)
QQLISYPLT

SEQ ID NO: 12296 - protein, 14 aa, Homo sapiens
  Heavy chain CDR3 for antibody 6148 (IGHV1-46)
ARRGIVGALDAFDI

SEQ ID NO: 12297 - protein, 9 aa, Homo sapiens
  Light chain CDR3 for antibody 6149 (IGKV5-2)
LQHDNFPWT

SEQ ID NO: 12298 - protein, 11 aa, Homo sapiens
  Heavy chain CDR3 for antibody 6149 (IGHV3-64)
ARERGSYAFDI

SEQ ID NO: 12299 - protein, 10 aa, Homo sapiens
  Light chain CDR3 for antibody 6150 (IGKV3-15)
QKYNNWPPLT

SEQ ID NO: 12300 - protein, 18 aa, Homo sapiens
  Heavy chain CDR3 for antibody 6150 (IGHV1-46)
ARDGDYVWGSYRSDWFDP

SEQ ID NO: 12301 - protein, 9 aa, Homo sapiens
  Light chain CDR3 for antibody 6151 (IGKV1-6)
LQDYNYPWT

SEQ ID NO: 12302 - protein, 12 aa, Homo sapiens
  Heavy chain CDR3 for antibody 6151 (IGHV4-61)
ARVGSSGWYFDY

SEQ ID NO: 12303 - protein, 10 aa, Homo sapiens
  Light chain CDR3 for antibody 6152 (IGKV1-9)
QQLDSYPMYT

SEQ ID NO: 12304 - protein, 16 aa, Homo sapiens
  Heavy chain CDR3 for antibody 6152 (IGHV3-33)
ARGYDMLTGDYYGMDV

SEQ ID NO: 12305 - protein, 9 aa, Homo sapiens
  Light chain CDR3 for antibody 6153 (IGKV1-33)
QQYDNLPFT

SEQ ID NO: 12306 - protein, 13 aa, Homo sapiens
  Heavy chain CDR3 for antibody 6153 (IGHV4-59)
ARDAGYSSSWFDY

SEQ ID NO: 12307 - protein, 9 aa, Homo sapiens
  Light chain CDR3 for antibody 6154 (IGKV1-39)
QQSYSTPWT

SEQ ID NO: 12308 - protein, 12 aa, Homo sapiens
  Heavy chain CDR3 for antibody 6154 (IGHV4-61)
ARVDSSGWFFDY

SEQ ID NO: 12309 - protein, 9 aa, Homo sapiens
  Light chain CDR3 for antibody 6155 (IGKV1-6)
LQDYNYPRT

SEQ ID NO: 12310 - protein, 10 aa, Homo sapiens
  Heavy chain CDR3 for antibody 6155 (IGHV3-33)
ARKGMNAFDI

SEQ ID NO: 12311 - protein, 9 aa, Homo sapiens
  Light chain CDR3 for antibody 6156 (IGKV3-15)
QQYNNWPYT

SEQ ID NO: 12312 - protein, 17 aa, Homo sapiens
  Heavy chain CDR3 for antibody 6156 (IGHV3-33)
ARGGYSSGWDYYYGMDV

SEQ ID NO: 12313 - protein, 9 aa, Homo sapiens
  Light chain CDR3 for antibody 6157 (IGKV1-6)
LQDYNYPRT

SEQ ID NO: 12314 - protein, 9 aa, Homo sapiens
  Heavy chain CDR3 for antibody 6157 (IGHV3-23)
ATIAADFDY

SEQ ID NO: 12315 - protein, 9 aa, Homo sapiens
  Light chain CDR3 for antibody 6158 (IGKV1D-16)
QQYYSYPLT

SEQ ID NO: 12316 - protein, 15 aa, Homo sapiens
  Heavy chain CDR3 for antibody 6158 (IGHV3-23)
AKDYRSGWFGYYFDY

SEQ ID NO: 12317 - protein, 10 aa, Homo sapiens
  Light chain CDR3 for antibody 6159 (IGKV1-6)
LQDYNYPMYT

SEQ ID NO: 12318 - protein, 11 aa, Homo sapiens
  Heavy chain CDR3 for antibody 6159 (IGHV3-33)
ARDRSSGPFDY

SEQ ID NO: 12319 - protein, 9 aa, Homo sapiens
  Light chain CDR3 for antibody 6160 (IGKV5-2)
LQHDNFPWT

SEQ ID NO: 12320 - protein, 16 aa, Homo sapiens
  Heavy chain CDR3 for antibody 6160 (IGHV3-11)
ARDSELRYFDWFGMDV

SEQ ID NO: 12321 - protein, 9 aa, Homo sapiens
  Light chain CDR3 for antibody 6161 (IGKV3-20)
QQYGSSPYT

SEQ ID NO: 12322 - protein, 15 aa, Homo sapiens
  Heavy chain CDR3 for antibody 6161 (IGHV3-33)
ARPPIAVAGPEYFQH

SEQ ID NO: 12323 - protein, 9 aa, Homo sapiens
  Light chain CDR3 for antibody 6162 (IGKV1D-13)
QQFNNYPST

SEQ ID NO: 12324 - protein, 16 aa, Homo sapiens
  Heavy chain CDR3 for antibody 6162 (IGHV3-23)
AKDLRYFDWSLYAFDI

SEQ ID NO: 12325 - protein, 8 aa, Homo sapiens
  Light chain CDR3 for antibody 6163 (IGKV1D-13)
QQFNNYPT

SEQ ID NO: 12326 - protein, 20 aa, Homo sapiens
  Heavy chain CDR3 for antibody 6163 (IGHV3-33)
SRGGATLVRGVIDYYYGMDV

SEQ ID NO: 12327 - protein, 9 aa, Homo sapiens
  Light chain CDR3 for antibody 6164 (IGKV1-6)
LQDYNYPWT

SEQ ID NO: 12328 - protein, 13 aa, Homo sapiens
  Heavy chain CDR3 for antibody 6164 (IGHV3-23)
AKVWSSGWSDFDY

SEQ ID NO: 12329 - protein, 10 aa, Homo sapiens
  Light chain CDR3 for antibody 6165 (IGKV1-39)
QQSYSTPMYT

SEQ ID NO: 12330 - protein, 15 aa, Homo sapiens
  Heavy chain CDR3 for antibody 6165 (IGHV3-64)
ARDSRPEITGPPFDY

SEQ ID NO: 12331 - protein, 9 aa, Homo sapiens
  Light chain CDR3 for antibody 6166 (IGKV1D-16)
QQYNSFPLT

SEQ ID NO: 12332 - protein, 15 aa, Homo sapiens
  Heavy chain CDR3 for antibody 6166 (IGHV3-33)
ARDHLTGYYYYGMDV

SEQ ID NO: 12333 - protein, 9 aa, Homo sapiens
  Light chain CDR3 for antibody 6167 (IGKV1-27)
QKYNSAPYT

SEQ ID NO: 12334 - protein, 11 aa, Homo sapiens
  Heavy chain CDR3 for antibody 6167 (IGHV3-23)
AKKVYDYGSDY

SEQ ID NO: 12335 - protein, 9 aa, Homo sapiens
  Light chain CDR3 for antibody 6168 (IGKV1-6)
QQEYNYPLT

SEQ ID NO: 12336 - protein, 13 aa, Homo sapiens
  Heavy chain CDR3 for antibody 6168 (IGHV4-34)
ASNFYYYYYGMDV

SEQ ID NO: 12337 - protein, 9 aa, Homo sapiens
  Light chain CDR3 for antibody 6169 (IGKV1-6)
LQDYKSPFT

SEQ ID NO: 12338 - protein, 17 aa, Homo sapiens
  Heavy chain CDR3 for antibody 6169 (IGHV3-33)
ARGYCSRTSCYLYYFDY

SEQ ID NO: 12339 - protein, 9 aa, Homo sapiens
  Light chain CDR3 for antibody 6170 (IGKV5-2)
LQHDKFPYT

SEQ ID NO: 12340 - protein, 16 aa, Homo sapiens
  Heavy chain CDR3 for antibody 6170 (IGHV3-33)
AREVAGSYYYYYGIDV

SEQ ID NO: 12341 - protein, 8 aa, Homo sapiens
  Light chain CDR3 for antibody 6171 (IGKV3D-7)
QQDYNLLT

SEQ ID NO: 12342 - protein, 16 aa, Homo sapiens
  Heavy chain CDR3 for antibody 6171 (IGHV3-33)
ARGYDMLTGDYYGMDV

SEQ ID NO: 12343 - protein, 9 aa, Homo sapiens
  Light chain CDR3 for antibody 6172 (IGKV1-17)
LQHNSYPWT

SEQ ID NO: 12344 - protein, 18 aa, Homo sapiens
  Heavy chain CDR3 for antibody 6172 (IGHV3-33)
ARERYYYGSGSYPDAFDI

SEQ ID NO: 12345 - protein, 9 aa, Homo sapiens
  Light chain CDR3 for antibody 6173 (IGKV1-6)
LQDFHYPWT

SEQ ID NO: 12346 - protein, 18 aa, Homo sapiens
  Heavy chain CDR3 for antibody 6173 (IGHV3-33)
ARREGIVGATTYYYGMDV

SEQ ID NO: 12347 - protein, 9 aa, Homo sapiens
  Light chain CDR3 for antibody 6174 (IGKV3D-7)
QQDYNLPRT

SEQ ID NO: 12348 - protein, 17 aa, Homo sapiens
  Heavy chain CDR3 for antibody 6174 (IGHV3-33)
ARAYYDILTGYSYYFDY

SEQ ID NO: 12349 - protein, 9 aa, Homo sapiens
  Light chain CDR3 for antibody 6175 (IGKV3-11)
QQRINWPWT

SEQ ID NO: 12350 - protein, 19 aa, Homo sapiens
  Heavy chain CDR3 for antibody 6175 (IGHV4-59)
ARDRVVGATTYYYYYGMDV

SEQ ID NO: 12351 - protein, 9 aa, Homo sapiens
  Light chain CDR3 for antibody 6176 (IGKV1-6)
LQDYNYPWT

SEQ ID NO: 12352 - protein, 20 aa, Homo sapiens
  Heavy chain CDR3 for antibody 6176 (IGHV3-23)
TKDRYSDSSGYYLYYNDMDV

SEQ ID NO: 12353 - protein, 9 aa, Homo sapiens
  Light chain CDR3 for antibody 6177 (IGKV1-9)
QQLHIYPWT

SEQ ID NO: 12354 - protein, 14 aa, Homo sapiens
  Heavy chain CDR3 for antibody 6177 (IGHV3-33)
ARDKTYPLSYGMDV

SEQ ID NO: 12355 - protein, 9 aa, Homo sapiens
  Light chain CDR3 for antibody 6178 (IGKV5-2)
LQHDNFPYT

SEQ ID NO: 12356 - protein, 13 aa, Homo sapiens
  Heavy chain CDR3 for antibody 6178 (IGHV3-33)
GRTDYYSYYGVDV

SEQ ID NO: 12357 - protein, 9 aa, Homo sapiens
  Light chain CDR3 for antibody 6179 (IGKV3-11)
QQRSNWPPT

SEQ ID NO: 12358 - protein, 16 aa, Homo sapiens
  Heavy chain CDR3 for antibody 6179 (IGHV1-8)
AREGTMVRGVTYAFDI

SEQ ID NO: 12359 - protein, 8 aa, Homo sapiens
  Light chain CDR3 for antibody 6180 (IGKV1D-13)
QQFNNYPT

SEQ ID NO: 12360 - protein, 13 aa, Homo sapiens
  Heavy chain CDR3 for antibody 6180 (IGHV4-39)
ARHVLLWFGEFDP

SEQ ID NO: 12361 - protein, 9 aa, Homo sapiens
  Light chain CDR3 for antibody 6181 (IGKV1-16)
QHYNDYPFT

SEQ ID NO: 12362 - protein, 15 aa, Homo sapiens
  Heavy chain CDR3 for antibody 6181 (IGHV3-33)
ARDTGYSSSWNWFDP

SEQ ID NO: 12363 - protein, 9 aa, Homo sapiens
  Light chain CDR3 for antibody 6182 (IGKV6-21)
HQSSSLPYT

SEQ ID NO: 12364 - protein, 14 aa, Homo sapiens
  Heavy chain CDR3 for antibody 6182 (IGHV3-23)
AKCDYDILTGILDY

SEQ ID NO: 12365 - protein, 9 aa, Homo sapiens
  Light chain CDR3 for antibody 6183 (IGKV1D-13)
QQFNNYPHT

SEQ ID NO: 12366 - protein, 15 aa, Homo sapiens
  Heavy chain CDR3 for antibody 6183 (IGHV3-23)
AKDLSSGWYAYFFDY

SEQ ID NO: 12367 - protein, 9 aa, Homo sapiens
  Light chain CDR3 for antibody 6184 (IGKV1D-13)
QQFNNYPHT

SEQ ID NO: 12368 - protein, 12 aa, Homo sapiens
  Heavy chain CDR3 for antibody 6184 (IGHV3-33)
ARKGYGLYVLDV

SEQ ID NO: 12369 - protein, 8 aa, Homo sapiens
  Light chain CDR3 for antibody 6185 (IGKV3-11)
QQRSNWLT

SEQ ID NO: 12370 - protein, 14 aa, Homo sapiens
  Heavy chain CDR3 for antibody 6185 (IGHV4-39)
ARQDYDILTGLFDY

SEQ ID NO: 12371 - protein, 9 aa, Homo sapiens
  Light chain CDR3 for antibody 6186 (IGKV6-21)
HQSSSLPYT

SEQ ID NO: 12372 - protein, 17 aa, Homo sapiens
  Heavy chain CDR3 for antibody 6186 (IGHV3-33)
ARAYYDILTGYYIHCDY

SEQ ID NO: 12373 - protein, 9 aa, Homo sapiens
  Light chain CDR3 for antibody 6187 (IGKV3D-7)
QQDYNLPYT

SEQ ID NO: 12374 - protein, 17 aa, Homo sapiens
  Heavy chain CDR3 for antibody 6187 (IGHV3-33)
ARDWFGELSDYYYGMDV

SEQ ID NO: 12375 - protein, 9 aa, Homo sapiens
  Light chain CDR3 for antibody 6188 (IGKV2-30)
MQGTHWPLT

SEQ ID NO: 12376 - protein, 13 aa, Homo sapiens
  Heavy chain CDR3 for antibody 6188 (IGHV3-23)
AKDRGGSYSYFDF

SEQ ID NO: 12377 - protein, 9 aa, Homo sapiens
  Light chain CDR3 for antibody 6189 (IGKV2D-24)
TQATQFPHT

SEQ ID NO: 12378 - protein, 17 aa, Homo sapiens
  Heavy chain CDR3 for antibody 6189 (IGHV1-18)
ARDRAFTMVRGVPPFDY

SEQ ID NO: 12379 - protein, 9 aa, Homo sapiens
  Light chain CDR3 for antibody 6190 (IGKV2-30)
MQGTHWPLT

SEQ ID NO: 12380 - protein, 23 aa, Homo sapiens
  Heavy chain CDR3 for antibody 6190 (IGHV4-59)
ARERTYSDILPGYYEDYYYGMDV

SEQ ID NO: 12381 - protein, 9 aa, Homo sapiens
  Light chain CDR3 for antibody 6191 (IGKV1-16)
QHYNDYPFT

SEQ ID NO: 12382 - protein, 18 aa, Homo sapiens
  Heavy chain CDR3 for antibody 6191 (IGHV3-33)
ARGLLWFGVSYYYYGMDV

SEQ ID NO: 12383 - protein, 11 aa, Homo sapiens
  Light chain CDR3 for antibody 6192 (IGKV3-11)
QQRSNWPPTWT

SEQ ID NO: 12384 - protein, 14 aa, Homo sapiens
  Heavy chain CDR3 for antibody 6192 (IGHV3-33)
ARTTAAAGPRDFQH

SEQ ID NO: 12385 - protein, 9 aa, Homo sapiens
  Light chain CDR3 for antibody 6193 (IGKV1-17)
LQHNSYPYT

SEQ ID NO: 12386 - protein, 8 aa, Homo sapiens
  Heavy chain CDR3 for antibody 6193 (IGHV3-33)
ARDDGMDV

SEQ ID NO: 12387 - protein, 10 aa, Homo sapiens
  Light chain CDR3 for antibody 6194 (IGKV1-27)
QKYNSAPMYT

SEQ ID NO: 12388 - protein, 17 aa, Homo sapiens
  Heavy chain CDR3 for antibody 6194 (IGHV4-59)
ARDFLVRGEGSYYGMDV

SEQ ID NO: 12389 - protein, 9 aa, Homo sapiens
  Light chain CDR3 for antibody 6195 (IGKV1D-13)
QQFNNYPYT

SEQ ID NO: 12390 - protein, 14 aa, Homo sapiens
  Heavy chain CDR3 for antibody 6195 (IGHV3-20)
ARDGGSTSFDWFDP

SEQ ID NO: 12391 - protein, 9 aa, Homo sapiens
  Light chain CDR3 for antibody 6196 (IGKV1-6)
LQDYKSPFT

SEQ ID NO: 12392 - protein, 15 aa, Homo sapiens
  Heavy chain CDR3 for antibody 6196 (IGHV3-33)
ARDTGYSSSWNWFDP

SEQ ID NO: 12393 - protein, 9 aa, Homo sapiens
  Light chain CDR3 for antibody 6197 (IGKV1-6)
LQDFNYPRT

SEQ ID NO: 12394 - protein, 13 aa, Homo sapiens
  Heavy chain CDR3 for antibody 6197 (IGHV4-39)
ARHEVMIRGVFDY

SEQ ID NO: 12395 - protein, 9 aa, Homo sapiens
  Light chain CDR3 for antibody 6198 (IGKV3D-20)
QQYGYSPLT

SEQ ID NO: 12396 - protein, 13 aa, Homo sapiens
  Heavy chain CDR3 for antibody 6198 (IGHV3-11)
ARDEGYRGYVLDT

SEQ ID NO: 12397 - protein, 8 aa, Homo sapiens
  Light chain CDR3 for antibody 6199 (IGKV1-5)
QQYNSYWT

SEQ ID NO: 12398 - protein, 8 aa, Homo sapiens
  Heavy chain CDR3 for antibody 6199 (IGHV3-23)
AETFLFDY

SEQ ID NO: 12399 - protein, 9 aa, Homo sapiens
  Light chain CDR3 for antibody 6200 (IGKV1-17)
LQHTSYPFT

SEQ ID NO: 12400 - protein, 18 aa, Homo sapiens
  Heavy chain CDR3 for antibody 6200 (IGHV1-46)
ARDGDYVWGSYRSDWFDP

SEQ ID NO: 12401 - protein, 8 aa, Homo sapiens
  Light chain CDR3 for antibody 6201 (IGKV6-21)
HQSSSLPT

SEQ ID NO: 12402 - protein, 12 aa, Homo sapiens
  Heavy chain CDR3 for antibody 6201 (IGHV1-18)
ARVLFDGDYFDY

SEQ ID NO: 12403 - protein, 8 aa, Homo sapiens
  Light chain CDR3 for antibody 6202 (IGKV1D-13)
QQFNNYPT

SEQ ID NO: 12404 - protein, 20 aa, Homo sapiens
  Heavy chain CDR3 for antibody 6202 (IGHV3-11)
ARGGATLIRGLIDYYYGMDV

SEQ ID NO: 12405 - protein, 9 aa, Homo sapiens
  Light chain CDR3 for antibody 6203 (IGKV5-2)
LQHDNFPYT

SEQ ID NO: 12406 - protein, 12 aa, Homo sapiens
  Heavy chain CDR3 for antibody 6203 (IGHV3-33)
ARKAYALYVLDV

SEQ ID NO: 12407 - protein, 8 aa, Homo sapiens
  Light chain CDR3 for antibody 6204 (IGKV3-11)
QQRSNWLT

SEQ ID NO: 12408 - protein, 12 aa, Homo sapiens
  Heavy chain CDR3 for antibody 6204 (IGHV4-61)
ARVYSSGWLFDY

SEQ ID NO: 12409 - protein, 9 aa, Homo sapiens
  Light chain CDR3 for antibody 6205 (IGKV1-17)
LQHNSYPYT

SEQ ID NO: 12410 - protein, 12 aa, Homo sapiens
  Heavy chain CDR3 for antibody 6205 (IGHV3-33)
AREGVMGYSGSY

SEQ ID NO: 12411 - protein, 8 aa, Homo sapiens
  Light chain CDR3 for antibody 6206 (IGKV3-11)
LQRGNWPT

SEQ ID NO: 12412 - protein, 13 aa, Homo sapiens
  Heavy chain CDR3 for antibody 6206 (IGHV3-33)
ARAFTMVRGVIDY

SEQ ID NO: 12413 - protein, 9 aa, Homo sapiens
  Light chain CDR3 for antibody 6207 (IGKV6-21)
HQSSSLPLT

SEQ ID NO: 12414 - protein, 11 aa, Homo sapiens
  Heavy chain CDR3 for antibody 6207 (IGHV3-33)
ASWDILTGSGY

SEQ ID NO: 12415 - protein, 9 aa, Homo sapiens
  Light chain CDR3 for antibody 6208 (IGKV6-21)
QQSSNLPHT

SEQ ID NO: 12416 - protein, 16 aa, Homo sapiens
  Heavy chain CDR3 for antibody 6208 (IGHV3-23)
AKEGMVLRYFDWLWDY

SEQ ID NO: 12417 - protein, 9 aa, Homo sapiens
  Light chain CDR3 for antibody 6209 (IGKV1-33)
QQYDNLPFT

SEQ ID NO: 12418 - protein, 14 aa, Homo sapiens
  Heavy chain CDR3 for antibody 6209 (IGHV3-23)
AKSRIVGALYYFDY

SEQ ID NO: 12419 - protein, 9 aa, Homo sapiens
  Light chain CDR3 for antibody 6210 (IGKV3D-7)
QQDYTLPLT

SEQ ID NO: 12420 - protein, 11 aa, Homo sapiens
  Heavy chain CDR3 for antibody 6210 (IGHV4-39)
ARLLVGATTDY

SEQ ID NO: 12421 - protein, 9 aa, Homo sapiens
  Light chain CDR3 for antibody 6211 (IGKV1-33)
QQYDNLPFT

SEQ ID NO: 12422 - protein, 11 aa, Homo sapiens
  Heavy chain CDR3 for antibody 6211 (IGHV4-59)
AREMGHDTFDI

SEQ ID NO: 12423 - protein, 8 aa, Homo sapiens
  Light chain CDR3 for antibody 6212 (IGKV1-5)
QQYNSYYT

SEQ ID NO: 12424 - protein, 14 aa, Homo sapiens
  Heavy chain CDR3 for antibody 6212 (IGHV3-23)
ANWAYDILTGYLDY

SEQ ID NO: 12425 - protein, 10 aa, Homo sapiens
  Light chain CDR3 for antibody 6213 (IGKV3-11)
QQRSNWPIFT

SEQ ID NO: 12426 - protein, 19 aa, Homo sapiens
  Heavy chain CDR3 for antibody 6213 (IGHV3-33)
ARGPYYDILTGYGYYGMDV

SEQ ID NO: 12427 - protein, 8 aa, Homo sapiens
  Light chain CDR3 for antibody 6214 (IGKV1D-13)
QQFNNYPT

SEQ ID NO: 12428 - protein, 16 aa, Homo sapiens
  Heavy chain CDR3 for antibody 6214 (IGHV4-59)
ARGRYFEWLLGDVFDI

SEQ ID NO: 12429 - protein, 10 aa, Homo sapiens
  Light chain CDR3 for antibody 6215 (IGKV1-27)
QKYNSAPMYT

SEQ ID NO: 12430 - protein, 11 aa, Homo sapiens
  Heavy chain CDR3 for antibody 6215 (IGHV3-33)
ARDRSSGPFDY

SEQ ID NO: 12431 - protein, 9 aa, Homo sapiens
  Light chain CDR3 for antibody 6216 (IGKV3-15)
QQYNNWPRT

SEQ ID NO: 12432 - protein, 18 aa, Homo sapiens
  Heavy chain CDR3 for antibody 6216 (IGHV3-23)
AKEGNYYGSGSYWGYFDP

SEQ ID NO: 12433 - protein, 10 aa, Homo sapiens
  Light chain CDR3 for antibody 6217 (IGKV1-39)
QQSYSTPMYT

SEQ ID NO: 12434 - protein, 13 aa, Homo sapiens
  Heavy chain CDR3 for antibody 6217 (IGHV3-23)
ASPFNWNDGFFDY

SEQ ID NO: 12435 - protein, 8 aa, Homo sapiens
  Light chain CDR3 for antibody 6218 (IGKV1-5)
QQYNSYWT

SEQ ID NO: 12436 - protein, 13 aa, Homo sapiens
  Heavy chain CDR3 for antibody 6218 (IGHV3-33)
ARDYTMVRGVMNY

SEQ ID NO: 12437 - protein, 9 aa, Homo sapiens
  Light chain CDR3 for antibody 6219 (IGKV3D-7)
QQDYNLPLT

SEQ ID NO: 12438 - protein, 17 aa, Homo sapiens
  Heavy chain CDR3 for antibody 6219 (IGHV3-23)
AKDGSFYSSGWYDAFDI

SEQ ID NO: 12439 - protein, 9 aa, Homo sapiens
  Light chain CDR3 for antibody 6220 (IGKV3-11)
QQRSNWPLT

SEQ ID NO: 12440 - protein, 14 aa, Homo sapiens
  Heavy chain CDR3 for antibody 6220 (IGHV1-2)
ARDYYGSGNYYMGY

SEQ ID NO: 12441 - protein, 9 aa, Homo sapiens
  Light chain CDR3 for antibody 6221 (IGKV1-27)
QKYNSAPYT

SEQ ID NO: 12442 - protein, 14 aa, Homo sapiens
  Heavy chain CDR3 for antibody 6221 (IGHV3-33)
ARDTVAAGFNGMDV

SEQ ID NO: 12443 - protein, 9 aa, Homo sapiens
  Light chain CDR3 for antibody 6222 (IGKV1-17)
LQHNSYPYT

SEQ ID NO: 12444 - protein, 18 aa, Homo sapiens
  Heavy chain CDR3 for antibody 6222 (IGHV3-33)
ARAGYYGSGSFYYYGMDV

SEQ ID NO: 12445 - protein, 9 aa, Homo sapiens
  Light chain CDR3 for antibody 6223 (IGKV1D-16)
QQYDSYPYT

SEQ ID NO: 12446 - protein, 15 aa, Homo sapiens
  Heavy chain CDR3 for antibody 6223 (IGHV3-33)
ARGYYYGSGSFPFDY

SEQ ID NO: 12447 - protein, 9 aa, Homo sapiens
  Light chain CDR3 for antibody 6224 (IGKV1D-16)
QQYITYPYT

SEQ ID NO: 12448 - protein, 13 aa, Homo sapiens
  Heavy chain CDR3 for antibody 6224 (IGHV3-33)
ARDYCGGDCYLDY

SEQ ID NO: 12449 - protein, 9 aa, Homo sapiens
  Light chain CDR3 for antibody 6225 (IGKV1D-13)
QQFNNYPHT

SEQ ID NO: 12450 - protein, 6 aa, Homo sapiens
  Heavy chain CDR3 for antibody 6225 (IGHV3-53)
ARSGSY

SEQ ID NO: 12451 - protein, 9 aa, Homo sapiens
  Light chain CDR3 for antibody 6226 (IGKV1D-13)
QQFNNYPHT

SEQ ID NO: 12452 - protein, 13 aa, Homo sapiens
  Heavy chain CDR3 for antibody 6226 (IGHV3-33)
ARIDYYSYYGMDV

SEQ ID NO: 12453 - protein, 9 aa, Homo sapiens
  Light chain CDR3 for antibody 6227 (IGKV1-27)
QKYNSAPYT

SEQ ID NO: 12454 - protein, 18 aa, Homo sapiens
  Heavy chain CDR3 for antibody 6227 (IGHV3-33)
ARREGITMIFYYYYGMDV

SEQ ID NO: 12455 - protein, 8 aa, Homo sapiens
  Light chain CDR3 for antibody 6228 (IGKV1D-13)
QQFNNYPT

SEQ ID NO: 12456 - protein, 14 aa, Homo sapiens
  Heavy chain CDR3 for antibody 6228 (IGHV3-33)
ARDREQQLVRYFDY

SEQ ID NO: 12457 - protein, 9 aa, Homo sapiens
  Light chain CDR3 for antibody 6229 (IGKV1D-16)
QQYDSYPRT

SEQ ID NO: 12458 - protein, 16 aa, Homo sapiens
  Heavy chain CDR3 for antibody 6229 (IGHV3-33)
ARGYDMLTGDYYGMDV

SEQ ID NO: 12459 - protein, 9 aa, Homo sapiens
  Light chain CDR3 for antibody 6230 (IGKV1-39)
QQSYSTPLT

SEQ ID NO: 12460 - protein, 11 aa, Homo sapiens
  Heavy chain CDR3 for antibody 6230 (IGHV3-33)
ARDQGGSSFDY

SEQ ID NO: 12461 - protein, 10 aa, Homo sapiens
  Light chain CDR3 for antibody 6231 (IGKV3-20)
QQYGRSPPVT

SEQ ID NO: 12462 - protein, 20 aa, Homo sapiens
  Heavy chain CDR3 for antibody 6231 (IGHV3-23)
AKDREMAATSHYYYYYGMDV

SEQ ID NO: 12463 - protein, 9 aa, Homo sapiens
  Light chain CDR3 for antibody 6232 (IGKV2-30)
MQGTHWPLT

SEQ ID NO: 12464 - protein, 13 aa, Homo sapiens
  Heavy chain CDR3 for antibody 6232 (IGHV3-33)
ARGVLWFGELFDY

SEQ ID NO: 12465 - protein, 10 aa, Homo sapiens
  Light chain CDR3 for antibody 6233 (IGKV1D-13)
QQFNNYPMYT

SEQ ID NO: 12466 - protein, 11 aa, Homo sapiens
  Heavy chain CDR3 for antibody 6233 (IGHV3-23)
AKAYSGSYGDY

SEQ ID NO: 12467 - protein, 9 aa, Homo sapiens
  Light chain CDR3 for antibody 6234 (IGKV1-6)
LQDFHYPWT

SEQ ID NO: 12468 - protein, 12 aa, Homo sapiens
  Heavy chain CDR3 for antibody 6234 (IGHV3-33)
ARDRAYRGSLDY

SEQ ID NO: 12469 - protein, 8 aa, Homo sapiens
  Light chain CDR3 for antibody 6235 (IGKV1-5)
QQYNSYWT

SEQ ID NO: 12470 - protein, 18 aa, Homo sapiens
  Heavy chain CDR3 for antibody 6235 (IGHV3-33)
ARDRDRYGSGTYPDAIDI

SEQ ID NO: 12471 - protein, 8 aa, Homo sapiens
  Light chain CDR3 for antibody 6236 (IGKV1-5)
QQYNSYWT

SEQ ID NO: 12472 - protein, 15 aa, Homo sapiens
  Heavy chain CDR3 for antibody 6236 (IGHV3-33)
ARRVCSGGSCSLFDY

SEQ ID NO: 12473 - protein, 9 aa, Homo sapiens
  Light chain CDR3 for antibody 6237 (IGKV1-9)
QQLNGYPFT

SEQ ID NO: 12474 - protein, 11 aa, Homo sapiens
  Heavy chain CDR3 for antibody 6237 (IGHV3-33)
ARDRSSGPFDY

SEQ ID NO: 12475 - protein, 9 aa, Homo sapiens
  Light chain CDR3 for antibody 6238 (IGKV3-15)
QQYNNWPRT

SEQ ID NO: 12476 - protein, 15 aa, Homo sapiens
  Heavy chain CDR3 for antibody 6238 (IGHV3-30)
ARRGYGSGSPDAFDL

SEQ ID NO: 12477 - protein, 8 aa, Homo sapiens
  Light chain CDR3 for antibody 6239 (IGKV1-5)
QQYNSYWT

SEQ ID NO: 12478 - protein, 17 aa, Homo sapiens
  Heavy chain CDR3 for antibody 6239 (IGHV3-33)
ARGEQWLGYYYYYGMDV

SEQ ID NO: 12479 - protein, 8 aa, Homo sapiens
  Light chain CDR3 for antibody 6240 (IGKV1D-13)
QQFNNYPT

SEQ ID NO: 12480 - protein, 15 aa, Homo sapiens
  Heavy chain CDR3 for antibody 6240 (IGHV3-20)
ARDRGSSGWRGWFDP

SEQ ID NO: 12481 - protein, 9 aa, Homo sapiens
  Light chain CDR3 for antibody 6241 (IGKV1-17)
LQHNSYPYT

SEQ ID NO: 12482 - protein, 11 aa, Homo sapiens
  Heavy chain CDR3 for antibody 6241 (IGHV3-33)
ARDSAVGPKDY

SEQ ID NO: 12483 - protein, 10 aa, Homo sapiens
  Light chain CDR3 for antibody 6242 (IGKV1-39)
QQSYSSPMYT

SEQ ID NO: 12484 - protein, 13 aa, Homo sapiens
  Heavy chain CDR3 for antibody 6242 (IGHV3-11)
ARDEGYRGYVLDT

SEQ ID NO: 12485 - protein, 8 aa, Homo sapiens
  Light chain CDR3 for antibody 6243 (IGKV3D-7)
QQDYNLLT

SEQ ID NO: 12486 - protein, 14 aa, Homo sapiens
  Heavy chain CDR3 for antibody 6243 (IGHV1-2)
ARDYYGSGNYYMGY

SEQ ID NO: 12487 - protein, 9 aa, Homo sapiens
  Light chain CDR3 for antibody 6244 (IGKV3-11)
QQRSNWPPT

SEQ ID NO: 12488 - protein, 17 aa, Homo sapiens
  Heavy chain CDR3 for antibody 6244 (IGHV3-33)
ARVRGVIEGYYYYGMDV

SEQ ID NO: 12489 - protein, 10 aa, Homo sapiens
  Light chain CDR3 for antibody 6245 (IGKV1-9)
QQLDSYPMYT

SEQ ID NO: 12490 - protein, 11 aa, Homo sapiens
  Heavy chain CDR3 for antibody 6245 (IGHV3-33)
ARARYTTGLDY

SEQ ID NO: 12491 - protein, 9 aa, Homo sapiens
  Light chain CDR3 for antibody 6246 (IGKV3D-7)
QQDYTLPLT

SEQ ID NO: 12492 - protein, 9 aa, Homo sapiens
  Heavy chain CDR3 for antibody 6246 (IGHV4-59)
ARGGASFDY

SEQ ID NO: 12493 - protein, 9 aa, Homo sapiens
  Light chain CDR3 for antibody 6247 (IGKV1-39)
QQSYSTPLT

SEQ ID NO: 12494 - protein, 16 aa, Homo sapiens
  Heavy chain CDR3 for antibody 6247 (IGHV3-33)
ARDSSYYGSGYYGMDV

SEQ ID NO: 12495 - protein, 9 aa, Homo sapiens
  Light chain CDR3 for antibody 6248 (IGKV1-9)
QQLNSYPRT

SEQ ID NO: 12496 - protein, 16 aa, Homo sapiens
  Heavy chain CDR3 for antibody 6248 (IGHV4-34)
ARDTPCYSGAGRPFDY

SEQ ID NO: 12497 - protein, 9 aa, Homo sapiens
  Light chain CDR3 for antibody 6249 (IGKV5-2)
LQHDKFPYT

SEQ ID NO: 12498 - protein, 18 aa, Homo sapiens
  Heavy chain CDR3 for antibody 6249 (IGHV4-59)
AREGDYVWGSYRPNWFGP

SEQ ID NO: 12499 - protein, 9 aa, Homo sapiens
  Light chain CDR3 for antibody 6250 (IGKV1-6)
LQDYNYPYT

SEQ ID NO: 12500 - protein, 10 aa, Homo sapiens
  Heavy chain CDR3 for antibody 6250 (IGHV4-59)
ARDWNDAFDI

SEQ ID NO: 12501 - protein, 9 aa, Homo sapiens
  Light chain CDR3 for antibody 6251 (IGKV1D-16)
QQYYSYPRT

SEQ ID NO: 12502 - protein, 13 aa, Homo sapiens
  Heavy chain CDR3 for antibody 6251 (IGHV3-33)
ARDWGYSHGYFDY

SEQ ID NO: 12503 - protein, 9 aa, Homo sapiens
  Light chain CDR3 for antibody 6252 (IGKV1-6)
LQDYKSPFT

SEQ ID NO: 12504 - protein, 15 aa, Homo sapiens
  Heavy chain CDR3 for antibody 6252 (IGHV3-23)
AKDGSYYDYYYGMDV

SEQ ID NO: 12505 - protein, 9 aa, Homo sapiens
  Light chain CDR3 for antibody 6253 (IGKV3D-20)
QQYGRSPRT

SEQ ID NO: 12506 - protein, 17 aa, Homo sapiens
  Heavy chain CDR3 for antibody 6253 (IGHV3-33)
ARGFSGYDGYYYYGMDV

SEQ ID NO: 12507 - protein, 8 aa, Homo sapiens
  Light chain CDR3 for antibody 6254 (IGKV1D-13)
QQFNNYYT

SEQ ID NO: 12508 - protein, 15 aa, Homo sapiens
  Heavy chain CDR3 for antibody 6254 (IGHV3-23)
AKDGSYYDYYYGMDV

SEQ ID NO: 12509 - protein, 9 aa, Homo sapiens
  Light chain CDR3 for antibody 6255 (IGKV3D-7)
QQDYKLPLT

SEQ ID NO: 12510 - protein, 7 aa, Homo sapiens
  Heavy chain CDR3 for antibody 6255 (IGHV3-33)
ARELVDY

SEQ ID NO: 12511 - protein, 8 aa, Homo sapiens
  Light chain CDR3 for antibody 6256 (IGKV3D-7)
QQDYNLLT

SEQ ID NO: 12512 - protein, 18 aa, Homo sapiens
  Heavy chain CDR3 for antibody 6256 (IGHV3-33)
AREGDYYGSGGFPNWFDP

SEQ ID NO: 12513 - protein, 9 aa, Homo sapiens
  Light chain CDR3 for antibody 6257 (IGKV1-39)
QQSYSTPLT

SEQ ID NO: 12514 - protein, 14 aa, Homo sapiens
  Heavy chain CDR3 for antibody 6257 (IGHV3-23)
AKGGDVLTGYYPDY

SEQ ID NO: 12515 - protein, 9 aa, Homo sapiens
  Light chain CDR3 for antibody 6258 (IGKV1-6)
LQDYNYPYT

SEQ ID NO: 12516 - protein, 9 aa, Homo sapiens
  Heavy chain CDR3 for antibody 6258 (IGHV3-33)
ASHSSGEDY

SEQ ID NO: 12517 - protein, 9 aa, Homo sapiens
  Light chain CDR3 for antibody 6259 (IGKV1-6)
LQDFHYPWT

SEQ ID NO: 12518 - protein, 12 aa, Homo sapiens
  Heavy chain CDR3 for antibody 6259 (IGHV3-33)
ARDLVGATPFDY

SEQ ID NO: 12519 - protein, 8 aa, Homo sapiens
  Light chain CDR3 for antibody 6260 (IGKV1D-13)
QQFNNYPT

SEQ ID NO: 12520 - protein, 13 aa, Homo sapiens
  Heavy chain CDR3 for antibody 6260 (IGHV3-33)
ARIDYYSYYGMDV

SEQ ID NO: 12521 - protein, 9 aa, Homo sapiens
  Light chain CDR3 for antibody 6261 (IGKV2-30)
MQGTHWPLT

SEQ ID NO: 12522 - protein, 12 aa, Homo sapiens
  Heavy chain CDR3 for antibody 6261 (IGHV3-33)
AREGTGGNWFDP

SEQ ID NO: 12523 - protein, 9 aa, Homo sapiens
  Light chain CDR3 for antibody 6262 (IGKV1D-13)
QQFNNYPHT

SEQ ID NO: 12524 - protein, 14 aa, Homo sapiens
  Heavy chain CDR3 for antibody 6262 (IGHV3-33)
ARSTLVRGANWFDP

SEQ ID NO: 12525 - protein, 10 aa, Homo sapiens
  Light chain CDR3 for antibody 6263 (IGKV3-11)
QQRSNWPIFT

SEQ ID NO: 12526 - protein, 13 aa, Homo sapiens
  Heavy chain CDR3 for antibody 6263 (IGHV3-33)
ARQSSGWFDAFDI

SEQ ID NO: 12527 - protein, 9 aa, Homo sapiens
  Light chain CDR3 for antibody 6264 (IGKV1-27)
QKYNSAPYT

SEQ ID NO: 12528 - protein, 14 aa, Homo sapiens
  Heavy chain CDR3 for antibody 6264 (IGHV3-23)
AKGGDILTGYYTDY

SEQ ID NO: 12529 - protein, 9 aa, Homo sapiens
  Light chain CDR3 for antibody 6265 (IGKV3-11)
QQRINWPWT

SEQ ID NO: 12530 - protein, 17 aa, Homo sapiens
  Heavy chain CDR3 for antibody 6265 (IGHV4-39)
AGRLTYYYGSGSPSFDY

SEQ ID NO: 12531 - protein, 8 aa, Homo sapiens
  Light chain CDR3 for antibody 6266 (IGKV1-9)
QQYNSYST

SEQ ID NO: 12532 - protein, 12 aa, Homo sapiens
  Heavy chain CDR3 for antibody 6266 (IGHV1-46)
AREDYDIDGMDV

SEQ ID NO: 12533 - protein, 9 aa, Homo sapiens
  Light chain CDR3 for antibody 6267 (IGKV1-39)
QQSYRTPLT

SEQ ID NO: 12534 - protein, 10 aa, Homo sapiens
  Heavy chain CDR3 for antibody 6267 (IGHV3-11)
ARGQWPPLDY

SEQ ID NO: 12535 - protein, 9 aa, Homo sapiens
  Light chain CDR3 for antibody 6268 (IGKV1-9)
QQLNNYLLT

SEQ ID NO: 12536 - protein, 16 aa, Homo sapiens
  Heavy chain CDR3 for antibody 6268 (IGHV4-59)
ARGRYFEWLLGDVFDI

SEQ ID NO: 12537 - protein, 9 aa, Homo sapiens
  Light chain CDR3 for antibody 6269 (IGKV1-39)
QQSYSTPYT

SEQ ID NO: 12538 - protein, 16 aa, Homo sapiens
  Heavy chain CDR3 for antibody 6269 (IGHV3-23)
AKEGMVLRYFDWLWDY

SEQ ID NO: 12539 - protein, 9 aa, Homo sapiens
  Light chain CDR3 for antibody 6270 (IGKV3D-7)
QQDYNLPRT

SEQ ID NO: 12540 - protein, 12 aa, Homo sapiens
  Heavy chain CDR3 for antibody 6270 (IGHV3-23)
AKEYDILTGYFH

SEQ ID NO: 12541 - protein, 9 aa, Homo sapiens
  Light chain CDR3 for antibody 6271 (IGKV1-39)
QQSYSTPFT

SEQ ID NO: 12542 - protein, 14 aa, Homo sapiens
  Heavy chain CDR3 for antibody 6271 (IGHV3-33)
ARDLYGSGTYYKDF

SEQ ID NO: 12543 - protein, 9 aa, Homo sapiens
  Light chain CDR3 for antibody 6272 (IGKV2D-28)
MQALQTPPT

SEQ ID NO: 12544 - protein, 12 aa, Homo sapiens
  Heavy chain CDR3 for antibody 6272 (IGHV3-33)
ARESGGSYSFDY

SEQ ID NO: 12545 - protein, 8 aa, Homo sapiens
  Light chain CDR3 for antibody 6273 (IGKV1-5)
QQYNSYYT

SEQ ID NO: 12546 - protein, 15 aa, Homo sapiens
  Heavy chain CDR3 for antibody 6273 (IGHV3-23)
AKEFTMVRGVITPDY

SEQ ID NO: 12547 - protein, 8 aa, Homo sapiens
  Light chain CDR3 for antibody 6274 (IGKV3-20)
QQYGRSFT

SEQ ID NO: 12548 - protein, 8 aa, Homo sapiens
  Heavy chain CDR3 for antibody 6274 (IGHV4-39)
ARRGGLDY

SEQ ID NO: 12549 - protein, 9 aa, Homo sapiens
  Light chain CDR3 for antibody 6275 (IGKV1-27)
QKYNSAPYT

SEQ ID NO: 12550 - protein, 12 aa, Homo sapiens
  Heavy chain CDR3 for antibody 6275 (IGHV3-33)
ARGYFGSGYGDF

SEQ ID NO: 12551 - protein, 10 aa, Homo sapiens
  Light chain CDR3 for antibody 6276 (IGKV3-15)
QQYNNWPPIT

SEQ ID NO: 12552 - protein, 11 aa, Homo sapiens
  Heavy chain CDR3 for antibody 6276 (IGHV3-33)
ARDKSSGWSDY

SEQ ID NO: 12553 - protein, 9 aa, Homo sapiens
  Light chain CDR3 for antibody 6277 (IGKV1-33)
QQYDNLPFT

SEQ ID NO: 12554 - protein, 13 aa, Homo sapiens
  Heavy chain CDR3 for antibody 6277 (IGHV3-30)
AAPFMVRGDGMDV

SEQ ID NO: 12555 - protein, 8 aa, Homo sapiens
  Light chain CDR3 for antibody 6278 (IGKV6-21)
HQSSSLPT

SEQ ID NO: 12556 - protein, 18 aa, Homo sapiens
  Heavy chain CDR3 for antibody 6278 (IGHV3-33)
ARDRDRYGSGTYPDAIDI

SEQ ID NO: 12557 - protein, 8 aa, Homo sapiens
  Light chain CDR3 for antibody 6279 (IGKV1-5)
QQYNSYWT

SEQ ID NO: 12558 - protein, 15 aa, Homo sapiens
  Heavy chain CDR3 for antibody 6279 (IGHV3-23)
AKDGGWNYYYYGMDV

SEQ ID NO: 12559 - protein, 9 aa, Homo sapiens
  Light chain CDR3 for antibody 6280 (IGKV1-6)
LQDYNYPYT

SEQ ID NO: 12560 - protein, 18 aa, Homo sapiens
  Heavy chain CDR3 for antibody 6280 (IGHV4-39)
VKYITMVRGDIITGPFAY

SEQ ID NO: 12561 - protein, 9 aa, Homo sapiens
  Light chain CDR3 for antibody 6281 (IGKV1-9)
QQLNGYPFT

SEQ ID NO: 12562 - protein, 16 aa, Homo sapiens
  Heavy chain CDR3 for antibody 6281 (IGHV3-23)
AKEGMVLRYFDWLWDY

SEQ ID NO: 12563 - protein, 11 aa, Homo sapiens
  Light chain CDR3 for antibody 6282 (IGKV3-11)
QQRSNWPPTWT

SEQ ID NO: 12564 - protein, 13 aa, Homo sapiens
  Heavy chain CDR3 for antibody 6282 (IGHV3-11)
ARDEGYRGYVLDT

SEQ ID NO: 12565 - protein, 9 aa, Homo sapiens
  Light chain CDR3 for antibody 6283 (IGKV1-17)
LQHNGYPLT

SEQ ID NO: 12566 - protein, 7 aa, Homo sapiens
  Heavy chain CDR3 for antibody 6283 (IGHV3-33)
ARELFDY

SEQ ID NO: 12567 - protein, 8 aa, Homo sapiens
  Light chain CDR3 for antibody 6284 (IGKV3-11)
QQRSNWLT

SEQ ID NO: 12568 - protein, 8 aa, Homo sapiens
  Heavy chain CDR3 for antibody 6284 (IGHV3-23)
EKSAGEDV

SEQ ID NO: 12569 - protein, 9 aa, Homo sapiens
  Light chain CDR3 for antibody 6285 (IGKV1D-16)
QQYDSYPYT

SEQ ID NO: 12570 - protein, 15 aa, Homo sapiens
  Heavy chain CDR3 for antibody 6285 (IGHV3-33)
AKGGTMVRGVIAFDY

SEQ ID NO: 12571 - protein, 9 aa, Homo sapiens
  Light chain CDR3 for antibody 6286 (IGKV1-39)
QQSYSTPLT

SEQ ID NO: 12572 - protein, 18 aa, Homo sapiens
  Heavy chain CDR3 for antibody 6286 (IGHV3-33)
AREGDYYGSGGFPNWFDP

SEQ ID NO: 12573 - protein, 8 aa, Homo sapiens
  Light chain CDR3 for antibody 6287 (IGKV3D-7)
QQDYNLVT

SEQ ID NO: 12574 - protein, 17 aa, Homo sapiens
  Heavy chain CDR3 for antibody 6287 (IGHV4-59)
AREGADSGIYYHWYFDL

SEQ ID NO: 12575 - protein, 8 aa, Homo sapiens
  Light chain CDR3 for antibody 6288 (IGKV3D-7)
QQDYNLLT

SEQ ID NO: 12576 - protein, 14 aa, Homo sapiens
  Heavy chain CDR3 for antibody 6288 (IGHV3-33)
ARDLNYDILNGGGY

SEQ ID NO: 12577 - protein, 9 aa, Homo sapiens
  Light chain CDR3 for antibody 6289 (IGKV1-17)
LQHNSYPLT

SEQ ID NO: 12578 - protein, 12 aa, Homo sapiens
  Heavy chain CDR3 for antibody 6289 (IGHV3-74)
ARDKGGRNGMDV

SEQ ID NO: 12579 - protein, 9 aa, Homo sapiens
  Light chain CDR3 for antibody 6290 (IGKV3-20)
QQYGSSPYT

SEQ ID NO: 12580 - protein, 12 aa, Homo sapiens
  Heavy chain CDR3 for antibody 6290 (IGHV3-23)
AKEGLGNDYEPY

SEQ ID NO: 12581 - protein, 9 aa, Homo sapiens
  Light chain CDR3 for antibody 6291 (IGKV5-2)
LQHDNFPYT

SEQ ID NO: 12582 - protein, 17 aa, Homo sapiens
  Heavy chain CDR3 for antibody 6291 (IGHV3-23)
AKERNWNDGYYYYGMDV

SEQ ID NO: 12583 - protein, 9 aa, Homo sapiens
  Light chain CDR3 for antibody 6292 (IGKV1-39)
QQSYSTPFT

SEQ ID NO: 12584 - protein, 18 aa, Homo sapiens
  Heavy chain CDR3 for antibody 6292 (IGHV3-33)
ARDQYSGYDFYYYYGMDV

SEQ ID NO: 12585 - protein, 9 aa, Homo sapiens
  Light chain CDR3 for antibody 6293 (IGKV1-9)
QQLNSYPWT

SEQ ID NO: 12586 - protein, 16 aa, Homo sapiens
  Heavy chain CDR3 for antibody 6293 (IGHV3-33)
ARAVYYGSGSSLIMDV

SEQ ID NO: 12587 - protein, 9 aa, Homo sapiens
  Light chain CDR3 for antibody 6294 (IGKV3-15)
QQYSNWPLT

SEQ ID NO: 12588 - protein, 16 aa, Homo sapiens
  Heavy chain CDR3 for antibody 6294 (IGHV3-33)
ARDNFGSGSYYSHFHY

SEQ ID NO: 12589 - protein, 8 aa, Homo sapiens
  Light chain CDR3 for antibody 6295 (IGKV3-15)
QQYNNWLT

SEQ ID NO: 12590 - protein, 20 aa, Homo sapiens
  Heavy chain CDR3 for antibody 6295 (IGHV1-18)
AREVGIAVAGTLYYYYGMDV

SEQ ID NO: 12591 - protein, 9 aa, Homo sapiens
  Light chain CDR3 for antibody 6296 (IGKV1-6)
QQEYNYPLT

SEQ ID NO: 12592 - protein, 20 aa, Homo sapiens
  Heavy chain CDR3 for antibody 6296 (IGHV3-11)
ARGGATLIRGLIDYYYGMDV

SEQ ID NO: 12593 - protein, 8 aa, Homo sapiens
  Light chain CDR3 for antibody 6297 (IGKV1-5)
QQYNSYYT

SEQ ID NO: 12594 - protein, 11 aa, Homo sapiens
  Heavy chain CDR3 for antibody 6297 (IGHV3-23)
ARDPGSITGDY

SEQ ID NO: 12595 - protein, 8 aa, Homo sapiens
  Light chain CDR3 for antibody 6298 (IGKV3-15)
QQYNNWPT

SEQ ID NO: 12596 - protein, 9 aa, Homo sapiens
  Heavy chain CDR3 for antibody 6298 (IGHV3-30)
ARDNWGFDY

SEQ ID NO: 12597 - protein, 10 aa, Homo sapiens
  Light chain CDR3 for antibody 6299 (IGKV3-15)
QKYNNWPPLT

SEQ ID NO: 12598 - protein, 12 aa, Homo sapiens
  Heavy chain CDR3 for antibody 6299 (IGHV1-24)
ASDWAYYYGMDV

SEQ ID NO: 12599 - protein, 9 aa, Homo sapiens
  Light chain CDR3 for antibody 6300 (IGKV1D-13)
QQFNNYPHT

SEQ ID NO: 12600 - protein, 10 aa, Homo sapiens
  Heavy chain CDR3 for antibody 6300 (IGHV3-33)
ARDGLRYFDW

SEQ ID NO: 12601 - protein, 10 aa, Homo sapiens
  Light chain CDR3 for antibody 6301 (IGKV3-11)
QQRSNWPIFT

SEQ ID NO: 12602 - protein, 11 aa, Homo sapiens
  Heavy chain CDR3 for antibody 6301 (IGHV4-59)
ARSIRYSVFDY

SEQ ID NO: 12603 - protein, 9 aa, Homo sapiens
  Light chain CDR3 for antibody 6302 (IGKV6-21)
HQSYSLPHT

SEQ ID NO: 12604 - protein, 17 aa, Homo sapiens
  Heavy chain CDR3 for antibody 6302 (IGHV4-39)
AGRLTYYYGSGSPSSDY

SEQ ID NO: 12605 - protein, 8 aa, Homo sapiens
  Light chain CDR3 for antibody 6303 (IGKV3D-7)
QQDYNLLT

SEQ ID NO: 12606 - protein, 11 aa, Homo sapiens
  Heavy chain CDR3 for antibody 6303 (IGHV1-46)
AREEDLGAFDI

SEQ ID NO: 12607 - protein, 9 aa, Homo sapiens
  Light chain CDR3 for antibody 6304 (IGKV1-33)
QQYDNLPFT

SEQ ID NO: 12608 - protein, 13 aa, Homo sapiens
  Heavy chain CDR3 for antibody 6304 (IGHV3-33)
VSTGDSYYYVMDV

SEQ ID NO: 12609 - protein, 9 aa, Homo sapiens
  Light chain CDR3 for antibody 6305 (IGKV3D-7)
QQDYNLPFT

SEQ ID NO: 12610 - protein, 12 aa, Homo sapiens
  Heavy chain CDR3 for antibody 6305 (IGHV3-33)
AREGTGGNWFDP

SEQ ID NO: 12611 - protein, 8 aa, Homo sapiens
  Light chain CDR3 for antibody 6306 (IGKV1-5)
QQYNSYYT

SEQ ID NO: 12612 - protein, 17 aa, Homo sapiens
  Heavy chain CDR3 for antibody 6306 (IGHV3-33)
ARDLIGPLSSSWYPFDY

SEQ ID NO: 12613 - protein, 8 aa, Homo sapiens
  Light chain CDR3 for antibody 6307 (IGKV1D-13)
QQFNNYPT

SEQ ID NO: 12614 - protein, 16 aa, Homo sapiens
  Heavy chain CDR3 for antibody 6307 (IGHV3-33)
ARGGRSDWLYYYGMDV

SEQ ID NO: 12615 - protein, 10 aa, Homo sapiens
  Light chain CDR3 for antibody 6308 (IGKV3-11)
QQRSNWPPFT

SEQ ID NO: 12616 - protein, 14 aa, Homo sapiens
  Heavy chain CDR3 for antibody 6308 (IGHV4-39)
ARQGTMIRGGYFDY

SEQ ID NO: 12617 - protein, 9 aa, Homo sapiens
  Light chain CDR3 for antibody 6309 (IGKV6-21)
HQSSSLPLT

SEQ ID NO: 12618 - protein, 12 aa, Homo sapiens
  Heavy chain CDR3 for antibody 6309 (IGHV4-59)
MGWLAYYYGMDV

SEQ ID NO: 12619 - protein, 9 aa, Homo sapiens
  Light chain CDR3 for antibody 6310 (IGKV3-11)
QQRSNWPRT

SEQ ID NO: 12620 - protein, 18 aa, Homo sapiens
  Heavy chain CDR3 for antibody 6310 (IGHV4-59)
ARERGNWNDVDYYYGMDV

SEQ ID NO: 12621 - protein, 9 aa, Homo sapiens
  Light chain CDR3 for antibody 6311 (IGKV3-20)
QQYGSSPYT

SEQ ID NO: 12622 - protein, 17 aa, Homo sapiens
  Heavy chain CDR3 for antibody 6311 (IGHV1-24)
ATDRYFDWLSPLDAFDI

SEQ ID NO: 12623 - protein, 9 aa, Homo sapiens
  Light chain CDR3 for antibody 6312 (IGKV2-30)
MQGTHWPLT

SEQ ID NO: 12624 - protein, 21 aa, Homo sapiens
  Heavy chain CDR3 for antibody 6312 (IGHV3-33)
ARDEYYEIVTGYGYYHYGMDV

SEQ ID NO: 12625 - protein, 9 aa, Homo sapiens
  Light chain CDR3 for antibody 6313 (IGKV1-6)
LQDYNHPFT

SEQ ID NO: 12626 - protein, 17 aa, Homo sapiens
  Heavy chain CDR3 for antibody 6313 (IGHV3-33)
ARVYYDILTGYSYYFDY

SEQ ID NO: 12627 - protein, 9 aa, Homo sapiens
  Light chain CDR3 for antibody 6314 (IGKV1-16)
QKYNSAPHT

SEQ ID NO: 12628 - protein, 15 aa, Homo sapiens
  Heavy chain CDR3 for antibody 6314 (IGHV3-33)
ARRGYNDYDPYGMDV

SEQ ID NO: 12629 - protein, 9 aa, Homo sapiens
  Light chain CDR3 for antibody 6315 (IGKV3-11)
QQRSNWPYT

SEQ ID NO: 12630 - protein, 15 aa, Homo sapiens
  Heavy chain CDR3 for antibody 6315 (IGHV3-33)
AKDRNSGYDWGGFDY

SEQ ID NO: 12631 - protein, 9 aa, Homo sapiens
  Light chain CDR3 for antibody 6316 (IGKV1-27)
QKYNSAPYT

SEQ ID NO: 12632 - protein, 10 aa, Homo sapiens
  Heavy chain CDR3 for antibody 6316 (IGHV3-33)
ARDHGYYFDY

SEQ ID NO: 12633 - protein, 9 aa, Homo sapiens
  Light chain CDR3 for antibody 6317 (IGKV1-39)
QQSYSTPLT

SEQ ID NO: 12634 - protein, 12 aa, Homo sapiens
  Heavy chain CDR3 for antibody 6317 (IGHV3-33)
ARKQWLVQAFDI

SEQ ID NO: 12635 - protein, 9 aa, Homo sapiens
  Light chain CDR3 for antibody 6318 (IGKV1D-13)
QQFNNYPYT

SEQ ID NO: 12636 - protein, 11 aa, Homo sapiens
  Heavy chain CDR3 for antibody 6318 (IGHV4-59)
ARDGSWEPFDY

SEQ ID NO: 12637 - protein, 9 aa, Homo sapiens
  Light chain CDR3 for antibody 6319 (IGKV3-11)
QQRSNWPWT

SEQ ID NO: 12638 - protein, 11 aa, Homo sapiens
  Heavy chain CDR3 for antibody 6319 (IGHV1-24)
ATYFGSGSLDY

SEQ ID NO: 12639 - protein, 9 aa, Homo sapiens
  Light chain CDR3 for antibody 6320 (IGKV1-6)
LQDYKSPFT

SEQ ID NO: 12640 - protein, 15 aa, Homo sapiens
  Heavy chain CDR3 for antibody 6320 (IGHV3-30)
ARDSRPEITGPPFDY

SEQ ID NO: 12641 - protein, 9 aa, Homo sapiens
  Light chain CDR3 for antibody 6321 (IGKV1-6)
QQLHIYPWT

SEQ ID NO: 12642 - protein, 15 aa, Homo sapiens
  Heavy chain CDR3 for antibody 6321 (IGHV3-33)
ARDRGSSGWRDWFDP

SEQ ID NO: 12643 - protein, 9 aa, Homo sapiens
  Light chain CDR3 for antibody 6322 (IGKV2D-28)
MQALQTPPT

SEQ ID NO: 12644 - protein, 14 aa, Homo sapiens
  Heavy chain CDR3 for antibody 6322 (IGHV3-33)
AREGYSSNWYDFDY

SEQ ID NO: 12645 - protein, 9 aa, Homo sapiens
  Light chain CDR3 for antibody 6323 (IGKV1D-16)
QQYDSYPWT

SEQ ID NO: 12646 - protein, 7 aa, Homo sapiens
  Heavy chain CDR3 for antibody 6323 (IGHV3-33)
ARELVDY

SEQ ID NO: 12647 - protein, 10 aa, Homo sapiens
  Light chain CDR3 for antibody 6324 (IGKV1-17)
LQHNSYPMYT

SEQ ID NO: 12648 - protein, 17 aa, Homo sapiens
  Heavy chain CDR3 for antibody 6324 (IGHV1-18)
ARERYYGSGSYKYNMDV

SEQ ID NO: 12649 - protein, 10 aa, Homo sapiens
  Light chain CDR3 for antibody 6325 (IGKV3-11)
QQRSNWPIFT

SEQ ID NO: 12650 - protein, 17 aa, Homo sapiens
  Heavy chain CDR3 for antibody 6325 (IGHV3-33)
TRDSGMVRGIIIYGMDV

SEQ ID NO: 12651 - protein, 8 aa, Homo sapiens
  Light chain CDR3 for antibody 6326 (IGKV6-21)
HQSSSLPT

SEQ ID NO: 12652 - protein, 12 aa, Homo sapiens
  Heavy chain CDR3 for antibody 6326 (IGHV3-13)
AREAGIPDAFDI

SEQ ID NO: 12653 - protein, 9 aa, Homo sapiens
  Light chain CDR3 for antibody 6327 (IGKV1-16)
QQYNSYPYT

SEQ ID NO: 12654 - protein, 19 aa, Homo sapiens
  Heavy chain CDR3 for antibody 6327 (IGHV5-51)
ARHGEKGKRITMVRGSLDV

SEQ ID NO: 12655 - protein, 8 aa, Homo sapiens
  Light chain CDR3 for antibody 6328 (IGKV3D-7)
QQDYNLLT

SEQ ID NO: 12656 - protein, 13 aa, Homo sapiens
  Heavy chain CDR3 for antibody 6328 (IGHV1-2)
ARDGVRGSFGMDV

SEQ ID NO: 12657 - protein, 9 aa, Homo sapiens
  Light chain CDR3 for antibody 6329 (IGKV1-17)
LQHNSYPYT

SEQ ID NO: 12658 - protein, 12 aa, Homo sapiens
  Heavy chain CDR3 for antibody 6329 (IGHV4-39)
ARHPRYLDAFDI

SEQ ID NO: 12659 - protein, 9 aa, Homo sapiens
  Light chain CDR3 for antibody 6330 (IGKV1-27)
QKYNSAPYT

SEQ ID NO: 12660 - protein, 8 aa, Homo sapiens
  Heavy chain CDR3 for antibody 6330 (IGHV3-20)
APHWIFDY

SEQ ID NO: 12661 - protein, 8 aa, Homo sapiens
  Light chain CDR3 for antibody 6331 (IGKV3D-7)
QQDYNLLT

SEQ ID NO: 12662 - protein, 10 aa, Homo sapiens
  Heavy chain CDR3 for antibody 6331 (IGHV3-30)
AREWYGGMDV

SEQ ID NO: 12663 - protein, 10 aa, Homo sapiens
  Light chain CDR3 for antibody 6332 (IGKV1-39)
QQSYSTPMYT

SEQ ID NO: 12664 - protein, 7 aa, Homo sapiens
  Heavy chain CDR3 for antibody 6332 (IGHV1-46)
AREGGDY

SEQ ID NO: 12665 - protein, 9 aa, Homo sapiens
  Light chain CDR3 for antibody 6333 (IGKV1D-13)
QHFNNYMYT

SEQ ID NO: 12666 - protein, 17 aa, Homo sapiens
  Heavy chain CDR3 for antibody 6333 (IGHV1-18)
ARDRAFTMVRGVPPFDY

SEQ ID NO: 12667 - protein, 9 aa, Homo sapiens
  Light chain CDR3 for antibody 6334 (IGKV1-39)
QQSYSTPLT

SEQ ID NO: 12668 - protein, 14 aa, Homo sapiens
  Heavy chain CDR3 for antibody 6334 (IGHV3-33)
VSAISGSSYWYFAL

SEQ ID NO: 12669 - protein, 9 aa, Homo sapiens
  Light chain CDR3 for antibody 6335 (IGKV1-9)
QQYNSYPLT

SEQ ID NO: 12670 - protein, 12 aa, Homo sapiens
  Heavy chain CDR3 for antibody 6335 (IGHV3-21)
AREGFGESSFDY

SEQ ID NO: 12671 - protein, 8 aa, Homo sapiens
  Light chain CDR3 for antibody 6336 (IGKV3-11)
QQRSNWLT

SEQ ID NO: 12672 - protein, 15 aa, Homo sapiens
  Heavy chain CDR3 for antibody 6336 (IGHV1-18)
ARGYCSSTSCYYFDY

SEQ ID NO: 12673 - protein, 10 aa, Homo sapiens
  Light chain CDR3 for antibody 6337 (IGKV3-11)
QQRSNWPPFT

SEQ ID NO: 12674 - protein, 11 aa, Homo sapiens
  Heavy chain CDR3 for antibody 6337 (IGHV4-4)
AREAYYYGLDV

SEQ ID NO: 12675 - protein, 9 aa, Homo sapiens
  Light chain CDR3 for antibody 6338 (IGKV1-17)
LHSNNYPWT

SEQ ID NO: 12676 - protein, 11 aa, Homo sapiens
  Heavy chain CDR3 for antibody 6338 (IGHV3-33)
ARDTWDDYFDY

SEQ ID NO: 12677 - protein, 9 aa, Homo sapiens
  Light chain CDR3 for antibody 6339 (IGKV1-6)
LQDYNYPYT

SEQ ID NO: 12678 - protein, 4 aa, Homo sapiens
  Heavy chain CDR3 for antibody 6339 (IGHV3-13)
ARDY

SEQ ID NO: 12679 - protein, 10 aa, Homo sapiens
  Light chain CDR3 for antibody 6340 (IGKV3-11)
QQRSNWPIFT

SEQ ID NO: 12680 - protein, 16 aa, Homo sapiens
  Heavy chain CDR3 for antibody 6340 (IGHV1-18)
ARYFDWLLRDYYGMDV

SEQ ID NO: 12681 - protein, 9 aa, Homo sapiens
  Light chain CDR3 for antibody 6341 (IGKV1-17)
LQHNSYPYT

SEQ ID NO: 12682 - protein, 14 aa, Homo sapiens
  Heavy chain CDR3 for antibody 6341 (IGHV3-23)
AKDRNIPAAGPFDY

SEQ ID NO: 12683 - protein, 8 aa, Homo sapiens
  Light chain CDR3 for antibody 6342 (IGKV3-15)
QQYNNWPT

SEQ ID NO: 12684 - protein, 16 aa, Homo sapiens
  Heavy chain CDR3 for antibody 6342 (IGHV3-33)
ARGYDMLTGDYYGMDV

SEQ ID NO: 12685 - protein, 9 aa, Homo sapiens
  Light chain CDR3 for antibody 6343 (IGKV1-16)
QQYNSYPYT

SEQ ID NO: 12686 - protein, 17 aa, Homo sapiens
  Heavy chain CDR3 for antibody 6343 (IGHV4-39)
ARLVLRYSDWLLPHFDY

SEQ ID NO: 12687 - protein, 9 aa, Homo sapiens
  Light chain CDR3 for antibody 6344 (IGKV1-9)
LQDYKSPFT

SEQ ID NO: 12688 - protein, 14 aa, Homo sapiens
  Heavy chain CDR3 for antibody 6344 (IGHV1-46)
ARRGIVGALDAFDI

SEQ ID NO: 12689 - protein, 9 aa, Homo sapiens
  Light chain CDR3 for antibody 6345 (IGKV1-27)
QKYNSAPYT

SEQ ID NO: 12690 - protein, 18 aa, Homo sapiens
  Heavy chain CDR3 for antibody 6345 (IGHV3-11)
ARDGYYGSGSFYYYGMDV

SEQ ID NO: 12691 - protein, 9 aa, Homo sapiens
  Light chain CDR3 for antibody 6346 (IGKV3-20)
QQYGSSPYT

SEQ ID NO: 12692 - protein, 13 aa, Homo sapiens
  Heavy chain CDR3 for antibody 6346 (IGHV4-4)
ARERGIAAAGPDY

SEQ ID NO: 12693 - protein, 9 aa, Homo sapiens
  Light chain CDR3 for antibody 6347 (IGKV3D-7)
QQDYNLPLT

SEQ ID NO: 12694 - protein, 11 aa, Homo sapiens
  Heavy chain CDR3 for antibody 6347 (IGHV3-33)
AREAANWGFDY

SEQ ID NO: 12695 - protein, 9 aa, Homo sapiens
  Light chain CDR3 for antibody 6348 (IGKV1-39)
QQSYRTPLT

SEQ ID NO: 12696 - protein, 11 aa, Homo sapiens
  Heavy chain CDR3 for antibody 6348 (IGHV4-59)
AREMGHDTFDI

SEQ ID NO: 12697 - protein, 9 aa, Homo sapiens
  Light chain CDR3 for antibody 6349 (IGKV3-11)
QQRSNWPPT

SEQ ID NO: 12698 - protein, 17 aa, Homo sapiens
  Heavy chain CDR3 for antibody 6349 (IGHV3-23)
AKDRPVTTLYYYFGMDV

SEQ ID NO: 12699 - protein, 10 aa, Homo sapiens
  Light chain CDR3 for antibody 6350 (IGKV3-11)
QQRSTWPTLT

SEQ ID NO: 12700 - protein, 14 aa, Homo sapiens
  Heavy chain CDR3 for antibody 6350 (IGHV3-33)
AREDYYGPLNWFDP

SEQ ID NO: 12701 - protein, 10 aa, Homo sapiens
  Light chain CDR3 for antibody 6351 (IGKV1-39)
QQSYSTPMYT

SEQ ID NO: 12702 - protein, 14 aa, Homo sapiens
  Heavy chain CDR3 for antibody 6351 (IGHV3-33)
ARQYSYGYPYYFDY

SEQ ID NO: 12703 - protein, 8 aa, Homo sapiens
  Light chain CDR3 for antibody 6352 (IGKV1-5)
QQYNSYYT

SEQ ID NO: 12704 - protein, 11 aa, Homo sapiens
  Heavy chain CDR3 for antibody 6352 (IGHV3-33)
ARAGIAALFDY

SEQ ID NO: 12705 - protein, 9 aa, Homo sapiens
  Light chain CDR3 for antibody 6353 (IGKV1-6)
LQDYNYPRT

SEQ ID NO: 12706 - protein, 11 aa, Homo sapiens
  Heavy chain CDR3 for antibody 6353 (IGHV3-33)
ARAGIAALFDY

SEQ ID NO: 12707 - protein, 8 aa, Homo sapiens
  Light chain CDR3 for antibody 6354 (IGKV3-20)
QQYGSSLT

SEQ ID NO: 12708 - protein, 17 aa, Homo sapiens
  Heavy chain CDR3 for antibody 6354 (IGHV1-18)
ARDEGYDILTGYPHFDY

SEQ ID NO: 12709 - protein, 8 aa, Homo sapiens
  Light chain CDR3 for antibody 6355 (IGKV3D-7)
QQDYNLLT

SEQ ID NO: 12710 - protein, 18 aa, Homo sapiens
  Heavy chain CDR3 for antibody 6355 (IGHV3-33)
ARREGITLIFYYYYGMDV

SEQ ID NO: 12711 - protein, 8 aa, Homo sapiens
  Light chain CDR3 for antibody 6356 (IGKV3-11)
QQRSNWWT

SEQ ID NO: 12712 - protein, 11 aa, Homo sapiens
  Heavy chain CDR3 for antibody 6356 (IGHV3-33)
ARGSGSYAFDY

SEQ ID NO: 12713 - protein, 9 aa, Homo sapiens
  Light chain CDR3 for antibody 6357 (IGKV5-2)
LQHDNFPYT

SEQ ID NO: 12714 - protein, 19 aa, Homo sapiens
  Heavy chain CDR3 for antibody 6357 (IGHV3-33)
ARGRGSYYYGPGSHYGMDV

SEQ ID NO: 12715 - protein, 9 aa, Homo sapiens
  Light chain CDR3 for antibody 6358 (IGKV1-27)
QKYNSAPYT

SEQ ID NO: 12716 - protein, 7 aa, Homo sapiens
  Heavy chain CDR3 for antibody 6358 (IGHV1-46)
AREGGDY

SEQ ID NO: 12717 - protein, 8 aa, Homo sapiens
  Light chain CDR3 for antibody 6359 (IGKV3-20)
QQYGSSFT

SEQ ID NO: 12718 - protein, 17 aa, Homo sapiens
  Heavy chain CDR3 for antibody 6359 (IGHV4-59)
ARRITMVREIIITAFDY

SEQ ID NO: 12719 - protein, 9 aa, Homo sapiens
  Light chain CDR3 for antibody 6360 (IGKV1D-16)
LQQNSYPWT

SEQ ID NO: 12720 - protein, 12 aa, Homo sapiens
  Heavy chain CDR3 for antibody 6360 (IGHV3-13)
VREAGIPDAFDI

SEQ ID NO: 12721 - protein, 10 aa, Homo sapiens
  Light chain CDR3 for antibody 6361 (IGKV3-11)
QQRSNWLMYT

SEQ ID NO: 12722 - protein, 11 aa, Homo sapiens
  Heavy chain CDR3 for antibody 6361 (IGHV3-33)
ARDRSSGPFDY

SEQ ID NO: 12723 - protein, 10 aa, Homo sapiens
  Light chain CDR3 for antibody 6362 (IGKV3-11)
QQRSNWPALT

SEQ ID NO: 12724 - protein, 16 aa, Homo sapiens
  Heavy chain CDR3 for antibody 6362 (IGHV3-23)
ARNWNDVGDYYYGMDV

SEQ ID NO: 12725 - protein, 9 aa, Homo sapiens
  Light chain CDR3 for antibody 6363 (IGKV1D-16)
QQYNSFPLT

SEQ ID NO: 12726 - protein, 12 aa, Homo sapiens
  Heavy chain CDR3 for antibody 6363 (IGHV3-33)
AREKGGSYSFDY

SEQ ID NO: 12727 - protein, 8 aa, Homo sapiens
  Light chain CDR3 for antibody 6364 (IGKV1-6)
QQFNNYPT

SEQ ID NO: 12728 - protein, 11 aa, Homo sapiens
  Heavy chain CDR3 for antibody 6364 (IGHV3-33)
ARDILTGFLDH

SEQ ID NO: 12729 - protein, 9 aa, Homo sapiens
  Light chain CDR3 for antibody 6365 (IGKV3D-7)
QQDYTLPLT

SEQ ID NO: 12730 - protein, 10 aa, Homo sapiens
  Heavy chain CDR3 for antibody 6365 (IGHV3-33)
ARENSTPLDY

SEQ ID NO: 12731 - protein, 8 aa, Homo sapiens
  Light chain CDR3 for antibody 6366 (IGKV3D-7)
QQDYNLVT

SEQ ID NO: 12732 - protein, 16 aa, Homo sapiens
  Heavy chain CDR3 for antibody 6366 (IGHV4-59)
ARYSGSYYGDYYGMDV

SEQ ID NO: 12733 - protein, 9 aa, Homo sapiens
  Light chain CDR3 for antibody 6367 (IGKV5-2)
LQHDNFPWT

SEQ ID NO: 12734 - protein, 12 aa, Homo sapiens
  Heavy chain CDR3 for antibody 6367 (IGHV6-1)
ARLDWNYRAFDI

SEQ ID NO: 12735 - protein, 9 aa, Homo sapiens
  Light chain CDR3 for antibody 6368 (IGKV1-33)
QQYDNLPPT

SEQ ID NO: 12736 - protein, 18 aa, Homo sapiens
  Heavy chain CDR3 for antibody 6368 (IGHV1-46)
ARDGDYVWGSYRSDWFDP

SEQ ID NO: 12737 - protein, 9 aa, Homo sapiens
  Light chain CDR3 for antibody 6369 (IGKV3D-7)
QQDYNLPWT

SEQ ID NO: 12738 - protein, 12 aa, Homo sapiens
  Heavy chain CDR3 for antibody 6369 (IGHV3-13)
ARDRGYSGYFDY

SEQ ID NO: 12739 - protein, 9 aa, Homo sapiens
  Light chain CDR3 for antibody 6370 (IGKV1-6)
LQDYNYPYT

SEQ ID NO: 12740 - protein, 14 aa, Homo sapiens
  Heavy chain CDR3 for antibody 6370 (IGHV1-18)
AREGGSGSSPGMDV

SEQ ID NO: 12741 - protein, 9 aa, Homo sapiens
  Light chain CDR3 for antibody 6371 (IGKV3-11)
QQRSNWPPT

SEQ ID NO: 12742 - protein, 12 aa, Homo sapiens
  Heavy chain CDR3 for antibody 6371 (IGHV3-13)
AIGTMVRGIPDY

SEQ ID NO: 12743 - protein, 9 aa, Homo sapiens
  Light chain CDR3 for antibody 6372 (IGKV1D-16)
QQYNSYPYT

SEQ ID NO: 12744 - protein, 12 aa, Homo sapiens
  Heavy chain CDR3 for antibody 6372 (IGHV3-23)
AKEYDSLTGYFH

SEQ ID NO: 12745 - protein, 9 aa, Homo sapiens
  Light chain CDR3 for antibody 6373 (IGKV1D-13)
QQFNNYPST

SEQ ID NO: 12746 - protein, 13 aa, Homo sapiens
  Heavy chain CDR3 for antibody 6373 (IGHV3-53)
ARDRDSSGSYFDY

SEQ ID NO: 12747 - protein, 8 aa, Homo sapiens
  Light chain CDR3 for antibody 6374 (IGKV6-21)
HQSSSLPT

SEQ ID NO: 12748 - protein, 9 aa, Homo sapiens
  Heavy chain CDR3 for antibody 6374 (IGHV3-33)
ARATVGVDY

SEQ ID NO: 12749 - protein, 8 aa, Homo sapiens
  Light chain CDR3 for antibody 6375 (IGKV1-5)
QQYNSYYT

SEQ ID NO: 12750 - protein, 12 aa, Homo sapiens
  Heavy chain CDR3 for antibody 6375 (IGHV4-59)
ARVYSSGWLFDY

SEQ ID NO: 12751 - protein, 9 aa, Homo sapiens
  Light chain CDR3 for antibody 6376 (IGKV3D-20)
QQYYSTPWT

SEQ ID NO: 12752 - protein, 9 aa, Homo sapiens
  Heavy chain CDR3 for antibody 6376 (IGHV3-13)
ARDRWYFDL

SEQ ID NO: 12753 - protein, 10 aa, Homo sapiens
  Light chain CDR3 for antibody 6377 (IGKV3-11)
QQRSNWPALT

SEQ ID NO: 12754 - protein, 18 aa, Homo sapiens
  Heavy chain CDR3 for antibody 6377 (IGHV3-23)
AKPDYYGSGSYYNVPFDY

SEQ ID NO: 12755 - protein, 8 aa, Homo sapiens
  Light chain CDR3 for antibody 6378 (IGKV1D-13)
QQFNNYPT

SEQ ID NO: 12756 - protein, 16 aa, Homo sapiens
  Heavy chain CDR3 for antibody 6378 (IGHV3-33)
AREVAGSYYYYYGIDV

SEQ ID NO: 12757 - protein, 9 aa, Homo sapiens
  Light chain CDR3 for antibody 6379 (IGKV1-39)
QQSYRTPLT

SEQ ID NO: 12758 - protein, 18 aa, Homo sapiens
  Heavy chain CDR3 for antibody 6379 (IGHV4-59)
AREGHYYTSGSYYKAFDY

SEQ ID NO: 12759 - protein, 9 aa, Homo sapiens
  Light chain CDR3 for antibody 6380 (IGKV1-6)
LQDYNYPRT

SEQ ID NO: 12760 - protein, 12 aa, Homo sapiens
  Heavy chain CDR3 for antibody 6380 (IGHV3-23)
AKEGLGNDYESY

SEQ ID NO: 12761 - protein, 9 aa, Homo sapiens
  Light chain CDR3 for antibody 6381 (IGKV3D-7)
QQDYEFPLT

SEQ ID NO: 12762 - protein, 11 aa, Homo sapiens
  Heavy chain CDR3 for antibody 6381 (IGHV4-61)
ARVDSSGWFDY

SEQ ID NO: 12763 - protein, 9 aa, Homo sapiens
  Light chain CDR3 for antibody 6382 (IGKV1-16)
QQYNSYPYT

SEQ ID NO: 12764 - protein, 17 aa, Homo sapiens
  Heavy chain CDR3 for antibody 6382 (IGHV4-59)
ARDRELLWFGEFGGMDV

SEQ ID NO: 12765 - protein, 9 aa, Homo sapiens
  Light chain CDR3 for antibody 6383 (IGKV1-39)
QQGFSTPWT

SEQ ID NO: 12766 - protein, 11 aa, Homo sapiens
  Heavy chain CDR3 for antibody 6383 (IGHV4-59)
ARSIRYSVFDY

SEQ ID NO: 12767 - protein, 9 aa, Homo sapiens
  Light chain CDR3 for antibody 6384 (IGKV1-9)
QQLKSYLYT

SEQ ID NO: 12768 - protein, 15 aa, Homo sapiens
  Heavy chain CDR3 for antibody 6384 (IGHV1-18)
ARRSPNWGHYYGMDV

SEQ ID NO: 12769 - protein, 9 aa, Homo sapiens
  Light chain CDR3 for antibody 6385 (IGKV6-21)
HQSSSLPYT

SEQ ID NO: 12770 - protein, 16 aa, Homo sapiens
  Heavy chain CDR3 for antibody 6385 (IGHV4-59)
ARQLLWFGELKGVFDY

SEQ ID NO: 12771 - protein, 9 aa, Homo sapiens
  Light chain CDR3 for antibody 6386 (IGKV1-6)
LQDYNYPYT

SEQ ID NO: 12772 - protein, 13 aa, Homo sapiens
  Heavy chain CDR3 for antibody 6386 (IGHV3-33)
ARRGSGSPDGFDI

SEQ ID NO: 12773 - protein, 9 aa, Homo sapiens
  Light chain CDR3 for antibody 6387 (IGKV1-9)
QQLKSYPYT

SEQ ID NO: 12774 - protein, 18 aa, Homo sapiens
  Heavy chain CDR3 for antibody 6387 (IGHV3-33)
ARREGIVGATTYYYGMDV

SEQ ID NO: 12775 - protein, 9 aa, Homo sapiens
  Light chain CDR3 for antibody 6388 (IGKV1D-13)
QQFNNYPYT

SEQ ID NO: 12776 - protein, 20 aa, Homo sapiens
  Heavy chain CDR3 for antibody 6388 (IGHV1-8)
ARGDGTMVRGIYYYYYGMDV

SEQ ID NO: 12777 - protein, 8 aa, Homo sapiens
  Light chain CDR3 for antibody 6389 (IGKV3D-7)
QQDYNLLT

SEQ ID NO: 12778 - protein, 12 aa, Homo sapiens
  Heavy chain CDR3 for antibody 6389 (IGHV1-46)
AREDYDIDGMDV

SEQ ID NO: 12779 - protein, 9 aa, Homo sapiens
  Light chain CDR3 for antibody 6390 (IGKV2-30)
MQGTHWPLT

SEQ ID NO: 12780 - protein, 20 aa, Homo sapiens
  Heavy chain CDR3 for antibody 6390 (IGHV3-33)
ARDNDSSGYYDYYYYYGMDV

SEQ ID NO: 12781 - protein, 9 aa, Homo sapiens
  Light chain CDR3 for antibody 6391 (IGKV2-30)
MQGTHWPLT

SEQ ID NO: 12782 - protein, 16 aa, Homo sapiens
  Heavy chain CDR3 for antibody 6391 (IGHV3-33)
ARAVYYGSGSSLIMDV

SEQ ID NO: 12783 - protein, 9 aa, Homo sapiens
  Light chain CDR3 for antibody 6392 (IGKV1-6)
LQDFHYPWT

SEQ ID NO: 12784 - protein, 12 aa, Homo sapiens
  Heavy chain CDR3 for antibody 6392 (IGHV3-33)
ASRDILTGYLGY

SEQ ID NO: 12785 - protein, 9 aa, Homo sapiens
  Light chain CDR3 for antibody 6393 (IGKV3D-7)
QQDYNLPLT

SEQ ID NO: 12786 - protein, 21 aa, Homo sapiens
  Heavy chain CDR3 for antibody 6393 (IGHV1-18)
ASGVLIWFGELLSEDYYDMDV

SEQ ID NO: 12787 - protein, 9 aa, Homo sapiens
  Light chain CDR3 for antibody 6394 (IGKV1-16)
QHYNDYPFT

SEQ ID NO: 12788 - protein, 18 aa, Homo sapiens
  Heavy chain CDR3 for antibody 6394 (IGHV1-46)
ARDGDYVWGSYRSDWFDP

SEQ ID NO: 12789 - protein, 8 aa, Homo sapiens
  Light chain CDR3 for antibody 6395 (IGKV3D-7)
QQDYNLVT

SEQ ID NO: 12790 - protein, 16 aa, Homo sapiens
  Heavy chain CDR3 for antibody 6395 (IGHV4-39)
ARDTPYYSGSGRPFDY

SEQ ID NO: 12791 - protein, 10 aa, Homo sapiens
  Light chain CDR3 for antibody 6396 (IGKV1-39)
QQSYSTPMYT

SEQ ID NO: 12792 - protein, 17 aa, Homo sapiens
  Heavy chain CDR3 for antibody 6396 (IGHV3-33)
ARGEQWLGYYYYYGMDV

SEQ ID NO: 12793 - protein, 9 aa, Homo sapiens
  Light chain CDR3 for antibody 6397 (IGKV3D-20)
QQYGYSPRT

SEQ ID NO: 12794 - protein, 17 aa, Homo sapiens
  Heavy chain CDR3 for antibody 6397 (IGHV3-33)
ARGEQWLGYYYYYGMDV

SEQ ID NO: 12795 - protein, 8 aa, Homo sapiens
  Light chain CDR3 for antibody 6398 (IGKV3-11)
QQRSNWLT

SEQ ID NO: 12796 - protein, 14 aa, Homo sapiens
  Heavy chain CDR3 for antibody 6398 (IGHV1-18)
ARCFGSGSYGWFDP

SEQ ID NO: 12797 - protein, 9 aa, Homo sapiens
  Light chain CDR3 for antibody 6399 (IGKV1-9)
QQLKSYPYT

SEQ ID NO: 12798 - protein, 13 aa, Homo sapiens
  Heavy chain CDR3 for antibody 6399 (IGHV1-46)
ARGGGVRGAPLDY

SEQ ID NO: 12799 - protein, 9 aa, Homo sapiens
  Light chain CDR3 for antibody 6400 (IGKV3-20)
QQYGTSPFP

SEQ ID NO: 12800 - protein, 13 aa, Homo sapiens
  Heavy chain CDR3 for antibody 6400 (IGHV3-33)
ARTDYYFYYGLDV

SEQ ID NO: 12801 - protein, 8 aa, Homo sapiens
  Light chain CDR3 for antibody 6401 (IGKV1D-13)
QQFNNYPT

SEQ ID NO: 12802 - protein, 16 aa, Homo sapiens
  Heavy chain CDR3 for antibody 6401 (IGHV1-24)
ATEDSSSTYYYYGLDV

SEQ ID NO: 12803 - protein, 9 aa, Homo sapiens
  Light chain CDR3 for antibody 6402 (IGKV1-39)
QQSYRTPLT

SEQ ID NO: 12804 - protein, 18 aa, Homo sapiens
  Heavy chain CDR3 for antibody 6402 (IGHV3-23)
AKVGDFFASGNYWDYFDY

SEQ ID NO: 12805 - protein, 9 aa, Homo sapiens
  Light chain CDR3 for antibody 6403 (IGKV2-30)
MQGTHWPLT

SEQ ID NO: 12806 - protein, 13 aa, Homo sapiens
  Heavy chain CDR3 for antibody 6403 (IGHV3-33)
ARIDYYSYYGMDV

SEQ ID NO: 12807 - protein, 10 aa, Homo sapiens
  Light chain CDR3 for antibody 6404 (IGKV3-20)
QQYGRSPPVT

SEQ ID NO: 12808 - protein, 18 aa, Homo sapiens
  Heavy chain CDR3 for antibody 6404 (IGHV3-23)
AKEGDYYSSGSYWGYFDL

SEQ ID NO: 12809 - protein, 8 aa, Homo sapiens
  Light chain CDR3 for antibody 6405 (IGKV3-20)
QQYGSSLT

SEQ ID NO: 12810 - protein, 13 aa, Homo sapiens
  Heavy chain CDR3 for antibody 6405 (IGHV3-23)
ARAITMVRGVIDY

SEQ ID NO: 12811 - protein, 9 aa, Homo sapiens
  Light chain CDR3 for antibody 6406 (IGKV3-15)
QQYNNWPLT

SEQ ID NO: 12812 - protein, 14 aa, Homo sapiens
  Heavy chain CDR3 for antibody 6406 (IGHV3-33)
VRDAMGAPTAWFDP

SEQ ID NO: 12813 - protein, 9 aa, Homo sapiens
  Light chain CDR3 for antibody 6407 (IGKV2D-24)
TQATQFPHT

SEQ ID NO: 12814 - protein, 13 aa, Homo sapiens
  Heavy chain CDR3 for antibody 6407 (IGHV4-34)
ASNFYYYYYGMDV

SEQ ID NO: 12815 - protein, 8 aa, Homo sapiens
  Light chain CDR3 for antibody 6408 (IGKV3-11)
QQRSNWLT

SEQ ID NO: 12816 - protein, 12 aa, Homo sapiens
  Heavy chain CDR3 for antibody 6408 (IGHV1-46)
AREDYDIDGMDV

SEQ ID NO: 12817 - protein, 9 aa, Homo sapiens
  Light chain CDR3 for antibody 6409 (IGKV3D-7)
QQDYNLPFT

SEQ ID NO: 12818 - protein, 18 aa, Homo sapiens
  Heavy chain CDR3 for antibody 6409 (IGHV3-33)
ARGGVLYDILTGFYGMDV

SEQ ID NO: 12819 - protein, 9 aa, Homo sapiens
  Light chain CDR3 for antibody 6410 (IGKV1-9)
QQLNSYPLT

SEQ ID NO: 12820 - protein, 19 aa, Homo sapiens
  Heavy chain CDR3 for antibody 6410 (IGHV3-33)
ARDNDSSGYYDYYYYGMDV

SEQ ID NO: 12821 - protein, 9 aa, Homo sapiens
  Light chain CDR3 for antibody 6411 (IGKV4-1)
QQYYSTPWT

SEQ ID NO: 12822 - protein, 12 aa, Homo sapiens
  Heavy chain CDR3 for antibody 6411 (IGHV3-33)
AREGDILTGYSL

SEQ ID NO: 12823 - protein, 8 aa, Homo sapiens
  Light chain CDR3 for antibody 6412 (IGKV3D-7)
QQDYNLLT

SEQ ID NO: 12824 - protein, 16 aa, Homo sapiens
  Heavy chain CDR3 for antibody 6412 (IGHV3-23)
AKEGEVLRYFDWLFNY

SEQ ID NO: 12825 - protein, 9 aa, Homo sapiens
  Light chain CDR3 for antibody 6413 (IGKV3-11)
QHRGNWPLT

SEQ ID NO: 12826 - protein, 13 aa, Homo sapiens
  Heavy chain CDR3 for antibody 6413 (IGHV4-34)
ASNFYYYYYGMDV

SEQ ID NO: 12827 - protein, 9 aa, Homo sapiens
  Light chain CDR3 for antibody 6414 (IGKV2D-28)
MQALQTPPT

SEQ ID NO: 12828 - protein, 20 aa, Homo sapiens
  Heavy chain CDR3 for antibody 6414 (IGHV3-20)
ARDLCSSTSCYGYYYYGMDV

SEQ ID NO: 12829 - protein, 9 aa, Homo sapiens
  Light chain CDR3 for antibody 6415 (IGKV1-17)
LQQNSYPWT

SEQ ID NO: 12830 - protein, 11 aa, Homo sapiens
  Heavy chain CDR3 for antibody 6415 (IGHV4-59)
ARSLRYAVCDY

SEQ ID NO: 12831 - protein, 8 aa, Homo sapiens
  Light chain CDR3 for antibody 6416 (IGKV3D-7)
QQDYNLLT

SEQ ID NO: 12832 - protein, 18 aa, Homo sapiens
  Heavy chain CDR3 for antibody 6416 (IGHV3-23)
ARYHLYFGSGFGSDGMDV

SEQ ID NO: 12833 - protein, 9 aa, Homo sapiens
  Light chain CDR3 for antibody 6417 (IGKV1-9)
QQLKSYLYT

SEQ ID NO: 12834 - protein, 20 aa, Homo sapiens
  Heavy chain CDR3 for antibody 6417 (IGHV3-23)
AKDREMAATSHYYYYYGMDV

SEQ ID NO: 12835 - protein, 8 aa, Homo sapiens
  Light chain CDR3 for antibody 6418 (IGKV3D-7)
QQDYNLLT

SEQ ID NO: 12836 - protein, 14 aa, Homo sapiens
  Heavy chain CDR3 for antibody 6418 (IGHV3-33)
AREDYYGPLNWFDP

SEQ ID NO: 12837 - protein, 9 aa, Homo sapiens
  Light chain CDR3 for antibody 6419 (IGKV3D-7)
QQDYNLPYT

SEQ ID NO: 12838 - protein, 17 aa, Homo sapiens
  Heavy chain CDR3 for antibody 6419 (IGHV3-74)
ARGDGDILTGYYEWFDP

SEQ ID NO: 12839 - protein, 8 aa, Homo sapiens
  Light chain CDR3 for antibody 6420 (IGKV3-15)
QQYNNYPT

SEQ ID NO: 12840 - protein, 13 aa, Homo sapiens
  Heavy chain CDR3 for antibody 6420 (IGHV3-33)
ARRATLVRGVFDP

SEQ ID NO: 12841 - protein, 8 aa, Homo sapiens
  Light chain CDR3 for antibody 6421 (IGKV6-21)
HQSSSLPT

SEQ ID NO: 12842 - protein, 15 aa, Homo sapiens
  Heavy chain CDR3 for antibody 6421 (IGHV3-33)
ARDRGWKAPGYGMDV

SEQ ID NO: 12843 - protein, 9 aa, Homo sapiens
  Light chain CDR3 for antibody 6422 (IGKV1D-16)
QQYDSYPYT

SEQ ID NO: 12844 - protein, 9 aa, Homo sapiens
  Heavy chain CDR3 for antibody 6422 (IGHV3-33)
ARDAVYFDY

SEQ ID NO: 12845 - protein, 9 aa, Homo sapiens
  Light chain CDR3 for antibody 6423 (IGKV1D-13)
QQFNNYPHT

SEQ ID NO: 12846 - protein, 12 aa, Homo sapiens
  Heavy chain CDR3 for antibody 6423 (IGHV3-33)
ARESGGSFGMDV

SEQ ID NO: 12847 - protein, 9 aa, Homo sapiens
  Light chain CDR3 for antibody 6424 (IGKV3-11)
QQRSSWPPT

SEQ ID NO: 12848 - protein, 13 aa, Homo sapiens
  Heavy chain CDR3 for antibody 6424 (IGHV4-34)
ASNFYYYYYGMDV

SEQ ID NO: 12849 - protein, 9 aa, Homo sapiens
  Light chain CDR3 for antibody 6425 (IGKV5-2)
LQHDNFPYT

SEQ ID NO: 12850 - protein, 16 aa, Homo sapiens
  Heavy chain CDR3 for antibody 6425 (IGHV3-33)
ARDAGYPNYDYYGMDV

SEQ ID NO: 12851 - protein, 9 aa, Homo sapiens
  Light chain CDR3 for antibody 6426 (IGKV1-9)
QQLKSYLYT

SEQ ID NO: 12852 - protein, 13 aa, Homo sapiens
  Heavy chain CDR3 for antibody 6426 (IGHV3-15)
ARAFTMVRGVIDY

SEQ ID NO: 12853 - protein, 10 aa, Homo sapiens
  Light chain CDR3 for antibody 6427 (IGKV3-20)
QQYGRSPPVT

SEQ ID NO: 12854 - protein, 10 aa, Homo sapiens
  Heavy chain CDR3 for antibody 6427 (IGHV3-23)
AKEQWLVLDY

SEQ ID NO: 12855 - protein, 10 aa, Homo sapiens
  Light chain CDR3 for antibody 6428 (IGKV3-11)
QQRSTWPTLI

SEQ ID NO: 12856 - protein, 13 aa, Homo sapiens
  Heavy chain CDR3 for antibody 6428 (IGHV3-33)
ARDYCGGDCYLDY

SEQ ID NO: 12857 - protein, 9 aa, Homo sapiens
  Light chain CDR3 for antibody 6429 (IGKV1-6)
LQDFHYPWT

SEQ ID NO: 12858 - protein, 20 aa, Homo sapiens
  Heavy chain CDR3 for antibody 6429 (IGHV3-20)
ARDLCSSTSCYGYYYYGMDV

SEQ ID NO: 12859 - protein, 10 aa, Homo sapiens
  Light chain CDR3 for antibody 6430 (IGKV3-11)
QQRSNWPPFT

SEQ ID NO: 12860 - protein, 16 aa, Homo sapiens
  Heavy chain CDR3 for antibody 6430 (IGHV3-20)
AREGYSSSWFDRNFDY

SEQ ID NO: 12861 - protein, 9 aa, Homo sapiens
  Light chain CDR3 for antibody 6431 (IGKV3-11)
QQRSNWQYT

SEQ ID NO: 12862 - protein, 17 aa, Homo sapiens
  Heavy chain CDR3 for antibody 6431 (IGHV4-59)
ARDFLVRGEGSYYGMDV

SEQ ID NO: 12863 - protein, 9 aa, Homo sapiens
  Light chain CDR3 for antibody 6432 (IGKV1-33)
QQYDNLPFT

SEQ ID NO: 12864 - protein, 20 aa, Homo sapiens
  Heavy chain CDR3 for antibody 6432 (IGHV3-20)
ARDLCSSTSCYGYYYYGMDV

SEQ ID NO: 12865 - protein, 9 aa, Homo sapiens
  Light chain CDR3 for antibody 6433 (IGKV1-9)
QQLNSYPRT

SEQ ID NO: 12866 - protein, 14 aa, Homo sapiens
  Heavy chain CDR3 for antibody 6433 (IGHV3-33)
ARDGIVRATDAFAI

SEQ ID NO: 12867 - protein, 11 aa, Homo sapiens
  Light chain CDR3 for antibody 6434 (IGKV3-11)
QQRSNWPPTWT

SEQ ID NO: 12868 - protein, 14 aa, Homo sapiens
  Heavy chain CDR3 for antibody 6434 (IGHV1-46)
ARRGIVGALDAFDI

SEQ ID NO: 12869 - protein, 9 aa, Homo sapiens
  Light chain CDR3 for antibody 6435 (IGKV1-16)
QQYNSYPYT

SEQ ID NO: 12870 - protein, 11 aa, Homo sapiens
  Heavy chain CDR3 for antibody 6435 (IGHV1-69)
ARDPAGRTFDI

SEQ ID NO: 12871 - protein, 9 aa, Homo sapiens
  Light chain CDR3 for antibody 6436 (IGKV1-9)
QQGNTYSRT

SEQ ID NO: 12872 - protein, 10 aa, Homo sapiens
  Heavy chain CDR3 for antibody 6436 (IGHV3-33)
ARENSTPLDY

SEQ ID NO: 12873 - protein, 9 aa, Homo sapiens
  Light chain CDR3 for antibody 6437 (IGKV5-2)
LQHDNFPWT

SEQ ID NO: 12874 - protein, 11 aa, Homo sapiens
  Heavy chain CDR3 for antibody 6437 (IGHV3-11)
ARASRGSYYDY

SEQ ID NO: 12875 - protein, 9 aa, Homo sapiens
  Light chain CDR3 for antibody 6438 (IGKV5-2)
LQHDNFPWT

SEQ ID NO: 12876 - protein, 14 aa, Homo sapiens
  Heavy chain CDR3 for antibody 6438 (IGHV1-18)
ARDQPTVPSGYFDY

SEQ ID NO: 12877 - protein, 9 aa, Homo sapiens
  Light chain CDR3 for antibody 6439 (IGKV1-17)
LQHNSYPIT

SEQ ID NO: 12878 - protein, 14 aa, Homo sapiens
  Heavy chain CDR3 for antibody 6439 (IGHV3-20)
ARDRGSSGHDAFDI

SEQ ID NO: 12879 - protein, 9 aa, Homo sapiens
  Light chain CDR3 for antibody 6440 (IGKV1-27)
QKYNSAPYT

SEQ ID NO: 12880 - protein, 17 aa, Homo sapiens
  Heavy chain CDR3 for antibody 6440 (IGHV3-23)
AKGDYYGSGSYSTFFDY

SEQ ID NO: 12881 - protein, 9 aa, Homo sapiens
  Light chain CDR3 for antibody 6441 (IGKV1D-13)
QRFNNYLYT

SEQ ID NO: 12882 - protein, 14 aa, Homo sapiens
  Heavy chain CDR3 for antibody 6441 (IGHV3-33)
AREGYSSNWYDFDY

SEQ ID NO: 12883 - protein, 9 aa, Homo sapiens
  Light chain CDR3 for antibody 6442 (IGKV3-11)
QQRSNWPPT

SEQ ID NO: 12884 - protein, 13 aa, Homo sapiens
  Heavy chain CDR3 for antibody 6442 (IGHV1-18)
ARSYYGSGSPFDY

SEQ ID NO: 12885 - protein, 9 aa, Homo sapiens
  Light chain CDR3 for antibody 6443 (IGKV3-15)
QQYHNWPYT

SEQ ID NO: 12886 - protein, 17 aa, Homo sapiens
  Heavy chain CDR3 for antibody 6443 (IGHV3-33)
ARVYYDILTGYSPAFDI

SEQ ID NO: 12887 - protein, 9 aa, Homo sapiens
  Light chain CDR3 for antibody 6444 (IGKV1-17)
LQHNSYPRT

SEQ ID NO: 12888 - protein, 18 aa, Homo sapiens
  Heavy chain CDR3 for antibody 6444 (IGHV1-46)
ARDGDYVWGSYRSDWFDP

SEQ ID NO: 12889 - protein, 9 aa, Homo sapiens
  Light chain CDR3 for antibody 6445 (IGKV2D-28)
MQVLQTPFT

SEQ ID NO: 12890 - protein, 20 aa, Homo sapiens
  Heavy chain CDR3 for antibody 6445 (IGHV1-f)
ATGLITFVRGVILTYRSFDY

SEQ ID NO: 12891 - protein, 8 aa, Homo sapiens
  Light chain CDR3 for antibody 6446 (IGKV3-15)
QQYNNYPT

SEQ ID NO: 12892 - protein, 14 aa, Homo sapiens
  Heavy chain CDR3 for antibody 6446 (IGHV3-33)
ARRGSPLRPSHLDV

SEQ ID NO: 12893 - protein, 9 aa, Homo sapiens
  Light chain CDR3 for antibody 6447 (IGKV1-5)
QQYNTYSRT

SEQ ID NO: 12894 - protein, 15 aa, Homo sapiens
  Heavy chain CDR3 for antibody 6447 (IGHV3-33)
ARDRGWKAPGYGMDV

SEQ ID NO: 12895 - protein, 8 aa, Homo sapiens
  Light chain CDR3 for antibody 6448 (IGKV1D-13)
QQFNNYPT

SEQ ID NO: 12896 - protein, 13 aa, Homo sapiens
  Heavy chain CDR3 for antibody 6448 (IGHV3-33)
ARDSSSWYHWFDP

SEQ ID NO: 12897 - protein, 8 aa, Homo sapiens
  Light chain CDR3 for antibody 6449 (IGKV3D-7)
QQDYNLLT

SEQ ID NO: 12898 - protein, 15 aa, Homo sapiens
  Heavy chain CDR3 for antibody 6449 (IGHV1-46)
ARGRFFDWLLSPFDY

SEQ ID NO: 12899 - protein, 9 aa, Homo sapiens
  Light chain CDR3 for antibody 6450 (IGKV1-16)
QHYNDYPFT

SEQ ID NO: 12900 - protein, 13 aa, Homo sapiens
  Heavy chain CDR3 for antibody 6450 (IGHV3-33)
ARRYRSGWYPFDY

SEQ ID NO: 12901 - protein, 9 aa, Homo sapiens
  Light chain CDR3 for antibody 6451 (IGKV5-2)
LQHDNFPYT

SEQ ID NO: 12902 - protein, 20 aa, Homo sapiens
  Heavy chain CDR3 for antibody 6451 (IGHV3-23)
AKDRETGTTSYHYYYYGMDV

SEQ ID NO: 12903 - protein, 9 aa, Homo sapiens
  Light chain CDR3 for antibody 6452 (IGKV5-2)
LQHDNFPWT

SEQ ID NO: 12904 - protein, 15 aa, Homo sapiens
  Heavy chain CDR3 for antibody 6452 (IGHV3-33)
AKGGTMVRGVIAFDY

SEQ ID NO: 12905 - protein, 8 aa, Homo sapiens
  Light chain CDR3 for antibody 6453 (IGKV1-5)
QQYNSYYT

SEQ ID NO: 12906 - protein, 15 aa, Homo sapiens
  Heavy chain CDR3 for antibody 6453 (IGHV4-59)
ARDLGHYYGSVSIDY

SEQ ID NO: 12907 - protein, 9 aa, Homo sapiens
  Light chain CDR3 for antibody 6454 (IGKV1-9)
QQYISYPLT

SEQ ID NO: 12908 - protein, 14 aa, Homo sapiens
  Heavy chain CDR3 for antibody 6454 (IGHV3-33)
AREGYSSGWDYFDH

SEQ ID NO: 12909 - protein, 9 aa, Homo sapiens
  Light chain CDR3 for antibody 6455 (IGKV1-9)
QQLISYPLT

SEQ ID NO: 12910 - protein, 9 aa, Homo sapiens
  Heavy chain CDR3 for antibody 6455 (IGHV1-8)
ARGRLDFDY

SEQ ID NO: 12911 - protein, 9 aa, Homo sapiens
  Light chain CDR3 for antibody 6456 (IGKV1-6)
LQDYKSPFT

SEQ ID NO: 12912 - protein, 11 aa, Homo sapiens
  Heavy chain CDR3 for antibody 6456 (IGHV3-33)
ARDKSSGWSDY

SEQ ID NO: 12913 - protein, 9 aa, Homo sapiens
  Light chain CDR3 for antibody 6457 (IGKV2-30)
MQGTHWPLT

SEQ ID NO: 12914 - protein, 11 aa, Homo sapiens
  Heavy chain CDR3 for antibody 6457 (IGHV4-59)
ARDGSWEPFDY

SEQ ID NO: 12915 - protein, 9 aa, Homo sapiens
  Light chain CDR3 for antibody 6458 (IGKV3-15)
QQYNNWPFT

SEQ ID NO: 12916 - protein, 12 aa, Homo sapiens
  Heavy chain CDR3 for antibody 6458 (IGHV3-33)
AREGTRWVYFDY

SEQ ID NO: 12917 - protein, 9 aa, Homo sapiens
  Light chain CDR3 for antibody 6459 (IGKV3D-7)
QQDYNLPLT

SEQ ID NO: 12918 - protein, 13 aa, Homo sapiens
  Heavy chain CDR3 for antibody 6459 (IGHV3-30)
AAPFMVRGDGMDV

SEQ ID NO: 12919 - protein, 9 aa, Homo sapiens
  Light chain CDR3 for antibody 6460 (IGKV5-2)
LQHDKFPYT

SEQ ID NO: 12920 - protein, 19 aa, Homo sapiens
  Heavy chain CDR3 for antibody 6460 (IGHV3-33)
ARGSDYDILTGYSSDAFDI

SEQ ID NO: 12921 - protein, 9 aa, Homo sapiens
  Light chain CDR3 for antibody 6461 (IGKV1-39)
QQSYSTPLT

SEQ ID NO: 12922 - protein, 17 aa, Homo sapiens
  Heavy chain CDR3 for antibody 6461 (IGHV1-24)
ATHYGSGSHYKGYGMDV

SEQ ID NO: 12923 - protein, 9 aa, Homo sapiens
  Light chain CDR3 for antibody 6462 (IGKV3D-20)
QQYDSYPWT

SEQ ID NO: 12924 - protein, 18 aa, Homo sapiens
  Heavy chain CDR3 for antibody 6462 (IGHV1-46)
ARDGDYVWGSYRSNWFDP

SEQ ID NO: 12925 - protein, 9 aa, Homo sapiens
  Light chain CDR3 for antibody 6463 (IGKV3-20)
QQYGSSPYT

SEQ ID NO: 12926 - protein, 12 aa, Homo sapiens
  Heavy chain CDR3 for antibody 6463 (IGHV3-13)
AIGTMVRGIPDY

SEQ ID NO: 12927 - protein, 9 aa, Homo sapiens
  Light chain CDR3 for antibody 6464 (IGKV3-20)
QQYGSSPYT

SEQ ID NO: 12928 - protein, 15 aa, Homo sapiens
  Heavy chain CDR3 for antibody 6464 (IGHV3-64)
ARDSHHDLLTGHYEY

SEQ ID NO: 12929 - protein, 9 aa, Homo sapiens
  Light chain CDR3 for antibody 6465 (IGKV3-15)
QQYNNWPLT

SEQ ID NO: 12930 - protein, 12 aa, Homo sapiens
  Heavy chain CDR3 for antibody 6465 (IGHV3-23)
AKEYDILTGYFH

SEQ ID NO: 12931 - protein, 9 aa, Homo sapiens
  Light chain CDR3 for antibody 6466 (IGKV1-39)
QQSYSTPYT

SEQ ID NO: 12932 - protein, 12 aa, Homo sapiens
  Heavy chain CDR3 for antibody 6466 (IGHV1-18)
AGVLFDGDYSDY

SEQ ID NO: 12933 - protein, 8 aa, Homo sapiens
  Light chain CDR3 for antibody 6467 (IGKV3-11)
QQRSNWLT

SEQ ID NO: 12934 - protein, 13 aa, Homo sapiens
  Heavy chain CDR3 for antibody 6467 (IGHV4-39)
ARQWPSGYWYFDL

SEQ ID NO: 12935 - protein, 9 aa, Homo sapiens
  Light chain CDR3 for antibody 6468 (IGKV1-17)
LQHNSYPYT

SEQ ID NO: 12936 - protein, 16 aa, Homo sapiens
  Heavy chain CDR3 for antibody 6468 (IGHV3-30)
ARDSSYYGSGYYGMDV

SEQ ID NO: 12937 - protein, 9 aa, Homo sapiens
  Light chain CDR3 for antibody 6469 (IGKV4-1)
QQYYSTPWT

SEQ ID NO: 12938 - protein, 16 aa, Homo sapiens
  Heavy chain CDR3 for antibody 6469 (IGHV3-30)
ARGGRSDWLYYYGMDV

SEQ ID NO: 12939 - protein, 11 aa, Homo sapiens
  Light chain CDR3 for antibody 6470 (IGKV3-11)
QQRSNWPPTWT

SEQ ID NO: 12940 - protein, 11 aa, Homo sapiens
  Heavy chain CDR3 for antibody 6470 (IGHV3-33)
ARGSGSYAFDS

SEQ ID NO: 12941 - protein, 8 aa, Homo sapiens
  Light chain CDR3 for antibody 6471 (IGKV1-5)
QQYNSYYT

SEQ ID NO: 12942 - protein, 11 aa, Homo sapiens
  Heavy chain CDR3 for antibody 6471 (IGHV3-33)
ARDRATATVDY

SEQ ID NO: 12943 - protein, 10 aa, Homo sapiens
  Light chain CDR3 for antibody 6472 (IGKV1-17)
LQHNSYPMYT

SEQ ID NO: 12944 - protein, 17 aa, Homo sapiens
  Heavy chain CDR3 for antibody 6472 (IGHV3-33)
ARGYCSRTSCYLYYFDY

SEQ ID NO: 12945 - protein, 9 aa, Homo sapiens
  Light chain CDR3 for antibody 6473 (IGKV3-15)
QQYNNWPLT

SEQ ID NO: 12946 - protein, 13 aa, Homo sapiens
  Heavy chain CDR3 for antibody 6473 (IGHV3-33)
ARGVLWFGELFDY

SEQ ID NO: 12947 - protein, 11 aa, Homo sapiens
  Light chain CDR3 for antibody 6474 (IGKV3-11)
QQRSNWPPTWT

SEQ ID NO: 12948 - protein, 18 aa, Homo sapiens
  Heavy chain CDR3 for antibody 6474 (IGHV3-23)
AKEGNYYGSGSYWGYFDP

SEQ ID NO: 12949 - protein, 9 aa, Homo sapiens
  Light chain CDR3 for antibody 6475 (IGKV1-9)
QQYNTYSRT

SEQ ID NO: 12950 - protein, 17 aa, Homo sapiens
  Heavy chain CDR3 for antibody 6475 (IGHV3-66)
ARVQYDILTGYSPYFDN

SEQ ID NO: 12951 - protein, 9 aa, Homo sapiens
  Light chain CDR3 for antibody 6476 (IGKV1-39)
QQYAGYPPT

SEQ ID NO: 12952 - protein, 13 aa, Homo sapiens
  Heavy chain CDR3 for antibody 6476 (IGHV4-59)
ARDAGYSSSWFDY

SEQ ID NO: 12953 - protein, 9 aa, Homo sapiens
  Light chain CDR3 for antibody 6477 (IGKV3-11)
QQRSNWPLT

SEQ ID NO: 12954 - protein, 17 aa, Homo sapiens
  Heavy chain CDR3 for antibody 6477 (IGHV3-33)
ARDLIGPLSSSWYPFDY

SEQ ID NO: 12955 - protein, 8 aa, Homo sapiens
  Light chain CDR3 for antibody 6478 (IGKV3-11)
LQRGNWPT

SEQ ID NO: 12956 - protein, 15 aa, Homo sapiens
  Heavy chain CDR3 for antibody 6478 (IGHV3-30)
ARGAMVRGVDYGMDV

SEQ ID NO: 12957 - protein, 9 aa, Homo sapiens
  Light chain CDR3 for antibody 6479 (IGKV1-6)
LQDYKSPFT

SEQ ID NO: 12958 - protein, 16 aa, Homo sapiens
  Heavy chain CDR3 for antibody 6479 (IGHV3-33)
ARGYDMLTGDYYGMDV

SEQ ID NO: 12959 - protein, 9 aa, Homo sapiens
  Light chain CDR3 for antibody 6480 (IGKV5-2)
LQHDNFPWT

SEQ ID NO: 12960 - protein, 16 aa, Homo sapiens
  Heavy chain CDR3 for antibody 6480 (IGHV4-39)
ARRGVLVVTAIPGFDY

SEQ ID NO: 12961 - protein, 9 aa, Homo sapiens
  Light chain CDR3 for antibody 6481 (IGKV2D-28)
MQALQTPPT

SEQ ID NO: 12962 - protein, 16 aa, Homo sapiens
  Heavy chain CDR3 for antibody 6481 (IGHV1-24)
ATEDSSSTYYYYGLDV

SEQ ID NO: 12963 - protein, 9 aa, Homo sapiens
  Light chain CDR3 for antibody 6482 (IGKV3-11)
QQRSNWPPT

SEQ ID NO: 12964 - protein, 19 aa, Homo sapiens
  Heavy chain CDR3 for antibody 6482 (IGHV3-33)
TRDPHYDILTGYAYYGMDV

SEQ ID NO: 12965 - protein, 9 aa, Homo sapiens
  Light chain CDR3 for antibody 6483 (IGKV2-30)
MQGTHWPLT

SEQ ID NO: 12966 - protein, 12 aa, Homo sapiens
  Heavy chain CDR3 for antibody 6483 (IGHV3-33)
ARKGYDMHEFDI

SEQ ID NO: 12967 - protein, 10 aa, Homo sapiens
  Light chain CDR3 for antibody 6484 (IGKV1-9)
QQLDSYPMYT

SEQ ID NO: 12968 - protein, 11 aa, Homo sapiens
  Heavy chain CDR3 for antibody 6484 (IGHV3-33)
ARDRVLTPFDY

SEQ ID NO: 12969 - protein, 9 aa, Homo sapiens
  Light chain CDR3 for antibody 6485 (IGKV1D-16)
QQYNSYPLT

SEQ ID NO: 12970 - protein, 12 aa, Homo sapiens
  Heavy chain CDR3 for antibody 6485 (IGHV3-11)
ARVLLWFGETDY

SEQ ID NO: 12971 - protein, 9 aa, Homo sapiens
  Light chain CDR3 for antibody 6486 (IGKV2-30)
MQGTHWPLT

SEQ ID NO: 12972 - protein, 14 aa, Homo sapiens
  Heavy chain CDR3 for antibody 6486 (IGHV3-11)
AKDRYRGYEGLFDY

SEQ ID NO: 12973 - protein, 8 aa, Homo sapiens
  Light chain CDR3 for antibody 6487 (IGKV3-11)
QQRSNWLT

SEQ ID NO: 12974 - protein, 9 aa, Homo sapiens
  Heavy chain CDR3 for antibody 6487 (IGHV1-8)
ARGRLDFDY

SEQ ID NO: 12975 - protein, 10 aa, Homo sapiens
  Light chain CDR3 for antibody 6488 (IGKV3-15)
QQYNNWPPYT

SEQ ID NO: 12976 - protein, 13 aa, Homo sapiens
  Heavy chain CDR3 for antibody 6488 (IGHV3-33)
ARTDYYFYYGLDV

SEQ ID NO: 12977 - protein, 9 aa, Homo sapiens
  Light chain CDR3 for antibody 6489 (IGKV3-15)
QQYNNWPLT

SEQ ID NO: 12978 - protein, 17 aa, Homo sapiens
  Heavy chain CDR3 for antibody 6489 (IGHV3-33)
ARGFSGYDGYYYYGMDV

SEQ ID NO: 12979 - protein, 9 aa, Homo sapiens
  Light chain CDR3 for antibody 6490 (IGKV2-30)
MQGTHWPLT

SEQ ID NO: 12980 - protein, 17 aa, Homo sapiens
  Heavy chain CDR3 for antibody 6490 (IGHV4-39)
AGRLTYYYGSGSPSFDY

SEQ ID NO: 12981 - protein, 9 aa, Homo sapiens
  Light chain CDR3 for antibody 6491 (IGKV1-39)
QQSYSTPFT

SEQ ID NO: 12982 - protein, 16 aa, Homo sapiens
  Heavy chain CDR3 for antibody 6491 (IGHV3-33)
ARGYDMLTGDYHGMDV

SEQ ID NO: 12983 - protein, 9 aa, Homo sapiens
  Light chain CDR3 for antibody 6492 (IGKV1D-13)
QQFNNYPHT

SEQ ID NO: 12984 - protein, 15 aa, Homo sapiens
  Heavy chain CDR3 for antibody 6492 (IGHV3-23)
AKDRYFDWLSDAFDI

SEQ ID NO: 12985 - protein, 9 aa, Homo sapiens
  Light chain CDR3 for antibody 6493 (IGKV1-39)
QQSYSTPLT

SEQ ID NO: 12986 - protein, 12 aa, Homo sapiens
  Heavy chain CDR3 for antibody 6493 (IGHV3-33)
ARAGMGAPYFDY

SEQ ID NO: 12987 - protein, 8 aa, Homo sapiens
  Light chain CDR3 for antibody 6494 (IGKV3D-7)
QQDYNLVT

SEQ ID NO: 12988 - protein, 15 aa, Homo sapiens
  Heavy chain CDR3 for antibody 6494 (IGHV4-39)
ARHSKYSSGWYPFDY

SEQ ID NO: 12989 - protein, 9 aa, Homo sapiens
  Light chain CDR3 for antibody 6495 (IGKV4-1)
QQYYSTPPT

SEQ ID NO: 12990 - protein, 11 aa, Homo sapiens
  Heavy chain CDR3 for antibody 6495 (IGHV3-33)
ARDKSSGWSDY

SEQ ID NO: 12991 - protein, 10 aa, Homo sapiens
  Light chain CDR3 for antibody 6496 (IGKV1-17)
LQHNSYPMYT

SEQ ID NO: 12992 - protein, 17 aa, Homo sapiens
  Heavy chain CDR3 for antibody 6496 (IGHV3-33)
ARDLIGPLSSSWYPFDY

SEQ ID NO: 12993 - protein, 9 aa, Homo sapiens
  Light chain CDR3 for antibody 6497 (IGKV2D-28)
MQALQTPWT

SEQ ID NO: 12994 - protein, 15 aa, Homo sapiens
  Heavy chain CDR3 for antibody 6497 (IGHV3-23)
AKDGSYYDYYYGMDV

SEQ ID NO: 12995 - protein, 9 aa, Homo sapiens
  Light chain CDR3 for antibody 6498 (IGKV1-9)
QQLISYPLT

SEQ ID NO: 12996 - protein, 15 aa, Homo sapiens
  Heavy chain CDR3 for antibody 6498 (IGHV3-33)
ARKRLYDILTGYLDY

SEQ ID NO: 12997 - protein, 9 aa, Homo sapiens
  Light chain CDR3 for antibody 6499 (IGKV1-17)
LQHNSFPLT

SEQ ID NO: 12998 - protein, 16 aa, Homo sapiens
  Heavy chain CDR3 for antibody 6499 (IGHV4-59)
ARGRYFDWLLGDVFDI

SEQ ID NO: 12999 - protein, 9 aa, Homo sapiens
  Light chain CDR3 for antibody 6500 (IGKV1D-13)
QQFNNYPHT

SEQ ID NO: 13000 - protein, 13 aa, Homo sapiens
  Heavy chain CDR3 for antibody 6500 (IGHV3-33)
ASGYSGYDWYFDL

SEQ ID NO: 13001 - protein, 10 aa, Homo sapiens
  Light chain CDR3 for antibody 6501 (IGKV3-11)
QQRSNWPIFT

SEQ ID NO: 13002 - protein, 14 aa, Homo sapiens
  Heavy chain CDR3 for antibody 6501 (IGHV3-20)
ARDEGSGGYDVFDI

SEQ ID NO: 13003 - protein, 9 aa, Homo sapiens
  Light chain CDR3 for antibody 6502 (IGKV2-30)
MQGTHWPLT

SEQ ID NO: 13004 - protein, 14 aa, Homo sapiens
  Heavy chain CDR3 for antibody 6502 (IGHV3-33)
ARDRRDFYYYGMDV

SEQ ID NO: 13005 - protein, 9 aa, Homo sapiens
  Light chain CDR3 for antibody 6503 (IGKV3D-7)
QQDYNLPYT

SEQ ID NO: 13006 - protein, 12 aa, Homo sapiens
  Heavy chain CDR3 for antibody 6503 (IGHV4-61)
ARVYSSGWLFDY

SEQ ID NO: 13007 - protein, 9 aa, Homo sapiens
  Light chain CDR3 for antibody 6504 (IGKV1D-16)
LQDYNHPFT

SEQ ID NO: 13008 - protein, 13 aa, Homo sapiens
  Heavy chain CDR3 for antibody 6504 (IGHV3-23)
ASTFNWNDGFFDY

SEQ ID NO: 13009 - protein, 8 aa, Homo sapiens
  Light chain CDR3 for antibody 6505 (IGKV3D-7)
QQDYNLLT

SEQ ID NO: 13010 - protein, 19 aa, Homo sapiens
  Heavy chain CDR3 for antibody 6505 (IGHV4-39)
ARQGDVLRYFDWLLGAFDI

SEQ ID NO: 13011 - protein, 9 aa, Homo sapiens
  Light chain CDR3 for antibody 6506 (IGKV3-11)
QQRSSWPPT

SEQ ID NO: 13012 - protein, 12 aa, Homo sapiens
  Heavy chain CDR3 for antibody 6506 (IGHV3-23)
AKDGWFGESLDY

SEQ ID NO: 13013 - protein, 9 aa, Homo sapiens
  Light chain CDR3 for antibody 6507 (IGKV1-17)
LQHNSYPYT

SEQ ID NO: 13014 - protein, 5 aa, Homo sapiens
  Heavy chain CDR3 for antibody 6507 (IGHV3-33)
AREDY

SEQ ID NO: 13015 - protein, 9 aa, Homo sapiens
  Light chain CDR3 for antibody 6508 (IGKV1-17)
LQHNSYPWT

SEQ ID NO: 13016 - protein, 13 aa, Homo sapiens
  Heavy chain CDR3 for antibody 6508 (IGHV3-33)
TGRIAVAGAEGDY

SEQ ID NO: 13017 - protein, 8 aa, Homo sapiens
  Light chain CDR3 for antibody 6509 (IGKV3-11)
LQRGNWPT

SEQ ID NO: 13018 - protein, 16 aa, Homo sapiens
  Heavy chain CDR3 for antibody 6509 (IGHV4-59)
ARGRYFEWLLGDVFDI

SEQ ID NO: 13019 - protein, 9 aa, Homo sapiens
  Light chain CDR3 for antibody 6510 (IGKV1-6)
LQDYKSPFT

SEQ ID NO: 13020 - protein, 17 aa, Homo sapiens
  Heavy chain CDR3 for antibody 6510 (IGHV1-18)
ARDEGYDILTGYPHFDY

SEQ ID NO: 13021 - protein, 9 aa, Homo sapiens
  Light chain CDR3 for antibody 6511 (IGKV1D-13)
QQFNNYPFT

SEQ ID NO: 13022 - protein, 16 aa, Homo sapiens
  Heavy chain CDR3 for antibody 6511 (IGHV4-59)
ARGRGYYGSGSPYFDY

SEQ ID NO: 13023 - protein, 9 aa, Homo sapiens
  Light chain CDR3 for antibody 6512 (IGKV1-6)
LQDYKSPFT

SEQ ID NO: 13024 - protein, 15 aa, Homo sapiens
  Heavy chain CDR3 for antibody 6512 (IGHV3-20)
ARDRGSSGWRDWFDP

SEQ ID NO: 13025 - protein, 8 aa, Homo sapiens
  Light chain CDR3 for antibody 6513 (IGKV6-21)
HQSSSLPT

SEQ ID NO: 13026 - protein, 16 aa, Homo sapiens
  Heavy chain CDR3 for antibody 6513 (IGHV1-18)
ARGRYFEWLLGDVFDI

SEQ ID NO: 13027 - protein, 9 aa, Homo sapiens
  Light chain CDR3 for antibody 6514 (IGKV5-2)
LQHDKFPYT

SEQ ID NO: 13028 - protein, 12 aa, Homo sapiens
  Heavy chain CDR3 for antibody 6514 (IGHV3-33)
ASGYFGSGSAHY

SEQ ID NO: 13029 - protein, 10 aa, Homo sapiens
  Light chain CDR3 for antibody 6515 (IGKV3-15)
QQYNNWPPIT

SEQ ID NO: 13030 - protein, 13 aa, Homo sapiens
  Heavy chain CDR3 for antibody 6515 (IGHV3-33)
ANTGDSYYYDMDV

SEQ ID NO: 13031 - protein, 9 aa, Homo sapiens
  Light chain CDR3 for antibody 6516 (IGKV1D-13)
QQFNNYPHT

SEQ ID NO: 13032 - protein, 14 aa, Homo sapiens
  Heavy chain CDR3 for antibody 6516 (IGHV3-33)
ARDAYDILTGYYDY

SEQ ID NO: 13033 - protein, 11 aa, Homo sapiens
  Light chain CDR3 for antibody 6517 (IGKV3-11)
QQRSNWPPMYT

SEQ ID NO: 13034 - protein, 18 aa, Homo sapiens
  Heavy chain CDR3 for antibody 6517 (IGHV4-59)
AREGDYVWGSYRPNWFDP

SEQ ID NO: 13035 - protein, 8 aa, Homo sapiens
  Light chain CDR3 for antibody 6518 (IGKV1D-13)
QQFNNYPT

SEQ ID NO: 13036 - protein, 13 aa, Homo sapiens
  Heavy chain CDR3 for antibody 6518 (IGHV3-23)
AKDRGYSSTSTAY

SEQ ID NO: 13037 - protein, 8 aa, Homo sapiens
  Light chain CDR3 for antibody 6519 (IGKV3D-7)
QQDYNLLT

SEQ ID NO: 13038 - protein, 15 aa, Homo sapiens
  Heavy chain CDR3 for antibody 6519 (IGHV3-33)
ARDRGWKAPGYGMDV

SEQ ID NO: 13039 - protein, 9 aa, Homo sapiens
  Light chain CDR3 for antibody 6520 (IGKV1-9)
QQLISYPLT

SEQ ID NO: 13040 - protein, 8 aa, Homo sapiens
  Heavy chain CDR3 for antibody 6520 (IGHV3-23)
EKSAGEDV

SEQ ID NO: 13041 - protein, 9 aa, Homo sapiens
  Light chain CDR3 for antibody 6521 (IGKV5-2)
LQHDNFPYT

SEQ ID NO: 13042 - protein, 11 aa, Homo sapiens
  Heavy chain CDR3 for antibody 6521 (IGHV3-33)
ARDRGYSYFDY

SEQ ID NO: 13043 - protein, 9 aa, Homo sapiens
  Light chain CDR3 for antibody 6522 (IGKV1-9)
QQLNSYPWT

SEQ ID NO: 13044 - protein, 18 aa, Homo sapiens
  Heavy chain CDR3 for antibody 6522 (IGHV4-59)
AREGDYVWGSYRPNWFDP

SEQ ID NO: 13045 - protein, 9 aa, Homo sapiens
  Light chain CDR3 for antibody 6523 (IGKV1-9)
QQLNSYPLT

SEQ ID NO: 13046 - protein, 14 aa, Homo sapiens
  Heavy chain CDR3 for antibody 6523 (IGHV3-33)
ARGYGSGSYYSFDY

SEQ ID NO: 13047 - protein, 8 aa, Homo sapiens
  Light chain CDR3 for antibody 6524 (IGKV6-21)
HQSSSLPT

SEQ ID NO: 13048 - protein, 18 aa, Homo sapiens
  Heavy chain CDR3 for antibody 6524 (IGHV3-33)
ARREGIVGATTYYYGMDV

SEQ ID NO: 13049 - protein, 9 aa, Homo sapiens
  Light chain CDR3 for antibody 6525 (IGKV3-15)
QQYNNWPLT

SEQ ID NO: 13050 - protein, 8 aa, Homo sapiens
  Heavy chain CDR3 for antibody 6525 (IGHV3-33)
ARDRGFDY

SEQ ID NO: 13051 - protein, 9 aa, Homo sapiens
  Light chain CDR3 for antibody 6526 (IGKV1D-16)
QQYYSYPRT

SEQ ID NO: 13052 - protein, 12 aa, Homo sapiens
  Heavy chain CDR3 for antibody 6526 (IGHV1-46)
ARGLTGDYAFDI

SEQ ID NO: 13053 - protein, 9 aa, Homo sapiens
  Light chain CDR3 for antibody 6527 (IGKV1-39)
QQSYSTPFT

SEQ ID NO: 13054 - protein, 13 aa, Homo sapiens
  Heavy chain CDR3 for antibody 6527 (IGHV4-59)
ANRDYYGYYGMDV

SEQ ID NO: 13055 - protein, 9 aa, Homo sapiens
  Light chain CDR3 for antibody 6528 (IGKV1D-13)
QRFNNYLYT

SEQ ID NO: 13056 - protein, 11 aa, Homo sapiens
  Heavy chain CDR3 for antibody 6528 (IGHV3-33)
ARDRVLTPFDY

SEQ ID NO: 13057 - protein, 10 aa, Homo sapiens
  Light chain CDR3 for antibody 6529 (IGKV1-6)
LQDYNYPMYT

SEQ ID NO: 13058 - protein, 16 aa, Homo sapiens
  Heavy chain CDR3 for antibody 6529 (IGHV3-23)
AKEGMVLRYFDWLWDY

SEQ ID NO: 13059 - protein, 9 aa, Homo sapiens
  Light chain CDR3 for antibody 6530 (IGKV1-27)
QRFNNYLYT

SEQ ID NO: 13060 - protein, 17 aa, Homo sapiens
  Heavy chain CDR3 for antibody 6530 (IGHV1-18)
ARDEGYDILTGYPHFDY

SEQ ID NO: 13061 - protein, 9 aa, Homo sapiens
  Light chain CDR3 for antibody 6531 (IGKV6-21)
HQSSSLPFT

SEQ ID NO: 13062 - protein, 10 aa, Homo sapiens
  Heavy chain CDR3 for antibody 6531 (IGHV4-39)
ARQLGNWFDP

SEQ ID NO: 13063 - protein, 9 aa, Homo sapiens
  Light chain CDR3 for antibody 6532 (IGKV1-33)
QQYYNLPFT

SEQ ID NO: 13064 - protein, 15 aa, Homo sapiens
  Heavy chain CDR3 for antibody 6532 (IGHV3-33)
ARDGSGSYSLYGMDV

SEQ ID NO: 13065 - protein, 9 aa, Homo sapiens
  Light chain CDR3 for antibody 6533 (IGKV6-21)
HQSSSLPLT

SEQ ID NO: 13066 - protein, 16 aa, Homo sapiens
  Heavy chain CDR3 for antibody 6533 (IGHV3-33)
ARIAAPGSEYYYGMDV

SEQ ID NO: 13067 - protein, 8 aa, Homo sapiens
  Light chain CDR3 for antibody 6534 (IGKV3D-7)
QQDYNLLT

SEQ ID NO: 13068 - protein, 17 aa, Homo sapiens
  Heavy chain CDR3 for antibody 6534 (IGHV4-59)
ARDSYDILTGYYKPFDY

SEQ ID NO: 13069 - protein, 9 aa, Homo sapiens
  Light chain CDR3 for antibody 6535 (IGKV1-39)
QQSYRTPLT

SEQ ID NO: 13070 - protein, 14 aa, Homo sapiens
  Heavy chain CDR3 for antibody 6535 (IGHV3-33)
ARSTLVRGANWFDP

SEQ ID NO: 13071 - protein, 9 aa, Homo sapiens
  Light chain CDR3 for antibody 6536 (IGKV1-5)
QQYNTYSRT

SEQ ID NO: 13072 - protein, 8 aa, Homo sapiens
  Heavy chain CDR3 for antibody 6536 (IGHV3-23)
AKETGNNY

SEQ ID NO: 13073 - protein, 9 aa, Homo sapiens
  Light chain CDR3 for antibody 6537 (IGKV1-17)
LQHNSYPYT

SEQ ID NO: 13074 - protein, 18 aa, Homo sapiens
  Heavy chain CDR3 for antibody 6537 (IGHV3-11)
ARDGYFSGWNYYYFGMDV

SEQ ID NO: 13075 - protein, 10 aa, Homo sapiens
  Light chain CDR3 for antibody 6538 (IGKV3-11)
QQRSTWPTLT

SEQ ID NO: 13076 - protein, 12 aa, Homo sapiens
  Heavy chain CDR3 for antibody 6538 (IGHV3-33)
ARDLVGATPFDY

SEQ ID NO: 13077 - protein, 8 aa, Homo sapiens
  Light chain CDR3 for antibody 6539 (IGKV3-20)
QQYGSSLT

SEQ ID NO: 13078 - protein, 18 aa, Homo sapiens
  Heavy chain CDR3 for antibody 6539 (IGHV1-46)
ARDGDYVWGSYRSDWFDP

SEQ ID NO: 13079 - protein, 9 aa, Homo sapiens
  Light chain CDR3 for antibody 6540 (IGKV1-39)
QQSYRTPLT

SEQ ID NO: 13080 - protein, 14 aa, Homo sapiens
  Heavy chain CDR3 for antibody 6540 (IGHV4-39)
ARDSGYDYYYAMDV

SEQ ID NO: 13081 - protein, 9 aa, Homo sapiens
  Light chain CDR3 for antibody 6541 (IGKV1-6)
LQDFHYPWT

SEQ ID NO: 13082 - protein, 15 aa, Homo sapiens
  Heavy chain CDR3 for antibody 6541 (IGHV3-20)
ARDRGSSGWRDWFDP

SEQ ID NO: 13083 - protein, 9 aa, Homo sapiens
  Light chain CDR3 for antibody 6542 (IGKV2-30)
MQGTHWPLT

SEQ ID NO: 13084 - protein, 16 aa, Homo sapiens
  Heavy chain CDR3 for antibody 6542 (IGHV3-20)
AREGYSSSWFDRNFDY

SEQ ID NO: 13085 - protein, 10 aa, Homo sapiens
  Light chain CDR3 for antibody 6543 (IGKV3-15)
QQYNNWPPLT

SEQ ID NO: 13086 - protein, 8 aa, Homo sapiens
  Heavy chain CDR3 for antibody 6543 (IGHV3-23)
EKSAGEDV

SEQ ID NO: 13087 - protein, 8 aa, Homo sapiens
  Light chain CDR3 for antibody 6544 (IGKV1-5)
QQYNSYYT

SEQ ID NO: 13088 - protein, 12 aa, Homo sapiens
  Heavy chain CDR3 for antibody 6544 (IGHV4-39)
ARHGSGSSYFDY

SEQ ID NO: 13089 - protein, 10 aa, Homo sapiens
  Light chain CDR3 for antibody 6545 (IGKV3-20)
QQYGSSPPYT

SEQ ID NO: 13090 - protein, 18 aa, Homo sapiens
  Heavy chain CDR3 for antibody 6545 (IGHV3-23)
AKDRITGTTYGYYSGLDV

SEQ ID NO: 13091 - protein, 11 aa, Homo sapiens
  Light chain CDR3 for antibody 6546 (IGKV3-11)
QQRSNWPPTWT

SEQ ID NO: 13092 - protein, 18 aa, Homo sapiens
  Heavy chain CDR3 for antibody 6546 (IGHV1-46)
ARDLTGRTENYYYYGMDV

SEQ ID NO: 13093 - protein, 10 aa, Homo sapiens
  Light chain CDR3 for antibody 6547 (IGKV3-15)
QQYNNWPPYT

SEQ ID NO: 13094 - protein, 14 aa, Homo sapiens
  Heavy chain CDR3 for antibody 6547 (IGHV3-33)
VRDAMGATTAWFDP

SEQ ID NO: 13095 - protein, 10 aa, Homo sapiens
  Light chain CDR3 for antibody 6548 (IGKV3-11)
QQRSNWPTWT

SEQ ID NO: 13096 - protein, 15 aa, Homo sapiens
  Heavy chain CDR3 for antibody 6548 (IGHV3-33)
ARDRVVRGVMGYFDY

SEQ ID NO: 13097 - protein, 9 aa, Homo sapiens
  Light chain CDR3 for antibody 6549 (IGKV1-37)
QRTSNAPYT

SEQ ID NO: 13098 - protein, 13 aa, Homo sapiens
  Heavy chain CDR3 for antibody 6549 (IGHV3-33)
ARDYCGGDCYLDY

SEQ ID NO: 13099 - protein, 9 aa, Homo sapiens
  Light chain CDR3 for antibody 6550 (IGKV3-20)
QHYGSSPYT

SEQ ID NO: 13100 - protein, 16 aa, Homo sapiens
  Heavy chain CDR3 for antibody 6550 (IGHV3-20)
ARDSSSLDYYYYGMDV

SEQ ID NO: 13101 - protein, 8 aa, Homo sapiens
  Light chain CDR3 for antibody 6551 (IGKV1-5)
QQYNSYWT

SEQ ID NO: 13102 - protein, 11 aa, Homo sapiens
  Heavy chain CDR3 for antibody 6551 (IGHV3-33)
ARARYTTGLDY

SEQ ID NO: 13103 - protein, 9 aa, Homo sapiens
  Light chain CDR3 for antibody 6552 (IGKV1-9)
QQLNTYPWT

SEQ ID NO: 13104 - protein, 16 aa, Homo sapiens
  Heavy chain CDR3 for antibody 6552 (IGHV3-33)
ARDNFGSGSYYSHFHY

SEQ ID NO: 13105 - protein, 9 aa, Homo sapiens
  Light chain CDR3 for antibody 6553 (IGKV5-2)
LQHDNFPWT

SEQ ID NO: 13106 - protein, 9 aa, Homo sapiens
  Heavy chain CDR3 for antibody 6553 (IGHV3-30)
ARDDYGVDV

SEQ ID NO: 13107 - protein, 9 aa, Homo sapiens
  Light chain CDR3 for antibody 6554 (IGKV1-39)
QQSYSTPLT

SEQ ID NO: 13108 - protein, 12 aa, Homo sapiens
  Heavy chain CDR3 for antibody 6554 (IGHV3-21)
ARDGYSSRNFDY

SEQ ID NO: 13109 - protein, 9 aa, Homo sapiens
  Light chain CDR3 for antibody 6555 (IGKV3D-20)
QQYGSSPRT

SEQ ID NO: 13110 - protein, 18 aa, Homo sapiens
  Heavy chain CDR3 for antibody 6555 (IGHV3-23)
AKEGDYYGSGSSWGYFDP

SEQ ID NO: 13111 - protein, 9 aa, Homo sapiens
  Light chain CDR3 for antibody 6556 (IGKV1-27)
QKYNSAPYT

SEQ ID NO: 13112 - protein, 12 aa, Homo sapiens
  Heavy chain CDR3 for antibody 6556 (IGHV4-39)
ARQMVREGWFDP

SEQ ID NO: 13113 - protein, 9 aa, Homo sapiens
  Light chain CDR3 for antibody 6557 (IGKV1-39)
QQSYSTPLT

SEQ ID NO: 13114 - protein, 18 aa, Homo sapiens
  Heavy chain CDR3 for antibody 6557 (IGHV4-59)
ARDNHYYSSGTYSNWFDP

SEQ ID NO: 13115 - protein, 9 aa, Homo sapiens
  Light chain CDR3 for antibody 6558 (IGKV1-39)
QQSYRTPLT

SEQ ID NO: 13116 - protein, 10 aa, Homo sapiens
  Heavy chain CDR3 for antibody 6558 (IGHV3-23)
AKENWNDFDY

SEQ ID NO: 13117 - protein, 9 aa, Homo sapiens
  Light chain CDR3 for antibody 6559 (IGKV3-15)
QQYNNWPRT

SEQ ID NO: 13118 - protein, 12 aa, Homo sapiens
  Heavy chain CDR3 for antibody 6559 (IGHV3-33)
ARDSSGWSHFDY

SEQ ID NO: 13119 - protein, 10 aa, Homo sapiens
  Light chain CDR3 for antibody 6560 (IGKV1-39)
QQSYSTPMYT

SEQ ID NO: 13120 - protein, 12 aa, Homo sapiens
  Heavy chain CDR3 for antibody 6560 (IGHV3-33)
ARDGYSSRNFDY

SEQ ID NO: 13121 - protein, 8 aa, Homo sapiens
  Light chain CDR3 for antibody 6561 (IGKV3-15)
QQYNNWPT

SEQ ID NO: 13122 - protein, 17 aa, Homo sapiens
  Heavy chain CDR3 for antibody 6561 (IGHV4-59)
ARDFLVRGEGSYYGMDV

SEQ ID NO: 13123 - protein, 10 aa, Homo sapiens
  Light chain CDR3 for antibody 6562 (IGKV3-11)
QQRSNWPIFT

SEQ ID NO: 13124 - protein, 20 aa, Homo sapiens
  Heavy chain CDR3 for antibody 6562 (IGHV3-23)
AKDREMAATSHYYYYYGMDV

SEQ ID NO: 13125 - protein, 9 aa, Homo sapiens
  Light chain CDR3 for antibody 6563 (IGKV1-17)
LQHNSFPLT

SEQ ID NO: 13126 - protein, 14 aa, Homo sapiens
  Heavy chain CDR3 for antibody 6563 (IGHV3-33)
ARAISGSSYWYFDL

SEQ ID NO: 13127 - protein, 9 aa, Homo sapiens
  Light chain CDR3 for antibody 6564 (IGKV1D-16)
QQYSSYPYT

SEQ ID NO: 13128 - protein, 18 aa, Homo sapiens
  Heavy chain CDR3 for antibody 6564 (IGHV3-33)
ARGAYSSGWDYYYYGLDV

SEQ ID NO: 13129 - protein, 9 aa, Homo sapiens
  Light chain CDR3 for antibody 6565 (IGKV3-11)
QQRSSWPPT

SEQ ID NO: 13130 - protein, 17 aa, Homo sapiens
  Heavy chain CDR3 for antibody 6565 (IGHV3-23)
AKEYCSGGSCYVYYFDY

SEQ ID NO: 13131 - protein, 11 aa, Homo sapiens
  Light chain CDR3 for antibody 6566 (IGKV3-11)
QQRSNWPPTWT

SEQ ID NO: 13132 - protein, 15 aa, Homo sapiens
  Heavy chain CDR3 for antibody 6566 (IGHV4-39)
ARHSGYSSGWYPFDY

SEQ ID NO: 13133 - protein, 10 aa, Homo sapiens
  Light chain CDR3 for antibody 6567 (IGKV3-11)
QQRSNWPIFT

SEQ ID NO: 13134 - protein, 13 aa, Homo sapiens
  Heavy chain CDR3 for antibody 6567 (IGHV3-33)
ARIDYYSYYGMDV

SEQ ID NO: 13135 - protein, 9 aa, Homo sapiens
  Light chain CDR3 for antibody 6568 (IGKV1-39)
QQSYSSPFT

SEQ ID NO: 13136 - protein, 12 aa, Homo sapiens
  Heavy chain CDR3 for antibody 6568 (IGHV1-18)
ARILFYGDYFDY

SEQ ID NO: 13137 - protein, 8 aa, Homo sapiens
  Light chain CDR3 for antibody 6569 (IGKV3D-7)
QQDYNLVT

SEQ ID NO: 13138 - protein, 21 aa, Homo sapiens
  Heavy chain CDR3 for antibody 6569 (IGHV4-59)
AAGVLLWFGEPNYYYYYGMDV

SEQ ID NO: 13139 - protein, 9 aa, Homo sapiens
  Light chain CDR3 for antibody 6570 (IGKV1-27)
QKYNSAPYT

SEQ ID NO: 13140 - protein, 18 aa, Homo sapiens
  Heavy chain CDR3 for antibody 6570 (IGHV3-33)
AREGSYYGSGSFPNWFDP

SEQ ID NO: 13141 - protein, 8 aa, Homo sapiens
  Light chain CDR3 for antibody 6571 (IGKV3D-7)
QQDYNLLT

SEQ ID NO: 13142 - protein, 10 aa, Homo sapiens
  Heavy chain CDR3 for antibody 6571 (IGHV3-33)
ARDLGWSFDH

SEQ ID NO: 13143 - protein, 9 aa, Homo sapiens
  Light chain CDR3 for antibody 6572 (IGKV3D-20)
QQFGSLPLT

SEQ ID NO: 13144 - protein, 13 aa, Homo sapiens
  Heavy chain CDR3 for antibody 6572 (IGHV4-59)
ARDAGYSSSWFDY

SEQ ID NO: 13145 - protein, 11 aa, Homo sapiens
  Light chain CDR3 for antibody 6573 (IGKV3-11)
QQRSNWPPTWT

SEQ ID NO: 13146 - protein, 13 aa, Homo sapiens
  Heavy chain CDR3 for antibody 6573 (IGHV4-39)
ARRDGSYYGYFDY

SEQ ID NO: 13147 - protein, 9 aa, Homo sapiens
  Light chain CDR3 for antibody 6574 (IGKV3D-20)
QQYGYSPLT

SEQ ID NO: 13148 - protein, 17 aa, Homo sapiens
  Heavy chain CDR3 for antibody 6574 (IGHV1-24)
ATEGYDILPGYYNVLDY

SEQ ID NO: 13149 - protein, 9 aa, Homo sapiens
  Light chain CDR3 for antibody 6575 (IGKV2D-24)
TQATQFPHT

SEQ ID NO: 13150 - protein, 17 aa, Homo sapiens
  Heavy chain CDR3 for antibody 6575 (IGHV1-18)
ARERYYGSGIYKYAMDV

SEQ ID NO: 13151 - protein, 6 aa, Homo sapiens
  Light chain CDR3 for antibody 6576 (IGKV3-20)
QQYGST

SEQ ID NO: 13152 - protein, 12 aa, Homo sapiens
  Heavy chain CDR3 for antibody 6576 (IGHV1-18)
ARILFYGDYFDY

SEQ ID NO: 13153 - protein, 9 aa, Homo sapiens
  Light chain CDR3 for antibody 6577 (IGKV1-6)
LQDYNYPWT

SEQ ID NO: 13154 - protein, 12 aa, Homo sapiens
  Heavy chain CDR3 for antibody 6577 (IGHV1-46)
ARGLIGDHAVDI

SEQ ID NO: 13155 - protein, 11 aa, Homo sapiens
  Light chain CDR3 for antibody 6578 (IGKV3-11)
QQRSNWPPTWT

SEQ ID NO: 13156 - protein, 17 aa, Homo sapiens
  Heavy chain CDR3 for antibody 6578 (IGHV4-59)
ARDRELLWFGEFGGMDV

SEQ ID NO: 13157 - protein, 9 aa, Homo sapiens
  Light chain CDR3 for antibody 6579 (IGKV1-6)
LQDYNYPYT

SEQ ID NO: 13158 - protein, 8 aa, Homo sapiens
  Heavy chain CDR3 for antibody 6579 (IGHV4-4)
ARGARFDP

SEQ ID NO: 13159 - protein, 9 aa, Homo sapiens
  Light chain CDR3 for antibody 6580 (IGKV1D-13)
QQFNNYPYT

SEQ ID NO: 13160 - protein, 13 aa, Homo sapiens
  Heavy chain CDR3 for antibody 6580 (IGHV3-15)
TTDRLLLFGAFDY

SEQ ID NO: 13161 - protein, 9 aa, Homo sapiens
  Light chain CDR3 for antibody 6581 (IGKV3D-7)
QQDYNLPLT

SEQ ID NO: 13162 - protein, 17 aa, Homo sapiens
  Heavy chain CDR3 for antibody 6581 (IGHV1-8)
ARGDYYGSGSPYWYFDL

SEQ ID NO: 13163 - protein, 8 aa, Homo sapiens
  Light chain CDR3 for antibody 6582 (IGKV3D-7)
QQDYNLLT

SEQ ID NO: 13164 - protein, 11 aa, Homo sapiens
  Heavy chain CDR3 for antibody 6582 (IGHV3-33)
ARAGIAALFDY

SEQ ID NO: 13165 - protein, 9 aa, Homo sapiens
  Light chain CDR3 for antibody 6583 (IGKV1-33)
QQYDNLPFT

SEQ ID NO: 13166 - protein, 15 aa, Homo sapiens
  Heavy chain CDR3 for antibody 6583 (IGHV3-33)
ARRICSGGSCSLFDY

SEQ ID NO: 13167 - protein, 8 aa, Homo sapiens
  Light chain CDR3 for antibody 6584 (IGKV3-20)
QQYGRSFT

SEQ ID NO: 13168 - protein, 16 aa, Homo sapiens
  Heavy chain CDR3 for antibody 6584 (IGHV1-24)
ATEDSSSTYYYYGLDV

SEQ ID NO: 13169 - protein, 9 aa, Homo sapiens
  Light chain CDR3 for antibody 6585 (IGKV1-6)
LQDFHYPWT

SEQ ID NO: 13170 - protein, 9 aa, Homo sapiens
  Heavy chain CDR3 for antibody 6585 (IGHV3-13)
ARDHWYFDL

SEQ ID NO: 13171 - protein, 9 aa, Homo sapiens
  Light chain CDR3 for antibody 6586 (IGKV1-27)
QKYNSAPYT

SEQ ID NO: 13172 - protein, 14 aa, Homo sapiens
  Heavy chain CDR3 for antibody 6586 (IGHV3-20)
ARDGGSTSFDWFDP

SEQ ID NO: 13173 - protein, 10 aa, Homo sapiens
  Light chain CDR3 for antibody 6587 (IGKV3-11)
QQRSNWPIFT

SEQ ID NO: 13174 - protein, 14 aa, Homo sapiens
  Heavy chain CDR3 for antibody 6587 (IGHV4-39)
ARRGVVVPPGGMDV

SEQ ID NO: 13175 - protein, 9 aa, Homo sapiens
  Light chain CDR3 for antibody 6588 (IGKV1D-16)
QQYYSYPRT

SEQ ID NO: 13176 - protein, 13 aa, Homo sapiens
  Heavy chain CDR3 for antibody 6588 (IGHV3-33)
ARRYSSGWYPFDY

SEQ ID NO: 13177 - protein, 9 aa, Homo sapiens
  Light chain CDR3 for antibody 6589 (IGKV1-9)
QQLKSYLYT

SEQ ID NO: 13178 - protein, 14 aa, Homo sapiens
  Heavy chain CDR3 for antibody 6589 (IGHV3-33)
ARATSGSSYWYFDL

SEQ ID NO: 13179 - protein, 9 aa, Homo sapiens
  Light chain CDR3 for antibody 6590 (IGKV1-6)
LQDYKSPFT

SEQ ID NO: 13180 - protein, 9 aa, Homo sapiens
  Heavy chain CDR3 for antibody 6590 (IGHV1-18)
ARGKDWFDP

SEQ ID NO: 13181 - protein, 9 aa, Homo sapiens
  Light chain CDR3 for antibody 6591 (IGKV3D-7)
QQDYELPLT

SEQ ID NO: 13182 - protein, 22 aa, Homo sapiens
  Heavy chain CDR3 for antibody 6591 (IGHV4-59)
AREINYGSGSYYNEDYYYGMDV

SEQ ID NO: 13183 - protein, 8 aa, Homo sapiens
  Light chain CDR3 for antibody 6592 (IGKV1D-13)
QQFNNYPT

SEQ ID NO: 13184 - protein, 14 aa, Homo sapiens
  Heavy chain CDR3 for antibody 6592 (IGHV3-20)
ARDGGSTSFDWFDP

SEQ ID NO: 13185 - protein, 8 aa, Homo sapiens
  Light chain CDR3 for antibody 6593 (IGKV3-20)
QQYGSSLT

SEQ ID NO: 13186 - protein, 13 aa, Homo sapiens
  Heavy chain CDR3 for antibody 6593 (IGHV1-46)
ARVKLGSLGAFDI

SEQ ID NO: 13187 - protein, 8 aa, Homo sapiens
  Light chain CDR3 for antibody 6594 (IGKV1D-13)
QQYNNYPT

SEQ ID NO: 13188 - protein, 13 aa, Homo sapiens
  Heavy chain CDR3 for antibody 6594 (IGHV3-11)
ARDEGYRGYVLDT

SEQ ID NO: 13189 - protein, 9 aa, Homo sapiens
  Light chain CDR3 for antibody 6595 (IGKV1-17)
LQHNSYPPT

SEQ ID NO: 13190 - protein, 17 aa, Homo sapiens
  Heavy chain CDR3 for antibody 6595 (IGHV3-23)
SKERNWNDGYYYFGMDA

SEQ ID NO: 13191 - protein, 9 aa, Homo sapiens
  Light chain CDR3 for antibody 6596 (IGKV3-15)
QQYNNWPRT

SEQ ID NO: 13192 - protein, 13 aa, Homo sapiens
  Heavy chain CDR3 for antibody 6596 (IGHV3-23)
ASPFNWNDGFFDY

SEQ ID NO: 13193 - protein, 9 aa, Homo sapiens
  Light chain CDR3 for antibody 6597 (IGKV4-1)
QQYYTTPPT

SEQ ID NO: 13194 - protein, 12 aa, Homo sapiens
  Heavy chain CDR3 for antibody 6597 (IGHV3-33)
ARDLVGATPFDY

SEQ ID NO: 13195 - protein, 9 aa, Homo sapiens
  Light chain CDR3 for antibody 6598 (IGKV1-6)
LQDYNYPYT

SEQ ID NO: 13196 - protein, 18 aa, Homo sapiens
  Heavy chain CDR3 for antibody 6598 (IGHV1-18)
ARDRYSSGWSDYYFGMDV

SEQ ID NO: 13197 - protein, 9 aa, Homo sapiens
  Light chain CDR3 for antibody 6599 (IGKV1D-16)
QQYNNWPLT

SEQ ID NO: 13198 - protein, 13 aa, Homo sapiens
  Heavy chain CDR3 for antibody 6599 (IGHV4-39)
ARRGVVAPAAFDY

SEQ ID NO: 13199 - protein, 10 aa, Homo sapiens
  Light chain CDR3 for antibody 6600 (IGKV1-9)
QQLDSYPMYT

SEQ ID NO: 13200 - protein, 13 aa, Homo sapiens
  Heavy chain CDR3 for antibody 6600 (IGHV3-33)
ARDYCGGDCYLDY

SEQ ID NO: 13201 - protein, 9 aa, Homo sapiens
  Light chain CDR3 for antibody 6601 (IGKV3-11)
QQRSNWMYT

SEQ ID NO: 13202 - protein, 16 aa, Homo sapiens
  Heavy chain CDR3 for antibody 6601 (IGHV3-23)
AKDLRYFDWSLYAFDI

SEQ ID NO: 13203 - protein, 9 aa, Homo sapiens
  Light chain CDR3 for antibody 6602 (IGKV2-30)
MQGTHWPLT

SEQ ID NO: 13204 - protein, 23 aa, Homo sapiens
  Heavy chain CDR3 for antibody 6602 (IGHV3-11)
ARDEGVTMVRGVISYYYYYGMDV

SEQ ID NO: 13205 - protein, 10 aa, Homo sapiens
  Light chain CDR3 for antibody 6603 (IGKV3-11)
QQRSNWPIFT

SEQ ID NO: 13206 - protein, 14 aa, Homo sapiens
  Heavy chain CDR3 for antibody 6603 (IGHV3-33)
ARDAYDILTGYYDY

SEQ ID NO: 13207 - protein, 9 aa, Homo sapiens
  Light chain CDR3 for antibody 6604 (IGKV1D-16)
QQYNSYPFT

SEQ ID NO: 13208 - protein, 16 aa, Homo sapiens
  Heavy chain CDR3 for antibody 6604 (IGHV4-39)
ARDTPCYSGSGRPFDY

SEQ ID NO: 13209 - protein, 9 aa, Homo sapiens
  Light chain CDR3 for antibody 6605 (IGKV1-6)
LQDYNYPRT

SEQ ID NO: 13210 - protein, 11 aa, Homo sapiens
  Heavy chain CDR3 for antibody 6605 (IGHV3-33)
ARGSGNYAFDY

SEQ ID NO: 13211 - protein, 9 aa, Homo sapiens
  Light chain CDR3 for antibody 6606 (IGKV3-11)
QQRSNWPYT

SEQ ID NO: 13212 - protein, 11 aa, Homo sapiens
  Heavy chain CDR3 for antibody 6606 (IGHV3-33)
ARDRATATVDY

SEQ ID NO: 13213 - protein, 9 aa, Homo sapiens
  Light chain CDR3 for antibody 6607 (IGKV2-30)
MQGTHWPLT

SEQ ID NO: 13214 - protein, 17 aa, Homo sapiens
  Heavy chain CDR3 for antibody 6607 (IGHV3-33)
ARCGYSSSWYDPYYFDY

SEQ ID NO: 13215 - protein, 9 aa, Homo sapiens
  Light chain CDR3 for antibody 6608 (IGKV1-27)
QKYNSAPYT

SEQ ID NO: 13216 - protein, 11 aa, Homo sapiens
  Heavy chain CDR3 for antibody 6608 (IGHV3-33)
ARASRGSYYDY

SEQ ID NO: 13217 - protein, 9 aa, Homo sapiens
  Light chain CDR3 for antibody 6609 (IGKV1-33)
QQYDNLPFT

SEQ ID NO: 13218 - protein, 18 aa, Homo sapiens
  Heavy chain CDR3 for antibody 6609 (IGHV3-33)
ARDRYYDILTGYYMGFDY

SEQ ID NO: 13219 - protein, 8 aa, Homo sapiens
  Light chain CDR3 for antibody 6610 (IGKV3-11)
QQRSNWLT

SEQ ID NO: 13220 - protein, 17 aa, Homo sapiens
  Heavy chain CDR3 for antibody 6610 (IGHV1-18)
ARERYYGSGIYKYAMDV

SEQ ID NO: 13221 - protein, 10 aa, Homo sapiens
  Light chain CDR3 for antibody 6611 (IGKV3-11)
QQRSNWPIFT

SEQ ID NO: 13222 - protein, 15 aa, Homo sapiens
  Heavy chain CDR3 for antibody 6611 (IGHV3-23)
AKDRDYDFLSGPFDY

SEQ ID NO: 13223 - protein, 9 aa, Homo sapiens
  Light chain CDR3 for antibody 6612 (IGKV3-20)
QQYGSSPRT

SEQ ID NO: 13224 - protein, 17 aa, Homo sapiens
  Heavy chain CDR3 for antibody 6612 (IGHV1-24)
ATEDSSSTYYYYYGMDV

SEQ ID NO: 13225 - protein, 8 aa, Homo sapiens
  Light chain CDR3 for antibody 6613 (IGKV6-21)
HQSSSLYT

SEQ ID NO: 13226 - protein, 12 aa, Homo sapiens
  Heavy chain CDR3 for antibody 6613 (IGHV1-46)
ARGLTGDHAVDI

SEQ ID NO: 13227 - protein, 9 aa, Homo sapiens
  Light chain CDR3 for antibody 6614 (IGKV1-17)
LQHNSYPWT

SEQ ID NO: 13228 - protein, 22 aa, Homo sapiens
  Heavy chain CDR3 for antibody 6614 (IGHV3-48)
ARDFPLYYDILTGYPYYHGMDV

SEQ ID NO: 13229 - protein, 9 aa, Homo sapiens
  Light chain CDR3 for antibody 6615 (IGKV1-33)
QQYDNLPFT

SEQ ID NO: 13230 - protein, 7 aa, Homo sapiens
  Heavy chain CDR3 for antibody 6615 (IGHV3-33)
ARELVDY

SEQ ID NO: 13231 - protein, 9 aa, Homo sapiens
  Light chain CDR3 for antibody 6616 (IGKV6-21)
HQSSSLPYT

SEQ ID NO: 13232 - protein, 15 aa, Homo sapiens
  Heavy chain CDR3 for antibody 6616 (IGHV3-23)
ARDALAVTGTGWFDP

SEQ ID NO: 13233 - protein, 10 aa, Homo sapiens
  Light chain CDR3 for antibody 6617 (IGKV3-11)
QQRSNWPIFT

SEQ ID NO: 13234 - protein, 10 aa, Homo sapiens
  Heavy chain CDR3 for antibody 6617 (IGHV3-64)
ARDGLESFDY

SEQ ID NO: 13235 - protein, 9 aa, Homo sapiens
  Light chain CDR3 for antibody 6618 (IGKV4-1)
QQYYSTPWT

SEQ ID NO: 13236 - protein, 13 aa, Homo sapiens
  Heavy chain CDR3 for antibody 6618 (IGHV3-33)
ARVDTMVRGVMAY

SEQ ID NO: 13237 - protein, 9 aa, Homo sapiens
  Light chain CDR3 for antibody 6619 (IGKV1D-16)
QQYNSYPPT

SEQ ID NO: 13238 - protein, 13 aa, Homo sapiens
  Heavy chain CDR3 for antibody 6619 (IGHV4-59)
ARDAGYSSGWFDY

SEQ ID NO: 13239 - protein, 10 aa, Homo sapiens
  Light chain CDR3 for antibody 6620 (IGKV1-39)
QQSYSTPMYT

SEQ ID NO: 13240 - protein, 14 aa, Homo sapiens
  Heavy chain CDR3 for antibody 6620 (IGHV3-33)
ARAGSGYDRDWFDP

SEQ ID NO: 13241 - protein, 9 aa, Homo sapiens
  Light chain CDR3 for antibody 6621 (IGKV2-30)
MQGTHWPLT

SEQ ID NO: 13242 - protein, 15 aa, Homo sapiens
  Heavy chain CDR3 for antibody 6621 (IGHV3-74)
ARGSGSHYHYYGMDV

SEQ ID NO: 13243 - protein, 9 aa, Homo sapiens
  Light chain CDR3 for antibody 6622 (IGKV5-2)
LQHDNFPYT

SEQ ID NO: 13244 - protein, 17 aa, Homo sapiens
  Heavy chain CDR3 for antibody 6622 (IGHV3-23)
AREGYYDILTDYYGMDV

SEQ ID NO: 13245 - protein, 8 aa, Homo sapiens
  Light chain CDR3 for antibody 6623 (IGKV1D-13)
QQFNNYPT

SEQ ID NO: 13246 - protein, 10 aa, Homo sapiens
  Heavy chain CDR3 for antibody 6623 (IGHV3-23)
AKEQWLVLDY

SEQ ID NO: 13247 - protein, 8 aa, Homo sapiens
  Light chain CDR3 for antibody 6624 (IGKV1D-13)
QQFNNYYT

SEQ ID NO: 13248 - protein, 15 aa, Homo sapiens
  Heavy chain CDR3 for antibody 6624 (IGHV3-33)
AKDRNSGYDWGGFDY

SEQ ID NO: 13249 - protein, 11 aa, Homo sapiens
  Light chain CDR3 for antibody 6625 (IGKV3-11)
QQRSNWPPTWT

SEQ ID NO: 13250 - protein, 13 aa, Homo sapiens
  Heavy chain CDR3 for antibody 6625 (IGHV3-33)
ASGYSGYDWYFDL

SEQ ID NO: 13251 - protein, 8 aa, Homo sapiens
  Light chain CDR3 for antibody 6626 (IGKV1-5)
QQYNSYWT

SEQ ID NO: 13252 - protein, 20 aa, Homo sapiens
  Heavy chain CDR3 for antibody 6626 (IGHV3-33)
SRGGATLVRGVIDYYYGMDV

SEQ ID NO: 13253 - protein, 10 aa, Homo sapiens
  Light chain CDR3 for antibody 6627 (IGKV3-11)
QQRSNWPIFT

SEQ ID NO: 13254 - protein, 16 aa, Homo sapiens
  Heavy chain CDR3 for antibody 6627 (IGHV3-33)
ARDNFGSGSYYSHFHY

SEQ ID NO: 13255 - protein, 9 aa, Homo sapiens
  Light chain CDR3 for antibody 6628 (IGKV3D-7)
QQDYNLPYT

SEQ ID NO: 13256 - protein, 10 aa, Homo sapiens
  Heavy chain CDR3 for antibody 6628 (IGHV3-74)
ARDGSGSYPI

SEQ ID NO: 13257 - protein, 10 aa, Homo sapiens
  Light chain CDR3 for antibody 6629 (IGKV3-11)
QQRSNWPMYT

SEQ ID NO: 13258 - protein, 12 aa, Homo sapiens
  Heavy chain CDR3 for antibody 6629 (IGHV3-33)
AREKGGSYSFDY

SEQ ID NO: 13259 - protein, 9 aa, Homo sapiens
  Light chain CDR3 for antibody 6630 (IGKV1-9)
QQVKSYPYT

SEQ ID NO: 13260 - protein, 11 aa, Homo sapiens
  Heavy chain CDR3 for antibody 6630 (IGHV4-59)
ARSLRYSFFDY

SEQ ID NO: 13261 - protein, 9 aa, Homo sapiens
  Light chain CDR3 for antibody 6631 (IGKV1-6)
LQDYNYPYT

SEQ ID NO: 13262 - protein, 14 aa, Homo sapiens
  Heavy chain CDR3 for antibody 6631 (IGHV4-59)
AREGHYYGSVSIDY

SEQ ID NO: 13263 - protein, 9 aa, Homo sapiens
  Light chain CDR3 for antibody 6632 (IGKV1-39)
QQSYRTPLT

SEQ ID NO: 13264 - protein, 11 aa, Homo sapiens
  Heavy chain CDR3 for antibody 6632 (IGHV3-23)
AKAGIVGCLDV

SEQ ID NO: 13265 - protein, 9 aa, Homo sapiens
  Light chain CDR3 for antibody 6633 (IGKV1D-13)
QQFNNYPHT

SEQ ID NO: 13266 - protein, 18 aa, Homo sapiens
  Heavy chain CDR3 for antibody 6633 (IGHV3-33)
ARRTAAGTGDYYYYGMDV

SEQ ID NO: 13267 - protein, 9 aa, Homo sapiens
  Light chain CDR3 for antibody 6634 (IGKV1-27)
QKYNSAPYT

SEQ ID NO: 13268 - protein, 17 aa, Homo sapiens
  Heavy chain CDR3 for antibody 6634 (IGHV3-33)
TRDSGMVRGIIIYGMDV

SEQ ID NO: 13269 - protein, 9 aa, Homo sapiens
  Light chain CDR3 for antibody 6635 (IGKV1-9)
QQLNSYPPL

SEQ ID NO: 13270 - protein, 11 aa, Homo sapiens
  Heavy chain CDR3 for antibody 6635 (IGHV3-53)
ARDLGPRGIDY

SEQ ID NO: 13271 - protein, 9 aa, Homo sapiens
  Light chain CDR3 for antibody 6636 (IGKV1-9)
QQLISYPLT

SEQ ID NO: 13272 - protein, 18 aa, Homo sapiens
  Heavy chain CDR3 for antibody 6636 (IGHV1-46)
ARDGDYVWGSYRSDWFDP

SEQ ID NO: 13273 - protein, 9 aa, Homo sapiens
  Light chain CDR3 for antibody 6637 (IGKV3-15)
QQYNNWPRT

SEQ ID NO: 13274 - protein, 13 aa, Homo sapiens
  Heavy chain CDR3 for antibody 6637 (IGHV1-18)
ARSITMVRGVIGY

SEQ ID NO: 13275 - protein, 9 aa, Homo sapiens
  Light chain CDR3 for antibody 6638 (IGKV1-16)
QHYNDYPFT

SEQ ID NO: 13276 - protein, 9 aa, Homo sapiens
  Heavy chain CDR3 for antibody 6638 (IGHV3-30)
ARDNWGFDY

SEQ ID NO: 13277 - protein, 9 aa, Homo sapiens
  Light chain CDR3 for antibody 6639 (IGKV1-27)
QKYNSAPYT

SEQ ID NO: 13278 - protein, 19 aa, Homo sapiens
  Heavy chain CDR3 for antibody 6639 (IGHV3-33)
AREDYYGSGSYYNEDWFDP

SEQ ID NO: 13279 - protein, 9 aa, Homo sapiens
  Light chain CDR3 for antibody 6640 (IGKV3-11)
QQRINWPWT

SEQ ID NO: 13280 - protein, 17 aa, Homo sapiens
  Heavy chain CDR3 for antibody 6640 (IGHV4-39)
ARQGWYYGSGSSLLFDY

SEQ ID NO: 13281 - protein, 9 aa, Homo sapiens
  Light chain CDR3 for antibody 6641 (IGKV1-16)
QQYNRYPYT

SEQ ID NO: 13282 - protein, 9 aa, Homo sapiens
  Heavy chain CDR3 for antibody 6641 (IGHV4-59)
ARGGASFDY

SEQ ID NO: 13283 - protein, 9 aa, Homo sapiens
  Light chain CDR3 for antibody 6642 (IGKV5-2)
LQHDKFPYT

SEQ ID NO: 13284 - protein, 14 aa, Homo sapiens
  Heavy chain CDR3 for antibody 6642 (IGHV3-33)
ARTTAAAGPRDFRH

SEQ ID NO: 13285 - protein, 9 aa, Homo sapiens
  Light chain CDR3 for antibody 6643 (IGKV1-17)
QQYNSYPFT

SEQ ID NO: 13286 - protein, 13 aa, Homo sapiens
  Heavy chain CDR3 for antibody 6643 (IGHV4-34)
ASNFYDYYYGMDV

SEQ ID NO: 13287 - protein, 9 aa, Homo sapiens
  Light chain CDR3 for antibody 6644 (IGKV1-39)
QQSYSTPLT

SEQ ID NO: 13288 - protein, 14 aa, Homo sapiens
  Heavy chain CDR3 for antibody 6644 (IGHV3-20)
ARGGSSGWYDWFDP

SEQ ID NO: 13289 - protein, 9 aa, Homo sapiens
  Light chain CDR3 for antibody 6645 (IGKV1-9)
QQGNTYSRT

SEQ ID NO: 13290 - protein, 15 aa, Homo sapiens
  Heavy chain CDR3 for antibody 6645 (IGHV4-59)
ARDLGHYYGSVSIDY

SEQ ID NO: 13291 - protein, 9 aa, Homo sapiens
  Light chain CDR3 for antibody 6646 (IGKV1-17)
QQLKSYPYT

SEQ ID NO: 13292 - protein, 8 aa, Homo sapiens
  Heavy chain CDR3 for antibody 6646 (IGHV3-23)
AETFLFDY

SEQ ID NO: 13293 - protein, 10 aa, Homo sapiens
  Light chain CDR3 for antibody 6647 (IGKV1-6)
LQDYNYPMYT

SEQ ID NO: 13294 - protein, 13 aa, Homo sapiens
  Heavy chain CDR3 for antibody 6647 (IGHV3-33)
ARDYCGGDCYLDY

SEQ ID NO: 13295 - protein, 10 aa, Homo sapiens
  Light chain CDR3 for antibody 6648 (IGKV3-15)
QQYNNWPPYT

SEQ ID NO: 13296 - protein, 11 aa, Homo sapiens
  Heavy chain CDR3 for antibody 6648 (IGHV3-33)
AREAANWGFDY

SEQ ID NO: 13297 - protein, 8 aa, Homo sapiens
  Light chain CDR3 for antibody 6649 (IGKV3-15)
QQYNNWPT

SEQ ID NO: 13298 - protein, 12 aa, Homo sapiens
  Heavy chain CDR3 for antibody 6649 (IGHV3-33)
ARDPGYYYGLDV

SEQ ID NO: 13299 - protein, 9 aa, Homo sapiens
  Light chain CDR3 for antibody 6650 (IGKV2-30)
MQGTHWPLT

SEQ ID NO: 13300 - protein, 17 aa, Homo sapiens
  Heavy chain CDR3 for antibody 6650 (IGHV3-64)
ARERYYGSGSYYNWFDP

SEQ ID NO: 13301 - protein, 10 aa, Homo sapiens
  Light chain CDR3 for antibody 6651 (IGKV1-17)
LQHNSYPMYT

SEQ ID NO: 13302 - protein, 9 aa, Homo sapiens
  Heavy chain CDR3 for antibody 6651 (IGHV3-13)
ARDRWYFDL

SEQ ID NO: 13303 - protein, 9 aa, Homo sapiens
  Light chain CDR3 for antibody 6652 (IGKV1-9)
QQLNSYPYT

SEQ ID NO: 13304 - protein, 13 aa, Homo sapiens
  Heavy chain CDR3 for antibody 6652 (IGHV4-59)
ARGYYDIFGWFDP

SEQ ID NO: 13305 - protein, 9 aa, Homo sapiens
  Light chain CDR3 for antibody 6653 (IGKV6-21)
HQSSSLPLT

SEQ ID NO: 13306 - protein, 5 aa, Homo sapiens
  Heavy chain CDR3 for antibody 6653 (IGHV3-33)
ARDIL

SEQ ID NO: 13307 - protein, 8 aa, Homo sapiens
  Light chain CDR3 for antibody 6654 (IGKV3-11)
QQRSNWLT

SEQ ID NO: 13308 - protein, 13 aa, Homo sapiens
  Heavy chain CDR3 for antibody 6654 (IGHV1-46)
ARVKLGSLGAFDI

SEQ ID NO: 13309 - protein, 8 aa, Homo sapiens
  Light chain CDR3 for antibody 6655 (IGKV3D-7)
QQDYNLLT

SEQ ID NO: 13310 - protein, 17 aa, Homo sapiens
  Heavy chain CDR3 for antibody 6655 (IGHV4-39)
ARQGWYYGSGSSLLFDY

SEQ ID NO: 13311 - protein, 9 aa, Homo sapiens
  Light chain CDR3 for antibody 6656 (IGKV3D-7)
QQDYEFPIT

SEQ ID NO: 13312 - protein, 17 aa, Homo sapiens
  Heavy chain CDR3 for antibody 6656 (IGHV4-59)
ARDFLVRGEGSYYGMDV

SEQ ID NO: 13313 - protein, 9 aa, Homo sapiens
  Light chain CDR3 for antibody 6657 (IGKV1-6)
LQDYNYPWT

SEQ ID NO: 13314 - protein, 13 aa, Homo sapiens
  Heavy chain CDR3 for antibody 6657 (IGHV1-18)
ARVRITGTYAFDI

SEQ ID NO: 13315 - protein, 9 aa, Homo sapiens
  Light chain CDR3 for antibody 6658 (IGKV3-11)
QQRSNWPYT

SEQ ID NO: 13316 - protein, 12 aa, Homo sapiens
  Heavy chain CDR3 for antibody 6658 (IGHV3-33)
AKDPGWQQLAEY

SEQ ID NO: 13317 - protein, 9 aa, Homo sapiens
  Light chain CDR3 for antibody 6659 (IGKV1-17)
LQHNSYPPT

SEQ ID NO: 13318 - protein, 18 aa, Homo sapiens
  Heavy chain CDR3 for antibody 6659 (IGHV1-18)
ARDRGYYYGSGSYSPFDY

SEQ ID NO: 13319 - protein, 9 aa, Homo sapiens
  Light chain CDR3 for antibody 6660 (IGKV3-15)
QQYNNWPRT

SEQ ID NO: 13320 - protein, 18 aa, Homo sapiens
  Heavy chain CDR3 for antibody 6660 (IGHV3-33)
ARDRYYDILTGYYMGFDY

SEQ ID NO: 13321 - protein, 9 aa, Homo sapiens
  Light chain CDR3 for antibody 6661 (IGKV3-15)
QQYHNWPLT

SEQ ID NO: 13322 - protein, 17 aa, Homo sapiens
  Heavy chain CDR3 for antibody 6661 (IGHV3-33)
ARGEQWLGYYYYYGMDV

SEQ ID NO: 13323 - protein, 8 aa, Homo sapiens
  Light chain CDR3 for antibody 6662 (IGKV1D-13)
QQFNNYPT

SEQ ID NO: 13324 - protein, 14 aa, Homo sapiens
  Heavy chain CDR3 for antibody 6662 (IGHV3-33)
VRDAMGATTAWFDP

SEQ ID NO: 13325 - protein, 8 aa, Homo sapiens
  Light chain CDR3 for antibody 6663 (IGKV3-15)
QQYNNWPT

SEQ ID NO: 13326 - protein, 12 aa, Homo sapiens
  Heavy chain CDR3 for antibody 6663 (IGHV1-46)
ARGLTGDHAVDI

SEQ ID NO: 13327 - protein, 9 aa, Homo sapiens
  Light chain CDR3 for antibody 6664 (IGKV1-9)
QQLNSYPWT

SEQ ID NO: 13328 - protein, 15 aa, Homo sapiens
  Heavy chain CDR3 for antibody 6664 (IGHV3-33)
ARESRDPASYYGMDV

SEQ ID NO: 13329 - protein, 9 aa, Homo sapiens
  Light chain CDR3 for antibody 6665 (IGKV3-11)
QQRSNWPYT

SEQ ID NO: 13330 - protein, 12 aa, Homo sapiens
  Heavy chain CDR3 for antibody 6665 (IGHV3-33)
ARDGPVAGLFDY

SEQ ID NO: 13331 - protein, 9 aa, Homo sapiens
  Light chain CDR3 for antibody 6666 (IGKV1-6)
QQEYNYPLT

SEQ ID NO: 13332 - protein, 21 aa, Homo sapiens
  Heavy chain CDR3 for antibody 6666 (IGHV3-33)
ARKRLYDILTGYYKAYYGMDV

SEQ ID NO: 13333 - protein, 9 aa, Homo sapiens
  Light chain CDR3 for antibody 6667 (IGKV6-21)
HQSSSLPYT

SEQ ID NO: 13334 - protein, 12 aa, Homo sapiens
  Heavy chain CDR3 for antibody 6667 (IGHV1-18)
AGVLFDGDYSDY

SEQ ID NO: 13335 - protein, 9 aa, Homo sapiens
  Light chain CDR3 for antibody 6668 (IGKV1-17)
LQQNSYPYT

SEQ ID NO: 13336 - protein, 16 aa, Homo sapiens
  Heavy chain CDR3 for antibody 6668 (IGHV4-59)
AREPLRYFDWPDAFDI

SEQ ID NO: 13337 - protein, 9 aa, Homo sapiens
  Light chain CDR3 for antibody 6669 (IGKV3D-7)
QQDYEFPLT

SEQ ID NO: 13338 - protein, 13 aa, Homo sapiens
  Heavy chain CDR3 for antibody 6669 (IGHV4-39)
ARRDGSYYGYFGY

SEQ ID NO: 13339 - protein, 9 aa, Homo sapiens
  Light chain CDR3 for antibody 6670 (IGKV3-15)
QQYNNWPRT

SEQ ID NO: 13340 - protein, 13 aa, Homo sapiens
  Heavy chain CDR3 for antibody 6670 (IGHV3-33)
ARTDYYFYYGLDV

SEQ ID NO: 13341 - protein, 9 aa, Homo sapiens
  Light chain CDR3 for antibody 6671 (IGKV3D-20)
QQYGSSPLT

SEQ ID NO: 13342 - protein, 14 aa, Homo sapiens
  Heavy chain CDR3 for antibody 6671 (IGHV4-39)
ARHGYYGSSNWFDP

SEQ ID NO: 13343 - protein, 9 aa, Homo sapiens
  Light chain CDR3 for antibody 6672 (IGKV3-11)
QQRSNWPYT

SEQ ID NO: 13344 - protein, 16 aa, Homo sapiens
  Heavy chain CDR3 for antibody 6672 (IGHV4-59)
AGGSGSYRDYYYGMDV

SEQ ID NO: 13345 - protein, 9 aa, Homo sapiens
  Light chain CDR3 for antibody 6673 (IGKV3-11)
QQRINWPWT

SEQ ID NO: 13346 - protein, 17 aa, Homo sapiens
  Heavy chain CDR3 for antibody 6673 (IGHV4-34)
AGLRFFDWLFDYYGMDV

SEQ ID NO: 13347 - protein, 10 aa, Homo sapiens
  Light chain CDR3 for antibody 6674 (IGKV3-20)
QQYGRSPPVT

SEQ ID NO: 13348 - protein, 14 aa, Homo sapiens
  Heavy chain CDR3 for antibody 6674 (IGHV4-39)
ARQDYDILTGLFDY

SEQ ID NO: 13349 - protein, 9 aa, Homo sapiens
  Light chain CDR3 for antibody 6675 (IGKV3-20)
QQYGSSPLT

SEQ ID NO: 13350 - protein, 10 aa, Homo sapiens
  Heavy chain CDR3 for antibody 6675 (IGHV1-46)
AREWELLFDY

SEQ ID NO: 13351 - protein, 9 aa, Homo sapiens
  Light chain CDR3 for antibody 6676 (IGKV5-2)
LQHDKFPYT

SEQ ID NO: 13352 - protein, 15 aa, Homo sapiens
  Heavy chain CDR3 for antibody 6676 (IGHV3-64)
ARDSRPEITGPPFDY

SEQ ID NO: 13353 - protein, 9 aa, Homo sapiens
  Light chain CDR3 for antibody 6677 (IGKV1-17)
LQHNSYPYT

SEQ ID NO: 13354 - protein, 14 aa, Homo sapiens
  Heavy chain CDR3 for antibody 6677 (IGHV3-33)
ARDNILTGYYLFDY

SEQ ID NO: 13355 - protein, 9 aa, Homo sapiens
  Light chain CDR3 for antibody 6678 (IGKV5-2)
LQHDNFPWT

SEQ ID NO: 13356 - protein, 11 aa, Homo sapiens
  Heavy chain CDR3 for antibody 6678 (IGHV4-59)
ARESFYGSGNL

SEQ ID NO: 13357 - protein, 9 aa, Homo sapiens
  Light chain CDR3 for antibody 6679 (IGKV5-2)
LQHDNFPYT

SEQ ID NO: 13358 - protein, 15 aa, Homo sapiens
  Heavy chain CDR3 for antibody 6679 (IGHV4-34)
ARGGTGYYSYWYFDL

SEQ ID NO: 13359 - protein, 9 aa, Homo sapiens
  Light chain CDR3 for antibody 6680 (IGKV1-9)
QQLNSYPYT

SEQ ID NO: 13360 - protein, 15 aa, Homo sapiens
  Heavy chain CDR3 for antibody 6680 (IGHV3-33)
ARDTGYSSSWNWFDP

SEQ ID NO: 13361 - protein, 9 aa, Homo sapiens
  Light chain CDR3 for antibody 6681 (IGKV1-17)
LQHNSYPWT

SEQ ID NO: 13362 - protein, 16 aa, Homo sapiens
  Heavy chain CDR3 for antibody 6681 (IGHV3-33)
ARGYDMLTGDYHGMDV

SEQ ID NO: 13363 - protein, 8 aa, Homo sapiens
  Light chain CDR3 for antibody 6682 (IGKV1D-13)
QQFNNYPT

SEQ ID NO: 13364 - protein, 15 aa, Homo sapiens
  Heavy chain CDR3 for antibody 6682 (IGHV3-33)
ARRGYNDYDPYGMDV

SEQ ID NO: 13365 - protein, 9 aa, Homo sapiens
  Light chain CDR3 for antibody 6683 (IGKV1-39)
QQSYSTPLT

SEQ ID NO: 13366 - protein, 17 aa, Homo sapiens
  Heavy chain CDR3 for antibody 6683 (IGHV3-23)
AKDRDWKDGYYYFGMDV

SEQ ID NO: 13367 - protein, 9 aa, Homo sapiens
  Light chain CDR3 for antibody 6684 (IGKV1-9)
QQLISYPLT

SEQ ID NO: 13368 - protein, 18 aa, Homo sapiens
  Heavy chain CDR3 for antibody 6684 (IGHV3-33)
AREGSYYGSGSFPNWFDP

SEQ ID NO: 13369 - protein, 9 aa, Homo sapiens
  Light chain CDR3 for antibody 6685 (IGKV2-30)
MQGTHWPLT

SEQ ID NO: 13370 - protein, 15 aa, Homo sapiens
  Heavy chain CDR3 for antibody 6685 (IGHV3-23)
AKDGGWNYYYYGMDV

SEQ ID NO: 13371 - protein, 9 aa, Homo sapiens
  Light chain CDR3 for antibody 6686 (IGKV1-6)
LQDYKSPFT

SEQ ID NO: 13372 - protein, 18 aa, Homo sapiens
  Heavy chain CDR3 for antibody 6686 (IGHV1-8)
AREGAAAGSYYYYNGMDV

SEQ ID NO: 13373 - protein, 10 aa, Homo sapiens
  Light chain CDR3 for antibody 6687 (IGKV3-15)
QQYNNWPPLT

SEQ ID NO: 13374 - protein, 13 aa, Homo sapiens
  Heavy chain CDR3 for antibody 6687 (IGHV3-33)
ARAFTMVRGVIDY

SEQ ID NO: 13375 - protein, 9 aa, Homo sapiens
  Light chain CDR3 for antibody 6688 (IGKV1D-13)
QQFNNYPHT

SEQ ID NO: 13376 - protein, 12 aa, Homo sapiens
  Heavy chain CDR3 for antibody 6688 (IGHV3-33)
ARDPGYFFGLDV

SEQ ID NO: 13377 - protein, 10 aa, Homo sapiens
  Light chain CDR3 for antibody 6689 (IGKV3-11)
QQRSNWPALT

SEQ ID NO: 13378 - protein, 24 aa, Homo sapiens
  Heavy chain CDR3 for antibody 6689 (IGHV1-46)
ARDEARGLLTGYYNMREYYYGMDV

SEQ ID NO: 13379 - protein, 8 aa, Homo sapiens
  Light chain CDR3 for antibody 6690 (IGKV1-6)
QQYNSYYT

SEQ ID NO: 13380 - protein, 13 aa, Homo sapiens
  Heavy chain CDR3 for antibody 6690 (IGHV1-46)
ARVKLGSLGAFDI

SEQ ID NO: 13381 - protein, 9 aa, Homo sapiens
  Light chain CDR3 for antibody 6691 (IGKV1D-16)
QQYITYPYT

SEQ ID NO: 13382 - protein, 15 aa, Homo sapiens
  Heavy chain CDR3 for antibody 6691 (IGHV3-33)
ARDRGWKAPGYGMDV

SEQ ID NO: 13383 - protein, 9 aa, Homo sapiens
  Light chain CDR3 for antibody 6692 (IGKV1-17)
LQHNSYPWT

SEQ ID NO: 13384 - protein, 11 aa, Homo sapiens
  Heavy chain CDR3 for antibody 6692 (IGHV3-33)
ARDRGYSYFDY

SEQ ID NO: 13385 - protein, 10 aa, Homo sapiens
  Light chain CDR3 for antibody 6693 (IGKV3-11)
QQRSNWPIFT

SEQ ID NO: 13386 - protein, 17 aa, Homo sapiens
  Heavy chain CDR3 for antibody 6693 (IGHV3-23)
AKDRDWKDGYYYFGMDV

SEQ ID NO: 13387 - protein, 10 aa, Homo sapiens
  Light chain CDR3 for antibody 6694 (IGKV3-15)
QQYNNWPPYT

SEQ ID NO: 13388 - protein, 12 aa, Homo sapiens
  Heavy chain CDR3 for antibody 6694 (IGHV3-33)
ARGYFGSGYAHF

SEQ ID NO: 13389 - protein, 9 aa, Homo sapiens
  Light chain CDR3 for antibody 6695 (IGKV1D-13)
QQFNNYPHT

SEQ ID NO: 13390 - protein, 12 aa, Homo sapiens
  Heavy chain CDR3 for antibody 6695 (IGHV3-13)
ARDRGYSGYFDY

SEQ ID NO: 13391 - protein, 9 aa, Homo sapiens
  Light chain CDR3 for antibody 6696 (IGKV1D-16)
QQYDSYPWT

SEQ ID NO: 13392 - protein, 13 aa, Homo sapiens
  Heavy chain CDR3 for antibody 6696 (IGHV4-39)
ARRGVLAPAAFDH

SEQ ID NO: 13393 - protein, 8 aa, Homo sapiens
  Light chain CDR3 for antibody 6697 (IGKV1-5)
QQYNSYYT

SEQ ID NO: 13394 - protein, 16 aa, Homo sapiens
  Heavy chain CDR3 for antibody 6697 (IGHV3-30)
ARDIAVAGHVYYGMDV

SEQ ID NO: 13395 - protein, 8 aa, Homo sapiens
  Light chain CDR3 for antibody 6698 (IGKV3D-7)
QQDYNLLT

SEQ ID NO: 13396 - protein, 18 aa, Homo sapiens
  Heavy chain CDR3 for antibody 6698 (IGHV3-33)
ARDEYYGSGIYYNYGMDV

SEQ ID NO: 13397 - protein, 9 aa, Homo sapiens
  Light chain CDR3 for antibody 6699 (IGKV3D-7)
QQDYTLPLT

SEQ ID NO: 13398 - protein, 13 aa, Homo sapiens
  Heavy chain CDR3 for antibody 6699 (IGHV4-39)
ARHPPSRDYGMDV

SEQ ID NO: 13399 - protein, 8 aa, Homo sapiens
  Light chain CDR3 for antibody 6700 (IGKV3-20)
QQYGRSFT

SEQ ID NO: 13400 - protein, 17 aa, Homo sapiens
  Heavy chain CDR3 for antibody 6700 (IGHV4-39)
ARVLRYFDWLSHDAFDI

SEQ ID NO: 13401 - protein, 9 aa, Homo sapiens
  Light chain CDR3 for antibody 6701 (IGKV3-11)
QQRSNWPLT

SEQ ID NO: 13402 - protein, 14 aa, Homo sapiens
  Heavy chain CDR3 for antibody 6701 (IGHV3-33)
AREEDYYYYYDMDV

SEQ ID NO: 13403 - protein, 9 aa, Homo sapiens
  Light chain CDR3 for antibody 6702 (IGKV3D-7)
QQDYEFPIT

SEQ ID NO: 13404 - protein, 9 aa, Homo sapiens
  Heavy chain CDR3 for antibody 6702 (IGHV4-59)
AREGGSGSL

SEQ ID NO: 13405 - protein, 9 aa, Homo sapiens
  Light chain CDR3 for antibody 6703 (IGKV1-6)
LQDYNYPRT

SEQ ID NO: 13406 - protein, 12 aa, Homo sapiens
  Heavy chain CDR3 for antibody 6703 (IGHV3-11)
VRVLLWFGESDY

SEQ ID NO: 13407 - protein, 9 aa, Homo sapiens
  Light chain CDR3 for antibody 6704 (IGKV3-11)
QQRSNWMYT

SEQ ID NO: 13408 - protein, 13 aa, Homo sapiens
  Heavy chain CDR3 for antibody 6704 (IGHV3-33)
ARVDTMVRGVMAY

SEQ ID NO: 13409 - protein, 9 aa, Homo sapiens
  Light chain CDR3 for antibody 6705 (IGKV3D-20)
QQYGSSPRT

SEQ ID NO: 13410 - protein, 14 aa, Homo sapiens
  Heavy chain CDR3 for antibody 6705 (IGHV3-23)
AKERLRYFDWFLDY

SEQ ID NO: 13411 - protein, 9 aa, Homo sapiens
  Light chain CDR3 for antibody 6706 (IGKV2D-28)
MQALQTPPT

SEQ ID NO: 13412 - protein, 14 aa, Homo sapiens
  Heavy chain CDR3 for antibody 6706 (IGHV3-33)
ARAGSGYDRDWFDP

SEQ ID NO: 13413 - protein, 9 aa, Homo sapiens
  Light chain CDR3 for antibody 6707 (IGKV1D-13)
QHFNNYMYT

SEQ ID NO: 13414 - protein, 13 aa, Homo sapiens
  Heavy chain CDR3 for antibody 6707 (IGHV4-34)
ASNFYYYYYGMDV

SEQ ID NO: 13415 - protein, 9 aa, Homo sapiens
  Light chain CDR3 for antibody 6708 (IGKV6-21)
HQSSSLPYT

SEQ ID NO: 13416 - protein, 16 aa, Homo sapiens
  Heavy chain CDR3 for antibody 6708 (IGHV3-33)
ARDAGYPNYDYYGMDV

SEQ ID NO: 13417 - protein, 9 aa, Homo sapiens
  Light chain CDR3 for antibody 6709 (IGKV2D-28)
MQALQTPPT

SEQ ID NO: 13418 - protein, 12 aa, Homo sapiens
  Heavy chain CDR3 for antibody 6709 (IGHV3-33)
ARDLVGATPFDY

SEQ ID NO: 13419 - protein, 8 aa, Homo sapiens
  Light chain CDR3 for antibody 6710 (IGKV3-20)
QQYGRSFT

SEQ ID NO: 13420 - protein, 23 aa, Homo sapiens
  Heavy chain CDR3 for antibody 6710 (IGHV4-59)
ARERTYSDILPGYYEDYYYGMDV

SEQ ID NO: 13421 - protein, 9 aa, Homo sapiens
  Light chain CDR3 for antibody 6711 (IGKV1D-13)
QQSYNYPRT

SEQ ID NO: 13422 - protein, 11 aa, Homo sapiens
  Heavy chain CDR3 for antibody 6711 (IGHV3-33)
ASGYSYGPFDY

SEQ ID NO: 13423 - protein, 10 aa, Homo sapiens
  Light chain CDR3 for antibody 6712 (IGKV1-17)
LQHNSYPMYT

SEQ ID NO: 13424 - protein, 14 aa, Homo sapiens
  Heavy chain CDR3 for antibody 6712 (IGHV3-20)
ARDGGSTSFDWFDP

SEQ ID NO: 13425 - protein, 9 aa, Homo sapiens
  Light chain CDR3 for antibody 6713 (IGKV4-1)
QQYYSTPWT

SEQ ID NO: 13426 - protein, 19 aa, Homo sapiens
  Heavy chain CDR3 for antibody 6713 (IGHV3-33)
ARRKNYYGSGSWHYYGMDV

SEQ ID NO: 13427 - protein, 8 aa, Homo sapiens
  Light chain CDR3 for antibody 6714 (IGKV3D-7)
QQDYNLLT

SEQ ID NO: 13428 - protein, 13 aa, Homo sapiens
  Heavy chain CDR3 for antibody 6714 (IGHV3-21)
ARDSTLVRGVFPY

SEQ ID NO: 13429 - protein, 9 aa, Homo sapiens
  Light chain CDR3 for antibody 6715 (IGKV3D-7)
QQDYNLPLT

SEQ ID NO: 13430 - protein, 13 aa, Homo sapiens
  Heavy chain CDR3 for antibody 6715 (IGHV3-66)
ANTGDSYYYGFYV

SEQ ID NO: 13431 - protein, 9 aa, Homo sapiens
  Light chain CDR3 for antibody 6716 (IGKV1-17)
QQHNSYPYT

SEQ ID NO: 13432 - protein, 24 aa, Homo sapiens
  Heavy chain CDR3 for antibody 6716 (IGHV1-24)
ATEAHYDILTGYYNPHYYYYGMDV

SEQ ID NO: 13433 - protein, 9 aa, Homo sapiens
  Light chain CDR3 for antibody 6717 (IGKV1-6)
LQDYNYPYT

SEQ ID NO: 13434 - protein, 10 aa, Homo sapiens
  Heavy chain CDR3 for antibody 6717 (IGHV3-72)
CRDREGFGDV

SEQ ID NO: 13435 - protein, 9 aa, Homo sapiens
  Light chain CDR3 for antibody 6718 (IGKV3-15)
QQYNNWPLT

SEQ ID NO: 13436 - protein, 19 aa, Homo sapiens
  Heavy chain CDR3 for antibody 6718 (IGHV1-24)
ATAGLQWFGEKIGYYGMDV

SEQ ID NO: 13437 - protein, 10 aa, Homo sapiens
  Light chain CDR3 for antibody 6719 (IGKV1-39)
QQSYSTPMYT

SEQ ID NO: 13438 - protein, 20 aa, Homo sapiens
  Heavy chain CDR3 for antibody 6719 (IGHV3-33)
AREDYYGSGSYYPAYNWFDP

SEQ ID NO: 13439 - protein, 9 aa, Homo sapiens
  Light chain CDR3 for antibody 6720 (IGKV1-17)
LQHNSYPYT

SEQ ID NO: 13440 - protein, 14 aa, Homo sapiens
  Heavy chain CDR3 for antibody 6720 (IGHV3-11)
ARDEGSTWSDIFDI

SEQ ID NO: 13441 - protein, 10 aa, Homo sapiens
  Light chain CDR3 for antibody 6721 (IGKV1-9)
QQLDSYPMYT

SEQ ID NO: 13442 - protein, 12 aa, Homo sapiens
  Heavy chain CDR3 for antibody 6721 (IGHV1-46)
ARGLTGDHAVDI

SEQ ID NO: 13443 - protein, 9 aa, Homo sapiens
  Light chain CDR3 for antibody 6722 (IGKV1-17)
LQHNSYPYT

SEQ ID NO: 13444 - protein, 12 aa, Homo sapiens
  Heavy chain CDR3 for antibody 6722 (IGHV3-33)
ARGGFDWGSIDY

SEQ ID NO: 13445 - protein, 9 aa, Homo sapiens
  Light chain CDR3 for antibody 6723 (IGKV5-2)
LQHDNFPYT

SEQ ID NO: 13446 - protein, 10 aa, Homo sapiens
  Heavy chain CDR3 for antibody 6723 (IGHV3-23)
ATIVGPFLDV

SEQ ID NO: 13447 - protein, 8 aa, Homo sapiens
  Light chain CDR3 for antibody 6724 (IGKV1-5)
QQYNSYWT

SEQ ID NO: 13448 - protein, 15 aa, Homo sapiens
  Heavy chain CDR3 for antibody 6724 (IGHV3-30)
ARRGYGSGSPDAFDL

SEQ ID NO: 13449 - protein, 9 aa, Homo sapiens
  Light chain CDR3 for antibody 6725 (IGKV1-9)
QQGNTYSRT

SEQ ID NO: 13450 - protein, 16 aa, Homo sapiens
  Heavy chain CDR3 for antibody 6725 (IGHV4-59)
ARGRYFEWLLGDVFDI

SEQ ID NO: 13451 - protein, 9 aa, Homo sapiens
  Light chain CDR3 for antibody 6726 (IGKV1-6)
LQDYKSPFT

SEQ ID NO: 13452 - protein, 18 aa, Homo sapiens
  Heavy chain CDR3 for antibody 6726 (IGHV3-33)
ARREGIVGATTYYYGMDV

SEQ ID NO: 13453 - protein, 9 aa, Homo sapiens
  Light chain CDR3 for antibody 6727 (IGKV1-17)
LQHNSYPYT

SEQ ID NO: 13454 - protein, 16 aa, Homo sapiens
  Heavy chain CDR3 for antibody 6727 (IGHV3-33)
ARDNILTGYYYYGMDV

SEQ ID NO: 13455 - protein, 9 aa, Homo sapiens
  Light chain CDR3 for antibody 6728 (IGKV3D-7)
QQDYTLPLT

SEQ ID NO: 13456 - protein, 11 aa, Homo sapiens
  Heavy chain CDR3 for antibody 6728 (IGHV4-59)
ARDGVRGVFDI

SEQ ID NO: 13457 - protein, 10 aa, Homo sapiens
  Light chain CDR3 for antibody 6729 (IGKV1-39)
QQSYSTPMYT

SEQ ID NO: 13458 - protein, 16 aa, Homo sapiens
  Heavy chain CDR3 for antibody 6729 (IGHV4-59)
ARYSGSYYGDYYGMDV

SEQ ID NO: 13459 - protein, 9 aa, Homo sapiens
  Light chain CDR3 for antibody 6730 (IGKV3-20)
QQYGSSPYT

SEQ ID NO: 13460 - protein, 14 aa, Homo sapiens
  Heavy chain CDR3 for antibody 6730 (IGHV3-33)
ARDGYDILTGPMDV

SEQ ID NO: 13461 - protein, 9 aa, Homo sapiens
  Light chain CDR3 for antibody 6731 (IGKV1-17)
LQHNSYPYT

SEQ ID NO: 13462 - protein, 13 aa, Homo sapiens
  Heavy chain CDR3 for antibody 6731 (IGHV3-11)
AREGIAVAGDFDH

SEQ ID NO: 13463 - protein, 11 aa, Homo sapiens
  Light chain CDR3 for antibody 6732 (IGKV3-11)
QQRSNWPPTWT

SEQ ID NO: 13464 - protein, 13 aa, Homo sapiens
  Heavy chain CDR3 for antibody 6732 (IGHV4-39)
ARHPPSRDYGMDV

SEQ ID NO: 13465 - protein, 9 aa, Homo sapiens
  Light chain CDR3 for antibody 6733 (IGKV1-9)
QQLISYPLT

SEQ ID NO: 13466 - protein, 13 aa, Homo sapiens
  Heavy chain CDR3 for antibody 6733 (IGHV3-33)
ANTGDSYYYDMDV

SEQ ID NO: 13467 - protein, 9 aa, Homo sapiens
  Light chain CDR3 for antibody 6734 (IGKV1D-16)
QQYSSYPYT

SEQ ID NO: 13468 - protein, 12 aa, Homo sapiens
  Heavy chain CDR3 for antibody 6734 (IGHV3-23)
AKEGLGNDYESY

SEQ ID NO: 13469 - protein, 11 aa, Homo sapiens
  Light chain CDR3 for antibody 6735 (IGKV3-11)
QQRSNWPPTWT

SEQ ID NO: 13470 - protein, 8 aa, Homo sapiens
  Heavy chain CDR3 for antibody 6735 (IGHV3-23)
AKETGNNY

SEQ ID NO: 13471 - protein, 9 aa, Homo sapiens
  Light chain CDR3 for antibody 6736 (IGKV1-17)
QQLNSYPYT

SEQ ID NO: 13472 - protein, 11 aa, Homo sapiens
  Heavy chain CDR3 for antibody 6736 (IGHV4-59)
AREMGHDTFDI

SEQ ID NO: 13473 - protein, 9 aa, Homo sapiens
  Light chain CDR3 for antibody 6737 (IGKV1-39)
QQSYSTPFT

SEQ ID NO: 13474 - protein, 15 aa, Homo sapiens
  Heavy chain CDR3 for antibody 6737 (IGHV4-59)
ARDRVQLGYYYGMDV

SEQ ID NO: 13475 - protein, 9 aa, Homo sapiens
  Light chain CDR3 for antibody 6738 (IGKV2-30)
MQGTHWPLT

SEQ ID NO: 13476 - protein, 17 aa, Homo sapiens
  Heavy chain CDR3 for antibody 6738 (IGHV3-23)
AKDRPVTTLYYYFGMDV

SEQ ID NO: 13477 - protein, 10 aa, Homo sapiens
  Light chain CDR3 for antibody 6739 (IGKV1-17)
LQHNSYPMYT

SEQ ID NO: 13478 - protein, 20 aa, Homo sapiens
  Heavy chain CDR3 for antibody 6739 (IGHV3-11)
ARGGATLIRGLIDYYYGMDV

SEQ ID NO: 13479 - protein, 9 aa, Homo sapiens
  Light chain CDR3 for antibody 6740 (IGKV1D-16)
QQYYSYPRT

SEQ ID NO: 13480 - protein, 15 aa, Homo sapiens
  Heavy chain CDR3 for antibody 6740 (IGHV3-33)
ARRICSGGSCSLFDY

SEQ ID NO: 13481 - protein, 8 aa, Homo sapiens
  Light chain CDR3 for antibody 6741 (IGKV1-5)
QQYNSYWT

SEQ ID NO: 13482 - protein, 11 aa, Homo sapiens
  Heavy chain CDR3 for antibody 6741 (IGHV3-33)
ARDKSSGWSDY

SEQ ID NO: 13483 - protein, 9 aa, Homo sapiens
  Light chain CDR3 for antibody 6742 (IGKV5-2)
LQHDNFPWT

SEQ ID NO: 13484 - protein, 14 aa, Homo sapiens
  Heavy chain CDR3 for antibody 6742 (IGHV4-34)
ARAYYAFLTGALDI

SEQ ID NO: 13485 - protein, 9 aa, Homo sapiens
  Light chain CDR3 for antibody 6743 (IGKV1-16)
QQYNSYPLT

SEQ ID NO: 13486 - protein, 13 aa, Homo sapiens
  Heavy chain CDR3 for antibody 6743 (IGHV3-33)
ARVHFDWLDAFDI

SEQ ID NO: 13487 - protein, 9 aa, Homo sapiens
  Light chain CDR3 for antibody 6744 (IGKV3-15)
QQYNNWPLT

SEQ ID NO: 13488 - protein, 8 aa, Homo sapiens
  Heavy chain CDR3 for antibody 6744 (IGHV3-23)
AKESLLDY

SEQ ID NO: 13489 - protein, 9 aa, Homo sapiens
  Light chain CDR3 for antibody 6745 (IGKV1-33)
QQYDNLPFT

SEQ ID NO: 13490 - protein, 17 aa, Homo sapiens
  Heavy chain CDR3 for antibody 6745 (IGHV3-33)
AREDYDILTGYPFYFDY

SEQ ID NO: 13491 - protein, 9 aa, Homo sapiens
  Light chain CDR3 for antibody 6746 (IGKV1-6)
LQDYNYPYT

SEQ ID NO: 13492 - protein, 18 aa, Homo sapiens
  Heavy chain CDR3 for antibody 6746 (IGHV3-33)
ARRGVGARGYYYYYGMDV

SEQ ID NO: 13493 - protein, 9 aa, Homo sapiens
  Light chain CDR3 for antibody 6747 (IGKV3D-7)
QQDYNLPWT

SEQ ID NO: 13494 - protein, 18 aa, Homo sapiens
  Heavy chain CDR3 for antibody 6747 (IGHV4-59)
ARERGNWNDVDYYYGMDV

SEQ ID NO: 13495 - protein, 10 aa, Homo sapiens
  Light chain CDR3 for antibody 6748 (IGKV3-15)
QQYNNWPPIT

SEQ ID NO: 13496 - protein, 13 aa, Homo sapiens
  Heavy chain CDR3 for antibody 6748 (IGHV3-33)
ARGDNWNDGGFDY

SEQ ID NO: 13497 - protein, 9 aa, Homo sapiens
  Light chain CDR3 for antibody 6749 (IGKV3-11)
QQRSNWPPT

SEQ ID NO: 13498 - protein, 15 aa, Homo sapiens
  Heavy chain CDR3 for antibody 6749 (IGHV3-23)
AKEFTMVRGVITPDY

SEQ ID NO: 13499 - protein, 9 aa, Homo sapiens
  Light chain CDR3 for antibody 6750 (IGKV1D-13)
QRFNNYLYT

SEQ ID NO: 13500 - protein, 18 aa, Homo sapiens
  Heavy chain CDR3 for antibody 6750 (IGHV3-33)
ARGGYSSGWDYYYYGMDV

SEQ ID NO: 13501 - protein, 9 aa, Homo sapiens
  Light chain CDR3 for antibody 6751 (IGKV3-15)
QQYINWPLT

SEQ ID NO: 13502 - protein, 12 aa, Homo sapiens
  Heavy chain CDR3 for antibody 6751 (IGHV3-33)
ARDLVRGIRMDV

SEQ ID NO: 13503 - protein, 9 aa, Homo sapiens
  Light chain CDR3 for antibody 6752 (IGKV1-16)
QQYTSYPFT

SEQ ID NO: 13504 - protein, 10 aa, Homo sapiens
  Heavy chain CDR3 for antibody 6752 (IGHV4-59)
ARQLGNWFDP

SEQ ID NO: 13505 - protein, 9 aa, Homo sapiens
  Light chain CDR3 for antibody 6753 (IGKV3-15)
QQYNNWPYT

SEQ ID NO: 13506 - protein, 10 aa, Homo sapiens
  Heavy chain CDR3 for antibody 6753 (IGHV3-23)
AKDHYGDYPY

SEQ ID NO: 13507 - protein, 9 aa, Homo sapiens
  Light chain CDR3 for antibody 6754 (IGKV1-9)
QQLISYPLT

SEQ ID NO: 13508 - protein, 15 aa, Homo sapiens
  Heavy chain CDR3 for antibody 6754 (IGHV3-33)
AKDRNSGYDWGGFDY

SEQ ID NO: 13509 - protein, 9 aa, Homo sapiens
  Light chain CDR3 for antibody 6755 (IGKV1-6)
QQEYNYPLT

SEQ ID NO: 13510 - protein, 18 aa, Homo sapiens
  Heavy chain CDR3 for antibody 6755 (IGHV4-59)
AREGHYYTSGSYYKAFDY

SEQ ID NO: 13511 - protein, 9 aa, Homo sapiens
  Light chain CDR3 for antibody 6756 (IGKV1-17)
LQHNSYPYT

SEQ ID NO: 13512 - protein, 10 aa, Homo sapiens
  Heavy chain CDR3 for antibody 6756 (IGHV3-66)
ARDLRADFDY

SEQ ID NO: 13513 - protein, 9 aa, Homo sapiens
  Light chain CDR3 for antibody 6757 (IGKV1-27)
QKYNSAPYT

SEQ ID NO: 13514 - protein, 14 aa, Homo sapiens
  Heavy chain CDR3 for antibody 6757 (IGHV3-20)
ARDEGSGGYDVFDI

SEQ ID NO: 13515 - protein, 10 aa, Homo sapiens
  Light chain CDR3 for antibody 6758 (IGKV1-17)
LQHNSYPMYT

SEQ ID NO: 13516 - protein, 18 aa, Homo sapiens
  Heavy chain CDR3 for antibody 6758 (IGHV3-23)
ARYHLYFGSGFGSDGMDV

SEQ ID NO: 13517 - protein, 9 aa, Homo sapiens
  Light chain CDR3 for antibody 6759 (IGKV1D-16)
QHYNDYPFT

SEQ ID NO: 13518 - protein, 13 aa, Homo sapiens
  Heavy chain CDR3 for antibody 6759 (IGHV3-33)
ARRATLVRGVFDP

SEQ ID NO: 13519 - protein, 8 aa, Homo sapiens
  Light chain CDR3 for antibody 6760 (IGKV1-5)
QQYNSYWT

SEQ ID NO: 13520 - protein, 12 aa, Homo sapiens
  Heavy chain CDR3 for antibody 6760 (IGHV4-59)
ARDRSGWAYFDY

SEQ ID NO: 13521 - protein, 8 aa, Homo sapiens
  Light chain CDR3 for antibody 6761 (IGKV3D-7)
QQDYNLLT

SEQ ID NO: 13522 - protein, 12 aa, Homo sapiens
  Heavy chain CDR3 for antibody 6761 (IGHV4-39)
ARQMVREGWFDP

SEQ ID NO: 13523 - protein, 9 aa, Homo sapiens
  Light chain CDR3 for antibody 6762 (IGKV1-16)
QQYNSYPIT

SEQ ID NO: 13524 - protein, 18 aa, Homo sapiens
  Heavy chain CDR3 for antibody 6762 (IGHV3-33)
ARREGITTIFYYYYGMDV

SEQ ID NO: 13525 - protein, 10 aa, Homo sapiens
  Light chain CDR3 for antibody 6763 (IGKV1-17)
LQHNSYPMYT

SEQ ID NO: 13526 - protein, 13 aa, Homo sapiens
  Heavy chain CDR3 for antibody 6763 (IGHV3-66)
ANTGDSYYYGFYV

SEQ ID NO: 13527 - protein, 9 aa, Homo sapiens
  Light chain CDR3 for antibody 6764 (IGKV1D-13)
QQFNNYMYT

SEQ ID NO: 13528 - protein, 14 aa, Homo sapiens
  Heavy chain CDR3 for antibody 6764 (IGHV3-33)
ARASSGSSYWYFDL

SEQ ID NO: 13529 - protein, 9 aa, Homo sapiens
  Light chain CDR3 for antibody 6765 (IGKV1-6)
LQDYNYPYT

SEQ ID NO: 13530 - protein, 12 aa, Homo sapiens
  Heavy chain CDR3 for antibody 6765 (IGHV3-66)
VRDRAAAPYFDL

SEQ ID NO: 13531 - protein, 9 aa, Homo sapiens
  Light chain CDR3 for antibody 6766 (IGKV1D-13)
QQFNNYPHT

SEQ ID NO: 13532 - protein, 14 aa, Homo sapiens
  Heavy chain CDR3 for antibody 6766 (IGHV3-64)
ARDHAAGGYSHSDY

SEQ ID NO: 13533 - protein, 9 aa, Homo sapiens
  Light chain CDR3 for antibody 6767 (IGKV1-33)
QQYDNLPFT

SEQ ID NO: 13534 - protein, 18 aa, Homo sapiens
  Heavy chain CDR3 for antibody 6767 (IGHV3-33)
ARDQYSGYDFYYYYGMDV

SEQ ID NO: 13535 - protein, 9 aa, Homo sapiens
  Light chain CDR3 for antibody 6768 (IGKV3-15)
QQYNNWPRT

SEQ ID NO: 13536 - protein, 17 aa, Homo sapiens
  Heavy chain CDR3 for antibody 6768 (IGHV3-23)
AKDGSFYSSGWYDAFDI

SEQ ID NO: 13537 - protein, 10 aa, Homo sapiens
  Light chain CDR3 for antibody 6769 (IGKV1-17)
LQHNSYPMYT

SEQ ID NO: 13538 - protein, 16 aa, Homo sapiens
  Heavy chain CDR3 for antibody 6769 (IGHV4-59)
ARGRYFEWLLGDVFDI

SEQ ID NO: 13539 - protein, 8 aa, Homo sapiens
  Light chain CDR3 for antibody 6770 (IGKV3D-7)
QQDYNLLT

SEQ ID NO: 13540 - protein, 14 aa, Homo sapiens
  Heavy chain CDR3 for antibody 6770 (IGHV3-33)
ANWAYDILTGYLDY

SEQ ID NO: 13541 - protein, 9 aa, Homo sapiens
  Light chain CDR3 for antibody 6771 (IGKV2-30)
MQGTHWPLT

SEQ ID NO: 13542 - protein, 16 aa, Homo sapiens
  Heavy chain CDR3 for antibody 6771 (IGHV3-33)
ARDKNTDYDILTGFDY

SEQ ID NO: 13543 - protein, 9 aa, Homo sapiens
  Light chain CDR3 for antibody 6772 (IGKV3-15)
QQYNNWPLT

SEQ ID NO: 13544 - protein, 12 aa, Homo sapiens
  Heavy chain CDR3 for antibody 6772 (IGHV1-24)
ASDWAYYYGMDV

SEQ ID NO: 13545 - protein, 9 aa, Homo sapiens
  Light chain CDR3 for antibody 6773 (IGKV5-2)
LQHDNFPYT

SEQ ID NO: 13546 - protein, 18 aa, Homo sapiens
  Heavy chain CDR3 for antibody 6773 (IGHV3-23)
AKDGDYFGSGSYWGYFDL

SEQ ID NO: 13547 - protein, 10 aa, Homo sapiens
  Light chain CDR3 for antibody 6774 (IGKV3-11)
QQRSNWPIFT

SEQ ID NO: 13548 - protein, 17 aa, Homo sapiens
  Heavy chain CDR3 for antibody 6774 (IGHV3-23)
AKGNYGSGSYYNGDFQH

SEQ ID NO: 13549 - protein, 9 aa, Homo sapiens
  Light chain CDR3 for antibody 6775 (IGKV3-15)
QQYNNWPLT

SEQ ID NO: 13550 - protein, 18 aa, Homo sapiens
  Heavy chain CDR3 for antibody 6775 (IGHV3-49)
TRDLRPPGIAVAEGAFDI

SEQ ID NO: 13551 - protein, 9 aa, Homo sapiens
  Light chain CDR3 for antibody 6776 (IGKV5-2)
LQHDNFPYT

SEQ ID NO: 13552 - protein, 16 aa, Homo sapiens
  Heavy chain CDR3 for antibody 6776 (IGHV1-24)
ATEDSSSYYYYYGMDV

SEQ ID NO: 13553 - protein, 9 aa, Homo sapiens
  Light chain CDR3 for antibody 6777 (IGKV3-20)
HQSTSLPFT

SEQ ID NO: 13554 - protein, 13 aa, Homo sapiens
  Heavy chain CDR3 for antibody 6777 (IGHV4-59)
ARDAGYSSSWFDY

SEQ ID NO: 13555 - protein, 8 aa, Homo sapiens
  Light chain CDR3 for antibody 6778 (IGKV1-5)
QQYNSYYT

SEQ ID NO: 13556 - protein, 19 aa, Homo sapiens
  Heavy chain CDR3 for antibody 6778 (IGHV3-33)
ARGPYYDILTGYGYYGMDV

SEQ ID NO: 13557 - protein, 9 aa, Homo sapiens
  Light chain CDR3 for antibody 6779 (IGKV3D-20)
QQYNNWPRT

SEQ ID NO: 13558 - protein, 14 aa, Homo sapiens
  Heavy chain CDR3 for antibody 6779 (IGHV3-15)
SIYYYGSGRDFFDY

SEQ ID NO: 13559 - protein, 9 aa, Homo sapiens
  Light chain CDR3 for antibody 6780 (IGKV1-13)
QQYHSYPYT

SEQ ID NO: 13560 - protein, 12 aa, Homo sapiens
  Heavy chain CDR3 for antibody 6780 (IGHV1-18)
ARRDGSGTSFDY

SEQ ID NO: 13561 - protein, 9 aa, Homo sapiens
  Light chain CDR3 for antibody 6781 (IGKV3-11)
QQRSNWPPT

SEQ ID NO: 13562 - protein, 18 aa, Homo sapiens
  Heavy chain CDR3 for antibody 6781 (IGHV3-33)
ARGGYSSGWDYYYYGMDV

SEQ ID NO: 13563 - protein, 10 aa, Homo sapiens
  Light chain CDR3 for antibody 6782 (IGKV3-15)
QQYNNWPPLT

SEQ ID NO: 13564 - protein, 18 aa, Homo sapiens
  Heavy chain CDR3 for antibody 6782 (IGHV3-33)
ARGYYGSGNFYKDSGMDV

SEQ ID NO: 13565 - protein, 9 aa, Homo sapiens
  Light chain CDR3 for antibody 6783 (IGKV3-15)
QQYNNWPLT

SEQ ID NO: 13566 - protein, 18 aa, Homo sapiens
  Heavy chain CDR3 for antibody 6783 (IGHV4-59)
ARERGNWNDVDYYYGMDV

SEQ ID NO: 13567 - protein, 10 aa, Homo sapiens
  Light chain CDR3 for antibody 6784 (IGKV1-39)
QQSYSTPMYT

SEQ ID NO: 13568 - protein, 21 aa, Homo sapiens
  Heavy chain CDR3 for antibody 6784 (IGHV3-23)
AKDIDYYGSGSYPLYYYGMDV

SEQ ID NO: 13569 - protein, 9 aa, Homo sapiens
  Light chain CDR3 for antibody 6785 (IGKV1-39)
QQSYSTPLT

SEQ ID NO: 13570 - protein, 9 aa, Homo sapiens
  Heavy chain CDR3 for antibody 6785 (IGHV1-18)
ARGGWGFEY

SEQ ID NO: 13571 - protein, 9 aa, Homo sapiens
  Light chain CDR3 for antibody 6786 (IGKV3D-7)
QQDYEFPLT

SEQ ID NO: 13572 - protein, 23 aa, Homo sapiens
  Heavy chain CDR3 for antibody 6786 (IGHV4-59)
ARERTYSDILPGYYEDYYYGMDV

SEQ ID NO: 13573 - protein, 8 aa, Homo sapiens
  Light chain CDR3 for antibody 6787 (IGKV3D-7)
QQDYNLVT

SEQ ID NO: 13574 - protein, 12 aa, Homo sapiens
  Heavy chain CDR3 for antibody 6787 (IGHV4-61)
ARVDSSGWFFDY

SEQ ID NO: 13575 - protein, 9 aa, Homo sapiens
  Light chain CDR3 for antibody 6788 (IGKV1-17)
LQHNSYPYT

SEQ ID NO: 13576 - protein, 11 aa, Homo sapiens
  Heavy chain CDR3 for antibody 6788 (IGHV4-59)
AREDYGVPFDY

SEQ ID NO: 13577 - protein, 9 aa, Homo sapiens
  Light chain CDR3 for antibody 6789 (IGKV4-1)
QQYYSTPWT

SEQ ID NO: 13578 - protein, 17 aa, Homo sapiens
  Heavy chain CDR3 for antibody 6789 (IGHV3-33)
ARGFSGYDGYYYYGMDV

SEQ ID NO: 13579 - protein, 9 aa, Homo sapiens
  Light chain CDR3 for antibody 6790 (IGKV1-9)
QQLKSYLYT

SEQ ID NO: 13580 - protein, 16 aa, Homo sapiens
  Heavy chain CDR3 for antibody 6790 (IGHV1-18)
ARYFDWLLRDYYGMDV

SEQ ID NO: 13581 - protein, 9 aa, Homo sapiens
  Light chain CDR3 for antibody 6791 (IGKV1-17)
LQHNSYPYT

SEQ ID NO: 13582 - protein, 17 aa, Homo sapiens
  Heavy chain CDR3 for antibody 6791 (IGHV3-30)
ARESLWFGEANHFVMDV

SEQ ID NO: 13583 - protein, 9 aa, Homo sapiens
  Light chain CDR3 for antibody 6792 (IGKV1-9)
QQLNTYPWT

SEQ ID NO: 13584 - protein, 14 aa, Homo sapiens
  Heavy chain CDR3 for antibody 6792 (IGHV3-33)
ARTTAAAGPRDFQH

SEQ ID NO: 13585 - protein, 9 aa, Homo sapiens
  Light chain CDR3 for antibody 6793 (IGKV1-9)
QQYNSYPYT

SEQ ID NO: 13586 - protein, 12 aa, Homo sapiens
  Heavy chain CDR3 for antibody 6793 (IGHV3-33)
ARERGIGRYFDL

SEQ ID NO: 13587 - protein, 9 aa, Homo sapiens
  Light chain CDR3 for antibody 6794 (IGKV1-5)
QQYNTYSRT

SEQ ID NO: 13588 - protein, 14 aa, Homo sapiens
  Heavy chain CDR3 for antibody 6794 (IGHV3-33)
ARDKSYPLSYGMDV

SEQ ID NO: 13589 - protein, 9 aa, Homo sapiens
  Light chain CDR3 for antibody 6795 (IGKV1-9)
QQLKSYLYT

SEQ ID NO: 13590 - protein, 12 aa, Homo sapiens
  Heavy chain CDR3 for antibody 6795 (IGHV4-59)
ARDRSGWAYFDY

SEQ ID NO: 13591 - protein, 10 aa, Homo sapiens
  Light chain CDR3 for antibody 6796 (IGKV1-17)
LQHNSYPMYT

SEQ ID NO: 13592 - protein, 21 aa, Homo sapiens
  Heavy chain CDR3 for antibody 6796 (IGHV3-33)
ARKRLYDILTGYYKAYYGMDV

SEQ ID NO: 13593 - protein, 9 aa, Homo sapiens
  Light chain CDR3 for antibody 6797 (IGKV1-27)
QKYNSAPYT

SEQ ID NO: 13594 - protein, 16 aa, Homo sapiens
  Heavy chain CDR3 for antibody 6797 (IGHV3-64)
ARGRYFDWLLGDWFDP

SEQ ID NO: 13595 - protein, 9 aa, Homo sapiens
  Light chain CDR3 for antibody 6798 (IGKV3-15)
QQYHNWPLT

SEQ ID NO: 13596 - protein, 19 aa, Homo sapiens
  Heavy chain CDR3 for antibody 6798 (IGHV3-33)
ARDSGYSGYDYYYYYGMDV

SEQ ID NO: 13597 - protein, 9 aa, Homo sapiens
  Light chain CDR3 for antibody 6799 (IGKV3-20)
QQYGSSPYT

SEQ ID NO: 13598 - protein, 17 aa, Homo sapiens
  Heavy chain CDR3 for antibody 6799 (IGHV3-33)
ARGGGYENDHYYYGMDV

SEQ ID NO: 13599 - protein, 9 aa, Homo sapiens
  Light chain CDR3 for antibody 6800 (IGKV2D-28)
MQALQTPFT

SEQ ID NO: 13600 - protein, 12 aa, Homo sapiens
  Heavy chain CDR3 for antibody 6800 (IGHV3-13)
AREAGIPDAFDI

SEQ ID NO: 13601 - protein, 9 aa, Homo sapiens
  Light chain CDR3 for antibody 6801 (IGKV1-27)
QKYNSAPYT

SEQ ID NO: 13602 - protein, 18 aa, Homo sapiens
  Heavy chain CDR3 for antibody 6801 (IGHV3-33)
ARGYNQGSGSYYNVCFDY

SEQ ID NO: 13603 - protein, 9 aa, Homo sapiens
  Light chain CDR3 for antibody 6802 (IGKV3-20)
QQYGSSPRT

SEQ ID NO: 13604 - protein, 20 aa, Homo sapiens
  Heavy chain CDR3 for antibody 6802 (IGHV3-33)
ARTMGSGSYYKAYYYYVMDV

SEQ ID NO: 13605 - protein, 10 aa, Homo sapiens
  Light chain CDR3 for antibody 6803 (IGKV3-11)
QQRSTWPTLT

SEQ ID NO: 13606 - protein, 16 aa, Homo sapiens
  Heavy chain CDR3 for antibody 6803 (IGHV3-23)
AKEGMVLRYFDWLWDY

SEQ ID NO: 13607 - protein, 10 aa, Homo sapiens
  Light chain CDR3 for antibody 6804 (IGKV1-39)
QQSYSTPMYT

SEQ ID NO: 13608 - protein, 15 aa, Homo sapiens
  Heavy chain CDR3 for antibody 6804 (IGHV3-30)
ARRGYGSGSPDAFDL

SEQ ID NO: 13609 - protein, 9 aa, Homo sapiens
  Light chain CDR3 for antibody 6805 (IGKV3-20)
QQYGSSPWT

SEQ ID NO: 13610 - protein, 12 aa, Homo sapiens
  Heavy chain CDR3 for antibody 6805 (IGHV4-61)
ARVGSSGWYFDY

SEQ ID NO: 13611 - protein, 9 aa, Homo sapiens
  Light chain CDR3 for antibody 6806 (IGKV4-1)
QQYYSTPWT

SEQ ID NO: 13612 - protein, 13 aa, Homo sapiens
  Heavy chain CDR3 for antibody 6806 (IGHV3-53)
ARSGSYWGYYFDY

SEQ ID NO: 13613 - protein, 9 aa, Homo sapiens
  Light chain CDR3 for antibody 6807 (IGKV1-17)
LQHNSYPRT

SEQ ID NO: 13614 - protein, 10 aa, Homo sapiens
  Heavy chain CDR3 for antibody 6807 (IGHV1-46)
AREWELLFDY

SEQ ID NO: 13615 - protein, 9 aa, Homo sapiens
  Light chain CDR3 for antibody 6808 (IGKV5-2)
LQHDNFPYT

SEQ ID NO: 13616 - protein, 10 aa, Homo sapiens
  Heavy chain CDR3 for antibody 6808 (IGHV3-33)
ARDGLRYFDW

SEQ ID NO: 13617 - protein, 9 aa, Homo sapiens
  Light chain CDR3 for antibody 6809 (IGKV3D-7)
QQDYEFPIT

SEQ ID NO: 13618 - protein, 13 aa, Homo sapiens
  Heavy chain CDR3 for antibody 6809 (IGHV4-34)
ASNFYYYYYGMDV

SEQ ID NO: 13619 - protein, 10 aa, Homo sapiens
  Light chain CDR3 for antibody 6810 (IGKV1-17)
LQHNSYPMYT

SEQ ID NO: 13620 - protein, 15 aa, Homo sapiens
  Heavy chain CDR3 for antibody 6810 (IGHV3-33)
ARDRGWKAPGYGMDV

SEQ ID NO: 13621 - protein, 9 aa, Homo sapiens
  Light chain CDR3 for antibody 6811 (IGKV1D-13)
QQFNNYPHT

SEQ ID NO: 13622 - protein, 17 aa, Homo sapiens
  Heavy chain CDR3 for antibody 6811 (IGHV4-39)
ARDRDDILTGFYTYFDY

SEQ ID NO: 13623 - protein, 9 aa, Homo sapiens
  Light chain CDR3 for antibody 6812 (IGKV3-11)
QQRSNWPYT

SEQ ID NO: 13624 - protein, 17 aa, Homo sapiens
  Heavy chain CDR3 for antibody 6812 (IGHV1-24)
ATHYGSGSHYKGYGMDV

SEQ ID NO: 13625 - protein, 9 aa, Homo sapiens
  Light chain CDR3 for antibody 6813 (IGKV1-6)
LQDYNYPYT

SEQ ID NO: 13626 - protein, 16 aa, Homo sapiens
  Heavy chain CDR3 for antibody 6813 (IGHV3-33)
ARGSVSDILTGAYFDY

SEQ ID NO: 13627 - protein, 10 aa, Homo sapiens [sequence omitted]

SEQ ID NO: 13628 - protein, 18 aa, Homo sapiens
  Heavy chain CDR3 for antibody 6814 (IGHV4-39)
ARQYYFGSGNYYRGWFDP

SEQ ID NO: 13629 - protein, 9 aa, Homo sapiens
  Light chain CDR3 for antibody 6815 (IGKV1D-13)
QQFNNYPHT

SEQ ID NO: 13630 - protein, 17 aa, Homo sapiens
  Heavy chain CDR3 for antibody 6815 (IGHV4-39)
AGRLTYYYGSGSPSFDY

SEQ ID NO: 13631 - protein, 10 aa, Homo sapiens
  Light chain CDR3 for antibody 6816 (IGKV3-11)
QQRSNWPIFT

SEQ ID NO: 13632 - protein, 20 aa, Homo sapiens
  Heavy chain CDR3 for antibody 6816 (IGHV3-33)
ARDPAQLERRYYYFYYGMDV

SEQ ID NO: 13633 - protein, 9 aa, Homo sapiens
  Light chain CDR3 for antibody 6817 (IGKV1D-16)
QQYDSYPLT

SEQ ID NO: 13634 - protein, 15 aa, Homo sapiens
  Heavy chain CDR3 for antibody 6817 (IGHV3-33)
ARERYSSAWSSGMDV

SEQ ID NO: 13635 - protein, 9 aa, Homo sapiens
  Light chain CDR3 for antibody 6818 (IGKV2-30)
MQGTHWPLT

SEQ ID NO: 13636 - protein, 12 aa, Homo sapiens
  Heavy chain CDR3 for antibody 6818 (IGHV3-33)
ARDSSGWSHFDY

SEQ ID NO: 13637 - protein, 11 aa, Homo sapiens
  Light chain CDR3 for antibody 6819 (IGKV3-11)
QQRSNWPPTWT

SEQ ID NO: 13638 - protein, 13 aa, Homo sapiens
  Heavy chain CDR3 for antibody 6819 (IGHV3-33)
ARKAYGDYFYFDY

SEQ ID NO: 13639 - protein, 10 aa, Homo sapiens
  Light chain CDR3 for antibody 6820 (IGKV1-17)
LQHNSYPMYT

SEQ ID NO: 13640 - protein, 12 aa, Homo sapiens
  Heavy chain CDR3 for antibody 6820 (IGHV3-h)
AREDYYYYGMDV

SEQ ID NO: 13641 - protein, 9 aa, Homo sapiens
  Light chain CDR3 for antibody 6821 (IGKV1D-13)
QQFNNYPHT

SEQ ID NO: 13642 - protein, 14 aa, Homo sapiens
  Heavy chain CDR3 for antibody 6821 (IGHV3-23)
AKDRYRGYEGLFDY

SEQ ID NO: 13643 - protein, 9 aa, Homo sapiens
  Light chain CDR3 for antibody 6822 (IGKV4-1)
QQYYSTPPT

SEQ ID NO: 13644 - protein, 18 aa, Homo sapiens
  Heavy chain CDR3 for antibody 6822 (IGHV3-23)
ARYHLYFGSGFGSDGMDV

SEQ ID NO: 13645 - protein, 9 aa, Homo sapiens
  Light chain CDR3 for antibody 6823 (IGKV2D-28)
MQALQTPPT

SEQ ID NO: 13646 - protein, 17 aa, Homo sapiens
  Heavy chain CDR3 for antibody 6823 (IGHV3-23)
AKDGIGELSYYYYGMDV

SEQ ID NO: 13647 - protein, 9 aa, Homo sapiens
  Light chain CDR3 for antibody 6824 (IGKV1-9)
QQLISYPLT

SEQ ID NO: 13648 - protein, 11 aa, Homo sapiens
  Heavy chain CDR3 for antibody 6824 (IGHV3-23)
ARDPGSITGDY

SEQ ID NO: 13649 - protein, 9 aa, Homo sapiens
  Light chain CDR3 for antibody 6825 (IGKV3-11)
QQRSNWPLT

SEQ ID NO: 13650 - protein, 15 aa, Homo sapiens
  Heavy chain CDR3 for antibody 6825 (IGHV1-2)
ARDLGYYGSGSRMDV

SEQ ID NO: 13651 - protein, 8 aa, Homo sapiens
  Light chain CDR3 for antibody 6826 (IGKV3D-7)
QQDYNLLT

SEQ ID NO: 13652 - protein, 11 aa, Homo sapiens
  Heavy chain CDR3 for antibody 6826 (IGHV3-33)
ARDQGGSSFDY

SEQ ID NO: 13653 - protein, 8 aa, Homo sapiens
  Light chain CDR3 for antibody 6827 (IGKV1D-13)
QQFNNYPT

SEQ ID NO: 13654 - protein, 18 aa, Homo sapiens
  Heavy chain CDR3 for antibody 6827 (IGHV3-33)
ARDRDRYGSGTYPDAIDI

SEQ ID NO: 13655 - protein, 9 aa, Homo sapiens
  Light chain CDR3 for antibody 6828 (IGKV3D-7)
QQDYEFPIT

SEQ ID NO: 13656 - protein, 9 aa, Homo sapiens
  Heavy chain CDR3 for antibody 6828 (IGHV4-59)
AGGSWDFDY

SEQ ID NO: 13657 - protein, 9 aa, Homo sapiens
  Light chain CDR3 for antibody 6829 (IGKV3-11)
QQRSNWPPT

SEQ ID NO: 13658 - protein, 13 aa, Homo sapiens
  Heavy chain CDR3 for antibody 6829 (IGHV3-33)
ASGYSGYDWYFDL

SEQ ID NO: 13659 - protein, 9 aa, Homo sapiens
  Light chain CDR3 for antibody 6830 (IGKV1-9)
QQVKGYPYT

SEQ ID NO: 13660 - protein, 18 aa, Homo sapiens
  Heavy chain CDR3 for antibody 6830 (IGHV1-46)
ARDGDYVWGSYRSDWFDP

SEQ ID NO: 13661 - protein, 9 aa, Homo sapiens
  Light chain CDR3 for antibody 6831 (IGKV1-27)
QKYNSAPYT

SEQ ID NO: 13662 - protein, 14 aa, Homo sapiens
  Heavy chain CDR3 for antibody 6831 (IGHV3-23)
VRDRIAAASSDFDN

SEQ ID NO: 13663 - protein, 9 aa, Homo sapiens
  Light chain CDR3 for antibody 6832 (IGKV4-1)
QQYYSTPWT

SEQ ID NO: 13664 - protein, 14 aa, Homo sapiens
  Heavy chain CDR3 for antibody 6832 (IGHV3-33)
AREGYSSNWYDFDY

SEQ ID NO: 13665 - protein, 9 aa, Homo sapiens
  Light chain CDR3 for antibody 6833 (IGKV1D-16)
QQYNSYPFT

SEQ ID NO: 13666 - protein, 18 aa, Homo sapiens
  Heavy chain CDR3 for antibody 6833 (IGHV4-59)
AREGHYYTSGSYYKAFDY

SEQ ID NO: 13667 - protein, 9 aa, Homo sapiens
  Light chain CDR3 for antibody 6834 (IGKV1-39)
QQSYSTPYT

SEQ ID NO: 13668 - protein, 12 aa, Homo sapiens
  Heavy chain CDR3 for antibody 6834 (IGHV4-39)
ARHPRYLDAFDI

SEQ ID NO: 13669 - protein, 9 aa, Homo sapiens
  Light chain CDR3 for antibody 6835 (IGKV5-2)
LQHDNFPWT

SEQ ID NO: 13670 - protein, 16 aa, Homo sapiens
  Heavy chain CDR3 for antibody 6835 (IGHV4-59)
AREPLRYFDWPDAFDI

SEQ ID NO: 13671 - protein, 9 aa, Homo sapiens
  Light chain CDR3 for antibody 6836 (IGKV2-30)
MQGTHWPLT

SEQ ID NO: 13672 - protein, 12 aa, Homo sapiens
  Heavy chain CDR3 for antibody 6836 (IGHV1-18)
AGVLFDGDYSDY

SEQ ID NO: 13673 - protein, 10 aa, Homo sapiens
  Light chain CDR3 for antibody 6837 (IGKV1-39)
QQSYSTPMYT

SEQ ID NO: 13674 - protein, 13 aa, Homo sapiens
  Heavy chain CDR3 for antibody 6837 (IGHV3-33)
ARVDTMVRGVMAY

SEQ ID NO: 13675 - protein, 8 aa, Homo sapiens
  Light chain CDR3 for antibody 6838 (IGKV3-20)
QQYGSSLT

SEQ ID NO: 13676 - protein, 14 aa, Homo sapiens
  Heavy chain CDR3 for antibody 6838 (IGHV3-33)
ARATSGSSYWYFDL

SEQ ID NO: 13677 - protein, 9 aa, Homo sapiens
  Light chain CDR3 for antibody 6839 (IGKV1-27)
QKYNSAPYT

SEQ ID NO: 13678 - protein, 12 aa, Homo sapiens
  Heavy chain CDR3 for antibody 6839 (IGHV4-61)
ARVDSSGWYFDY

SEQ ID NO: 13679 - protein, 10 aa, Homo sapiens
  Light chain CDR3 for antibody 6840 (IGKV3-11)
QQRSNWPIFT

SEQ ID NO: 13680 - protein, 13 aa, Homo sapiens
  Heavy chain CDR3 for antibody 6840 (IGHV3-33)
ARGVLWFGELFDY

SEQ ID NO: 13681 - protein, 9 aa, Homo sapiens
  Light chain CDR3 for antibody 6841 (IGKV1-39)
QQSYSTPLT

SEQ ID NO: 13682 - protein, 13 aa, Homo sapiens
  Heavy chain CDR3 for antibody 6841 (IGHV3-64)
AREYFDWLLPLDY

SEQ ID NO: 13683 - protein, 9 aa, Homo sapiens
  Light chain CDR3 for antibody 6842 (IGKV6-21)
HQSSSLPYT

SEQ ID NO: 13684 - protein, 14 aa, Homo sapiens
  Heavy chain CDR3 for antibody 6842 (IGHV3-20)
AREGWFGDYYGMDV

SEQ ID NO: 13685 - protein, 9 aa, Homo sapiens
  Light chain CDR3 for antibody 6843 (IGKV1-17)
LQHNSYPRT

SEQ ID NO: 13686 - protein, 18 aa, Homo sapiens
  Heavy chain CDR3 for antibody 6843 (IGHV3-33)
ARGYNQGSGSYYNVCFDY

SEQ ID NO: 13687 - protein, 9 aa, Homo sapiens
  Light chain CDR3 for antibody 6844 (IGKV1-6)
LQDYNYPWT

SEQ ID NO: 13688 - protein, 18 aa, Homo sapiens
  Heavy chain CDR3 for antibody 6844 (IGHV3-33)
ARGAYSSGWDYYYYGLDV

SEQ ID NO: 13689 - protein, 9 aa, Homo sapiens
  Light chain CDR3 for antibody 6845 (IGKV1D-16)
QQYNSYPYT

SEQ ID NO: 13690 - protein, 18 aa, Homo sapiens
  Heavy chain CDR3 for antibody 6845 (IGHV3-33)
AREAIVVVPAAPYYGMDV

SEQ ID NO: 13691 - protein, 9 aa, Homo sapiens
  Light chain CDR3 for antibody 6846 (IGKV1-6)
LQDYNYPRT

SEQ ID NO: 13692 - protein, 7 aa, Homo sapiens
  Heavy chain CDR3 for antibody 6846 (IGHV3-33)
AREGDIL

SEQ ID NO: 13693 - protein, 10 aa, Homo sapiens
  Light chain CDR3 for antibody 6847 (IGKV3-20)
QQYGRSPPVT

SEQ ID NO: 13694 - protein, 15 aa, Homo sapiens
  Heavy chain CDR3 for antibody 6847 (IGHV3-23)
AKDGSYYDYYYGMDV

SEQ ID NO: 13695 - protein, 9 aa, Homo sapiens
  Light chain CDR3 for antibody 6848 (IGKV2-30)
MQGTHWPLT

SEQ ID NO: 13696 - protein, 17 aa, Homo sapiens
  Heavy chain CDR3 for antibody 6848 (IGHV4-34)
AGLRFFDWLFDYYGMDV

SEQ ID NO: 13697 - protein, 8 aa, Homo sapiens
  Light chain CDR3 for antibody 6849 (IGKV3-11)
QQRSNWLT

SEQ ID NO: 13698 - protein, 12 aa, Homo sapiens
  Heavy chain CDR3 for antibody 6849 (IGHV1-8)
ARGYFGSGYAHF

SEQ ID NO: 13699 - protein, 9 aa, Homo sapiens
  Light chain CDR3 for antibody 6850 (IGKV1-6)
LQDYKSPFT

SEQ ID NO: 13700 - protein, 12 aa, Homo sapiens
  Heavy chain CDR3 for antibody 6850 (IGHV4-39)
ARHGSGSSYFDY

SEQ ID NO: 13701 - protein, 9 aa, Homo sapiens
  Light chain CDR3 for antibody 6851 (IGKV1D-13)
QHFNNYMYT

SEQ ID NO: 13702 - protein, 15 aa, Homo sapiens
  Heavy chain CDR3 for antibody 6851 (IGHV3-33)
ARDHLTGYYYYGMDV

SEQ ID NO: 13703 - protein, 9 aa, Homo sapiens
  Light chain CDR3 for antibody 6852 (IGKV1-13)
QQLKSYPYT

SEQ ID NO: 13704 - protein, 18 aa, Homo sapiens
  Heavy chain CDR3 for antibody 6852 (IGHV3-33)
ARGLLWFGVSYYYYGMDV

SEQ ID NO: 13705 - protein, 9 aa, Homo sapiens
  Light chain CDR3 for antibody 6853 (IGKV5-2)
LQHDKFPYT

SEQ ID NO: 13706 - protein, 18 aa, Homo sapiens
  Heavy chain CDR3 for antibody 6853 (IGHV3-33)
ARREGIVGATTYYYGMDV

SEQ ID NO: 13707 - protein, 9 aa, Homo sapiens
  Light chain CDR3 for antibody 6854 (IGKV2-30)
MQGTHWPYT

SEQ ID NO: 13708 - protein, 17 aa, Homo sapiens
  Heavy chain CDR3 for antibody 6854 (IGHV4-39)
ARVLRYFDWLSHDAFDI

SEQ ID NO: 13709 - protein, 10 aa, Homo sapiens
  Light chain CDR3 for antibody 6855 (IGKV1-9)
QQLDSYPMYT

SEQ ID NO: 13710 - protein, 20 aa, Homo sapiens
  Heavy chain CDR3 for antibody 6855 (IGHV3-20)
ARDLCSSTSCYGYYYYGMDV

SEQ ID NO: 13711 - protein, 9 aa, Homo sapiens
  Light chain CDR3 for antibody 6856 (IGKV1-5)
QQYNSYPYT

SEQ ID NO: 13712 - protein, 14 aa, Homo sapiens
  Heavy chain CDR3 for antibody 6856 (IGHV4-39)
ARQGTMIRGGYFDY

SEQ ID NO: 13713 - protein, 9 aa, Homo sapiens
  Light chain CDR3 for antibody 6857 (IGKV1-9)
QQLNGYPFT

SEQ ID NO: 13714 - protein, 8 aa, Homo sapiens
  Heavy chain CDR3 for antibody 6857 (IGHV3-23)
AKETGNNY

SEQ ID NO: 13715 - protein, 10 aa, Homo sapiens
  Light chain CDR3 for antibody 6858 (IGKV1D-17)
LQHNSYPMYT

SEQ ID NO: 13716 - protein, 7 aa, Homo sapiens
  Heavy chain CDR3 for antibody 6858 (IGHV1-46)
AREGGDY

SEQ ID NO: 13717 - protein, 10 aa, Homo sapiens
  Light chain CDR3 for antibody 6859 (IGKV1-39)
QQSYSTPMYT

SEQ ID NO: 13718 - protein, 9 aa, Homo sapiens
  Heavy chain CDR3 for antibody 6859 (IGHV1-8)
ARGRLDFDY

SEQ ID NO: 13719 - protein, 9 aa, Homo sapiens
  Light chain CDR3 for antibody 6860 (IGKV1D-16)
QQYNSYPLT

SEQ ID NO: 13720 - protein, 11 aa, Homo sapiens
  Heavy chain CDR3 for antibody 6860 (IGHV3-33)
ARDRGYSYFDY

SEQ ID NO: 13721 - protein, 9 aa, Homo sapiens
  Light chain CDR3 for antibody 6861 (IGKV3D-7)
QQDYNLPFT

SEQ ID NO: 13722 - protein, 15 aa, Homo sapiens
  Heavy chain CDR3 for antibody 6861 (IGHV3-64)
ARDGLRYFDWLFPWY

SEQ ID NO: 13723 - protein, 9 aa, Homo sapiens
  Light chain CDR3 for antibody 6862 (IGKV1-16)
QQYNSYPLT

SEQ ID NO: 13724 - protein, 13 aa, Homo sapiens
  Heavy chain CDR3 for antibody 6862 (IGHV3-33)
ARGRGYNYGYGDY

SEQ ID NO: 13725 - protein, 9 aa, Homo sapiens
  Light chain CDR3 for antibody 6863 (IGKV6-21)
HQSSSLPHT

SEQ ID NO: 13726 - protein, 12 aa, Homo sapiens
  Heavy chain CDR3 for antibody 6863 (IGHV4-39)
ARHGSGSSYFEY

SEQ ID NO: 13727 - protein, 9 aa, Homo sapiens
  Light chain CDR3 for antibody 6864 (IGKV3D-20)
QQYGRSPRT

SEQ ID NO: 13728 - protein, 13 aa, Homo sapiens
  Heavy chain CDR3 for antibody 6864 (IGHV3-53)
ARSGSYWGYYFDY

SEQ ID NO: 13729 - protein, 10 aa, Homo sapiens
  Light chain CDR3 for antibody 6865 (IGKV1-17)
LQHNSYPMYT

SEQ ID NO: 13730 - protein, 21 aa, Homo sapiens
  Heavy chain CDR3 for antibody 6865 (IGHV3-33)
ARDEYYEIVTGYGYYHYGMDV

SEQ ID NO: 13731 - protein, 9 aa, Homo sapiens
  Light chain CDR3 for antibody 6866 (IGKV1-6)
LQDYNYPYT

SEQ ID NO: 13732 - protein, 19 aa, Homo sapiens
  Heavy chain CDR3 for antibody 6866 (IGHV3-33)
ARDKYYDILTGYPWNGMDV

SEQ ID NO: 13733 - protein, 10 aa, Homo sapiens
  Light chain CDR3 for antibody 6867 (IGKV1-39)
QQSYSTPMYT

SEQ ID NO: 13734 - protein, 13 aa, Homo sapiens
  Heavy chain CDR3 for antibody 6867 (IGHV3-33)
ARRYRSGWYPFDY

SEQ ID NO: 13735 - protein, 9 aa, Homo sapiens
  Light chain CDR3 for antibody 6868 (IGKV2-30)
MQGTHWPLT

SEQ ID NO: 13736 - protein, 14 aa, Homo sapiens
  Heavy chain CDR3 for antibody 6868 (IGHV1-46)
ARDGVGAKEGGFDY

SEQ ID NO: 13737 - protein, 8 aa, Homo sapiens
  Light chain CDR3 for antibody 6869 (IGKV1D-13)
QQFNNYPT

SEQ ID NO: 13738 - protein, 18 aa, Homo sapiens
  Heavy chain CDR3 for antibody 6869 (IGHV3-33)
VRDRERYGSGSYPDAFDI

SEQ ID NO: 13739 - protein, 9 aa, Homo sapiens
  Light chain CDR3 for antibody 6870 (IGKV3D-20)
QQYGSSPYT

SEQ ID NO: 13740 - protein, 22 aa, Homo sapiens
  Heavy chain CDR3 for antibody 6870 (IGHV3-11)
AREAYYDILTGYYTGYYYGMDV

SEQ ID NO: 13741 - protein, 9 aa, Homo sapiens
  Light chain CDR3 for antibody 6871 (IGKV3-11)
QQRSNWMYT

SEQ ID NO: 13742 - protein, 11 aa, Homo sapiens
  Heavy chain CDR3 for antibody 6871 (IGHV3-33)
ARAGIAAVFDY

SEQ ID NO: 13743 - protein, 9 aa, Homo sapiens
  Light chain CDR3 for antibody 6872 (IGKV3-20)
QQYGSSPYT

SEQ ID NO: 13744 - protein, 15 aa, Homo sapiens
  Heavy chain CDR3 for antibody 6872 (IGHV3-33)
AKGGTMVRGVIAFDY

SEQ ID NO: 13745 - protein, 9 aa, Homo sapiens
  Light chain CDR3 for antibody 6873 (IGKV3D-7)
QQDYNLPYT

SEQ ID NO: 13746 - protein, 14 aa, Homo sapiens
  Heavy chain CDR3 for antibody 6873 (IGHV3-33)
VSAISGSSYWYFAL

SEQ ID NO: 13747 - protein, 9 aa, Homo sapiens
  Light chain CDR3 for antibody 6874 (IGKV1-17)
LHSNNYPWT

SEQ ID NO: 13748 - protein, 14 aa, Homo sapiens
  Heavy chain CDR3 for antibody 6874 (IGHV3-33)
ARDWNDVYYYGMDV

SEQ ID NO: 13749 - protein, 9 aa, Homo sapiens
  Light chain CDR3 for antibody 6875 (IGKV2D-28)
MQVLQTPFT

SEQ ID NO: 13750 - protein, 13 aa, Homo sapiens
  Heavy chain CDR3 for antibody 6875 (IGHV4-59)
ARTMVRGVAPFDY

SEQ ID NO: 13751 - protein, 9 aa, Homo sapiens
  Light chain CDR3 for antibody 6876 (IGKV2-30)
MQGTHWPLT

SEQ ID NO: 13752 - protein, 13 aa, Homo sapiens
  Heavy chain CDR3 for antibody 6876 (IGHV4-59)
ANRDYYGYYGMDV

SEQ ID NO: 13753 - protein, 10 aa, Homo sapiens
  Light chain CDR3 for antibody 6877 (IGKV1-17)
LQHNSYPMYT

SEQ ID NO: 13754 - protein, 16 aa, Homo sapiens
  Heavy chain CDR3 for antibody 6877 (IGHV3-13)
ARDRSYESYYYYGMDV

SEQ ID NO: 13755 - protein, 10 aa, Homo sapiens
  Light chain CDR3 for antibody 6878 (IGKV1-9)
QQLDSYPMYT

SEQ ID NO: 13756 - protein, 13 aa, Homo sapiens
  Heavy chain CDR3 for antibody 6878 (IGHV3-11)
ARDEGYRGYVLDT

SEQ ID NO: 13757 - protein, 10 aa, Homo sapiens
  Light chain CDR3 for antibody 6879 (IGKV3-11)
QQRSNWPALT

SEQ ID NO: 13758 - protein, 11 aa, Homo sapiens
  Heavy chain CDR3 for antibody 6879 (IGHV4-59)
ARSLRYSFFDY

SEQ ID NO: 13759 - protein, 9 aa, Homo sapiens
  Light chain CDR3 for antibody 6880 (IGKV1-17)
QRFNNYMYT

SEQ ID NO: 13760 - protein, 14 aa, Homo sapiens
  Heavy chain CDR3 for antibody 6880 (IGHV4-39)
ARRGVVVPPGGMDV

SEQ ID NO: 13761 - protein, 9 aa, Homo sapiens
  Light chain CDR3 for antibody 6881 (IGKV3-20)
QQYGSSPYT

SEQ ID NO: 13762 - protein, 13 aa, Homo sapiens
  Heavy chain CDR3 for antibody 6881 (IGHV3-33)
AKCIVAAIGGFDY

SEQ ID NO: 13763 - protein, 9 aa, Homo sapiens
  Light chain CDR3 for antibody 6882 (IGKV1D-13)
QQFNNYPYT

SEQ ID NO: 13764 - protein, 15 aa, Homo sapiens
  Heavy chain CDR3 for antibody 6882 (IGHV3-33)
AKGGTMVRGVIAFDY

SEQ ID NO: 13765 - protein, 8 aa, Homo sapiens
  Light chain CDR3 for antibody 6883 (IGKV3D-7)
QQDYNLLT

SEQ ID NO: 13766 - protein, 12 aa, Homo sapiens
  Heavy chain CDR3 for antibody 6883 (IGHV3-33)
ARKGYDMHEFDI

SEQ ID NO: 13767 - protein, 8 aa, Homo sapiens
  Light chain CDR3 for antibody 6884 (IGKV1-5)
QQYNSYWT

SEQ ID NO: 13768 - protein, 13 aa, Homo sapiens
  Heavy chain CDR3 for antibody 6884 (IGHV3-66)
ANTGDSYYYGFYV

SEQ ID NO: 13769 - protein, 9 aa, Homo sapiens
  Light chain CDR3 for antibody 6885 (IGKV2-30)
MQGTHWPLT

SEQ ID NO: 13770 - protein, 15 aa, Homo sapiens
  Heavy chain CDR3 for antibody 6885 (IGHV4-39)
ARRDYDISTGYLFDY

SEQ ID NO: 13771 - protein, 10 aa, Homo sapiens
  Light chain CDR3 for antibody 6886 (IGKV3-11)
QQRSNWPALT

SEQ ID NO: 13772 - protein, 17 aa, Homo sapiens
  Heavy chain CDR3 for antibody 6886 (IGHV3-33)
ARVRGVIEGYYYYGMDV

SEQ ID NO: 13773 - protein, 9 aa, Homo sapiens
  Light chain CDR3 for antibody 6887 (IGKV1D-16)
QQYITYPYT

SEQ ID NO: 13774 - protein, 15 aa, Homo sapiens
  Heavy chain CDR3 for antibody 6887 (IGHV3-23)
AKDGSYYDYYYGMDV

SEQ ID NO: 13775 - protein, 9 aa, Homo sapiens
  Light chain CDR3 for antibody 6888 (IGKV3-11)
QQRSNWPWT

SEQ ID NO: 13776 - protein, 17 aa, Homo sapiens
  Heavy chain CDR3 for antibody 6888 (IGHV3-33)
ARGGGYENDHYYYGMDV

SEQ ID NO: 13777 - protein, 9 aa, Homo sapiens
  Light chain CDR3 for antibody 6889 (IGKV6-21)
HQSSSLPYT

SEQ ID NO: 13778 - protein, 15 aa, Homo sapiens
  Heavy chain CDR3 for antibody 6889 (IGHV3-33)
ARGGTGYYSYWYFDL

SEQ ID NO: 13779 - protein, 11 aa, Homo sapiens
  Light chain CDR3 for antibody 6890 (IGKV3-11)
QQRSNWPPTWT

SEQ ID NO: 13780 - protein, 12 aa, Homo sapiens
  Heavy chain CDR3 for antibody 6890 (IGHV3-23)
AKDGWFGESLDY

SEQ ID NO: 13781 - protein, 9 aa, Homo sapiens
  Light chain CDR3 for antibody 6891 (IGKV1-6)
LQDYNYPWT

SEQ ID NO: 13782 - protein, 16 aa, Homo sapiens
  Heavy chain CDR3 for antibody 6891 (IGHV3-33)
AREVGAKDYYYYGMDV

SEQ ID NO: 13783 - protein, 9 aa, Homo sapiens
  Light chain CDR3 for antibody 6892 (IGKV6-21)
HQSSSLPYT

SEQ ID NO: 13784 - protein, 11 aa, Homo sapiens
  Heavy chain CDR3 for antibody 6892 (IGHV4-59)
ARESFYGSGNL

SEQ ID NO: 13785 - protein, 8 aa, Homo sapiens
  Light chain CDR3 for antibody 6893 (IGKV1-5)
QQYNSYWT

SEQ ID NO: 13786 - protein, 18 aa, Homo sapiens
  Heavy chain CDR3 for antibody 6893 (IGHV3-23)
AKDRITGTTYGYYSGLDV

SEQ ID NO: 13787 - protein, 8 aa, Homo sapiens
  Light chain CDR3 for antibody 6894 (IGKV3D-7)
QQDYNLLT

SEQ ID NO: 13788 - protein, 12 aa, Homo sapiens
  Heavy chain CDR3 for antibody 6894 (IGHV3-33)
ARVDTAAPYFDY

SEQ ID NO: 13789 - protein, 9 aa, Homo sapiens
  Light chain CDR3 for antibody 6895 (IGKV1-33)
QQYDNLPFT

SEQ ID NO: 13790 - protein, 12 aa, Homo sapiens
  Heavy chain CDR3 for antibody 6895 (IGHV3-33)
ARDPGYYYGLDV

SEQ ID NO: 13791 - protein, 8 aa, Homo sapiens
  Light chain CDR3 for antibody 6896 (IGKV3D-7)
QQDYNLLT

SEQ ID NO: 13792 - protein, 13 aa, Homo sapiens
  Heavy chain CDR3 for antibody 6896 (IGHV3-33)
AKEDGDYHHYFDY

SEQ ID NO: 13793 - protein, 9 aa, Homo sapiens
  Light chain CDR3 for antibody 6897 (IGKV6-21)
HQSSSLPYT

SEQ ID NO: 13794 - protein, 14 aa, Homo sapiens
  Heavy chain CDR3 for antibody 6897 (IGHV3-20)
ARNGGSTWYDWFDP

SEQ ID NO: 13795 - protein, 8 aa, Homo sapiens
  Light chain CDR3 for antibody 6898 (IGKV3D-7)
QQDYNLLT

SEQ ID NO: 13796 - protein, 16 aa, Homo sapiens
  Heavy chain CDR3 for antibody 6898 (IGHV1-8)
AREGTMVRGVTYAFDI

SEQ ID NO: 13797 - protein, 8 aa, Homo sapiens
  Light chain CDR3 for antibody 6899 (IGKV1-5)
QQYNSYYT

SEQ ID NO: 13798 - protein, 22 aa, Homo sapiens
  Heavy chain CDR3 for antibody 6899 (IGHV4-59)
AREINYGSGSYYNEDYYYGMDV

SEQ ID NO: 13799 - protein, 9 aa, Homo sapiens
  Light chain CDR3 for antibody 6900 (IGKV1-17)
LQHNSYPRT

SEQ ID NO: 13800 - protein, 12 aa, Homo sapiens
  Heavy chain CDR3 for antibody 6900 (IGHV3-33)
AREFPWGDYFDY

SEQ ID NO: 13801 - protein, 6 aa, Homo sapiens
  Light chain CDR3 for antibody 6901 (IGKV3-20)
QQYGST

SEQ ID NO: 13802 - protein, 15 aa, Homo sapiens
  Heavy chain CDR3 for antibody 6901 (IGHV3-30)
ARGAMVRGVDYGMDV

SEQ ID NO: 13803 - protein, 9 aa, Homo sapiens
  Light chain CDR3 for antibody 6902 (IGKV1-6)
LQDYKSPFT

SEQ ID NO: 13804 - protein, 14 aa, Homo sapiens
  Heavy chain CDR3 for antibody 6902 (IGHV3-33)
VRDAMGATTAWFDP

SEQ ID NO: 13805 - protein, 9 aa, Homo sapiens
  Light chain CDR3 for antibody 6903 (IGKV3-11)
QQRSNWPPT

SEQ ID NO: 13806 - protein, 12 aa, Homo sapiens
  Heavy chain CDR3 for antibody 6903 (IGHV1-46)
ARAGMGAPYFDY

SEQ ID NO: 13807 - protein, 9 aa, Homo sapiens
  Light chain CDR3 for antibody 6904 (IGKV1-39)
QQSYSTPLT

SEQ ID NO: 13808 - protein, 18 aa, Homo sapiens
  Heavy chain CDR3 for antibody 6904 (IGHV3-33)
ARDGRISLVRGIIDAFDI

SEQ ID NO: 13809 - protein, 9 aa, Homo sapiens
  Light chain CDR3 for antibody 6905 (IGKV1D-13)
QHFNNYMYT

SEQ ID NO: 13810 - protein, 17 aa, Homo sapiens
  Heavy chain CDR3 for antibody 6905 (IGHV4-59)
ARDFLVRGEGSYYGMDV

SEQ ID NO: 13811 - protein, 9 aa, Homo sapiens
  Light chain CDR3 for antibody 6906 (IGKV1-33)
QQYDNLPFT

SEQ ID NO: 13812 - protein, 15 aa, Homo sapiens
  Heavy chain CDR3 for antibody 6906 (IGHV3-33)
ARDRGWKAPGYGMDV

SEQ ID NO: 13813 - protein, 8 aa, Homo sapiens
  Light chain CDR3 for antibody 6907 (IGKV3D-7)
QQDYNLVT

SEQ ID NO: 13814 - protein, 13 aa, Homo sapiens
  Heavy chain CDR3 for antibody 6907 (IGHV4-39)
ARRDGSYYGYFDY

SEQ ID NO: 13815 - protein, 9 aa, Homo sapiens
  Light chain CDR3 for antibody 6908 (IGKV5-2)
LQHDNFPYT

SEQ ID NO: 13816 - protein, 14 aa, Homo sapiens
  Heavy chain CDR3 for antibody 6908 (IGHV1-2)
AREGGSGSSPGMDV

SEQ ID NO: 13817 - protein, 9 aa, Homo sapiens
  Light chain CDR3 for antibody 6909 (IGKV1-27)
QKYNSAPYT

SEQ ID NO: 13818 - protein, 14 aa, Homo sapiens
  Heavy chain CDR3 for antibody 6909 (IGHV4-39)
ARQGTMIRGGYFDY

SEQ ID NO: 13819 - protein, 8 aa, Homo sapiens
  Light chain CDR3 for antibody 6910 (IGKV3-11)
QQRSNWLT

SEQ ID NO: 13820 - protein, 15 aa, Homo sapiens
  Heavy chain CDR3 for antibody 6910 (IGHV3-20)
ARDRGSSGWRDWFDP

SEQ ID NO: 13821 - protein, 9 aa, Homo sapiens
  Light chain CDR3 for antibody 6911 (IGKV1-16)
QQYNSYPLT

SEQ ID NO: 13822 - protein, 13 aa, Homo sapiens
  Heavy chain CDR3 for antibody 6911 (IGHV3-33)
AKRYSSGWYPFDF

SEQ ID NO: 13823 - protein, 9 aa, Homo sapiens
  Light chain CDR3 for antibody 6912 (IGKV1D-13)
QRFNNYLYT

SEQ ID NO: 13824 - protein, 12 aa, Homo sapiens
  Heavy chain CDR3 for antibody 6912 (IGHV3-33)
ARGYFGSGYAHF

SEQ ID NO: 13825 - protein, 9 aa, Homo sapiens
  Light chain CDR3 for antibody 6913 (IGKV1-16)
QHYNDYPFT

SEQ ID NO: 13826 - protein, 14 aa, Homo sapiens
  Heavy chain CDR3 for antibody 6913 (IGHV3-33)
ARDKTYPLSYGMDV

SEQ ID NO: 13827 - protein, 9 aa, Homo sapiens
  Light chain CDR3 for antibody 6914 (IGKV1-39)
QQSYRTPLT

SEQ ID NO: 13828 - protein, 15 aa, Homo sapiens
  Heavy chain CDR3 for antibody 6914 (IGHV3-23)
AKDGFYYGSGSSFDH

SEQ ID NO: 13829 - protein, 9 aa, Homo sapiens
  Light chain CDR3 for antibody 6915 (IGKV1-17)
LQHNSFPLT

SEQ ID NO: 13830 - protein, 20 aa, Homo sapiens
  Heavy chain CDR3 for antibody 6915 (IGHV3-33)
ARDRCSSTSCYGYYYYGMDV

SEQ ID NO: 13831 - protein, 9 aa, Homo sapiens
  Light chain CDR3 for antibody 6916 (IGKV3D-7)
QQDYTLPLT

SEQ ID NO: 13832 - protein, 13 aa, Homo sapiens
  Heavy chain CDR3 for antibody 6916 (IGHV4-39)
ARHEVMVRGVFDY

SEQ ID NO: 13833 - protein, 9 aa, Homo sapiens
  Light chain CDR3 for antibody 6917 (IGKV6-21)
HQSSSLPYT

SEQ ID NO: 13834 - protein, 9 aa, Homo sapiens
  Heavy chain CDR3 for antibody 6917 (IGHV1-18)
ARGNTWFDY

SEQ ID NO: 13835 - protein, 9 aa, Homo sapiens
  Light chain CDR3 for antibody 6918 (IGKV1D-16)
QQYYSYPRT

SEQ ID NO: 13836 - protein, 20 aa, Homo sapiens
  Heavy chain CDR3 for antibody 6918 (IGHV3-20)
ARDLCSSTSCYGYYYYGMDV

SEQ ID NO: 13837 - protein, 9 aa, Homo sapiens
  Light chain CDR3 for antibody 6919 (IGKV1-39)
QQSYRTPLT

SEQ ID NO: 13838 - protein, 18 aa, Homo sapiens
  Heavy chain CDR3 for antibody 6919 (IGHV4-59)
AREGDYVWGSYRPNWFDP

SEQ ID NO: 13839 - protein, 9 aa, Homo sapiens
  Light chain CDR3 for antibody 6920 (IGKV1-6)
LQDYNYPRT

SEQ ID NO: 13840 - protein, 22 aa, Homo sapiens
  Heavy chain CDR3 for antibody 6920 (IGHV3-33)
ARMYYDILTGYYKDYYYYGMDA

SEQ ID NO: 13841 - protein, 9 aa, Homo sapiens
  Light chain CDR3 for antibody 6921 (IGKV1D-13)
QQFNNYPST

SEQ ID NO: 13842 - protein, 12 aa, Homo sapiens
  Heavy chain CDR3 for antibody 6921 (IGHV3-33)
ARKQWLVQAFDI

SEQ ID NO: 13843 - protein, 6 aa, Homo sapiens
  Light chain CDR3 for antibody 6922 (IGKV3-20)
QQYGST

SEQ ID NO: 13844 - protein, 11 aa, Homo sapiens
  Heavy chain CDR3 for antibody 6922 (IGHV4-59)
AREMGHDTFDI

SEQ ID NO: 13845 - protein, 9 aa, Homo sapiens
  Light chain CDR3 for antibody 6923 (IGKV1-9)
QQLISYPLT

SEQ ID NO: 13846 - protein, 18 aa, Homo sapiens
  Heavy chain CDR3 for antibody 6923 (IGHV3-33)
ARDQYSGYDFYYYYGMDV

SEQ ID NO: 13847 - protein, 9 aa, Homo sapiens
  Light chain CDR3 for antibody 6924 (IGKV5-2)
LQHDNFPYT

SEQ ID NO: 13848 - protein, 14 aa, Homo sapiens
  Heavy chain CDR3 for antibody 6924 (IGHV3-23)
AKDPRGYYYYGMDV

SEQ ID NO: 13849 - protein, 9 aa, Homo sapiens
  Light chain CDR3 for antibody 6925 (IGKV3-15)
QQYNNWPRT

SEQ ID NO: 13850 - protein, 20 aa, Homo sapiens
  Heavy chain CDR3 for antibody 6925 (IGHV3-33)
ARDWMVRGVIITDYYYGMDV

SEQ ID NO: 13851 - protein, 9 aa, Homo sapiens
  Light chain CDR3 for antibody 6926 (IGKV1-39)
QQSYSTPLT

SEQ ID NO: 13852 - protein, 13 aa, Homo sapiens
  Heavy chain CDR3 for antibody 6926 (IGHV3-33)
ARALYSSSWPGDY

SEQ ID NO: 13853 - protein, 9 aa, Homo sapiens
  Light chain CDR3 for antibody 6927 (IGKV1-9)
QQGNTYSRT

SEQ ID NO: 13854 - protein, 13 aa, Homo sapiens
  Heavy chain CDR3 for antibody 6927 (IGHV4-59)
ARTMVRGVAPFDY

SEQ ID NO: 13855 - protein, 9 aa, Homo sapiens
  Light chain CDR3 for antibody 6928 (IGKV1-27)
QKYNSAPYT

SEQ ID NO: 13856 - protein, 24 aa, Homo sapiens
  Heavy chain CDR3 for antibody 6928 (IGHV1-46)
ARDEARGLLTGYYNMREYYYGMDV

SEQ ID NO: 13857 - protein, 9 aa, Homo sapiens
  Light chain CDR3 for antibody 6929 (IGKV1-6)
LQDYNYPRT

SEQ ID NO: 13858 - protein, 18 aa, Homo sapiens
  Heavy chain CDR3 for antibody 6929 (IGHV3-33)
AREAIVVVPAAPYYGMDV

SEQ ID NO: 13859 - protein, 9 aa, Homo sapiens
  Light chain CDR3 for antibody 6930 (IGKV3-11)
QQRSNWMYT

SEQ ID NO: 13860 - protein, 18 aa, Homo sapiens
  Heavy chain CDR3 for antibody 6930 (IGHV3-23)
AKEGNYYGSGSYWGYFDP

SEQ ID NO: 13861 - protein, 9 aa, Homo sapiens
  Light chain CDR3 for antibody 6931 (IGKV6-21)
HQSSSLPYT

SEQ ID NO: 13862 - protein, 18 aa, Homo sapiens
  Heavy chain CDR3 for antibody 6931 (IGHV1-24)
ATGLRYFDWPIISDLFDY

SEQ ID NO: 13863 - protein, 11 aa, Homo sapiens
  Light chain CDR3 for antibody 6932 (IGKV3-11)
QQRSNWPPTWT

SEQ ID NO: 13864 - protein, 14 aa, Homo sapiens
  Heavy chain CDR3 for antibody 6932 (IGHV3-33)
ARDREQQLVRYFDY

SEQ ID NO: 13865 - protein, 9 aa, Homo sapiens
  Light chain CDR3 for antibody 6933 (IGKV2-30)
MQGTHWPLT

SEQ ID NO: 13866 - protein, 13 aa, Homo sapiens
  Heavy chain CDR3 for antibody 6933 (IGHV3-33)
ARDSSSWYHWFDP

SEQ ID NO: 13867 - protein, 10 aa, Homo sapiens
  Light chain CDR3 for antibody 6934 (IGKV3-11)
QQRSNWPIFT

SEQ ID NO: 13868 - protein, 17 aa, Homo sapiens
  Heavy chain CDR3 for antibody 6934 (IGHV3-23)
SKERNWNDGYYYFGMDA

SEQ ID NO: 13869 - protein, 9 aa, Homo sapiens
  Light chain CDR3 for antibody 6935 (IGKV2-30)
MQGTHWPLT

SEQ ID NO: 13870 - protein, 16 aa, Homo sapiens
  Heavy chain CDR3 for antibody 6935 (IGHV3-33)
AKDAFYYGSGSHLFDY

SEQ ID NO: 13871 - protein, 9 aa, Homo sapiens
  Light chain CDR3 for antibody 6936 (IGKV1-27)
QKYNSAPYT

SEQ ID NO: 13872 - protein, 17 aa, Homo sapiens
  Heavy chain CDR3 for antibody 6936 (IGHV4-59)
ARRITMVREIIITAFDY

SEQ ID NO: 13873 - protein, 9 aa, Homo sapiens
  Light chain CDR3 for antibody 6937 (IGKV3D-7)
QQDYNLPLT

SEQ ID NO: 13874 - protein, 13 aa, Homo sapiens
  Heavy chain CDR3 for antibody 6937 (IGHV3-23)
AKDRGLRYYGMDV

SEQ ID NO: 13875 - protein, 9 aa, Homo sapiens
  Light chain CDR3 for antibody 6938 (IGKV1-6)
LQDYKSPFT

SEQ ID NO: 13876 - protein, 17 aa, Homo sapiens
  Heavy chain CDR3 for antibody 6938 (IGHV3-23)
AKDGIGELSYYYYGMDV

SEQ ID NO: 13877 - protein, 9 aa, Homo sapiens
  Light chain CDR3 for antibody 6939 (IGKV3D-7)
QQDYEFPIT

SEQ ID NO: 13878 - protein, 13 aa, Homo sapiens
  Heavy chain CDR3 for antibody 6939 (IGHV3-33)
ARDYCGGDCYLDY

SEQ ID NO: 13879 - protein, 9 aa, Homo sapiens
  Light chain CDR3 for antibody 6940 (IGKV2D-28)
MQALQTPPT

SEQ ID NO: 13880 - protein, 12 aa, Homo sapiens
  Heavy chain CDR3 for antibody 6940 (IGHV3-33)
ARDRAYRGSLDY

SEQ ID NO: 13881 - protein, 9 aa, Homo sapiens
  Light chain CDR3 for antibody 6941 (IGKV1-9)
QQLNSYPWP

SEQ ID NO: 13882 - protein, 14 aa, Homo sapiens
  Heavy chain CDR3 for antibody 6941 (IGHV3-23)
AKSRIVGALYYFDY

SEQ ID NO: 13883 - protein, 9 aa, Homo sapiens
  Light chain CDR3 for antibody 6942 (IGKV1-6)
LQDYNYPFT

SEQ ID NO: 13884 - protein, 14 aa, Homo sapiens
  Heavy chain CDR3 for antibody 6942 (IGHV3-33)
ARGGYNWNDDWFDP

SEQ ID NO: 13885 - protein, 9 aa, Homo sapiens
  Light chain CDR3 for antibody 6943 (IGKV1-6)
QQEYNYPLT

SEQ ID NO: 13886 - protein, 12 aa, Homo sapiens
  Heavy chain CDR3 for antibody 6943 (IGHV3-33)
ARKGYDMHEFDI

SEQ ID NO: 13887 - protein, 9 aa, Homo sapiens
  Light chain CDR3 for antibody 6944 (IGKV1D-13)
QHFNNYMYT

SEQ ID NO: 13888 - protein, 13 aa, Homo sapiens
  Heavy chain CDR3 for antibody 6944 (IGHV3-53)
ARSGSYWGYYFDY

SEQ ID NO: 13889 - protein, 9 aa, Homo sapiens
  Light chain CDR3 for antibody 6945 (IGKV2-30)
MQGTHWPLT

SEQ ID NO: 13890 - protein, 14 aa, Homo sapiens
  Heavy chain CDR3 for antibody 6945 (IGHV3-33)
ARGGYSGYRYYFDY

SEQ ID NO: 13891 - protein, 9 aa, Homo sapiens
  Light chain CDR3 for antibody 6946 (IGKV6-21)
HQSTSLPFT

SEQ ID NO: 13892 - protein, 15 aa, Homo sapiens
  Heavy chain CDR3 for antibody 6946 (IGHV3-33)
ARRVCSGGSCSLFDY

SEQ ID NO: 13893 - protein, 9 aa, Homo sapiens
  Light chain CDR3 for antibody 6947 (IGKV1-39)
QQSYSTPYT

SEQ ID NO: 13894 - protein, 19 aa, Homo sapiens
  Heavy chain CDR3 for antibody 6947 (IGHV1-18)
ARGGHIGVVTAFHGYGMDV

SEQ ID NO: 13895 - protein, 9 aa, Homo sapiens
  Light chain CDR3 for antibody 6948 (IGKV2-30)
MQGTHWPLT

SEQ ID NO: 13896 - protein, 11 aa, Homo sapiens
  Heavy chain CDR3 for antibody 6948 (IGHV4-59)
ARDGVRGVFDI

SEQ ID NO: 13897 - protein, 11 aa, Homo sapiens
  Light chain CDR3 for antibody 6949 (IGKV3-11)
QQRSNWPPTWT

SEQ ID NO: 13898 - protein, 13 aa, Homo sapiens
  Heavy chain CDR3 for antibody 6949 (IGHV4-39)
APFRVMVRGVLDY

SEQ ID NO: 13899 - protein, 10 aa, Homo sapiens
  Light chain CDR3 for antibody 6950 (IGKV1-39)
QQSYSTPMYT

SEQ ID NO: 13900 - protein, 12 aa, Homo sapiens
  Heavy chain CDR3 for antibody 6950 (IGHV4-39)
ARHGSGSSYFDY

SEQ ID NO: 13901 - protein, 9 aa, Homo sapiens
  Light chain CDR3 for antibody 6951 (IGKV5-2)
LQHDNFPWT

SEQ ID NO: 13902 - protein, 13 aa, Homo sapiens
  Heavy chain CDR3 for antibody 6951 (IGHV3-33)
ARCIVAAMGGFDY

SEQ ID NO: 13903 - protein, 9 aa, Homo sapiens
  Light chain CDR3 for antibody 6952 (IGKV3-20)
QQYGSSPWT

SEQ ID NO: 13904 - protein, 16 aa, Homo sapiens
  Heavy chain CDR3 for antibody 6952 (IGHV1-58)
AAPYCSSTSCHDAFDI

SEQ ID NO: 13905 - protein, 9 aa, Homo sapiens
  Light chain CDR3 for antibody 6953 (IGKV2D-28)
MQVLQTPFT

SEQ ID NO: 13906 - protein, 12 aa, Homo sapiens
  Heavy chain CDR3 for antibody 6953 (IGHV4-59)
ARDRSGWAYFDY

SEQ ID NO: 13907 - protein, 9 aa, Homo sapiens
  Light chain CDR3 for antibody 6954 (IGKV3-11)
QQRSNWPYT

SEQ ID NO: 13908 - protein, 12 aa, Homo sapiens
  Heavy chain CDR3 for antibody 6954 (IGHV3-33)
ARDYISTYGMDV

SEQ ID NO: 13909 - protein, 8 aa, Homo sapiens
  Light chain CDR3 for antibody 6955 (IGKV1-5)
QQYNSYYT

SEQ ID NO: 13910 - protein, 10 aa, Homo sapiens
  Heavy chain CDR3 for antibody 6955 (IGHV3-20)
AKEQWLVLDY

SEQ ID NO: 13911 - protein, 10 aa, Homo sapiens
  Light chain CDR3 for antibody 6956 (IGKV1-17)
LQHNSYPMYT

SEQ ID NO: 13912 - protein, 9 aa, Homo sapiens
  Heavy chain CDR3 for antibody 6956 (IGHV4-59)
ARGGASFDY

SEQ ID NO: 13913 - protein, 9 aa, Homo sapiens
  Light chain CDR3 for antibody 6957 (IGKV6-21)
HQSSSLPYT

SEQ ID NO: 13914 - protein, 17 aa, Homo sapiens
  Heavy chain CDR3 for antibody 6957 (IGHV3-13)
AREGWFGELWGYYGMDV

SEQ ID NO: 13915 - protein, 9 aa, Homo sapiens
  Light chain CDR3 for antibody 6958 (IGKV1-6)
LQDYNYPYT

SEQ ID NO: 13916 - protein, 11 aa, Homo sapiens
  Heavy chain CDR3 for antibody 6958 (IGHV1-24)
ATREYSSSCDY

SEQ ID NO: 13917 - protein, 10 aa, Homo sapiens
  Light chain CDR3 for antibody 6959 (IGKV3-20)
QQYGRSPPVT

SEQ ID NO: 13918 - protein, 15 aa, Homo sapiens
  Heavy chain CDR3 for antibody 6959 (IGHV3-33)
VCVLYDYGDYVGFDY

SEQ ID NO: 13919 - protein, 9 aa, Homo sapiens
  Light chain CDR3 for antibody 6960 (IGKV1-9)
QQVKSYPYT

SEQ ID NO: 13920 - protein, 17 aa, Homo sapiens
  Heavy chain CDR3 for antibody 6960 (IGHV1-46)
ARERYYGSGSYKYNMDV

SEQ ID NO: 13921 - protein, 9 aa, Homo sapiens
  Light chain CDR3 for antibody 6961 (IGKV3-11)
QQRSNWPPT

SEQ ID NO: 13922 - protein, 14 aa, Homo sapiens
  Heavy chain CDR3 for antibody 6961 (IGHV1-18)
AREGGSYFYYGVDV

SEQ ID NO: 13923 - protein, 10 aa, Homo sapiens
  Light chain CDR3 for antibody 6962 (IGKV1-9)
QQLDSYPMYT

SEQ ID NO: 13924 - protein, 12 aa, Homo sapiens
  Heavy chain CDR3 for antibody 6962 (IGHV3-33)
ARGYFGSGYAHF

SEQ ID NO: 13925 - protein, 9 aa, Homo sapiens
  Light chain CDR3 for antibody 6963 (IGKV1-5)
QQYNTYSRT

SEQ ID NO: 13926 - protein, 12 aa, Homo sapiens
  Heavy chain CDR3 for antibody 6963 (IGHV3-33)
ARGYFGSGYAHF

SEQ ID NO: 13927 - protein, 9 aa, Homo sapiens
  Light chain CDR3 for antibody 6964 (IGKV1-16)
QQYNSYPYT

SEQ ID NO: 13928 - protein, 15 aa, Homo sapiens
  Heavy chain CDR3 for antibody 6964 (IGHV3-33)
ARAYDLPHYYDGMDV

SEQ ID NO: 13929 - protein, 9 aa, Homo sapiens
  Light chain CDR3 for antibody 6965 (IGKV5-2)
LQHDNFPYT

SEQ ID NO: 13930 - protein, 12 aa, Homo sapiens
  Heavy chain CDR3 for antibody 6965 (IGHV3-66)
VRDRAAAPYFDL

SEQ ID NO: 13931 - protein, 9 aa, Homo sapiens
  Light chain CDR3 for antibody 6966 (IGKV3-11)
QQRINWPWT

SEQ ID NO: 13932 - protein, 9 aa, Homo sapiens
  Heavy chain CDR3 for antibody 6966 (IGHV1-18)
ARGKDWFDP

SEQ ID NO: 13933 - protein, 10 aa, Homo sapiens
  Light chain CDR3 for antibody 6967 (IGKV1-17)
LQHNSYPMYT

SEQ ID NO: 13934 - protein, 18 aa, Homo sapiens
  Heavy chain CDR3 for antibody 6967 (IGHV3-33)
ARREGIVGATTYYYGMDV

SEQ ID NO: 13935 - protein, 8 aa, Homo sapiens
  Light chain CDR3 for antibody 6968 (IGKV3D-7)
QQDYNLLT

SEQ ID NO: 13936 - protein, 16 aa, Homo sapiens
  Heavy chain CDR3 for antibody 6968 (IGHV3-33)
AREVAGSYYYYYGIDV

SEQ ID NO: 13937 - protein, 9 aa, Homo sapiens
  Light chain CDR3 for antibody 6969 (IGKV1-27)
QKYNSAPYT

SEQ ID NO: 13938 - protein, 11 aa, Homo sapiens
  Heavy chain CDR3 for antibody 6969 (IGHV4-59)
TRDRGLGSFDY

SEQ ID NO: 13939 - protein, 9 aa, Homo sapiens
  Light chain CDR3 for antibody 6970 (IGKV1-16)
QQYNSYPLT

SEQ ID NO: 13940 - protein, 11 aa, Homo sapiens
  Heavy chain CDR3 for antibody 6970 (IGHV3-30)
VRVGTGEFFDL

SEQ ID NO: 13941 - protein, 8 aa, Homo sapiens
  Light chain CDR3 for antibody 6971 (IGKV3-20)
QQYGSSLT

SEQ ID NO: 13942 - protein, 13 aa, Homo sapiens
  Heavy chain CDR3 for antibody 6971 (IGHV3-33)
ARVDTMVRGVMAY

SEQ ID NO: 13943 - protein, 9 aa, Homo sapiens
  Light chain CDR3 for antibody 6972 (IGKV1-5)
QQYNTYSRT

SEQ ID NO: 13944 - protein, 13 aa, Homo sapiens
  Heavy chain CDR3 for antibody 6972 (IGHV3-53)
ARSGSYWGYYFDY

SEQ ID NO: 13945 - protein, 8 aa, Homo sapiens
  Light chain CDR3 for antibody 6973 (IGKV1D-13)
QQFNNYPT

SEQ ID NO: 13946 - protein, 13 aa, Homo sapiens
  Heavy chain CDR3 for antibody 6973 (IGHV3-33)
ASGYSGYDWYFDL

SEQ ID NO: 13947 - protein, 9 aa, Homo sapiens
  Light chain CDR3 for antibody 6974 (IGKV1D-13)
QQFNNYPHT

SEQ ID NO: 13948 - protein, 11 aa, Homo sapiens
  Heavy chain CDR3 for antibody 6974 (IGHV4-39)
ARLLVGATTDY

SEQ ID NO: 13949 - protein, 9 aa, Homo sapiens
  Light chain CDR3 for antibody 6975 (IGKV3D-7)
QQDYTLPLT

SEQ ID NO: 13950 - protein, 17 aa, Homo sapiens
  Heavy chain CDR3 for antibody 6975 (IGHV3-33)
ARQGVLLWFGELYYFDY

SEQ ID NO: 13951 - protein, 9 aa, Homo sapiens
  Light chain CDR3 for antibody 6976 (IGKV1-39)
QQSYRTPLT

SEQ ID NO: 13952 - protein, 20 aa, Homo sapiens
  Heavy chain CDR3 for antibody 6976 (IGHV3-33)
ARDLGWATMVRGVIRAPFDY

SEQ ID NO: 13953 - protein, 9 aa, Homo sapiens
  Light chain CDR3 for antibody 6977 (IGKV1-39)
QQSYSTPYT

SEQ ID NO: 13954 - protein, 15 aa, Homo sapiens
  Heavy chain CDR3 for antibody 6977 (IGHV3-33)
ARAYDLPHYYYGMDV

SEQ ID NO: 13955 - protein, 9 aa, Homo sapiens
  Light chain CDR3 for antibody 6978 (IGKV5-2)
LQHDNFPWT

SEQ ID NO: 13956 - protein, 16 aa, Homo sapiens
  Heavy chain CDR3 for antibody 6978 (IGHV4-59)
AREGYNWNDGVNWFDP

SEQ ID NO: 13957 - protein, 9 aa, Homo sapiens
  Light chain CDR3 for antibody 6979 (IGKV1-17)
LQHNSFPLT

SEQ ID NO: 13958 - protein, 18 aa, Homo sapiens
  Heavy chain CDR3 for antibody 6979 (IGHV4-59)
AREGDYVWGSYRSNWFDP

SEQ ID NO: 13959 - protein, 9 aa, Homo sapiens
  Light chain CDR3 for antibody 6980 (IGKV3-15)
QQYNNWPLT

SEQ ID NO: 13960 - protein, 15 aa, Homo sapiens
  Heavy chain CDR3 for antibody 6980 (IGHV1-24)
ATHWDLRYYYYGMDV

SEQ ID NO: 13961 - protein, 9 aa, Homo sapiens
  Light chain CDR3 for antibody 6981 (IGKV1-5)
QQYNTYSRT

SEQ ID NO: 13962 - protein, 13 aa, Homo sapiens
  Heavy chain CDR3 for antibody 6981 (IGHV3-11)
ARDEGYRGYVLDT

SEQ ID NO: 13963 - protein, 8 aa, Homo sapiens
  Light chain CDR3 for antibody 6982 (IGKV3-20)
QQYGRSFT

SEQ ID NO: 13964 - protein, 7 aa, Homo sapiens
  Heavy chain CDR3 for antibody 6982 (IGHV1-46)
AREGGDY

SEQ ID NO: 13965 - protein, 9 aa, Homo sapiens
  Light chain CDR3 for antibody 6983 (IGKV1-6)
LQDYNYPYT

SEQ ID NO: 13966 - protein, 18 aa, Homo sapiens
  Heavy chain CDR3 for antibody 6983 (IGHV4-39)
ARGALTYYDILTGYFFDY

SEQ ID NO: 13967 - protein, 9 aa, Homo sapiens
  Light chain CDR3 for antibody 6984 (IGKV3D-7)
QQDYEFPLT

SEQ ID NO: 13968 - protein, 13 aa, Homo sapiens
  Heavy chain CDR3 for antibody 6984 (IGHV3-33)
ARDWGYSHGYFDY

SEQ ID NO: 13969 - protein, 6 aa, Homo sapiens
  Light chain CDR3 for antibody 6985 (IGKV3-20)
QQYGST

SEQ ID NO: 13970 - protein, 14 aa, Homo sapiens
  Heavy chain CDR3 for antibody 6985 (IGHV3-33)
ARGAAAGNFYGLDV

SEQ ID NO: 13971 - protein, 9 aa, Homo sapiens
  Light chain CDR3 for antibody 6986 (IGKV1-6)
LQDYNYPWT

SEQ ID NO: 13972 - protein, 18 aa, Homo sapiens
  Heavy chain CDR3 for antibody 6986 (IGHV4-39)
ARYITMVRGAIITGPFDY

SEQ ID NO: 13973 - protein, 9 aa, Homo sapiens
  Light chain CDR3 for antibody 6987 (IGKV3-20)
LQYGSSPYT

SEQ ID NO: 13974 - protein, 14 aa, Homo sapiens
  Heavy chain CDR3 for antibody 6987 (IGHV3-33)
ARDRDIMATSYFDY

SEQ ID NO: 13975 - protein, 10 aa, Homo sapiens
  Light chain CDR3 for antibody 6988 (IGKV3-15)
QQYNNWPPYT

SEQ ID NO: 13976 - protein, 13 aa, Homo sapiens
  Heavy chain CDR3 for antibody 6988 (IGHV3-33)
ARKAYGDYFYFDY

SEQ ID NO: 13977 - protein, 9 aa, Homo sapiens
  Light chain CDR3 for antibody 6989 (IGKV1-33)
QQYDNLPFT

SEQ ID NO: 13978 - protein, 11 aa, Homo sapiens
  Heavy chain CDR3 for antibody 6989 (IGHV3-33)
AREAANWGFDY

SEQ ID NO: 13979 - protein, 8 aa, Homo sapiens
  Light chain CDR3 for antibody 6990 (IGKV6-21)
HQSSSLPT

SEQ ID NO: 13980 - protein, 12 aa, Homo sapiens
  Heavy chain CDR3 for antibody 6990 (IGHV4-61)
ARVYSSGWLFDY

SEQ ID NO: 13981 - protein, 8 aa, Homo sapiens
  Light chain CDR3 for antibody 6991 (IGKV1-16)
QQYNSYYT

SEQ ID NO: 13982 - protein, 14 aa, Homo sapiens
  Heavy chain CDR3 for antibody 6991 (IGHV3-33)
ARDRRDFYYYGMDV

SEQ ID NO: 13983 - protein, 10 aa, Homo sapiens
  Light chain CDR3 for antibody 6992 (IGKV1-17)
LQHNSYPMYT

SEQ ID NO: 13984 - protein, 14 aa, Homo sapiens
  Heavy chain CDR3 for antibody 6992 (IGHV3-23)
ARDGYDFLTGPFDY

SEQ ID NO: 13985 - protein, 9 aa, Homo sapiens
  Light chain CDR3 for antibody 6993 (IGKV1-27)
QKYNSAPYT

SEQ ID NO: 13986 - protein, 9 aa, Homo sapiens
  Heavy chain CDR3 for antibody 6993 (IGHV3-23)
AKEQQLFDY

SEQ ID NO: 13987 - protein, 8 aa, Homo sapiens
  Light chain CDR3 for antibody 6994 (IGKV3D-7)
QQDYNLLT

SEQ ID NO: 13988 - protein, 9 aa, Homo sapiens
  Heavy chain CDR3 for antibody 6994 (IGHV3-33)
AREYKEFDY

SEQ ID NO: 13989 - protein, 9 aa, Homo sapiens
  Light chain CDR3 for antibody 6995 (IGKV3-15)
QQYNNWPYT

SEQ ID NO: 13990 - protein, 19 aa, Homo sapiens
  Heavy chain CDR3 for antibody 6995 (IGHV3-33)
ARGVRLRYFDPYYYYGMDV

SEQ ID NO: 13991 - protein, 10 aa, Homo sapiens
  Light chain CDR3 for antibody 6996 (IGKV1-17)
LQHNSYPMYT

SEQ ID NO: 13992 - protein, 10 aa, Homo sapiens
  Heavy chain CDR3 for antibody 6996 (IGHV3-33)
ARDVVVYFDY

SEQ ID NO: 13993 - protein, 9 aa, Homo sapiens
  Light chain CDR3 for antibody 6997 (IGKV3-15)
QQYNNWPLT

SEQ ID NO: 13994 - protein, 11 aa, Homo sapiens
  Heavy chain CDR3 for antibody 6997 (IGHV4-4)
AREAYYYGLDV

SEQ ID NO: 13995 - protein, 10 aa, Homo sapiens
  Light chain CDR3 for antibody 6998 (IGKV3-11)
QQRSNWPPFT

SEQ ID NO: 13996 - protein, 18 aa, Homo sapiens
  Heavy chain CDR3 for antibody 6998 (IGHV3-13)
ARDYYGSGSLYYYYGMDV

SEQ ID NO: 13997 - protein, 9 aa, Homo sapiens
  Light chain CDR3 for antibody 6999 (IGKV1-9)
QQLKSYPYT

SEQ ID NO: 13998 - protein, 12 aa, Homo sapiens
  Heavy chain CDR3 for antibody 6999 (IGHV3-33)
ARDLVGATPFDY

SEQ ID NO: 13999 - protein, 9 aa, Homo sapiens
  Light chain CDR3 for antibody 7000 (IGKV3D-20)
QQYGSSPYT

SEQ ID NO: 14000 - protein, 15 aa, Homo sapiens
  Heavy chain CDR3 for antibody 7000 (IGHV4-39)
ARRDYDISTGYLFDY

SEQ ID NO: 14001 - protein, 8 aa, Homo sapiens
  Light chain CDR3 for antibody 7001 (IGKV1D-13)
QQFNNYPT

SEQ ID NO: 14002 - protein, 11 aa, Homo sapiens
  Heavy chain CDR3 for antibody 7001 (IGHV3-74)
ARDRGNWGFDY

SEQ ID NO: 14003 - protein, 10 aa, Homo sapiens
  Light chain CDR3 for antibody 7002 (IGKV1-39)
QQSYSTPMYT

SEQ ID NO: 14004 - protein, 15 aa, Homo sapiens
  Heavy chain CDR3 for antibody 7002 (IGHV3-33)
ARRGYNDYDPYGMDV

SEQ ID NO: 14005 - protein, 8 aa, Homo sapiens
  Light chain CDR3 for antibody 7003 (IGKV3-11)
LQRGNWPT

SEQ ID NO: 14006 - protein, 14 aa, Homo sapiens
  Heavy chain CDR3 for antibody 7003 (IGHV3-33)
ARGAAAGNFYGLDV

SEQ ID NO: 14007 - protein, 10 aa, Homo sapiens
  Light chain CDR3 for antibody 7004 (IGKV1-27)
QKYNSAPMYT

SEQ ID NO: 14008 - protein, 12 aa, Homo sapiens
  Heavy chain CDR3 for antibody 7004 (IGHV4-61)
ARVYSSGWLFDY

SEQ ID NO: 14009 - protein, 9 aa, Homo sapiens
  Light chain CDR3 for antibody 7005 (IGKV3-11)
QQRSNWPYT

SEQ ID NO: 14010 - protein, 16 aa, Homo sapiens
  Heavy chain CDR3 for antibody 7005 (IGHV3-30)
ARDIAVAGHVYYGMDV

SEQ ID NO: 14011 - protein, 9 aa, Homo sapiens
  Light chain CDR3 for antibody 7006 (IGKV1-17)
LQHNSYPPT

SEQ ID NO: 14012 - protein, 15 aa, Homo sapiens
  Heavy chain CDR3 for antibody 7006 (IGHV1-46)
ARGRFFDWLLSPFDY

SEQ ID NO: 14013 - protein, 9 aa, Homo sapiens
  Light chain CDR3 for antibody 7007 (IGKV1-17)
LQHNSFPLT

SEQ ID NO: 14014 - protein, 13 aa, Homo sapiens
  Heavy chain CDR3 for antibody 7007 (IGHV3-33)
ARGVLWFGELFDY

SEQ ID NO: 14015 - protein, 9 aa, Homo sapiens
  Light chain CDR3 for antibody 7008 (IGKV3-11)
QQRSSWPPT

SEQ ID NO: 14016 - protein, 9 aa, Homo sapiens
  Heavy chain CDR3 for antibody 7008 (IGHV4-59)
AREGGSGSL

SEQ ID NO: 14017 - protein, 9 aa, Homo sapiens
  Light chain CDR3 for antibody 7009 (IGKV1-17)
LHSNNYPWT

SEQ ID NO: 14018 - protein, 14 aa, Homo sapiens
  Heavy chain CDR3 for antibody 7009 (IGHV3-33)
ARQYSYGYPYYFDY

SEQ ID NO: 14019 - protein, 10 aa, Homo sapiens
  Light chain CDR3 for antibody 7010 (IGKV3-15)
QQYNNWPPYT

SEQ ID NO: 14020 - protein, 14 aa, Homo sapiens
  Heavy chain CDR3 for antibody 7010 (IGHV3-33)
ARGAAAGNFYGLDV

SEQ ID NO: 14021 - protein, 9 aa, Homo sapiens
  Light chain CDR3 for antibody 7011 (IGKV5-2)
LQHDKFPYT

SEQ ID NO: 14022 - protein, 15 aa, Homo sapiens
  Heavy chain CDR3 for antibody 7011 (IGHV3-23)
AKAGGRYFDWFPFDY

SEQ ID NO: 14023 - protein, 8 aa, Homo sapiens
  Light chain CDR3 for antibody 7012 (IGKV1-5)
QQYNSYYT

SEQ ID NO: 14024 - protein, 9 aa, Homo sapiens
  Heavy chain CDR3 for antibody 7012 (IGHV3-23)
ARIWWLKDY

SEQ ID NO: 14025 - protein, 10 aa, Homo sapiens
  Light chain CDR3 for antibody 7013 (IGKV1-9)
QQLDSYPMYT

SEQ ID NO: 14026 - protein, 14 aa, Homo sapiens
  Heavy chain CDR3 for antibody 7013 (IGHV3-23)
ARDRIAAASSDFDC

SEQ ID NO: 14027 - protein, 8 aa, Homo sapiens
  Light chain CDR3 for antibody 7014 (IGKV3D-7)
QQDYNLLT

SEQ ID NO: 14028 - protein, 14 aa, Homo sapiens
  Heavy chain CDR3 for antibody 7014 (IGHV3-20)
ARDGGSTCYDWFDP

SEQ ID NO: 14029 - protein, 8 aa, Homo sapiens
  Light chain CDR3 for antibody 7015 (IGKV6-21)
HQSSSLPT

SEQ ID NO: 14030 - protein, 9 aa, Homo sapiens
  Heavy chain CDR3 for antibody 7015 (IGHV3-30)
ARDNWGFDY

SEQ ID NO: 14031 - protein, 10 aa, Homo sapiens
  Light chain CDR3 for antibody 7016 (IGKV1-39)
QQSYSTPMYT

SEQ ID NO: 14032 - protein, 21 aa, Homo sapiens
  Heavy chain CDR3 for antibody 7016 (IGHV3-33)
ARKRLYDILTGYYKAYYGMDV

SEQ ID NO: 14033 - protein, 9 aa, Homo sapiens
  Light chain CDR3 for antibody 7017 (IGKV2-30)
MQGTHWPLT

SEQ ID NO: 14034 - protein, 18 aa, Homo sapiens
  Heavy chain CDR3 for antibody 7017 (IGHV1-46)
ARDLTGRTENYYFYGMDV

SEQ ID NO: 14035 - protein, 10 aa, Homo sapiens
  Light chain CDR3 for antibody 7018 (IGKV1-17)
LQHNSYPMYT

SEQ ID NO: 14036 - protein, 13 aa, Homo sapiens
  Heavy chain CDR3 for antibody 7018 (IGHV3-33)
ARRATLVRGVFDP

SEQ ID NO: 14037 - protein, 9 aa, Homo sapiens
  Light chain CDR3 for antibody 7019 (IGKV1-27)
QKYNSAPYT

SEQ ID NO: 14038 - protein, 11 aa, Homo sapiens
  Heavy chain CDR3 for antibody 7019 (IGHV3-33)
ARGTTVTHFDY

SEQ ID NO: 14039 - protein, 9 aa, Homo sapiens
  Light chain CDR3 for antibody 7020 (IGKV1D-16)
QQYDSYPWT

SEQ ID NO: 14040 - protein, 12 aa, Homo sapiens
  Heavy chain CDR3 for antibody 7020 (IGHV3-33)
AREGTGGNWFDP

SEQ ID NO: 14041 - protein, 8 aa, Homo sapiens
  Light chain CDR3 for antibody 7021 (IGKV3-20)
QQYGRSFT

SEQ ID NO: 14042 - protein, 15 aa, Homo sapiens
  Heavy chain CDR3 for antibody 7021 (IGHV4-39)
ARQGLVATIKGYFQH

SEQ ID NO: 14043 - protein, 9 aa, Homo sapiens
  Light chain CDR3 for antibody 7022 (IGKV1D-13)
QQFNNYPHT

SEQ ID NO: 14044 - protein, 14 aa, Homo sapiens
  Heavy chain CDR3 for antibody 7022 (IGHV4-39)
ARQGGSGSYYNLDY

SEQ ID NO: 14045 - protein, 9 aa, Homo sapiens
  Light chain CDR3 for antibody 7023 (IGKV5-2)
LQHDNFPYT

SEQ ID NO: 14046 - protein, 5 aa, Homo sapiens
  Heavy chain CDR3 for antibody 7023 (IGHV4-39)
ARGDY

SEQ ID NO: 14047 - protein, 10 aa, Homo sapiens
  Light chain CDR3 for antibody 7024 (IGKV1-17)
LQHNSYPMYT

SEQ ID NO: 14048 - protein, 12 aa, Homo sapiens
  Heavy chain CDR3 for antibody 7024 (IGHV3-13)
ARDRGYSGYFDY

SEQ ID NO: 14049 - protein, 10 aa, Homo sapiens
  Light chain CDR3 for antibody 7025 (IGKV1-17)
LQHNSYPMYT

SEQ ID NO: 14050 - protein, 13 aa, Homo sapiens
  Heavy chain CDR3 for antibody 7025 (IGHV3-33)
ARVDTMVRGVMAY

SEQ ID NO: 14051 - protein, 9 aa, Homo sapiens
  Light chain CDR3 for antibody 7026 (IGKV4-1)
QQYYSTPWT

SEQ ID NO: 14052 - protein, 15 aa, Homo sapiens
  Heavy chain CDR3 for antibody 7026 (IGHV1-18)
ARGYCSSTSCYYFDY

SEQ ID NO: 14053 - protein, 8 aa, Homo sapiens
  Light chain CDR3 for antibody 7027 (IGKV1D-13)
QQYNNYPT

SEQ ID NO: 14054 - protein, 11 aa, Homo sapiens
  Heavy chain CDR3 for antibody 7027 (IGHV3-33)
ARGSGSYAFDS

SEQ ID NO: 14055 - protein, 9 aa, Homo sapiens
  Light chain CDR3 for antibody 7028 (IGKV1-9)
QQLKSYLYT

SEQ ID NO: 14056 - protein, 14 aa, Homo sapiens
  Heavy chain CDR3 for antibody 7028 (IGHV3-33)
ARDNILTVYYLFDY

SEQ ID NO: 14057 - protein, 10 aa, Homo sapiens
  Light chain CDR3 for antibody 7029 (IGKV3-20)
QQYGRSPPVT

SEQ ID NO: 14058 - protein, 18 aa, Homo sapiens
  Heavy chain CDR3 for antibody 7029 (IGHV3-33)
ARGYYGSGNFYKDSGMDV

SEQ ID NO: 14059 - protein, 9 aa, Homo sapiens
  Light chain CDR3 for antibody 7030 (IGKV1-9)
QQLNSYPYT

SEQ ID NO: 14060 - protein, 12 aa, Homo sapiens
  Heavy chain CDR3 for antibody 7030 (IGHV3-33)
ARDRAYRGSLDH

SEQ ID NO: 14061 - protein, 9 aa, Homo sapiens
  Light chain CDR3 for antibody 7031 (IGKV3D-7)
QQDYNLPLT

SEQ ID NO: 14062 - protein, 15 aa, Homo sapiens
  Heavy chain CDR3 for antibody 7031 (IGHV3-23)
AKDRYFDWLSDAFDI

SEQ ID NO: 14063 - protein, 9 aa, Homo sapiens
  Light chain CDR3 for antibody 7032 (IGKV5-2)
LQHDNFPWT

SEQ ID NO: 14064 - protein, 8 aa, Homo sapiens
  Heavy chain CDR3 for antibody 7032 (IGHV4-4)
ARGARFDP

SEQ ID NO: 14065 - protein, 10 aa, Homo sapiens
  Light chain CDR3 for antibody 7033 (IGKV1-39)
QQSYSTPMYT

SEQ ID NO: 14066 - protein, 11 aa, Homo sapiens
  Heavy chain CDR3 for antibody 7033 (IGHV3-33)
ARARYTTGLDY

SEQ ID NO: 14067 - protein, 9 aa, Homo sapiens
  Light chain CDR3 for antibody 7034 (IGKV1D-13)
QQFNNYPHT

SEQ ID NO: 14068 - protein, 17 aa, Homo sapiens
  Heavy chain CDR3 for antibody 7034 (IGHV3-33)
ARDPARGNVRSFYGLDV

SEQ ID NO: 14069 - protein, 9 aa, Homo sapiens
  Light chain CDR3 for antibody 7035 (IGKV1-6)
LQDYNYPFT

SEQ ID NO: 14070 - protein, 13 aa, Homo sapiens
  Heavy chain CDR3 for antibody 7035 (IGHV3-33)
ARTDYYYYYGLDA

SEQ ID NO: 14071 - protein, 9 aa, Homo sapiens
  Light chain CDR3 for antibody 7036 (IGKV1-17)
LQYNSYPWT

SEQ ID NO: 14072 - protein, 9 aa, Homo sapiens
  Heavy chain CDR3 for antibody 7036 (IGHV3-13)
ARDHWYFDL

SEQ ID NO: 14073 - protein, 9 aa, Homo sapiens
  Light chain CDR3 for antibody 7037 (IGKV1-17)
LQHNSYPYT

SEQ ID NO: 14074 - protein, 19 aa, Homo sapiens
  Heavy chain CDR3 for antibody 7037 (IGHV3-74)
ARLDYDFLTDYYRPYFFAY

SEQ ID NO: 14075 - protein, 9 aa, Homo sapiens
  Light chain CDR3 for antibody 7038 (IGKV1-39)
QQSYSTPLT

SEQ ID NO: 14076 - protein, 11 aa, Homo sapiens
  Heavy chain CDR3 for antibody 7038 (IGHV4-59)
ARDGSWEPFDY

SEQ ID NO: 14077 - protein, 9 aa, Homo sapiens
  Light chain CDR3 for antibody 7039 (IGKV3-15)
QQYNNWPLT

SEQ ID NO: 14078 - protein, 16 aa, Homo sapiens
  Heavy chain CDR3 for antibody 7039 (IGHV3-20)
AREGYSSSWFDRNFDY

SEQ ID NO: 14079 - protein, 9 aa, Homo sapiens
  Light chain CDR3 for antibody 7040 (IGKV1-39)
QQSYRTPLT

SEQ ID NO: 14080 - protein, 18 aa, Homo sapiens
  Heavy chain CDR3 for antibody 7040 (IGHV3-33)
ARDQGIVVLPGAPWYFDL

SEQ ID NO: 14081 - protein, 9 aa, Homo sapiens
  Light chain CDR3 for antibody 7041 (IGKV1-9)
QQLKSYLYT

SEQ ID NO: 14082 - protein, 12 aa, Homo sapiens
  Heavy chain CDR3 for antibody 7041 (IGHV3-33)
ARDRAYRGSLDY

SEQ ID NO: 14083 - protein, 9 aa, Homo sapiens
  Light chain CDR3 for antibody 7042 (IGKV6-21)
HQSSSLPFT

SEQ ID NO: 14084 - protein, 15 aa, Homo sapiens
  Heavy chain CDR3 for antibody 7042 (IGHV3-33)
AREGSSSWYLYYFDY

SEQ ID NO: 14085 - protein, 8 aa, Homo sapiens
  Light chain CDR3 for antibody 7043 (IGKV1D-13)
QQFNNYPT

SEQ ID NO: 14086 - protein, 13 aa, Homo sapiens
  Heavy chain CDR3 for antibody 7043 (IGHV3-33)
ARGVLWFGELFDY

SEQ ID NO: 14087 - protein, 8 aa, Homo sapiens
  Light chain CDR3 for antibody 7044 (IGKV3-11)
QQRSNWLT

SEQ ID NO: 14088 - protein, 13 aa, Homo sapiens
  Heavy chain CDR3 for antibody 7044 (IGHV3-33)
ARDQRYSSGWYDY

SEQ ID NO: 14089 - protein, 10 aa, Homo sapiens
  Light chain CDR3 for antibody 7045 (IGKV1-17)
LQHNSYPMYT

SEQ ID NO: 14090 - protein, 11 aa, Homo sapiens
  Heavy chain CDR3 for antibody 7045 (IGHV3-13)
AREAIIGPFDY

SEQ ID NO: 14091 - protein, 9 aa, Homo sapiens
  Light chain CDR3 for antibody 7046 (IGKV1-39)
QQSYSTPWT

SEQ ID NO: 14092 - protein, 11 aa, Homo sapiens
  Heavy chain CDR3 for antibody 7046 (IGHV4-59)
AREDYGVPFDY

SEQ ID NO: 14093 - protein, 8 aa, Homo sapiens
  Light chain CDR3 for antibody 7047 (IGKV3-11)
QQRSNWWT

SEQ ID NO: 14094 - protein, 13 aa, Homo sapiens
  Heavy chain CDR3 for antibody 7047 (IGHV3-11)
ARDEGYRGYVLDN

SEQ ID NO: 14095 - protein, 8 aa, Homo sapiens
  Light chain CDR3 for antibody 7048 (IGKV3D-7)
QQDYSLLT

SEQ ID NO: 14096 - protein, 10 aa, Homo sapiens
  Heavy chain CDR3 for antibody 7048 (IGHV3-33)
AREWFGGFDI

SEQ ID NO: 14097 - protein, 9 aa, Homo sapiens
  Light chain CDR3 for antibody 7049 (IGKV1-16)
QQYKSYPYT

SEQ ID NO: 14098 - protein, 14 aa, Homo sapiens
  Heavy chain CDR3 for antibody 7049 (IGHV1-24)
ATWLPLYYYYGMDV

SEQ ID NO: 14099 - protein, 9 aa, Homo sapiens
  Light chain CDR3 for antibody 7050 (IGKV3-11)
QQRSNWPYT

SEQ ID NO: 14100 - protein, 18 aa, Homo sapiens
  Heavy chain CDR3 for antibody 7050 (IGHV3-33)
ARDGRISLVRGIIDAFDI

SEQ ID NO: 14101 - protein, 8 aa, Homo sapiens
  Light chain CDR3 for antibody 7051 (IGKV1-5)
QQYNSYYT

SEQ ID NO: 14102 - protein, 13 aa, Homo sapiens
  Heavy chain CDR3 for antibody 7051 (IGHV3-33)
ARAITMVRGVIDY

SEQ ID NO: 14103 - protein, 8 aa, Homo sapiens
  Light chain CDR3 for antibody 7052 (IGKV3-20)
QQYGSSLT

SEQ ID NO: 14104 - protein, 11 aa, Homo sapiens
  Heavy chain CDR3 for antibody 7052 (IGHV3-33)
ARAGIAALFDY

SEQ ID NO: 14105 - protein, 8 aa, Homo sapiens
  Light chain CDR3 for antibody 7053 (IGKV1D-13)
QQFNNYYT

SEQ ID NO: 14106 - protein, 17 aa, Homo sapiens
  Heavy chain CDR3 for antibody 7053 (IGHV1-18)
ARERYYGSGSYKYNMDV

SEQ ID NO: 14107 - protein, 8 aa, Homo sapiens
  Light chain CDR3 for antibody 7054 (IGKV3D-7)
QQDYNLLT

SEQ ID NO: 14108 - protein, 14 aa, Homo sapiens
  Heavy chain CDR3 for antibody 7054 (IGHV3-33)
ARDGYDILTGPFDY

SEQ ID NO: 14109 - protein, 9 aa, Homo sapiens
  Light chain CDR3 for antibody 7055 (IGKV1-6)
LQDYKSPFT

SEQ ID NO: 14110 - protein, 10 aa, Homo sapiens
  Heavy chain CDR3 for antibody 7055 (IGHV3-33)
ARDGSGSQPI

SEQ ID NO: 14111 - protein, 9 aa, Homo sapiens
  Light chain CDR3 for antibody 7056 (IGKV2-30)
MQGTHWPLT

SEQ ID NO: 14112 - protein, 17 aa, Homo sapiens
  Heavy chain CDR3 for antibody 7056 (IGHV3-33)
ARGDGDILTGYYEWFDP

SEQ ID NO: 14113 - protein, 8 aa, Homo sapiens
  Light chain CDR3 for antibody 7057 (IGKV1-5)
QQYNSYWT

SEQ ID NO: 14114 - protein, 16 aa, Homo sapiens
  Heavy chain CDR3 for antibody 7057 (IGHV1-24)
ATEDSSSTYYYYGLDV

SEQ ID NO: 14115 - protein, 9 aa, Homo sapiens
  Light chain CDR3 for antibody 7058 (IGKV1-6)
QQEYNYPLT

SEQ ID NO: 14116 - protein, 11 aa, Homo sapiens
  Heavy chain CDR3 for antibody 7058 (IGHV1-24)
ATELGLYYFDY

SEQ ID NO: 14117 - protein, 9 aa, Homo sapiens
  Light chain CDR3 for antibody 7059 (IGKV3-15)
QQYNNWPLT

SEQ ID NO: 14118 - protein, 11 aa, Homo sapiens
  Heavy chain CDR3 for antibody 7059 (IGHV4-59)
ARDGSWEPFDY

SEQ ID NO: 14119 - protein, 10 aa, Homo sapiens
  Light chain CDR3 for antibody 7060 (IGKV1-9)
QQLDSYPMYT

SEQ ID NO: 14120 - protein, 13 aa, Homo sapiens
  Heavy chain CDR3 for antibody 7060 (IGHV3-33)
ASTGDSYYYGMDV

SEQ ID NO: 14121 - protein, 9 aa, Homo sapiens
  Light chain CDR3 for antibody 7061 (IGKV1-39)
QQSYRTPLT

SEQ ID NO: 14122 - protein, 14 aa, Homo sapiens
  Heavy chain CDR3 for antibody 7061 (IGHV3-33)
ARDNILTVYYLFDY

SEQ ID NO: 14123 - protein, 9 aa, Homo sapiens
  Light chain CDR3 for antibody 7062 (IGKV1-39)
QQSYSTPLT

SEQ ID NO: 14124 - protein, 12 aa, Homo sapiens
  Heavy chain CDR3 for antibody 7062 (IGHV3-20)
AIGTMVRGIPDY

SEQ ID NO: 14125 - protein, 9 aa, Homo sapiens
  Light chain CDR3 for antibody 7063 (IGKV1-6)
LQVYSYPWT

SEQ ID NO: 14126 - protein, 13 aa, Homo sapiens
  Heavy chain CDR3 for antibody 7063 (IGHV3-33)
ARDYCGGDCYLDY

SEQ ID NO: 14127 - protein, 10 aa, Homo sapiens
  Light chain CDR3 for antibody 7064 (IGKV3-20)
QQYGSSPPYT

SEQ ID NO: 14128 - protein, 16 aa, Homo sapiens
  Heavy chain CDR3 for antibody 7064 (IGHV4-59)
ARGRYFEWLLGDVFDI

SEQ ID NO: 14129 - protein, 9 aa, Homo sapiens
  Light chain CDR3 for antibody 7065 (IGKV1-33)
QQYDNLPFT

SEQ ID NO: 14130 - protein, 14 aa, Homo sapiens
  Heavy chain CDR3 for antibody 7065 (IGHV3-64)
VRDQGSMVRGGGDY

SEQ ID NO: 14131 - protein, 8 aa, Homo sapiens
  Light chain CDR3 for antibody 7066 (IGKV6-21)
HQSSSLPT

SEQ ID NO: 14132 - protein, 16 aa, Homo sapiens
  Heavy chain CDR3 for antibody 7066 (IGHV3-33)
ARGGRSDWLYYYGMDV

SEQ ID NO: 14133 - protein, 9 aa, Homo sapiens
  Light chain CDR3 for antibody 7067 (IGKV1-39)
QQSYSTPLT

SEQ ID NO: 14134 - protein, 13 aa, Homo sapiens
  Heavy chain CDR3 for antibody 7067 (IGHV1-18)
ARKWEWDLLNFDY

SEQ ID NO: 14135 - protein, 9 aa, Homo sapiens
  Light chain CDR3 for antibody 7068 (IGKV1D-16)
QQYITYPYT

SEQ ID NO: 14136 - protein, 10 aa, Homo sapiens
  Heavy chain CDR3 for antibody 7068 (IGHV3-23)
AKGDRWRFDP

SEQ ID NO: 14137 - protein, 9 aa, Homo sapiens
  Light chain CDR3 for antibody 7069 (IGKV1D-13)
QQFNNYPHT

SEQ ID NO: 14138 - protein, 10 aa, Homo sapiens
  Heavy chain CDR3 for antibody 7069 (IGHV4-39)
ARQLGNWFDP

SEQ ID NO: 14139 - protein, 9 aa, Homo sapiens
  Light chain CDR3 for antibody 7070 (IGKV1-6)
LQDYNYPRT

SEQ ID NO: 14140 - protein, 16 aa, Homo sapiens
  Heavy chain CDR3 for antibody 7070 (IGHV4-39)
ARRVPYYDILTGYLDY

SEQ ID NO: 14141 - protein, 8 aa, Homo sapiens
  Light chain CDR3 for antibody 7071 (IGKV1-5)
QQYNSYWT

SEQ ID NO: 14142 - protein, 21 aa, Homo sapiens
  Heavy chain CDR3 for antibody 7071 (IGHV3-33)
ARKRLYDILTGYYKAYYGMDV

SEQ ID NO: 14143 - protein, 8 aa, Homo sapiens
  Light chain CDR3 for antibody 7072 (IGKV6-21)
HQSSSLPT

SEQ ID NO: 14144 - protein, 11 aa, Homo sapiens
  Heavy chain CDR3 for antibody 7072 (IGHV3-33)
ARDTWDDYFDY

SEQ ID NO: 14145 - protein, 9 aa, Homo sapiens
  Light chain CDR3 for antibody 7073 (IGKV1-17)
LQHNSYPLT

SEQ ID NO: 14146 - protein, 11 aa, Homo sapiens
  Heavy chain CDR3 for antibody 7073 (IGHV3-33)
ARAGIAAVFDY

SEQ ID NO: 14147 - protein, 8 aa, Homo sapiens
  Light chain CDR3 for antibody 7074 (IGKV3D-7)
QQDYNLLT

SEQ ID NO: 14148 - protein, 15 aa, Homo sapiens
  Heavy chain CDR3 for antibody 7074 (IGHV3-33)
AREGLRYFHYYGMDV

SEQ ID NO: 14149 - protein, 9 aa, Homo sapiens
  Light chain CDR3 for antibody 7075 (IGKV5-2)
LQHDNFPYT

SEQ ID NO: 14150 - protein, 13 aa, Homo sapiens
  Heavy chain CDR3 for antibody 7075 (IGHV3-53)
ARDRDSSGSYFDY

SEQ ID NO: 14151 - protein, 9 aa, Homo sapiens
  Light chain CDR3 for antibody 7076 (IGKV3-15)
QQYNNWPYT

SEQ ID NO: 14152 - protein, 14 aa, Homo sapiens
  Heavy chain CDR3 for antibody 7076 (IGHV3-33)
ARQYSYGYPYYFDY

SEQ ID NO: 14153 - protein, 9 aa, Homo sapiens
  Light chain CDR3 for antibody 7077 (IGKV1-9)
QQLISYPLT

SEQ ID NO: 14154 - protein, 13 aa, Homo sapiens
  Heavy chain CDR3 for antibody 7077 (IGHV3-33)
VSTGDSYYYVMDV

SEQ ID NO: 14155 - protein, 9 aa, Homo sapiens
  Light chain CDR3 for antibody 7078 (IGKV1D-13)
QQFNNYPYT

SEQ ID NO: 14156 - protein, 13 aa, Homo sapiens
  Heavy chain CDR3 for antibody 7078 (IGHV3-33)
ASAGNSYYNVMDV

SEQ ID NO: 14157 - protein, 10 aa, Homo sapiens
  Light chain CDR3 for antibody 7079 (IGKV1-39)
QQSYSTPMYT

SEQ ID NO: 14158 - protein, 13 aa, Homo sapiens
  Heavy chain CDR3 for antibody 7079 (IGHV3-23)
AKDRGGSYSYFDF

SEQ ID NO: 14159 - protein, 9 aa, Homo sapiens
  Light chain CDR3 for antibody 7080 (IGKV1D-13)
QQFNNYPHT

SEQ ID NO: 14160 - protein, 11 aa, Homo sapiens
  Heavy chain CDR3 for antibody 7080 (IGHV3-23)
GEFSSGWSFDY

SEQ ID NO: 14161 - protein, 10 aa, Homo sapiens
  Light chain CDR3 for antibody 7081 (IGKV3-15)
QQYNNWPPIT

SEQ ID NO: 14162 - protein, 9 aa, Homo sapiens
  Heavy chain CDR3 for antibody 7081 (IGHV3-30)
ARDYFHYDY

SEQ ID NO: 14163 - protein, 9 aa, Homo sapiens
  Light chain CDR3 for antibody 7082 (IGKV1D-13)
QQFNNYPHT

SEQ ID NO: 14164 - protein, 18 aa, Homo sapiens
  Heavy chain CDR3 for antibody 7082 (IGHV3-23)
ARYHLYFGSGFGSDGMDV

SEQ ID NO: 14165 - protein, 9 aa, Homo sapiens
  Light chain CDR3 for antibody 7083 (IGKV1D-13)
QQFNNYPST

SEQ ID NO: 14166 - protein, 21 aa, Homo sapiens
  Heavy chain CDR3 for antibody 7083 (IGHV1-18)
ASGVLIWFGELLSEDYYDMDV

SEQ ID NO: 14167 - protein, 10 aa, Homo sapiens
  Light chain CDR3 for antibody 7084 (IGKV3-11)
QQRSNWPTWT

SEQ ID NO: 14168 - protein, 13 aa, Homo sapiens
  Heavy chain CDR3 for antibody 7084 (IGHV4-39)
ARRGVVAPAAFDY

SEQ ID NO: 14169 - protein, 9 aa, Homo sapiens
  Light chain CDR3 for antibody 7085 (IGKV1-9)
QQLKSYLYT

SEQ ID NO: 14170 - protein, 13 aa, Homo sapiens
  Heavy chain CDR3 for antibody 7085 (IGHV3-33)
ARKAYGDYFYFDY

SEQ ID NO: 14171 - protein, 9 aa, Homo sapiens
  Light chain CDR3 for antibody 7086 (IGKV3D-20)
QQYGSSPFT

SEQ ID NO: 14172 - protein, 18 aa, Homo sapiens
  Heavy chain CDR3 for antibody 7086 (IGHV3-23)
AKEGDYYSSGSYWGYFDL

SEQ ID NO: 14173 - protein, 8 aa, Homo sapiens
  Light chain CDR3 for antibody 7087 (IGKV3-15)
QQYNNWLT

SEQ ID NO: 14174 - protein, 13 aa, Homo sapiens
  Heavy chain CDR3 for antibody 7087 (IGHV3-33)
ARTDYYFYYGLDV

SEQ ID NO: 14175 - protein, 9 aa, Homo sapiens
  Light chain CDR3 for antibody 7088 (IGKV1-16)
QQYNRYPYT

SEQ ID NO: 14176 - protein, 18 aa, Homo sapiens
  Heavy chain CDR3 for antibody 7088 (IGHV4-59)
AREGDDVWGSYRPNWFDP

SEQ ID NO: 14177 - protein, 9 aa, Homo sapiens
  Light chain CDR3 for antibody 7089 (IGKV3-20)
QQYGSSPLT

SEQ ID NO: 14178 - protein, 11 aa, Homo sapiens
  Heavy chain CDR3 for antibody 7089 (IGHV3-23)
GEFSSGWSFDY

SEQ ID NO: 14179 - protein, 7 aa, Homo sapiens
  Light chain CDR3 for antibody 7090 (IGKV5-2)
LQHDNFT

SEQ ID NO: 14180 - protein, 13 aa, Homo sapiens
  Heavy chain CDR3 for antibody 7090 (IGHV3-33)
ARDWGYSHGYFDY

SEQ ID NO: 14181 - protein, 9 aa, Homo sapiens
  Light chain CDR3 for antibody 7091 (IGKV1-17)
LQHNSYPWT

SEQ ID NO: 14182 - protein, 16 aa, Homo sapiens
  Heavy chain CDR3 for antibody 7091 (IGHV3-33)
ARPTYYDILTGYPFDY

SEQ ID NO: 14183 - protein, 9 aa, Homo sapiens
  Light chain CDR3 for antibody 7092 (IGKV5-2)
LQHDKFPYT

SEQ ID NO: 14184 - protein, 15 aa, Homo sapiens
  Heavy chain CDR3 for antibody 7092 (IGHV3-33)
SRDHLTGYNYYGMDV

SEQ ID NO: 14185 - protein, 9 aa, Homo sapiens
  Light chain CDR3 for antibody 7093 (IGKV1-17)
LQHNSYPYT

SEQ ID NO: 14186 - protein, 21 aa, Homo sapiens
  Heavy chain CDR3 for antibody 7093 (IGHV3-33)
ARDGGITMGRGVYYYYYGMDV

SEQ ID NO: 14187 - protein, 9 aa, Homo sapiens
  Light chain CDR3 for antibody 7094 (IGKV1-27)
QKYNSAPYT

SEQ ID NO: 14188 - protein, 16 aa, Homo sapiens
  Heavy chain CDR3 for antibody 7094 (IGHV4-59)
ARFYFGSGSYYWYFDL

SEQ ID NO: 14189 - protein, 9 aa, Homo sapiens
  Light chain CDR3 for antibody 7095 (IGKV3-20)
QQYGTSPFP

SEQ ID NO: 14190 - protein, 18 aa, Homo sapiens
  Heavy chain CDR3 for antibody 7095 (IGHV4-59)
AREGDYVWGSYRPNWFDP

SEQ ID NO: 14191 - protein, 10 aa, Homo sapiens
  Light chain CDR3 for antibody 7096 (IGKV1-39)
QQSYSTPMYT

SEQ ID NO: 14192 - protein, 14 aa, Homo sapiens
  Heavy chain CDR3 for antibody 7096 (IGHV3-33)
ARDREQQLVRYFDY

SEQ ID NO: 14193 - protein, 9 aa, Homo sapiens
  Light chain CDR3 for antibody 7097 (IGKV1D-13)
QQFNNYPHT

SEQ ID NO: 14194 - protein, 18 aa, Homo sapiens
  Heavy chain CDR3 for antibody 7097 (IGHV3-11)
ARDGYSSGWNYYYFGLDV

SEQ ID NO: 14195 - protein, 9 aa, Homo sapiens
  Light chain CDR3 for antibody 7098 (IGKV1-9)
QQLNGYPFT

SEQ ID NO: 14196 - protein, 16 aa, Homo sapiens
  Heavy chain CDR3 for antibody 7098 (IGHV4-59)
ARYSGSYYGDYYGMDV

SEQ ID NO: 14197 - protein, 9 aa, Homo sapiens
  Light chain CDR3 for antibody 7099 (IGKV3-11)
QQRSNWPYT

SEQ ID NO: 14198 - protein, 16 aa, Homo sapiens
  Heavy chain CDR3 for antibody 7099 (IGHV3-20)
AREGYSSSWFDRNFDY

SEQ ID NO: 14199 - protein, 9 aa, Homo sapiens
  Light chain CDR3 for antibody 7100 (IGKV1-17)
LQHNSYPRT

SEQ ID NO: 14200 - protein, 13 aa, Homo sapiens
  Heavy chain CDR3 for antibody 7100 (IGHV4-39)
ARRGVVAPAAFDY

SEQ ID NO: 14201 - protein, 8 aa, Homo sapiens
  Light chain CDR3 for antibody 7101 (IGKV3D-7)
QQDYNLVT

SEQ ID NO: 14202 - protein, 11 aa, Homo sapiens
  Heavy chain CDR3 for antibody 7101 (IGHV4-4)
AREAYYYGLDV

SEQ ID NO: 14203 - protein, 9 aa, Homo sapiens
  Light chain CDR3 for antibody 7102 (IGKV3D-7)
QQDYEFPLT

SEQ ID NO: 14204 - protein, 14 aa, Homo sapiens
  Heavy chain CDR3 for antibody 7102 (IGHV4-59)
AKGGSGSYYNWFDP

SEQ ID NO: 14205 - protein, 9 aa, Homo sapiens
  Light chain CDR3 for antibody 7103 (IGKV3-11)
QQRSSWPPT

SEQ ID NO: 14206 - protein, 18 aa, Homo sapiens
  Heavy chain CDR3 for antibody 7103 (IGHV3-23)
AKEGNYYGSGSYWGYFDP

SEQ ID NO: 14207 - protein, 9 aa, Homo sapiens
  Light chain CDR3 for antibody 7104 (IGKV1-17)
LQHNTYPYT

SEQ ID NO: 14208 - protein, 18 aa, Homo sapiens
  Heavy chain CDR3 for antibody 7104 (IGHV3-33)
ARREGITLIFYYYYGMDV

SEQ ID NO: 14209 - protein, 9 aa, Homo sapiens
  Light chain CDR3 for antibody 7105 (IGKV3D-7)
QQDYKLPLT

SEQ ID NO: 14210 - protein, 19 aa, Homo sapiens
  Heavy chain CDR3 for antibody 7105 (IGHV3-33)
ARDSGYSGYDYYYYYGMDV

SEQ ID NO: 14211 - protein, 10 aa, Homo sapiens
  Light chain CDR3 for antibody 7106 (IGKV1-17)
LQHNSYPMYT

SEQ ID NO: 14212 - protein, 15 aa, Homo sapiens
  Heavy chain CDR3 for antibody 7106 (IGHV3-23)
AKEALRYFDWSGMDV

SEQ ID NO: 14213 - protein, 10 aa, Homo sapiens
  Light chain CDR3 for antibody 7107 (IGKV3-11)
QQRSNWPIWT

SEQ ID NO: 14214 - protein, 12 aa, Homo sapiens
  Heavy chain CDR3 for antibody 7107 (IGHV4-39)
ARQMVREGWFDP

SEQ ID NO: 14215 - protein, 9 aa, Homo sapiens
  Light chain CDR3 for antibody 7108 (IGKV1-9)
QQLISYPLT

SEQ ID NO: 14216 - protein, 13 aa, Homo sapiens
  Heavy chain CDR3 for antibody 7108 (IGHV3-33)
ASGYSGYDWYFDL

SEQ ID NO: 14217 - protein, 10 aa, Homo sapiens
  Light chain CDR3 for antibody 7109 (IGKV1-39)
QQSYSSPMYT

SEQ ID NO: 14218 - protein, 17 aa, Homo sapiens
  Heavy chain CDR3 for antibody 7109 (IGHV4-59)
ARDFLVRGEGSYYGMDV

SEQ ID NO: 14219 - protein, 9 aa, Homo sapiens
  Light chain CDR3 for antibody 7110 (IGKV3D-20)
QQYGSSPYT

SEQ ID NO: 14220 - protein, 9 aa, Homo sapiens
  Heavy chain CDR3 for antibody 7110 (IGHV3-33)
ASHSSGEDY

SEQ ID NO: 14221 - protein, 9 aa, Homo sapiens
  Light chain CDR3 for antibody 7111 (IGKV1-9)
QQLNGYPFT

SEQ ID NO: 14222 - protein, 12 aa, Homo sapiens
  Heavy chain CDR3 for antibody 7111 (IGHV1-18)
ARILFYGDYFDY

SEQ ID NO: 14223 - protein, 9 aa, Homo sapiens
  Light chain CDR3 for antibody 7112 (IGKV1-37)
QRTSNAPYT

SEQ ID NO: 14224 - protein, 18 aa, Homo sapiens
  Heavy chain CDR3 for antibody 7112 (IGHV3-33)
ARDRYYDILTGYYMGFDY

SEQ ID NO: 14225 - protein, 8 aa, Homo sapiens
  Light chain CDR3 for antibody 7113 (IGKV1-9)
QQYNSYYT

SEQ ID NO: 14226 - protein, 10 aa, Homo sapiens
  Heavy chain CDR3 for antibody 7113 (IGHV3-30)
ARDGLESFDY

SEQ ID NO: 14227 - protein, 9 aa, Homo sapiens
  Light chain CDR3 for antibody 7114 (IGKV2D-28)
MQALQTPPT

SEQ ID NO: 14228 - protein, 13 aa, Homo sapiens
  Heavy chain CDR3 for antibody 7114 (IGHV3-23)
AKDRGYSSTSTAY

SEQ ID NO: 14229 - protein, 9 aa, Homo sapiens
  Light chain CDR3 for antibody 7115 (IGKV3-11)
QQRSNWMYT

SEQ ID NO: 14230 - protein, 12 aa, Homo sapiens
  Heavy chain CDR3 for antibody 7115 (IGHV3-33)
AREGIAVAGVDP

SEQ ID NO: 14231 - protein, 9 aa, Homo sapiens
  Light chain CDR3 for antibody 7116 (IGKV1-6)
LQDYNYPWT

SEQ ID NO: 14232 - protein, 18 aa, Homo sapiens
  Heavy chain CDR3 for antibody 7116 (IGHV3-33)
ARREGITMIFYYYYGMDA

SEQ ID NO: 14233 - protein, 9 aa, Homo sapiens
  Light chain CDR3 for antibody 7117 (IGKV6-21)
HQSSSLPYT

SEQ ID NO: 14234 - protein, 17 aa, Homo sapiens
  Heavy chain CDR3 for antibody 7117 (IGHV3-23)
ANGGFGESHYNYYGMDV

SEQ ID NO: 14235 - protein, 9 aa, Homo sapiens
  Light chain CDR3 for antibody 7118 (IGKV6-21)
HQSSSLPYT

SEQ ID NO: 14236 - protein, 14 aa, Homo sapiens
  Heavy chain CDR3 for antibody 7118 (IGHV3-64)
ARGGGAVTGTNFDY

SEQ ID NO: 14237 - protein, 9 aa, Homo sapiens
  Light chain CDR3 for antibody 7119 (IGKV1-6)
LQDYNYPRT

SEQ ID NO: 14238 - protein, 10 aa, Homo sapiens
  Heavy chain CDR3 for antibody 7119 (IGHV3-13)
ARDRGSYYDY

SEQ ID NO: 14239 - protein, 8 aa, Homo sapiens
  Light chain CDR3 for antibody 7120 (IGKV3D-7)
QQDYNLLT

SEQ ID NO: 14240 - protein, 16 aa, Homo sapiens
  Heavy chain CDR3 for antibody 7120 (IGHV3-33)
ARDKNTDYDILTGFDY

SEQ ID NO: 14241 - protein, 9 aa, Homo sapiens
  Light chain CDR3 for antibody 7121 (IGKV1-9)
QQLKSYLYT

SEQ ID NO: 14242 - protein, 21 aa, Homo sapiens
  Heavy chain CDR3 for antibody 7121 (IGHV3-33)
ARKRLYDILTGYYKAYYGMDV

SEQ ID NO: 14243 - protein, 8 aa, Homo sapiens
  Light chain CDR3 for antibody 7122 (IGKV3D-7)
QQDYNLLT

SEQ ID NO: 14244 - protein, 12 aa, Homo sapiens
  Heavy chain CDR3 for antibody 7122 (IGHV1-24)
ASDWAYYYGMDV

SEQ ID NO: 14245 - protein, 9 aa, Homo sapiens
  Light chain CDR3 for antibody 7123 (IGKV1-9)
QQLNSYPYT

SEQ ID NO: 14246 - protein, 18 aa, Homo sapiens
  Heavy chain CDR3 for antibody 7123 (IGHV3-33)
ARGGYCSGWDYYYYGMDV

SEQ ID NO: 14247 - protein, 9 aa, Homo sapiens
  Light chain CDR3 for antibody 7124 (IGKV1-9)
QQLKSYLYT

SEQ ID NO: 14248 - protein, 13 aa, Homo sapiens
  Heavy chain CDR3 for antibody 7124 (IGHV4-39)
ARREVVGGRGFDY

SEQ ID NO: 14249 - protein, 9 aa, Homo sapiens
  Light chain CDR3 for antibody 7125 (IGKV1-9)
QQLNSYPPT

SEQ ID NO: 14250 - protein, 17 aa, Homo sapiens
  Heavy chain CDR3 for antibody 7125 (IGHV3-20)
ARDPLYYYGAGSSGMDV

SEQ ID NO: 14251 - protein, 9 aa, Homo sapiens
  Light chain CDR3 for antibody 7126 (IGKV1-6)
LQDNNYPWT

SEQ ID NO: 14252 - protein, 11 aa, Homo sapiens
  Heavy chain CDR3 for antibody 7126 (IGHV4-59)
ARSLRYSVFDY

SEQ ID NO: 14253 - protein, 9 aa, Homo sapiens
  Light chain CDR3 for antibody 7127 (IGKV2D-28)
MQALQTPPT

SEQ ID NO: 14254 - protein, 17 aa, Homo sapiens
  Heavy chain CDR3 for antibody 7127 (IGHV3-33)
ARGFSGYDGYYYYGMDV

SEQ ID NO: 14255 - protein, 9 aa, Homo sapiens
  Light chain CDR3 for antibody 7128 (IGKV2-30)
MQGTHWPLT

SEQ ID NO: 14256 - protein, 18 aa, Homo sapiens
  Heavy chain CDR3 for antibody 7128 (IGHV3-33)
ARERDYYGSGSYPDAFDI

SEQ ID NO: 14257 - protein, 9 aa, Homo sapiens
  Light chain CDR3 for antibody 7129 (IGKV1-9)
QQGNTYSRT

SEQ ID NO: 14258 - protein, 16 aa, Homo sapiens
  Heavy chain CDR3 for antibody 7129 (IGHV4-59)
ARDTPYYSGSGRPFDS

SEQ ID NO: 14259 - protein, 8 aa, Homo sapiens
  Light chain CDR3 for antibody 7130 (IGKV1-5)
QQYNSYWT

SEQ ID NO: 14260 - protein, 20 aa, Homo sapiens
  Heavy chain CDR3 for antibody 7130 (IGHV3-33)
AREDYYGSGSYYPAYNWFDP

SEQ ID NO: 14261 - protein, 8 aa, Homo sapiens
  Light chain CDR3 for antibody 7131 (IGKV3D-7)
QQDYNLLT

SEQ ID NO: 14262 - protein, 12 aa, Homo sapiens
  Heavy chain CDR3 for antibody 7131 (IGHV3-21)
AREGFGESSFDY

SEQ ID NO: 14263 - protein, 9 aa, Homo sapiens
  Light chain CDR3 for antibody 7132 (IGKV3-20)
QQYGSSPYT

SEQ ID NO: 14264 - protein, 20 aa, Homo sapiens
  Heavy chain CDR3 for antibody 7132 (IGHV3-33)
ARRMVRGVKKTYYYYYGLDV

SEQ ID NO: 14265 - protein, 9 aa, Homo sapiens
  Light chain CDR3 for antibody 7133 (IGKV5-2)
LQHDNFPWT

SEQ ID NO: 14266 - protein, 11 aa, Homo sapiens
  Heavy chain CDR3 for antibody 7133 (IGHV3-33)
ARDRATAGLDY

SEQ ID NO: 14267 - protein, 9 aa, Homo sapiens
  Light chain CDR3 for antibody 7134 (IGKV6-21)
HQSSSLPYT

SEQ ID NO: 14268 - protein, 14 aa, Homo sapiens
  Heavy chain CDR3 for antibody 7134 (IGHV1-46)
ARAYYAFLTGALDI

SEQ ID NO: 14269 - protein, 9 aa, Homo sapiens
  Light chain CDR3 for antibody 7135 (IGKV2D-28)
MQALQTPPT

SEQ ID NO: 14270 - protein, 18 aa, Homo sapiens
  Heavy chain CDR3 for antibody 7135 (IGHV3-23)
AKEGNYYGSGSYWGYFDP

SEQ ID NO: 14271 - protein, 9 aa, Homo sapiens
  Light chain CDR3 for antibody 7136 (IGKV1-37)
QRTSNAPYT

SEQ ID NO: 14272 - protein, 14 aa, Homo sapiens
  Heavy chain CDR3 for antibody 7136 (IGHV3-33)
ARDWNDVYYYGMDV

SEQ ID NO: 14273 - protein, 9 aa, Homo sapiens
  Light chain CDR3 for antibody 7137 (IGKV1-9)
QQLNGYPFT

SEQ ID NO: 14274 - protein, 13 aa, Homo sapiens
  Heavy chain CDR3 for antibody 7137 (IGHV1-46)
ARVKLGSLGAFDI

SEQ ID NO: 14275 - protein, 9 aa, Homo sapiens
  Light chain CDR3 for antibody 7138 (IGKV1D-13)
QQFNNYPHT

SEQ ID NO: 14276 - protein, 14 aa, Homo sapiens
  Heavy chain CDR3 for antibody 7138 (IGHV3-23)
AKGGDVLTGYYPDY

SEQ ID NO: 14277 - protein, 9 aa, Homo sapiens
  Light chain CDR3 for antibody 7139 (IGKV1-6)
LQDYNYPWT

SEQ ID NO: 14278 - protein, 10 aa, Homo sapiens
  Heavy chain CDR3 for antibody 7139 (IGHV3-33)
ARDYGDYFDY

SEQ ID NO: 14279 - protein, 9 aa, Homo sapiens
  Light chain CDR3 for antibody 7140 (IGKV5-2)
LQHDNFPYT

SEQ ID NO: 14280 - protein, 11 aa, Homo sapiens
  Heavy chain CDR3 for antibody 7140 (IGHV3-33)
ARDRSTGWLDY

SEQ ID NO: 14281 - protein, 8 aa, Homo sapiens
  Light chain CDR3 for antibody 7141 (IGKV3D-7)
QQDYNLLT

SEQ ID NO: 14282 - protein, 14 aa, Homo sapiens
  Heavy chain CDR3 for antibody 7141 (IGHV3-33)
ARDRRDFYYYGMDV

SEQ ID NO: 14283 - protein, 8 aa, Homo sapiens
  Light chain CDR3 for antibody 7142 (IGKV3-11)
QQRSNWLT

SEQ ID NO: 14284 - protein, 19 aa, Homo sapiens
  Heavy chain CDR3 for antibody 7142 (IGHV5-51)
ARHGEKGKRITMVRGSLDV

SEQ ID NO: 14285 - protein, 8 aa, Homo sapiens
  Light chain CDR3 for antibody 7143 (IGKV3-15)
QQYNNWPT

SEQ ID NO: 14286 - protein, 17 aa, Homo sapiens
  Heavy chain CDR3 for antibody 7143 (IGHV3-33)
ARAYYDILTGYSYYFDY

SEQ ID NO: 14287 - protein, 9 aa, Homo sapiens
  Light chain CDR3 for antibody 7144 (IGKV1-6)
LQDFNYPRT

SEQ ID NO: 14288 - protein, 14 aa, Homo sapiens
  Heavy chain CDR3 for antibody 7144 (IGHV3-33)
ARDKSYPLSYGMDV

SEQ ID NO: 14289 - protein, 9 aa, Homo sapiens
  Light chain CDR3 for antibody 7145 (IGKV5-2)
LQHDKFPYT

SEQ ID NO: 14290 - protein, 19 aa, Homo sapiens
  Heavy chain CDR3 for antibody 7145 (IGHV3-33)
ARGVRLRFFDPYYYYGLDV

SEQ ID NO: 14291 - protein, 9 aa, Homo sapiens
  Light chain CDR3 for antibody 7146 (IGKV1D-13)
QQFNNYPHT

SEQ ID NO: 14292 - protein, 15 aa, Homo sapiens
  Heavy chain CDR3 for antibody 7146 (IGHV3-64)
ARDSHHDLLTGHYEY

SEQ ID NO: 14293 - protein, 10 aa, Homo sapiens
  Light chain CDR3 for antibody 7147 (IGKV3-15)
QQYNKWPPLT

SEQ ID NO: 14294 - protein, 7 aa, Homo sapiens
  Heavy chain CDR3 for antibody 7147 (IGHV1-46)
AREGGDY

SEQ ID NO: 14295 - protein, 9 aa, Homo sapiens
  Light chain CDR3 for antibody 7148 (IGKV3D-7)
QQDYKLPLT

SEQ ID NO: 14296 - protein, 14 aa, Homo sapiens
  Heavy chain CDR3 for antibody 7148 (IGHV1-2)
ARDYYGSGNYYMGY

SEQ ID NO: 14297 - protein, 8 aa, Homo sapiens
  Light chain CDR3 for antibody 7149 (IGKV3D-7)
QQDYNLLT

SEQ ID NO: 14298 - protein, 13 aa, Homo sapiens
  Heavy chain CDR3 for antibody 7149 (IGHV1-46)
ARVKLGSLGAFDI

SEQ ID NO: 14299 - protein, 9 aa, Homo sapiens
  Light chain CDR3 for antibody 7150 (IGKV3-15)
QQYNNWPYT

SEQ ID NO: 14300 - protein, 9 aa, Homo sapiens
  Heavy chain CDR3 for antibody 7150 (IGHV3-33)
ARDNWGFDY

SEQ ID NO: 14301 - protein, 9 aa, Homo sapiens
  Light chain CDR3 for antibody 7151 (IGKV3-15)
QQYINWPLT

SEQ ID NO: 14302 - protein, 15 aa, Homo sapiens
  Heavy chain CDR3 for antibody 7151 (IGHV4-39)
ARRSKYSSAWYPFDY

SEQ ID NO: 14303 - protein, 9 aa, Homo sapiens
  Light chain CDR3 for antibody 7152 (IGKV1-33)
QQYDNLPFT

SEQ ID NO: 14304 - protein, 8 aa, Homo sapiens
  Heavy chain CDR3 for antibody 7152 (IGHV3-33)
ARDRGFDY

SEQ ID NO: 14305 - protein, 9 aa, Homo sapiens
  Light chain CDR3 for antibody 7153 (IGKV1-17)
LHSNNYPWT

SEQ ID NO: 14306 - protein, 21 aa, Homo sapiens
  Heavy chain CDR3 for antibody 7153 (IGHV3-33)
ARKRLYDILTGYYKAYYGMDV

SEQ ID NO: 14307 - protein, 8 aa, Homo sapiens
  Light chain CDR3 for antibody 7154 (IGKV6-21)
HQSSSLPT

SEQ ID NO: 14308 - protein, 14 aa, Homo sapiens
  Heavy chain CDR3 for antibody 7154 (IGHV3-33)
ARDRIAAASSDFDC

SEQ ID NO: 14309 - protein, 9 aa, Homo sapiens
  Light chain CDR3 for antibody 7155 (IGKV1-9)
QQLNRYPYT

SEQ ID NO: 14310 - protein, 17 aa, Homo sapiens
  Heavy chain CDR3 for antibody 7155 (IGHV1-24)
TTVVLYYDILPGYSFDY

SEQ ID NO: 14311 - protein, 9 aa, Homo sapiens
  Light chain CDR3 for antibody 7156 (IGKV1-33)
QQYDNLPFT

SEQ ID NO: 14312 - protein, 10 aa, Homo sapiens
  Heavy chain CDR3 for antibody 7156 (IGHV3-30)
AREWYGGMDV

SEQ ID NO: 14313 - protein, 10 aa, Homo sapiens
  Light chain CDR3 for antibody 7157 (IGKV1-17)
LQHNSYPMYT

SEQ ID NO: 14314 - protein, 11 aa, Homo sapiens
  Heavy chain CDR3 for antibody 7157 (IGHV3-33)
ARGSGSYAFDS

SEQ ID NO: 14315 - protein, 10 aa, Homo sapiens
  Light chain CDR3 for antibody 7158 (IGKV3-11)
QQRSNWPIWT

SEQ ID NO: 14316 - protein, 22 aa, Homo sapiens
  Heavy chain CDR3 for antibody 7158 (IGHV4-59)
AREINYGSGSYYNEDYYYGMDV

SEQ ID NO: 14317 - protein, 9 aa, Homo sapiens
  Light chain CDR3 for antibody 7159 (IGKV1-27)
QKYNSAPYT

SEQ ID NO: 14318 - protein, 12 aa, Homo sapiens
  Heavy chain CDR3 for antibody 7159 (IGHV3-33)
ARKAYALYVLDV

SEQ ID NO: 14319 - protein, 9 aa, Homo sapiens
  Light chain CDR3 for antibody 7160 (IGKV1-27)
QKYNSAPYT

SEQ ID NO: 14320 - protein, 17 aa, Homo sapiens
  Heavy chain CDR3 for antibody 7160 (IGHV3-30)
ARDGVGATSYYYYGMDV

SEQ ID NO: 14321 - protein, 9 aa, Homo sapiens
  Light chain CDR3 for antibody 7161 (IGKV3-11)
QQRSNWPPT

SEQ ID NO: 14322 - protein, 12 aa, Homo sapiens
  Heavy chain CDR3 for antibody 7161 (IGHV3-33)
AREGTRWVYFDY

SEQ ID NO: 14323 - protein, 8 aa, Homo sapiens
  Light chain CDR3 for antibody 7162 (IGKV1D-13)
QQFNNYPT

SEQ ID NO: 14324 - protein, 13 aa, Homo sapiens
  Heavy chain CDR3 for antibody 7162 (IGHV3-33)
ARTDYYFYYGLDV

SEQ ID NO: 14325 - protein, 9 aa, Homo sapiens
  Light chain CDR3 for antibody 7163 (IGKV3-15)
QQYNNWPLT

SEQ ID NO: 14326 - protein, 18 aa, Homo sapiens
  Heavy chain CDR3 for antibody 7163 (IGHV3-33)
ARDYDSLTTYPEDYGMDV

SEQ ID NO: 14327 - protein, 9 aa, Homo sapiens
  Light chain CDR3 for antibody 7164 (IGKV2-30)
MQGTHWPLT

SEQ ID NO: 14328 - protein, 14 aa, Homo sapiens
  Heavy chain CDR3 for antibody 7164 (IGHV1-2)
ARDYYGSGNYYMGY

SEQ ID NO: 14329 - protein, 9 aa, Homo sapiens
  Light chain CDR3 for antibody 7165 (IGKV1-9)
QQLKSYLYT

SEQ ID NO: 14330 - protein, 19 aa, Homo sapiens
  Heavy chain CDR3 for antibody 7165 (IGHV1-18)
ARGGHIGVVTAFHGYGMDV

SEQ ID NO: 14331 - protein, 9 aa, Homo sapiens
  Light chain CDR3 for antibody 7166 (IGKV1-39)
QQGFSTPWT

SEQ ID NO: 14332 - protein, 16 aa, Homo sapiens
  Heavy chain CDR3 for antibody 7166 (IGHV3-23)
AKEGMVLRYFDWLWDY

SEQ ID NO: 14333 - protein, 9 aa, Homo sapiens
  Light chain CDR3 for antibody 7167 (IGKV1-5)
QQYNTYSRT

SEQ ID NO: 14334 - protein, 13 aa, Homo sapiens
  Heavy chain CDR3 for antibody 7167 (IGHV3-33)
ARGDNWNDGGFDY

SEQ ID NO: 14335 - protein, 9 aa, Homo sapiens
  Light chain CDR3 for antibody 7168 (IGKV1-9)
QQLKSYLYT

SEQ ID NO: 14336 - protein, 14 aa, Homo sapiens
  Heavy chain CDR3 for antibody 7168 (IGHV1-18)
AREGGSYFYYGVDV

SEQ ID NO: 14337 - protein, 9 aa, Homo sapiens
  Light chain CDR3 for antibody 7169 (IGKV1-39)
QQGFSTPWT

SEQ ID NO: 14338 - protein, 17 aa, Homo sapiens
  Heavy chain CDR3 for antibody 7169 (IGHV4-59)
ARDFLVRGEGSYYGMDV

SEQ ID NO: 14339 - protein, 8 aa, Homo sapiens
  Light chain CDR3 for antibody 7170 (IGKV3D-7)
QQDYNLLT

SEQ ID NO: 14340 - protein, 15 aa, Homo sapiens
  Heavy chain CDR3 for antibody 7170 (IGHV1-46)
ARGAVDDYYYYGMDV

SEQ ID NO: 14341 - protein, 10 aa, Homo sapiens
  Light chain CDR3 for antibody 7171 (IGKV1-17)
LQHNSYPMYT

SEQ ID NO: 14342 - protein, 16 aa, Homo sapiens
  Heavy chain CDR3 for antibody 7171 (IGHV3-23)
ARNWNDVGDYYYGMDV

SEQ ID NO: 14343 - protein, 9 aa, Homo sapiens
  Light chain CDR3 for antibody 7172 (IGKV1-16)
QQYNSYPLT

SEQ ID NO: 14344 - protein, 13 aa, Homo sapiens
  Heavy chain CDR3 for antibody 7172 (IGHV3-33)
GRTDYYSYYGVDV

SEQ ID NO: 14345 - protein, 9 aa, Homo sapiens
  Light chain CDR3 for antibody 7173 (IGKV1D-16)
QQYNSYPFT

SEQ ID NO: 14346 - protein, 13 aa, Homo sapiens
  Heavy chain CDR3 for antibody 7173 (IGHV3-15)
TTDRLLLFGAFDY

SEQ ID NO: 14347 - protein, 7 aa, Homo sapiens
  Light chain CDR3 for antibody 7174 (IGKV1-17)
LQHNSYP

SEQ ID NO: 14348 - protein, 13 aa, Homo sapiens
  Heavy chain CDR3 for antibody 7174 (IGHV4-34)
ASNFYYYYYGMDV

SEQ ID NO: 14349 - protein, 9 aa, Homo sapiens
  Light chain CDR3 for antibody 7175 (IGKV1-39)
QQSYSTPFT

SEQ ID NO: 14350 - protein, 18 aa, Homo sapiens
  Heavy chain CDR3 for antibody 7175 (IGHV3-33)
ARERYYYGSGSYPDAFDI

SEQ ID NO: 14351 - protein, 9 aa, Homo sapiens
  Light chain CDR3 for antibody 7176 (IGKV1-17)
LQHNSYPYT

SEQ ID NO: 14352 - protein, 13 aa, Homo sapiens
  Heavy chain CDR3 for antibody 7176 (IGHV3-33)
AREGDPQPDAFDI

SEQ ID NO: 14353 - protein, 8 aa, Homo sapiens
  Light chain CDR3 for antibody 7177 (IGKV3D-7)
QQDYSLLT

SEQ ID NO: 14354 - protein, 16 aa, Homo sapiens
  Heavy chain CDR3 for antibody 7177 (IGHV3-30)
ARDIAVAGHVYYGMDV

SEQ ID NO: 14355 - protein, 8 aa, Homo sapiens
  Light chain CDR3 for antibody 7178 (IGKV3D-7)
QQDYNLLT

SEQ ID NO: 14356 - protein, 17 aa, Homo sapiens
  Heavy chain CDR3 for antibody 7178 (IGHV3-33)
ARERYYGSGSYYNWFDP

SEQ ID NO: 14357 - protein, 8 aa, Homo sapiens
  Light chain CDR3 for antibody 7179 (IGKV3-20)
QQYGSSLT

SEQ ID NO: 14358 - protein, 14 aa, Homo sapiens
  Heavy chain CDR3 for antibody 7179 (IGHV3-33)
AREGYSSNWYDFDY

SEQ ID NO: 14359 - protein, 9 aa, Homo sapiens
  Light chain CDR3 for antibody 7180 (IGKV1-16)
QHYNDYPFT

SEQ ID NO: 14360 - protein, 17 aa, Homo sapiens
  Heavy chain CDR3 for antibody 7180 (IGHV1-18)
ARDEGYDILTGYPHFDY

SEQ ID NO: 14361 - protein, 8 aa, Homo sapiens
  Light chain CDR3 for antibody 7181 (IGKV1D-13)
QQFNNYPT

SEQ ID NO: 14362 - protein, 18 aa, Homo sapiens
  Heavy chain CDR3 for antibody 7181 (IGHV3-33)
ARERDYYGSGSYPDAFDI

SEQ ID NO: 14363 - protein, 8 aa, Homo sapiens
  Light chain CDR3 for antibody 7182 (IGKV1-5)
QQYNSYWT

SEQ ID NO: 14364 - protein, 20 aa, Homo sapiens
  Heavy chain CDR3 for antibody 7182 (IGHV3-11)
ARGGATLIRGLIDYYYGMDV

SEQ ID NO: 14365 - protein, 9 aa, Homo sapiens
  Light chain CDR3 for antibody 7183 (IGKV3D-7)
QQDYTLPLT

SEQ ID NO: 14366 - protein, 13 aa, Homo sapiens
  Heavy chain CDR3 for antibody 7183 (IGHV4-4)
ARERGIAAAGPDY

SEQ ID NO: 14367 - protein, 9 aa, Homo sapiens
  Light chain CDR3 for antibody 7184 (IGKV1-6)
QQYNSYPLT

SEQ ID NO: 14368 - protein, 14 aa, Homo sapiens
  Heavy chain CDR3 for antibody 7184 (IGHV3-20)
ARGGSSGWYDWFDP

SEQ ID NO: 14369 - protein, 10 aa, Homo sapiens
  Light chain CDR3 for antibody 7185 (IGKV3-11)
QQRSNWPALT

SEQ ID NO: 14370 - protein, 13 aa, Homo sapiens
  Heavy chain CDR3 for antibody 7185 (IGHV3-33)
ARAFTMVRGVIDY

SEQ ID NO: 14371 - protein, 9 aa, Homo sapiens
  Light chain CDR3 for antibody 7186 (IGKV1-27)
QKYNSAPYT

SEQ ID NO: 14372 - protein, 17 aa, Homo sapiens
  Heavy chain CDR3 for antibody 7186 (IGHV3-23)
AKDRPVTTLYYYFGMDV

SEQ ID NO: 14373 - protein, 10 aa, Homo sapiens
  Light chain CDR3 for antibody 7187 (IGKV3-11)
QQRSNWPIFT

SEQ ID NO: 14374 - protein, 14 aa, Homo sapiens
  Heavy chain CDR3 for antibody 7187 (IGHV1-2)
ARDYYGSGNYYMGY

SEQ ID NO: 14375 - protein, 10 aa, Homo sapiens
  Light chain CDR3 for antibody 7188 (IGKV1-6)
LQDYNYPMYT

SEQ ID NO: 14376 - protein, 20 aa, Homo sapiens
  Heavy chain CDR3 for antibody 7188 (IGHV3-23)
AKDREMAATSHYYYYYGMDV

SEQ ID NO: 14377 - protein, 9 aa, Homo sapiens
  Light chain CDR3 for antibody 7189 (IGKV1D-13)
QRFNNYLYT

SEQ ID NO: 14378 - protein, 18 aa, Homo sapiens
  Heavy chain CDR3 for antibody 7189 (IGHV3-33)
ARDRYYDILTGYYMGFDY

SEQ ID NO: 14379 - protein, 9 aa, Homo sapiens
  Light chain CDR3 for antibody 7190 (IGKV1-6)
LQDYKSPFT

SEQ ID NO: 14380 - protein, 16 aa, Homo sapiens
  Heavy chain CDR3 for antibody 7190 (IGHV4-59)
ARYSGSYYGDYYGMDV

SEQ ID NO: 14381 - protein, 10 aa, Homo sapiens
  Light chain CDR3 for antibody 7191 (IGKV3-11)
QQRSNWPIFT

SEQ ID NO: 14382 - protein, 15 aa, Homo sapiens
  Heavy chain CDR3 for antibody 7191 (IGHV3-23)
AKDGGWNYYYYGMDV

SEQ ID NO: 14383 - protein, 9 aa, Homo sapiens
  Light chain CDR3 for antibody 7192 (IGKV1D-16)
QQYYSYPRT

SEQ ID NO: 14384 - protein, 14 aa, Homo sapiens
  Heavy chain CDR3 for antibody 7192 (IGHV3-20)
ARDGGSTSFDWFDP

SEQ ID NO: 14385 - protein, 9 aa, Homo sapiens
  Light chain CDR3 for antibody 7193 (IGKV1-6)
LQDYNYPYT

SEQ ID NO: 14386 - protein, 15 aa, Homo sapiens
  Heavy chain CDR3 for antibody 7193 (IGHV3-23)
AKEGKLRYFDWLGDY

SEQ ID NO: 14387 - protein, 9 aa, Homo sapiens
  Light chain CDR3 for antibody 7194 (IGKV3D-7)
QQDYKLPLT

SEQ ID NO: 14388 - protein, 15 aa, Homo sapiens
  Heavy chain CDR3 for antibody 7194 (IGHV1-46)
AKDLSSGWYAYFFDY

SEQ ID NO: 14389 - protein, 9 aa, Homo sapiens
  Light chain CDR3 for antibody 7195 (IGKV1-9)
QQLISYPLT

SEQ ID NO: 14390 - protein, 12 aa, Homo sapiens
  Heavy chain CDR3 for antibody 7195 (IGHV1-24)
ASDWAYYYGMDV

SEQ ID NO: 14391 - protein, 10 aa, Homo sapiens
  Light chain CDR3 for antibody 7196 (IGKV1-39)
QQSYSTPMYT

SEQ ID NO: 14392 - protein, 13 aa, Homo sapiens
  Heavy chain CDR3 for antibody 7196 (IGHV3-33)
AKEDGDYHHYFDY

SEQ ID NO: 14393 - protein, 8 aa, Homo sapiens
  Light chain CDR3 for antibody 7197 (IGKV6-21)
HQSSSLPT

SEQ ID NO: 14394 - protein, 15 aa, Homo sapiens
  Heavy chain CDR3 for antibody 7197 (IGHV3-33)
ARDHLTGYYYYGMDV

SEQ ID NO: 14395 - protein, 9 aa, Homo sapiens
  Light chain CDR3 for antibody 7198 (IGKV3D-7)
QQDYNLPLT

SEQ ID NO: 14396 - protein, 18 aa, Homo sapiens
  Heavy chain CDR3 for antibody 7198 (IGHV3-13)
ARDYYGSGSLYYYYGMDV

SEQ ID NO: 14397 - protein, 9 aa, Homo sapiens
  Light chain CDR3 for antibody 7199 (IGKV1D-16)
QQYNSYPLT

SEQ ID NO: 14398 - protein, 18 aa, Homo sapiens
  Heavy chain CDR3 for antibody 7199 (IGHV3-33)
ARREGITMIFYYYYGMDV

SEQ ID NO: 14399 - protein, 9 aa, Homo sapiens
  Light chain CDR3 for antibody 7200 (IGKV5-2)
LQHDKFPYT

SEQ ID NO: 14400 - protein, 13 aa, Homo sapiens
  Heavy chain CDR3 for antibody 7200 (IGHV4-39)
ARHEVMIRGVFDY

SEQ ID NO: 14401 - protein, 8 aa, Homo sapiens
  Light chain CDR3 for antibody 7201 (IGKV1-17)
QQFNNYPT

SEQ ID NO: 14402 - protein, 13 aa, Homo sapiens
  Heavy chain CDR3 for antibody 7201 (IGHV3-33)
AKEDGDYHHYFDY

SEQ ID NO: 14403 - protein, 9 aa, Homo sapiens
  Light chain CDR3 for antibody 7202 (IGKV4-1)
QQYYSTPWT

SEQ ID NO: 14404 - protein, 9 aa, Homo sapiens
  Heavy chain CDR3 for antibody 7202 (IGHV3-33)
ARATVGVDY

SEQ ID NO: 14405 - protein, 9 aa, Homo sapiens
  Light chain CDR3 for antibody 7203 (IGKV6-21)
HQSYSLPHT

SEQ ID NO: 14406 - protein, 17 aa, Homo sapiens
  Heavy chain CDR3 for antibody 7203 (IGHV1-18)
ARERYYGSGNYKYNMDV

SEQ ID NO: 14407 - protein, 9 aa, Homo sapiens
  Light chain CDR3 for antibody 7204 (IGKV3-15)
QQYNNWPRT

SEQ ID NO: 14408 - protein, 9 aa, Homo sapiens
  Heavy chain CDR3 for antibody 7204 (IGHV3-30)
ARDYFHYDY

SEQ ID NO: 14409 - protein, 10 aa, Homo sapiens
  Light chain CDR3 for antibody 7205 (IGKV3-11)
QQRSNWPIWT

SEQ ID NO: 14410 - protein, 17 aa, Homo sapiens
  Heavy chain CDR3 for antibody 7205 (IGHV3-15)
TTERYPRRYYYYFGMDV

SEQ ID NO: 14411 - protein, 9 aa, Homo sapiens
  Light chain CDR3 for antibody 7206 (IGKV3-15)
QQYNNWPRT

SEQ ID NO: 14412 - protein, 18 aa, Homo sapiens
  Heavy chain CDR3 for antibody 7206 (IGHV3-33)
ARGGVLYDILTGFYGMDV

SEQ ID NO: 14413 - protein, 9 aa, Homo sapiens
  Light chain CDR3 for antibody 7207 (IGKV3D-7)
QQDYNLPWT

SEQ ID NO: 14414 - protein, 9 aa, Homo sapiens
  Heavy chain CDR3 for antibody 7207 (IGHV3-33)
AREYKEFDY

SEQ ID NO: 14415 - protein, 10 aa, Homo sapiens
  Light chain CDR3 for antibody 7208 (IGKV1-39)
QQSYSTPMYT

SEQ ID NO: 14416 - protein, 10 aa, Homo sapiens
  Heavy chain CDR3 for antibody 7208 (IGHV3-33)
ARDGSGSQPI

SEQ ID NO: 14417 - protein, 9 aa, Homo sapiens
  Light chain CDR3 for antibody 7209 (IGKV3D-7)
QQDYNLPWT

SEQ ID NO: 14418 - protein, 10 aa, Homo sapiens
  Heavy chain CDR3 for antibody 7209 (IGHV3-23)
AKDHWGDFDY

SEQ ID NO: 14419 - protein, 9 aa, Homo sapiens
  Light chain CDR3 for antibody 7210 (IGKV6-21)
HQSSSLPYT

SEQ ID NO: 14420 - protein, 20 aa, Homo sapiens
  Heavy chain CDR3 for antibody 7210 (IGHV3-23)
TKDRYSDSSGYYLYYNDMDV

SEQ ID NO: 14421 - protein, 10 aa, Homo sapiens
  Light chain CDR3 for antibody 7211 (IGKV3-11)
QQRSNWPIFT

SEQ ID NO: 14422 - protein, 16 aa, Homo sapiens
  Heavy chain CDR3 for antibody 7211 (IGHV3-23)
ARDQGILTGYYTALDY

SEQ ID NO: 14423 - protein, 9 aa, Homo sapiens
  Light chain CDR3 for antibody 7212 (IGKV1-6)
LQDYKSPFT

SEQ ID NO: 14424 - protein, 20 aa, Homo sapiens
  Heavy chain CDR3 for antibody 7212 (IGHV3-33)
SRGGATLVRGVIDYYYGMDV

SEQ ID NO: 14425 - protein, 8 aa, Homo sapiens
  Light chain CDR3 for antibody 7213 (IGKV3D-7)
QQDYNLLT

SEQ ID NO: 14426 - protein, 18 aa, Homo sapiens
  Heavy chain CDR3 for antibody 7213 (IGHV3-33)
VRDRERYGSGSYPDAFDI

SEQ ID NO: 14427 - protein, 9 aa, Homo sapiens
  Light chain CDR3 for antibody 7214 (IGKV1-16)
QQYTSYPFT

SEQ ID NO: 14428 - protein, 18 aa, Homo sapiens
  Heavy chain CDR3 for antibody 7214 (IGHV1-46)
ARDGDYVWGSYRSNWFDP

SEQ ID NO: 14429 - protein, 9 aa, Homo sapiens
  Light chain CDR3 for antibody 7215 (IGKV1-6)
LQDYKSPFT

SEQ ID NO: 14430 - protein, 13 aa, Homo sapiens
  Heavy chain CDR3 for antibody 7215 (IGHV1-46)
ARVKLGSLGAFDI

SEQ ID NO: 14431 - protein, 9 aa, Homo sapiens
  Light chain CDR3 for antibody 7216 (IGKV1-9)
QQYNTYSRT

SEQ ID NO: 14432 - protein, 11 aa, Homo sapiens
  Heavy chain CDR3 for antibody 7216 (IGHV3-33)
AREAANWGFDY

SEQ ID NO: 14433 - protein, 9 aa, Homo sapiens
  Light chain CDR3 for antibody 7217 (IGKV1-27)
QKYNSAPYT

SEQ ID NO: 14434 - protein, 17 aa, Homo sapiens
  Heavy chain CDR3 for antibody 7217 (IGHV3-33)
ARKDYGILSGYYSPFDY

SEQ ID NO: 14435 - protein, 9 aa, Homo sapiens
  Light chain CDR3 for antibody 7218 (IGKV1D-16)
QQYDSYPYT

SEQ ID NO: 14436 - protein, 19 aa, Homo sapiens
  Heavy chain CDR3 for antibody 7218 (IGHV3-33)
ARGSDYDILTGYSSDAFDI

SEQ ID NO: 14437 - protein, 9 aa, Homo sapiens
  Light chain CDR3 for antibody 7219 (IGKV3-15)
QQYNNWPLT

SEQ ID NO: 14438 - protein, 24 aa, Homo sapiens
  Heavy chain CDR3 for antibody 7219 (IGHV3-20)
ARGRITMVRGVIINPLDYYNGMDV

SEQ ID NO: 14439 - protein, 9 aa, Homo sapiens
  Light chain CDR3 for antibody 7220 (IGKV1-9)
QQLISYPLT

SEQ ID NO: 14440 - protein, 14 aa, Homo sapiens
  Heavy chain CDR3 for antibody 7220 (IGHV3-33)
ARDREQQLVRYFDY

SEQ ID NO: 14441 - protein, 10 aa, Homo sapiens
  Light chain CDR3 for antibody 7221 (IGKV3-11)
QQRSNWPALT

SEQ ID NO: 14442 - protein, 12 aa, Homo sapiens
  Heavy chain CDR3 for antibody 7221 (IGHV3-33)
ARKGYDMHEFDI

SEQ ID NO: 14443 - protein, 9 aa, Homo sapiens
  Light chain CDR3 for antibody 7222 (IGKV3-15)
QQYNNWPYT

SEQ ID NO: 14444 - protein, 11 aa, Homo sapiens
  Heavy chain CDR3 for antibody 7222 (IGHV3-33)
ARARYTTGLDY

SEQ ID NO: 14445 - protein, 8 aa, Homo sapiens
  Light chain CDR3 for antibody 7223 (IGKV1D-13)
QQFNNYPT

SEQ ID NO: 14446 - protein, 13 aa, Homo sapiens
  Heavy chain CDR3 for antibody 7223 (IGHV3-33)
ARDYTMVRGVMNY

SEQ ID NO: 14447 - protein, 9 aa, Homo sapiens
  Light chain CDR3 for antibody 7224 (IGKV1-6)
LQDYKSPFT

SEQ ID NO: 14448 - protein, 18 aa, Homo sapiens
  Heavy chain CDR3 for antibody 7224 (IGHV3-33)
ARERYYYGSGSYPDAFDI

SEQ ID NO: 14449 - protein, 9 aa, Homo sapiens
  Light chain CDR3 for antibody 7225 (IGKV1-9)
QQGNTYSRT

SEQ ID NO: 14450 - protein, 12 aa, Homo sapiens
  Heavy chain CDR3 for antibody 7225 (IGHV4-59)
ARDRSGWAYFDY

SEQ ID NO: 14451 - protein, 10 aa, Homo sapiens
  Light chain CDR3 for antibody 7226 (IGKV1-39)
QQSYSSPMYT

SEQ ID NO: 14452 - protein, 14 aa, Homo sapiens
  Heavy chain CDR3 for antibody 7226 (IGHV3-33)
ARDGYDFLTGPFDY

SEQ ID NO: 14453 - protein, 9 aa, Homo sapiens
  Light chain CDR3 for antibody 7227 (IGKV1D-16)
QQYNSYPYT

SEQ ID NO: 14454 - protein, 12 aa, Homo sapiens
  Heavy chain CDR3 for antibody 7227 (IGHV3-h)
AGEDYYYYGMDV

SEQ ID NO: 14455 - protein, 8 aa, Homo sapiens
  Light chain CDR3 for antibody 7228 (IGKV3D-7)
QQDYNLLT

SEQ ID NO: 14456 - protein, 12 aa, Homo sapiens
  Heavy chain CDR3 for antibody 7228 (IGHV1-18)
AGVLFDGDYFDY

SEQ ID NO: 14457 - protein, 10 aa, Homo sapiens
  Light chain CDR3 for antibody 7229 (IGKV1-17)
LQHNSYPMYT

SEQ ID NO: 14458 - protein, 18 aa, Homo sapiens
  Heavy chain CDR3 for antibody 7229 (IGHV3-33)
ARDYDSLTTYPEDYGMDV

SEQ ID NO: 14459 - protein, 9 aa, Homo sapiens
  Light chain CDR3 for antibody 7230 (IGKV1-9)
QQLNSYPLT

SEQ ID NO: 14460 - protein, 11 aa, Homo sapiens
  Heavy chain CDR3 for antibody 7230 (IGHV1-24)
ATYFGSGSLDY

SEQ ID NO: 14461 - protein, 9 aa, Homo sapiens
  Light chain CDR3 for antibody 7231 (IGKV1-9)
QQLKSYLYT

SEQ ID NO: 14462 - protein, 13 aa, Homo sapiens
  Heavy chain CDR3 for antibody 7231 (IGHV1-18)
ARRQVGYYYGMDV

SEQ ID NO: 14463 - protein, 9 aa, Homo sapiens
  Light chain CDR3 for antibody 7232 (IGKV1-33)
QQYDNLPFT

SEQ ID NO: 14464 - protein, 14 aa, Homo sapiens
  Heavy chain CDR3 for antibody 7232 (IGHV3-33)
ARDKSYPLSYGMDV

SEQ ID NO: 14465 - protein, 9 aa, Homo sapiens
  Light chain CDR3 for antibody 7233 (IGKV1-9)
QQLKSYLYT

SEQ ID NO: 14466 - protein, 16 aa, Homo sapiens
  Heavy chain CDR3 for antibody 7233 (IGHV1-8)
AREGTMVRGVTYAFDI

SEQ ID NO: 14467 - protein, 9 aa, Homo sapiens
  Light chain CDR3 for antibody 7234 (IGKV3D-7)
QQDYEFPLT

SEQ ID NO: 14468 - protein, 26 aa, Homo sapiens
  Heavy chain CDR3 for antibody 7234 (IGHV4-39)
ARQGLLWFGDLKAYDSSGYYYGYFHH

SEQ ID NO: 14469 - protein, 9 aa, Homo sapiens
  Light chain CDR3 for antibody 7235 (IGKV6-21)
HQSSSLPLT

SEQ ID NO: 14470 - protein, 11 aa, Homo sapiens
  Heavy chain CDR3 for antibody 7235 (IGHV3-33)
ARDPLTGDIDL

SEQ ID NO: 14471 - protein, 9 aa, Homo sapiens
  Light chain CDR3 for antibody 7236 (IGKV1-6)
QQEYNYPLT

SEQ ID NO: 14472 - protein, 15 aa, Homo sapiens
  Heavy chain CDR3 for antibody 7236 (IGHV3-33)
ARDRVVRGVMGYFDY

SEQ ID NO: 14473 - protein, 9 aa, Homo sapiens
  Light chain CDR3 for antibody 7237 (IGKV1-39)
QQSYSSPFT

SEQ ID NO: 14474 - protein, 13 aa, Homo sapiens
  Heavy chain CDR3 for antibody 7237 (IGHV3-33)
ARDYCGGDCYLDY

SEQ ID NO: 14475 - protein, 10 aa, Homo sapiens
  Light chain CDR3 for antibody 7238 (IGKV3-11)
QQRSNWPMYT

SEQ ID NO: 14476 - protein, 9 aa, Homo sapiens
  Heavy chain CDR3 for antibody 7238 (IGHV3-13)
ARDHWYFDL

SEQ ID NO: 14477 - protein, 9 aa, Homo sapiens
  Light chain CDR3 for antibody 7239 (IGKV1D-16)
QQYNSYPYT

SEQ ID NO: 14478 - protein, 13 aa, Homo sapiens
  Heavy chain CDR3 for antibody 7239 (IGHV3-20)
ASDYGDYVGAFDI

SEQ ID NO: 14479 - protein, 9 aa, Homo sapiens
  Light chain CDR3 for antibody 7240 (IGKV6-21)
HQSSSLPYT

SEQ ID NO: 14480 - protein, 17 aa, Homo sapiens
  Heavy chain CDR3 for antibody 7240 (IGHV4-59)
AREEDYFGSGSFGTFDI

SEQ ID NO: 14481 - protein, 9 aa, Homo sapiens
  Light chain CDR3 for antibody 7241 (IGKV1-39)
QQSYRTPLT

SEQ ID NO: 14482 - protein, 16 aa, Homo sapiens
  Heavy chain CDR3 for antibody 7241 (IGHV4-59)
ARDTPYYSGSGRPFDH

SEQ ID NO: 14483 - protein, 9 aa, Homo sapiens
  Light chain CDR3 for antibody 7242 (IGKV1-33)
QQYDNLPFT

SEQ ID NO: 14484 - protein, 20 aa, Homo sapiens
  Heavy chain CDR3 for antibody 7242 (IGHV3-33)
ARDPAQLERRYYYFYYGMDV

SEQ ID NO: 14485 - protein, 9 aa, Homo sapiens
  Light chain CDR3 for antibody 7243 (IGKV3D-7)
QQDYNLPWT

SEQ ID NO: 14486 - protein, 17 aa, Homo sapiens
  Heavy chain CDR3 for antibody 7243 (IGHV4-39)
AGRLTYYFGSGSPSFDY

SEQ ID NO: 14487 - protein, 8 aa, Homo sapiens
  Light chain CDR3 for antibody 7244 (IGKV6-21)
HQSSSLPT

SEQ ID NO: 14488 - protein, 17 aa, Homo sapiens
  Heavy chain CDR3 for antibody 7244 (IGHV1-18)
ARDEGYDILTGYPHFDY

SEQ ID NO: 14489 - protein, 9 aa, Homo sapiens
  Light chain CDR3 for antibody 7245 (IGKV1D-13)
QQFNNYPHT

SEQ ID NO: 14490 - protein, 14 aa, Homo sapiens
  Heavy chain CDR3 for antibody 7245 (IGHV3-23)
ARDGIVRATDAFAI

SEQ ID NO: 14491 - protein, 8 aa, Homo sapiens
  Light chain CDR3 for antibody 7246 (IGKV3D-7)
QQDYNLLT

SEQ ID NO: 14492 - protein, 12 aa, Homo sapiens
  Heavy chain CDR3 for antibody 7246 (IGHV3-33)
ARDGYSSRNFDY

SEQ ID NO: 14493 - protein, 9 aa, Homo sapiens
  Light chain CDR3 for antibody 7247 (IGKV3D-7)
QQDYNLPLT

SEQ ID NO: 14494 - protein, 24 aa, Homo sapiens
  Heavy chain CDR3 for antibody 7247 (IGHV3-20)
ARGRITMVRGVIINPLDYYNGMDV

SEQ ID NO: 14495 - protein, 9 aa, Homo sapiens
  Light chain CDR3 for antibody 7248 (IGKV1-17)
LQQNSYPWT

SEQ ID NO: 14496 - protein, 12 aa, Homo sapiens
  Heavy chain CDR3 for antibody 7248 (IGHV3-33)
ARKDSGYDWFDY

SEQ ID NO: 14497 - protein, 10 aa, Homo sapiens
  Light chain CDR3 for antibody 7249 (IGKV1-39)
QQSYSTPMYT

SEQ ID NO: 14498 - protein, 20 aa, Homo sapiens
  Heavy chain CDR3 for antibody 7249 (IGHV3-20)
ARDLCSSTSCYGYYYYGMDV

SEQ ID NO: 14499 - protein, 8 aa, Homo sapiens
  Light chain CDR3 for antibody 7250 (IGKV3-11)
QQRSNWLT

SEQ ID NO: 14500 - protein, 16 aa, Homo sapiens
  Heavy chain CDR3 for antibody 7250 (IGHV3-33)
ARAVYYGSGSSLIMDV

SEQ ID NO: 14501 - protein, 9 aa, Homo sapiens
  Light chain CDR3 for antibody 7251 (IGKV1D-16)
QQYYSYPRT

SEQ ID NO: 14502 - protein, 19 aa, Homo sapiens
  Heavy chain CDR3 for antibody 7251 (IGHV3-33)
ARGVRLRYFDPYYYYGMDV

SEQ ID NO: 14503 - protein, 11 aa, Homo sapiens
  Light chain CDR3 for antibody 7252 (IGKV3-11)
QQRSNWPPTWT

SEQ ID NO: 14504 - protein, 9 aa, Homo sapiens
  Heavy chain CDR3 for antibody 7252 (IGHV4-59)
ARGGASFDY

SEQ ID NO: 14505 - protein, 9 aa, Homo sapiens
  Light chain CDR3 for antibody 7253 (IGKV1-6)
LQDYIYPWT

SEQ ID NO: 14506 - protein, 11 aa, Homo sapiens
  Heavy chain CDR3 for antibody 7253 (IGHV3-20)
ARDGAVAGLDY

SEQ ID NO: 14507 - protein, 10 aa, Homo sapiens
  Light chain CDR3 for antibody 7254 (IGKV3-11)
QQRSNWPIFT

SEQ ID NO: 14508 - protein, 23 aa, Homo sapiens
  Heavy chain CDR3 for antibody 7254 (IGHV3-11)
ARDEGVTMVRGVISYYYYYGMDV

SEQ ID NO: 14509 - protein, 10 aa, Homo sapiens
  Light chain CDR3 for antibody 7255 (IGKV1-39)
QQSYSTPMYT

SEQ ID NO: 14510 - protein, 17 aa, Homo sapiens
  Heavy chain CDR3 for antibody 7255 (IGHV3-33)
ARESLKLGIYYYYGMDV

SEQ ID NO: 14511 - protein, 9 aa, Homo sapiens
  Light chain CDR3 for antibody 7256 (IGKV3D-20)
HQYGSSPLT

SEQ ID NO: 14512 - protein, 15 aa, Homo sapiens
  Heavy chain CDR3 for antibody 7256 (IGHV4-39)
ARRDYDILTGYLFDY

SEQ ID NO: 14513 - protein, 9 aa, Homo sapiens
  Light chain CDR3 for antibody 7257 (IGKV3D-20)
QQYGTSPYT

SEQ ID NO: 14514 - protein, 8 aa, Homo sapiens
  Heavy chain CDR3 for antibody 7257 (IGHV3-33)
ARGGYDIL

SEQ ID NO: 14515 - protein, 9 aa, Homo sapiens
  Light chain CDR3 for antibody 7258 (IGKV2-30)
MQGTHWPLT

SEQ ID NO: 14516 - protein, 13 aa, Homo sapiens
  Heavy chain CDR3 for antibody 7258 (IGHV1-46)
ARVKLGSLGAFDI

SEQ ID NO: 14517 - protein, 9 aa, Homo sapiens
  Light chain CDR3 for antibody 7259 (IGKV3-11)
QQRSNWPPT

SEQ ID NO: 14518 - protein, 17 aa, Homo sapiens
  Heavy chain CDR3 for antibody 7259 (IGHV4-59)
ARRITMVREIIITAFDY

SEQ ID NO: 14519 - protein, 9 aa, Homo sapiens
  Light chain CDR3 for antibody 7260 (IGKV3-20)
QQYGSSPYT

SEQ ID NO: 14520 - protein, 17 aa, Homo sapiens
  Heavy chain CDR3 for antibody 7260 (IGHV3-33)
AKGDYYGSGSYSTFFDY

SEQ ID NO: 14521 - protein, 9 aa, Homo sapiens
  Light chain CDR3 for antibody 7261 (IGKV6-21)
HQSNRLPLT

SEQ ID NO: 14522 - protein, 16 aa, Homo sapiens
  Heavy chain CDR3 for antibody 7261 (IGHV3-23)
AKEGMVLRYFDWLWDY

SEQ ID NO: 14523 - protein, 9 aa, Homo sapiens
  Light chain CDR3 for antibody 7262 (IGKV3D-7)
QQDYNLPYT

SEQ ID NO: 14524 - protein, 22 aa, Homo sapiens
  Heavy chain CDR3 for antibody 7262 (IGHV3-74)
AKDDLPYYDILTHSTTTGGMDV

SEQ ID NO: 14525 - protein, 8 aa, Homo sapiens
  Light chain CDR3 for antibody 7263 (IGKV3-20)
QQYGSSFT

SEQ ID NO: 14526 - protein, 13 aa, Homo sapiens
  Heavy chain CDR3 for antibody 7263 (IGHV3-33)
ARGDNWNDGGFDY

SEQ ID NO: 14527 - protein, 9 aa, Homo sapiens
  Light chain CDR3 for antibody 7264 (IGKV1-16)
QQYNSYPLT

SEQ ID NO: 14528 - protein, 15 aa, Homo sapiens
  Heavy chain CDR3 for antibody 7264 (IGHV3-30)
TKDEYPGNQIEAFDI

SEQ ID NO: 14529 - protein, 9 aa, Homo sapiens
  Light chain CDR3 for antibody 7265 (IGKV1-6)
LQDYNYPRT

SEQ ID NO: 14530 - protein, 9 aa, Homo sapiens
  Heavy chain CDR3 for antibody 7265 (IGHV3-33)
ARGRVSLDV

SEQ ID NO: 14531 - protein, 10 aa, Homo sapiens
  Light chain CDR3 for antibody 7266 (IGKV3-15)
QQYNNWPPLT

SEQ ID NO: 14532 - protein, 20 aa, Homo sapiens
  Heavy chain CDR3 for antibody 7266 (IGHV1-18)
AREVGIAVAGTLYYYYGMDV

SEQ ID NO: 14533 - protein, 9 aa, Homo sapiens
  Light chain CDR3 for antibody 7267 (IGKV2D-28)
MQALQTPPT

SEQ ID NO: 14534 - protein, 15 aa, Homo sapiens
  Heavy chain CDR3 for antibody 7267 (IGHV1-18)
ARGYCSSTSCYYFDY

SEQ ID NO: 14535 - protein, 9 aa, Homo sapiens
  Light chain CDR3 for antibody 7268 (IGKV1-6)
LQDFHYPWT

SEQ ID NO: 14536 - protein, 18 aa, Homo sapiens
  Heavy chain CDR3 for antibody 7268 (IGHV3-11)
AKDRITGTTYGYYSGLDV

SEQ ID NO: 14537 - protein, 8 aa, Homo sapiens
  Light chain CDR3 for antibody 7269 (IGKV3-11)
QQRGNWPS

SEQ ID NO: 14538 - protein, 13 aa, Homo sapiens
  Heavy chain CDR3 for antibody 7269 (IGHV4-34)
ASNFYYYYYGMDV

SEQ ID NO: 14539 - protein, 8 aa, Homo sapiens
  Light chain CDR3 for antibody 7270 (IGKV3D-7)
QQDYNLLT

SEQ ID NO: 14540 - protein, 13 aa, Homo sapiens
  Heavy chain CDR3 for antibody 7270 (IGHV3-30)
AAPFMVRGDGMDV

SEQ ID NO: 14541 - protein, 8 aa, Homo sapiens
  Light chain CDR3 for antibody 7271 (IGKV1-5)
QQYNSYWT

SEQ ID NO: 14542 - protein, 24 aa, Homo sapiens
  Heavy chain CDR3 for antibody 7271 (IGHV3-20)
ARGRITMVRGVIINPLDYYNGMDV

SEQ ID NO: 14543 - protein, 9 aa, Homo sapiens
  Light chain CDR3 for antibody 7272 (IGKV5-2)
LQHDKFPYT

SEQ ID NO: 14544 - protein, 16 aa, Homo sapiens
  Heavy chain CDR3 for antibody 7272 (IGHV3-23)
ARNDILTASGYYGMDV

SEQ ID NO: 14545 - protein, 10 aa, Homo sapiens
  Light chain CDR3 for antibody 7273 (IGKV3-11)
QQRSNWPTWT

SEQ ID NO: 14546 - protein, 14 aa, Homo sapiens
  Heavy chain CDR3 for antibody 7273 (IGHV1-46)
ARKGIVGAFDAFDI

SEQ ID NO: 14547 - protein, 9 aa, Homo sapiens
  Light chain CDR3 for antibody 7274 (IGKV3-11)
QQRSNWPRT

SEQ ID NO: 14548 - protein, 21 aa, Homo sapiens
  Heavy chain CDR3 for antibody 7274 (IGHV1-18)
ASGVLIWFGELLSEDYYDMDV

SEQ ID NO: 14549 - protein, 9 aa, Homo sapiens
  Light chain CDR3 for antibody 7275 (IGKV3-20)
QQFGRSPRT

SEQ ID NO: 14550 - protein, 12 aa, Homo sapiens
  Heavy chain CDR3 for antibody 7275 (IGHV1-18)
ARILFYGDYFDY

SEQ ID NO: 14551 - protein, 10 aa, Homo sapiens
  Light chain CDR3 for antibody 7276 (IGKV1-39)
QQSYSTPMYT

SEQ ID NO: 14552 - protein, 12 aa, Homo sapiens
  Heavy chain CDR3 for antibody 7276 (IGHV3-33)
AREGTRWVYFDY

SEQ ID NO: 14553 - protein, 9 aa, Homo sapiens
  Light chain CDR3 for antibody 7277 (IGKV1-39)
QQSYRTPLT

SEQ ID NO: 14554 - protein, 11 aa, Homo sapiens
  Heavy chain CDR3 for antibody 7277 (IGHV3-33)
ARAGIAAVFDY

SEQ ID NO: 14555 - protein, 8 aa, Homo sapiens
  Light chain CDR3 for antibody 7278 (IGKV3D-7)
QQDYNLLT

SEQ ID NO: 14556 - protein, 17 aa, Homo sapiens
  Heavy chain CDR3 for antibody 7278 (IGHV3-33)
ARGDGDILTGYYEWFDP

SEQ ID NO: 14557 - protein, 9 aa, Homo sapiens
  Light chain CDR3 for antibody 7279 (IGKV1D-13)
QRFNNYLYT

SEQ ID NO: 14558 - protein, 19 aa, Homo sapiens
  Heavy chain CDR3 for antibody 7279 (IGHV3-33)
ARGVRLRYFDPYYYYGMDV

SEQ ID NO: 14559 - protein, 10 aa, Homo sapiens
  Light chain CDR3 for antibody 7280 (IGKV1-17)
LQHNSYPMYT

SEQ ID NO: 14560 - protein, 20 aa, Homo sapiens
  Heavy chain CDR3 for antibody 7280 (IGHV3-23)
AKDREMAATSHYYYYYGMDV

SEQ ID NO: 14561 - protein, 9 aa, Homo sapiens
  Light chain CDR3 for antibody 7281 (IGKV3D-7)
QQDYNLPYT

SEQ ID NO: 14562 - protein, 16 aa, Homo sapiens
  Heavy chain CDR3 for antibody 7281 (IGHV3-30)
ARDIAVAGHVYYGMDV

SEQ ID NO: 14563 - protein, 6 aa, Homo sapiens
  Light chain CDR3 for antibody 7282 (IGKV3-20)
QQYGST

SEQ ID NO: 14564 - protein, 15 aa, Homo sapiens
  Heavy chain CDR3 for antibody 7282 (IGHV3-33)
ARRICSGGSCSLFDY

SEQ ID NO: 14565 - protein, 9 aa, Homo sapiens
  Light chain CDR3 for antibody 7283 (IGKV1-9)
QQLKSYLYT

SEQ ID NO: 14566 - protein, 14 aa, Homo sapiens
  Heavy chain CDR3 for antibody 7283 (IGHV3-33)
ARQYSYGYPYYFDY

SEQ ID NO: 14567 - protein, 8 aa, Homo sapiens
  Light chain CDR3 for antibody 7284 (IGKV3D-7)
QQDYNLLT

SEQ ID NO: 14568 - protein, 20 aa, Homo sapiens
  Heavy chain CDR3 for antibody 7284 (IGHV3-33)
AREDYYGSGSYYPAYNWFDP

SEQ ID NO: 14569 - protein, 8 aa, Homo sapiens
  Light chain CDR3 for antibody 7285 (IGKV1-5)
QQYNSYYT

SEQ ID NO: 14570 - protein, 11 aa, Homo sapiens
  Heavy chain CDR3 for antibody 7285 (IGHV3-23)
AKGLWSYYFDY

SEQ ID NO: 14571 - protein, 9 aa, Homo sapiens
  Light chain CDR3 for antibody 7286 (IGKV3-15)
QQYNNWPLT

SEQ ID NO: 14572 - protein, 14 aa, Homo sapiens
  Heavy chain CDR3 for antibody 7286 (IGHV3-33)
AREGYSSNWYDFDY

SEQ ID NO: 14573 - protein, 6 aa, Homo sapiens
  Light chain CDR3 for antibody 7287 (IGKV3-20)
QQYGST

SEQ ID NO: 14574 - protein, 18 aa, Homo sapiens
  Heavy chain CDR3 for antibody 7287 (IGHV3-23)
AKDRITGTTYGYYSGLDV

SEQ ID NO: 14575 - protein, 8 aa, Homo sapiens
  Light chain CDR3 for antibody 7288 (IGKV3D-7)
QQYGSSLT

SEQ ID NO: 14576 - protein, 19 aa, Homo sapiens
  Heavy chain CDR3 for antibody 7288 (IGHV3-33)
ARGPYYDILTGYGYYGMDV

SEQ ID NO: 14577 - protein, 9 aa, Homo sapiens
  Light chain CDR3 for antibody 7289 (IGKV1-9)
QQLNSYPWT

SEQ ID NO: 14578 - protein, 12 aa, Homo sapiens
  Heavy chain CDR3 for antibody 7289 (IGHV4-61)
ARVGSSGWYFDY

SEQ ID NO: 14579 - protein, 8 aa, Homo sapiens
  Light chain CDR3 for antibody 7290 (IGKV1-5)
QQYNSYYT

SEQ ID NO: 14580 - protein, 18 aa, Homo sapiens
  Heavy chain CDR3 for antibody 7290 (IGHV3-33)
ARERGYYGSDIYPAAFDI

SEQ ID NO: 14581 - protein, 8 aa, Homo sapiens
  Light chain CDR3 for antibody 7291 (IGKV3D-7)
QQDYNLLT

SEQ ID NO: 14582 - protein, 12 aa, Homo sapiens
  Heavy chain CDR3 for antibody 7291 (IGHV3-33)
ARDSSGWSHFDY

SEQ ID NO: 14583 - protein, 9 aa, Homo sapiens
  Light chain CDR3 for antibody 7292 (IGKV3-11)
QQRSNWPYT

SEQ ID NO: 14584 - protein, 18 aa, Homo sapiens
  Heavy chain CDR3 for antibody 7292 (IGHV1-18)
ARDRYYYDSGSYYYGMDV

SEQ ID NO: 14585 - protein, 9 aa, Homo sapiens
  Light chain CDR3 for antibody 7293 (IGKV1-39)
QQSYSTPLT

SEQ ID NO: 14586 - protein, 14 aa, Homo sapiens
  Heavy chain CDR3 for antibody 7293 (IGHV3-33)
ARDRDIMATSYFDY

SEQ ID NO: 14587 - protein, 10 aa, Homo sapiens
  Light chain CDR3 for antibody 7294 (IGKV1-39)
QQSYSTPMYT

SEQ ID NO: 14588 - protein, 16 aa, Homo sapiens
  Heavy chain CDR3 for antibody 7294 (IGHV3-33)
ARGYDMLTGDYYGMDV

SEQ ID NO: 14589 - protein, 9 aa, Homo sapiens
  Light chain CDR3 for antibody 7295 (IGKV1D-16)
QQYHSYPYT

SEQ ID NO: 14590 - protein, 17 aa, Homo sapiens
  Heavy chain CDR3 for antibody 7295 (IGHV1-8)
ARGDYYGSGSPYWYFDL

SEQ ID NO: 14591 - protein, 6 aa, Homo sapiens
  Light chain CDR3 for antibody 7296 (IGKV3-20)
QQYGST

SEQ ID NO: 14592 - protein, 12 aa, Homo sapiens
  Heavy chain CDR3 for antibody 7296 (IGHV3-33)
ARDLVGATPFDY

SEQ ID NO: 14593 - protein, 9 aa, Homo sapiens
  Light chain CDR3 for antibody 7297 (IGKV2D-28)
MQVLQTPFT

SEQ ID NO: 14594 - protein, 9 aa, Homo sapiens
  Heavy chain CDR3 for antibody 7297 (IGHV4-59)
AREGGSGSL

SEQ ID NO: 14595 - protein, 8 aa, Homo sapiens
  Light chain CDR3 for antibody 7298 (IGKV3-20)
QQYGRSFT

SEQ ID NO: 14596 - protein, 26 aa, Homo sapiens
  Heavy chain CDR3 for antibody 7298 (IGHV4-39)
ARQGLLWFGDLKAYDSSGYYYGYFHH

SEQ ID NO: 14597 - protein, 9 aa, Homo sapiens
  Light chain CDR3 for antibody 7299 (IGKV1-5)
QQYNTYSRT

SEQ ID NO: 14598 - protein, 15 aa, Homo sapiens
  Heavy chain CDR3 for antibody 7299 (IGHV3-74)
ARGAMVRGVDYGMDV

SEQ ID NO: 14599 - protein, 8 aa, Homo sapiens
  Light chain CDR3 for antibody 7300 (IGKV1-5)
QQYNSYYT

SEQ ID NO: 14600 - protein, 15 aa, Homo sapiens
  Heavy chain CDR3 for antibody 7300 (IGHV3-33)
ARDHLTGYYYYGMDV

SEQ ID NO: 14601 - protein, 9 aa, Homo sapiens
  Light chain CDR3 for antibody 7301 (IGKV1-9)
QQGNTYSRT

SEQ ID NO: 14602 - protein, 9 aa, Homo sapiens
  Heavy chain CDR3 for antibody 7301 (IGHV4-59)
AGGSWDFDY

SEQ ID NO: 14603 - protein, 9 aa, Homo sapiens
  Light chain CDR3 for antibody 7302 (IGKV2-30)
MQGTHWPLT

SEQ ID NO: 14604 - protein, 16 aa, Homo sapiens
  Heavy chain CDR3 for antibody 7302 (IGHV3-23)
AKEGEVLRYFDWLFNY

SEQ ID NO: 14605 - protein, 10 aa, Homo sapiens
  Light chain CDR3 for antibody 7303 (IGKV3-20)
QQYGSSPMYT

SEQ ID NO: 14606 - protein, 13 aa, Homo sapiens
  Heavy chain CDR3 for antibody 7303 (IGHV3-33)
ARGYGSGSPHFGY

SEQ ID NO: 14607 - protein, 10 aa, Homo sapiens
  Light chain CDR3 for antibody 7304 (IGKV1-39)
QQSYSTPMYT

SEQ ID NO: 14608 - protein, 13 aa, Homo sapiens
  Heavy chain CDR3 for antibody 7304 (IGHV3-33)
ARREVVGGRGFDY

SEQ ID NO: 14609 - protein, 9 aa, Homo sapiens
  Light chain CDR3 for antibody 7305 (IGKV1-9)
QQLISYPLT

SEQ ID NO: 14610 - protein, 13 aa, Homo sapiens
  Heavy chain CDR3 for antibody 7305 (IGHV4-28)
ARKGATGYYGMDV

SEQ ID NO: 14611 - protein, 10 aa, Homo sapiens
  Light chain CDR3 for antibody 7306 (IGKV3-11)
QQRSNWPIFT

SEQ ID NO: 14612 - protein, 20 aa, Homo sapiens
  Heavy chain CDR3 for antibody 7306 (IGHV1-18)
AREVGIAVAGTLYYYYGMDV

SEQ ID NO: 14613 - protein, 9 aa, Homo sapiens
  Light chain CDR3 for antibody 7307 (IGKV1-9)
QQLNGYPFT

SEQ ID NO: 14614 - protein, 12 aa, Homo sapiens
  Heavy chain CDR3 for antibody 7307 (IGHV3-33)
AREGDILTGYSL

SEQ ID NO: 14615 - protein, 11 aa, Homo sapiens
  Light chain CDR3 for antibody 7308 (IGKV3-11)
QQRSNWPPTWT

SEQ ID NO: 14616 - protein, 17 aa, Homo sapiens
  Heavy chain CDR3 for antibody 7308 (IGHV4-34)
AGLRFFDWLFDYYGMDV

SEQ ID NO: 14617 - protein, 9 aa, Homo sapiens
  Light chain CDR3 for antibody 7309 (IGKV3-20)
QQYGSSPYT

SEQ ID NO: 14618 - protein, 10 aa, Homo sapiens
  Heavy chain CDR3 for antibody 7309 (IGHV3-11)
ARGQWPPLDY

SEQ ID NO: 14619 - protein, 10 aa, Homo sapiens
  Light chain CDR3 for antibody 7310 (IGKV1-17)
LQHNSYPMYT

SEQ ID NO: 14620 - protein, 13 aa, Homo sapiens
  Heavy chain CDR3 for antibody 7310 (IGHV3-23)
AKDRGGSYSYFDF

SEQ ID NO: 14621 - protein, 9 aa, Homo sapiens
  Light chain CDR3 for antibody 7311 (IGKV1D-13)
QHFNNYMYT

SEQ ID NO: 14622 - protein, 11 aa, Homo sapiens
  Heavy chain CDR3 for antibody 7311 (IGHV4-39)
ARSLRYSFFDY

SEQ ID NO: 14623 - protein, 9 aa, Homo sapiens
  Light chain CDR3 for antibody 7312 (IGKV1-27)
QKYNSAPYT

SEQ ID NO: 14624 - protein, 15 aa, Homo sapiens
  Heavy chain CDR3 for antibody 7312 (IGHV3-33)
ARHSSGFYYYYGMDV

SEQ ID NO: 14625 - protein, 9 aa, Homo sapiens
  Light chain CDR3 for antibody 7313 (IGKV3-20)
LQYGSSPYT

SEQ ID NO: 14626 - protein, 18 aa, Homo sapiens
  Heavy chain CDR3 for antibody 7313 (IGHV4-59)
AREGDYVWGSYRPNWFDH

SEQ ID NO: 14627 - protein, 9 aa, Homo sapiens
  Light chain CDR3 for antibody 7314 (IGKV1-39)
QQSYSTPYT

SEQ ID NO: 14628 - protein, 19 aa, Homo sapiens
  Heavy chain CDR3 for antibody 7314 (IGHV3-33)
ARDRYYDILTGYSSYYFDY

SEQ ID NO: 14629 - protein, 9 aa, Homo sapiens
  Light chain CDR3 for antibody 7315 (IGKV3D-7)
QQDYDLPYP

SEQ ID NO: 14630 - protein, 13 aa, Homo sapiens
  Heavy chain CDR3 for antibody 7315 (IGHV4-39)
ARREVVGGRGFDY

SEQ ID NO: 14631 - protein, 9 aa, Homo sapiens
  Light chain CDR3 for antibody 7316 (IGKV3D-7)
QQDYNLPYT

SEQ ID NO: 14632 - protein, 14 aa, Homo sapiens
  Heavy chain CDR3 for antibody 7316 (IGHV4-39)
ARQGGSGSYYNLDY

SEQ ID NO: 14633 - protein, 9 aa, Homo sapiens
  Light chain CDR3 for antibody 7317 (IGKV1-9)
QQLNSYPLT

SEQ ID NO: 14634 - protein, 13 aa, Homo sapiens
  Heavy chain CDR3 for antibody 7317 (IGHV4-39)
ARQWPSGYWYFDL

SEQ ID NO: 14635 - protein, 10 aa, Homo sapiens
  Light chain CDR3 for antibody 7318 (IGKV3-11)
QQRSNWPIFT

SEQ ID NO: 14636 - protein, 17 aa, Homo sapiens
  Heavy chain CDR3 for antibody 7318 (IGHV3-23)
AKDRPVTTLYYYFGMDV

SEQ ID NO: 14637 - protein, 9 aa, Homo sapiens
  Light chain CDR3 for antibody 7319 (IGKV1-27)
QKYNSAPYT

SEQ ID NO: 14638 - protein, 18 aa, Homo sapiens
  Heavy chain CDR3 for antibody 7319 (IGHV3-11)
ARDGYFSGWNYYYFGMDV

SEQ ID NO: 14639 - protein, 9 aa, Homo sapiens
  Light chain CDR3 for antibody 7320 (IGKV1-39)
QQSYSTPLT

SEQ ID NO: 14640 - protein, 15 aa, Homo sapiens
  Heavy chain CDR3 for antibody 7320 (IGHV3-11)
ARDRAVAGTIHAFDI

SEQ ID NO: 14641 - protein, 9 aa, Homo sapiens
  Light chain CDR3 for antibody 7321 (IGKV5-2)
LQHDKFPYT

SEQ ID NO: 14642 - protein, 10 aa, Homo sapiens
  Heavy chain CDR3 for antibody 7321 (IGHV1-46)
AREWELLFDY

SEQ ID NO: 14643 - protein, 9 aa, Homo sapiens
  Light chain CDR3 for antibody 7322 (IGKV1-6)
LQDYNYPWT

SEQ ID NO: 14644 - protein, 10 aa, Homo sapiens
  Heavy chain CDR3 for antibody 7322 (IGHV3-23)
ANSGNYYFDY

SEQ ID NO: 14645 - protein, 9 aa, Homo sapiens
  Light chain CDR3 for antibody 7323 (IGKV1-6)
LQDYSYPRT

SEQ ID NO: 14646 - protein, 12 aa, Homo sapiens
  Heavy chain CDR3 for antibody 7323 (IGHV1-18)
ARDSFGLNWFDP

SEQ ID NO: 14647 - protein, 9 aa, Homo sapiens
  Light chain CDR3 for antibody 7324 (IGKV3D-7)
QQDYNLPYT

SEQ ID NO: 14648 - protein, 14 aa, Homo sapiens
  Heavy chain CDR3 for antibody 7324 (IGHV3-33)
ARASSGSSYWYIDL

SEQ ID NO: 14649 - protein, 9 aa, Homo sapiens
  Light chain CDR3 for antibody 7325 (IGKV3-15)
QQYNNWPRT

SEQ ID NO: 14650 - protein, 13 aa, Homo sapiens
  Heavy chain CDR3 for antibody 7325 (IGHV3-33)
VSTGDSYYYVMDV

SEQ ID NO: 14651 - protein, 8 aa, Homo sapiens
  Light chain CDR3 for antibody 7326 (IGKV1-5)
QQYNSYWT

SEQ ID NO: 14652 - protein, 15 aa, Homo sapiens
  Heavy chain CDR3 for antibody 7326 (IGHV3-33)
ARAYDLPHYYYGMDV

SEQ ID NO: 14653 - protein, 9 aa, Homo sapiens
  Light chain CDR3 for antibody 7327 (IGKV3-15)
QQYNNWPLT

SEQ ID NO: 14654 - protein, 19 aa, Homo sapiens
  Heavy chain CDR3 for antibody 7327 (IGHV4-39)
ARQGDALRYFDWLLGAFDI

SEQ ID NO: 14655 - protein, 8 aa, Homo sapiens
  Light chain CDR3 for antibody 7328 (IGKV3D-7)
QQDYNLVT

SEQ ID NO: 14656 - protein, 11 aa, Homo sapiens
  Heavy chain CDR3 for antibody 7328 (IGHV4-59)
VRERGYYGMDV

SEQ ID NO: 14657 - protein, 9 aa, Homo sapiens
  Light chain CDR3 for antibody 7329 (IGKV2-30)
MQGTHWPLT

SEQ ID NO: 14658 - protein, 16 aa, Homo sapiens
  Heavy chain CDR3 for antibody 7329 (IGHV1-18)
ARYFDWLLRDYYGMDV

SEQ ID NO: 14659 - protein, 8 aa, Homo sapiens
  Light chain CDR3 for antibody 7330 (IGKV1D-13)
QQFNNYPT

SEQ ID NO: 14660 - protein, 14 aa, Homo sapiens
  Heavy chain CDR3 for antibody 7330 (IGHV4-39)
ARDSGYDYYYGMDV

SEQ ID NO: 14661 - protein, 9 aa, Homo sapiens
  Light chain CDR3 for antibody 7331 (IGKV6-21)
HQSSSLPFT

SEQ ID NO: 14662 - protein, 15 aa, Homo sapiens
  Heavy chain CDR3 for antibody 7331 (IGHV4-39)
ARQGLVATIKGYFQH

SEQ ID NO: 14663 - protein, 9 aa, Homo sapiens
  Light chain CDR3 for antibody 7332 (IGKV1-39)
QQSDSTPRT

SEQ ID NO: 14664 - protein, 18 aa, Homo sapiens
  Heavy chain CDR3 for antibody 7332 (IGHV1-18)
ARDSGYGGYDYWEPPLDY

SEQ ID NO: 14665 - protein, 9 aa, Homo sapiens
  Light chain CDR3 for antibody 7333 (IGKV1-9)
QQLNSYPWT

SEQ ID NO: 14666 - protein, 12 aa, Homo sapiens
  Heavy chain CDR3 for antibody 7333 (IGHV6-1)
ARLDWNYRAFDI

SEQ ID NO: 14667 - protein, 9 aa, Homo sapiens
  Light chain CDR3 for antibody 7334 (IGKV1D-13)
QQFNNYPST

SEQ ID NO: 14668 - protein, 16 aa, Homo sapiens
  Heavy chain CDR3 for antibody 7334 (IGHV3-20)
AREGYSSSWFDRNFDY

SEQ ID NO: 14669 - protein, 9 aa, Homo sapiens
  Light chain CDR3 for antibody 7335 (IGKV1-9)
QQLNSYPYT

SEQ ID NO: 14670 - protein, 15 aa, Homo sapiens
  Heavy chain CDR3 for antibody 7335 (IGHV3-30)
ARGAMVRGVDYGMDV

SEQ ID NO: 14671 - protein, 10 aa, Homo sapiens
  Light chain CDR3 for antibody 7336 (IGKV1-17)
LQHNSYPMYT

SEQ ID NO: 14672 - protein, 14 aa, Homo sapiens
  Heavy chain CDR3 for antibody 7336 (IGHV3-33)
ARDREQQLVRYFDY

SEQ ID NO: 14673 - protein, 8 aa, Homo sapiens
  Light chain CDR3 for antibody 7337 (IGKV3D-7)
QQDYNLLT

SEQ ID NO: 14674 - protein, 10 aa, Homo sapiens
  Heavy chain CDR3 for antibody 7337 (IGHV3-74)
ARENWGGFDY

SEQ ID NO: 14675 - protein, 10 aa, Homo sapiens
  Light chain CDR3 for antibody 7338 (IGKV3-11)
QQRSNWPTWT

SEQ ID NO: 14676 - protein, 12 aa, Homo sapiens
  Heavy chain CDR3 for antibody 7338 (IGHV3-33)
ASRDILTGYLGY

SEQ ID NO: 14677 - protein, 9 aa, Homo sapiens
  Light chain CDR3 for antibody 7339 (IGKV5-2)
LQHDNFPYT

SEQ ID NO: 14678 - protein, 12 aa, Homo sapiens
  Heavy chain CDR3 for antibody 7339 (IGHV3-33)
AREEAVAEAFDI

SEQ ID NO: 14679 - protein, 8 aa, Homo sapiens
  Light chain CDR3 for antibody 7340 (IGKV3D-7)
QQDYNLLT

SEQ ID NO: 14680 - protein, 9 aa, Homo sapiens
  Heavy chain CDR3 for antibody 7340 (IGHV3-23)
ARIWWLKDY

SEQ ID NO: 14681 - protein, 9 aa, Homo sapiens
  Light chain CDR3 for antibody 7341 (IGKV3D-7)
QQDYNLPFT

SEQ ID NO: 14682 - protein, 18 aa, Homo sapiens
  Heavy chain CDR3 for antibody 7341 (IGHV6-1)
ARDQYSYGPYYYYYGMDV

SEQ ID NO: 14683 - protein, 9 aa, Homo sapiens
  Light chain CDR3 for antibody 7342 (IGKV3-20)
QQYGSSPRT

SEQ ID NO: 14684 - protein, 15 aa, Homo sapiens
  Heavy chain CDR3 for antibody 7342 (IGHV1-18)
ARLRWFGELSGWFDP

SEQ ID NO: 14685 - protein, 9 aa, Homo sapiens
  Light chain CDR3 for antibody 7343 (IGKV1D-13)
QQFNNYPST

SEQ ID NO: 14686 - protein, 15 aa, Homo sapiens
  Heavy chain CDR3 for antibody 7343 (IGHV3-33)
ARERYSSAWSSGMDV

SEQ ID NO: 14687 - protein, 9 aa, Homo sapiens
  Light chain CDR3 for antibody 7344 (IGKV3-20)
QQYGSSPLT

SEQ ID NO: 14688 - protein, 11 aa, Homo sapiens
  Heavy chain CDR3 for antibody 7344 (IGHV3-33)
ARDILTGYFDY

SEQ ID NO: 14689 - protein, 9 aa, Homo sapiens
  Light chain CDR3 for antibody 7345 (IGKV3-15)
QQYNNWPYT

SEQ ID NO: 14690 - protein, 11 aa, Homo sapiens
  Heavy chain CDR3 for antibody 7345 (IGHV1-24)
ATELGLYYFDY

SEQ ID NO: 14691 - protein, 9 aa, Homo sapiens
  Light chain CDR3 for antibody 7346 (IGKV1-17)
QQYYSYPRT

SEQ ID NO: 14692 - protein, 12 aa, Homo sapiens
  Heavy chain CDR3 for antibody 7346 (IGHV4-39)
ARHGSGSSYFDY

SEQ ID NO: 14693 - protein, 9 aa, Homo sapiens
  Light chain CDR3 for antibody 7347 (IGKV1D-13)
QQFNNYPHT

SEQ ID NO: 14694 - protein, 18 aa, Homo sapiens
  Heavy chain CDR3 for antibody 7347 (IGHV1-8)
ARSRIAAAGIYYYYGMDV

SEQ ID NO: 14695 - protein, 9 aa, Homo sapiens
  Light chain CDR3 for antibody 7348 (IGKV1-6)
LQDYNYPYT

SEQ ID NO: 14696 - protein, 15 aa, Homo sapiens
  Heavy chain CDR3 for antibody 7348 (IGHV3-64)
ARDSRPEITGAPFDY

SEQ ID NO: 14697 - protein, 9 aa, Homo sapiens
  Light chain CDR3 for antibody 7349 (IGKV3-20)
QQYGSSIFT

SEQ ID NO: 14698 - protein, 13 aa, Homo sapiens
  Heavy chain CDR3 for antibody 7349 (IGHV3-33)
VSTGDSYYYVMDV

SEQ ID NO: 14699 - protein, 10 aa, Homo sapiens
  Light chain CDR3 for antibody 7350 (IGKV3-11)
QQRSNWPPFT

SEQ ID NO: 14700 - protein, 17 aa, Homo sapiens
  Heavy chain CDR3 for antibody 7350 (IGHV3-23)
AKDTITMVRGALFGMDV

SEQ ID NO: 14701 - protein, 10 aa, Homo sapiens
  Light chain CDR3 for antibody 7351 (IGKV1-39)
QQSYSTPMYT

SEQ ID NO: 14702 - protein, 15 aa, Homo sapiens
  Heavy chain CDR3 for antibody 7351 (IGHV3-33)
ARDGSGSYSLYGMDV

SEQ ID NO: 14703 - protein, 9 aa, Homo sapiens
  Light chain CDR3 for antibody 7352 (IGKV3-11)
QQRSNWMYT

SEQ ID NO: 14704 - protein, 10 aa, Homo sapiens
  Heavy chain CDR3 for antibody 7352 (IGHV3-33)
ARNILTPLDY

SEQ ID NO: 14705 - protein, 8 aa, Homo sapiens
  Light chain CDR3 for antibody 7353 (IGKV1-5)
QQYNSYWT

SEQ ID NO: 14706 - protein, 8 aa, Homo sapiens
  Heavy chain CDR3 for antibody 7353 (IGHV3-33)
ARDRGFDY

SEQ ID NO: 14707 - protein, 9 aa, Homo sapiens
  Light chain CDR3 for antibody 7354 (IGKV2D-28)
MQALQTPPT

SEQ ID NO: 14708 - protein, 9 aa, Homo sapiens
  Heavy chain CDR3 for antibody 7354 (IGHV3-23)
ARIWWLKDY

SEQ ID NO: 14709 - protein, 9 aa, Homo sapiens
  Light chain CDR3 for antibody 7355 (IGKV1-6)
LQDYNYPYT

SEQ ID NO: 14710 - protein, 8 aa, Homo sapiens
  Heavy chain CDR3 for antibody 7355 (IGHV3-33)
AREDYDIL

SEQ ID NO: 14711 - protein, 9 aa, Homo sapiens
  Light chain CDR3 for antibody 7356 (IGKV1-6)
LQDYKSPFT

SEQ ID NO: 14712 - protein, 18 aa, Homo sapiens
  Heavy chain CDR3 for antibody 7356 (IGHV3-23)
AKDRITGTTYGYYSGLDV

SEQ ID NO: 14713 - protein, 9 aa, Homo sapiens
  Light chain CDR3 for antibody 7357 (IGKV3-20)
QQYGSSPWT

SEQ ID NO: 14714 - protein, 13 aa, Homo sapiens
  Heavy chain CDR3 for antibody 7357 (IGHV4-59)
ARESPGPYDAFDI

SEQ ID NO: 14715 - protein, 9 aa, Homo sapiens
  Light chain CDR3 for antibody 7358 (IGKV1-39)
QQGFSTPWT

SEQ ID NO: 14716 - protein, 11 aa, Homo sapiens
  Heavy chain CDR3 for antibody 7358 (IGHV4-59)
AREMGHDTFDI

SEQ ID NO: 14717 - protein, 6 aa, Homo sapiens
  Light chain CDR3 for antibody 7359 (IGKV3-20)
QQYGST

SEQ ID NO: 14718 - protein, 18 aa, Homo sapiens
  Heavy chain CDR3 for antibody 7359 (IGHV4-59)
AREGDYVWGSYRPNWFDP

SEQ ID NO: 14719 - protein, 9 aa, Homo sapiens
  Light chain CDR3 for antibody 7360 (IGKV1-5)
QQYNTYSRT

SEQ ID NO: 14720 - protein, 9 aa, Homo sapiens
  Heavy chain CDR3 for antibody 7360 (IGHV1-18)
ARGKDWFDP

SEQ ID NO: 14721 - protein, 9 aa, Homo sapiens
  Light chain CDR3 for antibody 7361 (IGKV1D-16)
QQYNSYPYT

SEQ ID NO: 14722 - protein, 13 aa, Homo sapiens
  Heavy chain CDR3 for antibody 7361 (IGHV3-23)
ASTGDSYSYGMDV

SEQ ID NO: 14723 - protein, 9 aa, Homo sapiens
  Light chain CDR3 for antibody 7362 (IGKV1-9)
QQLNSYPYT

SEQ ID NO: 14724 - protein, 15 aa, Homo sapiens
  Heavy chain CDR3 for antibody 7362 (IGHV3-33)
ARGCYYGSGSFPVDY

SEQ ID NO: 14725 - protein, 8 aa, Homo sapiens
  Light chain CDR3 for antibody 7363 (IGKV1-5)
QQYNSYWT

SEQ ID NO: 14726 - protein, 12 aa, Homo sapiens
  Heavy chain CDR3 for antibody 7363 (IGHV3-33)
AREEAVAEAFDI

SEQ ID NO: 14727 - protein, 9 aa, Homo sapiens
  Light chain CDR3 for antibody 7364 (IGKV1-17)
LQHNSYPYT

SEQ ID NO: 14728 - protein, 15 aa, Homo sapiens
  Heavy chain CDR3 for antibody 7364 (IGHV3-33)
ARPPIAVAGPEYFQH

SEQ ID NO: 14729 - protein, 8 aa, Homo sapiens
  Light chain CDR3 for antibody 7365 (IGKV3-20)
QQYGRSFT

SEQ ID NO: 14730 - protein, 10 aa, Homo sapiens
  Heavy chain CDR3 for antibody 7365 (IGHV4-39)
ARQLGNWFDP

SEQ ID NO: 14731 - protein, 10 aa, Homo sapiens
  Light chain CDR3 for antibody 7366 (IGKV3-11)
QQRSNWPMYT

SEQ ID NO: 14732 - protein, 11 aa, Homo sapiens
  Heavy chain CDR3 for antibody 7366 (IGHV3-33)
ARGSGSYAFDY

SEQ ID NO: 14733 - protein, 9 aa, Homo sapiens
  Light chain CDR3 for antibody 7367 (IGKV1-39)
QQSYRTPLT

SEQ ID NO: 14734 - protein, 10 aa, Homo sapiens
  Heavy chain CDR3 for antibody 7367 (IGHV3-11)
AKDQVGATDC

SEQ ID NO: 14735 - protein, 10 aa, Homo sapiens
  Light chain CDR3 for antibody 7368 (IGKV3-11)
QQRSNWPIFT

SEQ ID NO: 14736 - protein, 15 aa, Homo sapiens
  Heavy chain CDR3 for antibody 7368 (IGHV4-39)
ARQGLVATIKGYFQH

SEQ ID NO: 14737 - protein, 10 aa, Homo sapiens
  Light chain CDR3 for antibody 7369 (IGKV1-9)
QQLDSYPMYT

SEQ ID NO: 14738 - protein, 16 aa, Homo sapiens
  Heavy chain CDR3 for antibody 7369 (IGHV3-23)
AKEGMVLRYFDWLWDY

SEQ ID NO: 14739 - protein, 9 aa, Homo sapiens
  Light chain CDR3 for antibody 7370 (IGKV3-15)
QQYNNWPRT

SEQ ID NO: 14740 - protein, 12 aa, Homo sapiens
  Heavy chain CDR3 for antibody 7370 (IGHV3-33)
AREGDILTGYSL

SEQ ID NO: 14741 - protein, 9 aa, Homo sapiens
  Light chain CDR3 for antibody 7371 (IGKV3-11)
QQRSNWPPT

SEQ ID NO: 14742 - protein, 12 aa, Homo sapiens
  Heavy chain CDR3 for antibody 7371 (IGHV3-33)
AREGTGGNWFDP

SEQ ID NO: 14743 - protein, 9 aa, Homo sapiens
  Light chain CDR3 for antibody 7372 (IGKV1-39)
QQSYSTPFT

SEQ ID NO: 14744 - protein, 10 aa, Homo sapiens
  Heavy chain CDR3 for antibody 7372 (IGHV3-30)
ARDGLESFDY

SEQ ID NO: 14745 - protein, 9 aa, Homo sapiens
  Light chain CDR3 for antibody 7373 (IGKV1D-13)
QRFNNYLYT

SEQ ID NO: 14746 - protein, 13 aa, Homo sapiens
  Heavy chain CDR3 for antibody 7373 (IGHV3-33)
ARDWGYSHGYFDY

SEQ ID NO: 14747 - protein, 9 aa, Homo sapiens
  Light chain CDR3 for antibody 7374 (IGKV1-9)
QQLISYPLT

SEQ ID NO: 14748 - protein, 11 aa, Homo sapiens
  Heavy chain CDR3 for antibody 7374 (IGHV3-13)
AREAIIGPFDY

SEQ ID NO: 14749 - protein, 9 aa, Homo sapiens
  Light chain CDR3 for antibody 7375 (IGKV1-39)
QQSYRTPLT

SEQ ID NO: 14750 - protein, 13 aa, Homo sapiens
  Heavy chain CDR3 for antibody 7375 (IGHV3-11)
ARDYGDYLNWFDP

SEQ ID NO: 14751 - protein, 9 aa, Homo sapiens
  Light chain CDR3 for antibody 7376 (IGKV1-39)
QQSYRTPLT

SEQ ID NO: 14752 - protein, 14 aa, Homo sapiens
  Heavy chain CDR3 for antibody 7376 (IGHV3-33)
ARDTVAAGFNGMDV

SEQ ID NO: 14753 - protein, 9 aa, Homo sapiens
  Light chain CDR3 for antibody 7377 (IGKV1D-13)
QQFNNYPHT

SEQ ID NO: 14754 - protein, 15 aa, Homo sapiens
  Heavy chain CDR3 for antibody 7377 (IGHV3-33)
ARDEHYDILTGYWGY

SEQ ID NO: 14755 - protein, 9 aa, Homo sapiens
  Light chain CDR3 for antibody 7378 (IGKV2-30)
MQGTHWPLT

SEQ ID NO: 14756 - protein, 18 aa, Homo sapiens
  Heavy chain CDR3 for antibody 7378 (IGHV3-33)
ARGGVLYDILTGFYGMDV

SEQ ID NO: 14757 - protein, 9 aa, Homo sapiens
  Light chain CDR3 for antibody 7379 (IGKV1-39)
QQSYSTPLT

SEQ ID NO: 14758 - protein, 17 aa, Homo sapiens
  Heavy chain CDR3 for antibody 7379 (IGHV3-30)
ARDGVGATSYYYYGMDV

SEQ ID NO: 14759 - protein, 9 aa, Homo sapiens
  Light chain CDR3 for antibody 7380 (IGKV3-20)
QQYGSSPRT

SEQ ID NO: 14760 - protein, 12 aa, Homo sapiens
  Heavy chain CDR3 for antibody 7380 (IGHV3-33)
ARKAYALYVLDV

SEQ ID NO: 14761 - protein, 9 aa, Homo sapiens
  Light chain CDR3 for antibody 7381 (IGKV3-11)
QQRSNWPPT

SEQ ID NO: 14762 - protein, 20 aa, Homo sapiens
  Heavy chain CDR3 for antibody 7381 (IGHV1-8)
ARGDGTMVRGIYYYYYGMDV

SEQ ID NO: 14763 - protein, 9 aa, Homo sapiens
  Light chain CDR3 for antibody 7382 (IGKV1-39)
QQGFSTPWT

SEQ ID NO: 14764 - protein, 9 aa, Homo sapiens
  Heavy chain CDR3 for antibody 7382 (IGHV4-59)
AGGSWDFDY

SEQ ID NO: 14765 - protein, 9 aa, Homo sapiens
  Light chain CDR3 for antibody 7383 (IGKV2-30)
MQGTHWPLT

SEQ ID NO: 14766 - protein, 12 aa, Homo sapiens
  Heavy chain CDR3 for antibody 7383 (IGHV3-33)
ARDGYSSRNFDY

SEQ ID NO: 14767 - protein, 9 aa, Homo sapiens
  Light chain CDR3 for antibody 7384 (IGKV5-2)
LQHDNFPYT

SEQ ID NO: 14768 - protein, 18 aa, Homo sapiens
  Heavy chain CDR3 for antibody 7384 (IGHV3-23)
AKPDYYGSGSYYNVPFDY

SEQ ID NO: 14769 - protein, 10 aa, Homo sapiens
  Light chain CDR3 for antibody 7385 (IGKV3-20)
QQYGSSPPYT

SEQ ID NO: 14770 - protein, 13 aa, Homo sapiens
  Heavy chain CDR3 for antibody 7385 (IGHV4-59)
ARDAGYSSSWFDY

SEQ ID NO: 14771 - protein, 9 aa, Homo sapiens
  Light chain CDR3 for antibody 7386 (IGKV1-33)
QQYDNLPFT

SEQ ID NO: 14772 - protein, 11 aa, Homo sapiens
  Heavy chain CDR3 for antibody 7386 (IGHV3-33)
ARGSGSYAFDS

SEQ ID NO: 14773 - protein, 8 aa, Homo sapiens
  Light chain CDR3 for antibody 7387 (IGKV6-21)
HQSSSLYT

SEQ ID NO: 14774 - protein, 18 aa, Homo sapiens
  Heavy chain CDR3 for antibody 7387 (IGHV1-18)
ARDGDYVWGSYRSDWFDP

SEQ ID NO: 14775 - protein, 9 aa, Homo sapiens
  Light chain CDR3 for antibody 7388 (IGKV1-27)
QKYNSAPYT

SEQ ID NO: 14776 - protein, 12 aa, Homo sapiens
  Heavy chain CDR3 for antibody 7388 (IGHV3-33)
VRKWFGELYFDY

SEQ ID NO: 14777 - protein, 9 aa, Homo sapiens
  Light chain CDR3 for antibody 7389 (IGKV1D-16)
QQLISYPLT

SEQ ID NO: 14778 - protein, 12 aa, Homo sapiens
  Heavy chain CDR3 for antibody 7389 (IGHV1-18)
ARILFYGDYFDY

SEQ ID NO: 14779 - protein, 9 aa, Homo sapiens
  Light chain CDR3 for antibody 7390 (IGKV6-21)
HQSTSLPFT

SEQ ID NO: 14780 - protein, 16 aa, Homo sapiens
  Heavy chain CDR3 for antibody 7390 (IGHV4-39)
ARDTPYYSGSGRPFDY

SEQ ID NO: 14781 - protein, 9 aa, Homo sapiens
  Light chain CDR3 for antibody 7391 (IGKV1-6)
LQDFNYPRT

SEQ ID NO: 14782 - protein, 18 aa, Homo sapiens
  Heavy chain CDR3 for antibody 7391 (IGHV4-59)
AREGHYYTSGSYYSHFHY

SEQ ID NO: 14783 - protein, 8 aa, Homo sapiens
  Light chain CDR3 for antibody 7392 (IGKV1D-13)
QQFNNYPT

SEQ ID NO: 14784 - protein, 12 aa, Homo sapiens
  Heavy chain CDR3 for antibody 7392 (IGHV3-33)
AREGTRWVYFDY

SEQ ID NO: 14785 - protein, 9 aa, Homo sapiens
  Light chain CDR3 for antibody 7393 (IGKV3D-7)
QQDYKLPLT

SEQ ID NO: 14786 - protein, 18 aa, Homo sapiens
  Heavy chain CDR3 for antibody 7393 (IGHV4-59)
AREGDYVWGSYRSNWFDP

SEQ ID NO: 14787 - protein, 9 aa, Homo sapiens
  Light chain CDR3 for antibody 7394 (IGKV5-2)
LQHDKFPYT

SEQ ID NO: 14788 - protein, 16 aa, Homo sapiens
  Heavy chain CDR3 for antibody 7394 (IGHV3-33)
AREVGAKDYYYYGMDV

SEQ ID NO: 14789 - protein, 9 aa, Homo sapiens
  Light chain CDR3 for antibody 7395 (IGKV3D-20)
QQYGSSPWT

SEQ ID NO: 14790 - protein, 15 aa, Homo sapiens
  Heavy chain CDR3 for antibody 7395 (IGHV3-33)
ARGYYYGSGSYPLDY

SEQ ID NO: 14791 - protein, 10 aa, Homo sapiens
  Light chain CDR3 for antibody 7396 (IGKV3-11)
QQRSNWPALT

SEQ ID NO: 14792 - protein, 17 aa, Homo sapiens
  Heavy chain CDR3 for antibody 7396 (IGHV3-33)
ARCGYSSSWYDPYYFDY

SEQ ID NO: 14793 - protein, 8 aa, Homo sapiens
  Light chain CDR3 for antibody 7397 (IGKV3-20)
QQYGRSFT

SEQ ID NO: 14794 - protein, 15 aa, Homo sapiens
  Heavy chain CDR3 for antibody 7397 (IGHV1-24)
ATHWDLRYYYYGMDV

SEQ ID NO: 14795 - protein, 9 aa, Homo sapiens
  Light chain CDR3 for antibody 7398 (IGKV3-20)
QQYGSSPYT

SEQ ID NO: 14796 - protein, 12 aa, Homo sapiens
  Heavy chain CDR3 for antibody 7398 (IGHV3-64)
AREFPWGDYFDY

SEQ ID NO: 14797 - protein, 9 aa, Homo sapiens
  Light chain CDR3 for antibody 7399 (IGKV1D-16)
QQLNSYPYT

SEQ ID NO: 14798 - protein, 15 aa, Homo sapiens
  Heavy chain CDR3 for antibody 7399 (IGHV3-33)
ARDTGYSSSWNWFDH

SEQ ID NO: 14799 - protein, 9 aa, Homo sapiens
  Light chain CDR3 for antibody 7400 (IGKV1-6)
LQDYNFPFT

SEQ ID NO: 14800 - protein, 11 aa, Homo sapiens
  Heavy chain CDR3 for antibody 7400 (IGHV4-59)
AREMGHDIFDI

SEQ ID NO: 14801 - protein, 10 aa, Homo sapiens
  Light chain CDR3 for antibody 7401 (IGKV3-11)
QQRSNWLMYT

SEQ ID NO: 14802 - protein, 14 aa, Homo sapiens
  Heavy chain CDR3 for antibody 7401 (IGHV3-23)
ARDGYDFLTGPFDY

SEQ ID NO: 14803 - protein, 9 aa, Homo sapiens
  Light chain CDR3 for antibody 7402 (IGKV1-16)
QHYNDYPFT

SEQ ID NO: 14804 - protein, 11 aa, Homo sapiens
  Heavy chain CDR3 for antibody 7402 (IGHV3-33)
ARDRVLTPFDY

SEQ ID NO: 14805 - protein, 9 aa, Homo sapiens
  Light chain CDR3 for antibody 7403 (IGKV3D-7)
QQLNSYPYT

SEQ ID NO: 14806 - protein, 16 aa, Homo sapiens
  Heavy chain CDR3 for antibody 7403 (IGHV1-46)
ARGGGYSGSYSNWFDP

SEQ ID NO: 14807 - protein, 8 aa, Homo sapiens
  Light chain CDR3 for antibody 7404 (IGKV1-5)
QQYNSYYT

SEQ ID NO: 14808 - protein, 19 aa, Homo sapiens
  Heavy chain CDR3 for antibody 7404 (IGHV3-33)
AREDYYGSGSYYNEDWFDP

SEQ ID NO: 14809 - protein, 9 aa, Homo sapiens
  Light chain CDR3 for antibody 7405 (IGKV1-5)
QQYNSYSYT

SEQ ID NO: 14810 - protein, 13 aa, Homo sapiens
  Heavy chain CDR3 for antibody 7405 (IGHV4-59)
ARTMVRGVAPFDY

SEQ ID NO: 14811 - protein, 9 aa, Homo sapiens
  Light chain CDR3 for antibody 7406 (IGKV1-17)
LQHNSYPPT

SEQ ID NO: 14812 - protein, 17 aa, Homo sapiens
  Heavy chain CDR3 for antibody 7406 (IGHV1-24)
ATHYGSGSHYKGYGMDV

SEQ ID NO: 14813 - protein, 9 aa, Homo sapiens
  Light chain CDR3 for antibody 7407 (IGKV5-2)
LQHDNFPYT

SEQ ID NO: 14814 - protein, 10 aa, Homo sapiens
  Heavy chain CDR3 for antibody 7407 (IGHV3-33)
AREGLRYFDH

SEQ ID NO: 14815 - protein, 8 aa, Homo sapiens
  Light chain CDR3 for antibody 7408 (IGKV3D-7)
QQDYNLLT

SEQ ID NO: 14816 - protein, 15 aa, Homo sapiens
  Heavy chain CDR3 for antibody 7408 (IGHV3-33)
ARAYDLPHYYYGMDV

SEQ ID NO: 14817 - protein, 9 aa, Homo sapiens
  Light chain CDR3 for antibody 7409 (IGKV1D-13)
QHFNNYMYT

SEQ ID NO: 14818 - protein, 18 aa, Homo sapiens
  Heavy chain CDR3 for antibody 7409 (IGHV3-33)
ARREGITLIFYYYYGMDV

SEQ ID NO: 14819 - protein, 9 aa, Homo sapiens
  Light chain CDR3 for antibody 7410 (IGKV6-21)
HQSSSLPHT

SEQ ID NO: 14820 - protein, 18 aa, Homo sapiens
  Heavy chain CDR3 for antibody 7410 (IGHV3-33)
ARDHYDILTGYYKGWFDP

SEQ ID NO: 14821 - protein, 10 aa, Homo sapiens
  Light chain CDR3 for antibody 7411 (IGKV3-11)
QQRSNWPPYT

SEQ ID NO: 14822 - protein, 11 aa, Homo sapiens
  Heavy chain CDR3 for antibody 7411 (IGHV4-59)
ARETGDDAFDI

SEQ ID NO: 14823 - protein, 9 aa, Homo sapiens
  Light chain CDR3 for antibody 7412 (IGKV2-30)
MQGTHWPLT

SEQ ID NO: 14824 - protein, 18 aa, Homo sapiens
  Heavy chain CDR3 for antibody 7412 (IGHV3-33)
ARDRGDILTGYYKGWFDP

SEQ ID NO: 14825 - protein, 8 aa, Homo sapiens
  Light chain CDR3 for antibody 7413 (IGKV3D-7)
QQDYNLLT

SEQ ID NO: 14826 - protein, 18 aa, Homo sapiens
  Heavy chain CDR3 for antibody 7413 (IGHV1-8)
ARSRIAAAGIYYYYGMDV

SEQ ID NO: 14827 - protein, 8 aa, Homo sapiens
  Light chain CDR3 for antibody 7414 (IGKV3-11)
QQRSNWLT

SEQ ID NO: 14828 - protein, 13 aa, Homo sapiens
  Heavy chain CDR3 for antibody 7414 (IGHV3-53)
ARSGSYWGYYFDY

SEQ ID NO: 14829 - protein, 9 aa, Homo sapiens
  Light chain CDR3 for antibody 7415 (IGKV3D-7)
QQDYKLPLT

SEQ ID NO: 14830 - protein, 15 aa, Homo sapiens
  Heavy chain CDR3 for antibody 7415 (IGHV1-2)
ARDLGYYGSGSRMDV

SEQ ID NO: 14831 - protein, 9 aa, Homo sapiens
  Light chain CDR3 for antibody 7416 (IGKV1-6)
LQGYNYPRS

SEQ ID NO: 14832 - protein, 14 aa, Homo sapiens
  Heavy chain CDR3 for antibody 7416 (IGHV3-33)
ARGAAAGNFYGLDV

SEQ ID NO: 14833 - protein, 9 aa, Homo sapiens
  Light chain CDR3 for antibody 7417 (IGKV2D-28)
MQALQTPPT

SEQ ID NO: 14834 - protein, 15 aa, Homo sapiens
  Heavy chain CDR3 for antibody 7417 (IGHV3-33)
ARDHLTGYYYYGMDV

SEQ ID NO: 14835 - protein, 7 aa, Homo sapiens
  Light chain CDR3 for antibody 7418 (IGKV3-11)
QQRSKFT

SEQ ID NO: 14836 - protein, 18 aa, Homo sapiens
  Heavy chain CDR3 for antibody 7418 (IGHV1-46)
ARDGDYVWGSYRSNWFDP

SEQ ID NO: 14837 - protein, 9 aa, Homo sapiens
  Light chain CDR3 for antibody 7419 (IGKV2D-28)
MQALQTPPT

SEQ ID NO: 14838 - protein, 16 aa, Homo sapiens
  Heavy chain CDR3 for antibody 7419 (IGHV4-59)
ARGRYFDWLLGDVFDI

SEQ ID NO: 14839 - protein, 10 aa, Homo sapiens
  Light chain CDR3 for antibody 7420 (IGKV1-39)
QQSYSTPMYT

SEQ ID NO: 14840 - protein, 16 aa, Homo sapiens
  Heavy chain CDR3 for antibody 7420 (IGHV3-33)
ARDGSMVRRIHDAFDF

SEQ ID NO: 14841 - protein, 9 aa, Homo sapiens
  Light chain CDR3 for antibody 7421 (IGKV1D-13)
QQFNNYPST

SEQ ID NO: 14842 - protein, 17 aa, Homo sapiens
  Heavy chain CDR3 for antibody 7421 (IGHV3-33)
ARREGITLIFYYYGMDV

SEQ ID NO: 14843 - protein, 11 aa, Homo sapiens
  Light chain CDR3 for antibody 7422 (IGKV3D-7)
QQRSNWPPTWT

SEQ ID NO: 14844 - protein, 9 aa, Homo sapiens
  Heavy chain CDR3 for antibody 7422 (IGHV3-30)
ARDYFHYDY

SEQ ID NO: 14845 - protein, 10 aa, Homo sapiens
  Light chain CDR3 for antibody 7423 (IGKV3-20)
QQYGRSPPVT

SEQ ID NO: 14846 - protein, 11 aa, Homo sapiens
  Heavy chain CDR3 for antibody 7423 (IGHV3-74)
ARDRGNWGFDY

SEQ ID NO: 14847 - protein, 9 aa, Homo sapiens
  Light chain CDR3 for antibody 7424 (IGKV3-11)
QQRSNWMYT

SEQ ID NO: 14848 - protein, 10 aa, Homo sapiens
  Heavy chain CDR3 for antibody 7424 (IGHV3-33)
AREWFGGFDI

SEQ ID NO: 14849 - protein, 8 aa, Homo sapiens
  Light chain CDR3 for antibody 7425 (IGKV1-16)
QQDYNLVT

SEQ ID NO: 14850 - protein, 23 aa, Homo sapiens
  Heavy chain CDR3 for antibody 7425 (IGHV4-59)
ARERTYSDILPGYYEDYYYGMDV

SEQ ID NO: 14851 - protein, 10 aa, Homo sapiens
  Light chain CDR3 for antibody 7426 (IGKV1-17)
LQHNSYPMYT

SEQ ID NO: 14852 - protein, 13 aa, Homo sapiens
  Heavy chain CDR3 for antibody 7426 (IGHV3-23)
AKDRGYSSTSTAY

SEQ ID NO: 14853 - protein, 9 aa, Homo sapiens
  Light chain CDR3 for antibody 7427 (IGKV1-9)
QQVKSYPYT

SEQ ID NO: 14854 - protein, 13 aa, Homo sapiens
  Heavy chain CDR3 for antibody 7427 (IGHV4-39)
ARHEVMVRGVFDY

SEQ ID NO: 14855 - protein, 9 aa, Homo sapiens
  Light chain CDR3 for antibody 7428 (IGKV6-21)
HQSSSLPYT

SEQ ID NO: 14856 - protein, 18 aa, Homo sapiens
  Heavy chain CDR3 for antibody 7428 (IGHV3-33)
ARGAYSSGWDYYYYGLDV

SEQ ID NO: 14857 - protein, 9 aa, Homo sapiens
  Light chain CDR3 for antibody 7429 (IGKV1-9)
QQLNSYLFT

SEQ ID NO: 14858 - protein, 10 aa, Homo sapiens
  Heavy chain CDR3 for antibody 7429 (IGHV3-23)
AKGDRWRFDP

SEQ ID NO: 14859 - protein, 8 aa, Homo sapiens
  Light chain CDR3 for antibody 7430 (IGKV3-20)
QQYGSSLT

SEQ ID NO: 14860 - protein, 13 aa, Homo sapiens
  Heavy chain CDR3 for antibody 7430 (IGHV3-33)
ARTDYYFYYGLDV

SEQ ID NO: 14861 - protein, 11 aa, Homo sapiens
  Light chain CDR3 for antibody 7431 (IGKV3-11)
QQRSNWPPTWT

SEQ ID NO: 14862 - protein, 11 aa, Homo sapiens
  Heavy chain CDR3 for antibody 7431 (IGHV3-33)
ARAGIAALFDY

SEQ ID NO: 14863 - protein, 8 aa, Homo sapiens
  Light chain CDR3 for antibody 7432 (IGKV3D-7)
QQDYNLVT

SEQ ID NO: 14864 - protein, 14 aa, Homo sapiens
  Heavy chain CDR3 for antibody 7432 (IGHV4-39)
ARQGTMIRGGYFDY

SEQ ID NO: 14865 - protein, 9 aa, Homo sapiens
  Light chain CDR3 for antibody 7433 (IGKV3D-20)
QQYGSSPYT

SEQ ID NO: 14866 - protein, 19 aa, Homo sapiens
  Heavy chain CDR3 for antibody 7433 (IGHV3-33)
AREYFDILTGYYKTGFFQH

SEQ ID NO: 14867 - protein, 8 aa, Homo sapiens
  Light chain CDR3 for antibody 7434 (IGKV1D-13)
QQFNNYPT

SEQ ID NO: 14868 - protein, 17 aa, Homo sapiens
  Heavy chain CDR3 for antibody 7434 (IGHV4-34)
AGLRFFDWLFDYYGMDV

SEQ ID NO: 14869 - protein, 9 aa, Homo sapiens
  Light chain CDR3 for antibody 7435 (IGKV3D-11)
QQRSNWQYT

SEQ ID NO: 14870 - protein, 19 aa, Homo sapiens
  Heavy chain CDR3 for antibody 7435 (IGHV3-33)
ARGPYYDILTGYGYYGMDV

SEQ ID NO: 14871 - protein, 9 aa, Homo sapiens
  Light chain CDR3 for antibody 7436 (IGKV1-17)
LQHNSYPRT

SEQ ID NO: 14872 - protein, 15 aa, Homo sapiens
  Heavy chain CDR3 for antibody 7436 (IGHV3-33)
ARGYYYGSGSFPVDY

SEQ ID NO: 14873 - protein, 8 aa, Homo sapiens
  Light chain CDR3 for antibody 7437 (IGKV3-11)
QQRSNWLT

SEQ ID NO: 14874 - protein, 11 aa, Homo sapiens
  Heavy chain CDR3 for antibody 7437 (IGHV4-59)
ARDGVRGVFDI

SEQ ID NO: 14875 - protein, 10 aa, Homo sapiens
  Light chain CDR3 for antibody 7438 (IGKV1-17)
LQHNSYPMYT

SEQ ID NO: 14876 - protein, 14 aa, Homo sapiens
  Heavy chain CDR3 for antibody 7438 (IGHV3-33)
ARGGYSGYRYYFDY

SEQ ID NO: 14877 - protein, 9 aa, Homo sapiens
  Light chain CDR3 for antibody 7439 (IGKV5-2)
LQHDKFPYT

SEQ ID NO: 14878 - protein, 9 aa, Homo sapiens
  Heavy chain CDR3 for antibody 7439 (IGHV3-33)
ARGSGWSDY

SEQ ID NO: 14879 - protein, 8 aa, Homo sapiens
  Light chain CDR3 for antibody 7440 (IGKV3D-7)
QQDYNLLT

SEQ ID NO: 14880 - protein, 13 aa, Homo sapiens
  Heavy chain CDR3 for antibody 7440 (IGHV3-33)
AREYCSGGSCYDY

SEQ ID NO: 14881 - protein, 9 aa, Homo sapiens
  Light chain CDR3 for antibody 7441 (IGKV1-17)
LQDYKSPFT

SEQ ID NO: 14882 - protein, 14 aa, Homo sapiens
  Heavy chain CDR3 for antibody 7441 (IGHV3-33)
ARDKTYPLSYGMDV

SEQ ID NO: 14883 - protein, 9 aa, Homo sapiens
  Light chain CDR3 for antibody 7442 (IGKV1-5)
QQYNTYSRT

SEQ ID NO: 14884 - protein, 10 aa, Homo sapiens
  Heavy chain CDR3 for antibody 7442 (IGHV3-23)
AKDHYGDYPY

SEQ ID NO: 14885 - protein, 9 aa, Homo sapiens
  Light chain CDR3 for antibody 7443 (IGKV1-33)
QQYDNLPFT

SEQ ID NO: 14886 - protein, 18 aa, Homo sapiens
  Heavy chain CDR3 for antibody 7443 (IGHV3-33)
ARREGITLIFYYYYGMDV

SEQ ID NO: 14887 - protein, 9 aa, Homo sapiens
  Light chain CDR3 for antibody 7444 (IGKV2-30)
MQGTHWPLT

SEQ ID NO: 14888 - protein, 10 aa, Homo sapiens
  Heavy chain CDR3 for antibody 7444 (IGHV3-33)
ARDLGWSFDH

SEQ ID NO: 14889 - protein, 9 aa, Homo sapiens
  Light chain CDR3 for antibody 7445 (IGKV1-27)
QKYNSAPYT

SEQ ID NO: 14890 - protein, 14 aa, Homo sapiens
  Heavy chain CDR3 for antibody 7445 (IGHV3-33)
ARGYGSGSYYSFDY

SEQ ID NO: 14891 - protein, 9 aa, Homo sapiens
  Light chain CDR3 for antibody 7446 (IGKV3-15)
QQYNNWPLT

SEQ ID NO: 14892 - protein, 17 aa, Homo sapiens
  Heavy chain CDR3 for antibody 7446 (IGHV3-33)
ARSPYDILTGYSYYFDY

SEQ ID NO: 14893 - protein, 9 aa, Homo sapiens
  Light chain CDR3 for antibody 7447 (IGKV1D-13)
QHFNNYMYT

SEQ ID NO: 14894 - protein, 17 aa, Homo sapiens
  Heavy chain CDR3 for antibody 7447 (IGHV4-39)
ARVLRYFDWLSHDAFDI

SEQ ID NO: 14895 - protein, 9 aa, Homo sapiens
  Light chain CDR3 for antibody 7448 (IGKV3-11)
QQRSNWPPT

SEQ ID NO: 14896 - protein, 12 aa, Homo sapiens
  Heavy chain CDR3 for antibody 7448 (IGHV3-33)
ARKQWLVQAFDI

SEQ ID NO: 14897 - protein, 9 aa, Homo sapiens
  Light chain CDR3 for antibody 7449 (IGKV1D-13)
QQFNNYPHT

SEQ ID NO: 14898 - protein, 15 aa, Homo sapiens
  Heavy chain CDR3 for antibody 7449 (IGHV3-23)
AKDRSGSGSYNLFDY

SEQ ID NO: 14899 - protein, 9 aa, Homo sapiens
  Light chain CDR3 for antibody 7450 (IGKV1-9)
QQLNSYPFT

SEQ ID NO: 14900 - protein, 11 aa, Homo sapiens
  Heavy chain CDR3 for antibody 7450 (IGHV3-23)
AKGLWSYYFDY

SEQ ID NO: 14901 - protein, 9 aa, Homo sapiens
  Light chain CDR3 for antibody 7451 (IGKV3D-20)
QQFGSLPLT

SEQ ID NO: 14902 - protein, 13 aa, Homo sapiens
  Heavy chain CDR3 for antibody 7451 (IGHV4-39)
ARQWPSGYWYFDL

SEQ ID NO: 14903 - protein, 9 aa, Homo sapiens
  Light chain CDR3 for antibody 7452 (IGKV1-9)
QQSYSTPLT

SEQ ID NO: 14904 - protein, 11 aa, Homo sapiens
  Heavy chain CDR3 for antibody 7452 (IGHV3-33)
ARGTTVTHFDY

SEQ ID NO: 14905 - protein, 9 aa, Homo sapiens
  Light chain CDR3 for antibody 7453 (IGKV3-11)
QQRSNWPYT

SEQ ID NO: 14906 - protein, 19 aa, Homo sapiens
  Heavy chain CDR3 for antibody 7453 (IGHV3-33)
ARDRYYDILTGYSSYYFDY

SEQ ID NO: 14907 - protein, 9 aa, Homo sapiens
  Light chain CDR3 for antibody 7454 (IGKV1-39)
QQSYSTPFT

SEQ ID NO: 14908 - protein, 12 aa, Homo sapiens
  Heavy chain CDR3 for antibody 7454 (IGHV1-46)
ARGLTGDHAVDI

SEQ ID NO: 14909 - protein, 9 aa, Homo sapiens
  Light chain CDR3 for antibody 7455 (IGKV1-6)
LQDYKSPFT

SEQ ID NO: 14910 - protein, 13 aa, Homo sapiens
  Heavy chain CDR3 for antibody 7455 (IGHV3-33)
ARKAYGDYFYFDY

SEQ ID NO: 14911 - protein, 9 aa, Homo sapiens
  Light chain CDR3 for antibody 7456 (IGKV1-9)
QQLKSYLYT

SEQ ID NO: 14912 - protein, 8 aa, Homo sapiens
  Heavy chain CDR3 for antibody 7456 (IGHV1-18)
AKETGNNY

SEQ ID NO: 14913 - protein, 9 aa, Homo sapiens
  Light chain CDR3 for antibody 7457 (IGKV1-8)
QQYYSYPPT

SEQ ID NO: 14914 - protein, 12 aa, Homo sapiens
  Heavy chain CDR3 for antibody 7457 (IGHV3-33)
ARVDTAAPYFDY

SEQ ID NO: 14915 - protein, 9 aa, Homo sapiens
  Light chain CDR3 for antibody 7458 (IGKV1-37)
QRTYNAPFT

SEQ ID NO: 14916 - protein, 18 aa, Homo sapiens
  Heavy chain CDR3 for antibody 7458 (IGHV1-46)
ARDGDYVWGSYRSDWFDP

SEQ ID NO: 14917 - protein, 9 aa, Homo sapiens
  Light chain CDR3 for antibody 7459 (IGKV3-20)
LQYGSSPYT

SEQ ID NO: 14918 - protein, 13 aa, Homo sapiens
  Heavy chain CDR3 for antibody 7459 (IGHV3-11)
ARDEGYRGYGLDS

SEQ ID NO: 14919 - protein, 9 aa, Homo sapiens
  Light chain CDR3 for antibody 7460 (IGKV1-17)
LQHNSYPRT

SEQ ID NO: 14920 - protein, 11 aa, Homo sapiens
  Heavy chain CDR3 for antibody 7460 (IGHV1-18)
SRGGFSVGYDS

SEQ ID NO: 14921 - protein, 10 aa, Homo sapiens
  Light chain CDR3 for antibody 7461 (IGKV1-9)
QQYNNWPPIT

SEQ ID NO: 14922 - protein, 12 aa, Homo sapiens
  Heavy chain CDR3 for antibody 7461 (IGHV3-33)
ARVDAAAPYFDY

SEQ ID NO: 14923 - protein, 9 aa, Homo sapiens
  Light chain CDR3 for antibody 7462 (IGKV1-6)
QQEYNYPLT

SEQ ID NO: 14924 - protein, 16 aa, Homo sapiens
  Heavy chain CDR3 for antibody 7462 (IGHV3-23)
AKEGMVLRYFDWLWDY

SEQ ID NO: 14925 - protein, 9 aa, Homo sapiens
  Light chain CDR3 for antibody 7463 (IGKV6-21)
HQSSSLPLT

SEQ ID NO: 14926 - protein, 12 aa, Homo sapiens
  Heavy chain CDR3 for antibody 7463 (IGHV3-33)
ASGYFGSGSAHY

SEQ ID NO: 14927 - protein, 9 aa, Homo sapiens
  Light chain CDR3 for antibody 7464 (IGKV1-17)
LQHNSYPYT

SEQ ID NO: 14928 - protein, 16 aa, Homo sapiens
  Heavy chain CDR3 for antibody 7464 (IGHV3-23)
AKDGIGELSYYYGMDV

SEQ ID NO: 14929 - protein, 8 aa, Homo sapiens
  Light chain CDR3 for antibody 7465 (IGKV3-11)
QQRSNWLT

SEQ ID NO: 14930 - protein, 12 aa, Homo sapiens
  Heavy chain CDR3 for antibody 7465 (IGHV4-59)
ARDRSGWAYFDY

SEQ ID NO: 14931 - protein, 9 aa, Homo sapiens
  Light chain CDR3 for antibody 7466 (IGKV3-20)
QQYGSSIFT

SEQ ID NO: 14932 - protein, 16 aa, Homo sapiens
  Heavy chain CDR3 for antibody 7466 (IGHV3-33)
ARGGRSDWLYYYGMDV

SEQ ID NO: 14933 - protein, 9 aa, Homo sapiens
  Light chain CDR3 for antibody 7467 (IGKV1-9)
QQLNSYPLT

SEQ ID NO: 14934 - protein, 14 aa, Homo sapiens
  Heavy chain CDR3 for antibody 7467 (IGHV3-64)
ARGRASSGPYYFDY

SEQ ID NO: 14935 - protein, 9 aa, Homo sapiens
  Light chain CDR3 for antibody 7468 (IGKV1-6)
QQEYNYPLT

SEQ ID NO: 14936 - protein, 17 aa, Homo sapiens
  Heavy chain CDR3 for antibody 7468 (IGHV3-66)
ARVQYDILTGYSPYFDN

SEQ ID NO: 14937 - protein, 8 aa, Homo sapiens
  Light chain CDR3 for antibody 7469 (IGKV3-20)
QQYGRSFT

SEQ ID NO: 14938 - protein, 14 aa, Homo sapiens
  Heavy chain CDR3 for antibody 7469 (IGHV3-23)
ANWAYDILTGYLDY

SEQ ID NO: 14939 - protein, 10 aa, Homo sapiens
  Light chain CDR3 for antibody 7470 (IGKV3-11)
QQRSNWPPFT

SEQ ID NO: 14940 - protein, 18 aa, Homo sapiens
  Heavy chain CDR3 for antibody 7470 (IGHV3-33)
AREGSYYGSGSFPNWFDP

SEQ ID NO: 14941 - protein, 8 aa, Homo sapiens
  Light chain CDR3 for antibody 7471 (IGKV3D-7)
QQYGRSFT

SEQ ID NO: 14942 - protein, 14 aa, Homo sapiens
  Heavy chain CDR3 for antibody 7471 (IGHV4-39)
AKGGSGSYYNWFDP

SEQ ID NO: 14943 - protein, 9 aa, Homo sapiens
  Light chain CDR3 for antibody 7472 (IGKV1D-13)
QQFNNYPYT

SEQ ID NO: 14944 - protein, 18 aa, Homo sapiens
  Heavy chain CDR3 for antibody 7472 (IGHV3-33)
VRERGHYGSGSFPDAFDI

SEQ ID NO: 14945 - protein, 9 aa, Homo sapiens
  Light chain CDR3 for antibody 7473 (IGKV3D-7)
QQDYTLPRT

SEQ ID NO: 14946 - protein, 16 aa, Homo sapiens
  Heavy chain CDR3 for antibody 7473 (IGHV4-59)
ARQLLWFGELKGVFDY

SEQ ID NO: 14947 - protein, 10 aa, Homo sapiens
  Light chain CDR3 for antibody 7474 (IGKV1-39)
QQSYSTPMYT

SEQ ID NO: 14948 - protein, 10 aa, Homo sapiens
  Heavy chain CDR3 for antibody 7474 (IGHV3-33)
ARDGLRYFDW

SEQ ID NO: 14949 - protein, 10 aa, Homo sapiens
  Light chain CDR3 for antibody 7475 (IGKV1-17)
LQHNSYPMYT

SEQ ID NO: 14950 - protein, 12 aa, Homo sapiens
  Heavy chain CDR3 for antibody 7475 (IGHV3-33)
AKDPGWQQLAEY

SEQ ID NO: 14951 - protein, 8 aa, Homo sapiens
  Light chain CDR3 for antibody 7476 (IGKV3-11)
QQRSNWLT

SEQ ID NO: 14952 - protein, 11 aa, Homo sapiens
  Heavy chain CDR3 for antibody 7476 (IGHV3-33)
ARDTWDDYFDY

SEQ ID NO: 14953 - protein, 9 aa, Homo sapiens
  Light chain CDR3 for antibody 7477 (IGKV1-17)
LQHNSYPFT

SEQ ID NO: 14954 - protein, 15 aa, Homo sapiens
  Heavy chain CDR3 for antibody 7477 (IGHV4-39)
ARDEYSSGWYDAFDI

SEQ ID NO: 14955 - protein, 10 aa, Homo sapiens
  Light chain CDR3 for antibody 7478 (IGKV3-11)
QQRSNWPPYT

SEQ ID NO: 14956 - protein, 14 aa, Homo sapiens
  Heavy chain CDR3 for antibody 7478 (IGHV3-33)
ARKGYSGRYYYFDY

SEQ ID NO: 14957 - protein, 9 aa, Homo sapiens
  Light chain CDR3 for antibody 7479 (IGKV1D-16)
QQYYSYPRT

SEQ ID NO: 14958 - protein, 12 aa, Homo sapiens
  Heavy chain CDR3 for antibody 7479 (IGHV4-39)
ARQMVREGWFDP

SEQ ID NO: 14959 - protein, 9 aa, Homo sapiens
  Light chain CDR3 for antibody 7480 (IGKV1-27)
QKYNSAPYT

SEQ ID NO: 14960 - protein, 23 aa, Homo sapiens
  Heavy chain CDR3 for antibody 7480 (IGHV3-11)
ARDRGITMVRGVITYYYFYGMDV

SEQ ID NO: 14961 - protein, 9 aa, Homo sapiens
  Light chain CDR3 for antibody 7481 (IGKV1-6)
LQDFHYPWT

SEQ ID NO: 14962 - protein, 13 aa, Homo sapiens
  Heavy chain CDR3 for antibody 7481 (IGHV3-33)
ARRATLVRGVFDP

SEQ ID NO: 14963 - protein, 9 aa, Homo sapiens
  Light chain CDR3 for antibody 7482 (IGKV1-6)
LQDYKSPFT

SEQ ID NO: 14964 - protein, 14 aa, Homo sapiens
  Heavy chain CDR3 for antibody 7482 (IGHV3-33)
AREDYYGPLNWFDP

SEQ ID NO: 14965 - protein, 10 aa, Homo sapiens
  Light chain CDR3 for antibody 7483 (IGKV3-15)
QQYNNWPPYT

SEQ ID NO: 14966 - protein, 13 aa, Homo sapiens
  Heavy chain CDR3 for antibody 7483 (IGHV3-33)
AREYFDWLLPLDY

SEQ ID NO: 14967 - protein, 8 aa, Homo sapiens
  Light chain CDR3 for antibody 7484 (IGKV3-15)
QQYNNWLT

SEQ ID NO: 14968 - protein, 13 aa, Homo sapiens
  Heavy chain CDR3 for antibody 7484 (IGHV3-23)
ASPFNWNDGFFDY

SEQ ID NO: 14969 - protein, 9 aa, Homo sapiens
  Light chain CDR3 for antibody 7485 (IGKV1-6)
LQDYNYPWT

SEQ ID NO: 14970 - protein, 16 aa, Homo sapiens
  Heavy chain CDR3 for antibody 7485 (IGHV4-61)
ARDTPYYSGSGRPFDY

SEQ ID NO: 14971 - protein, 8 aa, Homo sapiens
  Light chain CDR3 for antibody 7486 (IGKV1-5)
QQYNSYWT

SEQ ID NO: 14972 - protein, 13 aa, Homo sapiens
  Heavy chain CDR3 for antibody 7486 (IGHV3-30)
AAPFMVRGDGMDV

SEQ ID NO: 14973 - protein, 8 aa, Homo sapiens
  Light chain CDR3 for antibody 7487 (IGKV6-21)
HQSSSLPT

SEQ ID NO: 14974 - protein, 9 aa, Homo sapiens
  Heavy chain CDR3 for antibody 7487 (IGHV3-13)
ARDRWYFDL

SEQ ID NO: 14975 - protein, 9 aa, Homo sapiens
  Light chain CDR3 for antibody 7488 (IGKV3-20)
LQYGSSPYT

SEQ ID NO: 14976 - protein, 20 aa, Homo sapiens
  Heavy chain CDR3 for antibody 7488 (IGHV3-23)
AKGMGGLRYFDWPHYYGMDV

SEQ ID NO: 14977 - protein, 8 aa, Homo sapiens
  Light chain CDR3 for antibody 7489 (IGKV3D-7)
QQDYNLLT

SEQ ID NO: 14978 - protein, 20 aa, Homo sapiens
  Heavy chain CDR3 for antibody 7489 (IGHV3-33)
SRGGATLVRGVIDYYYGMDV

SEQ ID NO: 14979 - protein, 7 aa, Homo sapiens
  Light chain CDR3 for antibody 7490 (IGKV1-17)
LQHNSYP

SEQ ID NO: 14980 - protein, 9 aa, Homo sapiens
  Heavy chain CDR3 for antibody 7490 (IGHV1-18)
ARGRLDFDY

SEQ ID NO: 14981 - protein, 9 aa, Homo sapiens
  Light chain CDR3 for antibody 7491 (IGKV3-15)
QQYNNWPRT

SEQ ID NO: 14982 - protein, 17 aa, Homo sapiens
  Heavy chain CDR3 for antibody 7491 (IGHV3-53)
TTERYPRRYYYYFGMDV

SEQ ID NO: 14983 - protein, 9 aa, Homo sapiens
  Light chain CDR3 for antibody 7492 (IGKV3-11)
QQRINWPWT

SEQ ID NO: 14984 - protein, 14 aa, Homo sapiens
  Heavy chain CDR3 for antibody 7492 (IGHV4-59)
ARASSGSSYWYFDL

SEQ ID NO: 14985 - protein, 9 aa, Homo sapiens
  Light chain CDR3 for antibody 7493 (IGKV1-6)
LQDYNYPYT

SEQ ID NO: 14986 - protein, 23 aa, Homo sapiens
  Heavy chain CDR3 for antibody 7493 (IGHV4/OR15-8)
ARERTYSGILPGYYEDYYYGMDV

SEQ ID NO: 14987 - protein, 8 aa, Homo sapiens
  Light chain CDR3 for antibody 7494 (IGKV6-21)
HQSSSLPT

SEQ ID NO: 14988 - protein, 9 aa, Homo sapiens
  Heavy chain CDR3 for antibody 7494 (IGHV4-59)
AREGGSGSL

SEQ ID NO: 14989 - protein, 9 aa, Homo sapiens
  Light chain CDR3 for antibody 7495 (IGKV3-15)
QQYNNWPLT

SEQ ID NO: 14990 - protein, 14 aa, Homo sapiens
  Heavy chain CDR3 for antibody 7495 (IGHV3-33)
ARDNILTAYYLFDY

SEQ ID NO: 14991 - protein, 9 aa, Homo sapiens
  Light chain CDR3 for antibody 7496 (IGKV3-11)
QQRSNWPLT

SEQ ID NO: 14992 - protein, 12 aa, Homo sapiens
  Heavy chain CDR3 for antibody 7496 (IGHV4-39)
ARREVILGAFDY

SEQ ID NO: 14993 - protein, 9 aa, Homo sapiens
  Light chain CDR3 for antibody 7497 (IGKV2D-28)
MQALQTPPT

SEQ ID NO: 14994 - protein, 18 aa, Homo sapiens
  Heavy chain CDR3 for antibody 7497 (IGHV1-46)
ARDGDYVWGSYRSDWFDP

SEQ ID NO: 14995 - protein, 9 aa, Homo sapiens
  Light chain CDR3 for antibody 7498 (IGKV2-30)
MQGTHWPLT

SEQ ID NO: 14996 - protein, 20 aa, Homo sapiens
  Heavy chain CDR3 for antibody 7498 (IGHV1-18)
AREVGIAVAGTLYYYYGMDV

SEQ ID NO: 14997 - protein, 9 aa, Homo sapiens
  Light chain CDR3 for antibody 7499 (IGKV4-1)
QQYYTTPYT

SEQ ID NO: 14998 - protein, 14 aa, Homo sapiens
  Heavy chain CDR3 for antibody 7499 (IGHV3-33)
ARDGYDILTGPFDY

SEQ ID NO: 14999 - protein, 9 aa, Homo sapiens
  Light chain CDR3 for antibody 7500 (IGKV1-17)
LQHNSYPYT

SEQ ID NO: 15000 - protein, 16 aa, Homo sapiens
  Heavy chain CDR3 for antibody 7500 (IGHV3-23)
ARGAWYSNGWYGTFDI

SEQ ID NO: 15001 - protein, 9 aa, Homo sapiens
  Light chain CDR3 for antibody 7501 (IGKV1-39)
QQSYRTPLT

SEQ ID NO: 15002 - protein, 11 aa, Homo sapiens
  Heavy chain CDR3 for antibody 7501 (IGHV3-23)
GEFSSGWSFDY

SEQ ID NO: 15003 - protein, 9 aa, Homo sapiens
  Light chain CDR3 for antibody 7502 (IGKV3D-15)
QQYNNWPIT

SEQ ID NO: 15004 - protein, 18 aa, Homo sapiens
  Heavy chain CDR3 for antibody 7502 (IGHV1-24)
ATGLRYFDWPIISNLFDY

SEQ ID NO: 15005 - protein, 9 aa, Homo sapiens
  Light chain CDR3 for antibody 7503 (IGKV1-6)
LQDYNYPRT

SEQ ID NO: 15006 - protein, 15 aa, Homo sapiens
  Heavy chain CDR3 for antibody 7503 (IGHV3-33)
ARRGGIAAAGYYFDY

SEQ ID NO: 15007 - protein, 9 aa, Homo sapiens
  Light chain CDR3 for antibody 7504 (IGKV3-11)
QQRSNWPLT

SEQ ID NO: 15008 - protein, 17 aa, Homo sapiens
  Heavy chain CDR3 for antibody 7504 (IGHV3-33)
ARQGVLLWFGELYYFDY

SEQ ID NO: 15009 - protein, 9 aa, Homo sapiens
  Light chain CDR3 for antibody 7505 (IGKV6-21)
HQSSSLPYT

SEQ ID NO: 15010 - protein, 18 aa, Homo sapiens
  Heavy chain CDR3 for antibody 7505 (IGHV1-18)
ARDPNYYGSGSYYNYFDY

SEQ ID NO: 15011 - protein, 10 aa, Homo sapiens
  Light chain CDR3 for antibody 7506 (IGKV3-11)
QQRSNWPIYT

SEQ ID NO: 15012 - protein, 17 aa, Homo sapiens
  Heavy chain CDR3 for antibody 7506 (IGHV3-13)
AREGWFGELWGYYGMDV

SEQ ID NO: 15013 - protein, 9 aa, Homo sapiens
  Light chain CDR3 for antibody 7507 (IGKV1-17)
QQYNSYSYT

SEQ ID NO: 15014 - protein, 14 aa, Homo sapiens
  Heavy chain CDR3 for antibody 7507 (IGHV4-39)
ARRGVVVPPGGMDV

SEQ ID NO: 15015 - protein, 10 aa, Homo sapiens
  Light chain CDR3 for antibody 7508 (IGKV1-39)
QQSYSTPMYT

SEQ ID NO: 15016 - protein, 13 aa, Homo sapiens
  Heavy chain CDR3 for antibody 7508 (IGHV1-18)
ARSITMVRGVIGY

SEQ ID NO: 15017 - protein, 10 aa, Homo sapiens
  Light chain CDR3 for antibody 7509 (IGKV3-11)
QQRSNWPIFT

SEQ ID NO: 15018 - protein, 15 aa, Homo sapiens
  Heavy chain CDR3 for antibody 7509 (IGHV3-23)
AKDPRGYYYYYGMDV

SEQ ID NO: 15019 - protein, 8 aa, Homo sapiens
  Light chain CDR3 for antibody 7510 (IGKV1-6)
QQYNSYWT

SEQ ID NO: 15020 - protein, 13 aa, Homo sapiens
  Heavy chain CDR3 for antibody 7510 (IGHV3-33)
ARGVLWFGELFDY

SEQ ID NO: 15021 - protein, 9 aa, Homo sapiens
  Light chain CDR3 for antibody 7511 (IGKV1-17)
LQHNSFPWT

SEQ ID NO: 15022 - protein, 9 aa, Homo sapiens
  Heavy chain CDR3 for antibody 7511 (IGHV3-30)
ARDNWGFDY

SEQ ID NO: 15023 - protein, 9 aa, Homo sapiens
  Light chain CDR3 for antibody 7512 (IGKV1-9)
QQLISYPLT

SEQ ID NO: 15024 - protein, 15 aa, Homo sapiens
  Heavy chain CDR3 for antibody 7512 (IGHV1-2)
ARDLGYYGSGSRMDV

SEQ ID NO: 15025 - protein, 9 aa, Homo sapiens
  Light chain CDR3 for antibody 7513 (IGKV1-27)
QKYNSAPYT

SEQ ID NO: 15026 - protein, 19 aa, Homo sapiens
  Heavy chain CDR3 for antibody 7513 (IGHV3-33)
ARRKNYYGSGSWHYYGMDV

SEQ ID NO: 15027 - protein, 9 aa, Homo sapiens
  Light chain CDR3 for antibody 7514 (IGKV1-39)
QQSYSTPYT

SEQ ID NO: 15028 - protein, 18 aa, Homo sapiens
  Heavy chain CDR3 for antibody 7514 (IGHV3-33)
ARREGIVGTTTYYYGMDV

SEQ ID NO: 15029 - protein, 9 aa, Homo sapiens
  Light chain CDR3 for antibody 7515 (IGKV3D-7)
QQDYEFPLT

SEQ ID NO: 15030 - protein, 10 aa, Homo sapiens
  Heavy chain CDR3 for antibody 7515 (IGHV3-33)
ARDGSGSQPI

SEQ ID NO: 15031 - protein, 9 aa, Homo sapiens
  Light chain CDR3 for antibody 7516 (IGKV1-16)
QHYNDYPFT

SEQ ID NO: 15032 - protein, 12 aa, Homo sapiens
  Heavy chain CDR3 for antibody 7516 (IGHV3-23)
AKDGWFGESLDY

SEQ ID NO: 15033 - protein, 10 aa, Homo sapiens
  Light chain CDR3 for antibody 7517 (IGKV3-15)
QQYNNWPPYT

SEQ ID NO: 15034 - protein, 14 aa, Homo sapiens
  Heavy chain CDR3 for antibody 7517 (IGHV4-39)
ARDSGYDYYYAMDV

SEQ ID NO: 15035 - protein, 9 aa, Homo sapiens
  Light chain CDR3 for antibody 7518 (IGKV1D-16)
QQYHSYPYT

SEQ ID NO: 15036 - protein, 15 aa, Homo sapiens
  Heavy chain CDR3 for antibody 7518 (IGHV1-18)
ARGSYDSSGYYYFDY

SEQ ID NO: 15037 - protein, 10 aa, Homo sapiens
  Light chain CDR3 for antibody 7519 (IGKV1-17)
LQHNSYPMYT

SEQ ID NO: 15038 - protein, 19 aa, Homo sapiens
  Heavy chain CDR3 for antibody 7519 (IGHV3-30)
ARRFSGYSGYDHYYYGMDV

SEQ ID NO: 15039 - protein, 9 aa, Homo sapiens
  Light chain CDR3 for antibody 7520 (IGKV6-21)
HQSTSLPFT

SEQ ID NO: 15040 - protein, 20 aa, Homo sapiens
  Heavy chain CDR3 for antibody 7520 (IGHV1-8)
ARGDGTMVRGIYYYYYGMDV

SEQ ID NO: 15041 - protein, 10 aa, Homo sapiens
  Light chain CDR3 for antibody 7521 (IGKV3-11)
QQRSNWLMYT

SEQ ID NO: 15042 - protein, 9 aa, Homo sapiens
  Heavy chain CDR3 for antibody 7521 (IGHV3-33)
ARATVGVDY

SEQ ID NO: 15043 - protein, 9 aa, Homo sapiens
  Light chain CDR3 for antibody 7522 (IGKV1-39)
QQSYSTPLT

SEQ ID NO: 15044 - protein, 10 aa, Homo sapiens
  Heavy chain CDR3 for antibody 7522 (IGHV1-46)
AREWELLFDY

SEQ ID NO: 15045 - protein, 10 aa, Homo sapiens
  Light chain CDR3 for antibody 7523 (IGKV3-11)
QQRSNWPIFT

SEQ ID NO: 15046 - protein, 15 aa, Homo sapiens
  Heavy chain CDR3 for antibody 7523 (IGHV1-24)
ATHWDLRYYYYGMDV

SEQ ID NO: 15047 - protein, 8 aa, Homo sapiens
  Light chain CDR3 for antibody 7524 (IGKV3-20)
QQYGSSFT

SEQ ID NO: 15048 - protein, 17 aa, Homo sapiens
  Heavy chain CDR3 for antibody 7524 (IGHV3-23)
AKDYDILTGYSHNWFDP

SEQ ID NO: 15049 - protein, 10 aa, Homo sapiens
  Light chain CDR3 for antibody 7525 (IGKV1-39)
QQSYSTPMYT

SEQ ID NO: 15050 - protein, 16 aa, Homo sapiens
  Heavy chain CDR3 for antibody 7525 (IGHV3-33)
ARAVYYGSGSSLIMDV

SEQ ID NO: 15051 - protein, 9 aa, Homo sapiens
  Light chain CDR3 for antibody 7526 (IGKV3D-7)
QQDYNLPYT

SEQ ID NO: 15052 - protein, 17 aa, Homo sapiens
  Heavy chain CDR3 for antibody 7526 (IGHV3-33)
ARSGIVGATDYYYGLDV

SEQ ID NO: 15053 - protein, 8 aa, Homo sapiens
  Light chain CDR3 for antibody 7527 (IGKV3D-7)
QQDYNLLT

SEQ ID NO: 15054 - protein, 13 aa, Homo sapiens
  Heavy chain CDR3 for antibody 7527 (IGHV3-33)
ARDSSSWYHWFDP

SEQ ID NO: 15055 - protein, 9 aa, Homo sapiens
  Light chain CDR3 for antibody 7528 (IGKV3-15)
QQYNNWPLT

SEQ ID NO: 15056 - protein, 11 aa, Homo sapiens
  Heavy chain CDR3 for antibody 7528 (IGHV3-20)
ARGGYYGPFDY

SEQ ID NO: 15057 - protein, 8 aa, Homo sapiens
  Light chain CDR3 for antibody 7529 (IGKV3-20)
QQYGRSFT

SEQ ID NO: 15058 - protein, 14 aa, Homo sapiens
  Heavy chain CDR3 for antibody 7529 (IGHV3-33)
ARDREQQLVRYFDY

SEQ ID NO: 15059 - protein, 9 aa, Homo sapiens
  Light chain CDR3 for antibody 7530 (IGKV1-33)
QQYDNLPFT

SEQ ID NO: 15060 - protein, 15 aa, Homo sapiens
  Heavy chain CDR3 for antibody 7530 (IGHV3-30)
ARRGYGSGSPDAFDL

SEQ ID NO: 15061 - protein, 9 aa, Homo sapiens
  Light chain CDR3 for antibody 7531 (IGKV1-17)
LQHNSYPYT

SEQ ID NO: 15062 - protein, 14 aa, Homo sapiens
  Heavy chain CDR3 for antibody 7531 (IGHV3-33)
AKSYDILTGEAFDI

SEQ ID NO: 15063 - protein, 9 aa, Homo sapiens
  Light chain CDR3 for antibody 7532 (IGKV1-16)
QQYNRYPYT

SEQ ID NO: 15064 - protein, 15 aa, Homo sapiens
  Heavy chain CDR3 for antibody 7532 (IGHV4-59)
ARDGHGNWGSGTFDY

SEQ ID NO: 15065 - protein, 10 aa, Homo sapiens
  Light chain CDR3 for antibody 7533 (IGKV3-11)
QQRSNWLMYT

SEQ ID NO: 15066 - protein, 13 aa, Homo sapiens
  Heavy chain CDR3 for antibody 7533 (IGHV3-11)
ARDGGAAAGTWDS

SEQ ID NO: 15067 - protein, 9 aa, Homo sapiens
  Light chain CDR3 for antibody 7534 (IGKV5-2)
LQHDNFPWT

SEQ ID NO: 15068 - protein, 12 aa, Homo sapiens
  Heavy chain CDR3 for antibody 7534 (IGHV3-23)
AKEGLGNDYESY

SEQ ID NO: 15069 - protein, 9 aa, Homo sapiens
  Light chain CDR3 for antibody 7535 (IGKV1-6)
LQDYNFPFT

SEQ ID NO: 15070 - protein, 14 aa, Homo sapiens
  Heavy chain CDR3 for antibody 7535 (IGHV3-33)
ARDWNDVYYYGMDV

SEQ ID NO: 15071 - protein, 9 aa, Homo sapiens
  Light chain CDR3 for antibody 7536 (IGKV1-17)
LQHNSYPYT

SEQ ID NO: 15072 - protein, 14 aa, Homo sapiens
  Heavy chain CDR3 for antibody 7536 (IGHV3-20)
ARNGGSTWYDWFDP

SEQ ID NO: 15073 - protein, 9 aa, Homo sapiens
  Light chain CDR3 for antibody 7537 (IGKV3D-20)
QQYSSYPYT

SEQ ID NO: 15074 - protein, 14 aa, Homo sapiens
  Heavy chain CDR3 for antibody 7537 (IGHV3-15)
SIYFYGSGRDYFDY

SEQ ID NO: 15075 - protein, 9 aa, Homo sapiens
  Light chain CDR3 for antibody 7538 (IGKV2D-28)
MQALQTPYT

SEQ ID NO: 15076 - protein, 17 aa, Homo sapiens
  Heavy chain CDR3 for antibody 7538 (IGHV3-33)
ARGYCSRTSCYLYYFDY

SEQ ID NO: 15077 - protein, 8 aa, Homo sapiens
  Light chain CDR3 for antibody 7539 (IGKV3D-7)
QQDYNLLT

SEQ ID NO: 15078 - protein, 18 aa, Homo sapiens
  Heavy chain CDR3 for antibody 7539 (IGHV3-23)
AKPDYYGSGSYYNVPFDY

SEQ ID NO: 15079 - protein, 9 aa, Homo sapiens
  Light chain CDR3 for antibody 7540 (IGKV1D-16)
QQYNSYPFT

SEQ ID NO: 15080 - protein, 14 aa, Homo sapiens
  Heavy chain CDR3 for antibody 7540 (IGHV4-59)
AKGGSGSYYNWFDP

SEQ ID NO: 15081 - protein, 9 aa, Homo sapiens
  Light chain CDR3 for antibody 7541 (IGKV5-2)
LQHDKFPYT

SEQ ID NO: 15082 - protein, 18 aa, Homo sapiens
  Heavy chain CDR3 for antibody 7541 (IGHV3-33)
ARDRYHDILTGYYMGFDY

SEQ ID NO: 15083 - protein, 9 aa, Homo sapiens
  Light chain CDR3 for antibody 7542 (IGKV2-30)
MQGTHWPLT

SEQ ID NO: 15084 - protein, 24 aa, Homo sapiens
  Heavy chain CDR3 for antibody 7542 (IGHV1-46)
ARDEARGLLTGYYNMREYYYGMDV

SEQ ID NO: 15085 - protein, 11 aa, Homo sapiens
  Light chain CDR3 for antibody 7543 (IGKV3-11)
QQRSNWPPTWT

SEQ ID NO: 15086 - protein, 18 aa, Homo sapiens
  Heavy chain CDR3 for antibody 7543 (IGHV3-33)
ARGGYSSGWDYYYYGMDV

SEQ ID NO: 15087 - protein, 9 aa, Homo sapiens
  Light chain CDR3 for antibody 7544 (IGKV3-20)
QQYGSSPYT

SEQ ID NO: 15088 - protein, 14 aa, Homo sapiens
  Heavy chain CDR3 for antibody 7544 (IGHV4-39)
ARQGDILTGYSFDN

SEQ ID NO: 15089 - protein, 9 aa, Homo sapiens
  Light chain CDR3 for antibody 7545 (IGKV2D-28)
MQALQTPPT

SEQ ID NO: 15090 - protein, 9 aa, Homo sapiens
  Heavy chain CDR3 for antibody 7545 (IGHV3-13)
ARDRWYFDL

SEQ ID NO: 15091 - protein, 9 aa, Homo sapiens
  Light chain CDR3 for antibody 7546 (IGKV1D-16)
QQYNSYPYT

SEQ ID NO: 15092 - protein, 12 aa, Homo sapiens
  Heavy chain CDR3 for antibody 7546 (IGHV4-39)
ASQMVREGWFDP

SEQ ID NO: 15093 - protein, 9 aa, Homo sapiens
  Light chain CDR3 for antibody 7547 (IGKV1D-13)
QQFNHYPRT

SEQ ID NO: 15094 - protein, 11 aa, Homo sapiens
  Heavy chain CDR3 for antibody 7547 (IGHV3-33)
ARDPSIDGMDV

SEQ ID NO: 15095 - protein, 9 aa, Homo sapiens
  Light chain CDR3 for antibody 7548 (IGKV1-6)
QQEYNYPLT

SEQ ID NO: 15096 - protein, 18 aa, Homo sapiens
  Heavy chain CDR3 for antibody 7548 (IGHV4-59)
AREGDYVWGSYRPNWFDP

SEQ ID NO: 15097 - protein, 9 aa, Homo sapiens
  Light chain CDR3 for antibody 7549 (IGKV1D-16)
QQYDSYPYT

SEQ ID NO: 15098 - protein, 14 aa, Homo sapiens
  Heavy chain CDR3 for antibody 7549 (IGHV3-33)
ARDWNDVYSYGMDV

SEQ ID NO: 15099 - protein, 9 aa, Homo sapiens
  Light chain CDR3 for antibody 7550 (IGKV3-20)
QQYGSSIFT

SEQ ID NO: 15100 - protein, 17 aa, Homo sapiens
  Heavy chain CDR3 for antibody 7550 (IGHV3-33)
ARGFSGYDGYYYYGMDV

SEQ ID NO: 15101 - protein, 9 aa, Homo sapiens
  Light chain CDR3 for antibody 7551 (IGKV6-21)
HQSSSLPYT

SEQ ID NO: 15102 - protein, 16 aa, Homo sapiens
  Heavy chain CDR3 for antibody 7551 (IGHV4-39)
ARRVPYYDILTGYLDY

SEQ ID NO: 15103 - protein, 10 aa, Homo sapiens
  Light chain CDR3 for antibody 7552 (IGKV1-39)
QQSYSTPMYT

SEQ ID NO: 15104 - protein, 16 aa, Homo sapiens
  Heavy chain CDR3 for antibody 7552 (IGHV1-24)
ATEDSSSTYYYYGLDV

SEQ ID NO: 15105 - protein, 9 aa, Homo sapiens
  Light chain CDR3 for antibody 7553 (IGKV1-6)
LQDYNYPFT

SEQ ID NO: 15106 - protein, 13 aa, Homo sapiens
  Heavy chain CDR3 for antibody 7553 (IGHV3-11)
ARDEGYRGYVLGS

SEQ ID NO: 15107 - protein, 9 aa, Homo sapiens
  Light chain CDR3 for antibody 7554 (IGKV1-17)
LQHNSYPRT

SEQ ID NO: 15108 - protein, 12 aa, Homo sapiens
  Heavy chain CDR3 for antibody 7554 (IGHV3-33)
AREGYSSSWFDY

SEQ ID NO: 15109 - protein, 8 aa, Homo sapiens
  Light chain CDR3 for antibody 7555 (IGKV1-17)
QQYNSYYT

SEQ ID NO: 15110 - protein, 14 aa, Homo sapiens
  Heavy chain CDR3 for antibody 7555 (IGHV3-33)
ARRGYSGYDWYFDY

SEQ ID NO: 15111 - protein, 10 aa, Homo sapiens
  Light chain CDR3 for antibody 7556 (IGKV3-11)
QQRSTWPTLT

SEQ ID NO: 15112 - protein, 13 aa, Homo sapiens
  Heavy chain CDR3 for antibody 7556 (IGHV3-33)
ARDWGYSHGYFDY

SEQ ID NO: 15113 - protein, 8 aa, Homo sapiens
  Light chain CDR3 for antibody 7557 (IGKV3-20)
QQYGRSFT

SEQ ID NO: 15114 - protein, 16 aa, Homo sapiens
  Heavy chain CDR3 for antibody 7557 (IGHV3-30)
ARDIAVAGHVYYGMDV

SEQ ID NO: 15115 - protein, 9 aa, Homo sapiens
  Light chain CDR3 for antibody 7558 (IGKV3-11)
QQRSNWPYT

SEQ ID NO: 15116 - protein, 18 aa, Homo sapiens
  Heavy chain CDR3 for antibody 7558 (IGHV3-33)
ARGGYDILTGYYRTGMDV

SEQ ID NO: 15117 - protein, 10 aa, Homo sapiens
  Light chain CDR3 for antibody 7559 (IGKV3-11)
QQRSNWPALT

SEQ ID NO: 15118 - protein, 18 aa, Homo sapiens
  Heavy chain CDR3 for antibody 7559 (IGHV3-33)
ARDGRISLVRGIIDAFDI

SEQ ID NO: 15119 - protein, 9 aa, Homo sapiens
  Light chain CDR3 for antibody 7560 (IGKV3D-7)
QQDSNLPYT

SEQ ID NO: 15120 - protein, 20 aa, Homo sapiens
  Heavy chain CDR3 for antibody 7560 (IGHV3-33)
AREDYYGSGSYYPAYNWFDP

SEQ ID NO: 15121 - protein, 8 aa, Homo sapiens
  Light chain CDR3 for antibody 7561 (IGKV1D-13)
QQFNNYPT

SEQ ID NO: 15122 - protein, 21 aa, Homo sapiens
  Heavy chain CDR3 for antibody 7561 (IGHV3-33)
ARDEYYEIVTGYGYYHYGMDV

SEQ ID NO: 15123 - protein, 8 aa, Homo sapiens
  Light chain CDR3 for antibody 7562 (IGKV3-20)
QQYGRSWT

SEQ ID NO: 15124 - protein, 11 aa, Homo sapiens
  Heavy chain CDR3 for antibody 7562 (IGHV3-33)
ARDKSSGWSDY

SEQ ID NO: 15125 - protein, 9 aa, Homo sapiens
  Light chain CDR3 for antibody 7563 (IGKV1-9)
QQGNTYSRT

SEQ ID NO: 15126 - protein, 13 aa, Homo sapiens
  Heavy chain CDR3 for antibody 7563 (IGHV4-39)
ARQWPSGYWYFDL

SEQ ID NO: 15127 - protein, 9 aa, Homo sapiens
  Light chain CDR3 for antibody 7564 (IGKV6-21)
HQSSSLPYT

SEQ ID NO: 15128 - protein, 14 aa, Homo sapiens
  Heavy chain CDR3 for antibody 7564 (IGHV3-15)
SIYFYGSGRDYFDY

SEQ ID NO: 15129 - protein, 9 aa, Homo sapiens
  Light chain CDR3 for antibody 7565 (IGKV1-9)
QQLKSYLYT

SEQ ID NO: 15130 - protein, 11 aa, Homo sapiens
  Heavy chain CDR3 for antibody 7565 (IGHV1-24)
ATELGLYYFDY

SEQ ID NO: 15131 - protein, 11 aa, Homo sapiens
  Light chain CDR3 for antibody 7566 (IGKV1-9)
QQRSNWPPMYT

SEQ ID NO: 15132 - protein, 16 aa, Homo sapiens
  Heavy chain CDR3 for antibody 7566 (IGHV4-59)
AGGSGSYRDYYYGIDV

SEQ ID NO: 15133 - protein, 8 aa, Homo sapiens
  Light chain CDR3 for antibody 7567 (IGKV6-21)
HQSSSLPT

SEQ ID NO: 15134 - protein, 15 aa, Homo sapiens
  Heavy chain CDR3 for antibody 7567 (IGHV3-33)
AKDRNSGYDWGGFDY

SEQ ID NO: 15135 - protein, 9 aa, Homo sapiens
  Light chain CDR3 for antibody 7568 (IGKV3D-7)
QQDYNLPYT

SEQ ID NO: 15136 - protein, 18 aa, Homo sapiens
  Heavy chain CDR3 for antibody 7568 (IGHV3-33)
ARGGYDILTGYYRTGMDV

SEQ ID NO: 15137 - protein, 9 aa, Homo sapiens
  Light chain CDR3 for antibody 7569 (IGKV1-16)
QHYNDYPFT

SEQ ID NO: 15138 - protein, 15 aa, Homo sapiens
  Heavy chain CDR3 for antibody 7569 (IGHV3-33)
ARGYYYGSGSFPFDY

SEQ ID NO: 15139 - protein, 9 aa, Homo sapiens
  Light chain CDR3 for antibody 7570 (IGKV3-20)
QQFDSSPYT

SEQ ID NO: 15140 - protein, 16 aa, Homo sapiens
  Heavy chain CDR3 for antibody 7570 (IGHV3-23)
AKEGMVLRYFDWLWDY

SEQ ID NO: 15141 - protein, 9 aa, Homo sapiens
  Light chain CDR3 for antibody 7571 (IGKV1D-16)
QQYNSYPLT

SEQ ID NO: 15142 - protein, 18 aa, Homo sapiens
  Heavy chain CDR3 for antibody 7571 (IGHV3-33)
ARGSYSSGWNDYHYGMDV

SEQ ID NO: 15143 - protein, 9 aa, Homo sapiens
  Light chain CDR3 for antibody 7572 (IGKV1-16)
QKYNSNPLT

SEQ ID NO: 15144 - protein, 13 aa, Homo sapiens
  Heavy chain CDR3 for antibody 7572 (IGHV3-33)
ARRATLVRGVFDP

SEQ ID NO: 15145 - protein, 9 aa, Homo sapiens
  Light chain CDR3 for antibody 7573 (IGKV1-9)
QQLISYPLT

SEQ ID NO: 15146 - protein, 17 aa, Homo sapiens
  Heavy chain CDR3 for antibody 7573 (IGHV3-33)
ARDLIGPLSSSWYPFDY

SEQ ID NO: 15147 - protein, 8 aa, Homo sapiens
  Light chain CDR3 for antibody 7574 (IGKV2D-28)
MQALQTPT

SEQ ID NO: 15148 - protein, 13 aa, Homo sapiens
  Heavy chain CDR3 for antibody 7574 (IGHV3-33)
ARDQRYSSGWYDY

SEQ ID NO: 15149 - protein, 9 aa, Homo sapiens
  Light chain CDR3 for antibody 7575 (IGKV3-11)
QQRSNWPYT

SEQ ID NO: 15150 - protein, 15 aa, Homo sapiens
  Heavy chain CDR3 for antibody 7575 (IGHV3-33)
ARDRDYYYYYYGMDV

SEQ ID NO: 15151 - protein, 9 aa, Homo sapiens
  Light chain CDR3 for antibody 7576 (IGKV3D-20)
QQYGSSPYT

SEQ ID NO: 15152 - protein, 20 aa, Homo sapiens
  Heavy chain CDR3 for antibody 7576 (IGHV3-33)
AKDRETGTTSYHYYYYGMDV

SEQ ID NO: 15153 - protein, 8 aa, Homo sapiens
  Light chain CDR3 for antibody 7577 (IGKV1D-13)
QQFNNYPT

SEQ ID NO: 15154 - protein, 9 aa, Homo sapiens
  Heavy chain CDR3 for antibody 7577 (IGHV3-23)
AKEQLLFDY

SEQ ID NO: 15155 - protein, 10 aa, Homo sapiens
  Light chain CDR3 for antibody 7578 (IGKV1-27)
QKYNSAPMYT

SEQ ID NO: 15156 - protein, 13 aa, Homo sapiens
  Heavy chain CDR3 for antibody 7578 (IGHV4-28)
ARKGATGYYGMDV

SEQ ID NO: 15157 - protein, 9 aa, Homo sapiens
  Light chain CDR3 for antibody 7579 (IGKV1-6)
LQDYKSPFT

SEQ ID NO: 15158 - protein, 17 aa, Homo sapiens
  Heavy chain CDR3 for antibody 7579 (IGHV3-33)
ARESLKLGIYYYYGMDV

SEQ ID NO: 15159 - protein, 9 aa, Homo sapiens
  Light chain CDR3 for antibody 7580 (IGKV1-6)
LQDYNYPYT

SEQ ID NO: 15160 - protein, 12 aa, Homo sapiens
  Heavy chain CDR3 for antibody 7580 (IGHV3-33)
AREGVMGYSGSY

SEQ ID NO: 15161 - protein, 9 aa, Homo sapiens
  Light chain CDR3 for antibody 7581 (IGKV1D-16)
QQYSSYPYT

SEQ ID NO: 15162 - protein, 17 aa, Homo sapiens
  Heavy chain CDR3 for antibody 7581 (IGHV3-33)
ARGYSGYVGYYYYGMDV

SEQ ID NO: 15163 - protein, 9 aa, Homo sapiens
  Light chain CDR3 for antibody 7582 (IGKV3-11)
QQRSNWPYT

SEQ ID NO: 15164 - protein, 13 aa, Homo sapiens
  Heavy chain CDR3 for antibody 7582 (IGHV3-23)
AKDRGLRYYGMDV

SEQ ID NO: 15165 - protein, 9 aa, Homo sapiens
  Light chain CDR3 for antibody 7583 (IGKV1D-13)
QQFYNYPRT

SEQ ID NO: 15166 - protein, 11 aa, Homo sapiens
  Heavy chain CDR3 for antibody 7583 (IGHV4-39)
ARKIVGAHFDY

SEQ ID NO: 15167 - protein, 8 aa, Homo sapiens
  Light chain CDR3 for antibody 7584 (IGKV1D-16)
HQSGSLPT

SEQ ID NO: 15168 - protein, 14 aa, Homo sapiens
  Heavy chain CDR3 for antibody 7584 (IGHV3-33)
VRDAMGATTAWFDP

SEQ ID NO: 15169 - protein, 9 aa, Homo sapiens
  Light chain CDR3 for antibody 7585 (IGKV3-11)
QQRSNWMYT

SEQ ID NO: 15170 - protein, 11 aa, Homo sapiens
  Heavy chain CDR3 for antibody 7585 (IGHV3-23)
GEFSSGWSFDY

SEQ ID NO: 15171 - protein, 9 aa, Homo sapiens
  Light chain CDR3 for antibody 7586 (IGKV1D-16)
QQYHSYPYT

SEQ ID NO: 15172 - protein, 18 aa, Homo sapiens
  Heavy chain CDR3 for antibody 7586 (IGHV4-39)
ARYITMVRGAIITGPFDY

SEQ ID NO: 15173 - protein, 9 aa, Homo sapiens
  Light chain CDR3 for antibody 7587 (IGKV1-17)
LQHNSYPIT

SEQ ID NO: 15174 - protein, 14 aa, Homo sapiens
  Heavy chain CDR3 for antibody 7587 (IGHV3-53)
ARDGLVGASSWFDP

SEQ ID NO: 15175 - protein, 9 aa, Homo sapiens
  Light chain CDR3 for antibody 7588 (IGKV1-6)
HQSSSLPYT

SEQ ID NO: 15176 - protein, 11 aa, Homo sapiens
  Heavy chain CDR3 for antibody 7588 (IGHV4-39)
ARLSGEGHFDS

SEQ ID NO: 15177 - protein, 9 aa, Homo sapiens
  Light chain CDR3 for antibody 7589 (IGKV3-11)
QQRSNWMYT

SEQ ID NO: 15178 - protein, 8 aa, Homo sapiens
  Heavy chain CDR3 for antibody 7589 (IGHV3-20)
APHWIFDY

SEQ ID NO: 15179 - protein, 9 aa, Homo sapiens
  Light chain CDR3 for antibody 7590 (IGKV1-6)
LQDYNYPYT

SEQ ID NO: 15180 - protein, 14 aa, Homo sapiens
  Heavy chain CDR3 for antibody 7590 (IGHV1-46)
ARGAVDDYYYGMDV

SEQ ID NO: 15181 - protein, 9 aa, Homo sapiens
  Light chain CDR3 for antibody 7591 (IGKV1-6)
LQDYKSPFT

SEQ ID NO: 15182 - protein, 13 aa, Homo sapiens
  Heavy chain CDR3 for antibody 7591 (IGHV4-59)
ARTMVRGVAPFDY

SEQ ID NO: 15183 - protein, 9 aa, Homo sapiens
  Light chain CDR3 for antibody 7592 (IGKV3-20)
QQYGSSPYT

SEQ ID NO: 15184 - protein, 18 aa, Homo sapiens
  Heavy chain CDR3 for antibody 7592 (IGHV3-33)
ARDYDSLTTYPEDYGMDV

SEQ ID NO: 15185 - protein, 10 aa, Homo sapiens
  Light chain CDR3 for antibody 7593 (IGKV3-11)
QQRSNWPTWT

SEQ ID NO: 15186 - protein, 17 aa, Homo sapiens
  Heavy chain CDR3 for antibody 7593 (IGHV4-39)
AGRLTYYYGSGSPSFDY

SEQ ID NO: 15187 - protein, 9 aa, Homo sapiens
  Light chain CDR3 for antibody 7594 (IGKV1-16)
QQYKSYPYT

SEQ ID NO: 15188 - protein, 18 aa, Homo sapiens
  Heavy chain CDR3 for antibody 7594 (IGHV1-46)
ARDGDYVWGSYRSSWFGP

SEQ ID NO: 15189 - protein, 9 aa, Homo sapiens
  Light chain CDR3 for antibody 7595 (IGKV5-2)
LQHDNFPWT

SEQ ID NO: 15190 - protein, 14 aa, Homo sapiens
  Heavy chain CDR3 for antibody 7595 (IGHV3-20)
ARDGGSGSYDGLDV

SEQ ID NO: 15191 - protein, 9 aa, Homo sapiens
  Light chain CDR3 for antibody 7596 (IGKV1-27)
QKYNSAPYT

SEQ ID NO: 15192 - protein, 12 aa, Homo sapiens
  Heavy chain CDR3 for antibody 7596 (IGHV3-33)
ARESGGSFGMDV

SEQ ID NO: 15193 - protein, 9 aa, Homo sapiens
  Light chain CDR3 for antibody 7597 (IGKV1-9)
QQLYTYPYT

SEQ ID NO: 15194 - protein, 14 aa, Homo sapiens
  Heavy chain CDR3 for antibody 7597 (IGHV3-33)
ARDRIAAASSDFDC

SEQ ID NO: 15195 - protein, 10 aa, Homo sapiens
  Light chain CDR3 for antibody 7598 (IGKV3-11)
QQRSNWPIFT

SEQ ID NO: 15196 - protein, 13 aa, Homo sapiens
  Heavy chain CDR3 for antibody 7598 (IGHV4-39)
ARPGIVAAGWFDP

SEQ ID NO: 15197 - protein, 8 aa, Homo sapiens
  Light chain CDR3 for antibody 7599 (IGKV1-5)
QQYNSYWT

SEQ ID NO: 15198 - protein, 17 aa, Homo sapiens
  Heavy chain CDR3 for antibody 7599 (IGHV3-23)
AKDGIGELSYYYYGMDV

SEQ ID NO: 15199 - protein, 9 aa, Homo sapiens
  Light chain CDR3 for antibody 7600 (IGKV1-16)
QQYNSYPYT

SEQ ID NO: 15200 - protein, 17 aa, Homo sapiens
  Heavy chain CDR3 for antibody 7600 (IGHV4-59)
AREEDYYGSGSFGTFDI

SEQ ID NO: 15201 - protein, 9 aa, Homo sapiens
  Light chain CDR3 for antibody 7601 (IGKV3D-7)
QQDYSFPLT

SEQ ID NO: 15202 - protein, 9 aa, Homo sapiens
  Heavy chain CDR3 for antibody 7601 (IGHV3-23)
AKEQQLFDY

SEQ ID NO: 15203 - protein, 9 aa, Homo sapiens
  Light chain CDR3 for antibody 7602 (IGKV1-5)
QQYNSYSYT

SEQ ID NO: 15204 - protein, 16 aa, Homo sapiens
  Heavy chain CDR3 for antibody 7602 (IGHV4-59)
ARFYFGSGSYYWYFDL

SEQ ID NO: 15205 - protein, 9 aa, Homo sapiens
  Light chain CDR3 for antibody 7603 (IGKV6-21)
HQSSSLPYT

SEQ ID NO: 15206 - protein, 22 aa, Homo sapiens
  Heavy chain CDR3 for antibody 7603 (IGHV3-33)
ARMYYDILTGYYKDYYYYGMDV

SEQ ID NO: 15207 - protein, 10 aa, Homo sapiens
  Light chain CDR3 for antibody 7604 (IGKV3-11)
QQRSNWPIFT

SEQ ID NO: 15208 - protein, 11 aa, Homo sapiens
  Heavy chain CDR3 for antibody 7604 (IGHV3-23)
ARDRATATVDY

SEQ ID NO: 15209 - protein, 9 aa, Homo sapiens
  Light chain CDR3 for antibody 7605 (IGKV1-17)
LQHNSYPLT

SEQ ID NO: 15210 - protein, 13 aa, Homo sapiens
  Heavy chain CDR3 for antibody 7605 (IGHV4-61)
ARRYSSGWYPFDY

SEQ ID NO: 15211 - protein, 9 aa, Homo sapiens
  Light chain CDR3 for antibody 7606 (IGKV1-6)
LQDYNYPWT

SEQ ID NO: 15212 - protein, 13 aa, Homo sapiens
  Heavy chain CDR3 for antibody 7606 (IGHV4-39)
ARRGVLAPAAFDH

SEQ ID NO: 15213 - protein, 10 aa, Homo sapiens
  Light chain CDR3 for antibody 7607 (IGKV1-17)
LQHNSYPMYT

SEQ ID NO: 15214 - protein, 15 aa, Homo sapiens
  Heavy chain CDR3 for antibody 7607 (IGHV3-33)
VCVLYDYGDYVGFDY

SEQ ID NO: 15215 - protein, 9 aa, Homo sapiens
  Light chain CDR3 for antibody 7608 (IGKV4-1)
QQYYTTPPT

SEQ ID NO: 15216 - protein, 16 aa, Homo sapiens
  Heavy chain CDR3 for antibody 7608 (IGHV4-59)
ARGRYFEWLLGDVFDI

SEQ ID NO: 15217 - protein, 9 aa, Homo sapiens
  Light chain CDR3 for antibody 7609 (IGKV1D-16)
QQYYSYPRT

SEQ ID NO: 15218 - protein, 14 aa, Homo sapiens
  Heavy chain CDR3 for antibody 7609 (IGHV3-33)
ARDDYVSGSYYFDY

SEQ ID NO: 15219 - protein, 9 aa, Homo sapiens
  Light chain CDR3 for antibody 7610 (IGKV3-11)
QQRSNWPYT

SEQ ID NO: 15220 - protein, 15 aa, Homo sapiens
  Heavy chain CDR3 for antibody 7610 (IGHV4-59)
ARDLGYYGSGSPLAY

SEQ ID NO: 15221 - protein, 9 aa, Homo sapiens
  Light chain CDR3 for antibody 7611 (IGKV1-6)
HQSSSLPYT

SEQ ID NO: 15222 - protein, 13 aa, Homo sapiens
  Heavy chain CDR3 for antibody 7611 (IGHV3-21)
ATGAWASSWWGDY

SEQ ID NO: 15223 - protein, 8 aa, Homo sapiens
  Light chain CDR3 for antibody 7612 (IGKV3D-7)
QQDYNLLT

SEQ ID NO: 15224 - protein, 14 aa, Homo sapiens
  Heavy chain CDR3 for antibody 7612 (IGHV3-33)
ARDHAAGGYSHSDY

SEQ ID NO: 15225 - protein, 9 aa, Homo sapiens
  Light chain CDR3 for antibody 7613 (IGKV1-9)
QQLNSYPYT

SEQ ID NO: 15226 - protein, 18 aa, Homo sapiens
  Heavy chain CDR3 for antibody 7613 (IGHV3-33)
ARDGYSGYDYYYYYGMDV

SEQ ID NO: 15227 - protein, 9 aa, Homo sapiens
  Light chain CDR3 for antibody 7614 (IGKV1-6)
LQDYKSPFT

SEQ ID NO: 15228 - protein, 13 aa, Homo sapiens
  Heavy chain CDR3 for antibody 7614 (IGHV3-33)
AKEDGDYHHYFDY

SEQ ID NO: 15229 - protein, 9 aa, Homo sapiens
  Light chain CDR3 for antibody 7615 (IGKV2-30)
MQGTHWPYT

SEQ ID NO: 15230 - protein, 17 aa, Homo sapiens
  Heavy chain CDR3 for antibody 7615 (IGHV1-18)
ARERYYGSGNYKYNMDV

SEQ ID NO: 15231 - protein, 9 aa, Homo sapiens
  Light chain CDR3 for antibody 7616 (IGKV1-9)
QQLISYPLT

SEQ ID NO: 15232 - protein, 18 aa, Homo sapiens
  Heavy chain CDR3 for antibody 7616 (IGHV3-33)
ARERGYYGSDIYPAAFDI

SEQ ID NO: 15233 - protein, 9 aa, Homo sapiens
  Light chain CDR3 for antibody 7617 (IGKV5-2)
LQHDKFPYT

SEQ ID NO: 15234 - protein, 16 aa, Homo sapiens
  Heavy chain CDR3 for antibody 7617 (IGHV1-46)
ARGGGYSESYSNWFDP

SEQ ID NO: 15235 - protein, 8 aa, Homo sapiens
  Light chain CDR3 for antibody 7618 (IGKV1D-13)
QQFNNYPT

SEQ ID NO: 15236 - protein, 13 aa, Homo sapiens
  Heavy chain CDR3 for antibody 7618 (IGHV3-23)
AKDRGGSYSYFDF

SEQ ID NO: 15237 - protein, 9 aa, Homo sapiens
  Light chain CDR3 for antibody 7619 (IGKV1-6)
LQDYKSPFT

SEQ ID NO: 15238 - protein, 10 aa, Homo sapiens
  Heavy chain CDR3 for antibody 7619 (IGHV3-23)
AKGDRWRFDP

SEQ ID NO: 15239 - protein, 9 aa, Homo sapiens
  Light chain CDR3 for antibody 7620 (IGKV3-11)
QQRSNWPPT

SEQ ID NO: 15240 - protein, 15 aa, Homo sapiens
  Heavy chain CDR3 for antibody 7620 (IGHV1-24)
ATHWDLRYYYYGMDV

SEQ ID NO: 15241 - protein, 9 aa, Homo sapiens
  Light chain CDR3 for antibody 7621 (IGKV1-6)
LQDYKSPFT

SEQ ID NO: 15242 - protein, 12 aa, Homo sapiens
  Heavy chain CDR3 for antibody 7621 (IGHV1-46)
ARGLTGDHAVDI

SEQ ID NO: 15243 - protein, 11 aa, Homo sapiens
  Light chain CDR3 for antibody 7622 (IGKV3-11)
QQRSNWPPTWT

SEQ ID NO: 15244 - protein, 14 aa, Homo sapiens
  Heavy chain CDR3 for antibody 7622 (IGHV3-33)
ARAGSGYDRDWFDP

SEQ ID NO: 15245 - protein, 8 aa, Homo sapiens
  Light chain CDR3 for antibody 7623 (IGKV1-5)
QQYNSYWT

SEQ ID NO: 15246 - protein, 10 aa, Homo sapiens
  Heavy chain CDR3 for antibody 7623 (IGHV3-33)
ARDVVVYFDY

SEQ ID NO: 15247 - protein, 10 aa, Homo sapiens
  Light chain CDR3 for antibody 7624 (IGKV3-15)
QQYNNWPPLT

SEQ ID NO: 15248 - protein, 12 aa, Homo sapiens
  Heavy chain CDR3 for antibody 7624 (IGHV3-13)
AREAGIPDAFDI

SEQ ID NO: 15249 - protein, 9 aa, Homo sapiens
  Light chain CDR3 for antibody 7625 (IGKV1-33)
QQYDNLPRT

SEQ ID NO: 15250 - protein, 12 aa, Homo sapiens
  Heavy chain CDR3 for antibody 7625 (IGHV3-66)
ARDCLGIPSMDV

SEQ ID NO: 15251 - protein, 9 aa, Homo sapiens
  Light chain CDR3 for antibody 7626 (IGKV3D-20)
QQYGSSPWT

SEQ ID NO: 15252 - protein, 17 aa, Homo sapiens
  Heavy chain CDR3 for antibody 7626 (IGHV3-33)
ARGFSGYDGYYYYGMHV

SEQ ID NO: 15253 - protein, 9 aa, Homo sapiens
  Light chain CDR3 for antibody 7627 (IGKV1D-13)
QRFNNYLYT

SEQ ID NO: 15254 - protein, 14 aa, Homo sapiens
  Heavy chain CDR3 for antibody 7627 (IGHV3-33)
ARDREQQLVRYFDY

SEQ ID NO: 15255 - protein, 9 aa, Homo sapiens
  Light chain CDR3 for antibody 7628 (IGKV1-9)
QQLNSYPWT

SEQ ID NO: 15256 - protein, 16 aa, Homo sapiens
  Heavy chain CDR3 for antibody 7628 (IGHV4-59)
ARGRYFEWLLGDVFDI

SEQ ID NO: 15257 - protein, 9 aa, Homo sapiens
  Light chain CDR3 for antibody 7629 (IGKV1-16)
QQYNSYPYT

SEQ ID NO: 15258 - protein, 10 aa, Homo sapiens
  Heavy chain CDR3 for antibody 7629 (IGHV4-59)
ASSGTSLLAY

SEQ ID NO: 15259 - protein, 6 aa, Homo sapiens
  Light chain CDR3 for antibody 7630 (IGKV3-20)
QQYGST

SEQ ID NO: 15260 - protein, 13 aa, Homo sapiens
  Heavy chain CDR3 for antibody 7630 (IGHV3-33)
ARDWGYSHGYFDY

SEQ ID NO: 15261 - protein, 8 aa, Homo sapiens
  Light chain CDR3 for antibody 7631 (IGKV6-21)
HQSSSLPT

SEQ ID NO: 15262 - protein, 13 aa, Homo sapiens
  Heavy chain CDR3 for antibody 7631 (IGHV3-33)
ARGDNWNDGGFDY

SEQ ID NO: 15263 - protein, 8 aa, Homo sapiens
  Light chain CDR3 for antibody 7632 (IGKV3-20)
QQYGRSFT

SEQ ID NO: 15264 - protein, 15 aa, Homo sapiens
  Heavy chain CDR3 for antibody 7632 (IGHV1-18)
ARGYCSSTSCYYFDY

SEQ ID NO: 15265 - protein, 10 aa, Homo sapiens
  Light chain CDR3 for antibody 7633 (IGKV1-17)
LQHNSYPMYT

SEQ ID NO: 15266 - protein, 13 aa, Homo sapiens
  Heavy chain CDR3 for antibody 7633 (IGHV3-33)
ARTDYYFYYGLDV

SEQ ID NO: 15267 - protein, 9 aa, Homo sapiens
  Light chain CDR3 for antibody 7634 (IGKV3-20)
QQYGSSPRT

SEQ ID NO: 15268 - protein, 18 aa, Homo sapiens
  Heavy chain CDR3 for antibody 7634 (IGHV3-23)
AKERGYYGSGSYSNWFDP

SEQ ID NO: 15269 - protein, 9 aa, Homo sapiens
  Light chain CDR3 for antibody 7635 (IGKV1D-16)
QQYNSFPLT

SEQ ID NO: 15270 - protein, 16 aa, Homo sapiens
  Heavy chain CDR3 for antibody 7635 (IGHV4-59)
ARGRYCDWLLGDVFDI

SEQ ID NO: 15271 - protein, 9 aa, Homo sapiens
  Light chain CDR3 for antibody 7636 (IGKV1-6)
LQVHSYPWT

SEQ ID NO: 15272 - protein, 13 aa, Homo sapiens
  Heavy chain CDR3 for antibody 7636 (IGHV3-33)
ARGVLWFGELFDY

SEQ ID NO: 15273 - protein, 9 aa, Homo sapiens
  Light chain CDR3 for antibody 7637 (IGKV2-30)
MQGTHWPLT

SEQ ID NO: 15274 - protein, 15 aa, Homo sapiens
  Heavy chain CDR3 for antibody 7637 (IGHV3-23)
AKDRNYDFLTGPFDP

SEQ ID NO: 15275 - protein, 10 aa, Homo sapiens
  Light chain CDR3 for antibody 7638 (IGKV1-27)
QKYNSAPMYT

SEQ ID NO: 15276 - protein, 15 aa, Homo sapiens
  Heavy chain CDR3 for antibody 7638 (IGHV3-23)
AKDGSYYDYYYGMDV

SEQ ID NO: 15277 - protein, 9 aa, Homo sapiens
  Light chain CDR3 for antibody 7639 (IGKV1-39)
QQSYSTPFT

SEQ ID NO: 15278 - protein, 11 aa, Homo sapiens
  Heavy chain CDR3 for antibody 7639 (IGHV4-59)
ARESFYGSGNL

SEQ ID NO: 15279 - protein, 8 aa, Homo sapiens
  Light chain CDR3 for antibody 7640 (IGKV6-21)
HQSSSLPT

SEQ ID NO: 15280 - protein, 19 aa, Homo sapiens
  Heavy chain CDR3 for antibody 7640 (IGHV3-33)
AREDYYGSGSYYNEDWFDP

SEQ ID NO: 15281 - protein, 8 aa, Homo sapiens
  Light chain CDR3 for antibody 7641 (IGKV1D-13)
QQFNNYYT

SEQ ID NO: 15282 - protein, 15 aa, Homo sapiens
  Heavy chain CDR3 for antibody 7641 (IGHV3-23)
AKDGGWNYYYYGMDV

SEQ ID NO: 15283 - protein, 9 aa, Homo sapiens
  Light chain CDR3 for antibody 7642 (IGKV1-27)
QKYNSAPYT

SEQ ID NO: 15284 - protein, 14 aa, Homo sapiens
  Heavy chain CDR3 for antibody 7642 (IGHV3-33)
ARRGYSGYDWYFDY

SEQ ID NO: 15285 - protein, 9 aa, Homo sapiens
  Light chain CDR3 for antibody 7643 (IGKV6-21)
HQSSSLPYT

SEQ ID NO: 15286 - protein, 12 aa, Homo sapiens
  Heavy chain CDR3 for antibody 7643 (IGHV3-33)
AREGVMGYSGSY

SEQ ID NO: 15287 - protein, 8 aa, Homo sapiens
  Light chain CDR3 for antibody 7644 (IGKV1D-13)
QQFNNYYT

SEQ ID NO: 15288 - protein, 23 aa, Homo sapiens
  Heavy chain CDR3 for antibody 7644 (IGHV1-18)
ARNLHYDILTGYFPYYFYYGMDV

SEQ ID NO: 15289 - protein, 9 aa, Homo sapiens
  Light chain CDR3 for antibody 7645 (IGKV3-15)
QQYNNWPLT

SEQ ID NO: 15290 - protein, 17 aa, Homo sapiens
  Heavy chain CDR3 for antibody 7645 (IGHV3-23)
AKDGIGELSYYYYGMDV

SEQ ID NO: 15291 - protein, 9 aa, Homo sapiens
  Light chain CDR3 for antibody 7646 (IGKV1-16)
QQHNSYPYT

SEQ ID NO: 15292 - protein, 12 aa, Homo sapiens
  Heavy chain CDR3 for antibody 7646 (IGHV3-33)
ARKKWEEGAFDI

SEQ ID NO: 15293 - protein, 10 aa, Homo sapiens
  Light chain CDR3 for antibody 7647 (IGKV3-11)
QQRSNWPIYT

SEQ ID NO: 15294 - protein, 17 aa, Homo sapiens
  Heavy chain CDR3 for antibody 7647 (IGHV4-39)
ARVLRYFDWLSHDAFDI

SEQ ID NO: 15295 - protein, 8 aa, Homo sapiens
  Light chain CDR3 for antibody 7648 (IGKV1-5)
QQYNSYWT

SEQ ID NO: 15296 - protein, 17 aa, Homo sapiens
  Heavy chain CDR3 for antibody 7648 (IGHV3-33)
ARDPARGNVRSFYGLDV

SEQ ID NO: 15297 - protein, 9 aa, Homo sapiens
  Light chain CDR3 for antibody 7649 (IGKV6-21)
LQSSSLLYT

SEQ ID NO: 15298 - protein, 12 aa, Homo sapiens
  Heavy chain CDR3 for antibody 7649 (IGHV3-33)
TRGYSSKSYFDY

SEQ ID NO: 15299 - protein, 9 aa, Homo sapiens
  Light chain CDR3 for antibody 7650 (IGKV3D-20)
QQYGNSPRT

SEQ ID NO: 15300 - protein, 16 aa, Homo sapiens
  Heavy chain CDR3 for antibody 7650 (IGHV3-33)
ARGYDMLTGDYHGMDV

SEQ ID NO: 15301 - protein, 9 aa, Homo sapiens
  Light chain CDR3 for antibody 7651 (IGKV1-16)
QQYHSYPYT

SEQ ID NO: 15302 - protein, 16 aa, Homo sapiens
  Heavy chain CDR3 for antibody 7651 (IGHV1-24)
TTEGGTVDYYYYGMDV

SEQ ID NO: 15303 - protein, 9 aa, Homo sapiens
  Light chain CDR3 for antibody 7652 (IGKV1-27)
QKYNSAPYT

SEQ ID NO: 15304 - protein, 12 aa, Homo sapiens
  Heavy chain CDR3 for antibody 7652 (IGHV1-18)
AGVLFDGDYFDY

SEQ ID NO: 15305 - protein, 9 aa, Homo sapiens
  Light chain CDR3 for antibody 7653 (IGKV1-39)
QQSYRTPLT

SEQ ID NO: 15306 - protein, 14 aa, Homo sapiens
  Heavy chain CDR3 for antibody 7653 (IGHV3-23)
ARGRRDFYYYGMDV

SEQ ID NO: 15307 - protein, 9 aa, Homo sapiens
  Light chain CDR3 for antibody 7654 (IGKV1-6)
LQDYNYPFT

SEQ ID NO: 15308 - protein, 15 aa, Homo sapiens
  Heavy chain CDR3 for antibody 7654 (IGHV3-23)
ARRVCSGGSCALFDY

SEQ ID NO: 15309 - protein, 9 aa, Homo sapiens
  Light chain CDR3 for antibody 7655 (IGKV1-9)
QQLNNYLFT

SEQ ID NO: 15310 - protein, 13 aa, Homo sapiens
  Heavy chain CDR3 for antibody 7655 (IGHV3-33)
ARDQRYSSGWYDY

SEQ ID NO: 15311 - protein, 9 aa, Homo sapiens
  Light chain CDR3 for antibody 7656 (IGKV1-17)
LQYNSYPWT

SEQ ID NO: 15312 - protein, 14 aa, Homo sapiens
  Heavy chain CDR3 for antibody 7656 (IGHV3-33)
ARDGYDILTGPFDY

SEQ ID NO: 15313 - protein, 10 aa, Homo sapiens
  Light chain CDR3 for antibody 7657 (IGKV1-27)
QKYNSAPMYT

SEQ ID NO: 15314 - protein, 11 aa, Homo sapiens
  Heavy chain CDR3 for antibody 7657 (IGHV3-33)
AREAANWGFDY

SEQ ID NO: 15315 - protein, 9 aa, Homo sapiens
  Light chain CDR3 for antibody 7658 (IGKV2D-28)
MQALQTPPT

SEQ ID NO: 15316 - protein, 18 aa, Homo sapiens
  Heavy chain CDR3 for antibody 7658 (IGHV4-39)
ARQYYFGSGNYYRGWFDP

SEQ ID NO: 15317 - protein, 11 aa, Homo sapiens
  Light chain CDR3 for antibody 7659 (IGKV3-11)
QQRSNWPPTWT

SEQ ID NO: 15318 - protein, 11 aa, Homo sapiens
  Heavy chain CDR3 for antibody 7659 (IGHV1-46)
AREEDLGAFDI

SEQ ID NO: 15319 - protein, 9 aa, Homo sapiens
  Light chain CDR3 for antibody 7660 (IGKV1-6)
LQDYNYPYT

SEQ ID NO: 15320 - protein, 14 aa, Homo sapiens
  Heavy chain CDR3 for antibody 7660 (IGHV1-18)
ARDEGSTWSDIFDI

SEQ ID NO: 15321 - protein, 9 aa, Homo sapiens
  Light chain CDR3 for antibody 7661 (IGKV4-1)
QQYYTTPPT

SEQ ID NO: 15322 - protein, 14 aa, Homo sapiens
  Heavy chain CDR3 for antibody 7661 (IGHV3-66)
ARAGSGYDRDWFDP

SEQ ID NO: 15323 - protein, 10 aa, Homo sapiens
  Light chain CDR3 for antibody 7662 (IGKV1-27)
QKYNSAPMYT

SEQ ID NO: 15324 - protein, 13 aa, Homo sapiens
  Heavy chain CDR3 for antibody 7662 (IGHV4-39)
ARQWPSGYWYFDL

SEQ ID NO: 15325 - protein, 8 aa, Homo sapiens
  Light chain CDR3 for antibody 7663 (IGKV3D-7)
QQDYNLLT

SEQ ID NO: 15326 - protein, 17 aa, Homo sapiens
  Heavy chain CDR3 for antibody 7663 (IGHV3-23)
AKDYDILTGYSHNWFDP

SEQ ID NO: 15327 - protein, 9 aa, Homo sapiens
  Light chain CDR3 for antibody 7664 (IGKV1-5)
QQYNTYSRT

SEQ ID NO: 15328 - protein, 13 aa, Homo sapiens
  Heavy chain CDR3 for antibody 7664 (IGHV3-33)
ARDWGYSHGYFDY

SEQ ID NO: 15329 - protein, 9 aa, Homo sapiens
  Light chain CDR3 for antibody 7665 (IGKV1-16)
QHYNDYPFT

SEQ ID NO: 15330 - protein, 9 aa, Homo sapiens
  Heavy chain CDR3 for antibody 7665 (IGHV3-30)
ARDYFHYDY

SEQ ID NO: 15331 - protein, 10 aa, Homo sapiens
  Light chain CDR3 for antibody 7666 (IGKV3-11)
QQRSNWPILT

SEQ ID NO: 15332 - protein, 15 aa, Homo sapiens
  Heavy chain CDR3 for antibody 7666 (IGHV3-33)
ARRGYNDYDPYGMDV

SEQ ID NO: 15333 - protein, 8 aa, Homo sapiens
  Light chain CDR3 for antibody 7667 (IGKV3D-7)
QQDYNLLT

SEQ ID NO: 15334 - protein, 16 aa, Homo sapiens
  Heavy chain CDR3 for antibody 7667 (IGHV3-33)
ARGDDILTHQYYGVDV

SEQ ID NO: 15335 - protein, 9 aa, Homo sapiens
  Light chain CDR3 for antibody 7668 (IGKV3-20)
QQYGSSPYT

SEQ ID NO: 15336 - protein, 18 aa, Homo sapiens
  Heavy chain CDR3 for antibody 7668 (IGHV3-23)
AKDGDYFGSGSYWGYFDL

SEQ ID NO: 15337 - protein, 8 aa, Homo sapiens
  Light chain CDR3 for antibody 7669 (IGKV6-21)
HQSSSLPT

SEQ ID NO: 15338 - protein, 17 aa, Homo sapiens
  Heavy chain CDR3 for antibody 7669 (IGHV3-33)
ARVRGVIEGYYYYGMDV

SEQ ID NO: 15339 - protein, 9 aa, Homo sapiens
  Light chain CDR3 for antibody 7670 (IGKV3-20)
QQYGSSPYT

SEQ ID NO: 15340 - protein, 15 aa, Homo sapiens
  Heavy chain CDR3 for antibody 7670 (IGHV3-23)
AKDGSYSYYYYGMDV

SEQ ID NO: 15341 - protein, 9 aa, Homo sapiens
  Light chain CDR3 for antibody 7671 (IGKV3D-7)
QQDYNLPRT

SEQ ID NO: 15342 - protein, 13 aa, Homo sapiens
  Heavy chain CDR3 for antibody 7671 (IGHV3-11)
ARDEGYSGYNLDN

SEQ ID NO: 15343 - protein, 9 aa, Homo sapiens
  Light chain CDR3 for antibody 7672 (IGKV1-9)
QQLKSYPYT

SEQ ID NO: 15344 - protein, 17 aa, Homo sapiens
  Heavy chain CDR3 for antibody 7672 (IGHV3-15)
TTERYPRRYYYYFGMDV

SEQ ID NO: 15345 - protein, 8 aa, Homo sapiens
  Light chain CDR3 for antibody 7673 (IGKV3-11)
QQRSNWWT

SEQ ID NO: 15346 - protein, 14 aa, Homo sapiens
  Heavy chain CDR3 for antibody 7673 (IGHV3-33)
ARRGSPLRPSHLDV

SEQ ID NO: 15347 - protein, 9 aa, Homo sapiens
  Light chain CDR3 for antibody 7674 (IGKV1-39)
QQSYSTPFT

SEQ ID NO: 15348 - protein, 16 aa, Homo sapiens
  Heavy chain CDR3 for antibody 7674 (IGHV4-59)
AGGSGSYRDYYYGMDV

SEQ ID NO: 15349 - protein, 10 aa, Homo sapiens
  Light chain CDR3 for antibody 7675 (IGKV1-39)
QQSYSTPMYT

SEQ ID NO: 15350 - protein, 20 aa, Homo sapiens
  Heavy chain CDR3 for antibody 7675 (IGHV3-33)
SRGGATLVRGVIDYYYGMDV

SEQ ID NO: 15351 - protein, 9 aa, Homo sapiens
  Light chain CDR3 for antibody 7676 (IGKV3-15)
QQYNNWPFT

SEQ ID NO: 15352 - protein, 18 aa, Homo sapiens
  Heavy chain CDR3 for antibody 7676 (IGHV1-8)
ARSRIAAAGIYYYYGMDV

SEQ ID NO: 15353 - protein, 8 aa, Homo sapiens
  Light chain CDR3 for antibody 7677 (IGKV1-5)
QQYNSYWT

SEQ ID NO: 15354 - protein, 19 aa, Homo sapiens
  Heavy chain CDR3 for antibody 7677 (IGHV4-59)
ARDRVVGATTYYYYYGMDV

SEQ ID NO: 15355 - protein, 9 aa, Homo sapiens
  Light chain CDR3 for antibody 7678 (IGKV5-2)
LQHDNFPYT

SEQ ID NO: 15356 - protein, 18 aa, Homo sapiens
  Heavy chain CDR3 for antibody 7678 (IGHV1-46)
ARDGGITMVRGILRGMDV

SEQ ID NO: 15357 - protein, 9 aa, Homo sapiens
  Light chain CDR3 for antibody 7679 (IGKV1-39)
QQSYRTPLT

SEQ ID NO: 15358 - protein, 13 aa, Homo sapiens
  Heavy chain CDR3 for antibody 7679 (IGHV3-33)
ARDPLYSGSYFDY

SEQ ID NO: 15359 - protein, 8 aa, Homo sapiens
  Light chain CDR3 for antibody 7680 (IGKV3-15)
QQYNNWWT

SEQ ID NO: 15360 - protein, 15 aa, Homo sapiens
  Heavy chain CDR3 for antibody 7680 (IGHV1-18)
ARIYYGSGSSYYFDY

SEQ ID NO: 15361 - protein, 9 aa, Homo sapiens
  Light chain CDR3 for antibody 7681 (IGKV3D-7)
QQDSNLPYT

SEQ ID NO: 15362 - protein, 13 aa, Homo sapiens
  Heavy chain CDR3 for antibody 7681 (IGHV3-11)
ARDGGAAAGTWDS

SEQ ID NO: 15363 - protein, 10 aa, Homo sapiens
  Light chain CDR3 for antibody 7682 (IGKV3-15)
QQYNNWPPIT

SEQ ID NO: 15364 - protein, 13 aa, Homo sapiens
  Heavy chain CDR3 for antibody 7682 (IGHV3-53)
ARSGSYWGYYFDY

SEQ ID NO: 15365 - protein, 9 aa, Homo sapiens
  Light chain CDR3 for antibody 7683 (IGKV3D-20)
QQYGSSPYT

SEQ ID NO: 15366 - protein, 13 aa, Homo sapiens
  Heavy chain CDR3 for antibody 7683 (IGHV3-33)
ARDPLYSGSYFDY

SEQ ID NO: 15367 - protein, 9 aa, Homo sapiens
  Light chain CDR3 for antibody 7684 (IGKV3D-7)
QQDYNLPWT

SEQ ID NO: 15368 - protein, 16 aa, Homo sapiens
  Heavy chain CDR3 for antibody 7684 (IGHV4-39)
ARHPLIWTGYPNWFDP

SEQ ID NO: 15369 - protein, 9 aa, Homo sapiens
  Light chain CDR3 for antibody 7685 (IGKV1-6)
LQDYKSPFT

SEQ ID NO: 15370 - protein, 13 aa, Homo sapiens
  Heavy chain CDR3 for antibody 7685 (IGHV3-33)
ARGVLWFGELFDY

SEQ ID NO: 15371 - protein, 9 aa, Homo sapiens
  Light chain CDR3 for antibody 7686 (IGKV3-11)
QQRSNWPPT

SEQ ID NO: 15372 - protein, 12 aa, Homo sapiens
  Heavy chain CDR3 for antibody 7686 (IGHV3-33)
ARVDTAAPYFDY

SEQ ID NO: 15373 - protein, 9 aa, Homo sapiens
  Light chain CDR3 for antibody 7687 (IGKV1D-13)
QQFNNYPHT

SEQ ID NO: 15374 - protein, 17 aa, Homo sapiens
  Heavy chain CDR3 for antibody 7687 (IGHV4-59)
ARRITMVREIIITAFDY

SEQ ID NO: 15375 - protein, 9 aa, Homo sapiens
  Light chain CDR3 for antibody 7688 (IGKV1-6)
LQDYNYPYT

SEQ ID NO: 15376 - protein, 12 aa, Homo sapiens
  Heavy chain CDR3 for antibody 7688 (IGHV6-1)
ARLDWNYRAFDI

SEQ ID NO: 15377 - protein, 10 aa, Homo sapiens
  Light chain CDR3 for antibody 7689 (IGKV3-20)
QQYGRSPPVT

SEQ ID NO: 15378 - protein, 11 aa, Homo sapiens
  Heavy chain CDR3 for antibody 7689 (IGHV3-33)
ARDRVLTPFDY

SEQ ID NO: 15379 - protein, 9 aa, Homo sapiens
  Light chain CDR3 for antibody 7690 (IGKV1-9)
QQLNSYPRT

SEQ ID NO: 15380 - protein, 18 aa, Homo sapiens
  Heavy chain CDR3 for antibody 7690 (IGHV4-39)
VKYITMVRGDIITGPFAY

SEQ ID NO: 15381 - protein, 8 aa, Homo sapiens
  Light chain CDR3 for antibody 7691 (IGKV3D-7)
QQDYNLLT

SEQ ID NO: 15382 - protein, 17 aa, Homo sapiens
  Heavy chain CDR3 for antibody 7691 (IGHV3-33)
ARQGVLLWFGELYYFDY

SEQ ID NO: 15383 - protein, 10 aa, Homo sapiens
  Light chain CDR3 for antibody 7692 (IGKV1-17)
LQHNSYPMYT

SEQ ID NO: 15384 - protein, 13 aa, Homo sapiens
  Heavy chain CDR3 for antibody 7692 (IGHV3-33)
ARAFTMVRGVIDY

SEQ ID NO: 15385 - protein, 9 aa, Homo sapiens
  Light chain CDR3 for antibody 7693 (IGKV1-6)
LQDYKSPFT

SEQ ID NO: 15386 - protein, 18 aa, Homo sapiens
  Heavy chain CDR3 for antibody 7693 (IGHV3-23)
AKERGYYGSGSYSNWFDP

SEQ ID NO: 15387 - protein, 9 aa, Homo sapiens
  Light chain CDR3 for antibody 7694 (IGKV1D-16)
QQYAGYPPT

SEQ ID NO: 15388 - protein, 11 aa, Homo sapiens
  Heavy chain CDR3 for antibody 7694 (IGHV4-39)
ARSLRYSVFDY

SEQ ID NO: 15389 - protein, 10 aa, Homo sapiens
  Light chain CDR3 for antibody 7695 (IGKV3-11)
QQRSNWPILT

SEQ ID NO: 15390 - protein, 18 aa, Homo sapiens
  Heavy chain CDR3 for antibody 7695 (IGHV3-33)
ARKGGYYSGSGSYRHFDF

SEQ ID NO: 15391 - protein, 10 aa, Homo sapiens
  Light chain CDR3 for antibody 7696 (IGKV1-17)
LQHNSYPMYT

SEQ ID NO: 15392 - protein, 14 aa, Homo sapiens
  Heavy chain CDR3 for antibody 7696 (IGHV3-33)
ARRGYSGYDWYFDY

SEQ ID NO: 15393 - protein, 9 aa, Homo sapiens
  Light chain CDR3 for antibody 7697 (IGKV1-9)
QQLNTYPYT

SEQ ID NO: 15394 - protein, 10 aa, Homo sapiens
  Heavy chain CDR3 for antibody 7697 (IGHV3-33)
AREWFGGFDI

SEQ ID NO: 15395 - protein, 9 aa, Homo sapiens
  Light chain CDR3 for antibody 7698 (IGKV1D-16)
QQYHSYPYT

SEQ ID NO: 15396 - protein, 10 aa, Homo sapiens
  Heavy chain CDR3 for antibody 7698 (IGHV3-13)
ARDRGSYYDY

SEQ ID NO: 15397 - protein, 9 aa, Homo sapiens
  Light chain CDR3 for antibody 7699 (IGKV1D-13)
QQFNNYPYT

SEQ ID NO: 15398 - protein, 15 aa, Homo sapiens
  Heavy chain CDR3 for antibody 7699 (IGHV3-33)
ARRICSGGSCSLFEY

SEQ ID NO: 15399 - protein, 9 aa, Homo sapiens
  Light chain CDR3 for antibody 7700 (IGKV3D-7)
QQDYNLPYS

SEQ ID NO: 15400 - protein, 19 aa, Homo sapiens
  Heavy chain CDR3 for antibody 7700 (IGHV1-18)
ARDDILTGYSLYYYYGMDV

SEQ ID NO: 15401 - protein, 10 aa, Homo sapiens
  Light chain CDR3 for antibody 7701 (IGKV3-11)
QQRSNWPIFT

SEQ ID NO: 15402 - protein, 10 aa, Homo sapiens
  Heavy chain CDR3 for antibody 7701 (IGHV3-23)
AKENWNDFDY

SEQ ID NO: 15403 - protein, 10 aa, Homo sapiens
  Light chain CDR3 for antibody 7702 (IGKV3-11)
QQRSNWPALT

SEQ ID NO: 15404 - protein, 19 aa, Homo sapiens
  Heavy chain CDR3 for antibody 7702 (IGHV3-23)
AKDGRSGSYDYYYYYGMDV

SEQ ID NO: 15405 - protein, 9 aa, Homo sapiens
  Light chain CDR3 for antibody 7703 (IGKV3-15)
QQYHNWPLT

SEQ ID NO: 15406 - protein, 17 aa, Homo sapiens
  Heavy chain CDR3 for antibody 7703 (IGHV3-33)
ARGGGYENDHYYYGMDV

SEQ ID NO: 15407 - protein, 9 aa, Homo sapiens
  Light chain CDR3 for antibody 7704 (IGKV5-2)
LQHDKFPYT

SEQ ID NO: 15408 - protein, 14 aa, Homo sapiens
  Heavy chain CDR3 for antibody 7704 (IGHV3-23)
ARGRRDFYYYGMDV

SEQ ID NO: 15409 - protein, 10 aa, Homo sapiens
  Light chain CDR3 for antibody 7705 (IGKV3-11)
QQRSNWLMYT

SEQ ID NO: 15410 - protein, 14 aa, Homo sapiens
  Heavy chain CDR3 for antibody 7705 (IGHV3-33)
ARGAAAGNFYGLDV

SEQ ID NO: 15411 - protein, 9 aa, Homo sapiens
  Light chain CDR3 for antibody 7706 (IGKV1-9)
QQLNTYPWT

SEQ ID NO: 15412 - protein, 17 aa, Homo sapiens
  Heavy chain CDR3 for antibody 7706 (IGHV3-33)
ARGFSGYDGYYYYGMDV

SEQ ID NO: 15413 - protein, 9 aa, Homo sapiens
  Light chain CDR3 for antibody 7707 (IGKV3D-7)
QQDYNLPFT

SEQ ID NO: 15414 - protein, 15 aa, Homo sapiens
  Heavy chain CDR3 for antibody 7707 (IGHV4-39)
ARRDYDILTGYLFDY

SEQ ID NO: 15415 - protein, 11 aa, Homo sapiens
  Light chain CDR3 for antibody 7708 (IGKV3-11)
QQRSNWPPTWT

SEQ ID NO: 15416 - protein, 12 aa, Homo sapiens
  Heavy chain CDR3 for antibody 7708 (IGHV3-33)
TRGYSSKSYFDY

SEQ ID NO: 15417 - protein, 9 aa, Homo sapiens
  Light chain CDR3 for antibody 7709 (IGKV3D-20)
QQHGNSPLT

SEQ ID NO: 15418 - protein, 12 aa, Homo sapiens
  Heavy chain CDR3 for antibody 7709 (IGHV4-61)
ARVYSSGWLFDY

SEQ ID NO: 15419 - protein, 9 aa, Homo sapiens
  Light chain CDR3 for antibody 7710 (IGKV5-2)
LQHDNFPWT

SEQ ID NO: 15420 - protein, 16 aa, Homo sapiens
  Heavy chain CDR3 for antibody 7710 (IGHV1-8)
ARGHYYGSGSYYNFDY

SEQ ID NO: 15421 - protein, 9 aa, Homo sapiens
  Light chain CDR3 for antibody 7711 (IGKV1-16)
QQYNSYPYT

SEQ ID NO: 15422 - protein, 12 aa, Homo sapiens
  Heavy chain CDR3 for antibody 7711 (IGHV3-33)
ARVIDWLKPMDV

SEQ ID NO: 15423 - protein, 9 aa, Homo sapiens
  Light chain CDR3 for antibody 7712 (IGKV1-27)
QKYNSAPYT

SEQ ID NO: 15424 - protein, 12 aa, Homo sapiens
  Heavy chain CDR3 for antibody 7712 (IGHV3-33)
ARDGPVAGLFDY

SEQ ID NO: 15425 - protein, 8 aa, Homo sapiens
  Light chain CDR3 for antibody 7713 (IGKV3-11)
LQRGNWPT

SEQ ID NO: 15426 - protein, 15 aa, Homo sapiens
  Heavy chain CDR3 for antibody 7713 (IGHV3-33)
ARDTGYSSSWNWFDP

SEQ ID NO: 15427 - protein, 9 aa, Homo sapiens
  Light chain CDR3 for antibody 7714 (IGKV1-6)
LQDYNYPRT

SEQ ID NO: 15428 - protein, 14 aa, Homo sapiens
  Heavy chain CDR3 for antibody 7714 (IGHV3-23)
AKSRIVGALYYFGY

SEQ ID NO: 15429 - protein, 8 aa, Homo sapiens
  Light chain CDR3 for antibody 7715 (IGKV1D-13)
QQFNNYPT

SEQ ID NO: 15430 - protein, 14 aa, Homo sapiens
  Heavy chain CDR3 for antibody 7715 (IGHV3-33)
AREMVRGVPNWFDP

SEQ ID NO: 15431 - protein, 9 aa, Homo sapiens
  Light chain CDR3 for antibody 7716 (IGKV2D-28)
MQALQTPWT

SEQ ID NO: 15432 - protein, 17 aa, Homo sapiens
  Heavy chain CDR3 for antibody 7716 (IGHV3-33)
ARVQYDILTGYSPYFDN

SEQ ID NO: 15433 - protein, 9 aa, Homo sapiens
  Light chain CDR3 for antibody 7717 (IGKV3D-7)
QQDYNLPYT

SEQ ID NO: 15434 - protein, 12 aa, Homo sapiens
  Heavy chain CDR3 for antibody 7717 (IGHV3-13)
AIGTMVRGIPDY

SEQ ID NO: 15435 - protein, 10 aa, Homo sapiens
  Light chain CDR3 for antibody 7718 (IGKV3-15)
QQYNNWPPIT

SEQ ID NO: 15436 - protein, 19 aa, Homo sapiens
  Heavy chain CDR3 for antibody 7718 (IGHV1-18)
ARDDILTGYSLYYYYGMDV

SEQ ID NO: 15437 - protein, 10 aa, Homo sapiens
  Light chain CDR3 for antibody 7719 (IGKV3-20)
QQYGRSPPVT

SEQ ID NO: 15438 - protein, 17 aa, Homo sapiens
  Heavy chain CDR3 for antibody 7719 (IGHV1-18)
ARDEGYDILTGYPHFDY

SEQ ID NO: 15439 - protein, 9 aa, Homo sapiens
  Light chain CDR3 for antibody 7720 (IGKV2-30)
MQGTHWPLT

SEQ ID NO: 15440 - protein, 17 aa, Homo sapiens
  Heavy chain CDR3 for antibody 7720 (IGHV3-33)
ARKDYGILSGYYSPFDY

SEQ ID NO: 15441 - protein, 9 aa, Homo sapiens
  Light chain CDR3 for antibody 7721 (IGKV3-11)
QQRSNWPPT

SEQ ID NO: 15442 - protein, 15 aa, Homo sapiens
  Heavy chain CDR3 for antibody 7721 (IGHV1-46)
ARGRFFDWLLSPFDY

SEQ ID NO: 15443 - protein, 8 aa, Homo sapiens
  Light chain CDR3 for antibody 7722 (IGKV3D-7)
QQDYNLLT

SEQ ID NO: 15444 - protein, 12 aa, Homo sapiens
  Heavy chain CDR3 for antibody 7722 (IGHV3-33)
AREGTRWVYFDY

SEQ ID NO: 15445 - protein, 10 aa, Homo sapiens
  Light chain CDR3 for antibody 7723 (IGKV3-11)
QQRSNWPIFT

SEQ ID NO: 15446 - protein, 18 aa, Homo sapiens
  Heavy chain CDR3 for antibody 7723 (IGHV3-33)
ARGGVLYDILTGFYGMDV

SEQ ID NO: 15447 - protein, 9 aa, Homo sapiens
  Light chain CDR3 for antibody 7724 (IGKV1-17)
LQHNSYPPT

SEQ ID NO: 15448 - protein, 16 aa, Homo sapiens
  Heavy chain CDR3 for antibody 7724 (IGHV3-23)
AKDLRYFDWSLYAFDI

SEQ ID NO: 15449 - protein, 10 aa, Homo sapiens
  Light chain CDR3 for antibody 7725 (IGKV3-11)
QQRSNWPIFT

SEQ ID NO: 15450 - protein, 12 aa, Homo sapiens
  Heavy chain CDR3 for antibody 7725 (IGHV3-33)
ARNYDILDYFDY

SEQ ID NO: 15451 - protein, 9 aa, Homo sapiens
  Light chain CDR3 for antibody 7726 (IGKV1-37)
QRTYNAPFT

SEQ ID NO: 15452 - protein, 11 aa, Homo sapiens
  Heavy chain CDR3 for antibody 7726 (IGHV3-33)
ARDRVLTPFDY

SEQ ID NO: 15453 - protein, 9 aa, Homo sapiens
  Light chain CDR3 for antibody 7727 (IGKV1-33)
QQYDNLPFT

SEQ ID NO: 15454 - protein, 13 aa, Homo sapiens
  Heavy chain CDR3 for antibody 7727 (IGHV3-33)
ARRYRSGWYPFDY

SEQ ID NO: 15455 - protein, 10 aa, Homo sapiens
  Light chain CDR3 for antibody 7728 (IGKV3-15)
QQYNNWPPIT

SEQ ID NO: 15456 - protein, 10 aa, Homo sapiens
  Heavy chain CDR3 for antibody 7728 (IGHV3-74)
ARENWGGFDY

SEQ ID NO: 15457 - protein, 9 aa, Homo sapiens
  Light chain CDR3 for antibody 7729 (IGKV3D-7)
QQDYKLPLT

SEQ ID NO: 15458 - protein, 8 aa, Homo sapiens
  Heavy chain CDR3 for antibody 7729 (IGHV4-39)
ARRGGLDY

SEQ ID NO: 15459 - protein, 8 aa, Homo sapiens
  Light chain CDR3 for antibody 7730 (IGKV3-11)
QQRRNWLT

SEQ ID NO: 15460 - protein, 12 aa, Homo sapiens
  Heavy chain CDR3 for antibody 7730 (IGHV3-13)
AREAGIPDAFDI

SEQ ID NO: 15461 - protein, 9 aa, Homo sapiens
  Light chain CDR3 for antibody 7731 (IGKV3-11)
QQRSNWQYT

SEQ ID NO: 15462 - protein, 11 aa, Homo sapiens
  Heavy chain CDR3 for antibody 7731 (IGHV3-23)
AKGLWSYYFDY

SEQ ID NO: 15463 - protein, 9 aa, Homo sapiens
  Light chain CDR3 for antibody 7732 (IGKV1-6)
LQDYSYPWT

SEQ ID NO: 15464 - protein, 16 aa, Homo sapiens
  Heavy chain CDR3 for antibody 7732 (IGHV4-59)
ARDTPYYSGSGRPFDH

SEQ ID NO: 15465 - protein, 8 aa, Homo sapiens
  Light chain CDR3 for antibody 7733 (IGKV1-13)
QQFNNYPT

SEQ ID NO: 15466 - protein, 20 aa, Homo sapiens
  Heavy chain CDR3 for antibody 7733 (IGHV3-33)
ARDRCSSTSCYGYYYYGMDV

SEQ ID NO: 15467 - protein, 9 aa, Homo sapiens
  Light chain CDR3 for antibody 7734 (IGKV3-15)
QQYNNWPRT

SEQ ID NO: 15468 - protein, 17 aa, Homo sapiens
  Heavy chain CDR3 for antibody 7734 (IGHV3-33)
ARVQYDILTGYSPYFDN

SEQ ID NO: 15469 - protein, 9 aa, Homo sapiens
  Light chain CDR3 for antibody 7735 (IGKV1-6)
LQDYNYPYT

SEQ ID NO: 15470 - protein, 9 aa, Homo sapiens
  Heavy chain CDR3 for antibody 7735 (IGHV3-30)
ARDDYGVDA

SEQ ID NO: 15471 - protein, 10 aa, Homo sapiens
  Light chain CDR3 for antibody 7736 (IGKV3-15)
QQYNNWPPIT

SEQ ID NO: 15472 - protein, 9 aa, Homo sapiens
  Heavy chain CDR3 for antibody 7736 (IGHV1-8)
ARGRLDFDY

SEQ ID NO: 15473 - protein, 9 aa, Homo sapiens
  Light chain CDR3 for antibody 7737 (IGKV1D-13)
QQFNNYPYT

SEQ ID NO: 15474 - protein, 16 aa, Homo sapiens
  Heavy chain CDR3 for antibody 7737 (IGHV3-33)
ARIAAPGSEYYYGMDV

SEQ ID NO: 15475 - protein, 9 aa, Homo sapiens
  Light chain CDR3 for antibody 7738 (IGKV1-27)
QKYNSAPYT

SEQ ID NO: 15476 - protein, 22 aa, Homo sapiens
  Heavy chain CDR3 for antibody 7738 (IGHV3-11)
AREAYYDILTGYYTGYYYGMDV

SEQ ID NO: 15477 - protein, 9 aa, Homo sapiens
  Light chain CDR3 for antibody 7739 (IGKV1-5)
QQYNTYSRT

SEQ ID NO: 15478 - protein, 10 aa, Homo sapiens
  Heavy chain CDR3 for antibody 7739 (IGHV3-33)
ARDGSGSQPI

SEQ ID NO: 15479 - protein, 8 aa, Homo sapiens
  Light chain CDR3 for antibody 7740 (IGKV3D-7)
QQDYNLVT

SEQ ID NO: 15480 - protein, 18 aa, Homo sapiens
  Heavy chain CDR3 for antibody 7740 (IGHV6-1)
ARDQYSYGPYYYYYGMDV

SEQ ID NO: 15481 - protein, 10 aa, Homo sapiens
  Light chain CDR3 for antibody 7741 (IGKV1-17)
LQHNSYPMYT

SEQ ID NO: 15482 - protein, 8 aa, Homo sapiens
  Heavy chain CDR3 for antibody 7741 (IGHV3-23)
EKSAGEDV

SEQ ID NO: 15483 - protein, 9 aa, Homo sapiens
  Light chain CDR3 for antibody 7742 (IGKV2-30)
MQGTHWPLT

SEQ ID NO: 15484 - protein, 14 aa, Homo sapiens
  Heavy chain CDR3 for antibody 7742 (IGHV4-39)
ARHGYYGSSNWFDP

SEQ ID NO: 15485 - protein, 9 aa, Homo sapiens
  Light chain CDR3 for antibody 7743 (IGKV1-6)
LQDYNYPYT

SEQ ID NO: 15486 - protein, 13 aa, Homo sapiens
  Heavy chain CDR3 for antibody 7743 (IGHV3-21)
AKEGSAPGPDFEY

SEQ ID NO: 15487 - protein, 9 aa, Homo sapiens
  Light chain CDR3 for antibody 7744 (IGKV6-21)
HQSSSLPLT

SEQ ID NO: 15488 - protein, 14 aa, Homo sapiens
  Heavy chain CDR3 for antibody 7744 (IGHV3-33)
ARGLEWGGDNWFDP

SEQ ID NO: 15489 - protein, 9 aa, Homo sapiens
  Light chain CDR3 for antibody 7745 (IGKV1-27)
QKYNSAPYT

SEQ ID NO: 15490 - protein, 14 aa, Homo sapiens
  Heavy chain CDR3 for antibody 7745 (IGHV1-46)
ARAYYAFLTGAFDI

SEQ ID NO: 15491 - protein, 9 aa, Homo sapiens
  Light chain CDR3 for antibody 7746 (IGKV1-6)
LQVYNYPWT

SEQ ID NO: 15492 - protein, 10 aa, Homo sapiens
  Heavy chain CDR3 for antibody 7746 (IGHV3-33)
VRDVVVYFDY

SEQ ID NO: 15493 - protein, 9 aa, Homo sapiens
  Light chain CDR3 for antibody 7747 (IGKV2D-28)
MQVLQTPFT

SEQ ID NO: 15494 - protein, 11 aa, Homo sapiens
  Heavy chain CDR3 for antibody 7747 (IGHV4-4)
AREAYYYGLDV

SEQ ID NO: 15495 - protein, 10 aa, Homo sapiens
  Light chain CDR3 for antibody 7748 (IGKV3-11)
QQRSNWPALT

SEQ ID NO: 15496 - protein, 13 aa, Homo sapiens
  Heavy chain CDR3 for antibody 7748 (IGHV3-33)
ASAGNSYYNVMDV

SEQ ID NO: 15497 - protein, 9 aa, Homo sapiens
  Light chain CDR3 for antibody 7749 (IGKV1D-16)
QQYNSFPLT

SEQ ID NO: 15498 - protein, 9 aa, Homo sapiens
  Heavy chain CDR3 for antibody 7749 (IGHV1-18)
ARGKDWFDP

SEQ ID NO: 15499 - protein, 10 aa, Homo sapiens
  Light chain CDR3 for antibody 7750 (IGKV3-15)
QQYNNWPPLT

SEQ ID NO: 15500 - protein, 15 aa, Homo sapiens
  Heavy chain CDR3 for antibody 7750 (IGHV3-33)
ARRGYNDYDPYGMDV

SEQ ID NO: 15501 - protein, 7 aa, Homo sapiens
  Light chain CDR3 for antibody 7751 (IGKV1-17)
LQHNSYP

SEQ ID NO: 15502 - protein, 12 aa, Homo sapiens
  Heavy chain CDR3 for antibody 7751 (IGHV1-18)
ARGLTGDHAVDI

SEQ ID NO: 15503 - protein, 9 aa, Homo sapiens
  Light chain CDR3 for antibody 7752 (IGKV2-30)
MQGTHWPLT

SEQ ID NO: 15504 - protein, 12 aa, Homo sapiens
  Heavy chain CDR3 for antibody 7752 (IGHV3-33)
AREGIAVAGVDP

SEQ ID NO: 15505 - protein, 9 aa, Homo sapiens
  Light chain CDR3 for antibody 7753 (IGKV1-6)
LQDYKSPFT

SEQ ID NO: 15506 - protein, 16 aa, Homo sapiens
  Heavy chain CDR3 for antibody 7753 (IGHV1-24)
ATEDSSSTYYYYGLDV

SEQ ID NO: 15507 - protein, 8 aa, Homo sapiens
  Light chain CDR3 for antibody 7754 (IGKV1-5)
QQYNSYWT

SEQ ID NO: 15508 - protein, 19 aa, Homo sapiens
  Heavy chain CDR3 for antibody 7754 (IGHV3-30)
ARRFSGYSGYDHYYYGMDV

SEQ ID NO: 15509 - protein, 9 aa, Homo sapiens
  Light chain CDR3 for antibody 7755 (IGKV6-21)
HQSSSLPYT

SEQ ID NO: 15510 - protein, 19 aa, Homo sapiens
  Heavy chain CDR3 for antibody 7755 (IGHV3-23)
ARGGVVRGVIEYYYYGMDV

SEQ ID NO: 15511 - protein, 9 aa, Homo sapiens
  Light chain CDR3 for antibody 7756 (IGKV1-9)
QQLHIYPWT

SEQ ID NO: 15512 - protein, 17 aa, Homo sapiens
  Heavy chain CDR3 for antibody 7756 (IGHV3-33)
AKDGSFYSSGWYDAFDI

SEQ ID NO: 15513 - protein, 10 aa, Homo sapiens
  Light chain CDR3 for antibody 7757 (IGKV3-20)
QQYGSSPPYT

SEQ ID NO: 15514 - protein, 17 aa, Homo sapiens
  Heavy chain CDR3 for antibody 7757 (IGHV3-h)
AKDGIGELSYYYYGMDV

SEQ ID NO: 15515 - protein, 9 aa, Homo sapiens
  Light chain CDR3 for antibody 7758 (IGKV1D-16)
QQSYSTPLT

SEQ ID NO: 15516 - protein, 20 aa, Homo sapiens
  Heavy chain CDR3 for antibody 7758 (IGHV1-8)
ARGDGTMVRGIYYYYYGMDV

SEQ ID NO: 15517 - protein, 9 aa, Homo sapiens
  Light chain CDR3 for antibody 7759 (IGKV1D-13)
QRFNNYLYT

SEQ ID NO: 15518 - protein, 13 aa, Homo sapiens
  Heavy chain CDR3 for antibody 7759 (IGHV3-11)
ARDEGYRGYVLDT

SEQ ID NO: 15519 - protein, 9 aa, Homo sapiens
  Light chain CDR3 for antibody 7760 (IGKV3D-20)
QQYGNSPRT

SEQ ID NO: 15520 - protein, 7 aa, Homo sapiens
  Heavy chain CDR3 for antibody 7760 (IGHV3-33)
ARELFDY

SEQ ID NO: 15521 - protein, 9 aa, Homo sapiens
  Light chain CDR3 for antibody 7761 (IGKV1-6)
LQVYSYPWT

SEQ ID NO: 15522 - protein, 15 aa, Homo sapiens
  Heavy chain CDR3 for antibody 7761 (IGHV3-33)
ARDTGYSSSWNWFDP

SEQ ID NO: 15523 - protein, 9 aa, Homo sapiens
  Light chain CDR3 for antibody 7762 (IGKV5-2)
LQHDNFPYT

SEQ ID NO: 15524 - protein, 9 aa, Homo sapiens
  Heavy chain CDR3 for antibody 7762 (IGHV3-23)
ATWGSAFDV

SEQ ID NO: 15525 - protein, 9 aa, Homo sapiens
  Light chain CDR3 for antibody 7763 (IGKV1-5)
QQYNTYSRT

SEQ ID NO: 15526 - protein, 12 aa, Homo sapiens
  Heavy chain CDR3 for antibody 7763 (IGHV3-33)
AREGTRWVYFDY

SEQ ID NO: 15527 - protein, 10 aa, Homo sapiens
  Light chain CDR3 for antibody 7764 (IGKV1-39)
QQSYSTPMYT

SEQ ID NO: 15528 - protein, 12 aa, Homo sapiens
  Heavy chain CDR3 for antibody 7764 (IGHV3-33)
AREGTGGNWFDP

SEQ ID NO: 15529 - protein, 10 aa, Homo sapiens
  Light chain CDR3 for antibody 7765 (IGKV3-11)
QQRSNWPAYT

SEQ ID NO: 15530 - protein, 15 aa, Homo sapiens
  Heavy chain CDR3 for antibody 7765 (IGHV3-33)
ARRSILTGSYWYFDL

SEQ ID NO: 15531 - protein, 9 aa, Homo sapiens
  Light chain CDR3 for antibody 7766 (IGKV1D-16)
QQYNSYPFT

SEQ ID NO: 15532 - protein, 15 aa, Homo sapiens
  Heavy chain CDR3 for antibody 7766 (IGHV4-59)
ARDLGHYYGSVSIDY

SEQ ID NO: 15533 - protein, 9 aa, Homo sapiens
  Light chain CDR3 for antibody 7767 (IGKV1-9)
QQLKSYLYT

SEQ ID NO: 15534 - protein, 14 aa, Homo sapiens
  Heavy chain CDR3 for antibody 7767 (IGHV4-59)
AKGGSGSYYNWFDP

SEQ ID NO: 15535 - protein, 8 aa, Homo sapiens
  Light chain CDR3 for antibody 7768 (IGKV3D-7)
QQDYNLLT

SEQ ID NO: 15536 - protein, 12 aa, Homo sapiens
  Heavy chain CDR3 for antibody 7768 (IGHV3-33)
ARDLVRGIRMDV

SEQ ID NO: 15537 - protein, 8 aa, Homo sapiens
  Light chain CDR3 for antibody 7769 (IGKV3D-7)
QQDYNLLT

SEQ ID NO: 15538 - protein, 16 aa, Homo sapiens
  Heavy chain CDR3 for antibody 7769 (IGHV3-33)
AREGGLIAAAGTGFDY

SEQ ID NO: 15539 - protein, 10 aa, Homo sapiens
  Light chain CDR3 for antibody 7770 (IGKV1-27)
QKYNSAPMYT

SEQ ID NO: 15540 - protein, 12 aa, Homo sapiens
  Heavy chain CDR3 for antibody 7770 (IGHV4-59)
ARDRSGWAYFDY

SEQ ID NO: 15541 - protein, 9 aa, Homo sapiens
  Light chain CDR3 for antibody 7771 (IGKV1-27)
QKYNSAPYT

SEQ ID NO: 15542 - protein, 11 aa, Homo sapiens
  Heavy chain CDR3 for antibody 7771 (IGHV4-59)
AREDYGVPFDY

SEQ ID NO: 15543 - protein, 10 aa, Homo sapiens
  Light chain CDR3 for antibody 7772 (IGKV3-20)
QQYGSSPPYT

SEQ ID NO: 15544 - protein, 17 aa, Homo sapiens
  Heavy chain CDR3 for antibody 7772 (IGHV3-33)
ARGYCSRTSCYLYYFDY

SEQ ID NO: 15545 - protein, 10 aa, Homo sapiens
  Light chain CDR3 for antibody 7773 (IGKV3-15)
QQYNNWPPIT

SEQ ID NO: 15546 - protein, 16 aa, Homo sapiens
  Heavy chain CDR3 for antibody 7773 (IGHV3-33)
ARGYDMLTGDYYGMDV

SEQ ID NO: 15547 - protein, 10 aa, Homo sapiens
  Light chain CDR3 for antibody 7774 (IGKV1-39)
QQSYSTPMYT

SEQ ID NO: 15548 - protein, 19 aa, Homo sapiens
  Heavy chain CDR3 for antibody 7774 (IGHV3-33)
ARDSGYSGYDYYYYYGMDV

SEQ ID NO: 15549 - protein, 9 aa, Homo sapiens
  Light chain CDR3 for antibody 7775 (IGKV1-16)
QQYNSYPYT

SEQ ID NO: 15550 - protein, 9 aa, Homo sapiens
  Heavy chain CDR3 for antibody 7775 (IGHV4-59)
ARGRSNFRI

SEQ ID NO: 15551 - protein, 9 aa, Homo sapiens
  Light chain CDR3 for antibody 7776 (IGKV2D-28)
MQALQTPPT

SEQ ID NO: 15552 - protein, 16 aa, Homo sapiens
  Heavy chain CDR3 for antibody 7776 (IGHV3-33)
ARDSSSLDYYYYGMDV

SEQ ID NO: 15553 - protein, 9 aa, Homo sapiens
  Light chain CDR3 for antibody 7777 (IGKV6-21)
HQSTSLPFT

SEQ ID NO: 15554 - protein, 12 aa, Homo sapiens
  Heavy chain CDR3 for antibody 7777 (IGHV4-39)
ARQMVREGWFDP

SEQ ID NO: 15555 - protein, 9 aa, Homo sapiens
  Light chain CDR3 for antibody 7778 (IGKV3-15)
QQYNNWPLT

SEQ ID NO: 15556 - protein, 12 aa, Homo sapiens
  Heavy chain CDR3 for antibody 7778 (IGHV3-33)
ARDPGYFFGLDV

SEQ ID NO: 15557 - protein, 9 aa, Homo sapiens
  Light chain CDR3 for antibody 7779 (IGKV1-6)
LQDYKSPFT

SEQ ID NO: 15558 - protein, 19 aa, Homo sapiens
  Heavy chain CDR3 for antibody 7779 (IGHV3-33)
ARDSGYSGYDYYYYYGMDV

SEQ ID NO: 15559 - protein, 9 aa, Homo sapiens
  Light chain CDR3 for antibody 7780 (IGKV2D-28)
MQALQTPPT

SEQ ID NO: 15560 - protein, 15 aa, Homo sapiens
  Heavy chain CDR3 for antibody 7780 (IGHV3-33)
ARRGYNDYDPYGMDV

SEQ ID NO: 15561 - protein, 10 aa, Homo sapiens
  Light chain CDR3 for antibody 7781 (IGKV3-11)
QQRSNWPIFT

SEQ ID NO: 15562 - protein, 18 aa, Homo sapiens
  Heavy chain CDR3 for antibody 7781 (IGHV3-33)
AREGDYYGSGGFPNWFDP

SEQ ID NO: 15563 - protein, 9 aa, Homo sapiens
  Light chain CDR3 for antibody 7782 (IGKV3-11)
QQRSNWPPT

SEQ ID NO: 15564 - protein, 14 aa, Homo sapiens
  Heavy chain CDR3 for antibody 7782 (IGHV3-33)
ARDGYDILTGPMDV

SEQ ID NO: 15565 - protein, 11 aa, Homo sapiens
  Light chain CDR3 for antibody 7783 (IGKV3-11)
QQRSNWPPTWT

SEQ ID NO: 15566 - protein, 12 aa, Homo sapiens
  Heavy chain CDR3 for antibody 7783 (IGHV3-33)
ARVDTAAPYFDY

SEQ ID NO: 15567 - protein, 10 aa, Homo sapiens
  Light chain CDR3 for antibody 7784 (IGKV1-27)
QKYNSAPMYT

SEQ ID NO: 15568 - protein, 13 aa, Homo sapiens
  Heavy chain CDR3 for antibody 7784 (IGHV4-39)
ARHVLLWFGEFDP

SEQ ID NO: 15569 - protein, 10 aa, Homo sapiens
  Light chain CDR3 for antibody 7785 (IGKV1-39)
QQSYSTPMYT

SEQ ID NO: 15570 - protein, 14 aa, Homo sapiens
  Heavy chain CDR3 for antibody 7785 (IGHV3-33)
ARSTLVRGANWFDP

SEQ ID NO: 15571 - protein, 9 aa, Homo sapiens
  Light chain CDR3 for antibody 7786 (IGKV1-39)
QQSYRTPLT

SEQ ID NO: 15572 - protein, 12 aa, Homo sapiens
  Heavy chain CDR3 for antibody 7786 (IGHV3-33)
AREGIAVAGVDP

SEQ ID NO: 15573 - protein, 9 aa, Homo sapiens
  Light chain CDR3 for antibody 7787 (IGKV1-6)
LQDYNYPWT

SEQ ID NO: 15574 - protein, 15 aa, Homo sapiens
  Heavy chain CDR3 for antibody 7787 (IGHV3-20)
ARDRGSSGWRGWFDP

SEQ ID NO: 15575 - protein, 11 aa, Homo sapiens
  Light chain CDR3 for antibody 7788 (IGKV3-11)
QQRSNWPPTWT

SEQ ID NO: 15576 - protein, 16 aa, Homo sapiens
  Heavy chain CDR3 for antibody 7788 (IGHV1-8)
AREGTMVRGVTYAFDI

SEQ ID NO: 15577 - protein, 9 aa, Homo sapiens
  Light chain CDR3 for antibody 7789 (IGKV1-16)
QHYNDYPFT

SEQ ID NO: 15578 - protein, 11 aa, Homo sapiens
  Heavy chain CDR3 for antibody 7789 (IGHV3-33)
ARARYTTGLDY

SEQ ID NO: 15579 - protein, 9 aa, Homo sapiens
  Light chain CDR3 for antibody 7790 (IGKV1-17)
LQHNSFPYT

SEQ ID NO: 15580 - protein, 23 aa, Homo sapiens
  Heavy chain CDR3 for antibody 7790 (IGHV4-59)
ARERTYSGILPGYYEDYYYGMDV

SEQ ID NO: 15581 - protein, 9 aa, Homo sapiens
  Light chain CDR3 for antibody 7791 (IGKV1-6)
LQVYSYPWT

SEQ ID NO: 15582 - protein, 13 aa, Homo sapiens
  Heavy chain CDR3 for antibody 7791 (IGHV3-33)
ARRYRSGWYPFDY

SEQ ID NO: 15583 - protein, 9 aa, Homo sapiens
  Light chain CDR3 for antibody 7792 (IGKV3D-7)
QQDYNLPLT

SEQ ID NO: 15584 - protein, 16 aa, Homo sapiens
  Heavy chain CDR3 for antibody 7792 (IGHV4-59)
ARFYFGSGSYYWYFDL

SEQ ID NO: 15585 - protein, 9 aa, Homo sapiens
  Light chain CDR3 for antibody 7793 (IGKV3D-7)
QQDYNLPYT

SEQ ID NO: 15586 - protein, 17 aa, Homo sapiens
  Heavy chain CDR3 for antibody 7793 (IGHV1-18)
ARDEGYDILTGYPHFDY

SEQ ID NO: 15587 - protein, 8 aa, Homo sapiens
  Light chain CDR3 for antibody 7794 (IGKV1D-13)
QQFNNYPT

SEQ ID NO: 15588 - protein, 9 aa, Homo sapiens
  Heavy chain CDR3 for antibody 7794 (IGHV3-33)
ARDRYYDIL

SEQ ID NO: 15589 - protein, 9 aa, Homo sapiens
  Light chain CDR3 for antibody 7795 (IGKV1-17)
LQHNSYPWT

SEQ ID NO: 15590 - protein, 12 aa, Homo sapiens
  Heavy chain CDR3 for antibody 7795 (IGHV3-33)
ARESGGSYSFDY

SEQ ID NO: 15591 - protein, 8 aa, Homo sapiens
  Light chain CDR3 for antibody 7796 (IGKV3-20)
QQYGSSLT

SEQ ID NO: 15592 - protein, 9 aa, Homo sapiens
  Heavy chain CDR3 for antibody 7796 (IGHV3-30)
ARDNWGFDY

SEQ ID NO: 15593 - protein, 9 aa, Homo sapiens
  Light chain CDR3 for antibody 7797 (IGKV1-6)
LQDFHYPWT

SEQ ID NO: 15594 - protein, 15 aa, Homo sapiens
  Heavy chain CDR3 for antibody 7797 (IGHV3-33)
ARDTGYSSSWNWFDP

SEQ ID NO: 15595 - protein, 9 aa, Homo sapiens
  Light chain CDR3 for antibody 7798 (IGKV1-16)
QHYNDYPFT

SEQ ID NO: 15596 - protein, 14 aa, Homo sapiens
  Heavy chain CDR3 for antibody 7798 (IGHV3-33)
ARDNILTAYYLFDY

SEQ ID NO: 15597 - protein, 9 aa, Homo sapiens
  Light chain CDR3 for antibody 7799 (IGKV1-16)
QQYYSYPRT

SEQ ID NO: 15598 - protein, 11 aa, Homo sapiens
  Heavy chain CDR3 for antibody 7799 (IGHV3-33)
ARDRSTGWLDY

SEQ ID NO: 15599 - protein, 10 aa, Homo sapiens
  Light chain CDR3 for antibody 7800 (IGKV1-17)
LQHNSYPMYT

SEQ ID NO: 15600 - protein, 14 aa, Homo sapiens
  Heavy chain CDR3 for antibody 7800 (IGHV3-23)
ANWAYDILTGYLDY

SEQ ID NO: 15601 - protein, 9 aa, Homo sapiens
  Light chain CDR3 for antibody 7801 (IGKV1-9)
QQLNSYPLT

SEQ ID NO: 15602 - protein, 15 aa, Homo sapiens
  Heavy chain CDR3 for antibody 7801 (IGHV3-23)
AKDRSGSGSYNLFDY

SEQ ID NO: 15603 - protein, 8 aa, Homo sapiens
  Light chain CDR3 for antibody 7802 (IGKV6-21)
HQSGSLPT

SEQ ID NO: 15604 - protein, 14 aa, Homo sapiens
  Heavy chain CDR3 for antibody 7802 (IGHV3-33)
ARDWNDVYYYGMDV

SEQ ID NO: 15605 - protein, 9 aa, Homo sapiens
  Light chain CDR3 for antibody 7803 (IGKV3D-7)
QQDYNLPLT

SEQ ID NO: 15606 - protein, 17 aa, Homo sapiens
  Heavy chain CDR3 for antibody 7803 (IGHV3-33)
AREDYDILTGYPFYFDY

SEQ ID NO: 15607 - protein, 9 aa, Homo sapiens
  Light chain CDR3 for antibody 7804 (IGKV1-6)
QQYSSYQYT

SEQ ID NO: 15608 - protein, 14 aa, Homo sapiens
  Heavy chain CDR3 for antibody 7804 (IGHV3-33)
ARASSGSSYWYFDL

SEQ ID NO: 15609 - protein, 9 aa, Homo sapiens
  Light chain CDR3 for antibody 7805 (IGKV1-5)
QQYNTYSRT

SEQ ID NO: 15610 - protein, 18 aa, Homo sapiens
  Heavy chain CDR3 for antibody 7805 (IGHV4-59)
ARERGNWNDVDYYYGMDV

SEQ ID NO: 15611 - protein, 9 aa, Homo sapiens
  Light chain CDR3 for antibody 7806 (IGKV1-9)
QQLISYPLT

SEQ ID NO: 15612 - protein, 15 aa, Homo sapiens
  Heavy chain CDR3 for antibody 7806 (IGHV3-23)
AKEALRYFDWSGMDV

SEQ ID NO: 15613 - protein, 9 aa, Homo sapiens
  Light chain CDR3 for antibody 7807 (IGKV1D-16)
QQYNSYPYT

SEQ ID NO: 15614 - protein, 15 aa, Homo sapiens
  Heavy chain CDR3 for antibody 7807 (IGHV3-33)
ARDRRGIAAAGTGDY

SEQ ID NO: 15615 - protein, 8 aa, Homo sapiens
  Light chain CDR3 for antibody 7808 (IGKV3D-7)
QQDYNLPT

SEQ ID NO: 15616 - protein, 16 aa, Homo sapiens
  Heavy chain CDR3 for antibody 7808 (IGHV1-18)
ARYFDWLLRDYYGMDV

SEQ ID NO: 15617 - protein, 8 aa, Homo sapiens
  Light chain CDR3 for antibody 7809 (IGKV6-21)
HQSSSLPT

SEQ ID NO: 15618 - protein, 13 aa, Homo sapiens
  Heavy chain CDR3 for antibody 7809 (IGHV3-33)
ARDWGYSHGYFDY

SEQ ID NO: 15619 - protein, 9 aa, Homo sapiens
  Light chain CDR3 for antibody 7810 (IGKV1-9)
QQLNTYPWT

SEQ ID NO: 15620 - protein, 11 aa, Homo sapiens
  Heavy chain CDR3 for antibody 7810 (IGHV1-46)
AREEDLGAFDI

SEQ ID NO: 15621 - protein, 10 aa, Homo sapiens
  Light chain CDR3 for antibody 7811 (IGKV1-17)
LQHNSYPMYT

SEQ ID NO: 15622 - protein, 13 aa, Homo sapiens
  Heavy chain CDR3 for antibody 7811 (IGHV4-28)
ARKGATGYYGMDV

SEQ ID NO: 15623 - protein, 10 aa, Homo sapiens
  Light chain CDR3 for antibody 7812 (IGKV1-39)
QQSYSTPMYT

SEQ ID NO: 15624 - protein, 18 aa, Homo sapiens
  Heavy chain CDR3 for antibody 7812 (IGHV3-33)
ARERGYYGSDIYPAAFDI

SEQ ID NO: 15625 - protein, 9 aa, Homo sapiens
  Light chain CDR3 for antibody 7813 (IGKV3-15)
QQYNNWPLT

SEQ ID NO: 15626 - protein, 11 aa, Homo sapiens
  Heavy chain CDR3 for antibody 7813 (IGHV4-30-2)
ARDRGHYGMDV

SEQ ID NO: 15627 - protein, 9 aa, Homo sapiens
  Light chain CDR3 for antibody 7814 (IGKV1D-13)
QRFNNYLYT

SEQ ID NO: 15628 - protein, 14 aa, Homo sapiens
  Heavy chain CDR3 for antibody 7814 (IGHV3-33)
ARQYSYGYPYYFDY

SEQ ID NO: 15629 - protein, 9 aa, Homo sapiens
  Light chain CDR3 for antibody 7815 (IGKV1D-13)
QQFNNYPYT

SEQ ID NO: 15630 - protein, 17 aa, Homo sapiens
  Heavy chain CDR3 for antibody 7815 (IGHV3-23)
SKERNWNDGYYYFGMDA

SEQ ID NO: 15631 - protein, 9 aa, Homo sapiens
  Light chain CDR3 for antibody 7816 (IGKV5-2)
LQHDNFPWT

SEQ ID NO: 15632 - protein, 12 aa, Homo sapiens
  Heavy chain CDR3 for antibody 7816 (IGHV3-33)
ARNYDILDYFDY

SEQ ID NO: 15633 - protein, 8 aa, Homo sapiens
  Light chain CDR3 for antibody 7817 (IGKV3-15)
QQYNNWPT

SEQ ID NO: 15634 - protein, 18 aa, Homo sapiens
  Heavy chain CDR3 for antibody 7817 (IGHV4-59)
AREGDYVWGSYRSNWFDP

SEQ ID NO: 15635 - protein, 9 aa, Homo sapiens
  Light chain CDR3 for antibody 7818 (IGKV3-15)
QQYNNWPLT

SEQ ID NO: 15636 - protein, 13 aa, Homo sapiens
  Heavy chain CDR3 for antibody 7818 (IGHV1-46)
ARVKLGSLGAFDI

SEQ ID NO: 15637 - protein, 8 aa, Homo sapiens
  Light chain CDR3 for antibody 7819 (IGKV3D-7)
QQDYNLLT

SEQ ID NO: 15638 - protein, 9 aa, Homo sapiens
  Heavy chain CDR3 for antibody 7819 (IGHV1-8)
ARGRLDFDY

SEQ ID NO: 15639 - protein, 9 aa, Homo sapiens
  Light chain CDR3 for antibody 7820 (IGKV3-15)
QQYNNWPRT

SEQ ID NO: 15640 - protein, 16 aa, Homo sapiens
  Heavy chain CDR3 for antibody 7820 (IGHV3-11)
ATEDSSSYYYYYGMDV

SEQ ID NO: 15641 - protein, 9 aa, Homo sapiens
  Light chain CDR3 for antibody 7821 (IGKV1-27)
QKYNSAPYT

SEQ ID NO: 15642 - protein, 12 aa, Homo sapiens
  Heavy chain CDR3 for antibody 7821 (IGHV1-18)
ARRDGSGTSFDY

SEQ ID NO: 15643 - protein, 9 aa, Homo sapiens
  Light chain CDR3 for antibody 7822 (IGKV1-9)
QQVNSYPYT

SEQ ID NO: 15644 - protein, 18 aa, Homo sapiens
  Heavy chain CDR3 for antibody 7822 (IGHV4-59)
ARERGNWNDVDYYYGMGV

SEQ ID NO: 15645 - protein, 9 aa, Homo sapiens
  Light chain CDR3 for antibody 7823 (IGKV1-9)
QQLNSYPRT

SEQ ID NO: 15646 - protein, 16 aa, Homo sapiens
  Heavy chain CDR3 for antibody 7823 (IGHV4-59)
ARDAAYSSGSGRPFDH

SEQ ID NO: 15647 - protein, 9 aa, Homo sapiens
  Light chain CDR3 for antibody 7824 (IGKV1D-16)
QQYNSYPYT

SEQ ID NO: 15648 - protein, 12 aa, Homo sapiens
  Heavy chain CDR3 for antibody 7824 (IGHV4-59)
ARVIGVWSPFDD

SEQ ID NO: 15649 - protein, 9 aa, Homo sapiens
  Light chain CDR3 for antibody 7825 (IGKV2D-28)
MQVLQTPFT

SEQ ID NO: 15650 - protein, 12 aa, Homo sapiens
  Heavy chain CDR3 for antibody 7825 (IGHV1-46)
ARGLTGDHAVDI

SEQ ID NO: 15651 - protein, 9 aa, Homo sapiens
  Light chain CDR3 for antibody 7826 (IGKV1-33)
QQYDNLPFT

SEQ ID NO: 15652 - protein, 14 aa, Homo sapiens
  Heavy chain CDR3 for antibody 7826 (IGHV3-33)
AREGYSSNWYDFDY

SEQ ID NO: 15653 - protein, 9 aa, Homo sapiens
  Light chain CDR3 for antibody 7827 (IGKV1-5)
QQGNTYSRT

SEQ ID NO: 15654 - protein, 17 aa, Homo sapiens
  Heavy chain CDR3 for antibody 7827 (IGHV3-74)
VREGGLLWVGELSLFDY

SEQ ID NO: 15655 - protein, 9 aa, Homo sapiens
  Light chain CDR3 for antibody 7828 (IGKV1-9)
QQLYSYPYT

SEQ ID NO: 15656 - protein, 17 aa, Homo sapiens
  Heavy chain CDR3 for antibody 7828 (IGHV3-33)
ARAYYDILTGYSYYFDY

SEQ ID NO: 15657 - protein, 8 aa, Homo sapiens
  Light chain CDR3 for antibody 7829 (IGKV1-6)
QQYNSYYT

SEQ ID NO: 15658 - protein, 14 aa, Homo sapiens
  Heavy chain CDR3 for antibody 7829 (IGHV1-46)
ARKGIVGAFDAFGI

SEQ ID NO: 15659 - protein, 8 aa, Homo sapiens
  Light chain CDR3 for antibody 7830 (IGKV1D-13)
QQFNNYPT

SEQ ID NO: 15660 - protein, 13 aa, Homo sapiens
  Heavy chain CDR3 for antibody 7830 (IGHV3-66)
ANTGDSYYYGFYV

SEQ ID NO: 15661 - protein, 9 aa, Homo sapiens
  Light chain CDR3 for antibody 7831 (IGKV3-15)
QQYHNWPLT

SEQ ID NO: 15662 - protein, 13 aa, Homo sapiens
  Heavy chain CDR3 for antibody 7831 (IGHV3-23)
ARAFFMVRGVIDF

SEQ ID NO: 15663 - protein, 9 aa, Homo sapiens
  Light chain CDR3 for antibody 7832 (IGKV1D-16)
QQYNSYPYT

SEQ ID NO: 15664 - protein, 10 aa, Homo sapiens
  Heavy chain CDR3 for antibody 7832 (IGHV3-23)
ANSGNYYFDY

SEQ ID NO: 15665 - protein, 9 aa, Homo sapiens
  Light chain CDR3 for antibody 7833 (IGKV3D-7)
QQDYEFPIT

SEQ ID NO: 15666 - protein, 18 aa, Homo sapiens
  Heavy chain CDR3 for antibody 7833 (IGHV1-8)
ARSRIAAAGIYYYYGMDV

SEQ ID NO: 15667 - protein, 8 aa, Homo sapiens
  Light chain CDR3 for antibody 7834 (IGKV3-20)
QQYGRSFT

SEQ ID NO: 15668 - protein, 14 aa, Homo sapiens
  Heavy chain CDR3 for antibody 7834 (IGHV4-39)
ARHGYYGSSNWFDP

SEQ ID NO: 15669 - protein, 9 aa, Homo sapiens
  Light chain CDR3 for antibody 7835 (IGKV1-9)
QQLNGYPFT

SEQ ID NO: 15670 - protein, 13 aa, Homo sapiens
  Heavy chain CDR3 for antibody 7835 (IGHV4-59)
ARDAGYSSSWFDY

SEQ ID NO: 15671 - protein, 10 aa, Homo sapiens
  Light chain CDR3 for antibody 7836 (IGKV3-15)
QQYNNWPPLT

SEQ ID NO: 15672 - protein, 21 aa, Homo sapiens
  Heavy chain CDR3 for antibody 7836 (IGHV3-33)
ARKRLYDILTGYYKAYYGMDV

SEQ ID NO: 15673 - protein, 9 aa, Homo sapiens
  Light chain CDR3 for antibody 7837 (IGKV3D-7)
QQDYNLPYT

SEQ ID NO: 15674 - protein, 17 aa, Homo sapiens
  Heavy chain CDR3 for antibody 7837 (IGHV3-33)
ARDRGIAVAGTPDGFDI

SEQ ID NO: 15675 - protein, 9 aa, Homo sapiens
  Light chain CDR3 for antibody 7838 (IGKV1D-16)
QQYDSYPWT

SEQ ID NO: 15676 - protein, 18 aa, Homo sapiens
  Heavy chain CDR3 for antibody 7838 (IGHV4-59)
AREGDYVWGSYRPNWFDP

SEQ ID NO: 15677 - protein, 8 aa, Homo sapiens
  Light chain CDR3 for antibody 7839 (IGKV3D-7)
QQDYNLLT

SEQ ID NO: 15678 - protein, 13 aa, Homo sapiens
  Heavy chain CDR3 for antibody 7839 (IGHV3-33)
ASAGNSYYNVMDV

SEQ ID NO: 15679 - protein, 9 aa, Homo sapiens
  Light chain CDR3 for antibody 7840 (IGKV3D-7)
QQDYNLPYT

SEQ ID NO: 15680 - protein, 16 aa, Homo sapiens
  Heavy chain CDR3 for antibody 7840 (IGHV1-8)
AREGTMVRGVTYAFDI

SEQ ID NO: 15681 - protein, 8 aa, Homo sapiens
  Light chain CDR3 for antibody 7841 (IGKV1D-13)
QQFNNYPT

SEQ ID NO: 15682 - protein, 15 aa, Homo sapiens
  Heavy chain CDR3 for antibody 7841 (IGHV3-33)
ARDSRPEIIGPPFDY

SEQ ID NO: 15683 - protein, 9 aa, Homo sapiens
  Light chain CDR3 for antibody 7842 (IGKV2-30)
MQGTHWPLT

SEQ ID NO: 15684 - protein, 19 aa, Homo sapiens
  Heavy chain CDR3 for antibody 7842 (IGHV3-11)
ARDSGYSGYDYYYYYGMDV

SEQ ID NO: 15685 - protein, 9 aa, Homo sapiens
  Light chain CDR3 for antibody 7843 (IGKV1-17)
QQLNGYPFT

SEQ ID NO: 15686 - protein, 20 aa, Homo sapiens
  Heavy chain CDR3 for antibody 7843 (IGHV3-23)
AKDREMAATSHYYYYYGMDV

SEQ ID NO: 15687 - protein, 8 aa, Homo sapiens
  Light chain CDR3 for antibody 7844 (IGKV3-11)
QQRSNWLT

SEQ ID NO: 15688 - protein, 13 aa, Homo sapiens
  Heavy chain CDR3 for antibody 7844 (IGHV3-33)
ARAFTMVRGVIDY

SEQ ID NO: 15689 - protein, 10 aa, Homo sapiens
  Light chain CDR3 for antibody 7845 (IGKV3-11)
QQRSNWPIFT

SEQ ID NO: 15690 - protein, 9 aa, Homo sapiens
  Heavy chain CDR3 for antibody 7845 (IGHV1-8)
ARGPRIMDV

SEQ ID NO: 15691 - protein, 9 aa, Homo sapiens
  Light chain CDR3 for antibody 7846 (IGKV1-17)
QQYDSYPWT

SEQ ID NO: 15692 - protein, 17 aa, Homo sapiens
  Heavy chain CDR3 for antibody 7846 (IGHV3-33)
AREGTMVRGYYYYGMDV

SEQ ID NO: 15693 - protein, 9 aa, Homo sapiens
  Light chain CDR3 for antibody 7847 (IGKV1-39)
QQSYSTPWT

SEQ ID NO: 15694 - protein, 13 aa, Homo sapiens
  Heavy chain CDR3 for antibody 7847 (IGHV4-59)
ARESPGPYDAFDI

SEQ ID NO: 15695 - protein, 9 aa, Homo sapiens
  Light chain CDR3 for antibody 7848 (IGKV1-6)
LQDYNYPHT

SEQ ID NO: 15696 - protein, 12 aa, Homo sapiens
  Heavy chain CDR3 for antibody 7848 (IGHV1-46)
ARGLTGDHASDT

SEQ ID NO: 15697 - protein, 9 aa, Homo sapiens
  Light chain CDR3 for antibody 7849 (IGKV1-6)
LQDYNYPWT

SEQ ID NO: 15698 - protein, 12 aa, Homo sapiens
  Heavy chain CDR3 for antibody 7849 (IGHV6-1)
ARDTMVRGVIDY

SEQ ID NO: 15699 - protein, 10 aa, Homo sapiens
  Light chain CDR3 for antibody 7850 (IGKV3-11)
QQRSNWPIFT

SEQ ID NO: 15700 - protein, 15 aa, Homo sapiens
  Heavy chain CDR3 for antibody 7850 (IGHV3-33)
ARDEHYDILTGYWGY

SEQ ID NO: 15701 - protein, 8 aa, Homo sapiens
  Light chain CDR3 for antibody 7851 (IGKV3D-7)
QQDYNLLT

SEQ ID NO: 15702 - protein, 13 aa, Homo sapiens
  Heavy chain CDR3 for antibody 7851 (IGHV3-33)
ARGVLWFGELFDY

SEQ ID NO: 15703 - protein, 9 aa, Homo sapiens
  Light chain CDR3 for antibody 7852 (IGKV1D-13)
QRFNNYLYT

SEQ ID NO: 15704 - protein, 14 aa, Homo sapiens
  Heavy chain CDR3 for antibody 7852 (IGHV4-59)
AKGGSGSYYNWFDP

SEQ ID NO: 15705 - protein, 9 aa, Homo sapiens
  Light chain CDR3 for antibody 7853 (IGKV3-11)
QQRSNWPPT

SEQ ID NO: 15706 - protein, 18 aa, Homo sapiens
  Heavy chain CDR3 for antibody 7853 (IGHV3-23)
AKEGDYYSSGSYWGYFDL

SEQ ID NO: 15707 - protein, 9 aa, Homo sapiens
  Light chain CDR3 for antibody 7854 (IGKV1-39)
QQSYSTPIT

SEQ ID NO: 15708 - protein, 13 aa, Homo sapiens
  Heavy chain CDR3 for antibody 7854 (IGHV3-33)
TRRIAVAGAEGDY

SEQ ID NO: 15709 - protein, 10 aa, Homo sapiens
  Light chain CDR3 for antibody 7855 (IGKV3-11)
QQRSNWPALT

SEQ ID NO: 15710 - protein, 20 aa, Homo sapiens
  Heavy chain CDR3 for antibody 7855 (IGHV3-33)
ARGDGTMVRGIYYYYYGMDV

SEQ ID NO: 15711 - protein, 9 aa, Homo sapiens
  Light chain CDR3 for antibody 7856 (IGKV3-20)
QQYGSSPYT

SEQ ID NO: 15712 - protein, 15 aa, Homo sapiens
  Heavy chain CDR3 for antibody 7856 (IGHV3-33)
ARDRVQLGYYYGMDV

SEQ ID NO: 15713 - protein, 9 aa, Homo sapiens
  Light chain CDR3 for antibody 7857 (IGKV6-21)
HQSSSLPYT

SEQ ID NO: 15714 - protein, 18 aa, Homo sapiens
  Heavy chain CDR3 for antibody 7857 (IGHV3-33)
AGGGSGSYSSYYYYGMDV

SEQ ID NO: 15715 - protein, 9 aa, Homo sapiens
  Light chain CDR3 for antibody 7858 (IGKV1D-17)
LQHNGYPLT

SEQ ID NO: 15716 - protein, 14 aa, Homo sapiens
  Heavy chain CDR3 for antibody 7858 (IGHV3-33)
ARDNILTVYYLFDY

SEQ ID NO: 15717 - protein, 10 aa, Homo sapiens
  Light chain CDR3 for antibody 7859 (IGKV3-11)
QQRSNWPIFT

SEQ ID NO: 15718 - protein, 13 aa, Homo sapiens
  Heavy chain CDR3 for antibody 7859 (IGHV4-39)
ARHHYGSGSLRDY

SEQ ID NO: 15719 - protein, 9 aa, Homo sapiens
  Light chain CDR3 for antibody 7860 (IGKV1-6)
LQDYKSPFT

SEQ ID NO: 15720 - protein, 15 aa, Homo sapiens
  Heavy chain CDR3 for antibody 7860 (IGHV3-23)
AKDGGWNYYYYGMDV

SEQ ID NO: 15721 - protein, 9 aa, Homo sapiens
  Light chain CDR3 for antibody 7861 (IGKV1-17)
LQHNSFPLT

SEQ ID NO: 15722 - protein, 18 aa, Homo sapiens
  Heavy chain CDR3 for antibody 7861 (IGHV3-30)
ARDQGIVVLPGAPWYFDL

SEQ ID NO: 15723 - protein, 9 aa, Homo sapiens
  Light chain CDR3 for antibody 7862 (IGKV1-9)
QQLISYPLT

SEQ ID NO: 15724 - protein, 18 aa, Homo sapiens
  Heavy chain CDR3 for antibody 7862 (IGHV3-33)
ARGYYGSGNFYKDSGMDV

SEQ ID NO: 15725 - protein, 10 aa, Homo sapiens
  Light chain CDR3 for antibody 7863 (IGKV1-39)
QQSYSTPMYT

SEQ ID NO: 15726 - protein, 11 aa, Homo sapiens
  Heavy chain CDR3 for antibody 7863 (IGHV3-13)
AREAIIGPFDY

SEQ ID NO: 15727 - protein, 9 aa, Homo sapiens
  Light chain CDR3 for antibody 7864 (IGKV6-21)
HQSTSLPFT

SEQ ID NO: 15728 - protein, 8 aa, Homo sapiens
  Heavy chain CDR3 for antibody 7864 (IGHV4-4)
ARGARFDP

SEQ ID NO: 15729 - protein, 9 aa, Homo sapiens
  Light chain CDR3 for antibody 7865 (IGKV3D-7)
QQDYNLPLT

SEQ ID NO: 15730 - protein, 15 aa, Homo sapiens
  Heavy chain CDR3 for antibody 7865 (IGHV1-18)
ARRSPNWGHYYGMDV

SEQ ID NO: 15731 - protein, 9 aa, Homo sapiens
  Light chain CDR3 for antibody 7866 (IGKV5-2)
LQHDNFPWT

SEQ ID NO: 15732 - protein, 15 aa, Homo sapiens
  Heavy chain CDR3 for antibody 7866 (IGHV4-34)
ARPPIAVAGPEYFQH

SEQ ID NO: 15733 - protein, 9 aa, Homo sapiens
  Light chain CDR3 for antibody 7867 (IGKV1-6)
LQDFNYPRT

SEQ ID NO: 15734 - protein, 12 aa, Homo sapiens
  Heavy chain CDR3 for antibody 7867 (IGHV3-33)
ARVDTAAPYFDY

SEQ ID NO: 15735 - protein, 9 aa, Homo sapiens
  Light chain CDR3 for antibody 7868 (IGKV1-9)
QQGNTYSRT

SEQ ID NO: 15736 - protein, 14 aa, Homo sapiens
  Heavy chain CDR3 for antibody 7868 (IGHV4-39)
ARQDYDILTGLFDY

SEQ ID NO: 15737 - protein, 9 aa, Homo sapiens
  Light chain CDR3 for antibody 7869 (IGKV1-39)
QQSYSTPYT

SEQ ID NO: 15738 - protein, 18 aa, Homo sapiens
  Heavy chain CDR3 for antibody 7869 (IGHV3-33)
ARGAYSSGWDYYYYGLDV

SEQ ID NO: 15739 - protein, 10 aa, Homo sapiens
  Light chain CDR3 for antibody 7870 (IGKV1-39)
QQSYSTPMYT

SEQ ID NO: 15740 - protein, 14 aa, Homo sapiens
  Heavy chain CDR3 for antibody 7870 (IGHV3-33)
ARDAMGTSTAWFDP

SEQ ID NO: 15741 - protein, 8 aa, Homo sapiens
  Light chain CDR3 for antibody 7871 (IGKV1-5)
QQYNSYWT

SEQ ID NO: 15742 - protein, 15 aa, Homo sapiens
  Heavy chain CDR3 for antibody 7871 (IGHV3-33)
AREGLRYFHYYGMDV

SEQ ID NO: 15743 - protein, 8 aa, Homo sapiens
  Light chain CDR3 for antibody 7872 (IGKV3D-7)
QQDYNLAT

SEQ ID NO: 15744 - protein, 14 aa, Homo sapiens
  Heavy chain CDR3 for antibody 7872 (IGHV4-39)
ARRGVVVPPGGMDV

SEQ ID NO: 15745 - protein, 9 aa, Homo sapiens
  Light chain CDR3 for antibody 7873 (IGKV1-37)
QRTSNAPYT

SEQ ID NO: 15746 - protein, 17 aa, Homo sapiens
  Heavy chain CDR3 for antibody 7873 (IGHV3-33)
ARGYCSRTSCYLYYFDY

SEQ ID NO: 15747 - protein, 9 aa, Homo sapiens
  Light chain CDR3 for antibody 7874 (IGKV1D-16)
QQYNSFPLT

SEQ ID NO: 15748 - protein, 14 aa, Homo sapiens
  Heavy chain CDR3 for antibody 7874 (IGHV1-46)
ARSYYDILTGAFDI

SEQ ID NO: 15749 - protein, 9 aa, Homo sapiens
  Light chain CDR3 for antibody 7875 (IGKV1-6)
LQDYNYPRT

SEQ ID NO: 15750 - protein, 14 aa, Homo sapiens
  Heavy chain CDR3 for antibody 7875 (IGHV3-15)
SIYFYGSGRDYFDY

SEQ ID NO: 15751 - protein, 9 aa, Homo sapiens
  Light chain CDR3 for antibody 7876 (IGKV3D-7)
QQDYNLPWT

SEQ ID NO: 15752 - protein, 16 aa, Homo sapiens
  Heavy chain CDR3 for antibody 7876 (IGHV1-24)
ATDWNDRGYYYYGMDV

SEQ ID NO: 15753 - protein, 9 aa, Homo sapiens
  Light chain CDR3 for antibody 7877 (IGKV1D-13)
QRFNNYLYT

SEQ ID NO: 15754 - protein, 13 aa, Homo sapiens
  Heavy chain CDR3 for antibody 7877 (IGHV3-33)
ARKAYGDYFYFDY

SEQ ID NO: 15755 - protein, 10 aa, Homo sapiens
  Light chain CDR3 for antibody 7878 (IGKV1-39)
QQSYSTPMYT

SEQ ID NO: 15756 - protein, 14 aa, Homo sapiens
  Heavy chain CDR3 for antibody 7878 (IGHV3-23)
AKGGDVLTGYYPDY

SEQ ID NO: 15757 - protein, 9 aa, Homo sapiens
  Light chain CDR3 for antibody 7879 (IGKV3D-7)
QQDYDLPYP

SEQ ID NO: 15758 - protein, 18 aa, Homo sapiens
  Heavy chain CDR3 for antibody 7879 (IGHV4-59)
AREGDYVWGSYRPNWFDP

SEQ ID NO: 15759 - protein, 10 aa, Homo sapiens
  Light chain CDR3 for antibody 7880 (IGKV1-39)
QQSYSTPMYT

SEQ ID NO: 15760 - protein, 17 aa, Homo sapiens
  Heavy chain CDR3 for antibody 7880 (IGHV3-33)
ARGGGYENDHYYYGMDV

SEQ ID NO: 15761 - protein, 10 aa, Homo sapiens
  Light chain CDR3 for antibody 7881 (IGKV3-11)
QQRSNWPALT

SEQ ID NO: 15762 - protein, 18 aa, Homo sapiens
  Heavy chain CDR3 for antibody 7881 (IGHV3-23)
AKVGDFFASGNYWDYFDY

SEQ ID NO: 15763 - protein, 9 aa, Homo sapiens
  Light chain CDR3 for antibody 7882 (IGKV1-6)
LQDYNHPFT

SEQ ID NO: 15764 - protein, 8 aa, Homo sapiens
  Heavy chain CDR3 for antibody 7882 (IGHV3-33)
ARVYYDIL

SEQ ID NO: 15765 - protein, 9 aa, Homo sapiens
  Light chain CDR3 for antibody 7883 (IGKV3-11)
QQRSNWPPT

SEQ ID NO: 15766 - protein, 11 aa, Homo sapiens
  Heavy chain CDR3 for antibody 7883 (IGHV3-33)
ARDRVLTPFDY

SEQ ID NO: 15767 - protein, 9 aa, Homo sapiens
  Light chain CDR3 for antibody 7884 (IGKV3-11)
QQRSNWPWT

SEQ ID NO: 15768 - protein, 14 aa, Homo sapiens
  Heavy chain CDR3 for antibody 7884 (IGHV3-33)
AREDYYGPLNWFDP

SEQ ID NO: 15769 - protein, 9 aa, Homo sapiens
  Light chain CDR3 for antibody 7885 (IGKV1-9)
LQDYNSPFT

SEQ ID NO: 15770 - protein, 13 aa, Homo sapiens
  Heavy chain CDR3 for antibody 7885 (IGHV3-33)
ARTDYYSYYGLDV

SEQ ID NO: 15771 - protein, 9 aa, Homo sapiens
  Light chain CDR3 for antibody 7886 (IGKV1-33)
QQYDNLPRT

SEQ ID NO: 15772 - protein, 11 aa, Homo sapiens
  Heavy chain CDR3 for antibody 7886 (IGHV3-33)
ARARYTTGLDY

SEQ ID NO: 15773 - protein, 9 aa, Homo sapiens
  Light chain CDR3 for antibody 7887 (IGKV3-11)
QQRSNWMYT

SEQ ID NO: 15774 - protein, 12 aa, Homo sapiens
  Heavy chain CDR3 for antibody 7887 (IGHV4-59)
ARDRSGWAYFDY

SEQ ID NO: 15775 - protein, 9 aa, Homo sapiens
  Light chain CDR3 for antibody 7888 (IGKV1-6)
LQDYNYPRT

SEQ ID NO: 15776 - protein, 13 aa, Homo sapiens
  Heavy chain CDR3 for antibody 7888 (IGHV3-33)
AREGDILTGYYDY

SEQ ID NO: 15777 - protein, 10 aa, Homo sapiens
  Light chain CDR3 for antibody 7889 (IGKV1-39)
QQSYSTPMYT

SEQ ID NO: 15778 - protein, 12 aa, Homo sapiens
  Heavy chain CDR3 for antibody 7889 (IGHV3-33)
AKDPGWQQLAEY

SEQ ID NO: 15779 - protein, 9 aa, Homo sapiens
  Light chain CDR3 for antibody 7890 (IGKV1-27)
QKYNSAPYT

SEQ ID NO: 15780 - protein, 11 aa, Homo sapiens
  Heavy chain CDR3 for antibody 7890 (IGHV3-23)
AKAGIVGCLDV

SEQ ID NO: 15781 - protein, 9 aa, Homo sapiens
  Light chain CDR3 for antibody 7891 (IGKV1-6)
LQDYNYPWT

SEQ ID NO: 15782 - protein, 15 aa, Homo sapiens
  Heavy chain CDR3 for antibody 7891 (IGHV3-33)
ATERAYGSGSSYCDY

SEQ ID NO: 15783 - protein, 9 aa, Homo sapiens
  Light chain CDR3 for antibody 7892 (IGKV1-27)
QKYNSAPYT

SEQ ID NO: 15784 - protein, 10 aa, Homo sapiens
  Heavy chain CDR3 for antibody 7892 (IGHV3-30)
ARDNFEGMDV

SEQ ID NO: 15785 - protein, 9 aa, Homo sapiens
  Light chain CDR3 for antibody 7893 (IGKV1-27)
QKYNSAPYT

SEQ ID NO: 15786 - protein, 13 aa, Homo sapiens
  Heavy chain CDR3 for antibody 7893 (IGHV3-53)
ARSGSYWGYYFDY

SEQ ID NO: 15787 - protein, 9 aa, Homo sapiens
  Light chain CDR3 for antibody 7894 (IGKV1D-16)
QQYNSFPLT

SEQ ID NO: 15788 - protein, 15 aa, Homo sapiens
  Heavy chain CDR3 for antibody 7894 (IGHV3-74)
ARGSGSHYHYYGMDV

SEQ ID NO: 15789 - protein, 10 aa, Homo sapiens
  Light chain CDR3 for antibody 7895 (IGKV1-17)
LQHNSYPMYT

SEQ ID NO: 15790 - protein, 10 aa, Homo sapiens
  Heavy chain CDR3 for antibody 7895 (IGHV3-23)
AKDHYGDYPY

SEQ ID NO: 15791 - protein, 9 aa, Homo sapiens
  Light chain CDR3 for antibody 7896 (IGKV3-11)
QQRSNWPYT

SEQ ID NO: 15792 - protein, 17 aa, Homo sapiens
  Heavy chain CDR3 for antibody 7896 (IGHV3-15)
TTERYPRRYYYYFGMDV

SEQ ID NO: 15793 - protein, 9 aa, Homo sapiens
  Light chain CDR3 for antibody 7897 (IGKV1-9)
QQLNSYPWT

SEQ ID NO: 15794 - protein, 13 aa, Homo sapiens
  Heavy chain CDR3 for antibody 7897 (IGHV3-30)
ARVDTMVRGVMAY

SEQ ID NO: 15795 - protein, 9 aa, Homo sapiens
  Light chain CDR3 for antibody 7898 (IGKV1-6)
LQDYNSPFT

SEQ ID NO: 15796 - protein, 12 aa, Homo sapiens
  Heavy chain CDR3 for antibody 7898 (IGHV3-33)
ARVDTAAPYFDY

SEQ ID NO: 15797 - protein, 9 aa, Homo sapiens
  Light chain CDR3 for antibody 7899 (IGKV2-30)
MQGTHWPLT

SEQ ID NO: 15798 - protein, 15 aa, Homo sapiens
  Heavy chain CDR3 for antibody 7899 (IGHV3-33)
ARAYDLPHYYYGMDV

SEQ ID NO: 15799 - protein, 9 aa, Homo sapiens
  Light chain CDR3 for antibody 7900 (IGKV1-6)
LQDYNHPFT

SEQ ID NO: 15800 - protein, 17 aa, Homo sapiens
  Heavy chain CDR3 for antibody 7900 (IGHV1-18)
ARVRAFTMVRGVPPFDY

SEQ ID NO: 15801 - protein, 8 aa, Homo sapiens
  Light chain CDR3 for antibody 7901 (IGKV3-20)
QQYGRSFT

SEQ ID NO: 15802 - protein, 12 aa, Homo sapiens
  Heavy chain CDR3 for antibody 7901 (IGHV3-23)
AKGAVVTAIFDY

SEQ ID NO: 15803 - protein, 9 aa, Homo sapiens
  Light chain CDR3 for antibody 7902 (IGKV1D-16)
QQYHSYPWT

SEQ ID NO: 15804 - protein, 12 aa, Homo sapiens
  Heavy chain CDR3 for antibody 7902 (IGHV3-23)
AKGAVVTAIFDY

SEQ ID NO: 15805 - protein, 9 aa, Homo sapiens
  Light chain CDR3 for antibody 7903 (IGKV1-33)
QQYDNLPFT

SEQ ID NO: 15806 - protein, 17 aa, Homo sapiens
  Heavy chain CDR3 for antibody 7903 (IGHV4-59)
ARDFLVRGEGSYYGMDV

SEQ ID NO: 15807 - protein, 8 aa, Homo sapiens
  Light chain CDR3 for antibody 7904 (IGKV6-21)
HQSSSLPT

SEQ ID NO: 15808 - protein, 15 aa, Homo sapiens
  Heavy chain CDR3 for antibody 7904 (IGHV1-18)
ARGYCSSTSCYYFDY

SEQ ID NO: 15809 - protein, 10 aa, Homo sapiens
  Light chain CDR3 for antibody 7905 (IGKV1-39)
QQSYSTPMYT

SEQ ID NO: 15810 - protein, 16 aa, Homo sapiens
  Heavy chain CDR3 for antibody 7905 (IGHV4-59)
ARDTPYYSGSGRPFDS

SEQ ID NO: 15811 - protein, 10 aa, Homo sapiens
  Light chain CDR3 for antibody 7906 (IGKV3-11)
QQRSNWPTLT

SEQ ID NO: 15812 - protein, 16 aa, Homo sapiens
  Heavy chain CDR3 for antibody 7906 (IGHV3-23)
AKDLRYFDWSLYAFDI

SEQ ID NO: 15813 - protein, 9 aa, Homo sapiens
  Light chain CDR3 for antibody 7907 (IGKV1-37)
QRTSNAPYT

SEQ ID NO: 15814 - protein, 13 aa, Homo sapiens
  Heavy chain CDR3 for antibody 7907 (IGHV3-33)
ARSGSYWGYYFDY

SEQ ID NO: 15815 - protein, 9 aa, Homo sapiens
  Light chain CDR3 for antibody 7908 (IGKV1-6)
LQDYNYPWT

SEQ ID NO: 15816 - protein, 14 aa, Homo sapiens
  Heavy chain CDR3 for antibody 7908 (IGHV3-33)
ARDNILTAYYLFDY

SEQ ID NO: 15817 - protein, 9 aa, Homo sapiens
  Light chain CDR3 for antibody 7909 (IGKV1D-13)
QRFNNYLYT

SEQ ID NO: 15818 - protein, 17 aa, Homo sapiens
  Heavy chain CDR3 for antibody 7909 (IGHV3-33)
ARAYYDILTGYSYYFDY

SEQ ID NO: 15819 - protein, 9 aa, Homo sapiens
  Light chain CDR3 for antibody 7910 (IGKV1-6)
LQDFNYPRT

SEQ ID NO: 15820 - protein, 19 aa, Homo sapiens
  Heavy chain CDR3 for antibody 7910 (IGHV4-59)
AREGHYYTSGSYRPNWFDP

SEQ ID NO: 15821 - protein, 8 aa, Homo sapiens
  Light chain CDR3 for antibody 7911 (IGKV1-5)
QQYNSYWT

SEQ ID NO: 15822 - protein, 13 aa, Homo sapiens
  Heavy chain CDR3 for antibody 7911 (IGHV3-33)
ARQSSGWFDAFDI

SEQ ID NO: 15823 - protein, 9 aa, Homo sapiens
  Light chain CDR3 for antibody 7912 (IGKV1D-13)
QQFNNYPRT

SEQ ID NO: 15824 - protein, 11 aa, Homo sapiens
  Heavy chain CDR3 for antibody 7912 (IGHV1-24)
ATYFGSGSLDY

SEQ ID NO: 15825 - protein, 9 aa, Homo sapiens
  Light chain CDR3 for antibody 7913 (IGKV1D-13)
QQFNNYPHT

SEQ ID NO: 15826 - protein, 13 aa, Homo sapiens
  Heavy chain CDR3 for antibody 7913 (IGHV1-18)
ARGGGVRGAPLDY

SEQ ID NO: 15827 - protein, 9 aa, Homo sapiens
  Light chain CDR3 for antibody 7914 (IGKV1D-13)
QQFNNYPST

SEQ ID NO: 15828 - protein, 15 aa, Homo sapiens
  Heavy chain CDR3 for antibody 7914 (IGHV3-33)
ARGGTGYYSYWYFDL

SEQ ID NO: 15829 - protein, 9 aa, Homo sapiens
  Light chain CDR3 for antibody 7915 (IGKV1-16)
QKYNSNPLT

SEQ ID NO: 15830 - protein, 14 aa, Homo sapiens
  Heavy chain CDR3 for antibody 7915 (IGHV3-33)
ARASSGSSYWYFDL

SEQ ID NO: 15831 - protein, 9 aa, Homo sapiens
  Light chain CDR3 for antibody 7916 (IGKV1-9)
QQLNNYLFT

SEQ ID NO: 15832 - protein, 13 aa, Homo sapiens
  Heavy chain CDR3 for antibody 7916 (IGHV4-34)
ASNFYYYYYGMDV

SEQ ID NO: 15833 - protein, 9 aa, Homo sapiens
  Light chain CDR3 for antibody 7917 (IGKV1-16)
QHYNDYPFT

SEQ ID NO: 15834 - protein, 17 aa, Homo sapiens
  Heavy chain CDR3 for antibody 7917 (IGHV4-59)
ARDFLVRGEGSYYGMDV

SEQ ID NO: 15835 - protein, 9 aa, Homo sapiens
  Light chain CDR3 for antibody 7918 (IGKV1-27)
QKYNSAPYT

SEQ ID NO: 15836 - protein, 9 aa, Homo sapiens
  Heavy chain CDR3 for antibody 7918 (IGHV1-18)
ARGKDWFDH

SEQ ID NO: 15837 - protein, 9 aa, Homo sapiens
  Light chain CDR3 for antibody 7919 (IGKV1-9)
QQLKSYLYT

SEQ ID NO: 15838 - protein, 15 aa, Homo sapiens
  Heavy chain CDR3 for antibody 7919 (IGHV1-18)
ARLRWFGELSGWFDP

SEQ ID NO: 15839 - protein, 9 aa, Homo sapiens
  Light chain CDR3 for antibody 7920 (IGKV1D-16)
QQYHSYPYT

SEQ ID NO: 15840 - protein, 18 aa, Homo sapiens
  Heavy chain CDR3 for antibody 7920 (IGHV4-59)
AREGHDYTSGSYYKAFDY

SEQ ID NO: 15841 - protein, 9 aa, Homo sapiens
  Light chain CDR3 for antibody 7921 (IGKV1-9)
QQFNSYTRT

SEQ ID NO: 15842 - protein, 14 aa, Homo sapiens
  Heavy chain CDR3 for antibody 7921 (IGHV3-33)
ARGGYSGYRYYFDY

SEQ ID NO: 15843 - protein, 9 aa, Homo sapiens
  Light chain CDR3 for antibody 7922 (IGKV1D-16)
QQFNNYPHT

SEQ ID NO: 15844 - protein, 16 aa, Homo sapiens
  Heavy chain CDR3 for antibody 7922 (IGHV4-39)
ARHPLILTGYPNWFDP

SEQ ID NO: 15845 - protein, 9 aa, Homo sapiens
  Light chain CDR3 for antibody 7923 (IGKV1D-13)
QQFNNYPHT

SEQ ID NO: 15846 - protein, 20 aa, Homo sapiens
  Heavy chain CDR3 for antibody 7923 (IGHV3-33)
ARDPAQLERRYYYFYYGMDV

SEQ ID NO: 15847 - protein, 10 aa, Homo sapiens
  Light chain CDR3 for antibody 7924 (IGKV3-11)
QQRSNWPIFT

SEQ ID NO: 15848 - protein, 14 aa, Homo sapiens
  Heavy chain CDR3 for antibody 7924 (IGHV3-20)
AREGWFGDYYGMDV

SEQ ID NO: 15849 - protein, 8 aa, Homo sapiens
  Light chain CDR3 for antibody 7925 (IGKV3-20)
QQYGRSFT

SEQ ID NO: 15850 - protein, 19 aa, Homo sapiens
  Heavy chain CDR3 for antibody 7925 (IGHV4-59)
ARDRVVGATTYYYYYGMDV

SEQ ID NO: 15851 - protein, 9 aa, Homo sapiens
  Light chain CDR3 for antibody 7926 (IGKV1-27)
QKYNSAPYT

SEQ ID NO: 15852 - protein, 12 aa, Homo sapiens
  Heavy chain CDR3 for antibody 7926 (IGHV3-64)
ARVNSGSPYFDY

SEQ ID NO: 15853 - protein, 10 aa, Homo sapiens
  Light chain CDR3 for antibody 7927 (IGKV3-15)
QQYNNWPPIT

SEQ ID NO: 15854 - protein, 15 aa, Homo sapiens
  Heavy chain CDR3 for antibody 7927 (IGHV3-33)
ARGYYYGSGSFPVDY

SEQ ID NO: 15855 - protein, 9 aa, Homo sapiens
  Light chain CDR3 for antibody 7928 (IGKV6-21)
HQSSSLPLT

SEQ ID NO: 15856 - protein, 14 aa, Homo sapiens
  Heavy chain CDR3 for antibody 7928 (IGHV3-33)
ARDGLVGASSWFDP

SEQ ID NO: 15857 - protein, 9 aa, Homo sapiens
  Light chain CDR3 for antibody 7929 (IGKV1-9)
QQLNSYPYT

SEQ ID NO: 15858 - protein, 19 aa, Homo sapiens
  Heavy chain CDR3 for antibody 7929 (IGHV1-46)
ARKGHYDILTGYYPDAFDI

SEQ ID NO: 15859 - protein, 9 aa, Homo sapiens
  Light chain CDR3 for antibody 7930 (IGKV2D-28)
MQALQTPPT

SEQ ID NO: 15860 - protein, 20 aa, Homo sapiens
  Heavy chain CDR3 for antibody 7930 (IGHV3-33)
ARDPAQLERRYYYFYYGMDV

SEQ ID NO: 15861 - protein, 9 aa, Homo sapiens
  Light chain CDR3 for antibody 7931 (IGKV1D-13)
QQFNNYPHT

SEQ ID NO: 15862 - protein, 13 aa, Homo sapiens
  Heavy chain CDR3 for antibody 7931 (IGHV4-39)
ARRDGGYYGYFDY

SEQ ID NO: 15863 - protein, 8 aa, Homo sapiens
  Light chain CDR3 for antibody 7932 (IGKV3D-7)
QQDYSLLT

SEQ ID NO: 15864 - protein, 18 aa, Homo sapiens
  Heavy chain CDR3 for antibody 7932 (IGHV3-33)
ARDYDSLTTYPEDYGMDV

SEQ ID NO: 15865 - protein, 9 aa, Homo sapiens
  Light chain CDR3 for antibody 7933 (IGKV4-1)
QQYYTTPPT

SEQ ID NO: 15866 - protein, 18 aa, Homo sapiens
  Heavy chain CDR3 for antibody 7933 (IGHV3-23)
AKEGNYYGSGSYWGYFDP

SEQ ID NO: 15867 - protein, 8 aa, Homo sapiens
  Light chain CDR3 for antibody 7934 (IGKV3D-7)
QQDYNLVT

SEQ ID NO: 15868 - protein, 15 aa, Homo sapiens
  Heavy chain CDR3 for antibody 7934 (IGHV3-23)
AKDGGWNYYYYGMDV

SEQ ID NO: 15869 - protein, 9 aa, Homo sapiens
  Light chain CDR3 for antibody 7935 (IGKV2-30)
MQGTHWPLT

SEQ ID NO: 15870 - protein, 14 aa, Homo sapiens
  Heavy chain CDR3 for antibody 7935 (IGHV3-33)
AREDYYGPLNWFDP

SEQ ID NO: 15871 - protein, 9 aa, Homo sapiens
  Light chain CDR3 for antibody 7936 (IGKV3-15)
QQYNNWPYT

SEQ ID NO: 15872 - protein, 10 aa, Homo sapiens
  Heavy chain CDR3 for antibody 7936 (IGHV3-33)
AREWFGGFDI

SEQ ID NO: 15873 - protein, 11 aa, Homo sapiens
  Light chain CDR3 for antibody 7937 (IGKV3-11)
QQRSNWPPTWT

SEQ ID NO: 15874 - protein, 19 aa, Homo sapiens
  Heavy chain CDR3 for antibody 7937 (IGHV4-39)
ARQGDVLRYFDWLLGAFDI

SEQ ID NO: 15875 - protein, 10 aa, Homo sapiens
  Light chain CDR3 for antibody 7938 (IGKV1-39)
QQSYSTPMYT

SEQ ID NO: 15876 - protein, 17 aa, Homo sapiens
  Heavy chain CDR3 for antibody 7938 (IGHV3-23)
AKDGIGELSYYYYGMDV

SEQ ID NO: 15877 - protein, 9 aa, Homo sapiens
  Light chain CDR3 for antibody 7939 (IGKV1-9)
QQLNNYLFT

SEQ ID NO: 15878 - protein, 12 aa, Homo sapiens
  Heavy chain CDR3 for antibody 7939 (IGHV4-61)
ARVYSSGWLFDY

SEQ ID NO: 15879 - protein, 9 aa, Homo sapiens
  Light chain CDR3 for antibody 7940 (IGKV1-17)
LQHNSYPYT

SEQ ID NO: 15880 - protein, 12 aa, Homo sapiens
  Heavy chain CDR3 for antibody 7940 (IGHV3-11)
VRVLLWFGESDY

SEQ ID NO: 15881 - protein, 9 aa, Homo sapiens
  Light chain CDR3 for antibody 7941 (IGKV3-20)
QQYGRSPRT

SEQ ID NO: 15882 - protein, 17 aa, Homo sapiens
  Heavy chain CDR3 for antibody 7941 (IGHV4-39)
ARVLRYFDWLSHDAFDI

SEQ ID NO: 15883 - protein, 8 aa, Homo sapiens
  Light chain CDR3 for antibody 7942 (IGKV1-5)
QQYNSYWT

SEQ ID NO: 15884 - protein, 11 aa, Homo sapiens
  Heavy chain CDR3 for antibody 7942 (IGHV3-33)
AREGAVARFDY

SEQ ID NO: 15885 - protein, 10 aa, Homo sapiens
  Light chain CDR3 for antibody 7943 (IGKV1-17)
LQHNSYPMYT

SEQ ID NO: 15886 - protein, 18 aa, Homo sapiens
  Heavy chain CDR3 for antibody 7943 (IGHV3-13)
ARDYYGSGSLYYYYGMDV

SEQ ID NO: 15887 - protein, 9 aa, Homo sapiens
  Light chain CDR3 for antibody 7944 (IGKV1-33)
QQYDNLPFT

SEQ ID NO: 15888 - protein, 13 aa, Homo sapiens
  Heavy chain CDR3 for antibody 7944 (IGHV3-33)
ARTDYYFYYGLDV

SEQ ID NO: 15889 - protein, 9 aa, Homo sapiens
  Light chain CDR3 for antibody 7945 (IGKV1-39)
QQSYRTPLT

SEQ ID NO: 15890 - protein, 17 aa, Homo sapiens
  Heavy chain CDR3 for antibody 7945 (IGHV4-61)
ARDGSGSYTHYYYGMDV

SEQ ID NO: 15891 - protein, 9 aa, Homo sapiens
  Light chain CDR3 for antibody 7946 (IGKV3-15)
QQYNNWPYT

SEQ ID NO: 15892 - protein, 20 aa, Homo sapiens
  Heavy chain CDR3 for antibody 7946 (IGHV3-33)
ARGGATLIRGLIDYYYGMDV

SEQ ID NO: 15893 - protein, 8 aa, Homo sapiens
  Light chain CDR3 for antibody 7947 (IGKV3-15)
QQRSNWLT

SEQ ID NO: 15894 - protein, 14 aa, Homo sapiens
  Heavy chain CDR3 for antibody 7947 (IGHV3-33)
ARGAAAGNFYGLDV

SEQ ID NO: 15895 - protein, 9 aa, Homo sapiens
  Light chain CDR3 for antibody 7948 (IGKV2-30)
MQGTHWPLT

SEQ ID NO: 15896 - protein, 12 aa, Homo sapiens
  Heavy chain CDR3 for antibody 7948 (IGHV3-11)
ARKQWLVQAFDI

SEQ ID NO: 15897 - protein, 10 aa, Homo sapiens
  Light chain CDR3 for antibody 7949 (IGKV3-11)
QQRSNWLMYT

SEQ ID NO: 15898 - protein, 19 aa, Homo sapiens
  Heavy chain CDR3 for antibody 7949 (IGHV3-33)
TRDPHYDILTGYAYYGMDV

SEQ ID NO: 15899 - protein, 10 aa, Homo sapiens
  Light chain CDR3 for antibody 7950 (IGKV1-17)
LQHNSYPMYT

SEQ ID NO: 15900 - protein, 17 aa, Homo sapiens
  Heavy chain CDR3 for antibody 7950 (IGHV4-39)
ARVLRYFDWLSHDAFDI

SEQ ID NO: 15901 - protein, 9 aa, Homo sapiens
  Light chain CDR3 for antibody 7951 (IGKV1-16)
QQYNSYPYT

SEQ ID NO: 15902 - protein, 14 aa, Homo sapiens
  Heavy chain CDR3 for antibody 7951 (IGHV1-18)
ARERGVRGVMYFDY

SEQ ID NO: 15903 - protein, 9 aa, Homo sapiens
  Light chain CDR3 for antibody 7952 (IGKV1-6)
LQDFHYPWT

SEQ ID NO: 15904 - protein, 12 aa, Homo sapiens
  Heavy chain CDR3 for antibody 7952 (IGHV3-33)
ARESGGSYSFDY

SEQ ID NO: 15905 - protein, 11 aa, Homo sapiens
  Light chain CDR3 for antibody 7953 (IGKV3-11)
QQRSNWPPTWT

SEQ ID NO: 15906 - protein, 12 aa, Homo sapiens
  Heavy chain CDR3 for antibody 7953 (IGHV1-46)
AREDYDIDGMDV

SEQ ID NO: 15907 - protein, 9 aa, Homo sapiens
  Light chain CDR3 for antibody 7954 (IGKV1-9)
QQLKSYLYT

SEQ ID NO: 15908 - protein, 18 aa, Homo sapiens
  Heavy chain CDR3 for antibody 7954 (IGHV4-39)
ARQYYFGSGNYYRGWFDP

SEQ ID NO: 15909 - protein, 10 aa, Homo sapiens
  Light chain CDR3 for antibody 7955 (IGKV1-17)
LQHNSYPMYT

SEQ ID NO: 15910 - protein, 15 aa, Homo sapiens
  Heavy chain CDR3 for antibody 7955 (IGHV3-74)
ARGSGSHYHYYGMDV

SEQ ID NO: 15911 - protein, 10 aa, Homo sapiens
  Light chain CDR3 for antibody 7956 (IGKV3-11)
QQRSNWPALT

SEQ ID NO: 15912 - protein, 13 aa, Homo sapiens
  Heavy chain CDR3 for antibody 7956 (IGHV4-39)
ARRDGSYYGYFGY

SEQ ID NO: 15913 - protein, 9 aa, Homo sapiens
  Light chain CDR3 for antibody 7957 (IGKV5-2)
LQHDNFPYT

SEQ ID NO: 15914 - protein, 12 aa, Homo sapiens
  Heavy chain CDR3 for antibody 7957 (IGHV3-9)
AEDPFLGTSFDY

SEQ ID NO: 15915 - protein, 9 aa, Homo sapiens
  Light chain CDR3 for antibody 7958 (IGKV5-2)
LQHDNFPYT

SEQ ID NO: 15916 - protein, 16 aa, Homo sapiens
  Heavy chain CDR3 for antibody 7958 (IGHV3-11)
ARYHYGSGSYYNVGDY

SEQ ID NO: 15917 - protein, 9 aa, Homo sapiens
  Light chain CDR3 for antibody 7959 (IGKV2-30)
MQGTHWPLT

SEQ ID NO: 15918 - protein, 17 aa, Homo sapiens
  Heavy chain CDR3 for antibody 7959 (IGHV3-33)
ARDSYDILTGYYKPFDY

SEQ ID NO: 15919 - protein, 9 aa, Homo sapiens
  Light chain CDR3 for antibody 7960 (IGKV2-30)
MQGTHWPLT

SEQ ID NO: 15920 - protein, 14 aa, Homo sapiens
  Heavy chain CDR3 for antibody 7960 (IGHV3-20)
ARDEGSGGYDVFDI

SEQ ID NO: 15921 - protein, 8 aa, Homo sapiens
  Light chain CDR3 for antibody 7961 (IGKV3D-7)
QQDYNLLT

SEQ ID NO: 15922 - protein, 18 aa, Homo sapiens
  Heavy chain CDR3 for antibody 7961 (IGHV3-33)
ARDRYYDILTGYYMGFDY

SEQ ID NO: 15923 - protein, 10 aa, Homo sapiens
  Light chain CDR3 for antibody 7962 (IGKV3-11)
QQRSNWPALT

SEQ ID NO: 15924 - protein, 12 aa, Homo sapiens
  Heavy chain CDR3 for antibody 7962 (IGHV3-23)
AKEGLGSDYESY

SEQ ID NO: 15925 - protein, 9 aa, Homo sapiens
  Light chain CDR3 for antibody 7963 (IGKV1D-13)
QQFNNYPRT

SEQ ID NO: 15926 - protein, 17 aa, Homo sapiens
  Heavy chain CDR3 for antibody 7963 (IGHV1-24)
ATHYGSGSHYKGYGMDV

SEQ ID NO: 15927 - protein, 8 aa, Homo sapiens
  Light chain CDR3 for antibody 7964 (IGKV2D-28)
MQALQTPT

SEQ ID NO: 15928 - protein, 13 aa, Homo sapiens
  Heavy chain CDR3 for antibody 7964 (IGHV4-34)
ASNFYYYYYGMDV

SEQ ID NO: 15929 - protein, 9 aa, Homo sapiens
  Light chain CDR3 for antibody 7965 (IGKV1-37)
QRTSNAPYT

SEQ ID NO: 15930 - protein, 12 aa, Homo sapiens
  Heavy chain CDR3 for antibody 7965 (IGHV3-h)
AREDYYYYGMDV

SEQ ID NO: 15931 - protein, 9 aa, Homo sapiens
  Light chain CDR3 for antibody 7966 (IGKV1-6)
QQLKSYLYT

SEQ ID NO: 15932 - protein, 9 aa, Homo sapiens
  Heavy chain CDR3 for antibody 7966 (IGHV3-13)
ARDRWYFDL

SEQ ID NO: 15933 - protein, 9 aa, Homo sapiens
  Light chain CDR3 for antibody 7967 (IGKV1-37)
QRTYNAPFT

SEQ ID NO: 15934 - protein, 12 aa, Homo sapiens
  Heavy chain CDR3 for antibody 7967 (IGHV3-23)
AKDGWFGESLDY

SEQ ID NO: 15935 - protein, 10 aa, Homo sapiens
  Light chain CDR3 for antibody 7968 (IGKV3-11)
QQRSNWPIFT

SEQ ID NO: 15936 - protein, 15 aa, Homo sapiens
  Heavy chain CDR3 for antibody 7968 (IGHV3-23)
AKDLSSGWYAYFFDY

SEQ ID NO: 15937 - protein, 9 aa, Homo sapiens
  Light chain CDR3 for antibody 7969 (IGKV1-9)
QQLITYPYT

SEQ ID NO: 15938 - protein, 12 aa, Homo sapiens
  Heavy chain CDR3 for antibody 7969 (IGHV3-33)
ARDPGYYYGLDV

SEQ ID NO: 15939 - protein, 9 aa, Homo sapiens
  Light chain CDR3 for antibody 7970 (IGKV3D-7)
QQDYNLPYT

SEQ ID NO: 15940 - protein, 18 aa, Homo sapiens
  Heavy chain CDR3 for antibody 7970 (IGHV3-33)
AREGYDILTGYYNVKFDY

SEQ ID NO: 15941 - protein, 9 aa, Homo sapiens
  Light chain CDR3 for antibody 7971 (IGKV3D-7)
QQDYKLPLT

SEQ ID NO: 15942 - protein, 12 aa, Homo sapiens
  Heavy chain CDR3 for antibody 7971 (IGHV4-34)
ARGYSSSWYFDY

SEQ ID NO: 15943 - protein, 9 aa, Homo sapiens
  Light chain CDR3 for antibody 7972 (IGKV1-6)
LQDFHYPWT

SEQ ID NO: 15944 - protein, 14 aa, Homo sapiens
  Heavy chain CDR3 for antibody 7972 (IGHV3-21)
ARQDYDILTGLFDY

SEQ ID NO: 15945 - protein, 9 aa, Homo sapiens
  Light chain CDR3 for antibody 7973 (IGKV1-6)
LQDFHYPWT

SEQ ID NO: 15946 - protein, 16 aa, Homo sapiens
  Heavy chain CDR3 for antibody 7973 (IGHV3-33)
ARGYDMLTGDYHGMDV

SEQ ID NO: 15947 - protein, 9 aa, Homo sapiens
  Light chain CDR3 for antibody 7974 (IGKV1-17)
LHSNNYPWT

SEQ ID NO: 15948 - protein, 12 aa, Homo sapiens
  Heavy chain CDR3 for antibody 7974 (IGHV3-13)
VREAGIPDAFDI

SEQ ID NO: 15949 - protein, 10 aa, Homo sapiens
  Light chain CDR3 for antibody 7975 (IGKV3-11)
QQRSNWPIYT

SEQ ID NO: 15950 - protein, 9 aa, Homo sapiens
  Heavy chain CDR3 for antibody 7975 (IGHV3-23)
ARIWWLKDY

SEQ ID NO: 15951 - protein, 8 aa, Homo sapiens
  Light chain CDR3 for antibody 7976 (IGKV6-21)
HQSSSLPT

SEQ ID NO: 15952 - protein, 13 aa, Homo sapiens
  Heavy chain CDR3 for antibody 7976 (IGHV3-11)
ARDEGYRGYVLDT

SEQ ID NO: 15953 - protein, 8 aa, Homo sapiens
  Light chain CDR3 for antibody 7977 (IGKV3D-7)
QQDYNLLT

SEQ ID NO: 15954 - protein, 15 aa, Homo sapiens
  Heavy chain CDR3 for antibody 7977 (IGHV3-33)
ARRSILTGSYWYFDL

SEQ ID NO: 15955 - protein, 9 aa, Homo sapiens
  Light chain CDR3 for antibody 7978 (IGKV1-39)
QQSYSTPIT

SEQ ID NO: 15956 - protein, 14 aa, Homo sapiens
  Heavy chain CDR3 for antibody 7978 (IGHV1-46)
ARKGIVGGFDAFDV

SEQ ID NO: 15957 - protein, 9 aa, Homo sapiens
  Light chain CDR3 for antibody 7979 (IGKV1D-16)
QQYAGYPPT

SEQ ID NO: 15958 - protein, 14 aa, Homo sapiens
  Heavy chain CDR3 for antibody 7979 (IGHV3-33)
ARRGSPLRPSHLDV

SEQ ID NO: 15959 - protein, 9 aa, Homo sapiens
  Light chain CDR3 for antibody 7980 (IGKV1D-13)
QRFNNYLYT

SEQ ID NO: 15960 - protein, 18 aa, Homo sapiens
  Heavy chain CDR3 for antibody 7980 (IGHV3-33)
VRDRERYGSGSYPDAFDI

SEQ ID NO: 15961 - protein, 8 aa, Homo sapiens
  Light chain CDR3 for antibody 7981 (IGKV1D-13)
QQFNNYPT

SEQ ID NO: 15962 - protein, 19 aa, Homo sapiens
  Heavy chain CDR3 for antibody 7981 (IGHV3-33)
ARDSGYSGYDYYYYYGMDV

SEQ ID NO: 15963 - protein, 9 aa, Homo sapiens
  Light chain CDR3 for antibody 7982 (IGKV3-20)
QQYGSSPYT

SEQ ID NO: 15964 - protein, 17 aa, Homo sapiens
  Heavy chain CDR3 for antibody 7982 (IGHV3-23)
AKDRDWKDGYYYFGMDV

SEQ ID NO: 15965 - protein, 9 aa, Homo sapiens
  Light chain CDR3 for antibody 7983 (IGKV1D-16)
QQYNSYPFT

SEQ ID NO: 15966 - protein, 9 aa, Homo sapiens
  Heavy chain CDR3 for antibody 7983 (IGHV4-34)
AREKYYFDY

SEQ ID NO: 15967 - protein, 9 aa, Homo sapiens
  Light chain CDR3 for antibody 7984 (IGKV1-9)
QQLKSYLYT

SEQ ID NO: 15968 - protein, 13 aa, Homo sapiens
  Heavy chain CDR3 for antibody 7984 (IGHV1-18)
ARKWEWDLLNFDY

SEQ ID NO: 15969 - protein, 10 aa, Homo sapiens
  Light chain CDR3 for antibody 7985 (IGKV1-17)
LQHNSYPMYT

SEQ ID NO: 15970 - protein, 11 aa, Homo sapiens
  Heavy chain CDR3 for antibody 7985 (IGHV3-33)
AREGAVARFDY

SEQ ID NO: 15971 - protein, 8 aa, Homo sapiens
  Light chain CDR3 for antibody 7986 (IGKV1-5)
QQYNSYYT

SEQ ID NO: 15972 - protein, 14 aa, Homo sapiens
  Heavy chain CDR3 for antibody 7986 (IGHV4-39)
ARDSGYDYYYGMDV

SEQ ID NO: 15973 - protein, 9 aa, Homo sapiens
  Light chain CDR3 for antibody 7987 (IGKV1-6)
LQDFNYPRT

SEQ ID NO: 15974 - protein, 13 aa, Homo sapiens
  Heavy chain CDR3 for antibody 7987 (IGHV3-11)
ARDGGAAAGTWDY

SEQ ID NO: 15975 - protein, 9 aa, Homo sapiens
  Light chain CDR3 for antibody 7988 (IGKV3-15)
QQYNNWPYT

SEQ ID NO: 15976 - protein, 16 aa, Homo sapiens
  Heavy chain CDR3 for antibody 7988 (IGHV3-33)
ARDKNTDYDILTGFDY

SEQ ID NO: 15977 - protein, 8 aa, Homo sapiens
  Light chain CDR3 for antibody 7989 (IGKV1D-13)
QQFNNYLT

SEQ ID NO: 15978 - protein, 13 aa, Homo sapiens
  Heavy chain CDR3 for antibody 7989 (IGHV3-33)
ARQSSGWFDAFDI

SEQ ID NO: 15979 - protein, 10 aa, Homo sapiens
  Light chain CDR3 for antibody 7990 (IGKV3-11)
QQRSNWPAYT

SEQ ID NO: 15980 - protein, 18 aa, Homo sapiens
  Heavy chain CDR3 for antibody 7990 (IGHV3-33)
ARDRGDILTGYYKGWFDP

SEQ ID NO: 15981 - protein, 9 aa, Homo sapiens
  Light chain CDR3 for antibody 7991 (IGKV1-17)
LQHNSYPYT

SEQ ID NO: 15982 - protein, 10 aa, Homo sapiens
  Heavy chain CDR3 for antibody 7991 (IGHV4-59)
VSSGTSLLAY

SEQ ID NO: 15983 - protein, 10 aa, Homo sapiens
  Light chain CDR3 for antibody 7992 (IGKV1-39)
QQSYSTPMYT

SEQ ID NO: 15984 - protein, 11 aa, Homo sapiens
  Heavy chain CDR3 for antibody 7992 (IGHV3-23)
AKGLWSYYFDY

SEQ ID NO: 15985 - protein, 9 aa, Homo sapiens
  Light chain CDR3 for antibody 7993 (IGKV1-9)
QQLNSYPYT

SEQ ID NO: 15986 - protein, 12 aa, Homo sapiens
  Heavy chain CDR3 for antibody 7993 (IGHV3-13)
AREAGIPDDFDI

SEQ ID NO: 15987 - protein, 9 aa, Homo sapiens
  Light chain CDR3 for antibody 7994 (IGKV1-17)
QQYYSYPRT

SEQ ID NO: 15988 - protein, 15 aa, Homo sapiens
  Heavy chain CDR3 for antibody 7994 (IGHV3-33)
ARDRGSSGWRDWCDP

SEQ ID NO: 15989 - protein, 9 aa, Homo sapiens
  Light chain CDR3 for antibody 7995 (IGKV1-9)
QQLNSYPYT

SEQ ID NO: 15990 - protein, 14 aa, Homo sapiens
  Heavy chain CDR3 for antibody 7995 (IGHV3-15)
SIYFYGSGRDYFDY

SEQ ID NO: 15991 - protein, 9 aa, Homo sapiens
  Light chain CDR3 for antibody 7996 (IGKV1-6)
LQDYNYPYT

SEQ ID NO: 15992 - protein, 23 aa, Homo sapiens
  Heavy chain CDR3 for antibody 7996 (IGHV3-30)
ARDGDYFGSGSQRDYHYYYGLDV

SEQ ID NO: 15993 - protein, 10 aa, Homo sapiens
  Light chain CDR3 for antibody 7997 (IGKV1-9)
QQLDSYPMYT

SEQ ID NO: 15994 - protein, 15 aa, Homo sapiens
  Heavy chain CDR3 for antibody 7997 (IGHV3-74)
ARGSGSHYHYYGMDV

SEQ ID NO: 15995 - protein, 9 aa, Homo sapiens
  Light chain CDR3 for antibody 7998 (IGKV4-1)
QQYYTTPYT

SEQ ID NO: 15996 - protein, 18 aa, Homo sapiens
  Heavy chain CDR3 for antibody 7998 (IGHV3-33)
ARGYYGSGNFYKDSGMDV

SEQ ID NO: 15997 - protein, 9 aa, Homo sapiens
  Light chain CDR3 for antibody 7999 (IGKV6-21)
HQSYSLPHT

SEQ ID NO: 15998 - protein, 12 aa, Homo sapiens
  Heavy chain CDR3 for antibody 7999 (IGHV3-13)
VREAGIPDAFDI

SEQ ID NO: 15999 - protein, 10 aa, Homo sapiens
  Light chain CDR3 for antibody 8000 (IGKV3-15)
QQYNNWPPIT

SEQ ID NO: 16000 - protein, 15 aa, Homo sapiens
  Heavy chain CDR3 for antibody 8000 (IGHV4-59)
ARDLGHYYGSVSIDY

SEQ ID NO: 16001 - protein, 9 aa, Homo sapiens
  Light chain CDR3 for antibody 8001 (IGKV1-39)
QQSYSTPYT

SEQ ID NO: 16002 - protein, 15 aa, Homo sapiens
  Heavy chain CDR3 for antibody 8001 (IGHV3-33)
ARDALAVTGTGWFDP

SEQ ID NO: 16003 - protein, 8 aa, Homo sapiens
  Light chain CDR3 for antibody 8002 (IGKV3D-7)
QQDYNLVT

SEQ ID NO: 16004 - protein, 13 aa, Homo sapiens
  Heavy chain CDR3 for antibody 8002 (IGHV4-39)
ARHHYGSGSLRDY

SEQ ID NO: 16005 - protein, 9 aa, Homo sapiens
  Light chain CDR3 for antibody 8003 (IGKV1-6)
LQDYNYPRT

SEQ ID NO: 16006 - protein, 15 aa, Homo sapiens
  Heavy chain CDR3 for antibody 8003 (IGHV1-18)
AREDAMIRAKWGFDP

SEQ ID NO: 16007 - protein, 10 aa, Homo sapiens
  Light chain CDR3 for antibody 8004 (IGKV3-15)
QQYNNWPPYT

SEQ ID NO: 16008 - protein, 12 aa, Homo sapiens
  Heavy chain CDR3 for antibody 8004 (IGHV4-61)
ARVDSSGWFFDY

SEQ ID NO: 16009 - protein, 9 aa, Homo sapiens
  Light chain CDR3 for antibody 8005 (IGKV1-6)
LQDYNYPWT

SEQ ID NO: 16010 - protein, 17 aa, Homo sapiens
  Heavy chain CDR3 for antibody 8005 (IGHV4-59)
ARRTTMVREIIVTHFDY

SEQ ID NO: 16011 - protein, 9 aa, Homo sapiens
  Light chain CDR3 for antibody 8006 (IGKV1D-13)
QQFNNYPYT

SEQ ID NO: 16012 - protein, 10 aa, Homo sapiens
  Heavy chain CDR3 for antibody 8006 (IGHV3-11)
ARGQWPPLDY

SEQ ID NO: 16013 - protein, 10 aa, Homo sapiens
  Light chain CDR3 for antibody 8007 (IGKV1-17)
LQHNSYPMYT

SEQ ID NO: 16014 - protein, 9 aa, Homo sapiens
  Heavy chain CDR3 for antibody 8007 (IGHV3-33)
ARATVGVDY

SEQ ID NO: 16015 - protein, 8 aa, Homo sapiens
  Light chain CDR3 for antibody 8008 (IGKV1D-13)
QQFNNYPT

SEQ ID NO: 16016 - protein, 11 aa, Homo sapiens
  Heavy chain CDR3 for antibody 8008 (IGHV3-13)
AREAIIGPFDY

SEQ ID NO: 16017 - protein, 9 aa, Homo sapiens
  Light chain CDR3 for antibody 8009 (IGKV1-6)
LQDFHYPWT

SEQ ID NO: 16018 - protein, 24 aa, Homo sapiens
  Heavy chain CDR3 for antibody 8009 (IGHV3-20)
ARGRITMVRGVIINPLDYYNGMDV

SEQ ID NO: 16019 - protein, 9 aa, Homo sapiens
  Light chain CDR3 for antibody 8010 (IGKV1-6)
LQDYNYPYT

SEQ ID NO: 16020 - protein, 13 aa, Homo sapiens
  Heavy chain CDR3 for antibody 8010 (IGHV3-33)
AKCIVAAIGGFDY

SEQ ID NO: 16021 - protein, 9 aa, Homo sapiens
  Light chain CDR3 for antibody 8011 (IGKV1-6)
LQDYKSPFT

SEQ ID NO: 16022 - protein, 17 aa, Homo sapiens
  Heavy chain CDR3 for antibody 8011 (IGHV3-23)
AKDYDILTGYSHNWFDP

SEQ ID NO: 16023 - protein, 9 aa, Homo sapiens
  Light chain CDR3 for antibody 8012 (IGKV5-2)
LQHDKFPYT

SEQ ID NO: 16024 - protein, 15 aa, Homo sapiens
  Heavy chain CDR3 for antibody 8012 (IGHV3-33)
ARDHLTGYYYYGMDV

SEQ ID NO: 16025 - protein, 9 aa, Homo sapiens
  Light chain CDR3 for antibody 8013 (IGKV1-9)
QQLKSYLYT

SEQ ID NO: 16026 - protein, 11 aa, Homo sapiens
  Heavy chain CDR3 for antibody 8013 (IGHV1-18)
ATYFGSGSLDY

SEQ ID NO: 16027 - protein, 9 aa, Homo sapiens
  Light chain CDR3 for antibody 8014 (IGKV1D-16)
QQYNSYPLT

SEQ ID NO: 16028 - protein, 9 aa, Homo sapiens
  Heavy chain CDR3 for antibody 8014 (IGHV3-30)
ARGRVSLDV

SEQ ID NO: 16029 - protein, 9 aa, Homo sapiens
  Light chain CDR3 for antibody 8015 (IGKV1D-13)
QRFNNYLYT

SEQ ID NO: 16030 - protein, 18 aa, Homo sapiens
  Heavy chain CDR3 for antibody 8015 (IGHV3-33)
ARREGIVGATTYYYGMDV

SEQ ID NO: 16031 - protein, 9 aa, Homo sapiens
  Light chain CDR3 for antibody 8016 (IGKV6-21)
HQSSSLPYT

SEQ ID NO: 16032 - protein, 20 aa, Homo sapiens
  Heavy chain CDR3 for antibody 8016 (IGHV3-23)
AKDRETGTTSYHYYYYGMDV

SEQ ID NO: 16033 - protein, 9 aa, Homo sapiens
  Light chain CDR3 for antibody 8017 (IGKV1-6)
LQDYKSPFT

SEQ ID NO: 16034 - protein, 12 aa, Homo sapiens
  Heavy chain CDR3 for antibody 8017 (IGHV3-33)
AREGTRWVYFDY

SEQ ID NO: 16035 - protein, 9 aa, Homo sapiens
  Light chain CDR3 for antibody 8018 (IGKV1-17)
LQHNSYPYT

SEQ ID NO: 16036 - protein, 16 aa, Homo sapiens
  Heavy chain CDR3 for antibody 8018 (IGHV3-33)
AREVGAKDYYYYGMDV

SEQ ID NO: 16037 - protein, 9 aa, Homo sapiens
  Light chain CDR3 for antibody 8019 (IGKV1-27)
QKYNSAPYT

SEQ ID NO: 16038 - protein, 14 aa, Homo sapiens
  Heavy chain CDR3 for antibody 8019 (IGHV3-33)
ARKGYSGRYYYFDY

SEQ ID NO: 16039 - protein, 9 aa, Homo sapiens
  Light chain CDR3 for antibody 8020 (IGKV3D-7)
QQDYNLPLT

SEQ ID NO: 16040 - protein, 11 aa, Homo sapiens
  Heavy chain CDR3 for antibody 8020 (IGHV3-33)
ARDILTGFLDH

SEQ ID NO: 16041 - protein, 11 aa, Homo sapiens
  Light chain CDR3 for antibody 8021 (IGKV3-11)
QQRSNWPPTWT

SEQ ID NO: 16042 - protein, 14 aa, Homo sapiens
  Heavy chain CDR3 for antibody 8021 (IGHV4-59)
AKGGSGSYYNWFDP

SEQ ID NO: 16043 - protein, 8 aa, Homo sapiens
  Light chain CDR3 for antibody 8022 (IGKV3-15)
QQYNNWPT

SEQ ID NO: 16044 - protein, 17 aa, Homo sapiens
  Heavy chain CDR3 for antibody 8022 (IGHV3-33)
ARVRGVIEGYYYYGMDV

SEQ ID NO: 16045 - protein, 9 aa, Homo sapiens
  Light chain CDR3 for antibody 8023 (IGKV3-11)
QQRSNWPPT

SEQ ID NO: 16046 - protein, 22 aa, Homo sapiens
  Heavy chain CDR3 for antibody 8023 (IGHV3-23)
AKDDLPYYDILTHSTTTGGMDV

SEQ ID NO: 16047 - protein, 9 aa, Homo sapiens
  Light chain CDR3 for antibody 8024 (IGKV3D-20)
QQYGSSPRT

SEQ ID NO: 16048 - protein, 15 aa, Homo sapiens
  Heavy chain CDR3 for antibody 8024 (IGHV1-18)
ARIYYGSGSSYYFDY

SEQ ID NO: 16049 - protein, 9 aa, Homo sapiens
  Light chain CDR3 for antibody 8025 (IGKV1D-16)
QQYNSYPLT

SEQ ID NO: 16050 - protein, 19 aa, Homo sapiens
  Heavy chain CDR3 for antibody 8025 (IGHV3-33)
TRDAHYDILTGYAYYGMDV

SEQ ID NO: 16051 - protein, 9 aa, Homo sapiens
  Light chain CDR3 for antibody 8026 (IGKV5-2)
LQHDKFPYT

SEQ ID NO: 16052 - protein, 14 aa, Homo sapiens
  Heavy chain CDR3 for antibody 8026 (IGHV3-33)
ARDKSYPLSYGMDV

SEQ ID NO: 16053 - protein, 9 aa, Homo sapiens
  Light chain CDR3 for antibody 8027 (IGKV2-30)
MQGTHWPYT

SEQ ID NO: 16054 - protein, 21 aa, Homo sapiens
  Heavy chain CDR3 for antibody 8027 (IGHV4-59)
AAGVLLWFGEPNYYYYYGMDV

SEQ ID NO: 16055 - protein, 9 aa, Homo sapiens
  Light chain CDR3 for antibody 8028 (IGKV1-39)
QQSYSTPIT

SEQ ID NO: 16056 - protein, 6 aa, Homo sapiens
  Heavy chain CDR3 for antibody 8028 (IGHV4-59)
AREGTY

SEQ ID NO: 16057 - protein, 9 aa, Homo sapiens
  Light chain CDR3 for antibody 8029 (IGKV3-11)
QQRSNWPPT

SEQ ID NO: 16058 - protein, 13 aa, Homo sapiens
  Heavy chain CDR3 for antibody 8029 (IGHV4-59)
ANRDYYGYYGMDV

SEQ ID NO: 16059 - protein, 9 aa, Homo sapiens
  Light chain CDR3 for antibody 8030 (IGKV2-30)
MQGTHWPLT

SEQ ID NO: 16060 - protein, 16 aa, Homo sapiens
  Heavy chain CDR3 for antibody 8030 (IGHV3-33)
AREVAGSYYYYYGIDV

SEQ ID NO: 16061 - protein, 9 aa, Homo sapiens
  Light chain CDR3 for antibody 8031 (IGKV4-1)
QQYYSTPYT

SEQ ID NO: 16062 - protein, 16 aa, Homo sapiens
  Heavy chain CDR3 for antibody 8031 (IGHV3-23)
AKEGMVLLYFDWLWDY

SEQ ID NO: 16063 - protein, 8 aa, Homo sapiens
  Light chain CDR3 for antibody 8032 (IGKV3D-15)
QQDYNLLT

SEQ ID NO: 16064 - protein, 18 aa, Homo sapiens
  Heavy chain CDR3 for antibody 8032 (IGHV3-33)
ARERGYYGSDIYPAAFDI

SEQ ID NO: 16065 - protein, 9 aa, Homo sapiens
  Light chain CDR3 for antibody 8033 (IGKV1-6)
LQDYNYPWT

SEQ ID NO: 16066 - protein, 16 aa, Homo sapiens
  Heavy chain CDR3 for antibody 8033 (IGHV3-23)
AKEGMVLRYFDWFWDY

SEQ ID NO: 16067 - protein, 9 aa, Homo sapiens
  Light chain CDR3 for antibody 8034 (IGKV1D-16)
QQYNSFPLT

SEQ ID NO: 16068 - protein, 13 aa, Homo sapiens
  Heavy chain CDR3 for antibody 8034 (IGHV3-11)
ARDEGYRGYVLDS

SEQ ID NO: 16069 - protein, 10 aa, Homo sapiens
  Light chain CDR3 for antibody 8035 (IGKV3-20)
QQYGSSPPYT

SEQ ID NO: 16070 - protein, 12 aa, Homo sapiens
  Heavy chain CDR3 for antibody 8035 (IGHV3-13)
AREAGIPDAFDI

SEQ ID NO: 16071 - protein, 9 aa, Homo sapiens
  Light chain CDR3 for antibody 8036 (IGKV1-39)
QQSYRTPLT

SEQ ID NO: 16072 - protein, 16 aa, Homo sapiens
  Heavy chain CDR3 for antibody 8036 (IGHV3-33)
ARGANYYGSGIPNFEY

SEQ ID NO: 16073 - protein, 8 aa, Homo sapiens
  Light chain CDR3 for antibody 8037 (IGKV1-5)
QQYNSYWT

SEQ ID NO: 16074 - protein, 10 aa, Homo sapiens
  Heavy chain CDR3 for antibody 8037 (IGHV3-33)
ARENWGGFDY

SEQ ID NO: 16075 - protein, 9 aa, Homo sapiens
  Light chain CDR3 for antibody 8038 (IGKV1D-13)
QQFNNYPYT

SEQ ID NO: 16076 - protein, 12 aa, Homo sapiens
  Heavy chain CDR3 for antibody 8038 (IGHV3-66)
VRDRAAAPYFDL

SEQ ID NO: 16077 - protein, 8 aa, Homo sapiens
  Light chain CDR3 for antibody 8039 (IGKV3D-7)
QQDYNLLT

SEQ ID NO: 16078 - protein, 10 aa, Homo sapiens
  Heavy chain CDR3 for antibody 8039 (IGHV3-30)
ARDGLESFDY

SEQ ID NO: 16079 - protein, 8 aa, Homo sapiens
  Light chain CDR3 for antibody 8040 (IGKV3-11)
LQRGNWPT

SEQ ID NO: 16080 - protein, 9 aa, Homo sapiens
  Heavy chain CDR3 for antibody 8040 (IGHV4-59)
AREGGSGSL

SEQ ID NO: 16081 - protein, 10 aa, Homo sapiens
  Light chain CDR3 for antibody 8041 (IGKV1-6)
LQDYNYPMYT

SEQ ID NO: 16082 - protein, 17 aa, Homo sapiens
  Heavy chain CDR3 for antibody 8041 (IGHV1-18)
ARDRAFTMVRGVPPFDY

SEQ ID NO: 16083 - protein, 9 aa, Homo sapiens
  Light chain CDR3 for antibody 8042 (IGKV1-39)
QQSYSTPYT

SEQ ID NO: 16084 - protein, 11 aa, Homo sapiens
  Heavy chain CDR3 for antibody 8042 (IGHV4-59)
ARETGDDAFDI

SEQ ID NO: 16085 - protein, 9 aa, Homo sapiens
  Light chain CDR3 for antibody 8043 (IGKV3-15)
QQYNNYPYT

SEQ ID NO: 16086 - protein, 12 aa, Homo sapiens
  Heavy chain CDR3 for antibody 8043 (IGHV4-39)
ARQGAYSRFFDY

SEQ ID NO: 16087 - protein, 10 aa, Homo sapiens
  Light chain CDR3 for antibody 8044 (IGKV3-11)
QQRSNWPALT

SEQ ID NO: 16088 - protein, 17 aa, Homo sapiens
  Heavy chain CDR3 for antibody 8044 (IGHV3-33)
ARSPYDILTGYSYYFDY

SEQ ID NO: 16089 - protein, 9 aa, Homo sapiens
  Light chain CDR3 for antibody 8045 (IGKV1D-13)
QRFNNYLYT

SEQ ID NO: 16090 - protein, 9 aa, Homo sapiens
  Heavy chain CDR3 for antibody 8045 (IGHV3-33)
ARATVGVDY

SEQ ID NO: 16091 - protein, 9 aa, Homo sapiens
  Light chain CDR3 for antibody 8046 (IGKV3D-7)
QQLKSYLYT

SEQ ID NO: 16092 - protein, 12 aa, Homo sapiens
  Heavy chain CDR3 for antibody 8046 (IGHV4-61)
ARVYSSGWLFDY

SEQ ID NO: 16093 - protein, 9 aa, Homo sapiens
  Light chain CDR3 for antibody 8047 (IGKV3-11)
QQRSNWMYT

SEQ ID NO: 16094 - protein, 13 aa, Homo sapiens
  Heavy chain CDR3 for antibody 8047 (IGHV1-8)
ARKWEWDLLNFDY

SEQ ID NO: 16095 - protein, 9 aa, Homo sapiens
  Light chain CDR3 for antibody 8048 (IGKV2-30)
MQGTHWPLT

SEQ ID NO: 16096 - protein, 11 aa, Homo sapiens
  Heavy chain CDR3 for antibody 8048 (IGHV3-33)
ARGSGSYAFDY

SEQ ID NO: 16097 - protein, 10 aa, Homo sapiens
  Light chain CDR3 for antibody 8049 (IGKV3-15)
QQYNNWPPYT

SEQ ID NO: 16098 - protein, 15 aa, Homo sapiens
  Heavy chain CDR3 for antibody 8049 (IGHV1-18)
ARGYCSSTSCYYFDY

SEQ ID NO: 16099 - protein, 8 aa, Homo sapiens
  Light chain CDR3 for antibody 8050 (IGKV1D-13)
QQFNNYPT

SEQ ID NO: 16100 - protein, 14 aa, Homo sapiens
  Heavy chain CDR3 for antibody 8050 (IGHV1-46)
ARDGVGAKEGGFDY

SEQ ID NO: 16101 - protein, 9 aa, Homo sapiens
  Light chain CDR3 for antibody 8051 (IGKV1-39)
QQGFSTPWT

SEQ ID NO: 16102 - protein, 13 aa, Homo sapiens
  Heavy chain CDR3 for antibody 8051 (IGHV3-33)
ARDYCGGDCYLDY

SEQ ID NO: 16103 - protein, 10 aa, Homo sapiens
  Light chain CDR3 for antibody 8052 (IGKV3-15)
QQYNNWPPLT

SEQ ID NO: 16104 - protein, 8 aa, Homo sapiens
  Heavy chain CDR3 for antibody 8052 (IGHV1-18)
AKESLLDY

SEQ ID NO: 16105 - protein, 9 aa, Homo sapiens
  Light chain CDR3 for antibody 8053 (IGKV1-6)
LQDYKSPFT

SEQ ID NO: 16106 - protein, 11 aa, Homo sapiens
  Heavy chain CDR3 for antibody 8053 (IGHV3-33)
ARDTWDDYFDY

SEQ ID NO: 16107 - protein, 9 aa, Homo sapiens
  Light chain CDR3 for antibody 8054 (IGKV1-6)
QQYNSYPPT

SEQ ID NO: 16108 - protein, 13 aa, Homo sapiens
  Heavy chain CDR3 for antibody 8054 (IGHV3-11)
ARDEGYRGYGLDS

SEQ ID NO: 16109 - protein, 11 aa, Homo sapiens
  Light chain CDR3 for antibody 8055 (IGKV3-11)
QQRSNWPPTWT

SEQ ID NO: 16110 - protein, 20 aa, Homo sapiens
  Heavy chain CDR3 for antibody 8055 (IGHV3-33)
SRGGATLVRGVIDYYYGMDV

SEQ ID NO: 16111 - protein, 9 aa, Homo sapiens
  Light chain CDR3 for antibody 8056 (IGKV1-9)
QQLNTYPWT

SEQ ID NO: 16112 - protein, 15 aa, Homo sapiens
  Heavy chain CDR3 for antibody 8056 (IGHV3-23)
AKEFTMVRGVITPDY

SEQ ID NO: 16113 - protein, 8 aa, Homo sapiens
  Light chain CDR3 for antibody 8057 (IGKV6-21)
HQSSSLPT

SEQ ID NO: 16114 - protein, 12 aa, Homo sapiens
  Heavy chain CDR3 for antibody 8057 (IGHV3-23)
AKDGWFGESFDY

SEQ ID NO: 16115 - protein, 10 aa, Homo sapiens
  Light chain CDR3 for antibody 8058 (IGKV1-17)
LQHNSYPMYT

SEQ ID NO: 16116 - protein, 18 aa, Homo sapiens
  Heavy chain CDR3 for antibody 8058 (IGHV3-33)
ARGLLWFGVSYYYYGMDV

SEQ ID NO: 16117 - protein, 9 aa, Homo sapiens
  Light chain CDR3 for antibody 8059 (IGKV1-39)
QQSYRTPLT

SEQ ID NO: 16118 - protein, 15 aa, Homo sapiens
  Heavy chain CDR3 for antibody 8059 (IGHV4-59)
ARDLGYYGSGSPLAY

SEQ ID NO: 16119 - protein, 10 aa, Homo sapiens
  Light chain CDR3 for antibody 8060 (IGKV3-11)
QQRSNWPALT

SEQ ID NO: 16120 - protein, 11 aa, Homo sapiens
  Heavy chain CDR3 for antibody 8060 (IGHV1-18)
ATELGLYYFDY

SEQ ID NO: 16121 - protein, 9 aa, Homo sapiens
  Light chain CDR3 for antibody 8061 (IGKV1-17)
LQHNSYPYT

SEQ ID NO: 16122 - protein, 15 aa, Homo sapiens
  Heavy chain CDR3 for antibody 8061 (IGHV3-33)
ARDRVGVKDYYSMDV

SEQ ID NO: 16123 - protein, 9 aa, Homo sapiens
  Light chain CDR3 for antibody 8062 (IGKV1-16)
QQYSRYPYT

SEQ ID NO: 16124 - protein, 16 aa, Homo sapiens
  Heavy chain CDR3 for antibody 8062 (IGHV3-33)
ARAVYYGSGSSLIMDV

SEQ ID NO: 16125 - protein, 9 aa, Homo sapiens
  Light chain CDR3 for antibody 8063 (IGKV1-6)
LQDFHYPWT

SEQ ID NO: 16126 - protein, 10 aa, Homo sapiens
  Heavy chain CDR3 for antibody 8063 (IGHV3-33)
ARENSTPLDY

SEQ ID NO: 16127 - protein, 9 aa, Homo sapiens
  Light chain CDR3 for antibody 8064 (IGKV1-33)
QQYDNLPFT

SEQ ID NO: 16128 - protein, 13 aa, Homo sapiens
  Heavy chain CDR3 for antibody 8064 (IGHV3-33)
ARKAYGDYFYFDY

SEQ ID NO: 16129 - protein, 9 aa, Homo sapiens
  Light chain CDR3 for antibody 8065 (IGKV1-9)
QQLNTYPWT

SEQ ID NO: 16130 - protein, 12 aa, Homo sapiens
  Heavy chain CDR3 for antibody 8065 (IGHV3-33)
ARDRAYRGSLDY

SEQ ID NO: 16131 - protein, 9 aa, Homo sapiens
  Light chain CDR3 for antibody 8066 (IGKV1-33)
QQYDNLPFT

SEQ ID NO: 16132 - protein, 23 aa, Homo sapiens
  Heavy chain CDR3 for antibody 8066 (IGHV3-11)
ARDEGVTMVRGVISYYYYYGMDV

SEQ ID NO: 16133 - protein, 9 aa, Homo sapiens
  Light chain CDR3 for antibody 8067 (IGKV1-6)
LQDYKSPFT

SEQ ID NO: 16134 - protein, 10 aa, Homo sapiens
  Heavy chain CDR3 for antibody 8067 (IGHV3-30)
AREWYGGMDV

SEQ ID NO: 16135 - protein, 9 aa, Homo sapiens
  Light chain CDR3 for antibody 8068 (IGKV3D-20)
QQYGSSPWT

SEQ ID NO: 16136 - protein, 14 aa, Homo sapiens
  Heavy chain CDR3 for antibody 8068 (IGHV3-23)
AKDDIVRATGAFDI

SEQ ID NO: 16137 - protein, 9 aa, Homo sapiens
  Light chain CDR3 for antibody 8069 (IGKV3D-7)
QQDYNLPLT

SEQ ID NO: 16138 - protein, 8 aa, Homo sapiens
  Heavy chain CDR3 for antibody 8069 (IGHV3-33)
ARDRGFDY

SEQ ID NO: 16139 - protein, 9 aa, Homo sapiens
  Light chain CDR3 for antibody 8070 (IGKV1-17)
QQYNSYPRT

SEQ ID NO: 16140 - protein, 17 aa, Homo sapiens
  Heavy chain CDR3 for antibody 8070 (IGHV3-33)
TRDSGMVRGIIIYGMDV

SEQ ID NO: 16141 - protein, 10 aa, Homo sapiens
  Light chain CDR3 for antibody 8071 (IGKV1-17)
LQHNSYPMYT

SEQ ID NO: 16142 - protein, 17 aa, Homo sapiens
  Heavy chain CDR3 for antibody 8071 (IGHV4-34)
AGLRFFDWLFDYYGMDV

SEQ ID NO: 16143 - protein, 10 aa, Homo sapiens
  Light chain CDR3 for antibody 8072 (IGKV1-17)
LQHNSYPMYT

SEQ ID NO: 16144 - protein, 20 aa, Homo sapiens
  Heavy chain CDR3 for antibody 8072 (IGHV3-33)
ARDLCSSTSCYGYYYYGMDV

SEQ ID NO: 16145 - protein, 9 aa, Homo sapiens
  Light chain CDR3 for antibody 8073 (IGKV1-6)
LQDYNHPFT

SEQ ID NO: 16146 - protein, 14 aa, Homo sapiens
  Heavy chain CDR3 for antibody 8073 (IGHV3-20)
ARDGGSSSFDWFDP

SEQ ID NO: 16147 - protein, 9 aa, Homo sapiens
  Light chain CDR3 for antibody 8074 (IGKV1-39)
QQSYSTPLT

SEQ ID NO: 16148 - protein, 17 aa, Homo sapiens
  Heavy chain CDR3 for antibody 8074 (IGHV3-33)
ARDQDDILTGYYWYFDL

SEQ ID NO: 16149 - protein, 9 aa, Homo sapiens
  Light chain CDR3 for antibody 8075 (IGKV2-30)
MQGTHWPLT

SEQ ID NO: 16150 - protein, 14 aa, Homo sapiens
  Heavy chain CDR3 for antibody 8075 (IGHV3-33)
ARDLNYDILNGGGY

SEQ ID NO: 16151 - protein, 9 aa, Homo sapiens
  Light chain CDR3 for antibody 8076 (IGKV4-1)
QQYYSTPYT

SEQ ID NO: 16152 - protein, 17 aa, Homo sapiens
  Heavy chain CDR3 for antibody 8076 (IGHV1-18)
ARDRAFTMVRGVPPFDC

SEQ ID NO: 16153 - protein, 9 aa, Homo sapiens
  Light chain CDR3 for antibody 8077 (IGKV3D-20)
QQYGSSPFT

SEQ ID NO: 16154 - protein, 14 aa, Homo sapiens
  Heavy chain CDR3 for antibody 8077 (IGHV4-39)
ARDLDIMATSPFAY

SEQ ID NO: 16155 - protein, 9 aa, Homo sapiens
  Light chain CDR3 for antibody 8078 (IGKV1-17)
LQHNSYPWT

SEQ ID NO: 16156 - protein, 17 aa, Homo sapiens
  Heavy chain CDR3 for antibody 8078 (IGHV3-33)
ARGEQWLGYYYYYGMDV

SEQ ID NO: 16157 - protein, 9 aa, Homo sapiens
  Light chain CDR3 for antibody 8079 (IGKV3D-20)
QQHGNSPLT

SEQ ID NO: 16158 - protein, 12 aa, Homo sapiens
  Heavy chain CDR3 for antibody 8079 (IGHV4-59)
ARDRSGWAYFDY

SEQ ID NO: 16159 - protein, 9 aa, Homo sapiens
  Light chain CDR3 for antibody 8080 (IGKV3-20)
QQYGRSPYT

SEQ ID NO: 16160 - protein, 18 aa, Homo sapiens
  Heavy chain CDR3 for antibody 8080 (IGHV1-46)
ARDGDYVWGSDRSDWFDP

SEQ ID NO: 16161 - protein, 9 aa, Homo sapiens
  Light chain CDR3 for antibody 8081 (IGKV3-20)
QQYGSSPYT

SEQ ID NO: 16162 - protein, 12 aa, Homo sapiens
  Heavy chain CDR3 for antibody 8081 (IGHV1-18)
ARLGGFGEFPDC

SEQ ID NO: 16163 - protein, 9 aa, Homo sapiens
  Light chain CDR3 for antibody 8082 (IGKV1D-16)
QQYNSYPYT

SEQ ID NO: 16164 - protein, 13 aa, Homo sapiens
  Heavy chain CDR3 for antibody 8082 (IGHV4-61)
ARDGSSSGWDFDY

SEQ ID NO: 16165 - protein, 9 aa, Homo sapiens
  Light chain CDR3 for antibody 8083 (IGKV3-15)
QQYNNWPRT

SEQ ID NO: 16166 - protein, 14 aa, Homo sapiens
  Heavy chain CDR3 for antibody 8083 (IGHV3-11)
ARRGSPLRPSHLDV

SEQ ID NO: 16167 - protein, 9 aa, Homo sapiens
  Light chain CDR3 for antibody 8084 (IGKV6-21)
QQSYSLPFT

SEQ ID NO: 16168 - protein, 8 aa, Homo sapiens
  Heavy chain CDR3 for antibody 8084 (IGHV3-23)
AKETGINY

SEQ ID NO: 16169 - protein, 8 aa, Homo sapiens
  Light chain CDR3 for antibody 8085 (IGKV3-20)
QQYGSSRT

SEQ ID NO: 16170 - protein, 14 aa, Homo sapiens
  Heavy chain CDR3 for antibody 8085 (IGHV3-33)
ARDRIAAASSDFDC

SEQ ID NO: 16171 - protein, 9 aa, Homo sapiens
  Light chain CDR3 for antibody 8086 (IGKV1D-13)
QQFNNYPYT

SEQ ID NO: 16172 - protein, 13 aa, Homo sapiens
  Heavy chain CDR3 for antibody 8086 (IGHV3-33)
ARTDYYYYYGMDV

SEQ ID NO: 16173 - protein, 9 aa, Homo sapiens
  Light chain CDR3 for antibody 8087 (IGKV3-15)
QQYHDWPLT

SEQ ID NO: 16174 - protein, 18 aa, Homo sapiens
  Heavy chain CDR3 for antibody 8087 (IGHV1-46)
ARDGDYVWGSYRSDWFDP

SEQ ID NO: 16175 - protein, 10 aa, Homo sapiens
  Light chain CDR3 for antibody 8088 (IGKV3-11)
QQRSNWPAYT

SEQ ID NO: 16176 - protein, 18 aa, Homo sapiens
  Heavy chain CDR3 for antibody 8088 (IGHV1-8)
ARSRIAAAGIYYYYGMDV

SEQ ID NO: 16177 - protein, 9 aa, Homo sapiens
  Light chain CDR3 for antibody 8089 (IGKV1D-13)
QQFNNYPST

SEQ ID NO: 16178 - protein, 9 aa, Homo sapiens
  Heavy chain CDR3 for antibody 8089 (IGHV3-33)
AANSYGLDY

SEQ ID NO: 16179 - protein, 9 aa, Homo sapiens
  Light chain CDR3 for antibody 8090 (IGKV3-11)
QQRSNWPPT

SEQ ID NO: 16180 - protein, 13 aa, Homo sapiens
  Heavy chain CDR3 for antibody 8090 (IGHV3-66)
ANTGDSYYYGFYV

SEQ ID NO: 16181 - protein, 9 aa, Homo sapiens
  Light chain CDR3 for antibody 8091 (IGKV1-16)
QKYNSNPLT

SEQ ID NO: 16182 - protein, 15 aa, Homo sapiens
  Heavy chain CDR3 for antibody 8091 (IGHV3-33)
ASRDILTGSYWYFDL

SEQ ID NO: 16183 - protein, 9 aa, Homo sapiens
  Light chain CDR3 for antibody 8092 (IGKV1-39)
QQSYSTPFT

SEQ ID NO: 16184 - protein, 12 aa, Homo sapiens
  Heavy chain CDR3 for antibody 8092 (IGHV4-59)
ARDFLVRGVIDY

SEQ ID NO: 16185 - protein, 8 aa, Homo sapiens
  Light chain CDR3 for antibody 8093 (IGKV3D-7)
QQDYNLLT

SEQ ID NO: 16186 - protein, 15 aa, Homo sapiens
  Heavy chain CDR3 for antibody 8093 (IGHV1-24)
ATHWDLRYYYYGMDV

SEQ ID NO: 16187 - protein, 8 aa, Homo sapiens
  Light chain CDR3 for antibody 8094 (IGKV3D-7)
QQDYNLLT

SEQ ID NO: 16188 - protein, 11 aa, Homo sapiens
  Heavy chain CDR3 for antibody 8094 (IGHV4-59)
ARDRGHYGMDV

SEQ ID NO: 16189 - protein, 10 aa, Homo sapiens
  Light chain CDR3 for antibody 8095 (IGKV1-17)
LQHNSYPIFT

SEQ ID NO: 16190 - protein, 13 aa, Homo sapiens
  Heavy chain CDR3 for antibody 8095 (IGHV3-23)
ARAFFMVRGVIDF

SEQ ID NO: 16191 - protein, 9 aa, Homo sapiens
  Light chain CDR3 for antibody 8096 (IGKV1D-16)
QQYNSYPYT

SEQ ID NO: 16192 - protein, 10 aa, Homo sapiens
  Heavy chain CDR3 for antibody 8096 (IGHV3-33)
ARDPWIYSGY

SEQ ID NO: 16193 - protein, 9 aa, Homo sapiens
  Light chain CDR3 for antibody 8097 (IGKV2-30)
MQGTHWPLT

SEQ ID NO: 16194 - protein, 10 aa, Homo sapiens
  Heavy chain CDR3 for antibody 8097 (IGHV3-30)
ARDGLESFDY

SEQ ID NO: 16195 - protein, 8 aa, Homo sapiens
  Light chain CDR3 for antibody 8098 (IGKV1D-13)
QQFNNYPT

SEQ ID NO: 16196 - protein, 11 aa, Homo sapiens
  Heavy chain CDR3 for antibody 8098 (IGHV3-23)
AKAGIVGCLDV

SEQ ID NO: 16197 - protein, 9 aa, Homo sapiens
  Light chain CDR3 for antibody 8099 (IGKV1-17)
LQHNSYPYT

SEQ ID NO: 16198 - protein, 15 aa, Homo sapiens
  Heavy chain CDR3 for antibody 8099 (IGHV4-39)
ARHSGYSSGWYPFDY

SEQ ID NO: 16199 - protein, 8 aa, Homo sapiens
  Light chain CDR3 for antibody 8100 (IGKV3D-7)
QQDYNLLT

SEQ ID NO: 16200 - protein, 8 aa, Homo sapiens
  Heavy chain CDR3 for antibody 8100 (IGHV3-23)
AKESLLDY

SEQ ID NO: 16201 - protein, 9 aa, Homo sapiens
  Light chain CDR3 for antibody 8101 (IGKV1-6)
LQDYNYPWT

SEQ ID NO: 16202 - protein, 15 aa, Homo sapiens
  Heavy chain CDR3 for antibody 8101 (IGHV3-23)
AKEALRYFDWSGMDV

SEQ ID NO: 16203 - protein, 9 aa, Homo sapiens
  Light chain CDR3 for antibody 8102 (IGKV3-20)
QQYGSSPRT

SEQ ID NO: 16204 - protein, 18 aa, Homo sapiens
  Heavy chain CDR3 for antibody 8102 (IGHV3-33)
ARDGYYGSGSFYYYGMDV

SEQ ID NO: 16205 - protein, 9 aa, Homo sapiens
  Light chain CDR3 for antibody 8103 (IGKV1-17)
LQHNSYPYT

SEQ ID NO: 16206 - protein, 16 aa, Homo sapiens
  Heavy chain CDR3 for antibody 8103 (IGHV3-66)
ARAYTYGSGSFPYFDY

SEQ ID NO: 16207 - protein, 9 aa, Homo sapiens
  Light chain CDR3 for antibody 8104 (IGKV1-9)
QQLNRYPWT

SEQ ID NO: 16208 - protein, 15 aa, Homo sapiens
  Heavy chain CDR3 for antibody 8104 (IGHV4-39)
ARRDYDILTGYLFDY

SEQ ID NO: 16209 - protein, 9 aa, Homo sapiens
  Light chain CDR3 for antibody 8105 (IGKV1-17)
LHSNNYPWT

SEQ ID NO: 16210 - protein, 14 aa, Homo sapiens
  Heavy chain CDR3 for antibody 8105 (IGHV3-33)
ARASSGSSYWYFDL

SEQ ID NO: 16211 - protein, 9 aa, Homo sapiens
  Light chain CDR3 for antibody 8106 (IGKV3-15)
QQYNNWPLT

SEQ ID NO: 16212 - protein, 15 aa, Homo sapiens
  Heavy chain CDR3 for antibody 8106 (IGHV3-33)
AKDRNSGYDWGGFDY

SEQ ID NO: 16213 - protein, 9 aa, Homo sapiens
  Light chain CDR3 for antibody 8107 (IGKV1-17)
LQHNSYPIT

SEQ ID NO: 16214 - protein, 16 aa, Homo sapiens
  Heavy chain CDR3 for antibody 8107 (IGHV4-39)
ARRGVLVVTAIPGFDY

SEQ ID NO: 16215 - protein, 9 aa, Homo sapiens
  Light chain CDR3 for antibody 8108 (IGKV3D-7)
QQDYNLPYS

SEQ ID NO: 16216 - protein, 20 aa, Homo sapiens
  Heavy chain CDR3 for antibody 8108 (IGHV1-f)
ATHYDILTGSPYYYYCALDV

SEQ ID NO: 16217 - protein, 9 aa, Homo sapiens
  Light chain CDR3 for antibody 8109 (IGKV2-30)
MQGTHWPLT

SEQ ID NO: 16218 - protein, 17 aa, Homo sapiens
  Heavy chain CDR3 for antibody 8109 (IGHV4-59)
ARRITMVREIIITAFDY

SEQ ID NO: 16219 - protein, 9 aa, Homo sapiens
  Light chain CDR3 for antibody 8110 (IGKV1-9)
QQYNSYPYT

SEQ ID NO: 16220 - protein, 13 aa, Homo sapiens
  Heavy chain CDR3 for antibody 8110 (IGHV3-33)
ARRGSGSPDGFDI

SEQ ID NO: 16221 - protein, 9 aa, Homo sapiens
  Light chain CDR3 for antibody 8111 (IGKV1-39)
QQSYSTPYT

SEQ ID NO: 16222 - protein, 20 aa, Homo sapiens
  Heavy chain CDR3 for antibody 8111 (IGHV3-23)
AKDRETGTTSYHYYYYGMDV

SEQ ID NO: 16223 - protein, 10 aa, Homo sapiens
  Light chain CDR3 for antibody 8112 (IGKV1-39)
QQSYSTPMYT

SEQ ID NO: 16224 - protein, 14 aa, Homo sapiens
  Heavy chain CDR3 for antibody 8112 (IGHV3-33)
ARDLNYDILNGGGY

SEQ ID NO: 16225 - protein, 9 aa, Homo sapiens
  Light chain CDR3 for antibody 8113 (IGKV6-21)
HQSSSLPLT

SEQ ID NO: 16226 - protein, 14 aa, Homo sapiens
  Heavy chain CDR3 for antibody 8113 (IGHV3-33)
ARDNILTVYYLLDY

SEQ ID NO: 16227 - protein, 9 aa, Homo sapiens
  Light chain CDR3 for antibody 8114 (IGKV3-15)
QQYNNWPLT

SEQ ID NO: 16228 - protein, 11 aa, Homo sapiens
  Heavy chain CDR3 for antibody 8114 (IGHV1-24)
ATYFGSGSLDY

SEQ ID NO: 16229 - protein, 9 aa, Homo sapiens
  Light chain CDR3 for antibody 8115 (IGKV1-17)
LQHNSYPPT

SEQ ID NO: 16230 - protein, 12 aa, Homo sapiens
  Heavy chain CDR3 for antibody 8115 (IGHV1-46)
ARGLTGDHASDT

SEQ ID NO: 16231 - protein, 9 aa, Homo sapiens
  Light chain CDR3 for antibody 8116 (IGKV2D-28)
MQALQTPWT

SEQ ID NO: 16232 - protein, 18 aa, Homo sapiens
  Heavy chain CDR3 for antibody 8116 (IGHV3-33)
ARDGYSGYDYYYYYGMDV

SEQ ID NO: 16233 - protein, 9 aa, Homo sapiens
  Light chain CDR3 for antibody 8117 (IGKV1-9)
QQLNGYPFT

SEQ ID NO: 16234 - protein, 11 aa, Homo sapiens
  Heavy chain CDR3 for antibody 8117 (IGHV4-28)
ARDILTGFLDH

SEQ ID NO: 16235 - protein, 9 aa, Homo sapiens
  Light chain CDR3 for antibody 8118 (IGKV2-30)
MQGTHWPLT

SEQ ID NO: 16236 - protein, 17 aa, Homo sapiens
  Heavy chain CDR3 for antibody 8118 (IGHV4-59)
AREGADSGIYYHWYFDL

SEQ ID NO: 16237 - protein, 9 aa, Homo sapiens
  Light chain CDR3 for antibody 8119 (IGKV1-6)
LQDYNYPYT

SEQ ID NO: 16238 - protein, 12 aa, Homo sapiens
  Heavy chain CDR3 for antibody 8119 (IGHV4-34)
ASNFYYYYGMDV

SEQ ID NO: 16239 - protein, 9 aa, Homo sapiens
  Light chain CDR3 for antibody 8120 (IGKV3D-20)
QQYGNSPRT

SEQ ID NO: 16240 - protein, 12 aa, Homo sapiens
  Heavy chain CDR3 for antibody 8120 (IGHV3-13)
VREAGIPDAFDI

SEQ ID NO: 16241 - protein, 9 aa, Homo sapiens
  Light chain CDR3 for antibody 8121 (IGKV1-9)
QQLISYPLT

SEQ ID NO: 16242 - protein, 12 aa, Homo sapiens
  Heavy chain CDR3 for antibody 8121 (IGHV3-33)
ARDSSGWSHFDY

SEQ ID NO: 16243 - protein, 8 aa, Homo sapiens
  Light chain CDR3 for antibody 8122 (IGKV1-13)
QQYNSYST

SEQ ID NO: 16244 - protein, 14 aa, Homo sapiens
  Heavy chain CDR3 for antibody 8122 (IGHV1-46)
ARSYYDILTGAFDI

SEQ ID NO: 16245 - protein, 8 aa, Homo sapiens
  Light chain CDR3 for antibody 8123 (IGKV3-11)
QQRSNWLT

SEQ ID NO: 16246 - protein, 14 aa, Homo sapiens
  Heavy chain CDR3 for antibody 8123 (IGHV3-33)
ARAISGSSYWYFDL

SEQ ID NO: 16247 - protein, 10 aa, Homo sapiens
  Light chain CDR3 for antibody 8124 (IGKV3-11)
QQRSNWPIFT

SEQ ID NO: 16248 - protein, 15 aa, Homo sapiens
  Heavy chain CDR3 for antibody 8124 (IGHV3-33)
ARDRGMVRGDGYLDY

SEQ ID NO: 16249 - protein, 8 aa, Homo sapiens
  Light chain CDR3 for antibody 8125 (IGKV3D-7)
QQDYNLLT

SEQ ID NO: 16250 - protein, 18 aa, Homo sapiens
  Heavy chain CDR3 for antibody 8125 (IGHV1-8)
AREGAAAGSYYYYNGMDV

SEQ ID NO: 16251 - protein, 9 aa, Homo sapiens
  Light chain CDR3 for antibody 8126 (IGKV1D-13)
QQFNNYPHT

SEQ ID NO: 16252 - protein, 13 aa, Homo sapiens
  Heavy chain CDR3 for antibody 8126 (IGHV3-33)
ARDEGYSGYNLDN

SEQ ID NO: 16253 - protein, 9 aa, Homo sapiens
  Light chain CDR3 for antibody 8127 (IGKV6-21)
HQSSSLPLT

SEQ ID NO: 16254 - protein, 14 aa, Homo sapiens
  Heavy chain CDR3 for antibody 8127 (IGHV1-2)
AREGGSGSSPGMDV

SEQ ID NO: 16255 - protein, 9 aa, Homo sapiens
  Light chain CDR3 for antibody 8128 (IGKV3-20)
QQYGSSPRT

SEQ ID NO: 16256 - protein, 13 aa, Homo sapiens
  Heavy chain CDR3 for antibody 8128 (IGHV3-66)
ARDQRYSSGWYEY

SEQ ID NO: 16257 - protein, 9 aa, Homo sapiens
  Light chain CDR3 for antibody 8129 (IGKV1-6)
LQDYNHPFT

SEQ ID NO: 16258 - protein, 9 aa, Homo sapiens
  Heavy chain CDR3 for antibody 8129 (IGHV3-33)
ARDRCYFDL

SEQ ID NO: 16259 - protein, 10 aa, Homo sapiens
  Light chain CDR3 for antibody 8130 (IGKV1-17)
LQHNSYPMYT

SEQ ID NO: 16260 - protein, 14 aa, Homo sapiens
  Heavy chain CDR3 for antibody 8130 (IGHV1-46)
ARRGIVGALDAFDI

SEQ ID NO: 16261 - protein, 9 aa, Homo sapiens
  Light chain CDR3 for antibody 8131 (IGKV2-30)
MQGTHWPLT

SEQ ID NO: 16262 - protein, 9 aa, Homo sapiens
  Heavy chain CDR3 for antibody 8131 (IGHV4-59)
AGGSWDFDY

SEQ ID NO: 16263 - protein, 9 aa, Homo sapiens
  Light chain CDR3 for antibody 8132 (IGKV3-20)
QQYGSSPLT

SEQ ID NO: 16264 - protein, 11 aa, Homo sapiens
  Heavy chain CDR3 for antibody 8132 (IGHV4-59)
ARDRGHYGMDV

SEQ ID NO: 16265 - protein, 9 aa, Homo sapiens
  Light chain CDR3 for antibody 8133 (IGKV4-1)
QQYYTTPPT

SEQ ID NO: 16266 - protein, 14 aa, Homo sapiens
  Heavy chain CDR3 for antibody 8133 (IGHV3-33)
ARDKTYPLSYGMDV

SEQ ID NO: 16267 - protein, 9 aa, Homo sapiens
  Light chain CDR3 for antibody 8134 (IGKV1-33)
QQYDNLPFT

SEQ ID NO: 16268 - protein, 13 aa, Homo sapiens
  Heavy chain CDR3 for antibody 8134 (IGHV4-39)
ARHPPSRDYGMDV

SEQ ID NO: 16269 - protein, 9 aa, Homo sapiens
  Light chain CDR3 for antibody 8135 (IGKV1-9)
QQLKSYLYT

SEQ ID NO: 16270 - protein, 7 aa, Homo sapiens
  Heavy chain CDR3 for antibody 8135 (IGHV1-46)
AREGGDY

SEQ ID NO: 16271 - protein, 9 aa, Homo sapiens
  Light chain CDR3 for antibody 8136 (IGKV1-16)
QHYNDYPFT

SEQ ID NO: 16272 - protein, 13 aa, Homo sapiens
  Heavy chain CDR3 for antibody 8136 (IGHV3-33)
ARDQRYSSGWYDY

SEQ ID NO: 16273 - protein, 10 aa, Homo sapiens
  Light chain CDR3 for antibody 8137 (IGKV3-15)
QQYNNWPPYT

SEQ ID NO: 16274 - protein, 14 aa, Homo sapiens
  Heavy chain CDR3 for antibody 8137 (IGHV3-33)
ARDRIAAASSDFDC

SEQ ID NO: 16275 - protein, 8 aa, Homo sapiens
  Light chain CDR3 for antibody 8138 (IGKV3D-7)
QQDYNLPT

SEQ ID NO: 16276 - protein, 12 aa, Homo sapiens
  Heavy chain CDR3 for antibody 8138 (IGHV4-39)
ARREVILGAFDY

SEQ ID NO: 16277 - protein, 9 aa, Homo sapiens
  Light chain CDR3 for antibody 8139 (IGKV1D-16)
QQYNSYPLT

SEQ ID NO: 16278 - protein, 19 aa, Homo sapiens
  Heavy chain CDR3 for antibody 8139 (IGHV1-24)
ATAGLQWFGEKVGYYGVDV

SEQ ID NO: 16279 - protein, 9 aa, Homo sapiens
  Light chain CDR3 for antibody 8140 (IGKV1D-13)
QQFNNYMYT

SEQ ID NO: 16280 - protein, 12 aa, Homo sapiens
  Heavy chain CDR3 for antibody 8140 (IGHV3-33)
ARKGYDMHAFDI

SEQ ID NO: 16281 - protein, 8 aa, Homo sapiens
  Light chain CDR3 for antibody 8141 (IGKV1-5)
QQYNSYWT

SEQ ID NO: 16282 - protein, 13 aa, Homo sapiens
  Heavy chain CDR3 for antibody 8141 (IGHV3-33)
ARTDYYFYYGLDV

SEQ ID NO: 16283 - protein, 9 aa, Homo sapiens
  Light chain CDR3 for antibody 8142 (IGKV6-21)
HQSSSLPLT

SEQ ID NO: 16284 - protein, 13 aa, Homo sapiens
  Heavy chain CDR3 for antibody 8142 (IGHV3-33)
ARGTVASIGGLDY

SEQ ID NO: 16285 - protein, 9 aa, Homo sapiens
  Light chain CDR3 for antibody 8143 (IGKV1-17)
LQHNSYPYT

SEQ ID NO: 16286 - protein, 9 aa, Homo sapiens
  Heavy chain CDR3 for antibody 8143 (IGHV4-59)
ARSGSGIYT

SEQ ID NO: 16287 - protein, 9 aa, Homo sapiens
  Light chain CDR3 for antibody 8144 (IGKV1-33)
QQYDNLPFT

SEQ ID NO: 16288 - protein, 17 aa, Homo sapiens
  Heavy chain CDR3 for antibody 8144 (IGHV3-33)
ARGGAAAGPYLYYGLDV

SEQ ID NO: 16289 - protein, 9 aa, Homo sapiens
  Light chain CDR3 for antibody 8145 (IGKV3-11)
QQRSNWPYT

SEQ ID NO: 16290 - protein, 14 aa, Homo sapiens
  Heavy chain CDR3 for antibody 8145 (IGHV3-23)
ARDGIVRATDAFAI

SEQ ID NO: 16291 - protein, 10 aa, Homo sapiens
  Light chain CDR3 for antibody 8146 (IGKV3-11)
QQRSNWPAYT

SEQ ID NO: 16292 - protein, 12 aa, Homo sapiens
  Heavy chain CDR3 for antibody 8146 (IGHV3-33)
VRKWFGELYFDY

SEQ ID NO: 16293 - protein, 9 aa, Homo sapiens
  Light chain CDR3 for antibody 8147 (IGKV1-17)
LHSNNYPWT

SEQ ID NO: 16294 - protein, 18 aa, Homo sapiens
  Heavy chain CDR3 for antibody 8147 (IGHV3-23)
AKEGNYYGSGSYWGYFDP

SEQ ID NO: 16295 - protein, 9 aa, Homo sapiens
  Light chain CDR3 for antibody 8148 (IGKV1-39)
QQSYSTPFT

SEQ ID NO: 16296 - protein, 16 aa, Homo sapiens
  Heavy chain CDR3 for antibody 8148 (IGHV1-24)
ATEDSSSYYYYYGMDV

SEQ ID NO: 16297 - protein, 10 aa, Homo sapiens
  Light chain CDR3 for antibody 8149 (IGKV3-11)
QQRSTWPTLT

SEQ ID NO: 16298 - protein, 13 aa, Homo sapiens
  Heavy chain CDR3 for antibody 8149 (IGHV3-11)
ARDGGAAAGTWDS

SEQ ID NO: 16299 - protein, 9 aa, Homo sapiens
  Light chain CDR3 for antibody 8150 (IGKV3D-7)
QQDYNLPYT

SEQ ID NO: 16300 - protein, 16 aa, Homo sapiens
  Heavy chain CDR3 for antibody 8150 (IGHV3-33)
AREGGLIAAAGTGFDY

SEQ ID NO: 16301 - protein, 9 aa, Homo sapiens
  Light chain CDR3 for antibody 8151 (IGKV1-16)
QHYNDYPFT

SEQ ID NO: 16302 - protein, 8 aa, Homo sapiens
  Heavy chain CDR3 for antibody 8151 (IGHV3-23)
AKETGNNY

SEQ ID NO: 16303 - protein, 9 aa, Homo sapiens
  Light chain CDR3 for antibody 8152 (IGKV6-21)
HQSSSLPYT

SEQ ID NO: 16304 - protein, 16 aa, Homo sapiens
  Heavy chain CDR3 for antibody 8152 (IGHV3-33)
AREMAGSYYYYYGMDV

SEQ ID NO: 16305 - protein, 10 aa, Homo sapiens
  Light chain CDR3 for antibody 8153 (IGKV1-6)
LQDYNYPMYT

SEQ ID NO: 16306 - protein, 13 aa, Homo sapiens
  Heavy chain CDR3 for antibody 8153 (IGHV3-33)
ASTGDSYYYGMDV

SEQ ID NO: 16307 - protein, 9 aa, Homo sapiens
  Light chain CDR3 for antibody 8154 (IGKV1-39)
QQSYSTPLT

SEQ ID NO: 16308 - protein, 18 aa, Homo sapiens
  Heavy chain CDR3 for antibody 8154 (IGHV3-33)
ARAGYYGSGSYYYYGMDV

SEQ ID NO: 16309 - protein, 9 aa, Homo sapiens
  Light chain CDR3 for antibody 8155 (IGKV1-17)
LQHNSYPYT

SEQ ID NO: 16310 - protein, 15 aa, Homo sapiens
  Heavy chain CDR3 for antibody 8155 (IGHV4-59)
ARDLGYYGSGSPLAY

SEQ ID NO: 16311 - protein, 9 aa, Homo sapiens
  Light chain CDR3 for antibody 8156 (IGKV3D-7)
QQDYNLPLT

SEQ ID NO: 16312 - protein, 18 aa, Homo sapiens
  Heavy chain CDR3 for antibody 8156 (IGHV3-33)
ARDEYYGSGIYYNYGMDV

SEQ ID NO: 16313 - protein, 8 aa, Homo sapiens
  Light chain CDR3 for antibody 8157 (IGKV1D-13)
QQFNNYPT

SEQ ID NO: 16314 - protein, 15 aa, Homo sapiens
  Heavy chain CDR3 for antibody 8157 (IGHV3-33)
ARRSILTGSYWYFDL

SEQ ID NO: 16315 - protein, 8 aa, Homo sapiens
  Light chain CDR3 for antibody 8158 (IGKV3-11)
QQRSNWLT

SEQ ID NO: 16316 - protein, 14 aa, Homo sapiens
  Heavy chain CDR3 for antibody 8158 (IGHV3-33)
AREDYYGPLNWFDP

SEQ ID NO: 16317 - protein, 9 aa, Homo sapiens
  Light chain CDR3 for antibody 8159 (IGKV1-6)
LQDYKSPFT

SEQ ID NO: 16318 - protein, 11 aa, Homo sapiens
  Heavy chain CDR3 for antibody 8159 (IGHV3-33)
ARDRVLTPFDY

SEQ ID NO: 16319 - protein, 9 aa, Homo sapiens
  Light chain CDR3 for antibody 8160 (IGKV3-11)
QQRSNWPPT

SEQ ID NO: 16320 - protein, 11 aa, Homo sapiens
  Heavy chain CDR3 for antibody 8160 (IGHV3-33)
ARAGIAALFDY

SEQ ID NO: 16321 - protein, 8 aa, Homo sapiens
  Light chain CDR3 for antibody 8161 (IGKV3-11)
LQRGNWPT

SEQ ID NO: 16322 - protein, 12 aa, Homo sapiens
  Heavy chain CDR3 for antibody 8161 (IGHV3-33)
TRGYSSKSYFDY

SEQ ID NO: 16323 - protein, 10 aa, Homo sapiens
  Light chain CDR3 for antibody 8162 (IGKV1-39)
QQSYSTPMYT

SEQ ID NO: 16324 - protein, 17 aa, Homo sapiens
  Heavy chain CDR3 for antibody 8162 (IGHV3-33)
ARQGVLLWFGELYYFDY

SEQ ID NO: 16325 - protein, 9 aa, Homo sapiens
  Light chain CDR3 for antibody 8163 (IGKV3D-7)
QQDYNLPLT

SEQ ID NO: 16326 - protein, 17 aa, Homo sapiens
  Heavy chain CDR3 for antibody 8163 (IGHV4-34)
ARDGSGSYTHYYYGMDV

SEQ ID NO: 16327 - protein, 9 aa, Homo sapiens
  Light chain CDR3 for antibody 8164 (IGKV1-16)
QQYDSYPPT

SEQ ID NO: 16328 - protein, 11 aa, Homo sapiens
  Heavy chain CDR3 for antibody 8164 (IGHV4-59)
ARSIRYSVFDY

SEQ ID NO: 16329 - protein, 9 aa, Homo sapiens
  Light chain CDR3 for antibody 8165 (IGKV3-11)
QQRINWPWT

SEQ ID NO: 16330 - protein, 8 aa, Homo sapiens
  Heavy chain CDR3 for antibody 8165 (IGHV3-23)
AETFLFDY

SEQ ID NO: 16331 - protein, 9 aa, Homo sapiens
  Light chain CDR3 for antibody 8166 (IGKV1-6)
LQDFHYPWT

SEQ ID NO: 16332 - protein, 16 aa, Homo sapiens
  Heavy chain CDR3 for antibody 8166 (IGHV4-59)
ARDTPYYSGSGRPFDS

SEQ ID NO: 16333 - protein, 8 aa, Homo sapiens
  Light chain CDR3 for antibody 8167 (IGKV1-5)
QQYNSYWT

SEQ ID NO: 16334 - protein, 12 aa, Homo sapiens
  Heavy chain CDR3 for antibody 8167 (IGHV3-23)
AKEYDILTGYFH

SEQ ID NO: 16335 - protein, 9 aa, Homo sapiens
  Light chain CDR3 for antibody 8168 (IGKV1-39)
QQSYSTPYT

SEQ ID NO: 16336 - protein, 12 aa, Homo sapiens
  Heavy chain CDR3 for antibody 8168 (IGHV4-34)
ARGYSSSWYFDY

SEQ ID NO: 16337 - protein, 10 aa, Homo sapiens
  Light chain CDR3 for antibody 8169 (IGKV1-17)
LQHNSYPMYT

SEQ ID NO: 16338 - protein, 19 aa, Homo sapiens
  Heavy chain CDR3 for antibody 8169 (IGHV3-33)
ARGPYYDILTGYGYYGMDV

SEQ ID NO: 16339 - protein, 8 aa, Homo sapiens
  Light chain CDR3 for antibody 8170 (IGKV6-21)
HQSSSLPT

SEQ ID NO: 16340 - protein, 13 aa, Homo sapiens
  Heavy chain CDR3 for antibody 8170 (IGHV3-23)
ASPFNWNDGFFDY

SEQ ID NO: 16341 - protein, 9 aa, Homo sapiens
  Light chain CDR3 for antibody 8171 (IGKV3-15)
QQYNNWPLT

SEQ ID NO: 16342 - protein, 13 aa, Homo sapiens
  Heavy chain CDR3 for antibody 8171 (IGHV3-33)
ANTGDSYYYDMDV

SEQ ID NO: 16343 - protein, 9 aa, Homo sapiens
  Light chain CDR3 for antibody 8172 (IGKV3-11)
QQRSNWPWT

SEQ ID NO: 16344 - protein, 13 aa, Homo sapiens
  Heavy chain CDR3 for antibody 8172 (IGHV4-39)
ARHHYGSGSLRDY

SEQ ID NO: 16345 - protein, 8 aa, Homo sapiens
  Light chain CDR3 for antibody 8173 (IGKV1D-13)
QQFNNYYT

SEQ ID NO: 16346 - protein, 12 aa, Homo sapiens
  Heavy chain CDR3 for antibody 8173 (IGHV3-33)
ARDPGYYYGLDV

SEQ ID NO: 16347 - protein, 9 aa, Homo sapiens
  Light chain CDR3 for antibody 8174 (IGKV1-16)
QHYNDYPFT

SEQ ID NO: 16348 - protein, 11 aa, Homo sapiens
  Heavy chain CDR3 for antibody 8174 (IGHV4-59)
ARSIRYSVFDY

SEQ ID NO: 16349 - protein, 10 aa, Homo sapiens
  Light chain CDR3 for antibody 8175 (IGKV3-20)
QQYGSSPPYT

SEQ ID NO: 16350 - protein, 20 aa, Homo sapiens
  Heavy chain CDR3 for antibody 8175 (IGHV3-20)
ARDLCSSTSCYGYYYYGMDV

SEQ ID NO: 16351 - protein, 10 aa, Homo sapiens
  Light chain CDR3 for antibody 8176 (IGKV3-11)
QQRSNWPALT

SEQ ID NO: 16352 - protein, 14 aa, Homo sapiens
  Heavy chain CDR3 for antibody 8176 (IGHV3-33)
ARDKTYPLSYGMDV

SEQ ID NO: 16353 - protein, 9 aa, Homo sapiens
  Light chain CDR3 for antibody 8177 (IGKV3D-20)
QQYGYSPLT

SEQ ID NO: 16354 - protein, 10 aa, Homo sapiens
  Heavy chain CDR3 for antibody 8177 (IGHV3-33)
ARENSTPLDY

SEQ ID NO: 16355 - protein, 9 aa, Homo sapiens
  Light chain CDR3 for antibody 8178 (IGKV3-20)
QQYCSSPLT

SEQ ID NO: 16356 - protein, 14 aa, Homo sapiens
  Heavy chain CDR3 for antibody 8178 (IGHV3-33)
ARDREQQLVRYFDY

SEQ ID NO: 16357 - protein, 9 aa, Homo sapiens
  Light chain CDR3 for antibody 8179 (IGKV3-11)
QQRINWPWT

SEQ ID NO: 16358 - protein, 15 aa, Homo sapiens
  Heavy chain CDR3 for antibody 8179 (IGHV4-39)
ARRDYDILTGYLFDY

SEQ ID NO: 16359 - protein, 8 aa, Homo sapiens
  Light chain CDR3 for antibody 8180 (IGKV1D-13)
QQFNNYPT

SEQ ID NO: 16360 - protein, 17 aa, Homo sapiens
  Heavy chain CDR3 for antibody 8180 (IGHV3-33)
ARDWFGELSDYYYGMDV

SEQ ID NO: 16361 - protein, 10 aa, Homo sapiens
  Light chain CDR3 for antibody 8181 (IGKV3-15)
QQYNNWPPYT

SEQ ID NO: 16362 - protein, 18 aa, Homo sapiens
  Heavy chain CDR3 for antibody 8181 (IGHV3-33)
AREGTMVRGVIIIDAFDI

SEQ ID NO: 16363 - protein, 10 aa, Homo sapiens
  Light chain CDR3 for antibody 8182 (IGKV1-33)
QQLNSYPGPT

SEQ ID NO: 16364 - protein, 12 aa, Homo sapiens
  Heavy chain CDR3 for antibody 8182 (IGHV3-66)
ARDLSEAGGFDY

SEQ ID NO: 16365 - protein, 11 aa, Homo sapiens
  Light chain CDR3 for antibody 8183 (IGKV3-11)
QQRSNWPPTWT

SEQ ID NO: 16366 - protein, 15 aa, Homo sapiens
  Heavy chain CDR3 for antibody 8183 (IGHV3-33)
ARDSRPEITGPPFDY

SEQ ID NO: 16367 - protein, 9 aa, Homo sapiens
  Light chain CDR3 for antibody 8184 (IGKV1-33)
QQYDNLPFT

SEQ ID NO: 16368 - protein, 17 aa, Homo sapiens
  Heavy chain CDR3 for antibody 8184 (IGHV3-30)
ARESLWFGEANHFVMDV

SEQ ID NO: 16369 - protein, 9 aa, Homo sapiens
  Light chain CDR3 for antibody 8185 (IGKV1-17)
LHSNNYPWT

SEQ ID NO: 16370 - protein, 13 aa, Homo sapiens
  Heavy chain CDR3 for antibody 8185 (IGHV3-33)
ARDWGYSHGYFDY

SEQ ID NO: 16371 - protein, 10 aa, Homo sapiens
  Light chain CDR3 for antibody 8186 (IGKV1-39)
QQSYSTPMYT

SEQ ID NO: 16372 - protein, 14 aa, Homo sapiens
  Heavy chain CDR3 for antibody 8186 (IGHV3-23)
ANWAYDILTGYLDY

SEQ ID NO: 16373 - protein, 9 aa, Homo sapiens
  Light chain CDR3 for antibody 8187 (IGKV1-6)
LQDYNYPHT

SEQ ID NO: 16374 - protein, 14 aa, Homo sapiens
  Heavy chain CDR3 for antibody 8187 (IGHV4-39)
ARQGGWYLYWYFDL

SEQ ID NO: 16375 - protein, 9 aa, Homo sapiens
  Light chain CDR3 for antibody 8188 (IGKV1-33)
QQYDNLPFT

SEQ ID NO: 16376 - protein, 8 aa, Homo sapiens
  Heavy chain CDR3 for antibody 8188 (IGHV4-39)
ARRGGLDY

SEQ ID NO: 16377 - protein, 9 aa, Homo sapiens
  Light chain CDR3 for antibody 8189 (IGKV3-11)
QQRSSWPPT

SEQ ID NO: 16378 - protein, 11 aa, Homo sapiens
  Heavy chain CDR3 for antibody 8189 (IGHV3-33)
ARDKSSGWSDY

SEQ ID NO: 16379 - protein, 9 aa, Homo sapiens
  Light chain CDR3 for antibody 8190 (IGKV6-21)
HQSSSLPYT

SEQ ID NO: 16380 - protein, 13 aa, Homo sapiens
  Heavy chain CDR3 for antibody 8190 (IGHV4-4)
ARERGIAAAGPDY

SEQ ID NO: 16381 - protein, 9 aa, Homo sapiens
  Light chain CDR3 for antibody 8191 (IGKV1-9)
QQGNTYSRT

SEQ ID NO: 16382 - protein, 19 aa, Homo sapiens
  Heavy chain CDR3 for antibody 8191 (IGHV5-51)
ARHGEKGKRITMVRGSLDV

SEQ ID NO: 16383 - protein, 9 aa, Homo sapiens
  Light chain CDR3 for antibody 8192 (IGKV1-17)
QQLNSYPWT

SEQ ID NO: 16384 - protein, 16 aa, Homo sapiens
  Heavy chain CDR3 for antibody 8192 (IGHV3-23)
AKEGMVLRYFDWLWDY

SEQ ID NO: 16385 - protein, 8 aa, Homo sapiens
  Light chain CDR3 for antibody 8193 (IGKV3-11)
QQRSNWWT

SEQ ID NO: 16386 - protein, 9 aa, Homo sapiens
  Heavy chain CDR3 for antibody 8193 (IGHV3-13)
ARDHWYFDL

SEQ ID NO: 16387 - protein, 8 aa, Homo sapiens
  Light chain CDR3 for antibody 8194 (IGKV6-21)
HQSSSLPT

SEQ ID NO: 16388 - protein, 10 aa, Homo sapiens
  Heavy chain CDR3 for antibody 8194 (IGHV3-23)
AKGDRWRFDP

SEQ ID NO: 16389 - protein, 9 aa, Homo sapiens
  Light chain CDR3 for antibody 8195 (IGKV1D-16)
QQYNSFPLT

SEQ ID NO: 16390 - protein, 16 aa, Homo sapiens
  Heavy chain CDR3 for antibody 8195 (IGHV4-61)
ARGRYFDWLLADVFDL

SEQ ID NO: 16391 - protein, 8 aa, Homo sapiens
  Light chain CDR3 for antibody 8196 (IGKV1D-13)
QQFNNYPT

SEQ ID NO: 16392 - protein, 17 aa, Homo sapiens
  Heavy chain CDR3 for antibody 8196 (IGHV3-33)
ARCGYSSSWYDPYYFDY

SEQ ID NO: 16393 - protein, 9 aa, Homo sapiens
  Light chain CDR3 for antibody 8197 (IGKV3-20)
QQYGSSPYT

SEQ ID NO: 16394 - protein, 13 aa, Homo sapiens
  Heavy chain CDR3 for antibody 8197 (IGHV1-24)
ATLHTYFYGEFAY

SEQ ID NO: 16395 - protein, 9 aa, Homo sapiens
  Light chain CDR3 for antibody 8198 (IGKV3D-7)
QQDYNLPYT

SEQ ID NO: 16396 - protein, 13 aa, Homo sapiens
  Heavy chain CDR3 for antibody 8198 (IGHV3-33)
ASGYSGYDWYFDL

SEQ ID NO: 16397 - protein, 9 aa, Homo sapiens
  Light chain CDR3 for antibody 8199 (IGKV1-17)
QQLNSYPLT

SEQ ID NO: 16398 - protein, 18 aa, Homo sapiens
  Heavy chain CDR3 for antibody 8199 (IGHV4-39)
ARYITMVRGAIITGPFDY

SEQ ID NO: 16399 - protein, 9 aa, Homo sapiens
  Light chain CDR3 for antibody 8200 (IGKV3-20)
QQYGTSPFP

SEQ ID NO: 16400 - protein, 13 aa, Homo sapiens
  Heavy chain CDR3 for antibody 8200 (IGHV3-33)
ARAFTMVRGVIDY

SEQ ID NO: 16401 - protein, 9 aa, Homo sapiens
  Light chain CDR3 for antibody 8201 (IGKV2D-24)
TQATQFPHT

SEQ ID NO: 16402 - protein, 18 aa, Homo sapiens
  Heavy chain CDR3 for antibody 8201 (IGHV3-33)
ARREGIVGATTYYYGMDV

SEQ ID NO: 16403 - protein, 8 aa, Homo sapiens
  Light chain CDR3 for antibody 8202 (IGKV1D-13)
QQFNNYPT

SEQ ID NO: 16404 - protein, 13 aa, Homo sapiens
  Heavy chain CDR3 for antibody 8202 (IGHV3-30)
AAPFMVRGDGMDV

SEQ ID NO: 16405 - protein, 9 aa, Homo sapiens
  Light chain CDR3 for antibody 8203 (IGKV1-9)
LQDFHYPWT

SEQ ID NO: 16406 - protein, 14 aa, Homo sapiens
  Heavy chain CDR3 for antibody 8203 (IGHV3-33)
ARAGSGYDRDWFDP

SEQ ID NO: 16407 - protein, 9 aa, Homo sapiens
  Light chain CDR3 for antibody 8204 (IGKV2D-24)
TQATQFPHT

SEQ ID NO: 16408 - protein, 14 aa, Homo sapiens
  Heavy chain CDR3 for antibody 8204 (IGHV4-39)
ARDSGYDYYYGMDV

SEQ ID NO: 16409 - protein, 9 aa, Homo sapiens
  Light chain CDR3 for antibody 8205 (IGKV2-30)
MQGTHWPLT

SEQ ID NO: 16410 - protein, 13 aa, Homo sapiens
  Heavy chain CDR3 for antibody 8205 (IGHV3-21)
ARDSTLVRGVFPY

SEQ ID NO: 16411 - protein, 9 aa, Homo sapiens
  Light chain CDR3 for antibody 8206 (IGKV3D-15)
QQYNNWPIT

SEQ ID NO: 16412 - protein, 20 aa, Homo sapiens
  Heavy chain CDR3 for antibody 8206 (IGHV3-33)
ARDPGYYGSGSYVPLDAFDI

SEQ ID NO: 16413 - protein, 9 aa, Homo sapiens
  Light chain CDR3 for antibody 8207 (IGKV1D-16)
QQYNSYPYT

SEQ ID NO: 16414 - protein, 14 aa, Homo sapiens
  Heavy chain CDR3 for antibody 8207 (IGHV3-33)
ARDGSGSYPLYFDY

SEQ ID NO: 16415 - protein, 9 aa, Homo sapiens
  Light chain CDR3 for antibody 8208 (IGKV3D-7)
QQDYSFPLT

SEQ ID NO: 16416 - protein, 9 aa, Homo sapiens
  Heavy chain CDR3 for antibody 8208 (IGHV3-13)
ARDRWYFDL

SEQ ID NO: 16417 - protein, 9 aa, Homo sapiens
  Light chain CDR3 for antibody 8209 (IGKV4-1)
QQYYTTPPT

SEQ ID NO: 16418 - protein, 13 aa, Homo sapiens
  Heavy chain CDR3 for antibody 8209 (IGHV3-23)
ASPFNWNDGFFDY

SEQ ID NO: 16419 - protein, 9 aa, Homo sapiens
  Light chain CDR3 for antibody 8210 (IGKV1-9)
QQLNRYPYT

SEQ ID NO: 16420 - protein, 15 aa, Homo sapiens
  Heavy chain CDR3 for antibody 8210 (IGHV3-23)
AKDGSYYDYYYGMDV

SEQ ID NO: 16421 - protein, 8 aa, Homo sapiens
  Light chain CDR3 for antibody 8211 (IGKV1-5)
QQYNSYYT

SEQ ID NO: 16422 - protein, 18 aa, Homo sapiens
  Heavy chain CDR3 for antibody 8211 (IGHV3-33)
VRDRERYGSGSYPDAFDI

SEQ ID NO: 16423 - protein, 9 aa, Homo sapiens
  Light chain CDR3 for antibody 8212 (IGKV3-15)
QQYNNWPYT

SEQ ID NO: 16424 - protein, 17 aa, Homo sapiens
  Heavy chain CDR3 for antibody 8212 (IGHV3-33)
ARDWFGELSDYYYGMDV

SEQ ID NO: 16425 - protein, 9 aa, Homo sapiens
  Light chain CDR3 for antibody 8213 (IGKV1-9)
QQLNSYPNT

SEQ ID NO: 16426 - protein, 14 aa, Homo sapiens
  Heavy chain CDR3 for antibody 8213 (IGHV3-33)
GRDAMGATTAWFDP

SEQ ID NO: 16427 - protein, 9 aa, Homo sapiens
  Light chain CDR3 for antibody 8214 (IGKV3-11)
QQRSNWPPT

SEQ ID NO: 16428 - protein, 18 aa, Homo sapiens
  Heavy chain CDR3 for antibody 8214 (IGHV3-33)
ARDQGIVVLPGAPWYFDP

SEQ ID NO: 16429 - protein, 8 aa, Homo sapiens
  Light chain CDR3 for antibody 8215 (IGKV3-20)
QQYGRSFT

SEQ ID NO: 16430 - protein, 14 aa, Homo sapiens
  Heavy chain CDR3 for antibody 8215 (IGHV3-33)
ARAGSGYDRDWFDP

SEQ ID NO: 16431 - protein, 9 aa, Homo sapiens
  Light chain CDR3 for antibody 8216 (IGKV1-9)
QQLNSYPYT

SEQ ID NO: 16432 - protein, 13 aa, Homo sapiens
  Heavy chain CDR3 for antibody 8216 (IGHV3-33)
AREYCSGGSCYDY

SEQ ID NO: 16433 - protein, 9 aa, Homo sapiens
  Light chain CDR3 for antibody 8217 (IGKV1-39)
QQSYSTPYT

SEQ ID NO: 16434 - protein, 13 aa, Homo sapiens
  Heavy chain CDR3 for antibody 8217 (IGHV1-18)
ARSYYGSGSPFDY

SEQ ID NO: 16435 - protein, 9 aa, Homo sapiens
  Light chain CDR3 for antibody 8218 (IGKV1D-13)
QRFNNYLYT

SEQ ID NO: 16436 - protein, 17 aa, Homo sapiens
  Heavy chain CDR3 for antibody 8218 (IGHV3-33)
ARDQDDILTGYYWYFDL

SEQ ID NO: 16437 - protein, 8 aa, Homo sapiens
  Light chain CDR3 for antibody 8219 (IGKV3-11)
QQRSNWLT

SEQ ID NO: 16438 - protein, 17 aa, Homo sapiens
  Heavy chain CDR3 for antibody 8219 (IGHV1-8)
ARGDYYGSGSPYWYFDL

SEQ ID NO: 16439 - protein, 9 aa, Homo sapiens
  Light chain CDR3 for antibody 8220 (IGKV5-2)
LQHDNFPYT

SEQ ID NO: 16440 - protein, 15 aa, Homo sapiens
  Heavy chain CDR3 for antibody 8220 (IGHV3-33)
ARDRVQLGYYYGMDV

SEQ ID NO: 16441 - protein, 9 aa, Homo sapiens
  Light chain CDR3 for antibody 8221 (IGKV3-15)
QQYNNWPLT

SEQ ID NO: 16442 - protein, 8 aa, Homo sapiens
  Heavy chain CDR3 for antibody 8221 (IGHV4-39)
ARRGGLDY

SEQ ID NO: 16443 - protein, 9 aa, Homo sapiens
  Light chain CDR3 for antibody 8222 (IGKV1-39)
QQSYSTPYT

SEQ ID NO: 16444 - protein, 17 aa, Homo sapiens
  Heavy chain CDR3 for antibody 8222 (IGHV3-33)
ARDPARGNVRSFYGLDV

SEQ ID NO: 16445 - protein, 9 aa, Homo sapiens
  Light chain CDR3 for antibody 8223 (IGKV2-30)
MQGTHWPLT

SEQ ID NO: 16446 - protein, 14 aa, Homo sapiens
  Heavy chain CDR3 for antibody 8223 (IGHV4-39)
ARQGTMIRGGYFDY

SEQ ID NO: 16447 - protein, 9 aa, Homo sapiens
  Light chain CDR3 for antibody 8224 (IGKV3-11)
QQRSNWPRT

SEQ ID NO: 16448 - protein, 14 aa, Homo sapiens
  Heavy chain CDR3 for antibody 8224 (IGHV1-46)
ARKGIVGAFDAFDI

SEQ ID NO: 16449 - protein, 9 aa, Homo sapiens
  Light chain CDR3 for antibody 8225 (IGKV1-17)
LQHNSYPFT

SEQ ID NO: 16450 - protein, 12 aa, Homo sapiens
  Heavy chain CDR3 for antibody 8225 (IGHV3-33)
ARESGGSYSFDY

SEQ ID NO: 16451 - protein, 9 aa, Homo sapiens
  Light chain CDR3 for antibody 8226 (IGKV3-20)
QQYGSSPYT

SEQ ID NO: 16452 - protein, 17 aa, Homo sapiens
  Heavy chain CDR3 for antibody 8226 (IGHV3-33)
ARGDAYYDILTGYHFDY

SEQ ID NO: 16453 - protein, 10 aa, Homo sapiens
  Light chain CDR3 for antibody 8227 (IGKV3-11)
QQHSNWPIFT

SEQ ID NO: 16454 - protein, 12 aa, Homo sapiens
  Heavy chain CDR3 for antibody 8227 (IGHV1-18)
ARVLFDGDYFDY

SEQ ID NO: 16455 - protein, 9 aa, Homo sapiens
  Light chain CDR3 for antibody 8228 (IGKV2-30)
MQGTHWPLT

SEQ ID NO: 16456 - protein, 11 aa, Homo sapiens
  Heavy chain CDR3 for antibody 8228 (IGHV3-23)
AKGLWSYYFDY

SEQ ID NO: 16457 - protein, 9 aa, Homo sapiens
  Light chain CDR3 for antibody 8229 (IGKV1D-13)
QRFNNYLYT

SEQ ID NO: 16458 - protein, 17 aa, Homo sapiens
  Heavy chain CDR3 for antibody 8229 (IGHV3-33)
VREGGLLWVGELSLFDY

SEQ ID NO: 16459 - protein, 9 aa, Homo sapiens
  Light chain CDR3 for antibody 8230 (IGKV1-9)
QQLKSYLYT

SEQ ID NO: 16460 - protein, 9 aa, Homo sapiens
  Heavy chain CDR3 for antibody 8230 (IGHV4-59)
AGGSWDFDY

SEQ ID NO: 16461 - protein, 9 aa, Homo sapiens
  Light chain CDR3 for antibody 8231 (IGKV3D-7)
QQDYNLPFT

SEQ ID NO: 16462 - protein, 14 aa, Homo sapiens
  Heavy chain CDR3 for antibody 8231 (IGHV3-33)
ARDTVAAGFNGMDV

SEQ ID NO: 16463 - protein, 8 aa, Homo sapiens
  Light chain CDR3 for antibody 8232 (IGKV3D-7)
QQDYNLLT

SEQ ID NO: 16464 - protein, 12 aa, Homo sapiens
  Heavy chain CDR3 for antibody 8232 (IGHV3-33)
ARNYDILDYFDY

SEQ ID NO: 16465 - protein, 9 aa, Homo sapiens
  Light chain CDR3 for antibody 8233 (IGKV1-6)
LQDYNYPYT

SEQ ID NO: 16466 - protein, 13 aa, Homo sapiens
  Heavy chain CDR3 for antibody 8233 (IGHV1-18)
ARDEGYDIDGMDV

SEQ ID NO: 16467 - protein, 10 aa, Homo sapiens
  Light chain CDR3 for antibody 8234 (IGKV3-11)
QQRSNWPIFT

SEQ ID NO: 16468 - protein, 20 aa, Homo sapiens
  Heavy chain CDR3 for antibody 8234 (IGHV3-33)
ARDWMVRGVIITDYYYGMDV

SEQ ID NO: 16469 - protein, 9 aa, Homo sapiens
  Light chain CDR3 for antibody 8235 (IGKV1-39)
LQDYNYPYT

SEQ ID NO: 16470 - protein, 12 aa, Homo sapiens
  Heavy chain CDR3 for antibody 8235 (IGHV3-33)
ARVIDWLKPMDV

SEQ ID NO: 16471 - protein, 9 aa, Homo sapiens
  Light chain CDR3 for antibody 8236 (IGKV3-11)
QQRSNWMYT

SEQ ID NO: 16472 - protein, 17 aa, Homo sapiens
  Heavy chain CDR3 for antibody 8236 (IGHV3-30)
AREGVRGLIYYYYGMDV

SEQ ID NO: 16473 - protein, 9 aa, Homo sapiens
  Light chain CDR3 for antibody 8237 (IGKV1D-16)
QQYHSYPYT

SEQ ID NO: 16474 - protein, 13 aa, Homo sapiens
  Heavy chain CDR3 for antibody 8237 (IGHV1-24)
ATGYSINWYEFDY

SEQ ID NO: 16475 - protein, 9 aa, Homo sapiens
  Light chain CDR3 for antibody 8238 (IGKV1D-16)
QQYNSYPFT

SEQ ID NO: 16476 - protein, 12 aa, Homo sapiens
  Heavy chain CDR3 for antibody 8238 (IGHV4-61)
ARVDSSGWYFDY

SEQ ID NO: 16477 - protein, 9 aa, Homo sapiens
  Light chain CDR3 for antibody 8239 (IGKV1-9)
QQLKSYLYT

SEQ ID NO: 16478 - protein, 18 aa, Homo sapiens
  Heavy chain CDR3 for antibody 8239 (IGHV1-18)
ARDLTGRTENYYYYGMDV

SEQ ID NO: 16479 - protein, 9 aa, Homo sapiens
  Light chain CDR3 for antibody 8240 (IGKV6-21)
HQSTSLPFT

SEQ ID NO: 16480 - protein, 18 aa, Homo sapiens
  Heavy chain CDR3 for antibody 8240 (IGHV1-46)
ARDLTGRTENYYYYGMDV

SEQ ID NO: 16481 - protein, 8 aa, Homo sapiens
  Light chain CDR3 for antibody 8241 (IGKV3-20)
QQYGRSFT

SEQ ID NO: 16482 - protein, 11 aa, Homo sapiens
  Heavy chain CDR3 for antibody 8241 (IGHV3-33)
AREAANWGFDY

SEQ ID NO: 16483 - protein, 9 aa, Homo sapiens
  Light chain CDR3 for antibody 8242 (IGKV1D-16)
QQYSSYPYT

SEQ ID NO: 16484 - protein, 14 aa, Homo sapiens
  Heavy chain CDR3 for antibody 8242 (IGHV3-48)
GRDTTHDWSDGGIY

SEQ ID NO: 16485 - protein, 11 aa, Homo sapiens
  Light chain CDR3 for antibody 8243 (IGKV3-11)
QQRSNWPPTWT

SEQ ID NO: 16486 - protein, 10 aa, Homo sapiens
  Heavy chain CDR3 for antibody 8243 (IGHV4-39)
ARQLGNWFDP

SEQ ID NO: 16487 - protein, 9 aa, Homo sapiens
  Light chain CDR3 for antibody 8244 (IGKV3-15)
QQYNNWPYT

SEQ ID NO: 16488 - protein, 17 aa, Homo sapiens
  Heavy chain CDR3 for antibody 8244 (IGHV3-33)
ARCGYSSSWYDPYYFDY

SEQ ID NO: 16489 - protein, 9 aa, Homo sapiens
  Light chain CDR3 for antibody 8245 (IGKV4-1)
QQYYTTPYT

SEQ ID NO: 16490 - protein, 15 aa, Homo sapiens
  Heavy chain CDR3 for antibody 8245 (IGHV3-33)
ARDTGYSSSWNWFDP

SEQ ID NO: 16491 - protein, 8 aa, Homo sapiens
  Light chain CDR3 for antibody 8246 (IGKV3D-7)
QQDYNLLT

SEQ ID NO: 16492 - protein, 18 aa, Homo sapiens
  Heavy chain CDR3 for antibody 8246 (IGHV3-33)
ARDQGIVVLPGAPWYFDP

SEQ ID NO: 16493 - protein, 8 aa, Homo sapiens
  Light chain CDR3 for antibody 8247 (IGKV1D-13)
QQFNNYPT

SEQ ID NO: 16494 - protein, 14 aa, Homo sapiens
  Heavy chain CDR3 for antibody 8247 (IGHV3-33)
AREDYYGPLNWFDP

SEQ ID NO: 16495 - protein, 9 aa, Homo sapiens
  Light chain CDR3 for antibody 8248 (IGKV1D-16)
QQYAGYPPT

SEQ ID NO: 16496 - protein, 18 aa, Homo sapiens
  Heavy chain CDR3 for antibody 8248 (IGHV4-59)
AREGHYYTSGSYYKAFDY

SEQ ID NO: 16497 - protein, 9 aa, Homo sapiens
  Light chain CDR3 for antibody 8249 (IGKV3D-7)
QQDYNLPYT

SEQ ID NO: 16498 - protein, 17 aa, Homo sapiens
  Heavy chain CDR3 for antibody 8249 (IGHV4-59)
ARDFLVRGEGSYYGMDV

SEQ ID NO: 16499 - protein, 9 aa, Homo sapiens
  Light chain CDR3 for antibody 8250 (IGKV3-11)
QQRSNWPLT

SEQ ID NO: 16500 - protein, 18 aa, Homo sapiens
  Heavy chain CDR3 for antibody 8250 (IGHV3-33)
ARRSAAGTGDYYYCGMDV

SEQ ID NO: 16501 - protein, 9 aa, Homo sapiens
  Light chain CDR3 for antibody 8251 (IGKV1D-16)
QQYHSYPYT

SEQ ID NO: 16502 - protein, 15 aa, Homo sapiens
  Heavy chain CDR3 for antibody 8251 (IGHV3-74)
ARGSGSHYFYYGMDV

SEQ ID NO: 16503 - protein, 8 aa, Homo sapiens
  Light chain CDR3 for antibody 8252 (IGKV3-11)
QQRSNWLT

SEQ ID NO: 16504 - protein, 13 aa, Homo sapiens
  Heavy chain CDR3 for antibody 8252 (IGHV4-39)
ARHHYGSGSLRDY

SEQ ID NO: 16505 - protein, 10 aa, Homo sapiens
  Light chain CDR3 for antibody 8253 (IGKV3-15)
QQYNNWPPYT

SEQ ID NO: 16506 - protein, 12 aa, Homo sapiens
  Heavy chain CDR3 for antibody 8253 (IGHV3-33)
AREGDILTGYSL

SEQ ID NO: 16507 - protein, 9 aa, Homo sapiens
  Light chain CDR3 for antibody 8254 (IGKV1-39)
QQSYSTPFT

SEQ ID NO: 16508 - protein, 10 aa, Homo sapiens
  Heavy chain CDR3 for antibody 8254 (IGHV4-59)
ARHGVAGTNY

SEQ ID NO: 16509 - protein, 9 aa, Homo sapiens
  Light chain CDR3 for antibody 8255 (IGKV1D-13)
QQFNNYPHT

SEQ ID NO: 16510 - protein, 17 aa, Homo sapiens
  Heavy chain CDR3 for antibody 8255 (IGHV3-23)
AKEYCSGGSCYVYYFDY

SEQ ID NO: 16511 - protein, 9 aa, Homo sapiens
  Light chain CDR3 for antibody 8256 (IGKV1D-16)
QQYNSFPLT

SEQ ID NO: 16512 - protein, 16 aa, Homo sapiens
  Heavy chain CDR3 for antibody 8256 (IGHV3-23)
AKEGMVLRYFDWLWDY

SEQ ID NO: 16513 - protein, 10 aa, Homo sapiens
  Light chain CDR3 for antibody 8257 (IGKV3-11)
QQRSNWPIFT

SEQ ID NO: 16514 - protein, 21 aa, Homo sapiens
  Heavy chain CDR3 for antibody 8257 (IGHV1-18)
ASGVLIWFGELLSEDYYDMDV

SEQ ID NO: 16515 - protein, 9 aa, Homo sapiens
  Light chain CDR3 for antibody 8258 (IGKV1-16)
QQYNRYPYT

SEQ ID NO: 16516 - protein, 17 aa, Homo sapiens
  Heavy chain CDR3 for antibody 8258 (IGHV4-59)
AREGADSGIYYHWYFDL

SEQ ID NO: 16517 - protein, 9 aa, Homo sapiens
  Light chain CDR3 for antibody 8259 (IGKV1-16)
QHYNDYPFT

SEQ ID NO: 16518 - protein, 15 aa, Homo sapiens
  Heavy chain CDR3 for antibody 8259 (IGHV3-33)
ARDRGWKAPGYGMDV

SEQ ID NO: 16519 - protein, 10 aa, Homo sapiens
  Light chain CDR3 for antibody 8260 (IGKV1-16)
QQSYSTPMYT

SEQ ID NO: 16520 - protein, 13 aa, Homo sapiens
  Heavy chain CDR3 for antibody 8260 (IGHV3-66)
ANTGDSYYYGFYV

SEQ ID NO: 16521 - protein, 9 aa, Homo sapiens
  Light chain CDR3 for antibody 8261 (IGKV1-9)
QQLNSYPLT

SEQ ID NO: 16522 - protein, 15 aa, Homo sapiens
  Heavy chain CDR3 for antibody 8261 (IGHV3-23)
AKDPRGYYYYYGMDV

SEQ ID NO: 16523 - protein, 9 aa, Homo sapiens
  Light chain CDR3 for antibody 8262 (IGKV1-9)
LQDFHYPWT

SEQ ID NO: 16524 - protein, 13 aa, Homo sapiens
  Heavy chain CDR3 for antibody 8262 (IGHV4-28)
ARKGATGYYGMDV

SEQ ID NO: 16525 - protein, 9 aa, Homo sapiens
  Light chain CDR3 for antibody 8263 (IGKV1-17)
LQHNGYPLT

SEQ ID NO: 16526 - protein, 18 aa, Homo sapiens
  Heavy chain CDR3 for antibody 8263 (IGHV4-59)
AREGDYVWGSYRPNWFDP

SEQ ID NO: 16527 - protein, 9 aa, Homo sapiens
  Light chain CDR3 for antibody 8264 (IGKV2-30)
MQGTHWPLT

SEQ ID NO: 16528 - protein, 20 aa, Homo sapiens
  Heavy chain CDR3 for antibody 8264 (IGHV3-33)
ARDWMVRGVIITDYYYGMDV

SEQ ID NO: 16529 - protein, 9 aa, Homo sapiens
  Light chain CDR3 for antibody 8265 (IGKV6-21)
HQSSSLPHT

SEQ ID NO: 16530 - protein, 14 aa, Homo sapiens
  Heavy chain CDR3 for antibody 8265 (IGHV3-33)
ARASSGSSYWYIDL

SEQ ID NO: 16531 - protein, 11 aa, Homo sapiens
  Light chain CDR3 for antibody 8266 (IGKV3-11)
QQRSNWPPMYT

SEQ ID NO: 16532 - protein, 12 aa, Homo sapiens
  Heavy chain CDR3 for antibody 8266 (IGHV3-13)
AREAGIPDAFDI

SEQ ID NO: 16533 - protein, 9 aa, Homo sapiens
  Light chain CDR3 for antibody 8267 (IGKV1-33)
QQYDNLPFT

SEQ ID NO: 16534 - protein, 14 aa, Homo sapiens
  Heavy chain CDR3 for antibody 8267 (IGHV3-33)
VRDAMGATTAWFDP

SEQ ID NO: 16535 - protein, 9 aa, Homo sapiens
  Light chain CDR3 for antibody 8268 (IGKV1-5)
QQYNTYSRT

SEQ ID NO: 16536 - protein, 12 aa, Homo sapiens
  Heavy chain CDR3 for antibody 8268 (IGHV1-46)
ARGLTGDHAVDI

SEQ ID NO: 16537 - protein, 9 aa, Homo sapiens
  Light chain CDR3 for antibody 8269 (IGKV5-2)
LQHDKFPYT

SEQ ID NO: 16538 - protein, 11 aa, Homo sapiens
  Heavy chain CDR3 for antibody 8269 (IGHV3-33)
AREAANWGFDY

SEQ ID NO: 16539 - protein, 9 aa, Homo sapiens
  Light chain CDR3 for antibody 8270 (IGKV3D-20)
HQYGSSPLT

SEQ ID NO: 16540 - protein, 13 aa, Homo sapiens
  Heavy chain CDR3 for antibody 8270 (IGHV4-61)
ASRYSSGWYPFDY

SEQ ID NO: 16541 - protein, 10 aa, Homo sapiens
  Light chain CDR3 for antibody 8271 (IGKV3-11)
QQRSNWPMYT

SEQ ID NO: 16542 - protein, 12 aa, Homo sapiens
  Heavy chain CDR3 for antibody 8271 (IGHV3-23)
AKEGIVGVPFDY

SEQ ID NO: 16543 - protein, 9 aa, Homo sapiens
  Light chain CDR3 for antibody 8272 (IGKV2D-28)
MQALQTPPT

SEQ ID NO: 16544 - protein, 14 aa, Homo sapiens
  Heavy chain CDR3 for antibody 8272 (IGHV3-33)
ARDGYDFLTGPFDY

SEQ ID NO: 16545 - protein, 9 aa, Homo sapiens
  Light chain CDR3 for antibody 8273 (IGKV3-20)
QQFGRSPRT

SEQ ID NO: 16546 - protein, 9 aa, Homo sapiens
  Heavy chain CDR3 for antibody 8273 (IGHV1-18)
ARGKDWFDP

SEQ ID NO: 16547 - protein, 9 aa, Homo sapiens
  Light chain CDR3 for antibody 8274 (IGKV1-39)
QQSYSTPLT

SEQ ID NO: 16548 - protein, 17 aa, Homo sapiens
  Heavy chain CDR3 for antibody 8274 (IGHV3-33)
ARDRDDILTGFYTYFDY

SEQ ID NO: 16549 - protein, 8 aa, Homo sapiens
  Light chain CDR3 for antibody 8275 (IGKV6-21)
HQSSSLPT

SEQ ID NO: 16550 - protein, 17 aa, Homo sapiens
  Heavy chain CDR3 for antibody 8275 (IGHV3-33)
ARSGIVGATDYYYGLDV

SEQ ID NO: 16551 - protein, 10 aa, Homo sapiens
  Light chain CDR3 for antibody 8276 (IGKV3-20)
QQYGRSPPVT

SEQ ID NO: 16552 - protein, 11 aa, Homo sapiens
  Heavy chain CDR3 for antibody 8276 (IGHV3-33)
ARDTWDDYFDY

SEQ ID NO: 16553 - protein, 9 aa, Homo sapiens
  Light chain CDR3 for antibody 8277 (IGKV1-39)
QQSYSTPFT

SEQ ID NO: 16554 - protein, 13 aa, Homo sapiens
  Heavy chain CDR3 for antibody 8277 (IGHV3-11)
ARDEGYRGYVLDA

SEQ ID NO: 16555 - protein, 9 aa, Homo sapiens
  Light chain CDR3 for antibody 8278 (IGKV1-9)
LQDYKSPFT

SEQ ID NO: 16556 - protein, 13 aa, Homo sapiens
  Heavy chain CDR3 for antibody 8278 (IGHV3-33)
ARGDNWNDGGFDY

SEQ ID NO: 16557 - protein, 9 aa, Homo sapiens
  Light chain CDR3 for antibody 8279 (IGKV2D-24)
TQATQFPHT

SEQ ID NO: 16558 - protein, 16 aa, Homo sapiens
  Heavy chain CDR3 for antibody 8279 (IGHV1-18)
ARYFDWLLRDYYGMDV

SEQ ID NO: 16559 - protein, 9 aa, Homo sapiens
  Light chain CDR3 for antibody 8280 (IGKV5-2)
LQHDNFPWT

SEQ ID NO: 16560 - protein, 22 aa, Homo sapiens
  Heavy chain CDR3 for antibody 8280 (IGHV1-18)
ARDRYNNQSKYRNRDYYYGLDV

SEQ ID NO: 16561 - protein, 9 aa, Homo sapiens
  Light chain CDR3 for antibody 8281 (IGKV3-11)
QQRSNWMYT

SEQ ID NO: 16562 - protein, 12 aa, Homo sapiens
  Heavy chain CDR3 for antibody 8281 (IGHV1-46)
ARGLTGDHAFDI

SEQ ID NO: 16563 - protein, 9 aa, Homo sapiens
  Light chain CDR3 for antibody 8282 (IGKV3-15)
QQYNNWPLT

SEQ ID NO: 16564 - protein, 14 aa, Homo sapiens
  Heavy chain CDR3 for antibody 8282 (IGHV3-20)
ARDGGSTCYDWFDP

SEQ ID NO: 16565 - protein, 9 aa, Homo sapiens
  Light chain CDR3 for antibody 8283 (IGKV1-17)
LQHNSYPYT

SEQ ID NO: 16566 - protein, 14 aa, Homo sapiens
  Heavy chain CDR3 for antibody 8283 (IGHV3-33)
AREGILTGYYPFDY

SEQ ID NO: 16567 - protein, 8 aa, Homo sapiens
  Light chain CDR3 for antibody 8284 (IGKV1D-13)
QQFNNYPT

SEQ ID NO: 16568 - protein, 16 aa, Homo sapiens
  Heavy chain CDR3 for antibody 8284 (IGHV3-33)
AREGYSSSWFDRNFDY

SEQ ID NO: 16569 - protein, 9 aa, Homo sapiens
  Light chain CDR3 for antibody 8285 (IGKV3-15)
QQYNNWPIT

SEQ ID NO: 16570 - protein, 13 aa, Homo sapiens
  Heavy chain CDR3 for antibody 8285 (IGHV3-23)
AKDIVVVVAATNY

SEQ ID NO: 16571 - protein, 9 aa, Homo sapiens
  Light chain CDR3 for antibody 8286 (IGKV1-9)
QQLISYPLT

SEQ ID NO: 16572 - protein, 20 aa, Homo sapiens
  Heavy chain CDR3 for antibody 8286 (IGHV3-23)
AKGMGGLRYFDWPHYYGMDV

SEQ ID NO: 16573 - protein, 9 aa, Homo sapiens
  Light chain CDR3 for antibody 8287 (IGKV1-6)
QQEYNYPLT

SEQ ID NO: 16574 - protein, 15 aa, Homo sapiens
  Heavy chain CDR3 for antibody 8287 (IGHV3-30)
ARGAMVRGVDYGMDV

SEQ ID NO: 16575 - protein, 9 aa, Homo sapiens
  Light chain CDR3 for antibody 8288 (IGKV1-6)
QQFNNYPRT

SEQ ID NO: 16576 - protein, 15 aa, Homo sapiens
  Heavy chain CDR3 for antibody 8288 (IGHV3-11)
ARDRAVAGTIHAFDI

SEQ ID NO: 16577 - protein, 9 aa, Homo sapiens
  Light chain CDR3 for antibody 8289 (IGKV3-15)
QQYNNWPYT

SEQ ID NO: 16578 - protein, 10 aa, Homo sapiens
  Heavy chain CDR3 for antibody 8289 (IGHV3-30)
ARDGLESFDY

SEQ ID NO: 16579 - protein, 9 aa, Homo sapiens
  Light chain CDR3 for antibody 8290 (IGKV1-17)
LQLNSFPWT

SEQ ID NO: 16580 - protein, 13 aa, Homo sapiens
  Heavy chain CDR3 for antibody 8290 (IGHV3-33)
ARRYRSGWYPFDY

SEQ ID NO: 16581 - protein, 9 aa, Homo sapiens
  Light chain CDR3 for antibody 8291 (IGKV1D-13)
QRFNNYLYT

SEQ ID NO: 16582 - protein, 17 aa, Homo sapiens
  Heavy chain CDR3 for antibody 8291 (IGHV3-33)
ARGFSGYDGYYYYGMDV

SEQ ID NO: 16583 - protein, 9 aa, Homo sapiens
  Light chain CDR3 for antibody 8292 (IGKV5-2)
LQHDNFPWT

SEQ ID NO: 16584 - protein, 15 aa, Homo sapiens
  Heavy chain CDR3 for antibody 8292 (IGHV3-33)
VRGYYYGSGSYPLNY

SEQ ID NO: 16585 - protein, 9 aa, Homo sapiens
  Light chain CDR3 for antibody 8293 (IGKV2-30)
MQGTHWPLT

SEQ ID NO: 16586 - protein, 17 aa, Homo sapiens
  Heavy chain CDR3 for antibody 8293 (IGHV4-59)
ARDRELLWFGEFGGMDV

SEQ ID NO: 16587 - protein, 9 aa, Homo sapiens
  Light chain CDR3 for antibody 8294 (IGKV5-2)
LQHDNFPYT

SEQ ID NO: 16588 - protein, 15 aa, Homo sapiens
  Heavy chain CDR3 for antibody 8294 (IGHV3-33)
ARGYYYGSGSYPLDY

SEQ ID NO: 16589 - protein, 9 aa, Homo sapiens
  Light chain CDR3 for antibody 8295 (IGKV1D-13)
QRFNNYLYT

SEQ ID NO: 16590 - protein, 16 aa, Homo sapiens
  Heavy chain CDR3 for antibody 8295 (IGHV4-59)
ARDTPYYSGSGRPFDS

SEQ ID NO: 16591 - protein, 8 aa, Homo sapiens
  Light chain CDR3 for antibody 8296 (IGKV1-5)
QQYNSYWT

SEQ ID NO: 16592 - protein, 16 aa, Homo sapiens
  Heavy chain CDR3 for antibody 8296 (IGHV3-33)
ARDQGILTGYYTALDY

SEQ ID NO: 16593 - protein, 9 aa, Homo sapiens
  Light chain CDR3 for antibody 8297 (IGKV3-20)
QQFGRSPRT

SEQ ID NO: 16594 - protein, 15 aa, Homo sapiens
  Heavy chain CDR3 for antibody 8297 (IGHV3-20)
ARDRGSSGWRDWFDP

SEQ ID NO: 16595 - protein, 9 aa, Homo sapiens
  Light chain CDR3 for antibody 8298 (IGKV2D-28)
MQALQTPFT

SEQ ID NO: 16596 - protein, 18 aa, Homo sapiens
  Heavy chain CDR3 for antibody 8298 (IGHV3-33)
ARGLLWFGVSYYYYGMDV

SEQ ID NO: 16597 - protein, 11 aa, Homo sapiens
  Light chain CDR3 for antibody 8299 (IGKV3-11)
QQRSNWPPTWT

SEQ ID NO: 16598 - protein, 15 aa, Homo sapiens
  Heavy chain CDR3 for antibody 8299 (IGHV3-33)
ARDRGWKAPGYGMDV

SEQ ID NO: 16599 - protein, 8 aa, Homo sapiens
  Light chain CDR3 for antibody 8300 (IGKV3-11)
LQRGNWPT

SEQ ID NO: 16600 - protein, 13 aa, Homo sapiens
  Heavy chain CDR3 for antibody 8300 (IGHV3-23)
ASPFNWNDGFFDY

SEQ ID NO: 16601 - protein, 9 aa, Homo sapiens
  Light chain CDR3 for antibody 8301 (IGKV1-6)
LQDYNYPYT

SEQ ID NO: 16602 - protein, 18 aa, Homo sapiens
  Heavy chain CDR3 for antibody 8301 (IGHV3-30)
ARDGYSGYDSYYYYGMDV

SEQ ID NO: 16603 - protein, 10 aa, Homo sapiens
  Light chain CDR3 for antibody 8302 (IGKV3-15)
QQYNNWPPYT

SEQ ID NO: 16604 - protein, 13 aa, Homo sapiens
  Heavy chain CDR3 for antibody 8302 (IGHV4-39)
ARHVLLWFGEFDP

SEQ ID NO: 16605 - protein, 9 aa, Homo sapiens
  Light chain CDR3 for antibody 8303 (IGKV3D-7)
QQDYNLPRT

SEQ ID NO: 16606 - protein, 15 aa, Homo sapiens
  Heavy chain CDR3 for antibody 8303 (IGHV3-33)
ARDALAVTGTGWFDP

SEQ ID NO: 16607 - protein, 9 aa, Homo sapiens
  Light chain CDR3 for antibody 8304 (IGKV3D-7)
QQDYKLPLT

SEQ ID NO: 16608 - protein, 12 aa, Homo sapiens
  Heavy chain CDR3 for antibody 8304 (IGHV3-33)
VRKWFGELYFDY

SEQ ID NO: 16609 - protein, 9 aa, Homo sapiens
  Light chain CDR3 for antibody 8305 (IGKV1-5)
QQYNTYSRT

SEQ ID NO: 16610 - protein, 9 aa, Homo sapiens
  Heavy chain CDR3 for antibody 8305 (IGHV4-59)
ARGGASFDY

SEQ ID NO: 16611 - protein, 9 aa, Homo sapiens
  Light chain CDR3 for antibody 8306 (IGKV1-16)
QKYNSNPLT

SEQ ID NO: 16612 - protein, 13 aa, Homo sapiens
  Heavy chain CDR3 for antibody 8306 (IGHV3-33)
ARIDYYSYYGMDV

SEQ ID NO: 16613 - protein, 9 aa, Homo sapiens
  Light chain CDR3 for antibody 8307 (IGKV1-16)
QHYNDYPFT

SEQ ID NO: 16614 - protein, 14 aa, Homo sapiens
  Heavy chain CDR3 for antibody 8307 (IGHV3-33)
ARTTAAAGPRDFQH

SEQ ID NO: 16615 - protein, 10 aa, Homo sapiens
  Light chain CDR3 for antibody 8308 (IGKV3-11)
QQRSNWPPFT

SEQ ID NO: 16616 - protein, 13 aa, Homo sapiens
  Heavy chain CDR3 for antibody 8308 (IGHV3-11)
ARDEGYSGYNLDN

SEQ ID NO: 16617 - protein, 8 aa, Homo sapiens
  Light chain CDR3 for antibody 8309 (IGKV1D-13)
QQFNNYPT

SEQ ID NO: 16618 - protein, 11 aa, Homo sapiens
  Heavy chain CDR3 for antibody 8309 (IGHV3-33)
ARSLRYSVFDY

SEQ ID NO: 16619 - protein, 8 aa, Homo sapiens
  Light chain CDR3 for antibody 8310 (IGKV1-5)
QQYNSYWT

SEQ ID NO: 16620 - protein, 17 aa, Homo sapiens
  Heavy chain CDR3 for antibody 8310 (IGHV3-33)
ARGDGDILTGYYEWFDP

SEQ ID NO: 16621 - protein, 9 aa, Homo sapiens
  Light chain CDR3 for antibody 8311 (IGKV3-15)
QQYNNWPLT

SEQ ID NO: 16622 - protein, 8 aa, Homo sapiens
  Heavy chain CDR3 for antibody 8311 (IGHV3-20)
APHWIFDY

SEQ ID NO: 16623 - protein, 9 aa, Homo sapiens
  Light chain CDR3 for antibody 8312 (IGKV2-30)
MQGTHWPLT

SEQ ID NO: 16624 - protein, 17 aa, Homo sapiens
  Heavy chain CDR3 for antibody 8312 (IGHV3-66)
ARVQYDILTGYSPYFDN

SEQ ID NO: 16625 - protein, 9 aa, Homo sapiens
  Light chain CDR3 for antibody 8313 (IGKV2-30)
MQGTHWPLT

SEQ ID NO: 16626 - protein, 26 aa, Homo sapiens
  Heavy chain CDR3 for antibody 8313 (IGHV4-39)
ARQGLLWFGDLKAYDSSGYYYGYFHH

SEQ ID NO: 16627 - protein, 9 aa, Homo sapiens
  Light chain CDR3 for antibody 8314 (IGKV1-9)
QQLNSYPRT

SEQ ID NO: 16628 - protein, 18 aa, Homo sapiens
  Heavy chain CDR3 for antibody 8314 (IGHV3-33)
ARDRYHDILTGYYMGFDY

SEQ ID NO: 16629 - protein, 9 aa, Homo sapiens
  Light chain CDR3 for antibody 8315 (IGKV1-39)
QQSYSTPYT

SEQ ID NO: 16630 - protein, 19 aa, Homo sapiens
  Heavy chain CDR3 for antibody 8315 (IGHV1-18)
ARDTTLVRGLMNYYYGMDV

SEQ ID NO: 16631 - protein, 8 aa, Homo sapiens
  Light chain CDR3 for antibody 8316 (IGKV3-20)
QQYGRSWT

SEQ ID NO: 16632 - protein, 13 aa, Homo sapiens
  Heavy chain CDR3 for antibody 8316 (IGHV3-33)
ANTGDSYYYDMDV

SEQ ID NO: 16633 - protein, 9 aa, Homo sapiens
  Light chain CDR3 for antibody 8317 (IGKV1D-16)
QQYNSYPYT

SEQ ID NO: 16634 - protein, 16 aa, Homo sapiens
  Heavy chain CDR3 for antibody 8317 (IGHV1-24)
ATEDSSSYYYYYGMDV

SEQ ID NO: 16635 - protein, 9 aa, Homo sapiens
  Light chain CDR3 for antibody 8318 (IGKV3-11)
QQRSNWMYT

SEQ ID NO: 16636 - protein, 12 aa, Homo sapiens
  Heavy chain CDR3 for antibody 8318 (IGHV3-13)
VREAGIPDAFDI

SEQ ID NO: 16637 - protein, 9 aa, Homo sapiens
  Light chain CDR3 for antibody 8319 (IGKV3-11)
QQRSSWPPT

SEQ ID NO: 16638 - protein, 15 aa, Homo sapiens
  Heavy chain CDR3 for antibody 8319 (IGHV3-33)
ARDALAVTGTGWFDP

SEQ ID NO: 16639 - protein, 9 aa, Homo sapiens
  Light chain CDR3 for antibody 8320 (IGKV1-17)
LQHNSYPRT

SEQ ID NO: 16640 - protein, 17 aa, Homo sapiens
  Heavy chain CDR3 for antibody 8320 (IGHV1-18)
ARERYYGSGNYKYNMDV

SEQ ID NO: 16641 - protein, 9 aa, Homo sapiens
  Light chain CDR3 for antibody 8321 (IGKV1-17)
LQHNSYPWT

SEQ ID NO: 16642 - protein, 20 aa, Homo sapiens
  Heavy chain CDR3 for antibody 8321 (IGHV1-f)
ATDTMVRGVIIEDYYYGMDV

SEQ ID NO: 16643 - protein, 9 aa, Homo sapiens
  Light chain CDR3 for antibody 8322 (IGKV5-2)
LQHDNFPTT

SEQ ID NO: 16644 - protein, 12 aa, Homo sapiens
  Heavy chain CDR3 for antibody 8322 (IGHV3-21)
ARDGGRYGDFDY

SEQ ID NO: 16645 - protein, 9 aa, Homo sapiens
  Light chain CDR3 for antibody 8323 (IGKV3-11)
QQRSNWMYT

SEQ ID NO: 16646 - protein, 12 aa, Homo sapiens
  Heavy chain CDR3 for antibody 8323 (IGHV3-33)
ARVDAAAPYFDY

SEQ ID NO: 16647 - protein, 8 aa, Homo sapiens
  Light chain CDR3 for antibody 8324 (IGKV3D-7)
QQDYNLVT

SEQ ID NO: 16648 - protein, 14 aa, Homo sapiens
  Heavy chain CDR3 for antibody 8324 (IGHV1-24)
ATWLPLYYYYGMDV

SEQ ID NO: 16649 - protein, 9 aa, Homo sapiens
  Light chain CDR3 for antibody 8325 (IGKV1D-16)
QQYNSYPYT

SEQ ID NO: 16650 - protein, 17 aa, Homo sapiens
  Heavy chain CDR3 for antibody 8325 (IGHV1-18)
ARERYYGSGSYYYGMDV

SEQ ID NO: 16651 - protein, 10 aa, Homo sapiens
  Light chain CDR3 for antibody 8326 (IGKV1-13)
QQLDSYPMYT

SEQ ID NO: 16652 - protein, 10 aa, Homo sapiens
  Heavy chain CDR3 for antibody 8326 (IGHV3-23)
AKGDRWRFDP

SEQ ID NO: 16653 - protein, 9 aa, Homo sapiens
  Light chain CDR3 for antibody 8327 (IGKV1-16)
QHYNDYPFT

SEQ ID NO: 16654 - protein, 14 aa, Homo sapiens
  Heavy chain CDR3 for antibody 8327 (IGHV3-33)
AREGYSSNWYDFDY

SEQ ID NO: 16655 - protein, 9 aa, Homo sapiens
  Light chain CDR3 for antibody 8328 (IGKV1-17)
QQFNNYPYT

SEQ ID NO: 16656 - protein, 14 aa, Homo sapiens
  Heavy chain CDR3 for antibody 8328 (IGHV3-33)
AREGYSSGWDYFDH

SEQ ID NO: 16657 - protein, 9 aa, Homo sapiens
  Light chain CDR3 for antibody 8329 (IGKV3D-7)
QQDYKLPLT

SEQ ID NO: 16658 - protein, 17 aa, Homo sapiens
  Heavy chain CDR3 for antibody 8329 (IGHV1-46)
ARERYYGSGIYKYAMDV

SEQ ID NO: 16659 - protein, 9 aa, Homo sapiens
  Light chain CDR3 for antibody 8330 (IGKV5-2)
LQHDNFPWT

SEQ ID NO: 16660 - protein, 15 aa, Homo sapiens
  Heavy chain CDR3 for antibody 8330 (IGHV3-64)
ARDSHHDLLTGHYEY

SEQ ID NO: 16661 - protein, 11 aa, Homo sapiens
  Light chain CDR3 for antibody 8331 (IGKV3-11)
QQRSNWPPTWT

SEQ ID NO: 16662 - protein, 13 aa, Homo sapiens
  Heavy chain CDR3 for antibody 8331 (IGHV4-59)
ANRDYYGYYGMDV

SEQ ID NO: 16663 - protein, 9 aa, Homo sapiens
  Light chain CDR3 for antibody 8332 (IGKV6-21)
QQSSNLPHT

SEQ ID NO: 16664 - protein, 11 aa, Homo sapiens
  Heavy chain CDR3 for antibody 8332 (IGHV3-33)
ARDRSSGPFDY

SEQ ID NO: 16665 - protein, 9 aa, Homo sapiens
  Light chain CDR3 for antibody 8333 (IGKV1-39)
QQGFSTPWT

SEQ ID NO: 16666 - protein, 9 aa, Homo sapiens
  Heavy chain CDR3 for antibody 8333 (IGHV4-59)
AREGGSGSL

SEQ ID NO: 16667 - protein, 9 aa, Homo sapiens
  Light chain CDR3 for antibody 8334 (IGKV1-39)
QQSYRTPLT

SEQ ID NO: 16668 - protein, 16 aa, Homo sapiens
  Heavy chain CDR3 for antibody 8334 (IGHV3-11)
ARDAGYPNYDYYGMDV

SEQ ID NO: 16669 - protein, 9 aa, Homo sapiens
  Light chain CDR3 for antibody 8335 (IGKV3D-7)
QQDYNLPLT

SEQ ID NO: 16670 - protein, 12 aa, Homo sapiens
  Heavy chain CDR3 for antibody 8335 (IGHV4-59)
ARRDGSGTSFDY

SEQ ID NO: 16671 - protein, 9 aa, Homo sapiens
  Light chain CDR3 for antibody 8336 (IGKV1-16)
QHYNDYPFT

SEQ ID NO: 16672 - protein, 9 aa, Homo sapiens
  Heavy chain CDR3 for antibody 8336 (IGHV3-33)
ARATVGVDY

SEQ ID NO: 16673 - protein, 9 aa, Homo sapiens
  Light chain CDR3 for antibody 8337 (IGKV3-20)
QQYGSSPRT

SEQ ID NO: 16674 - protein, 14 aa, Homo sapiens
  Heavy chain CDR3 for antibody 8337 (IGHV3-33)
ARDGIVRATDAFAI

SEQ ID NO: 16675 - protein, 9 aa, Homo sapiens
  Light chain CDR3 for antibody 8338 (IGKV1-39)
QQSYSTPLT

SEQ ID NO: 16676 - protein, 12 aa, Homo sapiens
  Heavy chain CDR3 for antibody 8338 (IGHV3-23)
AKGYTSFWYFDL

SEQ ID NO: 16677 - protein, 9 aa, Homo sapiens
  Light chain CDR3 for antibody 8339 (IGKV1-39)
QQSYSTPLT

SEQ ID NO: 16678 - protein, 17 aa, Homo sapiens
  Heavy chain CDR3 for antibody 8339 (IGHV3-23)
SKERNWNDGYYYFGMDA

SEQ ID NO: 16679 - protein, 9 aa, Homo sapiens
  Light chain CDR3 for antibody 8340 (IGKV5-2)
LQHDNFPWT

SEQ ID NO: 16680 - protein, 13 aa, Homo sapiens
  Heavy chain CDR3 for antibody 8340 (IGHV4-34)
ARDEGYRGYGLDS

SEQ ID NO: 16681 - protein, 9 aa, Homo sapiens
  Light chain CDR3 for antibody 8341 (IGKV1-17)
LQHNSYPYT

SEQ ID NO: 16682 - protein, 15 aa, Homo sapiens
  Heavy chain CDR3 for antibody 8341 (IGHV3-13)
ARDRSYESYYYGMDV

SEQ ID NO: 16683 - protein, 9 aa, Homo sapiens
  Light chain CDR3 for antibody 8342 (IGKV3-20)
QQYGSSPYT

SEQ ID NO: 16684 - protein, 17 aa, Homo sapiens
  Heavy chain CDR3 for antibody 8342 (IGHV3-33)
ARDPWIYSGYGGGWFDP

SEQ ID NO: 16685 - protein, 9 aa, Homo sapiens
  Light chain CDR3 for antibody 8343 (IGKV3D-7)
QQDYNLPYT

SEQ ID NO: 16686 - protein, 10 aa, Homo sapiens
  Heavy chain CDR3 for antibody 8343 (IGHV3-23)
AKENWNDFDY

SEQ ID NO: 16687 - protein, 9 aa, Homo sapiens
  Light chain CDR3 for antibody 8344 (IGKV1D-16)
QQYDSYPWT

SEQ ID NO: 16688 - protein, 14 aa, Homo sapiens
  Heavy chain CDR3 for antibody 8344 (IGHV3-33)
ARTTAAAGPRDFQH

SEQ ID NO: 16689 - protein, 9 aa, Homo sapiens
  Light chain CDR3 for antibody 8345 (IGKV1-17)
LHSNNYPWT

SEQ ID NO: 16690 - protein, 15 aa, Homo sapiens
  Heavy chain CDR3 for antibody 8345 (IGHV3-30)
ARGAMVRGVDYGMDV

SEQ ID NO: 16691 - protein, 9 aa, Homo sapiens
  Light chain CDR3 for antibody 8346 (IGKV1D-13)
QQFNNYPYT

SEQ ID NO: 16692 - protein, 17 aa, Homo sapiens
  Heavy chain CDR3 for antibody 8346 (IGHV3-33)
ARKDYGILSGYYSPFDY

SEQ ID NO: 16693 - protein, 9 aa, Homo sapiens
  Light chain CDR3 for antibody 8347 (IGKV1-17)
LQHNSYPWT

SEQ ID NO: 16694 - protein, 12 aa, Homo sapiens
  Heavy chain CDR3 for antibody 8347 (IGHV6-1)
ARDIMVRGVIDY

SEQ ID NO: 16695 - protein, 9 aa, Homo sapiens
  Light chain CDR3 for antibody 8348 (IGKV1-6)
LQVYSYPWT

SEQ ID NO: 16696 - protein, 20 aa, Homo sapiens
  Heavy chain CDR3 for antibody 8348 (IGHV3-11)
ARGGATLIRGLIDYYYGMDV

SEQ ID NO: 16697 - protein, 9 aa, Homo sapiens
  Light chain CDR3 for antibody 8349 (IGKV3D-7)
QQDYNLPWT

SEQ ID NO: 16698 - protein, 15 aa, Homo sapiens
  Heavy chain CDR3 for antibody 8349 (IGHV4-39)
ARHSGYSSGWYPFDY

SEQ ID NO: 16699 - protein, 9 aa, Homo sapiens
  Light chain CDR3 for antibody 8350 (IGKV1-9)
QQLKSYLYT

SEQ ID NO: 16700 - protein, 15 aa, Homo sapiens
  Heavy chain CDR3 for antibody 8350 (IGHV3-11)
ARDRAVAGTIHAFDI

SEQ ID NO: 16701 - protein, 9 aa, Homo sapiens
  Light chain CDR3 for antibody 8351 (IGKV1-17)
LQYNSYPWT

SEQ ID NO: 16702 - protein, 17 aa, Homo sapiens
  Heavy chain CDR3 for antibody 8351 (IGHV3-33)
ARGEQWLGYYYYCGMDV

SEQ ID NO: 16703 - protein, 9 aa, Homo sapiens
  Light chain CDR3 for antibody 8352 (IGKV1D-16)
QQYNSFPLT

SEQ ID NO: 16704 - protein, 15 aa, Homo sapiens
  Heavy chain CDR3 for antibody 8352 (IGHV4-59)
ARDLGHYYGSVSIDY

SEQ ID NO: 16705 - protein, 9 aa, Homo sapiens
  Light chain CDR3 for antibody 8353 (IGKV1-6)
LQDYNYPFT

SEQ ID NO: 16706 - protein, 14 aa, Homo sapiens
  Heavy chain CDR3 for antibody 8353 (IGHV3-33)
ARDKSYPLSYGMDV

SEQ ID NO: 16707 - protein, 9 aa, Homo sapiens
  Light chain CDR3 for antibody 8354 (IGKV1-39)
QQSYSTPYT

SEQ ID NO: 16708 - protein, 15 aa, Homo sapiens
  Heavy chain CDR3 for antibody 8354 (IGHV1-18)
ARDLGYYGSGSRMDV

SEQ ID NO: 16709 - protein, 9 aa, Homo sapiens
  Light chain CDR3 for antibody 8355 (IGKV1-9)
QQLYTYPYT

SEQ ID NO: 16710 - protein, 11 aa, Homo sapiens
  Heavy chain CDR3 for antibody 8355 (IGHV3-33)
ARDRSSGPFDY

SEQ ID NO: 16711 - protein, 9 aa, Homo sapiens
  Light chain CDR3 for antibody 8356 (IGKV3-11)
QQYGSSPYT

SEQ ID NO: 16712 - protein, 10 aa, Homo sapiens
  Heavy chain CDR3 for antibody 8356 (IGHV3-23)
AKDRYGDYVY

SEQ ID NO: 16713 - protein, 8 aa, Homo sapiens
  Light chain CDR3 for antibody 8357 (IGKV3-11)
LQRGNWPT

SEQ ID NO: 16714 - protein, 14 aa, Homo sapiens
  Heavy chain CDR3 for antibody 8357 (IGHV3-33)
ARDREQQLVRYFDY

SEQ ID NO: 16715 - protein, 9 aa, Homo sapiens
  Light chain CDR3 for antibody 8358 (IGKV1-27)
QKYNSAPYT

SEQ ID NO: 16716 - protein, 11 aa, Homo sapiens
  Heavy chain CDR3 for antibody 8358 (IGHV3-33)
ARDRATAGLDY

SEQ ID NO: 16717 - protein, 9 aa, Homo sapiens
  Light chain CDR3 for antibody 8359 (IGKV3-11)
QQRSNWMYT

SEQ ID NO: 16718 - protein, 12 aa, Homo sapiens
  Heavy chain CDR3 for antibody 8359 (IGHV4-59)
ARDSGSYYYFDY

SEQ ID NO: 16719 - protein, 9 aa, Homo sapiens
  Light chain CDR3 for antibody 8360 (IGKV3-15)
QQYNNWPRT

SEQ ID NO: 16720 - protein, 17 aa, Homo sapiens
  Heavy chain CDR3 for antibody 8360 (IGHV3-33)
ARDQDDILTGYYWYFDL

SEQ ID NO: 16721 - protein, 9 aa, Homo sapiens
  Light chain CDR3 for antibody 8361 (IGKV1-6)
QKYNSAPYT

SEQ ID NO: 16722 - protein, 13 aa, Homo sapiens
  Heavy chain CDR3 for antibody 8361 (IGHV3-33)
ARDYGDYLNWFDP

SEQ ID NO: 16723 - protein, 9 aa, Homo sapiens
  Light chain CDR3 for antibody 8362 (IGKV1D-13)
QQFNNYPST

SEQ ID NO: 16724 - protein, 15 aa, Homo sapiens
  Heavy chain CDR3 for antibody 8362 (IGHV3-20)
AREGPYYYGSGSLDY

SEQ ID NO: 16725 - protein, 9 aa, Homo sapiens
  Light chain CDR3 for antibody 8363 (IGKV1-6)
LQDYNYPWT

SEQ ID NO: 16726 - protein, 19 aa, Homo sapiens
  Heavy chain CDR3 for antibody 8363 (IGHV3-23)
AKDREWAAAGHYYYYGMDV

SEQ ID NO: 16727 - protein, 9 aa, Homo sapiens
  Light chain CDR3 for antibody 8364 (IGKV1-6)
LQDYKSPFT

SEQ ID NO: 16728 - protein, 17 aa, Homo sapiens
  Heavy chain CDR3 for antibody 8364 (IGHV3-33)
ARGEQWLGYYYYYGMDV

SEQ ID NO: 16729 - protein, 9 aa, Homo sapiens
  Light chain CDR3 for antibody 8365 (IGKV2-30)
MQGTHWPLT

SEQ ID NO: 16730 - protein, 14 aa, Homo sapiens
  Heavy chain CDR3 for antibody 8365 (IGHV3-33)
VRDQGSMVRGGGDY

SEQ ID NO: 16731 - protein, 9 aa, Homo sapiens
  Light chain CDR3 for antibody 8366 (IGKV3D-7)
QQDYNLPLT

SEQ ID NO: 16732 - protein, 14 aa, Homo sapiens
  Heavy chain CDR3 for antibody 8366 (IGHV3-20)
ARDGGSTCYDWFDP

SEQ ID NO: 16733 - protein, 10 aa, Homo sapiens
  Light chain CDR3 for antibody 8367 (IGKV3-11)
QQRSNWPTWT

SEQ ID NO: 16734 - protein, 12 aa, Homo sapiens
  Heavy chain CDR3 for antibody 8367 (IGHV3-33)
ARDSSGWSHFDY

SEQ ID NO: 16735 - protein, 10 aa, Homo sapiens
  Light chain CDR3 for antibody 8368 (IGKV1-17)
LQHNSYPMYT

SEQ ID NO: 16736 - protein, 17 aa, Homo sapiens
  Heavy chain CDR3 for antibody 8368 (IGHV3-33)
ARESLKLGIYYYYGMDV

SEQ ID NO: 16737 - protein, 9 aa, Homo sapiens
  Light chain CDR3 for antibody 8369 (IGKV1-27)
QKYNSAPYT

SEQ ID NO: 16738 - protein, 20 aa, Homo sapiens
  Heavy chain CDR3 for antibody 8369 (IGHV1-f)
ATGLITFVRGVILTYRSFDY

SEQ ID NO: 16739 - protein, 9 aa, Homo sapiens
  Light chain CDR3 for antibody 8370 (IGKV1-6)
LQDYNYTWT

SEQ ID NO: 16740 - protein, 9 aa, Homo sapiens
  Heavy chain CDR3 for antibody 8370 (IGHV3-30)
ARPNWGFDY

SEQ ID NO: 16741 - protein, 10 aa, Homo sapiens
  Light chain CDR3 for antibody 8371 (IGKV1-39)
QQSYSTPMYT

SEQ ID NO: 16742 - protein, 11 aa, Homo sapiens
  Heavy chain CDR3 for antibody 8371 (IGHV3-33)
ARGTTVTHFDY

SEQ ID NO: 16743 - protein, 9 aa, Homo sapiens
  Light chain CDR3 for antibody 8372 (IGKV2D-24)
TQATQFPHT

SEQ ID NO: 16744 - protein, 18 aa, Homo sapiens
  Heavy chain CDR3 for antibody 8372 (IGHV1-46)
ARDGDYVWGSYRSDWFDP

SEQ ID NO: 16745 - protein, 10 aa, Homo sapiens
  Light chain CDR3 for antibody 8373 (IGKV3-20)
QQYGSSPPYT

SEQ ID NO: 16746 - protein, 9 aa, Homo sapiens
  Heavy chain CDR3 for antibody 8373 (IGHV3-30)
ARPNWGFDY

SEQ ID NO: 16747 - protein, 10 aa, Homo sapiens
  Light chain CDR3 for antibody 8374 (IGKV1-39)
QQSYSTPMYT

SEQ ID NO: 16748 - protein, 18 aa, Homo sapiens
  Heavy chain CDR3 for antibody 8374 (IGHV3-33)
AREGYFGSGSYYRNWFDP

SEQ ID NO: 16749 - protein, 9 aa, Homo sapiens
  Light chain CDR3 for antibody 8375 (IGKV1-27)
QKYNSAPYT

SEQ ID NO: 16750 - protein, 15 aa, Homo sapiens
  Heavy chain CDR3 for antibody 8375 (IGHV3-23)
AKDLSSGWYAYFFDY

SEQ ID NO: 16751 - protein, 9 aa, Homo sapiens
  Light chain CDR3 for antibody 8376 (IGKV3-15)
QQYNNWPLT

SEQ ID NO: 16752 - protein, 15 aa, Homo sapiens
  Heavy chain CDR3 for antibody 8376 (IGHV1-18)
ARIYYGSGSSYYFDY

SEQ ID NO: 16753 - protein, 9 aa, Homo sapiens
  Light chain CDR3 for antibody 8377 (IGKV1D-13)
QQFNNYPHT

SEQ ID NO: 16754 - protein, 16 aa, Homo sapiens
  Heavy chain CDR3 for antibody 8377 (IGHV4-59)
AGGSGSYRDYYYGMDV

SEQ ID NO: 16755 - protein, 9 aa, Homo sapiens
  Light chain CDR3 for antibody 8378 (IGKV4-1)
QQYYSTPWT

SEQ ID NO: 16756 - protein, 14 aa, Homo sapiens
  Heavy chain CDR3 for antibody 8378 (IGHV3-64)
ARDRIAAASSDFDC

SEQ ID NO: 16757 - protein, 9 aa, Homo sapiens
  Light chain CDR3 for antibody 8379 (IGKV5-2)
LQHDNFPYT

SEQ ID NO: 16758 - protein, 16 aa, Homo sapiens
  Heavy chain CDR3 for antibody 8379 (IGHV3-33)
ARPTYYDILTGYPFDY

SEQ ID NO: 16759 - protein, 9 aa, Homo sapiens
  Light chain CDR3 for antibody 8380 (IGKV1D-16)
QQYDSYPWT

SEQ ID NO: 16760 - protein, 19 aa, Homo sapiens
  Heavy chain CDR3 for antibody 8380 (IGHV3-33)
TRDPHYDILTGYAYYGMDV

SEQ ID NO: 16761 - protein, 10 aa, Homo sapiens
  Light chain CDR3 for antibody 8381 (IGKV1-17)
LQHNSYPMYT

SEQ ID NO: 16762 - protein, 14 aa, Homo sapiens
  Heavy chain CDR3 for antibody 8381 (IGHV4-39)
ARQDYDILTGLFDY

SEQ ID NO: 16763 - protein, 8 aa, Homo sapiens
  Light chain CDR3 for antibody 8382 (IGKV3D-7)
QQDYNLLT

SEQ ID NO: 16764 - protein, 8 aa, Homo sapiens
  Heavy chain CDR3 for antibody 8382 (IGHV3-23)
AETFLFDY

SEQ ID NO: 16765 - protein, 10 aa, Homo sapiens
  Light chain CDR3 for antibody 8383 (IGKV3-11)
QQRSNWPIFT

SEQ ID NO: 16766 - protein, 16 aa, Homo sapiens
  Heavy chain CDR3 for antibody 8383 (IGHV4-59)
ARYSGSYYGDYYGMDV

SEQ ID NO: 16767 - protein, 9 aa, Homo sapiens
  Light chain CDR3 for antibody 8384 (IGKV4-1)
QQYYTTPPT

SEQ ID NO: 16768 - protein, 13 aa, Homo sapiens
  Heavy chain CDR3 for antibody 8384 (IGHV4-34)
ASNFYYYYYGMDV

SEQ ID NO: 16769 - protein, 9 aa, Homo sapiens
  Light chain CDR3 for antibody 8385 (IGKV3D-20)
QQYGRSPRT

SEQ ID NO: 16770 - protein, 16 aa, Homo sapiens
  Heavy chain CDR3 for antibody 8385 (IGHV1-8)
AREGTMVRGVTYALDI

SEQ ID NO: 16771 - protein, 9 aa, Homo sapiens
  Light chain CDR3 for antibody 8386 (IGKV3D-7)
QQDYNLPLT

SEQ ID NO: 16772 - protein, 15 aa, Homo sapiens
  Heavy chain CDR3 for antibody 8386 (IGHV3-33)
ARDGSGSYSLYGMDV

SEQ ID NO: 16773 - protein, 10 aa, Homo sapiens
  Light chain CDR3 for antibody 8387 (IGKV1-9)
QQLDSYPMYT

SEQ ID NO: 16774 - protein, 14 aa, Homo sapiens
  Heavy chain CDR3 for antibody 8387 (IGHV3-33)
ARDWNDVYYYGMDV

SEQ ID NO: 16775 - protein, 9 aa, Homo sapiens
  Light chain CDR3 for antibody 8388 (IGKV1D-16)
QQYITYPYT

SEQ ID NO: 16776 - protein, 17 aa, Homo sapiens
  Heavy chain CDR3 for antibody 8388 (IGHV3-33)
ARGYCSRTSCYLYYFDY

SEQ ID NO: 16777 - protein, 9 aa, Homo sapiens
  Light chain CDR3 for antibody 8389 (IGKV6-21)
HQSSSLPYT

SEQ ID NO: 16778 - protein, 12 aa, Homo sapiens
  Heavy chain CDR3 for antibody 8389 (IGHV4-34)
ARGYSSSWYFDY

SEQ ID NO: 16779 - protein, 10 aa, Homo sapiens
  Light chain CDR3 for antibody 8390 (IGKV3-20)
QQYGRSPPVT

SEQ ID NO: 16780 - protein, 12 aa, Homo sapiens
  Heavy chain CDR3 for antibody 8390 (IGHV1-46)
ARGLTGDHAVDI

SEQ ID NO: 16781 - protein, 9 aa, Homo sapiens
  Light chain CDR3 for antibody 8391 (IGKV3D-7)
QQDYEFPLT

SEQ ID NO: 16782 - protein, 16 aa, Homo sapiens
  Heavy chain CDR3 for antibody 8391 (IGHV4-59)
AGGSGSYRDYYYGMDV

SEQ ID NO: 16783 - protein, 9 aa, Homo sapiens
  Light chain CDR3 for antibody 8392 (IGKV1-27)
QKYNSAPYT

SEQ ID NO: 16784 - protein, 11 aa, Homo sapiens
  Heavy chain CDR3 for antibody 8392 (IGHV1-24)
ATYFGSGSLDY

SEQ ID NO: 16785 - protein, 9 aa, Homo sapiens
  Light chain CDR3 for antibody 8393 (IGKV3D-7)
QQDYNLPWT

SEQ ID NO: 16786 - protein, 14 aa, Homo sapiens
  Heavy chain CDR3 for antibody 8393 (IGHV3-33)
VRDQGSMVRGGGDY

SEQ ID NO: 16787 - protein, 8 aa, Homo sapiens
  Light chain CDR3 for antibody 8394 (IGKV3-11)
QQRRNWLT

SEQ ID NO: 16788 - protein, 9 aa, Homo sapiens
  Heavy chain CDR3 for antibody 8394 (IGHV1-18)
ARGGWGFEY

SEQ ID NO: 16789 - protein, 9 aa, Homo sapiens
  Light chain CDR3 for antibody 8395 (IGKV1-16)
QQYNSYPRT

SEQ ID NO: 16790 - protein, 13 aa, Homo sapiens
  Heavy chain CDR3 for antibody 8395 (IGHV3-33)
ARDRYSGYGAFDY

SEQ ID NO: 16791 - protein, 9 aa, Homo sapiens
  Light chain CDR3 for antibody 8396 (IGKV1-17)
LQHYSYPRT

SEQ ID NO: 16792 - protein, 12 aa, Homo sapiens
  Heavy chain CDR3 for antibody 8396 (IGHV3-33)
AREGIAVAGVDP

SEQ ID NO: 16793 - protein, 9 aa, Homo sapiens
  Light chain CDR3 for antibody 8397 (IGKV1-6)
LQDYNYPRT

SEQ ID NO: 16794 - protein, 12 aa, Homo sapiens
  Heavy chain CDR3 for antibody 8397 (IGHV3-33)
ARESGGSYSFDY

SEQ ID NO: 16795 - protein, 8 aa, Homo sapiens
  Light chain CDR3 for antibody 8398 (IGKV3D-7)
QQDYNLLT

SEQ ID NO: 16796 - protein, 16 aa, Homo sapiens
  Heavy chain CDR3 for antibody 8398 (IGHV3-33)
ARDGSMVRRIHDAFDF

SEQ ID NO: 16797 - protein, 9 aa, Homo sapiens
  Light chain CDR3 for antibody 8399 (IGKV3-11)
QQRSNWQYT

SEQ ID NO: 16798 - protein, 15 aa, Homo sapiens
  Heavy chain CDR3 for antibody 8399 (IGHV3-33)
ARGYYYGSGSFPVDY

SEQ ID NO: 16799 - protein, 9 aa, Homo sapiens
  Light chain CDR3 for antibody 8400 (IGKV1D-13)
QQFNNYPST

SEQ ID NO: 16800 - protein, 10 aa, Homo sapiens
  Heavy chain CDR3 for antibody 8400 (IGHV4-31)
ARHGVAGTNY

SEQ ID NO: 16801 - protein, 9 aa, Homo sapiens
  Light chain CDR3 for antibody 8401 (IGKV1-9)
LQHNSYPRT

SEQ ID NO: 16802 - protein, 16 aa, Homo sapiens
  Heavy chain CDR3 for antibody 8401 (IGHV1-8)
ARGHYYGSGSYYNFDY

SEQ ID NO: 16803 - protein, 10 aa, Homo sapiens
  Light chain CDR3 for antibody 8402 (IGKV1-9)
QQLDSYPMYT

SEQ ID NO: 16804 - protein, 10 aa, Homo sapiens
  Heavy chain CDR3 for antibody 8402 (IGHV3-33)
ARENSTPLDY

SEQ ID NO: 16805 - protein, 9 aa, Homo sapiens
  Light chain CDR3 for antibody 8403 (IGKV3-20)
QQYGSSPRT

SEQ ID NO: 16806 - protein, 16 aa, Homo sapiens
  Heavy chain CDR3 for antibody 8403 (IGHV1-24)
ATEDSSAYYYYYGMDV

SEQ ID NO: 16807 - protein, 8 aa, Homo sapiens
  Light chain CDR3 for antibody 8404 (IGKV3-20)
QQYGSSFT

SEQ ID NO: 16808 - protein, 18 aa, Homo sapiens
  Heavy chain CDR3 for antibody 8404 (IGHV3-23)
AKVGDFFASGNYWDYFDY

SEQ ID NO: 16809 - protein, 8 aa, Homo sapiens
  Light chain CDR3 for antibody 8405 (IGKV3D-7)
QQDYSLLT

SEQ ID NO: 16810 - protein, 15 aa, Homo sapiens
  Heavy chain CDR3 for antibody 8405 (IGHV3-33)
ARDALAVTGTGWFDP

SEQ ID NO: 16811 - protein, 10 aa, Homo sapiens
  Light chain CDR3 for antibody 8406 (IGKV3-11)
QQRSNWPIFT

SEQ ID NO: 16812 - protein, 17 aa, Homo sapiens
  Heavy chain CDR3 for antibody 8406 (IGHV4-34)
ARDGSGSYTHYYYGMDV

SEQ ID NO: 16813 - protein, 9 aa, Homo sapiens
  Light chain CDR3 for antibody 8407 (IGKV1-39)
QQSYSTPYT

SEQ ID NO: 16814 - protein, 14 aa, Homo sapiens
  Heavy chain CDR3 for antibody 8407 (IGHV3-33)
ARDLDIMATSPFAY

SEQ ID NO: 16815 - protein, 9 aa, Homo sapiens
  Light chain CDR3 for antibody 8408 (IGKV1D-16)
QQYDSYPYT

SEQ ID NO: 16816 - protein, 12 aa, Homo sapiens
  Heavy chain CDR3 for antibody 8408 (IGHV3-33)
AREGDILTGYAL

SEQ ID NO: 16817 - protein, 10 aa, Homo sapiens
  Light chain CDR3 for antibody 8409 (IGKV3-15)
QQYNNWPPIT

SEQ ID NO: 16818 - protein, 18 aa, Homo sapiens
  Heavy chain CDR3 for antibody 8409 (IGHV3-23)
AKDGDYFGSGSYWGYFDL

SEQ ID NO: 16819 - protein, 10 aa, Homo sapiens
  Light chain CDR3 for antibody 8410 (IGKV3-15)
QQYNNWPPLT

SEQ ID NO: 16820 - protein, 21 aa, Homo sapiens
  Heavy chain CDR3 for antibody 8410 (IGHV3-23)
AKDIDYYGSGSYPLYYYGMDV

SEQ ID NO: 16821 - protein, 9 aa, Homo sapiens
  Light chain CDR3 for antibody 8411 (IGKV1-37)
QRTSNAPYT

SEQ ID NO: 16822 - protein, 9 aa, Homo sapiens
  Heavy chain CDR3 for antibody 8411 (IGHV3-13)
ARDRWYFDL

SEQ ID NO: 16823 - protein, 10 aa, Homo sapiens
  Light chain CDR3 for antibody 8412 (IGKV1-39)
QQSYSTPMYT

SEQ ID NO: 16824 - protein, 14 aa, Homo sapiens
  Heavy chain CDR3 for antibody 8412 (IGHV3-33)
ARDRRDFYYYGMDV

SEQ ID NO: 16825 - protein, 9 aa, Homo sapiens
  Light chain CDR3 for antibody 8413 (IGKV1D-13)
QRFNNYLYT

SEQ ID NO: 16826 - protein, 13 aa, Homo sapiens
  Heavy chain CDR3 for antibody 8413 (IGHV3-33)
ARGVLWFGELFDY

SEQ ID NO: 16827 - protein, 9 aa, Homo sapiens
  Light chain CDR3 for antibody 8414 (IGKV1D-16)
QQYITYPYT

SEQ ID NO: 16828 - protein, 14 aa, Homo sapiens
  Heavy chain CDR3 for antibody 8414 (IGHV3-33)
ARAISGSSYWYFDL

SEQ ID NO: 16829 - protein, 9 aa, Homo sapiens
  Light chain CDR3 for antibody 8415 (IGKV1-9)
QQLNRYPWT

SEQ ID NO: 16830 - protein, 17 aa, Homo sapiens
  Heavy chain CDR3 for antibody 8415 (IGHV3-23)
AKDGIGELSYYYYGMDV

SEQ ID NO: 16831 - protein, 8 aa, Homo sapiens
  Light chain CDR3 for antibody 8416 (IGKV3-11)
QQRSNWLT

SEQ ID NO: 16832 - protein, 12 aa, Homo sapiens
  Heavy chain CDR3 for antibody 8416 (IGHV1-18)
ARRDGSGTSFDY

SEQ ID NO: 16833 - protein, 9 aa, Homo sapiens
  Light chain CDR3 for antibody 8417 (IGKV6-21)
HQSSSLPYT

SEQ ID NO: 16834 - protein, 13 aa, Homo sapiens
  Heavy chain CDR3 for antibody 8417 (IGHV1-18)
ARGGGVRGAPLDY

SEQ ID NO: 16835 - protein, 10 aa, Homo sapiens
  Light chain CDR3 for antibody 8418 (IGKV1-39)
QQSYSTPMYT

SEQ ID NO: 16836 - protein, 15 aa, Homo sapiens
  Heavy chain CDR3 for antibody 8418 (IGHV3-23)
AKEFTMVRGVITPDY

SEQ ID NO: 16837 - protein, 9 aa, Homo sapiens
  Light chain CDR3 for antibody 8419 (IGKV3-15)
QQYNNWPRT

SEQ ID NO: 16838 - protein, 10 aa, Homo sapiens
  Heavy chain CDR3 for antibody 8419 (IGHV3-23)
AKGDRWRFDP

SEQ ID NO: 16839 - protein, 9 aa, Homo sapiens
  Light chain CDR3 for antibody 8420 (IGKV1D-16)
QQYHSYPFT

SEQ ID NO: 16840 - protein, 14 aa, Homo sapiens
  Heavy chain CDR3 for antibody 8420 (IGHV1-46)
ARKGIVGAFDAFGI

SEQ ID NO: 16841 - protein, 9 aa, Homo sapiens
  Light chain CDR3 for antibody 8421 (IGKV3-15)
QQYNNWPLT

SEQ ID NO: 16842 - protein, 15 aa, Homo sapiens
  Heavy chain CDR3 for antibody 8421 (IGHV4-39)
ARRDYDILTGYLFDY

SEQ ID NO: 16843 - protein, 9 aa, Homo sapiens
  Light chain CDR3 for antibody 8422 (IGKV4-1)
QQYYSTPWT

SEQ ID NO: 16844 - protein, 12 aa, Homo sapiens
  Heavy chain CDR3 for antibody 8422 (IGHV3-33)
AREGTRWVYFDY

SEQ ID NO: 16845 - protein, 10 aa, Homo sapiens
  Light chain CDR3 for antibody 8423 (IGKV3-11)
QQRSNWPIFT

SEQ ID NO: 16846 - protein, 14 aa, Homo sapiens
  Heavy chain CDR3 for antibody 8423 (IGHV3-20)
ARGGSSGWYDWFDP

SEQ ID NO: 16847 - protein, 9 aa, Homo sapiens
  Light chain CDR3 for antibody 8424 (IGKV1-9)
QQLKSYLYT

SEQ ID NO: 16848 - protein, 11 aa, Homo sapiens
  Heavy chain CDR3 for antibody 8424 (IGHV3-33)
ARDRSSGPFDY

SEQ ID NO: 16849 - protein, 9 aa, Homo sapiens
  Light chain CDR3 for antibody 8425 (IGKV1-6)
LQDYNYPFT

SEQ ID NO: 16850 - protein, 18 aa, Homo sapiens
  Heavy chain CDR3 for antibody 8425 (IGHV3-33)
ARRGYSGYDYYYYYGMDV

SEQ ID NO: 16851 - protein, 9 aa, Homo sapiens
  Light chain CDR3 for antibody 8426 (IGKV1-9)
QQLISYPLT

SEQ ID NO: 16852 - protein, 20 aa, Homo sapiens
  Heavy chain CDR3 for antibody 8426 (IGHV3-23)
AKDREMAATSHYYYYYGMDV

SEQ ID NO: 16853 - protein, 10 aa, Homo sapiens
  Light chain CDR3 for antibody 8427 (IGKV1-17)
LQHNSYPMYT

SEQ ID NO: 16854 - protein, 15 aa, Homo sapiens
  Heavy chain CDR3 for antibody 8427 (IGHV4-59)
ARDLGHYYGSVSIDY

SEQ ID NO: 16855 - protein, 10 aa, Homo sapiens
  Light chain CDR3 for antibody 8428 (IGKV3-11)
QQRSNWPIYT

SEQ ID NO: 16856 - protein, 11 aa, Homo sapiens
  Heavy chain CDR3 for antibody 8428 (IGHV3-64)
ARERGSYAFDI

SEQ ID NO: 16857 - protein, 10 aa, Homo sapiens
  Light chain CDR3 for antibody 8429 (IGKV1-17)
LQHNSYPMYT

SEQ ID NO: 16858 - protein, 10 aa, Homo sapiens
  Heavy chain CDR3 for antibody 8429 (IGHV3-33)
AREWFGGFDI

SEQ ID NO: 16859 - protein, 10 aa, Homo sapiens
  Light chain CDR3 for antibody 8430 (IGKV1-16)
QQSYSTPMYT

SEQ ID NO: 16860 - protein, 12 aa, Homo sapiens
  Heavy chain CDR3 for antibody 8430 (IGHV3-23)
AKEYDILTGYFH

SEQ ID NO: 16861 - protein, 9 aa, Homo sapiens
  Light chain CDR3 for antibody 8431 (IGKV1-6)
QQEYNYPLT

SEQ ID NO: 16862 - protein, 14 aa, Homo sapiens
  Heavy chain CDR3 for antibody 8431 (IGHV3-33)
ARDNILTVYYLFDY

SEQ ID NO: 16863 - protein, 9 aa, Homo sapiens
  Light chain CDR3 for antibody 8432 (IGKV1-6)
LQDYNYPYT

SEQ ID NO: 16864 - protein, 17 aa, Homo sapiens
  Heavy chain CDR3 for antibody 8432 (IGHV3-33)
ARDQYSGYDFYYYGMDV

SEQ ID NO: 16865 - protein, 8 aa, Homo sapiens
  Light chain CDR3 for antibody 8433 (IGKV1-5)
QQYNSYWT

SEQ ID NO: 16866 - protein, 15 aa, Homo sapiens
  Heavy chain CDR3 for antibody 8433 (IGHV3-33)
VCVLYDYGDYVGFDY

SEQ ID NO: 16867 - protein, 8 aa, Homo sapiens
  Light chain CDR3 for antibody 8434 (IGKV1-5)
QQYNSYWT

SEQ ID NO: 16868 - protein, 18 aa, Homo sapiens
  Heavy chain CDR3 for antibody 8434 (IGHV3-33)
ARGYYGSGNFYKDSGMDV

SEQ ID NO: 16869 - protein, 9 aa, Homo sapiens
  Light chain CDR3 for antibody 8435 (IGKV1-39)
QQSYSTPYT

SEQ ID NO: 16870 - protein, 12 aa, Homo sapiens
  Heavy chain CDR3 for antibody 8435 (IGHV3-33)
ARDGRAAAYFDN

SEQ ID NO: 16871 - protein, 9 aa, Homo sapiens
  Light chain CDR3 for antibody 8436 (IGKV1-6)
LQDFNYPRT

SEQ ID NO: 16872 - protein, 12 aa, Homo sapiens
  Heavy chain CDR3 for antibody 8436 (IGHV4-39)
ARDSGSYYFFDY

SEQ ID NO: 16873 - protein, 9 aa, Homo sapiens
  Light chain CDR3 for antibody 8437 (IGKV1-17)
LQHNSYPYT

SEQ ID NO: 16874 - protein, 16 aa, Homo sapiens
  Heavy chain CDR3 for antibody 8437 (IGHV4-39)
ARRVPYYDILTGYLDY

SEQ ID NO: 16875 - protein, 9 aa, Homo sapiens
  Light chain CDR3 for antibody 8438 (IGKV1-5)
QQYNTYSRT

SEQ ID NO: 16876 - protein, 17 aa, Homo sapiens
  Heavy chain CDR3 for antibody 8438 (IGHV1-18)
ARDRAFTMVRGVPPFDY

SEQ ID NO: 16877 - protein, 8 aa, Homo sapiens
  Light chain CDR3 for antibody 8439 (IGKV6-21)
HQSSSLPT

SEQ ID NO: 16878 - protein, 18 aa, Homo sapiens
  Heavy chain CDR3 for antibody 8439 (IGHV1-46)
ARDLTGRTENYYYYGMDV

SEQ ID NO: 16879 - protein, 9 aa, Homo sapiens
  Light chain CDR3 for antibody 8440 (IGKV3-20)
QHYGSSPYT

SEQ ID NO: 16880 - protein, 5 aa, Homo sapiens
  Heavy chain CDR3 for antibody 8440 (IGHV3-33)
ARTDY

SEQ ID NO: 16881 - protein, 9 aa, Homo sapiens
  Light chain CDR3 for antibody 8441 (IGKV1-9)
QQLKSYLYT

SEQ ID NO: 16882 - protein, 17 aa, Homo sapiens
  Heavy chain CDR3 for antibody 8441 (IGHV4-34)
AGLRFFDWLFDYYGMDV

SEQ ID NO: 16883 - protein, 9 aa, Homo sapiens
  Light chain CDR3 for antibody 8442 (IGKV1-39)
QQSYRTPLT

SEQ ID NO: 16884 - protein, 16 aa, Homo sapiens
  Heavy chain CDR3 for antibody 8442 (IGHV3-21)
ARDQGILTGYYTALDY

SEQ ID NO: 16885 - protein, 9 aa, Homo sapiens
  Light chain CDR3 for antibody 8443 (IGKV1D-16)
QQYNSFPLT

SEQ ID NO: 16886 - protein, 9 aa, Homo sapiens
  Heavy chain CDR3 for antibody 8443 (IGHV3-30)
ARDYFHFDY

SEQ ID NO: 16887 - protein, 8 aa, Homo sapiens
  Light chain CDR3 for antibody 8444 (IGKV1D-13)
QQFNNYPT

SEQ ID NO: 16888 - protein, 12 aa, Homo sapiens
  Heavy chain CDR3 for antibody 8444 (IGHV3-23)
AKESLYTPTDDY

SEQ ID NO: 16889 - protein, 10 aa, Homo sapiens
  Light chain CDR3 for antibody 8445 (IGKV1-39)
QQSYSTPMYT

SEQ ID NO: 16890 - protein, 14 aa, Homo sapiens
  Heavy chain CDR3 for antibody 8445 (IGHV1-46)
ARRGIVGALDAFDI

SEQ ID NO: 16891 - protein, 9 aa, Homo sapiens
  Light chain CDR3 for antibody 8446 (IGKV1-6)
LQDFHYPWT

SEQ ID NO: 16892 - protein, 18 aa, Homo sapiens
  Heavy chain CDR3 for antibody 8446 (IGHV3-33)
ARDRYYDILTGYYMGFDY

SEQ ID NO: 16893 - protein, 8 aa, Homo sapiens
  Light chain CDR3 for antibody 8447 (IGKV3D-7)
QQDYNLLT

SEQ ID NO: 16894 - protein, 13 aa, Homo sapiens
  Heavy chain CDR3 for antibody 8447 (IGHV3-66)
ANTGDSYYYGFYV

SEQ ID NO: 16895 - protein, 9 aa, Homo sapiens
  Light chain CDR3 for antibody 8448 (IGKV3D-7)
QQDYEFPLT

SEQ ID NO: 16896 - protein, 11 aa, Homo sapiens
  Heavy chain CDR3 for antibody 8448 (IGHV3-33)
ARDKSSGWSDY

SEQ ID NO: 16897 - protein, 9 aa, Homo sapiens
  Light chain CDR3 for antibody 8449 (IGKV1D-13)
QQFNNYPYT

SEQ ID NO: 16898 - protein, 10 aa, Homo sapiens
  Heavy chain CDR3 for antibody 8449 (IGHV3-23)
AKENWNDFDY

SEQ ID NO: 16899 - protein, 9 aa, Homo sapiens
  Light chain CDR3 for antibody 8450 (IGKV2-30)
MQGTHWPLT

SEQ ID NO: 16900 - protein, 13 aa, Homo sapiens
  Heavy chain CDR3 for antibody 8450 (IGHV3-15)
TTDRLLLFGAFDY

SEQ ID NO: 16901 - protein, 9 aa, Homo sapiens
  Light chain CDR3 for antibody 8451 (IGKV6-21)
HQSSSLPYT

SEQ ID NO: 16902 - protein, 14 aa, Homo sapiens
  Heavy chain CDR3 for antibody 8451 (IGHV3-23)
AKDRNIPAAGPFDY

SEQ ID NO: 16903 - protein, 8 aa, Homo sapiens
  Light chain CDR3 for antibody 8452 (IGKV1D-13)
QQFNNYPT

SEQ ID NO: 16904 - protein, 10 aa, Homo sapiens
  Heavy chain CDR3 for antibody 8452 (IGHV3-33)
ARDLGWSFDH

SEQ ID NO: 16905 - protein, 9 aa, Homo sapiens
  Light chain CDR3 for antibody 8453 (IGKV3D-7)
QQDYKLPLT

SEQ ID NO: 16906 - protein, 15 aa, Homo sapiens
  Heavy chain CDR3 for antibody 8453 (IGHV3-33)
ARGGTGYYSYWYFDL

SEQ ID NO: 16907 - protein, 9 aa, Homo sapiens
  Light chain CDR3 for antibody 8454 (IGKV1-39)
QQSYSTPYT

SEQ ID NO: 16908 - protein, 14 aa, Homo sapiens
  Heavy chain CDR3 for antibody 8454 (IGHV1-18)
AREGGSYFYYGVDV

SEQ ID NO: 16909 - protein, 9 aa, Homo sapiens
  Light chain CDR3 for antibody 8455 (IGKV1-6)
LQDYKSPFT

SEQ ID NO: 16910 - protein, 11 aa, Homo sapiens
  Heavy chain CDR3 for antibody 8455 (IGHV3-33)
AREGAVARFDY

SEQ ID NO: 16911 - protein, 9 aa, Homo sapiens
  Light chain CDR3 for antibody 8456 (IGKV6-21)
HQSTSLPFT

SEQ ID NO: 16912 - protein, 13 aa, Homo sapiens
  Heavy chain CDR3 for antibody 8456 (IGHV4-59)
ARKGATGYYGMDV

SEQ ID NO: 16913 - protein, 10 aa, Homo sapiens
  Light chain CDR3 for antibody 8457 (IGKV1-9)
QQLDSYPMYT

SEQ ID NO: 16914 - protein, 18 aa, Homo sapiens
  Heavy chain CDR3 for antibody 8457 (IGHV4-59)
AREGDYVWGSYRPNWFDP

SEQ ID NO: 16915 - protein, 8 aa, Homo sapiens
  Light chain CDR3 for antibody 8458 (IGKV3-11)
QQRSNWLT

SEQ ID NO: 16916 - protein, 14 aa, Homo sapiens
  Heavy chain CDR3 for antibody 8458 (IGHV1-2)
AREGGSGSSPGMDV

SEQ ID NO: 16917 - protein, 9 aa, Homo sapiens
  Light chain CDR3 for antibody 8459 (IGKV1-39)
QQSYSTPLT

SEQ ID NO: 16918 - protein, 15 aa, Homo sapiens
  Heavy chain CDR3 for antibody 8459 (IGHV3-33)
ARDRGMVRGDGYLDY

SEQ ID NO: 16919 - protein, 9 aa, Homo sapiens
  Light chain CDR3 for antibody 8460 (IGKV3-11)
QQRSNWPPT

SEQ ID NO: 16920 - protein, 13 aa, Homo sapiens
  Heavy chain CDR3 for antibody 8460 (IGHV4-39)
ARRDGSYYGYFGY

SEQ ID NO: 16921 - protein, 8 aa, Homo sapiens
  Light chain CDR3 for antibody 8461 (IGKV2D-28)
MQALQTPT

SEQ ID NO: 16922 - protein, 12 aa, Homo sapiens
  Heavy chain CDR3 for antibody 8461 (IGHV3-13)
AREAGIPDAFDI

SEQ ID NO: 16923 - protein, 8 aa, Homo sapiens
  Light chain CDR3 for antibody 8462 (IGKV3-11)
QQRSNWLT

SEQ ID NO: 16924 - protein, 14 aa, Homo sapiens
  Heavy chain CDR3 for antibody 8462 (IGHV3-33)
ARTTAAAGPRDFQH

SEQ ID NO: 16925 - protein, 9 aa, Homo sapiens
  Light chain CDR3 for antibody 8463 (IGKV3-20)
QQYGSSPYT

SEQ ID NO: 16926 - protein, 6 aa, Homo sapiens
  Heavy chain CDR3 for antibody 8463 (IGHV4-59)
AREEDY

SEQ ID NO: 16927 - protein, 9 aa, Homo sapiens
  Light chain CDR3 for antibody 8464 (IGKV3D-7)
QQDYNLPYT

SEQ ID NO: 16928 - protein, 17 aa, Homo sapiens
  Heavy chain CDR3 for antibody 8464 (IGHV3-33)
AREGYYYGSGSYHFFDY

SEQ ID NO: 16929 - protein, 9 aa, Homo sapiens
  Light chain CDR3 for antibody 8465 (IGKV3-15)
QQYNNWPLT

SEQ ID NO: 16930 - protein, 17 aa, Homo sapiens
  Heavy chain CDR3 for antibody 8465 (IGHV3-23)
AKEYCSGGSCYVYYFDY

SEQ ID NO: 16931 - protein, 9 aa, Homo sapiens
  Light chain CDR3 for antibody 8466 (IGKV1-6)
LQDFHYPWT

SEQ ID NO: 16932 - protein, 9 aa, Homo sapiens
  Heavy chain CDR3 for antibody 8466 (IGHV3-30)
ARDNWGFDY

SEQ ID NO: 16933 - protein, 9 aa, Homo sapiens
  Light chain CDR3 for antibody 8467 (IGKV1D-13)
QQFNNYPYT

SEQ ID NO: 16934 - protein, 11 aa, Homo sapiens
  Heavy chain CDR3 for antibody 8467 (IGHV3-23)
AKEGTYFDIPH

SEQ ID NO: 16935 - protein, 9 aa, Homo sapiens
  Light chain CDR3 for antibody 8468 (IGKV1-16)
QHYNDYPFT

SEQ ID NO: 16936 - protein, 15 aa, Homo sapiens
  Heavy chain CDR3 for antibody 8468 (IGHV3-33)
ARDHLTGYYYYGMDV

SEQ ID NO: 16937 - protein, 9 aa, Homo sapiens
  Light chain CDR3 for antibody 8469 (IGKV1-17)
LQHNSYPYT

SEQ ID NO: 16938 - protein, 16 aa, Homo sapiens
  Heavy chain CDR3 for antibody 8469 (IGHV3-23)
ARDLGIAAAGTGWFDP

SEQ ID NO: 16939 - protein, 9 aa, Homo sapiens
  Light chain CDR3 for antibody 8470 (IGKV3D-7)
QQDYNLPYT

SEQ ID NO: 16940 - protein, 16 aa, Homo sapiens
  Heavy chain CDR3 for antibody 8470 (IGHV3-11)
ARDSELRYFDWFGMDV

SEQ ID NO: 16941 - protein, 10 aa, Homo sapiens
  Light chain CDR3 for antibody 8471 (IGKV1-39)
QQSYSTPMYT

SEQ ID NO: 16942 - protein, 12 aa, Homo sapiens
  Heavy chain CDR3 for antibody 8471 (IGHV3-23)
AKDGWFGESLDY

SEQ ID NO: 16943 - protein, 10 aa, Homo sapiens
  Light chain CDR3 for antibody 8472 (IGKV1-39)
QQSYSTPMYT

SEQ ID NO: 16944 - protein, 14 aa, Homo sapiens
  Heavy chain CDR3 for antibody 8472 (IGHV3-33)
VRDQGSMVRGGGDY

SEQ ID NO: 16945 - protein, 9 aa, Homo sapiens
  Light chain CDR3 for antibody 8473 (IGKV3-11)
QQRSNWPPT

SEQ ID NO: 16946 - protein, 12 aa, Homo sapiens
  Heavy chain CDR3 for antibody 8473 (IGHV4-39)
ASQMVREGWFDP

SEQ ID NO: 16947 - protein, 9 aa, Homo sapiens
  Light chain CDR3 for antibody 8474 (IGKV1-9)
QQLNTYPFT

SEQ ID NO: 16948 - protein, 21 aa, Homo sapiens
  Heavy chain CDR3 for antibody 8474 (IGHV3-33)
ARKRLYDILTGYYKAYYGMDV

SEQ ID NO: 16949 - protein, 9 aa, Homo sapiens
  Light chain CDR3 for antibody 8475 (IGKV1-9)
QQVKSYPYT

SEQ ID NO: 16950 - protein, 10 aa, Homo sapiens
  Heavy chain CDR3 for antibody 8475 (IGHV3-30)
AREWYGGMDV

SEQ ID NO: 16951 - protein, 9 aa, Homo sapiens
  Light chain CDR3 for antibody 8476 (IGKV1-6)
LQDYKSPFT

SEQ ID NO: 16952 - protein, 12 aa, Homo sapiens
  Heavy chain CDR3 for antibody 8476 (IGHV3-33)
TRGYSSKSYFDY

SEQ ID NO: 16953 - protein, 8 aa, Homo sapiens
  Light chain CDR3 for antibody 8477 (IGKV3-20)
QQYGSSLT

SEQ ID NO: 16954 - protein, 13 aa, Homo sapiens
  Heavy chain CDR3 for antibody 8477 (IGHV3-33)
ARDQRYSSGWYDY

SEQ ID NO: 16955 - protein, 8 aa, Homo sapiens
  Light chain CDR3 for antibody 8478 (IGKV3D-7)
QQDYSLLT

SEQ ID NO: 16956 - protein, 8 aa, Homo sapiens
  Heavy chain CDR3 for antibody 8478 (IGHV3-33)
ARRGGLDY

SEQ ID NO: 16957 - protein, 10 aa, Homo sapiens
  Light chain CDR3 for antibody 8479 (IGKV1-17)
LQHNSYPMYT

SEQ ID NO: 16958 - protein, 16 aa, Homo sapiens
  Heavy chain CDR3 for antibody 8479 (IGHV4-59)
ARYSGSYYGDYYGMDV

SEQ ID NO: 16959 - protein, 8 aa, Homo sapiens
  Light chain CDR3 for antibody 8480 (IGKV1-5)
QQYNSYYT

SEQ ID NO: 16960 - protein, 16 aa, Homo sapiens
  Heavy chain CDR3 for antibody 8480 (IGHV1-18)
ARYFDWLLRDYYGMDV

SEQ ID NO: 16961 - protein, 10 aa, Homo sapiens
  Light chain CDR3 for antibody 8481 (IGKV3-11)
QQRSNWPTWT

SEQ ID NO: 16962 - protein, 18 aa, Homo sapiens
  Heavy chain CDR3 for antibody 8481 (IGHV3-33)
VRDRERYGSGSYPDAFDI

SEQ ID NO: 16963 - protein, 8 aa, Homo sapiens
  Light chain CDR3 for antibody 8482 (IGKV3D-7)
QQDYNLLT

SEQ ID NO: 16964 - protein, 17 aa, Homo sapiens
  Heavy chain CDR3 for antibody 8482 (IGHV3-33)
TRDSGMVRGIIIYGMDV

SEQ ID NO: 16965 - protein, 9 aa, Homo sapiens
  Light chain CDR3 for antibody 8483 (IGKV3-20)
QQYGSSPYT

SEQ ID NO: 16966 - protein, 10 aa, Homo sapiens
  Heavy chain CDR3 for antibody 8483 (IGHV3-30)
ARGSWYGFDY

SEQ ID NO: 16967 - protein, 9 aa, Homo sapiens
  Light chain CDR3 for antibody 8484 (IGKV2D-28)
MQVLQTPFT

SEQ ID NO: 16968 - protein, 17 aa, Homo sapiens
  Heavy chain CDR3 for antibody 8484 (IGHV4-39)
AGRLTYYFGSGSPSFDY

SEQ ID NO: 16969 - protein, 9 aa, Homo sapiens
  Light chain CDR3 for antibody 8485 (IGKV1-39)
QQSYSTPLT

SEQ ID NO: 16970 - protein, 14 aa, Homo sapiens
  Heavy chain CDR3 for antibody 8485 (IGHV4-39)
ARQGGWYLYWYFDL

SEQ ID NO: 16971 - protein, 9 aa, Homo sapiens
  Light chain CDR3 for antibody 8486 (IGKV2D-28)
MQTVQTPWT

SEQ ID NO: 16972 - protein, 13 aa, Homo sapiens
  Heavy chain CDR3 for antibody 8486 (IGHV4-34)
ASNFYYYYYGMDV

SEQ ID NO: 16973 - protein, 8 aa, Homo sapiens
  Light chain CDR3 for antibody 8487 (IGKV1-5)
QQYNSYWT

SEQ ID NO: 16974 - protein, 9 aa, Homo sapiens
  Heavy chain CDR3 for antibody 8487 (IGHV3-33)
AREYKEFDY

SEQ ID NO: 16975 - protein, 9 aa, Homo sapiens
  Light chain CDR3 for antibody 8488 (IGKV1-33)
QQYDNLPFT

SEQ ID NO: 16976 - protein, 9 aa, Homo sapiens
  Heavy chain CDR3 for antibody 8488 (IGHV3-13)
ARDHWYFDL

SEQ ID NO: 16977 - protein, 9 aa, Homo sapiens
  Light chain CDR3 for antibody 8489 (IGKV6-21)
HQSSSLPYT

SEQ ID NO: 16978 - protein, 14 aa, Homo sapiens
  Heavy chain CDR3 for antibody 8489 (IGHV3-33)
AREMVRGVPNWFDP

SEQ ID NO: 16979 - protein, 9 aa, Homo sapiens
  Light chain CDR3 for antibody 8490 (IGKV1-17)
LQHNTYPWT

SEQ ID NO: 16980 - protein, 11 aa, Homo sapiens
  Heavy chain CDR3 for antibody 8490 (IGHV3-33)
ARAGIAAVFDY

SEQ ID NO: 16981 - protein, 9 aa, Homo sapiens
  Light chain CDR3 for antibody 8491 (IGKV1D-16)
QQYDSYPYT

SEQ ID NO: 16982 - protein, 13 aa, Homo sapiens
  Heavy chain CDR3 for antibody 8491 (IGHV4-34)
ASNVYYYYYGMDV

SEQ ID NO: 16983 - protein, 7 aa, Homo sapiens
  Light chain CDR3 for antibody 8492 (IGKV1-17)
LQHNSYP

SEQ ID NO: 16984 - protein, 13 aa, Homo sapiens
  Heavy chain CDR3 for antibody 8492 (IGHV4-59)
ARDAGYSSSWFDY

SEQ ID NO: 16985 - protein, 8 aa, Homo sapiens
  Light chain CDR3 for antibody 8493 (IGKV1D-13)
QQFNNYHT

SEQ ID NO: 16986 - protein, 21 aa, Homo sapiens
  Heavy chain CDR3 for antibody 8493 (IGHV3-23)
AKDIDYYGSGSYPLYYYGMDV

SEQ ID NO: 16987 - protein, 11 aa, Homo sapiens
  Light chain CDR3 for antibody 8494 (IGKV3-11)
QQRSNWPPTWT

SEQ ID NO: 16988 - protein, 18 aa, Homo sapiens
  Heavy chain CDR3 for antibody 8494 (IGHV3-33)
ARDGYSGYDYYYYYGMDV

SEQ ID NO: 16989 - protein, 10 aa, Homo sapiens
  Light chain CDR3 for antibody 8495 (IGKV1-9)
QQLDSYPMYT

SEQ ID NO: 16990 - protein, 17 aa, Homo sapiens
  Heavy chain CDR3 for antibody 8495 (IGHV1-18)
ARERYYGSGIYKYNMDV

SEQ ID NO: 16991 - protein, 9 aa, Homo sapiens
  Light chain CDR3 for antibody 8496 (IGKV3D-7)
QQDYNLPYT

SEQ ID NO: 16992 - protein, 14 aa, Homo sapiens
  Heavy chain CDR3 for antibody 8496 (IGHV3-64)
ARGGGAVTGTNFDY

SEQ ID NO: 16993 - protein, 9 aa, Homo sapiens
  Light chain CDR3 for antibody 8497 (IGKV1-27)
QKYNSAPYT

SEQ ID NO: 16994 - protein, 14 aa, Homo sapiens
  Heavy chain CDR3 for antibody 8497 (IGHV1-46)
ARDGVGAKEGGSDY

SEQ ID NO: 16995 - protein, 9 aa, Homo sapiens
  Light chain CDR3 for antibody 8498 (IGKV1D-13)
QQFNNYPYT

SEQ ID NO: 16996 - protein, 22 aa, Homo sapiens
  Heavy chain CDR3 for antibody 8498 (IGHV3-23)
AKDDLPYYDILTHSTTTGGMDV

SEQ ID NO: 16997 - protein, 10 aa, Homo sapiens
  Light chain CDR3 for antibody 8499 (IGKV3-11)
QQRSNWPIFT

SEQ ID NO: 16998 - protein, 14 aa, Homo sapiens
  Heavy chain CDR3 for antibody 8499 (IGHV3-23)
AKGGDVLTGYYPDY

SEQ ID NO: 16999 - protein, 9 aa, Homo sapiens
  Light chain CDR3 for antibody 8500 (IGKV3D-7)
QQDYNLPWT

SEQ ID NO: 17000 - protein, 17 aa, Homo sapiens
  Heavy chain CDR3 for antibody 8500 (IGHV3-23)
AKDRPVTTLYYYFGMDV

SEQ ID NO: 17001 - protein, 11 aa, Homo sapiens
  Light chain CDR3 for antibody 8501 (IGKV3-11)
QQRSNWPPTWT

SEQ ID NO: 17002 - protein, 13 aa, Homo sapiens
  Heavy chain CDR3 for antibody 8501 (IGHV3-33)
ARRATLVRGVFDP

SEQ ID NO: 17003 - protein, 9 aa, Homo sapiens
  Light chain CDR3 for antibody 8502 (IGKV1-17)
LQQNSYPWT

SEQ ID NO: 17004 - protein, 12 aa, Homo sapiens
  Heavy chain CDR3 for antibody 8502 (IGHV3-23)
AKEGLGSDYEPY

SEQ ID NO: 17005 - protein, 9 aa, Homo sapiens
  Light chain CDR3 for antibody 8503 (IGKV1-6)
LQDYNYPFT

SEQ ID NO: 17006 - protein, 14 aa, Homo sapiens
  Heavy chain CDR3 for antibody 8503 (IGHV3-33)
ARVTSGSSYWYFDL

SEQ ID NO: 17007 - protein, 9 aa, Homo sapiens
  Light chain CDR3 for antibody 8504 (IGKV1D-13)
QQFNNYPHT

SEQ ID NO: 17008 - protein, 14 aa, Homo sapiens
  Heavy chain CDR3 for antibody 8504 (IGHV3-33)
VSAISGSSYWYFAL

SEQ ID NO: 17009 - protein, 9 aa, Homo sapiens
  Light chain CDR3 for antibody 8505 (IGKV3D-7)
QQDYNLPYT

SEQ ID NO: 17010 - protein, 15 aa, Homo sapiens
  Heavy chain CDR3 for antibody 8505 (IGHV4-59)
ARDLGHYYGSVSIDY

SEQ ID NO: 17011 - protein, 9 aa, Homo sapiens
  Light chain CDR3 for antibody 8506 (IGKV3D-7)
QQDYNLPYT

SEQ ID NO: 17012 - protein, 19 aa, Homo sapiens
  Heavy chain CDR3 for antibody 8506 (IGHV3-30)
ARRFSGYSGYDHYYYGMDV

SEQ ID NO: 17013 - protein, 9 aa, Homo sapiens
  Light chain CDR3 for antibody 8507 (IGKV1-16)
QHYNDYPFT

SEQ ID NO: 17014 - protein, 13 aa, Homo sapiens
  Heavy chain CDR3 for antibody 8507 (IGHV3-33)
ARTDYYSYYGLDV

SEQ ID NO: 17015 - protein, 7 aa, Homo sapiens
  Light chain CDR3 for antibody 8508 (IGKV1-17)
LQHNSYP

SEQ ID NO: 17016 - protein, 16 aa, Homo sapiens
  Heavy chain CDR3 for antibody 8508 (IGHV1-24)
ATEDSSSTYYYYGLDV

SEQ ID NO: 17017 - protein, 9 aa, Homo sapiens
  Light chain CDR3 for antibody 8509 (IGKV1-6)
LQDYNYPYT

SEQ ID NO: 17018 - protein, 13 aa, Homo sapiens
  Heavy chain CDR3 for antibody 8509 (IGHV3-33)
VRRIAVAGTEGDC

SEQ ID NO: 17019 - protein, 11 aa, Homo sapiens
  Light chain CDR3 for antibody 8510 (IGKV3-11)
QQRSNWPPTWT

SEQ ID NO: 17020 - protein, 17 aa, Homo sapiens
  Heavy chain CDR3 for antibody 8510 (IGHV4-39)
ARQGWYYGSGSSLLFDY

SEQ ID NO: 17021 - protein, 9 aa, Homo sapiens
  Light chain CDR3 for antibody 8511 (IGKV1D-13)
QQFNNYPHT

SEQ ID NO: 17022 - protein, 15 aa, Homo sapiens
  Heavy chain CDR3 for antibody 8511 (IGHV3-33)
ARPPIAVAGPEYFQH

SEQ ID NO: 17023 - protein, 8 aa, Homo sapiens
  Light chain CDR3 for antibody 8512 (IGKV1-5)
QQYNSYWT

SEQ ID NO: 17024 - protein, 10 aa, Homo sapiens
  Heavy chain CDR3 for antibody 8512 (IGHV3-33)
AREWFGGFDI

SEQ ID NO: 17025 - protein, 9 aa, Homo sapiens
  Light chain CDR3 for antibody 8513 (IGKV1-16)
QHYNDYPFT

SEQ ID NO: 17026 - protein, 12 aa, Homo sapiens
  Heavy chain CDR3 for antibody 8513 (IGHV3-33)
ARDLVGATPFDY

SEQ ID NO: 17027 - protein, 8 aa, Homo sapiens
  Light chain CDR3 for antibody 8514 (IGKV3-11)
QQRSNWLT

SEQ ID NO: 17028 - protein, 19 aa, Homo sapiens
  Heavy chain CDR3 for antibody 8514 (IGHV1-18)
ARDTTLVRGLMNYYYGMDV

SEQ ID NO: 17029 - protein, 10 aa, Homo sapiens
  Light chain CDR3 for antibody 8515 (IGKV3-15)
QQYNNWPPIT

SEQ ID NO: 17030 - protein, 11 aa, Homo sapiens
  Heavy chain CDR3 for antibody 8515 (IGHV3-33)
ARDRVLTPFDY

SEQ ID NO: 17031 - protein, 9 aa, Homo sapiens
  Light chain CDR3 for antibody 8516 (IGKV3D-7)
QQDYKLPLT

SEQ ID NO: 17032 - protein, 14 aa, Homo sapiens
  Heavy chain CDR3 for antibody 8516 (IGHV4-39)
ARRGVVVPPGGMDV

SEQ ID NO: 17033 - protein, 9 aa, Homo sapiens
  Light chain CDR3 for antibody 8517 (IGKV1-37)
QRTYNAPFT

SEQ ID NO: 17034 - protein, 15 aa, Homo sapiens
  Heavy chain CDR3 for antibody 8517 (IGHV3-33)
ARDRGWKAPGYGMDV

SEQ ID NO: 17035 - protein, 9 aa, Homo sapiens
  Light chain CDR3 for antibody 8518 (IGKV1-9)
QQLNSYPYT

SEQ ID NO: 17036 - protein, 14 aa, Homo sapiens
  Heavy chain CDR3 for antibody 8518 (IGHV3-23)
ANWAYDILTGYLDY

SEQ ID NO: 17037 - protein, 9 aa, Homo sapiens
  Light chain CDR3 for antibody 8519 (IGKV1-39)
QQSYSTPIT

SEQ ID NO: 17038 - protein, 17 aa, Homo sapiens
  Heavy chain CDR3 for antibody 8519 (IGHV1-46)
ARDLTGRTENYYYGMDV

SEQ ID NO: 17039 - protein, 9 aa, Homo sapiens
  Light chain CDR3 for antibody 8520 (IGKV1D-13)
QQFNNYPHT

SEQ ID NO: 17040 - protein, 10 aa, Homo sapiens
  Heavy chain CDR3 for antibody 8520 (IGHV3-13)
ARDRGSYYDY

SEQ ID NO: 17041 - protein, 10 aa, Homo sapiens
  Light chain CDR3 for antibody 8521 (IGKV1-9)
QQLNSFLMYT

SEQ ID NO: 17042 - protein, 13 aa, Homo sapiens
  Heavy chain CDR3 for antibody 8521 (IGHV3-11)
ARDGGAAAGTWDS

SEQ ID NO: 17043 - protein, 10 aa, Homo sapiens
  Light chain CDR3 for antibody 8522 (IGKV1-39)
QQSYSTPMYT

SEQ ID NO: 17044 - protein, 18 aa, Homo sapiens
  Heavy chain CDR3 for antibody 8522 (IGHV3-33)
ARREGITLIFYYYYGMDV

SEQ ID NO: 17045 - protein, 9 aa, Homo sapiens
  Light chain CDR3 for antibody 8523 (IGKV3-20)
QQYGSSPLT

SEQ ID NO: 17046 - protein, 15 aa, Homo sapiens
  Heavy chain CDR3 for antibody 8523 (IGHV4-59)
ARDIGYYGSGSPLDY

SEQ ID NO: 17047 - protein, 9 aa, Homo sapiens
  Light chain CDR3 for antibody 8524 (IGKV1-16)
QQYNSYPLT

SEQ ID NO: 17048 - protein, 11 aa, Homo sapiens
  Heavy chain CDR3 for antibody 8524 (IGHV3-23)
AKDRPYYGSGV

SEQ ID NO: 17049 - protein, 9 aa, Homo sapiens
  Light chain CDR3 for antibody 8525 (IGKV1-9)
QQGNTYSRT

SEQ ID NO: 17050 - protein, 17 aa, Homo sapiens
  Heavy chain CDR3 for antibody 8525 (IGHV4-59)
ARDFLVRGEGSYYGMDV

SEQ ID NO: 17051 - protein, 9 aa, Homo sapiens
  Light chain CDR3 for antibody 8526 (IGKV1-6)
QQEYNYPLT

SEQ ID NO: 17052 - protein, 13 aa, Homo sapiens
  Heavy chain CDR3 for antibody 8526 (IGHV3-11)
ARDGGAAAGTWDS

SEQ ID NO: 17053 - protein, 9 aa, Homo sapiens
  Light chain CDR3 for antibody 8527 (IGKV2D-24)
TQATQFPHT

SEQ ID NO: 17054 - protein, 17 aa, Homo sapiens
  Heavy chain CDR3 for antibody 8527 (IGHV4-59)
ARDFLVRGEGSYYGMDV

SEQ ID NO: 17055 - protein, 9 aa, Homo sapiens
  Light chain CDR3 for antibody 8528 (IGKV1-9)
QQLNGYPFT

SEQ ID NO: 17056 - protein, 18 aa, Homo sapiens
  Heavy chain CDR3 for antibody 8528 (IGHV3-33)
ARGYYGSGNFYKDSGMDV

SEQ ID NO: 17057 - protein, 10 aa, Homo sapiens
  Light chain CDR3 for antibody 8529 (IGKV3-15)
QQYNNWPPYT

SEQ ID NO: 17058 - protein, 12 aa, Homo sapiens
  Heavy chain CDR3 for antibody 8529 (IGHV3-33)
ARDGYSSRNFDY

SEQ ID NO: 17059 - protein, 10 aa, Homo sapiens
  Light chain CDR3 for antibody 8530 (IGKV1-39)
QQSYSTPMYT

SEQ ID NO: 17060 - protein, 17 aa, Homo sapiens
  Heavy chain CDR3 for antibody 8530 (IGHV3-33)
TRDSGMVRGIIIYGMDV

SEQ ID NO: 17061 - protein, 9 aa, Homo sapiens
  Light chain CDR3 for antibody 8531 (IGKV3-11)
QQRSNWPRT

SEQ ID NO: 17062 - protein, 15 aa, Homo sapiens
  Heavy chain CDR3 for antibody 8531 (IGHV1-18)
ARLRWFGELSGWFDP

SEQ ID NO: 17063 - protein, 9 aa, Homo sapiens
  Light chain CDR3 for antibody 8532 (IGKV1-9)
QQGNTYSRT

SEQ ID NO: 17064 - protein, 16 aa, Homo sapiens
  Heavy chain CDR3 for antibody 8532 (IGHV3-13)
ARDRSYESYYYYGMDV

SEQ ID NO: 17065 - protein, 9 aa, Homo sapiens
  Light chain CDR3 for antibody 8533 (IGKV1D-16)
QQYNSYPYT

SEQ ID NO: 17066 - protein, 14 aa, Homo sapiens
  Heavy chain CDR3 for antibody 8533 (IGHV3-64)
ARGRASSGPYYFDY

SEQ ID NO: 17067 - protein, 8 aa, Homo sapiens
  Light chain CDR3 for antibody 8534 (IGKV3D-7)
QQDYNLLT

SEQ ID NO: 17068 - protein, 11 aa, Homo sapiens
  Heavy chain CDR3 for antibody 8534 (IGHV3-11)
ARASRGSYYDY

SEQ ID NO: 17069 - protein, 9 aa, Homo sapiens
  Light chain CDR3 for antibody 8535 (IGKV1-6)
LQDFHYPWT

SEQ ID NO: 17070 - protein, 17 aa, Homo sapiens
  Heavy chain CDR3 for antibody 8535 (IGHV1-18)
ARDRAFTMVRGVPPFDY

SEQ ID NO: 17071 - protein, 9 aa, Homo sapiens
  Light chain CDR3 for antibody 8536 (IGKV1-9)
QQLNSYPWT

SEQ ID NO: 17072 - protein, 9 aa, Homo sapiens
  Heavy chain CDR3 for antibody 8536 (IGHV3-33)
ARATVGVDY

SEQ ID NO: 17073 - protein, 9 aa, Homo sapiens
  Light chain CDR3 for antibody 8537 (IGKV1D-16)
QQYNSYPLT

SEQ ID NO: 17074 - protein, 14 aa, Homo sapiens
  Heavy chain CDR3 for antibody 8537 (IGHV3-23)
AKGGDILTGYYTDY

SEQ ID NO: 17075 - protein, 10 aa, Homo sapiens
  Light chain CDR3 for antibody 8538 (IGKV1-39)
QQSYSTPMYT

SEQ ID NO: 17076 - protein, 10 aa, Homo sapiens
  Heavy chain CDR3 for antibody 8538 (IGHV3-23)
AKGDRWRFDP

SEQ ID NO: 17077 - protein, 9 aa, Homo sapiens
  Light chain CDR3 for antibody 8539 (IGKV1-6)
LQDYKSPFT

SEQ ID NO: 17078 - protein, 12 aa, Homo sapiens
  Heavy chain CDR3 for antibody 8539 (IGHV3-33)
ARDSSGWSHFDY

SEQ ID NO: 17079 - protein, 9 aa, Homo sapiens
  Light chain CDR3 for antibody 8540 (IGKV5-2)
LQHDNFPWT

SEQ ID NO: 17080 - protein, 16 aa, Homo sapiens
  Heavy chain CDR3 for antibody 8540 (IGHV3-30)
ARDSSYYGSGYYGMDV

SEQ ID NO: 17081 - protein, 9 aa, Homo sapiens
  Light chain CDR3 for antibody 8541 (IGKV1-17)
LQHNTYPYT

SEQ ID NO: 17082 - protein, 15 aa, Homo sapiens
  Heavy chain CDR3 for antibody 8541 (IGHV4-39)
ARRDYDILTGYLFDY

SEQ ID NO: 17083 - protein, 10 aa, Homo sapiens
  Light chain CDR3 for antibody 8542 (IGKV3-20)
QQYGRSPPVT

SEQ ID NO: 17084 - protein, 12 aa, Homo sapiens
  Heavy chain CDR3 for antibody 8542 (IGHV3-33)
TRGYSSKSYFDY

SEQ ID NO: 17085 - protein, 10 aa, Homo sapiens
  Light chain CDR3 for antibody 8543 (IGKV1-9)
QQLNSFLMYT

SEQ ID NO: 17086 - protein, 17 aa, Homo sapiens
  Heavy chain CDR3 for antibody 8543 (IGHV4-34)
AGLRFFDWLFDYYGMDV

SEQ ID NO: 17087 - protein, 9 aa, Homo sapiens
  Light chain CDR3 for antibody 8544 (IGKV1-39)
LQDFHYPWT

SEQ ID NO: 17088 - protein, 15 aa, Homo sapiens
  Heavy chain CDR3 for antibody 8544 (IGHV3-74)
ARGSGSHYHYYGMDV

SEQ ID NO: 17089 - protein, 9 aa, Homo sapiens
  Light chain CDR3 for antibody 8545 (IGKV1-27)
QKYNSAPHT

SEQ ID NO: 17090 - protein, 14 aa, Homo sapiens
  Heavy chain CDR3 for antibody 8545 (IGHV3-33)
ARDRIAAASSDFDC

SEQ ID NO: 17091 - protein, 8 aa, Homo sapiens
  Light chain CDR3 for antibody 8546 (IGKV3D-7)
QQDYNLLT

SEQ ID NO: 17092 - protein, 12 aa, Homo sapiens
  Heavy chain CDR3 for antibody 8546 (IGHV3-23)
AKEYDILTGYFH

SEQ ID NO: 17093 - protein, 10 aa, Homo sapiens
  Light chain CDR3 for antibody 8547 (IGKV1-9)
QQLDSYPMYT

SEQ ID NO: 17094 - protein, 14 aa, Homo sapiens
  Heavy chain CDR3 for antibody 8547 (IGHV3-33)
ARASSGSSYWYFDL

SEQ ID NO: 17095 - protein, 9 aa, Homo sapiens
  Light chain CDR3 for antibody 8548 (IGKV5-2)
LQHDNFPWT

SEQ ID NO: 17096 - protein, 18 aa, Homo sapiens
  Heavy chain CDR3 for antibody 8548 (IGHV3-33)
ARGYYGSGNFYKDAGMDV

SEQ ID NO: 17097 - protein, 9 aa, Homo sapiens
  Light chain CDR3 for antibody 8549 (IGKV1D-13)
QHFNNYMYT

SEQ ID NO: 17098 - protein, 13 aa, Homo sapiens
  Heavy chain CDR3 for antibody 8549 (IGHV4-39)
ARHVLLWFGEFDP

SEQ ID NO: 17099 - protein, 9 aa, Homo sapiens
  Light chain CDR3 for antibody 8550 (IGKV1-9)
LQDYNHPFT

SEQ ID NO: 17100 - protein, 15 aa, Homo sapiens
  Heavy chain CDR3 for antibody 8550 (IGHV3-20)
ARDRGSSGWRDWFDP

SEQ ID NO: 17101 - protein, 9 aa, Homo sapiens
  Light chain CDR3 for antibody 8551 (IGKV1-5)
QQYNTYSRT

SEQ ID NO: 17102 - protein, 14 aa, Homo sapiens
  Heavy chain CDR3 for antibody 8551 (IGHV3-74)
ARRGIVGALDAFDI

SEQ ID NO: 17103 - protein, 9 aa, Homo sapiens
  Light chain CDR3 for antibody 8552 (IGKV1-6)
LQDYNYPYT

SEQ ID NO: 17104 - protein, 6 aa, Homo sapiens
  Heavy chain CDR3 for antibody 8552 (IGHV3-23)
AKDIDY

SEQ ID NO: 17105 - protein, 9 aa, Homo sapiens
  Light chain CDR3 for antibody 8553 (IGKV3-11)
QQRINWPWT

SEQ ID NO: 17106 - protein, 11 aa, Homo sapiens
  Heavy chain CDR3 for antibody 8553 (IGHV4-59)
ARDGSWEPFDY

SEQ ID NO: 17107 - protein, 9 aa, Homo sapiens
  Light chain CDR3 for antibody 8554 (IGKV6-21)
LQSSSLLYT

SEQ ID NO: 17108 - protein, 16 aa, Homo sapiens
  Heavy chain CDR3 for antibody 8554 (IGHV3-33)
ARDQGILTGYYAAFDY

SEQ ID NO: 17109 - protein, 10 aa, Homo sapiens
  Light chain CDR3 for antibody 8555 (IGKV3-11)
QQRSNWPIFT

SEQ ID NO: 17110 - protein, 11 aa, Homo sapiens
  Heavy chain CDR3 for antibody 8555 (IGHV4-59)
ARDGSWEPFDY

SEQ ID NO: 17111 - protein, 9 aa, Homo sapiens
  Light chain CDR3 for antibody 8556 (IGKV1-6)
LQDFNYPRT

SEQ ID NO: 17112 - protein, 9 aa, Homo sapiens
  Heavy chain CDR3 for antibody 8556 (IGHV4-59)
AREGGSGSL

SEQ ID NO: 17113 - protein, 9 aa, Homo sapiens
  Light chain CDR3 for antibody 8557 (IGKV1-9)
QQYNSYPLT

SEQ ID NO: 17114 - protein, 15 aa, Homo sapiens
  Heavy chain CDR3 for antibody 8557 (IGHV3-23)
AKAGGRYFDWFPFDY

SEQ ID NO: 17115 - protein, 9 aa, Homo sapiens
  Light chain CDR3 for antibody 8558 (IGKV6-21)
HQSSTLPST

SEQ ID NO: 17116 - protein, 9 aa, Homo sapiens
  Heavy chain CDR3 for antibody 8558 (IGHV4-59)
ARSGSGIYT

SEQ ID NO: 17117 - protein, 9 aa, Homo sapiens
  Light chain CDR3 for antibody 8559 (IGKV1-27)
QKYNSAPYT

SEQ ID NO: 17118 - protein, 18 aa, Homo sapiens
  Heavy chain CDR3 for antibody 8559 (IGHV1-46)
ARDLTGRTENYYFYGMDV

SEQ ID NO: 17119 - protein, 8 aa, Homo sapiens
  Light chain CDR3 for antibody 8560 (IGKV3D-7)
QQDYNLLT

SEQ ID NO: 17120 - protein, 14 aa, Homo sapiens
  Heavy chain CDR3 for antibody 8560 (IGHV3-33)
ARSTLVRGANWFDP

SEQ ID NO: 17121 - protein, 9 aa, Homo sapiens
  Light chain CDR3 for antibody 8561 (IGKV1-9)
QQLISYPLT

SEQ ID NO: 17122 - protein, 17 aa, Homo sapiens
  Heavy chain CDR3 for antibody 8561 (IGHV3-23)
AKDGSFYSSGWYDAFDI

SEQ ID NO: 17123 - protein, 9 aa, Homo sapiens
  Light chain CDR3 for antibody 8562 (IGKV1-27)
QKYNSAPYT

SEQ ID NO: 17124 - protein, 13 aa, Homo sapiens
  Heavy chain CDR3 for antibody 8562 (IGHV3-33)
ARRATLVRGVFDP

SEQ ID NO: 17125 - protein, 9 aa, Homo sapiens
  Light chain CDR3 for antibody 8563 (IGKV3-15)
QQYHNWPLT

SEQ ID NO: 17126 - protein, 18 aa, Homo sapiens
  Heavy chain CDR3 for antibody 8563 (IGHV1-8)
AREGAAAGSYYYYNGMDV

SEQ ID NO: 17127 - protein, 9 aa, Homo sapiens
  Light chain CDR3 for antibody 8564 (IGKV4-1)
QQYYSTPWT

SEQ ID NO: 17128 - protein, 14 aa, Homo sapiens
  Heavy chain CDR3 for antibody 8564 (IGHV3-33)
ARDWNDVYYYGMDV

SEQ ID NO: 17129 - protein, 10 aa, Homo sapiens
  Light chain CDR3 for antibody 8565 (IGKV1-39)
QQSYSTPMYT

SEQ ID NO: 17130 - protein, 18 aa, Homo sapiens
  Heavy chain CDR3 for antibody 8565 (IGHV3-33)
ARERDYYGSGSYPDAFDI

SEQ ID NO: 17131 - protein, 9 aa, Homo sapiens
  Light chain CDR3 for antibody 8566 (IGKV1-17)
LQLNSFPWT

SEQ ID NO: 17132 - protein, 11 aa, Homo sapiens
  Heavy chain CDR3 for antibody 8566 (IGHV3-33)
ARDRSSGPFDY

SEQ ID NO: 17133 - protein, 11 aa, Homo sapiens
  Light chain CDR3 for antibody 8567 (IGKV3-11)
QQRSNWPPTWT

SEQ ID NO: 17134 - protein, 12 aa, Homo sapiens
  Heavy chain CDR3 for antibody 8567 (IGHV4-59)
ARDSGSYYYFDY

SEQ ID NO: 17135 - protein, 9 aa, Homo sapiens
  Light chain CDR3 for antibody 8568 (IGKV2D-28)
MQALQTPPT

SEQ ID NO: 17136 - protein, 17 aa, Homo sapiens
  Heavy chain CDR3 for antibody 8568 (IGHV3-23)
AKDYDILTGYSHNWFDP

SEQ ID NO: 17137 - protein, 9 aa, Homo sapiens
  Light chain CDR3 for antibody 8569 (IGKV1-39)
QQSYRTPLT

SEQ ID NO: 17138 - protein, 14 aa, Homo sapiens
  Heavy chain CDR3 for antibody 8569 (IGHV3-33)
ARDGAAAALDAFDI

SEQ ID NO: 17139 - protein, 9 aa, Homo sapiens
  Light chain CDR3 for antibody 8570 (IGKV1-6)
LQDFNYPRT

SEQ ID NO: 17140 - protein, 14 aa, Homo sapiens
  Heavy chain CDR3 for antibody 8570 (IGHV4-39)
ARQGTMIRGGYSDY

SEQ ID NO: 17141 - protein, 9 aa, Homo sapiens
  Light chain CDR3 for antibody 8571 (IGKV1D-13)
QQFNNYPHT

SEQ ID NO: 17142 - protein, 10 aa, Homo sapiens
  Heavy chain CDR3 for antibody 8571 (IGHV3-23)
AKDHWGDFDY

SEQ ID NO: 17143 - protein, 9 aa, Homo sapiens
  Light chain CDR3 for antibody 8572 (IGKV1-9)
QQYYSYPRT

SEQ ID NO: 17144 - protein, 16 aa, Homo sapiens
  Heavy chain CDR3 for antibody 8572 (IGHV3-33)
ARDGSMVRRIHDAFDF

SEQ ID NO: 17145 - protein, 8 aa, Homo sapiens
  Light chain CDR3 for antibody 8573 (IGKV6-21)
HQSSSLPT

SEQ ID NO: 17146 - protein, 14 aa, Homo sapiens
  Heavy chain CDR3 for antibody 8573 (IGHV3-20)
ARDEGSGGYDVFDI

SEQ ID NO: 17147 - protein, 9 aa, Homo sapiens
  Light chain CDR3 for antibody 8574 (IGKV1-27)
QKYNSAPYT

SEQ ID NO: 17148 - protein, 14 aa, Homo sapiens
  Heavy chain CDR3 for antibody 8574 (IGHV3-33)
ARDGVYISSSWFDP

SEQ ID NO: 17149 - protein, 9 aa, Homo sapiens
  Light chain CDR3 for antibody 8575 (IGKV3D-20)
QQYGSSPRT

SEQ ID NO: 17150 - protein, 18 aa, Homo sapiens
  Heavy chain CDR3 for antibody 8575 (IGHV3-33)
AREIAAAGTKGLYYGMDV

SEQ ID NO: 17151 - protein, 9 aa, Homo sapiens
  Light chain CDR3 for antibody 8576 (IGKV1D-13)
QQFNNYPHT

SEQ ID NO: 17152 - protein, 13 aa, Homo sapiens
  Heavy chain CDR3 for antibody 8576 (IGHV1-18)
ARSITMVRGVIGY

SEQ ID NO: 17153 - protein, 9 aa, Homo sapiens
  Light chain CDR3 for antibody 8577 (IGKV1-9)
QQLNSYPYT

SEQ ID NO: 17154 - protein, 11 aa, Homo sapiens
  Heavy chain CDR3 for antibody 8577 (IGHV3-33)
ARDKGSGWSDY

SEQ ID NO: 17155 - protein, 9 aa, Homo sapiens
  Light chain CDR3 for antibody 8578 (IGKV2-30)
MQGTHWPLT

SEQ ID NO: 17156 - protein, 9 aa, Homo sapiens
  Heavy chain CDR3 for antibody 8578 (IGHV3-33)
ARELAYFDY

SEQ ID NO: 17157 - protein, 9 aa, Homo sapiens
  Light chain CDR3 for antibody 8579 (IGKV1D-13)
QRFNNYLYT

SEQ ID NO: 17158 - protein, 14 aa, Homo sapiens
  Heavy chain CDR3 for antibody 8579 (IGHV3-33)
ARAGSGYDRDWFDP

SEQ ID NO: 17159 - protein, 10 aa, Homo sapiens
  Light chain CDR3 for antibody 8580 (IGKV1-17)
LQHNSYPMYT

SEQ ID NO: 17160 - protein, 19 aa, Homo sapiens
  Heavy chain CDR3 for antibody 8580 (IGHV3-23)
ARGVRLRFFDPYYYYGLDV

SEQ ID NO: 17161 - protein, 10 aa, Homo sapiens
  Light chain CDR3 for antibody 8581 (IGKV1-39)
QQSYSTPMYT

SEQ ID NO: 17162 - protein, 10 aa, Homo sapiens
  Heavy chain CDR3 for antibody 8581 (IGHV3-33)
ARNILTPLDY

SEQ ID NO: 17163 - protein, 9 aa, Homo sapiens
  Light chain CDR3 for antibody 8582 (IGKV1D-13)
QQFNNYPYT

SEQ ID NO: 17164 - protein, 13 aa, Homo sapiens
  Heavy chain CDR3 for antibody 8582 (IGHV3-23)
ARRQVGYYYGMDV

SEQ ID NO: 17165 - protein, 9 aa, Homo sapiens
  Light chain CDR3 for antibody 8583 (IGKV3-20)
QQYGSSPYT

SEQ ID NO: 17166 - protein, 10 aa, Homo sapiens
  Heavy chain CDR3 for antibody 8583 (IGHV3-33)
ARDGLRYFDW

SEQ ID NO: 17167 - protein, 9 aa, Homo sapiens
  Light chain CDR3 for antibody 8584 (IGKV1-39)
QQSYRTPLT

SEQ ID NO: 17168 - protein, 9 aa, Homo sapiens
  Heavy chain CDR3 for antibody 8584 (IGHV3-21)
GSRRPYFDS

SEQ ID NO: 17169 - protein, 9 aa, Homo sapiens
  Light chain CDR3 for antibody 8585 (IGKV3-20)
QQYGSSPYT

SEQ ID NO: 17170 - protein, 10 aa, Homo sapiens
  Heavy chain CDR3 for antibody 8585 (IGHV4-59)
VSSGTSLLAY

SEQ ID NO: 17171 - protein, 9 aa, Homo sapiens
  Light chain CDR3 for antibody 8586 (IGKV3-15)
QQYNNWPLT

SEQ ID NO: 17172 - protein, 17 aa, Homo sapiens
  Heavy chain CDR3 for antibody 8586 (IGHV4-59)
AREGADSGIYYHWYFDL

SEQ ID NO: 17173 - protein, 9 aa, Homo sapiens
  Light chain CDR3 for antibody 8587 (IGKV1-6)
LQDFHYPWT

SEQ ID NO: 17174 - protein, 13 aa, Homo sapiens
  Heavy chain CDR3 for antibody 8587 (IGHV3-66)
ANTGDSYYYGFYV

SEQ ID NO: 17175 - protein, 9 aa, Homo sapiens
  Light chain CDR3 for antibody 8588 (IGKV1D-13)
QQFNNYPYT

SEQ ID NO: 17176 - protein, 19 aa, Homo sapiens
  Heavy chain CDR3 for antibody 8588 (IGHV3-33)
ARGVRLRFFDPYYYYGLDV

SEQ ID NO: 17177 - protein, 9 aa, Homo sapiens
  Light chain CDR3 for antibody 8589 (IGKV2-30)
MQGTHWPLT

SEQ ID NO: 17178 - protein, 12 aa, Homo sapiens
  Heavy chain CDR3 for antibody 8589 (IGHV3-23)
AKEGIVGVPFDY

SEQ ID NO: 17179 - protein, 9 aa, Homo sapiens
  Light chain CDR3 for antibody 8590 (IGKV6-21)
HQSSSLPYT

SEQ ID NO: 17180 - protein, 21 aa, Homo sapiens
  Heavy chain CDR3 for antibody 8590 (IGHV3-33)
ARDGGITMGRGVYYYYYGMDV

SEQ ID NO: 17181 - protein, 9 aa, Homo sapiens
  Light chain CDR3 for antibody 8591 (IGKV1-6)
LQDYNHPFT

SEQ ID NO: 17182 - protein, 13 aa, Homo sapiens
  Heavy chain CDR3 for antibody 8591 (IGHV4-59)
ARDAGYSSSWFDY

SEQ ID NO: 17183 - protein, 9 aa, Homo sapiens
  Light chain CDR3 for antibody 8592 (IGKV1-17)
LQLNSFPWT

SEQ ID NO: 17184 - protein, 15 aa, Homo sapiens
  Heavy chain CDR3 for antibody 8592 (IGHV3-23)
ARRVCSGGSCSLFDY

SEQ ID NO: 17185 - protein, 10 aa, Homo sapiens
  Light chain CDR3 for antibody 8593 (IGKV1-27)
QKYNSAPMYT

SEQ ID NO: 17186 - protein, 13 aa, Homo sapiens
  Heavy chain CDR3 for antibody 8593 (IGHV4-39)
ARREVVGGRGFDY

SEQ ID NO: 17187 - protein, 9 aa, Homo sapiens
  Light chain CDR3 for antibody 8594 (IGKV5-2)
LQHDNFPYT

SEQ ID NO: 17188 - protein, 19 aa, Homo sapiens
  Heavy chain CDR3 for antibody 8594 (IGHV3-33)
ARDKYYDILTGYPWNGMDV

SEQ ID NO: 17189 - protein, 9 aa, Homo sapiens
  Light chain CDR3 for antibody 8595 (IGKV1-27)
QKYNSAPYT

SEQ ID NO: 17190 - protein, 18 aa, Homo sapiens
  Heavy chain CDR3 for antibody 8595 (IGHV3-33)
ARERGYYGSDIYPAAFDI

SEQ ID NO: 17191 - protein, 11 aa, Homo sapiens
  Light chain CDR3 for antibody 8596 (IGKV3-11)
QQRSNWPPTWT

SEQ ID NO: 17192 - protein, 14 aa, Homo sapiens
  Heavy chain CDR3 for antibody 8596 (IGHV4-39)
ARHGYYGSSNWFDP

SEQ ID NO: 17193 - protein, 9 aa, Homo sapiens
  Light chain CDR3 for antibody 8597 (IGKV1-17)
LQHNSFPYT

SEQ ID NO: 17194 - protein, 17 aa, Homo sapiens
  Heavy chain CDR3 for antibody 8597 (IGHV4-39)
AGRLTYYFGSGSPSFDY

SEQ ID NO: 17195 - protein, 9 aa, Homo sapiens
  Light chain CDR3 for antibody 8598 (IGKV3-15)
QQYNNWPYT

SEQ ID NO: 17196 - protein, 12 aa, Homo sapiens
  Heavy chain CDR3 for antibody 8598 (IGHV3-33)
ARKQWLVQAFDI

SEQ ID NO: 17197 - protein, 9 aa, Homo sapiens
  Light chain CDR3 for antibody 8599 (IGKV1-39)
QQGFSTPWT

SEQ ID NO: 17198 - protein, 18 aa, Homo sapiens
  Heavy chain CDR3 for antibody 8599 (IGHV4-59)
AREGHYYTSGSYYKAFDY

SEQ ID NO: 17199 - protein, 10 aa, Homo sapiens
  Light chain CDR3 for antibody 8600 (IGKV1-9)
QQLDSYPMYT

SEQ ID NO: 17200 - protein, 18 aa, Homo sapiens
  Heavy chain CDR3 for antibody 8600 (IGHV1-46)
ARDGDYVWGSYRSDWFDP

SEQ ID NO: 17201 - protein, 9 aa, Homo sapiens
  Light chain CDR3 for antibody 8601 (IGKV1-39)
QQSYSTPFT

SEQ ID NO: 17202 - protein, 11 aa, Homo sapiens
  Heavy chain CDR3 for antibody 8601 (IGHV3-33)
ARGSGSYAFDY

SEQ ID NO: 17203 - protein, 9 aa, Homo sapiens
  Light chain CDR3 for antibody 8602 (IGKV2-30)
MQGTHWPLT

SEQ ID NO: 17204 - protein, 14 aa, Homo sapiens
  Heavy chain CDR3 for antibody 8602 (IGHV3-23)
AKGGDVLTGYYPDY

SEQ ID NO: 17205 - protein, 9 aa, Homo sapiens
  Light chain CDR3 for antibody 8603 (IGKV3D-20)
QQYGRSPRT

SEQ ID NO: 17206 - protein, 13 aa, Homo sapiens
  Heavy chain CDR3 for antibody 8603 (IGHV4-61)
ASRYSSGWYPFDY

SEQ ID NO: 17207 - protein, 9 aa, Homo sapiens
  Light chain CDR3 for antibody 8604 (IGKV2D-28)
MQALQTPFT

SEQ ID NO: 17208 - protein, 12 aa, Homo sapiens
  Heavy chain CDR3 for antibody 8604 (IGHV3-33)
AREGDILTGYSL

SEQ ID NO: 17209 - protein, 9 aa, Homo sapiens
  Light chain CDR3 for antibody 8605 (IGKV1-6)
LQDYKSPFT

SEQ ID NO: 17210 - protein, 14 aa, Homo sapiens
  Heavy chain CDR3 for antibody 8605 (IGHV3-33)
ARRGSPLRPSHLDV

SEQ ID NO: 17211 - protein, 11 aa, Homo sapiens
  Light chain CDR3 for antibody 8606 (IGKV3-11)
QQRSNWPPTWT

SEQ ID NO: 17212 - protein, 21 aa, Homo sapiens
  Heavy chain CDR3 for antibody 8606 (IGHV3-33)
ARKRLYDILTGYYKAYYGMDV

SEQ ID NO: 17213 - protein, 9 aa, Homo sapiens
  Light chain CDR3 for antibody 8607 (IGKV6-21)
HQSSSLPHT

SEQ ID NO: 17214 - protein, 14 aa, Homo sapiens
  Heavy chain CDR3 for antibody 8607 (IGHV3-20)
ARDGGSSCYDYFDY

SEQ ID NO: 17215 - protein, 9 aa, Homo sapiens
  Light chain CDR3 for antibody 8608 (IGKV1-9)
QQLNGYPFT

SEQ ID NO: 17216 - protein, 9 aa, Homo sapiens
  Heavy chain CDR3 for antibody 8608 (IGHV3-30)
ARDYFHYDY

SEQ ID NO: 17217 - protein, 8 aa, Homo sapiens
  Light chain CDR3 for antibody 8609 (IGKV6-21)
HQSSSLYT

SEQ ID NO: 17218 - protein, 13 aa, Homo sapiens
  Heavy chain CDR3 for antibody 8609 (IGHV4-39)
ARHEVMVRGVFDY

SEQ ID NO: 17219 - protein, 9 aa, Homo sapiens
  Light chain CDR3 for antibody 8610 (IGKV4-1)
QQYYSTPWT

SEQ ID NO: 17220 - protein, 13 aa, Homo sapiens
  Heavy chain CDR3 for antibody 8610 (IGHV3-33)
ARKAYGDYFYFDY

SEQ ID NO: 17221 - protein, 9 aa, Homo sapiens
  Light chain CDR3 for antibody 8611 (IGKV1D-16)
QQYDSYPWT

SEQ ID NO: 17222 - protein, 18 aa, Homo sapiens
  Heavy chain CDR3 for antibody 8611 (IGHV3-13)
ARDYYGSGSLYYYYGMDV

SEQ ID NO: 17223 - protein, 10 aa, Homo sapiens
  Light chain CDR3 for antibody 8612 (IGKV1-9)
QQSYSTPMYT

SEQ ID NO: 17224 - protein, 13 aa, Homo sapiens
  Heavy chain CDR3 for antibody 8612 (IGHV4-39)
ARHVLLWFGEFDP

SEQ ID NO: 17225 - protein, 9 aa, Homo sapiens
  Light chain CDR3 for antibody 8613 (IGKV3D-11)
QQRSNWPYT

SEQ ID NO: 17226 - protein, 10 aa, Homo sapiens
  Heavy chain CDR3 for antibody 8613 (IGHV3-30)
AREWYGGMDV

SEQ ID NO: 17227 - protein, 8 aa, Homo sapiens
  Light chain CDR3 for antibody 8614 (IGKV1-5)
QQYNSYWT

SEQ ID NO: 17228 - protein, 12 aa, Homo sapiens
  Heavy chain CDR3 for antibody 8614 (IGHV3-33)
ARDRAYRGSLDY

SEQ ID NO: 17229 - protein, 9 aa, Homo sapiens
  Light chain CDR3 for antibody 8615 (IGKV1-9)
QQLNSYPYT

SEQ ID NO: 17230 - protein, 17 aa, Homo sapiens
  Heavy chain CDR3 for antibody 8615 (IGHV3-33)
ARELRYFDWLLSDAFDI

SEQ ID NO: 17231 - protein, 10 aa, Homo sapiens
  Light chain CDR3 for antibody 8616 (IGKV1-39)
QQSYSTPMYT

SEQ ID NO: 17232 - protein, 11 aa, Homo sapiens
  Heavy chain CDR3 for antibody 8616 (IGHV3-33)
AREAANWGFDY

SEQ ID NO: 17233 - protein, 8 aa, Homo sapiens
  Light chain CDR3 for antibody 8617 (IGKV1-5)
QQYNSYYT

SEQ ID NO: 17234 - protein, 10 aa, Homo sapiens
  Heavy chain CDR3 for antibody 8617 (IGHV3-23)
AKDHWGDFDY

SEQ ID NO: 17235 - protein, 9 aa, Homo sapiens
  Light chain CDR3 for antibody 8618 (IGKV6-21)
QQFNNYPHT

SEQ ID NO: 17236 - protein, 20 aa, Homo sapiens
  Heavy chain CDR3 for antibody 8618 (IGHV4-59)
ARDRGYDILTGYYGYYGMDV

SEQ ID NO: 17237 - protein, 9 aa, Homo sapiens
  Light chain CDR3 for antibody 8619 (IGKV1-16)
QHYNDYPFT

SEQ ID NO: 17238 - protein, 10 aa, Homo sapiens
  Heavy chain CDR3 for antibody 8619 (IGHV3-33)
ARENSTPLDY

SEQ ID NO: 17239 - protein, 9 aa, Homo sapiens
  Light chain CDR3 for antibody 8620 (IGKV1-6)
LQDYKSPFT

SEQ ID NO: 17240 - protein, 12 aa, Homo sapiens
  Heavy chain CDR3 for antibody 8620 (IGHV3-33)
ARKGYDMHAFDI

SEQ ID NO: 17241 - protein, 8 aa, Homo sapiens
  Light chain CDR3 for antibody 8621 (IGKV1D-13)
QQFNNYPT

SEQ ID NO: 17242 - protein, 13 aa, Homo sapiens
  Heavy chain CDR3 for antibody 8621 (IGHV4-39)
ARHPPSRDYGMDV

SEQ ID NO: 17243 - protein, 9 aa, Homo sapiens
  Light chain CDR3 for antibody 8622 (IGKV1-16)
QHYNDYPFT

SEQ ID NO: 17244 - protein, 10 aa, Homo sapiens
  Heavy chain CDR3 for antibody 8622 (IGHV3-23)
AKEQWLVLDY

SEQ ID NO: 17245 - protein, 9 aa, Homo sapiens
  Light chain CDR3 for antibody 8623 (IGKV1-9)
QQLNSYPFT

SEQ ID NO: 17246 - protein, 7 aa, Homo sapiens
  Heavy chain CDR3 for antibody 8623 (IGHV1-46)
AREGGDY

SEQ ID NO: 17247 - protein, 10 aa, Homo sapiens
  Light chain CDR3 for antibody 8624 (IGKV1-39)
QQSYSTPMYT

SEQ ID NO: 17248 - protein, 13 aa, Homo sapiens
  Heavy chain CDR3 for antibody 8624 (IGHV4-39)
ARHEVMIRGVFDY

SEQ ID NO: 17249 - protein, 9 aa, Homo sapiens
  Light chain CDR3 for antibody 8625 (IGKV3-20)
QQYGRSPRT

SEQ ID NO: 17250 - protein, 13 aa, Homo sapiens
  Heavy chain CDR3 for antibody 8625 (IGHV3-33)
ARAFIMVRGVIDY

SEQ ID NO: 17251 - protein, 9 aa, Homo sapiens
  Light chain CDR3 for antibody 8626 (IGKV5-2)
LQHDNFPYT

SEQ ID NO: 17252 - protein, 12 aa, Homo sapiens
  Heavy chain CDR3 for antibody 8626 (IGHV3-33)
ARDIVGTSYFDY

SEQ ID NO: 17253 - protein, 11 aa, Homo sapiens
  Light chain CDR3 for antibody 8627 (IGKV1-39)
QQSYSTPPEYT

SEQ ID NO: 17254 - protein, 18 aa, Homo sapiens
  Heavy chain CDR3 for antibody 8627 (IGHV3-33)
ARDVLRYFDWLSNSYFDY

SEQ ID NO: 17255 - protein, 8 aa, Homo sapiens
  Light chain CDR3 for antibody 8628 (IGKV1D-13)
QQFNNYYT

SEQ ID NO: 17256 - protein, 23 aa, Homo sapiens
  Heavy chain CDR3 for antibody 8628 (IGHV4-59)
ARERTYSDILPGYYEDYYYGMDV

SEQ ID NO: 17257 - protein, 9 aa, Homo sapiens
  Light chain CDR3 for antibody 8629 (IGKV1-6)
LQDYKSPFT

SEQ ID NO: 17258 - protein, 16 aa, Homo sapiens
  Heavy chain CDR3 for antibody 8629 (IGHV3-23)
ARGGRSDWLYYYGMDV

SEQ ID NO: 17259 - protein, 8 aa, Homo sapiens
  Light chain CDR3 for antibody 8630 (IGKV1D-13)
QQFNNYYT

SEQ ID NO: 17260 - protein, 12 aa, Homo sapiens
  Heavy chain CDR3 for antibody 8630 (IGHV1-46)
AREDYDIDGMDV

SEQ ID NO: 17261 - protein, 9 aa, Homo sapiens
  Light chain CDR3 for antibody 8631 (IGKV3-20)
QQYGSSPYT

SEQ ID NO: 17262 - protein, 16 aa, Homo sapiens
  Heavy chain CDR3 for antibody 8631 (IGHV3-33)
ARGEQWLGYYYYGMDV

SEQ ID NO: 17263 - protein, 9 aa, Homo sapiens
  Light chain CDR3 for antibody 8632 (IGKV3-15)
QQYINWPLT

SEQ ID NO: 17264 - protein, 18 aa, Homo sapiens
  Heavy chain CDR3 for antibody 8632 (IGHV3-13)
ARDYYGSGSLYYYYGMDV

SEQ ID NO: 17265 - protein, 9 aa, Homo sapiens
  Light chain CDR3 for antibody 8633 (IGKV1D-13)
QQFNNYPRT

SEQ ID NO: 17266 - protein, 12 aa, Homo sapiens
  Heavy chain CDR3 for antibody 8633 (IGHV3-33)
ARGGIAVDVCDI

SEQ ID NO: 17267 - protein, 9 aa, Homo sapiens
  Light chain CDR3 for antibody 8634 (IGKV1-6)
QQEYNYPLT

SEQ ID NO: 17268 - protein, 13 aa, Homo sapiens
  Heavy chain CDR3 for antibody 8634 (IGHV3-33)
ARAFTMVRGVIDY

SEQ ID NO: 17269 - protein, 8 aa, Homo sapiens
  Light chain CDR3 for antibody 8635 (IGKV1-5)
QQYNSYYT

SEQ ID NO: 17270 - protein, 12 aa, Homo sapiens
  Heavy chain CDR3 for antibody 8635 (IGHV3-13)
AREAGIPDAFDI

SEQ ID NO: 17271 - protein, 9 aa, Homo sapiens
  Light chain CDR3 for antibody 8636 (IGKV1-27)
QKYNSAPYT

SEQ ID NO: 17272 - protein, 20 aa, Homo sapiens
  Heavy chain CDR3 for antibody 8636 (IGHV3-23)
AKDREMAATSHYYYYYGMDV

SEQ ID NO: 17273 - protein, 8 aa, Homo sapiens
  Light chain CDR3 for antibody 8637 (IGKV3-20)
QQYGSSRT

SEQ ID NO: 17274 - protein, 13 aa, Homo sapiens
  Heavy chain CDR3 for antibody 8637 (IGHV4-61)
ASRYSSGWYPFDY

SEQ ID NO: 17275 - protein, 9 aa, Homo sapiens
  Light chain CDR3 for antibody 8638 (IGKV1D-16)
QQYASYPPT

SEQ ID NO: 17276 - protein, 9 aa, Homo sapiens
  Heavy chain CDR3 for antibody 8638 (IGHV4-59)
ARGGASFDY

SEQ ID NO: 17277 - protein, 10 aa, Homo sapiens
  Light chain CDR3 for antibody 8639 (IGKV1-39)
QQSYSTPMYT

SEQ ID NO: 17278 - protein, 14 aa, Homo sapiens
  Heavy chain CDR3 for antibody 8639 (IGHV3-33)
ARTTAAAGPRDFQH

SEQ ID NO: 17279 - protein, 10 aa, Homo sapiens
  Light chain CDR3 for antibody 8640 (IGKV1-9)
QQLDSYPMYT

SEQ ID NO: 17280 - protein, 18 aa, Homo sapiens
  Heavy chain CDR3 for antibody 8640 (IGHV3-33)
ARREGIVGATTYYYGMDV

SEQ ID NO: 17281 - protein, 9 aa, Homo sapiens
  Light chain CDR3 for antibody 8641 (IGKV1D-16)
QQYDSYPWT

SEQ ID NO: 17282 - protein, 16 aa, Homo sapiens
  Heavy chain CDR3 for antibody 8641 (IGHV4-59)
ARDTPYYSGSGRPFDS

SEQ ID NO: 17283 - protein, 9 aa, Homo sapiens
  Light chain CDR3 for antibody 8642 (IGKV3-15)
QQYNNWPLT

SEQ ID NO: 17284 - protein, 12 aa, Homo sapiens
  Heavy chain CDR3 for antibody 8642 (IGHV4-39)
ARHPRYLDAFDI

SEQ ID NO: 17285 - protein, 9 aa, Homo sapiens
  Light chain CDR3 for antibody 8643 (IGKV1-17)
LHSNNYPWT

SEQ ID NO: 17286 - protein, 17 aa, Homo sapiens
  Heavy chain CDR3 for antibody 8643 (IGHV1-18)
ARDEGYDILTGYPHFDY

SEQ ID NO: 17287 - protein, 9 aa, Homo sapiens
  Light chain CDR3 for antibody 8644 (IGKV3D-7)
QQDYKLPLT

SEQ ID NO: 17288 - protein, 15 aa, Homo sapiens
  Heavy chain CDR3 for antibody 8644 (IGHV3-33)
ARAYDLPHYYYGMDV

SEQ ID NO: 17289 - protein, 9 aa, Homo sapiens
  Light chain CDR3 for antibody 8645 (IGKV1-17)
LQHNGYPLT

SEQ ID NO: 17290 - protein, 17 aa, Homo sapiens
  Heavy chain CDR3 for antibody 8645 (IGHV4-39)
ARVLRYFDWLSHDAFDI

SEQ ID NO: 17291 - protein, 10 aa, Homo sapiens
  Light chain CDR3 for antibody 8646 (IGKV1-9)
QQLDSYPMYT

SEQ ID NO: 17292 - protein, 20 aa, Homo sapiens
  Heavy chain CDR3 for antibody 8646 (IGHV3-11)
SRGGATLIRGLIDYYYGMDV

SEQ ID NO: 17293 - protein, 9 aa, Homo sapiens
  Light chain CDR3 for antibody 8647 (IGKV1-6)
LQDYKSPFT

SEQ ID NO: 17294 - protein, 23 aa, Homo sapiens
  Heavy chain CDR3 for antibody 8647 (IGHV3-11)
ARDEGVTMVRGVISYYYYYGMDV

SEQ ID NO: 17295 - protein, 9 aa, Homo sapiens
  Light chain CDR3 for antibody 8648 (IGKV1-27)
QKYNSAPYT

SEQ ID NO: 17296 - protein, 10 aa, Homo sapiens
  Heavy chain CDR3 for antibody 8648 (IGHV4-39)
ARQLGNWFDP

SEQ ID NO: 17297 - protein, 11 aa, Homo sapiens
  Light chain CDR3 for antibody 8649 (IGKV3-11)
QQRSNWPPTWT

SEQ ID NO: 17298 - protein, 9 aa, Homo sapiens
  Heavy chain CDR3 for antibody 8649 (IGHV3-13)
ARDRWYFDL

SEQ ID NO: 17299 - protein, 8 aa, Homo sapiens
  Light chain CDR3 for antibody 8650 (IGKV3D-7)
QQDYNLLT

SEQ ID NO: 17300 - protein, 14 aa, Homo sapiens
  Heavy chain CDR3 for antibody 8650 (IGHV3-33)
VRDAMGATTAWFDP

SEQ ID NO: 17301 - protein, 9 aa, Homo sapiens
  Light chain CDR3 for antibody 8651 (IGKV1-39)
QQSYRTPLT

SEQ ID NO: 17302 - protein, 12 aa, Homo sapiens
  Heavy chain CDR3 for antibody 8651 (IGHV3-33)
ARKGYGLYVLDV

SEQ ID NO: 17303 - protein, 9 aa, Homo sapiens
  Light chain CDR3 for antibody 8652 (IGKV3D-7)
QQDYNLPLT

SEQ ID NO: 17304 - protein, 17 aa, Homo sapiens
  Heavy chain CDR3 for antibody 8652 (IGHV3-23)
AREGYYDILTDYYGMDV

SEQ ID NO: 17305 - protein, 10 aa, Homo sapiens
  Light chain CDR3 for antibody 8653 (IGKV1-39)
QQSYSTPMYT

SEQ ID NO: 17306 - protein, 18 aa, Homo sapiens
  Heavy chain CDR3 for antibody 8653 (IGHV3-33)
ARDRDRYGSGTYPDAIDI

SEQ ID NO: 17307 - protein, 10 aa, Homo sapiens
  Light chain CDR3 for antibody 8654 (IGKV3-15)
QQYNNWPPYT

SEQ ID NO: 17308 - protein, 10 aa, Homo sapiens
  Heavy chain CDR3 for antibody 8654 (IGHV3-23)
AKEQWLVLDY

SEQ ID NO: 17309 - protein, 10 aa, Homo sapiens
  Light chain CDR3 for antibody 8655 (IGKV3-11)
QQRSNWPPYT

SEQ ID NO: 17310 - protein, 18 aa, Homo sapiens
  Heavy chain CDR3 for antibody 8655 (IGHV3-23)
ARREGITLIFYYYYGMDV

SEQ ID NO: 17311 - protein, 9 aa, Homo sapiens
  Light chain CDR3 for antibody 8656 (IGKV1-9)
QQSYSTPIT

SEQ ID NO: 17312 - protein, 9 aa, Homo sapiens
  Heavy chain CDR3 for antibody 8656 (IGHV3-30)
ARGRVSLDV

SEQ ID NO: 17313 - protein, 9 aa, Homo sapiens
  Light chain CDR3 for antibody 8657 (IGKV1-17)
LHSNNYPWT

SEQ ID NO: 17314 - protein, 11 aa, Homo sapiens
  Heavy chain CDR3 for antibody 8657 (IGHV3-33)
ARDRSSGPFDY

SEQ ID NO: 17315 - protein, 10 aa, Homo sapiens
  Light chain CDR3 for antibody 8658 (IGKV3-11)
QQRSNWPIFT

SEQ ID NO: 17316 - protein, 16 aa, Homo sapiens
  Heavy chain CDR3 for antibody 8658 (IGHV3-30)
ARDIAVAGHVYYGMDV

SEQ ID NO: 17317 - protein, 9 aa, Homo sapiens
  Light chain CDR3 for antibody 8659 (IGKV3D-7)
QQDYNLPIT

SEQ ID NO: 17318 - protein, 18 aa, Homo sapiens
  Heavy chain CDR3 for antibody 8659 (IGHV3-33)
VRDRERYGSGSYPDAFDI

SEQ ID NO: 17319 - protein, 9 aa, Homo sapiens
  Light chain CDR3 for antibody 8660 (IGKV2-30)
MQGTHWPLT

SEQ ID NO: 17320 - protein, 16 aa, Homo sapiens
  Heavy chain CDR3 for antibody 8660 (IGHV3-20)
ARDSSSLDYYYYGMDV

SEQ ID NO: 17321 - protein, 9 aa, Homo sapiens
  Light chain CDR3 for antibody 8661 (IGKV1-9)
QQLNSYPLT

SEQ ID NO: 17322 - protein, 15 aa, Homo sapiens
  Heavy chain CDR3 for antibody 8661 (IGHV3-11)
ARDRAVAGTVHAFDI

SEQ ID NO: 17323 - protein, 9 aa, Homo sapiens
  Light chain CDR3 for antibody 8662 (IGKV1D-16)
QQYYSYPRT

SEQ ID NO: 17324 - protein, 15 aa, Homo sapiens
  Heavy chain CDR3 for antibody 8662 (IGHV3-74)
ARGSGSHYHYYGMDV

SEQ ID NO: 17325 - protein, 8 aa, Homo sapiens
  Light chain CDR3 for antibody 8663 (IGKV3-20)
QQYGRSFT

SEQ ID NO: 17326 - protein, 14 aa, Homo sapiens
  Heavy chain CDR3 for antibody 8663 (IGHV4-39)
ARRGVVVPPGGMDV

SEQ ID NO: 17327 - protein, 10 aa, Homo sapiens
  Light chain CDR3 for antibody 8664 (IGKV3-20)
QQYGRSPPVT

SEQ ID NO: 17328 - protein, 13 aa, Homo sapiens
  Heavy chain CDR3 for antibody 8664 (IGHV3-33)
ARRATLVRGVFDP

SEQ ID NO: 17329 - protein, 9 aa, Homo sapiens
  Light chain CDR3 for antibody 8665 (IGKV1-16)
QHYNDYPFT

SEQ ID NO: 17330 - protein, 12 aa, Homo sapiens
  Heavy chain CDR3 for antibody 8665 (IGHV3-66)
ARKGYDMHEFDI

SEQ ID NO: 17331 - protein, 9 aa, Homo sapiens
  Light chain CDR3 for antibody 8666 (IGKV2D-28)
MQALQTPPT

SEQ ID NO: 17332 - protein, 14 aa, Homo sapiens
  Heavy chain CDR3 for antibody 8666 (IGHV3-33)
ARDKTYPLSYGMDV

SEQ ID NO: 17333 - protein, 6 aa, Homo sapiens
  Light chain CDR3 for antibody 8667 (IGKV3-20)
QQYGST

SEQ ID NO: 17334 - protein, 17 aa, Homo sapiens
  Heavy chain CDR3 for antibody 8667 (IGHV3-33)
ARVYYDILTGYSPAFDI

SEQ ID NO: 17335 - protein, 9 aa, Homo sapiens
  Light chain CDR3 for antibody 8668 (IGKV1-33)
QQYDNLPFT

SEQ ID NO: 17336 - protein, 18 aa, Homo sapiens
  Heavy chain CDR3 for antibody 8668 (IGHV3-33)
ARGLLWFGVSYYYYGMDV

SEQ ID NO: 17337 - protein, 9 aa, Homo sapiens
  Light chain CDR3 for antibody 8669 (IGKV1-9)
QQLISYPLT

SEQ ID NO: 17338 - protein, 20 aa, Homo sapiens
  Heavy chain CDR3 for antibody 8669 (IGHV3-66)
ARRMVRGVKKTYYYYYGLDV

SEQ ID NO: 17339 - protein, 9 aa, Homo sapiens
  Light chain CDR3 for antibody 8670 (IGKV1-27)
QKYNSAPYT

SEQ ID NO: 17340 - protein, 13 aa, Homo sapiens
  Heavy chain CDR3 for antibody 8670 (IGHV1-24)
ATGYSINWYEFDY

SEQ ID NO: 17341 - protein, 9 aa, Homo sapiens
  Light chain CDR3 for antibody 8671 (IGKV1D-16)
LQDYNYPFT

SEQ ID NO: 17342 - protein, 12 aa, Homo sapiens
  Heavy chain CDR3 for antibody 8671 (IGHV3-23)
AKEYDILAGYFH

SEQ ID NO: 17343 - protein, 9 aa, Homo sapiens
  Light chain CDR3 for antibody 8672 (IGKV3D-20)
QQYGSSPYT

SEQ ID NO: 17344 - protein, 11 aa, Homo sapiens
  Heavy chain CDR3 for antibody 8672 (IGHV1-24)
ATREYSSSCDY

SEQ ID NO: 17345 - protein, 9 aa, Homo sapiens
  Light chain CDR3 for antibody 8673 (IGKV1-17)
LQHNSYPRT

SEQ ID NO: 17346 - protein, 16 aa, Homo sapiens
  Heavy chain CDR3 for antibody 8673 (IGHV3-33)
ARAYYYGSGSYPHFQH

SEQ ID NO: 17347 - protein, 9 aa, Homo sapiens
  Light chain CDR3 for antibody 8674 (IGKV1D-17)
LQHNSYPYT

SEQ ID NO: 17348 - protein, 13 aa, Homo sapiens
  Heavy chain CDR3 for antibody 8674 (IGHV3-33)
ARGELLWFGEFAC

SEQ ID NO: 17349 - protein, 9 aa, Homo sapiens
  Light chain CDR3 for antibody 8675 (IGKV3-20)
QQYGSSPYT

SEQ ID NO: 17350 - protein, 12 aa, Homo sapiens
  Heavy chain CDR3 for antibody 8675 (IGHV1-46)
ARGLIGDHAVDI

SEQ ID NO: 17351 - protein, 11 aa, Homo sapiens
  Light chain CDR3 for antibody 8676 (IGKV3-11)
QQRSNWPPTWT

SEQ ID NO: 17352 - protein, 12 aa, Homo sapiens
  Heavy chain CDR3 for antibody 8676 (IGHV1-18)
AGVLFDGDYSDY

SEQ ID NO: 17353 - protein, 9 aa, Homo sapiens
  Light chain CDR3 for antibody 8677 (IGKV3D-7)
QQDYNLPWT

SEQ ID NO: 17354 - protein, 11 aa, Homo sapiens
  Heavy chain CDR3 for antibody 8677 (IGHV4-59)
VRERGYYGMDV

SEQ ID NO: 17355 - protein, 9 aa, Homo sapiens
  Light chain CDR3 for antibody 8678 (IGKV2-30)
MQGTHWPLT

SEQ ID NO: 17356 - protein, 16 aa, Homo sapiens
  Heavy chain CDR3 for antibody 8678 (IGHV3-33)
ARGDDILTHQYYGVDV

SEQ ID NO: 17357 - protein, 9 aa, Homo sapiens
  Light chain CDR3 for antibody 8679 (IGKV3-20)
QQYGSSPYT

SEQ ID NO: 17358 - protein, 20 aa, Homo sapiens
  Heavy chain CDR3 for antibody 8679 (IGHV3-33)
AKGMGGLRYFDWPHYYGMDV

SEQ ID NO: 17359 - protein, 9 aa, Homo sapiens
  Light chain CDR3 for antibody 8680 (IGKV1-33)
QQYDNLPFT

SEQ ID NO: 17360 - protein, 17 aa, Homo sapiens
  Heavy chain CDR3 for antibody 8680 (IGHV3-33)
ARESLKLGIYYYYGMDV

SEQ ID NO: 17361 - protein, 9 aa, Homo sapiens
  Light chain CDR3 for antibody 8681 (IGKV3D-7)
QQDYEFPLT

SEQ ID NO: 17362 - protein, 12 aa, Homo sapiens
  Heavy chain CDR3 for antibody 8681 (IGHV1-46)
ARGLTGDHAVDI

SEQ ID NO: 17363 - protein, 9 aa, Homo sapiens
  Light chain CDR3 for antibody 8682 (IGKV1-33)
QQYDNLPFT

SEQ ID NO: 17364 - protein, 15 aa, Homo sapiens
  Heavy chain CDR3 for antibody 8682 (IGHV3-33)
VCVLYDYGDYVGFDY

SEQ ID NO: 17365 - protein, 10 aa, Homo sapiens
  Light chain CDR3 for antibody 8683 (IGKV1-16)
QQSYSTPMYT

SEQ ID NO: 17366 - protein, 10 aa, Homo sapiens
  Heavy chain CDR3 for antibody 8683 (IGHV3-23)
AKDHYGDYPY

SEQ ID NO: 17367 - protein, 9 aa, Homo sapiens
  Light chain CDR3 for antibody 8684 (IGKV1-9)
QQLISYPLT

SEQ ID NO: 17368 - protein, 18 aa, Homo sapiens
  Heavy chain CDR3 for antibody 8684 (IGHV3-23)
AKPDYYGSGSYYNVPFDY

SEQ ID NO: 17369 - protein, 8 aa, Homo sapiens
  Light chain CDR3 for antibody 8685 (IGKV3D-7)
QQDYNLLT

SEQ ID NO: 17370 - protein, 17 aa, Homo sapiens
  Heavy chain CDR3 for antibody 8685 (IGHV4-59)
ARDRELLWFGEFGGMDV

SEQ ID NO: 17371 - protein, 9 aa, Homo sapiens
  Light chain CDR3 for antibody 8686 (IGKV1-27)
QKYNSAPYT

SEQ ID NO: 17372 - protein, 17 aa, Homo sapiens
  Heavy chain CDR3 for antibody 8686 (IGHV3-23)
AKGGSFYSSGWYDAFDI

SEQ ID NO: 17373 - protein, 8 aa, Homo sapiens
  Light chain CDR3 for antibody 8687 (IGKV1-5)
QQYNSYWT

SEQ ID NO: 17374 - protein, 16 aa, Homo sapiens
  Heavy chain CDR3 for antibody 8687 (IGHV4-59)
ARYSGSYYGDYYGMDV

SEQ ID NO: 17375 - protein, 10 aa, Homo sapiens
  Light chain CDR3 for antibody 8688 (IGKV1-6)
LQDYNYPMYT

SEQ ID NO: 17376 - protein, 15 aa, Homo sapiens
  Heavy chain CDR3 for antibody 8688 (IGHV3-30)
ARGAMVRGVDYGMDV

SEQ ID NO: 17377 - protein, 9 aa, Homo sapiens
  Light chain CDR3 for antibody 8689 (IGKV1D-16)
QQYHSYPYT

SEQ ID NO: 17378 - protein, 9 aa, Homo sapiens
  Heavy chain CDR3 for antibody 8689 (IGHV3-33)
ARGSGWSDY

SEQ ID NO: 17379 - protein, 8 aa, Homo sapiens
  Light chain CDR3 for antibody 8690 (IGKV1-5)
QQYNSYYT

SEQ ID NO: 17380 - protein, 17 aa, Homo sapiens
  Heavy chain CDR3 for antibody 8690 (IGHV4-39)
ARQGWYYGSGSSLLFDY

SEQ ID NO: 17381 - protein, 9 aa, Homo sapiens
  Light chain CDR3 for antibody 8691 (IGKV1-27)
QKYNSAPYT

SEQ ID NO: 17382 - protein, 19 aa, Homo sapiens
  Heavy chain CDR3 for antibody 8691 (IGHV5-51)
ARHGEKGKRITMVRGSLDV

SEQ ID NO: 17383 - protein, 9 aa, Homo sapiens
  Light chain CDR3 for antibody 8692 (IGKV3D-20)
QQYGSSPYT

SEQ ID NO: 17384 - protein, 14 aa, Homo sapiens
  Heavy chain CDR3 for antibody 8692 (IGHV3-23)
AKGGDVLTGYYPDY

SEQ ID NO: 17385 - protein, 9 aa, Homo sapiens
  Light chain CDR3 for antibody 8693 (IGKV1-17)
LHSNNYPWT

SEQ ID NO: 17386 - protein, 18 aa, Homo sapiens
  Heavy chain CDR3 for antibody 8693 (IGHV4-59)
AREGDYVWGSYRPNWFDP

SEQ ID NO: 17387 - protein, 8 aa, Homo sapiens
  Light chain CDR3 for antibody 8694 (IGKV3D-7)
QQDYNLLT

SEQ ID NO: 17388 - protein, 12 aa, Homo sapiens
  Heavy chain CDR3 for antibody 8694 (IGHV3-h)
AREDYYYYGMDV

SEQ ID NO: 17389 - protein, 9 aa, Homo sapiens
  Light chain CDR3 for antibody 8695 (IGKV1-9)
QHYNDYPFT

SEQ ID NO: 17390 - protein, 12 aa, Homo sapiens
  Heavy chain CDR3 for antibody 8695 (IGHV4-39)
ARHGSGSSYFDY

SEQ ID NO: 17391 - protein, 9 aa, Homo sapiens
  Light chain CDR3 for antibody 8696 (IGKV1-9)
QQVKSYPYT

SEQ ID NO: 17392 - protein, 11 aa, Homo sapiens
  Heavy chain CDR3 for antibody 8696 (IGHV4-4)
AREAYYYGLDV

SEQ ID NO: 17393 - protein, 9 aa, Homo sapiens
  Light chain CDR3 for antibody 8697 (IGKV3-20)
QLYGSSPYT

SEQ ID NO: 17394 - protein, 17 aa, Homo sapiens
  Heavy chain CDR3 for antibody 8697 (IGHV1-18)
ARERYYGSGNYKYNMDV

SEQ ID NO: 17395 - protein, 9 aa, Homo sapiens
  Light chain CDR3 for antibody 8698 (IGKV6-21)
HQSSSLPYT

SEQ ID NO: 17396 - protein, 16 aa, Homo sapiens
  Heavy chain CDR3 for antibody 8698 (IGHV1-18)
TRGTFYYGSGSSFFDY

SEQ ID NO: 17397 - protein, 10 aa, Homo sapiens
  Light chain CDR3 for antibody 8699 (IGKV3-15)
QQYNNWPPIT

SEQ ID NO: 17398 - protein, 17 aa, Homo sapiens
  Heavy chain CDR3 for antibody 8699 (IGHV3-33)
VREGGLLWVGELSLFDY

SEQ ID NO: 17399 - protein, 8 aa, Homo sapiens
  Light chain CDR3 for antibody 8700 (IGKV3D-7)
QQDYNLLT

SEQ ID NO: 17400 - protein, 12 aa, Homo sapiens
  Heavy chain CDR3 for antibody 8700 (IGHV3-23)
AKEGLGSDYESY

SEQ ID NO: 17401 - protein, 9 aa, Homo sapiens
  Light chain CDR3 for antibody 8701 (IGKV3-11)
QQRINWPWT

SEQ ID NO: 17402 - protein, 13 aa, Homo sapiens
  Heavy chain CDR3 for antibody 8701 (IGHV4-28)
ARKGATGYYGMDV

SEQ ID NO: 17403 - protein, 9 aa, Homo sapiens
  Light chain CDR3 for antibody 8702 (IGKV3-15)
QQYNNWPLT

SEQ ID NO: 17404 - protein, 14 aa, Homo sapiens
  Heavy chain CDR3 for antibody 8702 (IGHV1-24)
ATWLPLYYYYGMDV

SEQ ID NO: 17405 - protein, 9 aa, Homo sapiens
  Light chain CDR3 for antibody 8703 (IGKV3D-20)
LQHNGYPLT

SEQ ID NO: 17406 - protein, 17 aa, Homo sapiens
  Heavy chain CDR3 for antibody 8703 (IGHV3-33)
ARGYCSRTSCYLYYFDY

SEQ ID NO: 17407 - protein, 8 aa, Homo sapiens
  Light chain CDR3 for antibody 8704 (IGKV3-15)
QQYNNWPT

SEQ ID NO: 17408 - protein, 17 aa, Homo sapiens
  Heavy chain CDR3 for antibody 8704 (IGHV3-33)
ARERYYGSGSYYNWFDP

SEQ ID NO: 17409 - protein, 11 aa, Homo sapiens
  Light chain CDR3 for antibody 8705 (IGKV3-11)
QQRSNWPPTWT

SEQ ID NO: 17410 - protein, 17 aa, Homo sapiens
  Heavy chain CDR3 for antibody 8705 (IGHV3-33)
ARGEQWLGYYYYYGMDV

SEQ ID NO: 17411 - protein, 10 aa, Homo sapiens
  Light chain CDR3 for antibody 8706 (IGKV3-11)
QQRSNWPIFT

SEQ ID NO: 17412 - protein, 19 aa, Homo sapiens
  Heavy chain CDR3 for antibody 8706 (IGHV4-39)
ARQGDVLRYFDWLLGAFDI

SEQ ID NO: 17413 - protein, 11 aa, Homo sapiens
  Light chain CDR3 for antibody 8707 (IGKV3-11)
QQRSNWPPTWT

SEQ ID NO: 17414 - protein, 12 aa, Homo sapiens
  Heavy chain CDR3 for antibody 8707 (IGHV3-33)
ARGYFGSGYAHF

SEQ ID NO: 17415 - protein, 9 aa, Homo sapiens
  Light chain CDR3 for antibody 8708 (IGKV1-17)
LQHNSYPYT

SEQ ID NO: 17416 - protein, 16 aa, Homo sapiens
  Heavy chain CDR3 for antibody 8708 (IGHV3-48)
TRRRQWLAGFDWYFDL

SEQ ID NO: 17417 - protein, 11 aa, Homo sapiens
  Light chain CDR3 for antibody 8709 (IGKV3-11)
QQRSNWPPTWT

SEQ ID NO: 17418 - protein, 15 aa, Homo sapiens
  Heavy chain CDR3 for antibody 8709 (IGHV3-33)
VCVLYDYGDYVGFDY

SEQ ID NO: 17419 - protein, 8 aa, Homo sapiens
  Light chain CDR3 for antibody 8710 (IGKV1-5)
QQYNSYST

SEQ ID NO: 17420 - protein, 11 aa, Homo sapiens
  Heavy chain CDR3 for antibody 8710 (IGHV4-59)
TRDRGLGSFDY

SEQ ID NO: 17421 - protein, 8 aa, Homo sapiens
  Light chain CDR3 for antibody 8711 (IGKV3-15)
QQYNNWPT

SEQ ID NO: 17422 - protein, 17 aa, Homo sapiens
  Heavy chain CDR3 for antibody 8711 (IGHV1-18)
ARDEGYDILTGYPHFDY

SEQ ID NO: 17423 - protein, 9 aa, Homo sapiens
  Light chain CDR3 for antibody 8712 (IGKV1-9)
QQLISYPLT

SEQ ID NO: 17424 - protein, 15 aa, Homo sapiens
  Heavy chain CDR3 for antibody 8712 (IGHV3-33)
ARRICSGGSCSLFDY

SEQ ID NO: 17425 - protein, 9 aa, Homo sapiens
  Light chain CDR3 for antibody 8713 (IGKV2D-28)
MQALQTPPT

SEQ ID NO: 17426 - protein, 16 aa, Homo sapiens
  Heavy chain CDR3 for antibody 8713 (IGHV3-33)
ARDGSMVRRIHDAFDF

SEQ ID NO: 17427 - protein, 9 aa, Homo sapiens
  Light chain CDR3 for antibody 8714 (IGKV6-21)
HQSTSLPFT

SEQ ID NO: 17428 - protein, 17 aa, Homo sapiens
  Heavy chain CDR3 for antibody 8714 (IGHV1-8)
ARGDYYGSGSPYWYFDL

SEQ ID NO: 17429 - protein, 9 aa, Homo sapiens
  Light chain CDR3 for antibody 8715 (IGKV1-6)
LQDFHYPWT

SEQ ID NO: 17430 - protein, 15 aa, Homo sapiens
  Heavy chain CDR3 for antibody 8715 (IGHV3-33)
ARDRGWKAPGYGMDV

SEQ ID NO: 17431 - protein, 9 aa, Homo sapiens
  Light chain CDR3 for antibody 8716 (IGKV1-17)
LQHNSYPYT

SEQ ID NO: 17432 - protein, 17 aa, Homo sapiens
  Heavy chain CDR3 for antibody 8716 (IGHV3-23)
AKERNWNDGYYYYGMDV

SEQ ID NO: 17433 - protein, 9 aa, Homo sapiens
  Light chain CDR3 for antibody 8717 (IGKV6-21)
HQSYSLPHT

SEQ ID NO: 17434 - protein, 14 aa, Homo sapiens
  Heavy chain CDR3 for antibody 8717 (IGHV3-33)
ARASSGSSYWYFDL

SEQ ID NO: 17435 - protein, 9 aa, Homo sapiens
  Light chain CDR3 for antibody 8718 (IGKV1-6)
LQDYKSPFT

SEQ ID NO: 17436 - protein, 20 aa, Homo sapiens
  Heavy chain CDR3 for antibody 8718 (IGHV3-23)
AKGMGGLRYFDWPHYYGMDV

SEQ ID NO: 17437 - protein, 9 aa, Homo sapiens
  Light chain CDR3 for antibody 8719 (IGKV1D-16)
LQHNSYPYT

SEQ ID NO: 17438 - protein, 14 aa, Homo sapiens
  Heavy chain CDR3 for antibody 8719 (IGHV1-18)
ARDQPTVPSGYFDY

SEQ ID NO: 17439 - protein, 9 aa, Homo sapiens
  Light chain CDR3 for antibody 8720 (IGKV1-6)
LQDYKSPFT

SEQ ID NO: 17440 - protein, 18 aa, Homo sapiens
  Heavy chain CDR3 for antibody 8720 (IGHV4-39)
ARQYYFGSGNYYRGWFDP

SEQ ID NO: 17441 - protein, 9 aa, Homo sapiens
  Light chain CDR3 for antibody 8721 (IGKV5-2)
LQHDNFPYT

SEQ ID NO: 17442 - protein, 13 aa, Homo sapiens
  Heavy chain CDR3 for antibody 8721 (IGHV1-24)
ATLHTYFYGEFAY

SEQ ID NO: 17443 - protein, 8 aa, Homo sapiens
  Light chain CDR3 for antibody 8722 (IGKV2D-28)
MQALQTPT

SEQ ID NO: 17444 - protein, 14 aa, Homo sapiens
  Heavy chain CDR3 for antibody 8722 (IGHV3-23)
AKSRIVGALYYFDY

SEQ ID NO: 17445 - protein, 11 aa, Homo sapiens
  Light chain CDR3 for antibody 8723 (IGKV3-11)
QQRSNWPPTWT

SEQ ID NO: 17446 - protein, 12 aa, Homo sapiens
  Heavy chain CDR3 for antibody 8723 (IGHV3-33)
ARDLVGATPFDY

SEQ ID NO: 17447 - protein, 9 aa, Homo sapiens
  Light chain CDR3 for antibody 8724 (IGKV3-15)
QQYNNWPLT

SEQ ID NO: 17448 - protein, 23 aa, Homo sapiens
  Heavy chain CDR3 for antibody 8724 (IGHV4-34)
ARERTYSDILPGYYEDYYYGMDV

SEQ ID NO: 17449 - protein, 9 aa, Homo sapiens
  Light chain CDR3 for antibody 8725 (IGKV1-27)
QKYNSAPLT

SEQ ID NO: 17450 - protein, 9 aa, Homo sapiens
  Heavy chain CDR3 for antibody 8725 (IGHV3-33)
ARDGLGIDY

SEQ ID NO: 17451 - protein, 9 aa, Homo sapiens
  Light chain CDR3 for antibody 8726 (IGKV1-9)
QQFNSYPWT

SEQ ID NO: 17452 - protein, 11 aa, Homo sapiens
  Heavy chain CDR3 for antibody 8726 (IGHV3-20)
AREGAVAGIDY

SEQ ID NO: 17453 - protein, 10 aa, Homo sapiens
  Light chain CDR3 for antibody 8727 (IGKV3-20)
QQYGRSPPVT

SEQ ID NO: 17454 - protein, 13 aa, Homo sapiens
  Heavy chain CDR3 for antibody 8727 (IGHV4-34)
ASNFYYYYYGMDV

SEQ ID NO: 17455 - protein, 9 aa, Homo sapiens
  Light chain CDR3 for antibody 8728 (IGKV3-11)
QQRINWPWT

SEQ ID NO: 17456 - protein, 10 aa, Homo sapiens
  Heavy chain CDR3 for antibody 8728 (IGHV3-30)
ARDGLESFDY

SEQ ID NO: 17457 - protein, 10 aa, Homo sapiens
  Light chain CDR3 for antibody 8729 (IGKV1-17)
LQHNSYPMYT

SEQ ID NO: 17458 - protein, 14 aa, Homo sapiens
  Heavy chain CDR3 for antibody 8729 (IGHV3-33)
VRDQGSMVRGGGDY

SEQ ID NO: 17459 - protein, 9 aa, Homo sapiens
  Light chain CDR3 for antibody 8730 (IGKV1D-13)
QQFNNYPYT

SEQ ID NO: 17460 - protein, 13 aa, Homo sapiens
  Heavy chain CDR3 for antibody 8730 (IGHV3-33)
ARDYGDYLNWFDP

SEQ ID NO: 17461 - protein, 9 aa, Homo sapiens
  Light chain CDR3 for antibody 8731 (IGKV1-6)
LQDYKSPFT

SEQ ID NO: 17462 - protein, 12 aa, Homo sapiens
  Heavy chain CDR3 for antibody 8731 (IGHV3-33)
AREGDILTGYSL

SEQ ID NO: 17463 - protein, 9 aa, Homo sapiens
  Light chain CDR3 for antibody 8732 (IGKV1D-16)
QQYNSYPYT

SEQ ID NO: 17464 - protein, 13 aa, Homo sapiens
  Heavy chain CDR3 for antibody 8732 (IGHV3-23)
ARAFFMVRGVMAY

SEQ ID NO: 17465 - protein, 9 aa, Homo sapiens
  Light chain CDR3 for antibody 8733 (IGKV3-20)
QQYGSSPYT

SEQ ID NO: 17466 - protein, 20 aa, Homo sapiens
  Heavy chain CDR3 for antibody 8733 (IGHV4-59)
ARDRGYDILTGYYGYYGMDV

SEQ ID NO: 17467 - protein, 9 aa, Homo sapiens
  Light chain CDR3 for antibody 8734 (IGKV1-6)
LQDYKSPFT

SEQ ID NO: 17468 - protein, 12 aa, Homo sapiens
  Heavy chain CDR3 for antibody 8734 (IGHV3-h)
AREDYYYYGMDV

SEQ ID NO: 17469 - protein, 10 aa, Homo sapiens
  Light chain CDR3 for antibody 8735 (IGKV3-20)
QQYGSSPPYT

SEQ ID NO: 17470 - protein, 13 aa, Homo sapiens
  Heavy chain CDR3 for antibody 8735 (IGHV3-23)
AKDRGYSSTSTAY

SEQ ID NO: 17471 - protein, 9 aa, Homo sapiens
  Light chain CDR3 for antibody 8736 (IGKV2-30)
MQGTHWPLT

SEQ ID NO: 17472 - protein, 11 aa, Homo sapiens
  Heavy chain CDR3 for antibody 8736 (IGHV3-33)
ARGTTVTHFDY

SEQ ID NO: 17473 - protein, 9 aa, Homo sapiens
  Light chain CDR3 for antibody 8737 (IGKV5-2)
LQHDNFPWT

SEQ ID NO: 17474 - protein, 15 aa, Homo sapiens
  Heavy chain CDR3 for antibody 8737 (IGHV4-59)
ARDGHGNWGSGTFDY

SEQ ID NO: 17475 - protein, 9 aa, Homo sapiens
  Light chain CDR3 for antibody 8738 (IGKV1-39)
QQSYRTPLT

SEQ ID NO: 17476 - protein, 12 aa, Homo sapiens
  Heavy chain CDR3 for antibody 8738 (IGHV4-61)
ARVDSSGWYFDY

SEQ ID NO: 17477 - protein, 9 aa, Homo sapiens
  Light chain CDR3 for antibody 8739 (IGKV1-9)
QQLISYPLT

SEQ ID NO: 17478 - protein, 13 aa, Homo sapiens
  Heavy chain CDR3 for antibody 8739 (IGHV3-21)
ARDSTLVRGVFPY

SEQ ID NO: 17479 - protein, 9 aa, Homo sapiens
  Light chain CDR3 for antibody 8740 (IGKV3-20)
QQYGSSPRT

SEQ ID NO: 17480 - protein, 13 aa, Homo sapiens
  Heavy chain CDR3 for antibody 8740 (IGHV1-18)
ARDYGDYLNWFDP

SEQ ID NO: 17481 - protein, 8 aa, Homo sapiens
  Light chain CDR3 for antibody 8741 (IGKV3-20)
QQYGSSLT

SEQ ID NO: 17482 - protein, 13 aa, Homo sapiens
  Heavy chain CDR3 for antibody 8741 (IGHV3-33)
ARKAYGDYFYFDY

SEQ ID NO: 17483 - protein, 9 aa, Homo sapiens
  Light chain CDR3 for antibody 8742 (IGKV1-6)
LQDFHYPWT

SEQ ID NO: 17484 - protein, 9 aa, Homo sapiens
  Heavy chain CDR3 for antibody 8742 (IGHV4-59)
AREGGSGSL

SEQ ID NO: 17485 - protein, 9 aa, Homo sapiens
  Light chain CDR3 for antibody 8743 (IGKV1-9)
QQLNTYPWT

SEQ ID NO: 17486 - protein, 19 aa, Homo sapiens
  Heavy chain CDR3 for antibody 8743 (IGHV3-64)
ARRFSGYSGYDHYYYGMDV

SEQ ID NO: 17487 - protein, 9 aa, Homo sapiens
  Light chain CDR3 for antibody 8744 (IGKV1-9)
QQLISYPLT

SEQ ID NO: 17488 - protein, 16 aa, Homo sapiens
  Heavy chain CDR3 for antibody 8744 (IGHV1-18)
ARYFDWLLRDYYGMDV

SEQ ID NO: 17489 - protein, 9 aa, Homo sapiens
  Light chain CDR3 for antibody 8745 (IGKV6-21)
HQSSSLPIT

SEQ ID NO: 17490 - protein, 13 aa, Homo sapiens
  Heavy chain CDR3 for antibody 8745 (IGHV3-11)
ARGGDVLTGYYDY

SEQ ID NO: 17491 - protein, 10 aa, Homo sapiens
  Light chain CDR3 for antibody 8746 (IGKV3-20)
QQYGRSPPVT

SEQ ID NO: 17492 - protein, 18 aa, Homo sapiens
  Heavy chain CDR3 for antibody 8746 (IGHV1-18)
ARDRYYYDSGSYYYGMDV

SEQ ID NO: 17493 - protein, 9 aa, Homo sapiens
  Light chain CDR3 for antibody 8747 (IGKV6-21)
HQSSSLPYT

SEQ ID NO: 17494 - protein, 16 aa, Homo sapiens
  Heavy chain CDR3 for antibody 8747 (IGHV3-23)
AKEGRVLRYFDWFWDY

SEQ ID NO: 17495 - protein, 8 aa, Homo sapiens
  Light chain CDR3 for antibody 8748 (IGKV1-5)
QQYNSYYT

SEQ ID NO: 17496 - protein, 13 aa, Homo sapiens
  Heavy chain CDR3 for antibody 8748 (IGHV4-61)
ASRYSSGWYPFDY

SEQ ID NO: 17497 - protein, 9 aa, Homo sapiens
  Light chain CDR3 for antibody 8749 (IGKV1-16)
QQYNSYPYT

SEQ ID NO: 17498 - protein, 20 aa, Homo sapiens
  Heavy chain CDR3 for antibody 8749 (IGHV1-69)
AREGVAAVGRVYYFYYGMDV

SEQ ID NO: 17499 - protein, 10 aa, Homo sapiens
  Light chain CDR3 for antibody 8750 (IGKV3-20)
QQYGRSPPVT

SEQ ID NO: 17500 - protein, 18 aa, Homo sapiens
  Heavy chain CDR3 for antibody 8750 (IGHV3-33)
ARREGIVGATTYYYGMDV

SEQ ID NO: 17501 - protein, 9 aa, Homo sapiens
  Light chain CDR3 for antibody 8751 (IGKV1-33)
QQYDNLPFT

SEQ ID NO: 17502 - protein, 10 aa, Homo sapiens
  Heavy chain CDR3 for antibody 8751 (IGHV3-23)
AKEQWLVLDY

SEQ ID NO: 17503 - protein, 9 aa, Homo sapiens
  Light chain CDR3 for antibody 8752 (IGKV2-30)
MQGTHWPLT

SEQ ID NO: 17504 - protein, 16 aa, Homo sapiens
  Heavy chain CDR3 for antibody 8752 (IGHV4-59)
ARFYFGSGSYYWYFDL

SEQ ID NO: 17505 - protein, 9 aa, Homo sapiens
  Light chain CDR3 for antibody 8753 (IGKV2-30)
MQGTHWPLT

SEQ ID NO: 17506 - protein, 15 aa, Homo sapiens
  Heavy chain CDR3 for antibody 8753 (IGHV4-39)
ARRSKYSSAWYPFDY

SEQ ID NO: 17507 - protein, 9 aa, Homo sapiens
  Light chain CDR3 for antibody 8754 (IGKV1-39)
QQSYRTPLT

SEQ ID NO: 17508 - protein, 15 aa, Homo sapiens
  Heavy chain CDR3 for antibody 8754 (IGHV3-33)
AKDRNSGYDWGGFDY

SEQ ID NO: 17509 - protein, 9 aa, Homo sapiens
  Light chain CDR3 for antibody 8755 (IGKV1-17)
LHHHSYPYT

SEQ ID NO: 17510 - protein, 18 aa, Homo sapiens
  Heavy chain CDR3 for antibody 8755 (IGHV4-59)
AREGDYVWGSYRPNWFDP

SEQ ID NO: 17511 - protein, 9 aa, Homo sapiens
  Light chain CDR3 for antibody 8756 (IGKV1-17)
LQHNSYPYT

SEQ ID NO: 17512 - protein, 14 aa, Homo sapiens
  Heavy chain CDR3 for antibody 8756 (IGHV1-18)
ARGLRYFDWLSQDY

SEQ ID NO: 17513 - protein, 10 aa, Homo sapiens
  Light chain CDR3 for antibody 8757 (IGKV3-15)
QQYNNWPPYT

SEQ ID NO: 17514 - protein, 17 aa, Homo sapiens
  Heavy chain CDR3 for antibody 8757 (IGHV3-66)
ARVQYDILTGYSPYFDN

SEQ ID NO: 17515 - protein, 9 aa, Homo sapiens
  Light chain CDR3 for antibody 8758 (IGKV3D-20)
QQHGNSPLT

SEQ ID NO: 17516 - protein, 13 aa, Homo sapiens
  Heavy chain CDR3 for antibody 8758 (IGHV4-59)
ARDAGYSSSWFDY

SEQ ID NO: 17517 - protein, 9 aa, Homo sapiens
  Light chain CDR3 for antibody 8759 (IGKV1-9)
QQLKSYLYT

SEQ ID NO: 17518 - protein, 14 aa, Homo sapiens
  Heavy chain CDR3 for antibody 8759 (IGHV4-39)
ARRGVVVPPGGMDV

SEQ ID NO: 17519 - protein, 9 aa, Homo sapiens
  Light chain CDR3 for antibody 8760 (IGKV3D-7)
QQDYNLPYT

SEQ ID NO: 17520 - protein, 9 aa, Homo sapiens
  Heavy chain CDR3 for antibody 8760 (IGHV4-39)
AKEQLLFDY

SEQ ID NO: 17521 - protein, 6 aa, Homo sapiens
  Light chain CDR3 for antibody 8761 (IGKV3-20)
QQYGST

SEQ ID NO: 17522 - protein, 17 aa, Homo sapiens
  Heavy chain CDR3 for antibody 8761 (IGHV3-33)
ARGYCSRTSCYLYYFDY

SEQ ID NO: 17523 - protein, 9 aa, Homo sapiens
  Light chain CDR3 for antibody 8762 (IGKV4-1)
QQYYSTPWT

SEQ ID NO: 17524 - protein, 13 aa, Homo sapiens
  Heavy chain CDR3 for antibody 8762 (IGHV3-33)
ARDWGYSHGYFDY

SEQ ID NO: 17525 - protein, 9 aa, Homo sapiens
  Light chain CDR3 for antibody 8763 (IGKV1D-13)
QRFNNYLYT

SEQ ID NO: 17526 - protein, 15 aa, Homo sapiens
  Heavy chain CDR3 for antibody 8763 (IGHV3-33)
ARAYDLPHYYYGMDV

SEQ ID NO: 17527 - protein, 9 aa, Homo sapiens
  Light chain CDR3 for antibody 8764 (IGKV1-6)
LQDYNYPYT

SEQ ID NO: 17528 - protein, 14 aa, Homo sapiens
  Heavy chain CDR3 for antibody 8764 (IGHV3-33)
ARDYYDSGSYYFDY

SEQ ID NO: 17529 - protein, 9 aa, Homo sapiens
  Light chain CDR3 for antibody 8765 (IGKV1-9)
QQLKSYLYT

SEQ ID NO: 17530 - protein, 12 aa, Homo sapiens
  Heavy chain CDR3 for antibody 8765 (IGHV4-39)
ARHGSGSSYFDY

SEQ ID NO: 17531 - protein, 9 aa, Homo sapiens
  Light chain CDR3 for antibody 8766 (IGKV1-17)
LQHNGYPLT

SEQ ID NO: 17532 - protein, 11 aa, Homo sapiens
  Heavy chain CDR3 for antibody 8766 (IGHV3-33)
ARDQGGSSFDY

SEQ ID NO: 17533 - protein, 9 aa, Homo sapiens
  Light chain CDR3 for antibody 8767 (IGKV3D-7)
QQDYNLPLT

SEQ ID NO: 17534 - protein, 11 aa, Homo sapiens
  Heavy chain CDR3 for antibody 8767 (IGHV1-24)
ATYFGSGSLDY

SEQ ID NO: 17535 - protein, 10 aa, Homo sapiens
  Light chain CDR3 for antibody 8768 (IGKV1-9)
QQLDSYPMYT

SEQ ID NO: 17536 - protein, 12 aa, Homo sapiens
  Heavy chain CDR3 for antibody 8768 (IGHV3-33)
ARDRAYRGSLDY

SEQ ID NO: 17537 - protein, 9 aa, Homo sapiens
  Light chain CDR3 for antibody 8769 (IGKV6-21)
HQSSSLPYT

SEQ ID NO: 17538 - protein, 13 aa, Homo sapiens
  Heavy chain CDR3 for antibody 8769 (IGHV3-33)
ARDGYSYGPYFDY

SEQ ID NO: 17539 - protein, 9 aa, Homo sapiens
  Light chain CDR3 for antibody 8770 (IGKV1-6)
LQDYNYPWT

SEQ ID NO: 17540 - protein, 16 aa, Homo sapiens
  Heavy chain CDR3 for antibody 8770 (IGHV3-48)
TRRRQWLAGFDWYFDL

SEQ ID NO: 17541 - protein, 9 aa, Homo sapiens
  Light chain CDR3 for antibody 8771 (IGKV1-6)
LQDYNYPFT

SEQ ID NO: 17542 - protein, 13 aa, Homo sapiens
  Heavy chain CDR3 for antibody 8771 (IGHV3-33)
ARAFTMVRGVIDY

SEQ ID NO: 17543 - protein, 9 aa, Homo sapiens
  Light chain CDR3 for antibody 8772 (IGKV1-9)
QQGNTYSRT

SEQ ID NO: 17544 - protein, 12 aa, Homo sapiens
  Heavy chain CDR3 for antibody 8772 (IGHV1-18)
ARILFYGDYFDY

SEQ ID NO: 17545 - protein, 9 aa, Homo sapiens
  Light chain CDR3 for antibody 8773 (IGKV2D-28)
MQALQTPPT

SEQ ID NO: 17546 - protein, 14 aa, Homo sapiens
  Heavy chain CDR3 for antibody 8773 (IGHV3-20)
ARDGGSTSFDWFDP

SEQ ID NO: 17547 - protein, 9 aa, Homo sapiens
  Light chain CDR3 for antibody 8774 (IGKV3-20)
QQYGRSPRT

SEQ ID NO: 17548 - protein, 4 aa, Homo sapiens
  Heavy chain CDR3 for antibody 8774 (IGHV1-f)
ALDV

SEQ ID NO: 17549 - protein, 9 aa, Homo sapiens
  Light chain CDR3 for antibody 8775 (IGKV1-17)
LQHSTYPWT

SEQ ID NO: 17550 - protein, 20 aa, Homo sapiens
  Heavy chain CDR3 for antibody 8775 (IGHV3-21)
ARDRGYNDILTGYSWRYFDL

SEQ ID NO: 17551 - protein, 9 aa, Homo sapiens
  Light chain CDR3 for antibody 8776 (IGKV1-39)
QQSYRTPLT

SEQ ID NO: 17552 - protein, 12 aa, Homo sapiens
  Heavy chain CDR3 for antibody 8776 (IGHV1-18)
ARRDGSGTSFDY

SEQ ID NO: 17553 - protein, 9 aa, Homo sapiens
  Light chain CDR3 for antibody 8777 (IGKV1D-13)
QQFNNYPHT

SEQ ID NO: 17554 - protein, 12 aa, Homo sapiens
  Heavy chain CDR3 for antibody 8777 (IGHV3-33)
AREGIAVAGVDP

SEQ ID NO: 17555 - protein, 9 aa, Homo sapiens
  Light chain CDR3 for antibody 8778 (IGKV5-2)
LQHDNFPYT

SEQ ID NO: 17556 - protein, 13 aa, Homo sapiens
  Heavy chain CDR3 for antibody 8778 (IGHV3-33)
ARRGSGSPDGFDI

SEQ ID NO: 17557 - protein, 9 aa, Homo sapiens
  Light chain CDR3 for antibody 8779 (IGKV1-16)
QHYNDYPFT

SEQ ID NO: 17558 - protein, 13 aa, Homo sapiens
  Heavy chain CDR3 for antibody 8779 (IGHV3-66)
ANTGDSYYYGFYV

SEQ ID NO: 17559 - protein, 10 aa, Homo sapiens
  Light chain CDR3 for antibody 8780 (IGKV3-11)
QQRSNWPALT

SEQ ID NO: 17560 - protein, 20 aa, Homo sapiens
  Heavy chain CDR3 for antibody 8780 (IGHV3-23)
AKDREMAATSHYYYYYGMDV

SEQ ID NO: 17561 - protein, 9 aa, Homo sapiens
  Light chain CDR3 for antibody 8781 (IGKV1-6)
LQDYNYPYT

SEQ ID NO: 17562 - protein, 15 aa, Homo sapiens
  Heavy chain CDR3 for antibody 8781 (IGHV3-20)
ARDSSSLDYYYGMDV

SEQ ID NO: 17563 - protein, 9 aa, Homo sapiens
  Light chain CDR3 for antibody 8782 (IGKV5-2)
LQHDNFPYT

SEQ ID NO: 17564 - protein, 12 aa, Homo sapiens
  Heavy chain CDR3 for antibody 8782 (IGHV3-33)
ARKKWEEGAFDI

SEQ ID NO: 17565 - protein, 8 aa, Homo sapiens
  Light chain CDR3 for antibody 8783 (IGKV3D-7)
QQDYNLLT

SEQ ID NO: 17566 - protein, 14 aa, Homo sapiens
  Heavy chain CDR3 for antibody 8783 (IGHV3-33)
VRDQGSMVRGGGDY

SEQ ID NO: 17567 - protein, 9 aa, Homo sapiens
  Light chain CDR3 for antibody 8784 (IGKV5-2)
LQHDNFPWT

SEQ ID NO: 17568 - protein, 18 aa, Homo sapiens
  Heavy chain CDR3 for antibody 8784 (IGHV4-59)
ARVTIVRGVTIGRGWFDP

SEQ ID NO: 17569 - protein, 8 aa, Homo sapiens
  Light chain CDR3 for antibody 8785 (IGKV3-11)
QQRSNWLT

SEQ ID NO: 17570 - protein, 14 aa, Homo sapiens
  Heavy chain CDR3 for antibody 8785 (IGHV3-33)
ARDWNDVYYYGMDV

SEQ ID NO: 17571 - protein, 9 aa, Homo sapiens
  Light chain CDR3 for antibody 8786 (IGKV3-15)
QQYNNWPIT

SEQ ID NO: 17572 - protein, 16 aa, Homo sapiens
  Heavy chain CDR3 for antibody 8786 (IGHV3-23)
AKDLRYFDWSLYAFDI

SEQ ID NO: 17573 - protein, 9 aa, Homo sapiens
  Light chain CDR3 for antibody 8787 (IGKV2D-28)
MQALQTPPT

SEQ ID NO: 17574 - protein, 14 aa, Homo sapiens
  Heavy chain CDR3 for antibody 8787 (IGHV3-33)
ARDWNDVYYYGMDV

SEQ ID NO: 17575 - protein, 8 aa, Homo sapiens
  Light chain CDR3 for antibody 8788 (IGKV3-15)
QQYNNWPT

SEQ ID NO: 17576 - protein, 20 aa, Homo sapiens
  Heavy chain CDR3 for antibody 8788 (IGHV3-20)
ARDLCSSTSCYGYYYYGMDV

SEQ ID NO: 17577 - protein, 9 aa, Homo sapiens
  Light chain CDR3 for antibody 8789 (IGKV1-9)
QQLISYPLT

SEQ ID NO: 17578 - protein, 17 aa, Homo sapiens
  Heavy chain CDR3 for antibody 8789 (IGHV4-39)
ARVLRYFDWLSHDAFDI

SEQ ID NO: 17579 - protein, 9 aa, Homo sapiens
  Light chain CDR3 for antibody 8790 (IGKV1-16)
QQYNSYPLT

SEQ ID NO: 17580 - protein, 15 aa, Homo sapiens
  Heavy chain CDR3 for antibody 8790 (IGHV3-33)
ASDRGWKAPGYGMDV

SEQ ID NO: 17581 - protein, 9 aa, Homo sapiens
  Light chain CDR3 for antibody 8791 (IGKV3D-7)
QQDYTLPLT

SEQ ID NO: 17582 - protein, 11 aa, Homo sapiens
  Heavy chain CDR3 for antibody 8791 (IGHV4-59)
AREDYGVPFDY

SEQ ID NO: 17583 - protein, 8 aa, Homo sapiens
  Light chain CDR3 for antibody 8792 (IGKV1D-13)
QQFNNYPT

SEQ ID NO: 17584 - protein, 21 aa, Homo sapiens
  Heavy chain CDR3 for antibody 8792 (IGHV3-33)
ARKRLYDILTGYYKAYYGMDV

SEQ ID NO: 17585 - protein, 9 aa, Homo sapiens
  Light chain CDR3 for antibody 8793 (IGKV1-6)
QQLNSYPLT

SEQ ID NO: 17586 - protein, 12 aa, Homo sapiens
  Heavy chain CDR3 for antibody 8793 (IGHV3-13)
ARDRGYSGYFDY

SEQ ID NO: 17587 - protein, 6 aa, Homo sapiens
  Light chain CDR3 for antibody 8794 (IGKV3-20)
QQYGST

SEQ ID NO: 17588 - protein, 24 aa, Homo sapiens
  Heavy chain CDR3 for antibody 8794 (IGHV3-20)
ARGRITMVRGVIINPLDYYNGMDV

SEQ ID NO: 17589 - protein, 9 aa, Homo sapiens
  Light chain CDR3 for antibody 8795 (IGKV1-17)
LQHNSYPRT

SEQ ID NO: 17590 - protein, 12 aa, Homo sapiens
  Heavy chain CDR3 for antibody 8795 (IGHV3-33)
ARKAYALYVLDV

SEQ ID NO: 17591 - protein, 9 aa, Homo sapiens
  Light chain CDR3 for antibody 8796 (IGKV3-11)
QQRINWPWT

SEQ ID NO: 17592 - protein, 16 aa, Homo sapiens
  Heavy chain CDR3 for antibody 8796 (IGHV4-59)
ARGRYFEWLLGDVLDI

SEQ ID NO: 17593 - protein, 10 aa, Homo sapiens
  Light chain CDR3 for antibody 8797 (IGKV1-39)
QQSYSTPMYT

SEQ ID NO: 17594 - protein, 15 aa, Homo sapiens
  Heavy chain CDR3 for antibody 8797 (IGHV3-33)
ARGYYYGSGSFPVDY

SEQ ID NO: 17595 - protein, 10 aa, Homo sapiens
  Light chain CDR3 for antibody 8798 (IGKV1-39)
QQSYSTPMYT

SEQ ID NO: 17596 - protein, 13 aa, Homo sapiens
  Heavy chain CDR3 for antibody 8798 (IGHV3-21)
ARDSTLVRGVFPY

SEQ ID NO: 17597 - protein, 8 aa, Homo sapiens
  Light chain CDR3 for antibody 8799 (IGKV1D-13)
QQFNNYPT

SEQ ID NO: 17598 - protein, 20 aa, Homo sapiens
  Heavy chain CDR3 for antibody 8799 (IGHV3-23)
AKDREMAATSHYYYYYGMDV

SEQ ID NO: 17599 - protein, 9 aa, Homo sapiens
  Light chain CDR3 for antibody 8800 (IGKV1-17)
LQHNGYPLT

SEQ ID NO: 17600 - protein, 16 aa, Homo sapiens
  Heavy chain CDR3 for antibody 8800 (IGHV3-33)
ARGYDMLTGDYHGMDV

SEQ ID NO: 17601 - protein, 9 aa, Homo sapiens
  Light chain CDR3 for antibody 8801 (IGKV2D-28)
MQALQTPPT

SEQ ID NO: 17602 - protein, 13 aa, Homo sapiens
  Heavy chain CDR3 for antibody 8801 (IGHV3-33)
ARRYRSGWYPFDY

SEQ ID NO: 17603 - protein, 9 aa, Homo sapiens
  Light chain CDR3 for antibody 8802 (IGKV5-2)
LQHDNFPYT

SEQ ID NO: 17604 - protein, 12 aa, Homo sapiens
  Heavy chain CDR3 for antibody 8802 (IGHV3-33)
ARDGPVAGLFDY

SEQ ID NO: 17605 - protein, 9 aa, Homo sapiens
  Light chain CDR3 for antibody 8803 (IGKV1-39)
QQSYRTPLT

SEQ ID NO: 17606 - protein, 17 aa, Homo sapiens
  Heavy chain CDR3 for antibody 8803 (IGHV3-33)
AREDYDILTGYPFYFDY

SEQ ID NO: 17607 - protein, 8 aa, Homo sapiens
  Light chain CDR3 for antibody 8804 (IGKV3D-7)
QQDYNLLT

SEQ ID NO: 17608 - protein, 12 aa, Homo sapiens
  Heavy chain CDR3 for antibody 8804 (IGHV3-23)
AKESLYTPTDDY

SEQ ID NO: 17609 - protein, 8 aa, Homo sapiens
  Light chain CDR3 for antibody 8805 (IGKV1-5)
QQYNSYWT

SEQ ID NO: 17610 - protein, 14 aa, Homo sapiens
  Heavy chain CDR3 for antibody 8805 (IGHV3-33)
VRDAMGATTAWFDP

SEQ ID NO: 17611 - protein, 10 aa, Homo sapiens
  Light chain CDR3 for antibody 8806 (IGKV3-15)
QQYNNWPPYT

SEQ ID NO: 17612 - protein, 23 aa, Homo sapiens
  Heavy chain CDR3 for antibody 8806 (IGHV4-59)
ARERTYSDILPGYYEDYYYGMDV

SEQ ID NO: 17613 - protein, 9 aa, Homo sapiens
  Light chain CDR3 for antibody 8807 (IGKV3D-7)
QQDYNLPHT

SEQ ID NO: 17614 - protein, 12 aa, Homo sapiens
  Heavy chain CDR3 for antibody 8807 (IGHV3-33)
ARAGMGAPYFDY

SEQ ID NO: 17615 - protein, 10 aa, Homo sapiens
  Light chain CDR3 for antibody 8808 (IGKV1-9)
QQLDSYPMYT

SEQ ID NO: 17616 - protein, 14 aa, Homo sapiens
  Heavy chain CDR3 for antibody 8808 (IGHV3-13)
VRDQGSMVRGGGDY

SEQ ID NO: 17617 - protein, 8 aa, Homo sapiens
  Light chain CDR3 for antibody 8809 (IGKV1D-13)
QQFNNYPT

SEQ ID NO: 17618 - protein, 18 aa, Homo sapiens
  Heavy chain CDR3 for antibody 8809 (IGHV1-46)
ARDLTGRTENYYYYGMDV

SEQ ID NO: 17619 - protein, 8 aa, Homo sapiens
  Light chain CDR3 for antibody 8810 (IGKV1-5)
QQYNSYWT

SEQ ID NO: 17620 - protein, 17 aa, Homo sapiens
  Heavy chain CDR3 for antibody 8810 (IGHV3-33)
ARGGGYENDHYYYGMDV

SEQ ID NO: 17621 - protein, 9 aa, Homo sapiens
  Light chain CDR3 for antibody 8811 (IGKV1-5)
QQGNTYSRT

SEQ ID NO: 17622 - protein, 14 aa, Homo sapiens
  Heavy chain CDR3 for antibody 8811 (IGHV3-74)
ARAISGSSYWYFDL

SEQ ID NO: 17623 - protein, 9 aa, Homo sapiens
  Light chain CDR3 for antibody 8812 (IGKV3-20)
QQYGSSIFT

SEQ ID NO: 17624 - protein, 11 aa, Homo sapiens
  Heavy chain CDR3 for antibody 8812 (IGHV3-23)
ARDRSSGPFDY

SEQ ID NO: 17625 - protein, 9 aa, Homo sapiens
  Light chain CDR3 for antibody 8813 (IGKV1-39)
QQSYRTPLT

SEQ ID NO: 17626 - protein, 13 aa, Homo sapiens
  Heavy chain CDR3 for antibody 8813 (IGHV4-34)
ASNFYYYYYGMDV

SEQ ID NO: 17627 - protein, 8 aa, Homo sapiens
  Light chain CDR3 for antibody 8814 (IGKV3-20)
QQYGRSFT

SEQ ID NO: 17628 - protein, 14 aa, Homo sapiens
  Heavy chain CDR3 for antibody 8814 (IGHV1-46)
ARRGIVGALDAFDI

SEQ ID NO: 17629 - protein, 8 aa, Homo sapiens
  Light chain CDR3 for antibody 8815 (IGKV1-5)
QQYNSYWT

SEQ ID NO: 17630 - protein, 13 aa, Homo sapiens
  Heavy chain CDR3 for antibody 8815 (IGHV1-18)
ARSITMVRGVIGY

SEQ ID NO: 17631 - protein, 9 aa, Homo sapiens
  Light chain CDR3 for antibody 8816 (IGKV3-11)
QQRSNWMYT

SEQ ID NO: 17632 - protein, 13 aa, Homo sapiens
  Heavy chain CDR3 for antibody 8816 (IGHV3-23)
AKDRGGSYSYFDF

SEQ ID NO: 17633 - protein, 9 aa, Homo sapiens
  Light chain CDR3 for antibody 8817 (IGKV2-30)
MQGTHWPLT

SEQ ID NO: 17634 - protein, 14 aa, Homo sapiens
  Heavy chain CDR3 for antibody 8817 (IGHV3-33)
ARDGYDFLTGPFDY

SEQ ID NO: 17635 - protein, 9 aa, Homo sapiens
  Light chain CDR3 for antibody 8818 (IGKV3-15)
QQYNNWPLT

SEQ ID NO: 17636 - protein, 18 aa, Homo sapiens
  Heavy chain CDR3 for antibody 8818 (IGHV3-33)
ARERGYYGSDIYPAAFDI

SEQ ID NO: 17637 - protein, 9 aa, Homo sapiens
  Light chain CDR3 for antibody 8819 (IGKV1-27)
QKYNSAPYT

SEQ ID NO: 17638 - protein, 17 aa, Homo sapiens
  Heavy chain CDR3 for antibody 8819 (IGHV3-15)
TTERYPRRYYYYFGMDV

SEQ ID NO: 17639 - protein, 9 aa, Homo sapiens
  Light chain CDR3 for antibody 8820 (IGKV1-9)
QQLNSYPWT

SEQ ID NO: 17640 - protein, 10 aa, Homo sapiens
  Heavy chain CDR3 for antibody 8820 (IGHV3-33)
ARDGSGSYPI

SEQ ID NO: 17641 - protein, 11 aa, Homo sapiens
  Light chain CDR3 for antibody 8821 (IGKV3-11)
QQRSNWPPMYT

SEQ ID NO: 17642 - protein, 11 aa, Homo sapiens
  Heavy chain CDR3 for antibody 8821 (IGHV4-59)
AREMGHDTFDI

SEQ ID NO: 17643 - protein, 9 aa, Homo sapiens
  Light chain CDR3 for antibody 8822 (IGKV2D-28)
MQALQTPPT

SEQ ID NO: 17644 - protein, 11 aa, Homo sapiens
  Heavy chain CDR3 for antibody 8822 (IGHV3-33)
ARARYTTGLDY

SEQ ID NO: 17645 - protein, 10 aa, Homo sapiens
  Light chain CDR3 for antibody 8823 (IGKV3-11)
QQRSNWPTWT

SEQ ID NO: 17646 - protein, 17 aa, Homo sapiens
  Heavy chain CDR3 for antibody 8823 (IGHV3-33)
ARQGVLLWFGELYYFDY

SEQ ID NO: 17647 - protein, 8 aa, Homo sapiens
  Light chain CDR3 for antibody 8824 (IGKV1D-13)
QQFNNYPT

SEQ ID NO: 17648 - protein, 12 aa, Homo sapiens
  Heavy chain CDR3 for antibody 8824 (IGHV3-33)
AREGDILTGYSL

SEQ ID NO: 17649 - protein, 9 aa, Homo sapiens
  Light chain CDR3 for antibody 8825 (IGKV1-6)
LQDFNYPRT

SEQ ID NO: 17650 - protein, 18 aa, Homo sapiens
  Heavy chain CDR3 for antibody 8825 (IGHV1-46)
ARDLTGRTENYYFYGMDV

SEQ ID NO: 17651 - protein, 9 aa, Homo sapiens
  Light chain CDR3 for antibody 8826 (IGKV1-37)
QRTSNAPYT

SEQ ID NO: 17652 - protein, 13 aa, Homo sapiens
  Heavy chain CDR3 for antibody 8826 (IGHV3-33)
ARDQRYSSGWYDY

SEQ ID NO: 17653 - protein, 9 aa, Homo sapiens
  Light chain CDR3 for antibody 8827 (IGKV2D-24)
TQATQFPHT

SEQ ID NO: 17654 - protein, 14 aa, Homo sapiens
  Heavy chain CDR3 for antibody 8827 (IGHV1-18)
ARRGIVGALDAFDI

SEQ ID NO: 17655 - protein, 9 aa, Homo sapiens
  Light chain CDR3 for antibody 8828 (IGKV1-6)
LQDYNFPFT

SEQ ID NO: 17656 - protein, 20 aa, Homo sapiens
  Heavy chain CDR3 for antibody 8828 (IGHV3-33)
ARDRCSSTSCYGYYYYGMDV

SEQ ID NO: 17657 - protein, 10 aa, Homo sapiens
  Light chain CDR3 for antibody 8829 (IGKV1-27)
QKYNSAPMYT

SEQ ID NO: 17658 - protein, 16 aa, Homo sapiens
  Heavy chain CDR3 for antibody 8829 (IGHV4-59)
ARGRYFEWLLGDVFDI

SEQ ID NO: 17659 - protein, 9 aa, Homo sapiens
  Light chain CDR3 for antibody 8830 (IGKV1-6)
LQDFHYPWT

SEQ ID NO: 17660 - protein, 15 aa, Homo sapiens
  Heavy chain CDR3 for antibody 8830 (IGHV3-33)
ARRGYNDYDPYGMDV

SEQ ID NO: 17661 - protein, 9 aa, Homo sapiens
  Light chain CDR3 for antibody 8831 (IGKV5-2)
LQHDNFPWT

SEQ ID NO: 17662 - protein, 18 aa, Homo sapiens
  Heavy chain CDR3 for antibody 8831 (IGHV1-18)
ARDPTFYYVSGSYYKFDY

SEQ ID NO: 17663 - protein, 9 aa, Homo sapiens
  Light chain CDR3 for antibody 8832 (IGKV1D-16)
LQHNSYPRT

SEQ ID NO: 17664 - protein, 13 aa, Homo sapiens
  Heavy chain CDR3 for antibody 8832 (IGHV3-11)
AREGIAVAGDFDF

SEQ ID NO: 17665 - protein, 9 aa, Homo sapiens
  Light chain CDR3 for antibody 8833 (IGKV1-17)
LQHNSYPPT

SEQ ID NO: 17666 - protein, 9 aa, Homo sapiens
  Heavy chain CDR3 for antibody 8833 (IGHV3-20)
ATWGSAFDV

SEQ ID NO: 17667 - protein, 9 aa, Homo sapiens
  Light chain CDR3 for antibody 8834 (IGKV3-15)
QQYNNWPRT

SEQ ID NO: 17668 - protein, 13 aa, Homo sapiens
  Heavy chain CDR3 for antibody 8834 (IGHV3-23)
AKDRGYSSTSTAY

SEQ ID NO: 17669 - protein, 9 aa, Homo sapiens
  Light chain CDR3 for antibody 8835 (IGKV1-9)
QQLISYPLT

SEQ ID NO: 17670 - protein, 12 aa, Homo sapiens
  Heavy chain CDR3 for antibody 8835 (IGHV3-23)
AKEYDILTGYFH

SEQ ID NO: 17671 - protein, 8 aa, Homo sapiens
  Light chain CDR3 for antibody 8836 (IGKV3-20)
QQYGSSLT

SEQ ID NO: 17672 - protein, 8 aa, Homo sapiens
  Heavy chain CDR3 for antibody 8836 (IGHV3-33)
EKSAGEDV

SEQ ID NO: 17673 - protein, 9 aa, Homo sapiens
  Light chain CDR3 for antibody 8837 (IGKV3-20)
QQYGTSPFP

SEQ ID NO: 17674 - protein, 12 aa, Homo sapiens
  Heavy chain CDR3 for antibody 8837 (IGHV1-18)
ARILFYGDYFDY

SEQ ID NO: 17675 - protein, 8 aa, Homo sapiens
  Light chain CDR3 for antibody 8838 (IGKV3-11)
QQRRNWLT

SEQ ID NO: 17676 - protein, 12 aa, Homo sapiens
  Heavy chain CDR3 for antibody 8838 (IGHV1-8)
ARHGSGSSYFDY

SEQ ID NO: 17677 - protein, 10 aa, Homo sapiens
  Light chain CDR3 for antibody 8839 (IGKV3-11)
QQRSNWPMYT

SEQ ID NO: 17678 - protein, 9 aa, Homo sapiens
  Heavy chain CDR3 for antibody 8839 (IGHV3-30)
ARPNWGFDY

SEQ ID NO: 17679 - protein, 9 aa, Homo sapiens
  Light chain CDR3 for antibody 8840 (IGKV1D-13)
QRFNNYLYT

SEQ ID NO: 17680 - protein, 11 aa, Homo sapiens
  Heavy chain CDR3 for antibody 8840 (IGHV3-33)
ARARYTTGLDY

SEQ ID NO: 17681 - protein, 9 aa, Homo sapiens
  Light chain CDR3 for antibody 8841 (IGKV1-17)
LQHNSFPLT

SEQ ID NO: 17682 - protein, 17 aa, Homo sapiens
  Heavy chain CDR3 for antibody 8841 (IGHV1-18)
ARERYYGSGNYKYNMDV

SEQ ID NO: 17683 - protein, 9 aa, Homo sapiens
  Light chain CDR3 for antibody 8842 (IGKV2D-28)
MQALQTPPT

SEQ ID NO: 17684 - protein, 10 aa, Homo sapiens
  Heavy chain CDR3 for antibody 8842 (IGHV3-23)
AKEQWLVLDY

SEQ ID NO: 17685 - protein, 9 aa, Homo sapiens
  Light chain CDR3 for antibody 8843 (IGKV1-6)
LQDYKSPFT

SEQ ID NO: 17686 - protein, 14 aa, Homo sapiens
  Heavy chain CDR3 for antibody 8843 (IGHV3-33)
ARTTAAAGPRDFQH

SEQ ID NO: 17687 - protein, 8 aa, Homo sapiens
  Light chain CDR3 for antibody 8844 (IGKV6-21)
HQSSSLPT

SEQ ID NO: 17688 - protein, 10 aa, Homo sapiens
  Heavy chain CDR3 for antibody 8844 (IGHV3-30)
ARDGLESFDY

SEQ ID NO: 17689 - protein, 9 aa, Homo sapiens
  Light chain CDR3 for antibody 8845 (IGKV1-39)
QQSYSTPYT

SEQ ID NO: 17690 - protein, 12 aa, Homo sapiens
  Heavy chain CDR3 for antibody 8845 (IGHV3-33)
ARVDTAAPYFDY

SEQ ID NO: 17691 - protein, 9 aa, Homo sapiens
  Light chain CDR3 for antibody 8846 (IGKV1-6)
QQEYNYPLT

SEQ ID NO: 17692 - protein, 17 aa, Homo sapiens
  Heavy chain CDR3 for antibody 8846 (IGHV3-33)
ARGEQWLGYYYYYGMDV

SEQ ID NO: 17693 - protein, 9 aa, Homo sapiens
  Light chain CDR3 for antibody 8847 (IGKV5-2)
LQHDNFPYT

SEQ ID NO: 17694 - protein, 13 aa, Homo sapiens
  Heavy chain CDR3 for antibody 8847 (IGHV3-33)
ARDYGDYLNWFDP

SEQ ID NO: 17695 - protein, 9 aa, Homo sapiens
  Light chain CDR3 for antibody 8848 (IGKV3-11)
QQRSNWPPT

SEQ ID NO: 17696 - protein, 16 aa, Homo sapiens
  Heavy chain CDR3 for antibody 8848 (IGHV3-33)
AKDAFYYGSGSHLFDY

SEQ ID NO: 17697 - protein, 9 aa, Homo sapiens
  Light chain CDR3 for antibody 8849 (IGKV1-9)
QQLHIYPWT

SEQ ID NO: 17698 - protein, 13 aa, Homo sapiens
  Heavy chain CDR3 for antibody 8849 (IGHV3-53)
ARSGSYWGYYFDY

SEQ ID NO: 17699 - protein, 9 aa, Homo sapiens
  Light chain CDR3 for antibody 8850 (IGKV1-39)
QQSYSTPLT

SEQ ID NO: 17700 - protein, 10 aa, Homo sapiens
  Heavy chain CDR3 for antibody 8850 (IGHV3-21)
AREGLRYFDH

SEQ ID NO: 17701 - protein, 9 aa, Homo sapiens
  Light chain CDR3 for antibody 8851 (IGKV3-20)
QQYGSSIFT

SEQ ID NO: 17702 - protein, 13 aa, Homo sapiens
  Heavy chain CDR3 for antibody 8851 (IGHV3-53)
ARSGSYWGYYFDY

SEQ ID NO: 17703 - protein, 9 aa, Homo sapiens
  Light chain CDR3 for antibody 8852 (IGKV1D-16)
QQYDSYPWT

SEQ ID NO: 17704 - protein, 12 aa, Homo sapiens
  Heavy chain CDR3 for antibody 8852 (IGHV1-46)
ARGLTGDHASDI

SEQ ID NO: 17705 - protein, 10 aa, Homo sapiens
  Light chain CDR3 for antibody 8853 (IGKV3-15)
QQYNNWPPYT

SEQ ID NO: 17706 - protein, 14 aa, Homo sapiens
  Heavy chain CDR3 for antibody 8853 (IGHV3-33)
ARQYSYGYPYYFDY

SEQ ID NO: 17707 - protein, 9 aa, Homo sapiens
  Light chain CDR3 for antibody 8854 (IGKV6-21)
HQSTSLPFT

SEQ ID NO: 17708 - protein, 13 aa, Homo sapiens
  Heavy chain CDR3 for antibody 8854 (IGHV3-33)
ARAFTMVRGVIDY

SEQ ID NO: 17709 - protein, 9 aa, Homo sapiens
  Light chain CDR3 for antibody 8855 (IGKV3-11)
QQRSNWPPT

SEQ ID NO: 17710 - protein, 19 aa, Homo sapiens
  Heavy chain CDR3 for antibody 8855 (IGHV3-64)
ARRFSGYSGYDHYYYGMDV

SEQ ID NO: 17711 - protein, 9 aa, Homo sapiens
  Light chain CDR3 for antibody 8856 (IGKV1-39)
QQSYRTPLT

SEQ ID NO: 17712 - protein, 17 aa, Homo sapiens
  Heavy chain CDR3 for antibody 8856 (IGHV3-33)
ARENDILTGSYYYGMDV

SEQ ID NO: 17713 - protein, 9 aa, Homo sapiens
  Light chain CDR3 for antibody 8857 (IGKV6-21)
HQSSSLPYT

SEQ ID NO: 17714 - protein, 9 aa, Homo sapiens
  Heavy chain CDR3 for antibody 8857 (IGHV3-33)
AREYKGFDY

SEQ ID NO: 17715 - protein, 9 aa, Homo sapiens
  Light chain CDR3 for antibody 8858 (IGKV1-27)
QKYNSAPYT

SEQ ID NO: 17716 - protein, 12 aa, Homo sapiens
  Heavy chain CDR3 for antibody 8858 (IGHV3-23)
AKEGIVGVPFDY

SEQ ID NO: 17717 - protein, 9 aa, Homo sapiens
  Light chain CDR3 for antibody 8859 (IGKV3D-7)
QQDYSFPLT

SEQ ID NO: 17718 - protein, 9 aa, Homo sapiens
  Heavy chain CDR3 for antibody 8859 (IGHV3-30)
ARDYFHYDY

SEQ ID NO: 17719 - protein, 9 aa, Homo sapiens
  Light chain CDR3 for antibody 8860 (IGKV1-27)
QKYNSAPYT

SEQ ID NO: 17720 - protein, 17 aa, Homo sapiens
  Heavy chain CDR3 for antibody 8860 (IGHV3-23)
AKGNYGSGSYYNGDFQH

SEQ ID NO: 17721 - protein, 9 aa, Homo sapiens
  Light chain CDR3 for antibody 8861 (IGKV1-6)
LQDYKSPFT

SEQ ID NO: 17722 - protein, 12 aa, Homo sapiens
  Heavy chain CDR3 for antibody 8861 (IGHV1-18)
ARILFYGDYFDY

SEQ ID NO: 17723 - protein, 8 aa, Homo sapiens
  Light chain CDR3 for antibody 8862 (IGKV3-15)
QQYNNWPT

SEQ ID NO: 17724 - protein, 18 aa, Homo sapiens
  Heavy chain CDR3 for antibody 8862 (IGHV3-33)
ARDEYYGSGIYYNYGMDV

SEQ ID NO: 17725 - protein, 9 aa, Homo sapiens
  Light chain CDR3 for antibody 8863 (IGKV1-9)
QQVKSYPYT

SEQ ID NO: 17726 - protein, 17 aa, Homo sapiens
  Heavy chain CDR3 for antibody 8863 (IGHV1-46)
AREDYVWGSYRSNWFDP

SEQ ID NO: 17727 - protein, 9 aa, Homo sapiens
  Light chain CDR3 for antibody 8864 (IGKV1D-16)
QQYHSYPYT

SEQ ID NO: 17728 - protein, 18 aa, Homo sapiens
  Heavy chain CDR3 for antibody 8864 (IGHV3-23)
AKDGRSGSYDYYYYGMDV

SEQ ID NO: 17729 - protein, 9 aa, Homo sapiens
  Light chain CDR3 for antibody 8865 (IGKV1D-13)
QQFNNYPHT

SEQ ID NO: 17730 - protein, 12 aa, Homo sapiens
  Heavy chain CDR3 for antibody 8865 (IGHV3-23)
AKGAVVTAIFDY

SEQ ID NO: 17731 - protein, 10 aa, Homo sapiens
  Light chain CDR3 for antibody 8866 (IGKV1-16)
QQLNSFLMYT

SEQ ID NO: 17732 - protein, 13 aa, Homo sapiens
  Heavy chain CDR3 for antibody 8866 (IGHV4-34)
ASNFYYYYYGMDV

SEQ ID NO: 17733 - protein, 9 aa, Homo sapiens
  Light chain CDR3 for antibody 8867 (IGKV6-21)
HQSSSLPLT

SEQ ID NO: 17734 - protein, 15 aa, Homo sapiens
  Heavy chain CDR3 for antibody 8867 (IGHV4-39)
ARRSKYSSAWYPFDY

SEQ ID NO: 17735 - protein, 9 aa, Homo sapiens
  Light chain CDR3 for antibody 8868 (IGKV6-21)
HQSSSLPLT

SEQ ID NO: 17736 - protein, 18 aa, Homo sapiens
  Heavy chain CDR3 for antibody 8868 (IGHV3-33)
AREGSYYGSGSFPNWFDP

SEQ ID NO: 17737 - protein, 9 aa, Homo sapiens
  Light chain CDR3 for antibody 8869 (IGKV1-9)
QQLNSYPWT

SEQ ID NO: 17738 - protein, 18 aa, Homo sapiens
  Heavy chain CDR3 for antibody 8869 (IGHV1-46)
ARDGDYVWGSYRYDWFDP

SEQ ID NO: 17739 - protein, 9 aa, Homo sapiens
  Light chain CDR3 for antibody 8870 (IGKV1-6)
LQDYNYPYT

SEQ ID NO: 17740 - protein, 12 aa, Homo sapiens
  Heavy chain CDR3 for antibody 8870 (IGHV3-33)
ARKQWLVQAFDI

SEQ ID NO: 17741 - protein, 10 aa, Homo sapiens
  Light chain CDR3 for antibody 8871 (IGKV3-11)
QQRSNWPIFT

SEQ ID NO: 17742 - protein, 14 aa, Homo sapiens
  Heavy chain CDR3 for antibody 8871 (IGHV3-33)
AREDYYGPLNWFDP

SEQ ID NO: 17743 - protein, 9 aa, Homo sapiens
  Light chain CDR3 for antibody 8872 (IGKV1-6)
QQEYNYPLT

SEQ ID NO: 17744 - protein, 16 aa, Homo sapiens
  Heavy chain CDR3 for antibody 8872 (IGHV3-33)
ARGDDILTHQYYGVDV

SEQ ID NO: 17745 - protein, 9 aa, Homo sapiens
  Light chain CDR3 for antibody 8873 (IGKV5-2)
LQHDNFPWT

SEQ ID NO: 17746 - protein, 12 aa, Homo sapiens
  Heavy chain CDR3 for antibody 8873 (IGHV3-33)
ARGGIAVDVCDI

SEQ ID NO: 17747 - protein, 10 aa, Homo sapiens
  Light chain CDR3 for antibody 8874 (IGKV3-11)
QQRSNWLMYT

SEQ ID NO: 17748 - protein, 9 aa, Homo sapiens
  Heavy chain CDR3 for antibody 8874 (IGHV1-18)
ARGKDWFDP

SEQ ID NO: 17749 - protein, 9 aa, Homo sapiens
  Light chain CDR3 for antibody 8875 (IGKV1-6)
LQDYNYPWT

SEQ ID NO: 17750 - protein, 13 aa, Homo sapiens
  Heavy chain CDR3 for antibody 8875 (IGHV3-11)
ARDGGYRGYVLDN

SEQ ID NO: 17751 - protein, 8 aa, Homo sapiens
  Light chain CDR3 for antibody 8876 (IGKV1D-13)
QQFNNYPT

SEQ ID NO: 17752 - protein, 12 aa, Homo sapiens
  Heavy chain CDR3 for antibody 8876 (IGHV3-33)
ARGGIAVDVCDI

SEQ ID NO: 17753 - protein, 8 aa, Homo sapiens
  Light chain CDR3 for antibody 8877 (IGKV6-21)
HQSSSLPT

SEQ ID NO: 17754 - protein, 13 aa, Homo sapiens
  Heavy chain CDR3 for antibody 8877 (IGHV4-59)
ARTMVRGVAPFDY

SEQ ID NO: 17755 - protein, 9 aa, Homo sapiens
  Light chain CDR3 for antibody 8878 (IGKV1-9)
QQLNRYPYT

SEQ ID NO: 17756 - protein, 16 aa, Homo sapiens
  Heavy chain CDR3 for antibody 8878 (IGHV3-33)
AKEGEVLRYFDWLFNY

SEQ ID NO: 17757 - protein, 9 aa, Homo sapiens
  Light chain CDR3 for antibody 8879 (IGKV1-12)
QQANSFPFT

SEQ ID NO: 17758 - protein, 11 aa, Homo sapiens
  Heavy chain CDR3 for antibody 8879 (IGHV3-33)
ARDRSSGPFDY

SEQ ID NO: 17759 - protein, 9 aa, Homo sapiens
  Light chain CDR3 for antibody 8880 (IGKV1-6)
LQDYKSPFT

SEQ ID NO: 17760 - protein, 16 aa, Homo sapiens
  Heavy chain CDR3 for antibody 8880 (IGHV1-24)
ATDWNDRGYYYYGMDV

SEQ ID NO: 17761 - protein, 9 aa, Homo sapiens
  Light chain CDR3 for antibody 8881 (IGKV1-9)
QQLKSYLYT

SEQ ID NO: 17762 - protein, 17 aa, Homo sapiens
  Heavy chain CDR3 for antibody 8881 (IGHV1-24)
ATHYGSGSHYKGYGMDV

SEQ ID NO: 17763 - protein, 8 aa, Homo sapiens
  Light chain CDR3 for antibody 8882 (IGKV1-5)
QQYNSYYT

SEQ ID NO: 17764 - protein, 12 aa, Homo sapiens
  Heavy chain CDR3 for antibody 8882 (IGHV3-h)
AREDYYYYGMDV

SEQ ID NO: 17765 - protein, 9 aa, Homo sapiens
  Light chain CDR3 for antibody 8883 (IGKV1D-16)
QQYDSYPWT

SEQ ID NO: 17766 - protein, 17 aa, Homo sapiens
  Heavy chain CDR3 for antibody 8883 (IGHV3-33)
ARDSYDILTGYYKPFDY

SEQ ID NO: 17767 - protein, 9 aa, Homo sapiens
  Light chain CDR3 for antibody 8884 (IGKV3-11)
QQRSNWPYT

SEQ ID NO: 17768 - protein, 14 aa, Homo sapiens
  Heavy chain CDR3 for antibody 8884 (IGHV1-24)
ATWLPLYYYYGMDV

SEQ ID NO: 17769 - protein, 9 aa, Homo sapiens
  Light chain CDR3 for antibody 8885 (IGKV1-9)
QQLISYPLT

SEQ ID NO: 17770 - protein, 16 aa, Homo sapiens
  Heavy chain CDR3 for antibody 8885 (IGHV1-46)
ATEDSSSTYYYYGLDV

SEQ ID NO: 17771 - protein, 9 aa, Homo sapiens
  Light chain CDR3 for antibody 8886 (IGKV3D-7)
QQDYNLPYT

SEQ ID NO: 17772 - protein, 14 aa, Homo sapiens
  Heavy chain CDR3 for antibody 8886 (IGHV3-33)
ARDGAAAALDAFDI

SEQ ID NO: 17773 - protein, 9 aa, Homo sapiens
  Light chain CDR3 for antibody 8887 (IGKV2-30)
MQGTHWPLT

SEQ ID NO: 17774 - protein, 12 aa, Homo sapiens
  Heavy chain CDR3 for antibody 8887 (IGHV3-23)
AKEGLGSDYESY

SEQ ID NO: 17775 - protein, 8 aa, Homo sapiens
  Light chain CDR3 for antibody 8888 (IGKV1-5)
QQYNSYYT

SEQ ID NO: 17776 - protein, 19 aa, Homo sapiens
  Heavy chain CDR3 for antibody 8888 (IGHV5-51)
ARHGEKGKRITMVRGSLDV

SEQ ID NO: 17777 - protein, 8 aa, Homo sapiens
  Light chain CDR3 for antibody 8889 (IGKV1-5)
QQYNSYYT

SEQ ID NO: 17778 - protein, 18 aa, Homo sapiens
  Heavy chain CDR3 for antibody 8889 (IGHV3-23)
AKEGNYYGSGSYWGYFDP

SEQ ID NO: 17779 - protein, 9 aa, Homo sapiens
  Light chain CDR3 for antibody 8890 (IGKV3D-7)
QQDYNLPLT

SEQ ID NO: 17780 - protein, 11 aa, Homo sapiens
  Heavy chain CDR3 for antibody 8890 (IGHV3-33)
AREGAVARFDY

SEQ ID NO: 17781 - protein, 9 aa, Homo sapiens
  Light chain CDR3 for antibody 8891 (IGKV3D-7)
QQDYEFPIT

SEQ ID NO: 17782 - protein, 13 aa, Homo sapiens
  Heavy chain CDR3 for antibody 8891 (IGHV4-39)
ARHEVMVRGVFDY

SEQ ID NO: 17783 - protein, 8 aa, Homo sapiens
  Light chain CDR3 for antibody 8892 (IGKV1D-13)
QQFNNYLT

SEQ ID NO: 17784 - protein, 8 aa, Homo sapiens
  Heavy chain CDR3 for antibody 8892 (IGHV3-23)
AETFLFDY

SEQ ID NO: 17785 - protein, 8 aa, Homo sapiens
  Light chain CDR3 for antibody 8893 (IGKV1D-13)
QQFNNYPT

SEQ ID NO: 17786 - protein, 13 aa, Homo sapiens
  Heavy chain CDR3 for antibody 8893 (IGHV3-33)
ARGDNWNDGGFDY

SEQ ID NO: 17787 - protein, 10 aa, Homo sapiens
  Light chain CDR3 for antibody 8894 (IGKV1-17)
LQHNSYPMYT

SEQ ID NO: 17788 - protein, 19 aa, Homo sapiens
  Heavy chain CDR3 for antibody 8894 (IGHV3-23)
AKDGRSGSYDYYYYYGMDV

SEQ ID NO: 17789 - protein, 9 aa, Homo sapiens
  Light chain CDR3 for antibody 8895 (IGKV1-6)
QQYNSYPYT

SEQ ID NO: 17790 - protein, 14 aa, Homo sapiens
  Heavy chain CDR3 for antibody 8895 (IGHV3-20)
ARDRGSSGHDGFDI

SEQ ID NO: 17791 - protein, 9 aa, Homo sapiens
  Light chain CDR3 for antibody 8896 (IGKV2-30)
MQGTHWPLT

SEQ ID NO: 17792 - protein, 12 aa, Homo sapiens
  Heavy chain CDR3 for antibody 8896 (IGHV4-59)
ARDSGSYYYFDY

SEQ ID NO: 17793 - protein, 9 aa, Homo sapiens
  Light chain CDR3 for antibody 8897 (IGKV1D-16)
QQYNSYPFT

SEQ ID NO: 17794 - protein, 16 aa, Homo sapiens
  Heavy chain CDR3 for antibody 8897 (IGHV4-59)
ARDTPYYSGSGRPFDS

SEQ ID NO: 17795 - protein, 8 aa, Homo sapiens
  Light chain CDR3 for antibody 8898 (IGKV1-6)
QQFNNYYT

SEQ ID NO: 17796 - protein, 13 aa, Homo sapiens
  Heavy chain CDR3 for antibody 8898 (IGHV1-46)
ARRQVGYYYGMDV

SEQ ID NO: 17797 - protein, 9 aa, Homo sapiens
  Light chain CDR3 for antibody 8899 (IGKV1-33)
QQYDNLPFT

SEQ ID NO: 17798 - protein, 16 aa, Homo sapiens
  Heavy chain CDR3 for antibody 8899 (IGHV3-30)
ARDIAVAGHVYYGMDV

SEQ ID NO: 17799 - protein, 8 aa, Homo sapiens
  Light chain CDR3 for antibody 8900 (IGKV3-20)
QQYGSSLT

SEQ ID NO: 17800 - protein, 13 aa, Homo sapiens
  Heavy chain CDR3 for antibody 8900 (IGHV4-39)
ARRDGSYYGYFGY

SEQ ID NO: 17801 - protein, 9 aa, Homo sapiens
  Light chain CDR3 for antibody 8901 (IGKV3-20)
QQYGSLPLT

SEQ ID NO: 17802 - protein, 15 aa, Homo sapiens
  Heavy chain CDR3 for antibody 8901 (IGHV2-5)
AHRPNYYDKAGAFDI

SEQ ID NO: 17803 - protein, 8 aa, Homo sapiens
  Light chain CDR3 for antibody 8902 (IGKV6-21)
HQSSSLPT

SEQ ID NO: 17804 - protein, 11 aa, Homo sapiens
  Heavy chain CDR3 for antibody 8902 (IGHV4-59)
AREMGHDTFDI

SEQ ID NO: 17805 - protein, 9 aa, Homo sapiens
  Light chain CDR3 for antibody 8903 (IGKV3-15)
QQYNNWPYT

SEQ ID NO: 17806 - protein, 9 aa, Homo sapiens
  Heavy chain CDR3 for antibody 8903 (IGHV3-23)
AKEQQLFDY

SEQ ID NO: 17807 - protein, 9 aa, Homo sapiens
  Light chain CDR3 for antibody 8904 (IGKV3-20)
QQYGSSPLT

SEQ ID NO: 17808 - protein, 12 aa, Homo sapiens
  Heavy chain CDR3 for antibody 8904 (IGHV3-11)
VRVLLWFGESDY

SEQ ID NO: 17809 - protein, 9 aa, Homo sapiens
  Light chain CDR3 for antibody 8905 (IGKV1D-16)
QQYNSYPYT

SEQ ID NO: 17810 - protein, 14 aa, Homo sapiens
  Heavy chain CDR3 for antibody 8905 (IGHV3-33)
VRDARGATTAWFDP

SEQ ID NO: 17811 - protein, 7 aa, Homo sapiens
  Light chain CDR3 for antibody 8906 (IGKV1-17)
LQHNSYP

SEQ ID NO: 17812 - protein, 9 aa, Homo sapiens
  Heavy chain CDR3 for antibody 8906 (IGHV1-18)
ARGKDWFDP

SEQ ID NO: 17813 - protein, 10 aa, Homo sapiens
  Light chain CDR3 for antibody 8907 (IGKV3-15)
QQYNNWPPYT

SEQ ID NO: 17814 - protein, 15 aa, Homo sapiens
  Heavy chain CDR3 for antibody 8907 (IGHV3-33)
ARAYDLPHYYYGMDV

SEQ ID NO: 17815 - protein, 9 aa, Homo sapiens
  Light chain CDR3 for antibody 8908 (IGKV1-33)
QQYDNLPFT

SEQ ID NO: 17816 - protein, 18 aa, Homo sapiens
  Heavy chain CDR3 for antibody 8908 (IGHV1-18)
ARDRYYYDSGSYYYGMDV

SEQ ID NO: 17817 - protein, 8 aa, Homo sapiens
  Light chain CDR3 for antibody 8909 (IGKV3D-7)
QQDYNLLT

SEQ ID NO: 17818 - protein, 9 aa, Homo sapiens
  Heavy chain CDR3 for antibody 8909 (IGHV4-59)
ARGGVHFDS

SEQ ID NO: 17819 - protein, 9 aa, Homo sapiens
  Light chain CDR3 for antibody 8910 (IGKV1-27)
QKYNSAPYT

SEQ ID NO: 17820 - protein, 16 aa, Homo sapiens
  Heavy chain CDR3 for antibody 8910 (IGHV3-23)
AKEGEVLRYFDWLFNY

SEQ ID NO: 17821 - protein, 9 aa, Homo sapiens
  Light chain CDR3 for antibody 8911 (IGKV1-6)
LQVYSYPWT

SEQ ID NO: 17822 - protein, 14 aa, Homo sapiens
  Heavy chain CDR3 for antibody 8911 (IGHV3-23)
AKSRIVGALYYFDY

SEQ ID NO: 17823 - protein, 9 aa, Homo sapiens
  Light chain CDR3 for antibody 8912 (IGKV1-33)
QQYDNLPFT

SEQ ID NO: 17824 - protein, 21 aa, Homo sapiens
  Heavy chain CDR3 for antibody 8912 (IGHV3-30)
ARDRHHDILTGYYKAYYGMDV

SEQ ID NO: 17825 - protein, 8 aa, Homo sapiens
  Light chain CDR3 for antibody 8913 (IGKV1D-13)
QQFNNYPT

SEQ ID NO: 17826 - protein, 13 aa, Homo sapiens
  Heavy chain CDR3 for antibody 8913 (IGHV3-33)
ARRYRSGWYPFDY

SEQ ID NO: 17827 - protein, 9 aa, Homo sapiens
  Light chain CDR3 for antibody 8914 (IGKV1-9)
QQLKSYLYT

SEQ ID NO: 17828 - protein, 13 aa, Homo sapiens
  Heavy chain CDR3 for antibody 8914 (IGHV1-24)
ATGYSINWYEFDY

SEQ ID NO: 17829 - protein, 9 aa, Homo sapiens
  Light chain CDR3 for antibody 8915 (IGKV3-15)
QQYNNWPRT

SEQ ID NO: 17830 - protein, 15 aa, Homo sapiens
  Heavy chain CDR3 for antibody 8915 (IGHV3-33)
ARDRVVRGVMGYFDY

SEQ ID NO: 17831 - protein, 10 aa, Homo sapiens
  Light chain CDR3 for antibody 8916 (IGKV3-15)
QQYNNWPPYT

SEQ ID NO: 17832 - protein, 9 aa, Homo sapiens
  Heavy chain CDR3 for antibody 8916 (IGHV4-59)
AREGGSGSL

SEQ ID NO: 17833 - protein, 10 aa, Homo sapiens
  Light chain CDR3 for antibody 8917 (IGKV1-27)
QKYNSAPMYT

SEQ ID NO: 17834 - protein, 14 aa, Homo sapiens
  Heavy chain CDR3 for antibody 8917 (IGHV4-39)
ARQDYDILTGLFDY

SEQ ID NO: 17835 - protein, 9 aa, Homo sapiens
  Light chain CDR3 for antibody 8918 (IGKV6-21)
HQSYSLPHT

SEQ ID NO: 17836 - protein, 14 aa, Homo sapiens
  Heavy chain CDR3 for antibody 8918 (IGHV3-33)
ARDKSYPLSYGMDV

SEQ ID NO: 17837 - protein, 9 aa, Homo sapiens
  Light chain CDR3 for antibody 8919 (IGKV3D-7)
QQDYNFPLT

SEQ ID NO: 17838 - protein, 15 aa, Homo sapiens
  Heavy chain CDR3 for antibody 8919 (IGHV3-33)
ARDSRPEIIGPPFDY

SEQ ID NO: 17839 - protein, 10 aa, Homo sapiens
  Light chain CDR3 for antibody 8920 (IGKV1-17)
LQHNSYPMYT

SEQ ID NO: 17840 - protein, 22 aa, Homo sapiens
  Heavy chain CDR3 for antibody 8920 (IGHV4-59)
AREINYGSGSYYNEDYYYGMDV

SEQ ID NO: 17841 - protein, 9 aa, Homo sapiens
  Light chain CDR3 for antibody 8921 (IGKV6-21)
HQSSSLPYT

SEQ ID NO: 17842 - protein, 19 aa, Homo sapiens
  Heavy chain CDR3 for antibody 8921 (IGHV3-33)
ARGRGSYYYGPGSHNGMDV

SEQ ID NO: 17843 - protein, 9 aa, Homo sapiens
  Light chain CDR3 for antibody 8922 (IGKV1D-16)
QQYNSFPLT

SEQ ID NO: 17844 - protein, 9 aa, Homo sapiens
  Heavy chain CDR3 for antibody 8922 (IGHV4-59)
ARDLYYFDY

SEQ ID NO: 17845 - protein, 9 aa, Homo sapiens
  Light chain CDR3 for antibody 8923 (IGKV1D-16)
QQYSSYPYT

SEQ ID NO: 17846 - protein, 15 aa, Homo sapiens
  Heavy chain CDR3 for antibody 8923 (IGHV3-33)
ARDHLTGYYYYGMDV

SEQ ID NO: 17847 - protein, 9 aa, Homo sapiens
  Light chain CDR3 for antibody 8924 (IGKV1-17)
LRHNCYPYT

SEQ ID NO: 17848 - protein, 16 aa, Homo sapiens
  Heavy chain CDR3 for antibody 8924 (IGHV3-23)
AKEGMVLRYFDWLWDY

SEQ ID NO: 17849 - protein, 9 aa, Homo sapiens
  Light chain CDR3 for antibody 8925 (IGKV1-27)
QKYNSAPYT

SEQ ID NO: 17850 - protein, 14 aa, Homo sapiens
  Heavy chain CDR3 for antibody 8925 (IGHV3-66)
ARDLDIMATSPFAY

SEQ ID NO: 17851 - protein, 10 aa, Homo sapiens
  Light chain CDR3 for antibody 8926 (IGKV1-17)
LQHNSYPMYT

SEQ ID NO: 17852 - protein, 20 aa, Homo sapiens
  Heavy chain CDR3 for antibody 8926 (IGHV3-33)
ARDNDSSGYYDYYYYYGMDV

SEQ ID NO: 17853 - protein, 9 aa, Homo sapiens
  Light chain CDR3 for antibody 8927 (IGKV1-17)
LQQNSYPWT

SEQ ID NO: 17854 - protein, 17 aa, Homo sapiens
  Heavy chain CDR3 for antibody 8927 (IGHV1-18)
ARERYYGSGNYKYNMDV

SEQ ID NO: 17855 - protein, 9 aa, Homo sapiens
  Light chain CDR3 for antibody 8928 (IGKV3-11)
QQRSNWMYT

SEQ ID NO: 17856 - protein, 18 aa, Homo sapiens
  Heavy chain CDR3 for antibody 8928 (IGHV3-33)
ARKGGYYSGSGSYRHFDF

SEQ ID NO: 17857 - protein, 8 aa, Homo sapiens
  Light chain CDR3 for antibody 8929 (IGKV3D-7)
QQDYNLLT

SEQ ID NO: 17858 - protein, 8 aa, Homo sapiens
  Heavy chain CDR3 for antibody 8929 (IGHV3-33)
ARDRGFDY

SEQ ID NO: 17859 - protein, 9 aa, Homo sapiens
  Light chain CDR3 for antibody 8930 (IGKV1D-13)
QQFNNYPYT

SEQ ID NO: 17860 - protein, 14 aa, Homo sapiens
  Heavy chain CDR3 for antibody 8930 (IGHV3-33)
ARDAMGTSTAWFDP

SEQ ID NO: 17861 - protein, 10 aa, Homo sapiens
  Light chain CDR3 for antibody 8931 (IGKV1-39)
QQSYSTPMYT

SEQ ID NO: 17862 - protein, 14 aa, Homo sapiens
  Heavy chain CDR3 for antibody 8931 (IGHV3-33)
ARRGYSGYDWYFDY

SEQ ID NO: 17863 - protein, 10 aa, Homo sapiens
  Light chain CDR3 for antibody 8932 (IGKV1-39)
QQSYSTPMYT

SEQ ID NO: 17864 - protein, 9 aa, Homo sapiens
  Heavy chain CDR3 for antibody 8932 (IGHV4-59)
AREGGSGSL

SEQ ID NO: 17865 - protein, 9 aa, Homo sapiens
  Light chain CDR3 for antibody 8933 (IGKV1-6)
LQDYKSPFT

SEQ ID NO: 17866 - protein, 17 aa, Homo sapiens
  Heavy chain CDR3 for antibody 8933 (IGHV4-59)
ARRITMVREIIITAFDY

SEQ ID NO: 17867 - protein, 9 aa, Homo sapiens
  Light chain CDR3 for antibody 8934 (IGKV3-20)
QQLISYPLT

SEQ ID NO: 17868 - protein, 21 aa, Homo sapiens
  Heavy chain CDR3 for antibody 8934 (IGHV1-18)
ASGVLIWFGELLSEDYYDMDV

SEQ ID NO: 17869 - protein, 9 aa, Homo sapiens
  Light chain CDR3 for antibody 8935 (IGKV1-6)
LQDYNYPRT

SEQ ID NO: 17870 - protein, 9 aa, Homo sapiens
  Heavy chain CDR3 for antibody 8935 (IGHV3-30)
ARPNWGFDY

SEQ ID NO: 17871 - protein, 9 aa, Homo sapiens
  Light chain CDR3 for antibody 8936 (IGKV4-1)
QQYYSTPPT

SEQ ID NO: 17872 - protein, 18 aa, Homo sapiens
  Heavy chain CDR3 for antibody 8936 (IGHV3-23)
AKPDYYGSGSYYNVPFDY

SEQ ID NO: 17873 - protein, 9 aa, Homo sapiens
  Light chain CDR3 for antibody 8937 (IGKV5-2)
LQHDNFPYT

SEQ ID NO: 17874 - protein, 13 aa, Homo sapiens
  Heavy chain CDR3 for antibody 8937 (IGHV3-21)
ATGAWASSWWGDY

SEQ ID NO: 17875 - protein, 9 aa, Homo sapiens
  Light chain CDR3 for antibody 8938 (IGKV3-20)
QQYGSSPLT

SEQ ID NO: 17876 - protein, 18 aa, Homo sapiens
  Heavy chain CDR3 for antibody 8938 (IGHV3-33)
ARRTAAGTGDYYYYGMDV

SEQ ID NO: 17877 - protein, 9 aa, Homo sapiens
  Light chain CDR3 for antibody 8939 (IGKV2-30)
MQGTHWPLT

SEQ ID NO: 17878 - protein, 16 aa, Homo sapiens
  Heavy chain CDR3 for antibody 8939 (IGHV3-23)
ARNDILTASGYYGMDV

SEQ ID NO: 17879 - protein, 9 aa, Homo sapiens
  Light chain CDR3 for antibody 8940 (IGKV2-30)
MQGTHWPLT

SEQ ID NO: 17880 - protein, 13 aa, Homo sapiens
  Heavy chain CDR3 for antibody 8940 (IGHV3-33)
AREYCSGGSCYDY

SEQ ID NO: 17881 - protein, 9 aa, Homo sapiens
  Light chain CDR3 for antibody 8941 (IGKV1-9)
QQLNSYPYT

SEQ ID NO: 17882 - protein, 14 aa, Homo sapiens
  Heavy chain CDR3 for antibody 8941 (IGHV3-33)
ARDTVSAGFNGMDV

SEQ ID NO: 17883 - protein, 8 aa, Homo sapiens
  Light chain CDR3 for antibody 8942 (IGKV3-11)
LQRGNWPT

SEQ ID NO: 17884 - protein, 12 aa, Homo sapiens
  Heavy chain CDR3 for antibody 8942 (IGHV3-33)
ARESGGSYSFDY

SEQ ID NO: 17885 - protein, 8 aa, Homo sapiens
  Light chain CDR3 for antibody 8943 (IGKV6-21)
HQSSSLPT

SEQ ID NO: 17886 - protein, 8 aa, Homo sapiens
  Heavy chain CDR3 for antibody 8943 (IGHV3-33)
ARDRGFDY

SEQ ID NO: 17887 - protein, 9 aa, Homo sapiens
  Light chain CDR3 for antibody 8944 (IGKV3-20)
QQYGSSPLT

SEQ ID NO: 17888 - protein, 14 aa, Homo sapiens
  Heavy chain CDR3 for antibody 8944 (IGHV1-18)
ARERGVRGVMYFDY

SEQ ID NO: 17889 - protein, 9 aa, Homo sapiens
  Light chain CDR3 for antibody 8945 (IGKV2-30)
MQGTHWPLT

SEQ ID NO: 17890 - protein, 13 aa, Homo sapiens
  Heavy chain CDR3 for antibody 8945 (IGHV4-39)
ARHPPSRDYGMDV

SEQ ID NO: 17891 - protein, 8 aa, Homo sapiens
  Light chain CDR3 for antibody 8946 (IGKV2D-28)
MQALQTPT

SEQ ID NO: 17892 - protein, 11 aa, Homo sapiens
  Heavy chain CDR3 for antibody 8946 (IGHV4-59)
AREMGHDTFDI

SEQ ID NO: 17893 - protein, 10 aa, Homo sapiens
  Light chain CDR3 for antibody 8947 (IGKV3-11)
QQRSNWLMYT

SEQ ID NO: 17894 - protein, 13 aa, Homo sapiens
  Heavy chain CDR3 for antibody 8947 (IGHV3-33)
ARDYCGGDCYLDY

SEQ ID NO: 17895 - protein, 9 aa, Homo sapiens
  Light chain CDR3 for antibody 8948 (IGKV3D-7)
QQDYEFPLT

SEQ ID NO: 17896 - protein, 15 aa, Homo sapiens
  Heavy chain CDR3 for antibody 8948 (IGHV4-61)
ARHSKYSSGWYPFDY

SEQ ID NO: 17897 - protein, 9 aa, Homo sapiens
  Light chain CDR3 for antibody 8949 (IGKV1-39)
QQSYRTPLT

SEQ ID NO: 17898 - protein, 20 aa, Homo sapiens
  Heavy chain CDR3 for antibody 8949 (IGHV1-f)
ATHYDILTGSPYYYYCALDV

SEQ ID NO: 17899 - protein, 9 aa, Homo sapiens
  Light chain CDR3 for antibody 8950 (IGKV3D-7)
QQDYNLPYT

SEQ ID NO: 17900 - protein, 15 aa, Homo sapiens
  Heavy chain CDR3 for antibody 8950 (IGHV3-33)
AKDRNSGYDWGGFDY

SEQ ID NO: 17901 - protein, 6 aa, Homo sapiens
  Light chain CDR3 for antibody 8951 (IGKV3-20)
QQYGST

SEQ ID NO: 17902 - protein, 13 aa, Homo sapiens
  Heavy chain CDR3 for antibody 8951 (IGHV4-39)
ARHVLLWFGEFDP

SEQ ID NO: 17903 - protein, 9 aa, Homo sapiens
  Light chain CDR3 for antibody 8952 (IGKV1-6)
LQDYNYPRT

SEQ ID NO: 17904 - protein, 9 aa, Homo sapiens
  Heavy chain CDR3 for antibody 8952 (IGHV4-34)
ARDLYYFDY

SEQ ID NO: 17905 - protein, 9 aa, Homo sapiens
  Light chain CDR3 for antibody 8953 (IGKV3D-20)
QQYGNSPRT

SEQ ID NO: 17906 - protein, 18 aa, Homo sapiens
  Heavy chain CDR3 for antibody 8953 (IGHV3-33)
ARERGYYGSDIYPAAFDI

SEQ ID NO: 17907 - protein, 9 aa, Homo sapiens
  Light chain CDR3 for antibody 8954 (IGKV5-2)
LQHDNFPWT

SEQ ID NO: 17908 - protein, 17 aa, Homo sapiens
  Heavy chain CDR3 for antibody 8954 (IGHV6-1)
ARDQYSYGPYYYYGMDV

SEQ ID NO: 17909 - protein, 8 aa, Homo sapiens
  Light chain CDR3 for antibody 8955 (IGKV3D-7)
QQDYNLLT

SEQ ID NO: 17910 - protein, 13 aa, Homo sapiens
  Heavy chain CDR3 for antibody 8955 (IGHV3-33)
ARDYTMVRGVMNY

SEQ ID NO: 17911 - protein, 9 aa, Homo sapiens
  Light chain CDR3 for antibody 8956 (IGKV3-15)
QQYNNWPRT

SEQ ID NO: 17912 - protein, 10 aa, Homo sapiens
  Heavy chain CDR3 for antibody 8956 (IGHV3-33)
ARENSSPLDY

SEQ ID NO: 17913 - protein, 9 aa, Homo sapiens
  Light chain CDR3 for antibody 8957 (IGKV1-37)
QRTYNAPFT

SEQ ID NO: 17914 - protein, 11 aa, Homo sapiens
  Heavy chain CDR3 for antibody 8957 (IGHV4-59)
AREMGHDTFDI

SEQ ID NO: 17915 - protein, 10 aa, Homo sapiens
  Light chain CDR3 for antibody 8958 (IGKV1-39)
QQSYSTPMYT

SEQ ID NO: 17916 - protein, 13 aa, Homo sapiens
  Heavy chain CDR3 for antibody 8958 (IGHV3-33)
AREYCSGGSCYDY

SEQ ID NO: 17917 - protein, 8 aa, Homo sapiens
  Light chain CDR3 for antibody 8959 (IGKV3D-7)
QQDYNLVT

SEQ ID NO: 17918 - protein, 11 aa, Homo sapiens
  Heavy chain CDR3 for antibody 8959 (IGHV4-59)
ARDGVRGVFDI

SEQ ID NO: 17919 - protein, 9 aa, Homo sapiens
  Light chain CDR3 for antibody 8960 (IGKV3-20)
QQYGSSPRT

SEQ ID NO: 17920 - protein, 16 aa, Homo sapiens
  Heavy chain CDR3 for antibody 8960 (IGHV1-24)
ATEDSSSYYYYDGMDV

SEQ ID NO: 17921 - protein, 9 aa, Homo sapiens
  Light chain CDR3 for antibody 8961 (IGKV3D-20)
QQHGNSPLT

SEQ ID NO: 17922 - protein, 13 aa, Homo sapiens
  Heavy chain CDR3 for antibody 8961 (IGHV4-34)
ASNFYYYYYGMDV

SEQ ID NO: 17923 - protein, 9 aa, Homo sapiens
  Light chain CDR3 for antibody 8962 (IGKV1-9)
QQLKSYLYT

SEQ ID NO: 17924 - protein, 18 aa, Homo sapiens
  Heavy chain CDR3 for antibody 8962 (IGHV1-18)
ARDPNYYGSGSYYNYFDY

SEQ ID NO: 17925 - protein, 10 aa, Homo sapiens
  Light chain CDR3 for antibody 8963 (IGKV1-39)
QQSYSTPMYT

SEQ ID NO: 17926 - protein, 16 aa, Homo sapiens
  Heavy chain CDR3 for antibody 8963 (IGHV3-64)
ARGRYFDWLLGDWFDP

SEQ ID NO: 17927 - protein, 9 aa, Homo sapiens
  Light chain CDR3 for antibody 8964 (IGKV1-6)
LQDFHYPWT

SEQ ID NO: 17928 - protein, 15 aa, Homo sapiens
  Heavy chain CDR3 for antibody 8964 (IGHV3-33)
ARDHLTGYYYYGMDV

SEQ ID NO: 17929 - protein, 9 aa, Homo sapiens
  Light chain CDR3 for antibody 8965 (IGKV1-37)
QRTSNAPYT

SEQ ID NO: 17930 - protein, 12 aa, Homo sapiens
  Heavy chain CDR3 for antibody 8965 (IGHV3-33)
ARDLVGATPFDY

SEQ ID NO: 17931 - protein, 9 aa, Homo sapiens
  Light chain CDR3 for antibody 8966 (IGKV1-27)
QKYNSAPYT

SEQ ID NO: 17932 - protein, 13 aa, Homo sapiens
  Heavy chain CDR3 for antibody 8966 (IGHV3-23)
AKDRGGSYSYFDF

SEQ ID NO: 17933 - protein, 9 aa, Homo sapiens
  Light chain CDR3 for antibody 8967 (IGKV3-11)
QQRSNWPLT

SEQ ID NO: 17934 - protein, 15 aa, Homo sapiens
  Heavy chain CDR3 for antibody 8967 (IGHV3-33)
AREGLRYFHYYGMDV

SEQ ID NO: 17935 - protein, 9 aa, Homo sapiens
  Light chain CDR3 for antibody 8968 (IGKV1-6)
LQDYKSPFT

SEQ ID NO: 17936 - protein, 15 aa, Homo sapiens
  Heavy chain CDR3 for antibody 8968 (IGHV3-33)
ARDHLTGYYYYGMDV

SEQ ID NO: 17937 - protein, 9 aa, Homo sapiens
  Light chain CDR3 for antibody 8969 (IGKV1-6)
LQDYNYPYT

SEQ ID NO: 17938 - protein, 17 aa, Homo sapiens
  Heavy chain CDR3 for antibody 8969 (IGHV6-1)
ARDQYSYGPYYYYGMDV

SEQ ID NO: 17939 - protein, 9 aa, Homo sapiens
  Light chain CDR3 for antibody 8970 (IGKV1D-16)
QQYDSYPWT

SEQ ID NO: 17940 - protein, 26 aa, Homo sapiens
  Heavy chain CDR3 for antibody 8970 (IGHV4-39)
ARQGLLWFGDLKAYDSSGYYYGYFHH

SEQ ID NO: 17941 - protein, 9 aa, Homo sapiens
  Light chain CDR3 for antibody 8971 (IGKV3-20)
QQYGSSPYT

SEQ ID NO: 17942 - protein, 14 aa, Homo sapiens
  Heavy chain CDR3 for antibody 8971 (IGHV3-20)
ARDEGSTWSDIFDI

SEQ ID NO: 17943 - protein, 9 aa, Homo sapiens
  Light chain CDR3 for antibody 8972 (IGKV3-11)
QQRINWPWT

SEQ ID NO: 17944 - protein, 21 aa, Homo sapiens
  Heavy chain CDR3 for antibody 8972 (IGHV4-59)
AAGVLLWFGEPNYYYYYGMDV

SEQ ID NO: 17945 - protein, 8 aa, Homo sapiens
  Light chain CDR3 for antibody 8973 (IGKV3-20)
QQYGSSFT

SEQ ID NO: 17946 - protein, 12 aa, Homo sapiens
  Heavy chain CDR3 for antibody 8973 (IGHV4-59)
ARVDSSGWFFDY

SEQ ID NO: 17947 - protein, 9 aa, Homo sapiens
  Light chain CDR3 for antibody 8974 (IGKV1-6)
LQDYNYPRT

SEQ ID NO: 17948 - protein, 15 aa, Homo sapiens
  Heavy chain CDR3 for antibody 8974 (IGHV4-59)
ARDIGYYGSGSPLDY

SEQ ID NO: 17949 - protein, 9 aa, Homo sapiens
  Light chain CDR3 for antibody 8975 (IGKV1-27)
QKYNSAPYT

SEQ ID NO: 17950 - protein, 13 aa, Homo sapiens
  Heavy chain CDR3 for antibody 8975 (IGHV4-59)
ANRDYYGYYGMDV

SEQ ID NO: 17951 - protein, 9 aa, Homo sapiens
  Light chain CDR3 for antibody 8976 (IGKV1-17)
QQLNSYPWT

SEQ ID NO: 17952 - protein, 13 aa, Homo sapiens
  Heavy chain CDR3 for antibody 8976 (IGHV3-66)
ARAFFMVRGVIDF

SEQ ID NO: 17953 - protein, 8 aa, Homo sapiens
  Light chain CDR3 for antibody 8977 (IGKV6-21)
HQSSSLPT

SEQ ID NO: 17954 - protein, 10 aa, Homo sapiens
  Heavy chain CDR3 for antibody 8977 (IGHV3-33)
ARDVVVYFDY

SEQ ID NO: 17955 - protein, 9 aa, Homo sapiens
  Light chain CDR3 for antibody 8978 (IGKV1-39)
QQGFSTPWT

SEQ ID NO: 17956 - protein, 14 aa, Homo sapiens
  Heavy chain CDR3 for antibody 8978 (IGHV4-39)
ARDSGYDYYYGMDV

SEQ ID NO: 17957 - protein, 9 aa, Homo sapiens
  Light chain CDR3 for antibody 8979 (IGKV1-39)
QQSYRTPLT

SEQ ID NO: 17958 - protein, 10 aa, Homo sapiens
  Heavy chain CDR3 for antibody 8979 (IGHV3-33)
ARDLGWSFDH

SEQ ID NO: 17959 - protein, 9 aa, Homo sapiens
  Light chain CDR3 for antibody 8980 (IGKV3D-7)
QQYNNWPYT

SEQ ID NO: 17960 - protein, 14 aa, Homo sapiens
  Heavy chain CDR3 for antibody 8980 (IGHV3-33)
ARDRRDFYYYGMDV

SEQ ID NO: 17961 - protein, 9 aa, Homo sapiens
  Light chain CDR3 for antibody 8981 (IGKV2D-28)
MQALQTPPT

SEQ ID NO: 17962 - protein, 14 aa, Homo sapiens
  Heavy chain CDR3 for antibody 8981 (IGHV3-33)
ARDNILTVYYLFDY

SEQ ID NO: 17963 - protein, 9 aa, Homo sapiens
  Light chain CDR3 for antibody 8982 (IGKV1-33)
QQYDNLPFT

SEQ ID NO: 17964 - protein, 19 aa, Homo sapiens
  Heavy chain CDR3 for antibody 8982 (IGHV3-64)
ARDRYYDILTGYSSYYFDY

SEQ ID NO: 17965 - protein, 9 aa, Homo sapiens
  Light chain CDR3 for antibody 8983 (IGKV2-30)
MQGTHWPLT

SEQ ID NO: 17966 - protein, 12 aa, Homo sapiens
  Heavy chain CDR3 for antibody 8983 (IGHV3-33)
ARDYISTYGMDV

SEQ ID NO: 17967 - protein, 10 aa, Homo sapiens
  Light chain CDR3 for antibody 8984 (IGKV3-11)
QQRSNWPIFT

SEQ ID NO: 17968 - protein, 15 aa, Homo sapiens
  Heavy chain CDR3 for antibody 8984 (IGHV3-11)
AREYSSGWYGDAFDI

SEQ ID NO: 17969 - protein, 10 aa, Homo sapiens
  Light chain CDR3 for antibody 8985 (IGKV1-39)
QQSYSTPMYT

SEQ ID NO: 17970 - protein, 18 aa, Homo sapiens
  Heavy chain CDR3 for antibody 8985 (IGHV3-33)
ARDRGDILTGYYKGWFDP

SEQ ID NO: 17971 - protein, 9 aa, Homo sapiens
  Light chain CDR3 for antibody 8986 (IGKV4-1)
QQYYTTPYT

SEQ ID NO: 17972 - protein, 20 aa, Homo sapiens
  Heavy chain CDR3 for antibody 8986 (IGHV1-f)
ATHYDILTGSPYYYYCALDV

SEQ ID NO: 17973 - protein, 8 aa, Homo sapiens
  Light chain CDR3 for antibody 8987 (IGKV1D-13)
QQFNNYLT

SEQ ID NO: 17974 - protein, 18 aa, Homo sapiens
  Heavy chain CDR3 for antibody 8987 (IGHV3-33)
ARREGITLIFYYYYGMDV

SEQ ID NO: 17975 - protein, 9 aa, Homo sapiens
  Light chain CDR3 for antibody 8988 (IGKV1-27)
QKYNSAPYT

SEQ ID NO: 17976 - protein, 17 aa, Homo sapiens
  Heavy chain CDR3 for antibody 8988 (IGHV3-23)
AKDYDILTGYSHNWFDP

SEQ ID NO: 17977 - protein, 10 aa, Homo sapiens
  Light chain CDR3 for antibody 8989 (IGKV1-9)
QQLDSYPMYT

SEQ ID NO: 17978 - protein, 17 aa, Homo sapiens
  Heavy chain CDR3 for antibody 8989 (IGHV3-23)
AKDGSFYSSGWYDAFDI

SEQ ID NO: 17979 - protein, 8 aa, Homo sapiens
  Light chain CDR3 for antibody 8990 (IGKV6-21)
HQSSSLPT

SEQ ID NO: 17980 - protein, 18 aa, Homo sapiens
  Heavy chain CDR3 for antibody 8990 (IGHV3-23)
ARYHLYFGSGFGSDGMDV

SEQ ID NO: 17981 - protein, 9 aa, Homo sapiens
  Light chain CDR3 for antibody 8991 (IGKV1D-16)
QQYNSYPLT

SEQ ID NO: 17982 - protein, 12 aa, Homo sapiens
  Heavy chain CDR3 for antibody 8991 (IGHV3-30)
ARGAMVRGVFDP

SEQ ID NO: 17983 - protein, 9 aa, Homo sapiens
  Light chain CDR3 for antibody 8992 (IGKV3-15)
QQYNNWPYT

SEQ ID NO: 17984 - protein, 14 aa, Homo sapiens
  Heavy chain CDR3 for antibody 8992 (IGHV3-23)
AKDRYRGYEGLFDY

SEQ ID NO: 17985 - protein, 9 aa, Homo sapiens
  Light chain CDR3 for antibody 8993 (IGKV1-17)
QHYGSSPYT

SEQ ID NO: 17986 - protein, 18 aa, Homo sapiens
  Heavy chain CDR3 for antibody 8993 (IGHV3-23)
AKEGNYYGSGSYWGYFDP

SEQ ID NO: 17987 - protein, 9 aa, Homo sapiens
  Light chain CDR3 for antibody 8994 (IGKV3-11)
QQRSNWPYT

SEQ ID NO: 17988 - protein, 16 aa, Homo sapiens
  Heavy chain CDR3 for antibody 8994 (IGHV1-18)
ARYFDWLLRDYYGMDV

SEQ ID NO: 17989 - protein, 9 aa, Homo sapiens
  Light chain CDR3 for antibody 8995 (IGKV3-11)
QQYINWPLT

SEQ ID NO: 17990 - protein, 15 aa, Homo sapiens
  Heavy chain CDR3 for antibody 8995 (IGHV3-23)
AKAGGRYFDWFPFDY

SEQ ID NO: 17991 - protein, 9 aa, Homo sapiens
  Light chain CDR3 for antibody 8996 (IGKV4-1)
QQYYTTPYT

SEQ ID NO: 17992 - protein, 13 aa, Homo sapiens
  Heavy chain CDR3 for antibody 8996 (IGHV3-33)
ARAFIMVRGVIDY

SEQ ID NO: 17993 - protein, 9 aa, Homo sapiens
  Light chain CDR3 for antibody 8997 (IGKV2-30)
MQGTHWPLT

SEQ ID NO: 17994 - protein, 18 aa, Homo sapiens
  Heavy chain CDR3 for antibody 8997 (IGHV3-33)
ARDQGIVVLPGAPWYFDP

SEQ ID NO: 17995 - protein, 9 aa, Homo sapiens
  Light chain CDR3 for antibody 8998 (IGKV3-20)
QQYGSSPWT

SEQ ID NO: 17996 - protein, 14 aa, Homo sapiens
  Heavy chain CDR3 for antibody 8998 (IGHV3-33)
ARKPDYYGSGYFDY

SEQ ID NO: 17997 - protein, 9 aa, Homo sapiens
  Light chain CDR3 for antibody 8999 (IGKV1-6)
LQDYNYPYT

SEQ ID NO: 17998 - protein, 9 aa, Homo sapiens
  Heavy chain CDR3 for antibody 8999 (IGHV3-23)
AIGRYYFDY

SEQ ID NO: 17999 - protein, 9 aa, Homo sapiens
  Light chain CDR3 for antibody 9000 (IGKV1-39)
QQSYRTPLT

SEQ ID NO: 18000 - protein, 12 aa, Homo sapiens
  Heavy chain CDR3 for antibody 9000 (IGHV3-11)
ARVLLWFGETDY

SEQ ID NO: 18001 - protein, 10 aa, Homo sapiens
  Light chain CDR3 for antibody 9001 (IGKV3-15)
QQYNNWPPYT

SEQ ID NO: 18002 - protein, 13 aa, Homo sapiens
  Heavy chain CDR3 for antibody 9001 (IGHV3-23)
ARAFFMVRGVIDF

SEQ ID NO: 18003 - protein, 8 aa, Homo sapiens
  Light chain CDR3 for antibody 9002 (IGKV6-21)
HQSSSLPT

SEQ ID NO: 18004 - protein, 12 aa, Homo sapiens
  Heavy chain CDR3 for antibody 9002 (IGHV3-33)
AREGTRWVYFDY

SEQ ID NO: 18005 - protein, 10 aa, Homo sapiens
  Light chain CDR3 for antibody 9003 (IGKV1-27)
QKYNSAPMYT

SEQ ID NO: 18006 - protein, 14 aa, Homo sapiens
  Heavy chain CDR3 for antibody 9003 (IGHV4-39)
ARDSGYDYYYGMDV

SEQ ID NO: 18007 - protein, 8 aa, Homo sapiens
  Light chain CDR3 for antibody 9004 (IGKV2D-28)
MQALQTPT

SEQ ID NO: 18008 - protein, 9 aa, Homo sapiens
  Heavy chain CDR3 for antibody 9004 (IGHV3-33)
ARATVGVDY

SEQ ID NO: 18009 - protein, 9 aa, Homo sapiens
  Light chain CDR3 for antibody 9005 (IGKV1-9)
QQLISYPRT

SEQ ID NO: 18010 - protein, 14 aa, Homo sapiens
  Heavy chain CDR3 for antibody 9005 (IGHV3-33)
AKSRIVGALYYFDY

SEQ ID NO: 18011 - protein, 9 aa, Homo sapiens
  Light chain CDR3 for antibody 9006 (IGKV2D-28)
MQALQTPPT

SEQ ID NO: 18012 - protein, 14 aa, Homo sapiens
  Heavy chain CDR3 for antibody 9006 (IGHV3-33)
VRDQGSMVRGGGDY

SEQ ID NO: 18013 - protein, 10 aa, Homo sapiens
  Light chain CDR3 for antibody 9007 (IGKV3-15)
QQYNNWPPYT

SEQ ID NO: 18014 - protein, 16 aa, Homo sapiens
  Heavy chain CDR3 for antibody 9007 (IGHV4-59)
ARGRYFDWLLGDVFDI

SEQ ID NO: 18015 - protein, 9 aa, Homo sapiens
  Light chain CDR3 for antibody 9008 (IGKV1-6)
QQLNGYPFT

SEQ ID NO: 18016 - protein, 17 aa, Homo sapiens
  Heavy chain CDR3 for antibody 9008 (IGHV1-18)
ARDEGYDILTGYPHFDY

SEQ ID NO: 18017 - protein, 8 aa, Homo sapiens
  Light chain CDR3 for antibody 9009 (IGKV1D-13)
QQFNNYPT

SEQ ID NO: 18018 - protein, 14 aa, Homo sapiens
  Heavy chain CDR3 for antibody 9009 (IGHV3-33)
ARGGYSGYRYYFDY

SEQ ID NO: 18019 - protein, 10 aa, Homo sapiens
  Light chain CDR3 for antibody 9010 (IGKV1-17)
LQHNSYPMYT

SEQ ID NO: 18020 - protein, 12 aa, Homo sapiens
  Heavy chain CDR3 for antibody 9010 (IGHV3-33)
VRKWFGELYFDY

SEQ ID NO: 18021 - protein, 11 aa, Homo sapiens
  Light chain CDR3 for antibody 9011 (IGKV3-11)
QQRSNWPPTWT

SEQ ID NO: 18022 - protein, 15 aa, Homo sapiens
  Heavy chain CDR3 for antibody 9011 (IGHV4-39)
ARRSKYSSAWYPFDY

SEQ ID NO: 18023 - protein, 8 aa, Homo sapiens
  Light chain CDR3 for antibody 9012 (IGKV1-5)
QQYHSYYT

SEQ ID NO: 18024 - protein, 10 aa, Homo sapiens
  Heavy chain CDR3 for antibody 9012 (IGHV1-18)
AREQRLGFDY

SEQ ID NO: 18025 - protein, 10 aa, Homo sapiens
  Light chain CDR3 for antibody 9013 (IGKV3-15)
QQYNNWPPYT

SEQ ID NO: 18026 - protein, 9 aa, Homo sapiens
  Heavy chain CDR3 for antibody 9013 (IGHV3-13)
ARDRWYFDL

SEQ ID NO: 18027 - protein, 9 aa, Homo sapiens
  Light chain CDR3 for antibody 9014 (IGKV1-9)
QQLKSYLYT

SEQ ID NO: 18028 - protein, 13 aa, Homo sapiens
  Heavy chain CDR3 for antibody 9014 (IGHV4-28)
ARKGATGYYGMDV

SEQ ID NO: 18029 - protein, 9 aa, Homo sapiens
  Light chain CDR3 for antibody 9015 (IGKV1-16)
QQFNNYPYT

SEQ ID NO: 18030 - protein, 15 aa, Homo sapiens
  Heavy chain CDR3 for antibody 9015 (IGHV3-23)
AKAGGRYFDWFPFDY

SEQ ID NO: 18031 - protein, 8 aa, Homo sapiens
  Light chain CDR3 for antibody 9016 (IGKV1-5)
QQYNSYWT

SEQ ID NO: 18032 - protein, 9 aa, Homo sapiens
  Heavy chain CDR3 for antibody 9016 (IGHV3-30)
ARDYFHYDY

SEQ ID NO: 18033 - protein, 9 aa, Homo sapiens
  Light chain CDR3 for antibody 9017 (IGKV1-16)
QKYNSNPLT

SEQ ID NO: 18034 - protein, 11 aa, Homo sapiens
  Heavy chain CDR3 for antibody 9017 (IGHV3-33)
ARDTWDDYFDY

SEQ ID NO: 18035 - protein, 9 aa, Homo sapiens
  Light chain CDR3 for antibody 9018 (IGKV1-6)
LQDYNYPRT

SEQ ID NO: 18036 - protein, 15 aa, Homo sapiens
  Heavy chain CDR3 for antibody 9018 (IGHV1-18)
ARDRAFTMVRGVIDY

SEQ ID NO: 18037 - protein, 8 aa, Homo sapiens
  Light chain CDR3 for antibody 9019 (IGKV2D-28)
MQALQTPT

SEQ ID NO: 18038 - protein, 13 aa, Homo sapiens
  Heavy chain CDR3 for antibody 9019 (IGHV3-23)
ARAFFMVRGVIDF

SEQ ID NO: 18039 - protein, 10 aa, Homo sapiens
  Light chain CDR3 for antibody 9020 (IGKV1-17)
LQHNSYPMYT

SEQ ID NO: 18040 - protein, 13 aa, Homo sapiens
  Heavy chain CDR3 for antibody 9020 (IGHV3-53)
ARSGSYWGYYFDY

SEQ ID NO: 18041 - protein, 9 aa, Homo sapiens
  Light chain CDR3 for antibody 9021 (IGKV1-17)
QQLKSYLYT

SEQ ID NO: 18042 - protein, 15 aa, Homo sapiens
  Heavy chain CDR3 for antibody 9021 (IGHV3-33)
ARDRGWKAPGYGMDV

SEQ ID NO: 18043 - protein, 9 aa, Homo sapiens
  Light chain CDR3 for antibody 9022 (IGKV1-17)
LHSNNYPWT

SEQ ID NO: 18044 - protein, 13 aa, Homo sapiens
  Heavy chain CDR3 for antibody 9022 (IGHV4-59)
ARDAGYSSSWFDY

SEQ ID NO: 18045 - protein, 6 aa, Homo sapiens
  Light chain CDR3 for antibody 9023 (IGKV3-20)
QQYGST

SEQ ID NO: 18046 - protein, 12 aa, Homo sapiens
  Heavy chain CDR3 for antibody 9023 (IGHV3-23)
AKDGWFGESLDY

SEQ ID NO: 18047 - protein, 9 aa, Homo sapiens
  Light chain CDR3 for antibody 9024 (IGKV3-15)
QQYNNWPYT

SEQ ID NO: 18048 - protein, 12 aa, Homo sapiens
  Heavy chain CDR3 for antibody 9024 (IGHV3-33)
ARGGYSHGYFDY

SEQ ID NO: 18049 - protein, 9 aa, Homo sapiens
  Light chain CDR3 for antibody 9025 (IGKV3-20)
QHYGSSPYT

SEQ ID NO: 18050 - protein, 12 aa, Homo sapiens
  Heavy chain CDR3 for antibody 9025 (IGHV3-64)
ARVNSGSPYFDY

SEQ ID NO: 18051 - protein, 9 aa, Homo sapiens
  Light chain CDR3 for antibody 9026 (IGKV1-37)
QRTSNAPYT

SEQ ID NO: 18052 - protein, 15 aa, Homo sapiens
  Heavy chain CDR3 for antibody 9026 (IGHV3-30)
ARGAMVRGVDYGMDV

SEQ ID NO: 18053 - protein, 9 aa, Homo sapiens
  Light chain CDR3 for antibody 9027 (IGKV1D-16)
QQYNSYPYT

SEQ ID NO: 18054 - protein, 10 aa, Homo sapiens
  Heavy chain CDR3 for antibody 9027 (IGHV3-21)
ARRWERYFDY

SEQ ID NO: 18055 - protein, 10 aa, Homo sapiens
  Light chain CDR3 for antibody 9028 (IGKV1-39)
QQSYSTPMYT

SEQ ID NO: 18056 - protein, 13 aa, Homo sapiens
  Heavy chain CDR3 for antibody 9028 (IGHV3-33)
ARDYTMVRGVMNY

SEQ ID NO: 18057 - protein, 11 aa, Homo sapiens
  Light chain CDR3 for antibody 9029 (IGKV3-11)
QQRSNWPPTWT

SEQ ID NO: 18058 - protein, 17 aa, Homo sapiens
  Heavy chain CDR3 for antibody 9029 (IGHV3-23)
AKDGIGELSYYYYGMDV

SEQ ID NO: 18059 - protein, 8 aa, Homo sapiens
  Light chain CDR3 for antibody 9030 (IGKV1-5)
QQYNSYWT

SEQ ID NO: 18060 - protein, 12 aa, Homo sapiens
  Heavy chain CDR3 for antibody 9030 (IGHV3-33)
VRKWFGELYFDY

SEQ ID NO: 18061 - protein, 9 aa, Homo sapiens
  Light chain CDR3 for antibody 9031 (IGKV5-2)
LQHDNFPWT

SEQ ID NO: 18062 - protein, 14 aa, Homo sapiens
  Heavy chain CDR3 for antibody 9031 (IGHV3-33)
ARGLEWGGDNWFDP

SEQ ID NO: 18063 - protein, 9 aa, Homo sapiens
  Light chain CDR3 for antibody 9032 (IGKV3-15)
QQYNNWPRT

SEQ ID NO: 18064 - protein, 17 aa, Homo sapiens
  Heavy chain CDR3 for antibody 9032 (IGHV4-34)
ARDGSGSYTHYYYGMDV

SEQ ID NO: 18065 - protein, 10 aa, Homo sapiens
  Light chain CDR3 for antibody 9033 (IGKV3-11)
QQRSNWPIFT

SEQ ID NO: 18066 - protein, 13 aa, Homo sapiens
  Heavy chain CDR3 for antibody 9033 (IGHV3-30)
AAPFMVRGDGMDV

SEQ ID NO: 18067 - protein, 10 aa, Homo sapiens
  Light chain CDR3 for antibody 9034 (IGKV3-20)
QQYGRSPPVT

SEQ ID NO: 18068 - protein, 16 aa, Homo sapiens
  Heavy chain CDR3 for antibody 9034 (IGHV3-33)
ARGGRSDWLYYYGMDV

SEQ ID NO: 18069 - protein, 9 aa, Homo sapiens
  Light chain CDR3 for antibody 9035 (IGKV6-21)
HQSSSLPHT

SEQ ID NO: 18070 - protein, 14 aa, Homo sapiens
  Heavy chain CDR3 for antibody 9035 (IGHV3-23)
VRDRIAAASSDFDN

SEQ ID NO: 18071 - protein, 9 aa, Homo sapiens
  Light chain CDR3 for antibody 9036 (IGKV4-1)
QQYYSTPLT

SEQ ID NO: 18072 - protein, 11 aa, Homo sapiens
  Heavy chain CDR3 for antibody 9036 (IGHV4-59)
AREMGHDPFDI

SEQ ID NO: 18073 - protein, 10 aa, Homo sapiens
  Light chain CDR3 for antibody 9037 (IGKV3-15)
QQYNNWPPIT

SEQ ID NO: 18074 - protein, 17 aa, Homo sapiens
  Heavy chain CDR3 for antibody 9037 (IGHV3-33)
ARGEQWLGYYYYYGMDV

SEQ ID NO: 18075 - protein, 9 aa, Homo sapiens
  Light chain CDR3 for antibody 9038 (IGKV1-6)
LQDYKSPFT

SEQ ID NO: 18076 - protein, 11 aa, Homo sapiens
  Heavy chain CDR3 for antibody 9038 (IGHV3-33)
AREAANWGFDY

SEQ ID NO: 18077 - protein, 9 aa, Homo sapiens
  Light chain CDR3 for antibody 9039 (IGKV1D-13)
QRFNNYLYT

SEQ ID NO: 18078 - protein, 14 aa, Homo sapiens
  Heavy chain CDR3 for antibody 9039 (IGHV3-33)
ARDGVYISSSWFDP

SEQ ID NO: 18079 - protein, 8 aa, Homo sapiens
  Light chain CDR3 for antibody 9040 (IGKV3D-7)
QQDYSLLT

SEQ ID NO: 18080 - protein, 13 aa, Homo sapiens
  Heavy chain CDR3 for antibody 9040 (IGHV3-33)
VSTGDSYYYVMDV

SEQ ID NO: 18081 - protein, 8 aa, Homo sapiens
  Light chain CDR3 for antibody 9041 (IGKV1D-13)
QQFNNYPT

SEQ ID NO: 18082 - protein, 19 aa, Homo sapiens
  Heavy chain CDR3 for antibody 9041 (IGHV3-33)
ARDRYYDILTGYSSYYFDY

SEQ ID NO: 18083 - protein, 9 aa, Homo sapiens
  Light chain CDR3 for antibody 9042 (IGKV1-6)
LQDYNHPFT

SEQ ID NO: 18084 - protein, 13 aa, Homo sapiens
  Heavy chain CDR3 for antibody 9042 (IGHV3-33)
ARDYCGGDCYLDY

SEQ ID NO: 18085 - protein, 10 aa, Homo sapiens
  Light chain CDR3 for antibody 9043 (IGKV1-17)
LQHNSYPMYT

SEQ ID NO: 18086 - protein, 17 aa, Homo sapiens
  Heavy chain CDR3 for antibody 9043 (IGHV3-33)
ARVYYDILTGYSPAFDI

SEQ ID NO: 18087 - protein, 10 aa, Homo sapiens
  Light chain CDR3 for antibody 9044 (IGKV1-17)
LQHNSYPMYT

SEQ ID NO: 18088 - protein, 17 aa, Homo sapiens
  Heavy chain CDR3 for antibody 9044 (IGHV3-33)
ARGFSGYDGYYYYGMDV

SEQ ID NO: 18089 - protein, 10 aa, Homo sapiens
  Light chain CDR3 for antibody 9045 (IGKV1-39)
QQSYSTPMYT

SEQ ID NO: 18090 - protein, 9 aa, Homo sapiens
  Heavy chain CDR3 for antibody 9045 (IGHV1-18)
ARGKDWFDP

SEQ ID NO: 18091 - protein, 10 aa, Homo sapiens
  Light chain CDR3 for antibody 9046 (IGKV1-27)
QKYNSAPMYT

SEQ ID NO: 18092 - protein, 13 aa, Homo sapiens
  Heavy chain CDR3 for antibody 9046 (IGHV3-33)
ARDYCGGDCYLDY

SEQ ID NO: 18093 - protein, 9 aa, Homo sapiens
  Light chain CDR3 for antibody 9047 (IGKV3-15)
QQYNDWPLT

SEQ ID NO: 18094 - protein, 9 aa, Homo sapiens
  Heavy chain CDR3 for antibody 9047 (IGHV3-13)
ARDRWYFDL

SEQ ID NO: 18095 - protein, 9 aa, Homo sapiens
  Light chain CDR3 for antibody 9048 (IGKV1-6)
LQDYNYPYT

SEQ ID NO: 18096 - protein, 18 aa, Homo sapiens
  Heavy chain CDR3 for antibody 9048 (IGHV3-33)
ARDHCSGGSCYYYYGMDV

SEQ ID NO: 18097 - protein, 10 aa, Homo sapiens
  Light chain CDR3 for antibody 9049 (IGKV1-17)
LQHNSYPMYT

SEQ ID NO: 18098 - protein, 18 aa, Homo sapiens
  Heavy chain CDR3 for antibody 9049 (IGHV3-33)
ARREGITLIFYYYYGMDV

SEQ ID NO: 18099 - protein, 9 aa, Homo sapiens
  Light chain CDR3 for antibody 9050 (IGKV2-30)
MQGTHWPLT

SEQ ID NO: 18100 - protein, 9 aa, Homo sapiens
  Heavy chain CDR3 for antibody 9050 (IGHV3-33)
AANSYGLDY

SEQ ID NO: 18101 - protein, 8 aa, Homo sapiens
  Light chain CDR3 for antibody 9051 (IGKV3D-7)
QQDYNLLT

SEQ ID NO: 18102 - protein, 11 aa, Homo sapiens
  Heavy chain CDR3 for antibody 9051 (IGHV3-23)
AKGLWSYYFDY

SEQ ID NO: 18103 - protein, 8 aa, Homo sapiens
  Light chain CDR3 for antibody 9052 (IGKV3D-7)
QQDYNLLT

SEQ ID NO: 18104 - protein, 13 aa, Homo sapiens
  Heavy chain CDR3 for antibody 9052 (IGHV1-46)
ARRQVGYYYGMDV

SEQ ID NO: 18105 - protein, 9 aa, Homo sapiens
  Light chain CDR3 for antibody 9053 (IGKV1D-13)
QRFNNYLYT

SEQ ID NO: 18106 - protein, 16 aa, Homo sapiens
  Heavy chain CDR3 for antibody 9053 (IGHV3-33)
ARGGRSDWLYYYGMDV

SEQ ID NO: 18107 - protein, 11 aa, Homo sapiens
  Light chain CDR3 for antibody 9054 (IGKV3-11)
QQRSNWPPTWT

SEQ ID NO: 18108 - protein, 7 aa, Homo sapiens
  Heavy chain CDR3 for antibody 9054 (IGHV3-33)
ARELVDY

SEQ ID NO: 18109 - protein, 9 aa, Homo sapiens
  Light chain CDR3 for antibody 9055 (IGKV1-16)
QQYYSYPRT

SEQ ID NO: 18110 - protein, 18 aa, Homo sapiens
  Heavy chain CDR3 for antibody 9055 (IGHV3-33)
ARERYYYGSGSYPDAFDI

SEQ ID NO: 18111 - protein, 10 aa, Homo sapiens
  Light chain CDR3 for antibody 9056 (IGKV3-20)
QQYGRSPPVT

SEQ ID NO: 18112 - protein, 21 aa, Homo sapiens
  Heavy chain CDR3 for antibody 9056 (IGHV3-23)
AKDIDYYGSGSYPLYYYGMDV

SEQ ID NO: 18113 - protein, 9 aa, Homo sapiens
  Light chain CDR3 for antibody 9057 (IGKV3-15)
QQYNNWPRT

SEQ ID NO: 18114 - protein, 14 aa, Homo sapiens
  Heavy chain CDR3 for antibody 9057 (IGHV3-23)
AKCDYDILTGILDY

SEQ ID NO: 18115 - protein, 11 aa, Homo sapiens
  Light chain CDR3 for antibody 9058 (IGKV3-11)
QQRSNWPPTWT

SEQ ID NO: 18116 - protein, 15 aa, Homo sapiens
  Heavy chain CDR3 for antibody 9058 (IGHV3-30)
ARGAMVRGVDYGMDV

SEQ ID NO: 18117 - protein, 9 aa, Homo sapiens
  Light chain CDR3 for antibody 9059 (IGKV6-21)
HQSSSLPYT

SEQ ID NO: 18118 - protein, 14 aa, Homo sapiens
  Heavy chain CDR3 for antibody 9059 (IGHV3-33)
ARDAMGTSTAWFDP

SEQ ID NO: 18119 - protein, 10 aa, Homo sapiens
  Light chain CDR3 for antibody 9060 (IGKV1-17)
LQHNSYPMYT

SEQ ID NO: 18120 - protein, 12 aa, Homo sapiens
  Heavy chain CDR3 for antibody 9060 (IGHV3-33)
ARDPGYYYGLDV

SEQ ID NO: 18121 - protein, 9 aa, Homo sapiens
  Light chain CDR3 for antibody 9061 (IGKV1-16)
QQYNSYPPT

SEQ ID NO: 18122 - protein, 14 aa, Homo sapiens
  Heavy chain CDR3 for antibody 9061 (IGHV3-33)
ARDAMGTPTAWFDP

SEQ ID NO: 18123 - protein, 9 aa, Homo sapiens
  Light chain CDR3 for antibody 9062 (IGKV1-39)
QQSYRTPLT

SEQ ID NO: 18124 - protein, 15 aa, Homo sapiens
  Heavy chain CDR3 for antibody 9062 (IGHV3-20)
AREGSSSWYLYYFDY

SEQ ID NO: 18125 - protein, 8 aa, Homo sapiens
  Light chain CDR3 for antibody 9063 (IGKV1-5)
QQYNSYWT

SEQ ID NO: 18126 - protein, 16 aa, Homo sapiens
  Heavy chain CDR3 for antibody 9063 (IGHV3-23)
AKDLRYFDWSLYAFDI

SEQ ID NO: 18127 - protein, 8 aa, Homo sapiens
  Light chain CDR3 for antibody 9064 (IGKV3-11)
QQRGNWPS

SEQ ID NO: 18128 - protein, 15 aa, Homo sapiens
  Heavy chain CDR3 for antibody 9064 (IGHV4-59)
ARDLGHYYGSVSIDY

SEQ ID NO: 18129 - protein, 10 aa, Homo sapiens
  Light chain CDR3 for antibody 9065 (IGKV3-15)
QQYNNWPPYT

SEQ ID NO: 18130 - protein, 17 aa, Homo sapiens
  Heavy chain CDR3 for antibody 9065 (IGHV1-24)
ATEGYDILPGYYNVLDY

SEQ ID NO: 18131 - protein, 9 aa, Homo sapiens
  Light chain CDR3 for antibody 9066 (IGKV1-17)
LQYNSYPWT

SEQ ID NO: 18132 - protein, 14 aa, Homo sapiens
  Heavy chain CDR3 for antibody 9066 (IGHV3-23)
AKSRIVGALYYFGY

SEQ ID NO: 18133 - protein, 9 aa, Homo sapiens
  Light chain CDR3 for antibody 9067 (IGKV1-6)
LQDFHYPWT

SEQ ID NO: 18134 - protein, 13 aa, Homo sapiens
  Heavy chain CDR3 for antibody 9067 (IGHV1-2)
ARDGVRGSFGMDV

SEQ ID NO: 18135 - protein, 9 aa, Homo sapiens
  Light chain CDR3 for antibody 9068 (IGKV3-20)
QQYGSSPRT

SEQ ID NO: 18136 - protein, 15 aa, Homo sapiens
  Heavy chain CDR3 for antibody 9068 (IGHV1-24)
ATEDSSSYYYYGLDV

SEQ ID NO: 18137 - protein, 9 aa, Homo sapiens
  Light chain CDR3 for antibody 9069 (IGKV1-17)
LQHNSYPWT

SEQ ID NO: 18138 - protein, 22 aa, Homo sapiens
  Heavy chain CDR3 for antibody 9069 (IGHV3-33)
ARMYYDILTGYYKDYYYYGMDV

SEQ ID NO: 18139 - protein, 8 aa, Homo sapiens
  Light chain CDR3 for antibody 9070 (IGKV1-5)
QQYNSYWT

SEQ ID NO: 18140 - protein, 12 aa, Homo sapiens
  Heavy chain CDR3 for antibody 9070 (IGHV3-33)
AREGTRWVYFDY

SEQ ID NO: 18141 - protein, 9 aa, Homo sapiens
  Light chain CDR3 for antibody 9071 (IGKV1-27)
QKYNSAPYT

SEQ ID NO: 18142 - protein, 15 aa, Homo sapiens
  Heavy chain CDR3 for antibody 9071 (IGHV3-64)
ARDSRPEITGPPFDY

SEQ ID NO: 18143 - protein, 8 aa, Homo sapiens
  Light chain CDR3 for antibody 9072 (IGKV6-21)
HQSSSLPT

SEQ ID NO: 18144 - protein, 18 aa, Homo sapiens
  Heavy chain CDR3 for antibody 9072 (IGHV4-59)
AREGHYYTSGSYYKAFDY

SEQ ID NO: 18145 - protein, 8 aa, Homo sapiens
  Light chain CDR3 for antibody 9073 (IGKV1-5)
QQYNSYYT

SEQ ID NO: 18146 - protein, 9 aa, Homo sapiens
  Heavy chain CDR3 for antibody 9073 (IGHV3-13)
ARDRWYFDL

SEQ ID NO: 18147 - protein, 9 aa, Homo sapiens
  Light chain CDR3 for antibody 9074 (IGKV1-16)
QQYDNLPFT

SEQ ID NO: 18148 - protein, 14 aa, Homo sapiens
  Heavy chain CDR3 for antibody 9074 (IGHV3-33)
ARDRIAAASSDFDC

SEQ ID NO: 18149 - protein, 9 aa, Homo sapiens
  Light chain CDR3 for antibody 9075 (IGKV3-15)
QQYNNWPYT

SEQ ID NO: 18150 - protein, 13 aa, Homo sapiens
  Heavy chain CDR3 for antibody 9075 (IGHV3-30)
AAPFMVRGDGMDV

SEQ ID NO: 18151 - protein, 9 aa, Homo sapiens
  Light chain CDR3 for antibody 9076 (IGKV1-6)
LQDYKSPFT

SEQ ID NO: 18152 - protein, 12 aa, Homo sapiens
  Heavy chain CDR3 for antibody 9076 (IGHV3-23)
AKDGWFGESLDY

SEQ ID NO: 18153 - protein, 8 aa, Homo sapiens
  Light chain CDR3 for antibody 9077 (IGKV1D-13)
QQFNNYPT

SEQ ID NO: 18154 - protein, 18 aa, Homo sapiens
  Heavy chain CDR3 for antibody 9077 (IGHV3-33)
ARGGYSSGWDYYYYGMDV

SEQ ID NO: 18155 - protein, 9 aa, Homo sapiens
  Light chain CDR3 for antibody 9078 (IGKV1-17)
LQHNSYPYT

SEQ ID NO: 18156 - protein, 12 aa, Homo sapiens
  Heavy chain CDR3 for antibody 9078 (IGHV3-64)
ARVNSGSPYFDY

SEQ ID NO: 18157 - protein, 9 aa, Homo sapiens
  Light chain CDR3 for antibody 9079 (IGKV3-20)
QQYGSSPYT

SEQ ID NO: 18158 - protein, 16 aa, Homo sapiens
  Heavy chain CDR3 for antibody 9079 (IGHV3-33)
AREMAGSYYYYYGMDV

SEQ ID NO: 18159 - protein, 9 aa, Homo sapiens
  Light chain CDR3 for antibody 9080 (IGKV1-27)
QKYNSAPYT

SEQ ID NO: 18160 - protein, 11 aa, Homo sapiens
  Heavy chain CDR3 for antibody 9080 (IGHV4-39)
ARLLVGATTDY

SEQ ID NO: 18161 - protein, 9 aa, Homo sapiens
  Light chain CDR3 for antibody 9081 (IGKV2D-28)
MQVLQTPFT

SEQ ID NO: 18162 - protein, 13 aa, Homo sapiens
  Heavy chain CDR3 for antibody 9081 (IGHV4-28)
ARKGATGYYGMDV

SEQ ID NO: 18163 - protein, 9 aa, Homo sapiens
  Light chain CDR3 for antibody 9082 (IGKV1-16)
QHYNDYPFT

SEQ ID NO: 18164 - protein, 13 aa, Homo sapiens
  Heavy chain CDR3 for antibody 9082 (IGHV3-33)
AKEDGDYHHYFDY

SEQ ID NO: 18165 - protein, 9 aa, Homo sapiens
  Light chain CDR3 for antibody 9083 (IGKV3-15)
QQYNNWPRT

SEQ ID NO: 18166 - protein, 18 aa, Homo sapiens
  Heavy chain CDR3 for antibody 9083 (IGHV3-33)
VRDRERYGSGSYPDAFDI

SEQ ID NO: 18167 - protein, 8 aa, Homo sapiens
  Light chain CDR3 for antibody 9084 (IGKV1D-16)
QQYNSYYT

SEQ ID NO: 18168 - protein, 17 aa, Homo sapiens
  Heavy chain CDR3 for antibody 9084 (IGHV3-33)
ARQGVLLWFGELYYFDY

SEQ ID NO: 18169 - protein, 9 aa, Homo sapiens
  Light chain CDR3 for antibody 9085 (IGKV1-16)
QQYNSYPLT

SEQ ID NO: 18170 - protein, 10 aa, Homo sapiens
  Heavy chain CDR3 for antibody 9085 (IGHV3-33)
ARDYGDYFDY

SEQ ID NO: 18171 - protein, 9 aa, Homo sapiens
  Light chain CDR3 for antibody 9086 (IGKV1-6)
QQEYNYPLT

SEQ ID NO: 18172 - protein, 16 aa, Homo sapiens
  Heavy chain CDR3 for antibody 9086 (IGHV1-46)
ARGYDMLTGDYHGMDV

SEQ ID NO: 18173 - protein, 10 aa, Homo sapiens
  Light chain CDR3 for antibody 9087 (IGKV1-39)
QQSYSTPMYT

SEQ ID NO: 18174 - protein, 18 aa, Homo sapiens
  Heavy chain CDR3 for antibody 9087 (IGHV1-46)
ARDLTGRTENYYFYGMDV

SEQ ID NO: 18175 - protein, 8 aa, Homo sapiens
  Light chain CDR3 for antibody 9088 (IGKV6-21)
HQSSSLPT

SEQ ID NO: 18176 - protein, 14 aa, Homo sapiens
  Heavy chain CDR3 for antibody 9088 (IGHV3-33)
ARDGYDFLTGPFDY

SEQ ID NO: 18177 - protein, 9 aa, Homo sapiens
  Light chain CDR3 for antibody 9089 (IGKV2D-28)
MQALQTPPT

SEQ ID NO: 18178 - protein, 17 aa, Homo sapiens
  Heavy chain CDR3 for antibody 9089 (IGHV1-18)
ARDEGYDILTGYPHFDY

SEQ ID NO: 18179 - protein, 9 aa, Homo sapiens
  Light chain CDR3 for antibody 9090 (IGKV1-27)
QKYNSAPYT

SEQ ID NO: 18180 - protein, 14 aa, Homo sapiens
  Heavy chain CDR3 for antibody 9090 (IGHV3-23)
AKCDYDILTGILDY

SEQ ID NO: 18181 - protein, 9 aa, Homo sapiens
  Light chain CDR3 for antibody 9091 (IGKV1-6)
LQDYKSPFT

SEQ ID NO: 18182 - protein, 15 aa, Homo sapiens
  Heavy chain CDR3 for antibody 9091 (IGHV1-18)
ARGYCSSTSCYYFDY

SEQ ID NO: 18183 - protein, 9 aa, Homo sapiens
  Light chain CDR3 for antibody 9092 (IGKV1-39)
QQSYSTPYT

SEQ ID NO: 18184 - protein, 13 aa, Homo sapiens
  Heavy chain CDR3 for antibody 9092 (IGHV3-33)
ARDWGYSNGYFDY

SEQ ID NO: 18185 - protein, 6 aa, Homo sapiens
  Light chain CDR3 for antibody 9093 (IGKV3-20)
QQYGST

SEQ ID NO: 18186 - protein, 17 aa, Homo sapiens
  Heavy chain CDR3 for antibody 9093 (IGHV3-33)
ARESLKLGIYYYYGMDV

SEQ ID NO: 18187 - protein, 10 aa, Homo sapiens
  Light chain CDR3 for antibody 9094 (IGKV1-17)
LQHNSYPMYT

SEQ ID NO: 18188 - protein, 9 aa, Homo sapiens
  Heavy chain CDR3 for antibody 9094 (IGHV3-23)
AREYKEFDY

SEQ ID NO: 18189 - protein, 9 aa, Homo sapiens
  Light chain CDR3 for antibody 9095 (IGKV3D-20)
QQYGSSPYT

SEQ ID NO: 18190 - protein, 16 aa, Homo sapiens
  Heavy chain CDR3 for antibody 9095 (IGHV4-59)
AGGSGSYRDYYYGMDV

SEQ ID NO: 18191 - protein, 9 aa, Homo sapiens
  Light chain CDR3 for antibody 9096 (IGKV2-30)
MQGTHWPLT

SEQ ID NO: 18192 - protein, 13 aa, Homo sapiens
  Heavy chain CDR3 for antibody 9096 (IGHV4-39)
ARHHYGSGSLRDY

SEQ ID NO: 18193 - protein, 10 aa, Homo sapiens
  Light chain CDR3 for antibody 9097 (IGKV3-11)
QQRSNWLMYT

SEQ ID NO: 18194 - protein, 13 aa, Homo sapiens
  Heavy chain CDR3 for antibody 9097 (IGHV3-33)
ARTDYYFYYGLDV

SEQ ID NO: 18195 - protein, 8 aa, Homo sapiens
  Light chain CDR3 for antibody 9098 (IGKV3-20)
QQYGSSFT

SEQ ID NO: 18196 - protein, 20 aa, Homo sapiens
  Heavy chain CDR3 for antibody 9098 (IGHV3-23)
AKDREMAATSHYYYYYGMDV

SEQ ID NO: 18197 - protein, 9 aa, Homo sapiens
  Light chain CDR3 for antibody 9099 (IGKV2D-28)
MQALQTPPT

SEQ ID NO: 18198 - protein, 11 aa, Homo sapiens
  Heavy chain CDR3 for antibody 9099 (IGHV3-74)
ARDRGNWGFDY

SEQ ID NO: 18199 - protein, 8 aa, Homo sapiens
  Light chain CDR3 for antibody 9100 (IGKV3D-7)
QQDYNLLT

SEQ ID NO: 18200 - protein, 14 aa, Homo sapiens
  Heavy chain CDR3 for antibody 9100 (IGHV3-23)
AKCDYDILTGILDY

SEQ ID NO: 18201 - protein, 9 aa, Homo sapiens
  Light chain CDR3 for antibody 9101 (IGKV1-9)
QQLNSYPYT

SEQ ID NO: 18202 - protein, 19 aa, Homo sapiens
  Heavy chain CDR3 for antibody 9101 (IGHV3-33)
ARGRGSYYYGPGSHYGMDV

SEQ ID NO: 18203 - protein, 8 aa, Homo sapiens
  Light chain CDR3 for antibody 9102 (IGKV1-5)
QQYNSYWT

SEQ ID NO: 18204 - protein, 17 aa, Homo sapiens
  Heavy chain CDR3 for antibody 9102 (IGHV3-33)
ARVRGVIEGYYYYGMDV

SEQ ID NO: 18205 - protein, 9 aa, Homo sapiens
  Light chain CDR3 for antibody 9103 (IGKV1-6)
LQDFHYPWT

SEQ ID NO: 18206 - protein, 14 aa, Homo sapiens
  Heavy chain CDR3 for antibody 9103 (IGHV3-33)
VRDAMGATTAWFDP

SEQ ID NO: 18207 - protein, 10 aa, Homo sapiens
  Light chain CDR3 for antibody 9104 (IGKV1-39)
QQSYSTPMYT

SEQ ID NO: 18208 - protein, 12 aa, Homo sapiens
  Heavy chain CDR3 for antibody 9104 (IGHV3-33)
AREGDILTGYSL

SEQ ID NO: 18209 - protein, 10 aa, Homo sapiens
  Light chain CDR3 for antibody 9105 (IGKV1-39)
QQSYSTPMYT

SEQ ID NO: 18210 - protein, 15 aa, Homo sapiens
  Heavy chain CDR3 for antibody 9105 (IGHV3-74)
ARGSGSHYHYYGMDV

SEQ ID NO: 18211 - protein, 9 aa, Homo sapiens
  Light chain CDR3 for antibody 9106 (IGKV2D-24)
TQATQFPHT

SEQ ID NO: 18212 - protein, 19 aa, Homo sapiens
  Heavy chain CDR3 for antibody 9106 (IGHV1-18)
ARDDILTGYSLYYYYGMDV

SEQ ID NO: 18213 - protein, 9 aa, Homo sapiens
  Light chain CDR3 for antibody 9107 (IGKV3D-20)
QQYGYSPRT

SEQ ID NO: 18214 - protein, 14 aa, Homo sapiens
  Heavy chain CDR3 for antibody 9107 (IGHV3-33)
ARWELPFYYSGMDV

SEQ ID NO: 18215 - protein, 9 aa, Homo sapiens
  Light chain CDR3 for antibody 9108 (IGKV3D-7)
QQDYNLPWT

SEQ ID NO: 18216 - protein, 20 aa, Homo sapiens
  Heavy chain CDR3 for antibody 9108 (IGHV3-23)
AKGMGGLRYFDWPHYYGMDV

SEQ ID NO: 18217 - protein, 9 aa, Homo sapiens
  Light chain CDR3 for antibody 9109 (IGKV1-9)
QQYNSYPRT

SEQ ID NO: 18218 - protein, 17 aa, Homo sapiens
  Heavy chain CDR3 for antibody 9109 (IGHV3-23)
ANGGFGESHYNYYGMDV

SEQ ID NO: 18219 - protein, 9 aa, Homo sapiens
  Light chain CDR3 for antibody 9110 (IGKV1-17)
LQHNSYPYT

SEQ ID NO: 18220 - protein, 14 aa, Homo sapiens
  Heavy chain CDR3 for antibody 9110 (IGHV3-23)
AKGGGVGAYNWFDP

SEQ ID NO: 18221 - protein, 9 aa, Homo sapiens
  Light chain CDR3 for antibody 9111 (IGKV3D-7)
QQDYEFPLT

SEQ ID NO: 18222 - protein, 10 aa, Homo sapiens
  Heavy chain CDR3 for antibody 9111 (IGHV4-39)
ARQLGNWFDP

SEQ ID NO: 18223 - protein, 9 aa, Homo sapiens
  Light chain CDR3 for antibody 9112 (IGKV1-9)
QQLNSYPYT

SEQ ID NO: 18224 - protein, 13 aa, Homo sapiens
  Heavy chain CDR3 for antibody 9112 (IGHV3-23)
AKERLRYFDWLAY

SEQ ID NO: 18225 - protein, 9 aa, Homo sapiens
  Light chain CDR3 for antibody 9113 (IGKV1-9)
QQLNTYPWT

SEQ ID NO: 18226 - protein, 12 aa, Homo sapiens
  Heavy chain CDR3 for antibody 9113 (IGHV1-46)
ARGLTGDHAIDI

SEQ ID NO: 18227 - protein, 9 aa, Homo sapiens
  Light chain CDR3 for antibody 9114 (IGKV3-11)
QQRSNWMYT

SEQ ID NO: 18228 - protein, 17 aa, Homo sapiens
  Heavy chain CDR3 for antibody 9114 (IGHV3-33)
ARCGYSSSWYDPYYFDY

SEQ ID NO: 18229 - protein, 9 aa, Homo sapiens
  Light chain CDR3 for antibody 9115 (IGKV1D-13)
QRLNNYLYT

SEQ ID NO: 18230 - protein, 9 aa, Homo sapiens
  Heavy chain CDR3 for antibody 9115 (IGHV3-30)
ARDYFHFDY

SEQ ID NO: 18231 - protein, 9 aa, Homo sapiens
  Light chain CDR3 for antibody 9116 (IGKV1-17)
LHSNNYPWT

SEQ ID NO: 18232 - protein, 17 aa, Homo sapiens
  Heavy chain CDR3 for antibody 9116 (IGHV3-33)
ARSPYDILTGYSYYFDY

SEQ ID NO: 18233 - protein, 10 aa, Homo sapiens
  Light chain CDR3 for antibody 9117 (IGKV1-17)
LQHNSYPMYT

SEQ ID NO: 18234 - protein, 16 aa, Homo sapiens
  Heavy chain CDR3 for antibody 9117 (IGHV3-33)
AREGGLIAAAGTGFDY

SEQ ID NO: 18235 - protein, 6 aa, Homo sapiens
  Light chain CDR3 for antibody 9118 (IGKV3-20)
QQYGST

SEQ ID NO: 18236 - protein, 14 aa, Homo sapiens
  Heavy chain CDR3 for antibody 9118 (IGHV3-33)
ARDREQQLVRYFDY

SEQ ID NO: 18237 - protein, 9 aa, Homo sapiens
  Light chain CDR3 for antibody 9119 (IGKV1-9)
QQLNGYPFT

SEQ ID NO: 18238 - protein, 17 aa, Homo sapiens
  Heavy chain CDR3 for antibody 9119 (IGHV3-33)
VREGGLLWVGELSLFDY

SEQ ID NO: 18239 - protein, 9 aa, Homo sapiens
  Light chain CDR3 for antibody 9120 (IGKV1-17)
LHSNNYPWT

SEQ ID NO: 18240 - protein, 13 aa, Homo sapiens
  Heavy chain CDR3 for antibody 9120 (IGHV3-33)
ARDYCGGDCYLDY

SEQ ID NO: 18241 - protein, 9 aa, Homo sapiens
  Light chain CDR3 for antibody 9121 (IGKV1D-13)
QQFNNYPHT

SEQ ID NO: 18242 - protein, 11 aa, Homo sapiens
  Heavy chain CDR3 for antibody 9121 (IGHV4-59)
AREDYGVPFDY

SEQ ID NO: 18243 - protein, 11 aa, Homo sapiens
  Light chain CDR3 for antibody 9122 (IGKV3-11)
QQRSNWPPTWT

SEQ ID NO: 18244 - protein, 16 aa, Homo sapiens
  Heavy chain CDR3 for antibody 9122 (IGHV4-59)
ARFYFGSGSYYWYFDL

SEQ ID NO: 18245 - protein, 9 aa, Homo sapiens
  Light chain CDR3 for antibody 9123 (IGKV1D-16)
QQYNSYPYT

SEQ ID NO: 18246 - protein, 16 aa, Homo sapiens
  Heavy chain CDR3 for antibody 9123 (IGHV3-48)
TRRRQWLAGFDWYFDL

SEQ ID NO: 18247 - protein, 9 aa, Homo sapiens
  Light chain CDR3 for antibody 9124 (IGKV1-16)
QQYNSYPYT

SEQ ID NO: 18248 - protein, 13 aa, Homo sapiens
  Heavy chain CDR3 for antibody 9124 (IGHV4-59)
AREGDYDIDGMDV

SEQ ID NO: 18249 - protein, 9 aa, Homo sapiens
  Light chain CDR3 for antibody 9125 (IGKV1-9)
QQLISYPLT

SEQ ID NO: 18250 - protein, 16 aa, Homo sapiens
  Heavy chain CDR3 for antibody 9125 (IGHV3-33)
ARDNFGSGSYYSHFHY

SEQ ID NO: 18251 - protein, 8 aa, Homo sapiens
  Light chain CDR3 for antibody 9126 (IGKV3-20)
QQYGSSRT

SEQ ID NO: 18252 - protein, 12 aa, Homo sapiens
  Heavy chain CDR3 for antibody 9126 (IGHV3-33)
ASRDILTGYLGY

SEQ ID NO: 18253 - protein, 9 aa, Homo sapiens
  Light chain CDR3 for antibody 9127 (IGKV1-9)
QQLISYPLT

SEQ ID NO: 18254 - protein, 13 aa, Homo sapiens
  Heavy chain CDR3 for antibody 9127 (IGHV3-11)
ARDEGYSGYNLDN

SEQ ID NO: 18255 - protein, 9 aa, Homo sapiens
  Light chain CDR3 for antibody 9128 (IGKV6-21)
HQSSSLPYT

SEQ ID NO: 18256 - protein, 20 aa, Homo sapiens
  Heavy chain CDR3 for antibody 9128 (IGHV3-33)
ARRMVRGVKKTYYYYYGLDV

SEQ ID NO: 18257 - protein, 9 aa, Homo sapiens
  Light chain CDR3 for antibody 9129 (IGKV1-9)
QQLISYPLT

SEQ ID NO: 18258 - protein, 16 aa, Homo sapiens
  Heavy chain CDR3 for antibody 9129 (IGHV3-33)
ARDTPYYSGSGRPFDH

SEQ ID NO: 18259 - protein, 8 aa, Homo sapiens
  Light chain CDR3 for antibody 9130 (IGKV6-21)
HQSSSLPT

SEQ ID NO: 18260 - protein, 11 aa, Homo sapiens
  Heavy chain CDR3 for antibody 9130 (IGHV3-33)
ARGTTVTHFDY

SEQ ID NO: 18261 - protein, 8 aa, Homo sapiens
  Light chain CDR3 for antibody 9131 (IGKV1D-13)
QQFNNYPT

SEQ ID NO: 18262 - protein, 14 aa, Homo sapiens
  Heavy chain CDR3 for antibody 9131 (IGHV3-33)
ARDRYYDILNGGGY

SEQ ID NO: 18263 - protein, 8 aa, Homo sapiens
  Light chain CDR3 for antibody 9132 (IGKV3-11)
QQRSNWLT

SEQ ID NO: 18264 - protein, 14 aa, Homo sapiens
  Heavy chain CDR3 for antibody 9132 (IGHV3-33)
ARAGSGYDRDWFDP

SEQ ID NO: 18265 - protein, 8 aa, Homo sapiens
  Light chain CDR3 for antibody 9133 (IGKV1D-13)
QQFNNYLT

SEQ ID NO: 18266 - protein, 10 aa, Homo sapiens
  Heavy chain CDR3 for antibody 9133 (IGHV3-23)
AKDHYGDYPY

SEQ ID NO: 18267 - protein, 9 aa, Homo sapiens
  Light chain CDR3 for antibody 9134 (IGKV1-9)
QQLNGYPFT

SEQ ID NO: 18268 - protein, 14 aa, Homo sapiens
  Heavy chain CDR3 for antibody 9134 (IGHV4-39)
ARDSGYDYYYAMDV

SEQ ID NO: 18269 - protein, 9 aa, Homo sapiens
  Light chain CDR3 for antibody 9135 (IGKV1-39)
QQSYRTPLT

SEQ ID NO: 18270 - protein, 19 aa, Homo sapiens
  Heavy chain CDR3 for antibody 9135 (IGHV3-21)
AREDYYGSGSYYNEDWFDP

SEQ ID NO: 18271 - protein, 8 aa, Homo sapiens
  Light chain CDR3 for antibody 9136 (IGKV1-5)
QQYNSYYT

SEQ ID NO: 18272 - protein, 16 aa, Homo sapiens
  Heavy chain CDR3 for antibody 9136 (IGHV3-20)
ARDSSSLDYYYYGMDV

SEQ ID NO: 18273 - protein, 8 aa, Homo sapiens
  Light chain CDR3 for antibody 9137 (IGKV3D-7)
QQDYNLLT

SEQ ID NO: 18274 - protein, 18 aa, Homo sapiens
  Heavy chain CDR3 for antibody 9137 (IGHV3-30)
ARDRHHDILTGYSDAFEI

SEQ ID NO: 18275 - protein, 9 aa, Homo sapiens
  Light chain CDR3 for antibody 9138 (IGKV1-16)
QHYNDYPFT

SEQ ID NO: 18276 - protein, 14 aa, Homo sapiens
  Heavy chain CDR3 for antibody 9138 (IGHV3-33)
ARDRIAAASSDFDC

SEQ ID NO: 18277 - protein, 7 aa, Homo sapiens
  Light chain CDR3 for antibody 9139 (IGKV1-17)
LQHNSYP

SEQ ID NO: 18278 - protein, 20 aa, Homo sapiens
  Heavy chain CDR3 for antibody 9139 (IGHV1-18)
AREVGIAVAGTLYYYYGMDV

SEQ ID NO: 18279 - protein, 9 aa, Homo sapiens
  Light chain CDR3 for antibody 9140 (IGKV3-20)
QQYGRSPRT

SEQ ID NO: 18280 - protein, 19 aa, Homo sapiens
  Heavy chain CDR3 for antibody 9140 (IGHV1-24)
ATHYDILTGSPYYYCALDV

SEQ ID NO: 18281 - protein, 9 aa, Homo sapiens
  Light chain CDR3 for antibody 9141 (IGKV2D-24)
TQATQFPHT

SEQ ID NO: 18282 - protein, 18 aa, Homo sapiens
  Heavy chain CDR3 for antibody 9141 (IGHV1-18)
ARDRYYYDSGSYYYGMDV

SEQ ID NO: 18283 - protein, 10 aa, Homo sapiens
  Light chain CDR3 for antibody 9142 (IGKV3-15)
QQYNNWPPIT

SEQ ID NO: 18284 - protein, 9 aa, Homo sapiens
  Heavy chain CDR3 for antibody 9142 (IGHV4-59)
ARGGASFDY

SEQ ID NO: 18285 - protein, 9 aa, Homo sapiens
  Light chain CDR3 for antibody 9143 (IGKV3-11)
QQRSNWMYT

SEQ ID NO: 18286 - protein, 10 aa, Homo sapiens
  Heavy chain CDR3 for antibody 9143 (IGHV3-33)
ARDGSGSQPI

SEQ ID NO: 18287 - protein, 9 aa, Homo sapiens
  Light chain CDR3 for antibody 9144 (IGKV1D-16)
QQYITYPYT

SEQ ID NO: 18288 - protein, 14 aa, Homo sapiens
  Heavy chain CDR3 for antibody 9144 (IGHV3-33)
ARDWNDVYYYGMDV

SEQ ID NO: 18289 - protein, 10 aa, Homo sapiens
  Light chain CDR3 for antibody 9145 (IGKV3-11)
QQRSNWPPFT

SEQ ID NO: 18290 - protein, 17 aa, Homo sapiens
  Heavy chain CDR3 for antibody 9145 (IGHV4-59)
ARRITMVREIIITAFDY

SEQ ID NO: 18291 - protein, 9 aa, Homo sapiens
  Light chain CDR3 for antibody 9146 (IGKV3D-20)
QQFGSLPLT

SEQ ID NO: 18292 - protein, 11 aa, Homo sapiens
  Heavy chain CDR3 for antibody 9146 (IGHV4-59)
AREMGHDTFDI

SEQ ID NO: 18293 - protein, 9 aa, Homo sapiens
  Light chain CDR3 for antibody 9147 (IGKV2D-24)
TQATQFPHT

SEQ ID NO: 18294 - protein, 12 aa, Homo sapiens
  Heavy chain CDR3 for antibody 9147 (IGHV1-46)
AREDYDIDGMDV

SEQ ID NO: 18295 - protein, 8 aa, Homo sapiens
  Light chain CDR3 for antibody 9148 (IGKV3D-7)
QQDYNLLT

SEQ ID NO: 18296 - protein, 17 aa, Homo sapiens
  Heavy chain CDR3 for antibody 9148 (IGHV1-24)
ATHYGSGSHYKGYGMDV

SEQ ID NO: 18297 - protein, 9 aa, Homo sapiens
  Light chain CDR3 for antibody 9149 (IGKV3-11)
QQRSNWPYT

SEQ ID NO: 18298 - protein, 19 aa, Homo sapiens
  Heavy chain CDR3 for antibody 9149 (IGHV3-33)
AREDYYGSGSYYNEDWFDP

SEQ ID NO: 18299 - protein, 9 aa, Homo sapiens
  Light chain CDR3 for antibody 9150 (IGKV1-17)
LQHNSFPLT

SEQ ID NO: 18300 - protein, 11 aa, Homo sapiens
  Heavy chain CDR3 for antibody 9150 (IGHV3-33)
ARGSGSYAFDS

SEQ ID NO: 18301 - protein, 8 aa, Homo sapiens
  Light chain CDR3 for antibody 9151 (IGKV3-11)
QQRSNWWT

SEQ ID NO: 18302 - protein, 20 aa, Homo sapiens
  Heavy chain CDR3 for antibody 9151 (IGHV3-33)
ARDRCSSTSCYGYYYYGMDV

SEQ ID NO: 18303 - protein, 9 aa, Homo sapiens
  Light chain CDR3 for antibody 9152 (IGKV3D-7)
QQDYNLPYT

SEQ ID NO: 18304 - protein, 19 aa, Homo sapiens
  Heavy chain CDR3 for antibody 9152 (IGHV1-24)
ATAGLQWFGEKIGYYGMDV

SEQ ID NO: 18305 - protein, 8 aa, Homo sapiens
  Light chain CDR3 for antibody 9153 (IGKV3D-7)
QQDYNLLT

SEQ ID NO: 18306 - protein, 15 aa, Homo sapiens
  Heavy chain CDR3 for antibody 9153 (IGHV3-33)
AKDRNSGYDWGGFDY

SEQ ID NO: 18307 - protein, 9 aa, Homo sapiens
  Light chain CDR3 for antibody 9154 (IGKV1-16)
QHYNDYPFT

SEQ ID NO: 18308 - protein, 18 aa, Homo sapiens
  Heavy chain CDR3 for antibody 9154 (IGHV3-33)
ARGYYGSGNFYKDSGMDV

SEQ ID NO: 18309 - protein, 9 aa, Homo sapiens
  Light chain CDR3 for antibody 9155 (IGKV6-21)
HQSYSLPHT

SEQ ID NO: 18310 - protein, 9 aa, Homo sapiens
  Heavy chain CDR3 for antibody 9155 (IGHV3-30)
VRDNWGFDY

SEQ ID NO: 18311 - protein, 9 aa, Homo sapiens
  Light chain CDR3 for antibody 9156 (IGKV1D-13)
QRFNNYLYT

SEQ ID NO: 18312 - protein, 18 aa, Homo sapiens
  Heavy chain CDR3 for antibody 9156 (IGHV3-23)
AKDRITGTTYGYYSGLDV

SEQ ID NO: 18313 - protein, 8 aa, Homo sapiens
  Light chain CDR3 for antibody 9157 (IGKV1-39)
QQSYTTPT

SEQ ID NO: 18314 - protein, 18 aa, Homo sapiens
  Heavy chain CDR3 for antibody 9157 (IGHV4-59)
AREGDYVWGSYRPNWFDP

SEQ ID NO: 18315 - protein, 9 aa, Homo sapiens
  Light chain CDR3 for antibody 9158 (IGKV3-20)
QQYGSSPYT

SEQ ID NO: 18316 - protein, 12 aa, Homo sapiens
  Heavy chain CDR3 for antibody 9158 (IGHV1-18)
ARAPYNWNDPDY

SEQ ID NO: 18317 - protein, 9 aa, Homo sapiens
  Light chain CDR3 for antibody 9159 (IGKV1-37)
QRTSNAPYT

SEQ ID NO: 18318 - protein, 11 aa, Homo sapiens
  Heavy chain CDR3 for antibody 9159 (IGHV3-33)
ARDTWDDYFDY

SEQ ID NO: 18319 - protein, 7 aa, Homo sapiens
  Light chain CDR3 for antibody 9160 (IGKV1-17)
LQHNSYP

SEQ ID NO: 18320 - protein, 17 aa, Homo sapiens
  Heavy chain CDR3 for antibody 9160 (IGHV1-18)
ARDRAFTMVRGVPPFDY

SEQ ID NO: 18321 - protein, 9 aa, Homo sapiens
  Light chain CDR3 for antibody 9161 (IGKV1-39)
QQSYSTPIT

SEQ ID NO: 18322 - protein, 16 aa, Homo sapiens
  Heavy chain CDR3 for antibody 9161 (IGHV3-23)
ARNWNDVGDYYYGMDV

SEQ ID NO: 18323 - protein, 9 aa, Homo sapiens
  Light chain CDR3 for antibody 9162 (IGKV1-9)
QQLISYPLT

SEQ ID NO: 18324 - protein, 13 aa, Homo sapiens
  Heavy chain CDR3 for antibody 9162 (IGHV3-33)
ARDYTMVRGVMNY

SEQ ID NO: 18325 - protein, 9 aa, Homo sapiens
  Light chain CDR3 for antibody 9163 (IGKV1-39)
QQGFSTPWT

SEQ ID NO: 18326 - protein, 13 aa, Homo sapiens
  Heavy chain CDR3 for antibody 9163 (IGHV3-33)
ARRYRSGWYPFDY

SEQ ID NO: 18327 - protein, 10 aa, Homo sapiens
  Light chain CDR3 for antibody 9164 (IGKV3-15)
QQYNNWPPYT

SEQ ID NO: 18328 - protein, 13 aa, Homo sapiens
  Heavy chain CDR3 for antibody 9164 (IGHV3-33)
ARDQRYSSGWYDY

SEQ ID NO: 18329 - protein, 9 aa, Homo sapiens
  Light chain CDR3 for antibody 9165 (IGKV3D-7)
QQDYEFPIT

SEQ ID NO: 18330 - protein, 14 aa, Homo sapiens
  Heavy chain CDR3 for antibody 9165 (IGHV3-33)
ARASSGSSYWYFDL

SEQ ID NO: 18331 - protein, 9 aa, Homo sapiens
  Light chain CDR3 for antibody 9166 (IGKV1-27)
QKYNSAPLT

SEQ ID NO: 18332 - protein, 16 aa, Homo sapiens
  Heavy chain CDR3 for antibody 9166 (IGHV3-33)
ARDAKYYDILTGYPDY

SEQ ID NO: 18333 - protein, 8 aa, Homo sapiens
  Light chain CDR3 for antibody 9167 (IGKV3D-7)
QQDYNLLT

SEQ ID NO: 18334 - protein, 12 aa, Homo sapiens
  Heavy chain CDR3 for antibody 9167 (IGHV3-33)
ARKQWLVQAFDI

SEQ ID NO: 18335 - protein, 9 aa, Homo sapiens
  Light chain CDR3 for antibody 9168 (IGKV3D-7)
QQDYNLPLT

SEQ ID NO: 18336 - protein, 10 aa, Homo sapiens
  Heavy chain CDR3 for antibody 9168 (IGHV3-33)
ARNILTPLDY

SEQ ID NO: 18337 - protein, 9 aa, Homo sapiens
  Light chain CDR3 for antibody 9169 (IGKV5-2)
LQHDNFPWT

SEQ ID NO: 18338 - protein, 16 aa, Homo sapiens
  Heavy chain CDR3 for antibody 9169 (IGHV3-33)
AKDAFYYGSGSHLFDY

SEQ ID NO: 18339 - protein, 9 aa, Homo sapiens
  Light chain CDR3 for antibody 9170 (IGKV1-6)
LQDYKSPFT

SEQ ID NO: 18340 - protein, 15 aa, Homo sapiens
  Heavy chain CDR3 for antibody 9170 (IGHV3-33)
ARDRVVRGVMGYFDY

SEQ ID NO: 18341 - protein, 9 aa, Homo sapiens
  Light chain CDR3 for antibody 9171 (IGKV1D-16)
QQYDSYPYT

SEQ ID NO: 18342 - protein, 13 aa, Homo sapiens
  Heavy chain CDR3 for antibody 9171 (IGHV3-33)
ARDYCGGDCYLDY

SEQ ID NO: 18343 - protein, 10 aa, Homo sapiens
  Light chain CDR3 for antibody 9172 (IGKV3-11)
QQRSNWLMYT

SEQ ID NO: 18344 - protein, 13 aa, Homo sapiens
  Heavy chain CDR3 for antibody 9172 (IGHV1-46)
ARAFFMVRGVIDF

SEQ ID NO: 18345 - protein, 9 aa, Homo sapiens
  Light chain CDR3 for antibody 9173 (IGKV1D-16)
QQYNSFPLT

SEQ ID NO: 18346 - protein, 17 aa, Homo sapiens
  Heavy chain CDR3 for antibody 9173 (IGHV4-59)
ARGRYFDWLFDYYGMDV

SEQ ID NO: 18347 - protein, 6 aa, Homo sapiens
  Light chain CDR3 for antibody 9174 (IGKV3-20)
QQYGST

SEQ ID NO: 18348 - protein, 16 aa, Homo sapiens
  Heavy chain CDR3 for antibody 9174 (IGHV3-23)
AKEGMVLRYFDWLWDY

SEQ ID NO: 18349 - protein, 9 aa, Homo sapiens
  Light chain CDR3 for antibody 9175 (IGKV6-21)
HQSSSLPHT

SEQ ID NO: 18350 - protein, 19 aa, Homo sapiens
  Heavy chain CDR3 for antibody 9175 (IGHV4-39)
ARQDYHGSGTYYKDWFFDL

SEQ ID NO: 18351 - protein, 9 aa, Homo sapiens
  Light chain CDR3 for antibody 9176 (IGKV1-17)
LQHNSYPRT

SEQ ID NO: 18352 - protein, 9 aa, Homo sapiens
  Heavy chain CDR3 for antibody 9176 (IGHV1-18)
ARGNTWFDY

SEQ ID NO: 18353 - protein, 9 aa, Homo sapiens
  Light chain CDR3 for antibody 9177 (IGKV1D-16)
QQYNSFPLT

SEQ ID NO: 18354 - protein, 14 aa, Homo sapiens
  Heavy chain CDR3 for antibody 9177 (IGHV4-39)
ARQGGSGSYYNLDY

SEQ ID NO: 18355 - protein, 9 aa, Homo sapiens
  Light chain CDR3 for antibody 9178 (IGKV1-5)
QQYNTYSRT

SEQ ID NO: 18356 - protein, 9 aa, Homo sapiens
  Heavy chain CDR3 for antibody 9178 (IGHV1-8)
ARGRLDFDY

SEQ ID NO: 18357 - protein, 9 aa, Homo sapiens
  Light chain CDR3 for antibody 9179 (IGKV1-9)
QQVKSYPYT

SEQ ID NO: 18358 - protein, 26 aa, Homo sapiens
  Heavy chain CDR3 for antibody 9179 (IGHV4-39)
ARQGLLWFGDLKAYDSSGYYYGYFHH

SEQ ID NO: 18359 - protein, 9 aa, Homo sapiens
  Light chain CDR3 for antibody 9180 (IGKV3D-20)
QQYGYSPYT

SEQ ID NO: 18360 - protein, 12 aa, Homo sapiens
  Heavy chain CDR3 for antibody 9180 (IGHV3-33)
ARGPTGDHALDI

SEQ ID NO: 18361 - protein, 8 aa, Homo sapiens
  Light chain CDR3 for antibody 9181 (IGKV6-21)
HQSSSLPT

SEQ ID NO: 18362 - protein, 9 aa, Homo sapiens
  Heavy chain CDR3 for antibody 9181 (IGHV4-59)
ARGGASFDY

SEQ ID NO: 18363 - protein, 10 aa, Homo sapiens
  Light chain CDR3 for antibody 9182 (IGKV1-9)
QQLDSYPMYT

SEQ ID NO: 18364 - protein, 9 aa, Homo sapiens
  Heavy chain CDR3 for antibody 9182 (IGHV1-18)
ARGKDWFDP

SEQ ID NO: 18365 - protein, 10 aa, Homo sapiens
  Light chain CDR3 for antibody 9183 (IGKV1-39)
QQSYSTPMYT

SEQ ID NO: 18366 - protein, 15 aa, Homo sapiens
  Heavy chain CDR3 for antibody 9183 (IGHV1-46)
ARGAVDDYYYYGMDV

SEQ ID NO: 18367 - protein, 9 aa, Homo sapiens
  Light chain CDR3 for antibody 9184 (IGKV3-15)
QQYNNWPLT

SEQ ID NO: 18368 - protein, 10 aa, Homo sapiens
  Heavy chain CDR3 for antibody 9184 (IGHV4-39)
ARQLGNWFDP

SEQ ID NO: 18369 - protein, 9 aa, Homo sapiens
  Light chain CDR3 for antibody 9185 (IGKV1-27)
QKYNSAPYT

SEQ ID NO: 18370 - protein, 15 aa, Homo sapiens
  Heavy chain CDR3 for antibody 9185 (IGHV3-66)
ARDRDYYYYYYGMDV

SEQ ID NO: 18371 - protein, 9 aa, Homo sapiens
  Light chain CDR3 for antibody 9186 (IGKV3D-7)
QQDYNLPLT

SEQ ID NO: 18372 - protein, 16 aa, Homo sapiens
  Heavy chain CDR3 for antibody 9186 (IGHV3-33)
ARDKNTDYDILTGFDY

SEQ ID NO: 18373 - protein, 9 aa, Homo sapiens
  Light chain CDR3 for antibody 9187 (IGKV5-2)
LQHDNFPWT

SEQ ID NO: 18374 - protein, 18 aa, Homo sapiens
  Heavy chain CDR3 for antibody 9187 (IGHV1-24)
ATGLRYFDWPIISNLFDY

SEQ ID NO: 18375 - protein, 9 aa, Homo sapiens
  Light chain CDR3 for antibody 9188 (IGKV2-30)
MQGTHWPLT

SEQ ID NO: 18376 - protein, 11 aa, Homo sapiens
  Heavy chain CDR3 for antibody 9188 (IGHV3-23)
ARDPGSITGDY

SEQ ID NO: 18377 - protein, 8 aa, Homo sapiens
  Light chain CDR3 for antibody 9189 (IGKV1D-13)
QQFNNYYT

SEQ ID NO: 18378 - protein, 6 aa, Homo sapiens
  Heavy chain CDR3 for antibody 9189 (IGHV1-8)
AREGTY

SEQ ID NO: 18379 - protein, 9 aa, Homo sapiens
  Light chain CDR3 for antibody 9190 (IGKV3D-7)
QQLKSYLYT

SEQ ID NO: 18380 - protein, 11 aa, Homo sapiens
  Heavy chain CDR3 for antibody 9190 (IGHV3-33)
ARDKSSGWSDY

SEQ ID NO: 18381 - protein, 10 aa, Homo sapiens
  Light chain CDR3 for antibody 9191 (IGKV3-11)
QQRSNWLMYT

SEQ ID NO: 18382 - protein, 14 aa, Homo sapiens
  Heavy chain CDR3 for antibody 9191 (IGHV3-23)
AKSRIVGALYYFDY

SEQ ID NO: 18383 - protein, 9 aa, Homo sapiens
  Light chain CDR3 for antibody 9192 (IGKV5-2)
LQHDNFPWT

SEQ ID NO: 18384 - protein, 10 aa, Homo sapiens
  Heavy chain CDR3 for antibody 9192 (IGHV3-33)
ARDYGDYFDY

SEQ ID NO: 18385 - protein, 9 aa, Homo sapiens
  Light chain CDR3 for antibody 9193 (IGKV1-17)
LQHNSYPLT

SEQ ID NO: 18386 - protein, 12 aa, Homo sapiens
  Heavy chain CDR3 for antibody 9193 (IGHV1-18)
ARVGPLTGAFDY

SEQ ID NO: 18387 - protein, 8 aa, Homo sapiens
  Light chain CDR3 for antibody 9194 (IGKV1-5)
QQYNSYYT

SEQ ID NO: 18388 - protein, 15 aa, Homo sapiens
  Heavy chain CDR3 for antibody 9194 (IGHV3-23)
AKEALRYFDWSGMDV

SEQ ID NO: 18389 - protein, 9 aa, Homo sapiens
  Light chain CDR3 for antibody 9195 (IGKV1-6)
LQDFHYPWT

SEQ ID NO: 18390 - protein, 12 aa, Homo sapiens
  Heavy chain CDR3 for antibody 9195 (IGHV3-23)
AKDGWFGESLDY

SEQ ID NO: 18391 - protein, 9 aa, Homo sapiens
  Light chain CDR3 for antibody 9196 (IGKV3-15)
QQYNNWPRT

SEQ ID NO: 18392 - protein, 11 aa, Homo sapiens
  Heavy chain CDR3 for antibody 9196 (IGHV3-33)
ARDKSSGWSDY

SEQ ID NO: 18393 - protein, 9 aa, Homo sapiens
  Light chain CDR3 for antibody 9197 (IGKV3D-7)
QQDYNLPRT

SEQ ID NO: 18394 - protein, 9 aa, Homo sapiens
  Heavy chain CDR3 for antibody 9197 (IGHV3-33)
ARDYFHYDY

SEQ ID NO: 18395 - protein, 9 aa, Homo sapiens
  Light chain CDR3 for antibody 9198 (IGKV1-39)
QQSYRTPLT

SEQ ID NO: 18396 - protein, 10 aa, Homo sapiens
  Heavy chain CDR3 for antibody 9198 (IGHV3-72)
CRDREGFGDV

SEQ ID NO: 18397 - protein, 9 aa, Homo sapiens
  Light chain CDR3 for antibody 9199 (IGKV1-6)
QQYNSYPIT

SEQ ID NO: 18398 - protein, 13 aa, Homo sapiens
  Heavy chain CDR3 for antibody 9199 (IGHV3-23)
ASTGDSSYYGMDV

SEQ ID NO: 18399 - protein, 9 aa, Homo sapiens
  Light chain CDR3 for antibody 9200 (IGKV2D-28)
MQVLQTPYT

SEQ ID NO: 18400 - protein, 11 aa, Homo sapiens
  Heavy chain CDR3 for antibody 9200 (IGHV3-33)
AREAANWGFDY

SEQ ID NO: 18401 - protein, 10 aa, Homo sapiens
  Light chain CDR3 for antibody 9201 (IGKV3-11)
QQRSNWPIFT

SEQ ID NO: 18402 - protein, 17 aa, Homo sapiens
  Heavy chain CDR3 for antibody 9201 (IGHV3-30)
ARDGVGATSYYYYGMDV

SEQ ID NO: 18403 - protein, 9 aa, Homo sapiens
  Light chain CDR3 for antibody 9202 (IGKV2-30)
MQGTHWPLT

SEQ ID NO: 18404 - protein, 17 aa, Homo sapiens
  Heavy chain CDR3 for antibody 9202 (IGHV3-21)
AKGNYGSGSYYNGDFQH

SEQ ID NO: 18405 - protein, 10 aa, Homo sapiens
  Light chain CDR3 for antibody 9203 (IGKV1-17)
QQYNNWPPYT

SEQ ID NO: 18406 - protein, 17 aa, Homo sapiens
  Heavy chain CDR3 for antibody 9203 (IGHV1-24)
AGLRFFDWLFDYYGMDV

SEQ ID NO: 18407 - protein, 9 aa, Homo sapiens
  Light chain CDR3 for antibody 9204 (IGKV1-16)
QQYKSYPYT

SEQ ID NO: 18408 - protein, 13 aa, Homo sapiens
  Heavy chain CDR3 for antibody 9204 (IGHV1-46)
ARDAEYSSSWFDY

SEQ ID NO: 18409 - protein, 9 aa, Homo sapiens
  Light chain CDR3 for antibody 9205 (IGKV1-6)
LQDYKSPFT

SEQ ID NO: 18410 - protein, 14 aa, Homo sapiens
  Heavy chain CDR3 for antibody 9205 (IGHV3-23)
AKDRYRGYEGLFDY

SEQ ID NO: 18411 - protein, 9 aa, Homo sapiens
  Light chain CDR3 for antibody 9206 (IGKV3-15)
QQYNNWPLT

SEQ ID NO: 18412 - protein, 14 aa, Homo sapiens
  Heavy chain CDR3 for antibody 9206 (IGHV4-39)
ARQGGWYLYWYFDL

SEQ ID NO: 18413 - protein, 9 aa, Homo sapiens
  Light chain CDR3 for antibody 9207 (IGKV1D-16)
QQYNSFPLT

SEQ ID NO: 18414 - protein, 12 aa, Homo sapiens
  Heavy chain CDR3 for antibody 9207 (IGHV4-39)
ARQGAYSRFFDY

SEQ ID NO: 18415 - protein, 9 aa, Homo sapiens
  Light chain CDR3 for antibody 9208 (IGKV1-39)
QQSYSTPFT

SEQ ID NO: 18416 - protein, 19 aa, Homo sapiens
  Heavy chain CDR3 for antibody 9208 (IGHV4-59)
ARDRVVGATTYYYYYGMDV

SEQ ID NO: 18417 - protein, 9 aa, Homo sapiens
  Light chain CDR3 for antibody 9209 (IGKV1-9)
QQLKSYLYT

SEQ ID NO: 18418 - protein, 9 aa, Homo sapiens
  Heavy chain CDR3 for antibody 9209 (IGHV3-30)
ARDYFHYDY

SEQ ID NO: 18419 - protein, 10 aa, Homo sapiens
  Light chain CDR3 for antibody 9210 (IGKV1-39)
QQSYSTPMYT

SEQ ID NO: 18420 - protein, 14 aa, Homo sapiens
  Heavy chain CDR3 for antibody 9210 (IGHV3-33)
ARGGYSGYRYYFDY

SEQ ID NO: 18421 - protein, 9 aa, Homo sapiens
  Light chain CDR3 for antibody 9211 (IGKV1-27)
QKYNSAPYT

SEQ ID NO: 18422 - protein, 22 aa, Homo sapiens
  Heavy chain CDR3 for antibody 9211 (IGHV4-59)
AREINYGSGSYYNEDYYYGMDV

SEQ ID NO: 18423 - protein, 9 aa, Homo sapiens
  Light chain CDR3 for antibody 9212 (IGKV3-11)
QQRSNWPPT

SEQ ID NO: 18424 - protein, 17 aa, Homo sapiens
  Heavy chain CDR3 for antibody 9212 (IGHV3-11)
ARSPYDILTGYSYYFDY

SEQ ID NO: 18425 - protein, 9 aa, Homo sapiens
  Light chain CDR3 for antibody 9213 (IGKV1-39)
QQGFSTPWT

SEQ ID NO: 18426 - protein, 15 aa, Homo sapiens
  Heavy chain CDR3 for antibody 9213 (IGHV4-59)
ARDLGHYYGSVSIDY

SEQ ID NO: 18427 - protein, 9 aa, Homo sapiens
  Light chain CDR3 for antibody 9214 (IGKV1-27)
QKYNSAPYT

SEQ ID NO: 18428 - protein, 13 aa, Homo sapiens
  Heavy chain CDR3 for antibody 9214 (IGHV3-23)
AKDRGYSSTSTAY

SEQ ID NO: 18429 - protein, 9 aa, Homo sapiens
  Light chain CDR3 for antibody 9215 (IGKV1-9)
QQVKSYPYT

SEQ ID NO: 18430 - protein, 12 aa, Homo sapiens
  Heavy chain CDR3 for antibody 9215 (IGHV1-46)
ARGLTGDHASDI

SEQ ID NO: 18431 - protein, 9 aa, Homo sapiens
  Light chain CDR3 for antibody 9216 (IGKV1-6)
QQEYNYPLT

SEQ ID NO: 18432 - protein, 20 aa, Homo sapiens
  Heavy chain CDR3 for antibody 9216 (IGHV3-33)
AREDYYGSGSYYPAYNWFDP

SEQ ID NO: 18433 - protein, 8 aa, Homo sapiens
  Light chain CDR3 for antibody 9217 (IGKV3D-7)
QQDYSLLT

SEQ ID NO: 18434 - protein, 18 aa, Homo sapiens
  Heavy chain CDR3 for antibody 9217 (IGHV4-59)
AREGDYVWGSYRSNWFDP

SEQ ID NO: 18435 - protein, 9 aa, Homo sapiens
  Light chain CDR3 for antibody 9218 (IGKV3-15)
QQYNNWPLT

SEQ ID NO: 18436 - protein, 18 aa, Homo sapiens
  Heavy chain CDR3 for antibody 9218 (IGHV3-33)
ARDQGIVVLPGAPWYFDL

SEQ ID NO: 18437 - protein, 9 aa, Homo sapiens
  Light chain CDR3 for antibody 9219 (IGKV1-39)
QQSYSTPFT

SEQ ID NO: 18438 - protein, 16 aa, Homo sapiens
  Heavy chain CDR3 for antibody 9219 (IGHV3-33)
AREMAGSYYYYYGMDV

SEQ ID NO: 18439 - protein, 9 aa, Homo sapiens
  Light chain CDR3 for antibody 9220 (IGKV1-16)
QHYNDYPFT

SEQ ID NO: 18440 - protein, 12 aa, Homo sapiens
  Heavy chain CDR3 for antibody 9220 (IGHV3-33)
ARDPGYYYGLDV

SEQ ID NO: 18441 - protein, 9 aa, Homo sapiens
  Light chain CDR3 for antibody 9221 (IGKV1D-13)
QHFNNYMYT

SEQ ID NO: 18442 - protein, 14 aa, Homo sapiens
  Heavy chain CDR3 for antibody 9221 (IGHV3-33)
ARDKTYPLSYGMDV

SEQ ID NO: 18443 - protein, 10 aa, Homo sapiens
  Light chain CDR3 for antibody 9222 (IGKV1-39)
QQSYSTPMYT

SEQ ID NO: 18444 - protein, 8 aa, Homo sapiens
  Heavy chain CDR3 for antibody 9222 (IGHV3-23)
AKETGNNY

SEQ ID NO: 18445 - protein, 11 aa, Homo sapiens
  Light chain CDR3 for antibody 9223 (IGKV3-11)
QQRSNWPPTWT

SEQ ID NO: 18446 - protein, 17 aa, Homo sapiens
  Heavy chain CDR3 for antibody 9223 (IGHV3-33)
ARAYYDILTGYSYYFDY

SEQ ID NO: 18447 - protein, 9 aa, Homo sapiens
  Light chain CDR3 for antibody 9224 (IGKV1-27)
QKYNSAPYT

SEQ ID NO: 18448 - protein, 14 aa, Homo sapiens
  Heavy chain CDR3 for antibody 9224 (IGHV1-46)
ARSYYDILTGAFDI

SEQ ID NO: 18449 - protein, 10 aa, Homo sapiens
  Light chain CDR3 for antibody 9225 (IGKV3-20)
QQYGSSPPYT

SEQ ID NO: 18450 - protein, 7 aa, Homo sapiens
  Heavy chain CDR3 for antibody 9225 (IGHV3-33)
ARELVDY

SEQ ID NO: 18451 - protein, 8 aa, Homo sapiens
  Light chain CDR3 for antibody 9226 (IGKV3D-7)
QQDYNLLT

SEQ ID NO: 18452 - protein, 19 aa, Homo sapiens
  Heavy chain CDR3 for antibody 9226 (IGHV3-33)
AREDYYGSGSYYNEDWFDP

SEQ ID NO: 18453 - protein, 9 aa, Homo sapiens
  Light chain CDR3 for antibody 9227 (IGKV1-5)
QQYNSYSYT

SEQ ID NO: 18454 - protein, 13 aa, Homo sapiens
  Heavy chain CDR3 for antibody 9227 (IGHV4-39)
ARRDGSYYGYFDY

SEQ ID NO: 18455 - protein, 9 aa, Homo sapiens
  Light chain CDR3 for antibody 9228 (IGKV2D-28)
MQALQTPPT

SEQ ID NO: 18456 - protein, 18 aa, Homo sapiens
  Heavy chain CDR3 for antibody 9228 (IGHV3-33)
ARGYYGSGNFYKDSGMDV

SEQ ID NO: 18457 - protein, 8 aa, Homo sapiens
  Light chain CDR3 for antibody 9229 (IGKV1D-13)
QQFNNYPT

SEQ ID NO: 18458 - protein, 15 aa, Homo sapiens
  Heavy chain CDR3 for antibody 9229 (IGHV3-74)
ARGSGSHYHYYGMDV

SEQ ID NO: 18459 - protein, 10 aa, Homo sapiens
  Light chain CDR3 for antibody 9230 (IGKV3-20)
QQYGSSPPYT

SEQ ID NO: 18460 - protein, 12 aa, Homo sapiens
  Heavy chain CDR3 for antibody 9230 (IGHV1-24)
ASDWAYYYGMDV

SEQ ID NO: 18461 - protein, 9 aa, Homo sapiens
  Light chain CDR3 for antibody 9231 (IGKV1-16)
QQYNSYPRT

SEQ ID NO: 18462 - protein, 13 aa, Homo sapiens
  Heavy chain CDR3 for antibody 9231 (IGHV4-59)
ARDAGYSSSWLDY

SEQ ID NO: 18463 - protein, 9 aa, Homo sapiens
  Light chain CDR3 for antibody 9232 (IGKV3-11)
QQRSNWMYT

SEQ ID NO: 18464 - protein, 14 aa, Homo sapiens
  Heavy chain CDR3 for antibody 9232 (IGHV3-33)
ARASSESSYWYFDL

SEQ ID NO: 18465 - protein, 8 aa, Homo sapiens
  Light chain CDR3 for antibody 9233 (IGKV3-20)
QQYGSSLT

SEQ ID NO: 18466 - protein, 18 aa, Homo sapiens
  Heavy chain CDR3 for antibody 9233 (IGHV3-33)
ARERGYYGSDIYPAAFDI

SEQ ID NO: 18467 - protein, 10 aa, Homo sapiens
  Light chain CDR3 for antibody 9234 (IGKV1-27)
QKYNSAPMYT

SEQ ID NO: 18468 - protein, 11 aa, Homo sapiens
  Heavy chain CDR3 for antibody 9234 (IGHV3-33)
ARDRVLTPFDY

SEQ ID NO: 18469 - protein, 9 aa, Homo sapiens
  Light chain CDR3 for antibody 9235 (IGKV1D-13)
QQFNNYPST

SEQ ID NO: 18470 - protein, 17 aa, Homo sapiens
  Heavy chain CDR3 for antibody 9235 (IGHV4-59)
ARDRELLWFGEFGGMDV

SEQ ID NO: 18471 - protein, 9 aa, Homo sapiens
  Light chain CDR3 for antibody 9236 (IGKV1-5)
QQYNTYSRT

SEQ ID NO: 18472 - protein, 16 aa, Homo sapiens
  Heavy chain CDR3 for antibody 9236 (IGHV3-33)
ARAVYYGSGSSLIMDV

SEQ ID NO: 18473 - protein, 9 aa, Homo sapiens
  Light chain CDR3 for antibody 9237 (IGKV6-21)
HQSTSLPFT

SEQ ID NO: 18474 - protein, 12 aa, Homo sapiens
  Heavy chain CDR3 for antibody 9237 (IGHV3-33)
ARKGYDMHAFDI

SEQ ID NO: 18475 - protein, 9 aa, Homo sapiens
  Light chain CDR3 for antibody 9238 (IGKV3D-7)
QQDYEFPLT

SEQ ID NO: 18476 - protein, 15 aa, Homo sapiens
  Heavy chain CDR3 for antibody 9238 (IGHV3-30)
ARGAMVRGVDYGMDV

SEQ ID NO: 18477 - protein, 10 aa, Homo sapiens
  Light chain CDR3 for antibody 9239 (IGKV3-11)
QQRSNWPALT

SEQ ID NO: 18478 - protein, 18 aa, Homo sapiens
  Heavy chain CDR3 for antibody 9239 (IGHV3-30)
ARDRHHDILTGYSDAFEI

SEQ ID NO: 18479 - protein, 9 aa, Homo sapiens
  Light chain CDR3 for antibody 9240 (IGKV1-6)
LQDFHYPWT

SEQ ID NO: 18480 - protein, 16 aa, Homo sapiens
  Heavy chain CDR3 for antibody 9240 (IGHV3-33)
ARGDDILTHQYYGVDV

SEQ ID NO: 18481 - protein, 9 aa, Homo sapiens
  Light chain CDR3 for antibody 9241 (IGKV3D-7)
QQDYEFPLT

SEQ ID NO: 18482 - protein, 18 aa, Homo sapiens
  Heavy chain CDR3 for antibody 9241 (IGHV4-59)
ARDGYSGYDYYYYYGMDV

SEQ ID NO: 18483 - protein, 9 aa, Homo sapiens
  Light chain CDR3 for antibody 9242 (IGKV1D-13)
QQFNNYPHT

SEQ ID NO: 18484 - protein, 15 aa, Homo sapiens
  Heavy chain CDR3 for antibody 9242 (IGHV3-64)
ARDGLRYFDWLFPWY

SEQ ID NO: 18485 - protein, 9 aa, Homo sapiens
  Light chain CDR3 for antibody 9243 (IGKV3D-7)
QQDYNLPWT

SEQ ID NO: 18486 - protein, 15 aa, Homo sapiens
  Heavy chain CDR3 for antibody 9243 (IGHV1-18)
ARGYCSSTSCYYLDY

SEQ ID NO: 18487 - protein, 9 aa, Homo sapiens
  Light chain CDR3 for antibody 9244 (IGKV3-20)
QQYSSSIFT

SEQ ID NO: 18488 - protein, 13 aa, Homo sapiens
  Heavy chain CDR3 for antibody 9244 (IGHV4-61)
ASRYSSGWYPFDY

SEQ ID NO: 18489 - protein, 9 aa, Homo sapiens
  Light chain CDR3 for antibody 9245 (IGKV1-17)
LQHNSYPYT

SEQ ID NO: 18490 - protein, 17 aa, Homo sapiens
  Heavy chain CDR3 for antibody 9245 (IGHV3-23)
AKDRDWNDGQYYYGMDV

SEQ ID NO: 18491 - protein, 9 aa, Homo sapiens
  Light chain CDR3 for antibody 9246 (IGKV2D-28)
MQALQTPPT

SEQ ID NO: 18492 - protein, 18 aa, Homo sapiens
  Heavy chain CDR3 for antibody 9246 (IGHV3-33)
ARDRDRYGSGTYPDAIDI

SEQ ID NO: 18493 - protein, 9 aa, Homo sapiens
  Light chain CDR3 for antibody 9247 (IGKV1-37)
QRTYNAPFT

SEQ ID NO: 18494 - protein, 9 aa, Homo sapiens
  Heavy chain CDR3 for antibody 9247 (IGHV3-30)
ARPNWGFDY

SEQ ID NO: 18495 - protein, 9 aa, Homo sapiens
  Light chain CDR3 for antibody 9248 (IGKV1D-16)
QQYGSYPLT

SEQ ID NO: 18496 - protein, 14 aa, Homo sapiens
  Heavy chain CDR3 for antibody 9248 (IGHV3-33)
ARGGYNWNDDWFDP

SEQ ID NO: 18497 - protein, 9 aa, Homo sapiens
  Light chain CDR3 for antibody 9249 (IGKV1-6)
LQDFNYPRT

SEQ ID NO: 18498 - protein, 12 aa, Homo sapiens
  Heavy chain CDR3 for antibody 9249 (IGHV1-18)
ARILFYGDYFDY

SEQ ID NO: 18499 - protein, 10 aa, Homo sapiens
  Light chain CDR3 for antibody 9250 (IGKV3-11)
QQRSNWPPLT

SEQ ID NO: 18500 - protein, 19 aa, Homo sapiens
  Heavy chain CDR3 for antibody 9250 (IGHV1-24)
ATERYKVGATYYYYYGMDV

SEQ ID NO: 18501 - protein, 9 aa, Homo sapiens
  Light chain CDR3 for antibody 9251 (IGKV1-39)
QQSYSTPLT

SEQ ID NO: 18502 - protein, 9 aa, Homo sapiens
  Heavy chain CDR3 for antibody 9251 (IGHV1-8)
ARGPRIMDV

SEQ ID NO: 18503 - protein, 10 aa, Homo sapiens
  Light chain CDR3 for antibody 9252 (IGKV1-39)
QQSYSTPMYT

SEQ ID NO: 18504 - protein, 12 aa, Homo sapiens
  Heavy chain CDR3 for antibody 9252 (IGHV3-33)
ASRDILTGYLGY

SEQ ID NO: 18505 - protein, 9 aa, Homo sapiens
  Light chain CDR3 for antibody 9253 (IGKV3D-7)
QQDYNLPFT

SEQ ID NO: 18506 - protein, 17 aa, Homo sapiens
  Heavy chain CDR3 for antibody 9253 (IGHV3-23)
ARGYCSRTSCYLYYFDY

SEQ ID NO: 18507 - protein, 10 aa, Homo sapiens
  Light chain CDR3 for antibody 9254 (IGKV3-11)
QQRSNWPALA

SEQ ID NO: 18508 - protein, 20 aa, Homo sapiens
  Heavy chain CDR3 for antibody 9254 (IGHV3-33)
AREDYYGSGSYYPAYNWFAP

SEQ ID NO: 18509 - protein, 9 aa, Homo sapiens
  Light chain CDR3 for antibody 9255 (IGKV1-9)
QQYYTYPYT

SEQ ID NO: 18510 - protein, 18 aa, Homo sapiens
  Heavy chain CDR3 for antibody 9255 (IGHV4-59)
AREGHYYTSGGYYKAFDY

SEQ ID NO: 18511 - protein, 10 aa, Homo sapiens
  Light chain CDR3 for antibody 9256 (IGKV1-17)
LQHNSYPMYT

SEQ ID NO: 18512 - protein, 17 aa, Homo sapiens
  Heavy chain CDR3 for antibody 9256 (IGHV3-33)
ARVRGVIEGYYYYGMDV

SEQ ID NO: 18513 - protein, 9 aa, Homo sapiens
  Light chain CDR3 for antibody 9257 (IGKV1-17)
LQHTSYPIT

SEQ ID NO: 18514 - protein, 18 aa, Homo sapiens
  Heavy chain CDR3 for antibody 9257 (IGHV1-18)
ARDPNYYGSGSYYNYFDY

SEQ ID NO: 18515 - protein, 10 aa, Homo sapiens
  Light chain CDR3 for antibody 9258 (IGKV3-11)
QQRSNWPIFT

SEQ ID NO: 18516 - protein, 10 aa, Homo sapiens
  Heavy chain CDR3 for antibody 9258 (IGHV3-23)
VRDVVVYCDY

SEQ ID NO: 18517 - protein, 9 aa, Homo sapiens
  Light chain CDR3 for antibody 9259 (IGKV1-6)
LQDYNYPYT

SEQ ID NO: 18518 - protein, 16 aa, Homo sapiens
  Heavy chain CDR3 for antibody 9259 (IGHV3-30)
AREIEVAGHVYYGMDV

SEQ ID NO: 18519 - protein, 9 aa, Homo sapiens
  Light chain CDR3 for antibody 9260 (IGKV3D-7)
QQDYTLPLT

SEQ ID NO: 18520 - protein, 17 aa, Homo sapiens
  Heavy chain CDR3 for antibody 9260 (IGHV3-33)
ARAYYDILTGYYIHCDY

SEQ ID NO: 18521 - protein, 9 aa, Homo sapiens
  Light chain CDR3 for antibody 9261 (IGKV1D-13)
QQFNNYPHT

SEQ ID NO: 18522 - protein, 16 aa, Homo sapiens
  Heavy chain CDR3 for antibody 9261 (IGHV3-53)
AREPLRYFDWPDAFDI

SEQ ID NO: 18523 - protein, 9 aa, Homo sapiens
  Light chain CDR3 for antibody 9262 (IGKV1-27)
QKYNSAPYT

SEQ ID NO: 18524 - protein, 15 aa, Homo sapiens
  Heavy chain CDR3 for antibody 9262 (IGHV1-46)
ARGAVDDYYYYGMDV

SEQ ID NO: 18525 - protein, 8 aa, Homo sapiens
  Light chain CDR3 for antibody 9263 (IGKV3-20)
QQYGSSLT

SEQ ID NO: 18526 - protein, 16 aa, Homo sapiens
  Heavy chain CDR3 for antibody 9263 (IGHV3-33)
ARNWNDVGDYYYGMDV

SEQ ID NO: 18527 - protein, 9 aa, Homo sapiens
  Light chain CDR3 for antibody 9264 (IGKV2D-28)
MQALQTPPT

SEQ ID NO: 18528 - protein, 15 aa, Homo sapiens
  Heavy chain CDR3 for antibody 9264 (IGHV3-23)
AKDRDYDFLSGPFDY

SEQ ID NO: 18529 - protein, 8 aa, Homo sapiens
  Light chain CDR3 for antibody 9265 (IGKV3-11)
LQRGNWPT

SEQ ID NO: 18530 - protein, 15 aa, Homo sapiens
  Heavy chain CDR3 for antibody 9265 (IGHV3-33)
ARGGTGYYSYWYFDL

SEQ ID NO: 18531 - protein, 10 aa, Homo sapiens
  Light chain CDR3 for antibody 9266 (IGKV3-15)
QQYNNLPPLT

SEQ ID NO: 18532 - protein, 12 aa, Homo sapiens
  Heavy chain CDR3 for antibody 9266 (IGHV3-33)
AREGTGGNWFDP

SEQ ID NO: 18533 - protein, 9 aa, Homo sapiens
  Light chain CDR3 for antibody 9267 (IGKV3D-7)
QQDYNLPYT

SEQ ID NO: 18534 - protein, 10 aa, Homo sapiens
  Heavy chain CDR3 for antibody 9267 (IGHV3-33)
ARVVDTAMAY

SEQ ID NO: 18535 - protein, 9 aa, Homo sapiens
  Light chain CDR3 for antibody 9268 (IGKV5-2)
LQHDNFPWT

SEQ ID NO: 18536 - protein, 17 aa, Homo sapiens
  Heavy chain CDR3 for antibody 9268 (IGHV4-34)
AREDYDILTGYPSYFDY

SEQ ID NO: 18537 - protein, 9 aa, Homo sapiens
  Light chain CDR3 for antibody 9269 (IGKV1-6)
LQDYNYPYT

SEQ ID NO: 18538 - protein, 15 aa, Homo sapiens
  Heavy chain CDR3 for antibody 9269 (IGHV3-33)
ARRVCSGGSCSLLDY

SEQ ID NO: 18539 - protein, 9 aa, Homo sapiens
  Light chain CDR3 for antibody 9270 (IGKV1-16)
QHYNDYPFT

SEQ ID NO: 18540 - protein, 13 aa, Homo sapiens
  Heavy chain CDR3 for antibody 9270 (IGHV3-23)
AREYCSGGSCYDY

SEQ ID NO: 18541 - protein, 9 aa, Homo sapiens
  Light chain CDR3 for antibody 9271 (IGKV1-9)
QQLHIYPWT

SEQ ID NO: 18542 - protein, 11 aa, Homo sapiens
  Heavy chain CDR3 for antibody 9271 (IGHV3-33)
ARDKSSGWSDY

SEQ ID NO: 18543 - protein, 8 aa, Homo sapiens
  Light chain CDR3 for antibody 9272 (IGKV3-11)
LQRGNWPT

SEQ ID NO: 18544 - protein, 13 aa, Homo sapiens
  Heavy chain CDR3 for antibody 9272 (IGHV4-59)
ARTMVRGVAPFDY

SEQ ID NO: 18545 - protein, 10 aa, Homo sapiens
  Light chain CDR3 for antibody 9273 (IGKV3-11)
QQRSNWPMYT

SEQ ID NO: 18546 - protein, 13 aa, Homo sapiens
  Heavy chain CDR3 for antibody 9273 (IGHV4-39)
ARRDGSYYGYFDY

SEQ ID NO: 18547 - protein, 9 aa, Homo sapiens
  Light chain CDR3 for antibody 9274 (IGKV1-27)
QQYNSAPYT

SEQ ID NO: 18548 - protein, 12 aa, Homo sapiens
  Heavy chain CDR3 for antibody 9274 (IGHV1-18)
ARKGIEVGGFDY

SEQ ID NO: 18549 - protein, 9 aa, Homo sapiens
  Light chain CDR3 for antibody 9275 (IGKV4-1)
QQYYTTPYT

SEQ ID NO: 18550 - protein, 13 aa, Homo sapiens
  Heavy chain CDR3 for antibody 9275 (IGHV3-11)
ARDEGYRGYVLDT

SEQ ID NO: 18551 - protein, 8 aa, Homo sapiens
  Light chain CDR3 for antibody 9276 (IGKV6-21)
HQSSSLPT

SEQ ID NO: 18552 - protein, 13 aa, Homo sapiens
  Heavy chain CDR3 for antibody 9276 (IGHV3-33)
ARDQRYSSGWYDY

SEQ ID NO: 18553 - protein, 9 aa, Homo sapiens
  Light chain CDR3 for antibody 9277 (IGKV1D-16)
QQYITYPYT

SEQ ID NO: 18554 - protein, 14 aa, Homo sapiens
  Heavy chain CDR3 for antibody 9277 (IGHV3-33)
ARGAAAGNFYGLDV

SEQ ID NO: 18555 - protein, 9 aa, Homo sapiens
  Light chain CDR3 for antibody 9278 (IGKV1-9)
QQLNSYPYT

SEQ ID NO: 18556 - protein, 16 aa, Homo sapiens
  Heavy chain CDR3 for antibody 9278 (IGHV3-33)
ARELAGSYYYYYGMDV

SEQ ID NO: 18557 - protein, 10 aa, Homo sapiens
  Light chain CDR3 for antibody 9279 (IGKV3-11)
QQRSNWPALT

SEQ ID NO: 18558 - protein, 15 aa, Homo sapiens
  Heavy chain CDR3 for antibody 9279 (IGHV3-74)
ARGSGSHYHYYGMDV

SEQ ID NO: 18559 - protein, 9 aa, Homo sapiens
  Light chain CDR3 for antibody 9280 (IGKV1-33)
QQYYNLPFT

SEQ ID NO: 18560 - protein, 15 aa, Homo sapiens
  Heavy chain CDR3 for antibody 9280 (IGHV3-33)
ARGYYYGSGSFPVDY

SEQ ID NO: 18561 - protein, 8 aa, Homo sapiens
  Light chain CDR3 for antibody 9281 (IGKV3-15)
QQYNNWPT

SEQ ID NO: 18562 - protein, 8 aa, Homo sapiens
  Heavy chain CDR3 for antibody 9281 (IGHV3-23)
AKETGNNY

SEQ ID NO: 18563 - protein, 9 aa, Homo sapiens
  Light chain CDR3 for antibody 9282 (IGKV4-1)
QQYYSTPPT

SEQ ID NO: 18564 - protein, 13 aa, Homo sapiens
  Heavy chain CDR3 for antibody 9282 (IGHV3-33)
AKEDGDYHHYFDY

SEQ ID NO: 18565 - protein, 9 aa, Homo sapiens
  Light chain CDR3 for antibody 9283 (IGKV6-21)
HQTSSLPYT

SEQ ID NO: 18566 - protein, 16 aa, Homo sapiens
  Heavy chain CDR3 for antibody 9283 (IGHV4-59)
ARFYFGSGSYYWYFDL

SEQ ID NO: 18567 - protein, 9 aa, Homo sapiens
  Light chain CDR3 for antibody 9284 (IGKV3D-7)
HQDYNLPWT

SEQ ID NO: 18568 - protein, 18 aa, Homo sapiens
  Heavy chain CDR3 for antibody 9284 (IGHV1-46)
ARDGDYVWGSYRSDWFDP

SEQ ID NO: 18569 - protein, 9 aa, Homo sapiens
  Light chain CDR3 for antibody 9285 (IGKV1-6)
LQDYSYPFT

SEQ ID NO: 18570 - protein, 13 aa, Homo sapiens
  Heavy chain CDR3 for antibody 9285 (IGHV3-23)
ARAFTMGRGVIDY

SEQ ID NO: 18571 - protein, 10 aa, Homo sapiens
  Light chain CDR3 for antibody 9286 (IGKV3-15)
QQYNNWPPYT

SEQ ID NO: 18572 - protein, 12 aa, Homo sapiens
  Heavy chain CDR3 for antibody 9286 (IGHV1-46)
AREDYDIDGMDV

SEQ ID NO: 18573 - protein, 9 aa, Homo sapiens
  Light chain CDR3 for antibody 9287 (IGKV3-20)
QQYGSSPYT

SEQ ID NO: 18574 - protein, 17 aa, Homo sapiens
  Heavy chain CDR3 for antibody 9287 (IGHV3-23)
AKEGSYYGSGSYNWFDP

SEQ ID NO: 18575 - protein, 9 aa, Homo sapiens
  Light chain CDR3 for antibody 9288 (IGKV1-37)
QRTSNAPYT

SEQ ID NO: 18576 - protein, 14 aa, Homo sapiens
  Heavy chain CDR3 for antibody 9288 (IGHV3-33)
ARDRIAAASSDFDC

SEQ ID NO: 18577 - protein, 8 aa, Homo sapiens
  Light chain CDR3 for antibody 9289 (IGKV3-15)
QQYNNWPT

SEQ ID NO: 18578 - protein, 17 aa, Homo sapiens
  Heavy chain CDR3 for antibody 9289 (IGHV3-33)
ARDLIGPLSSSWYPFDY

SEQ ID NO: 18579 - protein, 10 aa, Homo sapiens
  Light chain CDR3 for antibody 9290 (IGKV1-17)
LQHNSYPMYT

SEQ ID NO: 18580 - protein, 12 aa, Homo sapiens
  Heavy chain CDR3 for antibody 9290 (IGHV3-23)
AKDGWFGESLDY

SEQ ID NO: 18581 - protein, 9 aa, Homo sapiens
  Light chain CDR3 for antibody 9291 (IGKV3-20)
QQYGSSPLT

SEQ ID NO: 18582 - protein, 12 aa, Homo sapiens
  Heavy chain CDR3 for antibody 9291 (IGHV1-18)
ARVLFDGAYFAY

SEQ ID NO: 18583 - protein, 10 aa, Homo sapiens
  Light chain CDR3 for antibody 9292 (IGKV3-20)
QQYGRSPPVT

SEQ ID NO: 18584 - protein, 15 aa, Homo sapiens
  Heavy chain CDR3 for antibody 9292 (IGHV3-33)
AREGLRYFHYYGMDV

SEQ ID NO: 18585 - protein, 9 aa, Homo sapiens
  Light chain CDR3 for antibody 9293 (IGKV1D-13)
QQFNNYPHT

SEQ ID NO: 18586 - protein, 18 aa, Homo sapiens
  Heavy chain CDR3 for antibody 9293 (IGHV4-59)
ARDNHYYSSGTYSNWFDP

SEQ ID NO: 18587 - protein, 9 aa, Homo sapiens
  Light chain CDR3 for antibody 9294 (IGKV1-6)
LQDFHYPWT

SEQ ID NO: 18588 - protein, 12 aa, Homo sapiens
  Heavy chain CDR3 for antibody 9294 (IGHV4-59)
ARDRSGWAYFDY

SEQ ID NO: 18589 - protein, 9 aa, Homo sapiens
  Light chain CDR3 for antibody 9295 (IGKV1-9)
QQLHIYPWT

SEQ ID NO: 18590 - protein, 13 aa, Homo sapiens
  Heavy chain CDR3 for antibody 9295 (IGHV4-59)
ARDAGYSSSWFDY

SEQ ID NO: 18591 - protein, 9 aa, Homo sapiens
  Light chain CDR3 for antibody 9296 (IGKV3-20)
QQYGSSPRT

SEQ ID NO: 18592 - protein, 16 aa, Homo sapiens
  Heavy chain CDR3 for antibody 9296 (IGHV1-24)
ATEDSSSYCYYYDMDV

SEQ ID NO: 18593 - protein, 9 aa, Homo sapiens
  Light chain CDR3 for antibody 9297 (IGKV1-6)
LQVYSYPWT

SEQ ID NO: 18594 - protein, 11 aa, Homo sapiens
  Heavy chain CDR3 for antibody 9297 (IGHV4-59)
AREMGHDTFDI

SEQ ID NO: 18595 - protein, 8 aa, Homo sapiens
  Light chain CDR3 for antibody 9298 (IGKV3-15)
QQYNNYPT

SEQ ID NO: 18596 - protein, 13 aa, Homo sapiens
  Heavy chain CDR3 for antibody 9298 (IGHV3-33)
ARDSTLVRGVFPY

SEQ ID NO: 18597 - protein, 10 aa, Homo sapiens
  Light chain CDR3 for antibody 9299 (IGKV1-17)
LQHNSYPMYT

SEQ ID NO: 18598 - protein, 12 aa, Homo sapiens
  Heavy chain CDR3 for antibody 9299 (IGHV3-33)
ARVDAAAPYFDY

SEQ ID NO: 18599 - protein, 11 aa, Homo sapiens
  Light chain CDR3 for antibody 9300 (IGKV3-11)
QQRSNWPPMYT

SEQ ID NO: 18600 - protein, 13 aa, Homo sapiens
  Heavy chain CDR3 for antibody 9300 (IGHV3-33)
ARDWGYSHGYFDY

SEQ ID NO: 18601 - protein, 9 aa, Homo sapiens
  Light chain CDR3 for antibody 9301 (IGKV3D-11)
QQRSNWQYT

SEQ ID NO: 18602 - protein, 15 aa, Homo sapiens
  Heavy chain CDR3 for antibody 9301 (IGHV3-33)
ARDALAVTGTGWFDP

SEQ ID NO: 18603 - protein, 9 aa, Homo sapiens
  Light chain CDR3 for antibody 9302 (IGKV1D-13)
QQFNNYPHT

SEQ ID NO: 18604 - protein, 17 aa, Homo sapiens
  Heavy chain CDR3 for antibody 9302 (IGHV3-23)
AKGDYYGSGSYSTFFDY

SEQ ID NO: 18605 - protein, 9 aa, Homo sapiens
  Light chain CDR3 for antibody 9303 (IGKV3D-7)
QQDYELPLT

SEQ ID NO: 18606 - protein, 12 aa, Homo sapiens
  Heavy chain CDR3 for antibody 9303 (IGHV1-18)
ARVLFDGDYFDY

SEQ ID NO: 18607 - protein, 8 aa, Homo sapiens
  Light chain CDR3 for antibody 9304 (IGKV6-21)
HQSSSLPT

SEQ ID NO: 18608 - protein, 13 aa, Homo sapiens
  Heavy chain CDR3 for antibody 9304 (IGHV3-33)
ARRATLVRGVFDP

SEQ ID NO: 18609 - protein, 9 aa, Homo sapiens
  Light chain CDR3 for antibody 9305 (IGKV1-17)
LQHNTYPLT

SEQ ID NO: 18610 - protein, 10 aa, Homo sapiens
  Heavy chain CDR3 for antibody 9305 (IGHV3-33)
VRDVVVYFDY

SEQ ID NO: 18611 - protein, 8 aa, Homo sapiens
  Light chain CDR3 for antibody 9306 (IGKV3-11)
QQRSNWLT

SEQ ID NO: 18612 - protein, 14 aa, Homo sapiens
  Heavy chain CDR3 for antibody 9306 (IGHV1-46)
ARDGVGAKEGGFDY

SEQ ID NO: 18613 - protein, 9 aa, Homo sapiens
  Light chain CDR3 for antibody 9307 (IGKV1-6)
LQDYNHPFT

SEQ ID NO: 18614 - protein, 16 aa, Homo sapiens
  Heavy chain CDR3 for antibody 9307 (IGHV4-61)
ARGRYFEWLLGDVLDI

SEQ ID NO: 18615 - protein, 9 aa, Homo sapiens
  Light chain CDR3 for antibody 9308 (IGKV1-9)
QQLNSYPWT

SEQ ID NO: 18616 - protein, 18 aa, Homo sapiens
  Heavy chain CDR3 for antibody 9308 (IGHV4-59)
AREGDYVWGSYRPNWFDH

SEQ ID NO: 18617 - protein, 9 aa, Homo sapiens
  Light chain CDR3 for antibody 9309 (IGKV1-9)
QQYITYPYT

SEQ ID NO: 18618 - protein, 11 aa, Homo sapiens
  Heavy chain CDR3 for antibody 9309 (IGHV3-33)
ATERDMVRGDY

SEQ ID NO: 18619 - protein, 6 aa, Homo sapiens
  Light chain CDR3 for antibody 9310 (IGKV3-20)
QQYGST

SEQ ID NO: 18620 - protein, 20 aa, Homo sapiens
  Heavy chain CDR3 for antibody 9310 (IGHV3-33)
AREDYYGSGSYYPAYNWFDP

SEQ ID NO: 18621 - protein, 9 aa, Homo sapiens
  Light chain CDR3 for antibody 9311 (IGKV1-6)
LQDFHYPRT

SEQ ID NO: 18622 - protein, 15 aa, Homo sapiens
  Heavy chain CDR3 for antibody 9311 (IGHV3-23)
AKEALRYFDWSGMDV

SEQ ID NO: 18623 - protein, 10 aa, Homo sapiens
  Light chain CDR3 for antibody 9312 (IGKV3-11)
QQRSNWPPYT

SEQ ID NO: 18624 - protein, 12 aa, Homo sapiens
  Heavy chain CDR3 for antibody 9312 (IGHV3-23)
AKESLYTPTDDY

SEQ ID NO: 18625 - protein, 9 aa, Homo sapiens
  Light chain CDR3 for antibody 9313 (IGKV1-17)
LQHNSYPPT

SEQ ID NO: 18626 - protein, 15 aa, Homo sapiens
  Heavy chain CDR3 for antibody 9313 (IGHV3-33)
ARDSRPEIIGTPFDY

SEQ ID NO: 18627 - protein, 9 aa, Homo sapiens
  Light chain CDR3 for antibody 9314 (IGKV1-39)
QQSYRTPLT

SEQ ID NO: 18628 - protein, 18 aa, Homo sapiens
  Heavy chain CDR3 for antibody 9314 (IGHV3-33)
AREGSYYGSGSVPNWFDP

SEQ ID NO: 18629 - protein, 10 aa, Homo sapiens
  Light chain CDR3 for antibody 9315 (IGKV3-11)
QQRSNWPIWT

SEQ ID NO: 18630 - protein, 14 aa, Homo sapiens
  Heavy chain CDR3 for antibody 9315 (IGHV1-46)
ARKGIVGGFDAFDV

SEQ ID NO: 18631 - protein, 9 aa, Homo sapiens
  Light chain CDR3 for antibody 9316 (IGKV3-11)
QQRINWPWT

SEQ ID NO: 18632 - protein, 14 aa, Homo sapiens
  Heavy chain CDR3 for antibody 9316 (IGHV4-39)
ARHGYYGSSNWLDP

SEQ ID NO: 18633 - protein, 9 aa, Homo sapiens
  Light chain CDR3 for antibody 9317 (IGKV1-17)
LHSNNYPWT

SEQ ID NO: 18634 - protein, 15 aa, Homo sapiens
  Heavy chain CDR3 for antibody 9317 (IGHV3-33)
ARRICSGGSCSLFDY

SEQ ID NO: 18635 - protein, 9 aa, Homo sapiens
  Light chain CDR3 for antibody 9318 (IGKV1-9)
QQLISYQLT

SEQ ID NO: 18636 - protein, 14 aa, Homo sapiens
  Heavy chain CDR3 for antibody 9318 (IGHV3-23)
ASWAYDILTGYLDY

SEQ ID NO: 18637 - protein, 9 aa, Homo sapiens
  Light chain CDR3 for antibody 9319 (IGKV1-9)
QQLHSYPYT

SEQ ID NO: 18638 - protein, 19 aa, Homo sapiens
  Heavy chain CDR3 for antibody 9319 (IGHV3-30)
ARRFSGYSGYDHYYYGMDV

SEQ ID NO: 18639 - protein, 10 aa, Homo sapiens
  Light chain CDR3 for antibody 9320 (IGKV3-20)
QQYGSSPPYT

SEQ ID NO: 18640 - protein, 18 aa, Homo sapiens
  Heavy chain CDR3 for antibody 9320 (IGHV3-23)
ARYHLYFGSGFGSDGMDV

SEQ ID NO: 18641 - protein, 9 aa, Homo sapiens
  Light chain CDR3 for antibody 9321 (IGKV6-21)
HQSSSLPYT

SEQ ID NO: 18642 - protein, 14 aa, Homo sapiens
  Heavy chain CDR3 for antibody 9321 (IGHV3-23)
AKSYDILTGEAFDI

SEQ ID NO: 18643 - protein, 8 aa, Homo sapiens
  Light chain CDR3 for antibody 9322 (IGKV3-20)
QQYGSSRT

SEQ ID NO: 18644 - protein, 11 aa, Homo sapiens
  Heavy chain CDR3 for antibody 9322 (IGHV1-24)
ATELGLYYFDY

SEQ ID NO: 18645 - protein, 9 aa, Homo sapiens
  Light chain CDR3 for antibody 9323 (IGKV1-6)
QQLISYPLT

SEQ ID NO: 18646 - protein, 11 aa, Homo sapiens
  Heavy chain CDR3 for antibody 9323 (IGHV3-33)
ARDILTGFLDH

SEQ ID NO: 18647 - protein, 9 aa, Homo sapiens
  Light chain CDR3 for antibody 9324 (IGKV1-6)
LQDYNHPFT

SEQ ID NO: 18648 - protein, 18 aa, Homo sapiens
  Heavy chain CDR3 for antibody 9324 (IGHV4-59)
AREGDYGWGSYRPNWFDP

SEQ ID NO: 18649 - protein, 9 aa, Homo sapiens
  Light chain CDR3 for antibody 9325 (IGKV1-6)
LQDYNSPYT

SEQ ID NO: 18650 - protein, 14 aa, Homo sapiens
  Heavy chain CDR3 for antibody 9325 (IGHV3-23)
AKEALRYFDWLLDY

SEQ ID NO: 18651 - protein, 10 aa, Homo sapiens
  Light chain CDR3 for antibody 9326 (IGKV3-11)
QQRSNWPIWT

SEQ ID NO: 18652 - protein, 19 aa, Homo sapiens
  Heavy chain CDR3 for antibody 9326 (IGHV3-33)
ARDSGYSGYDYYYYYGMDV

SEQ ID NO: 18653 - protein, 9 aa, Homo sapiens
  Light chain CDR3 for antibody 9327 (IGKV1D-16)
QQYYSYPRT

SEQ ID NO: 18654 - protein, 17 aa, Homo sapiens
  Heavy chain CDR3 for antibody 9327 (IGHV3-23)
AKDYDILTGYSHNWFDP

SEQ ID NO: 18655 - protein, 8 aa, Homo sapiens
  Light chain CDR3 for antibody 9328 (IGKV3-11)
LQRGNWPT

SEQ ID NO: 18656 - protein, 13 aa, Homo sapiens
  Heavy chain CDR3 for antibody 9328 (IGHV4-39)
ARHVLLWFGEFDP

SEQ ID NO: 18657 - protein, 9 aa, Homo sapiens
  Light chain CDR3 for antibody 9329 (IGKV5-2)
LQHDNFPLT

SEQ ID NO: 18658 - protein, 10 aa, Homo sapiens
  Heavy chain CDR3 for antibody 9329 (IGHV4-34)
ARGPTSDVDY

SEQ ID NO: 18659 - protein, 9 aa, Homo sapiens
  Light chain CDR3 for antibody 9330 (IGKV1-27)
QKYNSAPYT

SEQ ID NO: 18660 - protein, 14 aa, Homo sapiens
  Heavy chain CDR3 for antibody 9330 (IGHV1-46)
ARKGIVGAFDAFDI

SEQ ID NO: 18661 - protein, 8 aa, Homo sapiens
  Light chain CDR3 for antibody 9331 (IGKV3D-7)
QQDYNLVT

SEQ ID NO: 18662 - protein, 13 aa, Homo sapiens
  Heavy chain CDR3 for antibody 9331 (IGHV4-39)
ASRYSSGWYPFDY

SEQ ID NO: 18663 - protein, 9 aa, Homo sapiens
  Light chain CDR3 for antibody 9332 (IGKV6-21)
HQSSSLPRT

SEQ ID NO: 18664 - protein, 11 aa, Homo sapiens
  Heavy chain CDR3 for antibody 9332 (IGHV3-33)
ARDILTGYFDY

SEQ ID NO: 18665 - protein, 9 aa, Homo sapiens
  Light chain CDR3 for antibody 9333 (IGKV6-21)
HQSSSLPYT

SEQ ID NO: 18666 - protein, 19 aa, Homo sapiens
  Heavy chain CDR3 for antibody 9333 (IGHV1-18)
ARGGHIGVVTAFHGYGMDV

SEQ ID NO: 18667 - protein, 9 aa, Homo sapiens
  Light chain CDR3 for antibody 9334 (IGKV1-5)
QQYNSYSYT

SEQ ID NO: 18668 - protein, 12 aa, Homo sapiens
  Heavy chain CDR3 for antibody 9334 (IGHV3-33)
ASRDILTGYLGY

SEQ ID NO: 18669 - protein, 9 aa, Homo sapiens
  Light chain CDR3 for antibody 9335 (IGKV1D-16)
QQRSSWPPT

SEQ ID NO: 18670 - protein, 13 aa, Homo sapiens
  Heavy chain CDR3 for antibody 9335 (IGHV3-33)
ARDWGYSHGYFDY

SEQ ID NO: 18671 - protein, 9 aa, Homo sapiens
  Light chain CDR3 for antibody 9336 (IGKV1-17)
LQHNSYPPT

SEQ ID NO: 18672 - protein, 16 aa, Homo sapiens
  Heavy chain CDR3 for antibody 9336 (IGHV4-59)
ARGRYFDWLLGDVFDI

SEQ ID NO: 18673 - protein, 8 aa, Homo sapiens
  Light chain CDR3 for antibody 9337 (IGKV1D-13)
QQFNNYPT

SEQ ID NO: 18674 - protein, 15 aa, Homo sapiens
  Heavy chain CDR3 for antibody 9337 (IGHV3-33)
ARDRYYDILTGYLDY

SEQ ID NO: 18675 - protein, 9 aa, Homo sapiens
  Light chain CDR3 for antibody 9338 (IGKV3D-7)
QQDYTLPRT

SEQ ID NO: 18676 - protein, 11 aa, Homo sapiens
  Heavy chain CDR3 for antibody 9338 (IGHV4-39)
TRDRGLGSFDY

SEQ ID NO: 18677 - protein, 11 aa, Homo sapiens
  Light chain CDR3 for antibody 9339 (IGKV3-11)
QQRSNWPPTWT

SEQ ID NO: 18678 - protein, 8 aa, Homo sapiens
  Heavy chain CDR3 for antibody 9339 (IGHV3-23)
EKSAGEDV

SEQ ID NO: 18679 - protein, 9 aa, Homo sapiens
  Light chain CDR3 for antibody 9340 (IGKV1-16)
QHYNDYPFT

SEQ ID NO: 18680 - protein, 12 aa, Homo sapiens
  Heavy chain CDR3 for antibody 9340 (IGHV4-59)
ARDRSGWAYFDY

SEQ ID NO: 18681 - protein, 8 aa, Homo sapiens
  Light chain CDR3 for antibody 9341 (IGKV3-15)
QQYNNYPT

SEQ ID NO: 18682 - protein, 8 aa, Homo sapiens
  Heavy chain CDR3 for antibody 9341 (IGHV3-23)
AKESLLDY

SEQ ID NO: 18683 - protein, 9 aa, Homo sapiens
  Light chain CDR3 for antibody 9342 (IGKV1-6)
LQDYSYPWT

SEQ ID NO: 18684 - protein, 10 aa, Homo sapiens
  Heavy chain CDR3 for antibody 9342 (IGHV3-33)
ATMTNVTFDY

SEQ ID NO: 18685 - protein, 10 aa, Homo sapiens
  Light chain CDR3 for antibody 9343 (IGKV1-17)
LQHNSYPMYT

SEQ ID NO: 18686 - protein, 17 aa, Homo sapiens
  Heavy chain CDR3 for antibody 9343 (IGHV3-23)
AKEYCSGGSCYVYYFDY

SEQ ID NO: 18687 - protein, 9 aa, Homo sapiens
  Light chain CDR3 for antibody 9344 (IGKV5-2)
LQHDKFPYT

SEQ ID NO: 18688 - protein, 9 aa, Homo sapiens
  Heavy chain CDR3 for antibody 9344 (IGHV3-33)
ASHSSGEDY

SEQ ID NO: 18689 - protein, 8 aa, Homo sapiens
  Light chain CDR3 for antibody 9345 (IGKV3-11)
QQRSNWLT

SEQ ID NO: 18690 - protein, 16 aa, Homo sapiens
  Heavy chain CDR3 for antibody 9345 (IGHV1-24)
ATDWNDRGYYYYGMDV

SEQ ID NO: 18691 - protein, 10 aa, Homo sapiens
  Light chain CDR3 for antibody 9346 (IGKV3-15)
QQYNNWPPLT

SEQ ID NO: 18692 - protein, 12 aa, Homo sapiens
  Heavy chain CDR3 for antibody 9346 (IGHV3-33)
TRGYSSKSYFDY

SEQ ID NO: 18693 - protein, 9 aa, Homo sapiens
  Light chain CDR3 for antibody 9347 (IGKV5-2)
LQHDKFPYT

SEQ ID NO: 18694 - protein, 13 aa, Homo sapiens
  Heavy chain CDR3 for antibody 9347 (IGHV3-23)
AKCIVAAIGGFDY

SEQ ID NO: 18695 - protein, 9 aa, Homo sapiens
  Light chain CDR3 for antibody 9348 (IGKV3D-20)
QQYGYSPLT

SEQ ID NO: 18696 - protein, 13 aa, Homo sapiens
  Heavy chain CDR3 for antibody 9348 (IGHV3-33)
ARGRGYNYGYGDY

SEQ ID NO: 18697 - protein, 9 aa, Homo sapiens
  Light chain CDR3 for antibody 9349 (IGKV3-20)
QQYGSSPYT

SEQ ID NO: 18698 - protein, 15 aa, Homo sapiens
  Heavy chain CDR3 for antibody 9349 (IGHV3-33)
ARDRGSSGYDRYFDY

SEQ ID NO: 18699 - protein, 9 aa, Homo sapiens
  Light chain CDR3 for antibody 9350 (IGKV3D-20)
QQYGSSPIT

SEQ ID NO: 18700 - protein, 18 aa, Homo sapiens
  Heavy chain CDR3 for antibody 9350 (IGHV1-46)
ARDGDYVWGSYRSNCFDP

SEQ ID NO: 18701 - protein, 9 aa, Homo sapiens
  Light chain CDR3 for antibody 9351 (IGKV1-6)
LQDYSYPWT

SEQ ID NO: 18702 - protein, 18 aa, Homo sapiens
  Heavy chain CDR3 for antibody 9351 (IGHV3-33)
ARDGYSGYDYYYYYGMDV

SEQ ID NO: 18703 - protein, 9 aa, Homo sapiens
  Light chain CDR3 for antibody 9352 (IGKV1D-16)
QQYYSYPRT

SEQ ID NO: 18704 - protein, 18 aa, Homo sapiens
  Heavy chain CDR3 for antibody 9352 (IGHV4-39)
ARQYYFGSGNYYRGWFDP

SEQ ID NO: 18705 - protein, 6 aa, Homo sapiens
  Light chain CDR3 for antibody 9353 (IGKV3-20)
QQYGST

SEQ ID NO: 18706 - protein, 13 aa, Homo sapiens
  Heavy chain CDR3 for antibody 9353 (IGHV3-33)
ARQSSGWFDAFDI

SEQ ID NO: 18707 - protein, 9 aa, Homo sapiens
  Light chain CDR3 for antibody 9354 (IGKV1-6)
LQDYNYPRT

SEQ ID NO: 18708 - protein, 18 aa, Homo sapiens
  Heavy chain CDR3 for antibody 9354 (IGHV3-33)
ARGSYSSGWNDYHYGMDV

SEQ ID NO: 18709 - protein, 9 aa, Homo sapiens
  Light chain CDR3 for antibody 9355 (IGKV5-2)
LQHDKFPYT

SEQ ID NO: 18710 - protein, 13 aa, Homo sapiens
  Heavy chain CDR3 for antibody 9355 (IGHV3-33)
TRTDYYFYYGMDV

SEQ ID NO: 18711 - protein, 10 aa, Homo sapiens
  Light chain CDR3 for antibody 9356 (IGKV3-11)
QQRSNWPIFT

SEQ ID NO: 18712 - protein, 17 aa, Homo sapiens
  Heavy chain CDR3 for antibody 9356 (IGHV1-8)
ARGDYYGSGSPYWYFDL

SEQ ID NO: 18713 - protein, 9 aa, Homo sapiens
  Light chain CDR3 for antibody 9357 (IGKV1-6)
LQDYNHPFT

SEQ ID NO: 18714 - protein, 16 aa, Homo sapiens
  Heavy chain CDR3 for antibody 9357 (IGHV3-33)
ARVYYDILTGYPHFDY

SEQ ID NO: 18715 - protein, 9 aa, Homo sapiens
  Light chain CDR3 for antibody 9358 (IGKV1D-13)
QHFNNYMYT

SEQ ID NO: 18716 - protein, 17 aa, Homo sapiens
  Heavy chain CDR3 for antibody 9358 (IGHV3-33)
ARDWFGELSDYYYGMDV

SEQ ID NO: 18717 - protein, 9 aa, Homo sapiens
  Light chain CDR3 for antibody 9359 (IGKV6-21)
HQSTSLPFT

SEQ ID NO: 18718 - protein, 12 aa, Homo sapiens
  Heavy chain CDR3 for antibody 9359 (IGHV4-39)
ARDSGSYYYFAY

SEQ ID NO: 18719 - protein, 9 aa, Homo sapiens
  Light chain CDR3 for antibody 9360 (IGKV6-21)
HQSSSLPLA

SEQ ID NO: 18720 - protein, 9 aa, Homo sapiens
  Heavy chain CDR3 for antibody 9360 (IGHV3-33)
AREYKEFDY

SEQ ID NO: 18721 - protein, 9 aa, Homo sapiens
  Light chain CDR3 for antibody 9361 (IGKV4-1)
QQYYSTPWT

SEQ ID NO: 18722 - protein, 14 aa, Homo sapiens
  Heavy chain CDR3 for antibody 9361 (IGHV3-33)
ARGGYSGYRYYFDY

SEQ ID NO: 18723 - protein, 9 aa, Homo sapiens
  Light chain CDR3 for antibody 9362 (IGKV1D-16)
QQYAGYPPT

SEQ ID NO: 18724 - protein, 13 aa, Homo sapiens
  Heavy chain CDR3 for antibody 9362 (IGHV4-39)
ARREVVGGRGFDY

SEQ ID NO: 18725 - protein, 9 aa, Homo sapiens
  Light chain CDR3 for antibody 9363 (IGKV1-17)
LHSNNYPWT

SEQ ID NO: 18726 - protein, 13 aa, Homo sapiens
  Heavy chain CDR3 for antibody 9363 (IGHV3-23)
ARAFTMVRGVIDY

SEQ ID NO: 18727 - protein, 9 aa, Homo sapiens
  Light chain CDR3 for antibody 9364 (IGKV5-2)
LQHDNFPYT

SEQ ID NO: 18728 - protein, 15 aa, Homo sapiens
  Heavy chain CDR3 for antibody 9364 (IGHV3-33)
ARDRGSSGYDRYFDY

SEQ ID NO: 18729 - protein, 9 aa, Homo sapiens
  Light chain CDR3 for antibody 9365 (IGKV6-21)
QQSSSLPQT

SEQ ID NO: 18730 - protein, 17 aa, Homo sapiens
  Heavy chain CDR3 for antibody 9365 (IGHV3-33)
ARGYSGYVGYYYYGMDV

SEQ ID NO: 18731 - protein, 7 aa, Homo sapiens
  Light chain CDR3 for antibody 9366 (IGKV1-17)
LQHNSYP

SEQ ID NO: 18732 - protein, 17 aa, Homo sapiens
  Heavy chain CDR3 for antibody 9366 (IGHV1-18)
ARERYYGSGSYKYNMDV

SEQ ID NO: 18733 - protein, 8 aa, Homo sapiens
  Light chain CDR3 for antibody 9367 (IGKV6-21)
HQSSSLPT

SEQ ID NO: 18734 - protein, 20 aa, Homo sapiens
  Heavy chain CDR3 for antibody 9367 (IGHV3-11)
ARGGATLIRGLIDYYYGMDV

SEQ ID NO: 18735 - protein, 9 aa, Homo sapiens
  Light chain CDR3 for antibody 9368 (IGKV1-9)
QQLNSYPWP

SEQ ID NO: 18736 - protein, 15 aa, Homo sapiens
  Heavy chain CDR3 for antibody 9368 (IGHV3-20)
ARDRGSSGWRDWFDP

SEQ ID NO: 18737 - protein, 8 aa, Homo sapiens
  Light chain CDR3 for antibody 9369 (IGKV3-11)
QQRGNWPS

SEQ ID NO: 18738 - protein, 10 aa, Homo sapiens
  Heavy chain CDR3 for antibody 9369 (IGHV3-23)
ATIVGPFLDV

SEQ ID NO: 18739 - protein, 10 aa, Homo sapiens
  Light chain CDR3 for antibody 9370 (IGKV3-20)
QQYGSSPPYT

SEQ ID NO: 18740 - protein, 13 aa, Homo sapiens
  Heavy chain CDR3 for antibody 9370 (IGHV4-59)
ARTMVRGVAPFDY

SEQ ID NO: 18741 - protein, 9 aa, Homo sapiens
  Light chain CDR3 for antibody 9371 (IGKV1-6)
LQDFNYPPT

SEQ ID NO: 18742 - protein, 14 aa, Homo sapiens
  Heavy chain CDR3 for antibody 9371 (IGHV3-33)
ARDGYDILTGPFDY

SEQ ID NO: 18743 - protein, 8 aa, Homo sapiens
  Light chain CDR3 for antibody 9372 (IGKV1-5)
QQYHSYYT

SEQ ID NO: 18744 - protein, 14 aa, Homo sapiens
  Heavy chain CDR3 for antibody 9372 (IGHV1-18)
ARRGIVGALDAFDI

SEQ ID NO: 18745 - protein, 9 aa, Homo sapiens
  Light chain CDR3 for antibody 9373 (IGKV1-6)
LQDYNYPLT

SEQ ID NO: 18746 - protein, 17 aa, Homo sapiens
  Heavy chain CDR3 for antibody 9373 (IGHV3-33)
ARDRGDILTGYSYYFDY

SEQ ID NO: 18747 - protein, 9 aa, Homo sapiens
  Light chain CDR3 for antibody 9374 (IGKV3D-20)
QQYGSSPYT

SEQ ID NO: 18748 - protein, 12 aa, Homo sapiens
  Heavy chain CDR3 for antibody 9374 (IGHV3-66)
VRDRAAAPYFDL

SEQ ID NO: 18749 - protein, 9 aa, Homo sapiens
  Light chain CDR3 for antibody 9375 (IGKV1-6)
LQDYNYPRT

SEQ ID NO: 18750 - protein, 14 aa, Homo sapiens
  Heavy chain CDR3 for antibody 9375 (IGHV4-34)
ARREEDYYYYGLDV

SEQ ID NO: 18751 - protein, 10 aa, Homo sapiens
  Light chain CDR3 for antibody 9376 (IGKV3-11)
QQRSNWPALT

SEQ ID NO: 18752 - protein, 14 aa, Homo sapiens
  Heavy chain CDR3 for antibody 9376 (IGHV3-33)
ARAISGSSYWYFDL

SEQ ID NO: 18753 - protein, 9 aa, Homo sapiens
  Light chain CDR3 for antibody 9377 (IGKV3-15)
QQYNNWPYT

SEQ ID NO: 18754 - protein, 13 aa, Homo sapiens
  Heavy chain CDR3 for antibody 9377 (IGHV4-39)
ARHPPSRDYGMDV

SEQ ID NO: 18755 - protein, 9 aa, Homo sapiens
  Light chain CDR3 for antibody 9378 (IGKV1-6)
LQDYKSPFT

SEQ ID NO: 18756 - protein, 19 aa, Homo sapiens
  Heavy chain CDR3 for antibody 9378 (IGHV3-33)
TRDPHYDILTGYAYYGMDV

SEQ ID NO: 18757 - protein, 8 aa, Homo sapiens
  Light chain CDR3 for antibody 9379 (IGKV3-11)
QQRSNWLT

SEQ ID NO: 18758 - protein, 13 aa, Homo sapiens
  Heavy chain CDR3 for antibody 9379 (IGHV1-8)
ARSITMVRGVIGY

SEQ ID NO: 18759 - protein, 10 aa, Homo sapiens
  Light chain CDR3 for antibody 9380 (IGKV3-15)
QQYNNWPPYT

SEQ ID NO: 18760 - protein, 11 aa, Homo sapiens
  Heavy chain CDR3 for antibody 9380 (IGHV3-74)
ARDRGNWGFDY

SEQ ID NO: 18761 - protein, 9 aa, Homo sapiens
  Light chain CDR3 for antibody 9381 (IGKV1-9)
QQLNSYPRT

SEQ ID NO: 18762 - protein, 15 aa, Homo sapiens
  Heavy chain CDR3 for antibody 9381 (IGHV3-23)
AKEALRYFDWAGMDV

SEQ ID NO: 18763 - protein, 9 aa, Homo sapiens
  Light chain CDR3 for antibody 9382 (IGKV1-17)
LQYNNYPWT

SEQ ID NO: 18764 - protein, 14 aa, Homo sapiens
  Heavy chain CDR3 for antibody 9382 (IGHV3-33)
ARDRIAAASSDFDC

SEQ ID NO: 18765 - protein, 8 aa, Homo sapiens
  Light chain CDR3 for antibody 9383 (IGKV3-11)
LQRGNWPT

SEQ ID NO: 18766 - protein, 16 aa, Homo sapiens
  Heavy chain CDR3 for antibody 9383 (IGHV4-39)
ARDTPYYSGSGRPFDY

SEQ ID NO: 18767 - protein, 9 aa, Homo sapiens
  Light chain CDR3 for antibody 9384 (IGKV1-9)
QQYNTYSRT

SEQ ID NO: 18768 - protein, 9 aa, Homo sapiens
  Heavy chain CDR3 for antibody 9384 (IGHV3-13)
ARDRWYFDL

SEQ ID NO: 18769 - protein, 9 aa, Homo sapiens
  Light chain CDR3 for antibody 9385 (IGKV1D-13)
QQFNNYPST

SEQ ID NO: 18770 - protein, 11 aa, Homo sapiens
  Heavy chain CDR3 for antibody 9385 (IGHV3-23)
ARDPGSIPGDY

SEQ ID NO: 18771 - protein, 9 aa, Homo sapiens
  Light chain CDR3 for antibody 9386 (IGKV1D-16)
QQYHSYPYT

SEQ ID NO: 18772 - protein, 17 aa, Homo sapiens
  Heavy chain CDR3 for antibody 9386 (IGHV3-33)
ARVYYDMLTGYSPALDI

SEQ ID NO: 18773 - protein, 11 aa, Homo sapiens
  Light chain CDR3 for antibody 9387 (IGKV3-11)
QQRSNWPPMYT

SEQ ID NO: 18774 - protein, 16 aa, Homo sapiens
  Heavy chain CDR3 for antibody 9387 (IGHV4-59)
ARDIPYYSGSGRPFDH

SEQ ID NO: 18775 - protein, 9 aa, Homo sapiens
  Light chain CDR3 for antibody 9388 (IGKV1-6)
LQDYKSPFT

SEQ ID NO: 18776 - protein, 11 aa, Homo sapiens
  Heavy chain CDR3 for antibody 9388 (IGHV4-4)
AREAYYYGLDV

SEQ ID NO: 18777 - protein, 8 aa, Homo sapiens
  Light chain CDR3 for antibody 9389 (IGKV3-11)
LQRGNWPT

SEQ ID NO: 18778 - protein, 19 aa, Homo sapiens
  Heavy chain CDR3 for antibody 9389 (IGHV3-33)
ARRRDDILTGWDYYFGMDV

SEQ ID NO: 18779 - protein, 9 aa, Homo sapiens
  Light chain CDR3 for antibody 9390 (IGKV1-6)
QQEYNYPLT

SEQ ID NO: 18780 - protein, 18 aa, Homo sapiens
  Heavy chain CDR3 for antibody 9390 (IGHV1-18)
ARDRYYYDSGSYYYGMDV

SEQ ID NO: 18781 - protein, 9 aa, Homo sapiens
  Light chain CDR3 for antibody 9391 (IGKV1-9)
QQYNTYSRT

SEQ ID NO: 18782 - protein, 18 aa, Homo sapiens
  Heavy chain CDR3 for antibody 9391 (IGHV3-33)
ARDGYSGYDYYYYYGMDV

SEQ ID NO: 18783 - protein, 11 aa, Homo sapiens
  Light chain CDR3 for antibody 9392 (IGKV3-11)
QQRSNWPPMYT

SEQ ID NO: 18784 - protein, 13 aa, Homo sapiens
  Heavy chain CDR3 for antibody 9392 (IGHV4-39)
ARERGIAAAGPDY

SEQ ID NO: 18785 - protein, 8 aa, Homo sapiens
  Light chain CDR3 for antibody 9393 (IGKV3D-7)
QQDYNLLT

SEQ ID NO: 18786 - protein, 8 aa, Homo sapiens
  Heavy chain CDR3 for antibody 9393 (IGHV3-20)
APHWIFDY

SEQ ID NO: 18787 - protein, 9 aa, Homo sapiens
  Light chain CDR3 for antibody 9394 (IGKV3-15)
QQYNDWPLT

SEQ ID NO: 18788 - protein, 20 aa, Homo sapiens
  Heavy chain CDR3 for antibody 9394 (IGHV1-f)
ATHYDILTGSPYYYYCALDV

SEQ ID NO: 18789 - protein, 9 aa, Homo sapiens
  Light chain CDR3 for antibody 9395 (IGKV1-6)
LQDYKSPFT

SEQ ID NO: 18790 - protein, 17 aa, Homo sapiens
  Heavy chain CDR3 for antibody 9395 (IGHV3-33)
VREGGLLWVGELSLFDY

SEQ ID NO: 18791 - protein, 10 aa, Homo sapiens
  Light chain CDR3 for antibody 9396 (IGKV3-11)
QQRSNWPIFT

SEQ ID NO: 18792 - protein, 17 aa, Homo sapiens
  Heavy chain CDR3 for antibody 9396 (IGHV3-23)
AKEGSSSSWYGGHYFDY

SEQ ID NO: 18793 - protein, 10 aa, Homo sapiens
  Light chain CDR3 for antibody 9397 (IGKV1-39)
QQSYSSPMYT

SEQ ID NO: 18794 - protein, 19 aa, Homo sapiens
  Heavy chain CDR3 for antibody 9397 (IGHV5-51)
ARHGEKGKRITMVRGSLDV

SEQ ID NO: 18795 - protein, 9 aa, Homo sapiens
  Light chain CDR3 for antibody 9398 (IGKV1-6)
LQVYSYPWT

SEQ ID NO: 18796 - protein, 12 aa, Homo sapiens
  Heavy chain CDR3 for antibody 9398 (IGHV1-46)
ARGLTGDHALDI

SEQ ID NO: 18797 - protein, 8 aa, Homo sapiens
  Light chain CDR3 for antibody 9399 (IGKV1-13)
QQYSNWLT

SEQ ID NO: 18798 - protein, 18 aa, Homo sapiens
  Heavy chain CDR3 for antibody 9399 (IGHV1-18)
ARDRYYYDSGSYYYGMDV

SEQ ID NO: 18799 - protein, 9 aa, Homo sapiens
  Light chain CDR3 for antibody 9400 (IGKV1-6)
LQDYNYPYT

SEQ ID NO: 18800 - protein, 18 aa, Homo sapiens
  Heavy chain CDR3 for antibody 9400 (IGHV3-33)
ARERYYYGSGSYYNWFDP

SEQ ID NO: 18801 - protein, 9 aa, Homo sapiens
  Light chain CDR3 for antibody 9401 (IGKV1-6)
LQDFHYPWT

SEQ ID NO: 18802 - protein, 12 aa, Homo sapiens
  Heavy chain CDR3 for antibody 9401 (IGHV3-23)
AKESLYTPTDDY

SEQ ID NO: 18803 - protein, 9 aa, Homo sapiens
  Light chain CDR3 for antibody 9402 (IGKV3-11)
QQRINWPWT

SEQ ID NO: 18804 - protein, 14 aa, Homo sapiens
  Heavy chain CDR3 for antibody 9402 (IGHV4-59)
AKGGSGSYYNWFDP

SEQ ID NO: 18805 - protein, 9 aa, Homo sapiens
  Light chain CDR3 for antibody 9403 (IGKV6-21)
HQSSSLPYT

SEQ ID NO: 18806 - protein, 13 aa, Homo sapiens
  Heavy chain CDR3 for antibody 9403 (IGHV3-33)
ARGELLWFGEFAC

SEQ ID NO: 18807 - protein, 9 aa, Homo sapiens
  Light chain CDR3 for antibody 9404 (IGKV1D-13)
QQFNNYPYT

SEQ ID NO: 18808 - protein, 13 aa, Homo sapiens
  Heavy chain CDR3 for antibody 9404 (IGHV3-33)
ARDPLYSGSYFDY

SEQ ID NO: 18809 - protein, 9 aa, Homo sapiens
  Light chain CDR3 for antibody 9405 (IGKV5-2)
LQHDKFPYT

SEQ ID NO: 18810 - protein, 11 aa, Homo sapiens
  Heavy chain CDR3 for antibody 9405 (IGHV4-59)
AREMGHDIFDI

SEQ ID NO: 18811 - protein, 10 aa, Homo sapiens
  Light chain CDR3 for antibody 9406 (IGKV1-16)
LQDYNYPMYT

SEQ ID NO: 18812 - protein, 10 aa, Homo sapiens
  Heavy chain CDR3 for antibody 9406 (IGHV3-23)
AKGDRWRFDP

SEQ ID NO: 18813 - protein, 11 aa, Homo sapiens
  Light chain CDR3 for antibody 9407 (IGKV3-11)
QQRSNWPPTWT

SEQ ID NO: 18814 - protein, 11 aa, Homo sapiens
  Heavy chain CDR3 for antibody 9407 (IGHV3-33)
ARDKSSGWSDY

SEQ ID NO: 18815 - protein, 9 aa, Homo sapiens
  Light chain CDR3 for antibody 9408 (IGKV3-15)
QQYHNWPRT

SEQ ID NO: 18816 - protein, 13 aa, Homo sapiens
  Heavy chain CDR3 for antibody 9408 (IGHV3-33)
ARDYTMVRGVMNY

SEQ ID NO: 18817 - protein, 9 aa, Homo sapiens
  Light chain CDR3 for antibody 9409 (IGKV1-9)
QQLNSYPYT

SEQ ID NO: 18818 - protein, 12 aa, Homo sapiens
  Heavy chain CDR3 for antibody 9409 (IGHV3-33)
ARGRGYSYGYDY

SEQ ID NO: 18819 - protein, 8 aa, Homo sapiens
  Light chain CDR3 for antibody 9410 (IGKV6-21)
HQSSSLPT

SEQ ID NO: 18820 - protein, 15 aa, Homo sapiens
  Heavy chain CDR3 for antibody 9410 (IGHV3-23)
AKDGSYYDYYYGMDV

SEQ ID NO: 18821 - protein, 8 aa, Homo sapiens
  Light chain CDR3 for antibody 9411 (IGKV3-20)
QQYGSSLT

SEQ ID NO: 18822 - protein, 14 aa, Homo sapiens
  Heavy chain CDR3 for antibody 9411 (IGHV1-24)
ATWLPLYYYYGMDV

SEQ ID NO: 18823 - protein, 9 aa, Homo sapiens
  Light chain CDR3 for antibody 9412 (IGKV1-9)
QQLNSYPYT

SEQ ID NO: 18824 - protein, 15 aa, Homo sapiens
  Heavy chain CDR3 for antibody 9412 (IGHV3-33)
ARHYDILTGYGGFDP

SEQ ID NO: 18825 - protein, 9 aa, Homo sapiens
  Light chain CDR3 for antibody 9413 (IGKV6-21)
HQSSTLPST

SEQ ID NO: 18826 - protein, 15 aa, Homo sapiens
  Heavy chain CDR3 for antibody 9413 (IGHV3-21)
ARDSRPEITGPPFDY

SEQ ID NO: 18827 - protein, 9 aa, Homo sapiens
  Light chain CDR3 for antibody 9414 (IGKV5-2)
LQHDKFPYT

SEQ ID NO: 18828 - protein, 12 aa, Homo sapiens
  Heavy chain CDR3 for antibody 9414 (IGHV4-59)
ARDRSGWAYFDY

SEQ ID NO: 18829 - protein, 9 aa, Homo sapiens
  Light chain CDR3 for antibody 9415 (IGKV3-20)
QQYGSSIFT

SEQ ID NO: 18830 - protein, 18 aa, Homo sapiens
  Heavy chain CDR3 for antibody 9415 (IGHV1-46)
ARDGDYVWGSYRSNWFDP

SEQ ID NO: 18831 - protein, 8 aa, Homo sapiens
  Light chain CDR3 for antibody 9416 (IGKV3-20)
QQYGSSLT

SEQ ID NO: 18832 - protein, 9 aa, Homo sapiens
  Heavy chain CDR3 for antibody 9416 (IGHV1-18)
ARGGWGFEY

SEQ ID NO: 18833 - protein, 10 aa, Homo sapiens
  Light chain CDR3 for antibody 9417 (IGKV1-17)
LQHNSYPMYT

SEQ ID NO: 18834 - protein, 13 aa, Homo sapiens
  Heavy chain CDR3 for antibody 9417 (IGHV3-33)
ASAGNSYYNVMDV

SEQ ID NO: 18835 - protein, 8 aa, Homo sapiens
  Light chain CDR3 for antibody 9418 (IGKV3-11)
QQRSNWLT

SEQ ID NO: 18836 - protein, 15 aa, Homo sapiens
  Heavy chain CDR3 for antibody 9418 (IGHV1-46)
ARGRFFDWLLSPFDY

SEQ ID NO: 18837 - protein, 9 aa, Homo sapiens
  Light chain CDR3 for antibody 9419 (IGKV1D-16)
KQYNSYPYT

SEQ ID NO: 18838 - protein, 15 aa, Homo sapiens
  Heavy chain CDR3 for antibody 9419 (IGHV3-33)
AREQGYSGYWGHLDY

SEQ ID NO: 18839 - protein, 9 aa, Homo sapiens
  Light chain CDR3 for antibody 9420 (IGKV1D-16)
QQYAGYPPT

SEQ ID NO: 18840 - protein, 16 aa, Homo sapiens
  Heavy chain CDR3 for antibody 9420 (IGHV3-23)
AKEGMVLRYFDWLWDY

SEQ ID NO: 18841 - protein, 9 aa, Homo sapiens
  Light chain CDR3 for antibody 9421 (IGKV6-21)
HQSSSLPLT

SEQ ID NO: 18842 - protein, 14 aa, Homo sapiens
  Heavy chain CDR3 for antibody 9421 (IGHV3-33)
ARDGYDILPGPFDY

SEQ ID NO: 18843 - protein, 9 aa, Homo sapiens
  Light chain CDR3 for antibody 9422 (IGKV1-27)
QKYNSAPYT

SEQ ID NO: 18844 - protein, 9 aa, Homo sapiens
  Heavy chain CDR3 for antibody 9422 (IGHV3-33)
AANSYGLDY

SEQ ID NO: 18845 - protein, 9 aa, Homo sapiens
  Light chain CDR3 for antibody 9423 (IGKV3D-7)
QQDYNLPLT

SEQ ID NO: 18846 - protein, 12 aa, Homo sapiens
  Heavy chain CDR3 for antibody 9423 (IGHV3-33)
ARDGYSSRNFDY

SEQ ID NO: 18847 - protein, 9 aa, Homo sapiens
  Light chain CDR3 for antibody 9424 (IGKV1-17)
LQHNSYPYT

SEQ ID NO: 18848 - protein, 10 aa, Homo sapiens
  Heavy chain CDR3 for antibody 9424 (IGHV3-33)
ARDYGDYFDY

SEQ ID NO: 18849 - protein, 8 aa, Homo sapiens
  Light chain CDR3 for antibody 9425 (IGKV3D-7)
QQDYNLPT

SEQ ID NO: 18850 - protein, 16 aa, Homo sapiens
  Heavy chain CDR3 for antibody 9425 (IGHV1-24)
ATDWNDRGYYYYGMDV

SEQ ID NO: 18851 - protein, 9 aa, Homo sapiens
  Light chain CDR3 for antibody 9426 (IGKV3-11)
QQRSNWMYT

SEQ ID NO: 18852 - protein, 17 aa, Homo sapiens
  Heavy chain CDR3 for antibody 9426 (IGHV3-33)
ARDRDDILTGFYTYFDY

SEQ ID NO: 18853 - protein, 9 aa, Homo sapiens
  Light chain CDR3 for antibody 9427 (IGKV1-39)
QQSYSTPLT

SEQ ID NO: 18854 - protein, 18 aa, Homo sapiens
  Heavy chain CDR3 for antibody 9427 (IGHV3-33)
AKDGDYFGSGSYWGYFDL

SEQ ID NO: 18855 - protein, 8 aa, Homo sapiens
  Light chain CDR3 for antibody 9428 (IGKV1D-13)
QQFNNYYT

SEQ ID NO: 18856 - protein, 18 aa, Homo sapiens
  Heavy chain CDR3 for antibody 9428 (IGHV1-8)
ARSRIAAAGIYYYYGMDV

SEQ ID NO: 18857 - protein, 10 aa, Homo sapiens
  Light chain CDR3 for antibody 9429 (IGKV1-17)
LQHNSYPMYT

SEQ ID NO: 18858 - protein, 13 aa, Homo sapiens
  Heavy chain CDR3 for antibody 9429 (IGHV1-18)
ARSITMVRGVIGY

SEQ ID NO: 18859 - protein, 9 aa, Homo sapiens
  Light chain CDR3 for antibody 9430 (IGKV2D-28)
MQALQTPWT

SEQ ID NO: 18860 - protein, 10 aa, Homo sapiens
  Heavy chain CDR3 for antibody 9430 (IGHV3-48)
ARDGSGSQPI

SEQ ID NO: 18861 - protein, 9 aa, Homo sapiens
  Light chain CDR3 for antibody 9431 (IGKV2D-28)
MQALQTPWT

SEQ ID NO: 18862 - protein, 12 aa, Homo sapiens
  Heavy chain CDR3 for antibody 9431 (IGHV3-33)
ARGYFGSGYAHF

SEQ ID NO: 18863 - protein, 8 aa, Homo sapiens
  Light chain CDR3 for antibody 9432 (IGKV3-11)
QQRSNWLT

SEQ ID NO: 18864 - protein, 11 aa, Homo sapiens
  Heavy chain CDR3 for antibody 9432 (IGHV1-24)
ATELGLYYFDY

SEQ ID NO: 18865 - protein, 9 aa, Homo sapiens
  Light chain CDR3 for antibody 9433 (IGKV3D-20)
QQYGSSPYT

SEQ ID NO: 18866 - protein, 19 aa, Homo sapiens
  Heavy chain CDR3 for antibody 9433 (IGHV3-33)
ARDKYYDILTGYPWNGMDV

SEQ ID NO: 18867 - protein, 9 aa, Homo sapiens
  Light chain CDR3 for antibody 9434 (IGKV1-16)
QHYNDYPFT

SEQ ID NO: 18868 - protein, 13 aa, Homo sapiens
  Heavy chain CDR3 for antibody 9434 (IGHV3-33)
ANTGDSYYYDMDV

SEQ ID NO: 18869 - protein, 9 aa, Homo sapiens
  Light chain CDR3 for antibody 9435 (IGKV6-21)
HQSSSLPYT

SEQ ID NO: 18870 - protein, 17 aa, Homo sapiens
  Heavy chain CDR3 for antibody 9435 (IGHV3-49)
ARRVTLVRVPIKNWFDP

SEQ ID NO: 18871 - protein, 8 aa, Homo sapiens
  Light chain CDR3 for antibody 9436 (IGKV3-15)
QQYNNYPT

SEQ ID NO: 18872 - protein, 17 aa, Homo sapiens
  Heavy chain CDR3 for antibody 9436 (IGHV3-33)
ARQGVLLWFGELYYFDY

SEQ ID NO: 18873 - protein, 9 aa, Homo sapiens
  Light chain CDR3 for antibody 9437 (IGKV6-21)
QQSSSLPYT

SEQ ID NO: 18874 - protein, 17 aa, Homo sapiens
  Heavy chain CDR3 for antibody 9437 (IGHV3-33)
AREGTMVRGYYYYGMDV

SEQ ID NO: 18875 - protein, 9 aa, Homo sapiens
  Light chain CDR3 for antibody 9438 (IGKV1-9)
QQYNSYPYT

SEQ ID NO: 18876 - protein, 19 aa, Homo sapiens
  Heavy chain CDR3 for antibody 9438 (IGHV3-20)
ARDPPTQALHYYYYYGMDV

SEQ ID NO: 18877 - protein, 9 aa, Homo sapiens
  Light chain CDR3 for antibody 9439 (IGKV1-6)
QQEYNYPLT

SEQ ID NO: 18878 - protein, 19 aa, Homo sapiens
  Heavy chain CDR3 for antibody 9439 (IGHV3-33)
ARDRVVGATTYYYYYGMDV

SEQ ID NO: 18879 - protein, 9 aa, Homo sapiens
  Light chain CDR3 for antibody 9440 (IGKV1-6)
LQDYNYPRT

SEQ ID NO: 18880 - protein, 19 aa, Homo sapiens
  Heavy chain CDR3 for antibody 9440 (IGHV3-30)
ARRLGGYSGYDHYYYGMDV

SEQ ID NO: 18881 - protein, 9 aa, Homo sapiens
  Light chain CDR3 for antibody 9441 (IGKV1D-13)
QRFNNYLYT

SEQ ID NO: 18882 - protein, 18 aa, Homo sapiens
  Heavy chain CDR3 for antibody 9441 (IGHV4-59)
AREGDYVWGSYRSNWFDP

SEQ ID NO: 18883 - protein, 9 aa, Homo sapiens
  Light chain CDR3 for antibody 9442 (IGKV1-9)
QQLHSYPYT

SEQ ID NO: 18884 - protein, 16 aa, Homo sapiens
  Heavy chain CDR3 for antibody 9442 (IGHV1-46)
ARDKNTDYDILTGFDY

SEQ ID NO: 18885 - protein, 9 aa, Homo sapiens
  Light chain CDR3 for antibody 9443 (IGKV3D-7)
QQDYSFPLT

SEQ ID NO: 18886 - protein, 12 aa, Homo sapiens
  Heavy chain CDR3 for antibody 9443 (IGHV3-23)
AKGAVVTAIFDY

SEQ ID NO: 18887 - protein, 9 aa, Homo sapiens
  Light chain CDR3 for antibody 9444 (IGKV1-9)
QQLNTYPYT

SEQ ID NO: 18888 - protein, 20 aa, Homo sapiens
  Heavy chain CDR3 for antibody 9444 (IGHV3-33)
ARDNDSSGYYDYYYYYGMYV

SEQ ID NO: 18889 - protein, 10 aa, Homo sapiens
  Light chain CDR3 for antibody 9445 (IGKV3-20)
QQYGSSPPYT

SEQ ID NO: 18890 - protein, 18 aa, Homo sapiens
  Heavy chain CDR3 for antibody 9445 (IGHV4-59)
ARDNHYYSSGTYSNWFDP

SEQ ID NO: 18891 - protein, 9 aa, Homo sapiens
  Light chain CDR3 for antibody 9446 (IGKV1-9)
QQYNSYPIT

SEQ ID NO: 18892 - protein, 24 aa, Homo sapiens
  Heavy chain CDR3 for antibody 9446 (IGHV1-24)
ATEAHYDILTGYYNPHYYYYGMDV

SEQ ID NO: 18893 - protein, 9 aa, Homo sapiens
  Light chain CDR3 for antibody 9447 (IGKV1-6)
QQEYNYPLT

SEQ ID NO: 18894 - protein, 12 aa, Homo sapiens
  Heavy chain CDR3 for antibody 9447 (IGHV4-39)
ARHPRYLDAFDI

SEQ ID NO: 18895 - protein, 10 aa, Homo sapiens
  Light chain CDR3 for antibody 9448 (IGKV1-6)
LQDYNYPMYT

SEQ ID NO: 18896 - protein, 15 aa, Homo sapiens
  Heavy chain CDR3 for antibody 9448 (IGHV3-33)
ARDTGYSSSWNWFDP

SEQ ID NO: 18897 - protein, 9 aa, Homo sapiens
  Light chain CDR3 for antibody 9449 (IGKV1-17)
LQLNSFPWT

SEQ ID NO: 18898 - protein, 14 aa, Homo sapiens
  Heavy chain CDR3 for antibody 9449 (IGHV3-23)
AKSRIVGALYYCDY

SEQ ID NO: 18899 - protein, 9 aa, Homo sapiens
  Light chain CDR3 for antibody 9450 (IGKV6-21)
HQSTSLPFT

SEQ ID NO: 18900 - protein, 14 aa, Homo sapiens
  Heavy chain CDR3 for antibody 9450 (IGHV4-39)
ARRGVLVPPGGMDV

SEQ ID NO: 18901 - protein, 9 aa, Homo sapiens
  Light chain CDR3 for antibody 9451 (IGKV1-5)
QQYNTYSRT

SEQ ID NO: 18902 - protein, 7 aa, Homo sapiens
  Heavy chain CDR3 for antibody 9451 (IGHV1-46)
AREGGDY

SEQ ID NO: 18903 - protein, 9 aa, Homo sapiens
  Light chain CDR3 for antibody 9452 (IGKV1-39)
QQSYSSPFT

SEQ ID NO: 18904 - protein, 12 aa, Homo sapiens
  Heavy chain CDR3 for antibody 9452 (IGHV1-18)
AREDYDIDGMDV

SEQ ID NO: 18905 - protein, 9 aa, Homo sapiens
  Light chain CDR3 for antibody 9453 (IGKV1-9)
QQLNSYPLT

SEQ ID NO: 18906 - protein, 15 aa, Homo sapiens
  Heavy chain CDR3 for antibody 9453 (IGHV4-59)
ARDAGYSSSWYDFDY

SEQ ID NO: 18907 - protein, 9 aa, Homo sapiens
  Light chain CDR3 for antibody 9454 (IGKV1-17)
LQHNSYPPT

SEQ ID NO: 18908 - protein, 18 aa, Homo sapiens
  Heavy chain CDR3 for antibody 9454 (IGHV1-18)
ARDPTFYYVSGSYYKFDY

SEQ ID NO: 18909 - protein, 10 aa, Homo sapiens
  Light chain CDR3 for antibody 9455 (IGKV3-11)
QQRSDWPPFT

SEQ ID NO: 18910 - protein, 14 aa, Homo sapiens
  Heavy chain CDR3 for antibody 9455 (IGHV3-20)
ARDGGSTSFDWFDP

SEQ ID NO: 18911 - protein, 9 aa, Homo sapiens
  Light chain CDR3 for antibody 9456 (IGKV1D-13)
QQFNNYPRT

SEQ ID NO: 18912 - protein, 16 aa, Homo sapiens
  Heavy chain CDR3 for antibody 9456 (IGHV1-8)
AREGTMVRGVTYAFDI

SEQ ID NO: 18913 - protein, 9 aa, Homo sapiens
  Light chain CDR3 for antibody 9457 (IGKV1-6)
LQDFHYPWT

SEQ ID NO: 18914 - protein, 13 aa, Homo sapiens
  Heavy chain CDR3 for antibody 9457 (IGHV3-23)
ARIDYYYYYGMDV

SEQ ID NO: 18915 - protein, 11 aa, Homo sapiens
  Light chain CDR3 for antibody 9458 (IGKV3-11)
QQRSNWPPMYT

SEQ ID NO: 18916 - protein, 16 aa, Homo sapiens
  Heavy chain CDR3 for antibody 9458 (IGHV3-23)
AKEGEVLRYFDWLFNY

SEQ ID NO: 18917 - protein, 9 aa, Homo sapiens
  Light chain CDR3 for antibody 9459 (IGKV1-9)
QQLNSYPWP

SEQ ID NO: 18918 - protein, 15 aa, Homo sapiens
  Heavy chain CDR3 for antibody 9459 (IGHV3-33)
ARDTGYSSSWNWFDP

SEQ ID NO: 18919 - protein, 9 aa, Homo sapiens
  Light chain CDR3 for antibody 9460 (IGKV2-30)
MQGTHWPLT

SEQ ID NO: 18920 - protein, 14 aa, Homo sapiens
  Heavy chain CDR3 for antibody 9460 (IGHV3-20)
ARGGSSGWYDWFDP

SEQ ID NO: 18921 - protein, 9 aa, Homo sapiens
  Light chain CDR3 for antibody 9461 (IGKV5-2)
LQHDNFPYT

SEQ ID NO: 18922 - protein, 19 aa, Homo sapiens
  Heavy chain CDR3 for antibody 9461 (IGHV3-33)
ARDNDSSGYYDYYYYGMDV

SEQ ID NO: 18923 - protein, 9 aa, Homo sapiens
  Light chain CDR3 for antibody 9462 (IGKV1-39)
QQSYSSPFT

SEQ ID NO: 18924 - protein, 11 aa, Homo sapiens
  Heavy chain CDR3 for antibody 9462 (IGHV3-33)
ARDKSSGWSDY

SEQ ID NO: 18925 - protein, 9 aa, Homo sapiens
  Light chain CDR3 for antibody 9463 (IGKV1-6)
LQDYNYPYT

SEQ ID NO: 18926 - protein, 17 aa, Homo sapiens
  Heavy chain CDR3 for antibody 9463 (IGHV4-59)
AREEDYYGSGSFGTFDI

SEQ ID NO: 18927 - protein, 9 aa, Homo sapiens
  Light chain CDR3 for antibody 9464 (IGKV1-17)
LQHNSYPYT

SEQ ID NO: 18928 - protein, 17 aa, Homo sapiens
  Heavy chain CDR3 for antibody 9464 (IGHV1-18)
ARERYYGSGSYWGYFDP

SEQ ID NO: 18929 - protein, 9 aa, Homo sapiens
  Light chain CDR3 for antibody 9465 (IGKV3D-7)
QQDYNLPWT

SEQ ID NO: 18930 - protein, 12 aa, Homo sapiens
  Heavy chain CDR3 for antibody 9465 (IGHV3-33)
AREDYYYYGMDV

SEQ ID NO: 18931 - protein, 9 aa, Homo sapiens
  Light chain CDR3 for antibody 9466 (IGKV1-39)
QQSYSTPFT

SEQ ID NO: 18932 - protein, 14 aa, Homo sapiens
  Heavy chain CDR3 for antibody 9466 (IGHV3-33)
ARDGYDILTDPMDV

SEQ ID NO: 18933 - protein, 8 aa, Homo sapiens
  Light chain CDR3 for antibody 9467 (IGKV3-20)
QQYGSSLT

SEQ ID NO: 18934 - protein, 21 aa, Homo sapiens
  Heavy chain CDR3 for antibody 9467 (IGHV3-23)
AKDIDYYGSGSYPLYYYGMDV

SEQ ID NO: 18935 - protein, 9 aa, Homo sapiens
  Light chain CDR3 for antibody 9468 (IGKV6-21)
HQSSSLPYT

SEQ ID NO: 18936 - protein, 16 aa, Homo sapiens
  Heavy chain CDR3 for antibody 9468 (IGHV4-59)
AREPLRYFDWPDAFDI

SEQ ID NO: 18937 - protein, 8 aa, Homo sapiens
  Light chain CDR3 for antibody 9469 (IGKV3D-7)
QQDYHLLT

SEQ ID NO: 18938 - protein, 15 aa, Homo sapiens
  Heavy chain CDR3 for antibody 9469 (IGHV1-18)
ARIYYGSGSSYYFDY

SEQ ID NO: 18939 - protein, 9 aa, Homo sapiens
  Light chain CDR3 for antibody 9470 (IGKV5-2)
LQHDKFPYT

SEQ ID NO: 18940 - protein, 19 aa, Homo sapiens
  Heavy chain CDR3 for antibody 9470 (IGHV1-24)
ATAGLQWFGEKVGYYGVDV

SEQ ID NO: 18941 - protein, 9 aa, Homo sapiens
  Light chain CDR3 for antibody 9471 (IGKV1-5)
QQYNTYSRT

SEQ ID NO: 18942 - protein, 20 aa, Homo sapiens
  Heavy chain CDR3 for antibody 9471 (IGHV3-20)
ARDLCSSTSCYGYYYYGMDV

SEQ ID NO: 18943 - protein, 9 aa, Homo sapiens
  Light chain CDR3 for antibody 9472 (IGKV5-2)
LQHDNFPYT

SEQ ID NO: 18944 - protein, 15 aa, Homo sapiens
  Heavy chain CDR3 for antibody 9472 (IGHV3-11)
AREYSSGWYGDAFDI

SEQ ID NO: 18945 - protein, 9 aa, Homo sapiens
  Light chain CDR3 for antibody 9473 (IGKV1-39)
QQSYSTPIT

SEQ ID NO: 18946 - protein, 16 aa, Homo sapiens
  Heavy chain CDR3 for antibody 9473 (IGHV3-23)
AKDGIGELSYYYGMDV

SEQ ID NO: 18947 - protein, 9 aa, Homo sapiens
  Light chain CDR3 for antibody 9474 (IGKV1D-13)
QQYNNYPRT

SEQ ID NO: 18948 - protein, 11 aa, Homo sapiens
  Heavy chain CDR3 for antibody 9474 (IGHV1-46)
AREEDLGAFDI

SEQ ID NO: 18949 - protein, 9 aa, Homo sapiens
  Light chain CDR3 for antibody 9475 (IGKV3-20)
QQYGSSIFT

SEQ ID NO: 18950 - protein, 12 aa, Homo sapiens
  Heavy chain CDR3 for antibody 9475 (IGHV3-33)
ARESGGSYSFDY

SEQ ID NO: 18951 - protein, 9 aa, Homo sapiens
  Light chain CDR3 for antibody 9476 (IGKV1-39)
LQQNSYPYT

SEQ ID NO: 18952 - protein, 15 aa, Homo sapiens
  Heavy chain CDR3 for antibody 9476 (IGHV4-59)
ARDGHGNWGSGTFDY

SEQ ID NO: 18953 - protein, 8 aa, Homo sapiens
  Light chain CDR3 for antibody 9477 (IGKV3-20)
QQYGSSLT

SEQ ID NO: 18954 - protein, 15 aa, Homo sapiens
  Heavy chain CDR3 for antibody 9477 (IGHV3-23)
ARRVCSGGSCSLFDY

SEQ ID NO: 18955 - protein, 10 aa, Homo sapiens
  Light chain CDR3 for antibody 9478 (IGKV1-17)
LQHNSYPMYT

SEQ ID NO: 18956 - protein, 18 aa, Homo sapiens
  Heavy chain CDR3 for antibody 9478 (IGHV6-1)
ARDQYSYGPYYYYYGMDV

SEQ ID NO: 18957 - protein, 10 aa, Homo sapiens
  Light chain CDR3 for antibody 9479 (IGKV3-15)
QQYNNWPPLT

SEQ ID NO: 18958 - protein, 12 aa, Homo sapiens
  Heavy chain CDR3 for antibody 9479 (IGHV3-11)
VRVLLWFGESDY

SEQ ID NO: 18959 - protein, 9 aa, Homo sapiens
  Light chain CDR3 for antibody 9480 (IGKV1-17)
LQHNSYPYT

SEQ ID NO: 18960 - protein, 18 aa, Homo sapiens
  Heavy chain CDR3 for antibody 9480 (IGHV1-46)
ARDLTGRTENYYYDGMDV

SEQ ID NO: 18961 - protein, 10 aa, Homo sapiens
  Light chain CDR3 for antibody 9481 (IGKV3-11)
QQRSNWPALT

SEQ ID NO: 18962 - protein, 11 aa, Homo sapiens
  Heavy chain CDR3 for antibody 9481 (IGHV3-11)
ARASRGSYYDY

SEQ ID NO: 18963 - protein, 9 aa, Homo sapiens
  Light chain CDR3 for antibody 9482 (IGKV3-20)
QQYGTSPFP

SEQ ID NO: 18964 - protein, 19 aa, Homo sapiens
  Heavy chain CDR3 for antibody 9482 (IGHV3-33)
ARDSGYSGYDYYYYYGMDV

SEQ ID NO: 18965 - protein, 9 aa, Homo sapiens
  Light chain CDR3 for antibody 9483 (IGKV3D-7)
QQDYNLPWT

SEQ ID NO: 18966 - protein, 16 aa, Homo sapiens
  Heavy chain CDR3 for antibody 9483 (IGHV3-23)
AKDLRYFDWSLYAFDI

SEQ ID NO: 18967 - protein, 9 aa, Homo sapiens
  Light chain CDR3 for antibody 9484 (IGKV1D-13)
QQFNNYPHT

SEQ ID NO: 18968 - protein, 12 aa, Homo sapiens
  Heavy chain CDR3 for antibody 9484 (IGHV3-33)
ASGYFGSGSAHY

SEQ ID NO: 18969 - protein, 8 aa, Homo sapiens
  Light chain CDR3 for antibody 9485 (IGKV3D-7)
QQDYNLVT

SEQ ID NO: 18970 - protein, 17 aa, Homo sapiens
  Heavy chain CDR3 for antibody 9485 (IGHV4-59)
ARRLTYYYGSGSPSSDY

SEQ ID NO: 18971 - protein, 9 aa, Homo sapiens
  Light chain CDR3 for antibody 9486 (IGKV1-27)
QKYNSAPYT

SEQ ID NO: 18972 - protein, 11 aa, Homo sapiens
  Heavy chain CDR3 for antibody 9486 (IGHV4-4)
AREAYYYGLDV

SEQ ID NO: 18973 - protein, 9 aa, Homo sapiens
  Light chain CDR3 for antibody 9487 (IGKV1-6)
LQDYNHPFT

SEQ ID NO: 18974 - protein, 12 aa, Homo sapiens
  Heavy chain CDR3 for antibody 9487 (IGHV3-33)
ARDLVGATPFDY

SEQ ID NO: 18975 - protein, 9 aa, Homo sapiens
  Light chain CDR3 for antibody 9488 (IGKV1-6)
LQDYTYPYT

SEQ ID NO: 18976 - protein, 22 aa, Homo sapiens
  Heavy chain CDR3 for antibody 9488 (IGHV1-18)
ARDRYNNQSKYRNRDYYYGLDV

SEQ ID NO: 18977 - protein, 9 aa, Homo sapiens
  Light chain CDR3 for antibody 9489 (IGKV1-16)
QHYNDYPFT

SEQ ID NO: 18978 - protein, 15 aa, Homo sapiens
  Heavy chain CDR3 for antibody 9489 (IGHV1-18)
ARRSPNWGHYYGMDV

SEQ ID NO: 18979 - protein, 9 aa, Homo sapiens
  Light chain CDR3 for antibody 9490 (IGKV1D-13)
QRFNNYLYT

SEQ ID NO: 18980 - protein, 13 aa, Homo sapiens
  Heavy chain CDR3 for antibody 9490 (IGHV3-23)
ARAFFMVRGVIDF

SEQ ID NO: 18981 - protein, 9 aa, Homo sapiens
  Light chain CDR3 for antibody 9491 (IGKV1-6)
LQDFHYPWT

SEQ ID NO: 18982 - protein, 18 aa, Homo sapiens
  Heavy chain CDR3 for antibody 9491 (IGHV1-46)
ARDGDYVWGSYRSDWFDH

SEQ ID NO: 18983 - protein, 9 aa, Homo sapiens
  Light chain CDR3 for antibody 9492 (IGKV3-15)
QQYNNWPYT

SEQ ID NO: 18984 - protein, 14 aa, Homo sapiens
  Heavy chain CDR3 for antibody 9492 (IGHV3-20)
ARDRGSSFFDAFDI

SEQ ID NO: 18985 - protein, 9 aa, Homo sapiens
  Light chain CDR3 for antibody 9493 (IGKV4-1)
QQYYTTPPT

SEQ ID NO: 18986 - protein, 16 aa, Homo sapiens
  Heavy chain CDR3 for antibody 9493 (IGHV1-18)
ARYFDWLLRDYYGMDV

SEQ ID NO: 18987 - protein, 9 aa, Homo sapiens
  Light chain CDR3 for antibody 9494 (IGKV3-20)
QQYGTSPFP

SEQ ID NO: 18988 - protein, 12 aa, Homo sapiens
  Heavy chain CDR3 for antibody 9494 (IGHV3-33)
TRGYSSKSYFDY

SEQ ID NO: 18989 - protein, 9 aa, Homo sapiens
  Light chain CDR3 for antibody 9495 (IGKV1-6)
QQEYNYPLT

SEQ ID NO: 18990 - protein, 17 aa, Homo sapiens
  Heavy chain CDR3 for antibody 9495 (IGHV1-18)
ARDRAFTMVRGVPPFDY

SEQ ID NO: 18991 - protein, 9 aa, Homo sapiens
  Light chain CDR3 for antibody 9496 (IGKV1-16)
QQYNSYPRT

SEQ ID NO: 18992 - protein, 21 aa, Homo sapiens
  Heavy chain CDR3 for antibody 9496 (IGHV3-20)
AIETDYDILTGPYYNYYTMDV

SEQ ID NO: 18993 - protein, 9 aa, Homo sapiens
  Light chain CDR3 for antibody 9497 (IGKV5-2)
LQHDNFPWT

SEQ ID NO: 18994 - protein, 15 aa, Homo sapiens
  Heavy chain CDR3 for antibody 9497 (IGHV3-33)
ARRVCSGGSCPLLDY

SEQ ID NO: 18995 - protein, 9 aa, Homo sapiens
  Light chain CDR3 for antibody 9498 (IGKV1-39)
QQSYSTPYT

SEQ ID NO: 18996 - protein, 11 aa, Homo sapiens
  Heavy chain CDR3 for antibody 9498 (IGHV3-23)
AKKVYDYGSDY

SEQ ID NO: 18997 - protein, 9 aa, Homo sapiens
  Light chain CDR3 for antibody 9499 (IGKV1-9)
QQLKSYLYT

SEQ ID NO: 18998 - protein, 11 aa, Homo sapiens
  Heavy chain CDR3 for antibody 9499 (IGHV3-33)
ARDRVLTPFDY

SEQ ID NO: 18999 - protein, 9 aa, Homo sapiens
  Light chain CDR3 for antibody 9500 (IGKV1-17)
LQHNSYPIT

SEQ ID NO: 19000 - protein, 15 aa, Homo sapiens
  Heavy chain CDR3 for antibody 9500 (IGHV4-39)
ARRSKYTSAWYPFDY

SEQ ID NO: 19001 - protein, 9 aa, Homo sapiens
  Light chain CDR3 for antibody 9501 (IGKV1-39)
QQSYSTPLT

SEQ ID NO: 19002 - protein, 9 aa, Homo sapiens
  Heavy chain CDR3 for antibody 9501 (IGHV4-59)
ARSGSGIYT

SEQ ID NO: 19003 - protein, 9 aa, Homo sapiens
  Light chain CDR3 for antibody 9502 (IGKV1-39)
QQSYSTPYT

SEQ ID NO: 19004 - protein, 9 aa, Homo sapiens
  Heavy chain CDR3 for antibody 9502 (IGHV4-59)
ARDYFHFDY

SEQ ID NO: 19005 - protein, 10 aa, Homo sapiens
  Light chain CDR3 for antibody 9503 (IGKV1-9)
QQLDSYPMYT

SEQ ID NO: 19006 - protein, 15 aa, Homo sapiens
  Heavy chain CDR3 for antibody 9503 (IGHV3-33)
ARDRGWKAPGYGMDV

SEQ ID NO: 19007 - protein, 9 aa, Homo sapiens
  Light chain CDR3 for antibody 9504 (IGKV6-21)
HQSYSLPYT

SEQ ID NO: 19008 - protein, 17 aa, Homo sapiens
  Heavy chain CDR3 for antibody 9504 (IGHV3-33)
ARDQDDILTGYYWYFDL

SEQ ID NO: 19009 - protein, 9 aa, Homo sapiens
  Light chain CDR3 for antibody 9505 (IGKV1D-13)
QHFNNYMYT

SEQ ID NO: 19010 - protein, 17 aa, Homo sapiens
  Heavy chain CDR3 for antibody 9505 (IGHV3-33)
ARESLKLGIYYYYGMDV

SEQ ID NO: 19011 - protein, 10 aa, Homo sapiens
  Light chain CDR3 for antibody 9506 (IGKV1-17)
LQHNSYPMYT

SEQ ID NO: 19012 - protein, 11 aa, Homo sapiens
  Heavy chain CDR3 for antibody 9506 (IGHV3-74)
ARDRGNWGFDY

SEQ ID NO: 19013 - protein, 9 aa, Homo sapiens
  Light chain CDR3 for antibody 9507 (IGKV4-1)
QQYYSTPWT

SEQ ID NO: 19014 - protein, 13 aa, Homo sapiens
  Heavy chain CDR3 for antibody 9507 (IGHV3-33)
ARDQRYSSGWYDY

SEQ ID NO: 19015 - protein, 9 aa, Homo sapiens
  Light chain CDR3 for antibody 9508 (IGKV1-27)
QKYNSAPHT

SEQ ID NO: 19016 - protein, 9 aa, Homo sapiens
  Heavy chain CDR3 for antibody 9508 (IGHV3-33)
ARATVGVDY

SEQ ID NO: 19017 - protein, 9 aa, Homo sapiens
  Light chain CDR3 for antibody 9509 (IGKV2-30)
MQGIHWPLT

SEQ ID NO: 19018 - protein, 15 aa, Homo sapiens
  Heavy chain CDR3 for antibody 9509 (IGHV3-64)
ARDGLRYFDWLFPWY

SEQ ID NO: 19019 - protein, 9 aa, Homo sapiens
  Light chain CDR3 for antibody 9510 (IGKV1-17)
LQHNGYPLT

SEQ ID NO: 19020 - protein, 17 aa, Homo sapiens
  Heavy chain CDR3 for antibody 9510 (IGHV1-18)
ARDEGYDILTGYPHFDY

SEQ ID NO: 19021 - protein, 10 aa, Homo sapiens
  Light chain CDR3 for antibody 9511 (IGKV3-15)
QQYNNWPPYT

SEQ ID NO: 19022 - protein, 15 aa, Homo sapiens
  Heavy chain CDR3 for antibody 9511 (IGHV3-33)
ARDSRPEIIGPPFDY

SEQ ID NO: 19023 - protein, 10 aa, Homo sapiens
  Light chain CDR3 for antibody 9512 (IGKV3-11)
QQRSTWPTLI

SEQ ID NO: 19024 - protein, 10 aa, Homo sapiens
  Heavy chain CDR3 for antibody 9512 (IGHV3-74)
ARENWGGFDY

SEQ ID NO: 19025 - protein, 10 aa, Homo sapiens
  Light chain CDR3 for antibody 9513 (IGKV3-15)
QQYNNWPPYT

SEQ ID NO: 19026 - protein, 10 aa, Homo sapiens
  Heavy chain CDR3 for antibody 9513 (IGHV3-33)
AIEWFGGFDI

SEQ ID NO: 19027 - protein, 8 aa, Homo sapiens
  Light chain CDR3 for antibody 9514 (IGKV1D-13)
QQYNSYYT

SEQ ID NO: 19028 - protein, 11 aa, Homo sapiens
  Heavy chain CDR3 for antibody 9514 (IGHV3-23)
GEFSSGWSFDY

SEQ ID NO: 19029 - protein, 9 aa, Homo sapiens
  Light chain CDR3 for antibody 9515 (IGKV1D-16)
QQYNSYPLT

SEQ ID NO: 19030 - protein, 16 aa, Homo sapiens
  Heavy chain CDR3 for antibody 9515 (IGHV3-33)
ARGYYYGSGSSLIMDV

SEQ ID NO: 19031 - protein, 9 aa, Homo sapiens
  Light chain CDR3 for antibody 9516 (IGKV1-16)
QHYNDYPFT

SEQ ID NO: 19032 - protein, 13 aa, Homo sapiens
  Heavy chain CDR3 for antibody 9516 (IGHV3-23)
AKDRGYCSTSTAY

SEQ ID NO: 19033 - protein, 10 aa, Homo sapiens
  Light chain CDR3 for antibody 9517 (IGKV1-17)
LQHNSYPMYT

SEQ ID NO: 19034 - protein, 17 aa, Homo sapiens
  Heavy chain CDR3 for antibody 9517 (IGHV3-33)
ARGGAAAGPYLYYGLDV

SEQ ID NO: 19035 - protein, 9 aa, Homo sapiens
  Light chain CDR3 for antibody 9518 (IGKV1-6)
LQDYNYPRT

SEQ ID NO: 19036 - protein, 15 aa, Homo sapiens
  Heavy chain CDR3 for antibody 9518 (IGHV3-33)
ARGVDILTGYSSFDY

SEQ ID NO: 19037 - protein, 9 aa, Homo sapiens
  Light chain CDR3 for antibody 9519 (IGKV1-6)
LQVYSYPWT

SEQ ID NO: 19038 - protein, 16 aa, Homo sapiens
  Heavy chain CDR3 for antibody 9519 (IGHV3-33)
ARSPYDILTGFYGMDV

SEQ ID NO: 19039 - protein, 10 aa, Homo sapiens
  Light chain CDR3 for antibody 9520 (IGKV1-39)
QQSYSTPMYT

SEQ ID NO: 19040 - protein, 12 aa, Homo sapiens
  Heavy chain CDR3 for antibody 9520 (IGHV4-61)
ARVYSSGWLFDY

SEQ ID NO: 19041 - protein, 9 aa, Homo sapiens
  Light chain CDR3 for antibody 9521 (IGKV1-9)
LQHNSFPLT

SEQ ID NO: 19042 - protein, 15 aa, Homo sapiens
  Heavy chain CDR3 for antibody 9521 (IGHV3-30)
ARGARVRGVDYGMDV

SEQ ID NO: 19043 - protein, 9 aa, Homo sapiens
  Light chain CDR3 for antibody 9522 (IGKV2-30)
MQGTHWPLT

SEQ ID NO: 19044 - protein, 18 aa, Homo sapiens
  Heavy chain CDR3 for antibody 9522 (IGHV3-33)
ARDRHHDILTGYSDAFEI

SEQ ID NO: 19045 - protein, 10 aa, Homo sapiens
  Light chain CDR3 for antibody 9523 (IGKV3-11)
QQRSNWPIFT

SEQ ID NO: 19046 - protein, 14 aa, Homo sapiens
  Heavy chain CDR3 for antibody 9523 (IGHV3-33)
ARDRDIMAPSYFDY

SEQ ID NO: 19047 - protein, 10 aa, Homo sapiens
  Light chain CDR3 for antibody 9524 (IGKV3-11)
QQRSNWPIFT

SEQ ID NO: 19048 - protein, 12 aa, Homo sapiens
  Heavy chain CDR3 for antibody 9524 (IGHV3-h)
AREDYYYYGMDV

SEQ ID NO: 19049 - protein, 9 aa, Homo sapiens
  Light chain CDR3 for antibody 9525 (IGKV1-33)
QQYDNLPFT

SEQ ID NO: 19050 - protein, 17 aa, Homo sapiens
  Heavy chain CDR3 for antibody 9525 (IGHV3-33)
ARGYCSRTSCYLYYFDY

SEQ ID NO: 19051 - protein, 9 aa, Homo sapiens
  Light chain CDR3 for antibody 9526 (IGKV1-39)
QQSYSTPLT

SEQ ID NO: 19052 - protein, 16 aa, Homo sapiens
  Heavy chain CDR3 for antibody 9526 (IGHV2-70)
AHRAVVTSNLNCRFDF

SEQ ID NO: 19053 - protein, 9 aa, Homo sapiens
  Light chain CDR3 for antibody 9527 (IGKV1D-13)
QQFNNYPST

SEQ ID NO: 19054 - protein, 15 aa, Homo sapiens
  Heavy chain CDR3 for antibody 9527 (IGHV3-48)
ARDRVQLGYYYGMDV

SEQ ID NO: 19055 - protein, 9 aa, Homo sapiens
  Light chain CDR3 for antibody 9528 (IGKV5-2)
LQHDNFPYT

SEQ ID NO: 19056 - protein, 20 aa, Homo sapiens
  Heavy chain CDR3 for antibody 9528 (IGHV3-23)
TKDRYSDSSGYYLYYNDMDV

SEQ ID NO: 19057 - protein, 8 aa, Homo sapiens
  Light chain CDR3 for antibody 9529 (IGKV2D-28)
MQALQTPT

SEQ ID NO: 19058 - protein, 21 aa, Homo sapiens
  Heavy chain CDR3 for antibody 9529 (IGHV3-33)
ARKRLYDILTGYYKAYYGMDV

SEQ ID NO: 19059 - protein, 9 aa, Homo sapiens
  Light chain CDR3 for antibody 9530 (IGKV1-27)
QKYNSAPYT

SEQ ID NO: 19060 - protein, 20 aa, Homo sapiens
  Heavy chain CDR3 for antibody 9530 (IGHV3-33)
ARDWMVRGVIITDYYYGMDV

SEQ ID NO: 19061 - protein, 10 aa, Homo sapiens
  Light chain CDR3 for antibody 9531 (IGKV1-39)
QQSYSTPMYT

SEQ ID NO: 19062 - protein, 14 aa, Homo sapiens
  Heavy chain CDR3 for antibody 9531 (IGHV3-33)
ARDLDIMATSPFAY

SEQ ID NO: 19063 - protein, 8 aa, Homo sapiens
  Light chain CDR3 for antibody 9532 (IGKV1-9)
QQYNSYWT

SEQ ID NO: 19064 - protein, 13 aa, Homo sapiens
  Heavy chain CDR3 for antibody 9532 (IGHV4-39)
ARHHYGSGSLRDY

SEQ ID NO: 19065 - protein, 9 aa, Homo sapiens
  Light chain CDR3 for antibody 9533 (IGKV3D-7)
QQDYNLPYS

SEQ ID NO: 19066 - protein, 17 aa, Homo sapiens
  Heavy chain CDR3 for antibody 9533 (IGHV1-18)
ARVRAFTMVRGVPPFDY

SEQ ID NO: 19067 - protein, 9 aa, Homo sapiens
  Light chain CDR3 for antibody 9534 (IGKV1-6)
LQDYKSPFT

SEQ ID NO: 19068 - protein, 14 aa, Homo sapiens
  Heavy chain CDR3 for antibody 9534 (IGHV3-33)
ARDTVAAGFNGMDV

SEQ ID NO: 19069 - protein, 9 aa, Homo sapiens
  Light chain CDR3 for antibody 9535 (IGKV1-17)
LQHNGYPLT

SEQ ID NO: 19070 - protein, 9 aa, Homo sapiens
  Heavy chain CDR3 for antibody 9535 (IGHV3-23)
AKEQLLFDY

SEQ ID NO: 19071 - protein, 9 aa, Homo sapiens
  Light chain CDR3 for antibody 9536 (IGKV1-9)
QQLYTYPYT

SEQ ID NO: 19072 - protein, 12 aa, Homo sapiens
  Heavy chain CDR3 for antibody 9536 (IGHV3-33)
AREEAVAEAFDI

SEQ ID NO: 19073 - protein, 8 aa, Homo sapiens
  Light chain CDR3 for antibody 9537 (IGKV1-5)
QQYNSYYT

SEQ ID NO: 19074 - protein, 18 aa, Homo sapiens
  Heavy chain CDR3 for antibody 9537 (IGHV3-33)
AREGSYYGSGSFPNWFDP

SEQ ID NO: 19075 - protein, 8 aa, Homo sapiens
  Light chain CDR3 for antibody 9538 (IGKV3-11)
LQRGNWPT

SEQ ID NO: 19076 - protein, 17 aa, Homo sapiens
  Heavy chain CDR3 for antibody 9538 (IGHV3-33)
ARVYYDILTGYSPAFDI

SEQ ID NO: 19077 - protein, 9 aa, Homo sapiens
  Light chain CDR3 for antibody 9539 (IGKV2D-28)
MQARQTPPT

SEQ ID NO: 19078 - protein, 12 aa, Homo sapiens
  Heavy chain CDR3 for antibody 9539 (IGHV3-33)
AREGTRWVYFDY

SEQ ID NO: 19079 - protein, 9 aa, Homo sapiens
  Light chain CDR3 for antibody 9540 (IGKV1D-16)
QQYYSYPRT

SEQ ID NO: 19080 - protein, 17 aa, Homo sapiens
  Heavy chain CDR3 for antibody 9540 (IGHV3-23)
SKERNWNDGYYYFGMDA

SEQ ID NO: 19081 - protein, 9 aa, Homo sapiens
  Light chain CDR3 for antibody 9541 (IGKV1-6)
QQEYNYPLT

SEQ ID NO: 19082 - protein, 14 aa, Homo sapiens
  Heavy chain CDR3 for antibody 9541 (IGHV1-46)
ARKGIVGGFDAFDV

SEQ ID NO: 19083 - protein, 9 aa, Homo sapiens
  Light chain CDR3 for antibody 9542 (IGKV1-6)
LQDYNYPYT

SEQ ID NO: 19084 - protein, 18 aa, Homo sapiens
  Heavy chain CDR3 for antibody 9542 (IGHV3-33)
AREDYDILTGYAYYGMDV

SEQ ID NO: 19085 - protein, 9 aa, Homo sapiens
  Light chain CDR3 for antibody 9543 (IGKV1-33)
QQYDNLPFT

SEQ ID NO: 19086 - protein, 14 aa, Homo sapiens
  Heavy chain CDR3 for antibody 9543 (IGHV3-64)
ARDAYDILTGYYDY

SEQ ID NO: 19087 - protein, 8 aa, Homo sapiens
  Light chain CDR3 for antibody 9544 (IGKV3D-7)
QQDYSLLT

SEQ ID NO: 19088 - protein, 15 aa, Homo sapiens
  Heavy chain CDR3 for antibody 9544 (IGHV3-23)
AKEFTMVRGVITPDY

SEQ ID NO: 19089 - protein, 9 aa, Homo sapiens
  Light chain CDR3 for antibody 9545 (IGKV3-15)
QQYNNWPFT

SEQ ID NO: 19090 - protein, 18 aa, Homo sapiens
  Heavy chain CDR3 for antibody 9545 (IGHV1-46)
ARDGDYVWGSYHSDWFDP

SEQ ID NO: 19091 - protein, 9 aa, Homo sapiens
  Light chain CDR3 for antibody 9546 (IGKV1-27)
QKYNSAPYT

SEQ ID NO: 19092 - protein, 14 aa, Homo sapiens
  Heavy chain CDR3 for antibody 9546 (IGHV3-23)
AKGSDVLTGYYPDY

SEQ ID NO: 19093 - protein, 9 aa, Homo sapiens
  Light chain CDR3 for antibody 9547 (IGKV3-11)
QQRSNWMYT

SEQ ID NO: 19094 - protein, 10 aa, Homo sapiens
  Heavy chain CDR3 for antibody 9547 (IGHV3-33)
ARVVDTAMAY

SEQ ID NO: 19095 - protein, 9 aa, Homo sapiens
  Light chain CDR3 for antibody 9548 (IGKV1-39)
QQSYRTPLT

SEQ ID NO: 19096 - protein, 13 aa, Homo sapiens
  Heavy chain CDR3 for antibody 9548 (IGHV4-39)
ARHEVMIRGVFDY

SEQ ID NO: 19097 - protein, 9 aa, Homo sapiens
  Light chain CDR3 for antibody 9549 (IGKV1-9)
QQLNSYPRT

SEQ ID NO: 19098 - protein, 16 aa, Homo sapiens
  Heavy chain CDR3 for antibody 9549 (IGHV4-39)
ARDTPYYAGSGSPFDY

SEQ ID NO: 19099 - protein, 9 aa, Homo sapiens
  Light chain CDR3 for antibody 9550 (IGKV1-9)
QQLNSYPWP

SEQ ID NO: 19100 - protein, 11 aa, Homo sapiens
  Heavy chain CDR3 for antibody 9550 (IGHV4-59)
AREMGHDTFDI

SEQ ID NO: 19101 - protein, 9 aa, Homo sapiens
  Light chain CDR3 for antibody 9551 (IGKV3-15)
QQYSNCPLT

SEQ ID NO: 19102 - protein, 18 aa, Homo sapiens
  Heavy chain CDR3 for antibody 9551 (IGHV3-23)
AKDGDYFGSGSYWGYFDL

SEQ ID NO: 19103 - protein, 9 aa, Homo sapiens
  Light chain CDR3 for antibody 9552 (IGKV1D-16)
QQYNYFPLT

SEQ ID NO: 19104 - protein, 20 aa, Homo sapiens
  Heavy chain CDR3 for antibody 9552 (IGHV4-61)
AREVGIAVAGTRYYYYGMDV

SEQ ID NO: 19105 - protein, 9 aa, Homo sapiens
  Light chain CDR3 for antibody 9553 (IGKV3-20)
QQYGSSPRT

SEQ ID NO: 19106 - protein, 16 aa, Homo sapiens
  Heavy chain CDR3 for antibody 9553 (IGHV1-24)
ATEDSSAYYSYYGMDV

SEQ ID NO: 19107 - protein, 9 aa, Homo sapiens
  Light chain CDR3 for antibody 9554 (IGKV1-16)
QQYSRYPYT

SEQ ID NO: 19108 - protein, 18 aa, Homo sapiens
  Heavy chain CDR3 for antibody 9554 (IGHV4-59)
AREGDYVWGSYRSDWFDH

SEQ ID NO: 19109 - protein, 9 aa, Homo sapiens
  Light chain CDR3 for antibody 9555 (IGKV1D-16)
QQYSSYPYT

SEQ ID NO: 19110 - protein, 13 aa, Homo sapiens
  Heavy chain CDR3 for antibody 9555 (IGHV3-13)
AKDRGYSSASTAY

SEQ ID NO: 19111 - protein, 9 aa, Homo sapiens
  Light chain CDR3 for antibody 9556 (IGKV3-15)
QQYNNWPRT

SEQ ID NO: 19112 - protein, 17 aa, Homo sapiens
  Heavy chain CDR3 for antibody 9556 (IGHV3-33)
AREDYDILTGYPFYFDY

SEQ ID NO: 19113 - protein, 9 aa, Homo sapiens
  Light chain CDR3 for antibody 9557 (IGKV1-37)
QRTYNAPYT

SEQ ID NO: 19114 - protein, 14 aa, Homo sapiens
  Heavy chain CDR3 for antibody 9557 (IGHV3-33)
ARDGYDILTGPFDY

SEQ ID NO: 19115 - protein, 9 aa, Homo sapiens
  Light chain CDR3 for antibody 9558 (IGKV1-16)
QQFNNYPRT

SEQ ID NO: 19116 - protein, 18 aa, Homo sapiens
  Heavy chain CDR3 for antibody 9558 (IGHV3-30)
ARRGVGARGYYYYYGMDV

SEQ ID NO: 19117 - protein, 9 aa, Homo sapiens
  Light chain CDR3 for antibody 9559 (IGKV1-27)
QKYNSAPYT

SEQ ID NO: 19118 - protein, 18 aa, Homo sapiens
  Heavy chain CDR3 for antibody 9559 (IGHV3-23)
AKVGDFFASGNYWDYFDY

SEQ ID NO: 19119 - protein, 9 aa, Homo sapiens
  Light chain CDR3 for antibody 9560 (IGKV1-37)
QRTSNAPYT

SEQ ID NO: 19120 - protein, 15 aa, Homo sapiens
  Heavy chain CDR3 for antibody 9560 (IGHV3-74)
ARGSGSHYHYYGMDV

SEQ ID NO: 19121 - protein, 10 aa, Homo sapiens
  Light chain CDR3 for antibody 9561 (IGKV3-11)
QQRSNWPIFT

SEQ ID NO: 19122 - protein, 9 aa, Homo sapiens
  Heavy chain CDR3 for antibody 9561 (IGHV4-59)
ARGGAGFEY

SEQ ID NO: 19123 - protein, 9 aa, Homo sapiens
  Light chain CDR3 for antibody 9562 (IGKV1-16)
QQYNRYPYT

SEQ ID NO: 19124 - protein, 18 aa, Homo sapiens
  Heavy chain CDR3 for antibody 9562 (IGHV4-59)
AREGDYLWWSYRPNWFDP

SEQ ID NO: 19125 - protein, 9 aa, Homo sapiens
  Light chain CDR3 for antibody 9563 (IGKV1D-13)
QQFNNYQYT

SEQ ID NO: 19126 - protein, 16 aa, Homo sapiens
  Heavy chain CDR3 for antibody 9563 (IGHV3-33)
AKDAFYYGSGSHLFDY

SEQ ID NO: 19127 - protein, 8 aa, Homo sapiens
  Light chain CDR3 for antibody 9564 (IGKV3-20)
QQYGSSLT

SEQ ID NO: 19128 - protein, 20 aa, Homo sapiens
  Heavy chain CDR3 for antibody 9564 (IGHV1-8)
ARGDGTMVRGIYYYYYGMDV

SEQ ID NO: 19129 - protein, 9 aa, Homo sapiens
  Light chain CDR3 for antibody 9565 (IGKV3D-7)
QQDYNLPLT

SEQ ID NO: 19130 - protein, 12 aa, Homo sapiens
  Heavy chain CDR3 for antibody 9565 (IGHV3-33)
VRKWFGELYFDY

SEQ ID NO: 19131 - protein, 9 aa, Homo sapiens
  Light chain CDR3 for antibody 9566 (IGKV1-6)
LQDYNYPWT

SEQ ID NO: 19132 - protein, 14 aa, Homo sapiens
  Heavy chain CDR3 for antibody 9566 (IGHV3-33)
ARDGYDFLAGALDY

SEQ ID NO: 19133 - protein, 10 aa, Homo sapiens
  Light chain CDR3 for antibody 9567 (IGKV1-39)
QQSYSTPMYT

SEQ ID NO: 19134 - protein, 13 aa, Homo sapiens
  Heavy chain CDR3 for antibody 9567 (IGHV3-33)
ARIDYYYYYGMDV

SEQ ID NO: 19135 - protein, 10 aa, Homo sapiens
  Light chain CDR3 for antibody 9568 (IGKV1-39)
QQSYSTPMYT

SEQ ID NO: 19136 - protein, 16 aa, Homo sapiens
  Heavy chain CDR3 for antibody 9568 (IGHV3-23)
AKDLRYFDWSLYAFDI

SEQ ID NO: 19137 - protein, 9 aa, Homo sapiens
  Light chain CDR3 for antibody 9569 (IGKV1-9)
QQLKSYPYT

SEQ ID NO: 19138 - protein, 13 aa, Homo sapiens
  Heavy chain CDR3 for antibody 9569 (IGHV3-33)
AKEDGDYHHYFDY

SEQ ID NO: 19139 - protein, 9 aa, Homo sapiens
  Light chain CDR3 for antibody 9570 (IGKV1-27)
QKYNSAPYT

SEQ ID NO: 19140 - protein, 9 aa, Homo sapiens
  Heavy chain CDR3 for antibody 9570 (IGHV3-33)
ARGSGWSDY

SEQ ID NO: 19141 - protein, 9 aa, Homo sapiens
  Light chain CDR3 for antibody 9571 (IGKV3-11)
QQRSNWMYT

SEQ ID NO: 19142 - protein, 13 aa, Homo sapiens
  Heavy chain CDR3 for antibody 9571 (IGHV4-39)
ARHVLLWFGEFDP

SEQ ID NO: 19143 - protein, 9 aa, Homo sapiens
  Light chain CDR3 for antibody 9572 (IGKV1-16)
QQYDCYPPT

SEQ ID NO: 19144 - protein, 18 aa, Homo sapiens
  Heavy chain CDR3 for antibody 9572 (IGHV1-46)
ARDGDYVWGSYRSDWFDP

SEQ ID NO: 19145 - protein, 8 aa, Homo sapiens
  Light chain CDR3 for antibody 9573 (IGKV1D-13)
QQFNNYPT

SEQ ID NO: 19146 - protein, 18 aa, Homo sapiens
  Heavy chain CDR3 for antibody 9573 (IGHV3-33)
ARDRYYDILTGYSYYFDY

SEQ ID NO: 19147 - protein, 9 aa, Homo sapiens
  Light chain CDR3 for antibody 9574 (IGKV1-9)
QQYYSYPRT

SEQ ID NO: 19148 - protein, 12 aa, Homo sapiens
  Heavy chain CDR3 for antibody 9574 (IGHV3-33)
ARGYFGSGYGHF

SEQ ID NO: 19149 - protein, 9 aa, Homo sapiens
  Light chain CDR3 for antibody 9575 (IGKV1D-16)
QKYNSYPYT

SEQ ID NO: 19150 - protein, 16 aa, Homo sapiens
  Heavy chain CDR3 for antibody 9575 (IGHV3-33)
ARDAGYPNYDYSGMDV

SEQ ID NO: 19151 - protein, 9 aa, Homo sapiens
  Light chain CDR3 for antibody 9576 (IGKV1-27)
QKYNSAPYT

SEQ ID NO: 19152 - protein, 13 aa, Homo sapiens
  Heavy chain CDR3 for antibody 9576 (IGHV3-33)
ANTGDSYYYDMEV

SEQ ID NO: 19153 - protein, 9 aa, Homo sapiens
  Light chain CDR3 for antibody 9577 (IGKV1-33)
QQYDNLPFT

SEQ ID NO: 19154 - protein, 18 aa, Homo sapiens
  Heavy chain CDR3 for antibody 9577 (IGHV3-33)
ARERYYYGSGSYPDAFDI

SEQ ID NO: 19155 - protein, 9 aa, Homo sapiens
  Light chain CDR3 for antibody 9578 (IGKV5-2)
LQHDNFPWT

SEQ ID NO: 19156 - protein, 15 aa, Homo sapiens
  Heavy chain CDR3 for antibody 9578 (IGHV1-18)
ARLRWFGELSGWFDP

SEQ ID NO: 19157 - protein, 9 aa, Homo sapiens
  Light chain CDR3 for antibody 9579 (IGKV1D-16)
QQYGYSPLT

SEQ ID NO: 19158 - protein, 15 aa, Homo sapiens
  Heavy chain CDR3 for antibody 9579 (IGHV3-20)
ARDRGSSGWRGWFDP

SEQ ID NO: 19159 - protein, 9 aa, Homo sapiens
  Light chain CDR3 for antibody 9580 (IGKV1-6)
LQDYDYPWT

SEQ ID NO: 19160 - protein, 13 aa, Homo sapiens
  Heavy chain CDR3 for antibody 9580 (IGHV3-33)
ARDHYYDSSGYDY

SEQ ID NO: 19161 - protein, 10 aa, Homo sapiens
  Light chain CDR3 for antibody 9581 (IGKV1-39)
QQSYSTPMYT

SEQ ID NO: 19162 - protein, 17 aa, Homo sapiens
  Heavy chain CDR3 for antibody 9581 (IGHV3-33)
ARCGYSSSWYAPYYFDY

SEQ ID NO: 19163 - protein, 9 aa, Homo sapiens
  Light chain CDR3 for antibody 9582 (IGKV1-16)
QKYNSAPLT

SEQ ID NO: 19164 - protein, 17 aa, Homo sapiens
  Heavy chain CDR3 for antibody 9582 (IGHV3-33)
ARSPYDILTGYSYYFDY

SEQ ID NO: 19165 - protein, 8 aa, Homo sapiens
  Light chain CDR3 for antibody 9583 (IGKV3D-7)
QQDYNLLT

SEQ ID NO: 19166 - protein, 13 aa, Homo sapiens
  Heavy chain CDR3 for antibody 9583 (IGHV3-33)
ARDGYSYGPYFDY

SEQ ID NO: 19167 - protein, 8 aa, Homo sapiens
  Light chain CDR3 for antibody 9584 (IGKV3-20)
QQYGSSLT

SEQ ID NO: 19168 - protein, 12 aa, Homo sapiens
  Heavy chain CDR3 for antibody 9584 (IGHV3-33)
ARDSSGWSHFDY

SEQ ID NO: 19169 - protein, 9 aa, Homo sapiens
  Light chain CDR3 for antibody 9585 (IGKV3D-20)
QQYAGYPPT

SEQ ID NO: 19170 - protein, 13 aa, Homo sapiens
  Heavy chain CDR3 for antibody 9585 (IGHV4-34)
ASNFYYYYYGMDV

SEQ ID NO: 19171 - protein, 9 aa, Homo sapiens
  Light chain CDR3 for antibody 9586 (IGKV1-37)
QRTSNAPYT

SEQ ID NO: 19172 - protein, 13 aa, Homo sapiens
  Heavy chain CDR3 for antibody 9586 (IGHV3-33)
ARVDTMVRGVMAY

SEQ ID NO: 19173 - protein, 10 aa, Homo sapiens
  Light chain CDR3 for antibody 9587 (IGKV1-39)
QQSYSTPMYT

SEQ ID NO: 19174 - protein, 14 aa, Homo sapiens
  Heavy chain CDR3 for antibody 9587 (IGHV3-33)
AREEDYYYHYDMDV

SEQ ID NO: 19175 - protein, 9 aa, Homo sapiens
  Light chain CDR3 for antibody 9588 (IGKV1-9)
QQLNGYPFT

SEQ ID NO: 19176 - protein, 21 aa, Homo sapiens
  Heavy chain CDR3 for antibody 9588 (IGHV3-33)
ARDEYYEIVTGYGYYHYGMDV

SEQ ID NO: 19177 - protein, 9 aa, Homo sapiens
  Light chain CDR3 for antibody 9589 (IGKV3-15)
QQYINWPLT

SEQ ID NO: 19178 - protein, 10 aa, Homo sapiens
  Heavy chain CDR3 for antibody 9589 (IGHV4-31)
ARHGVAGTNY

SEQ ID NO: 19179 - protein, 9 aa, Homo sapiens
  Light chain CDR3 for antibody 9590 (IGKV3D-7)
QQDYTLPLT

SEQ ID NO: 19180 - protein, 9 aa, Homo sapiens
  Heavy chain CDR3 for antibody 9590 (IGHV3-20)
ASIRGYFDY

SEQ ID NO: 19181 - protein, 8 aa, Homo sapiens
  Light chain CDR3 for antibody 9591 (IGKV3-11)
QQRSNWLT

SEQ ID NO: 19182 - protein, 17 aa, Homo sapiens
  Heavy chain CDR3 for antibody 9591 (IGHV3-33)
ARGYCSRTSCYLYYFDY

SEQ ID NO: 19183 - protein, 10 aa, Homo sapiens
  Light chain CDR3 for antibody 9592 (IGKV1-27)
QKYNSAPMYT

SEQ ID NO: 19184 - protein, 15 aa, Homo sapiens
  Heavy chain CDR3 for antibody 9592 (IGHV3-33)
ARDTGYSSSWNWFDP

SEQ ID NO: 19185 - protein, 8 aa, Homo sapiens
  Light chain CDR3 for antibody 9593 (IGKV1-5)
QQYNSYYT

SEQ ID NO: 19186 - protein, 17 aa, Homo sapiens
  Heavy chain CDR3 for antibody 9593 (IGHV3-23)
AKDTITMVRGALFGMDV

SEQ ID NO: 19187 - protein, 9 aa, Homo sapiens
  Light chain CDR3 for antibody 9594 (IGKV1-9)
QQLNGYPFT

SEQ ID NO: 19188 - protein, 15 aa, Homo sapiens
  Heavy chain CDR3 for antibody 9594 (IGHV4-39)
ARQGLVATIKGYFQH

SEQ ID NO: 19189 - protein, 9 aa, Homo sapiens
  Light chain CDR3 for antibody 9595 (IGKV1-17)
LQHNSYPPT

SEQ ID NO: 19190 - protein, 11 aa, Homo sapiens
  Heavy chain CDR3 for antibody 9595 (IGHV1-24)
ATREYSSSCDY

SEQ ID NO: 19191 - protein, 9 aa, Homo sapiens
  Light chain CDR3 for antibody 9596 (IGKV3D-7)
QQDYTLPYT

SEQ ID NO: 19192 - protein, 13 aa, Homo sapiens
  Heavy chain CDR3 for antibody 9596 (IGHV3-33)
ARVDYYNYYGLDV

SEQ ID NO: 19193 - protein, 9 aa, Homo sapiens
  Light chain CDR3 for antibody 9597 (IGKV1-6)
LQDYNYPYT

SEQ ID NO: 19194 - protein, 12 aa, Homo sapiens
  Heavy chain CDR3 for antibody 9597 (IGHV3-23)
AGGDFWGGNPLY

SEQ ID NO: 19195 - protein, 9 aa, Homo sapiens
  Light chain CDR3 for antibody 9598 (IGKV1-6)
LQDYNYPYT

SEQ ID NO: 19196 - protein, 16 aa, Homo sapiens
  Heavy chain CDR3 for antibody 9598 (IGHV3-20)
ARLLRYFDWPLGAFDI

SEQ ID NO: 19197 - protein, 9 aa, Homo sapiens
  Light chain CDR3 for antibody 9599 (IGKV3-11)
QQRSSWPPT

SEQ ID NO: 19198 - protein, 11 aa, Homo sapiens
  Heavy chain CDR3 for antibody 9599 (IGHV3-23)
AKGLWSYYFDY

SEQ ID NO: 19199 - protein, 8 aa, Homo sapiens
  Light chain CDR3 for antibody 9600 (IGKV3D-7)
QQDYNLLT

SEQ ID NO: 19200 - protein, 13 aa, Homo sapiens
  Heavy chain CDR3 for antibody 9600 (IGHV3-33)
AREYFDWLLPLDY

SEQ ID NO: 19201 - protein, 8 aa, Homo sapiens
  Light chain CDR3 for antibody 9601 (IGKV1-5)
QQYNSYYT

SEQ ID NO: 19202 - protein, 10 aa, Homo sapiens
  Heavy chain CDR3 for antibody 9601 (IGHV3-33)
ARDLGWSFDF

SEQ ID NO: 19203 - protein, 9 aa, Homo sapiens
  Light chain CDR3 for antibody 9602 (IGKV1-39)
QQSYSSPYT

SEQ ID NO: 19204 - protein, 18 aa, Homo sapiens
  Heavy chain CDR3 for antibody 9602 (IGHV1-18)
ARDRGYYYGSGSYSPFDY

SEQ ID NO: 19205 - protein, 9 aa, Homo sapiens
  Light chain CDR3 for antibody 9603 (IGKV1-6)
QQYNSYPFT

SEQ ID NO: 19206 - protein, 17 aa, Homo sapiens
  Heavy chain CDR3 for antibody 9603 (IGHV4-59)
ARRITMVREIIITAFDY

SEQ ID NO: 19207 - protein, 9 aa, Homo sapiens
  Light chain CDR3 for antibody 9604 (IGKV3-20)
QQYGSSPYT

SEQ ID NO: 19208 - protein, 20 aa, Homo sapiens
  Heavy chain CDR3 for antibody 9604 (IGHV1-f)
ATHYDILTGSPYYYYCALDV

SEQ ID NO: 19209 - protein, 9 aa, Homo sapiens
  Light chain CDR3 for antibody 9605 (IGKV5-2)
LQHDNFPYT

SEQ ID NO: 19210 - protein, 16 aa, Homo sapiens
  Heavy chain CDR3 for antibody 9605 (IGHV3-33)
ARGGLTGGGDYDAFDI

SEQ ID NO: 19211 - protein, 8 aa, Homo sapiens
  Light chain CDR3 for antibody 9606 (IGKV3-11)
QQRSNWLT

SEQ ID NO: 19212 - protein, 17 aa, Homo sapiens
  Heavy chain CDR3 for antibody 9606 (IGHV3-64)
ARERYYGSGSYYNWFDP

SEQ ID NO: 19213 - protein, 9 aa, Homo sapiens
  Light chain CDR3 for antibody 9607 (IGKV1-39)
QQSYSTPST

SEQ ID NO: 19214 - protein, 11 aa, Homo sapiens
  Heavy chain CDR3 for antibody 9607 (IGHV3-48)
AREGALYAFDF

SEQ ID NO: 19215 - protein, 9 aa, Homo sapiens
  Light chain CDR3 for antibody 9608 (IGKV1-16)
QQYYSYPYT

SEQ ID NO: 19216 - protein, 11 aa, Homo sapiens
  Heavy chain CDR3 for antibody 9608 (IGHV3-33)
VREAYYYGLDV

SEQ ID NO: 19217 - protein, 9 aa, Homo sapiens
  Light chain CDR3 for antibody 9609 (IGKV1-6)
LQDYNYPWT

SEQ ID NO: 19218 - protein, 9 aa, Homo sapiens
  Heavy chain CDR3 for antibody 9609 (IGHV3-33)
ARELGYFDF

SEQ ID NO: 19219 - protein, 9 aa, Homo sapiens
  Light chain CDR3 for antibody 9610 (IGKV1-9)
QQLKSYPYT

SEQ ID NO: 19220 - protein, 14 aa, Homo sapiens
  Heavy chain CDR3 for antibody 9610 (IGHV3-33)
VRDAMGAPTAWFDP

SEQ ID NO: 19221 - protein, 8 aa, Homo sapiens
  Light chain CDR3 for antibody 9611 (IGKV3-11)
QQRGNWPS

SEQ ID NO: 19222 - protein, 14 aa, Homo sapiens
  Heavy chain CDR3 for antibody 9611 (IGHV3-33)
AREGYSSNWYDFDY

SEQ ID NO: 19223 - protein, 9 aa, Homo sapiens
  Light chain CDR3 for antibody 9612 (IGKV3D-7)
QQDYEFPLT

SEQ ID NO: 19224 - protein, 8 aa, Homo sapiens
  Heavy chain CDR3 for antibody 9612 (IGHV4-59)
ARGARFDP

SEQ ID NO: 19225 - protein, 9 aa, Homo sapiens
  Light chain CDR3 for antibody 9613 (IGKV2-30)
MQGTHWPLT

SEQ ID NO: 19226 - protein, 15 aa, Homo sapiens
  Heavy chain CDR3 for antibody 9613 (IGHV3-33)
AKDRNSGYDWGGFDY

SEQ ID NO: 19227 - protein, 9 aa, Homo sapiens
  Light chain CDR3 for antibody 9614 (IGKV1-6)
LQDFHYPWT

SEQ ID NO: 19228 - protein, 14 aa, Homo sapiens
  Heavy chain CDR3 for antibody 9614 (IGHV3-33)
ARDWNDVYYYGMDV

SEQ ID NO: 19229 - protein, 9 aa, Homo sapiens
  Light chain CDR3 for antibody 9615 (IGKV1-17)
LQHNSYPWT

SEQ ID NO: 19230 - protein, 6 aa, Homo sapiens
  Heavy chain CDR3 for antibody 9615 (IGHV3-33)
VREGDY

SEQ ID NO: 19231 - protein, 9 aa, Homo sapiens
  Light chain CDR3 for antibody 9616 (IGKV3D-7)
QQDYDLPYP

SEQ ID NO: 19232 - protein, 17 aa, Homo sapiens
  Heavy chain CDR3 for antibody 9616 (IGHV4-39)
ARVLRYFDWLSHDAFDI

SEQ ID NO: 19233 - protein, 9 aa, Homo sapiens
  Light chain CDR3 for antibody 9617 (IGKV1D-16)
QQYNSYPLT

SEQ ID NO: 19234 - protein, 15 aa, Homo sapiens
  Heavy chain CDR3 for antibody 9617 (IGHV4-39)
ARRSKYSSAWYPSDY

SEQ ID NO: 19235 - protein, 9 aa, Homo sapiens
  Light chain CDR3 for antibody 9618 (IGKV3D-7)
QQDYNLPYT

SEQ ID NO: 19236 - protein, 15 aa, Homo sapiens
  Heavy chain CDR3 for antibody 9618 (IGHV3-74)
ARGSGSHYFYYGMDV

SEQ ID NO: 19237 - protein, 9 aa, Homo sapiens
  Light chain CDR3 for antibody 9619 (IGKV1-6)
LQDYSSPWT

SEQ ID NO: 19238 - protein, 16 aa, Homo sapiens
  Heavy chain CDR3 for antibody 9619 (IGHV3-33)
ARAVYYGSGSSLIMDV

SEQ ID NO: 19239 - protein, 8 aa, Homo sapiens
  Light chain CDR3 for antibody 9620 (IGKV3-20)
QQYGSSRT

SEQ ID NO: 19240 - protein, 17 aa, Homo sapiens
  Heavy chain CDR3 for antibody 9620 (IGHV3-23)
AKDGSFYSSGWYDAFDI

SEQ ID NO: 19241 - protein, 9 aa, Homo sapiens
  Light chain CDR3 for antibody 9621 (IGKV1D-13)
QHFNNYMYT

SEQ ID NO: 19242 - protein, 9 aa, Homo sapiens
  Heavy chain CDR3 for antibody 9621 (IGHV1-8)
ARGRLDFDY

SEQ ID NO: 19243 - protein, 8 aa, Homo sapiens
  Light chain CDR3 for antibody 9622 (IGKV1-5)
QQYNSYYT

SEQ ID NO: 19244 - protein, 20 aa, Homo sapiens
  Heavy chain CDR3 for antibody 9622 (IGHV3-23)
AKGMGGLRYFDWPHYYGMDV

SEQ ID NO: 19245 - protein, 9 aa, Homo sapiens
  Light chain CDR3 for antibody 9623 (IGKV2-30)
MQGTHWPYT

SEQ ID NO: 19246 - protein, 18 aa, Homo sapiens
  Heavy chain CDR3 for antibody 9623 (IGHV3-33)
ARKGGYYSGSGSYRHFDF

SEQ ID NO: 19247 - protein, 10 aa, Homo sapiens
  Light chain CDR3 for antibody 9624 (IGKV3-15)
QQYNNWPPYT

SEQ ID NO: 19248 - protein, 9 aa, Homo sapiens
  Heavy chain CDR3 for antibody 9624 (IGHV3-33)
AREYKEFDY

SEQ ID NO: 19249 - protein, 9 aa, Homo sapiens
  Light chain CDR3 for antibody 9625 (IGKV6-21)
HQSTSLPFT

SEQ ID NO: 19250 - protein, 13 aa, Homo sapiens
  Heavy chain CDR3 for antibody 9625 (IGHV4-34)
ASDFYYYYYGMDV

SEQ ID NO: 19251 - protein, 9 aa, Homo sapiens
  Light chain CDR3 for antibody 9626 (IGKV1-9)
QQLNSYPYT

SEQ ID NO: 19252 - protein, 14 aa, Homo sapiens
  Heavy chain CDR3 for antibody 9626 (IGHV3-33)
ARMAAAAGPRDFQH

SEQ ID NO: 19253 - protein, 8 aa, Homo sapiens
  Light chain CDR3 for antibody 9627 (IGKV1-5)
QQYNSYWT

SEQ ID NO: 19254 - protein, 9 aa, Homo sapiens
  Heavy chain CDR3 for antibody 9627 (IGHV4-59)
ARGGASFDY

SEQ ID NO: 19255 - protein, 8 aa, Homo sapiens
  Light chain CDR3 for antibody 9628 (IGKV3-11)
QQRSNWLT

SEQ ID NO: 19256 - protein, 21 aa, Homo sapiens
  Heavy chain CDR3 for antibody 9628 (IGHV1-18)
ASGVLIWFGELLSEDYYDMDV

SEQ ID NO: 19257 - protein, 9 aa, Homo sapiens
  Light chain CDR3 for antibody 9629 (IGKV1-39)
QQSYSTPLT

SEQ ID NO: 19258 - protein, 15 aa, Homo sapiens
  Heavy chain CDR3 for antibody 9629 (IGHV3-23)
AKDRSGSGSYNLFDY

SEQ ID NO: 19259 - protein, 9 aa, Homo sapiens
  Light chain CDR3 for antibody 9630 (IGKV2-30)
MQGTHWPLT

SEQ ID NO: 19260 - protein, 13 aa, Homo sapiens
  Heavy chain CDR3 for antibody 9630 (IGHV3-33)
ARDYTMVRGVMTY

SEQ ID NO: 19261 - protein, 10 aa, Homo sapiens
  Light chain CDR3 for antibody 9631 (IGKV3-15)
QQYNNWPPLT

SEQ ID NO: 19262 - protein, 14 aa, Homo sapiens
  Heavy chain CDR3 for antibody 9631 (IGHV3-33)
ARDREQQLVRYFDY

SEQ ID NO: 19263 - protein, 9 aa, Homo sapiens
  Light chain CDR3 for antibody 9632 (IGKV1D-13)
QQFNNYPHT

SEQ ID NO: 19264 - protein, 14 aa, Homo sapiens
  Heavy chain CDR3 for antibody 9632 (IGHV3-15)
SIYYYGSGRDYFDY

SEQ ID NO: 19265 - protein, 10 aa, Homo sapiens
  Light chain CDR3 for antibody 9633 (IGKV3-11)
QQRSNWPIFT

SEQ ID NO: 19266 - protein, 19 aa, Homo sapiens
  Heavy chain CDR3 for antibody 9633 (IGHV3-23)
AKDREMAATSHYYYYGMDV

SEQ ID NO: 19267 - protein, 9 aa, Homo sapiens
  Light chain CDR3 for antibody 9634 (IGKV1-9)
QQLKSYPYT

SEQ ID NO: 19268 - protein, 18 aa, Homo sapiens
  Heavy chain CDR3 for antibody 9634 (IGHV1-46)
ARDGRISLVRGIIDAFDI

SEQ ID NO: 19269 - protein, 10 aa, Homo sapiens
  Light chain CDR3 for antibody 9635 (IGKV3-11)
QQRSNWPMYT

SEQ ID NO: 19270 - protein, 9 aa, Homo sapiens
  Heavy chain CDR3 for antibody 9635 (IGHV3-33)
AREYKEFDY

SEQ ID NO: 19271 - protein, 9 aa, Homo sapiens
  Light chain CDR3 for antibody 9636 (IGKV1D-16)
QQYSSYPYT

SEQ ID NO: 19272 - protein, 12 aa, Homo sapiens
  Heavy chain CDR3 for antibody 9636 (IGHV3-33)
ARGYFGSGYARF

SEQ ID NO: 19273 - protein, 9 aa, Homo sapiens
  Light chain CDR3 for antibody 9637 (IGKV1D-16)
QQYNSYPLT

SEQ ID NO: 19274 - protein, 15 aa, Homo sapiens
  Heavy chain CDR3 for antibody 9637 (IGHV3-33)
ARAYDLPHYYYGMDV

SEQ ID NO: 19275 - protein, 9 aa, Homo sapiens
  Light chain CDR3 for antibody 9638 (IGKV1-6)
LQDFHYPWT

SEQ ID NO: 19276 - protein, 14 aa, Homo sapiens
  Heavy chain CDR3 for antibody 9638 (IGHV3-33)
ARDRIAAASSDFDC

SEQ ID NO: 19277 - protein, 8 aa, Homo sapiens
  Light chain CDR3 for antibody 9639 (IGKV2D-28)
MQALQTPT

SEQ ID NO: 19278 - protein, 11 aa, Homo sapiens
  Heavy chain CDR3 for antibody 9639 (IGHV3-33)
ARARYTTGLDY

SEQ ID NO: 19279 - protein, 9 aa, Homo sapiens
  Light chain CDR3 for antibody 9640 (IGKV1-5)
QQYNTYSRT

SEQ ID NO: 19280 - protein, 11 aa, Homo sapiens
  Heavy chain CDR3 for antibody 9640 (IGHV3-33)
ARDKSSGWSDY

SEQ ID NO: 19281 - protein, 8 aa, Homo sapiens
  Light chain CDR3 for antibody 9641 (IGKV6-21)
HQSSSLPT

SEQ ID NO: 19282 - protein, 16 aa, Homo sapiens
  Heavy chain CDR3 for antibody 9641 (IGHV3-33)
ARAVYYGSGSSLIMDV

SEQ ID NO: 19283 - protein, 9 aa, Homo sapiens
  Light chain CDR3 for antibody 9642 (IGKV1-9)
QQLNSYPYT

SEQ ID NO: 19284 - protein, 10 aa, Homo sapiens
  Heavy chain CDR3 for antibody 9642 (IGHV3-23)
AKDHYGDCPY

SEQ ID NO: 19285 - protein, 8 aa, Homo sapiens
  Light chain CDR3 for antibody 9643 (IGKV3-11)
LQRGNWPT

SEQ ID NO: 19286 - protein, 11 aa, Homo sapiens
  Heavy chain CDR3 for antibody 9643 (IGHV4-59)
ARSLRYSFFDY

SEQ ID NO: 19287 - protein, 9 aa, Homo sapiens
  Light chain CDR3 for antibody 9644 (IGKV1D-16)
QQYNSYPFT

SEQ ID NO: 19288 - protein, 15 aa, Homo sapiens
  Heavy chain CDR3 for antibody 9644 (IGHV4-59)
AREMGHYYGSVSIDY

SEQ ID NO: 19289 - protein, 9 aa, Homo sapiens
  Light chain CDR3 for antibody 9645 (IGKV1-9)
QQLISYPLT

SEQ ID NO: 19290 - protein, 20 aa, Homo sapiens
  Heavy chain CDR3 for antibody 9645 (IGHV1-18)
AREVGIAVAGTLYYYYGMDV

SEQ ID NO: 19291 - protein, 9 aa, Homo sapiens
  Light chain CDR3 for antibody 9646 (IGKV1-17)
LHSNNYPWT

SEQ ID NO: 19292 - protein, 12 aa, Homo sapiens
  Heavy chain CDR3 for antibody 9646 (IGHV3-33)
ARDRAYRGSLDY

SEQ ID NO: 19293 - protein, 9 aa, Homo sapiens
  Light chain CDR3 for antibody 9647 (IGKV1-6)
LQDFNYPRT

SEQ ID NO: 19294 - protein, 14 aa, Homo sapiens
  Heavy chain CDR3 for antibody 9647 (IGHV3-33)
ARDNILTAYYLFDY

SEQ ID NO: 19295 - protein, 10 aa, Homo sapiens
  Light chain CDR3 for antibody 9648 (IGKV3-11)
QQRSNWPIFT

SEQ ID NO: 19296 - protein, 10 aa, Homo sapiens
  Heavy chain CDR3 for antibody 9648 (IGHV3-23)
AKDHWGDFDY

SEQ ID NO: 19297 - protein, 9 aa, Homo sapiens
  Light chain CDR3 for antibody 9649 (IGKV3-15)
QQYHNWPRT

SEQ ID NO: 19298 - protein, 16 aa, Homo sapiens
  Heavy chain CDR3 for antibody 9649 (IGHV3-33)
ARDRGGMTMVRGGFDY

SEQ ID NO: 19299 - protein, 8 aa, Homo sapiens
  Light chain CDR3 for antibody 9650 (IGKV1-5)
QQYNSYWT

SEQ ID NO: 19300 - protein, 10 aa, Homo sapiens
  Heavy chain CDR3 for antibody 9650 (IGHV3-33)
ARDGSGSQPI

SEQ ID NO: 19301 - protein, 9 aa, Homo sapiens
  Light chain CDR3 for antibody 9651 (IGKV3D-7)
QQDYTLPLT

SEQ ID NO: 19302 - protein, 10 aa, Homo sapiens
  Heavy chain CDR3 for antibody 9651 (IGHV4-59)
VSSGTSLLAY

SEQ ID NO: 19303 - protein, 9 aa, Homo sapiens
  Light chain CDR3 for antibody 9652 (IGKV3D-7)
QQDYNLPLT

SEQ ID NO: 19304 - protein, 18 aa, Homo sapiens
  Heavy chain CDR3 for antibody 9652 (IGHV3-23)
AKEGDYYSSGSYWGYFDL

SEQ ID NO: 19305 - protein, 10 aa, Homo sapiens
  Light chain CDR3 for antibody 9653 (IGKV3-15)
QQYNNWPPIT

SEQ ID NO: 19306 - protein, 13 aa, Homo sapiens
  Heavy chain CDR3 for antibody 9653 (IGHV4-59)
ANRDYYGYYGMDV

SEQ ID NO: 19307 - protein, 9 aa, Homo sapiens
  Light chain CDR3 for antibody 9654 (IGKV1-27)
QKYNSAPYT

SEQ ID NO: 19308 - protein, 16 aa, Homo sapiens
  Heavy chain CDR3 for antibody 9654 (IGHV4-59)
ARYSGSYYGDYYGMDV

SEQ ID NO: 19309 - protein, 9 aa, Homo sapiens
  Light chain CDR3 for antibody 9655 (IGKV1-9)
QQLKSYLYT

SEQ ID NO: 19310 - protein, 20 aa, Homo sapiens
  Heavy chain CDR3 for antibody 9655 (IGHV1-f)
ATHYDILTGSPYYYYCALDV

SEQ ID NO: 19311 - protein, 9 aa, Homo sapiens
  Light chain CDR3 for antibody 9656 (IGKV1D-13)
QQFNNYPHT

SEQ ID NO: 19312 - protein, 18 aa, Homo sapiens
  Heavy chain CDR3 for antibody 9656 (IGHV4-39)
VKYITMVRGDIITGPFAY

SEQ ID NO: 19313 - protein, 9 aa, Homo sapiens
  Light chain CDR3 for antibody 9657 (IGKV1D-16)
LQHNIYPPT

SEQ ID NO: 19314 - protein, 18 aa, Homo sapiens
  Heavy chain CDR3 for antibody 9657 (IGHV1-46)
ARDLTGRTENYYYYGMDV

SEQ ID NO: 19315 - protein, 8 aa, Homo sapiens
  Light chain CDR3 for antibody 9658 (IGKV1-13)
QQFNTYPT

SEQ ID NO: 19316 - protein, 13 aa, Homo sapiens
  Heavy chain CDR3 for antibody 9658 (IGHV3-33)
ARKAYGDYFYFDY

SEQ ID NO: 19317 - protein, 8 aa, Homo sapiens
  Light chain CDR3 for antibody 9659 (IGKV1-5)
QQYNSYYT

SEQ ID NO: 19318 - protein, 15 aa, Homo sapiens
  Heavy chain CDR3 for antibody 9659 (IGHV3-33)
ARDALAVTGTGWFDP

SEQ ID NO: 19319 - protein, 9 aa, Homo sapiens
  Light chain CDR3 for antibody 9660 (IGKV1-9)
QQLKSYLYT

SEQ ID NO: 19320 - protein, 21 aa, Homo sapiens
  Heavy chain CDR3 for antibody 9660 (IGHV1-69)
ASGVLIWFGELLSEDYYDMDV

SEQ ID NO: 19321 - protein, 9 aa, Homo sapiens
  Light chain CDR3 for antibody 9661 (IGKV3D-7)
QQDYEFPIT

SEQ ID NO: 19322 - protein, 13 aa, Homo sapiens
  Heavy chain CDR3 for antibody 9661 (IGHV4-61)
ASRYSSGRYPFDY

SEQ ID NO: 19323 - protein, 10 aa, Homo sapiens
  Light chain CDR3 for antibody 9662 (IGKV3-20)
QQYGSSPPYT

SEQ ID NO: 19324 - protein, 10 aa, Homo sapiens
  Heavy chain CDR3 for antibody 9662 (IGHV1-18)
AREQRLGFDY

SEQ ID NO: 19325 - protein, 9 aa, Homo sapiens
  Light chain CDR3 for antibody 9663 (IGKV1-6)
LQDFHYPWT

SEQ ID NO: 19326 - protein, 14 aa, Homo sapiens
  Heavy chain CDR3 for antibody 9663 (IGHV3-33)
ARQYSYGYPYYFDY

SEQ ID NO: 19327 - protein, 9 aa, Homo sapiens
  Light chain CDR3 for antibody 9664 (IGKV3D-20)
HQYGSSPLT

SEQ ID NO: 19328 - protein, 13 aa, Homo sapiens
  Heavy chain CDR3 for antibody 9664 (IGHV4-34)
ASNFYYYYYCMKV

SEQ ID NO: 19329 - protein, 9 aa, Homo sapiens
  Light chain CDR3 for antibody 9665 (IGKV3D-7)
QQDYKSPLT

SEQ ID NO: 19330 - protein, 7 aa, Homo sapiens
  Heavy chain CDR3 for antibody 9665 (IGHV1-46)
AREGGDY

SEQ ID NO: 19331 - protein, 9 aa, Homo sapiens
  Light chain CDR3 for antibody 9666 (IGKV1-37)
QRTSNAPYT

SEQ ID NO: 19332 - protein, 11 aa, Homo sapiens
  Heavy chain CDR3 for antibody 9666 (IGHV3-33)
ARDRATATVDY

SEQ ID NO: 19333 - protein, 10 aa, Homo sapiens
  Light chain CDR3 for antibody 9667 (IGKV3-20)
QQYGSSPPYT

SEQ ID NO: 19334 - protein, 13 aa, Homo sapiens
  Heavy chain CDR3 for antibody 9667 (IGHV3-33)
ARDWGYSHGYFDY

SEQ ID NO: 19335 - protein, 8 aa, Homo sapiens
  Light chain CDR3 for antibody 9668 (IGKV6-21)
HQSSSLYT

SEQ ID NO: 19336 - protein, 17 aa, Homo sapiens
  Heavy chain CDR3 for antibody 9668 (IGHV3-66)
ARVQYDILTGYSPYFDN

SEQ ID NO: 19337 - protein, 9 aa, Homo sapiens
  Light chain CDR3 for antibody 9669 (IGKV1-9)
QQLNGYPFT

SEQ ID NO: 19338 - protein, 14 aa, Homo sapiens
  Heavy chain CDR3 for antibody 9669 (IGHV3-33)
ARRGSPLRPSHLDV

SEQ ID NO: 19339 - protein, 9 aa, Homo sapiens
  Light chain CDR3 for antibody 9670 (IGKV1D-13)
QHFNNYMYT

SEQ ID NO: 19340 - protein, 18 aa, Homo sapiens
  Heavy chain CDR3 for antibody 9670 (IGHV4-59)
AREGHYYTSGSYYKAFDY

SEQ ID NO: 19341 - protein, 9 aa, Homo sapiens
  Light chain CDR3 for antibody 9671 (IGKV5-2)
LQHDKFPYT

SEQ ID NO: 19342 - protein, 15 aa, Homo sapiens
  Heavy chain CDR3 for antibody 9671 (IGHV3-33)
ARGVDILTGYSSFDY

SEQ ID NO: 19343 - protein, 9 aa, Homo sapiens
  Light chain CDR3 for antibody 9672 (IGKV3-11)
QQRSKWPLT

SEQ ID NO: 19344 - protein, 18 aa, Homo sapiens
  Heavy chain CDR3 for antibody 9672 (IGHV3-33)
ARREGITMIFYYYYGMDV

SEQ ID NO: 19345 - protein, 8 aa, Homo sapiens
  Light chain CDR3 for antibody 9673 (IGKV1-5)
QQYNSYYT

SEQ ID NO: 19346 - protein, 16 aa, Homo sapiens
  Heavy chain CDR3 for antibody 9673 (IGHV3-11)
ARDSELRYFDWFGMDV

SEQ ID NO: 19347 - protein, 9 aa, Homo sapiens
  Light chain CDR3 for antibody 9674 (IGKV1D-13)
QQFNNYLYT

SEQ ID NO: 19348 - protein, 20 aa, Homo sapiens
  Heavy chain CDR3 for antibody 9674 (IGHV3-33)
ARDRCSSTSCYGYYYYGMDV

SEQ ID NO: 19349 - protein, 9 aa, Homo sapiens
  Light chain CDR3 for antibody 9675 (IGKV1-17)
LQHNSYPYT

SEQ ID NO: 19350 - protein, 13 aa, Homo sapiens
  Heavy chain CDR3 for antibody 9675 (IGHV3-23)
ATGAWASSWWGDY

SEQ ID NO: 19351 - protein, 10 aa, Homo sapiens
  Light chain CDR3 for antibody 9676 (IGKV3-15)
QQYNNWPPYT

SEQ ID NO: 19352 - protein, 13 aa, Homo sapiens
  Heavy chain CDR3 for antibody 9676 (IGHV3-33)
ASGYSGYDWYFDL

SEQ ID NO: 19353 - protein, 6 aa, Homo sapiens
  Light chain CDR3 for antibody 9677 (IGKV3-20)
QQYGST

SEQ ID NO: 19354 - protein, 15 aa, Homo sapiens
  Heavy chain CDR3 for antibody 9677 (IGHV3-33)
ARDHLTGYYYYGMDV

SEQ ID NO: 19355 - protein, 9 aa, Homo sapiens
  Light chain CDR3 for antibody 9678 (IGKV4-1)
QQYYSTPPT

SEQ ID NO: 19356 - protein, 17 aa, Homo sapiens
  Heavy chain CDR3 for antibody 9678 (IGHV3-23)
AKDGSFYSSGWYDAFDI

SEQ ID NO: 19357 - protein, 9 aa, Homo sapiens
  Light chain CDR3 for antibody 9679 (IGKV3-15)
QQYNNWPRT

SEQ ID NO: 19358 - protein, 14 aa, Homo sapiens
  Heavy chain CDR3 for antibody 9679 (IGHV3-13)
ARDRIAAASSDFDC

SEQ ID NO: 19359 - protein, 10 aa, Homo sapiens
  Light chain CDR3 for antibody 9680 (IGKV1-9)
QQLDSYPMYT

SEQ ID NO: 19360 - protein, 17 aa, Homo sapiens
  Heavy chain CDR3 for antibody 9680 (IGHV3-33)
AREDYDILTGYPFYFDY

SEQ ID NO: 19361 - protein, 9 aa, Homo sapiens
  Light chain CDR3 for antibody 9681 (IGKV1D-13)
QRFNNYLYT

SEQ ID NO: 19362 - protein, 10 aa, Homo sapiens
  Heavy chain CDR3 for antibody 9681 (IGHV3-33)
ARDGSGSYPI

SEQ ID NO: 19363 - protein, 9 aa, Homo sapiens
  Light chain CDR3 for antibody 9682 (IGKV1D-13)
QQFNNYPST

SEQ ID NO: 19364 - protein, 12 aa, Homo sapiens
  Heavy chain CDR3 for antibody 9682 (IGHV3-33)
ARDWMVRGVIAY

SEQ ID NO: 19365 - protein, 9 aa, Homo sapiens
  Light chain CDR3 for antibody 9683 (IGKV1-9)
QQLNSYPWT

SEQ ID NO: 19366 - protein, 20 aa, Homo sapiens
  Heavy chain CDR3 for antibody 9683 (IGHV1-f)
ATGLITFVRGVILTYRSFDY

SEQ ID NO: 19367 - protein, 8 aa, Homo sapiens
  Light chain CDR3 for antibody 9684 (IGKV3-11)
QQRSNWWT

SEQ ID NO: 19368 - protein, 12 aa, Homo sapiens
  Heavy chain CDR3 for antibody 9684 (IGHV3-33)
AREGDILTGYYL

SEQ ID NO: 19369 - protein, 9 aa, Homo sapiens
  Light chain CDR3 for antibody 9685 (IGKV1-6)
LQDYNYPWT

SEQ ID NO: 19370 - protein, 15 aa, Homo sapiens
  Heavy chain CDR3 for antibody 9685 (IGHV3-66)
ARDSRPEITGPPFDY

SEQ ID NO: 19371 - protein, 9 aa, Homo sapiens
  Light chain CDR3 for antibody 9686 (IGKV1D-13)
QQFNNYPYT

SEQ ID NO: 19372 - protein, 13 aa, Homo sapiens
  Heavy chain CDR3 for antibody 9686 (IGHV4-39)
ARRDVLAPAAFEY

SEQ ID NO: 19373 - protein, 8 aa, Homo sapiens
  Light chain CDR3 for antibody 9687 (IGKV3D-7)
QQDYNLLT

SEQ ID NO: 19374 - protein, 12 aa, Homo sapiens
  Heavy chain CDR3 for antibody 9687 (IGHV3-33)
AREGIAVAGVDP

SEQ ID NO: 19375 - protein, 9 aa, Homo sapiens
  Light chain CDR3 for antibody 9688 (IGKV3-20)
QQYGSSPYT

SEQ ID NO: 19376 - protein, 15 aa, Homo sapiens
  Heavy chain CDR3 for antibody 9688 (IGHV4-39)
ARRVRGLIITRYFDY

SEQ ID NO: 19377 - protein, 10 aa, Homo sapiens
  Light chain CDR3 for antibody 9689 (IGKV1-27)
QKYNSAPMYT

SEQ ID NO: 19378 - protein, 18 aa, Homo sapiens
  Heavy chain CDR3 for antibody 9689 (IGHV3-23)
AKDRITGTTYGYYSGLDV

SEQ ID NO: 19379 - protein, 9 aa, Homo sapiens
  Light chain CDR3 for antibody 9690 (IGKV1-39)
QQSYSTPYT

SEQ ID NO: 19380 - protein, 10 aa, Homo sapiens
  Heavy chain CDR3 for antibody 9690 (IGHV3-30)
ARDNFEGMDV

SEQ ID NO: 19381 - protein, 10 aa, Homo sapiens
  Light chain CDR3 for antibody 9691 (IGKV3-15)
QQYNNWPPYT

SEQ ID NO: 19382 - protein, 21 aa, Homo sapiens
  Heavy chain CDR3 for antibody 9691 (IGHV1-69)
ARDEYYEIVTGYGYYHYGMDV

SEQ ID NO: 19383 - protein, 9 aa, Homo sapiens
  Light chain CDR3 for antibody 9692 (IGKV1-5)
QQYNTYSRT

SEQ ID NO: 19384 - protein, 9 aa, Homo sapiens
  Heavy chain CDR3 for antibody 9692 (IGHV3-23)
AKEQQLFDY

SEQ ID NO: 19385 - protein, 9 aa, Homo sapiens
  Light chain CDR3 for antibody 9693 (IGKV3-11)
QQRSNWPLT

SEQ ID NO: 19386 - protein, 18 aa, Homo sapiens
  Heavy chain CDR3 for antibody 9693 (IGHV4-59)
AREGDYVWGSYRPNWFDP

SEQ ID NO: 19387 - protein, 9 aa, Homo sapiens
  Light chain CDR3 for antibody 9694 (IGKV2D-28)
MQALQTPPT

SEQ ID NO: 19388 - protein, 14 aa, Homo sapiens
  Heavy chain CDR3 for antibody 9694 (IGHV1-46)
ARDGVGAKEGGFDY

SEQ ID NO: 19389 - protein, 8 aa, Homo sapiens
  Light chain CDR3 for antibody 9695 (IGKV3-11)
QQRGNWPS

SEQ ID NO: 19390 - protein, 13 aa, Homo sapiens
  Heavy chain CDR3 for antibody 9695 (IGHV3-33)
ARGDNWNDGGFDY

SEQ ID NO: 19391 - protein, 10 aa, Homo sapiens
  Light chain CDR3 for antibody 9696 (IGKV3-11)
QQRSNWPALT

SEQ ID NO: 19392 - protein, 15 aa, Homo sapiens
  Heavy chain CDR3 for antibody 9696 (IGHV3-33)
ARHSSGFYYYYGMDV

SEQ ID NO: 19393 - protein, 9 aa, Homo sapiens
  Light chain CDR3 for antibody 9697 (IGKV3-11)
QQRSNWQYT

SEQ ID NO: 19394 - protein, 11 aa, Homo sapiens
  Heavy chain CDR3 for antibody 9697 (IGHV4-59)
ARSLRYSVFDY

SEQ ID NO: 19395 - protein, 9 aa, Homo sapiens
  Light chain CDR3 for antibody 9698 (IGKV2D-24)
TQATQFPHT

SEQ ID NO: 19396 - protein, 13 aa, Homo sapiens
  Heavy chain CDR3 for antibody 9698 (IGHV4-39)
ARHPPSRDYGMDV

SEQ ID NO: 19397 - protein, 9 aa, Homo sapiens
  Light chain CDR3 for antibody 9699 (IGKV1D-13)
QQFNNYPHT

SEQ ID NO: 19398 - protein, 19 aa, Homo sapiens
  Heavy chain CDR3 for antibody 9699 (IGHV3-33)
ARIHGIAVAGGYYYYGMDV

SEQ ID NO: 19399 - protein, 8 aa, Homo sapiens
  Light chain CDR3 for antibody 9700 (IGKV1-5)
QQYNSYYT

SEQ ID NO: 19400 - protein, 8 aa, Homo sapiens
  Heavy chain CDR3 for antibody 9700 (IGHV3-23)
AKESLLDY

SEQ ID NO: 19401 - protein, 10 aa, Homo sapiens
  Light chain CDR3 for antibody 9701 (IGKV1-39)
QQSYSTPMYT

SEQ ID NO: 19402 - protein, 18 aa, Homo sapiens
  Heavy chain CDR3 for antibody 9701 (IGHV3-33)
ARDGRISLVRGIIDAFDI

SEQ ID NO: 19403 - protein, 9 aa, Homo sapiens
  Light chain CDR3 for antibody 9702 (IGKV1-39)
QQSYRTPLT

SEQ ID NO: 19404 - protein, 15 aa, Homo sapiens
  Heavy chain CDR3 for antibody 9702 (IGHV3-33)
ARPPIAVAGPEYFQH

SEQ ID NO: 19405 - protein, 9 aa, Homo sapiens
  Light chain CDR3 for antibody 9703 (IGKV1-9)
QQLTSFPRT

SEQ ID NO: 19406 - protein, 15 aa, Homo sapiens
  Heavy chain CDR3 for antibody 9703 (IGHV3-30)
ARGAMVRGVDYGMDV

SEQ ID NO: 19407 - protein, 9 aa, Homo sapiens
  Light chain CDR3 for antibody 9704 (IGKV3-15)
QQYNNWPRT

SEQ ID NO: 19408 - protein, 19 aa, Homo sapiens
  Heavy chain CDR3 for antibody 9704 (IGHV3-30)
ARRFSGYSGYDHYYYGMDV

SEQ ID NO: 19409 - protein, 8 aa, Homo sapiens
  Light chain CDR3 for antibody 9705 (IGKV3-11)
LQRGNWPT

SEQ ID NO: 19410 - protein, 10 aa, Homo sapiens
  Heavy chain CDR3 for antibody 9705 (IGHV3-15)
AKDQVGATDC

SEQ ID NO: 19411 - protein, 10 aa, Homo sapiens
  Light chain CDR3 for antibody 9706 (IGKV1-17)
LQHNSYPMYT

SEQ ID NO: 19412 - protein, 15 aa, Homo sapiens
  Heavy chain CDR3 for antibody 9706 (IGHV3-33)
ARDRDYYYYYYGMDV

SEQ ID NO: 19413 - protein, 9 aa, Homo sapiens
  Light chain CDR3 for antibody 9707 (IGKV1D-16)
QQYNSYPLT

SEQ ID NO: 19414 - protein, 14 aa, Homo sapiens
  Heavy chain CDR3 for antibody 9707 (IGHV3-33)
ARDHRDNSYYGMDV

SEQ ID NO: 19415 - protein, 9 aa, Homo sapiens
  Light chain CDR3 for antibody 9708 (IGKV1-17)
LHSNNYPWT

SEQ ID NO: 19416 - protein, 18 aa, Homo sapiens
  Heavy chain CDR3 for antibody 9708 (IGHV3-33)
ARRSAAGTGDYYYYGMDV

SEQ ID NO: 19417 - protein, 8 aa, Homo sapiens
  Light chain CDR3 for antibody 9709 (IGKV3-15)
QQYNNYPT

SEQ ID NO: 19418 - protein, 18 aa, Homo sapiens
  Heavy chain CDR3 for antibody 9709 (IGHV3-33)
ARERGYYGSDIYPAAFDI

SEQ ID NO: 19419 - protein, 9 aa, Homo sapiens
  Light chain CDR3 for antibody 9710 (IGKV1D-16)
QQYNSYPYT

SEQ ID NO: 19420 - protein, 16 aa, Homo sapiens
  Heavy chain CDR3 for antibody 9710 (IGHV3-33)
ARRATLVRGVDYGMDV

SEQ ID NO: 19421 - protein, 9 aa, Homo sapiens
  Light chain CDR3 for antibody 9711 (IGKV1D-16)
QQYYSYPRT

SEQ ID NO: 19422 - protein, 14 aa, Homo sapiens
  Heavy chain CDR3 for antibody 9711 (IGHV3-33)
ARTTAAAGPRDFQH

SEQ ID NO: 19423 - protein, 9 aa, Homo sapiens
  Light chain CDR3 for antibody 9712 (IGKV1D-16)
QQYNSYPWT

SEQ ID NO: 19424 - protein, 17 aa, Homo sapiens
  Heavy chain CDR3 for antibody 9712 (IGHV4-59)
ARDCLVRGEGSYYGMDV

SEQ ID NO: 19425 - protein, 9 aa, Homo sapiens
  Light chain CDR3 for antibody 9713 (IGKV1-12)
QQADTIPVT

SEQ ID NO: 19426 - protein, 13 aa, Homo sapiens
  Heavy chain CDR3 for antibody 9713 (IGHV4-59)
ARDAGYSSSWFDY

SEQ ID NO: 19427 - protein, 9 aa, Homo sapiens
  Light chain CDR3 for antibody 9714 (IGKV6-21)
HQSTSLPFT

SEQ ID NO: 19428 - protein, 17 aa, Homo sapiens
  Heavy chain CDR3 for antibody 9714 (IGHV4-39)
AGRLTYYYGSGSPYSDY

SEQ ID NO: 19429 - protein, 9 aa, Homo sapiens
  Light chain CDR3 for antibody 9715 (IGKV1-16)
QQLKSYPYT

SEQ ID NO: 19430 - protein, 12 aa, Homo sapiens
  Heavy chain CDR3 for antibody 9715 (IGHV1-18)
AGVLFDGDYSDY

SEQ ID NO: 19431 - protein, 9 aa, Homo sapiens
  Light chain CDR3 for antibody 9716 (IGKV1-5)
QQYNTYSRT

SEQ ID NO: 19432 - protein, 14 aa, Homo sapiens
  Heavy chain CDR3 for antibody 9716 (IGHV3-33)
VRDAMGATTAWFDP

SEQ ID NO: 19433 - protein, 9 aa, Homo sapiens
  Light chain CDR3 for antibody 9717 (IGKV1-27)
QKYNSAPYT

SEQ ID NO: 19434 - protein, 12 aa, Homo sapiens
  Heavy chain CDR3 for antibody 9717 (IGHV3-33)
ARNYDILDYFDY

SEQ ID NO: 19435 - protein, 9 aa, Homo sapiens
  Light chain CDR3 for antibody 9718 (IGKV2-30)
MQGTHWPLT

SEQ ID NO: 19436 - protein, 11 aa, Homo sapiens
  Heavy chain CDR3 for antibody 9718 (IGHV4-59)
VRERGYYGMDV

SEQ ID NO: 19437 - protein, 9 aa, Homo sapiens
  Light chain CDR3 for antibody 9719 (IGKV1D-13)
QRFNNYLYT

SEQ ID NO: 19438 - protein, 14 aa, Homo sapiens
  Heavy chain CDR3 for antibody 9719 (IGHV3-33)
ARMTAAAGPRDFQH

SEQ ID NO: 19439 - protein, 9 aa, Homo sapiens
  Light chain CDR3 for antibody 9720 (IGKV1-9)
QQLKSYPYT

SEQ ID NO: 19440 - protein, 12 aa, Homo sapiens
  Heavy chain CDR3 for antibody 9720 (IGHV1-46)
ARALTVGASFDY

SEQ ID NO: 19441 - protein, 8 aa, Homo sapiens
  Light chain CDR3 for antibody 9721 (IGKV3D-7)
QQDYNLLT

SEQ ID NO: 19442 - protein, 13 aa, Homo sapiens
  Heavy chain CDR3 for antibody 9721 (IGHV4-39)
ARPGIVAAGWFDP

SEQ ID NO: 19443 - protein, 9 aa, Homo sapiens
  Light chain CDR3 for antibody 9722 (IGKV1-6)
LQDYNSPWT

SEQ ID NO: 19444 - protein, 10 aa, Homo sapiens
  Heavy chain CDR3 for antibody 9722 (IGHV3-33)
ARDLGWSFDH

SEQ ID NO: 19445 - protein, 10 aa, Homo sapiens
  Light chain CDR3 for antibody 9723 (IGKV1-39)
QQSYSTPMYT

SEQ ID NO: 19446 - protein, 18 aa, Homo sapiens
  Heavy chain CDR3 for antibody 9723 (IGHV3-30)
ARDRHHDILTGYSDAFEI

SEQ ID NO: 19447 - protein, 9 aa, Homo sapiens
  Light chain CDR3 for antibody 9724 (IGKV3D-20)
QQYGRSPRT

SEQ ID NO: 19448 - protein, 20 aa, Homo sapiens
  Heavy chain CDR3 for antibody 9724 (IGHV3-11)
ARGGATLIRGLIDYYYGMDV

SEQ ID NO: 19449 - protein, 9 aa, Homo sapiens
  Light chain CDR3 for antibody 9725 (IGKV2D-28)
MQALQTPPT

SEQ ID NO: 19450 - protein, 11 aa, Homo sapiens
  Heavy chain CDR3 for antibody 9725 (IGHV3-33)
AREGAVARFDY

SEQ ID NO: 19451 - protein, 9 aa, Homo sapiens
  Light chain CDR3 for antibody 9726 (IGKV1-17)
QQLKSYPYT

SEQ ID NO: 19452 - protein, 18 aa, Homo sapiens
  Heavy chain CDR3 for antibody 9726 (IGHV3-23)
AKDRITGTTYGYYSGLDV

SEQ ID NO: 19453 - protein, 9 aa, Homo sapiens
  Light chain CDR3 for antibody 9727 (IGKV1D-13)
QQFNNYPST

SEQ ID NO: 19454 - protein, 16 aa, Homo sapiens
  Heavy chain CDR3 for antibody 9727 (IGHV3-20)
ARDSSSLDYYYYGMDV

SEQ ID NO: 19455 - protein, 9 aa, Homo sapiens
  Light chain CDR3 for antibody 9728 (IGKV1-9)
QQLYTYPYT

SEQ ID NO: 19456 - protein, 12 aa, Homo sapiens
  Heavy chain CDR3 for antibody 9728 (IGHV3-33)
TRGYSSKSYFDY

SEQ ID NO: 19457 - protein, 8 aa, Homo sapiens
  Light chain CDR3 for antibody 9729 (IGKV3-15)
QQYNNYPT

SEQ ID NO: 19458 - protein, 12 aa, Homo sapiens
  Heavy chain CDR3 for antibody 9729 (IGHV3-13)
AIGTMVRGIPDY

SEQ ID NO: 19459 - protein, 8 aa, Homo sapiens
  Light chain CDR3 for antibody 9730 (IGKV1-6)
LQDYNYYT

SEQ ID NO: 19460 - protein, 11 aa, Homo sapiens
  Heavy chain CDR3 for antibody 9730 (IGHV3-33)
ARDRSSGPFDY

SEQ ID NO: 19461 - protein, 10 aa, Homo sapiens
  Light chain CDR3 for antibody 9731 (IGKV3-11)
QQRSNWPAYT

SEQ ID NO: 19462 - protein, 18 aa, Homo sapiens
  Heavy chain CDR3 for antibody 9731 (IGHV3-33)
ARDYDSLTTYPEDYGMDV

SEQ ID NO: 19463 - protein, 9 aa, Homo sapiens
  Light chain CDR3 for antibody 9732 (IGKV3D-7)
QQDYEFPIT

SEQ ID NO: 19464 - protein, 13 aa, Homo sapiens
  Heavy chain CDR3 for antibody 9732 (IGHV3-11)
ARDGGAAAGTWDS

SEQ ID NO: 19465 - protein, 9 aa, Homo sapiens
  Light chain CDR3 for antibody 9733 (IGKV1-17)
LQHNSFPLT

SEQ ID NO: 19466 - protein, 18 aa, Homo sapiens
  Heavy chain CDR3 for antibody 9733 (IGHV3-33)
ARREGITLIFYYYYGMDV

SEQ ID NO: 19467 - protein, 9 aa, Homo sapiens
  Light chain CDR3 for antibody 9734 (IGKV2D-28)
MQALQTPPT

SEQ ID NO: 19468 - protein, 12 aa, Homo sapiens
  Heavy chain CDR3 for antibody 9734 (IGHV3-23)
AKEGIVGVPFDY

SEQ ID NO: 19469 - protein, 10 aa, Homo sapiens [sequence omitted]

SEQ ID NO: 19470 - protein, 13 aa, Homo sapiens
  Heavy chain CDR3 for antibody 9735 (IGHV4-39)
ARHEVMVRGVFDY

SEQ ID NO: 19471 - protein, 8 aa, Homo sapiens
  Light chain CDR3 for antibody 9736 (IGKV1D-13)
QQFNNYPT

SEQ ID NO: 19472 - protein, 18 aa, Homo sapiens
  Heavy chain CDR3 for antibody 9736 (IGHV3-13)
ARDYYGSGSLYYYYGMDV

SEQ ID NO: 19473 - protein, 10 aa, Homo sapiens
  Light chain CDR3 for antibody 9737 (IGKV1-17)
LQHNSYPMYT

SEQ ID NO: 19474 - protein, 11 aa, Homo sapiens
  Heavy chain CDR3 for antibody 9737 (IGHV3-23)
AKGLWSYYFDY

SEQ ID NO: 19475 - protein, 9 aa, Homo sapiens
  Light chain CDR3 for antibody 9738 (IGKV1-27)
QKYSCAPYT

SEQ ID NO: 19476 - protein, 20 aa, Homo sapiens
  Heavy chain CDR3 for antibody 9738 (IGHV3-33)
AREDYYGSGSYYPAYNWFDP

SEQ ID NO: 19477 - protein, 9 aa, Homo sapiens
  Light chain CDR3 for antibody 9739 (IGKV3-11)
QQRSNWPPT

SEQ ID NO: 19478 - protein, 13 aa, Homo sapiens
  Heavy chain CDR3 for antibody 9739 (IGHV3-30)
AAPFMLRGDGMDV

SEQ ID NO: 19479 - protein, 9 aa, Homo sapiens
  Light chain CDR3 for antibody 9740 (IGKV3D-11)
QQRSNWQYT

SEQ ID NO: 19480 - protein, 12 aa, Homo sapiens
  Heavy chain CDR3 for antibody 9740 (IGHV3-33)
ARGYFTSGSAHY

SEQ ID NO: 19481 - protein, 8 aa, Homo sapiens
  Light chain CDR3 for antibody 9741 (IGKV1-5)
QQYNSYYT

SEQ ID NO: 19482 - protein, 11 aa, Homo sapiens
  Heavy chain CDR3 for antibody 9741 (IGHV4-4)
AREAYYYGLDV

SEQ ID NO: 19483 - protein, 9 aa, Homo sapiens
  Light chain CDR3 for antibody 9742 (IGKV3D-7)
QQDYSFPLT

SEQ ID NO: 19484 - protein, 8 aa, Homo sapiens
  Heavy chain CDR3 for antibody 9742 (IGHV3-23)
EKSAGEDV

SEQ ID NO: 19485 - protein, 9 aa, Homo sapiens
  Light chain CDR3 for antibody 9743 (IGKV1-6)
QQEYNYPLT

SEQ ID NO: 19486 - protein, 14 aa, Homo sapiens
  Heavy chain CDR3 for antibody 9743 (IGHV1-46)
ARDKTYPLSYGMDV

SEQ ID NO: 19487 - protein, 10 aa, Homo sapiens
  Light chain CDR3 for antibody 9744 (IGKV1-39)
QQSYSTPMYT

SEQ ID NO: 19488 - protein, 18 aa, Homo sapiens
  Heavy chain CDR3 for antibody 9744 (IGHV3-33)
ARGYNQGSGSYYNVCFDY

SEQ ID NO: 19489 - protein, 11 aa, Homo sapiens
  Light chain CDR3 for antibody 9745 (IGKV3-11)
QQRSNWPPMYT

SEQ ID NO: 19490 - protein, 17 aa, Homo sapiens
  Heavy chain CDR3 for antibody 9745 (IGHV4-34)
ARDGSGSYTHYYYGMDV

SEQ ID NO: 19491 - protein, 8 aa, Homo sapiens
  Light chain CDR3 for antibody 9746 (IGKV3-11)
LQRGNWPT

SEQ ID NO: 19492 - protein, 8 aa, Homo sapiens
  Heavy chain CDR3 for antibody 9746 (IGHV3-23)
AKETGNNY

SEQ ID NO: 19493 - protein, 9 aa, Homo sapiens
  Light chain CDR3 for antibody 9747 (IGKV1-39)
QQSYSSPFT

SEQ ID NO: 19494 - protein, 16 aa, Homo sapiens
  Heavy chain CDR3 for antibody 9747 (IGHV3-23)
AKEGMVLRYFDWLWDY

SEQ ID NO: 19495 - protein, 9 aa, Homo sapiens
  Light chain CDR3 for antibody 9748 (IGKV1-9)
QQLNSYPRT

SEQ ID NO: 19496 - protein, 12 aa, Homo sapiens
  Heavy chain CDR3 for antibody 9748 (IGHV4-59)
AIDPYSSRGFDY

SEQ ID NO: 19497 - protein, 9 aa, Homo sapiens
  Light chain CDR3 for antibody 9749 (IGKV2D-28)
MQALQTPPT

SEQ ID NO: 19498 - protein, 12 aa, Homo sapiens
  Heavy chain CDR3 for antibody 9749 (IGHV3-21)
AREGTGGNWFDP

SEQ ID NO: 19499 - protein, 9 aa, Homo sapiens
  Light chain CDR3 for antibody 9750 (IGKV1-9)
QQLISYPLT

SEQ ID NO: 19500 - protein, 16 aa, Homo sapiens
  Heavy chain CDR3 for antibody 9750 (IGHV3-20)
AREGYSSSWFDRNFDY

SEQ ID NO: 19501 - protein, 8 aa, Homo sapiens
  Light chain CDR3 for antibody 9751 (IGKV3-20)
QQYGSSLT

SEQ ID NO: 19502 - protein, 13 aa, Homo sapiens
  Heavy chain CDR3 for antibody 9751 (IGHV3-23)
ASTGDSYYYGMDV

SEQ ID NO: 19503 - protein, 9 aa, Homo sapiens
  Light chain CDR3 for antibody 9752 (IGKV1D-16)
QQYNYFPLT

SEQ ID NO: 19504 - protein, 12 aa, Homo sapiens
  Heavy chain CDR3 for antibody 9752 (IGHV1-46)
ARGLTGDHAGDI

SEQ ID NO: 19505 - protein, 9 aa, Homo sapiens
  Light chain CDR3 for antibody 9753 (IGKV3-11)
QQRSNWPYT

SEQ ID NO: 19506 - protein, 10 aa, Homo sapiens
  Heavy chain CDR3 for antibody 9753 (IGHV4-39)
ASSNWNDGPL

SEQ ID NO: 19507 - protein, 9 aa, Homo sapiens
  Light chain CDR3 for antibody 9754 (IGKV1-39)
QQYYSTPWT

SEQ ID NO: 19508 - protein, 11 aa, Homo sapiens
  Heavy chain CDR3 for antibody 9754 (IGHV3-33)
ARDTWDDYFDY

SEQ ID NO: 19509 - protein, 10 aa, Homo sapiens
  Light chain CDR3 for antibody 9755 (IGKV1-9)
QQLDSYPMYT

SEQ ID NO: 19510 - protein, 15 aa, Homo sapiens
  Heavy chain CDR3 for antibody 9755 (IGHV3-33)
ARRICSGGSCSLFDY

SEQ ID NO: 19511 - protein, 9 aa, Homo sapiens
  Light chain CDR3 for antibody 9756 (IGKV1-16)
QQYYSYPRT

SEQ ID NO: 19512 - protein, 12 aa, Homo sapiens
  Heavy chain CDR3 for antibody 9756 (IGHV3-33)
VRKWFGELYFDY

SEQ ID NO: 19513 - protein, 10 aa, Homo sapiens
  Light chain CDR3 for antibody 9757 (IGKV3-11)
QQRSNWPMYT

SEQ ID NO: 19514 - protein, 13 aa, Homo sapiens
  Heavy chain CDR3 for antibody 9757 (IGHV1-2)
ARDGVRGSFGMDV

SEQ ID NO: 19515 - protein, 9 aa, Homo sapiens
  Light chain CDR3 for antibody 9758 (IGKV1D-13)
QQFNNYPHT

SEQ ID NO: 19516 - protein, 10 aa, Homo sapiens
  Heavy chain CDR3 for antibody 9758 (IGHV3-30)
ARDNFEGMDV

SEQ ID NO: 19517 - protein, 9 aa, Homo sapiens
  Light chain CDR3 for antibody 9759 (IGKV1-37)
QRTYNAPYT

SEQ ID NO: 19518 - protein, 12 aa, Homo sapiens
  Heavy chain CDR3 for antibody 9759 (IGHV3-23)
AKEGLGSDYEPY

SEQ ID NO: 19519 - protein, 9 aa, Homo sapiens
  Light chain CDR3 for antibody 9760 (IGKV1D-16)
QQYNSYPLT

SEQ ID NO: 19520 - protein, 14 aa, Homo sapiens
  Heavy chain CDR3 for antibody 9760 (IGHV3-66)
ARSTAPAGPPDFQH

SEQ ID NO: 19521 - protein, 9 aa, Homo sapiens
  Light chain CDR3 for antibody 9761 (IGKV1-16)
QQYSSYPIT

SEQ ID NO: 19522 - protein, 12 aa, Homo sapiens
  Heavy chain CDR3 for antibody 9761 (IGHV1-46)
ARGLTGDHASDI

SEQ ID NO: 19523 - protein, 9 aa, Homo sapiens
  Light chain CDR3 for antibody 9762 (IGKV1-8)
QQYYSYPPT

SEQ ID NO: 19524 - protein, 24 aa, Homo sapiens
  Heavy chain CDR3 for antibody 9762 (IGHV3-20)
ARGRITMVRGVIIDPLDYYNGMDV

SEQ ID NO: 19525 - protein, 9 aa, Homo sapiens
  Light chain CDR3 for antibody 9763 (IGKV1-6)
LQDFHYPWT

SEQ ID NO: 19526 - protein, 9 aa, Homo sapiens
  Heavy chain CDR3 for antibody 9763 (IGHV3-30)
ARDYFHYDY

SEQ ID NO: 19527 - protein, 9 aa, Homo sapiens
  Light chain CDR3 for antibody 9764 (IGKV3D-7)
QQDYNLPWT

SEQ ID NO: 19528 - protein, 18 aa, Homo sapiens
  Heavy chain CDR3 for antibody 9764 (IGHV3-33)
ARGYNQGSGSYYNVCFDY

SEQ ID NO: 19529 - protein, 9 aa, Homo sapiens
  Light chain CDR3 for antibody 9765 (IGKV3-20)
QQYGGSLFT

SEQ ID NO: 19530 - protein, 16 aa, Homo sapiens
  Heavy chain CDR3 for antibody 9765 (IGHV3-23)
AKEGMVLRYFDWLWDY

SEQ ID NO: 19531 - protein, 8 aa, Homo sapiens
  Light chain CDR3 for antibody 9766 (IGKV1-5)
QQYNSYYT

SEQ ID NO: 19532 - protein, 17 aa, Homo sapiens
  Heavy chain CDR3 for antibody 9766 (IGHV4-39)
AREEDYFGSGSFGTFDI

SEQ ID NO: 19533 - protein, 11 aa, Homo sapiens
  Light chain CDR3 for antibody 9767 (IGKV3-11)
QQRSDWPPTWT

SEQ ID NO: 19534 - protein, 15 aa, Homo sapiens
  Heavy chain CDR3 for antibody 9767 (IGHV3-33)
ARDRVVRGVMGYFDY

SEQ ID NO: 19535 - protein, 9 aa, Homo sapiens
  Light chain CDR3 for antibody 9768 (IGKV3-11)
QQRSSWPPT

SEQ ID NO: 19536 - protein, 14 aa, Homo sapiens
  Heavy chain CDR3 for antibody 9768 (IGHV3-23)
AKSRIVGALYYFDY

SEQ ID NO: 19537 - protein, 9 aa, Homo sapiens
  Light chain CDR3 for antibody 9769 (IGKV1-17)
LQHSSYPRT

SEQ ID NO: 19538 - protein, 14 aa, Homo sapiens
  Heavy chain CDR3 for antibody 9769 (IGHV3-33)
ARDKSYPLYYGMDV

SEQ ID NO: 19539 - protein, 9 aa, Homo sapiens
  Light chain CDR3 for antibody 9770 (IGKV1D-13)
QQFNNYPYT

SEQ ID NO: 19540 - protein, 18 aa, Homo sapiens
  Heavy chain CDR3 for antibody 9770 (IGHV3-33)
ARGAYSSGWDYYYYGLDV

SEQ ID NO: 19541 - protein, 9 aa, Homo sapiens
  Light chain CDR3 for antibody 9771 (IGKV1-6)
LQDFHYPWT

SEQ ID NO: 19542 - protein, 11 aa, Homo sapiens
  Heavy chain CDR3 for antibody 9771 (IGHV3-33)
ARDKSSGWSDY

SEQ ID NO: 19543 - protein, 10 aa, Homo sapiens
  Light chain CDR3 for antibody 9772 (IGKV3-20)
QQYGRSPPVT

SEQ ID NO: 19544 - protein, 9 aa, Homo sapiens
  Heavy chain CDR3 for antibody 9772 (IGHV1-18)
ARGKDWFDP

SEQ ID NO: 19545 - protein, 8 aa, Homo sapiens
  Light chain CDR3 for antibody 9773 (IGKV3-20)
QQYGSSLT

SEQ ID NO: 19546 - protein, 14 aa, Homo sapiens
  Heavy chain CDR3 for antibody 9773 (IGHV3-15)
SIYFYGSGRDYFDY

SEQ ID NO: 19547 - protein, 10 aa, Homo sapiens
  Light chain CDR3 for antibody 9774 (IGKV3-15)
QQYNNWPPYT

SEQ ID NO: 19548 - protein, 17 aa, Homo sapiens
  Heavy chain CDR3 for antibody 9774 (IGHV3-23)
AKEGSSSSWYGGIYFDY

SEQ ID NO: 19549 - protein, 9 aa, Homo sapiens
  Light chain CDR3 for antibody 9775 (IGKV6-21)
HQSSSLPYT

SEQ ID NO: 19550 - protein, 10 aa, Homo sapiens
  Heavy chain CDR3 for antibody 9775 (IGHV3-23)
AKEGMYYDIL

SEQ ID NO: 19551 - protein, 10 aa, Homo sapiens
  Light chain CDR3 for antibody 9776 (IGKV3-20)
QQYGSSPPYT

SEQ ID NO: 19552 - protein, 11 aa, Homo sapiens
  Heavy chain CDR3 for antibody 9776 (IGHV3-33)
ARAGIAAVFDY

SEQ ID NO: 19553 - protein, 9 aa, Homo sapiens
  Light chain CDR3 for antibody 9777 (IGKV3-20)
QQYSSSIFT

SEQ ID NO: 19554 - protein, 14 aa, Homo sapiens
  Heavy chain CDR3 for antibody 9777 (IGHV3-23)
AKSRIVGALYYFDY

SEQ ID NO: 19555 - protein, 9 aa, Homo sapiens
  Light chain CDR3 for antibody 9778 (IGKV1D-16)
QQYSSYQYT

SEQ ID NO: 19556 - protein, 14 aa, Homo sapiens
  Heavy chain CDR3 for antibody 9778 (IGHV3-23)
AKSRIVGALYYFDY

SEQ ID NO: 19557 - protein, 9 aa, Homo sapiens
  Light chain CDR3 for antibody 9779 (IGKV1-9)
QQLNGYPFT

SEQ ID NO: 19558 - protein, 18 aa, Homo sapiens
  Heavy chain CDR3 for antibody 9779 (IGHV3-33)
ARDRDRYGSGTYPDAIDI

SEQ ID NO: 19559 - protein, 8 aa, Homo sapiens
  Light chain CDR3 for antibody 9780 (IGKV3D-7)
QQDYSLLT

SEQ ID NO: 19560 - protein, 19 aa, Homo sapiens
  Heavy chain CDR3 for antibody 9780 (IGHV3-33)
ARDSGYSGYDYYYYYGMDV

SEQ ID NO: 19561 - protein, 10 aa, Homo sapiens
  Light chain CDR3 for antibody 9781 (IGKV1-39)
QQSYSTPMYT

SEQ ID NO: 19562 - protein, 20 aa, Homo sapiens
  Heavy chain CDR3 for antibody 9781 (IGHV3-33)
ARDNDSSGYYDYYYYYGMDV

SEQ ID NO: 19563 - protein, 9 aa, Homo sapiens
  Light chain CDR3 for antibody 9782 (IGKV3-20)
QQYGSSPRT

SEQ ID NO: 19564 - protein, 12 aa, Homo sapiens
  Heavy chain CDR3 for antibody 9782 (IGHV4-39)
ALDEWHPSWYKY

SEQ ID NO: 19565 - protein, 9 aa, Homo sapiens
  Light chain CDR3 for antibody 9783 (IGKV1-17)
LQHNSYPYT

SEQ ID NO: 19566 - protein, 15 aa, Homo sapiens
  Heavy chain CDR3 for antibody 9783 (IGHV3-33)
ARDNILTGYSYYFDY

SEQ ID NO: 19567 - protein, 8 aa, Homo sapiens
  Light chain CDR3 for antibody 9784 (IGKV1D-13)
QQYNNYPT

SEQ ID NO: 19568 - protein, 14 aa, Homo sapiens
  Heavy chain CDR3 for antibody 9784 (IGHV3-33)
VSAISGSSYWYFAL

SEQ ID NO: 19569 - protein, 9 aa, Homo sapiens
  Light chain CDR3 for antibody 9785 (IGKV2D-28)
MQALQTPPT

SEQ ID NO: 19570 - protein, 13 aa, Homo sapiens
  Heavy chain CDR3 for antibody 9785 (IGHV3-33)
ARGDNWNDGGFDY

SEQ ID NO: 19571 - protein, 9 aa, Homo sapiens
  Light chain CDR3 for antibody 9786 (IGKV1-39)
QQSYSTPIT

SEQ ID NO: 19572 - protein, 14 aa, Homo sapiens
  Heavy chain CDR3 for antibody 9786 (IGHV3-23)
AKGGDILTGYYTDY

SEQ ID NO: 19573 - protein, 9 aa, Homo sapiens
  Light chain CDR3 for antibody 9787 (IGKV6-21)
HQSSSLPQT

SEQ ID NO: 19574 - protein, 11 aa, Homo sapiens
  Heavy chain CDR3 for antibody 9787 (IGHV3-33)
ATERDMVRGDY

SEQ ID NO: 19575 - protein, 9 aa, Homo sapiens
  Light chain CDR3 for antibody 9788 (IGKV1-16)
QQYTSYPYT

SEQ ID NO: 19576 - protein, 12 aa, Homo sapiens
  Heavy chain CDR3 for antibody 9788 (IGHV4-59)
ARKAYALYVLDV

SEQ ID NO: 19577 - protein, 8 aa, Homo sapiens
  Light chain CDR3 for antibody 9789 (IGKV3-11)
QQRGNWPS

SEQ ID NO: 19578 - protein, 19 aa, Homo sapiens
  Heavy chain CDR3 for antibody 9789 (IGHV3-30)
ARRFSGYSGYDHYYYGMDV

SEQ ID NO: 19579 - protein, 9 aa, Homo sapiens
  Light chain CDR3 for antibody 9790 (IGKV3-15)
QQYNNWPRT

SEQ ID NO: 19580 - protein, 18 aa, Homo sapiens
  Heavy chain CDR3 for antibody 9790 (IGHV3-33)
ARREGITLIFYYYYGMDV

SEQ ID NO: 19581 - protein, 10 aa, Homo sapiens
  Light chain CDR3 for antibody 9791 (IGKV1-9)
QQLDSYPMYT

SEQ ID NO: 19582 - protein, 13 aa, Homo sapiens
  Heavy chain CDR3 for antibody 9791 (IGHV3-33)
ARDQRYSSGWYDY

SEQ ID NO: 19583 - protein, 8 aa, Homo sapiens
  Light chain CDR3 for antibody 9792 (IGKV3D-7)
QQDYNSLT

SEQ ID NO: 19584 - protein, 20 aa, Homo sapiens
  Heavy chain CDR3 for antibody 9792 (IGHV3-23)
AKGMGGLRYFDWPHYYGMDV

SEQ ID NO: 19585 - protein, 9 aa, Homo sapiens
  Light chain CDR3 for antibody 9793 (IGKV1-16)
QQYKSYPYT

SEQ ID NO: 19586 - protein, 14 aa, Homo sapiens
  Heavy chain CDR3 for antibody 9793 (IGHV3-23)
AKSRIVGALYYCDY

SEQ ID NO: 19587 - protein, 9 aa, Homo sapiens
  Light chain CDR3 for antibody 9794 (IGKV1-17)
LQHNSYPYT

SEQ ID NO: 19588 - protein, 18 aa, Homo sapiens
  Heavy chain CDR3 for antibody 9794 (IGHV3-33)
ARDRYHDILTGYYMGVDY

SEQ ID NO: 19589 - protein, 8 aa, Homo sapiens
  Light chain CDR3 for antibody 9795 (IGKV3-11)
LQRGNWPT

SEQ ID NO: 19590 - protein, 20 aa, Homo sapiens
  Heavy chain CDR3 for antibody 9795 (IGHV3-33)
ARGGATLIRGLIDYYYGMDV

SEQ ID NO: 19591 - protein, 9 aa, Homo sapiens
  Light chain CDR3 for antibody 9796 (IGKV1-17)
LQHDSYPIT

SEQ ID NO: 19592 - protein, 12 aa, Homo sapiens
  Heavy chain CDR3 for antibody 9796 (IGHV3-33)
ARERGIGRYFDL

SEQ ID NO: 19593 - protein, 9 aa, Homo sapiens
  Light chain CDR3 for antibody 9797 (IGKV1-6)
QQEYNYPLT

SEQ ID NO: 19594 - protein, 12 aa, Homo sapiens
  Heavy chain CDR3 for antibody 9797 (IGHV3-30)
ARDPGYYYGLDV

SEQ ID NO: 19595 - protein, 9 aa, Homo sapiens
  Light chain CDR3 for antibody 9798 (IGKV3-20)
LQYGSSPST

SEQ ID NO: 19596 - protein, 12 aa, Homo sapiens
  Heavy chain CDR3 for antibody 9798 (IGHV3-23)
ARESGGSYSFDY

SEQ ID NO: 19597 - protein, 9 aa, Homo sapiens
  Light chain CDR3 for antibody 9799 (IGKV1-9)
QQLNSYPNT

SEQ ID NO: 19598 - protein, 16 aa, Homo sapiens
  Heavy chain CDR3 for antibody 9799 (IGHV3-23)
AKEGMVLRYFDRLWDY

SEQ ID NO: 19599 - protein, 9 aa, Homo sapiens
  Light chain CDR3 for antibody 9800 (IGKV1-6)
LQVYSYPWT

SEQ ID NO: 19600 - protein, 17 aa, Homo sapiens
  Heavy chain CDR3 for antibody 9800 (IGHV3-23)
AKDGSFYSSGWYDAFDI

SEQ ID NO: 19601 - protein, 9 aa, Homo sapiens
  Light chain CDR3 for antibody 9801 (IGKV3-20)
QQYGSSIFT

SEQ ID NO: 19602 - protein, 10 aa, Homo sapiens
  Heavy chain CDR3 for antibody 9801 (IGHV3-33)
ARENSHPLDY

SEQ ID NO: 19603 - protein, 9 aa, Homo sapiens
  Light chain CDR3 for antibody 9802 (IGKV6-21)
HQSSSLPYS

SEQ ID NO: 19604 - protein, 18 aa, Homo sapiens
  Heavy chain CDR3 for antibody 9802 (IGHV3-33)
ARDQYSGYDFYYYYGMDV

SEQ ID NO: 19605 - protein, 9 aa, Homo sapiens
  Light chain CDR3 for antibody 9803 (IGKV1D-13)
QQLNNYLFT

SEQ ID NO: 19606 - protein, 18 aa, Homo sapiens
  Heavy chain CDR3 for antibody 9803 (IGHV1-46)
ARDGDYVWGSYRSNWFDP

SEQ ID NO: 19607 - protein, 9 aa, Homo sapiens
  Light chain CDR3 for antibody 9804 (IGKV1-39)
QQSYSTPFT

SEQ ID NO: 19608 - protein, 16 aa, Homo sapiens
  Heavy chain CDR3 for antibody 9804 (IGHV3-33)
ARGAWYSNGWYGTFDI

SEQ ID NO: 19609 - protein, 9 aa, Homo sapiens
  Light chain CDR3 for antibody 9805 (IGKV3-11)
QQRSKWPPT

SEQ ID NO: 19610 - protein, 13 aa, Homo sapiens
  Heavy chain CDR3 for antibody 9805 (IGHV3-33)
ASAGNSYYNVMDV

SEQ ID NO: 19611 - protein, 9 aa, Homo sapiens
  Light chain CDR3 for antibody 9806 (IGKV1-6)
LQDFHYPWT

SEQ ID NO: 19612 - protein, 13 aa, Homo sapiens
  Heavy chain CDR3 for antibody 9806 (IGHV4-39)
ARQWPSGYWYFDL

SEQ ID NO: 19613 - protein, 9 aa, Homo sapiens
  Light chain CDR3 for antibody 9807 (IGKV2D-28)
MQALQTPGT

SEQ ID NO: 19614 - protein, 14 aa, Homo sapiens
  Heavy chain CDR3 for antibody 9807 (IGHV4-39)
ARDSGYDYYYAMDV

SEQ ID NO: 19615 - protein, 10 aa, Homo sapiens
  Light chain CDR3 for antibody 9808 (IGKV3-20)
QQYGRSPPVT

SEQ ID NO: 19616 - protein, 21 aa, Homo sapiens
  Heavy chain CDR3 for antibody 9808 (IGHV3-33)
ARKRLYDILTGYYKAYYGMDV

SEQ ID NO: 19617 - protein, 9 aa, Homo sapiens
  Light chain CDR3 for antibody 9809 (IGKV4-1)
QQYYTYPYT

SEQ ID NO: 19618 - protein, 14 aa, Homo sapiens
  Heavy chain CDR3 for antibody 9809 (IGHV3-33)
ARGYGSGSYYSFDY

SEQ ID NO: 19619 - protein, 8 aa, Homo sapiens
  Light chain CDR3 for antibody 9810 (IGKV3D-7)
QQDYNLLT

SEQ ID NO: 19620 - protein, 17 aa, Homo sapiens
  Heavy chain CDR3 for antibody 9810 (IGHV3-23)
AKEGSSSSWYGGLYFDY

SEQ ID NO: 19621 - protein, 9 aa, Homo sapiens
  Light chain CDR3 for antibody 9811 (IGKV1-33)
QQYDNLPFT

SEQ ID NO: 19622 - protein, 14 aa, Homo sapiens
  Heavy chain CDR3 for antibody 9811 (IGHV4-39)
ARDSGYDYYYAMDV

SEQ ID NO: 19623 - protein, 9 aa, Homo sapiens
  Light chain CDR3 for antibody 9812 (IGKV1-6)
QQEYNYPLT

SEQ ID NO: 19624 - protein, 9 aa, Homo sapiens
  Heavy chain CDR3 for antibody 9812 (IGHV3-66)
ARDNWGFDY

SEQ ID NO: 19625 - protein, 9 aa, Homo sapiens
  Light chain CDR3 for antibody 9813 (IGKV5-2)
LQHDKFPYT

SEQ ID NO: 19626 - protein, 12 aa, Homo sapiens
  Heavy chain CDR3 for antibody 9813 (IGHV3-53)
ARVLLWFGETDY

SEQ ID NO: 19627 - protein, 9 aa, Homo sapiens
  Light chain CDR3 for antibody 9814 (IGKV3D-7)
QQDYELPLT

SEQ ID NO: 19628 - protein, 13 aa, Homo sapiens
  Heavy chain CDR3 for antibody 9814 (IGHV3-15)
TTDRLLLFGAFDY

SEQ ID NO: 19629 - protein, 10 aa, Homo sapiens
  Light chain CDR3 for antibody 9815 (IGKV3-20)
QQYGSSPPYT

SEQ ID NO: 19630 - protein, 11 aa, Homo sapiens
  Heavy chain CDR3 for antibody 9815 (IGHV3-33)
AREGAVARFDY

SEQ ID NO: 19631 - protein, 11 aa, Homo sapiens
  Light chain CDR3 for antibody 9816 (IGKV3-11)
QQRSNWPPTWT

SEQ ID NO: 19632 - protein, 11 aa, Homo sapiens
  Heavy chain CDR3 for antibody 9816 (IGHV4-59)
ARETGDDAFDI

SEQ ID NO: 19633 - protein, 9 aa, Homo sapiens
  Light chain CDR3 for antibody 9817 (IGKV1-39)
QQSYRTPLT

SEQ ID NO: 19634 - protein, 17 aa, Homo sapiens
  Heavy chain CDR3 for antibody 9817 (IGHV4-39)
AGRLTYYYGSGSPSSDY

SEQ ID NO: 19635 - protein, 9 aa, Homo sapiens
  Light chain CDR3 for antibody 9818 (IGKV1-9)
QQGNTYSRT

SEQ ID NO: 19636 - protein, 18 aa, Homo sapiens
  Heavy chain CDR3 for antibody 9818 (IGHV6-1)
ARDQYSYGPYYYYYGMDV

SEQ ID NO: 19637 - protein, 8 aa, Homo sapiens
  Light chain CDR3 for antibody 9819 (IGKV2D-28)
MQALQTPT

SEQ ID NO: 19638 - protein, 18 aa, Homo sapiens
  Heavy chain CDR3 for antibody 9819 (IGHV3-33)
ARGGYSSGWDYYYYGMDV

SEQ ID NO: 19639 - protein, 8 aa, Homo sapiens
  Light chain CDR3 for antibody 9820 (IGKV1-5)
QQYNSYWT

SEQ ID NO: 19640 - protein, 13 aa, Homo sapiens
  Heavy chain CDR3 for antibody 9820 (IGHV3-33)
ASGYSGYAWYFDL

SEQ ID NO: 19641 - protein, 8 aa, Homo sapiens
  Light chain CDR3 for antibody 9821 (IGKV3-20)
QQYGSSLT

SEQ ID NO: 19642 - protein, 13 aa, Homo sapiens
  Heavy chain CDR3 for antibody 9821 (IGHV3-23)
ARAFFMVRGVIDF

SEQ ID NO: 19643 - protein, 9 aa, Homo sapiens
  Light chain CDR3 for antibody 9822 (IGKV1-9)
QQYISYPLT

SEQ ID NO: 19644 - protein, 10 aa, Homo sapiens
  Heavy chain CDR3 for antibody 9822 (IGHV3-20)
ATIVGPFLDV

SEQ ID NO: 19645 - protein, 10 aa, Homo sapiens
  Light chain CDR3 for antibody 9823 (IGKV3-11)
QQRSNWLMYT

SEQ ID NO: 19646 - protein, 16 aa, Homo sapiens
  Heavy chain CDR3 for antibody 9823 (IGHV3-33)
ARGGRSDWLYYYGMDV

SEQ ID NO: 19647 - protein, 10 aa, Homo sapiens
  Light chain CDR3 for antibody 9824 (IGKV3-15)
QQYNNWPPYT

SEQ ID NO: 19648 - protein, 14 aa, Homo sapiens
  Heavy chain CDR3 for antibody 9824 (IGHV1-46)
ARRGIVGALDAFDI

SEQ ID NO: 19649 - protein, 9 aa, Homo sapiens
  Light chain CDR3 for antibody 9825 (IGKV1-9)
QQLNSYPWP

SEQ ID NO: 19650 - protein, 18 aa, Homo sapiens
  Heavy chain CDR3 for antibody 9825 (IGHV3-33)
ARDRYYDILTGYYMGFDY

SEQ ID NO: 19651 - protein, 9 aa, Homo sapiens
  Light chain CDR3 for antibody 9826 (IGKV1-17)
LQHNSYPLT

SEQ ID NO: 19652 - protein, 12 aa, Homo sapiens
  Heavy chain CDR3 for antibody 9826 (IGHV3-33)
AKEGLGNDYEPY

SEQ ID NO: 19653 - protein, 9 aa, Homo sapiens
  Light chain CDR3 for antibody 9827 (IGKV6-21)
HQSSSLPYT

SEQ ID NO: 19654 - protein, 15 aa, Homo sapiens
  Heavy chain CDR3 for antibody 9827 (IGHV3-33)
ARDRVQLGYYYGMDV

SEQ ID NO: 19655 - protein, 9 aa, Homo sapiens
  Light chain CDR3 for antibody 9828 (IGKV3-11)
QQRSNWPPT

SEQ ID NO: 19656 - protein, 14 aa, Homo sapiens
  Heavy chain CDR3 for antibody 9828 (IGHV3-33)
ARWELPFYYSGMDV

SEQ ID NO: 19657 - protein, 9 aa, Homo sapiens
  Light chain CDR3 for antibody 9829 (IGKV1-39)
QQSYSTPIT

SEQ ID NO: 19658 - protein, 9 aa, Homo sapiens
  Heavy chain CDR3 for antibody 9829 (IGHV3-23)
AKEQLLFDY

SEQ ID NO: 19659 - protein, 9 aa, Homo sapiens
  Light chain CDR3 for antibody 9830 (IGKV1-6)
LQGYNYPRS

SEQ ID NO: 19660 - protein, 18 aa, Homo sapiens
  Heavy chain CDR3 for antibody 9830 (IGHV1-46)
ARDGDYVWGSYRSDWFDP

SEQ ID NO: 19661 - protein, 9 aa, Homo sapiens
  Light chain CDR3 for antibody 9831 (IGKV1-39)
QQSYSTPLT

SEQ ID NO: 19662 - protein, 23 aa, Homo sapiens
  Heavy chain CDR3 for antibody 9831 (IGHV3-11)
ARDRGITMVRGVITYYYFYGMDV

SEQ ID NO: 19663 - protein, 9 aa, Homo sapiens
  Light chain CDR3 for antibody 9832 (IGKV5-2)
LQHDNFPWT

SEQ ID NO: 19664 - protein, 15 aa, Homo sapiens
  Heavy chain CDR3 for antibody 9832 (IGHV3-23)
AKDRGWYDYYYGMDV

SEQ ID NO: 19665 - protein, 9 aa, Homo sapiens
  Light chain CDR3 for antibody 9833 (IGKV3-20)
QQYGSSPYT

SEQ ID NO: 19666 - protein, 17 aa, Homo sapiens
  Heavy chain CDR3 for antibody 9833 (IGHV3-33)
ARGEQWLGYYYYCGMDV

SEQ ID NO: 19667 - protein, 8 aa, Homo sapiens
  Light chain CDR3 for antibody 9834 (IGKV1-5)
QQYNSYYT

SEQ ID NO: 19668 - protein, 17 aa, Homo sapiens
  Heavy chain CDR3 for antibody 9834 (IGHV3-23)
AKGNYGSGSYYNGDFQH

SEQ ID NO: 19669 - protein, 9 aa, Homo sapiens
  Light chain CDR3 for antibody 9835 (IGKV3-11)
QQRSSWPPT

SEQ ID NO: 19670 - protein, 13 aa, Homo sapiens
  Heavy chain CDR3 for antibody 9835 (IGHV3-33)
ARDQRYSSGWYDY

SEQ ID NO: 19671 - protein, 9 aa, Homo sapiens
  Light chain CDR3 for antibody 9836 (IGKV4-1)
QQYYSYPWT

SEQ ID NO: 19672 - protein, 14 aa, Homo sapiens
  Heavy chain CDR3 for antibody 9836 (IGHV3-33)
AREGYSSGWDYFDH

SEQ ID NO: 19673 - protein, 9 aa, Homo sapiens
  Light chain CDR3 for antibody 9837 (IGKV6-21)
HQSSSLPYT

SEQ ID NO: 19674 - protein, 10 aa, Homo sapiens
  Heavy chain CDR3 for antibody 9837 (IGHV3-23)
AKDRYGDYVY

SEQ ID NO: 19675 - protein, 8 aa, Homo sapiens
  Light chain CDR3 for antibody 9838 (IGKV3-15)
QQYNNWPT

SEQ ID NO: 19676 - protein, 11 aa, Homo sapiens
  Heavy chain CDR3 for antibody 9838 (IGHV3-33)
ARDILTAFLDH

SEQ ID NO: 19677 - protein, 9 aa, Homo sapiens
  Light chain CDR3 for antibody 9839 (IGKV2-30)
MQGTHWPLT

SEQ ID NO: 19678 - protein, 12 aa, Homo sapiens
  Heavy chain CDR3 for antibody 9839 (IGHV3-33)
AKDPGWQQLAEY

SEQ ID NO: 19679 - protein, 8 aa, Homo sapiens
  Light chain CDR3 for antibody 9840 (IGKV3D-7)
QQDYHLLT

SEQ ID NO: 19680 - protein, 17 aa, Homo sapiens
  Heavy chain CDR3 for antibody 9840 (IGHV3-23)
AKDGSFYSSGWYDAFDI

SEQ ID NO: 19681 - protein, 9 aa, Homo sapiens
  Light chain CDR3 for antibody 9841 (IGKV1-6)
QQEYNYPLT

SEQ ID NO: 19682 - protein, 12 aa, Homo sapiens
  Heavy chain CDR3 for antibody 9841 (IGHV3-33)
ARGYFGSGYAHF

SEQ ID NO: 19683 - protein, 9 aa, Homo sapiens
  Light chain CDR3 for antibody 9842 (IGKV3-15)
QQYNNWPRT

SEQ ID NO: 19684 - protein, 15 aa, Homo sapiens
  Heavy chain CDR3 for antibody 9842 (IGHV1-18)
ARRSPNWGHYYGRDV

SEQ ID NO: 19685 - protein, 9 aa, Homo sapiens
  Light chain CDR3 for antibody 9843 (IGKV1-9)
QQLKSYPYT

SEQ ID NO: 19686 - protein, 12 aa, Homo sapiens
  Heavy chain CDR3 for antibody 9843 (IGHV3-23)
AKEYDILTGYFH

SEQ ID NO: 19687 - protein, 9 aa, Homo sapiens
  Light chain CDR3 for antibody 9844 (IGKV1-9)
QQYNTYSRT

SEQ ID NO: 19688 - protein, 11 aa, Homo sapiens
  Heavy chain CDR3 for antibody 9844 (IGHV3-33)
ARGSGSYAFDY

SEQ ID NO: 19689 - protein, 8 aa, Homo sapiens
  Light chain CDR3 for antibody 9845 (IGKV6-21)
HQSSSLPT

SEQ ID NO: 19690 - protein, 14 aa, Homo sapiens
  Heavy chain CDR3 for antibody 9845 (IGHV3-74)
ARDNILTAYYLFDY

SEQ ID NO: 19691 - protein, 9 aa, Homo sapiens
  Light chain CDR3 for antibody 9846 (IGKV1-17)
LHSNNYPWT

SEQ ID NO: 19692 - protein, 14 aa, Homo sapiens
  Heavy chain CDR3 for antibody 9846 (IGHV3-33)
ARTTAAAGPRDFQH

SEQ ID NO: 19693 - protein, 9 aa, Homo sapiens
  Light chain CDR3 for antibody 9847 (IGKV1-9)
QQVKGYPYT

SEQ ID NO: 19694 - protein, 7 aa, Homo sapiens
  Heavy chain CDR3 for antibody 9847 (IGHV1-46)
AREGGDY

SEQ ID NO: 19695 - protein, 9 aa, Homo sapiens
  Light chain CDR3 for antibody 9848 (IGKV1-17)
LHSNNYPWT

SEQ ID NO: 19696 - protein, 10 aa, Homo sapiens
  Heavy chain CDR3 for antibody 9848 (IGHV3-33)
ARDGSGSQPI

SEQ ID NO: 19697 - protein, 9 aa, Homo sapiens
  Light chain CDR3 for antibody 9849 (IGKV1-6)
LQDFHYPWT

SEQ ID NO: 19698 - protein, 10 aa, Homo sapiens
  Heavy chain CDR3 for antibody 9849 (IGHV3-23)
AKGDRWRFDP

SEQ ID NO: 19699 - protein, 9 aa, Homo sapiens
  Light chain CDR3 for antibody 9850 (IGKV1-33)
QQYDNLPFT

SEQ ID NO: 19700 - protein, 8 aa, Homo sapiens
  Heavy chain CDR3 for antibody 9850 (IGHV3-23)
AETFLFDY

SEQ ID NO: 19701 - protein, 8 aa, Homo sapiens
  Light chain CDR3 for antibody 9851 (IGKV1-5)
QQYNSYYT

SEQ ID NO: 19702 - protein, 17 aa, Homo sapiens
  Heavy chain CDR3 for antibody 9851 (IGHV4-59)
ARDRELLWFGEFGGMDV

SEQ ID NO: 19703 - protein, 9 aa, Homo sapiens
  Light chain CDR3 for antibody 9852 (IGKV1-16)
QQYYSYPRT

SEQ ID NO: 19704 - protein, 9 aa, Homo sapiens
  Heavy chain CDR3 for antibody 9852 (IGHV3-20)
ASIRGYFDY

SEQ ID NO: 19705 - protein, 9 aa, Homo sapiens
  Light chain CDR3 for antibody 9853 (IGKV1-6)
LQDYSYPWT

SEQ ID NO: 19706 - protein, 20 aa, Homo sapiens
  Heavy chain CDR3 for antibody 9853 (IGHV3-h)
ARDRCSSTSCYGYYYYGMDV

SEQ ID NO: 19707 - protein, 10 aa, Homo sapiens
  Light chain CDR3 for antibody 9854 (IGKV3-20)
QQYGRSPPVT

SEQ ID NO: 19708 - protein, 12 aa, Homo sapiens
  Heavy chain CDR3 for antibody 9854 (IGHV3-33)
ARVDTAAPYFDY

SEQ ID NO: 19709 - protein, 9 aa, Homo sapiens
  Light chain CDR3 for antibody 9855 (IGKV2-30)
MQGTHWPLT

SEQ ID NO: 19710 - protein, 17 aa, Homo sapiens
  Heavy chain CDR3 for antibody 9855 (IGHV3-23)
AKDRDWNDGQYYFGMDV

SEQ ID NO: 19711 - protein, 8 aa, Homo sapiens
  Light chain CDR3 for antibody 9856 (IGKV2D-28)
MQALQTPT

SEQ ID NO: 19712 - protein, 17 aa, Homo sapiens
  Heavy chain CDR3 for antibody 9856 (IGHV1-18)
ARERYYGSGIYKYAMDV

SEQ ID NO: 19713 - protein, 9 aa, Homo sapiens
  Light chain CDR3 for antibody 9857 (IGKV5-2)
LQHDNFPWT

SEQ ID NO: 19714 - protein, 6 aa, Homo sapiens
  Heavy chain CDR3 for antibody 9857 (IGHV1-18)
ARDDIL

SEQ ID NO: 19715 - protein, 9 aa, Homo sapiens
  Light chain CDR3 for antibody 9858 (IGKV3-15)
QQYNNWPLT

SEQ ID NO: 19716 - protein, 16 aa, Homo sapiens
  Heavy chain CDR3 for antibody 9858 (IGHV1-46)
ARGGGYSESYSNWFDP

SEQ ID NO: 19717 - protein, 9 aa, Homo sapiens
  Light chain CDR3 for antibody 9859 (IGKV1-33)
QQYDNLPFT

SEQ ID NO: 19718 - protein, 12 aa, Homo sapiens
  Heavy chain CDR3 for antibody 9859 (IGHV3-33)
ASRDILTGYLGY

SEQ ID NO: 19719 - protein, 9 aa, Homo sapiens
  Light chain CDR3 for antibody 9860 (IGKV1-6)
LQDFNYPRT

SEQ ID NO: 19720 - protein, 13 aa, Homo sapiens
  Heavy chain CDR3 for antibody 9860 (IGHV4-61)
ASRYSSGWYPFDY

SEQ ID NO: 19721 - protein, 9 aa, Homo sapiens
  Light chain CDR3 for antibody 9861 (IGKV1-17)
QQYIRYPYT

SEQ ID NO: 19722 - protein, 18 aa, Homo sapiens
  Heavy chain CDR3 for antibody 9861 (IGHV4-59)
ARDGYSGYDYYYYYGMDV

SEQ ID NO: 19723 - protein, 9 aa, Homo sapiens
  Light chain CDR3 for antibody 9862 (IGKV1D-13)
QHFNNYMYT

SEQ ID NO: 19724 - protein, 20 aa, Homo sapiens
  Heavy chain CDR3 for antibody 9862 (IGHV3-23)
AKGMGGLRYFDWPHYYGMDV

SEQ ID NO: 19725 - protein, 9 aa, Homo sapiens
  Light chain CDR3 for antibody 9863 (IGKV1D-13)
QQFNNYPST

SEQ ID NO: 19726 - protein, 7 aa, Homo sapiens
  Heavy chain CDR3 for antibody 9863 (IGHV3-33)
ARELFNY

SEQ ID NO: 19727 - protein, 8 aa, Homo sapiens
  Light chain CDR3 for antibody 9864 (IGKV2D-28)
MQALQTPT

SEQ ID NO: 19728 - protein, 13 aa, Homo sapiens
  Heavy chain CDR3 for antibody 9864 (IGHV4-39)
ARREVVGGRGFDY

SEQ ID NO: 19729 - protein, 9 aa, Homo sapiens
  Light chain CDR3 for antibody 9865 (IGKV1-17)
LQQSSYPWT

SEQ ID NO: 19730 - protein, 17 aa, Homo sapiens
  Heavy chain CDR3 for antibody 9865 (IGHV1-18)
ARDEGYDILTGYPHFDY

SEQ ID NO: 19731 - protein, 10 aa, Homo sapiens
  Light chain CDR3 for antibody 9866 (IGKV1-39)
QQSYSSPMYT

SEQ ID NO: 19732 - protein, 18 aa, Homo sapiens
  Heavy chain CDR3 for antibody 9866 (IGHV3-33)
ARDEYYGSGIYYNYGMDV

SEQ ID NO: 19733 - protein, 9 aa, Homo sapiens
  Light chain CDR3 for antibody 9867 (IGKV1-17)
LQYNSYPWT

SEQ ID NO: 19734 - protein, 14 aa, Homo sapiens
  Heavy chain CDR3 for antibody 9867 (IGHV3-33)
ARASSESSYWYFDL

SEQ ID NO: 19735 - protein, 9 aa, Homo sapiens
  Light chain CDR3 for antibody 9868 (IGKV6-21)
HQSTSLPFT

SEQ ID NO: 19736 - protein, 18 aa, Homo sapiens
  Heavy chain CDR3 for antibody 9868 (IGHV4-39)
ARGALTYYDILTGYFFDY

SEQ ID NO: 19737 - protein, 9 aa, Homo sapiens
  Light chain CDR3 for antibody 9869 (IGKV1-16)
QQYNSYPIT

SEQ ID NO: 19738 - protein, 10 aa, Homo sapiens
  Heavy chain CDR3 for antibody 9869 (IGHV4-59)
ARVVRGVFDY

SEQ ID NO: 19739 - protein, 9 aa, Homo sapiens
  Light chain CDR3 for antibody 9870 (IGKV6-21)
HQSSSFPYT

SEQ ID NO: 19740 - protein, 15 aa, Homo sapiens
  Heavy chain CDR3 for antibody 9870 (IGHV3-33)
ARDTGYSGSWNWFDP

SEQ ID NO: 19741 - protein, 9 aa, Homo sapiens
  Light chain CDR3 for antibody 9871 (IGKV6-21)
HQSSSLPLT

SEQ ID NO: 19742 - protein, 15 aa, Homo sapiens
  Heavy chain CDR3 for antibody 9871 (IGHV3-74)
SRGSGSHYFYYGMDV

SEQ ID NO: 19743 - protein, 10 aa, Homo sapiens
  Light chain CDR3 for antibody 9872 (IGKV3-11)
QQRSNWPIWT

SEQ ID NO: 19744 - protein, 14 aa, Homo sapiens
  Heavy chain CDR3 for antibody 9872 (IGHV3-33)
ARGLEWGGDNWFDP

SEQ ID NO: 19745 - protein, 9 aa, Homo sapiens
  Light chain CDR3 for antibody 9873 (IGKV1-9)
QQYNSYPYT

SEQ ID NO: 19746 - protein, 13 aa, Homo sapiens
  Heavy chain CDR3 for antibody 9873 (IGHV3-33)
VRRIAVAGTEGDC

SEQ ID NO: 19747 - protein, 9 aa, Homo sapiens
  Light chain CDR3 for antibody 9874 (IGKV3-20)
QQYGRSPRT

SEQ ID NO: 19748 - protein, 16 aa, Homo sapiens
  Heavy chain CDR3 for antibody 9874 (IGHV4-59)
ARGRYFDWLLGDVFDI

SEQ ID NO: 19749 - protein, 9 aa, Homo sapiens
  Light chain CDR3 for antibody 9875 (IGKV3D-7)
QQDYNLPYT

SEQ ID NO: 19750 - protein, 14 aa, Homo sapiens
  Heavy chain CDR3 for antibody 9875 (IGHV3-33)
AREEDYYYHYDMDV

SEQ ID NO: 19751 - protein, 10 aa, Homo sapiens
  Light chain CDR3 for antibody 9876 (IGKV3-11)
QQRSNWPIFT

SEQ ID NO: 19752 - protein, 14 aa, Homo sapiens
  Heavy chain CDR3 for antibody 9876 (IGHV1-24)
ATWLPLYYYYGMDV

SEQ ID NO: 19753 - protein, 8 aa, Homo sapiens
  Light chain CDR3 for antibody 9877 (IGKV3-11)
QQRGNWPS

SEQ ID NO: 19754 - protein, 15 aa, Homo sapiens
  Heavy chain CDR3 for antibody 9877 (IGHV3-33)
ARRGYNDYDPYGMDV

SEQ ID NO: 19755 - protein, 8 aa, Homo sapiens
  Light chain CDR3 for antibody 9878 (IGKV1-5)
QQYHSYYT

SEQ ID NO: 19756 - protein, 14 aa, Homo sapiens
  Heavy chain CDR3 for antibody 9878 (IGHV1-18)
ARCFGSGSYGWFDP

SEQ ID NO: 19757 - protein, 10 aa, Homo sapiens
  Light chain CDR3 for antibody 9879 (IGKV3-20)
QQYGRSPPVT

SEQ ID NO: 19758 - protein, 11 aa, Homo sapiens
  Heavy chain CDR3 for antibody 9879 (IGHV4-59)
AREMGHDTFDI

SEQ ID NO: 19759 - protein, 10 aa, Homo sapiens
  Light chain CDR3 for antibody 9880 (IGKV3-20)
QQYGSSPPYT

SEQ ID NO: 19760 - protein, 26 aa, Homo sapiens
  Heavy chain CDR3 for antibody 9880 (IGHV4-39)
ARQGLLWFGDLKAYDSSGYYYGYFHH

SEQ ID NO: 19761 - protein, 8 aa, Homo sapiens
  Light chain CDR3 for antibody 9881 (IGKV6-21)
HQSSSLPT

SEQ ID NO: 19762 - protein, 10 aa, Homo sapiens
  Heavy chain CDR3 for antibody 9881 (IGHV3-33)
ARENSTPLDY

SEQ ID NO: 19763 - protein, 9 aa, Homo sapiens
  Light chain CDR3 for antibody 9882 (IGKV2D-24)
TQATQFPHT

SEQ ID NO: 19764 - protein, 17 aa, Homo sapiens
  Heavy chain CDR3 for antibody 9882 (IGHV1-18)
ATEGYDILPGYYNVLDY

SEQ ID NO: 19765 - protein, 8 aa, Homo sapiens
  Light chain CDR3 for antibody 9883 (IGKV6-21)
HQSSSLPT

SEQ ID NO: 19766 - protein, 11 aa, Homo sapiens
  Heavy chain CDR3 for antibody 9883 (IGHV3-33)
ARAGIAALFDY

SEQ ID NO: 19767 - protein, 8 aa, Homo sapiens
  Light chain CDR3 for antibody 9884 (IGKV6-21)
HQSSSLYT

SEQ ID NO: 19768 - protein, 8 aa, Homo sapiens
  Heavy chain CDR3 for antibody 9884 (IGHV3-23)
AKETGNNY

SEQ ID NO: 19769 - protein, 9 aa, Homo sapiens
  Light chain CDR3 for antibody 9885 (IGKV3-11)
QQRSNWPLT

SEQ ID NO: 19770 - protein, 23 aa, Homo sapiens
  Heavy chain CDR3 for antibody 9885 (IGHV1-18)
ARNLHYDILTGYFPYYFYYGMDV

SEQ ID NO: 19771 - protein, 9 aa, Homo sapiens
  Light chain CDR3 for antibody 9886 (IGKV1-16)
QQYNSYPYT

SEQ ID NO: 19772 - protein, 15 aa, Homo sapiens
  Heavy chain CDR3 for antibody 9886 (IGHV3-33)
ARYRGWKAPVYGMDV

SEQ ID NO: 19773 - protein, 9 aa, Homo sapiens
  Light chain CDR3 for antibody 9887 (IGKV2D-28)
MQALQTPWT

SEQ ID NO: 19774 - protein, 12 aa, Homo sapiens
  Heavy chain CDR3 for antibody 9887 (IGHV4-39)
ARHPRYLDAFDI

SEQ ID NO: 19775 - protein, 9 aa, Homo sapiens
  Light chain CDR3 for antibody 9888 (IGKV1-39)
QQSYSTPLT

SEQ ID NO: 19776 - protein, 13 aa, Homo sapiens
  Heavy chain CDR3 for antibody 9888 (IGHV3-30)
ARVGDSVMVPFDY

SEQ ID NO: 19777 - protein, 8 aa, Homo sapiens
  Light chain CDR3 for antibody 9889 (IGKV3-20)
QQYGRSFT

SEQ ID NO: 19778 - protein, 13 aa, Homo sapiens
  Heavy chain CDR3 for antibody 9889 (IGHV3-11)
ARDEGYRGYVLDT

SEQ ID NO: 19779 - protein, 9 aa, Homo sapiens
  Light chain CDR3 for antibody 9890 (IGKV1-16)
QHYNDYPFT

SEQ ID NO: 19780 - protein, 14 aa, Homo sapiens
  Heavy chain CDR3 for antibody 9890 (IGHV3-33)
ARDREQQLVRYFDY

SEQ ID NO: 19781 - protein, 8 aa, Homo sapiens
  Light chain CDR3 for antibody 9891 (IGKV3-11)
QQRSNWWT

SEQ ID NO: 19782 - protein, 11 aa, Homo sapiens
  Heavy chain CDR3 for antibody 9891 (IGHV3-33)
ARARYTTGLDY

SEQ ID NO: 19783 - protein, 9 aa, Homo sapiens
  Light chain CDR3 for antibody 9892 (IGKV1-6)
LQDYKSPFT

SEQ ID NO: 19784 - protein, 19 aa, Homo sapiens
  Heavy chain CDR3 for antibody 9892 (IGHV3-33)
ARGPYYDILTGYGYYGMDV

SEQ ID NO: 19785 - protein, 10 aa, Homo sapiens
  Light chain CDR3 for antibody 9893 (IGKV3-11)
QQRSNWPMYT

SEQ ID NO: 19786 - protein, 18 aa, Homo sapiens
  Heavy chain CDR3 for antibody 9893 (IGHV3-23)
AKEGDYYGSGSYWGYFDP

SEQ ID NO: 19787 - protein, 9 aa, Homo sapiens
  Light chain CDR3 for antibody 9894 (IGKV4-1)
QQYYTTPPT

SEQ ID NO: 19788 - protein, 16 aa, Homo sapiens
  Heavy chain CDR3 for antibody 9894 (IGHV3-33)
ARDNFGSGSYYSHFHY

SEQ ID NO: 19789 - protein, 9 aa, Homo sapiens
  Light chain CDR3 for antibody 9895 (IGKV1-9)
QQLDNYLFT

SEQ ID NO: 19790 - protein, 13 aa, Homo sapiens
  Heavy chain CDR3 for antibody 9895 (IGHV3-23)
ASPFNWNDGFFDY

SEQ ID NO: 19791 - protein, 9 aa, Homo sapiens
  Light chain CDR3 for antibody 9896 (IGKV3-15)
QQYNNWPPT

SEQ ID NO: 19792 - protein, 13 aa, Homo sapiens
  Heavy chain CDR3 for antibody 9896 (IGHV4-4)
ARERGIAAAGPDY

SEQ ID NO: 19793 - protein, 10 aa, Homo sapiens
  Light chain CDR3 for antibody 9897 (IGKV1-9)
QQLDSYPMYT

SEQ ID NO: 19794 - protein, 9 aa, Homo sapiens
  Heavy chain CDR3 for antibody 9897 (IGHV3-33)
ARATVGVDY

SEQ ID NO: 19795 - protein, 10 aa, Homo sapiens
  Light chain CDR3 for antibody 9898 (IGKV3-11)
QQRSNWPILT

SEQ ID NO: 19796 - protein, 19 aa, Homo sapiens
  Heavy chain CDR3 for antibody 9898 (IGHV3-33)
AREDYYGSGSYYNEDWFDP

SEQ ID NO: 19797 - protein, 9 aa, Homo sapiens
  Light chain CDR3 for antibody 9899 (IGKV3-20)
QQYGSPPYT

SEQ ID NO: 19798 - protein, 16 aa, Homo sapiens
  Heavy chain CDR3 for antibody 9899 (IGHV3-33)
AKYAGYPNYDYSGMDV

SEQ ID NO: 19799 - protein, 9 aa, Homo sapiens
  Light chain CDR3 for antibody 9900 (IGKV3D-7)
QQDYNLPWT

SEQ ID NO: 19800 - protein, 18 aa, Homo sapiens
  Heavy chain CDR3 for antibody 9900 (IGHV3-30)
ARDRHHDILTGYSDAFEI

SEQ ID NO: 19801 - protein, 10 aa, Homo sapiens
  Light chain CDR3 for antibody 9901 (IGKV1-39)
QQSYSTPMYT

SEQ ID NO: 19802 - protein, 14 aa, Homo sapiens
  Heavy chain CDR3 for antibody 9901 (IGHV3-33)
AKDRYRGYEGLFDY

SEQ ID NO: 19803 - protein, 9 aa, Homo sapiens
  Light chain CDR3 for antibody 9902 (IGKV1-6)
LQAYNYPRT

SEQ ID NO: 19804 - protein, 12 aa, Homo sapiens
  Heavy chain CDR3 for antibody 9902 (IGHV3-33)
ARKGYDMHAFDI

SEQ ID NO: 19805 - protein, 9 aa, Homo sapiens
  Light chain CDR3 for antibody 9903 (IGKV6-21)
HQSTSLPFT

SEQ ID NO: 19806 - protein, 18 aa, Homo sapiens
  Heavy chain CDR3 for antibody 9903 (IGHV4-59)
AREGHYYTSGSYYKAFDY

SEQ ID NO: 19807 - protein, 9 aa, Homo sapiens
  Light chain CDR3 for antibody 9904 (IGKV2D-28)
MQALQTPPT

SEQ ID NO: 19808 - protein, 18 aa, Homo sapiens
  Heavy chain CDR3 for antibody 9904 (IGHV3-13)
ARDYYGSGSLYYYYGMDV

SEQ ID NO: 19809 - protein, 9 aa, Homo sapiens
  Light chain CDR3 for antibody 9905 (IGKV2D-24)
TQATQFPHT

SEQ ID NO: 19810 - protein, 15 aa, Homo sapiens
  Heavy chain CDR3 for antibody 9905 (IGHV1-46)
ARGRFFDWLLSPFDY

SEQ ID NO: 19811 - protein, 9 aa, Homo sapiens
  Light chain CDR3 for antibody 9906 (IGKV5-2)
LQHDKFPYT

SEQ ID NO: 19812 - protein, 14 aa, Homo sapiens
  Heavy chain CDR3 for antibody 9906 (IGHV3-33)
ARGYYGSGSFPFDY

SEQ ID NO: 19813 - protein, 9 aa, Homo sapiens
  Light chain CDR3 for antibody 9907 (IGKV3D-7)
QQDYTLPRT

SEQ ID NO: 19814 - protein, 18 aa, Homo sapiens
  Heavy chain CDR3 for antibody 9907 (IGHV3-33)
ARDQGIVVLPGAPWYFDP

SEQ ID NO: 19815 - protein, 9 aa, Homo sapiens
  Light chain CDR3 for antibody 9908 (IGKV1-17)
LQHNSYPYT

SEQ ID NO: 19816 - protein, 17 aa, Homo sapiens
  Heavy chain CDR3 for antibody 9908 (IGHV3-33)
ARELRYFDLLLSDAFDI

SEQ ID NO: 19817 - protein, 10 aa, Homo sapiens
  Light chain CDR3 for antibody 9909 (IGKV1-17)
LQHNSYPMYT

SEQ ID NO: 19818 - protein, 12 aa, Homo sapiens
  Heavy chain CDR3 for antibody 9909 (IGHV3-33)
ARDSSGWSHFDY

SEQ ID NO: 19819 - protein, 9 aa, Homo sapiens
  Light chain CDR3 for antibody 9910 (IGKV1-27)
QKYNSAPYT

SEQ ID NO: 19820 - protein, 18 aa, Homo sapiens
  Heavy chain CDR3 for antibody 9910 (IGHV3-33)
AREEYFGSGSYYRNWFDP

SEQ ID NO: 19821 - protein, 9 aa, Homo sapiens
  Light chain CDR3 for antibody 9911 (IGKV1-39)
QQSYSTPYT

SEQ ID NO: 19822 - protein, 12 aa, Homo sapiens
  Heavy chain CDR3 for antibody 9911 (IGHV3-30)
ARDYGSGSFFDY

SEQ ID NO: 19823 - protein, 9 aa, Homo sapiens
  Light chain CDR3 for antibody 9912 (IGKV3-15)
QQYHNWPRT

SEQ ID NO: 19824 - protein, 12 aa, Homo sapiens
  Heavy chain CDR3 for antibody 9912 (IGHV3-33)
TRGYSSKSYFDY

SEQ ID NO: 19825 - protein, 9 aa, Homo sapiens
  Light chain CDR3 for antibody 9913 (IGKV1-17)
LQHNSYPPT

SEQ ID NO: 19826 - protein, 17 aa, Homo sapiens
  Heavy chain CDR3 for antibody 9913 (IGHV4-39)
AGRLTYYYGSGSPSSDY

SEQ ID NO: 19827 - protein, 8 aa, Homo sapiens
  Light chain CDR3 for antibody 9914 (IGKV6-21)
HQSSSLPT

SEQ ID NO: 19828 - protein, 18 aa, Homo sapiens
  Heavy chain CDR3 for antibody 9914 (IGHV3-33)
ARGLLWFGVSYYYYGMDV

SEQ ID NO: 19829 - protein, 9 aa, Homo sapiens
  Light chain CDR3 for antibody 9915 (IGKV1-16)
QHYNDYPFT

SEQ ID NO: 19830 - protein, 13 aa, Homo sapiens
  Heavy chain CDR3 for antibody 9915 (IGHV4-39)
ARHVLLWFGEFDP

SEQ ID NO: 19831 - protein, 9 aa, Homo sapiens
  Light chain CDR3 for antibody 9916 (IGKV1-27)
QKYNSAPHT

SEQ ID NO: 19832 - protein, 13 aa, Homo sapiens
  Heavy chain CDR3 for antibody 9916 (IGHV3-23)
ARDSTLVRGVFPY

SEQ ID NO: 19833 - protein, 9 aa, Homo sapiens
  Light chain CDR3 for antibody 9917 (IGKV1-9)
LHSNNYPWT

SEQ ID NO: 19834 - protein, 20 aa, Homo sapiens
  Heavy chain CDR3 for antibody 9917 (IGHV3-33)
ARDNDSSGYYDYYYYYGMDV

SEQ ID NO: 19835 - protein, 10 aa, Homo sapiens
  Light chain CDR3 for antibody 9918 (IGKV3-20)
QQYGRSPPVP

SEQ ID NO: 19836 - protein, 14 aa, Homo sapiens
  Heavy chain CDR3 for antibody 9918 (IGHV3-33)
AREGYSSNWYDFDY

SEQ ID NO: 19837 - protein, 10 aa, Homo sapiens
  Light chain CDR3 for antibody 9919 (IGKV3-11)
QQRSNWPPWT

SEQ ID NO: 19838 - protein, 10 aa, Homo sapiens
  Heavy chain CDR3 for antibody 9919 (IGHV3-23)
AKDRYGDYVY

SEQ ID NO: 19839 - protein, 9 aa, Homo sapiens
  Light chain CDR3 for antibody 9920 (IGKV1-6)
LQDYNYPYT

SEQ ID NO: 19840 - protein, 18 aa, Homo sapiens
  Heavy chain CDR3 for antibody 9920 (IGHV1-8)
ARGAWYYYGSGSYYTFDY

SEQ ID NO: 19841 - protein, 10 aa, Homo sapiens
  Light chain CDR3 for antibody 9921 (IGKV3-11)
QQRSNWPALT

SEQ ID NO: 19842 - protein, 16 aa, Homo sapiens
  Heavy chain CDR3 for antibody 9921 (IGHV3-33)
ARGDDILTHQYYGVDV

SEQ ID NO: 19843 - protein, 9 aa, Homo sapiens
  Light chain CDR3 for antibody 9922 (IGKV1-16)
QHYNDYPFT

SEQ ID NO: 19844 - protein, 11 aa, Homo sapiens
  Heavy chain CDR3 for antibody 9922 (IGHV3-33)
ARGSGSYAFDY

SEQ ID NO: 19845 - protein, 10 aa, Homo sapiens
  Light chain CDR3 for antibody 9923 (IGKV1-39)
QQSYSSPMYT

SEQ ID NO: 19846 - protein, 15 aa, Homo sapiens
  Heavy chain CDR3 for antibody 9923 (IGHV3-33)
ARAYDLPHYYYGMDV

SEQ ID NO: 19847 - protein, 9 aa, Homo sapiens
  Light chain CDR3 for antibody 9924 (IGKV1-6)
QQEYNYPLT

SEQ ID NO: 19848 - protein, 11 aa, Homo sapiens
  Heavy chain CDR3 for antibody 9924 (IGHV1-18)
SRGGFSVGYDS

SEQ ID NO: 19849 - protein, 9 aa, Homo sapiens
  Light chain CDR3 for antibody 9925 (IGKV1D-16)
LHSNNYPWT

SEQ ID NO: 19850 - protein, 12 aa, Homo sapiens
  Heavy chain CDR3 for antibody 9925 (IGHV3-23)
AKEYDILTGYFH

SEQ ID NO: 19851 - protein, 8 aa, Homo sapiens
  Light chain CDR3 for antibody 9926 (IGKV1D-13)
QQFNNYYT

SEQ ID NO: 19852 - protein, 14 aa, Homo sapiens
  Heavy chain CDR3 for antibody 9926 (IGHV1-46)
ARKGIVGAFDAFDI

SEQ ID NO: 19853 - protein, 9 aa, Homo sapiens
  Light chain CDR3 for antibody 9927 (IGKV1-39)
QQLNRYPYT

SEQ ID NO: 19854 - protein, 10 aa, Homo sapiens
  Heavy chain CDR3 for antibody 9927 (IGHV3-23)
AKGDRWRFDP

SEQ ID NO: 19855 - protein, 9 aa, Homo sapiens
  Light chain CDR3 for antibody 9928 (IGKV2-30)
MQGTHWPLT

SEQ ID NO: 19856 - protein, 19 aa, Homo sapiens
  Heavy chain CDR3 for antibody 9928 (IGHV1-18)
ARGGHIGVVTAFHGYGMDV

SEQ ID NO: 19857 - protein, 9 aa, Homo sapiens
  Light chain CDR3 for antibody 9929 (IGKV1-39)
QQSYSTPLT

SEQ ID NO: 19858 - protein, 16 aa, Homo sapiens
  Heavy chain CDR3 for antibody 9929 (IGHV3-21)
AKDAFYYGSGSHLFDY

SEQ ID NO: 19859 - protein, 9 aa, Homo sapiens
  Light chain CDR3 for antibody 9930 (IGKV2D-24)
TQATQFPHT

SEQ ID NO: 19860 - protein, 17 aa, Homo sapiens
  Heavy chain CDR3 for antibody 9930 (IGHV1-8)
ARGDYYGSGSPYWYFDL

SEQ ID NO: 19861 - protein, 9 aa, Homo sapiens
  Light chain CDR3 for antibody 9931 (IGKV4-1)
QQYYTTPPT

SEQ ID NO: 19862 - protein, 18 aa, Homo sapiens
  Heavy chain CDR3 for antibody 9931 (IGHV4-59)
AREGDYVWGSYRPNWFDP

SEQ ID NO: 19863 - protein, 9 aa, Homo sapiens
  Light chain CDR3 for antibody 9932 (IGKV1-9)
QQLNSYPWT

SEQ ID NO: 19864 - protein, 15 aa, Homo sapiens
  Heavy chain CDR3 for antibody 9932 (IGHV1-18)
ARGYCSSTSCYYFDY

SEQ ID NO: 19865 - protein, 6 aa, Homo sapiens
  Light chain CDR3 for antibody 9933 (IGKV3-20)
QQYGST

SEQ ID NO: 19866 - protein, 17 aa, Homo sapiens
  Heavy chain CDR3 for antibody 9933 (IGHV3-33)
AREGYYYGSGSYHFFDY

SEQ ID NO: 19867 - protein, 10 aa, Homo sapiens
  Light chain CDR3 for antibody 9934 (IGKV1-27)
QKYNSAPMYT

SEQ ID NO: 19868 - protein, 12 aa, Homo sapiens
  Heavy chain CDR3 for antibody 9934 (IGHV1-46)
ARGLTGDHAVDI

SEQ ID NO: 19869 - protein, 10 aa, Homo sapiens
  Light chain CDR3 for antibody 9935 (IGKV3-15)
QQYNNWPPLT

SEQ ID NO: 19870 - protein, 16 aa, Homo sapiens
  Heavy chain CDR3 for antibody 9935 (IGHV3-33)
ARDRNWGPHLYWYFDL

SEQ ID NO: 19871 - protein, 9 aa, Homo sapiens
  Light chain CDR3 for antibody 9936 (IGKV1D-13)
QQFNNYPST

SEQ ID NO: 19872 - protein, 17 aa, Homo sapiens
  Heavy chain CDR3 for antibody 9936 (IGHV3-33)
ARDQDDILTGYYWYFDL

SEQ ID NO: 19873 - protein, 9 aa, Homo sapiens
  Light chain CDR3 for antibody 9937 (IGKV2D-28)
MQALQTPPT

SEQ ID NO: 19874 - protein, 14 aa, Homo sapiens
  Heavy chain CDR3 for antibody 9937 (IGHV3-23)
AKDRYRGYEGLFDY

SEQ ID NO: 19875 - protein, 9 aa, Homo sapiens
  Light chain CDR3 for antibody 9938 (IGKV1-9)
QQYNSYPLT

SEQ ID NO: 19876 - protein, 19 aa, Homo sapiens
  Heavy chain CDR3 for antibody 9938 (IGHV3-33)
ARGSDYDILTGYSSDAFDI

SEQ ID NO: 19877 - protein, 9 aa, Homo sapiens
  Light chain CDR3 for antibody 9939 (IGKV1-16)
QHYNDYPFT

SEQ ID NO: 19878 - protein, 11 aa, Homo sapiens
  Heavy chain CDR3 for antibody 9939 (IGHV3-33)
ARDTWDDYFDY

SEQ ID NO: 19879 - protein, 8 aa, Homo sapiens
  Light chain CDR3 for antibody 9940 (IGKV1D-13)
QQFNTYPT

SEQ ID NO: 19880 - protein, 15 aa, Homo sapiens
  Heavy chain CDR3 for antibody 9940 (IGHV3-33)
AKEALRYFDWSGMDV

SEQ ID NO: 19881 - protein, 9 aa, Homo sapiens
  Light chain CDR3 for antibody 9941 (IGKV3D-7)
QQDYNFALT

SEQ ID NO: 19882 - protein, 17 aa, Homo sapiens
  Heavy chain CDR3 for antibody 9941 (IGHV3-33)
ARGEQWLGYYYYYGMDV

SEQ ID NO: 19883 - protein, 9 aa, Homo sapiens
  Light chain CDR3 for antibody 9942 (IGKV2-30)
MQGTHWPLT

SEQ ID NO: 19884 - protein, 19 aa, Homo sapiens
  Heavy chain CDR3 for antibody 9942 (IGHV1-18)
ARDTTLVRGLMNYYYGMDV

SEQ ID NO: 19885 - protein, 9 aa, Homo sapiens
  Light chain CDR3 for antibody 9943 (IGKV1-9)
QQLNGYPFT

SEQ ID NO: 19886 - protein, 8 aa, Homo sapiens
  Heavy chain CDR3 for antibody 9943 (IGHV3-33)
ARDRGFDY

SEQ ID NO: 19887 - protein, 9 aa, Homo sapiens
  Light chain CDR3 for antibody 9944 (IGKV1D-13)
QQFNNYPYT

SEQ ID NO: 19888 - protein, 11 aa, Homo sapiens
  Heavy chain CDR3 for antibody 9944 (IGHV3-33)
ARDRATAGLDY

SEQ ID NO: 19889 - protein, 9 aa, Homo sapiens
  Light chain CDR3 for antibody 9945 (IGKV6-21)
HQSTSLPFT

SEQ ID NO: 19890 - protein, 10 aa, Homo sapiens
  Heavy chain CDR3 for antibody 9945 (IGHV3-33)
ARDGSGSYPI

SEQ ID NO: 19891 - protein, 9 aa, Homo sapiens
  Light chain CDR3 for antibody 9946 (IGKV1-17)
LQHNTYPWT

SEQ ID NO: 19892 - protein, 14 aa, Homo sapiens
  Heavy chain CDR3 for antibody 9946 (IGHV3-33)
ARTTAAAGPRDLHH

SEQ ID NO: 19893 - protein, 9 aa, Homo sapiens
  Light chain CDR3 for antibody 9947 (IGKV1D-16)
QQYYSYPYT

SEQ ID NO: 19894 - protein, 9 aa, Homo sapiens
  Heavy chain CDR3 for antibody 9947 (IGHV3-30)
ARDDYGVDV

SEQ ID NO: 19895 - protein, 8 aa, Homo sapiens
  Light chain CDR3 for antibody 9948 (IGKV3-20)
QQYGSSRT

SEQ ID NO: 19896 - protein, 17 aa, Homo sapiens
  Heavy chain CDR3 for antibody 9948 (IGHV1-18)
ARERYYGSGSYKYNMDV

SEQ ID NO: 19897 - protein, 8 aa, Homo sapiens
  Light chain CDR3 for antibody 9949 (IGKV3-11)
QQRGNWPS

SEQ ID NO: 19898 - protein, 18 aa, Homo sapiens
  Heavy chain CDR3 for antibody 9949 (IGHV3-23)
AKDRITGTTYGYYSGLDV

SEQ ID NO: 19899 - protein, 9 aa, Homo sapiens
  Light chain CDR3 for antibody 9950 (IGKV6-21)
HQSYSYPLT

SEQ ID NO: 19900 - protein, 13 aa, Homo sapiens
  Heavy chain CDR3 for antibody 9950 (IGHV4-59)
ARDAGYSSSWFDY

SEQ ID NO: 19901 - protein, 9 aa, Homo sapiens
  Light chain CDR3 for antibody 9951 (IGKV3D-20)
QQYGSSPYT

SEQ ID NO: 19902 - protein, 17 aa, Homo sapiens
  Heavy chain CDR3 for antibody 9951 (IGHV3-66)
ARCYCHTTICYLYYFDY

SEQ ID NO: 19903 - protein, 9 aa, Homo sapiens
  Light chain CDR3 for antibody 9952 (IGKV1-9)
QQLKSYLYT

SEQ ID NO: 19904 - protein, 15 aa, Homo sapiens
  Heavy chain CDR3 for antibody 9952 (IGHV3-20)
ARDRGSSGWRDWFDP

SEQ ID NO: 19905 - protein, 9 aa, Homo sapiens
  Light chain CDR3 for antibody 9953 (IGKV3D-7)
QQDYTLPLT

SEQ ID NO: 19906 - protein, 13 aa, Homo sapiens
  Heavy chain CDR3 for antibody 9953 (IGHV4-39)
ARPGIVAAGWFDP

SEQ ID NO: 19907 - protein, 9 aa, Homo sapiens
  Light chain CDR3 for antibody 9954 (IGKV5-2)
LQHDKFPYT

SEQ ID NO: 19908 - protein, 13 aa, Homo sapiens
  Heavy chain CDR3 for antibody 9954 (IGHV3-33)
AREGDPQPDAFDI

SEQ ID NO: 19909 - protein, 10 aa, Homo sapiens
  Light chain CDR3 for antibody 9955 (IGKV1-9)
QQLNSFLMYT

SEQ ID NO: 19910 - protein, 13 aa, Homo sapiens
  Heavy chain CDR3 for antibody 9955 (IGHV4-39)
ARREVVGGRGFDY

SEQ ID NO: 19911 - protein, 9 aa, Homo sapiens
  Light chain CDR3 for antibody 9956 (IGKV1D-16)
QQYNSYPYT

SEQ ID NO: 19912 - protein, 18 aa, Homo sapiens
  Heavy chain CDR3 for antibody 9956 (IGHV3-33)
ARREGIVGATTYYDGMDV

SEQ ID NO: 19913 - protein, 10 aa, Homo sapiens
  Light chain CDR3 for antibody 9957 (IGKV3-11)
QQRSNWPIYT

SEQ ID NO: 19914 - protein, 13 aa, Homo sapiens
  Heavy chain CDR3 for antibody 9957 (IGHV3-33)
ARDYTMVRGVMNY

SEQ ID NO: 19915 - protein, 8 aa, Homo sapiens
  Light chain CDR3 for antibody 9958 (IGKV3-20)
QQYGSSLT

SEQ ID NO: 19916 - protein, 17 aa, Homo sapiens
  Heavy chain CDR3 for antibody 9958 (IGHV3-33)
ARAYYDILTGYSYYFDY

SEQ ID NO: 19917 - protein, 9 aa, Homo sapiens
  Light chain CDR3 for antibody 9959 (IGKV3D-7)
QQDYNLPYT

SEQ ID NO: 19918 - protein, 15 aa, Homo sapiens
  Heavy chain CDR3 for antibody 9959 (IGHV3-33)
ARRSILTGSYWYFDL

SEQ ID NO: 19919 - protein, 9 aa, Homo sapiens
  Light chain CDR3 for antibody 9960 (IGKV2-30)
MQGKHWPLT

SEQ ID NO: 19920 - protein, 17 aa, Homo sapiens
  Heavy chain CDR3 for antibody 9960 (IGHV3-33)
ARSGIVGATDYYYGLDV

SEQ ID NO: 19921 - protein, 10 aa, Homo sapiens
  Light chain CDR3 for antibody 9961 (IGKV3-11)
QQRSTWPTLT

SEQ ID NO: 19922 - protein, 18 aa, Homo sapiens
  Heavy chain CDR3 for antibody 9961 (IGHV4-59)
AREGHYYTSGSYYKAFDY

SEQ ID NO: 19923 - protein, 8 aa, Homo sapiens
  Light chain CDR3 for antibody 9962 (IGKV3-11)
LQRGNWPT

SEQ ID NO: 19924 - protein, 17 aa, Homo sapiens
  Heavy chain CDR3 for antibody 9962 (IGHV3-23)
AKDGSFYSSGWYDAFDI

SEQ ID NO: 19925 - protein, 10 aa, Homo sapiens
  Light chain CDR3 for antibody 9963 (IGKV3-15)
QQYNNWPPYT

SEQ ID NO: 19926 - protein, 11 aa, Homo sapiens
  Heavy chain CDR3 for antibody 9963 (IGHV3-64)
ARERGSYAFDI

SEQ ID NO: 19927 - protein, 9 aa, Homo sapiens
  Light chain CDR3 for antibody 9964 (IGKV3D-20)
QQYGSSPYT

SEQ ID NO: 19928 - protein, 17 aa, Homo sapiens
  Heavy chain CDR3 for antibody 9964 (IGHV3-33)
ARELRYFDWLLSDAFDI

SEQ ID NO: 19929 - protein, 10 aa, Homo sapiens
  Light chain CDR3 for antibody 9965 (IGKV1-39)
QQSYSSPMYT

SEQ ID NO: 19930 - protein, 13 aa, Homo sapiens
  Heavy chain CDR3 for antibody 9965 (IGHV3-66)
ARGDNWNDGGFDY

SEQ ID NO: 19931 - protein, 9 aa, Homo sapiens
  Light chain CDR3 for antibody 9966 (IGKV1-6)
LQDYNYPYT

SEQ ID NO: 19932 - protein, 20 aa, Homo sapiens
  Heavy chain CDR3 for antibody 9966 (IGHV3-33)
ARAGDIAVAGTHYYYYGMDV

SEQ ID NO: 19933 - protein, 10 aa, Homo sapiens
  Light chain CDR3 for antibody 9967 (IGKV3-15)
QQYNNWPPIT

SEQ ID NO: 19934 - protein, 17 aa, Homo sapiens
  Heavy chain CDR3 for antibody 9967 (IGHV3-33)
TRDSGMVRGIIIYGMDV

SEQ ID NO: 19935 - protein, 9 aa, Homo sapiens
  Light chain CDR3 for antibody 9968 (IGKV1-9)
QQLHIYPWT

SEQ ID NO: 19936 - protein, 14 aa, Homo sapiens
  Heavy chain CDR3 for antibody 9968 (IGHV3-33)
ANWAYDILTGYLDY

SEQ ID NO: 19937 - protein, 10 aa, Homo sapiens
  Light chain CDR3 for antibody 9969 (IGKV3-11)
QQRSNCPALA

SEQ ID NO: 19938 - protein, 13 aa, Homo sapiens
  Heavy chain CDR3 for antibody 9969 (IGHV3-33)
AKEDGDYHHYFDY

SEQ ID NO: 19939 - protein, 10 aa, Homo sapiens
  Light chain CDR3 for antibody 9970 (IGKV1-39)
QQSYSTPMYT

SEQ ID NO: 19940 - protein, 18 aa, Homo sapiens
  Heavy chain CDR3 for antibody 9970 (IGHV3-23)
AKERGYYGSGSYSNWFDP

SEQ ID NO: 19941 - protein, 9 aa, Homo sapiens
  Light chain CDR3 for antibody 9971 (IGKV2-30)
MQGTHWPLT

SEQ ID NO: 19942 - protein, 13 aa, Homo sapiens
  Heavy chain CDR3 for antibody 9971 (IGHV3-33)
AKCIVAAIGGFDY

SEQ ID NO: 19943 - protein, 9 aa, Homo sapiens
  Light chain CDR3 for antibody 9972 (IGKV6-21)
HQSSSLPYT

SEQ ID NO: 19944 - protein, 13 aa, Homo sapiens
  Heavy chain CDR3 for antibody 9972 (IGHV3-23)
AKERLRYFDWLAY

SEQ ID NO: 19945 - protein, 8 aa, Homo sapiens
  Light chain CDR3 for antibody 9973 (IGKV1-5)
QQYNSYST

SEQ ID NO: 19946 - protein, 19 aa, Homo sapiens
  Heavy chain CDR3 for antibody 9973 (IGHV1-18)
ARDDILTGYSLYYYYGMDV

SEQ ID NO: 19947 - protein, 10 aa, Homo sapiens
  Light chain CDR3 for antibody 9974 (IGKV3-15)
QQYNNWPPIT

SEQ ID NO: 19948 - protein, 11 aa, Homo sapiens
  Heavy chain CDR3 for antibody 9974 (IGHV4-59)
ARDGVRGVFDI

SEQ ID NO: 19949 - protein, 9 aa, Homo sapiens
  Light chain CDR3 for antibody 9975 (IGKV1-9)
QQYNSYPYT

SEQ ID NO: 19950 - protein, 13 aa, Homo sapiens
  Heavy chain CDR3 for antibody 9975 (IGHV3-33)
AKCIVAAIGGLDY

SEQ ID NO: 19951 - protein, 9 aa, Homo sapiens
  Light chain CDR3 for antibody 9976 (IGKV1-9)
QQLNSYPWT

SEQ ID NO: 19952 - protein, 20 aa, Homo sapiens
  Heavy chain CDR3 for antibody 9976 (IGHV1-18)
AREVGIAVAGTLYYYYGMEV

SEQ ID NO: 19953 - protein, 6 aa, Homo sapiens
  Light chain CDR3 for antibody 9977 (IGKV3-20)
QQYGST

SEQ ID NO: 19954 - protein, 17 aa, Homo sapiens
  Heavy chain CDR3 for antibody 9977 (IGHV3-33)
ARDLIGPLSSSWYPFDY

SEQ ID NO: 19955 - protein, 10 aa, Homo sapiens
  Light chain CDR3 for antibody 9978 (IGKV1-39)
QQSYSTPMYT

SEQ ID NO: 19956 - protein, 14 aa, Homo sapiens
  Heavy chain CDR3 for antibody 9978 (IGHV4-39)
ARQGTMIRGGYFDY

SEQ ID NO: 19957 - protein, 9 aa, Homo sapiens
  Light chain CDR3 for antibody 9979 (IGKV1-9)
QQYKSYPYT

SEQ ID NO: 19958 - protein, 13 aa, Homo sapiens
  Heavy chain CDR3 for antibody 9979 (IGHV3-33)
ARAFIMVRGVIDY

SEQ ID NO: 19959 - protein, 8 aa, Homo sapiens
  Light chain CDR3 for antibody 9980 (IGKV3-20)
QQYGSSRT

SEQ ID NO: 19960 - protein, 10 aa, Homo sapiens
  Heavy chain CDR3 for antibody 9980 (IGHV3-23)
AKGDRWRFDP

SEQ ID NO: 19961 - protein, 9 aa, Homo sapiens
  Light chain CDR3 for antibody 9981 (IGKV3D-11)
QQRSNWQYT

SEQ ID NO: 19962 - protein, 16 aa, Homo sapiens
  Heavy chain CDR3 for antibody 9981 (IGHV3-33)
ARIAAPGSEYYYGMDV

SEQ ID NO: 19963 - protein, 9 aa, Homo sapiens
  Light chain CDR3 for antibody 9982 (IGKV1-6)
LQAYSYPFT

SEQ ID NO: 19964 - protein, 15 aa, Homo sapiens
  Heavy chain CDR3 for antibody 9982 (IGHV3-23)
AKEALRYFDWSGMDV

SEQ ID NO: 19965 - protein, 8 aa, Homo sapiens
  Light chain CDR3 for antibody 9983 (IGKV3-20)
QQYGRSFT

SEQ ID NO: 19966 - protein, 19 aa, Homo sapiens
  Heavy chain CDR3 for antibody 9983 (IGHV3-33)
TRDPHYDILTGYAYYGMDV

SEQ ID NO: 19967 - protein, 9 aa, Homo sapiens
  Light chain CDR3 for antibody 9984 (IGKV1-17)
LQQNSYPWT

SEQ ID NO: 19968 - protein, 9 aa, Homo sapiens
  Heavy chain CDR3 for antibody 9984 (IGHV4-59)
AREGGSGSL

SEQ ID NO: 19969 - protein, 9 aa, Homo sapiens
  Light chain CDR3 for antibody 9985 (IGKV3-11)
QQRSNWPPT

SEQ ID NO: 19970 - protein, 14 aa, Homo sapiens
  Heavy chain CDR3 for antibody 9985 (IGHV3-33)
AKKGYSGRYYYFDY

SEQ ID NO: 19971 - protein, 9 aa, Homo sapiens
  Light chain CDR3 for antibody 9986 (IGKV6-21)
HQSSSLPRT

SEQ ID NO: 19972 - protein, 12 aa, Homo sapiens
  Heavy chain CDR3 for antibody 9986 (IGHV4-61)
ARVGSSGWYFDY

SEQ ID NO: 19973 - protein, 9 aa, Homo sapiens
  Light chain CDR3 for antibody 9987 (IGKV1-9)
QQLTSFPRT

SEQ ID NO: 19974 - protein, 18 aa, Homo sapiens
  Heavy chain CDR3 for antibody 9987 (IGHV1-46)
ARDGDYVWGSYRSDWFDP

SEQ ID NO: 19975 - protein, 9 aa, Homo sapiens
  Light chain CDR3 for antibody 9988 (IGKV1D-16)
QQYYSYPRT

SEQ ID NO: 19976 - protein, 24 aa, Homo sapiens
  Heavy chain CDR3 for antibody 9988 (IGHV1-46)
ARDEARGLLTGYYNMREYYYGMDV

SEQ ID NO: 19977 - protein, 10 aa, Homo sapiens
  Light chain CDR3 for antibody 9989 (IGKV3-15)
QQYNNWPPIT

SEQ ID NO: 19978 - protein, 8 aa, Homo sapiens
  Heavy chain CDR3 for antibody 9989 (IGHV3-33)
ARDRGFDY

SEQ ID NO: 19979 - protein, 10 aa, Homo sapiens
  Light chain CDR3 for antibody 9990 (IGKV3-11)
QQRSNWPALT

SEQ ID NO: 19980 - protein, 13 aa, Homo sapiens
  Heavy chain CDR3 for antibody 9990 (IGHV4-61)
ASRYSSGWYPFDY

SEQ ID NO: 19981 - protein, 9 aa, Homo sapiens
  Light chain CDR3 for antibody 9991 (IGKV1D-13)
QQFNNYPHT

SEQ ID NO: 19982 - protein, 18 aa, Homo sapiens
  Heavy chain CDR3 for antibody 9991 (IGHV1-8)
ARGRYNSGWNYYYFGMDV

SEQ ID NO: 19983 - protein, 8 aa, Homo sapiens
  Light chain CDR3 for antibody 9992 (IGKV2D-28)
MQALQTPT

SEQ ID NO: 19984 - protein, 14 aa, Homo sapiens
  Heavy chain CDR3 for antibody 9992 (IGHV3-30)
ARAISGSSYWYFDL

SEQ ID NO: 19985 - protein, 9 aa, Homo sapiens
  Light chain CDR3 for antibody 9993 (IGKV2D-24)
TQATQFPHT

SEQ ID NO: 19986 - protein, 13 aa, Homo sapiens
  Heavy chain CDR3 for antibody 9993 (IGHV1-46)
ARRQVGYYYGMDV

SEQ ID NO: 19987 - protein, 9 aa, Homo sapiens
  Light chain CDR3 for antibody 9994 (IGKV1-6)
LQDYSYPWT

SEQ ID NO: 19988 - protein, 11 aa, Homo sapiens
  Heavy chain CDR3 for antibody 9994 (IGHV3-33)
ARAGIAALCDY

SEQ ID NO: 19989 - protein, 9 aa, Homo sapiens
  Light chain CDR3 for antibody 9995 (IGKV1-6)
LQGYNYPRS

SEQ ID NO: 19990 - protein, 12 aa, Homo sapiens
  Heavy chain CDR3 for antibody 9995 (IGHV1-46)
ARGLTGDHAFDI

SEQ ID NO: 19991 - protein, 8 aa, Homo sapiens
  Light chain CDR3 for antibody 9996 (IGKV1D-13)
QQFNTYHT

SEQ ID NO: 19992 - protein, 13 aa, Homo sapiens
  Heavy chain CDR3 for antibody 9996 (IGHV4-39)
ARQWPSGYWYFDL

SEQ ID NO: 19993 - protein, 9 aa, Homo sapiens
  Light chain CDR3 for antibody 9997 (IGKV3D-11)
QQRSNWQYT

SEQ ID NO: 19994 - protein, 14 aa, Homo sapiens
  Heavy chain CDR3 for antibody 9997 (IGHV3-33)
ARDNILTAYYLFDY

SEQ ID NO: 19995 - protein, 8 aa, Homo sapiens
  Light chain CDR3 for antibody 9998 (IGKV6-21)
HQSSSLPT

SEQ ID NO: 19996 - protein, 12 aa, Homo sapiens
  Heavy chain CDR3 for antibody 9998 (IGHV3-33)
ARDLVGATPFDY

SEQ ID NO: 19997 - protein, 9 aa, Homo sapiens
  Light chain CDR3 for antibody 9999 (IGKV2-30)
MQGTHWPLT

SEQ ID NO: 19998 - protein, 18 aa, Homo sapiens
  Heavy chain CDR3 for antibody 9999 (IGHV3-33)
AKERGYYGSGSYSNWFDP

SEQ ID NO: 19999 - protein, 8 aa, Homo sapiens
  Light chain CDR3 for antibody 10000 (IGKV1-5)
QQYNSYYT

SEQ ID NO: 20000 - protein, 15 aa, Homo sapiens
  Heavy chain CDR3 for antibody 10000 (IGHV3-33)
AKDLSSGWYAYFFDY

SEQ ID NO: 20001 - protein, 10 aa, Homo sapiens
  Light chain CDR3 for antibody 10001 (IGKV4-1)
QQYYDISMYT

SEQ ID NO: 20002 - protein, 17 aa, Homo sapiens
  Heavy chain CDR3 for antibody 10001 (IGHV4-59)
ARDLLVRGEGSYYGMDV

SEQ ID NO: 20003 - protein, 10 aa, Homo sapiens
  Light chain CDR3 for antibody 10002 (IGKV3-11)
QQRSNWPIFT

SEQ ID NO: 20004 - protein, 8 aa, Homo sapiens
  Heavy chain CDR3 for antibody 10002 (IGHV3-33)
ARDRGFDY

SEQ ID NO: 20005 - protein, 9 aa, Homo sapiens
  Light chain CDR3 for antibody 10003 (IGKV3-11)
QQRINWPWT

SEQ ID NO: 20006 - protein, 11 aa, Homo sapiens
  Heavy chain CDR3 for antibody 10003 (IGHV3-23)
AKGLWPYYFDY

SEQ ID NO: 20007 - protein, 9 aa, Homo sapiens
  Light chain CDR3 for antibody 10004 (IGKV3D-7)
QQDYKSPLT

SEQ ID NO: 20008 - protein, 12 aa, Homo sapiens
  Heavy chain CDR3 for antibody 10004 (IGHV3-33)
ARKGYDMHEFDI

SEQ ID NO: 20009 - protein, 9 aa, Homo sapiens
  Light chain CDR3 for antibody 10005 (IGKV1-6)
LQVYNYPWT

SEQ ID NO: 20010 - protein, 12 aa, Homo sapiens
  Heavy chain CDR3 for antibody 10005 (IGHV3-33)
ARKGYDMHAFDI

SEQ ID NO: 20011 - protein, 8 aa, Homo sapiens
  Light chain CDR3 for antibody 10006 (IGKV1-5)
QQYNSYYT

SEQ ID NO: 20012 - protein, 15 aa, Homo sapiens
  Heavy chain CDR3 for antibody 10006 (IGHV3-23)
AKDRDYDFLSGPFDY

SEQ ID NO: 20013 - protein, 9 aa, Homo sapiens
  Light chain CDR3 for antibody 10007 (IGKV1-17)
LQHYSYPPT

SEQ ID NO: 20014 - protein, 12 aa, Homo sapiens
  Heavy chain CDR3 for antibody 10007 (IGHV3-9)
AEDPFLGTSFDY

SEQ ID NO: 20015 - protein, 10 aa, Homo sapiens
  Light chain CDR3 for antibody 10008 (IGKV3-15)
QQYNNWPPYT

SEQ ID NO: 20016 - protein, 12 aa, Homo sapiens
  Heavy chain CDR3 for antibody 10008 (IGHV3-23)
AKEGLGSDYEPY

SEQ ID NO: 20017 - protein, 9 aa, Homo sapiens
  Light chain CDR3 for antibody 10009 (IGKV1-17)
LQHNSYPYT

SEQ ID NO: 20018 - protein, 11 aa, Homo sapiens
  Heavy chain CDR3 for antibody 10009 (IGHV3-h)
AREDYYYGMDV

SEQ ID NO: 20019 - protein, 9 aa, Homo sapiens
  Light chain CDR3 for antibody 10010 (IGKV1-9)
QQLNSYPLT

SEQ ID NO: 20020 - protein, 12 aa, Homo sapiens
  Heavy chain CDR3 for antibody 10010 (IGHV4-39)
ARDSGSYYFLDY

SEQ ID NO: 20021 - protein, 9 aa, Homo sapiens
  Light chain CDR3 for antibody 10011 (IGKV1-6)
LQDYNYPRT

SEQ ID NO: 20022 - protein, 10 aa, Homo sapiens
  Heavy chain CDR3 for antibody 10011 (IGHV3-21)
ARRWERYFDY

SEQ ID NO: 20023 - protein, 9 aa, Homo sapiens
  Light chain CDR3 for antibody 10012 (IGKV1-6)
LQDYNYPRT

SEQ ID NO: 20024 - protein, 11 aa, Homo sapiens
  Heavy chain CDR3 for antibody 10012 (IGHV1-46)
AREQHGQAPDY

SEQ ID NO: 20025 - protein, 9 aa, Homo sapiens
  Light chain CDR3 for antibody 10013 (IGKV1-37)
QRTSNAPYT

SEQ ID NO: 20026 - protein, 14 aa, Homo sapiens
  Heavy chain CDR3 for antibody 10013 (IGHV3-33)
ARDKSYPLSYGMDV

SEQ ID NO: 20027 - protein, 9 aa, Homo sapiens
  Light chain CDR3 for antibody 10014 (IGKV2D-28)
MQALQTPPT

SEQ ID NO: 20028 - protein, 16 aa, Homo sapiens
  Heavy chain CDR3 for antibody 10014 (IGHV3-33)
ARGGRSDWLYYYGMDV

SEQ ID NO: 20029 - protein, 9 aa, Homo sapiens
  Light chain CDR3 for antibody 10015 (IGKV3D-7)
QQDYELPLT

SEQ ID NO: 20030 - protein, 17 aa, Homo sapiens
  Heavy chain CDR3 for antibody 10015 (IGHV3-13)
AREGWFGELWGYYGMDV

SEQ ID NO: 20031 - protein, 10 aa, Homo sapiens
  Light chain CDR3 for antibody 10016 (IGKV1-39)
QQSYSTPMYT

SEQ ID NO: 20032 - protein, 16 aa, Homo sapiens
  Heavy chain CDR3 for antibody 10016 (IGHV3-33)
ARDKNTDYDILTGFDY

SEQ ID NO: 20033 - protein, 9 aa, Homo sapiens
  Light chain CDR3 for antibody 10017 (IGKV2-30)
MQGTHWPLT

SEQ ID NO: 20034 - protein, 19 aa, Homo sapiens
  Heavy chain CDR3 for antibody 10017 (IGHV1-24)
ATAGLQWFGEKIGYYGMDV

SEQ ID NO: 20035 - protein, 9 aa, Homo sapiens
  Light chain CDR3 for antibody 10018 (IGKV1-9)
QQLNNYLFT

SEQ ID NO: 20036 - protein, 20 aa, Homo sapiens
  Heavy chain CDR3 for antibody 10018 (IGHV4-59)
ARDRGYDILTGYYGYYGMDV

SEQ ID NO: 20037 - protein, 6 aa, Homo sapiens
  Light chain CDR3 for antibody 10019 (IGKV3-20)
QQYGST

SEQ ID NO: 20038 - protein, 12 aa, Homo sapiens
  Heavy chain CDR3 for antibody 10019 (IGHV3-33)
ARGYFGSGYAHF

SEQ ID NO: 20039 - protein, 10 aa, Homo sapiens
  Light chain CDR3 for antibody 10020 (IGKV3-11)
QQRSNWPIFT

SEQ ID NO: 20040 - protein, 17 aa, Homo sapiens
  Heavy chain CDR3 for antibody 10020 (IGHV3-33)
ARDWFGELSDYYYGMDV

SEQ ID NO: 20041 - protein, 8 aa, Homo sapiens
  Light chain CDR3 for antibody 10021 (IGKV3-15)
QQYNNYPT

SEQ ID NO: 20042 - protein, 13 aa, Homo sapiens
  Heavy chain CDR3 for antibody 10021 (IGHV4-39)
ARREVVGGRGFDY

SEQ ID NO: 20043 - protein, 9 aa, Homo sapiens
  Light chain CDR3 for antibody 10022 (IGKV3D-7)
QQDYTLPLT

SEQ ID NO: 20044 - protein, 11 aa, Homo sapiens
  Heavy chain CDR3 for antibody 10022 (IGHV4-39)
ARLSGEGHFDS

SEQ ID NO: 20045 - protein, 9 aa, Homo sapiens
  Light chain CDR3 for antibody 10023 (IGKV1-17)
LHSNNYPWT

SEQ ID NO: 20046 - protein, 13 aa, Homo sapiens
  Heavy chain CDR3 for antibody 10023 (IGHV3-23)
ARDGGAAAGTWDS

SEQ ID NO: 20047 - protein, 9 aa, Homo sapiens
  Light chain CDR3 for antibody 10024 (IGKV1-9)
QQLKSYLYT

SEQ ID NO: 20048 - protein, 13 aa, Homo sapiens
  Heavy chain CDR3 for antibody 10024 (IGHV3-33)
ARVDTMVRGVMAY

SEQ ID NO: 20049 - protein, 9 aa, Homo sapiens
  Light chain CDR3 for antibody 10025 (IGKV2D-28)
MQALQTPPT

SEQ ID NO: 20050 - protein, 15 aa, Homo sapiens
  Heavy chain CDR3 for antibody 10025 (IGHV3-23)
ARRICSGGSCSLFDY

SEQ ID NO: 20051 - protein, 9 aa, Homo sapiens
  Light chain CDR3 for antibody 10026 (IGKV1-9)
QQLISYPLT

SEQ ID NO: 20052 - protein, 14 aa, Homo sapiens
  Heavy chain CDR3 for antibody 10026 (IGHV3-23)
AKDDIVRATGAFDI

SEQ ID NO: 20053 - protein, 10 aa, Homo sapiens
  Light chain CDR3 for antibody 10027 (IGKV1-9)
QQLNSFLMYT

SEQ ID NO: 20054 - protein, 12 aa, Homo sapiens
  Heavy chain CDR3 for antibody 10027 (IGHV1-46)
ARGLTGDHAVDI

SEQ ID NO: 20055 - protein, 8 aa, Homo sapiens
  Light chain CDR3 for antibody 10028 (IGKV1-5)
QQYNSYYT

SEQ ID NO: 20056 - protein, 12 aa, Homo sapiens
  Heavy chain CDR3 for antibody 10028 (IGHV3-23)
AKEGIVGVPFDY

SEQ ID NO: 20057 - protein, 9 aa, Homo sapiens
  Light chain CDR3 for antibody 10029 (IGKV1-16)
QHYNDYPFT

SEQ ID NO: 20058 - protein, 17 aa, Homo sapiens
  Heavy chain CDR3 for antibody 10029 (IGHV3-66)
ARVQYDILTGYSPYFDN

SEQ ID NO: 20059 - protein, 9 aa, Homo sapiens
  Light chain CDR3 for antibody 10030 (IGKV1-6)
LQAYNYPYT

SEQ ID NO: 20060 - protein, 9 aa, Homo sapiens
  Heavy chain CDR3 for antibody 10030 (IGHV3-73)
TRLLTGFDY

SEQ ID NO: 20061 - protein, 9 aa, Homo sapiens
  Light chain CDR3 for antibody 10031 (IGKV3-15)
QQYNNYPYT

SEQ ID NO: 20062 - protein, 18 aa, Homo sapiens
  Heavy chain CDR3 for antibody 10031 (IGHV3-64)
ARDEYYYGSGSYYNYFDW

SEQ ID NO: 20063 - protein, 9 aa, Homo sapiens
  Light chain CDR3 for antibody 10032 (IGKV1-9)
QQLNSYPRT

SEQ ID NO: 20064 - protein, 5 aa, Homo sapiens
  Heavy chain CDR3 for antibody 10032 (IGHV1-8)
ARGDY

SEQ ID NO: 20065 - protein, 9 aa, Homo sapiens
  Light chain CDR3 for antibody 10033 (IGKV1-9)
QQLNSYPRT

SEQ ID NO: 20066 - protein, 13 aa, Homo sapiens
  Heavy chain CDR3 for antibody 10033 (IGHV1-24)
ATGYSLNLYDFDY

SEQ ID NO: 20067 - protein, 9 aa, Homo sapiens
  Light chain CDR3 for antibody 10034 (IGKV1-9)
QQLNSYPYT

SEQ ID NO: 20068 - protein, 19 aa, Homo sapiens
  Heavy chain CDR3 for antibody 10034 (IGHV1-46)
ASKGHYDILTGYYPDAFDI

SEQ ID NO: 20069 - protein, 10 aa, Homo sapiens
  Light chain CDR3 for antibody 10035 (IGKV1-27)
QKYNSAPMYT

SEQ ID NO: 20070 - protein, 12 aa, Homo sapiens
  Heavy chain CDR3 for antibody 10035 (IGHV4-39)
ARHGSGSSYFDY

SEQ ID NO: 20071 - protein, 9 aa, Homo sapiens
  Light chain CDR3 for antibody 10036 (IGKV3-11)
QQRINWPYT

SEQ ID NO: 20072 - protein, 9 aa, Homo sapiens
  Heavy chain CDR3 for antibody 10036 (IGHV3-33)
AANSYGLDY

SEQ ID NO: 20073 - protein, 9 aa, Homo sapiens
  Light chain CDR3 for antibody 10037 (IGKV3-20)
LQYGSSPYT

SEQ ID NO: 20074 - protein, 12 aa, Homo sapiens
  Heavy chain CDR3 for antibody 10037 (IGHV4-61)
ARVDSSGWYFDY

SEQ ID NO: 20075 - protein, 10 aa, Homo sapiens
  Light chain CDR3 for antibody 10038 (IGKV3-20)
QQYGRSPPVT

SEQ ID NO: 20076 - protein, 18 aa, Homo sapiens
  Heavy chain CDR3 for antibody 10038 (IGHV1-46)
ARDGDYVWGSYRSDWFDP

SEQ ID NO: 20077 - protein, 9 aa, Homo sapiens
  Light chain CDR3 for antibody 10039 (IGKV3D-7)
QQDYEFPLT

SEQ ID NO: 20078 - protein, 13 aa, Homo sapiens
  Heavy chain CDR3 for antibody 10039 (IGHV3-33)
ARGDNWNDGGFDY

SEQ ID NO: 20079 - protein, 9 aa, Homo sapiens
  Light chain CDR3 for antibody 10040 (IGKV1-39)
QQSYSTPLT

SEQ ID NO: 20080 - protein, 18 aa, Homo sapiens
  Heavy chain CDR3 for antibody 10040 (IGHV3-33)
AREGYFGSGSYYRNWFDP

SEQ ID NO: 20081 - protein, 6 aa, Homo sapiens
  Light chain CDR3 for antibody 10041 (IGKV3-20)
QQYGST

SEQ ID NO: 20082 - protein, 17 aa, Homo sapiens
  Heavy chain CDR3 for antibody 10041 (IGHV3-66)
ARVQYDILTGYSPYFDN

SEQ ID NO: 20083 - protein, 8 aa, Homo sapiens
  Light chain CDR3 for antibody 10042 (IGKV1-13)
QQFNTYPT

SEQ ID NO: 20084 - protein, 9 aa, Homo sapiens
  Heavy chain CDR3 for antibody 10042 (IGHV3-33)
AREYKEFDY

SEQ ID NO: 20085 - protein, 9 aa, Homo sapiens
  Light chain CDR3 for antibody 10043 (IGKV2D-28)
MQVLQTPFT

SEQ ID NO: 20086 - protein, 11 aa, Homo sapiens
  Heavy chain CDR3 for antibody 10043 (IGHV4-59)
AGGSGSSYFDY

SEQ ID NO: 20087 - protein, 9 aa, Homo sapiens
  Light chain CDR3 for antibody 10044 (IGKV1-5)
QQYNTYSRT

SEQ ID NO: 20088 - protein, 13 aa, Homo sapiens
  Heavy chain CDR3 for antibody 10044 (IGHV3-33)
ARRATLVRGVLDP

SEQ ID NO: 20089 - protein, 9 aa, Homo sapiens
  Light chain CDR3 for antibody 10045 (IGKV1-6)
LQDYKSPFT

SEQ ID NO: 20090 - protein, 13 aa, Homo sapiens
  Heavy chain CDR3 for antibody 10045 (IGHV3-33)
ARRYRSGWYPFDY

SEQ ID NO: 20091 - protein, 8 aa, Homo sapiens
  Light chain CDR3 for antibody 10046 (IGKV3-20)
QQYGSSLT

SEQ ID NO: 20092 - protein, 17 aa, Homo sapiens
  Heavy chain CDR3 for antibody 10046 (IGHV3-15)
TTERYPRRYYYYFGMDV

SEQ ID NO: 20093 - protein, 9 aa, Homo sapiens
  Light chain CDR3 for antibody 10047 (IGKV1D-13)
QHFNNYMYT

SEQ ID NO: 20094 - protein, 12 aa, Homo sapiens
  Heavy chain CDR3 for antibody 10047 (IGHV3-23)
AKDGWFGESLDY

SEQ ID NO: 20095 - protein, 9 aa, Homo sapiens
  Light chain CDR3 for antibody 10048 (IGKV2D-28)
MQALQTPPT

SEQ ID NO: 20096 - protein, 17 aa, Homo sapiens
  Heavy chain CDR3 for antibody 10048 (IGHV3-23)
AKDGSFYSSGWYDAFDI

SEQ ID NO: 20097 - protein, 9 aa, Homo sapiens
  Light chain CDR3 for antibody 10049 (IGKV2-30)
MQGTHWPLT

SEQ ID NO: 20098 - protein, 13 aa, Homo sapiens
  Heavy chain CDR3 for antibody 10049 (IGHV3-33)
ARVEYYNYYGLDV

SEQ ID NO: 20099 - protein, 9 aa, Homo sapiens
  Light chain CDR3 for antibody 10050 (IGKV1-5)
QQYNTYSRT

SEQ ID NO: 20100 - protein, 14 aa, Homo sapiens
  Heavy chain CDR3 for antibody 10050 (IGHV3-33)
ARDNILTAYYLFDY

SEQ ID NO: 20101 - protein, 8 aa, Homo sapiens
  Light chain CDR3 for antibody 10051 (IGKV3-15)
QQYNNYPT

SEQ ID NO: 20102 - protein, 17 aa, Homo sapiens
  Heavy chain CDR3 for antibody 10051 (IGHV3-33)
ARGGAAAGPYLYYGLDV

SEQ ID NO: 20103 - protein, 9 aa, Homo sapiens
  Light chain CDR3 for antibody 10052 (IGKV1-9)
QQYNTYSRT

SEQ ID NO: 20104 - protein, 13 aa, Homo sapiens
  Heavy chain CDR3 for antibody 10052 (IGHV3-33)
ARDQRYSSGWYDY

SEQ ID NO: 20105 - protein, 9 aa, Homo sapiens
  Light chain CDR3 for antibody 10053 (IGKV1-16)
QQYNSYPYT

SEQ ID NO: 20106 - protein, 18 aa, Homo sapiens
  Heavy chain CDR3 for antibody 10053 (IGHV1-24)
ATGLRYFDWPIISDLFDY

SEQ ID NO: 20107 - protein, 8 aa, Homo sapiens
  Light chain CDR3 for antibody 10054 (IGKV6-21)
HQSSSLPT

SEQ ID NO: 20108 - protein, 20 aa, Homo sapiens
  Heavy chain CDR3 for antibody 10054 (IGHV3-33)
ARDPAQLERRYYYFYYGIDV

SEQ ID NO: 20109 - protein, 9 aa, Homo sapiens
  Light chain CDR3 for antibody 10055 (IGKV1-6)
QQYKSYPRT

SEQ ID NO: 20110 - protein, 14 aa, Homo sapiens
  Heavy chain CDR3 for antibody 10055 (IGHV1-2)
ARDYYGSGNYYMGY

SEQ ID NO: 20111 - protein, 9 aa, Homo sapiens
  Light chain CDR3 for antibody 10056 (IGKV5-2)
LQHDKFPYT

SEQ ID NO: 20112 - protein, 10 aa, Homo sapiens
  Heavy chain CDR3 for antibody 10056 (IGHV3-33)
ARDLRADFDY

SEQ ID NO: 20113 - protein, 10 aa, Homo sapiens
  Light chain CDR3 for antibody 10057 (IGKV1-17)
LQHNSYPIYT

SEQ ID NO: 20114 - protein, 18 aa, Homo sapiens
  Heavy chain CDR3 for antibody 10057 (IGHV3-23)
ARDEYYGSGIYYNYGMDV

SEQ ID NO: 20115 - protein, 9 aa, Homo sapiens
  Light chain CDR3 for antibody 10058 (IGKV5-2)
LQHDKFPYT

SEQ ID NO: 20116 - protein, 7 aa, Homo sapiens
  Heavy chain CDR3 for antibody 10058 (IGHV3-33)
ARDRGPY

SEQ ID NO: 20117 - protein, 10 aa, Homo sapiens
  Light chain CDR3 for antibody 10059 (IGKV3-15)
QQYNNWPPYT

SEQ ID NO: 20118 - protein, 15 aa, Homo sapiens
  Heavy chain CDR3 for antibody 10059 (IGHV3-11)
ARDRAVAGTIHAFDI

SEQ ID NO: 20119 - protein, 10 aa, Homo sapiens
  Light chain CDR3 for antibody 10060 (IGKV4-1)
QQYYDISMYT

SEQ ID NO: 20120 - protein, 15 aa, Homo sapiens
  Heavy chain CDR3 for antibody 10060 (IGHV4-59)
ARDLGHYYGSVSIDY

SEQ ID NO: 20121 - protein, 11 aa, Homo sapiens
  Light chain CDR3 for antibody 10061 (IGKV3-11)
QQRSNWPPTWT

SEQ ID NO: 20122 - protein, 18 aa, Homo sapiens
  Heavy chain CDR3 for antibody 10061 (IGHV4-59)
ARERGKWNDVDYYYGMDV

SEQ ID NO: 20123 - protein, 9 aa, Homo sapiens
  Light chain CDR3 for antibody 10062 (IGKV1-16)
QHYNDYPFT

SEQ ID NO: 20124 - protein, 15 aa, Homo sapiens
  Heavy chain CDR3 for antibody 10062 (IGHV3-74)
ARGSGSHYHYYGMDV

SEQ ID NO: 20125 - protein, 9 aa, Homo sapiens
  Light chain CDR3 for antibody 10063 (IGKV3-20)
QQFGTSPLT

SEQ ID NO: 20126 - protein, 20 aa, Homo sapiens
  Heavy chain CDR3 for antibody 10063 (IGHV1-f)
ATGLITFVRGVILTYRSFDY

SEQ ID NO: 20127 - protein, 9 aa, Homo sapiens
  Light chain CDR3 for antibody 10064 (IGKV2-30)
MQGTHWPLT

SEQ ID NO: 20128 - protein, 13 aa, Homo sapiens
  Heavy chain CDR3 for antibody 10064 (IGHV3-33)
ARRQVGYYYGMDV

SEQ ID NO: 20129 - protein, 8 aa, Homo sapiens
  Light chain CDR3 for antibody 10065 (IGKV3-15)
QQYNNYPT

SEQ ID NO: 20130 - protein, 13 aa, Homo sapiens
  Heavy chain CDR3 for antibody 10065 (IGHV4-39)
ARHHYGSGSLRDY

SEQ ID NO: 20131 - protein, 7 aa, Homo sapiens
  Light chain CDR3 for antibody 10066 (IGKV1-17)
LQHNSYP

SEQ ID NO: 20132 - protein, 12 aa, Homo sapiens
  Heavy chain CDR3 for antibody 10066 (IGHV3-33)
ARDLVGATPFDY

SEQ ID NO: 20133 - protein, 8 aa, Homo sapiens
  Light chain CDR3 for antibody 10067 (IGKV3-20)
QQYGSSLT

SEQ ID NO: 20134 - protein, 15 aa, Homo sapiens
  Heavy chain CDR3 for antibody 10067 (IGHV4-39)
ARHSKYSSAWYPFDY

SEQ ID NO: 20135 - protein, 8 aa, Homo sapiens
  Light chain CDR3 for antibody 10068 (IGKV3-20)
QQYGSSLT

SEQ ID NO: 20136 - protein, 10 aa, Homo sapiens
  Heavy chain CDR3 for antibody 10068 (IGHV3-33)
ARDVVVYFDY

SEQ ID NO: 20137 - protein, 9 aa, Homo sapiens
  Light chain CDR3 for antibody 10069 (IGKV1-39)
QQSYSTPPT

SEQ ID NO: 20138 - protein, 18 aa, Homo sapiens
  Heavy chain CDR3 for antibody 10069 (IGHV3-33)
ARREGITMIFYYYYGMDV

SEQ ID NO: 20139 - protein, 9 aa, Homo sapiens
  Light chain CDR3 for antibody 10070 (IGKV1-37)
QQYHSYPYT

SEQ ID NO: 20140 - protein, 16 aa, Homo sapiens
  Heavy chain CDR3 for antibody 10070 (IGHV4-39)
ARHPLILTGYPNWFDP

SEQ ID NO: 20141 - protein, 9 aa, Homo sapiens
  Light chain CDR3 for antibody 10071 (IGKV1D-16)
QQYNSYPYT

SEQ ID NO: 20142 - protein, 18 aa, Homo sapiens
  Heavy chain CDR3 for antibody 10071 (IGHV3-33)
ARDHCSGGSCYYYYGMDV

SEQ ID NO: 20143 - protein, 9 aa, Homo sapiens
  Light chain CDR3 for antibody 10072 (IGKV1D-16)
QQYACYPPT

SEQ ID NO: 20144 - protein, 14 aa, Homo sapiens
  Heavy chain CDR3 for antibody 10072 (IGHV3-33)
AREGYSSNWYDFDY

SEQ ID NO: 20145 - protein, 8 aa, Homo sapiens
  Light chain CDR3 for antibody 10073 (IGKV1D-13)
QQYNNYPT

SEQ ID NO: 20146 - protein, 14 aa, Homo sapiens
  Heavy chain CDR3 for antibody 10073 (IGHV3-23)
ANWAYDILTGYLDY

SEQ ID NO: 20147 - protein, 8 aa, Homo sapiens
  Light chain CDR3 for antibody 10074 (IGKV1D-13)
QQFNNYPT

SEQ ID NO: 20148 - protein, 17 aa, Homo sapiens
  Heavy chain CDR3 for antibody 10074 (IGHV3-66)
ARVQYDILTGYSPYFDN

SEQ ID NO: 20149 - protein, 9 aa, Homo sapiens
  Light chain CDR3 for antibody 10075 (IGKV1-27)
QKYNSAPYT

SEQ ID NO: 20150 - protein, 13 aa, Homo sapiens
  Heavy chain CDR3 for antibody 10075 (IGHV3-33)
ARVHFDWLDAFDI

SEQ ID NO: 20151 - protein, 9 aa, Homo sapiens
  Light chain CDR3 for antibody 10076 (IGKV3D-7)
QQDYKLPLT

SEQ ID NO: 20152 - protein, 13 aa, Homo sapiens
  Heavy chain CDR3 for antibody 10076 (IGHV3-33)
ARALYSSSWPGDY

SEQ ID NO: 20153 - protein, 9 aa, Homo sapiens
  Light chain CDR3 for antibody 10077 (IGKV2-30)
MQGTHWPYT

SEQ ID NO: 20154 - protein, 10 aa, Homo sapiens
  Heavy chain CDR3 for antibody 10077 (IGHV4-39)
ARQLGNWFDP

SEQ ID NO: 20155 - protein, 9 aa, Homo sapiens
  Light chain CDR3 for antibody 10078 (IGKV1-39)
QQGFSTPWT

SEQ ID NO: 20156 - protein, 17 aa, Homo sapiens
  Heavy chain CDR3 for antibody 10078 (IGHV1-18)
ARDEGYDILTGYPHFDY

SEQ ID NO: 20157 - protein, 8 aa, Homo sapiens
  Light chain CDR3 for antibody 10079 (IGKV3-11)
QQRSNWLT

SEQ ID NO: 20158 - protein, 12 aa, Homo sapiens
  Heavy chain CDR3 for antibody 10079 (IGHV3-23)
AKGYTSFWYFDL

SEQ ID NO: 20159 - protein, 9 aa, Homo sapiens
  Light chain CDR3 for antibody 10080 (IGKV3-11)
QQRINWPWT

SEQ ID NO: 20160 - protein, 18 aa, Homo sapiens
  Heavy chain CDR3 for antibody 10080 (IGHV1-8)
AREGAAAGSYYYYNGMDV

SEQ ID NO: 20161 - protein, 9 aa, Homo sapiens
  Light chain CDR3 for antibody 10081 (IGKV1-39)
QQSYSTPLT

SEQ ID NO: 20162 - protein, 12 aa, Homo sapiens
  Heavy chain CDR3 for antibody 10081 (IGHV3-11)
ARDGPVAGLFDY

SEQ ID NO: 20163 - protein, 9 aa, Homo sapiens
  Light chain CDR3 for antibody 10082 (IGKV1-27)
QKYNSAPYT

SEQ ID NO: 20164 - protein, 13 aa, Homo sapiens
  Heavy chain CDR3 for antibody 10082 (IGHV3-33)
ARSGSCWGYYFDY

SEQ ID NO: 20165 - protein, 10 aa, Homo sapiens
  Light chain CDR3 for antibody 10083 (IGKV3-20)
QQYGRSPPVT

SEQ ID NO: 20166 - protein, 19 aa, Homo sapiens
  Heavy chain CDR3 for antibody 10083 (IGHV5-51)
ARHGEKGKRITMVRGSLDV

SEQ ID NO: 20167 - protein, 9 aa, Homo sapiens
  Light chain CDR3 for antibody 10084 (IGKV1-27)
QKYNSAPYT

SEQ ID NO: 20168 - protein, 13 aa, Homo sapiens
  Heavy chain CDR3 for antibody 10084 (IGHV3-33)
ARCIVAAMGGFDY

SEQ ID NO: 20169 - protein, 9 aa, Homo sapiens
  Light chain CDR3 for antibody 10085 (IGKV1D-13)
QQFNNYPYT

SEQ ID NO: 20170 - protein, 15 aa, Homo sapiens
  Heavy chain CDR3 for antibody 10085 (IGHV1-18)
ARLRWFGELSGWFDP

SEQ ID NO: 20171 - protein, 9 aa, Homo sapiens
  Light chain CDR3 for antibody 10086 (IGKV1D-16)
QQYDSYPYT

SEQ ID NO: 20172 - protein, 18 aa, Homo sapiens
  Heavy chain CDR3 for antibody 10086 (IGHV3-23)
AKEGDYYGSGSYWGYFDP

SEQ ID NO: 20173 - protein, 8 aa, Homo sapiens
  Light chain CDR3 for antibody 10087 (IGKV3-11)
QQRSNWLT

SEQ ID NO: 20174 - protein, 20 aa, Homo sapiens
  Heavy chain CDR3 for antibody 10087 (IGHV3-11)
ARGGATLIRGLIDYYYGMDV

SEQ ID NO: 20175 - protein, 8 aa, Homo sapiens
  Light chain CDR3 for antibody 10088 (IGKV6-21)
HQSSSLPT

SEQ ID NO: 20176 - protein, 14 aa, Homo sapiens
  Heavy chain CDR3 for antibody 10088 (IGHV3-33)
ARKGYSGRYYYFDY

SEQ ID NO: 20177 - protein, 10 aa, Homo sapiens
  Light chain CDR3 for antibody 10089 (IGKV3-11)
QQHSNWPIFT

SEQ ID NO: 20178 - protein, 12 aa, Homo sapiens
  Heavy chain CDR3 for antibody 10089 (IGHV3-23)
AKEGIVGVPFDY

SEQ ID NO: 20179 - protein, 9 aa, Homo sapiens
  Light chain CDR3 for antibody 10090 (IGKV1D-13)
QQFNSYPYT

SEQ ID NO: 20180 - protein, 13 aa, Homo sapiens
  Heavy chain CDR3 for antibody 10090 (IGHV3-11)
ARDGGYRGYVLDN

SEQ ID NO: 20181 - protein, 9 aa, Homo sapiens
  Light chain CDR3 for antibody 10091 (IGKV3D-7)
QQDYKLPYT

SEQ ID NO: 20182 - protein, 11 aa, Homo sapiens
  Heavy chain CDR3 for antibody 10091 (IGHV3-33)
ARGTTVTHFDY

SEQ ID NO: 20183 - protein, 8 aa, Homo sapiens
  Light chain CDR3 for antibody 10092 (IGKV6-21)
HQSSSLYT

SEQ ID NO: 20184 - protein, 15 aa, Homo sapiens
  Heavy chain CDR3 for antibody 10092 (IGHV3-33)
ARDRVVRGVMGYFDY

SEQ ID NO: 20185 - protein, 10 aa, Homo sapiens
  Light chain CDR3 for antibody 10093 (IGKV1-27)
QKYNSAPMYT

SEQ ID NO: 20186 - protein, 13 aa, Homo sapiens
  Heavy chain CDR3 for antibody 10093 (IGHV4-59)
ARTMVRGVAPFDY

SEQ ID NO: 20187 - protein, 9 aa, Homo sapiens
  Light chain CDR3 for antibody 10094 (IGKV1-17)
LQHNSYPYT

SEQ ID NO: 20188 - protein, 15 aa, Homo sapiens
  Heavy chain CDR3 for antibody 10094 (IGHV3-33)
ASRDILTGYSPAFEI

SEQ ID NO: 20189 - protein, 9 aa, Homo sapiens
  Light chain CDR3 for antibody 10095 (IGKV1-9)
QQLISYPLT

SEQ ID NO: 20190 - protein, 15 aa, Homo sapiens
  Heavy chain CDR3 for antibody 10095 (IGHV3-33)
VCVLYDYGDYVRFDY

SEQ ID NO: 20191 - protein, 8 aa, Homo sapiens
  Light chain CDR3 for antibody 10096 (IGKV1-9)
QQYNSYYT

SEQ ID NO: 20192 - protein, 24 aa, Homo sapiens
  Heavy chain CDR3 for antibody 10096 (IGHV1-46)
ARDEARGLLTGYYNMREYYYGMDV

SEQ ID NO: 20193 - protein, 9 aa, Homo sapiens
  Light chain CDR3 for antibody 10097 (IGKV2-30)
MQGTHWPLT

SEQ ID NO: 20194 - protein, 16 aa, Homo sapiens
  Heavy chain CDR3 for antibody 10097 (IGHV3-23)
ARDLGIAAAGTGWFDP

SEQ ID NO: 20195 - protein, 9 aa, Homo sapiens
  Light chain CDR3 for antibody 10098 (IGKV1D-16)
QQYNSYPFT

SEQ ID NO: 20196 - protein, 14 aa, Homo sapiens
  Heavy chain CDR3 for antibody 10098 (IGHV4-39)
ARDSGYDYYYGMDA

SEQ ID NO: 20197 - protein, 9 aa, Homo sapiens
  Light chain CDR3 for antibody 10099 (IGKV1-33)
QQYDNLPFT

SEQ ID NO: 20198 - protein, 9 aa, Homo sapiens
  Heavy chain CDR3 for antibody 10099 (IGHV3-30)
AREYKEFDY

SEQ ID NO: 20199 - protein, 9 aa, Homo sapiens
  Light chain CDR3 for antibody 10100 (IGKV1-16)
QQYITYPYT

SEQ ID NO: 20200 - protein, 8 aa, Homo sapiens
  Heavy chain CDR3 for antibody 10100 (IGHV3-23)
AETFLFDY

SEQ ID NO: 20201 - protein, 9 aa, Homo sapiens
  Light chain CDR3 for antibody 10101 (IGKV2D-28)
MQVLQTPFT

SEQ ID NO: 20202 - protein, 9 aa, Homo sapiens
  Heavy chain CDR3 for antibody 10101 (IGHV4-59)
ARGGASFDY

SEQ ID NO: 20203 - protein, 9 aa, Homo sapiens
  Light chain CDR3 for antibody 10102 (IGKV3-20)
LQYGSSPYT

SEQ ID NO: 20204 - protein, 16 aa, Homo sapiens
  Heavy chain CDR3 for antibody 10102 (IGHV4-59)
ARYIGSYYRDYYGMDV

SEQ ID NO: 20205 - protein, 8 aa, Homo sapiens
  Light chain CDR3 for antibody 10103 (IGKV6-21)
HQSSSLPT

SEQ ID NO: 20206 - protein, 13 aa, Homo sapiens
  Heavy chain CDR3 for antibody 10103 (IGHV3-33)
ARKAYGDYFYFDY

SEQ ID NO: 20207 - protein, 9 aa, Homo sapiens
  Light chain CDR3 for antibody 10104 (IGKV1-6)
LQDYNSPWT

SEQ ID NO: 20208 - protein, 9 aa, Homo sapiens
  Heavy chain CDR3 for antibody 10104 (IGHV3-33)
ARVRGVIDY

SEQ ID NO: 20209 - protein, 9 aa, Homo sapiens
  Light chain CDR3 for antibody 10105 (IGKV1-6)
QQLNSYPWP

SEQ ID NO: 20210 - protein, 17 aa, Homo sapiens
  Heavy chain CDR3 for antibody 10105 (IGHV3-33)
ARGYCSRTSCYLYYFDY

SEQ ID NO: 20211 - protein, 9 aa, Homo sapiens
  Light chain CDR3 for antibody 10106 (IGKV3-20)
QLYGSSPYT

SEQ ID NO: 20212 - protein, 17 aa, Homo sapiens
  Heavy chain CDR3 for antibody 10106 (IGHV1-18)
ARDEGYDILTGYPHFDY

SEQ ID NO: 20213 - protein, 9 aa, Homo sapiens
  Light chain CDR3 for antibody 10107 (IGKV1-39)
QQGFSTPWT

SEQ ID NO: 20214 - protein, 11 aa, Homo sapiens
  Heavy chain CDR3 for antibody 10107 (IGHV4-59)
ARESFYGSGNL

SEQ ID NO: 20215 - protein, 10 aa, Homo sapiens
  Light chain CDR3 for antibody 10108 (IGKV3-15)
QQYNNWPPYT

SEQ ID NO: 20216 - protein, 11 aa, Homo sapiens
  Heavy chain CDR3 for antibody 10108 (IGHV3-33)
ARAGIAALFDY

SEQ ID NO: 20217 - protein, 10 aa, Homo sapiens
  Light chain CDR3 for antibody 10109 (IGKV1-39)
QQSYSTPMYT

SEQ ID NO: 20218 - protein, 14 aa, Homo sapiens
  Heavy chain CDR3 for antibody 10109 (IGHV3-33)
AREDYYGPLNWFDP

SEQ ID NO: 20219 - protein, 9 aa, Homo sapiens
  Light chain CDR3 for antibody 10110 (IGKV3-15)
QQYINWPLT

SEQ ID NO: 20220 - protein, 16 aa, Homo sapiens
  Heavy chain CDR3 for antibody 10110 (IGHV3-33)
AREMAGSYYYYYGMDV

SEQ ID NO: 20221 - protein, 9 aa, Homo sapiens
  Light chain CDR3 for antibody 10111 (IGKV1D-16)
QQYNTYSRT

SEQ ID NO: 20222 - protein, 17 aa, Homo sapiens
  Heavy chain CDR3 for antibody 10111 (IGHV3-33)
ARAYYDILTGYSYYFDY

SEQ ID NO: 20223 - protein, 9 aa, Homo sapiens
  Light chain CDR3 for antibody 10112 (IGKV1-9)
QQLNSYPHT

SEQ ID NO: 20224 - protein, 10 aa, Homo sapiens
  Heavy chain CDR3 for antibody 10112 (IGHV3-33)
ARDILTGYYH

SEQ ID NO: 20225 - protein, 9 aa, Homo sapiens
  Light chain CDR3 for antibody 10113 (IGKV3-11)
QQRSNWPPT

SEQ ID NO: 20226 - protein, 23 aa, Homo sapiens
  Heavy chain CDR3 for antibody 10113 (IGHV3-11)
ARDEGVTMLRGVISYYYYYGMDV

SEQ ID NO: 20227 - protein, 8 aa, Homo sapiens
  Light chain CDR3 for antibody 10114 (IGKV3D-7)
QQDYNLLT

SEQ ID NO: 20228 - protein, 18 aa, Homo sapiens
  Heavy chain CDR3 for antibody 10114 (IGHV3-33)
ARGGYDILTGYYRTGMDV

SEQ ID NO: 20229 - protein, 9 aa, Homo sapiens
  Light chain CDR3 for antibody 10115 (IGKV3-15)
QQYNNWPRT

SEQ ID NO: 20230 - protein, 7 aa, Homo sapiens
  Heavy chain CDR3 for antibody 10115 (IGHV3-33)
ARELVDY

SEQ ID NO: 20231 - protein, 9 aa, Homo sapiens
  Light chain CDR3 for antibody 10116 (IGKV1-17)
LQHTSYPFT

SEQ ID NO: 20232 - protein, 12 aa, Homo sapiens
  Heavy chain CDR3 for antibody 10116 (IGHV1-46)
ARGLTGDHAVDI

SEQ ID NO: 20233 - protein, 9 aa, Homo sapiens
  Light chain CDR3 for antibody 10117 (IGKV1-9)
QQLNSYPLT

SEQ ID NO: 20234 - protein, 15 aa, Homo sapiens
  Heavy chain CDR3 for antibody 10117 (IGHV4-39)
ARRSKYSSAWYPFDY

SEQ ID NO: 20235 - protein, 8 aa, Homo sapiens
  Light chain CDR3 for antibody 10118 (IGKV3-11)
LQRGNWPT

SEQ ID NO: 20236 - protein, 12 aa, Homo sapiens
  Heavy chain CDR3 for antibody 10118 (IGHV3-23)
AKDGWFGESLDY

SEQ ID NO: 20237 - protein, 9 aa, Homo sapiens
  Light chain CDR3 for antibody 10119 (IGKV1-17)
LQQNSYPWT

SEQ ID NO: 20238 - protein, 12 aa, Homo sapiens
  Heavy chain CDR3 for antibody 10119 (IGHV3-33)
ARGYFGSGYADF

SEQ ID NO: 20239 - protein, 9 aa, Homo sapiens
  Light chain CDR3 for antibody 10120 (IGKV3-11)
QQRINWPLT

SEQ ID NO: 20240 - protein, 17 aa, Homo sapiens
  Heavy chain CDR3 for antibody 10120 (IGHV1-24)
ATEGYDILPGYYNVLDY

SEQ ID NO: 20241 - protein, 8 aa, Homo sapiens
  Light chain CDR3 for antibody 10121 (IGKV3-20)
QQYGSSFT

SEQ ID NO: 20242 - protein, 13 aa, Homo sapiens
  Heavy chain CDR3 for antibody 10121 (IGHV4-39)
ARRDVLAPAAFDY

SEQ ID NO: 20243 - protein, 8 aa, Homo sapiens
  Light chain CDR3 for antibody 10122 (IGKV3D-7)
QQDYNLVT

SEQ ID NO: 20244 - protein, 12 aa, Homo sapiens
  Heavy chain CDR3 for antibody 10122 (IGHV4-39)
ARQGAYSRFFDY

SEQ ID NO: 20245 - protein, 9 aa, Homo sapiens
  Light chain CDR3 for antibody 10123 (IGKV2D-24)
TQATQFPHT

SEQ ID NO: 20246 - protein, 18 aa, Homo sapiens
  Heavy chain CDR3 for antibody 10123 (IGHV3-33)
ARDGYSGYDYYYYYGMDV

SEQ ID NO: 20247 - protein, 9 aa, Homo sapiens
  Light chain CDR3 for antibody 10124 (IGKV2-30)
MQGTHWPLT

SEQ ID NO: 20248 - protein, 15 aa, Homo sapiens
  Heavy chain CDR3 for antibody 10124 (IGHV1-18)
ARRSPNWGHYYGMDV

SEQ ID NO: 20249 - protein, 9 aa, Homo sapiens
  Light chain CDR3 for antibody 10125 (IGKV1-6)
LQVYSYPWT

SEQ ID NO: 20250 - protein, 15 aa, Homo sapiens
  Heavy chain CDR3 for antibody 10125 (IGHV3-30)
ARGAMVRGVDYGMDV

SEQ ID NO: 20251 - protein, 9 aa, Homo sapiens
  Light chain CDR3 for antibody 10126 (IGKV1-6)
LQDYNYPYT

SEQ ID NO: 20252 - protein, 12 aa, Homo sapiens
  Heavy chain CDR3 for antibody 10126 (IGHV3-23)
AKDGYSYGYFDY

SEQ ID NO: 20253 - protein, 8 aa, Homo sapiens
  Light chain CDR3 for antibody 10127 (IGKV3-20)
QQYGSSLT

SEQ ID NO: 20254 - protein, 18 aa, Homo sapiens
  Heavy chain CDR3 for antibody 10127 (IGHV3-33)
ARDRDRYGSGTYPDAIDI

SEQ ID NO: 20255 - protein, 9 aa, Homo sapiens
  Light chain CDR3 for antibody 10128 (IGKV3D-7)
QQDYTLPLT

SEQ ID NO: 20256 - protein, 18 aa, Homo sapiens
  Heavy chain CDR3 for antibody 10128 (IGHV4-55)
AREGDYVWGSYRPNWFDP

SEQ ID NO: 20257 - protein, 9 aa, Homo sapiens
  Light chain CDR3 for antibody 10129 (IGKV3-11)
QQRSSWPPT

SEQ ID NO: 20258 - protein, 18 aa, Homo sapiens
  Heavy chain CDR3 for antibody 10129 (IGHV3-23)
AKDRITGTTYGYYSGLDV

SEQ ID NO: 20259 - protein, 9 aa, Homo sapiens
  Light chain CDR3 for antibody 10130 (IGKV4-1)
QQYYTTPPT

SEQ ID NO: 20260 - protein, 18 aa, Homo sapiens
  Heavy chain CDR3 for antibody 10130 (IGHV1-46)
ARDGDYAWGSYRSDWFDP

SEQ ID NO: 20261 - protein, 9 aa, Homo sapiens
  Light chain CDR3 for antibody 10131 (IGKV1-17)
LQQNSYPWT

SEQ ID NO: 20262 - protein, 17 aa, Homo sapiens
  Heavy chain CDR3 for antibody 10131 (IGHV4-59)
ARDGLVRGEGSYYGMDV

SEQ ID NO: 20263 - protein, 9 aa, Homo sapiens
  Light chain CDR3 for antibody 10132 (IGKV3D-7)
QQDYEFPIT

SEQ ID NO: 20264 - protein, 14 aa, Homo sapiens
  Heavy chain CDR3 for antibody 10132 (IGHV4-39)
ARQGTMIRGGYFDY

SEQ ID NO: 20265 - protein, 9 aa, Homo sapiens
  Light chain CDR3 for antibody 10133 (IGKV3D-7)
QQDYNLPWT

SEQ ID NO: 20266 - protein, 18 aa, Homo sapiens
  Heavy chain CDR3 for antibody 10133 (IGHV3-33)
ARRSAAGTGDYYYCGIDV

SEQ ID NO: 20267 - protein, 9 aa, Homo sapiens
  Light chain CDR3 for antibody 10134 (IGKV1D-13)
QQFNNYPYT

SEQ ID NO: 20268 - protein, 18 aa, Homo sapiens
  Heavy chain CDR3 for antibody 10134 (IGHV3-64)
ARDEYYYGSGSYYNYFDW

SEQ ID NO: 20269 - protein, 9 aa, Homo sapiens
  Light chain CDR3 for antibody 10135 (IGKV1-39)
QQSYRTPLT

SEQ ID NO: 20270 - protein, 14 aa, Homo sapiens
  Heavy chain CDR3 for antibody 10135 (IGHV3-33)
AREGILTGYYPFDY

SEQ ID NO: 20271 - protein, 8 aa, Homo sapiens
  Light chain CDR3 for antibody 10136 (IGKV3D-7)
QQDYSLLT

SEQ ID NO: 20272 - protein, 12 aa, Homo sapiens
  Heavy chain CDR3 for antibody 10136 (IGHV3-33)
ARGGIAVDVCDI

SEQ ID NO: 20273 - protein, 9 aa, Homo sapiens
  Light chain CDR3 for antibody 10137 (IGKV1-6)
LQSNNYPWT

SEQ ID NO: 20274 - protein, 12 aa, Homo sapiens
  Heavy chain CDR3 for antibody 10137 (IGHV3-33)
AREGDILTGYAL

SEQ ID NO: 20275 - protein, 9 aa, Homo sapiens
  Light chain CDR3 for antibody 10138 (IGKV1-9)
QQLNNYLFT

SEQ ID NO: 20276 - protein, 11 aa, Homo sapiens
  Heavy chain CDR3 for antibody 10138 (IGHV4-59)
AREMGHDTFDI

SEQ ID NO: 20277 - protein, 10 aa, Homo sapiens
  Light chain CDR3 for antibody 10139 (IGKV1-17)
LQHNSYPMYT

SEQ ID NO: 20278 - protein, 16 aa, Homo sapiens
  Heavy chain CDR3 for antibody 10139 (IGHV3-33)
ARDNFGSGSYYSHFHY

SEQ ID NO: 20279 - protein, 9 aa, Homo sapiens
  Light chain CDR3 for antibody 10140 (IGKV1-9)
QQLHIYPWT

SEQ ID NO: 20280 - protein, 13 aa, Homo sapiens
  Heavy chain CDR3 for antibody 10140 (IGHV4-39)
ARQWPSGYWYFDL

SEQ ID NO: 20281 - protein, 9 aa, Homo sapiens
  Light chain CDR3 for antibody 10141 (IGKV2-30)
MQGTHWPLT

SEQ ID NO: 20282 - protein, 13 aa, Homo sapiens
  Heavy chain CDR3 for antibody 10141 (IGHV4-39)
ARHEVMIRGVFDY

SEQ ID NO: 20283 - protein, 9 aa, Homo sapiens
  Light chain CDR3 for antibody 10142 (IGKV3-20)
QQYGSSPYT

SEQ ID NO: 20284 - protein, 13 aa, Homo sapiens
  Heavy chain CDR3 for antibody 10142 (IGHV3-53)
ARDRDSSGSYFDY

SEQ ID NO: 20285 - protein, 9 aa, Homo sapiens
  Light chain CDR3 for antibody 10143 (IGKV3-15)
QQYNNWPRT

SEQ ID NO: 20286 - protein, 15 aa, Homo sapiens
  Heavy chain CDR3 for antibody 10143 (IGHV3-33)
ARRGYNDYDPYGMDV

SEQ ID NO: 20287 - protein, 9 aa, Homo sapiens
  Light chain CDR3 for antibody 10144 (IGKV1-16)
QQLNSYPWT

SEQ ID NO: 20288 - protein, 16 aa, Homo sapiens
  Heavy chain CDR3 for antibody 10144 (IGHV4-39)
ARDTPYYSGSGRPFDY

SEQ ID NO: 20289 - protein, 9 aa, Homo sapiens
  Light chain CDR3 for antibody 10145 (IGKV1-9)
QQLNNYLFT

SEQ ID NO: 20290 - protein, 12 aa, Homo sapiens
  Heavy chain CDR3 for antibody 10145 (IGHV4-39)
ARQMVREGWFDP

SEQ ID NO: 20291 - protein, 8 aa, Homo sapiens
  Light chain CDR3 for antibody 10146 (IGKV3D-7)
QQDYNLLT

SEQ ID NO: 20292 - protein, 19 aa, Homo sapiens
  Heavy chain CDR3 for antibody 10146 (IGHV3-33)
ARGRGSYYYGPGSHYGMDV

SEQ ID NO: 20293 - protein, 8 aa, Homo sapiens
  Light chain CDR3 for antibody 10147 (IGKV3-20)
QQYGRSFT

SEQ ID NO: 20294 - protein, 9 aa, Homo sapiens
  Heavy chain CDR3 for antibody 10147 (IGHV3-13)
ARERWYFDL

SEQ ID NO: 20295 - protein, 9 aa, Homo sapiens
  Light chain CDR3 for antibody 10148 (IGKV1-9)
QQYNTYSRT

SEQ ID NO: 20296 - protein, 15 aa, Homo sapiens
  Heavy chain CDR3 for antibody 10148 (IGHV3-33)
ARRICSGGSCSLFDY

SEQ ID NO: 20297 - protein, 9 aa, Homo sapiens
  Light chain CDR3 for antibody 10149 (IGKV1D-16)
QQYNSYPYT

SEQ ID NO: 20298 - protein, 17 aa, Homo sapiens
  Heavy chain CDR3 for antibody 10149 (IGHV3-23)
AKGNYGSGSYYKGDFHH

SEQ ID NO: 20299 - protein, 9 aa, Homo sapiens
  Light chain CDR3 for antibody 10150 (IGKV1-16)
QHYNDYPFT

SEQ ID NO: 20300 - protein, 9 aa, Homo sapiens
  Heavy chain CDR3 for antibody 10150 (IGHV3-13)
ARDRWYFDL

SEQ ID NO: 20301 - protein, 9 aa, Homo sapiens
  Light chain CDR3 for antibody 10151 (IGKV1-6)
LQDYNHPFT

SEQ ID NO: 20302 - protein, 15 aa, Homo sapiens
  Heavy chain CDR3 for antibody 10151 (IGHV3-33)
ARDTGYSSSWNWFDP

SEQ ID NO: 20303 - protein, 9 aa, Homo sapiens
  Light chain CDR3 for antibody 10152 (IGKV1D-16)
QQYDSYPLT

SEQ ID NO: 20304 - protein, 14 aa, Homo sapiens
  Heavy chain CDR3 for antibody 10152 (IGHV3-33)
ARDNILTGYYLFDY

SEQ ID NO: 20305 - protein, 9 aa, Homo sapiens
  Light chain CDR3 for antibody 10153 (IGKV1-6)
LQDYNYPYT

SEQ ID NO: 20306 - protein, 15 aa, Homo sapiens
  Heavy chain CDR3 for antibody 10153 (IGHV3-33)
ARERGYYGSGSFFDY

SEQ ID NO: 20307 - protein, 9 aa, Homo sapiens
  Light chain CDR3 for antibody 10154 (IGKV3-11)
QQRSNWMYT

SEQ ID NO: 20308 - protein, 12 aa, Homo sapiens
  Heavy chain CDR3 for antibody 10154 (IGHV4-28)
ARKDSGYDWFDY

SEQ ID NO: 20309 - protein, 9 aa, Homo sapiens
  Light chain CDR3 for antibody 10155 (IGKV1-17)
QQDKSYPYT

SEQ ID NO: 20310 - protein, 16 aa, Homo sapiens
  Heavy chain CDR3 for antibody 10155 (IGHV1-24)
TTEGGTVDYYYYGMDV

SEQ ID NO: 20311 - protein, 9 aa, Homo sapiens
  Light chain CDR3 for antibody 10156 (IGKV1-6)
LQDYNYPYT

SEQ ID NO: 20312 - protein, 12 aa, Homo sapiens
  Heavy chain CDR3 for antibody 10156 (IGHV3-21)
ARDGGRYGDFDY

SEQ ID NO: 20313 - protein, 9 aa, Homo sapiens
  Light chain CDR3 for antibody 10157 (IGKV1-9)
QQLNGYPFT

SEQ ID NO: 20314 - protein, 10 aa, Homo sapiens
  Heavy chain CDR3 for antibody 10157 (IGHV3-23)
AKDQVGATDC

SEQ ID NO: 20315 - protein, 9 aa, Homo sapiens
  Light chain CDR3 for antibody 10158 (IGKV2D-28)
MQALQTPPT

SEQ ID NO: 20316 - protein, 18 aa, Homo sapiens
  Heavy chain CDR3 for antibody 10158 (IGHV3-23)
ARGGYSSGWDYYYYGMDV

SEQ ID NO: 20317 - protein, 9 aa, Homo sapiens
  Light chain CDR3 for antibody 10159 (IGKV3-11)
QQRSNWMYT

SEQ ID NO: 20318 - protein, 16 aa, Homo sapiens
  Heavy chain CDR3 for antibody 10159 (IGHV4-55)
ARYSGSYYGDYYGMDV

SEQ ID NO: 20319 - protein, 6 aa, Homo sapiens
  Light chain CDR3 for antibody 10160 (IGKV3-20)
QQYGST

SEQ ID NO: 20320 - protein, 14 aa, Homo sapiens
  Heavy chain CDR3 for antibody 10160 (IGHV3-33)
AREGYSSNWYDFDY

SEQ ID NO: 20321 - protein, 9 aa, Homo sapiens
  Light chain CDR3 for antibody 10161 (IGKV4-1)
QQYYSTPPT

SEQ ID NO: 20322 - protein, 12 aa, Homo sapiens
  Heavy chain CDR3 for antibody 10161 (IGHV1-46)
ARGLTGDYAVDI

SEQ ID NO: 20323 - protein, 9 aa, Homo sapiens
  Light chain CDR3 for antibody 10162 (IGKV3D-7)
QQDYNLPFT

SEQ ID NO: 20324 - protein, 16 aa, Homo sapiens
  Heavy chain CDR3 for antibody 10162 (IGHV3-23)
AKDGIGELSYYYGMDV

SEQ ID NO: 20325 - protein, 9 aa, Homo sapiens
  Light chain CDR3 for antibody 10163 (IGKV3-15)
QQYNNWPYT

SEQ ID NO: 20326 - protein, 12 aa, Homo sapiens
  Heavy chain CDR3 for antibody 10163 (IGHV4-61)
ARVDSSGWYFDY

SEQ ID NO: 20327 - protein, 10 aa, Homo sapiens
  Light chain CDR3 for antibody 10164 (IGKV1-6)
LQDYNYPMYT

SEQ ID NO: 20328 - protein, 14 aa, Homo sapiens
  Heavy chain CDR3 for antibody 10164 (IGHV3-33)
ARDWNDVYYYGMDV

SEQ ID NO: 20329 - protein, 8 aa, Homo sapiens
  Light chain CDR3 for antibody 10165 (IGKV6-21)
HQSSSLPT

SEQ ID NO: 20330 - protein, 14 aa, Homo sapiens
  Heavy chain CDR3 for antibody 10165 (IGHV3-64)
VRDQGSMVRGGGDY

SEQ ID NO: 20331 - protein, 9 aa, Homo sapiens
  Light chain CDR3 for antibody 10166 (IGKV1-6)
LQDFHYPWT

SEQ ID NO: 20332 - protein, 14 aa, Homo sapiens
  Heavy chain CDR3 for antibody 10166 (IGHV1-46)
ARRGIVGALDALDI

SEQ ID NO: 20333 - protein, 9 aa, Homo sapiens
  Light chain CDR3 for antibody 10167 (IGKV1-33)
QQYDNLPFT

SEQ ID NO: 20334 - protein, 20 aa, Homo sapiens
  Heavy chain CDR3 for antibody 10167 (IGHV3-33)
SRGGATLVRGVIDYYYGMDV

SEQ ID NO: 20335 - protein, 9 aa, Homo sapiens
  Light chain CDR3 for antibody 10168 (IGKV3-11)
QQRSNWPYT

SEQ ID NO: 20336 - protein, 21 aa, Homo sapiens
  Heavy chain CDR3 for antibody 10168 (IGHV3-33)
ARDGGITMGRGVYYYYYGMDV

SEQ ID NO: 20337 - protein, 10 aa, Homo sapiens
  Light chain CDR3 for antibody 10169 (IGKV3-11)
QQRSNWPMYT

SEQ ID NO: 20338 - protein, 13 aa, Homo sapiens
  Heavy chain CDR3 for antibody 10169 (IGHV3-11)
AREGIAVAGDFDF

SEQ ID NO: 20339 - protein, 9 aa, Homo sapiens
  Light chain CDR3 for antibody 10170 (IGKV3-11)
QQRSYWPLT

SEQ ID NO: 20340 - protein, 8 aa, Homo sapiens
  Heavy chain CDR3 for antibody 10170 (IGHV4-4)
ARGARFDP

SEQ ID NO: 20341 - protein, 8 aa, Homo sapiens
  Light chain CDR3 for antibody 10171 (IGKV3-11)
LQRGNWPT

SEQ ID NO: 20342 - protein, 14 aa, Homo sapiens
  Heavy chain CDR3 for antibody 10171 (IGHV3-15)
ARTTAAAGPRDFQH

SEQ ID NO: 20343 - protein, 11 aa, Homo sapiens
  Light chain CDR3 for antibody 10172 (IGKV3-11)
QQRSNWPPMYT

SEQ ID NO: 20344 - protein, 13 aa, Homo sapiens
  Heavy chain CDR3 for antibody 10172 (IGHV3-23)
AKDRGLRYYGMDV

SEQ ID NO: 20345 - protein, 8 aa, Homo sapiens
  Light chain CDR3 for antibody 10173 (IGKV3-20)
QQYGRSFT

SEQ ID NO: 20346 - protein, 14 aa, Homo sapiens
  Heavy chain CDR3 for antibody 10173 (IGHV4-39)
ARQGTMIRGGYFDY

SEQ ID NO: 20347 - protein, 9 aa, Homo sapiens
  Light chain CDR3 for antibody 10174 (IGKV1D-16)
QQYDSYPYT

SEQ ID NO: 20348 - protein, 15 aa, Homo sapiens
  Heavy chain CDR3 for antibody 10174 (IGHV3-23)
ARAFFMVRGVITPDY

SEQ ID NO: 20349 - protein, 9 aa, Homo sapiens
  Light chain CDR3 for antibody 10175 (IGKV1-5)
QQYNTYSRT

SEQ ID NO: 20350 - protein, 8 aa, Homo sapiens
  Heavy chain CDR3 for antibody 10175 (IGHV3-23)
AETFLFDY

SEQ ID NO: 20351 - protein, 9 aa, Homo sapiens
  Light chain CDR3 for antibody 10176 (IGKV1-5)
QQYNTYSRT

SEQ ID NO: 20352 - protein, 13 aa, Homo sapiens
  Heavy chain CDR3 for antibody 10176 (IGHV1-18)
ARSITMVRGVIGY

SEQ ID NO: 20353 - protein, 9 aa, Homo sapiens
  Light chain CDR3 for antibody 10177 (IGKV2-30)
MQGTHWPLT

SEQ ID NO: 20354 - protein, 10 aa, Homo sapiens
  Heavy chain CDR3 for antibody 10177 (IGHV3-33)
ARVVDTAMAY

SEQ ID NO: 20355 - protein, 9 aa, Homo sapiens
  Light chain CDR3 for antibody 10178 (IGKV3-15)
QQYHNWPLT

SEQ ID NO: 20356 - protein, 20 aa, Homo sapiens
  Heavy chain CDR3 for antibody 10178 (IGHV1-f)
ATGLITFVRGVILTYRSFDY

SEQ ID NO: 20357 - protein, 9 aa, Homo sapiens
  Light chain CDR3 for antibody 10179 (IGKV1-6)
LQDYNYPYT

SEQ ID NO: 20358 - protein, 20 aa, Homo sapiens
  Heavy chain CDR3 for antibody 10179 (IGHV3-30)
ARVGAAMIRGLIDYYYGMDV

SEQ ID NO: 20359 - protein, 9 aa, Homo sapiens
  Light chain CDR3 for antibody 10180 (IGKV1-39)
QQSYSTPYT

SEQ ID NO: 20360 - protein, 11 aa, Homo sapiens
  Heavy chain CDR3 for antibody 10180 (IGHV3-33)
ARDRGYSYFDY

SEQ ID NO: 20361 - protein, 9 aa, Homo sapiens
  Light chain CDR3 for antibody 10181 (IGKV1-9)
QQLNSYPWP

SEQ ID NO: 20362 - protein, 15 aa, Homo sapiens
  Heavy chain CDR3 for antibody 10181 (IGHV3-33)
ARRGYNDYDPYGMDV

SEQ ID NO: 20363 - protein, 9 aa, Homo sapiens
  Light chain CDR3 for antibody 10182 (IGKV1-6)
LQDYNYPYT

SEQ ID NO: 20364 - protein, 16 aa, Homo sapiens
  Heavy chain CDR3 for antibody 10182 (IGHV1-24)
ATDGYYYGSGSYLFDY

SEQ ID NO: 20365 - protein, 9 aa, Homo sapiens
  Light chain CDR3 for antibody 10183 (IGKV2D-28)
MQALQTPYT

SEQ ID NO: 20366 - protein, 17 aa, Homo sapiens
  Heavy chain CDR3 for antibody 10183 (IGHV3-33)
VREGGLLWVGELSLFDY

SEQ ID NO: 20367 - protein, 10 aa, Homo sapiens
  Light chain CDR3 for antibody 10184 (IGKV3-15)
QQYNNWPPYT

SEQ ID NO: 20368 - protein, 13 aa, Homo sapiens
  Heavy chain CDR3 for antibody 10184 (IGHV4-39)
ARREVVGGRGFDY

SEQ ID NO: 20369 - protein, 9 aa, Homo sapiens
  Light chain CDR3 for antibody 10185 (IGKV3D-7)
QQDYILPWT

SEQ ID NO: 20370 - protein, 12 aa, Homo sapiens
  Heavy chain CDR3 for antibody 10185 (IGHV3-h)
AREDYYYYGMDV

SEQ ID NO: 20371 - protein, 9 aa, Homo sapiens
  Light chain CDR3 for antibody 10186 (IGKV3D-7)
QQDSNLPYT

SEQ ID NO: 20372 - protein, 17 aa, Homo sapiens
  Heavy chain CDR3 for antibody 10186 (IGHV4-39)
ARQGWYYGSGSSLLFDY

SEQ ID NO: 20373 - protein, 8 aa, Homo sapiens
  Light chain CDR3 for antibody 10187 (IGKV3-20)
QQYGSSFT

SEQ ID NO: 20374 - protein, 10 aa, Homo sapiens
  Heavy chain CDR3 for antibody 10187 (IGHV1-46)
ARGAYYGMDV

SEQ ID NO: 20375 - protein, 9 aa, Homo sapiens
  Light chain CDR3 for antibody 10188 (IGKV1-5)
QQYNTYSRT

SEQ ID NO: 20376 - protein, 18 aa, Homo sapiens
  Heavy chain CDR3 for antibody 10188 (IGHV3-74)
ARDRDRYGSGTYPDAIDI

SEQ ID NO: 20377 - protein, 8 aa, Homo sapiens
  Light chain CDR3 for antibody 10189 (IGKV1-5)
QQYNSYST

SEQ ID NO: 20378 - protein, 12 aa, Homo sapiens
  Heavy chain CDR3 for antibody 10189 (IGHV1-18)
ARRDGSGTSFDY

SEQ ID NO: 20379 - protein, 9 aa, Homo sapiens
  Light chain CDR3 for antibody 10190 (IGKV1D-13)
QQFNNYPYT

SEQ ID NO: 20380 - protein, 14 aa, Homo sapiens
  Heavy chain CDR3 for antibody 10190 (IGHV3-33)
ARDGYDILTGPMDV

SEQ ID NO: 20381 - protein, 9 aa, Homo sapiens
  Light chain CDR3 for antibody 10191 (IGKV1D-13)
QQFNNYMYT

SEQ ID NO: 20382 - protein, 14 aa, Homo sapiens
  Heavy chain CDR3 for antibody 10191 (IGHV3-15)
SIYYYGSGRDFFDY

SEQ ID NO: 20383 - protein, 9 aa, Homo sapiens
  Light chain CDR3 for antibody 10192 (IGKV1-6)
LQAYNFPYT

SEQ ID NO: 20384 - protein, 17 aa, Homo sapiens
  Heavy chain CDR3 for antibody 10192 (IGHV3-33)
ARDRDDILTGVCTYLDY

SEQ ID NO: 20385 - protein, 8 aa, Homo sapiens
  Light chain CDR3 for antibody 10193 (IGKV2D-28)
MQALQTPT

SEQ ID NO: 20386 - protein, 13 aa, Homo sapiens
  Heavy chain CDR3 for antibody 10193 (IGHV3-33)
ARQSSGWFDAFDI

SEQ ID NO: 20387 - protein, 9 aa, Homo sapiens
  Light chain CDR3 for antibody 10194 (IGKV1-16)
QQYKSYPYT

SEQ ID NO: 20388 - protein, 13 aa, Homo sapiens
  Heavy chain CDR3 for antibody 10194 (IGHV3-33)
ARTDYYYYYGMDV

SEQ ID NO: 20389 - protein, 9 aa, Homo sapiens
  Light chain CDR3 for antibody 10195 (IGKV4-1)
QQYYSTPYT

SEQ ID NO: 20390 - protein, 13 aa, Homo sapiens
  Heavy chain CDR3 for antibody 10195 (IGHV3-33)
ANTGDSYYYDMDV

SEQ ID NO: 20391 - protein, 9 aa, Homo sapiens
  Light chain CDR3 for antibody 10196 (IGKV2-30)
MQGTHWPLT

SEQ ID NO: 20392 - protein, 15 aa, Homo sapiens
  Heavy chain CDR3 for antibody 10196 (IGHV3-33)
ARDRVQLGYYYGMDV

SEQ ID NO: 20393 - protein, 9 aa, Homo sapiens
  Light chain CDR3 for antibody 10197 (IGKV5-2)
LQRDKFPYT

SEQ ID NO: 20394 - protein, 19 aa, Homo sapiens
  Heavy chain CDR3 for antibody 10197 (IGHV3-33)
ARGVRLRYFDPYYYYCMDV

SEQ ID NO: 20395 - protein, 9 aa, Homo sapiens
  Light chain CDR3 for antibody 10198 (IGKV3-20)
QQYGSSLYT

SEQ ID NO: 20396 - protein, 16 aa, Homo sapiens
  Heavy chain CDR3 for antibody 10198 (IGHV1-18)
ARANPGAVGYYYGMDV

SEQ ID NO: 20397 - protein, 10 aa, Homo sapiens
  Light chain CDR3 for antibody 10199 (IGKV1-17)
LQHNSYPMYT

SEQ ID NO: 20398 - protein, 13 aa, Homo sapiens
  Heavy chain CDR3 for antibody 10199 (IGHV3-33)
ARQSSGWFDAFDI

SEQ ID NO: 20399 - protein, 7 aa, Homo sapiens
  Light chain CDR3 for antibody 10200 (IGKV1-17)
LQHNSYP

SEQ ID NO: 20400 - protein, 17 aa, Homo sapiens
  Heavy chain CDR3 for antibody 10200 (IGHV1-18)
ARDEGYDILTGYPHFDY

SEQ ID NO: 20401 - protein, 9 aa, Homo sapiens
  Light chain CDR3 for antibody 10201 (IGKV1-16)
QHYNDYPFT

SEQ ID NO: 20402 - protein, 12 aa, Homo sapiens
  Heavy chain CDR3 for antibody 10201 (IGHV3-33)
ARESGGSYSFDY

SEQ ID NO: 20403 - protein, 9 aa, Homo sapiens
  Light chain CDR3 for antibody 10202 (IGKV1-6)
LQQNSYPYT

SEQ ID NO: 20404 - protein, 14 aa, Homo sapiens
  Heavy chain CDR3 for antibody 10202 (IGHV4-34)
ARGGYNWNDDWFDP

SEQ ID NO: 20405 - protein, 9 aa, Homo sapiens
  Light chain CDR3 for antibody 10203 (IGKV1-9)
QQLISYPLT

SEQ ID NO: 20406 - protein, 20 aa, Homo sapiens
  Heavy chain CDR3 for antibody 10203 (IGHV3-33)
AREDYYGSGSYYPAYNWFDP

SEQ ID NO: 20407 - protein, 9 aa, Homo sapiens
  Light chain CDR3 for antibody 10204 (IGKV1D-16)
LQHNTYPLT

SEQ ID NO: 20408 - protein, 16 aa, Homo sapiens
  Heavy chain CDR3 for antibody 10204 (IGHV3-33)
AREMAGSYYYYYGMDV

SEQ ID NO: 20409 - protein, 9 aa, Homo sapiens
  Light chain CDR3 for antibody 10205 (IGKV6-21)
HQSTSLPFT

SEQ ID NO: 20410 - protein, 12 aa, Homo sapiens
  Heavy chain CDR3 for antibody 10205 (IGHV4-61)
ARVYSSGWLFDY

SEQ ID NO: 20411 - protein, 10 aa, Homo sapiens
  Light chain CDR3 for antibody 10206 (IGKV3-15)
QQYNNWPPLT

SEQ ID NO: 20412 - protein, 11 aa, Homo sapiens
  Heavy chain CDR3 for antibody 10206 (IGHV3-33)
ARDILTGFLDH

SEQ ID NO: 20413 - protein, 8 aa, Homo sapiens
  Light chain CDR3 for antibody 10207 (IGKV3-20)
QQYGSSLT

SEQ ID NO: 20414 - protein, 18 aa, Homo sapiens
  Heavy chain CDR3 for antibody 10207 (IGHV3-33)
AREGDYYGSGGFPNWFDP

SEQ ID NO: 20415 - protein, 9 aa, Homo sapiens
  Light chain CDR3 for antibody 10208 (IGKV3D-7)
QQDYKLPLT

SEQ ID NO: 20416 - protein, 21 aa, Homo sapiens
  Heavy chain CDR3 for antibody 10208 (IGHV4-59)
ARDGGITMGRGVYYYYYGMDV

SEQ ID NO: 20417 - protein, 9 aa, Homo sapiens
  Light chain CDR3 for antibody 10209 (IGKV1-9)
QQLNSYPYT

SEQ ID NO: 20418 - protein, 16 aa, Homo sapiens
  Heavy chain CDR3 for antibody 10209 (IGHV4-39)
ARHPLILTGYPNWFDP

SEQ ID NO: 20419 - protein, 11 aa, Homo sapiens
  Light chain CDR3 for antibody 10210 (IGKV3-11)
QQRSNWPPMYT

SEQ ID NO: 20420 - protein, 15 aa, Homo sapiens
  Heavy chain CDR3 for antibody 10210 (IGHV3-23)
AKEFTMVRGVITPDY

SEQ ID NO: 20421 - protein, 10 aa, Homo sapiens
  Light chain CDR3 for antibody 10211 (IGKV1-39)
QQSYSTPMYT

SEQ ID NO: 20422 - protein, 17 aa, Homo sapiens
  Heavy chain CDR3 for antibody 10211 (IGHV3-33)
AKDGSFYSSGWYDAFDI

SEQ ID NO: 20423 - protein, 10 aa, Homo sapiens
  Light chain CDR3 for antibody 10212 (IGKV3-11)
QQRSNWPILT

SEQ ID NO: 20424 - protein, 21 aa, Homo sapiens
  Heavy chain CDR3 for antibody 10212 (IGHV3-23)
AAGVLLWFGEPNYYYYYGMDV

SEQ ID NO: 20425 - protein, 9 aa, Homo sapiens
  Light chain CDR3 for antibody 10213 (IGKV1D-13)
QQFNNYPHT

SEQ ID NO: 20426 - protein, 14 aa, Homo sapiens
  Heavy chain CDR3 for antibody 10213 (IGHV3-33)
VRDAMGAPPAWFDP

SEQ ID NO: 20427 - protein, 8 aa, Homo sapiens
  Light chain CDR3 for antibody 10214 (IGKV1D-13)
QQYNNYPT

SEQ ID NO: 20428 - protein, 12 aa, Homo sapiens
  Heavy chain CDR3 for antibody 10214 (IGHV3-23)
AKEYDILTGYFH

SEQ ID NO: 20429 - protein, 9 aa, Homo sapiens
  Light chain CDR3 for antibody 10215 (IGKV1D-13)
QQFTNYPYT

SEQ ID NO: 20430 - protein, 17 aa, Homo sapiens
  Heavy chain CDR3 for antibody 10215 (IGHV3-33)
ARSMVTTYGYYYYGMDV

SEQ ID NO: 20431 - protein, 10 aa, Homo sapiens
  Light chain CDR3 for antibody 10216 (IGKV3-11)
QQRSNWPALT

SEQ ID NO: 20432 - protein, 17 aa, Homo sapiens
  Heavy chain CDR3 for antibody 10216 (IGHV3-33)
AREDYDILTGYPFYFDY

SEQ ID NO: 20433 - protein, 9 aa, Homo sapiens
  Light chain CDR3 for antibody 10217 (IGKV1-16)
QQYSSYPYT

SEQ ID NO: 20434 - protein, 14 aa, Homo sapiens
  Heavy chain CDR3 for antibody 10217 (IGHV3-23)
AKEDTAMASYYFDY

SEQ ID NO: 20435 - protein, 10 aa, Homo sapiens
  Light chain CDR3 for antibody 10218 (IGKV3-15)
QQYNNWPPYT

SEQ ID NO: 20436 - protein, 11 aa, Homo sapiens
  Heavy chain CDR3 for antibody 10218 (IGHV1-24)
ATELGLYYFDY

SEQ ID NO: 20437 - protein, 9 aa, Homo sapiens
  Light chain CDR3 for antibody 10219 (IGKV1-9)
QQLNGYPWT

SEQ ID NO: 20438 - protein, 16 aa, Homo sapiens
  Heavy chain CDR3 for antibody 10219 (IGHV4-59)
ARDTPYYSGSGRPFDH

SEQ ID NO: 20439 - protein, 9 aa, Homo sapiens
  Light chain CDR3 for antibody 10220 (IGKV3D-20)
QQYGSSPYT

SEQ ID NO: 20440 - protein, 8 aa, Homo sapiens
  Heavy chain CDR3 for antibody 10220 (IGHV4-4)
ARGARFDP

SEQ ID NO: 20441 - protein, 9 aa, Homo sapiens
  Light chain CDR3 for antibody 10221 (IGKV3D-7)
QQDYNLPLT

SEQ ID NO: 20442 - protein, 14 aa, Homo sapiens
  Heavy chain CDR3 for antibody 10221 (IGHV3-20)
ARNGGSTWYDWFDP

SEQ ID NO: 20443 - protein, 10 aa, Homo sapiens
  Light chain CDR3 for antibody 10222 (IGKV1-9)
QQLDSYPMYT

SEQ ID NO: 20444 - protein, 14 aa, Homo sapiens
  Heavy chain CDR3 for antibody 10222 (IGHV3-33)
VRDAMGATTAWFDP

SEQ ID NO: 20445 - protein, 9 aa, Homo sapiens
  Light chain CDR3 for antibody 10223 (IGKV5-2)
LQHDNFPYT

SEQ ID NO: 20446 - protein, 19 aa, Homo sapiens
  Heavy chain CDR3 for antibody 10223 (IGHV3-23)
AKDREMAATSHYYYYGMDV

SEQ ID NO: 20447 - protein, 9 aa, Homo sapiens
  Light chain CDR3 for antibody 10224 (IGKV1-16)
QQYNSYPLT

SEQ ID NO: 20448 - protein, 13 aa, Homo sapiens
  Heavy chain CDR3 for antibody 10224 (IGHV1-24)
ATGYSLNWYEFDY

SEQ ID NO: 20449 - protein, 8 aa, Homo sapiens
  Light chain CDR3 for antibody 10225 (IGKV1D-13)
QQFNNYPT

SEQ ID NO: 20450 - protein, 12 aa, Homo sapiens
  Heavy chain CDR3 for antibody 10225 (IGHV3-23)
AKEGLGNDYEPY

SEQ ID NO: 20451 - protein, 8 aa, Homo sapiens
  Light chain CDR3 for antibody 10226 (IGKV6-21)
HQSSSLPT

SEQ ID NO: 20452 - protein, 14 aa, Homo sapiens
  Heavy chain CDR3 for antibody 10226 (IGHV1-46)
ARKGIVGALDAFDI

SEQ ID NO: 20453 - protein, 9 aa, Homo sapiens
  Light chain CDR3 for antibody 10227 (IGKV3D-7)
QQDYNLPFT

SEQ ID NO: 20454 - protein, 12 aa, Homo sapiens
  Heavy chain CDR3 for antibody 10227 (IGHV3-33)
ARDYISTYGMDV

SEQ ID NO: 20455 - protein, 9 aa, Homo sapiens
  Light chain CDR3 for antibody 10228 (IGKV1-39)
QQSYSTPIT

SEQ ID NO: 20456 - protein, 11 aa, Homo sapiens
  Heavy chain CDR3 for antibody 10228 (IGHV3-33)
AREGAVASFDY

SEQ ID NO: 20457 - protein, 9 aa, Homo sapiens
  Light chain CDR3 for antibody 10229 (IGKV1D-13)
QQFNNYPHT

SEQ ID NO: 20458 - protein, 9 aa, Homo sapiens
  Heavy chain CDR3 for antibody 10229 (IGHV1-8)
ARGPRIMDV

SEQ ID NO: 20459 - protein, 9 aa, Homo sapiens
  Light chain CDR3 for antibody 10230 (IGKV1D-13)
QQFNNYMYT

SEQ ID NO: 20460 - protein, 11 aa, Homo sapiens
  Heavy chain CDR3 for antibody 10230 (IGHV4-59)
ARETGDDAFDI

SEQ ID NO: 20461 - protein, 9 aa, Homo sapiens
  Light chain CDR3 for antibody 10231 (IGKV5-2)
LQHDKFPYT

SEQ ID NO: 20462 - protein, 17 aa, Homo sapiens
  Heavy chain CDR3 for antibody 10231 (IGHV3-33)
AREGWFGELWGYYGMDV

SEQ ID NO: 20463 - protein, 10 aa, Homo sapiens
  Light chain CDR3 for antibody 10232 (IGKV1-39)
QQSYSTPMYT

SEQ ID NO: 20464 - protein, 18 aa, Homo sapiens
  Heavy chain CDR3 for antibody 10232 (IGHV4-39)
ARQYYFGSGNYYRGWFDP

SEQ ID NO: 20465 - protein, 8 aa, Homo sapiens
  Light chain CDR3 for antibody 10233 (IGKV1-5)
QQYNSYST

SEQ ID NO: 20466 - protein, 20 aa, Homo sapiens
  Heavy chain CDR3 for antibody 10233 (IGHV1-18)
AREVGIAVAGTLYYYYGRDV

SEQ ID NO: 20467 - protein, 9 aa, Homo sapiens
  Light chain CDR3 for antibody 10234 (IGKV1-6)
LQDYNYPWT

SEQ ID NO: 20468 - protein, 17 aa, Homo sapiens
  Heavy chain CDR3 for antibody 10234 (IGHV3-33)
SRGGATLVRGVDYGMDV

SEQ ID NO: 20469 - protein, 9 aa, Homo sapiens
  Light chain CDR3 for antibody 10235 (IGKV1-6)
QQEYNYPLT

SEQ ID NO: 20470 - protein, 14 aa, Homo sapiens
  Heavy chain CDR3 for antibody 10235 (IGHV1-46)
ARGAAAGNFYGLDV

SEQ ID NO: 20471 - protein, 9 aa, Homo sapiens
  Light chain CDR3 for antibody 10236 (IGKV3D-7)
QQDYTLPLT

SEQ ID NO: 20472 - protein, 17 aa, Homo sapiens
  Heavy chain CDR3 for antibody 10236 (IGHV3-33)
ARDRELLWFGEFGGMDV

SEQ ID NO: 20473 - protein, 9 aa, Homo sapiens
  Light chain CDR3 for antibody 10237 (IGKV1D-16)
QQYNSYPIT

SEQ ID NO: 20474 - protein, 17 aa, Homo sapiens
  Heavy chain CDR3 for antibody 10237 (IGHV4-59)
AREMGHDILTGYPHFDY

SEQ ID NO: 20475 - protein, 9 aa, Homo sapiens
  Light chain CDR3 for antibody 10238 (IGKV1-9)
QQLKSYLYT

SEQ ID NO: 20476 - protein, 13 aa, Homo sapiens
  Heavy chain CDR3 for antibody 10238 (IGHV1-18)
ARSITMVRGVIGY

SEQ ID NO: 20477 - protein, 9 aa, Homo sapiens
  Light chain CDR3 for antibody 10239 (IGKV3-15)
QQYNNWPRT

SEQ ID NO: 20478 - protein, 14 aa, Homo sapiens
  Heavy chain CDR3 for antibody 10239 (IGHV3-33)
ARDGAAAALDAFDI

SEQ ID NO: 20479 - protein, 8 aa, Homo sapiens
  Light chain CDR3 for antibody 10240 (IGKV3-11)
LQRGNWPT

SEQ ID NO: 20480 - protein, 17 aa, Homo sapiens
  Heavy chain CDR3 for antibody 10240 (IGHV4-59)
ARDFLVRGEGSYYGMDV

SEQ ID NO: 20481 - protein, 8 aa, Homo sapiens
  Light chain CDR3 for antibody 10241 (IGKV3-15)
QQYNNWPT

SEQ ID NO: 20482 - protein, 15 aa, Homo sapiens
  Heavy chain CDR3 for antibody 10241 (IGHV3-33)
ARDRVVRGVMGYFDY

SEQ ID NO: 20483 - protein, 9 aa, Homo sapiens
  Light chain CDR3 for antibody 10242 (IGKV1-37)
QRTYNAPYT

SEQ ID NO: 20484 - protein, 13 aa, Homo sapiens
  Heavy chain CDR3 for antibody 10242 (IGHV3-33)
ARRYRSGWYPFDY

SEQ ID NO: 20485 - protein, 9 aa, Homo sapiens
  Light chain CDR3 for antibody 10243 (IGKV6-21)
HQSSSLPYT

SEQ ID NO: 20486 - protein, 24 aa, Homo sapiens
  Heavy chain CDR3 for antibody 10243 (IGHV1-24)
ATEAHYDILTGYYNPHYYYYGMDV

SEQ ID NO: 20487 - protein, 9 aa, Homo sapiens
  Light chain CDR3 for antibody 10244 (IGKV1D-16)
QQYNSYPYT

SEQ ID NO: 20488 - protein, 20 aa, Homo sapiens
  Heavy chain CDR3 for antibody 10244 (IGHV3-20)
ARDPPRIVGTTYYYYYVMDV

SEQ ID NO: 20489 - protein, 9 aa, Homo sapiens
  Light chain CDR3 for antibody 10245 (IGKV1-6)
LQDYKSPFT

SEQ ID NO: 20490 - protein, 14 aa, Homo sapiens
  Heavy chain CDR3 for antibody 10245 (IGHV3-66)
ARDGYDILTGPMDV

SEQ ID NO: 20491 - protein, 9 aa, Homo sapiens
  Light chain CDR3 for antibody 10246 (IGKV2D-28)
MQALQTPPT

SEQ ID NO: 20492 - protein, 13 aa, Homo sapiens
  Heavy chain CDR3 for antibody 10246 (IGHV3-23)
ARSGSYWGYYFDY

SEQ ID NO: 20493 - protein, 9 aa, Homo sapiens
  Light chain CDR3 for antibody 10247 (IGKV3-20)
HQYGSSPDT

SEQ ID NO: 20494 - protein, 14 aa, Homo sapiens
  Heavy chain CDR3 for antibody 10247 (IGHV3-33)
ARDKTYPLSYGMDV

SEQ ID NO: 20495 - protein, 8 aa, Homo sapiens
  Light chain CDR3 for antibody 10248 (IGKV1D-13)
QQFNNYPT

SEQ ID NO: 20496 - protein, 9 aa, Homo sapiens
  Heavy chain CDR3 for antibody 10248 (IGHV4-59)
AGGSWDFDY

SEQ ID NO: 20497 - protein, 9 aa, Homo sapiens
  Light chain CDR3 for antibody 10249 (IGKV3-15)
QQYNNWPRT

SEQ ID NO: 20498 - protein, 16 aa, Homo sapiens
  Heavy chain CDR3 for antibody 10249 (IGHV3-23)
AKEGEVLRYFDWLFNY

SEQ ID NO: 20499 - protein, 8 aa, Homo sapiens
  Light chain CDR3 for antibody 10250 (IGKV3-20)
QQYGSSFT

SEQ ID NO: 20500 - protein, 12 aa, Homo sapiens
  Heavy chain CDR3 for antibody 10250 (IGHV3-33)
ARDYISTYGMDV

SEQ ID NO: 20501 - protein, 9 aa, Homo sapiens
  Light chain CDR3 for antibody 10251 (IGKV1-17)
LHSNNYPWT

SEQ ID NO: 20502 - protein, 18 aa, Homo sapiens
  Heavy chain CDR3 for antibody 10251 (IGHV3-33)
ARREGIVGATTYYYGMDV

SEQ ID NO: 20503 - protein, 9 aa, Homo sapiens
  Light chain CDR3 for antibody 10252 (IGKV5-2)
LQHDKFPYT

SEQ ID NO: 20504 - protein, 18 aa, Homo sapiens
  Heavy chain CDR3 for antibody 10252 (IGHV3-33)
ARRSAAGTGDYYYCGMDV

SEQ ID NO: 20505 - protein, 9 aa, Homo sapiens
  Light chain CDR3 for antibody 10253 (IGKV2D-28)
MQATQFPHT

SEQ ID NO: 20506 - protein, 13 aa, Homo sapiens
  Heavy chain CDR3 for antibody 10253 (IGHV3-33)
ARDYCGGDCYLDY

SEQ ID NO: 20507 - protein, 9 aa, Homo sapiens
  Light chain CDR3 for antibody 10254 (IGKV1-6)
LQDYNHPFT

SEQ ID NO: 20508 - protein, 12 aa, Homo sapiens
  Heavy chain CDR3 for antibody 10254 (IGHV3-33)
ARDRAYRGSLDY

SEQ ID NO: 20509 - protein, 9 aa, Homo sapiens
  Light chain CDR3 for antibody 10255 (IGKV4-1)
QQYYTTPYT

SEQ ID NO: 20510 - protein, 19 aa, Homo sapiens
  Heavy chain CDR3 for antibody 10255 (IGHV3-33)
ARRRDDILTGWDYYFGMDV

SEQ ID NO: 20511 - protein, 9 aa, Homo sapiens
  Light chain CDR3 for antibody 10256 (IGKV1-16)
QQYNSYPYT

SEQ ID NO: 20512 - protein, 9 aa, Homo sapiens
  Heavy chain CDR3 for antibody 10256 (IGHV3-33)
AKDRNSGYD

SEQ ID NO: 20513 - protein, 9 aa, Homo sapiens
  Light chain CDR3 for antibody 10257 (IGKV3-15)
QQYNNWPRT

SEQ ID NO: 20514 - protein, 14 aa, Homo sapiens
  Heavy chain CDR3 for antibody 10257 (IGHV3-33)
VRDQGSMVRGGGDY

SEQ ID NO: 20515 - protein, 10 aa, Homo sapiens
  Light chain CDR3 for antibody 10258 (IGKV3-11)
QQRSNWPIYT

SEQ ID NO: 20516 - protein, 16 aa, Homo sapiens
  Heavy chain CDR3 for antibody 10258 (IGHV3-33)
AKDAFYYGSGSHLFDY

SEQ ID NO: 20517 - protein, 9 aa, Homo sapiens
  Light chain CDR3 for antibody 10259 (IGKV1D-13)
QHFNNYMYT

SEQ ID NO: 20518 - protein, 12 aa, Homo sapiens
  Heavy chain CDR3 for antibody 10259 (IGHV4-59)
ARDRSGWAYFDY

SEQ ID NO: 20519 - protein, 8 aa, Homo sapiens
  Light chain CDR3 for antibody 10260 (IGKV3D-7)
QQDYNLLT

SEQ ID NO: 20520 - protein, 18 aa, Homo sapiens
  Heavy chain CDR3 for antibody 10260 (IGHV3-33)
ARDPYSSGWYDYYFGMDV

SEQ ID NO: 20521 - protein, 9 aa, Homo sapiens
  Light chain CDR3 for antibody 10261 (IGKV3-15)
QQYSNWPLT

SEQ ID NO: 20522 - protein, 13 aa, Homo sapiens
  Heavy chain CDR3 for antibody 10261 (IGHV3-23)
ARDEGYSGYNLDN

SEQ ID NO: 20523 - protein, 9 aa, Homo sapiens
  Light chain CDR3 for antibody 10262 (IGKV1-16)
QQYNSYPFT

SEQ ID NO: 20524 - protein, 11 aa, Homo sapiens
  Heavy chain CDR3 for antibody 10262 (IGHV4-59)
AREKGHDSFDL

SEQ ID NO: 20525 - protein, 9 aa, Homo sapiens
  Light chain CDR3 for antibody 10263 (IGKV1D-13)
QQFNNYPYT

SEQ ID NO: 20526 - protein, 12 aa, Homo sapiens
  Heavy chain CDR3 for antibody 10263 (IGHV4-39)
ARREVILGAFDY

SEQ ID NO: 20527 - protein, 8 aa, Homo sapiens
  Light chain CDR3 for antibody 10264 (IGKV1-39)
QQSYTTPT

SEQ ID NO: 20528 - protein, 13 aa, Homo sapiens
  Heavy chain CDR3 for antibody 10264 (IGHV4-34)
ASNFYYYYYGMDV

SEQ ID NO: 20529 - protein, 9 aa, Homo sapiens
  Light chain CDR3 for antibody 10265 (IGKV1-6)
QQYDSYPYT

SEQ ID NO: 20530 - protein, 21 aa, Homo sapiens
  Heavy chain CDR3 for antibody 10265 (IGHV3-33)
AKKRLYDILTGYYKAYYGMDV

SEQ ID NO: 20531 - protein, 9 aa, Homo sapiens
  Light chain CDR3 for antibody 10266 (IGKV1-9)
QQYSSYPYT

SEQ ID NO: 20532 - protein, 16 aa, Homo sapiens
  Heavy chain CDR3 for antibody 10266 (IGHV3-30)
ARDISVAGHVYYGMDV

SEQ ID NO: 20533 - protein, 9 aa, Homo sapiens
  Light chain CDR3 for antibody 10267 (IGKV1-39)
QHYNDYPFT

SEQ ID NO: 20534 - protein, 11 aa, Homo sapiens
  Heavy chain CDR3 for antibody 10267 (IGHV3-33)
AREAANWGFDY

SEQ ID NO: 20535 - protein, 9 aa, Homo sapiens
  Light chain CDR3 for antibody 10268 (IGKV1D-13)
QQFNNYPST

SEQ ID NO: 20536 - protein, 10 aa, Homo sapiens
  Heavy chain CDR3 for antibody 10268 (IGHV3-23)
AKDQVGATDY

SEQ ID NO: 20537 - protein, 9 aa, Homo sapiens
  Light chain CDR3 for antibody 10269 (IGKV1-6)
LQDYNYPRT

SEQ ID NO: 20538 - protein, 22 aa, Homo sapiens
  Heavy chain CDR3 for antibody 10269 (IGHV3-11)
ARDVRDYDILTGYYNGKNYFDY

SEQ ID NO: 20539 - protein, 9 aa, Homo sapiens
  Light chain CDR3 for antibody 10270 (IGKV1-17)
LQHNGYPLT

SEQ ID NO: 20540 - protein, 14 aa, Homo sapiens
  Heavy chain CDR3 for antibody 10270 (IGHV3-23)
ARGRRDFYYYGMDV

SEQ ID NO: 20541 - protein, 9 aa, Homo sapiens
  Light chain CDR3 for antibody 10271 (IGKV1-6)
LQDYKSPFT

SEQ ID NO: 20542 - protein, 13 aa, Homo sapiens
  Heavy chain CDR3 for antibody 10271 (IGHV4-39)
ARQWPSGYWYFDL

SEQ ID NO: 20543 - protein, 8 aa, Homo sapiens
  Light chain CDR3 for antibody 10272 (IGKV1-5)
QQYNSYYT

SEQ ID NO: 20544 - protein, 12 aa, Homo sapiens
  Heavy chain CDR3 for antibody 10272 (IGHV3-33)
AREGIAVAGVDP

SEQ ID NO: 20545 - protein, 9 aa, Homo sapiens
  Light chain CDR3 for antibody 10273 (IGKV1-6)
LQDYNYPRT

SEQ ID NO: 20546 - protein, 19 aa, Homo sapiens
  Heavy chain CDR3 for antibody 10273 (IGHV1-18)
ARDLPYYDILTGYYPLFDY

SEQ ID NO: 20547 - protein, 9 aa, Homo sapiens
  Light chain CDR3 for antibody 10274 (IGKV1-9)
QQLHIYPWT

SEQ ID NO: 20548 - protein, 12 aa, Homo sapiens
  Heavy chain CDR3 for antibody 10274 (IGHV3-33)
ARDSSGWSHFDY

SEQ ID NO: 20549 - protein, 9 aa, Homo sapiens
  Light chain CDR3 for antibody 10275 (IGKV3-11)
QQRSNWPPT

SEQ ID NO: 20550 - protein, 13 aa, Homo sapiens
  Heavy chain CDR3 for antibody 10275 (IGHV3-33)
ARDYTMVRGVMNY

SEQ ID NO: 20551 - protein, 10 aa, Homo sapiens
  Light chain CDR3 for antibody 10276 (IGKV3-20)
QQYGSSPPYT

SEQ ID NO: 20552 - protein, 24 aa, Homo sapiens
  Heavy chain CDR3 for antibody 10276 (IGHV3-20)
ARGRITMVRGVIINPLDYYNGMDV

SEQ ID NO: 20553 - protein, 9 aa, Homo sapiens
  Light chain CDR3 for antibody 10277 (IGKV1-17)
LQHNSYPYT

SEQ ID NO: 20554 - protein, 19 aa, Homo sapiens
  Heavy chain CDR3 for antibody 10277 (IGHV3-20)
ARGGSGSYYNGYYYYGMDV

SEQ ID NO: 20555 - protein, 9 aa, Homo sapiens
  Light chain CDR3 for antibody 10278 (IGKV1-6)
LQDFHYPWT

SEQ ID NO: 20556 - protein, 14 aa, Homo sapiens
  Heavy chain CDR3 for antibody 10278 (IGHV3-20)
ARDRGSSFFDAFDI

SEQ ID NO: 20557 - protein, 9 aa, Homo sapiens
  Light chain CDR3 for antibody 10279 (IGKV1-6)
LQDYSYPWT

SEQ ID NO: 20558 - protein, 19 aa, Homo sapiens
  Heavy chain CDR3 for antibody 10279 (IGHV3-33)
ARDSGYSGYDYYYYYGMDV

SEQ ID NO: 20559 - protein, 9 aa, Homo sapiens
  Light chain CDR3 for antibody 10280 (IGKV3-15)
QQYINWPLT

SEQ ID NO: 20560 - protein, 10 aa, Homo sapiens
  Heavy chain CDR3 for antibody 10280 (IGHV3-11)
ARGQWPPLDY

SEQ ID NO: 20561 - protein, 9 aa, Homo sapiens
  Light chain CDR3 for antibody 10281 (IGKV1-6)
LQDYNYPRT

SEQ ID NO: 20562 - protein, 15 aa, Homo sapiens
  Heavy chain CDR3 for antibody 10281 (IGHV3-23)
AKVFTMVRGMGYFDL

SEQ ID NO: 20563 - protein, 8 aa, Homo sapiens
  Light chain CDR3 for antibody 10282 (IGKV1-5)
QQYNSYWT

SEQ ID NO: 20564 - protein, 16 aa, Homo sapiens
  Heavy chain CDR3 for antibody 10282 (IGHV3-33)
ARGANYYGSGIPNFEY

SEQ ID NO: 20565 - protein, 9 aa, Homo sapiens
  Light chain CDR3 for antibody 10283 (IGKV1D-13)
QQFNNYPYT

SEQ ID NO: 20566 - protein, 14 aa, Homo sapiens
  Heavy chain CDR3 for antibody 10283 (IGHV3-23)
AKGGGVGAYNWFDP

SEQ ID NO: 20567 - protein, 8 aa, Homo sapiens
  Light chain CDR3 for antibody 10284 (IGKV3-20)
QQYGRSFT

SEQ ID NO: 20568 - protein, 13 aa, Homo sapiens
  Heavy chain CDR3 for antibody 10284 (IGHV4-28)
ARKGATGYYGMDV

SEQ ID NO: 20569 - protein, 10 aa, Homo sapiens
  Light chain CDR3 for antibody 10285 (IGKV1-17)
LQHNSYPMYT

SEQ ID NO: 20570 - protein, 17 aa, Homo sapiens
  Heavy chain CDR3 for antibody 10285 (IGHV3-64)
ARERYYGSGSYYNWFDP

SEQ ID NO: 20571 - protein, 9 aa, Homo sapiens
  Light chain CDR3 for antibody 10286 (IGKV3-20)
QQYGSSPYT

SEQ ID NO: 20572 - protein, 12 aa, Homo sapiens
  Heavy chain CDR3 for antibody 10286 (IGHV1-46)
ARGLTGDHAFDI

SEQ ID NO: 20573 - protein, 9 aa, Homo sapiens
  Light chain CDR3 for antibody 10287 (IGKV3-20)
QQYATSPIT

SEQ ID NO: 20574 - protein, 16 aa, Homo sapiens
  Heavy chain CDR3 for antibody 10287 (IGHV3-23)
AKEGMVLRYFDWLWDY

SEQ ID NO: 20575 - protein, 9 aa, Homo sapiens
  Light chain CDR3 for antibody 10288 (IGKV6-21)
QQSSNLPYT

SEQ ID NO: 20576 - protein, 12 aa, Homo sapiens
  Heavy chain CDR3 for antibody 10288 (IGHV4-59)
ARDRSGWAYFDY

SEQ ID NO: 20577 - protein, 9 aa, Homo sapiens
  Light chain CDR3 for antibody 10289 (IGKV2D-24)
TQATQFPHT

SEQ ID NO: 20578 - protein, 15 aa, Homo sapiens
  Heavy chain CDR3 for antibody 10289 (IGHV3-33)
ARDTGYSSSWNWFDP

SEQ ID NO: 20579 - protein, 10 aa, Homo sapiens
  Light chain CDR3 for antibody 10290 (IGKV1-9)
QQLDSYPMYT

SEQ ID NO: 20580 - protein, 19 aa, Homo sapiens
  Heavy chain CDR3 for antibody 10290 (IGHV3-33)
ARGPYYDILTGYGYYGMDV

SEQ ID NO: 20581 - protein, 9 aa, Homo sapiens
  Light chain CDR3 for antibody 10291 (IGKV3-15)
QQYNNWPRT

SEQ ID NO: 20582 - protein, 11 aa, Homo sapiens
  Heavy chain CDR3 for antibody 10291 (IGHV4-39)
ARLLVGATTDY

SEQ ID NO: 20583 - protein, 9 aa, Homo sapiens
  Light chain CDR3 for antibody 10292 (IGKV6-21)
HQSSSLPYT

SEQ ID NO: 20584 - protein, 17 aa, Homo sapiens
  Heavy chain CDR3 for antibody 10292 (IGHV3-23)
AKEGMVLRYFDWSGMDV

SEQ ID NO: 20585 - protein, 9 aa, Homo sapiens
  Light chain CDR3 for antibody 10293 (IGKV1-9)
QQLNTYPWT

SEQ ID NO: 20586 - protein, 11 aa, Homo sapiens
  Heavy chain CDR3 for antibody 10293 (IGHV3-33)
ARERSSGPFAY

SEQ ID NO: 20587 - protein, 9 aa, Homo sapiens
  Light chain CDR3 for antibody 10294 (IGKV1-39)
QQSHTLPCT

SEQ ID NO: 20588 - protein, 11 aa, Homo sapiens
  Heavy chain CDR3 for antibody 10294 (IGHV1-18)
SRGGFSVGYDS

SEQ ID NO: 20589 - protein, 9 aa, Homo sapiens
  Light chain CDR3 for antibody 10295 (IGKV1-39)
QQSYRTPLT

SEQ ID NO: 20590 - protein, 11 aa, Homo sapiens
  Heavy chain CDR3 for antibody 10295 (IGHV3-23)
AKEGTYFDIPH

SEQ ID NO: 20591 - protein, 9 aa, Homo sapiens
  Light chain CDR3 for antibody 10296 (IGKV3-15)
QQYINWPRT

SEQ ID NO: 20592 - protein, 20 aa, Homo sapiens
  Heavy chain CDR3 for antibody 10296 (IGHV3-33)
SRGGATLVRGVIDYYYGMDV

SEQ ID NO: 20593 - protein, 8 aa, Homo sapiens
  Light chain CDR3 for antibody 10297 (IGKV1D-13)
QQFNNYPT

SEQ ID NO: 20594 - protein, 10 aa, Homo sapiens
  Heavy chain CDR3 for antibody 10297 (IGHV3-23)
AKDHWGDFDY

SEQ ID NO: 20595 - protein, 8 aa, Homo sapiens
  Light chain CDR3 for antibody 10298 (IGKV1D-13)
QQFNNYPT

SEQ ID NO: 20596 - protein, 17 aa, Homo sapiens
  Heavy chain CDR3 for antibody 10298 (IGHV3-33)
AREDYDILTGYPFYFDY

SEQ ID NO: 20597 - protein, 8 aa, Homo sapiens
  Light chain CDR3 for antibody 10299 (IGKV1-5)
QQYNSYWT

SEQ ID NO: 20598 - protein, 14 aa, Homo sapiens
  Heavy chain CDR3 for antibody 10299 (IGHV3-33)
ARDRDIMATSYFDY

SEQ ID NO: 20599 - protein, 8 aa, Homo sapiens
  Light chain CDR3 for antibody 10300 (IGKV3D-7)
QQDYSLLT

SEQ ID NO: 20600 - protein, 11 aa, Homo sapiens
  Heavy chain CDR3 for antibody 10300 (IGHV3-64)
ARERGSYAFDI

SEQ ID NO: 20601 - protein, 9 aa, Homo sapiens
  Light chain CDR3 for antibody 10301 (IGKV1D-13)
QQFNNYPYT

SEQ ID NO: 20602 - protein, 20 aa, Homo sapiens
  Heavy chain CDR3 for antibody 10301 (IGHV3-33)
ARDLGWATMVRGVIRAPFDY

SEQ ID NO: 20603 - protein, 9 aa, Homo sapiens
  Light chain CDR3 for antibody 10302 (IGKV5-2)
LQHDKFPYT

SEQ ID NO: 20604 - protein, 14 aa, Homo sapiens
  Heavy chain CDR3 for antibody 10302 (IGHV3-33)
ARDREQQLVRYFDY

SEQ ID NO: 20605 - protein, 10 aa, Homo sapiens
  Light chain CDR3 for antibody 10303 (IGKV3-15)
QQYNNWPPYT

SEQ ID NO: 20606 - protein, 11 aa, Homo sapiens
  Heavy chain CDR3 for antibody 10303 (IGHV3-13)
AREAIIGPFDY

SEQ ID NO: 20607 - protein, 8 aa, Homo sapiens
  Light chain CDR3 for antibody 10304 (IGKV3-15)
QQYNNWPT

SEQ ID NO: 20608 - protein, 18 aa, Homo sapiens
  Heavy chain CDR3 for antibody 10304 (IGHV3-23)
AKVGDFFASGNYWDYFDY

SEQ ID NO: 20609 - protein, 8 aa, Homo sapiens
  Light chain CDR3 for antibody 10305 (IGKV1-5)
QQYNSYYT

SEQ ID NO: 20610 - protein, 14 aa, Homo sapiens
  Heavy chain CDR3 for antibody 10305 (IGHV3-20)
ARGYGSGSYYSFDY

SEQ ID NO: 20611 - protein, 8 aa, Homo sapiens
  Light chain CDR3 for antibody 10306 (IGKV1D-13)
QQFNNYYT

SEQ ID NO: 20612 - protein, 8 aa, Homo sapiens
  Heavy chain CDR3 for antibody 10306 (IGHV3-23)
AKETGTSY

SEQ ID NO: 20613 - protein, 9 aa, Homo sapiens
  Light chain CDR3 for antibody 10307 (IGKV3-20)
QQYGSSPYT

SEQ ID NO: 20614 - protein, 17 aa, Homo sapiens
  Heavy chain CDR3 for antibody 10307 (IGHV3-30)
ARESLWFGEANHFVMDV

SEQ ID NO: 20615 - protein, 8 aa, Homo sapiens
  Light chain CDR3 for antibody 10308 (IGKV3-20)
QQYGSSLT

SEQ ID NO: 20616 - protein, 9 aa, Homo sapiens
  Heavy chain CDR3 for antibody 10308 (IGHV4-59)
AGGSWDFDY

SEQ ID NO: 20617 - protein, 9 aa, Homo sapiens
  Light chain CDR3 for antibody 10309 (IGKV3-20)
QQYGTSPFP

SEQ ID NO: 20618 - protein, 11 aa, Homo sapiens
  Heavy chain CDR3 for antibody 10309 (IGHV3-33)
ARDRSSGPFDY

SEQ ID NO: 20619 - protein, 10 aa, Homo sapiens
  Light chain CDR3 for antibody 10310 (IGKV1-39)
QQSYSTPMYT

SEQ ID NO: 20620 - protein, 12 aa, Homo sapiens
  Heavy chain CDR3 for antibody 10310 (IGHV3-33)
ARDRGYSGYFDY

SEQ ID NO: 20621 - protein, 11 aa, Homo sapiens
  Light chain CDR3 for antibody 10311 (IGKV3-11)
QQRSNWPPTWT

SEQ ID NO: 20622 - protein, 10 aa, Homo sapiens
  Heavy chain CDR3 for antibody 10311 (IGHV3-33)
ARDVVVYFDY

SEQ ID NO: 20623 - protein, 9 aa, Homo sapiens
  Light chain CDR3 for antibody 10312 (IGKV1-6)
LQDYNYPRT

SEQ ID NO: 20624 - protein, 12 aa, Homo sapiens
  Heavy chain CDR3 for antibody 10312 (IGHV3-33)
ARGYCGSGYADF

SEQ ID NO: 20625 - protein, 8 aa, Homo sapiens
  Light chain CDR3 for antibody 10313 (IGKV3D-7)
QQDYNLLT

SEQ ID NO: 20626 - protein, 12 aa, Homo sapiens
  Heavy chain CDR3 for antibody 10313 (IGHV3-33)
ARDYISTYGMDV

SEQ ID NO: 20627 - protein, 9 aa, Homo sapiens
  Light chain CDR3 for antibody 10314 (IGKV1-12)
QQANSFPFT

SEQ ID NO: 20628 - protein, 12 aa, Homo sapiens
  Heavy chain CDR3 for antibody 10314 (IGHV3-33)
ARDLVGATPFDY

SEQ ID NO: 20629 - protein, 11 aa, Homo sapiens
  Light chain CDR3 for antibody 10315 (IGKV3-11)
QQRSNWPPTWT

SEQ ID NO: 20630 - protein, 14 aa, Homo sapiens
  Heavy chain CDR3 for antibody 10315 (IGHV3-33)
ARAISGSSYWYFDL

SEQ ID NO: 20631 - protein, 8 aa, Homo sapiens
  Light chain CDR3 for antibody 10316 (IGKV6-21)
HQSSSLPT

SEQ ID NO: 20632 - protein, 11 aa, Homo sapiens
  Heavy chain CDR3 for antibody 10316 (IGHV4-59)
ARSIRYSFFDY

SEQ ID NO: 20633 - protein, 9 aa, Homo sapiens
  Light chain CDR3 for antibody 10317 (IGKV1-27)
QKYNSAPHM

SEQ ID NO: 20634 - protein, 9 aa, Homo sapiens
  Heavy chain CDR3 for antibody 10317 (IGHV3-33)
ARELAYFDY

SEQ ID NO: 20635 - protein, 9 aa, Homo sapiens
  Light chain CDR3 for antibody 10318 (IGKV4-1)
QQYYTTPPT

SEQ ID NO: 20636 - protein, 20 aa, Homo sapiens
  Heavy chain CDR3 for antibody 10318 (IGHV3-23)
AKGMGGLRYFDWPHYYGMDV

SEQ ID NO: 20637 - protein, 9 aa, Homo sapiens
  Light chain CDR3 for antibody 10319 (IGKV2-30)
MQGTHWPLT

SEQ ID NO: 20638 - protein, 13 aa, Homo sapiens
  Heavy chain CDR3 for antibody 10319 (IGHV3-33)
ARDPLYSGSYFDY

SEQ ID NO: 20639 - protein, 9 aa, Homo sapiens
  Light chain CDR3 for antibody 10320 (IGKV6-21)
HQSSSLPYT

SEQ ID NO: 20640 - protein, 11 aa, Homo sapiens
  Heavy chain CDR3 for antibody 10320 (IGHV3-30)
VRVGTGEFFDL

SEQ ID NO: 20641 - protein, 10 aa, Homo sapiens
  Light chain CDR3 for antibody 10321 (IGKV1-17)
QQLNSFLMYT

SEQ ID NO: 20642 - protein, 13 aa, Homo sapiens
  Heavy chain CDR3 for antibody 10321 (IGHV4-39)
ARHPPSRDYGMDV

SEQ ID NO: 20643 - protein, 9 aa, Homo sapiens
  Light chain CDR3 for antibody 10322 (IGKV1-6)
LQDYKSPFT

SEQ ID NO: 20644 - protein, 13 aa, Homo sapiens
  Heavy chain CDR3 for antibody 10322 (IGHV3-33)
VSTGDSYYYVMDV

SEQ ID NO: 20645 - protein, 9 aa, Homo sapiens
  Light chain CDR3 for antibody 10323 (IGKV6-21)
HQSYSLPHT

SEQ ID NO: 20646 - protein, 14 aa, Homo sapiens
  Heavy chain CDR3 for antibody 10323 (IGHV3-20)
ARDRGSSFFDAFDI

SEQ ID NO: 20647 - protein, 8 aa, Homo sapiens
  Light chain CDR3 for antibody 10324 (IGKV3-11)
QQRSNWLT

SEQ ID NO: 20648 - protein, 15 aa, Homo sapiens
  Heavy chain CDR3 for antibody 10324 (IGHV3-33)
ARDHLTGYYYYGMDV

SEQ ID NO: 20649 - protein, 9 aa, Homo sapiens
  Light chain CDR3 for antibody 10325 (IGKV2D-28)
MQALQTPPT

SEQ ID NO: 20650 - protein, 15 aa, Homo sapiens
  Heavy chain CDR3 for antibody 10325 (IGHV3-20)
AREGSSSWYLYYFDY

SEQ ID NO: 20651 - protein, 9 aa, Homo sapiens
  Light chain CDR3 for antibody 10326 (IGKV1-16)
QQYNSYPRT

SEQ ID NO: 20652 - protein, 16 aa, Homo sapiens
  Heavy chain CDR3 for antibody 10326 (IGHV3-33)
ARDVGIAAAGSGWFDT

SEQ ID NO: 20653 - protein, 9 aa, Homo sapiens
  Light chain CDR3 for antibody 10327 (IGKV1-16)
QQYDSYPYT

SEQ ID NO: 20654 - protein, 12 aa, Homo sapiens
  Heavy chain CDR3 for antibody 10327 (IGHV3-h)
AREDYYYYGMDV

SEQ ID NO: 20655 - protein, 9 aa, Homo sapiens
  Light chain CDR3 for antibody 10328 (IGKV1-16)
QQYSRYPYT

SEQ ID NO: 20656 - protein, 13 aa, Homo sapiens
  Heavy chain CDR3 for antibody 10328 (IGHV4-59)
ARTMVRGVAPFDY

SEQ ID NO: 20657 - protein, 10 aa, Homo sapiens
  Light chain CDR3 for antibody 10329 (IGKV3-11)
QQRSNWPMYT

SEQ ID NO: 20658 - protein, 17 aa, Homo sapiens
  Heavy chain CDR3 for antibody 10329 (IGHV1-18)
ARDRAFTMVRGVPPFDY

SEQ ID NO: 20659 - protein, 10 aa, Homo sapiens
  Light chain CDR3 for antibody 10330 (IGKV3-11)
QQRSNWLMYT

SEQ ID NO: 20660 - protein, 14 aa, Homo sapiens
  Heavy chain CDR3 for antibody 10330 (IGHV3-33)
ARDWNDVYYYGMDV

SEQ ID NO: 20661 - protein, 9 aa, Homo sapiens
  Light chain CDR3 for antibody 10331 (IGKV1-9)
QQLNRYPYT

SEQ ID NO: 20662 - protein, 12 aa, Homo sapiens
  Heavy chain CDR3 for antibody 10331 (IGHV3-33)
ARKGYDMHEFDI

SEQ ID NO: 20663 - protein, 8 aa, Homo sapiens
  Light chain CDR3 for antibody 10332 (IGKV6-21)
HQSSSLPT

SEQ ID NO: 20664 - protein, 11 aa, Homo sapiens
  Heavy chain CDR3 for antibody 10332 (IGHV3-33)
ARDRATATVDY

SEQ ID NO: 20665 - protein, 8 aa, Homo sapiens
  Light chain CDR3 for antibody 10333 (IGKV3D-7)
QQDYNLLT

SEQ ID NO: 20666 - protein, 18 aa, Homo sapiens
  Heavy chain CDR3 for antibody 10333 (IGHV1-18)
ARDRYYYDSGSYYYGMDV

SEQ ID NO: 20667 - protein, 9 aa, Homo sapiens
  Light chain CDR3 for antibody 10334 (IGKV1-6)
LQDYNHPFT

SEQ ID NO: 20668 - protein, 20 aa, Homo sapiens
  Heavy chain CDR3 for antibody 10334 (IGHV3-30)
ARGGATLIRGLIDYYYGMDV

SEQ ID NO: 20669 - protein, 10 aa, Homo sapiens
  Light chain CDR3 for antibody 10335 (IGKV3-11)
QQRSNWPALT

SEQ ID NO: 20670 - protein, 10 aa, Homo sapiens
  Heavy chain CDR3 for antibody 10335 (IGHV3-72)
CRDREGFGDV

SEQ ID NO: 20671 - protein, 9 aa, Homo sapiens
  Light chain CDR3 for antibody 10336 (IGKV1-9)
QQFNSYTRT

SEQ ID NO: 20672 - protein, 26 aa, Homo sapiens
  Heavy chain CDR3 for antibody 10336 (IGHV4-39)
ARQGLLWFGDLKAYDSSGYYYGYCHH

SEQ ID NO: 20673 - protein, 10 aa, Homo sapiens
  Light chain CDR3 for antibody 10337 (IGKV3-15)
QQYNNWPPYT

SEQ ID NO: 20674 - protein, 13 aa, Homo sapiens
  Heavy chain CDR3 for antibody 10337 (IGHV3-23)
AKDRGYSSTSTAY

SEQ ID NO: 20675 - protein, 8 aa, Homo sapiens
  Light chain CDR3 for antibody 10338 (IGKV6-21)
HQSSSLPT

SEQ ID NO: 20676 - protein, 15 aa, Homo sapiens
  Heavy chain CDR3 for antibody 10338 (IGHV1-46)
ARGAVDDYYYYGMDV

SEQ ID NO: 20677 - protein, 9 aa, Homo sapiens
  Light chain CDR3 for antibody 10339 (IGKV3D-7)
QQDYDLPYP

SEQ ID NO: 20678 - protein, 13 aa, Homo sapiens
  Heavy chain CDR3 for antibody 10339 (IGHV4-34)
ASNFYYYYYGMDV

SEQ ID NO: 20679 - protein, 9 aa, Homo sapiens
  Light chain CDR3 for antibody 10340 (IGKV1D-16)
QQYNSYPLT

SEQ ID NO: 20680 - protein, 9 aa, Homo sapiens
  Heavy chain CDR3 for antibody 10340 (IGHV3-33)
ASHSSGEDY

SEQ ID NO: 20681 - protein, 9 aa, Homo sapiens
  Light chain CDR3 for antibody 10341 (IGKV1-5)
QQYNTYSRT

SEQ ID NO: 20682 - protein, 13 aa, Homo sapiens
  Heavy chain CDR3 for antibody 10341 (IGHV3-33)
VSTGDSYYYVMDV

SEQ ID NO: 20683 - protein, 9 aa, Homo sapiens
  Light chain CDR3 for antibody 10342 (IGKV3D-7)
QQDYNLPLT

SEQ ID NO: 20684 - protein, 12 aa, Homo sapiens
  Heavy chain CDR3 for antibody 10342 (IGHV3-23)
AKDGYSYGYFDY

SEQ ID NO: 20685 - protein, 10 aa, Homo sapiens
  Light chain CDR3 for antibody 10343 (IGKV3-11)
QQRSNWPAYT

SEQ ID NO: 20686 - protein, 8 aa, Homo sapiens
  Heavy chain CDR3 for antibody 10343 (IGHV3-23)
APHWIFDY

SEQ ID NO: 20687 - protein, 6 aa, Homo sapiens
  Light chain CDR3 for antibody 10344 (IGKV3-20)
QQYGST

SEQ ID NO: 20688 - protein, 17 aa, Homo sapiens
  Heavy chain CDR3 for antibody 10344 (IGHV1-18)
ARDEGYDILTGYPHFDY

SEQ ID NO: 20689 - protein, 8 aa, Homo sapiens
  Light chain CDR3 for antibody 10345 (IGKV6-21)
HQSSSLPT

SEQ ID NO: 20690 - protein, 18 aa, Homo sapiens
  Heavy chain CDR3 for antibody 10345 (IGHV3-33)
ARERDYYGSGSYPDAFDI

SEQ ID NO: 20691 - protein, 8 aa, Homo sapiens
  Light chain CDR3 for antibody 10346 (IGKV1D-13)
QQFNNYYT

SEQ ID NO: 20692 - protein, 17 aa, Homo sapiens
  Heavy chain CDR3 for antibody 10346 (IGHV1-24)
ATEGYDILPGYYNVLDY

SEQ ID NO: 20693 - protein, 10 aa, Homo sapiens
  Light chain CDR3 for antibody 10347 (IGKV1-39)
QQSYSTPMYT

SEQ ID NO: 20694 - protein, 15 aa, Homo sapiens
  Heavy chain CDR3 for antibody 10347 (IGHV3-33)
AKDRNSGYDWGGFDY

SEQ ID NO: 20695 - protein, 9 aa, Homo sapiens
  Light chain CDR3 for antibody 10348 (IGKV3-20)
QQYGTSPFP

SEQ ID NO: 20696 - protein, 13 aa, Homo sapiens
  Heavy chain CDR3 for antibody 10348 (IGHV3-53)
ARSGSYWGYYFDY

SEQ ID NO: 20697 - protein, 8 aa, Homo sapiens
  Light chain CDR3 for antibody 10349 (IGKV1D-13)
QQFNNYPT

SEQ ID NO: 20698 - protein, 18 aa, Homo sapiens
  Heavy chain CDR3 for antibody 10349 (IGHV3-33)
ARERGNWNDVDYYYGMDV

SEQ ID NO: 20699 - protein, 8 aa, Homo sapiens
  Light chain CDR3 for antibody 10350 (IGKV3-11)
LQRGNWPT

SEQ ID NO: 20700 - protein, 17 aa, Homo sapiens
  Heavy chain CDR3 for antibody 10350 (IGHV1-18)
ARERYYGSGIYKYAMDV

SEQ ID NO: 20701 - protein, 9 aa, Homo sapiens
  Light chain CDR3 for antibody 10351 (IGKV1-6)
LQAYNYPFT

SEQ ID NO: 20702 - protein, 15 aa, Homo sapiens
  Heavy chain CDR3 for antibody 10351 (IGHV3-33)
ARGYYYGSGSCPFDY

SEQ ID NO: 20703 - protein, 9 aa, Homo sapiens
  Light chain CDR3 for antibody 10352 (IGKV5-2)
LQHDKFPYT

SEQ ID NO: 20704 - protein, 16 aa, Homo sapiens
  Heavy chain CDR3 for antibody 10352 (IGHV3-33)
ARGAWYSNGWYGTFDI

SEQ ID NO: 20705 - protein, 9 aa, Homo sapiens
  Light chain CDR3 for antibody 10353 (IGKV1-6)
LQDYNYPLT

SEQ ID NO: 20706 - protein, 8 aa, Homo sapiens
  Heavy chain CDR3 for antibody 10353 (IGHV3-33)
ARDRGDIL

SEQ ID NO: 20707 - protein, 9 aa, Homo sapiens
  Light chain CDR3 for antibody 10354 (IGKV4-1)
QQYYTTPPT

SEQ ID NO: 20708 - protein, 11 aa, Homo sapiens
  Heavy chain CDR3 for antibody 10354 (IGHV3-13)
AREAIIGPFDY

SEQ ID NO: 20709 - protein, 9 aa, Homo sapiens
  Light chain CDR3 for antibody 10355 (IGKV1D-13)
QQFNNYPYT

SEQ ID NO: 20710 - protein, 17 aa, Homo sapiens
  Heavy chain CDR3 for antibody 10355 (IGHV3-64)
ARESLWFGEANHFVMDV

SEQ ID NO: 20711 - protein, 9 aa, Homo sapiens
  Light chain CDR3 for antibody 10356 (IGKV1-17)
QQYSSYPPT

SEQ ID NO: 20712 - protein, 14 aa, Homo sapiens
  Heavy chain CDR3 for antibody 10356 (IGHV3-33)
ARDGYDILTGPFDY

SEQ ID NO: 20713 - protein, 9 aa, Homo sapiens
  Light chain CDR3 for antibody 10357 (IGKV3D-7)
QQDYKLPLT

SEQ ID NO: 20714 - protein, 10 aa, Homo sapiens
  Heavy chain CDR3 for antibody 10357 (IGHV3-30)
AREWYGGMEV

SEQ ID NO: 20715 - protein, 10 aa, Homo sapiens
  Light chain CDR3 for antibody 10358 (IGKV3-11)
QQRSNWPALT

SEQ ID NO: 20716 - protein, 13 aa, Homo sapiens
  Heavy chain CDR3 for antibody 10358 (IGHV4-34)
ARHPPSRDYGMDV

SEQ ID NO: 20717 - protein, 8 aa, Homo sapiens
  Light chain CDR3 for antibody 10359 (IGKV3-11)
QQRGNWPS

SEQ ID NO: 20718 - protein, 9 aa, Homo sapiens
  Heavy chain CDR3 for antibody 10359 (IGHV1-18)
ARGKDWFDP

SEQ ID NO: 20719 - protein, 9 aa, Homo sapiens
  Light chain CDR3 for antibody 10360 (IGKV1-6)
LQDYNYPWT

SEQ ID NO: 20720 - protein, 12 aa, Homo sapiens
  Heavy chain CDR3 for antibody 10360 (IGHV1-69)
ARLVGAWSGMDV

SEQ ID NO: 20721 - protein, 9 aa, Homo sapiens
  Light chain CDR3 for antibody 10361 (IGKV3-20)
QQYGRSPRT

SEQ ID NO: 20722 - protein, 16 aa, Homo sapiens
  Heavy chain CDR3 for antibody 10361 (IGHV1-24)
ATEDSSSYYYYYGMDV

SEQ ID NO: 20723 - protein, 8 aa, Homo sapiens
  Light chain CDR3 for antibody 10362 (IGKV3-11)
QQRSNWWT

SEQ ID NO: 20724 - protein, 16 aa, Homo sapiens
  Heavy chain CDR3 for antibody 10362 (IGHV3-33)
ARGGRSDWLYYYGMDV

SEQ ID NO: 20725 - protein, 11 aa, Homo sapiens
  Light chain CDR3 for antibody 10363 (IGKV3-11)
QQRSNWPPMYT

SEQ ID NO: 20726 - protein, 15 aa, Homo sapiens
  Heavy chain CDR3 for antibody 10363 (IGHV3-66)
ARDRDYYYYYYGMDV

SEQ ID NO: 20727 - protein, 9 aa, Homo sapiens
  Light chain CDR3 for antibody 10364 (IGKV2-30)
MQGTHWPLT

SEQ ID NO: 20728 - protein, 11 aa, Homo sapiens
  Heavy chain CDR3 for antibody 10364 (IGHV3-33)
ARDQGGSSFDY

SEQ ID NO: 20729 - protein, 9 aa, Homo sapiens
  Light chain CDR3 for antibody 10365 (IGKV1-5)
QQYNTYSRT

SEQ ID NO: 20730 - protein, 17 aa, Homo sapiens
  Heavy chain CDR3 for antibody 10365 (IGHV3-33)
ARGFSGYDGYYYYGMDV

SEQ ID NO: 20731 - protein, 8 aa, Homo sapiens
  Light chain CDR3 for antibody 10366 (IGKV6-21)
HQSSSLYA

SEQ ID NO: 20732 - protein, 19 aa, Homo sapiens
  Heavy chain CDR3 for antibody 10366 (IGHV4-59)
ARDRVVGATTYYYYYGMDV

SEQ ID NO: 20733 - protein, 9 aa, Homo sapiens
  Light chain CDR3 for antibody 10367 (IGKV1-6)
LQDYNYPYT

SEQ ID NO: 20734 - protein, 20 aa, Homo sapiens
  Heavy chain CDR3 for antibody 10367 (IGHV3-33)
AREGYDILTGYYKAYYGMDV

SEQ ID NO: 20735 - protein, 9 aa, Homo sapiens
  Light chain CDR3 for antibody 10368 (IGKV1-6)
LQDFHYPWT

SEQ ID NO: 20736 - protein, 14 aa, Homo sapiens
  Heavy chain CDR3 for antibody 10368 (IGHV3-23)
AKSRIVGALYYFDY

SEQ ID NO: 20737 - protein, 9 aa, Homo sapiens
  Light chain CDR3 for antibody 10369 (IGKV3-20)
QQYGSSPWK

SEQ ID NO: 20738 - protein, 13 aa, Homo sapiens
  Heavy chain CDR3 for antibody 10369 (IGHV3-33)
ARDQRYSSGWYDY

SEQ ID NO: 20739 - protein, 9 aa, Homo sapiens
  Light chain CDR3 for antibody 10370 (IGKV1-6)
LQDYNYPWT

SEQ ID NO: 20740 - protein, 18 aa, Homo sapiens
  Heavy chain CDR3 for antibody 10370 (IGHV3-33)
AREGSYYGSGSCPNWFDH

SEQ ID NO: 20741 - protein, 11 aa, Homo sapiens
  Light chain CDR3 for antibody 10371 (IGKV3-11)
QQRSNWPPTWT

SEQ ID NO: 20742 - protein, 11 aa, Homo sapiens
  Heavy chain CDR3 for antibody 10371 (IGHV3-33)
ARDRVLSPFDY

SEQ ID NO: 20743 - protein, 9 aa, Homo sapiens
  Light chain CDR3 for antibody 10372 (IGKV1-6)
LQDYNHQFT

SEQ ID NO: 20744 - protein, 12 aa, Homo sapiens
  Heavy chain CDR3 for antibody 10372 (IGHV3-33)
ARGYFGSGYAHF

SEQ ID NO: 20745 - protein, 9 aa, Homo sapiens
  Light chain CDR3 for antibody 10373 (IGKV1-9)
QQYISYPLT

SEQ ID NO: 20746 - protein, 15 aa, Homo sapiens
  Heavy chain CDR3 for antibody 10373 (IGHV3-23)
ARDSGGGAGTLPFDY

SEQ ID NO: 20747 - protein, 10 aa, Homo sapiens
  Light chain CDR3 for antibody 10374 (IGKV3-15)
QQYNNWPPLT

SEQ ID NO: 20748 - protein, 13 aa, Homo sapiens
  Heavy chain CDR3 for antibody 10374 (IGHV3-11)
ARDEGYRGYVLDT

SEQ ID NO: 20749 - protein, 9 aa, Homo sapiens
  Light chain CDR3 for antibody 10375 (IGKV1-16)
QHYNDYPFT

SEQ ID NO: 20750 - protein, 16 aa, Homo sapiens
  Heavy chain CDR3 for antibody 10375 (IGHV3-33)
ARGGRSDWLYYYGMDV

SEQ ID NO: 20751 - protein, 8 aa, Homo sapiens
  Light chain CDR3 for antibody 10376 (IGKV3D-7)
QQDYNLLT

SEQ ID NO: 20752 - protein, 15 aa, Homo sapiens
  Heavy chain CDR3 for antibody 10376 (IGHV3-23)
AKDLSSGWYAYFFDY

SEQ ID NO: 20753 - protein, 9 aa, Homo sapiens
  Light chain CDR3 for antibody 10377 (IGKV3D-20)
QQYGSSPWT

SEQ ID NO: 20754 - protein, 13 aa, Homo sapiens
  Heavy chain CDR3 for antibody 10377 (IGHV3-33)
VRRIAVAGTEGDC

SEQ ID NO: 20755 - protein, 9 aa, Homo sapiens
  Light chain CDR3 for antibody 10378 (IGKV1-6)
QQYYSYPWT

SEQ ID NO: 20756 - protein, 12 aa, Homo sapiens
  Heavy chain CDR3 for antibody 10378 (IGHV1-18)
ARILFYGDYFDY

SEQ ID NO: 20757 - protein, 9 aa, Homo sapiens
  Light chain CDR3 for antibody 10379 (IGKV2-30)
MQGTHCPYT

SEQ ID NO: 20758 - protein, 9 aa, Homo sapiens
  Heavy chain CDR3 for antibody 10379 (IGHV4-59)
ARGGASFDY

SEQ ID NO: 20759 - protein, 9 aa, Homo sapiens
  Light chain CDR3 for antibody 10380 (IGKV1-16)
LQDYNYPPT

SEQ ID NO: 20760 - protein, 14 aa, Homo sapiens
  Heavy chain CDR3 for antibody 10380 (IGHV3-33)
AKSYDILTGEAFDI

SEQ ID NO: 20761 - protein, 8 aa, Homo sapiens
  Light chain CDR3 for antibody 10381 (IGKV3D-7)
QQDYSLLT

SEQ ID NO: 20762 - protein, 18 aa, Homo sapiens
  Heavy chain CDR3 for antibody 10381 (IGHV3-33)
ARREGIVGAAAYYYGMDV

SEQ ID NO: 20763 - protein, 9 aa, Homo sapiens
  Light chain CDR3 for antibody 10382 (IGKV1-16)
QQYNSYPYT

SEQ ID NO: 20764 - protein, 20 aa, Homo sapiens
  Heavy chain CDR3 for antibody 10382 (IGHV4-59)
ARDRGYDILTGYYGYYGMDV

SEQ ID NO: 20765 - protein, 10 aa, Homo sapiens
  Light chain CDR3 for antibody 10383 (IGKV1-27)
QKYNSAPMYT

SEQ ID NO: 20766 - protein, 16 aa, Homo sapiens
  Heavy chain CDR3 for antibody 10383 (IGHV3-13)
AKEGMVLRYFDWLWDY

SEQ ID NO: 20767 - protein, 8 aa, Homo sapiens
  Light chain CDR3 for antibody 10384 (IGKV2D-28)
MQALQTPT

SEQ ID NO: 20768 - protein, 11 aa, Homo sapiens
  Heavy chain CDR3 for antibody 10384 (IGHV3-33)
AREAANWGFDY

SEQ ID NO: 20769 - protein, 9 aa, Homo sapiens
  Light chain CDR3 for antibody 10385 (IGKV3D-7)
QQDYNLPRT

SEQ ID NO: 20770 - protein, 14 aa, Homo sapiens
  Heavy chain CDR3 for antibody 10385 (IGHV3-33)
AREGYSSGWDYFDH

SEQ ID NO: 20771 - protein, 8 aa, Homo sapiens
  Light chain CDR3 for antibody 10386 (IGKV3-11)
QQRSNWWT

SEQ ID NO: 20772 - protein, 11 aa, Homo sapiens
  Heavy chain CDR3 for antibody 10386 (IGHV3-33)
ARDRVLTPFDY

SEQ ID NO: 20773 - protein, 8 aa, Homo sapiens
  Light chain CDR3 for antibody 10387 (IGKV3D-7)
QQDYNLVT

SEQ ID NO: 20774 - protein, 13 aa, Homo sapiens
  Heavy chain CDR3 for antibody 10387 (IGHV4-59)
ARESPGPYDAFDI

SEQ ID NO: 20775 - protein, 8 aa, Homo sapiens
  Light chain CDR3 for antibody 10388 (IGKV3-11)
QQRSNWLT

SEQ ID NO: 20776 - protein, 9 aa, Homo sapiens
  Heavy chain CDR3 for antibody 10388 (IGHV3-30)
ARPNWGFDY

SEQ ID NO: 20777 - protein, 8 aa, Homo sapiens
  Light chain CDR3 for antibody 10389 (IGKV3-11)
LQRGNWPT

SEQ ID NO: 20778 - protein, 19 aa, Homo sapiens
  Heavy chain CDR3 for antibody 10389 (IGHV5-78)
ARHGEKGKRITMVRGSLDV

SEQ ID NO: 20779 - protein, 9 aa, Homo sapiens
  Light chain CDR3 for antibody 10390 (IGKV1-9)
QQLISYPLT

SEQ ID NO: 20780 - protein, 12 aa, Homo sapiens
  Heavy chain CDR3 for antibody 10390 (IGHV3-30)
ARDRGYSGYIDY

SEQ ID NO: 20781 - protein, 9 aa, Homo sapiens
  Light chain CDR3 for antibody 10391 (IGKV3-15)
QQYNNWPYT

SEQ ID NO: 20782 - protein, 12 aa, Homo sapiens
  Heavy chain CDR3 for antibody 10391 (IGHV3-33)
AREGTGGNWFDP

SEQ ID NO: 20783 - protein, 9 aa, Homo sapiens
  Light chain CDR3 for antibody 10392 (IGKV5-2)
LQHDNFPYT

SEQ ID NO: 20784 - protein, 10 aa, Homo sapiens
  Heavy chain CDR3 for antibody 10392 (IGHV3-23)
AKARNGGLDY

SEQ ID NO: 20785 - protein, 9 aa, Homo sapiens
  Light chain CDR3 for antibody 10393 (IGKV1-16)
QHYNDYPFT

SEQ ID NO: 20786 - protein, 18 aa, Homo sapiens
  Heavy chain CDR3 for antibody 10393 (IGHV3-23)
AKDRITGTTYGYYSGLDV

SEQ ID NO: 20787 - protein, 9 aa, Homo sapiens
  Light chain CDR3 for antibody 10394 (IGKV1-17)
LHHHSYPYT

SEQ ID NO: 20788 - protein, 13 aa, Homo sapiens
  Heavy chain CDR3 for antibody 10394 (IGHV3-33)
ARDQRYSSGWYDY

SEQ ID NO: 20789 - protein, 9 aa, Homo sapiens
  Light chain CDR3 for antibody 10395 (IGKV3D-7)
QQDYNLPLT

SEQ ID NO: 20790 - protein, 16 aa, Homo sapiens
  Heavy chain CDR3 for antibody 10395 (IGHV3-23)
ARIAAPGSEYYYGMDV

SEQ ID NO: 20791 - protein, 9 aa, Homo sapiens
  Light chain CDR3 for antibody 10396 (IGKV1-27)
QKYNSAPYT

SEQ ID NO: 20792 - protein, 16 aa, Homo sapiens
  Heavy chain CDR3 for antibody 10396 (IGHV3-11)
ARDSELRYFDWFGMDV

SEQ ID NO: 20793 - protein, 9 aa, Homo sapiens
  Light chain CDR3 for antibody 10397 (IGKV1-39)
QQSYSTPFT

SEQ ID NO: 20794 - protein, 16 aa, Homo sapiens
  Heavy chain CDR3 for antibody 10397 (IGHV3-23)
AKDLRYFDWSLYAFDI

SEQ ID NO: 20795 - protein, 8 aa, Homo sapiens
  Light chain CDR3 for antibody 10398 (IGKV3-15)
QQYNNWPT

SEQ ID NO: 20796 - protein, 15 aa, Homo sapiens
  Heavy chain CDR3 for antibody 10398 (IGHV3-20)
ARDRGSSGWRDWFDP

SEQ ID NO: 20797 - protein, 9 aa, Homo sapiens
  Light chain CDR3 for antibody 10399 (IGKV1-9)
QQLNSYPRT

SEQ ID NO: 20798 - protein, 14 aa, Homo sapiens
  Heavy chain CDR3 for antibody 10399 (IGHV3-33)
ARETAAAIPEAFDI

SEQ ID NO: 20799 - protein, 9 aa, Homo sapiens
  Light chain CDR3 for antibody 10400 (IGKV3D-7)
QQDYKLPLT

SEQ ID NO: 20800 - protein, 13 aa, Homo sapiens
  Heavy chain CDR3 for antibody 10400 (IGHV3-33)
ARAFTMVRGVIDY

SEQ ID NO: 20801 - protein, 9 aa, Homo sapiens
  Light chain CDR3 for antibody 10401 (IGKV1-17)
LQHNSYPYT

SEQ ID NO: 20802 - protein, 13 aa, Homo sapiens
  Heavy chain CDR3 for antibody 10401 (IGHV4-39)
ARRDGSYYGYFGY

SEQ ID NO: 20803 - protein, 9 aa, Homo sapiens
  Light chain CDR3 for antibody 10402 (IGKV3-15)
QQYINWPLT

SEQ ID NO: 20804 - protein, 18 aa, Homo sapiens
  Heavy chain CDR3 for antibody 10402 (IGHV3-33)
ARERDYYGSGSYPDAFDI

SEQ ID NO: 20805 - protein, 9 aa, Homo sapiens
  Light chain CDR3 for antibody 10403 (IGKV3D-20)
HQYGSSPYT

SEQ ID NO: 20806 - protein, 16 aa, Homo sapiens
  Heavy chain CDR3 for antibody 10403 (IGHV1-24)
ATDWNDRGYYYYGMDV

SEQ ID NO: 20807 - protein, 9 aa, Homo sapiens
  Light chain CDR3 for antibody 10404 (IGKV2-30)
MQGTHWPLT

SEQ ID NO: 20808 - protein, 16 aa, Homo sapiens
  Heavy chain CDR3 for antibody 10404 (IGHV4-59)
AGGSGSYRDYYYGMDV

SEQ ID NO: 20809 - protein, 9 aa, Homo sapiens
  Light chain CDR3 for antibody 10405 (IGKV1-6)
LQDYKSPFT

SEQ ID NO: 20810 - protein, 20 aa, Homo sapiens
  Heavy chain CDR3 for antibody 10405 (IGHV1-18)
AREVGIAVAGTLYYYYGMDV

SEQ ID NO: 20811 - protein, 9 aa, Homo sapiens
  Light chain CDR3 for antibody 10406 (IGKV3D-7)
QQDYNLPYT

SEQ ID NO: 20812 - protein, 7 aa, Homo sapiens
  Heavy chain CDR3 for antibody 10406 (IGHV3-33)
ARELVDY

SEQ ID NO: 20813 - protein, 10 aa, Homo sapiens
  Light chain CDR3 for antibody 10407 (IGKV3-11)
QQRSNWPALT

SEQ ID NO: 20814 - protein, 8 aa, Homo sapiens
  Heavy chain CDR3 for antibody 10407 (IGHV3-23)
AKETGISY

SEQ ID NO: 20815 - protein, 9 aa, Homo sapiens
  Light chain CDR3 for antibody 10408 (IGKV1D-16)
QQFNNYPST

SEQ ID NO: 20816 - protein, 19 aa, Homo sapiens
  Heavy chain CDR3 for antibody 10408 (IGHV3-33)
ARGRGSYYYGPGSHNGMDV

SEQ ID NO: 20817 - protein, 9 aa, Homo sapiens
  Light chain CDR3 for antibody 10409 (IGKV3-11)
QQRSNWPPT

SEQ ID NO: 20818 - protein, 14 aa, Homo sapiens
  Heavy chain CDR3 for antibody 10409 (IGHV3-20)
ARDGGSSSFDWFDP

SEQ ID NO: 20819 - protein, 9 aa, Homo sapiens
  Light chain CDR3 for antibody 10410 (IGKV3D-7)
QQDYNLPLT

SEQ ID NO: 20820 - protein, 14 aa, Homo sapiens
  Heavy chain CDR3 for antibody 10410 (IGHV1-24)
ATWLPLYYYYGMDV

SEQ ID NO: 20821 - protein, 10 aa, Homo sapiens
  Light chain CDR3 for antibody 10411 (IGKV3-15)
QQYNNWPPYT

SEQ ID NO: 20822 - protein, 12 aa, Homo sapiens
  Heavy chain CDR3 for antibody 10411 (IGHV3-33)
ARDYISTYGMDV

SEQ ID NO: 20823 - protein, 9 aa, Homo sapiens
  Light chain CDR3 for antibody 10412 (IGKV3-11)
QQRSNWPYT

SEQ ID NO: 20824 - protein, 14 aa, Homo sapiens
  Heavy chain CDR3 for antibody 10412 (IGHV3-20)
ARDEGSGGYDVFDI

SEQ ID NO: 20825 - protein, 8 aa, Homo sapiens
  Light chain CDR3 for antibody 10413 (IGKV3-20)
QQYGSSRT

SEQ ID NO: 20826 - protein, 18 aa, Homo sapiens
  Heavy chain CDR3 for antibody 10413 (IGHV4-59)
AREGHYYTAGSYYKALDY

SEQ ID NO: 20827 - protein, 9 aa, Homo sapiens
  Light chain CDR3 for antibody 10414 (IGKV1-9)
QQLKSYLYT

SEQ ID NO: 20828 - protein, 11 aa, Homo sapiens
  Heavy chain CDR3 for antibody 10414 (IGHV3-33)
ARDILTGFLDH

SEQ ID NO: 20829 - protein, 10 aa, Homo sapiens
  Light chain CDR3 for antibody 10415 (IGKV3-20)
QQYGRSPPVT

SEQ ID NO: 20830 - protein, 17 aa, Homo sapiens
  Heavy chain CDR3 for antibody 10415 (IGHV3-33)
ARGEQWLGYYYYYGMDV

SEQ ID NO: 20831 - protein, 9 aa, Homo sapiens
  Light chain CDR3 for antibody 10416 (IGKV3-20)
QQYGTSPFP

SEQ ID NO: 20832 - protein, 11 aa, Homo sapiens
  Heavy chain CDR3 for antibody 10416 (IGHV3-33)
AREGAVARFDY

SEQ ID NO: 20833 - protein, 9 aa, Homo sapiens
  Light chain CDR3 for antibody 10417 (IGKV1-39)
QQSYSSPFT

SEQ ID NO: 20834 - protein, 17 aa, Homo sapiens
  Heavy chain CDR3 for antibody 10417 (IGHV1-18)
ARERYYGSGIYKYAMDV

SEQ ID NO: 20835 - protein, 11 aa, Homo sapiens
  Light chain CDR3 for antibody 10418 (IGKV3-11)
QQRSNWPPTWT

SEQ ID NO: 20836 - protein, 14 aa, Homo sapiens
  Heavy chain CDR3 for antibody 10418 (IGHV3-33)
ARRGSPLRPSHLDV

SEQ ID NO: 20837 - protein, 10 aa, Homo sapiens
  Light chain CDR3 for antibody 10419 (IGKV1-39)
QQSYSTPMYT

SEQ ID NO: 20838 - protein, 12 aa, Homo sapiens
  Heavy chain CDR3 for antibody 10419 (IGHV3-33)
ARGYFTSGSAHY

SEQ ID NO: 20839 - protein, 8 aa, Homo sapiens
  Light chain CDR3 for antibody 10420 (IGKV6-21)
HQSSSLPT

SEQ ID NO: 20840 - protein, 19 aa, Homo sapiens
  Heavy chain CDR3 for antibody 10420 (IGHV1-18)
ARDDILTGYSLYYYYGMDV

SEQ ID NO: 20841 - protein, 10 aa, Homo sapiens
  Light chain CDR3 for antibody 10421 (IGKV3-15)
QQYNNWPPIT

SEQ ID NO: 20842 - protein, 17 aa, Homo sapiens
  Heavy chain CDR3 for antibody 10421 (IGHV1-24)
ATHYGSGSHYKGYGMDV

SEQ ID NO: 20843 - protein, 9 aa, Homo sapiens
  Light chain CDR3 for antibody 10422 (IGKV1-6)
LQDYNYPRT

SEQ ID NO: 20844 - protein, 16 aa, Homo sapiens
  Heavy chain CDR3 for antibody 10422 (IGHV3-33)
AREGDILTGYPYYFDY

SEQ ID NO: 20845 - protein, 9 aa, Homo sapiens
  Light chain CDR3 for antibody 10423 (IGKV2D-24)
MQATQFPHT

SEQ ID NO: 20846 - protein, 10 aa, Homo sapiens
  Heavy chain CDR3 for antibody 10423 (IGHV3-33)
ARDGSGSQPI

SEQ ID NO: 20847 - protein, 9 aa, Homo sapiens
  Light chain CDR3 for antibody 10424 (IGKV1D-13)
QQFNNYPST

SEQ ID NO: 20848 - protein, 13 aa, Homo sapiens
  Heavy chain CDR3 for antibody 10424 (IGHV3-33)
ARDDDYGDYPFDY

SEQ ID NO: 20849 - protein, 9 aa, Homo sapiens
  Light chain CDR3 for antibody 10425 (IGKV1-16)
QHYNDYPFT

SEQ ID NO: 20850 - protein, 17 aa, Homo sapiens
  Heavy chain CDR3 for antibody 10425 (IGHV3-23)
AKDGIGELSYYYYGMDV

SEQ ID NO: 20851 - protein, 9 aa, Homo sapiens
  Light chain CDR3 for antibody 10426 (IGKV6-21)
HQSYSLPHT

SEQ ID NO: 20852 - protein, 13 aa, Homo sapiens
  Heavy chain CDR3 for antibody 10426 (IGHV3-33)
ARRYSSGWYPFDY

SEQ ID NO: 20853 - protein, 9 aa, Homo sapiens
  Light chain CDR3 for antibody 10427 (IGKV3-15)
QQYNYWPLT

SEQ ID NO: 20854 - protein, 17 aa, Homo sapiens
  Heavy chain CDR3 for antibody 10427 (IGHV4-59)
ARDRELLWFGEFGGMDV

SEQ ID NO: 20855 - protein, 8 aa, Homo sapiens
  Light chain CDR3 for antibody 10428 (IGKV6-21)
HQSSSLPT

SEQ ID NO: 20856 - protein, 10 aa, Homo sapiens
  Heavy chain CDR3 for antibody 10428 (IGHV3-23)
AKEQWLVPDY

SEQ ID NO: 20857 - protein, 8 aa, Homo sapiens
  Light chain CDR3 for antibody 10429 (IGKV1D-13)
QQFNNYPT

SEQ ID NO: 20858 - protein, 16 aa, Homo sapiens
  Heavy chain CDR3 for antibody 10429 (IGHV3-33)
ARDGSMVRRIHDAFDF

SEQ ID NO: 20859 - protein, 9 aa, Homo sapiens
  Light chain CDR3 for antibody 10430 (IGKV1-9)
QQLYRYPIT

SEQ ID NO: 20860 - protein, 18 aa, Homo sapiens
  Heavy chain CDR3 for antibody 10430 (IGHV3-11)
ARREGIVGATTYYYGMDV

SEQ ID NO: 20861 - protein, 8 aa, Homo sapiens
  Light chain CDR3 for antibody 10431 (IGKV1-9)
QQDYNLLT

SEQ ID NO: 20862 - protein, 13 aa, Homo sapiens
  Heavy chain CDR3 for antibody 10431 (IGHV3-23)
AKDRGYSSTSTAY

SEQ ID NO: 20863 - protein, 10 aa, Homo sapiens
  Light chain CDR3 for antibody 10432 (IGKV1-39)
QQSYSTPMYT

SEQ ID NO: 20864 - protein, 11 aa, Homo sapiens
  Heavy chain CDR3 for antibody 10432 (IGHV3-23)
GEFSSGWSFDY

SEQ ID NO: 20865 - protein, 9 aa, Homo sapiens
  Light chain CDR3 for antibody 10433 (IGKV2-30)
MQGTHWPLT

SEQ ID NO: 20866 - protein, 20 aa, Homo sapiens
  Heavy chain CDR3 for antibody 10433 (IGHV3-33)
ARDPAQLERRYYYFYYGMDV

SEQ ID NO: 20867 - protein, 9 aa, Homo sapiens
  Light chain CDR3 for antibody 10434 (IGKV1-9)
QQLNSYPWP

SEQ ID NO: 20868 - protein, 11 aa, Homo sapiens
  Heavy chain CDR3 for antibody 10434 (IGHV3-33)
ARGTTVTHFDY

SEQ ID NO: 20869 - protein, 9 aa, Homo sapiens
  Light chain CDR3 for antibody 10435 (IGKV1-17)
LQHNGYPLT

SEQ ID NO: 20870 - protein, 11 aa, Homo sapiens
  Heavy chain CDR3 for antibody 10435 (IGHV4-59)
ARSIRYSVFDY

SEQ ID NO: 20871 - protein, 9 aa, Homo sapiens
  Light chain CDR3 for antibody 10436 (IGKV1-5)
QQYNTYSRT

SEQ ID NO: 20872 - protein, 13 aa, Homo sapiens
  Heavy chain CDR3 for antibody 10436 (IGHV3-33)
ARKAYGDYFYFDY

SEQ ID NO: 20873 - protein, 9 aa, Homo sapiens
  Light chain CDR3 for antibody 10437 (IGKV1-17)
LQQNSYPYT

SEQ ID NO: 20874 - protein, 18 aa, Homo sapiens
  Heavy chain CDR3 for antibody 10437 (IGHV4-39)
ARGALTYYDILTGYFFDY

SEQ ID NO: 20875 - protein, 8 aa, Homo sapiens
  Light chain CDR3 for antibody 10438 (IGKV1D-13)
QQFNNYPT

SEQ ID NO: 20876 - protein, 16 aa, Homo sapiens
  Heavy chain CDR3 for antibody 10438 (IGHV3-33)
ARDNFGSGSYYSHFHY

SEQ ID NO: 20877 - protein, 9 aa, Homo sapiens
  Light chain CDR3 for antibody 10439 (IGKV1-9)
QQLNNYLFT

SEQ ID NO: 20878 - protein, 13 aa, Homo sapiens
  Heavy chain CDR3 for antibody 10439 (IGHV4-59)
ARTMVRGVAPFDY

SEQ ID NO: 20879 - protein, 9 aa, Homo sapiens
  Light chain CDR3 for antibody 10440 (IGKV1D-16)
QQYNSYPYT

SEQ ID NO: 20880 - protein, 17 aa, Homo sapiens
  Heavy chain CDR3 for antibody 10440 (IGHV1-18)
SRARYYGSGNYKYNMDF

SEQ ID NO: 20881 - protein, 9 aa, Homo sapiens
  Light chain CDR3 for antibody 10441 (IGKV1-9)
QQLNTYPWT

SEQ ID NO: 20882 - protein, 15 aa, Homo sapiens
  Heavy chain CDR3 for antibody 10441 (IGHV4-39)
ARRSKYTSAWYPFDY

SEQ ID NO: 20883 - protein, 9 aa, Homo sapiens
  Light chain CDR3 for antibody 10442 (IGKV1-17)
LHSNNYPWT

SEQ ID NO: 20884 - protein, 12 aa, Homo sapiens
  Heavy chain CDR3 for antibody 10442 (IGHV4-59)
ARDRSGWAYFDY

SEQ ID NO: 20885 - protein, 9 aa, Homo sapiens
  Light chain CDR3 for antibody 10443 (IGKV5-2)
LQHDKFPYT

SEQ ID NO: 20886 - protein, 12 aa, Homo sapiens
  Heavy chain CDR3 for antibody 10443 (IGHV3-13)
VREAGIPDAFDI

SEQ ID NO: 20887 - protein, 9 aa, Homo sapiens
  Light chain CDR3 for antibody 10444 (IGKV3D-7)
QQDYKLPLT

SEQ ID NO: 20888 - protein, 12 aa, Homo sapiens
  Heavy chain CDR3 for antibody 10444 (IGHV3-23)
AKEGIVGVPFDY

SEQ ID NO: 20889 - protein, 9 aa, Homo sapiens
  Light chain CDR3 for antibody 10445 (IGKV1-6)
LQDFHYPWT

SEQ ID NO: 20890 - protein, 12 aa, Homo sapiens
  Heavy chain CDR3 for antibody 10445 (IGHV1-18)
ARILFYGDYFDY

SEQ ID NO: 20891 - protein, 9 aa, Homo sapiens
  Light chain CDR3 for antibody 10446 (IGKV3-15)
QQYHNWPLT

SEQ ID NO: 20892 - protein, 18 aa, Homo sapiens
  Heavy chain CDR3 for antibody 10446 (IGHV6-1)
ARDQYSYGPYYYYYGMDV

SEQ ID NO: 20893 - protein, 9 aa, Homo sapiens
  Light chain CDR3 for antibody 10447 (IGKV1-9)
QQLISYPRT

SEQ ID NO: 20894 - protein, 9 aa, Homo sapiens
  Heavy chain CDR3 for antibody 10447 (IGHV3-30)
ARPNWGFDY

SEQ ID NO: 20895 - protein, 10 aa, Homo sapiens
  Light chain CDR3 for antibody 10448 (IGKV1-17)
LQHNSYPMYT

SEQ ID NO: 20896 - protein, 9 aa, Homo sapiens
  Heavy chain CDR3 for antibody 10448 (IGHV1-8)
ARGRLDFDY

SEQ ID NO: 20897 - protein, 9 aa, Homo sapiens
  Light chain CDR3 for antibody 10449 (IGKV1-9)
QQLNSYPLT

SEQ ID NO: 20898 - protein, 11 aa, Homo sapiens
  Heavy chain CDR3 for antibody 10449 (IGHV4-39)
ARDSGSYYFDY

SEQ ID NO: 20899 - protein, 9 aa, Homo sapiens
  Light chain CDR3 for antibody 10450 (IGKV3-20)
QQYGISPYT

SEQ ID NO: 20900 - protein, 12 aa, Homo sapiens
  Heavy chain CDR3 for antibody 10450 (IGHV1-18)
ARILSYGDYFDY

SEQ ID NO: 20901 - protein, 9 aa, Homo sapiens
  Light chain CDR3 for antibody 10451 (IGKV4-1)
QQYYTTPPT

SEQ ID NO: 20902 - protein, 11 aa, Homo sapiens
  Heavy chain CDR3 for antibody 10451 (IGHV3-33)
ARAGIAALFDY

SEQ ID NO: 20903 - protein, 9 aa, Homo sapiens
  Light chain CDR3 for antibody 10452 (IGKV1-9)
QQLISYPLT

SEQ ID NO: 20904 - protein, 12 aa, Homo sapiens
  Heavy chain CDR3 for antibody 10452 (IGHV4-59)
ARGYSSSWYFDY

SEQ ID NO: 20905 - protein, 8 aa, Homo sapiens
  Light chain CDR3 for antibody 10453 (IGKV3-20)
QQYGRSFT

SEQ ID NO: 20906 - protein, 15 aa, Homo sapiens
  Heavy chain CDR3 for antibody 10453 (IGHV4-59)
ARDIGYYGSGSPLAY

SEQ ID NO: 20907 - protein, 9 aa, Homo sapiens
  Light chain CDR3 for antibody 10454 (IGKV1D-16)
QQYDSYPWT

SEQ ID NO: 20908 - protein, 23 aa, Homo sapiens
  Heavy chain CDR3 for antibody 10454 (IGHV3-11)
ARDRGITMVRGVITYYYFYGMDV

SEQ ID NO: 20909 - protein, 9 aa, Homo sapiens
  Light chain CDR3 for antibody 10455 (IGKV1D-16)
QQYNSYPLT

SEQ ID NO: 20910 - protein, 14 aa, Homo sapiens
  Heavy chain CDR3 for antibody 10455 (IGHV3-20)
ARDEGSTWSDIFDI

SEQ ID NO: 20911 - protein, 9 aa, Homo sapiens
  Light chain CDR3 for antibody 10456 (IGKV2D-24)
TQATQFPHT

SEQ ID NO: 20912 - protein, 13 aa, Homo sapiens
  Heavy chain CDR3 for antibody 10456 (IGHV4-39)
ARQWPSGYWYFDL

SEQ ID NO: 20913 - protein, 8 aa, Homo sapiens
  Light chain CDR3 for antibody 10457 (IGKV3-11)
QQRSNWLT

SEQ ID NO: 20914 - protein, 18 aa, Homo sapiens
  Heavy chain CDR3 for antibody 10457 (IGHV3-23)
AKDRITGTTYGYYAGLDV

SEQ ID NO: 20915 - protein, 9 aa, Homo sapiens
  Light chain CDR3 for antibody 10458 (IGKV5-2)
LQHDKFPYT

SEQ ID NO: 20916 - protein, 19 aa, Homo sapiens
  Heavy chain CDR3 for antibody 10458 (IGHV3-33)
ARVLDGLSPPYYYYDGLDV

SEQ ID NO: 20917 - protein, 9 aa, Homo sapiens
  Light chain CDR3 for antibody 10459 (IGKV1D-13)
QQFNNYPYT

SEQ ID NO: 20918 - protein, 11 aa, Homo sapiens
  Heavy chain CDR3 for antibody 10459 (IGHV3-23)
AKDRPYYGSGV

SEQ ID NO: 20919 - protein, 9 aa, Homo sapiens
  Light chain CDR3 for antibody 10460 (IGKV4-1)
QQYYSTPWT

SEQ ID NO: 20920 - protein, 14 aa, Homo sapiens
  Heavy chain CDR3 for antibody 10460 (IGHV3-33)
ARRGSPLRPSHLDV

SEQ ID NO: 20921 - protein, 10 aa, Homo sapiens
  Light chain CDR3 for antibody 10461 (IGKV3-11)
QQRSIWPPYT

SEQ ID NO: 20922 - protein, 16 aa, Homo sapiens
  Heavy chain CDR3 for antibody 10461 (IGHV3-33)
ARGYDMLTGDYHCMDV

SEQ ID NO: 20923 - protein, 9 aa, Homo sapiens
  Light chain CDR3 for antibody 10462 (IGKV1-39)
QQSYRTPLT

SEQ ID NO: 20924 - protein, 17 aa, Homo sapiens
  Heavy chain CDR3 for antibody 10462 (IGHV3-33)
AKEGSSSSWYGGLYFDY

SEQ ID NO: 20925 - protein, 9 aa, Homo sapiens
  Light chain CDR3 for antibody 10463 (IGKV1-17)
LHSNNYPWT

SEQ ID NO: 20926 - protein, 13 aa, Homo sapiens
  Heavy chain CDR3 for antibody 10463 (IGHV3-33)
ARDYTMVRGVMNY

SEQ ID NO: 20927 - protein, 9 aa, Homo sapiens
  Light chain CDR3 for antibody 10464 (IGKV1-9)
QQLISYPLT

SEQ ID NO: 20928 - protein, 12 aa, Homo sapiens
  Heavy chain CDR3 for antibody 10464 (IGHV3-33)
AREEAVAEAFDI

SEQ ID NO: 20929 - protein, 9 aa, Homo sapiens
  Light chain CDR3 for antibody 10465 (IGKV1D-16)
QQYYSYPRT

SEQ ID NO: 20930 - protein, 16 aa, Homo sapiens
  Heavy chain CDR3 for antibody 10465 (IGHV1-24)
ATEDSSSYYYYYGMDV

SEQ ID NO: 20931 - protein, 8 aa, Homo sapiens
  Light chain CDR3 for antibody 10466 (IGKV1-5)
QQYNSYYT

SEQ ID NO: 20932 - protein, 17 aa, Homo sapiens
  Heavy chain CDR3 for antibody 10466 (IGHV3-33)
ARGGAAAGPYLYYGLDV

SEQ ID NO: 20933 - protein, 9 aa, Homo sapiens
  Light chain CDR3 for antibody 10467 (IGKV1-9)
QQLKSYPYT

SEQ ID NO: 20934 - protein, 12 aa, Homo sapiens
  Heavy chain CDR3 for antibody 10467 (IGHV3-13)
AREAGIPDAFDI

SEQ ID NO: 20935 - protein, 9 aa, Homo sapiens
  Light chain CDR3 for antibody 10468 (IGKV3-20)
LQHNSYPYT

SEQ ID NO: 20936 - protein, 13 aa, Homo sapiens
  Heavy chain CDR3 for antibody 10468 (IGHV3-33)
VRRIAVAGTECDC

SEQ ID NO: 20937 - protein, 10 aa, Homo sapiens
  Light chain CDR3 for antibody 10469 (IGKV3-11)
QQRSNWPALT

SEQ ID NO: 20938 - protein, 16 aa, Homo sapiens
  Heavy chain CDR3 for antibody 10469 (IGHV3-33)
ARGANYYGSGIPNFEY

SEQ ID NO: 20939 - protein, 10 aa, Homo sapiens
  Light chain CDR3 for antibody 10470 (IGKV1-27)
QKYNSAPMYT

SEQ ID NO: 20940 - protein, 9 aa, Homo sapiens
  Heavy chain CDR3 for antibody 10470 (IGHV4-59)
AREGGSGSL

SEQ ID NO: 20941 - protein, 10 aa, Homo sapiens
  Light chain CDR3 for antibody 10471 (IGKV3-11)
QQRSNWPIFT

SEQ ID NO: 20942 - protein, 17 aa, Homo sapiens
  Heavy chain CDR3 for antibody 10471 (IGHV3-33)
ARGFSGYDGYYYYGMDV

SEQ ID NO: 20943 - protein, 9 aa, Homo sapiens
  Light chain CDR3 for antibody 10472 (IGKV1-6)
LQDFHYPWT

SEQ ID NO: 20944 - protein, 17 aa, Homo sapiens
  Heavy chain CDR3 for antibody 10472 (IGHV3-21)
ARGYCSRTSCYLYYFDY

SEQ ID NO: 20945 - protein, 9 aa, Homo sapiens
  Light chain CDR3 for antibody 10473 (IGKV3D-7)
QQDYTLPYT

SEQ ID NO: 20946 - protein, 13 aa, Homo sapiens
  Heavy chain CDR3 for antibody 10473 (IGHV3-13)
ARAITMVRGVIDY

SEQ ID NO: 20947 - protein, 9 aa, Homo sapiens
  Light chain CDR3 for antibody 10474 (IGKV1-9)
QQLNTYPWT

SEQ ID NO: 20948 - protein, 9 aa, Homo sapiens
  Heavy chain CDR3 for antibody 10474 (IGHV3-23)
ARIWWLKDY

SEQ ID NO: 20949 - protein, 9 aa, Homo sapiens
  Light chain CDR3 for antibody 10475 (IGKV1-16)
QQYNSYPYT

SEQ ID NO: 20950 - protein, 11 aa, Homo sapiens
  Heavy chain CDR3 for antibody 10475 (IGHV1-69)
AREGSSGPFDY

SEQ ID NO: 20951 - protein, 10 aa, Homo sapiens
  Light chain CDR3 for antibody 10476 (IGKV3-11)
QQRSNWPIWT

SEQ ID NO: 20952 - protein, 16 aa, Homo sapiens
  Heavy chain CDR3 for antibody 10476 (IGHV3-33)
ARDRGGMTMVRGGFDY

SEQ ID NO: 20953 - protein, 9 aa, Homo sapiens
  Light chain CDR3 for antibody 10477 (IGKV3D-7)
QQDYTLPLT

SEQ ID NO: 20954 - protein, 18 aa, Homo sapiens
  Heavy chain CDR3 for antibody 10477 (IGHV1-24)
ATGLRYFDWPIISDLFDY

SEQ ID NO: 20955 - protein, 8 aa, Homo sapiens
  Light chain CDR3 for antibody 10478 (IGKV3-11)
QQRSNWLT

SEQ ID NO: 20956 - protein, 18 aa, Homo sapiens
  Heavy chain CDR3 for antibody 10478 (IGHV3-23)
AKEGNYYGSGSYWGYFDP

SEQ ID NO: 20957 - protein, 9 aa, Homo sapiens
  Light chain CDR3 for antibody 10479 (IGKV6-21)
HQSSSLPYT

SEQ ID NO: 20958 - protein, 15 aa, Homo sapiens
  Heavy chain CDR3 for antibody 10479 (IGHV1-8)
ARLRWFGELSGWFDP

SEQ ID NO: 20959 - protein, 9 aa, Homo sapiens
  Light chain CDR3 for antibody 10480 (IGKV3D-7)
QQDYNLPYT

SEQ ID NO: 20960 - protein, 13 aa, Homo sapiens
  Heavy chain CDR3 for antibody 10480 (IGHV1-2)
AKDGVRGSFGMDV

SEQ ID NO: 20961 - protein, 9 aa, Homo sapiens
  Light chain CDR3 for antibody 10481 (IGKV1-9)
QQLHIYPWT

SEQ ID NO: 20962 - protein, 18 aa, Homo sapiens
  Heavy chain CDR3 for antibody 10481 (IGHV3-33)
ARREGIVGATTYYYGMDV

SEQ ID NO: 20963 - protein, 10 aa, Homo sapiens
  Light chain CDR3 for antibody 10482 (IGKV3-11)
QQRSNWPIFT

SEQ ID NO: 20964 - protein, 17 aa, Homo sapiens
  Heavy chain CDR3 for antibody 10482 (IGHV1-18)
ARERYYGSGIYKYAMDV

SEQ ID NO: 20965 - protein, 9 aa, Homo sapiens
  Light chain CDR3 for antibody 10483 (IGKV1-9)
QQLHIYPWT

SEQ ID NO: 20966 - protein, 16 aa, Homo sapiens
  Heavy chain CDR3 for antibody 10483 (IGHV3-33)
AREVAGSYYYYYGMDV

SEQ ID NO: 20967 - protein, 9 aa, Homo sapiens
  Light chain CDR3 for antibody 10484 (IGKV1-17)
LQHNSYPPT

SEQ ID NO: 20968 - protein, 20 aa, Homo sapiens
  Heavy chain CDR3 for antibody 10484 (IGHV3-23)
AKDRETGTTSYHYYYYGMDV

SEQ ID NO: 20969 - protein, 10 aa, Homo sapiens
  Light chain CDR3 for antibody 10485 (IGKV3-15)
QQYNNWPPLT

SEQ ID NO: 20970 - protein, 12 aa, Homo sapiens
  Heavy chain CDR3 for antibody 10485 (IGHV3-33)
ARVDTAAPYLDY

SEQ ID NO: 20971 - protein, 6 aa, Homo sapiens
  Light chain CDR3 for antibody 10486 (IGKV3-20)
QQYGST

SEQ ID NO: 20972 - protein, 13 aa, Homo sapiens
  Heavy chain CDR3 for antibody 10486 (IGHV3-23)
ASPFNWNDGFFDY

SEQ ID NO: 20973 - protein, 9 aa, Homo sapiens
  Light chain CDR3 for antibody 10487 (IGKV3D-7)
QQDYNLPLT

SEQ ID NO: 20974 - protein, 15 aa, Homo sapiens
  Heavy chain CDR3 for antibody 10487 (IGHV3-20)
AREGPYYYGSGSLDY

SEQ ID NO: 20975 - protein, 11 aa, Homo sapiens
  Light chain CDR3 for antibody 10488 (IGKV3-11)
QQRSNWPPTWT

SEQ ID NO: 20976 - protein, 17 aa, Homo sapiens
  Heavy chain CDR3 for antibody 10488 (IGHV3-33)
ARGFSGYDGYYYYGMDV

SEQ ID NO: 20977 - protein, 9 aa, Homo sapiens
  Light chain CDR3 for antibody 10489 (IGKV1-6)
LQDYIYPRT

SEQ ID NO: 20978 - protein, 17 aa, Homo sapiens
  Heavy chain CDR3 for antibody 10489 (IGHV3-21)
ARDKAVAVYQFYYGLDV

SEQ ID NO: 20979 - protein, 10 aa, Homo sapiens
  Light chain CDR3 for antibody 10490 (IGKV3-11)
QQRSNWLMYT

SEQ ID NO: 20980 - protein, 17 aa, Homo sapiens
  Heavy chain CDR3 for antibody 10490 (IGHV3-33)
ARGYCSRTSCYLYYFDY

SEQ ID NO: 20981 - protein, 9 aa, Homo sapiens
  Light chain CDR3 for antibody 10491 (IGKV1-6)
LQVYSYPWT

SEQ ID NO: 20982 - protein, 14 aa, Homo sapiens
  Heavy chain CDR3 for antibody 10491 (IGHV3-33)
ARAISGSSYWYFDL

SEQ ID NO: 20983 - protein, 9 aa, Homo sapiens
  Light chain CDR3 for antibody 10492 (IGKV3D-7)
QQDYDLPYP

SEQ ID NO: 20984 - protein, 9 aa, Homo sapiens
  Heavy chain CDR3 for antibody 10492 (IGHV1-18)
ARGKDWFDH

SEQ ID NO: 20985 - protein, 9 aa, Homo sapiens
  Light chain CDR3 for antibody 10493 (IGKV1-27)
QKYNSAPHT

SEQ ID NO: 20986 - protein, 13 aa, Homo sapiens
  Heavy chain CDR3 for antibody 10493 (IGHV3-33)
ASAGNSYYNVMDV

SEQ ID NO: 20987 - protein, 8 aa, Homo sapiens
  Light chain CDR3 for antibody 10494 (IGKV3D-7)
QQDYNLLT

SEQ ID NO: 20988 - protein, 15 aa, Homo sapiens
  Heavy chain CDR3 for antibody 10494 (IGHV3-23)
AKEALRYFDWSGMDV

SEQ ID NO: 20989 - protein, 9 aa, Homo sapiens
  Light chain CDR3 for antibody 10495 (IGKV3D-20)
QQLKSYLYT

SEQ ID NO: 20990 - protein, 24 aa, Homo sapiens
  Heavy chain CDR3 for antibody 10495 (IGHV3-20)
ARGRITMVRGVIINPLDYYNGMDV

SEQ ID NO: 20991 - protein, 9 aa, Homo sapiens
  Light chain CDR3 for antibody 10496 (IGKV4-1)
QQYYTTPPT

SEQ ID NO: 20992 - protein, 15 aa, Homo sapiens
  Heavy chain CDR3 for antibody 10496 (IGHV3-23)
AKEALRYFDWSGMDV

SEQ ID NO: 20993 - protein, 8 aa, Homo sapiens
  Light chain CDR3 for antibody 10497 (IGKV3-15)
QQYNNWPT

SEQ ID NO: 20994 - protein, 15 aa, Homo sapiens
  Heavy chain CDR3 for antibody 10497 (IGHV1-46)
ARGRFFDWLLSPFDY

SEQ ID NO: 20995 - protein, 9 aa, Homo sapiens
  Light chain CDR3 for antibody 10498 (IGKV1-9)
QQRSNWQYT

SEQ ID NO: 20996 - protein, 18 aa, Homo sapiens
  Heavy chain CDR3 for antibody 10498 (IGHV3-33)
AGGGSGSYSSYYYYGMDV

SEQ ID NO: 20997 - protein, 9 aa, Homo sapiens
  Light chain CDR3 for antibody 10499 (IGKV6-21)
HQRSSLPYT

SEQ ID NO: 20998 - protein, 16 aa, Homo sapiens
  Heavy chain CDR3 for antibody 10499 (IGHV3-23)
AKEGMVLRYFAWFWDY

SEQ ID NO: 20999 - protein, 9 aa, Homo sapiens
  Light chain CDR3 for antibody 10500 (IGKV1-17)
QQYSSYPYT

SEQ ID NO: 21000 - protein, 11 aa, Homo sapiens
  Heavy chain CDR3 for antibody 10500 (IGHV4-59)
TRDRGLGSCDY

SEQ ID NO: 21001 - protein, 9 aa, Homo sapiens
  Light chain CDR3 for antibody 10501 (IGKV1-27)
QKYNSAPYT

SEQ ID NO: 21002 - protein, 19 aa, Homo sapiens
  Heavy chain CDR3 for antibody 10501 (IGHV3-33)
AKDGRSGSYDYYYYYGMDV

SEQ ID NO: 21003 - protein, 9 aa, Homo sapiens
  Light chain CDR3 for antibody 10502 (IGKV3D-20)
HQYGSSPLT

SEQ ID NO: 21004 - protein, 16 aa, Homo sapiens
  Heavy chain CDR3 for antibody 10502 (IGHV4-59)
ARGRYFEWLLGDVFDI

SEQ ID NO: 21005 - protein, 10 aa, Homo sapiens
  Light chain CDR3 for antibody 10503 (IGKV1-17)
LQHNSYPMYT

SEQ ID NO: 21006 - protein, 12 aa, Homo sapiens
  Heavy chain CDR3 for antibody 10503 (IGHV3-33)
AREGTRWVYFDY

SEQ ID NO: 21007 - protein, 9 aa, Homo sapiens
  Light chain CDR3 for antibody 10504 (IGKV5-2)
LQHDKFPYT

SEQ ID NO: 21008 - protein, 13 aa, Homo sapiens
  Heavy chain CDR3 for antibody 10504 (IGHV3-33)
ARDSGSYSYYFSY

SEQ ID NO: 21009 - protein, 10 aa, Homo sapiens
  Light chain CDR3 for antibody 10505 (IGKV3-11)
QQRSNWPAYT

SEQ ID NO: 21010 - protein, 18 aa, Homo sapiens
  Heavy chain CDR3 for antibody 10505 (IGHV3-30)
ARDQGIVVLPGAPWYFDL

SEQ ID NO: 21011 - protein, 9 aa, Homo sapiens
  Light chain CDR3 for antibody 10506 (IGKV1-17)
QQHNSYPYT

SEQ ID NO: 21012 - protein, 20 aa, Homo sapiens
  Heavy chain CDR3 for antibody 10506 (IGHV3-33)
ARAGDIAVAGTHYYYYGMDV

SEQ ID NO: 21013 - protein, 9 aa, Homo sapiens
  Light chain CDR3 for antibody 10507 (IGKV1-27)
QKYNSAPYT

SEQ ID NO: 21014 - protein, 15 aa, Homo sapiens
  Heavy chain CDR3 for antibody 10507 (IGHV3-33)
ARERYSSAWSSGMDV

SEQ ID NO: 21015 - protein, 9 aa, Homo sapiens
  Light chain CDR3 for antibody 10508 (IGKV1-13)
LQHNSYPPT

SEQ ID NO: 21016 - protein, 14 aa, Homo sapiens
  Heavy chain CDR3 for antibody 10508 (IGHV4-39)
ARDSGYDYYYAMDV

SEQ ID NO: 21017 - protein, 9 aa, Homo sapiens
  Light chain CDR3 for antibody 10509 (IGKV1-39)
QQSYSTPYT

SEQ ID NO: 21018 - protein, 13 aa, Homo sapiens
  Heavy chain CDR3 for antibody 10509 (IGHV3-33)
ARTDYYSYYGLDV

SEQ ID NO: 21019 - protein, 11 aa, Homo sapiens
  Light chain CDR3 for antibody 10510 (IGKV3-11)
QQRSDWPPTWT

SEQ ID NO: 21020 - protein, 14 aa, Homo sapiens
  Heavy chain CDR3 for antibody 10510 (IGHV3-33)
ARDKSYPLSYGMDV

SEQ ID NO: 21021 - protein, 9 aa, Homo sapiens
  Light chain CDR3 for antibody 10511 (IGKV3D-7)
QQDYNLPYT

SEQ ID NO: 21022 - protein, 12 aa, Homo sapiens
  Heavy chain CDR3 for antibody 10511 (IGHV3-74)
ARKQWLVQAFDI

SEQ ID NO: 21023 - protein, 9 aa, Homo sapiens
  Light chain CDR3 for antibody 10512 (IGKV1-39)
QQSYSTPLT

SEQ ID NO: 21024 - protein, 18 aa, Homo sapiens
  Heavy chain CDR3 for antibody 10512 (IGHV3-33)
VREGGYYGSGSYPDAFDI

SEQ ID NO: 21025 - protein, 9 aa, Homo sapiens
  Light chain CDR3 for antibody 10513 (IGKV1-33)
QQYDNLPFT

SEQ ID NO: 21026 - protein, 14 aa, Homo sapiens
  Heavy chain CDR3 for antibody 10513 (IGHV3-20)
AREGWFGDYYGMDV

SEQ ID NO: 21027 - protein, 9 aa, Homo sapiens
  Light chain CDR3 for antibody 10514 (IGKV1-33)
QQYDNLPFT

SEQ ID NO: 21028 - protein, 14 aa, Homo sapiens
  Heavy chain CDR3 for antibody 10514 (IGHV3-33)
ARDNILTGYYLFDY

SEQ ID NO: 21029 - protein, 9 aa, Homo sapiens
  Light chain CDR3 for antibody 10515 (IGKV3D-20)
QQYGISPYT

SEQ ID NO: 21030 - protein, 12 aa, Homo sapiens
  Heavy chain CDR3 for antibody 10515 (IGHV1-24)
TSDWAYYYGMDV

SEQ ID NO: 21031 - protein, 9 aa, Homo sapiens
  Light chain CDR3 for antibody 10516 (IGKV3-20)
QQYGSSPYT

SEQ ID NO: 21032 - protein, 10 aa, Homo sapiens
  Heavy chain CDR3 for antibody 10516 (IGHV3-33)
ARDHGYYFDY

SEQ ID NO: 21033 - protein, 10 aa, Homo sapiens
  Light chain CDR3 for antibody 10517 (IGKV3-15)
QQYNNWPPYT

SEQ ID NO: 21034 - protein, 14 aa, Homo sapiens
  Heavy chain CDR3 for antibody 10517 (IGHV3-33)
ARDNILTVYYLFDY

SEQ ID NO: 21035 - protein, 8 aa, Homo sapiens
  Light chain CDR3 for antibody 10518 (IGKV3-20)
QQYGSSFT

SEQ ID NO: 21036 - protein, 13 aa, Homo sapiens
  Heavy chain CDR3 for antibody 10518 (IGHV4-39)
ARHPPSRDYGMDV

SEQ ID NO: 21037 - protein, 9 aa, Homo sapiens
  Light chain CDR3 for antibody 10519 (IGKV3-11)
QQRSNWMYT

SEQ ID NO: 21038 - protein, 17 aa, Homo sapiens
  Heavy chain CDR3 for antibody 10519 (IGHV4-59)
AREEDYFGSGSFGTFDI

SEQ ID NO: 21039 - protein, 9 aa, Homo sapiens
  Light chain CDR3 for antibody 10520 (IGKV3-11)
QQRSDWPLT

SEQ ID NO: 21040 - protein, 14 aa, Homo sapiens
  Heavy chain CDR3 for antibody 10520 (IGHV3-33)
ARGGYSGYRYYFDY

SEQ ID NO: 21041 - protein, 9 aa, Homo sapiens
  Light chain CDR3 for antibody 10521 (IGKV1-6)
LQDYNYPYT

SEQ ID NO: 21042 - protein, 17 aa, Homo sapiens
  Heavy chain CDR3 for antibody 10521 (IGHV3-33)
ARVRGVIEGYHYYGMDV

SEQ ID NO: 21043 - protein, 10 aa, Homo sapiens
  Light chain CDR3 for antibody 10522 (IGKV1-17)
LQHNSYPMYT

SEQ ID NO: 21044 - protein, 15 aa, Homo sapiens
  Heavy chain CDR3 for antibody 10522 (IGHV3-23)
AKDGGWNYYYYGMDV

SEQ ID NO: 21045 - protein, 9 aa, Homo sapiens
  Light chain CDR3 for antibody 10523 (IGKV2-30)
MQGTHWPLT

SEQ ID NO: 21046 - protein, 10 aa, Homo sapiens
  Heavy chain CDR3 for antibody 10523 (IGHV1-18)
AREQRLGFDY

SEQ ID NO: 21047 - protein, 9 aa, Homo sapiens
  Light chain CDR3 for antibody 10524 (IGKV4-1)
QQYYSTPPT

SEQ ID NO: 21048 - protein, 13 aa, Homo sapiens
  Heavy chain CDR3 for antibody 10524 (IGHV3-53)
ARDEGYSGYNLDN

SEQ ID NO: 21049 - protein, 9 aa, Homo sapiens
  Light chain CDR3 for antibody 10525 (IGKV2-30)
MQGTHWPLT

SEQ ID NO: 21050 - protein, 13 aa, Homo sapiens
  Heavy chain CDR3 for antibody 10525 (IGHV3-33)
ASAGNSYYNVMDV

SEQ ID NO: 21051 - protein, 10 aa, Homo sapiens
  Light chain CDR3 for antibody 10526 (IGKV1-9)
QQLNSFLMYT

SEQ ID NO: 21052 - protein, 17 aa, Homo sapiens
  Heavy chain CDR3 for antibody 10526 (IGHV1-18)
ARDRAFTMVRGVPPFDY

SEQ ID NO: 21053 - protein, 9 aa, Homo sapiens
  Light chain CDR3 for antibody 10527 (IGKV3D-7)
QQDYNLPWT

SEQ ID NO: 21054 - protein, 17 aa, Homo sapiens
  Heavy chain CDR3 for antibody 10527 (IGHV3-23)
AKGNYGSGSYYKGDFHH

SEQ ID NO: 21055 - protein, 9 aa, Homo sapiens
  Light chain CDR3 for antibody 10528 (IGKV2D-28)
MQALQTPPT

SEQ ID NO: 21056 - protein, 21 aa, Homo sapiens
  Heavy chain CDR3 for antibody 10528 (IGHV3-33)
ARDEYYEIVTGYGYYHYGMDV

SEQ ID NO: 21057 - protein, 9 aa, Homo sapiens
  Light chain CDR3 for antibody 10529 (IGKV3-11)
QQRSSWPPT

SEQ ID NO: 21058 - protein, 14 aa, Homo sapiens
  Heavy chain CDR3 for antibody 10529 (IGHV3-33)
ARDTVAAGFNGMDV

SEQ ID NO: 21059 - protein, 9 aa, Homo sapiens
  Light chain CDR3 for antibody 10530 (IGKV1-39)
QQSYRTPLT

SEQ ID NO: 21060 - protein, 12 aa, Homo sapiens
  Heavy chain CDR3 for antibody 10530 (IGHV3-23)
AKESLYTPTDDY

SEQ ID NO: 21061 - protein, 9 aa, Homo sapiens
  Light chain CDR3 for antibody 10531 (IGKV1-17)
LQHNSHPWT

SEQ ID NO: 21062 - protein, 14 aa, Homo sapiens
  Heavy chain CDR3 for antibody 10531 (IGHV3-33)
ARATSGSSYWYFDL

SEQ ID NO: 21063 - protein, 9 aa, Homo sapiens
  Light chain CDR3 for antibody 10532 (IGKV1-6)
LQDYNHPFT

SEQ ID NO: 21064 - protein, 14 aa, Homo sapiens
  Heavy chain CDR3 for antibody 10532 (IGHV3-33)
ARGAAAGNFYGLEV

SEQ ID NO: 21065 - protein, 8 aa, Homo sapiens
  Light chain CDR3 for antibody 10533 (IGKV6-21)
HQSSSLPT

SEQ ID NO: 21066 - protein, 11 aa, Homo sapiens
  Heavy chain CDR3 for antibody 10533 (IGHV3-33)
ARGSGSYAFDY

SEQ ID NO: 21067 - protein, 9 aa, Homo sapiens
  Light chain CDR3 for antibody 10534 (IGKV3-15)
QQYNNWPRT

SEQ ID NO: 21068 - protein, 15 aa, Homo sapiens
  Heavy chain CDR3 for antibody 10534 (IGHV3-33)
AREYYYGSGSFPVDY

SEQ ID NO: 21069 - protein, 9 aa, Homo sapiens
  Light chain CDR3 for antibody 10535 (IGKV1D-13)
QRFNNYLYT

SEQ ID NO: 21070 - protein, 13 aa, Homo sapiens
  Heavy chain CDR3 for antibody 10535 (IGHV3-23)
AKEDGDYHHYFDY

SEQ ID NO: 21071 - protein, 9 aa, Homo sapiens
  Light chain CDR3 for antibody 10536 (IGKV1-6)
LQDYNYPYT

SEQ ID NO: 21072 - protein, 14 aa, Homo sapiens
  Heavy chain CDR3 for antibody 10536 (IGHV3-66)
AREEDYYYYYDMDV

SEQ ID NO: 21073 - protein, 9 aa, Homo sapiens
  Light chain CDR3 for antibody 10537 (IGKV1-17)
LQHNGYPLT

SEQ ID NO: 21074 - protein, 9 aa, Homo sapiens
  Heavy chain CDR3 for antibody 10537 (IGHV3-13)
ARDHWYFDL

SEQ ID NO: 21075 - protein, 10 aa, Homo sapiens
  Light chain CDR3 for antibody 10538 (IGKV1-39)
QQSYSTPMYT

SEQ ID NO: 21076 - protein, 18 aa, Homo sapiens
  Heavy chain CDR3 for antibody 10538 (IGHV3-33)
ARDQGIVVLPGAPWYFDP

SEQ ID NO: 21077 - protein, 9 aa, Homo sapiens
  Light chain CDR3 for antibody 10539 (IGKV3-11)
QQRSNWPLT

SEQ ID NO: 21078 - protein, 18 aa, Homo sapiens
  Heavy chain CDR3 for antibody 10539 (IGHV3-23)
AKEGDYYGSGSYWGYFDP

SEQ ID NO: 21079 - protein, 9 aa, Homo sapiens
  Light chain CDR3 for antibody 10540 (IGKV1-13)
QQYSNWPLT

SEQ ID NO: 21080 - protein, 17 aa, Homo sapiens
  Heavy chain CDR3 for antibody 10540 (IGHV3-33)
ARSGIVGATDYYYGLDV

SEQ ID NO: 21081 - protein, 9 aa, Homo sapiens
  Light chain CDR3 for antibody 10541 (IGKV1-16)
QHYNDYPFT

SEQ ID NO: 21082 - protein, 15 aa, Homo sapiens
  Heavy chain CDR3 for antibody 10541 (IGHV4-59)
ARDLGHYYGSVSIDY

SEQ ID NO: 21083 - protein, 9 aa, Homo sapiens
  Light chain CDR3 for antibody 10542 (IGKV1-6)
QQYYSYPYT

SEQ ID NO: 21084 - protein, 14 aa, Homo sapiens
  Heavy chain CDR3 for antibody 10542 (IGHV1-46)
ARGAAAGNFDGLDV

SEQ ID NO: 21085 - protein, 9 aa, Homo sapiens
  Light chain CDR3 for antibody 10543 (IGKV2D-28)
MQALQTPPT

SEQ ID NO: 21086 - protein, 10 aa, Homo sapiens
  Heavy chain CDR3 for antibody 10543 (IGHV3-21)
ARDVVVYFDY

SEQ ID NO: 21087 - protein, 9 aa, Homo sapiens
  Light chain CDR3 for antibody 10544 (IGKV5-2)
LQHDNFPYT

SEQ ID NO: 21088 - protein, 16 aa, Homo sapiens
  Heavy chain CDR3 for antibody 10544 (IGHV3-33)
ARGSVSDILTGAYFDY

SEQ ID NO: 21089 - protein, 9 aa, Homo sapiens
  Light chain CDR3 for antibody 10545 (IGKV1-17)
LQHNSYPPT

SEQ ID NO: 21090 - protein, 9 aa, Homo sapiens
  Heavy chain CDR3 for antibody 10545 (IGHV1-8)
ARGPRIMDV

SEQ ID NO: 21091 - protein, 10 aa, Homo sapiens
  Light chain CDR3 for antibody 10546 (IGKV3-11)
QQRSNWPIYT

SEQ ID NO: 21092 - protein, 13 aa, Homo sapiens
  Heavy chain CDR3 for antibody 10546 (IGHV3-15)
TTDRLLLFGAFDY

SEQ ID NO: 21093 - protein, 8 aa, Homo sapiens
  Light chain CDR3 for antibody 10547 (IGKV6-21)
HQSSSLYT

SEQ ID NO: 21094 - protein, 14 aa, Homo sapiens
  Heavy chain CDR3 for antibody 10547 (IGHV1-18)
ARCFGSGSYGWFDP

SEQ ID NO: 21095 - protein, 9 aa, Homo sapiens
  Light chain CDR3 for antibody 10548 (IGKV3-20)
QQYGSSPYT

SEQ ID NO: 21096 - protein, 13 aa, Homo sapiens
  Heavy chain CDR3 for antibody 10548 (IGHV4-61)
ARDGSSSGWDFDY

SEQ ID NO: 21097 - protein, 9 aa, Homo sapiens
  Light chain CDR3 for antibody 10549 (IGKV1-6)
LQDYNYPYT

SEQ ID NO: 21098 - protein, 12 aa, Homo sapiens
  Heavy chain CDR3 for antibody 10549 (IGHV3-9)
AEDPFLGTSFDY

SEQ ID NO: 21099 - protein, 9 aa, Homo sapiens
  Light chain CDR3 for antibody 10550 (IGKV1-6)
LQDYKSPFT

SEQ ID NO: 21100 - protein, 13 aa, Homo sapiens
  Heavy chain CDR3 for antibody 10550 (IGHV3-33)
ARQSSGWFDAFDI

SEQ ID NO: 21101 - protein, 10 aa, Homo sapiens
  Light chain CDR3 for antibody 10551 (IGKV1-39)
QQSYSTPMYT

SEQ ID NO: 21102 - protein, 20 aa, Homo sapiens
  Heavy chain CDR3 for antibody 10551 (IGHV3-33)
ARRMVRGVKKTYYYYYGLDV

SEQ ID NO: 21103 - protein, 9 aa, Homo sapiens
  Light chain CDR3 for antibody 10552 (IGKV1-39)
QQSYSTPLT

SEQ ID NO: 21104 - protein, 12 aa, Homo sapiens
  Heavy chain CDR3 for antibody 10552 (IGHV3-23)
AKGAVVTAIFDY

SEQ ID NO: 21105 - protein, 8 aa, Homo sapiens
  Light chain CDR3 for antibody 10553 (IGKV1D-13)
QQFNNYYT

SEQ ID NO: 21106 - protein, 12 aa, Homo sapiens
  Heavy chain CDR3 for antibody 10553 (IGHV4-61)
AREYSSGWLFDY

SEQ ID NO: 21107 - protein, 9 aa, Homo sapiens
  Light chain CDR3 for antibody 10554 (IGKV1-17)
LQHNGYPLT

SEQ ID NO: 21108 - protein, 14 aa, Homo sapiens
  Heavy chain CDR3 for antibody 10554 (IGHV3-33)
AREEDYYYYYDMDV

SEQ ID NO: 21109 - protein, 8 aa, Homo sapiens
  Light chain CDR3 for antibody 10555 (IGKV3D-7)
QQDYNLLT

SEQ ID NO: 21110 - protein, 19 aa, Homo sapiens
  Heavy chain CDR3 for antibody 10555 (IGHV3-33)
ARRRDDILTGWDYYFGMDV

SEQ ID NO: 21111 - protein, 9 aa, Homo sapiens
  Light chain CDR3 for antibody 10556 (IGKV1-16)
QQYNSYPLT

SEQ ID NO: 21112 - protein, 15 aa, Homo sapiens
  Heavy chain CDR3 for antibody 10556 (IGHV3-33)
ARDGGPDGDYKAFDI

SEQ ID NO: 21113 - protein, 9 aa, Homo sapiens
  Light chain CDR3 for antibody 10557 (IGKV1-33)
QQYDNLPFT

SEQ ID NO: 21114 - protein, 15 aa, Homo sapiens
  Heavy chain CDR3 for antibody 10557 (IGHV3-33)
ARDTGYSSSWNWFDP

SEQ ID NO: 21115 - protein, 9 aa, Homo sapiens
  Light chain CDR3 for antibody 10558 (IGKV3D-20)
QQYGSSPYT

SEQ ID NO: 21116 - protein, 20 aa, Homo sapiens
  Heavy chain CDR3 for antibody 10558 (IGHV1-2)
ARDGWDYYDSSAYYPSAFDL

SEQ ID NO: 21117 - protein, 9 aa, Homo sapiens
  Light chain CDR3 for antibody 10559 (IGKV1-6)
LQDYNYPWT

SEQ ID NO: 21118 - protein, 8 aa, Homo sapiens
  Heavy chain CDR3 for antibody 10559 (IGHV3-33)
ARGDGDIL

SEQ ID NO: 21119 - protein, 9 aa, Homo sapiens
  Light chain CDR3 for antibody 10560 (IGKV1-27)
QKYNSAPYT

SEQ ID NO: 21120 - protein, 14 aa, Homo sapiens
  Heavy chain CDR3 for antibody 10560 (IGHV1-46)
ARRGIVGALDAFDI

SEQ ID NO: 21121 - protein, 9 aa, Homo sapiens
  Light chain CDR3 for antibody 10561 (IGKV6-21)
HQSSSLPYT

SEQ ID NO: 21122 - protein, 6 aa, Homo sapiens
  Heavy chain CDR3 for antibody 10561 (IGHV4-59)
ARDGDY

SEQ ID NO: 21123 - protein, 9 aa, Homo sapiens
  Light chain CDR3 for antibody 10562 (IGKV3-20)
QQYGTSPFP

SEQ ID NO: 21124 - protein, 12 aa, Homo sapiens
  Heavy chain CDR3 for antibody 10562 (IGHV1-46)
ARGLTGDYAFDI

SEQ ID NO: 21125 - protein, 8 aa, Homo sapiens
  Light chain CDR3 for antibody 10563 (IGKV3-11)
QQRGNWPS

SEQ ID NO: 21126 - protein, 12 aa, Homo sapiens
  Heavy chain CDR3 for antibody 10563 (IGHV1-46)
ARILFYGDYFDY

SEQ ID NO: 21127 - protein, 9 aa, Homo sapiens
  Light chain CDR3 for antibody 10564 (IGKV1D-13)
QQFNNYPHT

SEQ ID NO: 21128 - protein, 14 aa, Homo sapiens
  Heavy chain CDR3 for antibody 10564 (IGHV4-59)
AKGGSGSYYNWFDP

SEQ ID NO: 21129 - protein, 8 aa, Homo sapiens
  Light chain CDR3 for antibody 10565 (IGKV3-11)
QQRGNWPS

SEQ ID NO: 21130 - protein, 17 aa, Homo sapiens
  Heavy chain CDR3 for antibody 10565 (IGHV1-18)
ARDEGYDILTGYPHFDY

SEQ ID NO: 21131 - protein, 9 aa, Homo sapiens
  Light chain CDR3 for antibody 10566 (IGKV1-9)
QQYNSYPLT

SEQ ID NO: 21132 - protein, 16 aa, Homo sapiens
  Heavy chain CDR3 for antibody 10566 (IGHV3-30)
ARDSSYYGSGYYGMDV

SEQ ID NO: 21133 - protein, 9 aa, Homo sapiens
  Light chain CDR3 for antibody 10567 (IGKV2-30)
MQGTHWPLT

SEQ ID NO: 21134 - protein, 14 aa, Homo sapiens
  Heavy chain CDR3 for antibody 10567 (IGHV1-24)
ATWLPLYYYYGMDV

SEQ ID NO: 21135 - protein, 9 aa, Homo sapiens
  Light chain CDR3 for antibody 10568 (IGKV1D-16)
QQYNSFPLT

SEQ ID NO: 21136 - protein, 18 aa, Homo sapiens
  Heavy chain CDR3 for antibody 10568 (IGHV4-30-2)
ARQGDYVWGSYRPNWFDH

SEQ ID NO: 21137 - protein, 11 aa, Homo sapiens
  Light chain CDR3 for antibody 10569 (IGKV3-11)
QQRSNWPPTWT

SEQ ID NO: 21138 - protein, 17 aa, Homo sapiens
  Heavy chain CDR3 for antibody 10569 (IGHV1-18)
ARERYYGSGIYKYAMDV

SEQ ID NO: 21139 - protein, 9 aa, Homo sapiens
  Light chain CDR3 for antibody 10570 (IGKV1-6)
LQHYSYPRT

SEQ ID NO: 21140 - protein, 12 aa, Homo sapiens
  Heavy chain CDR3 for antibody 10570 (IGHV3-33)
ARVDAAAPYFDY

SEQ ID NO: 21141 - protein, 11 aa, Homo sapiens
  Light chain CDR3 for antibody 10571 (IGKV3-11)
QQRSNWPPTWT

SEQ ID NO: 21142 - protein, 16 aa, Homo sapiens
  Heavy chain CDR3 for antibody 10571 (IGHV3-33)
ARAVYYGSGSSLIMDV

SEQ ID NO: 21143 - protein, 9 aa, Homo sapiens
  Light chain CDR3 for antibody 10572 (IGKV1-5)
QQYNTYSRT

SEQ ID NO: 21144 - protein, 15 aa, Homo sapiens
  Heavy chain CDR3 for antibody 10572 (IGHV3-33)
ARDHLTGYYYYGMDV

SEQ ID NO: 21145 - protein, 9 aa, Homo sapiens
  Light chain CDR3 for antibody 10573 (IGKV3-11)
QQRINWPWT

SEQ ID NO: 21146 - protein, 13 aa, Homo sapiens
  Heavy chain CDR3 for antibody 10573 (IGHV3-30)
ARAFIMVRGVIDY

SEQ ID NO: 21147 - protein, 8 aa, Homo sapiens
  Light chain CDR3 for antibody 10574 (IGKV3-11)
QQRSNWLT

SEQ ID NO: 21148 - protein, 13 aa, Homo sapiens
  Heavy chain CDR3 for antibody 10574 (IGHV3-33)
ARGDNWNDGGFDY

SEQ ID NO: 21149 - protein, 9 aa, Homo sapiens
  Light chain CDR3 for antibody 10575 (IGKV1-9)
QQLKSYPYT

SEQ ID NO: 21150 - protein, 9 aa, Homo sapiens
  Heavy chain CDR3 for antibody 10575 (IGHV4-59)
ARGGASFDY

SEQ ID NO: 21151 - protein, 8 aa, Homo sapiens
  Light chain CDR3 for antibody 10576 (IGKV1D-13)
QQYNSYYT

SEQ ID NO: 21152 - protein, 13 aa, Homo sapiens
  Heavy chain CDR3 for antibody 10576 (IGHV4-39)
ARHEVMIRGVFDY

SEQ ID NO: 21153 - protein, 9 aa, Homo sapiens
  Light chain CDR3 for antibody 10577 (IGKV1-6)
LQDYNYPYT

SEQ ID NO: 21154 - protein, 14 aa, Homo sapiens
  Heavy chain CDR3 for antibody 10577 (IGHV3-33)
ARDGYDILTGPFDY

SEQ ID NO: 21155 - protein, 9 aa, Homo sapiens
  Light chain CDR3 for antibody 10578 (IGKV1-6)
LQDYNYPRT

SEQ ID NO: 21156 - protein, 9 aa, Homo sapiens
  Heavy chain CDR3 for antibody 10578 (IGHV3-13)
AREHWYFDH

SEQ ID NO: 21157 - protein, 9 aa, Homo sapiens
  Light chain CDR3 for antibody 10579 (IGKV1-17)
LQHNTYPWT

SEQ ID NO: 21158 - protein, 13 aa, Homo sapiens
  Heavy chain CDR3 for antibody 10579 (IGHV3-11)
ARDEGYRGYVLDP

SEQ ID NO: 21159 - protein, 9 aa, Homo sapiens
  Light chain CDR3 for antibody 10580 (IGKV3-20)
QQYGSSPYT

SEQ ID NO: 21160 - protein, 7 aa, Homo sapiens
  Heavy chain CDR3 for antibody 10580 (IGHV3-33)
ARELFNY

SEQ ID NO: 21161 - protein, 10 aa, Homo sapiens
  Light chain CDR3 for antibody 10581 (IGKV3-11)
QQRSNWPALT

SEQ ID NO: 21162 - protein, 18 aa, Homo sapiens
  Heavy chain CDR3 for antibody 10581 (IGHV1-46)
ARDGDYVWGSYRSDWFDH

SEQ ID NO: 21163 - protein, 9 aa, Homo sapiens
  Light chain CDR3 for antibody 10582 (IGKV1-5)
QQYNSYPYT

SEQ ID NO: 21164 - protein, 18 aa, Homo sapiens
  Heavy chain CDR3 for antibody 10582 (IGHV1-8)
AREGAAAGSYYYYNGMDV

SEQ ID NO: 21165 - protein, 9 aa, Homo sapiens
  Light chain CDR3 for antibody 10583 (IGKV3-20)
QQYGSSPIT

SEQ ID NO: 21166 - protein, 12 aa, Homo sapiens
  Heavy chain CDR3 for antibody 10583 (IGHV3-23)
AKEGLGSDYDPY

SEQ ID NO: 21167 - protein, 10 aa, Homo sapiens
  Light chain CDR3 for antibody 10584 (IGKV1-39)
QQSYSTPMYT

SEQ ID NO: 21168 - protein, 14 aa, Homo sapiens
  Heavy chain CDR3 for antibody 10584 (IGHV3-20)
ARDGGSTCYDWFDP

SEQ ID NO: 21169 - protein, 9 aa, Homo sapiens
  Light chain CDR3 for antibody 10585 (IGKV1-39)
QQSYSTPYT

SEQ ID NO: 21170 - protein, 15 aa, Homo sapiens
  Heavy chain CDR3 for antibody 10585 (IGHV3-33)
ARGYYYGSGSFPVDY

SEQ ID NO: 21171 - protein, 9 aa, Homo sapiens
  Light chain CDR3 for antibody 10586 (IGKV3-15)
QQYDNLPFT

SEQ ID NO: 21172 - protein, 11 aa, Homo sapiens
  Heavy chain CDR3 for antibody 10586 (IGHV3-23)
AKGLWSYYFDY

SEQ ID NO: 21173 - protein, 8 aa, Homo sapiens
  Light chain CDR3 for antibody 10587 (IGKV1-5)
QQYNSYST

SEQ ID NO: 21174 - protein, 17 aa, Homo sapiens
  Heavy chain CDR3 for antibody 10587 (IGHV1-18)
ARERYYGSGIYKYAMDV

SEQ ID NO: 21175 - protein, 9 aa, Homo sapiens
  Light chain CDR3 for antibody 10588 (IGKV1-17)
QQEYNYPLT

SEQ ID NO: 21176 - protein, 10 aa, Homo sapiens
  Heavy chain CDR3 for antibody 10588 (IGHV3-23)
AKGDRWRFDP

SEQ ID NO: 21177 - protein, 8 aa, Homo sapiens
  Light chain CDR3 for antibody 10589 (IGKV3-11)
QQRSNWLT

SEQ ID NO: 21178 - protein, 12 aa, Homo sapiens
  Heavy chain CDR3 for antibody 10589 (IGHV3-23)
AKEYDILTGYFH

SEQ ID NO: 21179 - protein, 9 aa, Homo sapiens
  Light chain CDR3 for antibody 10590 (IGKV1-6)
LQQYSYPWT

SEQ ID NO: 21180 - protein, 14 aa, Homo sapiens
  Heavy chain CDR3 for antibody 10590 (IGHV3-33)
ARGGYSGYRYYFDY

SEQ ID NO: 21181 - protein, 10 aa, Homo sapiens
  Light chain CDR3 for antibody 10591 (IGKV1-9)
QQLDSYPMYT

SEQ ID NO: 21182 - protein, 18 aa, Homo sapiens
  Heavy chain CDR3 for antibody 10591 (IGHV3-23)
AKDRITGTTYGYYSGLDV

SEQ ID NO: 21183 - protein, 9 aa, Homo sapiens
  Light chain CDR3 for antibody 10592 (IGKV3-11)
QQRSNWPLT

SEQ ID NO: 21184 - protein, 17 aa, Homo sapiens
  Heavy chain CDR3 for antibody 10592 (IGHV3-23)
AKDTITMVRGALFGMDV

SEQ ID NO: 21185 - protein, 9 aa, Homo sapiens
  Light chain CDR3 for antibody 10593 (IGKV1-9)
QQLNTYPWM

SEQ ID NO: 21186 - protein, 13 aa, Homo sapiens
  Heavy chain CDR3 for antibody 10593 (IGHV4-59)
ARDAGYSSSWFDY

SEQ ID NO: 21187 - protein, 9 aa, Homo sapiens
  Light chain CDR3 for antibody 10594 (IGKV1-17)
LQHNSYQYT

SEQ ID NO: 21188 - protein, 9 aa, Homo sapiens
  Heavy chain CDR3 for antibody 10594 (IGHV4-34)
AREKYYFDY

SEQ ID NO: 21189 - protein, 9 aa, Homo sapiens
  Light chain CDR3 for antibody 10595 (IGKV1-17)
LQHNSYPRT

SEQ ID NO: 21190 - protein, 12 aa, Homo sapiens
  Heavy chain CDR3 for antibody 10595 (IGHV3-33)
ARESGGSYSFDY

SEQ ID NO: 21191 - protein, 9 aa, Homo sapiens
  Light chain CDR3 for antibody 10596 (IGKV1D-16)
QQYITYPYT

SEQ ID NO: 21192 - protein, 15 aa, Homo sapiens
  Heavy chain CDR3 for antibody 10596 (IGHV3-33)
ARGYYYGSGSFPVDY

SEQ ID NO: 21193 - protein, 8 aa, Homo sapiens
  Light chain CDR3 for antibody 10597 (IGKV3D-7)
QQDYNLLT

SEQ ID NO: 21194 - protein, 12 aa, Homo sapiens
  Heavy chain CDR3 for antibody 10597 (IGHV3-23)
AKEGIVGVPFDY

SEQ ID NO: 21195 - protein, 8 aa, Homo sapiens
  Light chain CDR3 for antibody 10598 (IGKV1-5)
QQYNSYYT

SEQ ID NO: 21196 - protein, 12 aa, Homo sapiens
  Heavy chain CDR3 for antibody 10598 (IGHV3-23)
AKESLYTPTDDY

SEQ ID NO: 21197 - protein, 10 aa, Homo sapiens
  Light chain CDR3 for antibody 10599 (IGKV3-11)
QQRSNLPALA

SEQ ID NO: 21198 - protein, 16 aa, Homo sapiens
  Heavy chain CDR3 for antibody 10599 (IGHV3-11)
AKEGMVLRYFDWLWDY

SEQ ID NO: 21199 - protein, 9 aa, Homo sapiens
  Light chain CDR3 for antibody 10600 (IGKV1D-13)
QQFNNYPHT

SEQ ID NO: 21200 - protein, 10 aa, Homo sapiens
  Heavy chain CDR3 for antibody 10600 (IGHV4-59)
ASSGTSLLAY

SEQ ID NO: 21201 - protein, 9 aa, Homo sapiens
  Light chain CDR3 for antibody 10601 (IGKV1-6)
LQDYKSPFT

SEQ ID NO: 21202 - protein, 13 aa, Homo sapiens
  Heavy chain CDR3 for antibody 10601 (IGHV3-33)
AKDSSSWYHWFDP

SEQ ID NO: 21203 - protein, 9 aa, Homo sapiens
  Light chain CDR3 for antibody 10602 (IGKV1-6)
LQDFHYPWT

SEQ ID NO: 21204 - protein, 17 aa, Homo sapiens
  Heavy chain CDR3 for antibody 10602 (IGHV4-59)
ARRITMVREIIITAFDY

SEQ ID NO: 21205 - protein, 8 aa, Homo sapiens
  Light chain CDR3 for antibody 10603 (IGKV3-11)
QQRGNWPS

SEQ ID NO: 21206 - protein, 20 aa, Homo sapiens
  Heavy chain CDR3 for antibody 10603 (IGHV3-23)
AKDREMAATSHYYYYYGMDV

SEQ ID NO: 21207 - protein, 9 aa, Homo sapiens
  Light chain CDR3 for antibody 10604 (IGKV1-6)
LQDYNYPRT

SEQ ID NO: 21208 - protein, 17 aa, Homo sapiens
  Heavy chain CDR3 for antibody 10604 (IGHV3-33)
ARGDGDILTGYYEWFDH

SEQ ID NO: 21209 - protein, 9 aa, Homo sapiens
  Light chain CDR3 for antibody 10605 (IGKV1D-16)
LQDYKSPFT

SEQ ID NO: 21210 - protein, 21 aa, Homo sapiens
  Heavy chain CDR3 for antibody 10605 (IGHV3-23)
AKDIDYYGSGSYPLYYYGMDV

SEQ ID NO: 21211 - protein, 9 aa, Homo sapiens
  Light chain CDR3 for antibody 10606 (IGKV1-6)
LQDYKSPFT

SEQ ID NO: 21212 - protein, 17 aa, Homo sapiens
  Heavy chain CDR3 for antibody 10606 (IGHV3-33)
TRDSGMVRGIIIYGMDV

SEQ ID NO: 21213 - protein, 8 aa, Homo sapiens
  Light chain CDR3 for antibody 10607 (IGKV1D-13)
QQFNNYPT

SEQ ID NO: 21214 - protein, 16 aa, Homo sapiens
  Heavy chain CDR3 for antibody 10607 (IGHV3-30)
ARDSSYYGSGYYGMDV

SEQ ID NO: 21215 - protein, 10 aa, Homo sapiens
  Light chain CDR3 for antibody 10608 (IGKV3-20)
QQYGRSPPVT

SEQ ID NO: 21216 - protein, 18 aa, Homo sapiens
  Heavy chain CDR3 for antibody 10608 (IGHV4-59)
AREGHYYTSGSYYKAFDY

SEQ ID NO: 21217 - protein, 9 aa, Homo sapiens
  Light chain CDR3 for antibody 10609 (IGKV1-6)
LQVYSYPWT

SEQ ID NO: 21218 - protein, 18 aa, Homo sapiens
  Heavy chain CDR3 for antibody 10609 (IGHV3-33)
ARREGIVGATTYYYGMDV

SEQ ID NO: 21219 - protein, 9 aa, Homo sapiens
  Light chain CDR3 for antibody 10610 (IGKV1-9)
QQVKSYPYT

SEQ ID NO: 21220 - protein, 13 aa, Homo sapiens
  Heavy chain CDR3 for antibody 10610 (IGHV4-39)
ARRDVLAPAAFDY

SEQ ID NO: 21221 - protein, 9 aa, Homo sapiens
  Light chain CDR3 for antibody 10611 (IGKV1-17)
QQYITYPYT

SEQ ID NO: 21222 - protein, 12 aa, Homo sapiens
  Heavy chain CDR3 for antibody 10611 (IGHV3-64)
ARDLVGATPFDY

SEQ ID NO: 21223 - protein, 9 aa, Homo sapiens
  Light chain CDR3 for antibody 10612 (IGKV1-6)
QQEYNYPLT

SEQ ID NO: 21224 - protein, 11 aa, Homo sapiens
  Heavy chain CDR3 for antibody 10612 (IGHV1-46)
AREEDLGAFDI

SEQ ID NO: 21225 - protein, 8 aa, Homo sapiens
  Light chain CDR3 for antibody 10613 (IGKV1-6)
QQRSNWLT

SEQ ID NO: 21226 - protein, 14 aa, Homo sapiens
  Heavy chain CDR3 for antibody 10613 (IGHV3-33)
ARDREQQLVRYFDY

SEQ ID NO: 21227 - protein, 9 aa, Homo sapiens
  Light chain CDR3 for antibody 10614 (IGKV6-21)
HQSYSLPYT

SEQ ID NO: 21228 - protein, 17 aa, Homo sapiens
  Heavy chain CDR3 for antibody 10614 (IGHV3-23)
AKGDYYGSGTYSTFFDY

SEQ ID NO: 21229 - protein, 6 aa, Homo sapiens
  Light chain CDR3 for antibody 10615 (IGKV3-20)
QQYGST

SEQ ID NO: 21230 - protein, 15 aa, Homo sapiens
  Heavy chain CDR3 for antibody 10615 (IGHV3-23)
AKDGSYYDYYYGMDV

SEQ ID NO: 21231 - protein, 9 aa, Homo sapiens
  Light chain CDR3 for antibody 10616 (IGKV3-15)
QQYNNWPLT

SEQ ID NO: 21232 - protein, 19 aa, Homo sapiens
  Heavy chain CDR3 for antibody 10616 (IGHV1-18)
ARDTTLVRGLMNYYYGMDV

SEQ ID NO: 21233 - protein, 9 aa, Homo sapiens
  Light chain CDR3 for antibody 10617 (IGKV1D-13)
QQFNNYPYT

SEQ ID NO: 21234 - protein, 12 aa, Homo sapiens
  Heavy chain CDR3 for antibody 10617 (IGHV4-34)
ARGYSSSWYFDY

SEQ ID NO: 21235 - protein, 8 aa, Homo sapiens
  Light chain CDR3 for antibody 10618 (IGKV6-21)
QQSSSLPT

SEQ ID NO: 21236 - protein, 18 aa, Homo sapiens
  Heavy chain CDR3 for antibody 10618 (IGHV3-33)
ARDRYYDILTGYYMGFDY

SEQ ID NO: 21237 - protein, 8 aa, Homo sapiens
  Light chain CDR3 for antibody 10619 (IGKV3-20)
QQYGRSFT

SEQ ID NO: 21238 - protein, 10 aa, Homo sapiens
  Heavy chain CDR3 for antibody 10619 (IGHV3-33)
ARENSTPLDY

SEQ ID NO: 21239 - protein, 9 aa, Homo sapiens
  Light chain CDR3 for antibody 10620 (IGKV3-15)
QQYHNWPLT

SEQ ID NO: 21240 - protein, 15 aa, Homo sapiens
  Heavy chain CDR3 for antibody 10620 (IGHV3-33)
TRDSRPEIIGPPFDY

SEQ ID NO: 21241 - protein, 10 aa, Homo sapiens
  Light chain CDR3 for antibody 10621 (IGKV3-11)
QQRSNWPIYT

SEQ ID NO: 21242 - protein, 14 aa, Homo sapiens
  Heavy chain CDR3 for antibody 10621 (IGHV3-23)
AKDDIVRATGAFDI

SEQ ID NO: 21243 - protein, 11 aa, Homo sapiens
  Light chain CDR3 for antibody 10622 (IGKV3-11)
QQRSNWPPMYT

SEQ ID NO: 21244 - protein, 11 aa, Homo sapiens
  Heavy chain CDR3 for antibody 10622 (IGHV4-59)
TRDRGLGSFDY

SEQ ID NO: 21245 - protein, 9 aa, Homo sapiens
  Light chain CDR3 for antibody 10623 (IGKV1-33)
QQYDNLPFT

SEQ ID NO: 21246 - protein, 13 aa, Homo sapiens
  Heavy chain CDR3 for antibody 10623 (IGHV3-33)
ASGYSGYDWYFDL

SEQ ID NO: 21247 - protein, 9 aa, Homo sapiens
  Light chain CDR3 for antibody 10624 (IGKV1D-16)
LQDFNYPRT

SEQ ID NO: 21248 - protein, 12 aa, Homo sapiens
  Heavy chain CDR3 for antibody 10624 (IGHV3-33)
ASRDILTGYLGY

SEQ ID NO: 21249 - protein, 7 aa, Homo sapiens
  Light chain CDR3 for antibody 10625 (IGKV3-20)
QQYGSYT

SEQ ID NO: 21250 - protein, 15 aa, Homo sapiens
  Heavy chain CDR3 for antibody 10625 (IGHV3-20)
ARDRGSSGWRDWFDP

SEQ ID NO: 21251 - protein, 9 aa, Homo sapiens
  Light chain CDR3 for antibody 10626 (IGKV3-15)
QQYNNWPRT

SEQ ID NO: 21252 - protein, 14 aa, Homo sapiens
  Heavy chain CDR3 for antibody 10626 (IGHV3-33)
ARDKTYPLSYGMDV

SEQ ID NO: 21253 - protein, 10 aa, Homo sapiens
  Light chain CDR3 for antibody 10627 (IGKV3-11)
QQRSNWPALT

SEQ ID NO: 21254 - protein, 12 aa, Homo sapiens
  Heavy chain CDR3 for antibody 10627 (IGHV3-33)
AKDPGWQQLAEY

SEQ ID NO: 21255 - protein, 10 aa, Homo sapiens
  Light chain CDR3 for antibody 10628 (IGKV1-17)
LQHNSYPMYT

SEQ ID NO: 21256 - protein, 12 aa, Homo sapiens
  Heavy chain CDR3 for antibody 10628 (IGHV4-59)
ARDRSGWAYFDY

SEQ ID NO: 21257 - protein, 9 aa, Homo sapiens
  Light chain CDR3 for antibody 10629 (IGKV2-30)
MQGTHWPLT

SEQ ID NO: 21258 - protein, 18 aa, Homo sapiens
  Heavy chain CDR3 for antibody 10629 (IGHV3-33)
AREGYDILTGYYNVKFDY

SEQ ID NO: 21259 - protein, 9 aa, Homo sapiens
  Light chain CDR3 for antibody 10630 (IGKV1-9)
QQLNTYPWT

SEQ ID NO: 21260 - protein, 13 aa, Homo sapiens
  Heavy chain CDR3 for antibody 10630 (IGHV3-33)
ARGVLWFGELFDY

SEQ ID NO: 21261 - protein, 10 aa, Homo sapiens
  Light chain CDR3 for antibody 10631 (IGKV3-20)
QQYGRSPPVT

SEQ ID NO: 21262 - protein, 9 aa, Homo sapiens
  Heavy chain CDR3 for antibody 10631 (IGHV3-30)
ARPKWGFDY

SEQ ID NO: 21263 - protein, 10 aa, Homo sapiens
  Light chain CDR3 for antibody 10632 (IGKV1-39)
QQSYSTPMYT

SEQ ID NO: 21264 - protein, 12 aa, Homo sapiens
  Heavy chain CDR3 for antibody 10632 (IGHV3-33)
AREDYYYYGMDV

SEQ ID NO: 21265 - protein, 10 aa, Homo sapiens
  Light chain CDR3 for antibody 10633 (IGKV3-11)
QQRSNWPMYT

SEQ ID NO: 21266 - protein, 18 aa, Homo sapiens
  Heavy chain CDR3 for antibody 10633 (IGHV3-33)
AGGGSGSYSSYYYYGMDV

SEQ ID NO: 21267 - protein, 8 aa, Homo sapiens
  Light chain CDR3 for antibody 10634 (IGKV3-20)
QQYGSSFT

SEQ ID NO: 21268 - protein, 13 aa, Homo sapiens
  Heavy chain CDR3 for antibody 10634 (IGHV3-33)
ARTDYYYYYGMDV

SEQ ID NO: 21269 - protein, 10 aa, Homo sapiens
  Light chain CDR3 for antibody 10635 (IGKV1-17)
LQHNSYPMYT

SEQ ID NO: 21270 - protein, 11 aa, Homo sapiens
  Heavy chain CDR3 for antibody 10635 (IGHV4-59)
ARSLRYSFFDY

SEQ ID NO: 21271 - protein, 9 aa, Homo sapiens
  Light chain CDR3 for antibody 10636 (IGKV3D-7)
QQDYNLPLT

SEQ ID NO: 21272 - protein, 9 aa, Homo sapiens
  Heavy chain CDR3 for antibody 10636 (IGHV3-23)
ARIWWLKDY

SEQ ID NO: 21273 - protein, 9 aa, Homo sapiens
  Light chain CDR3 for antibody 10637 (IGKV1-17)
QQLISYPPT

SEQ ID NO: 21274 - protein, 15 aa, Homo sapiens
  Heavy chain CDR3 for antibody 10637 (IGHV3-33)
ARERYSSAWSSGMDV

SEQ ID NO: 21275 - protein, 9 aa, Homo sapiens
  Light chain CDR3 for antibody 10638 (IGKV1-9)
QQLNTYPWT

SEQ ID NO: 21276 - protein, 17 aa, Homo sapiens
  Heavy chain CDR3 for antibody 10638 (IGHV3-33)
ARGGGYENDHYYYGMDV

SEQ ID NO: 21277 - protein, 9 aa, Homo sapiens
  Light chain CDR3 for antibody 10639 (IGKV6-21)
HQSSSLPYT

SEQ ID NO: 21278 - protein, 16 aa, Homo sapiens
  Heavy chain CDR3 for antibody 10639 (IGHV3-33)
ARAPGGDYYFYFGMDV

SEQ ID NO: 21279 - protein, 9 aa, Homo sapiens
  Light chain CDR3 for antibody 10640 (IGKV1-39)
QQSYSTPWT

SEQ ID NO: 21280 - protein, 17 aa, Homo sapiens
  Heavy chain CDR3 for antibody 10640 (IGHV4-59)
AREEDYYGSGSFGTFDI

SEQ ID NO: 21281 - protein, 9 aa, Homo sapiens
  Light chain CDR3 for antibody 10641 (IGKV1-6)
LQDYNYPPT

SEQ ID NO: 21282 - protein, 15 aa, Homo sapiens
  Heavy chain CDR3 for antibody 10641 (IGHV4-34)
ARVLRYFDWLGGMDV

SEQ ID NO: 21283 - protein, 9 aa, Homo sapiens
  Light chain CDR3 for antibody 10642 (IGKV3-20)
QQYGTSPFP

SEQ ID NO: 21284 - protein, 13 aa, Homo sapiens
  Heavy chain CDR3 for antibody 10642 (IGHV4-39)
ARRDVLAPAAFDY

SEQ ID NO: 21285 - protein, 9 aa, Homo sapiens
  Light chain CDR3 for antibody 10643 (IGKV6-21)
HQSTSLPFT

SEQ ID NO: 21286 - protein, 13 aa, Homo sapiens
  Heavy chain CDR3 for antibody 10643 (IGHV3-11)
ARDGGAAAGTWDS

SEQ ID NO: 21287 - protein, 9 aa, Homo sapiens
  Light chain CDR3 for antibody 10644 (IGKV1-17)
LQHNSYPYT

SEQ ID NO: 21288 - protein, 14 aa, Homo sapiens
  Heavy chain CDR3 for antibody 10644 (IGHV4-39)
ARQGDILTGYSFDN

SEQ ID NO: 21289 - protein, 9 aa, Homo sapiens
  Light chain CDR3 for antibody 10645 (IGKV1D-16)
QQYITYPYT

SEQ ID NO: 21290 - protein, 18 aa, Homo sapiens
  Heavy chain CDR3 for antibody 10645 (IGHV3-33)
AREGYDILTGDYRLGFDY

SEQ ID NO: 21291 - protein, 9 aa, Homo sapiens
  Light chain CDR3 for antibody 10646 (IGKV3D-7)
QQDYEFPLT

SEQ ID NO: 21292 - protein, 12 aa, Homo sapiens
  Heavy chain CDR3 for antibody 10646 (IGHV3-13)
AREAGIPDAFDI

SEQ ID NO: 21293 - protein, 10 aa, Homo sapiens
  Light chain CDR3 for antibody 10647 (IGKV3-11)
QQRSNWPMYT

SEQ ID NO: 21294 - protein, 17 aa, Homo sapiens
  Heavy chain CDR3 for antibody 10647 (IGHV3-23)
AKYGIGELSYYYYGMDV

SEQ ID NO: 21295 - protein, 9 aa, Homo sapiens
  Light chain CDR3 for antibody 10648 (IGKV6-21)
HQSSSLPYT

SEQ ID NO: 21296 - protein, 20 aa, Homo sapiens
  Heavy chain CDR3 for antibody 10648 (IGHV4-59)
ARDRGYDILTGYYGYYGMDV

SEQ ID NO: 21297 - protein, 9 aa, Homo sapiens
  Light chain CDR3 for antibody 10649 (IGKV2D-28)
MQATQFPHT

SEQ ID NO: 21298 - protein, 12 aa, Homo sapiens
  Heavy chain CDR3 for antibody 10649 (IGHV3-33)
ARDLVGATPFDY

SEQ ID NO: 21299 - protein, 9 aa, Homo sapiens
  Light chain CDR3 for antibody 10650 (IGKV1-9)
QQLYTYPYT

SEQ ID NO: 21300 - protein, 18 aa, Homo sapiens
  Heavy chain CDR3 for antibody 10650 (IGHV3-33)
ARDGYSGYDYYYYYGMDV

SEQ ID NO: 21301 - protein, 9 aa, Homo sapiens
  Light chain CDR3 for antibody 10651 (IGKV3D-7)
QQDYSFPLT

SEQ ID NO: 21302 - protein, 17 aa, Homo sapiens
  Heavy chain CDR3 for antibody 10651 (IGHV3-23)
AKDGIGELSYYYYGMDV

SEQ ID NO: 21303 - protein, 9 aa, Homo sapiens
  Light chain CDR3 for antibody 10652 (IGKV3-15)
QQYNNWPLT

SEQ ID NO: 21304 - protein, 16 aa, Homo sapiens
  Heavy chain CDR3 for antibody 10652 (IGHV4-59)
ARQLLWFGELKGVFDY

SEQ ID NO: 21305 - protein, 9 aa, Homo sapiens
  Light chain CDR3 for antibody 10653 (IGKV1-9)
QQGNTYSRT

SEQ ID NO: 21306 - protein, 23 aa, Homo sapiens
  Heavy chain CDR3 for antibody 10653 (IGHV4-59)
ARERTYSDILPGYYEDYYYGMDV

SEQ ID NO: 21307 - protein, 10 aa, Homo sapiens
  Light chain CDR3 for antibody 10654 (IGKV3-11)
QQRSNWPILT

SEQ ID NO: 21308 - protein, 13 aa, Homo sapiens
  Heavy chain CDR3 for antibody 10654 (IGHV4-39)
ARRDVLAPAAFDY

SEQ ID NO: 21309 - protein, 10 aa, Homo sapiens
  Light chain CDR3 for antibody 10655 (IGKV1-39)
QQSYSTPMYT

SEQ ID NO: 21310 - protein, 11 aa, Homo sapiens
  Heavy chain CDR3 for antibody 10655 (IGHV3-33)
ARDILTGFLDH

SEQ ID NO: 21311 - protein, 9 aa, Homo sapiens
  Light chain CDR3 for antibody 10656 (IGKV3-11)
QQRSSWPPT

SEQ ID NO: 21312 - protein, 18 aa, Homo sapiens
  Heavy chain CDR3 for antibody 10656 (IGHV3-53)
AREGHYYTSGSYYKAFDY

SEQ ID NO: 21313 - protein, 9 aa, Homo sapiens
  Light chain CDR3 for antibody 10657 (IGKV1-9)
QQLISYPLT

SEQ ID NO: 21314 - protein, 18 aa, Homo sapiens
  Heavy chain CDR3 for antibody 10657 (IGHV3-33)
ARREGITMIFYYYYGMDV

SEQ ID NO: 21315 - protein, 10 aa, Homo sapiens
  Light chain CDR3 for antibody 10658 (IGKV1-17)
LQHNSYPMYT

SEQ ID NO: 21316 - protein, 19 aa, Homo sapiens
  Heavy chain CDR3 for antibody 10658 (IGHV3-33)
ARDSGYSGYDYYYYYGMDV

SEQ ID NO: 21317 - protein, 10 aa, Homo sapiens
  Light chain CDR3 for antibody 10659 (IGKV3-11)
QQRSNWPMYT

SEQ ID NO: 21318 - protein, 14 aa, Homo sapiens
  Heavy chain CDR3 for antibody 10659 (IGHV1-46)
ARAYYAFLTGAFDI

SEQ ID NO: 21319 - protein, 10 aa, Homo sapiens
  Light chain CDR3 for antibody 10660 (IGKV1-17)
LQHNSYPMYT

SEQ ID NO: 21320 - protein, 15 aa, Homo sapiens
  Heavy chain CDR3 for antibody 10660 (IGHV3-33)
ARGGTGYYSYWYFDL

SEQ ID NO: 21321 - protein, 9 aa, Homo sapiens
  Light chain CDR3 for antibody 10661 (IGKV1-17)
LQHNSYPYT

SEQ ID NO: 21322 - protein, 14 aa, Homo sapiens
  Heavy chain CDR3 for antibody 10661 (IGHV3-64)
ARGGGAVTGANFDY

SEQ ID NO: 21323 - protein, 9 aa, Homo sapiens
  Light chain CDR3 for antibody 10662 (IGKV3-11)
QQRSSWPPT

SEQ ID NO: 21324 - protein, 11 aa, Homo sapiens
  Heavy chain CDR3 for antibody 10662 (IGHV3-74)
ARDRGNWGFDY

SEQ ID NO: 21325 - protein, 11 aa, Homo sapiens
  Light chain CDR3 for antibody 10663 (IGKV3-11)
QQRSNWPPTWT

SEQ ID NO: 21326 - protein, 13 aa, Homo sapiens
  Heavy chain CDR3 for antibody 10663 (IGHV3-33)
AREYCSGGSCYDY

SEQ ID NO: 21327 - protein, 10 aa, Homo sapiens
  Light chain CDR3 for antibody 10664 (IGKV3-11)
QQRSNWPTWT

SEQ ID NO: 21328 - protein, 14 aa, Homo sapiens
  Heavy chain CDR3 for antibody 10664 (IGHV3-23)
AKSRIVGALYYFDY

SEQ ID NO: 21329 - protein, 9 aa, Homo sapiens
  Light chain CDR3 for antibody 10665 (IGKV1-39)
QQSFSTPWT

SEQ ID NO: 21330 - protein, 11 aa, Homo sapiens
  Heavy chain CDR3 for antibody 10665 (IGHV4-59)
TRDRGLGSFDY

SEQ ID NO: 21331 - protein, 8 aa, Homo sapiens
  Light chain CDR3 for antibody 10666 (IGKV3-11)
QQRGNWPS

SEQ ID NO: 21332 - protein, 14 aa, Homo sapiens
  Heavy chain CDR3 for antibody 10666 (IGHV3-33)
ARDGAAAALDAFDI

SEQ ID NO: 21333 - protein, 9 aa, Homo sapiens
  Light chain CDR3 for antibody 10667 (IGKV1-6)
QQSYSTPFT

SEQ ID NO: 21334 - protein, 11 aa, Homo sapiens
  Heavy chain CDR3 for antibody 10667 (IGHV3-33)
ARDRVLAPFDY

SEQ ID NO: 21335 - protein, 10 aa, Homo sapiens
  Light chain CDR3 for antibody 10668 (IGKV3-11)
QQRSNWPPWT

SEQ ID NO: 21336 - protein, 18 aa, Homo sapiens
  Heavy chain CDR3 for antibody 10668 (IGHV4-39)
ARQYYFGSGNYYRGWFDP

SEQ ID NO: 21337 - protein, 11 aa, Homo sapiens
  Light chain CDR3 for antibody 10669 (IGKV3-11)
QQRSNWPPTWT

SEQ ID NO: 21338 - protein, 12 aa, Homo sapiens
  Heavy chain CDR3 for antibody 10669 (IGHV4-39)
ARHPRYLDAFDI

SEQ ID NO: 21339 - protein, 9 aa, Homo sapiens
  Light chain CDR3 for antibody 10670 (IGKV1-27)
QKYNSAPYT

SEQ ID NO: 21340 - protein, 14 aa, Homo sapiens
  Heavy chain CDR3 for antibody 10670 (IGHV4-59)
AKGGSGSYYNWFDP

SEQ ID NO: 21341 - protein, 9 aa, Homo sapiens
  Light chain CDR3 for antibody 10671 (IGKV4-1)
QQYYSTPYT

SEQ ID NO: 21342 - protein, 16 aa, Homo sapiens
  Heavy chain CDR3 for antibody 10671 (IGHV3-33)
ARAVYYGSGSSLIMDV

SEQ ID NO: 21343 - protein, 8 aa, Homo sapiens
  Light chain CDR3 for antibody 10672 (IGKV3D-7)
QQDYNLLT

SEQ ID NO: 21344 - protein, 13 aa, Homo sapiens
  Heavy chain CDR3 for antibody 10672 (IGHV3-23)
ARGELLWFGEFAC

SEQ ID NO: 21345 - protein, 9 aa, Homo sapiens
  Light chain CDR3 for antibody 10673 (IGKV1-6)
LQDYKSPFT

SEQ ID NO: 21346 - protein, 12 aa, Homo sapiens
  Heavy chain CDR3 for antibody 10673 (IGHV3-33)
ARAGMGAPYFDY

SEQ ID NO: 21347 - protein, 10 aa, Homo sapiens
  Light chain CDR3 for antibody 10674 (IGKV1-39)
QQSYSTPMYT

SEQ ID NO: 21348 - protein, 18 aa, Homo sapiens
  Heavy chain CDR3 for antibody 10674 (IGHV3-23)
ARYHLYFGSGFGSDGMDV

SEQ ID NO: 21349 - protein, 9 aa, Homo sapiens
  Light chain CDR3 for antibody 10675 (IGKV1-39)
QQSYSTPIT

SEQ ID NO: 21350 - protein, 13 aa, Homo sapiens
  Heavy chain CDR3 for antibody 10675 (IGHV1-46)
AKDGVRGSCGMDV

SEQ ID NO: 21351 - protein, 9 aa, Homo sapiens
  Light chain CDR3 for antibody 10676 (IGKV3D-20)
QQYGYSPRT

SEQ ID NO: 21352 - protein, 14 aa, Homo sapiens
  Heavy chain CDR3 for antibody 10676 (IGHV3-33)
ARDKTYPLSYGMDV

SEQ ID NO: 21353 - protein, 9 aa, Homo sapiens
  Light chain CDR3 for antibody 10677 (IGKV1D-13)
QQFNNYPYT

SEQ ID NO: 21354 - protein, 11 aa, Homo sapiens
  Heavy chain CDR3 for antibody 10677 (IGHV3-33)
ASWDILTGSGY

SEQ ID NO: 21355 - protein, 9 aa, Homo sapiens
  Light chain CDR3 for antibody 10678 (IGKV1-17)
LQHNSYPPT

SEQ ID NO: 21356 - protein, 10 aa, Homo sapiens
  Heavy chain CDR3 for antibody 10678 (IGHV3-33)
ARDHGWCFDY

SEQ ID NO: 21357 - protein, 9 aa, Homo sapiens
  Light chain CDR3 for antibody 10679 (IGKV1-17)
LQHNSYPIT

SEQ ID NO: 21358 - protein, 12 aa, Homo sapiens
  Heavy chain CDR3 for antibody 10679 (IGHV3-23)
AKEGLGSDYDPY

SEQ ID NO: 21359 - protein, 9 aa, Homo sapiens
  Light chain CDR3 for antibody 10680 (IGKV1-9)
QQLISYPLT

SEQ ID NO: 21360 - protein, 12 aa, Homo sapiens
  Heavy chain CDR3 for antibody 10680 (IGHV3-33)
ARDLVGATPFDY

SEQ ID NO: 21361 - protein, 10 aa, Homo sapiens
  Light chain CDR3 for antibody 10681 (IGKV3-11)
QQRSTWPTLI

SEQ ID NO: 21362 - protein, 17 aa, Homo sapiens
  Heavy chain CDR3 for antibody 10681 (IGHV3-33)
ARGYCSRTSCYLYYFDY

SEQ ID NO: 21363 - protein, 9 aa, Homo sapiens
  Light chain CDR3 for antibody 10682 (IGKV1-33)
QQYDNLPFT

SEQ ID NO: 21364 - protein, 18 aa, Homo sapiens
  Heavy chain CDR3 for antibody 10682 (IGHV3-33)
VRDRERYGSGSYPDAFDI

SEQ ID NO: 21365 - protein, 10 aa, Homo sapiens
  Light chain CDR3 for antibody 10683 (IGKV3-15)
QQYNNWPPYT

SEQ ID NO: 21366 - protein, 14 aa, Homo sapiens
  Heavy chain CDR3 for antibody 10683 (IGHV3-23)
AKDRYRGYEGLFDY

SEQ ID NO: 21367 - protein, 9 aa, Homo sapiens
  Light chain CDR3 for antibody 10684 (IGKV1-9)
QQLISYPYT

SEQ ID NO: 21368 - protein, 11 aa, Homo sapiens
  Heavy chain CDR3 for antibody 10684 (IGHV3-33)
ARGTTVAHFDY

SEQ ID NO: 21369 - protein, 11 aa, Homo sapiens
  Light chain CDR3 for antibody 10685 (IGKV3-11)
QQRSNWPPTWT

SEQ ID NO: 21370 - protein, 17 aa, Homo sapiens
  Heavy chain CDR3 for antibody 10685 (IGHV3-33)
ARGGAAAGPYLYYGLDV

SEQ ID NO: 21371 - protein, 9 aa, Homo sapiens
  Light chain CDR3 for antibody 10686 (IGKV1-9)
QQLISYPLT

SEQ ID NO: 21372 - protein, 12 aa, Homo sapiens
  Heavy chain CDR3 for antibody 10686 (IGHV3-33)
AREGIAVAGVDP

SEQ ID NO: 21373 - protein, 9 aa, Homo sapiens
  Light chain CDR3 for antibody 10687 (IGKV1-6)
LQDYKSPFT

SEQ ID NO: 21374 - protein, 10 aa, Homo sapiens
  Heavy chain CDR3 for antibody 10687 (IGHV3-33)
ARVVDTAMAY

SEQ ID NO: 21375 - protein, 9 aa, Homo sapiens
  Light chain CDR3 for antibody 10688 (IGKV1D-13)
QQFNNYPYT

SEQ ID NO: 21376 - protein, 20 aa, Homo sapiens
  Heavy chain CDR3 for antibody 10688 (IGHV3-33)
ARAGDIAVAGTHYYYYGMDV

SEQ ID NO: 21377 - protein, 9 aa, Homo sapiens
  Light chain CDR3 for antibody 10689 (IGKV1-6)
LQDYNYPRT

SEQ ID NO: 21378 - protein, 15 aa, Homo sapiens
  Heavy chain CDR3 for antibody 10689 (IGHV4-59)
ARDGHGNWGSGTFDY

SEQ ID NO: 21379 - protein, 8 aa, Homo sapiens
  Light chain CDR3 for antibody 10690 (IGKV1-5)
QQYNSYWT

SEQ ID NO: 21380 - protein, 12 aa, Homo sapiens
  Heavy chain CDR3 for antibody 10690 (IGHV3-33)
AKEGLGNDYEPY

SEQ ID NO: 21381 - protein, 9 aa, Homo sapiens
  Light chain CDR3 for antibody 10691 (IGKV1D-16)
QQYNSYPYT

SEQ ID NO: 21382 - protein, 15 aa, Homo sapiens
  Heavy chain CDR3 for antibody 10691 (IGHV3-20)
ARDRGSSGWYDAFDI

SEQ ID NO: 21383 - protein, 10 aa, Homo sapiens
  Light chain CDR3 for antibody 10692 (IGKV3-11)
QQRSNWPIFT

SEQ ID NO: 21384 - protein, 13 aa, Homo sapiens
  Heavy chain CDR3 for antibody 10692 (IGHV4-59)
ANRDYYGYYGMDV

SEQ ID NO: 21385 - protein, 9 aa, Homo sapiens
  Light chain CDR3 for antibody 10693 (IGKV1-6)
LQDYNYPYT

SEQ ID NO: 21386 - protein, 15 aa, Homo sapiens
  Heavy chain CDR3 for antibody 10693 (IGHV3-33)
ARDGGPDGDYKAFDI

SEQ ID NO: 21387 - protein, 9 aa, Homo sapiens
  Light chain CDR3 for antibody 10694 (IGKV1D-16)
QQYNSYPRT

SEQ ID NO: 21388 - protein, 11 aa, Homo sapiens
  Heavy chain CDR3 for antibody 10694 (IGHV3-33)
ATERDMVRGDY

SEQ ID NO: 21389 - protein, 9 aa, Homo sapiens
  Light chain CDR3 for antibody 10695 (IGKV1-6)
LQVYSYPWT

SEQ ID NO: 21390 - protein, 14 aa, Homo sapiens
  Heavy chain CDR3 for antibody 10695 (IGHV3-33)
ARQYSYGYPYYFDY

SEQ ID NO: 21391 - protein, 9 aa, Homo sapiens
  Light chain CDR3 for antibody 10696 (IGKV1-39)
QQSYRTPLT

SEQ ID NO: 21392 - protein, 16 aa, Homo sapiens
  Heavy chain CDR3 for antibody 10696 (IGHV3-11)
ARDGGAAAGNFYGLDV

SEQ ID NO: 21393 - protein, 9 aa, Homo sapiens
  Light chain CDR3 for antibody 10697 (IGKV2-30)
MQGTHWPLT

SEQ ID NO: 21394 - protein, 16 aa, Homo sapiens
  Heavy chain CDR3 for antibody 10697 (IGHV3-11)
ARGRYFDWLLGDWFDP

SEQ ID NO: 21395 - protein, 9 aa, Homo sapiens
  Light chain CDR3 for antibody 10698 (IGKV1-17)
LQHNSYPYT

SEQ ID NO: 21396 - protein, 15 aa, Homo sapiens
  Heavy chain CDR3 for antibody 10698 (IGHV3-30)
ARRGYGSGSPDACDL

SEQ ID NO: 21397 - protein, 9 aa, Homo sapiens
  Light chain CDR3 for antibody 10699 (IGKV2-30)
MQGTHWPLT

SEQ ID NO: 21398 - protein, 12 aa, Homo sapiens
  Heavy chain CDR3 for antibody 10699 (IGHV3-33)
ARGGIAVDVCDI

SEQ ID NO: 21399 - protein, 9 aa, Homo sapiens
  Light chain CDR3 for antibody 10700 (IGKV6-21)
HQSSSLPYT

SEQ ID NO: 21400 - protein, 13 aa, Homo sapiens
  Heavy chain CDR3 for antibody 10700 (IGHV4-61)
ASRYSSGRYPFDY

SEQ ID NO: 21401 - protein, 9 aa, Homo sapiens
  Light chain CDR3 for antibody 10701 (IGKV3-11)
QQRSNWMYT

SEQ ID NO: 21402 - protein, 16 aa, Homo sapiens
  Heavy chain CDR3 for antibody 10701 (IGHV3-64)
ARGRYFDWLLGDWFDP

SEQ ID NO: 21403 - protein, 10 aa, Homo sapiens
  Light chain CDR3 for antibody 10702 (IGKV3-11)
QQRSNWLMYT

SEQ ID NO: 21404 - protein, 14 aa, Homo sapiens
  Heavy chain CDR3 for antibody 10702 (IGHV3-33)
ARASSGSSYWYFDL

SEQ ID NO: 21405 - protein, 8 aa, Homo sapiens
  Light chain CDR3 for antibody 10703 (IGKV1-17)
QQYNSYYT

SEQ ID NO: 21406 - protein, 9 aa, Homo sapiens
  Heavy chain CDR3 for antibody 10703 (IGHV1-18)
ARGGWGFEY

SEQ ID NO: 21407 - protein, 9 aa, Homo sapiens
  Light chain CDR3 for antibody 10704 (IGKV3-20)
QQYGSSPYT

SEQ ID NO: 21408 - protein, 14 aa, Homo sapiens
  Heavy chain CDR3 for antibody 10704 (IGHV3-23)
AKDRNIPAAGPFDY

SEQ ID NO: 21409 - protein, 9 aa, Homo sapiens
  Light chain CDR3 for antibody 10705 (IGKV1-6)
LQDYNYPHT

SEQ ID NO: 21410 - protein, 14 aa, Homo sapiens
  Heavy chain CDR3 for antibody 10705 (IGHV3-23)
AKGDAAMASYYFDY

SEQ ID NO: 21411 - protein, 9 aa, Homo sapiens
  Light chain CDR3 for antibody 10706 (IGKV3-20)
QQFGRSPRT

SEQ ID NO: 21412 - protein, 13 aa, Homo sapiens
  Heavy chain CDR3 for antibody 10706 (IGHV1-24)
ARDAGYSSSWFDY

SEQ ID NO: 21413 - protein, 8 aa, Homo sapiens
  Light chain CDR3 for antibody 10707 (IGKV6-21)
HQSSSLPT

SEQ ID NO: 21414 - protein, 14 aa, Homo sapiens
  Heavy chain CDR3 for antibody 10707 (IGHV3-33)
ARDRRDFYYYGMDV

SEQ ID NO: 21415 - protein, 8 aa, Homo sapiens
  Light chain CDR3 for antibody 10708 (IGKV1-5)
QQYNSYYT

SEQ ID NO: 21416 - protein, 13 aa, Homo sapiens
  Heavy chain CDR3 for antibody 10708 (IGHV3-23)
AKDRGLRYYGMDV

SEQ ID NO: 21417 - protein, 10 aa, Homo sapiens
  Light chain CDR3 for antibody 10709 (IGKV1-17)
LQHNSYPMYT

SEQ ID NO: 21418 - protein, 13 aa, Homo sapiens
  Heavy chain CDR3 for antibody 10709 (IGHV4-39)
ARQWPSGYWYFDL

SEQ ID NO: 21419 - protein, 9 aa, Homo sapiens
  Light chain CDR3 for antibody 10710 (IGKV2-30)
MQGTHWPYT

SEQ ID NO: 21420 - protein, 11 aa, Homo sapiens
  Heavy chain CDR3 for antibody 10710 (IGHV4-59)
ARDRGHYGMDV

SEQ ID NO: 21421 - protein, 9 aa, Homo sapiens
  Light chain CDR3 for antibody 10711 (IGKV6-21)
HQSSSLPLT

SEQ ID NO: 21422 - protein, 17 aa, Homo sapiens
  Heavy chain CDR3 for antibody 10711 (IGHV3-23)
AREGYYDILTDYYGMDV

SEQ ID NO: 21423 - protein, 9 aa, Homo sapiens
  Light chain CDR3 for antibody 10712 (IGKV1-6)
LQDYSYPFT

SEQ ID NO: 21424 - protein, 15 aa, Homo sapiens
  Heavy chain CDR3 for antibody 10712 (IGHV3-33)
ARGAMVRGVDYGMDV

SEQ ID NO: 21425 - protein, 9 aa, Homo sapiens
  Light chain CDR3 for antibody 10713 (IGKV1-6)
LQDYKSQFT

SEQ ID NO: 21426 - protein, 14 aa, Homo sapiens
  Heavy chain CDR3 for antibody 10713 (IGHV3-33)
AKKGYSGRYYYFDY

SEQ ID NO: 21427 - protein, 10 aa, Homo sapiens
  Light chain CDR3 for antibody 10714 (IGKV3-20)
QQYGRSPPVT

SEQ ID NO: 21428 - protein, 10 aa, Homo sapiens
  Heavy chain CDR3 for antibody 10714 (IGHV3-23)
AKGDRWRFDP

SEQ ID NO: 21429 - protein, 9 aa, Homo sapiens
  Light chain CDR3 for antibody 10715 (IGKV1D-16)
QQFNNYMYT

SEQ ID NO: 21430 - protein, 12 aa, Homo sapiens
  Heavy chain CDR3 for antibody 10715 (IGHV3-33)
ASGYFGSGSAHY

SEQ ID NO: 21431 - protein, 9 aa, Homo sapiens
  Light chain CDR3 for antibody 10716 (IGKV1D-16)
QQYDSLPFT

SEQ ID NO: 21432 - protein, 12 aa, Homo sapiens
  Heavy chain CDR3 for antibody 10716 (IGHV3-33)
AKDPGWQQLAEY

SEQ ID NO: 21433 - protein, 9 aa, Homo sapiens
  Light chain CDR3 for antibody 10717 (IGKV1-9)
QQGNTYSRT

SEQ ID NO: 21434 - protein, 18 aa, Homo sapiens
  Heavy chain CDR3 for antibody 10717 (IGHV4-39)
ARQYYFGSGNYYRGWFDP

SEQ ID NO: 21435 - protein, 9 aa, Homo sapiens
  Light chain CDR3 for antibody 10718 (IGKV1-27)
QKYNSAPYT

SEQ ID NO: 21436 - protein, 15 aa, Homo sapiens
  Heavy chain CDR3 for antibody 10718 (IGHV3-23)
AKDGFYYGSGSSFDH

SEQ ID NO: 21437 - protein, 9 aa, Homo sapiens
  Light chain CDR3 for antibody 10719 (IGKV3D-7)
QQDYNLPWT

SEQ ID NO: 21438 - protein, 12 aa, Homo sapiens
  Heavy chain CDR3 for antibody 10719 (IGHV3-23)
AKEGLGNDYDPY

SEQ ID NO: 21439 - protein, 9 aa, Homo sapiens
  Light chain CDR3 for antibody 10720 (IGKV1-39)
QQSYSTPLT

SEQ ID NO: 21440 - protein, 16 aa, Homo sapiens
  Heavy chain CDR3 for antibody 10720 (IGHV4-59)
ARQLLWFGELKGVFDY

SEQ ID NO: 21441 - protein, 9 aa, Homo sapiens
  Light chain CDR3 for antibody 10721 (IGKV3-20)
QQYGSSIFT

SEQ ID NO: 21442 - protein, 14 aa, Homo sapiens
  Heavy chain CDR3 for antibody 10721 (IGHV3-33)
ARDKTYPLSYGMDV

SEQ ID NO: 21443 - protein, 10 aa, Homo sapiens
  Light chain CDR3 for antibody 10722 (IGKV1-9)
QQLDSYPMYT

SEQ ID NO: 21444 - protein, 14 aa, Homo sapiens
  Heavy chain CDR3 for antibody 10722 (IGHV3-33)
ARAGSGYDRDWFDP

SEQ ID NO: 21445 - protein, 9 aa, Homo sapiens
  Light chain CDR3 for antibody 10723 (IGKV3D-7)
QQYYNLPFT

SEQ ID NO: 21446 - protein, 14 aa, Homo sapiens
  Heavy chain CDR3 for antibody 10723 (IGHV3-15)
SIYFYGSGRDYFDY

SEQ ID NO: 21447 - protein, 9 aa, Homo sapiens
  Light chain CDR3 for antibody 10724 (IGKV1-9)
QQLISYPYT

SEQ ID NO: 21448 - protein, 18 aa, Homo sapiens
  Heavy chain CDR3 for antibody 10724 (IGHV3-33)
AREAIVVVPAAPYYGMDV

SEQ ID NO: 21449 - protein, 8 aa, Homo sapiens
  Light chain CDR3 for antibody 10725 (IGKV1-5)
QQYNSYYT

SEQ ID NO: 21450 - protein, 18 aa, Homo sapiens
  Heavy chain CDR3 for antibody 10725 (IGHV3-23)
AKVGDFFASGNYWDYFDY

SEQ ID NO: 21451 - protein, 9 aa, Homo sapiens
  Light chain CDR3 for antibody 10726 (IGKV1-17)
QQLKSYLYT

SEQ ID NO: 21452 - protein, 18 aa, Homo sapiens
  Heavy chain CDR3 for antibody 10726 (IGHV1-8)
AREGAAAGSYYYYNGMDV

SEQ ID NO: 21453 - protein, 9 aa, Homo sapiens
  Light chain CDR3 for antibody 10727 (IGKV1-39)
QQSYSTPYT

SEQ ID NO: 21454 - protein, 18 aa, Homo sapiens
  Heavy chain CDR3 for antibody 10727 (IGHV3-33)
AREGYDILTGYYNVKFDY

SEQ ID NO: 21455 - protein, 8 aa, Homo sapiens
  Light chain CDR3 for antibody 10728 (IGKV3D-7)
QQDYNLLT

SEQ ID NO: 21456 - protein, 14 aa, Homo sapiens
  Heavy chain CDR3 for antibody 10728 (IGHV3-15)
SIYYYGSGRDFFDY

SEQ ID NO: 21457 - protein, 9 aa, Homo sapiens
  Light chain CDR3 for antibody 10729 (IGKV1-17)
LQHTSYPFT

SEQ ID NO: 21458 - protein, 14 aa, Homo sapiens
  Heavy chain CDR3 for antibody 10729 (IGHV1-46)
ARKGIVGGFDAFDV

SEQ ID NO: 21459 - protein, 8 aa, Homo sapiens
  Light chain CDR3 for antibody 10730 (IGKV3-11)
LQRGNWPT

SEQ ID NO: 21460 - protein, 15 aa, Homo sapiens
  Heavy chain CDR3 for antibody 10730 (IGHV3-23)
AKEALRYFDWSGMDV

SEQ ID NO: 21461 - protein, 9 aa, Homo sapiens
  Light chain CDR3 for antibody 10731 (IGKV1-6)
LQDYNYPRT

SEQ ID NO: 21462 - protein, 11 aa, Homo sapiens
  Heavy chain CDR3 for antibody 10731 (IGHV3-33)
ARDSGYDPLYY

SEQ ID NO: 21463 - protein, 9 aa, Homo sapiens
  Light chain CDR3 for antibody 10732 (IGKV2-30)
MQGTHWPLT

SEQ ID NO: 21464 - protein, 19 aa, Homo sapiens
  Heavy chain CDR3 for antibody 10732 (IGHV3-33)
ARRRDDILTGWDYYFGMDV

SEQ ID NO: 21465 - protein, 9 aa, Homo sapiens
  Light chain CDR3 for antibody 10733 (IGKV6-21)
HQSSSLPYT

SEQ ID NO: 21466 - protein, 12 aa, Homo sapiens
  Heavy chain CDR3 for antibody 10733 (IGHV3-33)
VRKGYALYGLDV

SEQ ID NO: 21467 - protein, 9 aa, Homo sapiens
  Light chain CDR3 for antibody 10734 (IGKV1D-16)
QRYNSYPLT

SEQ ID NO: 21468 - protein, 18 aa, Homo sapiens
  Heavy chain CDR3 for antibody 10734 (IGHV3-33)
ARGYNQGSGSYYNVCFDY

SEQ ID NO: 21469 - protein, 9 aa, Homo sapiens
  Light chain CDR3 for antibody 10735 (IGKV1-17)
QQYNSYPYT

SEQ ID NO: 21470 - protein, 17 aa, Homo sapiens
  Heavy chain CDR3 for antibody 10735 (IGHV3-33)
ARDPARGIVRSFYGMDV

SEQ ID NO: 21471 - protein, 9 aa, Homo sapiens
  Light chain CDR3 for antibody 10736 (IGKV1-5)
QQYNTYSRT

SEQ ID NO: 21472 - protein, 14 aa, Homo sapiens
  Heavy chain CDR3 for antibody 10736 (IGHV3-74)
ARDGYDFLTGPFDY

SEQ ID NO: 21473 - protein, 10 aa, Homo sapiens
  Light chain CDR3 for antibody 10737 (IGKV1-9)
QQLDSYPMYT

SEQ ID NO: 21474 - protein, 18 aa, Homo sapiens
  Heavy chain CDR3 for antibody 10737 (IGHV3-33)
ARREGITTIFYYYYGMDV

SEQ ID NO: 21475 - protein, 9 aa, Homo sapiens
  Light chain CDR3 for antibody 10738 (IGKV1-16)
QQYNSYPIT

SEQ ID NO: 21476 - protein, 13 aa, Homo sapiens
  Heavy chain CDR3 for antibody 10738 (IGHV3-33)
ARRVAVAGAEGDY

SEQ ID NO: 21477 - protein, 8 aa, Homo sapiens
  Light chain CDR3 for antibody 10739 (IGKV1D-13)
QQFNNYPT

SEQ ID NO: 21478 - protein, 19 aa, Homo sapiens
  Heavy chain CDR3 for antibody 10739 (IGHV3-33)
TRDPHYDILTGYAYYGMDV

SEQ ID NO: 21479 - protein, 9 aa, Homo sapiens
  Light chain CDR3 for antibody 10740 (IGKV1-9)
QQLKSYLYT

SEQ ID NO: 21480 - protein, 18 aa, Homo sapiens
  Heavy chain CDR3 for antibody 10740 (IGHV1-18)
ARDPTFYYVSGSYYKFDY

SEQ ID NO: 21481 - protein, 10 aa, Homo sapiens
  Light chain CDR3 for antibody 10741 (IGKV3-11)
QQRSNWPTWT

SEQ ID NO: 21482 - protein, 20 aa, Homo sapiens
  Heavy chain CDR3 for antibody 10741 (IGHV1-f)
ATHYDILTGSPYYYYCALDV

SEQ ID NO: 21483 - protein, 9 aa, Homo sapiens
  Light chain CDR3 for antibody 10742 (IGKV1-6)
LQDYNYPRT

SEQ ID NO: 21484 - protein, 12 aa, Homo sapiens
  Heavy chain CDR3 for antibody 10742 (IGHV3-33)
ARDGRAAAYFDN

SEQ ID NO: 21485 - protein, 9 aa, Homo sapiens
  Light chain CDR3 for antibody 10743 (IGKV3D-7)
QQDYNLPLT

SEQ ID NO: 21486 - protein, 13 aa, Homo sapiens
  Heavy chain CDR3 for antibody 10743 (IGHV4-39)
AIRGVLAPAAFDH

SEQ ID NO: 21487 - protein, 9 aa, Homo sapiens
  Light chain CDR3 for antibody 10744 (IGKV3-20)
QQYGSSPWT

SEQ ID NO: 21488 - protein, 16 aa, Homo sapiens
  Heavy chain CDR3 for antibody 10744 (IGHV4-59)
ARGRYLDWLSGDVFDI

SEQ ID NO: 21489 - protein, 10 aa, Homo sapiens
  Light chain CDR3 for antibody 10745 (IGKV3-11)
QQRSNWPMYT

SEQ ID NO: 21490 - protein, 13 aa, Homo sapiens
  Heavy chain CDR3 for antibody 10745 (IGHV3-33)
ANTGDSYYYGFYV

SEQ ID NO: 21491 - protein, 9 aa, Homo sapiens
  Light chain CDR3 for antibody 10746 (IGKV3-20)
QQYGSSPYT

SEQ ID NO: 21492 - protein, 9 aa, Homo sapiens
  Heavy chain CDR3 for antibody 10746 (IGHV3-23)
ATIAAYFDY

SEQ ID NO: 21493 - protein, 9 aa, Homo sapiens
  Light chain CDR3 for antibody 10747 (IGKV1D-16)
QQYNSYPYT

SEQ ID NO: 21494 - protein, 16 aa, Homo sapiens
  Heavy chain CDR3 for antibody 10747 (IGHV4-39)
ARHPLIWTGYPNWFDP

SEQ ID NO: 21495 - protein, 9 aa, Homo sapiens
  Light chain CDR3 for antibody 10748 (IGKV3-15)
QQYNNWPLT

SEQ ID NO: 21496 - protein, 18 aa, Homo sapiens
  Heavy chain CDR3 for antibody 10748 (IGHV1-18)
ARDRGYYYGSGSYSPFDY

SEQ ID NO: 21497 - protein, 9 aa, Homo sapiens
  Light chain CDR3 for antibody 10749 (IGKV2D-28)
MQALQTPPT

SEQ ID NO: 21498 - protein, 18 aa, Homo sapiens
  Heavy chain CDR3 for antibody 10749 (IGHV3-33)
ARDRYYDILTGYYMGFDY

SEQ ID NO: 21499 - protein, 9 aa, Homo sapiens
  Light chain CDR3 for antibody 10750 (IGKV1-16)
QQYDSYPPT

SEQ ID NO: 21500 - protein, 13 aa, Homo sapiens
  Heavy chain CDR3 for antibody 10750 (IGHV3-23)
AKERGYSSTSTAY

SEQ ID NO: 21501 - protein, 8 aa, Homo sapiens
  Light chain CDR3 for antibody 10751 (IGKV3-11)
QQRSNWRT

SEQ ID NO: 21502 - protein, 12 aa, Homo sapiens
  Heavy chain CDR3 for antibody 10751 (IGHV3-33)
ARESGGSYSCDY

SEQ ID NO: 21503 - protein, 9 aa, Homo sapiens
  Light chain CDR3 for antibody 10752 (IGKV1-17)
LQHNGYPLT

SEQ ID NO: 21504 - protein, 18 aa, Homo sapiens
  Heavy chain CDR3 for antibody 10752 (IGHV3-23)
AKEGDYYGSGSYWGYFDP

SEQ ID NO: 21505 - protein, 9 aa, Homo sapiens
  Light chain CDR3 for antibody 10753 (IGKV1-17)
LHSNNYPWT

SEQ ID NO: 21506 - protein, 17 aa, Homo sapiens
  Heavy chain CDR3 for antibody 10753 (IGHV3-33)
ARDWFGELSDYYYGMDV

SEQ ID NO: 21507 - protein, 9 aa, Homo sapiens
  Light chain CDR3 for antibody 10754 (IGKV3-20)
QQYGRSPRT

SEQ ID NO: 21508 - protein, 13 aa, Homo sapiens
  Heavy chain CDR3 for antibody 10754 (IGHV3-11)
ARDGGAAAGTWDP

SEQ ID NO: 21509 - protein, 8 aa, Homo sapiens
  Light chain CDR3 for antibody 10755 (IGKV2D-28)
MQALQTPP

SEQ ID NO: 21510 - protein, 15 aa, Homo sapiens
  Heavy chain CDR3 for antibody 10755 (IGHV3-33)
ARRICSGGSCSLFDY

SEQ ID NO: 21511 - protein, 9 aa, Homo sapiens
  Light chain CDR3 for antibody 10756 (IGKV3D-7)
QQDYEFPIT

SEQ ID NO: 21512 - protein, 15 aa, Homo sapiens
  Heavy chain CDR3 for antibody 10756 (IGHV3-33)
ARDRGWKAPGYGMDV

SEQ ID NO: 21513 - protein, 9 aa, Homo sapiens
  Light chain CDR3 for antibody 10757 (IGKV1-39)
QQSYSTPLT

SEQ ID NO: 21514 - protein, 14 aa, Homo sapiens
  Heavy chain CDR3 for antibody 10757 (IGHV3-23)
AKEDTAMASYYFDY

SEQ ID NO: 21515 - protein, 11 aa, Homo sapiens
  Light chain CDR3 for antibody 10758 (IGKV3-11)
QQRSNWPPMYT

SEQ ID NO: 21516 - protein, 16 aa, Homo sapiens
  Heavy chain CDR3 for antibody 10758 (IGHV1-18)
ARYFDWLLRDYYGMDV

SEQ ID NO: 21517 - protein, 9 aa, Homo sapiens
  Light chain CDR3 for antibody 10759 (IGKV1-13)
LQDYNYPWT

SEQ ID NO: 21518 - protein, 15 aa, Homo sapiens
  Heavy chain CDR3 for antibody 10759 (IGHV3-23)
AKDLSSGWFAYFFDY

SEQ ID NO: 21519 - protein, 9 aa, Homo sapiens
  Light chain CDR3 for antibody 10760 (IGKV1-6)
LQDYNSPYT

SEQ ID NO: 21520 - protein, 15 aa, Homo sapiens
  Heavy chain CDR3 for antibody 10760 (IGHV3-21)
AKEALRYLDWSGMDF

SEQ ID NO: 21521 - protein, 9 aa, Homo sapiens
  Light chain CDR3 for antibody 10761 (IGKV1-33)
QQYDNLPFT

SEQ ID NO: 21522 - protein, 12 aa, Homo sapiens
  Heavy chain CDR3 for antibody 10761 (IGHV3-33)
ARKGYDMHAFDI

SEQ ID NO: 21523 - protein, 9 aa, Homo sapiens
  Light chain CDR3 for antibody 10762 (IGKV1-13)
QQVNSYPST

SEQ ID NO: 21524 - protein, 18 aa, Homo sapiens
  Heavy chain CDR3 for antibody 10762 (IGHV1-46)
ARDGDYVWGSYRSNWFDP

SEQ ID NO: 21525 - protein, 9 aa, Homo sapiens
  Light chain CDR3 for antibody 10763 (IGKV1-6)
QQYDNLPPT

SEQ ID NO: 21526 - protein, 12 aa, Homo sapiens
  Heavy chain CDR3 for antibody 10763 (IGHV1-46)
AREDYDIDGMDV

SEQ ID NO: 21527 - protein, 9 aa, Homo sapiens
  Light chain CDR3 for antibody 10764 (IGKV4-1)
QQYYSTPWT

SEQ ID NO: 21528 - protein, 13 aa, Homo sapiens
  Heavy chain CDR3 for antibody 10764 (IGHV3-11)
AREGIAVAGDFDH

SEQ ID NO: 21529 - protein, 9 aa, Homo sapiens
  Light chain CDR3 for antibody 10765 (IGKV1-9)
QQLNSYPLA

SEQ ID NO: 21530 - protein, 14 aa, Homo sapiens
  Heavy chain CDR3 for antibody 10765 (IGHV1-46)
ARKGIVGCFDAFDV

SEQ ID NO: 21531 - protein, 8 aa, Homo sapiens
  Light chain CDR3 for antibody 10766 (IGKV3D-7)
QQDYNLLT

SEQ ID NO: 21532 - protein, 17 aa, Homo sapiens
  Heavy chain CDR3 for antibody 10766 (IGHV3-15)
TTERYPRRYYYYFGMDV

SEQ ID NO: 21533 - protein, 9 aa, Homo sapiens
  Light chain CDR3 for antibody 10767 (IGKV1-9)
QQLNSYPWP

SEQ ID NO: 21534 - protein, 13 aa, Homo sapiens
  Heavy chain CDR3 for antibody 10767 (IGHV3-33)
ARDQRYSSGWYDY

SEQ ID NO: 21535 - protein, 9 aa, Homo sapiens
  Light chain CDR3 for antibody 10768 (IGKV2-30)
MQGTHWPLT

SEQ ID NO: 21536 - protein, 14 aa, Homo sapiens
  Heavy chain CDR3 for antibody 10768 (IGHV3-33)
ARWELPFYYSGMDV

SEQ ID NO: 21537 - protein, 9 aa, Homo sapiens
  Light chain CDR3 for antibody 10769 (IGKV1D-16)
QQYYSYPYT

SEQ ID NO: 21538 - protein, 21 aa, Homo sapiens
  Heavy chain CDR3 for antibody 10769 (IGHV3-33)
ARKRLYDILTGYYKAFYGMDV

SEQ ID NO: 21539 - protein, 10 aa, Homo sapiens
  Light chain CDR3 for antibody 10770 (IGKV1-39)
QQSYSTPMYT

SEQ ID NO: 21540 - protein, 14 aa, Homo sapiens
  Heavy chain CDR3 for antibody 10770 (IGHV1-2)
ARDYYGSGNYYMGY

SEQ ID NO: 21541 - protein, 10 aa, Homo sapiens
  Light chain CDR3 for antibody 10771 (IGKV3-15)
QQYNNWPPLT

SEQ ID NO: 21542 - protein, 15 aa, Homo sapiens
  Heavy chain CDR3 for antibody 10771 (IGHV3-23)
AKEFTMVRGVITPDY

SEQ ID NO: 21543 - protein, 9 aa, Homo sapiens
  Light chain CDR3 for antibody 10772 (IGKV1-39)
QQSYSTPLT

SEQ ID NO: 21544 - protein, 17 aa, Homo sapiens
  Heavy chain CDR3 for antibody 10772 (IGHV4-59)
ARDRELLWFGEFGGMDV

SEQ ID NO: 21545 - protein, 9 aa, Homo sapiens
  Light chain CDR3 for antibody 10773 (IGKV1-9)
QQLKSYLYT

SEQ ID NO: 21546 - protein, 13 aa, Homo sapiens
  Heavy chain CDR3 for antibody 10773 (IGHV3-33)
ARQSSGWFDAFDI

SEQ ID NO: 21547 - protein, 9 aa, Homo sapiens
  Light chain CDR3 for antibody 10774 (IGKV1-6)
LQDFHYPWT

SEQ ID NO: 21548 - protein, 15 aa, Homo sapiens
  Heavy chain CDR3 for antibody 10774 (IGHV3-23)
AKDLSSGWYAYFFDY

SEQ ID NO: 21549 - protein, 9 aa, Homo sapiens
  Light chain CDR3 for antibody 10775 (IGKV5-2)
LQHDNFPWR

SEQ ID NO: 21550 - protein, 17 aa, Homo sapiens
  Heavy chain CDR3 for antibody 10775 (IGHV4-34)
ARDLIGPLSSSWYPFDY

SEQ ID NO: 21551 - protein, 9 aa, Homo sapiens
  Light chain CDR3 for antibody 10776 (IGKV1-17)
LQHDSFPYT

SEQ ID NO: 21552 - protein, 12 aa, Homo sapiens
  Heavy chain CDR3 for antibody 10776 (IGHV4-39)
ARDSGSYYFFDY

SEQ ID NO: 21553 - protein, 10 aa, Homo sapiens
  Light chain CDR3 for antibody 10777 (IGKV3-11)
QQRSNWPALA

SEQ ID NO: 21554 - protein, 11 aa, Homo sapiens
  Heavy chain CDR3 for antibody 10777 (IGHV4-59)
TRDRGLGSFDY

SEQ ID NO: 21555 - protein, 9 aa, Homo sapiens
  Light chain CDR3 for antibody 10778 (IGKV1-39)
QQSYSSPFT

SEQ ID NO: 21556 - protein, 17 aa, Homo sapiens
  Heavy chain CDR3 for antibody 10778 (IGHV3-66)
ARVQYDILTGYYPYFDN

SEQ ID NO: 21557 - protein, 9 aa, Homo sapiens
  Light chain CDR3 for antibody 10779 (IGKV1-33)
QQSYSTPRT

SEQ ID NO: 21558 - protein, 14 aa, Homo sapiens
  Heavy chain CDR3 for antibody 10779 (IGHV2-70)
ARTAIAAAGSPFDP

SEQ ID NO: 21559 - protein, 10 aa, Homo sapiens
  Light chain CDR3 for antibody 10780 (IGKV3-11)
QQRSNWPALT

SEQ ID NO: 21560 - protein, 13 aa, Homo sapiens
  Heavy chain CDR3 for antibody 10780 (IGHV1-18)
ARGGGVRGAPLDY

SEQ ID NO: 21561 - protein, 9 aa, Homo sapiens
  Light chain CDR3 for antibody 10781 (IGKV5-2)
LQHDNFPWT

SEQ ID NO: 21562 - protein, 14 aa, Homo sapiens
  Heavy chain CDR3 for antibody 10781 (IGHV3-23)
AKDRNIPAAGPFDY

SEQ ID NO: 21563 - protein, 9 aa, Homo sapiens
  Light chain CDR3 for antibody 10782 (IGKV6-21)
HQSRSLPFT

SEQ ID NO: 21564 - protein, 23 aa, Homo sapiens
  Heavy chain CDR3 for antibody 10782 (IGHV4-59)
ARERTYSGILPGYYEDYYYGMDV

SEQ ID NO: 21565 - protein, 9 aa, Homo sapiens
  Light chain CDR3 for antibody 10783 (IGKV1D-13)
QRFNNYLYT

SEQ ID NO: 21566 - protein, 20 aa, Homo sapiens
  Heavy chain CDR3 for antibody 10783 (IGHV1-18)
AREVGIAVAGTLYYYYGMDV

SEQ ID NO: 21567 - protein, 8 aa, Homo sapiens
  Light chain CDR3 for antibody 10784 (IGKV3-20)
QQYGSSLT

SEQ ID NO: 21568 - protein, 13 aa, Homo sapiens
  Heavy chain CDR3 for antibody 10784 (IGHV3-33)
AKEDGDYHHYFDY

SEQ ID NO: 21569 - protein, 9 aa, Homo sapiens
  Light chain CDR3 for antibody 10785 (IGKV1-39)
QQSYSSPIT

SEQ ID NO: 21570 - protein, 17 aa, Homo sapiens
  Heavy chain CDR3 for antibody 10785 (IGHV3-33)
ARAYYDILTGYSYYFDY

SEQ ID NO: 21571 - protein, 10 aa, Homo sapiens
  Light chain CDR3 for antibody 10786 (IGKV1-17)
LQHNSYPMYT

SEQ ID NO: 21572 - protein, 15 aa, Homo sapiens
  Heavy chain CDR3 for antibody 10786 (IGHV3-30)
ARRGYGSGSPDAFDL

SEQ ID NO: 21573 - protein, 9 aa, Homo sapiens
  Light chain CDR3 for antibody 10787 (IGKV1-5)
QQYNTYSRT

SEQ ID NO: 21574 - protein, 15 aa, Homo sapiens
  Heavy chain CDR3 for antibody 10787 (IGHV3-20)
ARDRGSSGWRDWFDP

SEQ ID NO: 21575 - protein, 9 aa, Homo sapiens
  Light chain CDR3 for antibody 10788 (IGKV3D-20)
PQYGSSPWT

SEQ ID NO: 21576 - protein, 14 aa, Homo sapiens
  Heavy chain CDR3 for antibody 10788 (IGHV3-33)
AKSYDILTGEAFDI

SEQ ID NO: 21577 - protein, 9 aa, Homo sapiens
  Light chain CDR3 for antibody 10789 (IGKV3-11)
QQRSNWMYT

SEQ ID NO: 21578 - protein, 13 aa, Homo sapiens
  Heavy chain CDR3 for antibody 10789 (IGHV4-39)
ARRDVLAPAAFDY

SEQ ID NO: 21579 - protein, 9 aa, Homo sapiens
  Light chain CDR3 for antibody 10790 (IGKV5-2)
LQHDNFPYT

SEQ ID NO: 21580 - protein, 16 aa, Homo sapiens
  Heavy chain CDR3 for antibody 10790 (IGHV3-23)
ARDLGIAAAGTGWFDP

SEQ ID NO: 21581 - protein, 9 aa, Homo sapiens
  Light chain CDR3 for antibody 10791 (IGKV3D-7)
QQDYKLPLT

SEQ ID NO: 21582 - protein, 14 aa, Homo sapiens
  Heavy chain CDR3 for antibody 10791 (IGHV3-33)
ARDAMGTSTAWFDP

SEQ ID NO: 21583 - protein, 9 aa, Homo sapiens
  Light chain CDR3 for antibody 10792 (IGKV1-9)
QQLISYPLT

SEQ ID NO: 21584 - protein, 18 aa, Homo sapiens
  Heavy chain CDR3 for antibody 10792 (IGHV3-33)
ARRSAAGTGDYYYYGMDV

SEQ ID NO: 21585 - protein, 8 aa, Homo sapiens
  Light chain CDR3 for antibody 10793 (IGKV3D-7)
QQDYSLLT

SEQ ID NO: 21586 - protein, 13 aa, Homo sapiens
  Heavy chain CDR3 for antibody 10793 (IGHV3-33)
ARVHFDWLDAFDI

SEQ ID NO: 21587 - protein, 9 aa, Homo sapiens
  Light chain CDR3 for antibody 10794 (IGKV1-9)
QQLNGYPFT

SEQ ID NO: 21588 - protein, 17 aa, Homo sapiens
  Heavy chain CDR3 for antibody 10794 (IGHV3-23)
AKDGSFYSSGWYDAFDI

SEQ ID NO: 21589 - protein, 8 aa, Homo sapiens
  Light chain CDR3 for antibody 10795 (IGKV6-21)
HQSSSLYT

SEQ ID NO: 21590 - protein, 14 aa, Homo sapiens
  Heavy chain CDR3 for antibody 10795 (IGHV3-33)
ARDRGRHNYFGMDV

SEQ ID NO: 21591 - protein, 9 aa, Homo sapiens
  Light chain CDR3 for antibody 10796 (IGKV3D-7)
QQDYEFPIT

SEQ ID NO: 21592 - protein, 14 aa, Homo sapiens
  Heavy chain CDR3 for antibody 10796 (IGHV3-23)
AKDRYRGYEGLFDY

SEQ ID NO: 21593 - protein, 9 aa, Homo sapiens
  Light chain CDR3 for antibody 10797 (IGKV1-6)
LQVYSYPWT

SEQ ID NO: 21594 - protein, 17 aa, Homo sapiens
  Heavy chain CDR3 for antibody 10797 (IGHV3-33)
ARGLSGYDGYYYYGMDV

SEQ ID NO: 21595 - protein, 9 aa, Homo sapiens
  Light chain CDR3 for antibody 10798 (IGKV1-9)
QQLNTYPLT

SEQ ID NO: 21596 - protein, 16 aa, Homo sapiens
  Heavy chain CDR3 for antibody 10798 (IGHV3-33)
AREGITMVRGVIRFDY

SEQ ID NO: 21597 - protein, 8 aa, Homo sapiens
  Light chain CDR3 for antibody 10799 (IGKV3-20)
QQYGSSLT

SEQ ID NO: 21598 - protein, 12 aa, Homo sapiens
  Heavy chain CDR3 for antibody 10799 (IGHV3-h)
AREDYYYYGMDV

SEQ ID NO: 21599 - protein, 9 aa, Homo sapiens
  Light chain CDR3 for antibody 10800 (IGKV1-6)
LQDYKSPFT

SEQ ID NO: 21600 - protein, 15 aa, Homo sapiens
  Heavy chain CDR3 for antibody 10800 (IGHV3-30)
ARRGYGSGSPDAFDL

SEQ ID NO: 21601 - protein, 9 aa, Homo sapiens
  Light chain CDR3 for antibody 10801 (IGKV1-27)
QKYNSAPYT

SEQ ID NO: 21602 - protein, 11 aa, Homo sapiens
  Heavy chain CDR3 for antibody 10801 (IGHV3-23)
AKDRPYYGSEV

SEQ ID NO: 21603 - protein, 9 aa, Homo sapiens
  Light chain CDR3 for antibody 10802 (IGKV2-24)
MQATQFPHT

SEQ ID NO: 21604 - protein, 14 aa, Homo sapiens
  Heavy chain CDR3 for antibody 10802 (IGHV3-33)
ARDWNDVYYYGMDV

SEQ ID NO: 21605 - protein, 9 aa, Homo sapiens
  Light chain CDR3 for antibody 10803 (IGKV1-9)
QQYNSYPIT

SEQ ID NO: 21606 - protein, 12 aa, Homo sapiens
  Heavy chain CDR3 for antibody 10803 (IGHV3-33)
ARDIVGTSYFDY

SEQ ID NO: 21607 - protein, 8 aa, Homo sapiens
  Light chain CDR3 for antibody 10804 (IGKV3D-7)
QQDYHLLT

SEQ ID NO: 21608 - protein, 12 aa, Homo sapiens
  Heavy chain CDR3 for antibody 10804 (IGHV3-13)
ARDRGYSGYFEY

SEQ ID NO: 21609 - protein, 8 aa, Homo sapiens
  Light chain CDR3 for antibody 10805 (IGKV3D-7)
QQDYNLLT

SEQ ID NO: 21610 - protein, 16 aa, Homo sapiens
  Heavy chain CDR3 for antibody 10805 (IGHV3-33)
ARGANYYGSGIPNFEY

SEQ ID NO: 21611 - protein, 9 aa, Homo sapiens
  Light chain CDR3 for antibody 10806 (IGKV1-27)
QKYNSAPYT

SEQ ID NO: 21612 - protein, 15 aa, Homo sapiens
  Heavy chain CDR3 for antibody 10806 (IGHV3-23)
AKEALRYVDWSGMDV

SEQ ID NO: 21613 - protein, 8 aa, Homo sapiens
  Light chain CDR3 for antibody 10807 (IGKV3-15)
QQYNNWPT

SEQ ID NO: 21614 - protein, 18 aa, Homo sapiens
  Heavy chain CDR3 for antibody 10807 (IGHV3-23)
AKDGDYFGSGSYWGYFDL

SEQ ID NO: 21615 - protein, 8 aa, Homo sapiens
  Light chain CDR3 for antibody 10808 (IGKV3D-7)
QQDYNLLT

SEQ ID NO: 21616 - protein, 9 aa, Homo sapiens
  Heavy chain CDR3 for antibody 10808 (IGHV4-59)
ARGGASFDY

SEQ ID NO: 21617 - protein, 9 aa, Homo sapiens
  Light chain CDR3 for antibody 10809 (IGKV1D-16)
QQSYSTPLT

SEQ ID NO: 21618 - protein, 17 aa, Homo sapiens
  Heavy chain CDR3 for antibody 10809 (IGHV3-66)
AREDYDILTGYPCYFDY

SEQ ID NO: 21619 - protein, 9 aa, Homo sapiens
  Light chain CDR3 for antibody 10810 (IGKV3-15)
QQYHNWPLT

SEQ ID NO: 21620 - protein, 15 aa, Homo sapiens
  Heavy chain CDR3 for antibody 10810 (IGHV3-33)
ARRICSGGSCSLFDY

SEQ ID NO: 21621 - protein, 10 aa, Homo sapiens
  Light chain CDR3 for antibody 10811 (IGKV3-15)
QQYNNWPPIT

SEQ ID NO: 21622 - protein, 12 aa, Homo sapiens
  Heavy chain CDR3 for antibody 10811 (IGHV4-59)
ARDRSGWAYFDY

SEQ ID NO: 21623 - protein, 9 aa, Homo sapiens
  Light chain CDR3 for antibody 10812 (IGKV1-33)
QQYDNLPFT

SEQ ID NO: 21624 - protein, 15 aa, Homo sapiens
  Heavy chain CDR3 for antibody 10812 (IGHV3-23)
ARDSRPEITGPPFDY

SEQ ID NO: 21625 - protein, 9 aa, Homo sapiens
  Light chain CDR3 for antibody 10813 (IGKV6-21)
HQSSSLPYT

SEQ ID NO: 21626 - protein, 14 aa, Homo sapiens
  Heavy chain CDR3 for antibody 10813 (IGHV3-20)
ARDRGSSGHDGFDI

SEQ ID NO: 21627 - protein, 9 aa, Homo sapiens
  Light chain CDR3 for antibody 10814 (IGKV5-2)
LQHDKFPYT

SEQ ID NO: 21628 - protein, 17 aa, Homo sapiens
  Heavy chain CDR3 for antibody 10814 (IGHV3-33)
ARDCGSYYDYYFYGMDV

SEQ ID NO: 21629 - protein, 9 aa, Homo sapiens
  Light chain CDR3 for antibody 10815 (IGKV3-20)
QQYGSSPYT

SEQ ID NO: 21630 - protein, 15 aa, Homo sapiens
  Heavy chain CDR3 for antibody 10815 (IGHV3-23)
ARDRGSSGWRGRFDP

SEQ ID NO: 21631 - protein, 9 aa, Homo sapiens
  Light chain CDR3 for antibody 10816 (IGKV3D-7)
QQDYNLPLT

SEQ ID NO: 21632 - protein, 14 aa, Homo sapiens
  Heavy chain CDR3 for antibody 10816 (IGHV3-33)
ARDRDIMATSYFDY

SEQ ID NO: 21633 - protein, 9 aa, Homo sapiens
  Light chain CDR3 for antibody 10817 (IGKV1-9)
QQLISYPLT

SEQ ID NO: 21634 - protein, 17 aa, Homo sapiens
  Heavy chain CDR3 for antibody 10817 (IGHV3-33)
ARSGIVGATDYYYGLDV

SEQ ID NO: 21635 - protein, 9 aa, Homo sapiens
  Light chain CDR3 for antibody 10818 (IGKV1-33)
QQYDNLPFT

SEQ ID NO: 21636 - protein, 12 aa, Homo sapiens
  Heavy chain CDR3 for antibody 10818 (IGHV3-23)
AKEYDILTGYGH

SEQ ID NO: 21637 - protein, 9 aa, Homo sapiens
  Light chain CDR3 for antibody 10819 (IGKV1-9)
QQYNTYSRT

SEQ ID NO: 21638 - protein, 14 aa, Homo sapiens
  Heavy chain CDR3 for antibody 10819 (IGHV3-33)
ARGGYSGYRYYFDY

SEQ ID NO: 21639 - protein, 10 aa, Homo sapiens
  Light chain CDR3 for antibody 10820 (IGKV3-20)
QQYGRSPPVT

SEQ ID NO: 21640 - protein, 18 aa, Homo sapiens
  Heavy chain CDR3 for antibody 10820 (IGHV3-23)
AKEGNYYGSGSYWGYFDP

SEQ ID NO: 21641 - protein, 9 aa, Homo sapiens
  Light chain CDR3 for antibody 10821 (IGKV4-1)
QQYYSTPPT

SEQ ID NO: 21642 - protein, 15 aa, Homo sapiens
  Heavy chain CDR3 for antibody 10821 (IGHV3-23)
AKDGGWNYYYYGMDV

SEQ ID NO: 21643 - protein, 9 aa, Homo sapiens
  Light chain CDR3 for antibody 10822 (IGKV1D-13)
QQFNNYPHT

SEQ ID NO: 21644 - protein, 23 aa, Homo sapiens
  Heavy chain CDR3 for antibody 10822 (IGHV3-h)
ARDRGITMVRGVITYYYFYGMDV

SEQ ID NO: 21645 - protein, 9 aa, Homo sapiens
  Light chain CDR3 for antibody 10823 (IGKV1-39)
QQSYRTPLT

SEQ ID NO: 21646 - protein, 12 aa, Homo sapiens
  Heavy chain CDR3 for antibody 10823 (IGHV3-11)
ARHGSGSSYCDY

SEQ ID NO: 21647 - protein, 9 aa, Homo sapiens
  Light chain CDR3 for antibody 10824 (IGKV1-6)
LQDYKSPFT

SEQ ID NO: 21648 - protein, 17 aa, Homo sapiens
  Heavy chain CDR3 for antibody 10824 (IGHV4-34)
AGLRFFDWLFDYYGMDV

SEQ ID NO: 21649 - protein, 9 aa, Homo sapiens
  Light chain CDR3 for antibody 10825 (IGKV1-17)
LHSYNYPWT

SEQ ID NO: 21650 - protein, 16 aa, Homo sapiens
  Heavy chain CDR3 for antibody 10825 (IGHV3-33)
ARDKNTDYDILTGFDY

SEQ ID NO: 21651 - protein, 9 aa, Homo sapiens
  Light chain CDR3 for antibody 10826 (IGKV3D-7)
QQDYNLPYS

SEQ ID NO: 21652 - protein, 17 aa, Homo sapiens
  Heavy chain CDR3 for antibody 10826 (IGHV1-18)
ARDRACTMVRGVPPFDY

SEQ ID NO: 21653 - protein, 9 aa, Homo sapiens
  Light chain CDR3 for antibody 10827 (IGKV1-9)
QQYNTYSRT

SEQ ID NO: 21654 - protein, 11 aa, Homo sapiens
  Heavy chain CDR3 for antibody 10827 (IGHV3-33)
ARDRVLSPFDY

SEQ ID NO: 21655 - protein, 9 aa, Homo sapiens
  Light chain CDR3 for antibody 10828 (IGKV1-9)
QQLNTYPWT

SEQ ID NO: 21656 - protein, 12 aa, Homo sapiens
  Heavy chain CDR3 for antibody 10828 (IGHV3-33)
VRKWFGELYFDY

SEQ ID NO: 21657 - protein, 8 aa, Homo sapiens
  Light chain CDR3 for antibody 10829 (IGKV1-13)
QQFNTYPT

SEQ ID NO: 21658 - protein, 16 aa, Homo sapiens
  Heavy chain CDR3 for antibody 10829 (IGHV3-33)
ARGDDILTHQYYGVDV

SEQ ID NO: 21659 - protein, 8 aa, Homo sapiens
  Light chain CDR3 for antibody 10830 (IGKV3-20)
QQYGSSLT

SEQ ID NO: 21660 - protein, 18 aa, Homo sapiens
  Heavy chain CDR3 for antibody 10830 (IGHV3-33)
ARDRYYDILTGYYMGFDY

SEQ ID NO: 21661 - protein, 9 aa, Homo sapiens
  Light chain CDR3 for antibody 10831 (IGKV3-20)
QQYGSSPYT

SEQ ID NO: 21662 - protein, 12 aa, Homo sapiens
  Heavy chain CDR3 for antibody 10831 (IGHV1-46)
ARALTVGASFDY

SEQ ID NO: 21663 - protein, 9 aa, Homo sapiens
  Light chain CDR3 for antibody 10832 (IGKV3-11)
QQRINWPWT

SEQ ID NO: 21664 - protein, 11 aa, Homo sapiens
  Heavy chain CDR3 for antibody 10832 (IGHV3-33)
ARDRVLTPFDY

SEQ ID NO: 21665 - protein, 9 aa, Homo sapiens
  Light chain CDR3 for antibody 10833 (IGKV1-9)
QQLKSYLYT

SEQ ID NO: 21666 - protein, 12 aa, Homo sapiens
  Heavy chain CDR3 for antibody 10833 (IGHV1-18)
ARRDGSGTSFDY

SEQ ID NO: 21667 - protein, 9 aa, Homo sapiens
  Light chain CDR3 for antibody 10834 (IGKV1-6)
LQDYKSPFT

SEQ ID NO: 21668 - protein, 13 aa, Homo sapiens
  Heavy chain CDR3 for antibody 10834 (IGHV3-13)
ARAITMVRGVIDY

SEQ ID NO: 21669 - protein, 9 aa, Homo sapiens
  Light chain CDR3 for antibody 10835 (IGKV1-9)
QQLISYPLT

SEQ ID NO: 21670 - protein, 7 aa, Homo sapiens
  Heavy chain CDR3 for antibody 10835 (IGHV3-33)
ARELFNY

SEQ ID NO: 21671 - protein, 9 aa, Homo sapiens
  Light chain CDR3 for antibody 10836 (IGKV1-9)
QQLNGYPFT

SEQ ID NO: 21672 - protein, 15 aa, Homo sapiens
  Heavy chain CDR3 for antibody 10836 (IGHV3-33)
ARRVCSGGSCSLFDY

SEQ ID NO: 21673 - protein, 9 aa, Homo sapiens
  Light chain CDR3 for antibody 10837 (IGKV1D-16)
QQYNSYPYT

SEQ ID NO: 21674 - protein, 15 aa, Homo sapiens
  Heavy chain CDR3 for antibody 10837 (IGHV3-33)
ARGGTGYYAYWYFDL

SEQ ID NO: 21675 - protein, 9 aa, Homo sapiens
  Light chain CDR3 for antibody 10838 (IGKV3-15)
QQYNNWPLT

SEQ ID NO: 21676 - protein, 13 aa, Homo sapiens
  Heavy chain CDR3 for antibody 10838 (IGHV3-33)
ARAITMVRGVIDY

SEQ ID NO: 21677 - protein, 9 aa, Homo sapiens
  Light chain CDR3 for antibody 10839 (IGKV3D-7)
HQSSSLPYT

SEQ ID NO: 21678 - protein, 19 aa, Homo sapiens
  Heavy chain CDR3 for antibody 10839 (IGHV4-39)
ARQGDALRYFDWLLGAFDI

SEQ ID NO: 21679 - protein, 9 aa, Homo sapiens
  Light chain CDR3 for antibody 10840 (IGKV1D-16)
QQYDSYPWT

SEQ ID NO: 21680 - protein, 13 aa, Homo sapiens
  Heavy chain CDR3 for antibody 10840 (IGHV4-39)
ARHVLLWFGEFDP

SEQ ID NO: 21681 - protein, 9 aa, Homo sapiens
  Light chain CDR3 for antibody 10841 (IGKV1D-13)
QQFNNYPYT

SEQ ID NO: 21682 - protein, 16 aa, Homo sapiens
  Heavy chain CDR3 for antibody 10841 (IGHV3-11)
ARDSELRYFDWFGMDV

SEQ ID NO: 21683 - protein, 9 aa, Homo sapiens
  Light chain CDR3 for antibody 10842 (IGKV1-17)
QQDYTLPLT

SEQ ID NO: 21684 - protein, 15 aa, Homo sapiens
  Heavy chain CDR3 for antibody 10842 (IGHV3-30)
ARRGYGSGSPDAFDL

SEQ ID NO: 21685 - protein, 9 aa, Homo sapiens
  Light chain CDR3 for antibody 10843 (IGKV1-6)
LQDFNYPRT

SEQ ID NO: 21686 - protein, 9 aa, Homo sapiens
  Heavy chain CDR3 for antibody 10843 (IGHV4-39)
AGGIWDVDY

SEQ ID NO: 21687 - protein, 9 aa, Homo sapiens
  Light chain CDR3 for antibody 10844 (IGKV1-17)
LQHNSYPYT

SEQ ID NO: 21688 - protein, 20 aa, Homo sapiens
  Heavy chain CDR3 for antibody 10844 (IGHV3-33)
AIVGATMIRGLIDYYYGMDV

SEQ ID NO: 21689 - protein, 9 aa, Homo sapiens
  Light chain CDR3 for antibody 10845 (IGKV1-17)
LQHTSYPLT

SEQ ID NO: 21690 - protein, 17 aa, Homo sapiens
  Heavy chain CDR3 for antibody 10845 (IGHV4-39)
AGRLTYYYGSGSPSFDY

SEQ ID NO: 21691 - protein, 9 aa, Homo sapiens
  Light chain CDR3 for antibody 10846 (IGKV3-11)
QQRSNWMYT

SEQ ID NO: 21692 - protein, 16 aa, Homo sapiens
  Heavy chain CDR3 for antibody 10846 (IGHV3-23)
ARNWNDVGDYYYGMDV

SEQ ID NO: 21693 - protein, 9 aa, Homo sapiens
  Light chain CDR3 for antibody 10847 (IGKV1-27)
QKYNSAPYT

SEQ ID NO: 21694 - protein, 12 aa, Homo sapiens
  Heavy chain CDR3 for antibody 10847 (IGHV3-66)
VRDRAAAPYFDL

SEQ ID NO: 21695 - protein, 8 aa, Homo sapiens
  Light chain CDR3 for antibody 10848 (IGKV3-11)
QQRSNWLT

SEQ ID NO: 21696 - protein, 16 aa, Homo sapiens
  Heavy chain CDR3 for antibody 10848 (IGHV4-59)
ARDTPYYSGSGRPFDS

SEQ ID NO: 21697 - protein, 9 aa, Homo sapiens
  Light chain CDR3 for antibody 10849 (IGKV1-27)
QKYNSAPHT

SEQ ID NO: 21698 - protein, 11 aa, Homo sapiens
  Heavy chain CDR3 for antibody 10849 (IGHV3-33)
AREAIIGPFDY

SEQ ID NO: 21699 - protein, 9 aa, Homo sapiens
  Light chain CDR3 for antibody 10850 (IGKV2D-24)
TQATQFPHT

SEQ ID NO: 21700 - protein, 14 aa, Homo sapiens
  Heavy chain CDR3 for antibody 10850 (IGHV3-33)
ARGAAAGNFYGLDV

SEQ ID NO: 21701 - protein, 9 aa, Homo sapiens
  Light chain CDR3 for antibody 10851 (IGKV1-5)
QQYDSYPWT

SEQ ID NO: 21702 - protein, 17 aa, Homo sapiens
  Heavy chain CDR3 for antibody 10851 (IGHV3-23)
AKDGIGELSYYYYGMDV

SEQ ID NO: 21703 - protein, 8 aa, Homo sapiens
  Light chain CDR3 for antibody 10852 (IGKV1D-13)
QQFNNYYT

SEQ ID NO: 21704 - protein, 17 aa, Homo sapiens
  Heavy chain CDR3 for antibody 10852 (IGHV4-59)
ARDFLVRGEGSYYGMDV

SEQ ID NO: 21705 - protein, 10 aa, Homo sapiens
  Light chain CDR3 for antibody 10853 (IGKV1-6)
QQSYSTPMYT

SEQ ID NO: 21706 - protein, 14 aa, Homo sapiens
  Heavy chain CDR3 for antibody 10853 (IGHV3-15)
SIYFYGSGRDYFDY

SEQ ID NO: 21707 - protein, 9 aa, Homo sapiens
  Light chain CDR3 for antibody 10854 (IGKV3-20)
QQYGSSPYT

SEQ ID NO: 21708 - protein, 16 aa, Homo sapiens
  Heavy chain CDR3 for antibody 10854 (IGHV3-33)
ARPTYYDILTGYPFDY

SEQ ID NO: 21709 - protein, 9 aa, Homo sapiens
  Light chain CDR3 for antibody 10855 (IGKV3-15)
QQYNNWPRT

SEQ ID NO: 21710 - protein, 15 aa, Homo sapiens
  Heavy chain CDR3 for antibody 10855 (IGHV1-46)
ARGAVDDYYYYGMDV

SEQ ID NO: 21711 - protein, 9 aa, Homo sapiens
  Light chain CDR3 for antibody 10856 (IGKV1-6)
LQGYNHPFT

SEQ ID NO: 21712 - protein, 14 aa, Homo sapiens
  Heavy chain CDR3 for antibody 10856 (IGHV3-20)
ARDGGSTSYDWFDP

SEQ ID NO: 21713 - protein, 9 aa, Homo sapiens
  Light chain CDR3 for antibody 10857 (IGKV5-2)
QQYYSTPWT

SEQ ID NO: 21714 - protein, 18 aa, Homo sapiens
  Heavy chain CDR3 for antibody 10857 (IGHV3-33)
ARDRYYDILTGYYMGFDY

SEQ ID NO: 21715 - protein, 9 aa, Homo sapiens
  Light chain CDR3 for antibody 10858 (IGKV1-9)
QQLNSYPWT

SEQ ID NO: 21716 - protein, 15 aa, Homo sapiens
  Heavy chain CDR3 for antibody 10858 (IGHV3-23)
AKDGSYSYYYYGMDV

SEQ ID NO: 21717 - protein, 9 aa, Homo sapiens
  Light chain CDR3 for antibody 10859 (IGKV1-6)
LQVYSYPWT

SEQ ID NO: 21718 - protein, 17 aa, Homo sapiens
  Heavy chain CDR3 for antibody 10859 (IGHV1-18)
ARERYYGSGSYKYNMDV

SEQ ID NO: 21719 - protein, 10 aa, Homo sapiens
  Light chain CDR3 for antibody 10860 (IGKV1-9)
QQLNSFLMYT

SEQ ID NO: 21720 - protein, 17 aa, Homo sapiens
  Heavy chain CDR3 for antibody 10860 (IGHV1-18)
ARDEDYDILTGYPHFDY

SEQ ID NO: 21721 - protein, 9 aa, Homo sapiens
  Light chain CDR3 for antibody 10861 (IGKV1-9)
QQFNSYTRT

SEQ ID NO: 21722 - protein, 14 aa, Homo sapiens
  Heavy chain CDR3 for antibody 10861 (IGHV3-33)
ARRGSPLRPSHLDV

SEQ ID NO: 21723 - protein, 9 aa, Homo sapiens
  Light chain CDR3 for antibody 10862 (IGKV1-9)
QQLNSYPWT

SEQ ID NO: 21724 - protein, 21 aa, Homo sapiens
  Heavy chain CDR3 for antibody 10862 (IGHV3-23)
AKDIDYYGSGSYPLYYYGMDV

SEQ ID NO: 21725 - protein, 9 aa, Homo sapiens
  Light chain CDR3 for antibody 10863 (IGKV6-21)
HQSSSLPYT

SEQ ID NO: 21726 - protein, 12 aa, Homo sapiens
  Heavy chain CDR3 for antibody 10863 (IGHV3-21)
ARDGGRYGDFDY

SEQ ID NO: 21727 - protein, 8 aa, Homo sapiens
  Light chain CDR3 for antibody 10864 (IGKV3-20)
QQYGSSLT

SEQ ID NO: 21728 - protein, 17 aa, Homo sapiens
  Heavy chain CDR3 for antibody 10864 (IGHV3-33)
ARDPARGNVRSFYGLDV

SEQ ID NO: 21729 - protein, 9 aa, Homo sapiens
  Light chain CDR3 for antibody 10865 (IGKV1D-13)
QHFNNYMYT

SEQ ID NO: 21730 - protein, 9 aa, Homo sapiens
  Heavy chain CDR3 for antibody 10865 (IGHV4-59)
AREGGSGSL

SEQ ID NO: 21731 - protein, 9 aa, Homo sapiens
  Light chain CDR3 for antibody 10866 (IGKV1-9)
QQLISYPLT

SEQ ID NO: 21732 - protein, 15 aa, Homo sapiens
  Heavy chain CDR3 for antibody 10866 (IGHV3-33)
ARGYYYGSGSFPFDY

SEQ ID NO: 21733 - protein, 9 aa, Homo sapiens
  Light chain CDR3 for antibody 10867 (IGKV1-17)
LQHNSYPPT

SEQ ID NO: 21734 - protein, 8 aa, Homo sapiens
  Heavy chain CDR3 for antibody 10867 (IGHV4-34)
ARGARFDP

SEQ ID NO: 21735 - protein, 9 aa, Homo sapiens
  Light chain CDR3 for antibody 10868 (IGKV1-17)
LQHNSYPLT

SEQ ID NO: 21736 - protein, 12 aa, Homo sapiens
  Heavy chain CDR3 for antibody 10868 (IGHV3-33)
ARKGYDMHAFDI

SEQ ID NO: 21737 - protein, 9 aa, Homo sapiens
  Light chain CDR3 for antibody 10869 (IGKV3-11)
QQRSNWPYT

SEQ ID NO: 21738 - protein, 13 aa, Homo sapiens
  Heavy chain CDR3 for antibody 10869 (IGHV3-11)
ARDEGYSGYNLDN

SEQ ID NO: 21739 - protein, 9 aa, Homo sapiens
  Light chain CDR3 for antibody 10870 (IGKV2D-28)
MQALQTPPT

SEQ ID NO: 21740 - protein, 13 aa, Homo sapiens
  Heavy chain CDR3 for antibody 10870 (IGHV6-1)
ARHVLLWFGEFDP

SEQ ID NO: 21741 - protein, 9 aa, Homo sapiens
  Light chain CDR3 for antibody 10871 (IGKV1-39)
QQSYSTPLT

SEQ ID NO: 21742 - protein, 11 aa, Homo sapiens
  Heavy chain CDR3 for antibody 10871 (IGHV3-23)
AKAYSGSYGDY

SEQ ID NO: 21743 - protein, 9 aa, Homo sapiens
  Light chain CDR3 for antibody 10872 (IGKV1-6)
LQDHNYPYT

SEQ ID NO: 21744 - protein, 12 aa, Homo sapiens
  Heavy chain CDR3 for antibody 10872 (IGHV3-h)
ARDIGGRSSFDY

SEQ ID NO: 21745 - protein, 9 aa, Homo sapiens
  Light chain CDR3 for antibody 10873 (IGKV6-21)
HQSSSLPYT

SEQ ID NO: 21746 - protein, 9 aa, Homo sapiens
  Heavy chain CDR3 for antibody 10873 (IGHV4-59)
ARGGVHFDS

SEQ ID NO: 21747 - protein, 9 aa, Homo sapiens
  Light chain CDR3 for antibody 10874 (IGKV1-9)
QQSYSTPFT

SEQ ID NO: 21748 - protein, 13 aa, Homo sapiens
  Heavy chain CDR3 for antibody 10874 (IGHV3-33)
ARDGSMVRGVIDY

SEQ ID NO: 21749 - protein, 9 aa, Homo sapiens
  Light chain CDR3 for antibody 10875 (IGKV1-9)
QQYNTYSRT

SEQ ID NO: 21750 - protein, 18 aa, Homo sapiens
  Heavy chain CDR3 for antibody 10875 (IGHV3-33)
ARDGRISLVRGIIDAFDI

SEQ ID NO: 21751 - protein, 9 aa, Homo sapiens
  Light chain CDR3 for antibody 10876 (IGKV1D-13)
QQFNNYPST

SEQ ID NO: 21752 - protein, 12 aa, Homo sapiens
  Heavy chain CDR3 for antibody 10876 (IGHV3-21)
AREGFGESSFDY

SEQ ID NO: 21753 - protein, 11 aa, Homo sapiens
  Light chain CDR3 for antibody 10877 (IGKV3-11)
QQRSNWPPTWT

SEQ ID NO: 21754 - protein, 18 aa, Homo sapiens
  Heavy chain CDR3 for antibody 10877 (IGHV3-33)
ARDRYYDILTGYYMGFDY

SEQ ID NO: 21755 - protein, 10 aa, Homo sapiens
  Light chain CDR3 for antibody 10878 (IGKV3-11)
QQRSNWPILT

SEQ ID NO: 21756 - protein, 18 aa, Homo sapiens
  Heavy chain CDR3 for antibody 10878 (IGHV3-33)
ARDEYYGSGIYYNYGMDV

SEQ ID NO: 21757 - protein, 9 aa, Homo sapiens
  Light chain CDR3 for antibody 10879 (IGKV1-9)
QQLNGYPFT

SEQ ID NO: 21758 - protein, 11 aa, Homo sapiens
  Heavy chain CDR3 for antibody 10879 (IGHV3-33)
ARDRVLTPFDY

SEQ ID NO: 21759 - protein, 8 aa, Homo sapiens
  Light chain CDR3 for antibody 10880 (IGKV1-5)
QQYNSYYT

SEQ ID NO: 21760 - protein, 12 aa, Homo sapiens
  Heavy chain CDR3 for antibody 10880 (IGHV3-33)
ARAGMGAPYFEY

SEQ ID NO: 21761 - protein, 9 aa, Homo sapiens
  Light chain CDR3 for antibody 10881 (IGKV5-2)
LQHDNFPLT

SEQ ID NO: 21762 - protein, 16 aa, Homo sapiens
  Heavy chain CDR3 for antibody 10881 (IGHV1-18)
TRGTFYYGSGSSFFDY

SEQ ID NO: 21763 - protein, 9 aa, Homo sapiens
  Light chain CDR3 for antibody 10882 (IGKV3-11)
QQRSNRPLT

SEQ ID NO: 21764 - protein, 13 aa, Homo sapiens
  Heavy chain CDR3 for antibody 10882 (IGHV3-33)
ARDQRYSSGWYDY

SEQ ID NO: 21765 - protein, 9 aa, Homo sapiens
  Light chain CDR3 for antibody 10883 (IGKV1-9)
QQLHSYPYT

SEQ ID NO: 21766 - protein, 23 aa, Homo sapiens
  Heavy chain CDR3 for antibody 10883 (IGHV3-11)
ARDEGVTMVRGVISYYYYYGMDV

SEQ ID NO: 21767 - protein, 9 aa, Homo sapiens
  Light chain CDR3 for antibody 10884 (IGKV2D-28)
MQALQTPYT

SEQ ID NO: 21768 - protein, 15 aa, Homo sapiens
  Heavy chain CDR3 for antibody 10884 (IGHV3-30)
ARRGYGSGSPDAFDL

SEQ ID NO: 21769 - protein, 10 aa, Homo sapiens
  Light chain CDR3 for antibody 10885 (IGKV1-17)
LQHNSYPMYT

SEQ ID NO: 21770 - protein, 13 aa, Homo sapiens
  Heavy chain CDR3 for antibody 10885 (IGHV3-33)
ASGYSGYDWYFDL

SEQ ID NO: 21771 - protein, 9 aa, Homo sapiens
  Light chain CDR3 for antibody 10886 (IGKV3-15)
QQYNNWPRT

SEQ ID NO: 21772 - protein, 18 aa, Homo sapiens
  Heavy chain CDR3 for antibody 10886 (IGHV3-33)
ARDRGDILTGYYKGWFDH

SEQ ID NO: 21773 - protein, 9 aa, Homo sapiens
  Light chain CDR3 for antibody 10887 (IGKV2D-28)
MQALQTPPT

SEQ ID NO: 21774 - protein, 13 aa, Homo sapiens
  Heavy chain CDR3 for antibody 10887 (IGHV3-23)
AKDRGGSYSYFDF

SEQ ID NO: 21775 - protein, 9 aa, Homo sapiens
  Light chain CDR3 for antibody 10888 (IGKV1-6)
LQDYNYPLT

SEQ ID NO: 21776 - protein, 9 aa, Homo sapiens
  Heavy chain CDR3 for antibody 10888 (IGHV3-30)
ARDYCHFDY

SEQ ID NO: 21777 - protein, 9 aa, Homo sapiens
  Light chain CDR3 for antibody 10889 (IGKV6-21)
HQSSSLPYT

SEQ ID NO: 21778 - protein, 12 aa, Homo sapiens
  Heavy chain CDR3 for antibody 10889 (IGHV4-28)
ARKDSGYDWFDY

SEQ ID NO: 21779 - protein, 9 aa, Homo sapiens
  Light chain CDR3 for antibody 10890 (IGKV1-39)
QQCYSTPFT

SEQ ID NO: 21780 - protein, 15 aa, Homo sapiens
  Heavy chain CDR3 for antibody 10890 (IGHV3-33)
ARDHLTGYYYYGMDV

SEQ ID NO: 21781 - protein, 9 aa, Homo sapiens
  Light chain CDR3 for antibody 10891 (IGKV1D-16)
QQYNSFPLT

SEQ ID NO: 21782 - protein, 12 aa, Homo sapiens
  Heavy chain CDR3 for antibody 10891 (IGHV4-61)
ARVDSSGWYFDY

SEQ ID NO: 21783 - protein, 9 aa, Homo sapiens
  Light chain CDR3 for antibody 10892 (IGKV1-17)
LQHNSYPYT

SEQ ID NO: 21784 - protein, 16 aa, Homo sapiens
  Heavy chain CDR3 for antibody 10892 (IGHV3-23)
AKEGMVLRYLDWFWDY

SEQ ID NO: 21785 - protein, 10 aa, Homo sapiens
  Light chain CDR3 for antibody 10893 (IGKV1-9)
QQFNSYPPYT

SEQ ID NO: 21786 - protein, 14 aa, Homo sapiens
  Heavy chain CDR3 for antibody 10893 (IGHV3-33)
ARDGRLTMVRGGDF

SEQ ID NO: 21787 - protein, 9 aa, Homo sapiens
  Light chain CDR3 for antibody 10894 (IGKV1-9)
QQLKSYLYT

SEQ ID NO: 21788 - protein, 11 aa, Homo sapiens
  Heavy chain CDR3 for antibody 10894 (IGHV3-33)
AREAANWGFDY

SEQ ID NO: 21789 - protein, 8 aa, Homo sapiens
  Light chain CDR3 for antibody 10895 (IGKV3D-7)
QQDYNLLT

SEQ ID NO: 21790 - protein, 17 aa, Homo sapiens
  Heavy chain CDR3 for antibody 10895 (IGHV3-23)
AKDTITMVRGALFGMDV

SEQ ID NO: 21791 - protein, 9 aa, Homo sapiens
  Light chain CDR3 for antibody 10896 (IGKV1-16)
QHYNDYPFT

SEQ ID NO: 21792 - protein, 16 aa, Homo sapiens
  Heavy chain CDR3 for antibody 10896 (IGHV3-33)
ARDGSMVRRIHDAFDF

SEQ ID NO: 21793 - protein, 9 aa, Homo sapiens
  Light chain CDR3 for antibody 10897 (IGKV1-6)
LQDYKSPFT

SEQ ID NO: 21794 - protein, 14 aa, Homo sapiens
  Heavy chain CDR3 for antibody 10897 (IGHV3-33)
ARDGIVRATDAFAI

SEQ ID NO: 21795 - protein, 9 aa, Homo sapiens
  Light chain CDR3 for antibody 10898 (IGKV1D-16)
QQYNSFPFT

SEQ ID NO: 21796 - protein, 17 aa, Homo sapiens
  Heavy chain CDR3 for antibody 10898 (IGHV3-33)
AREYNDILTGYWGYFDY

SEQ ID NO: 21797 - protein, 10 aa, Homo sapiens
  Light chain CDR3 for antibody 10899 (IGKV1-39)
QQSYSSPMYT

SEQ ID NO: 21798 - protein, 14 aa, Homo sapiens
  Heavy chain CDR3 for antibody 10899 (IGHV4-39)
ARDSGYDYYYAMDV

SEQ ID NO: 21799 - protein, 9 aa, Homo sapiens
  Light chain CDR3 for antibody 10900 (IGKV3D-7)
QQDYNLPLT

SEQ ID NO: 21800 - protein, 18 aa, Homo sapiens
  Heavy chain CDR3 for antibody 10900 (IGHV3-64)
ARDEYYYGSGSYYNYFDW

SEQ ID NO: 21801 - protein, 9 aa, Homo sapiens
  Light chain CDR3 for antibody 10901 (IGKV3D-7)
QQDYNLPYS

SEQ ID NO: 21802 - protein, 12 aa, Homo sapiens
  Heavy chain CDR3 for antibody 10901 (IGHV1-46)
AREDYDIDGMDV

SEQ ID NO: 21803 - protein, 9 aa, Homo sapiens
  Light chain CDR3 for antibody 10902 (IGKV6-21)
HQSSSLPYT

SEQ ID NO: 21804 - protein, 10 aa, Homo sapiens
  Heavy chain CDR3 for antibody 10902 (IGHV3-21)
ARETWWRFDP

SEQ ID NO: 21805 - protein, 9 aa, Homo sapiens
  Light chain CDR3 for antibody 10903 (IGKV1-6)
LQDYKSPFT

SEQ ID NO: 21806 - protein, 14 aa, Homo sapiens
  Heavy chain CDR3 for antibody 10903 (IGHV3-33)
ARDGYDILTGPFYY

SEQ ID NO: 21807 - protein, 9 aa, Homo sapiens
  Light chain CDR3 for antibody 10904 (IGKV2D-28)
MQALQTPPT

SEQ ID NO: 21808 - protein, 11 aa, Homo sapiens
  Heavy chain CDR3 for antibody 10904 (IGHV4-59)
AREMGHDIFDI

SEQ ID NO: 21809 - protein, 9 aa, Homo sapiens
  Light chain CDR3 for antibody 10905 (IGKV1-17)
LHSNNYPWT

SEQ ID NO: 21810 - protein, 12 aa, Homo sapiens
  Heavy chain CDR3 for antibody 10905 (IGHV1-46)
ARGLIGDHALDI

SEQ ID NO: 21811 - protein, 9 aa, Homo sapiens
  Light chain CDR3 for antibody 10906 (IGKV6-21)
HQSSTLPST

SEQ ID NO: 21812 - protein, 16 aa, Homo sapiens
  Heavy chain CDR3 for antibody 10906 (IGHV3-23)
AKEGMVLRYFDWLRDY

SEQ ID NO: 21813 - protein, 11 aa, Homo sapiens
  Light chain CDR3 for antibody 10907 (IGKV3-11)
QQRSNWPPMYT

SEQ ID NO: 21814 - protein, 19 aa, Homo sapiens
  Heavy chain CDR3 for antibody 10907 (IGHV1-18)
ARDDILTGYSLYYYYGMDV

SEQ ID NO: 21815 - protein, 9 aa, Homo sapiens
  Light chain CDR3 for antibody 10908 (IGKV6-21)
HQSSSLPYT

SEQ ID NO: 21816 - protein, 18 aa, Homo sapiens
  Heavy chain CDR3 for antibody 10908 (IGHV1-18)
ARDPNYYGSGSYYNYFGY

SEQ ID NO: 21817 - protein, 9 aa, Homo sapiens
  Light chain CDR3 for antibody 10909 (IGKV1-9)
QQLNGYPFT

SEQ ID NO: 21818 - protein, 18 aa, Homo sapiens
  Heavy chain CDR3 for antibody 10909 (IGHV1-18)
ARDRYYYDSGSYYYGMDV

SEQ ID NO: 21819 - protein, 9 aa, Homo sapiens
  Light chain CDR3 for antibody 10910 (IGKV1-33)
QQLNGYPFT

SEQ ID NO: 21820 - protein, 18 aa, Homo sapiens
  Heavy chain CDR3 for antibody 10910 (IGHV4-39)
ARGALTYYDILTGYFFDY

SEQ ID NO: 21821 - protein, 9 aa, Homo sapiens
  Light chain CDR3 for antibody 10911 (IGKV3-11)
QQRINWPWT

SEQ ID NO: 21822 - protein, 18 aa, Homo sapiens
  Heavy chain CDR3 for antibody 10911 (IGHV4-59)
ARDNHYYSSGAYSNWFDP

SEQ ID NO: 21823 - protein, 9 aa, Homo sapiens
  Light chain CDR3 for antibody 10912 (IGKV1-6)
LQDFHYPWT

SEQ ID NO: 21824 - protein, 17 aa, Homo sapiens
  Heavy chain CDR3 for antibody 10912 (IGHV4-59)
ARDFLVRGEGSYYGMDV

SEQ ID NO: 21825 - protein, 9 aa, Homo sapiens
  Light chain CDR3 for antibody 10913 (IGKV1-6)
LQDYKSPFT

SEQ ID NO: 21826 - protein, 13 aa, Homo sapiens
  Heavy chain CDR3 for antibody 10913 (IGHV3-53)
ARSGSYWGYYFDY

SEQ ID NO: 21827 - protein, 9 aa, Homo sapiens
  Light chain CDR3 for antibody 10914 (IGKV1D-13)
QQFNNYPHT

SEQ ID NO: 21828 - protein, 12 aa, Homo sapiens
  Heavy chain CDR3 for antibody 10914 (IGHV3-23)
AKGYTSFWYFDL

SEQ ID NO: 21829 - protein, 9 aa, Homo sapiens
  Light chain CDR3 for antibody 10915 (IGKV1D-13)
QQFNNYPHT

SEQ ID NO: 21830 - protein, 11 aa, Homo sapiens
  Heavy chain CDR3 for antibody 10915 (IGHV3-33)
ATERDMVRGDY

SEQ ID NO: 21831 - protein, 9 aa, Homo sapiens
  Light chain CDR3 for antibody 10916 (IGKV1-6)
LQDYNYPYT

SEQ ID NO: 21832 - protein, 14 aa, Homo sapiens
  Heavy chain CDR3 for antibody 10916 (IGHV3-33)
ARDHRDNSYYGMDV

SEQ ID NO: 21833 - protein, 9 aa, Homo sapiens
  Light chain CDR3 for antibody 10917 (IGKV1-9)
QQLHIYPWT

SEQ ID NO: 21834 - protein, 18 aa, Homo sapiens
  Heavy chain CDR3 for antibody 10917 (IGHV3-33)
VRDRERYGSGSYPDAFDI

SEQ ID NO: 21835 - protein, 7 aa, Homo sapiens
  Light chain CDR3 for antibody 10918 (IGKV1-17)
LQHNSYP

SEQ ID NO: 21836 - protein, 11 aa, Homo sapiens
  Heavy chain CDR3 for antibody 10918 (IGHV3-33)
ARDRSSGPFDY

SEQ ID NO: 21837 - protein, 10 aa, Homo sapiens
  Light chain CDR3 for antibody 10919 (IGKV1-6)
LQDYNYPMYT

SEQ ID NO: 21838 - protein, 16 aa, Homo sapiens
  Heavy chain CDR3 for antibody 10919 (IGHV3-33)
ARAVYYGSGSSLIMDV

SEQ ID NO: 21839 - protein, 9 aa, Homo sapiens
  Light chain CDR3 for antibody 10920 (IGKV1-17)
QQLNSYPRT

SEQ ID NO: 21840 - protein, 15 aa, Homo sapiens
  Heavy chain CDR3 for antibody 10920 (IGHV3-21)
ARDEHYDILTGYWAY

SEQ ID NO: 21841 - protein, 9 aa, Homo sapiens
  Light chain CDR3 for antibody 10921 (IGKV1-6)
LQDYKSPFT

SEQ ID NO: 21842 - protein, 18 aa, Homo sapiens
  Heavy chain CDR3 for antibody 10921 (IGHV3-33)
AREGSYYGSGSFPNWFDP

SEQ ID NO: 21843 - protein, 9 aa, Homo sapiens
  Light chain CDR3 for antibody 10922 (IGKV1-9)
QQLKSYLYT

SEQ ID NO: 21844 - protein, 20 aa, Homo sapiens
  Heavy chain CDR3 for antibody 10922 (IGHV3-11)
ARGGATLIRGLIDYYYGMDV

SEQ ID NO: 21845 - protein, 10 aa, Homo sapiens
  Light chain CDR3 for antibody 10923 (IGKV3-15)
QQYNNWPPIT

SEQ ID NO: 21846 - protein, 14 aa, Homo sapiens
  Heavy chain CDR3 for antibody 10923 (IGHV1-2)
ARDYYGSGNYYMGY

SEQ ID NO: 21847 - protein, 9 aa, Homo sapiens
  Light chain CDR3 for antibody 10924 (IGKV1-39)
QQSYSTPYT

SEQ ID NO: 21848 - protein, 14 aa, Homo sapiens
  Heavy chain CDR3 for antibody 10924 (IGHV3-33)
ARDDYVSGSYYFDY

SEQ ID NO: 21849 - protein, 9 aa, Homo sapiens
  Light chain CDR3 for antibody 10925 (IGKV3-11)
QQRSNWMYT

SEQ ID NO: 21850 - protein, 14 aa, Homo sapiens
  Heavy chain CDR3 for antibody 10925 (IGHV4-39)
ARHGYYGSSNWFDP

SEQ ID NO: 21851 - protein, 9 aa, Homo sapiens
  Light chain CDR3 for antibody 10926 (IGKV1D-13)
QHFNNYMYT

SEQ ID NO: 21852 - protein, 16 aa, Homo sapiens
  Heavy chain CDR3 for antibody 10926 (IGHV3-33)
ARGYDMLTGDYHCMDV

SEQ ID NO: 21853 - protein, 8 aa, Homo sapiens
  Light chain CDR3 for antibody 10927 (IGKV3-15)
QQYNNWPT

SEQ ID NO: 21854 - protein, 12 aa, Homo sapiens
  Heavy chain CDR3 for antibody 10927 (IGHV3-13)
AREAGIPDAFDI

SEQ ID NO: 21855 - protein, 9 aa, Homo sapiens
  Light chain CDR3 for antibody 10928 (IGKV1-33)
QQYDNLPFT

SEQ ID NO: 21856 - protein, 16 aa, Homo sapiens
  Heavy chain CDR3 for antibody 10928 (IGHV3-33)
ARAVYYGSGSSLIMDV

SEQ ID NO: 21857 - protein, 10 aa, Homo sapiens
  Light chain CDR3 for antibody 10929 (IGKV3-11)
QQRSNWPMYT

SEQ ID NO: 21858 - protein, 12 aa, Homo sapiens
  Heavy chain CDR3 for antibody 10929 (IGHV3-33)
ARVDAAAPYFDY

SEQ ID NO: 21859 - protein, 9 aa, Homo sapiens
  Light chain CDR3 for antibody 10930 (IGKV1D-16)
QQYHSYPYT

SEQ ID NO: 21860 - protein, 19 aa, Homo sapiens
  Heavy chain CDR3 for antibody 10930 (IGHV3-20)
ARDSAVAGRYYYYYYGMDV

SEQ ID NO: 21861 - protein, 8 aa, Homo sapiens
  Light chain CDR3 for antibody 10931 (IGKV1D-13)
QQYNNYPT

SEQ ID NO: 21862 - protein, 12 aa, Homo sapiens
  Heavy chain CDR3 for antibody 10931 (IGHV3-33)
ASRDILTGYLGY

SEQ ID NO: 21863 - protein, 9 aa, Homo sapiens
  Light chain CDR3 for antibody 10932 (IGKV1-17)
LQHNGYPLT

SEQ ID NO: 21864 - protein, 11 aa, Homo sapiens
  Heavy chain CDR3 for antibody 10932 (IGHV3-33)
ARDRISGPFDY

SEQ ID NO: 21865 - protein, 9 aa, Homo sapiens
  Light chain CDR3 for antibody 10933 (IGKV1-6)
LQDYNYPWT

SEQ ID NO: 21866 - protein, 10 aa, Homo sapiens
  Heavy chain CDR3 for antibody 10933 (IGHV3-33)
ARDPSGCFDY

SEQ ID NO: 21867 - protein, 10 aa, Homo sapiens
  Light chain CDR3 for antibody 10934 (IGKV1-17)
LQHNSYPMYT

SEQ ID NO: 21868 - protein, 15 aa, Homo sapiens
  Heavy chain CDR3 for antibody 10934 (IGHV1-46)
ARGAVDDYYYYGMDV

SEQ ID NO: 21869 - protein, 9 aa, Homo sapiens
  Light chain CDR3 for antibody 10935 (IGKV1-39)
QQSYSTPFT

SEQ ID NO: 21870 - protein, 12 aa, Homo sapiens
  Heavy chain CDR3 for antibody 10935 (IGHV4-39)
ASLGWELHDFDY

SEQ ID NO: 21871 - protein, 9 aa, Homo sapiens
  Light chain CDR3 for antibody 10936 (IGKV1-9)
QQLNTYPWT

SEQ ID NO: 21872 - protein, 14 aa, Homo sapiens
  Heavy chain CDR3 for antibody 10936 (IGHV3-33)
ARDGYDFLTGPFDY

SEQ ID NO: 21873 - protein, 9 aa, Homo sapiens
  Light chain CDR3 for antibody 10937 (IGKV1-6)
LQDYKHPFT

SEQ ID NO: 21874 - protein, 10 aa, Homo sapiens
  Heavy chain CDR3 for antibody 10937 (IGHV3-23)
AKDHYGDYPY

SEQ ID NO: 21875 - protein, 6 aa, Homo sapiens
  Light chain CDR3 for antibody 10938 (IGKV3-20)
QQYGST

SEQ ID NO: 21876 - protein, 17 aa, Homo sapiens
  Heavy chain CDR3 for antibody 10938 (IGHV3-33)
ARGFSGYDGYYYYGMDV

SEQ ID NO: 21877 - protein, 10 aa, Homo sapiens
  Light chain CDR3 for antibody 10939 (IGKV1-39)
QQSYSTPMYT

SEQ ID NO: 21878 - protein, 15 aa, Homo sapiens
  Heavy chain CDR3 for antibody 10939 (IGHV3-33)
VCVLYDYGDYVGFDY

SEQ ID NO: 21879 - protein, 9 aa, Homo sapiens
  Light chain CDR3 for antibody 10940 (IGKV3-20)
QRYGSSPYT

SEQ ID NO: 21880 - protein, 17 aa, Homo sapiens
  Heavy chain CDR3 for antibody 10940 (IGHV1-18)
ARDRASTMVRGVPPFDY

SEQ ID NO: 21881 - protein, 9 aa, Homo sapiens
  Light chain CDR3 for antibody 10941 (IGKV1-6)
LQDYKSPFT

SEQ ID NO: 21882 - protein, 14 aa, Homo sapiens
  Heavy chain CDR3 for antibody 10941 (IGHV3-33)
ARDLDIMATSPFAY

SEQ ID NO: 21883 - protein, 9 aa, Homo sapiens
  Light chain CDR3 for antibody 10942 (IGKV1-6)
QQEYNYPLT

SEQ ID NO: 21884 - protein, 13 aa, Homo sapiens
  Heavy chain CDR3 for antibody 10942 (IGHV3-53)
ARSGSYWGYYFDY

SEQ ID NO: 21885 - protein, 9 aa, Homo sapiens
  Light chain CDR3 for antibody 10943 (IGKV1D-16)
QQYITYPYT

SEQ ID NO: 21886 - protein, 18 aa, Homo sapiens
  Heavy chain CDR3 for antibody 10943 (IGHV3-64)
AREGDYYGSGGFPNWFDP

SEQ ID NO: 21887 - protein, 9 aa, Homo sapiens
  Light chain CDR3 for antibody 10944 (IGKV3-20)
QQYGSSPYT

SEQ ID NO: 21888 - protein, 12 aa, Homo sapiens
  Heavy chain CDR3 for antibody 10944 (IGHV3-9)
AEDPFLGTSFDY

SEQ ID NO: 21889 - protein, 9 aa, Homo sapiens
  Light chain CDR3 for antibody 10945 (IGKV4-1)
QQYYSTPWT

SEQ ID NO: 21890 - protein, 14 aa, Homo sapiens
  Heavy chain CDR3 for antibody 10945 (IGHV3-33)
ARDLNYDILNGGGY

SEQ ID NO: 21891 - protein, 9 aa, Homo sapiens
  Light chain CDR3 for antibody 10946 (IGKV1-17)
LQHNSYPLT

SEQ ID NO: 21892 - protein, 12 aa, Homo sapiens
  Heavy chain CDR3 for antibody 10946 (IGHV3-33)
ARDRAYRGSLDH

SEQ ID NO: 21893 - protein, 8 aa, Homo sapiens
  Light chain CDR3 for antibody 10947 (IGKV3-20)
QQYGSSLT

SEQ ID NO: 21894 - protein, 18 aa, Homo sapiens
  Heavy chain CDR3 for antibody 10947 (IGHV3-33)
ARDQYSGYDYYYYYGMDV

SEQ ID NO: 21895 - protein, 9 aa, Homo sapiens
  Light chain CDR3 for antibody 10948 (IGKV3-20)
QQYGSSPRT

SEQ ID NO: 21896 - protein, 13 aa, Homo sapiens
  Heavy chain CDR3 for antibody 10948 (IGHV3-33)
TRRIAVAGAEGDY

SEQ ID NO: 21897 - protein, 8 aa, Homo sapiens
  Light chain CDR3 for antibody 10949 (IGKV3-20)
QQYGSSLT

SEQ ID NO: 21898 - protein, 11 aa, Homo sapiens
  Heavy chain CDR3 for antibody 10949 (IGHV3-23)
ARDPGSITGDY

SEQ ID NO: 21899 - protein, 9 aa, Homo sapiens
  Light chain CDR3 for antibody 10950 (IGKV1-37)
QRTSNAPYT

SEQ ID NO: 21900 - protein, 12 aa, Homo sapiens
  Heavy chain CDR3 for antibody 10950 (IGHV3-33)
ARGYFGSGYAHF

SEQ ID NO: 21901 - protein, 9 aa, Homo sapiens
  Light chain CDR3 for antibody 10951 (IGKV3D-20)
QQYHSYPYT

SEQ ID NO: 21902 - protein, 15 aa, Homo sapiens
  Heavy chain CDR3 for antibody 10951 (IGHV3-33)
ARDRVGVKDYYSMDV

SEQ ID NO: 21903 - protein, 9 aa, Homo sapiens
  Light chain CDR3 for antibody 10952 (IGKV1-6)
LQDYKHPFT

SEQ ID NO: 21904 - protein, 21 aa, Homo sapiens
  Heavy chain CDR3 for antibody 10952 (IGHV3-33)
ARKRLYDILTGYYKAYYGMDV

SEQ ID NO: 21905 - protein, 10 aa, Homo sapiens
  Light chain CDR3 for antibody 10953 (IGKV3-15)
QQYNNWPPYT

SEQ ID NO: 21906 - protein, 13 aa, Homo sapiens
  Heavy chain CDR3 for antibody 10953 (IGHV3-33)
ARRYRSGWYPFDY

SEQ ID NO: 21907 - protein, 9 aa, Homo sapiens
  Light chain CDR3 for antibody 10954 (IGKV3D-7)
QQDYKLPRT

SEQ ID NO: 21908 - protein, 13 aa, Homo sapiens
  Heavy chain CDR3 for antibody 10954 (IGHV3-33)
ARVHFDWLDAFDI

SEQ ID NO: 21909 - protein, 9 aa, Homo sapiens
  Light chain CDR3 for antibody 10955 (IGKV1-17)
LQHNGYPLT

SEQ ID NO: 21910 - protein, 17 aa, Homo sapiens
  Heavy chain CDR3 for antibody 10955 (IGHV4-59)
ARDFLVRGEGSYYGMDV

SEQ ID NO: 21911 - protein, 9 aa, Homo sapiens
  Light chain CDR3 for antibody 10956 (IGKV3-11)
QQRSNWMYT

SEQ ID NO: 21912 - protein, 14 aa, Homo sapiens
  Heavy chain CDR3 for antibody 10956 (IGHV3-23)
AKGGDILTGYYPDY

SEQ ID NO: 21913 - protein, 8 aa, Homo sapiens
  Light chain CDR3 for antibody 10957 (IGKV1-5)
QQYHSYYT

SEQ ID NO: 21914 - protein, 9 aa, Homo sapiens
  Heavy chain CDR3 for antibody 10957 (IGHV1-8)
ARGRLDFDY

SEQ ID NO: 21915 - protein, 10 aa, Homo sapiens
  Light chain CDR3 for antibody 10958 (IGKV1-17)
LQHNSYPMYT

SEQ ID NO: 21916 - protein, 18 aa, Homo sapiens
  Heavy chain CDR3 for antibody 10958 (IGHV3-23)
AKVGDFFASGNYWDYFDY

SEQ ID NO: 21917 - protein, 8 aa, Homo sapiens
  Light chain CDR3 for antibody 10959 (IGKV1D-13)
QQFNNYPT

SEQ ID NO: 21918 - protein, 18 aa, Homo sapiens
  Heavy chain CDR3 for antibody 10959 (IGHV3-33)
ARGGVLYDILTGFYGMDV

SEQ ID NO: 21919 - protein, 9 aa, Homo sapiens
  Light chain CDR3 for antibody 10960 (IGKV1-6)
LQDFHYPWT

SEQ ID NO: 21920 - protein, 17 aa, Homo sapiens
  Heavy chain CDR3 for antibody 10960 (IGHV3-h)
ARGEQWLGYYYYYGMDV

SEQ ID NO: 21921 - protein, 9 aa, Homo sapiens
  Light chain CDR3 for antibody 10961 (IGKV1-16)
QKYNSAPHT

SEQ ID NO: 21922 - protein, 13 aa, Homo sapiens
  Heavy chain CDR3 for antibody 10961 (IGHV3-33)
ASGYSGYDWYFDL

SEQ ID NO: 21923 - protein, 9 aa, Homo sapiens
  Light chain CDR3 for antibody 10962 (IGKV1-39)
QQSYSTPLT

SEQ ID NO: 21924 - protein, 15 aa, Homo sapiens
  Heavy chain CDR3 for antibody 10962 (IGHV3-23)
AKDPRGYYYYYGMDV

SEQ ID NO: 21925 - protein, 9 aa, Homo sapiens
  Light chain CDR3 for antibody 10963 (IGKV2D-28)
MQALQTPPT

SEQ ID NO: 21926 - protein, 8 aa, Homo sapiens
  Heavy chain CDR3 for antibody 10963 (IGHV3-23)
EKSAGEDV

SEQ ID NO: 21927 - protein, 9 aa, Homo sapiens
  Light chain CDR3 for antibody 10964 (IGKV3D-20)
QQYGSSPRT

SEQ ID NO: 21928 - protein, 18 aa, Homo sapiens
  Heavy chain CDR3 for antibody 10964 (IGHV3-33)
ARDPYSSGWYDYYFGMDV

SEQ ID NO: 21929 - protein, 9 aa, Homo sapiens
  Light chain CDR3 for antibody 10965 (IGKV1-9)
QQLTSYPWT

SEQ ID NO: 21930 - protein, 17 aa, Homo sapiens
  Heavy chain CDR3 for antibody 10965 (IGHV3-33)
AREDGDILTGYYEWFDP

SEQ ID NO: 21931 - protein, 10 aa, Homo sapiens
  Light chain CDR3 for antibody 10966 (IGKV3-15)
QQYNNWPPLT

SEQ ID NO: 21932 - protein, 14 aa, Homo sapiens
  Heavy chain CDR3 for antibody 10966 (IGHV3-33)
ARDKSYPLSYGMDV

SEQ ID NO: 21933 - protein, 9 aa, Homo sapiens
  Light chain CDR3 for antibody 10967 (IGKV1-17)
LQQNDYPWT

SEQ ID NO: 21934 - protein, 17 aa, Homo sapiens
  Heavy chain CDR3 for antibody 10967 (IGHV4-59)
ARRITMVREIIITAFDY

SEQ ID NO: 21935 - protein, 9 aa, Homo sapiens
  Light chain CDR3 for antibody 10968 (IGKV1D-13)
QQFNNYPYT

SEQ ID NO: 21936 - protein, 11 aa, Homo sapiens
  Heavy chain CDR3 for antibody 10968 (IGHV3-33)
ARDILTGYFDY

SEQ ID NO: 21937 - protein, 9 aa, Homo sapiens
  Light chain CDR3 for antibody 10969 (IGKV1D-13)
QRFNNYLYT

SEQ ID NO: 21938 - protein, 15 aa, Homo sapiens
  Heavy chain CDR3 for antibody 10969 (IGHV3-23)
AKEALRYFDWSGMDV

SEQ ID NO: 21939 - protein, 8 aa, Homo sapiens
  Light chain CDR3 for antibody 10970 (IGKV3-20)
QQYGSSLT

SEQ ID NO: 21940 - protein, 10 aa, Homo sapiens
  Heavy chain CDR3 for antibody 10970 (IGHV3-23)
AKEQWLVLDY

SEQ ID NO: 21941 - protein, 10 aa, Homo sapiens
  Light chain CDR3 for antibody 10971 (IGKV1-39)
QQSYSTPMYT

SEQ ID NO: 21942 - protein, 19 aa, Homo sapiens
  Heavy chain CDR3 for antibody 10971 (IGHV3-30)
ARRFSGYSGYDHYYYGMDV

SEQ ID NO: 21943 - protein, 9 aa, Homo sapiens
  Light chain CDR3 for antibody 10972 (IGKV1-17)
LQHNGYPLT

SEQ ID NO: 21944 - protein, 15 aa, Homo sapiens
  Heavy chain CDR3 for antibody 10972 (IGHV3-30)
ARGAMGRGVDYGMDV

SEQ ID NO: 21945 - protein, 9 aa, Homo sapiens
  Light chain CDR3 for antibody 10973 (IGKV1D-13)
QQFNNYPST

SEQ ID NO: 21946 - protein, 18 aa, Homo sapiens
  Heavy chain CDR3 for antibody 10973 (IGHV3-23)
AKDGDYFGSGSYWGYFDL

SEQ ID NO: 21947 - protein, 9 aa, Homo sapiens
  Light chain CDR3 for antibody 10974 (IGKV3D-7)
QQDYTLPLT

SEQ ID NO: 21948 - protein, 19 aa, Homo sapiens
  Heavy chain CDR3 for antibody 10974 (IGHV1-18)
ARGGHIGVVTAFHGYGMDV

SEQ ID NO: 21949 - protein, 9 aa, Homo sapiens
  Light chain CDR3 for antibody 10975 (IGKV3D-7)
QQDYNLPLT

SEQ ID NO: 21950 - protein, 11 aa, Homo sapiens
  Heavy chain CDR3 for antibody 10975 (IGHV3-23)
AKEGTYFDIPH

SEQ ID NO: 21951 - protein, 9 aa, Homo sapiens
  Light chain CDR3 for antibody 10976 (IGKV1-6)
LQDYSYPFT

SEQ ID NO: 21952 - protein, 13 aa, Homo sapiens
  Heavy chain CDR3 for antibody 10976 (IGHV3-33)
ARRATLVRGVFDH

SEQ ID NO: 21953 - protein, 9 aa, Homo sapiens
  Light chain CDR3 for antibody 10977 (IGKV1-39)
QQSYSTPLT

SEQ ID NO: 21954 - protein, 11 aa, Homo sapiens
  Heavy chain CDR3 for antibody 10977 (IGHV3-33)
ARDRATAGLDY

SEQ ID NO: 21955 - protein, 10 aa, Homo sapiens
  Light chain CDR3 for antibody 10978 (IGKV3-20)
QQYGRSPPVT

SEQ ID NO: 21956 - protein, 11 aa, Homo sapiens
  Heavy chain CDR3 for antibody 10978 (IGHV3-33)
ARARYTTGLDY

SEQ ID NO: 21957 - protein, 8 aa, Homo sapiens
  Light chain CDR3 for antibody 10979 (IGKV3-20)
QQYGSSLT

SEQ ID NO: 21958 - protein, 18 aa, Homo sapiens
  Heavy chain CDR3 for antibody 10979 (IGHV3-53)
AKAGDYYVSGSYWGYFDL

SEQ ID NO: 21959 - protein, 9 aa, Homo sapiens
  Light chain CDR3 for antibody 10980 (IGKV3D-20)
QQYGRSPRT

SEQ ID NO: 21960 - protein, 16 aa, Homo sapiens
  Heavy chain CDR3 for antibody 10980 (IGHV1-24)
ARGRYYEWLLGDVFDI

SEQ ID NO: 21961 - protein, 9 aa, Homo sapiens
  Light chain CDR3 for antibody 10981 (IGKV1-9)
QQLNNYLFT

SEQ ID NO: 21962 - protein, 11 aa, Homo sapiens
  Heavy chain CDR3 for antibody 10981 (IGHV4-39)
ARLLVGATTDY

SEQ ID NO: 21963 - protein, 9 aa, Homo sapiens
  Light chain CDR3 for antibody 10982 (IGKV3D-7)
QQDYTLPLT

SEQ ID NO: 21964 - protein, 17 aa, Homo sapiens
  Heavy chain CDR3 for antibody 10982 (IGHV3-33)
TRDSGMVRGIIIYGMDV

SEQ ID NO: 21965 - protein, 9 aa, Homo sapiens
  Light chain CDR3 for antibody 10983 (IGKV6-21)
HQSSSLPYT

SEQ ID NO: 21966 - protein, 16 aa, Homo sapiens
  Heavy chain CDR3 for antibody 10983 (IGHV3-33)
ARGFSGYDGYYYGMDV

SEQ ID NO: 21967 - protein, 8 aa, Homo sapiens
  Light chain CDR3 for antibody 10984 (IGKV1D-13)
QQFNNYPT

SEQ ID NO: 21968 - protein, 18 aa, Homo sapiens
  Heavy chain CDR3 for antibody 10984 (IGHV3-33)
AREGYFGSGSYYRNWFDP

SEQ ID NO: 21969 - protein, 9 aa, Homo sapiens
  Light chain CDR3 for antibody 10985 (IGKV5-2)
LQHYNFPYT

SEQ ID NO: 21970 - protein, 10 aa, Homo sapiens
  Heavy chain CDR3 for antibody 10985 (IGHV3-33)
ARDLGYNFDY

SEQ ID NO: 21971 - protein, 9 aa, Homo sapiens
  Light chain CDR3 for antibody 10986 (IGKV3D-7)
QQDYNLPYT

SEQ ID NO: 21972 - protein, 13 aa, Homo sapiens
  Heavy chain CDR3 for antibody 10986 (IGHV3-33)
ARQSSGWFDAFDI

SEQ ID NO: 21973 - protein, 9 aa, Homo sapiens
  Light chain CDR3 for antibody 10987 (IGKV6-21)
QQSSNLPHT

SEQ ID NO: 21974 - protein, 13 aa, Homo sapiens
  Heavy chain CDR3 for antibody 10987 (IGHV3-11)
ARSGSYWGYYFDY

SEQ ID NO: 21975 - protein, 10 aa, Homo sapiens
  Light chain CDR3 for antibody 10988 (IGKV1-27)
QKYNSAPMYT

SEQ ID NO: 21976 - protein, 15 aa, Homo sapiens
  Heavy chain CDR3 for antibody 10988 (IGHV4-39)
ARRSKYSSAWYPFDY

SEQ ID NO: 21977 - protein, 9 aa, Homo sapiens
  Light chain CDR3 for antibody 10989 (IGKV1D-13)
QQFNNYPYT

SEQ ID NO: 21978 - protein, 17 aa, Homo sapiens
  Heavy chain CDR3 for antibody 10989 (IGHV3-33)
ARSPYDILTGYSYYFDY

SEQ ID NO: 21979 - protein, 9 aa, Homo sapiens
  Light chain CDR3 for antibody 10990 (IGKV1-17)
LQHNSFPLT

SEQ ID NO: 21980 - protein, 20 aa, Homo sapiens
  Heavy chain CDR3 for antibody 10990 (IGHV3-30)
ARVGATLIRGLIDYYYGMDV

SEQ ID NO: 21981 - protein, 9 aa, Homo sapiens
  Light chain CDR3 for antibody 10991 (IGKV1-9)
QQLKSYLYT

SEQ ID NO: 21982 - protein, 20 aa, Homo sapiens
  Heavy chain CDR3 for antibody 10991 (IGHV3-33)
SRGGATLVRGVIDYYYGMDV

SEQ ID NO: 21983 - protein, 9 aa, Homo sapiens
  Light chain CDR3 for antibody 10992 (IGKV1-16)
LQHNSYPYT

SEQ ID NO: 21984 - protein, 12 aa, Homo sapiens
  Heavy chain CDR3 for antibody 10992 (IGHV4-39)
ARQGAYSRFFDY

SEQ ID NO: 21985 - protein, 10 aa, Homo sapiens
  Light chain CDR3 for antibody 10993 (IGKV1-17)
QQSYSTPMYT

SEQ ID NO: 21986 - protein, 12 aa, Homo sapiens
  Heavy chain CDR3 for antibody 10993 (IGHV4-59)
ARDRSGWAYFDY

SEQ ID NO: 21987 - protein, 9 aa, Homo sapiens
  Light chain CDR3 for antibody 10994 (IGKV1-16)
QQYYSYPRT

SEQ ID NO: 21988 - protein, 17 aa, Homo sapiens
  Heavy chain CDR3 for antibody 10994 (IGHV1-18)
ARVRAFTMVRGVPPFDY

SEQ ID NO: 21989 - protein, 9 aa, Homo sapiens
  Light chain CDR3 for antibody 10995 (IGKV3D-7)
QQDYNLPYT

SEQ ID NO: 21990 - protein, 13 aa, Homo sapiens
  Heavy chain CDR3 for antibody 10995 (IGHV4-39)
APFRVMVRGVLDY

SEQ ID NO: 21991 - protein, 9 aa, Homo sapiens
  Light chain CDR3 for antibody 10996 (IGKV1-6)
LQDYKSPFT

SEQ ID NO: 21992 - protein, 13 aa, Homo sapiens
  Heavy chain CDR3 for antibody 10996 (IGHV3-33)
ARVDTMVRGVMAY

SEQ ID NO: 21993 - protein, 8 aa, Homo sapiens
  Light chain CDR3 for antibody 10997 (IGKV1-5)
QQYNSYYT

SEQ ID NO: 21994 - protein, 15 aa, Homo sapiens
  Heavy chain CDR3 for antibody 10997 (IGHV3-23)
AKDPRGYYYYYGMDV

SEQ ID NO: 21995 - protein, 9 aa, Homo sapiens
  Light chain CDR3 for antibody 10998 (IGKV1D-13)
QRFNNYLYT

SEQ ID NO: 21996 - protein, 14 aa, Homo sapiens
  Heavy chain CDR3 for antibody 10998 (IGHV3-33)
ARAISGSAYWYFDL

SEQ ID NO: 21997 - protein, 9 aa, Homo sapiens
  Light chain CDR3 for antibody 10999 (IGKV3-11)
QQRINWPWT

SEQ ID NO: 21998 - protein, 13 aa, Homo sapiens
  Heavy chain CDR3 for antibody 10999 (IGHV4-61)
ARHPPSRDYGMDV

SEQ ID NO: 21999 - protein, 9 aa, Homo sapiens
  Light chain CDR3 for antibody 11000 (IGKV1-17)
QQYDSYPWT

SEQ ID NO: 22000 - protein, 17 aa, Homo sapiens
  Heavy chain CDR3 for antibody 11000 (IGHV3-33)
ARGYCSRTSCYLYYLDY

SEQ ID NO: 22001 - protein, 9 aa, Homo sapiens
  Light chain CDR3 for antibody 11001 (IGKV3-11)
QQFNNYPST

SEQ ID NO: 22002 - protein, 15 aa, Homo sapiens
  Heavy chain CDR3 for antibody 11001 (IGHV3-74)
ARGSGSHYHYYGMDV

SEQ ID NO: 22003 - protein, 8 aa, Homo sapiens
  Light chain CDR3 for antibody 11002 (IGKV3D-7)
QQDYNLLT

SEQ ID NO: 22004 - protein, 13 aa, Homo sapiens
  Heavy chain CDR3 for antibody 11002 (IGHV4-59)
ANRDYYGYYGMDV

SEQ ID NO: 22005 - protein, 9 aa, Homo sapiens
  Light chain CDR3 for antibody 11003 (IGKV1-16)
QHYNDYPFT

SEQ ID NO: 22006 - protein, 13 aa, Homo sapiens
  Heavy chain CDR3 for antibody 11003 (IGHV1-18)
ARSITMVRGVIGY

SEQ ID NO: 22007 - protein, 9 aa, Homo sapiens
  Light chain CDR3 for antibody 11004 (IGKV3-15)
QQYNNWPLT

SEQ ID NO: 22008 - protein, 18 aa, Homo sapiens
  Heavy chain CDR3 for antibody 11004 (IGHV3-33)
ARKGGYYSGSGSYRHFDF

SEQ ID NO: 22009 - protein, 9 aa, Homo sapiens
  Light chain CDR3 for antibody 11005 (IGKV1D-16)
QQYNSYPYT

SEQ ID NO: 22010 - protein, 15 aa, Homo sapiens
  Heavy chain CDR3 for antibody 11005 (IGHV3-15)
TTGWVRYCSGGCCRI

SEQ ID NO: 22011 - protein, 9 aa, Homo sapiens
  Light chain CDR3 for antibody 11006 (IGKV1-9)
QQLKSYMYT

SEQ ID NO: 22012 - protein, 13 aa, Homo sapiens
  Heavy chain CDR3 for antibody 11006 (IGHV3-66)
ANTGDSYYYGFYV

SEQ ID NO: 22013 - protein, 8 aa, Homo sapiens
  Light chain CDR3 for antibody 11007 (IGKV3-11)
QQRSNWLT

SEQ ID NO: 22014 - protein, 12 aa, Homo sapiens
  Heavy chain CDR3 for antibody 11007 (IGHV3-23)
AKEGLGSDYEPY

SEQ ID NO: 22015 - protein, 9 aa, Homo sapiens
  Light chain CDR3 for antibody 11008 (IGKV1-6)
LQDYNYPYT

SEQ ID NO: 22016 - protein, 14 aa, Homo sapiens
  Heavy chain CDR3 for antibody 11008 (IGHV3-20)
ARGRITMVRGVIDF

SEQ ID NO: 22017 - protein, 9 aa, Homo sapiens
  Light chain CDR3 for antibody 11009 (IGKV1-9)
QQLISYPLT

SEQ ID NO: 22018 - protein, 18 aa, Homo sapiens
  Heavy chain CDR3 for antibody 11009 (IGHV3-33)
VREGGYYGSGSYPDAFDI

SEQ ID NO: 22019 - protein, 9 aa, Homo sapiens
  Light chain CDR3 for antibody 11010 (IGKV1-9)
QQLYTYPYT

SEQ ID NO: 22020 - protein, 13 aa, Homo sapiens
  Heavy chain CDR3 for antibody 11010 (IGHV3-33)
ARDQRYSSGWYDY

SEQ ID NO: 22021 - protein, 6 aa, Homo sapiens
  Light chain CDR3 for antibody 11011 (IGKV3-20)
QQYGST

SEQ ID NO: 22022 - protein, 14 aa, Homo sapiens
  Heavy chain CDR3 for antibody 11011 (IGHV4-34)
ARDSGYDYYYGMDV

SEQ ID NO: 22023 - protein, 8 aa, Homo sapiens
  Light chain CDR3 for antibody 11012 (IGKV3-11)
QQRSNWWT

SEQ ID NO: 22024 - protein, 17 aa, Homo sapiens
  Heavy chain CDR3 for antibody 11012 (IGHV3-33)
AREGGLLWVGELSLFDY

SEQ ID NO: 22025 - protein, 7 aa, Homo sapiens
  Light chain CDR3 for antibody 11013 (IGKV1-17)
LQHNSYP

SEQ ID NO: 22026 - protein, 18 aa, Homo sapiens
  Heavy chain CDR3 for antibody 11013 (IGHV4-59)
ARERGNWNDVDYYYGMDV

SEQ ID NO: 22027 - protein, 9 aa, Homo sapiens
  Light chain CDR3 for antibody 11014 (IGKV1-9)
QQYNTYSRT

SEQ ID NO: 22028 - protein, 18 aa, Homo sapiens
  Heavy chain CDR3 for antibody 11014 (IGHV1-46)
ARDGDYVWGSYRSDWFDP

SEQ ID NO: 22029 - protein, 9 aa, Homo sapiens
  Light chain CDR3 for antibody 11015 (IGKV1-9)
QQLNSYPLT

SEQ ID NO: 22030 - protein, 13 aa, Homo sapiens
  Heavy chain CDR3 for antibody 11015 (IGHV4-59)
ARDAAYGCSCFDY

SEQ ID NO: 22031 - protein, 8 aa, Homo sapiens
  Light chain CDR3 for antibody 11016 (IGKV3-20)
QQYGSSLT

SEQ ID NO: 22032 - protein, 13 aa, Homo sapiens
  Heavy chain CDR3 for antibody 11016 (IGHV3-23)
AKDRGYSSTSTAY

SEQ ID NO: 22033 - protein, 9 aa, Homo sapiens
  Light chain CDR3 for antibody 11017 (IGKV4-1)
QQYYSYPLT

SEQ ID NO: 22034 - protein, 17 aa, Homo sapiens
  Heavy chain CDR3 for antibody 11017 (IGHV3-23)
ANGGFGESHYNYYGMDV

SEQ ID NO: 22035 - protein, 8 aa, Homo sapiens
  Light chain CDR3 for antibody 11018 (IGKV1D-13)
QQFNNYPT

SEQ ID NO: 22036 - protein, 20 aa, Homo sapiens
  Heavy chain CDR3 for antibody 11018 (IGHV3-33)
AREDYYGSGSYYPAYNWFDP

SEQ ID NO: 22037 - protein, 10 aa, Homo sapiens
  Light chain CDR3 for antibody 11019 (IGKV1-17)
LQHNSYPMYT

SEQ ID NO: 22038 - protein, 17 aa, Homo sapiens
  Heavy chain CDR3 for antibody 11019 (IGHV3-23)
AKDGIGELSYYYYCMDV

SEQ ID NO: 22039 - protein, 9 aa, Homo sapiens
  Light chain CDR3 for antibody 11020 (IGKV6-21)
HQSSSLPHT

SEQ ID NO: 22040 - protein, 19 aa, Homo sapiens
  Heavy chain CDR3 for antibody 11020 (IGHV3-33)
ATEGGIVGGTRYYYYGMDV

SEQ ID NO: 22041 - protein, 9 aa, Homo sapiens
  Light chain CDR3 for antibody 11021 (IGKV3-20)
QQYGTSPFP

SEQ ID NO: 22042 - protein, 20 aa, Homo sapiens
  Heavy chain CDR3 for antibody 11021 (IGHV3-33)
ARDRCSSTSCYGYYYYGMDV

SEQ ID NO: 22043 - protein, 9 aa, Homo sapiens
  Light chain CDR3 for antibody 11022 (IGKV6-21)
QQSSNLPHT

SEQ ID NO: 22044 - protein, 15 aa, Homo sapiens
  Heavy chain CDR3 for antibody 11022 (IGHV3-33)
ARDTGYSSSWNWFDP

SEQ ID NO: 22045 - protein, 9 aa, Homo sapiens
  Light chain CDR3 for antibody 11023 (IGKV1-27)
QKYNSAPYT

SEQ ID NO: 22046 - protein, 19 aa, Homo sapiens
  Heavy chain CDR3 for antibody 11023 (IGHV3-20)
ARDSAVAGRYYYYYYGMDV

SEQ ID NO: 22047 - protein, 9 aa, Homo sapiens
  Light chain CDR3 for antibody 11024 (IGKV3-15)
QQYNSYPRT

SEQ ID NO: 22048 - protein, 14 aa, Homo sapiens
  Heavy chain CDR3 for antibody 11024 (IGHV3-33)
AREMVRGVPNWFDP

SEQ ID NO: 22049 - protein, 9 aa, Homo sapiens
  Light chain CDR3 for antibody 11025 (IGKV6-21)
HQSSSLPST

SEQ ID NO: 22050 - protein, 18 aa, Homo sapiens
  Heavy chain CDR3 for antibody 11025 (IGHV3-33)
ARDPYSSGWYDYYFGMDV

SEQ ID NO: 22051 - protein, 9 aa, Homo sapiens
  Light chain CDR3 for antibody 11026 (IGKV1-9)
QQGNTYSRT

SEQ ID NO: 22052 - protein, 17 aa, Homo sapiens
  Heavy chain CDR3 for antibody 11026 (IGHV3-33)
ARGDGDILTGYYEWFDH

SEQ ID NO: 22053 - protein, 10 aa, Homo sapiens
  Light chain CDR3 for antibody 11027 (IGKV3-15)
QQYNNWPPYT

SEQ ID NO: 22054 - protein, 15 aa, Homo sapiens
  Heavy chain CDR3 for antibody 11027 (IGHV3-33)
ARDHLTGYYYYGMDV

SEQ ID NO: 22055 - protein, 9 aa, Homo sapiens
  Light chain CDR3 for antibody 11028 (IGKV1-6)
LQDFHYPWT

SEQ ID NO: 22056 - protein, 12 aa, Homo sapiens
  Heavy chain CDR3 for antibody 11028 (IGHV3-33)
ARDGYSSRNFDY

SEQ ID NO: 22057 - protein, 10 aa, Homo sapiens
  Light chain CDR3 for antibody 11029 (IGKV1-6)
QQLDSYPMYT

SEQ ID NO: 22058 - protein, 18 aa, Homo sapiens
  Heavy chain CDR3 for antibody 11029 (IGHV3-48)
ARGLLWFGVSYYYYGMDV

SEQ ID NO: 22059 - protein, 9 aa, Homo sapiens
  Light chain CDR3 for antibody 11030 (IGKV3-11)
QQRSDWPLT

SEQ ID NO: 22060 - protein, 19 aa, Homo sapiens
  Heavy chain CDR3 for antibody 11030 (IGHV5-51)
ARHGEKGKRITMVRGSLDV

SEQ ID NO: 22061 - protein, 8 aa, Homo sapiens
  Light chain CDR3 for antibody 11031 (IGKV1-5)
QQYNSYWT

SEQ ID NO: 22062 - protein, 13 aa, Homo sapiens
  Heavy chain CDR3 for antibody 11031 (IGHV1-24)
ATGYSINWYEFDY

SEQ ID NO: 22063 - protein, 9 aa, Homo sapiens
  Light chain CDR3 for antibody 11032 (IGKV5-2)
LQHDNFPYT

SEQ ID NO: 22064 - protein, 18 aa, Homo sapiens
  Heavy chain CDR3 for antibody 11032 (IGHV3-33)
ARDHYDILTGYYKGWFDP

SEQ ID NO: 22065 - protein, 9 aa, Homo sapiens
  Light chain CDR3 for antibody 11033 (IGKV1-27)
QKYNSAPYT

SEQ ID NO: 22066 - protein, 19 aa, Homo sapiens
  Heavy chain CDR3 for antibody 11033 (IGHV3-33)
ARDNDSSGYYDYYYYGMDV

SEQ ID NO: 22067 - protein, 9 aa, Homo sapiens
  Light chain CDR3 for antibody 11034 (IGKV2-30)
MQGTHWPLT

SEQ ID NO: 22068 - protein, 15 aa, Homo sapiens
  Heavy chain CDR3 for antibody 11034 (IGHV3-20)
AREGSSSWYLYYFDY

SEQ ID NO: 22069 - protein, 9 aa, Homo sapiens
  Light chain CDR3 for antibody 11035 (IGKV1-16)
QHYNDYPFT

SEQ ID NO: 22070 - protein, 16 aa, Homo sapiens
  Heavy chain CDR3 for antibody 11035 (IGHV3-33)
ARDKNTDYDILTGFDY

SEQ ID NO: 22071 - protein, 10 aa, Homo sapiens
  Light chain CDR3 for antibody 11036 (IGKV1-6)
LQDYNYPMYT

SEQ ID NO: 22072 - protein, 13 aa, Homo sapiens
  Heavy chain CDR3 for antibody 11036 (IGHV4-39)
ARQWPSGYWYFDL

SEQ ID NO: 22073 - protein, 9 aa, Homo sapiens
  Light chain CDR3 for antibody 11037 (IGKV1D-16)
LQDYNYMYA

SEQ ID NO: 22074 - protein, 18 aa, Homo sapiens
  Heavy chain CDR3 for antibody 11037 (IGHV1-46)
ARDGDYVWGSYRSNWFDP

SEQ ID NO: 22075 - protein, 9 aa, Homo sapiens
  Light chain CDR3 for antibody 11038 (IGKV1-6)
LQDYKHPFT

SEQ ID NO: 22076 - protein, 15 aa, Homo sapiens
  Heavy chain CDR3 for antibody 11038 (IGHV3-33)
ARGYYYGSGSFPFDY

SEQ ID NO: 22077 - protein, 11 aa, Homo sapiens
  Light chain CDR3 for antibody 11039 (IGKV3-11)
QQRSNWPPTWT

SEQ ID NO: 22078 - protein, 14 aa, Homo sapiens
  Heavy chain CDR3 for antibody 11039 (IGHV3-64)
ARDHAAGGYSHSDY

SEQ ID NO: 22079 - protein, 9 aa, Homo sapiens
  Light chain CDR3 for antibody 11040 (IGKV3D-7)
QQDYEFPIT

SEQ ID NO: 22080 - protein, 23 aa, Homo sapiens
  Heavy chain CDR3 for antibody 11040 (IGHV1-18)
ARNLHYDILTGYFPYYFYYGMDV

SEQ ID NO: 22081 - protein, 9 aa, Homo sapiens
  Light chain CDR3 for antibody 11041 (IGKV1-17)
LHSNNYPWT

SEQ ID NO: 22082 - protein, 10 aa, Homo sapiens
  Heavy chain CDR3 for antibody 11041 (IGHV3-30)
AREWYGGMDV

SEQ ID NO: 22083 - protein, 9 aa, Homo sapiens
  Light chain CDR3 for antibody 11042 (IGKV1-9)
QQLNSYPLT

SEQ ID NO: 22084 - protein, 13 aa, Homo sapiens
  Heavy chain CDR3 for antibody 11042 (IGHV3-30)
ARYSSSWYDACDI

SEQ ID NO: 22085 - protein, 9 aa, Homo sapiens
  Light chain CDR3 for antibody 11043 (IGKV1-9)
QQLNTYPWT

SEQ ID NO: 22086 - protein, 13 aa, Homo sapiens
  Heavy chain CDR3 for antibody 11043 (IGHV3-33)
VSTGDSYYYVMDV

SEQ ID NO: 22087 - protein, 8 aa, Homo sapiens
  Light chain CDR3 for antibody 11044 (IGKV3-20)
QQYGSSLT

SEQ ID NO: 22088 - protein, 18 aa, Homo sapiens
  Heavy chain CDR3 for antibody 11044 (IGHV3-33)
ARREGIVGATTYYYGMDV

SEQ ID NO: 22089 - protein, 9 aa, Homo sapiens
  Light chain CDR3 for antibody 11045 (IGKV1-39)
QQGFSTPWT

SEQ ID NO: 22090 - protein, 12 aa, Homo sapiens
  Heavy chain CDR3 for antibody 11045 (IGHV4-59)
ARDSGSYYYFDY

SEQ ID NO: 22091 - protein, 9 aa, Homo sapiens
  Light chain CDR3 for antibody 11046 (IGKV3-11)
QQRSNWPCT

SEQ ID NO: 22092 - protein, 19 aa, Homo sapiens
  Heavy chain CDR3 for antibody 11046 (IGHV3-33)
ARDSGYSGYDYYYYYGMDV

SEQ ID NO: 22093 - protein, 9 aa, Homo sapiens
  Light chain CDR3 for antibody 11047 (IGKV4-1)
QQYYSTPPT

SEQ ID NO: 22094 - protein, 13 aa, Homo sapiens
  Heavy chain CDR3 for antibody 11047 (IGHV3-66)
ARRATLVRGVFDP

SEQ ID NO: 22095 - protein, 9 aa, Homo sapiens
  Light chain CDR3 for antibody 11048 (IGKV1-27)
QKYNIAPYT

SEQ ID NO: 22096 - protein, 17 aa, Homo sapiens
  Heavy chain CDR3 for antibody 11048 (IGHV1-18)
ARERYYGSGIYKYAMDV

SEQ ID NO: 22097 - protein, 10 aa, Homo sapiens
  Light chain CDR3 for antibody 11049 (IGKV3-15)
QQYNKWPPYT

SEQ ID NO: 22098 - protein, 18 aa, Homo sapiens
  Heavy chain CDR3 for antibody 11049 (IGHV1-8)
AKDRITGTTYGYYSGLDV

SEQ ID NO: 22099 - protein, 9 aa, Homo sapiens
  Light chain CDR3 for antibody 11050 (IGKV1-17)
LHSNNYPWT

SEQ ID NO: 22100 - protein, 13 aa, Homo sapiens
  Heavy chain CDR3 for antibody 11050 (IGHV1-18)
ARAITMVRGVIDY

SEQ ID NO: 22101 - protein, 9 aa, Homo sapiens
  Light chain CDR3 for antibody 11051 (IGKV1-6)
LQDYNYPWT

SEQ ID NO: 22102 - protein, 14 aa, Homo sapiens
  Heavy chain CDR3 for antibody 11051 (IGHV3-33)
ARAYYDILTGYWGY

SEQ ID NO: 22103 - protein, 11 aa, Homo sapiens
  Light chain CDR3 for antibody 11052 (IGKV3D-20)
QQRSSWPPMYP

SEQ ID NO: 22104 - protein, 12 aa, Homo sapiens
  Heavy chain CDR3 for antibody 11052 (IGHV4-61)
ARVYSSGWLFDY

SEQ ID NO: 22105 - protein, 9 aa, Homo sapiens
  Light chain CDR3 for antibody 11053 (IGKV1-16)
QHYNDYPFT

SEQ ID NO: 22106 - protein, 16 aa, Homo sapiens
  Heavy chain CDR3 for antibody 11053 (IGHV3-33)
ARAVYYGSGSSLIMDV

SEQ ID NO: 22107 - protein, 9 aa, Homo sapiens
  Light chain CDR3 for antibody 11054 (IGKV1-9)
QQYNTYSRT

SEQ ID NO: 22108 - protein, 12 aa, Homo sapiens
  Heavy chain CDR3 for antibody 11054 (IGHV3-33)
TRGYSSKSYFDY

SEQ ID NO: 22109 - protein, 8 aa, Homo sapiens
  Light chain CDR3 for antibody 11055 (IGKV3-11)
QQRSNWWT

SEQ ID NO: 22110 - protein, 13 aa, Homo sapiens
  Heavy chain CDR3 for antibody 11055 (IGHV4-61)
ASRYSSGWYPFDY

SEQ ID NO: 22111 - protein, 8 aa, Homo sapiens
  Light chain CDR3 for antibody 11056 (IGKV3-20)
QQYGSSLT

SEQ ID NO: 22112 - protein, 12 aa, Homo sapiens
  Heavy chain CDR3 for antibody 11056 (IGHV3-23)
AKDGWFGESLDY

SEQ ID NO: 22113 - protein, 11 aa, Homo sapiens
  Light chain CDR3 for antibody 11057 (IGKV3-11)
QQRSNWPPTWT

SEQ ID NO: 22114 - protein, 15 aa, Homo sapiens
  Heavy chain CDR3 for antibody 11057 (IGHV3-33)
ARHSSGFYYYYGMDV

SEQ ID NO: 22115 - protein, 9 aa, Homo sapiens
  Light chain CDR3 for antibody 11058 (IGKV3-11)
QQRSNWPPT

SEQ ID NO: 22116 - protein, 14 aa, Homo sapiens
  Heavy chain CDR3 for antibody 11058 (IGHV3-30)
AKDDIVRATGAFDI

SEQ ID NO: 22117 - protein, 9 aa, Homo sapiens
  Light chain CDR3 for antibody 11059 (IGKV1-6)
QQYNSYPLT

SEQ ID NO: 22118 - protein, 15 aa, Homo sapiens
  Heavy chain CDR3 for antibody 11059 (IGHV3-33)
ATERAYGSGSSYCDY

SEQ ID NO: 22119 - protein, 8 aa, Homo sapiens
  Light chain CDR3 for antibody 11060 (IGKV6-21)
HQSSSLPT

SEQ ID NO: 22120 - protein, 11 aa, Homo sapiens
  Heavy chain CDR3 for antibody 11060 (IGHV3-33)
ARARYTTGLDY

SEQ ID NO: 22121 - protein, 9 aa, Homo sapiens
  Light chain CDR3 for antibody 11061 (IGKV1-17)
LQHNSFQLT

SEQ ID NO: 22122 - protein, 15 aa, Homo sapiens
  Heavy chain CDR3 for antibody 11061 (IGHV3-33)
ARDSRPEIIGPPFDY

SEQ ID NO: 22123 - protein, 9 aa, Homo sapiens
  Light chain CDR3 for antibody 11062 (IGKV1-39)
QQSYSTPLT

SEQ ID NO: 22124 - protein, 10 aa, Homo sapiens
  Heavy chain CDR3 for antibody 11062 (IGHV4-39)
ASSNWNDGPL

SEQ ID NO: 22125 - protein, 9 aa, Homo sapiens
  Light chain CDR3 for antibody 11063 (IGKV5-2)
LQHDKFPYT

SEQ ID NO: 22126 - protein, 14 aa, Homo sapiens
  Heavy chain CDR3 for antibody 11063 (IGHV3-20)
ARDEGSTWSDIFDI

SEQ ID NO: 22127 - protein, 9 aa, Homo sapiens
  Light chain CDR3 for antibody 11064 (IGKV2-30)
MQGTHWPLT

SEQ ID NO: 22128 - protein, 13 aa, Homo sapiens
  Heavy chain CDR3 for antibody 11064 (IGHV3-66)
ANTGDSYYYGFYV

SEQ ID NO: 22129 - protein, 9 aa, Homo sapiens
  Light chain CDR3 for antibody 11065 (IGKV1-9)
QQLISYPLT

SEQ ID NO: 22130 - protein, 14 aa, Homo sapiens
  Heavy chain CDR3 for antibody 11065 (IGHV3-33)
ARGAAAGNFYGLDV

SEQ ID NO: 22131 - protein, 9 aa, Homo sapiens
  Light chain CDR3 for antibody 11066 (IGKV3-11)
QQRSNWPPT

SEQ ID NO: 22132 - protein, 9 aa, Homo sapiens
  Heavy chain CDR3 for antibody 11066 (IGHV3-33)
AREYKEFDY

SEQ ID NO: 22133 - protein, 10 aa, Homo sapiens
  Light chain CDR3 for antibody 11067 (IGKV1-27)
QKYNSAPMYT

SEQ ID NO: 22134 - protein, 18 aa, Homo sapiens
  Heavy chain CDR3 for antibody 11067 (IGHV4-39)
ARQYYFGSGNYYRGWFDH

SEQ ID NO: 22135 - protein, 9 aa, Homo sapiens
  Light chain CDR3 for antibody 11068 (IGKV1-17)
LHSNNYPWT

SEQ ID NO: 22136 - protein, 12 aa, Homo sapiens
  Heavy chain CDR3 for antibody 11068 (IGHV3-33)
TRGYSSKSYFDY

SEQ ID NO: 22137 - protein, 9 aa, Homo sapiens
  Light chain CDR3 for antibody 11069 (IGKV1-6)
LQDFHYPPT

SEQ ID NO: 22138 - protein, 12 aa, Homo sapiens
  Heavy chain CDR3 for antibody 11069 (IGHV1-46)
ARGLIGDHAVDI

SEQ ID NO: 22139 - protein, 9 aa, Homo sapiens
  Light chain CDR3 for antibody 11070 (IGKV1D-16)
QQYNSYPFT

SEQ ID NO: 22140 - protein, 18 aa, Homo sapiens
  Heavy chain CDR3 for antibody 11070 (IGHV4-59)
AREMGHDILTGYSDAFEI

SEQ ID NO: 22141 - protein, 9 aa, Homo sapiens
  Light chain CDR3 for antibody 11071 (IGKV1-39)
QQSYSTPYT

SEQ ID NO: 22142 - protein, 14 aa, Homo sapiens
  Heavy chain CDR3 for antibody 11071 (IGHV1-18)
AKCDYDILTGILDY

SEQ ID NO: 22143 - protein, 9 aa, Homo sapiens
  Light chain CDR3 for antibody 11072 (IGKV1D-13)
QHFNNYMYT

SEQ ID NO: 22144 - protein, 17 aa, Homo sapiens
  Heavy chain CDR3 for antibody 11072 (IGHV4-34)
AGLRFFDWLFDYYGMDV

SEQ ID NO: 22145 - protein, 9 aa, Homo sapiens
  Light chain CDR3 for antibody 11073 (IGKV5-2)
LQHDKFPYT

SEQ ID NO: 22146 - protein, 16 aa, Homo sapiens
  Heavy chain CDR3 for antibody 11073 (IGHV3-48)
ARWFSRSSTGVSYMDV

SEQ ID NO: 22147 - protein, 9 aa, Homo sapiens
  Light chain CDR3 for antibody 11074 (IGKV1-9)
QQLNGYPFT

SEQ ID NO: 22148 - protein, 11 aa, Homo sapiens
  Heavy chain CDR3 for antibody 11074 (IGHV1-18)
SRGGFSVGYDS

SEQ ID NO: 22149 - protein, 8 aa, Homo sapiens
  Light chain CDR3 for antibody 11075 (IGKV1D-13)
QQFNNYPT

SEQ ID NO: 22150 - protein, 14 aa, Homo sapiens
  Heavy chain CDR3 for antibody 11075 (IGHV3-33)
VRDQGSMVRGGGDY

SEQ ID NO: 22151 - protein, 8 aa, Homo sapiens
  Light chain CDR3 for antibody 11076 (IGKV1D-13)
QQFNNYPT

SEQ ID NO: 22152 - protein, 11 aa, Homo sapiens
  Heavy chain CDR3 for antibody 11076 (IGHV3-33)
ARAGIAALFDY

SEQ ID NO: 22153 - protein, 10 aa, Homo sapiens
  Light chain CDR3 for antibody 11077 (IGKV3-15)
QQYNNWPPIT

SEQ ID NO: 22154 - protein, 18 aa, Homo sapiens
  Heavy chain CDR3 for antibody 11077 (IGHV3-33)
ARDRGDILTGYYKGWFDP

SEQ ID NO: 22155 - protein, 9 aa, Homo sapiens
  Light chain CDR3 for antibody 11078 (IGKV1-9)
QQLYTYPYT

SEQ ID NO: 22156 - protein, 14 aa, Homo sapiens
  Heavy chain CDR3 for antibody 11078 (IGHV3-33)
ARRGYSGYDWYFDY

SEQ ID NO: 22157 - protein, 9 aa, Homo sapiens
  Light chain CDR3 for antibody 11079 (IGKV1-39)
QQSYRTPLT

SEQ ID NO: 22158 - protein, 12 aa, Homo sapiens
  Heavy chain CDR3 for antibody 11079 (IGHV3-33)
ARKGYDMHAFDI

SEQ ID NO: 22159 - protein, 9 aa, Homo sapiens
  Light chain CDR3 for antibody 11080 (IGKV1-9)
QQLHIYPWT

SEQ ID NO: 22160 - protein, 12 aa, Homo sapiens
  Heavy chain CDR3 for antibody 11080 (IGHV3-33)
ARGYFGSGYAHF

SEQ ID NO: 22161 - protein, 10 aa, Homo sapiens
  Light chain CDR3 for antibody 11081 (IGKV3-11)
QQRSNWPPYT

SEQ ID NO: 22162 - protein, 17 aa, Homo sapiens
  Heavy chain CDR3 for antibody 11081 (IGHV3-33)
ARGDGDILTGYYEWFDP

SEQ ID NO: 22163 - protein, 9 aa, Homo sapiens
  Light chain CDR3 for antibody 11082 (IGKV3-11)
QQRSNWPPT

SEQ ID NO: 22164 - protein, 10 aa, Homo sapiens
  Heavy chain CDR3 for antibody 11082 (IGHV3-33)
AREGLRYFAH

SEQ ID NO: 22165 - protein, 9 aa, Homo sapiens
  Light chain CDR3 for antibody 11083 (IGKV1-33)
QQYDNLPFT

SEQ ID NO: 22166 - protein, 17 aa, Homo sapiens
  Heavy chain CDR3 for antibody 11083 (IGHV3-33)
VREGGLLWVGELSLFDY

SEQ ID NO: 22167 - protein, 10 aa, Homo sapiens
  Light chain CDR3 for antibody 11084 (IGKV3-11)
QQRSNWPILT

SEQ ID NO: 22168 - protein, 13 aa, Homo sapiens
  Heavy chain CDR3 for antibody 11084 (IGHV1-46)
ARRQVGYYYGMDV

SEQ ID NO: 22169 - protein, 9 aa, Homo sapiens
  Light chain CDR3 for antibody 11085 (IGKV3-11)
QQRSSWPPT

SEQ ID NO: 22170 - protein, 14 aa, Homo sapiens
  Heavy chain CDR3 for antibody 11085 (IGHV3-15)
SIYYYGSGRDFFDY

SEQ ID NO: 22171 - protein, 9 aa, Homo sapiens
  Light chain CDR3 for antibody 11086 (IGKV1-27)
QKYNSAPYT

SEQ ID NO: 22172 - protein, 17 aa, Homo sapiens
  Heavy chain CDR3 for antibody 11086 (IGHV1-8)
ARGDYYGSGSPYWYFDL

SEQ ID NO: 22173 - protein, 9 aa, Homo sapiens
  Light chain CDR3 for antibody 11087 (IGKV2-30)
MQGTHWPLT

SEQ ID NO: 22174 - protein, 19 aa, Homo sapiens
  Heavy chain CDR3 for antibody 11087 (IGHV3-30)
ARRFSGYSGYDHYYYGMDV

SEQ ID NO: 22175 - protein, 9 aa, Homo sapiens
  Light chain CDR3 for antibody 11088 (IGKV1-9)
QQLNSYPPL

SEQ ID NO: 22176 - protein, 20 aa, Homo sapiens
  Heavy chain CDR3 for antibody 11088 (IGHV3-30)
ARGGATMIRGLIDYYYGMDV

SEQ ID NO: 22177 - protein, 9 aa, Homo sapiens
  Light chain CDR3 for antibody 11089 (IGKV6-21)
HQSSSLPYT

SEQ ID NO: 22178 - protein, 12 aa, Homo sapiens
  Heavy chain CDR3 for antibody 11089 (IGHV1-46)
ARGLTGDHASAT

SEQ ID NO: 22179 - protein, 9 aa, Homo sapiens
  Light chain CDR3 for antibody 11090 (IGKV6-21)
HQSSSLPLT

SEQ ID NO: 22180 - protein, 11 aa, Homo sapiens
  Heavy chain CDR3 for antibody 11090 (IGHV4-39)
AREFDWSPFDY

SEQ ID NO: 22181 - protein, 9 aa, Homo sapiens
  Light chain CDR3 for antibody 11091 (IGKV1-9)
QQLKSYLYT

SEQ ID NO: 22182 - protein, 14 aa, Homo sapiens
  Heavy chain CDR3 for antibody 11091 (IGHV3-33)
ARDAYDILTGYYDY

SEQ ID NO: 22183 - protein, 9 aa, Homo sapiens
  Light chain CDR3 for antibody 11092 (IGKV3-20)
QQYGSSPYT

SEQ ID NO: 22184 - protein, 10 aa, Homo sapiens
  Heavy chain CDR3 for antibody 11092 (IGHV3-33)
ARKGMNAFDI

SEQ ID NO: 22185 - protein, 9 aa, Homo sapiens
  Light chain CDR3 for antibody 11093 (IGKV1-9)
QQLKSYLYT

SEQ ID NO: 22186 - protein, 18 aa, Homo sapiens
  Heavy chain CDR3 for antibody 11093 (IGHV1-24)
ATGLRYFDWPIISNLFDY

SEQ ID NO: 22187 - protein, 9 aa, Homo sapiens
  Light chain CDR3 for antibody 11094 (IGKV1-39)
QQSYSTPYT

SEQ ID NO: 22188 - protein, 10 aa, Homo sapiens
  Heavy chain CDR3 for antibody 11094 (IGHV3-33)
ARVVDTAMAY

SEQ ID NO: 22189 - protein, 9 aa, Homo sapiens
  Light chain CDR3 for antibody 11095 (IGKV1-17)
LQHNSYPWT

SEQ ID NO: 22190 - protein, 21 aa, Homo sapiens
  Heavy chain CDR3 for antibody 11095 (IGHV3-11)
ARGEALWFGELWGYYYYGMDV

SEQ ID NO: 22191 - protein, 9 aa, Homo sapiens
  Light chain CDR3 for antibody 11096 (IGKV5-2)
LQHDKFPYT

SEQ ID NO: 22192 - protein, 14 aa, Homo sapiens
  Heavy chain CDR3 for antibody 11096 (IGHV3-33)
ARDGVYISSSWFDP

SEQ ID NO: 22193 - protein, 9 aa, Homo sapiens
  Light chain CDR3 for antibody 11097 (IGKV1-9)
QQLNSYPRT

SEQ ID NO: 22194 - protein, 22 aa, Homo sapiens
  Heavy chain CDR3 for antibody 11097 (IGHV3-23)
TKDPGGIVAKIRDYQYFYGVDV

SEQ ID NO: 22195 - protein, 9 aa, Homo sapiens
  Light chain CDR3 for antibody 11098 (IGKV3-11)
QQRSNWPLT

SEQ ID NO: 22196 - protein, 18 aa, Homo sapiens
  Heavy chain CDR3 for antibody 11098 (IGHV1-24)
ATGLRYFDWPIISNLFDY

SEQ ID NO: 22197 - protein, 9 aa, Homo sapiens
  Light chain CDR3 for antibody 11099 (IGKV1-16)
QKYNSAPYT

SEQ ID NO: 22198 - protein, 11 aa, Homo sapiens
  Heavy chain CDR3 for antibody 11099 (IGHV3-33)
ARDRGYSYFDY

SEQ ID NO: 22199 - protein, 9 aa, Homo sapiens
  Light chain CDR3 for antibody 11100 (IGKV2D-28)
MQTLQTPWT

SEQ ID NO: 22200 - protein, 18 aa, Homo sapiens
  Heavy chain CDR3 for antibody 11100 (IGHV6-1)
ARDQYSYGPYYYYYGMDV

SEQ ID NO: 22201 - protein, 9 aa, Homo sapiens
  Light chain CDR3 for antibody 11101 (IGKV3-11)
QQRSNWPPT

SEQ ID NO: 22202 - protein, 14 aa, Homo sapiens
  Heavy chain CDR3 for antibody 11101 (IGHV3-33)
AREGYSSGWDYFDH

SEQ ID NO: 22203 - protein, 9 aa, Homo sapiens
  Light chain CDR3 for antibody 11102 (IGKV1-6)
LQDYKSPFT

SEQ ID NO: 22204 - protein, 17 aa, Homo sapiens
  Heavy chain CDR3 for antibody 11102 (IGHV3-23)
AKDGSFYSSGWYDAFDI

SEQ ID NO: 22205 - protein, 9 aa, Homo sapiens
  Light chain CDR3 for antibody 11103 (IGKV1-17)
LQHNSYPRT

SEQ ID NO: 22206 - protein, 14 aa, Homo sapiens
  Heavy chain CDR3 for antibody 11103 (IGHV1-8)
AREGGSGSSPGMDV

SEQ ID NO: 22207 - protein, 9 aa, Homo sapiens
  Light chain CDR3 for antibody 11104 (IGKV1D-13)
QRFNNYLYT

SEQ ID NO: 22208 - protein, 15 aa, Homo sapiens
  Heavy chain CDR3 for antibody 11104 (IGHV3-33)
VCVLYDYGDYVGFDY

SEQ ID NO: 22209 - protein, 8 aa, Homo sapiens
  Light chain CDR3 for antibody 11105 (IGKV1D-13)
QQFNNYPT

SEQ ID NO: 22210 - protein, 18 aa, Homo sapiens
  Heavy chain CDR3 for antibody 11105 (IGHV3-33)
VREGGYYGSGSYPDAFDI

SEQ ID NO: 22211 - protein, 9 aa, Homo sapiens
  Light chain CDR3 for antibody 11106 (IGKV1-39)
QQSYSTPYT

SEQ ID NO: 22212 - protein, 18 aa, Homo sapiens
  Heavy chain CDR3 for antibody 11106 (IGHV3-23)
AKERGYYGSGSYSNWFDP

SEQ ID NO: 22213 - protein, 8 aa, Homo sapiens
  Light chain CDR3 for antibody 11107 (IGKV3D-7)
QQDYNLLT

SEQ ID NO: 22214 - protein, 14 aa, Homo sapiens
  Heavy chain CDR3 for antibody 11107 (IGHV3-33)
VSAISGSSYWYFAL

SEQ ID NO: 22215 - protein, 9 aa, Homo sapiens
  Light chain CDR3 for antibody 11108 (IGKV1-39)
QQSYSTPLT

SEQ ID NO: 22216 - protein, 22 aa, Homo sapiens
  Heavy chain CDR3 for antibody 11108 (IGHV3-23)
AKDDLPYYDILTHSTTTGGMDV

SEQ ID NO: 22217 - protein, 9 aa, Homo sapiens
  Light chain CDR3 for antibody 11109 (IGKV1-9)
QQLHIYPWT

SEQ ID NO: 22218 - protein, 18 aa, Homo sapiens
  Heavy chain CDR3 for antibody 11109 (IGHV3-33)
ARDGDYVWGSYRSDWFDP

SEQ ID NO: 22219 - protein, 9 aa, Homo sapiens
  Light chain CDR3 for antibody 11110 (IGKV3-15)
QQYHNWPYT

SEQ ID NO: 22220 - protein, 14 aa, Homo sapiens
  Heavy chain CDR3 for antibody 11110 (IGHV3-20)
AREGWFGDYYGMDV

SEQ ID NO: 22221 - protein, 9 aa, Homo sapiens
  Light chain CDR3 for antibody 11111 (IGKV1-39)
QQSYSTPIT

SEQ ID NO: 22222 - protein, 13 aa, Homo sapiens
  Heavy chain CDR3 for antibody 11111 (IGHV4-39)
ARRDGGYYGYFDY

SEQ ID NO: 22223 - protein, 8 aa, Homo sapiens
  Light chain CDR3 for antibody 11112 (IGKV1-5)
QQYNSYYT

SEQ ID NO: 22224 - protein, 13 aa, Homo sapiens
  Heavy chain CDR3 for antibody 11112 (IGHV3-33)
ARDSSSWYHWFDP

SEQ ID NO: 22225 - protein, 10 aa, Homo sapiens
  Light chain CDR3 for antibody 11113 (IGKV3-11)
QQRSNWPIWT

SEQ ID NO: 22226 - protein, 14 aa, Homo sapiens
  Heavy chain CDR3 for antibody 11113 (IGHV3-33)
ARWELPFYYSGMDV

SEQ ID NO: 22227 - protein, 8 aa, Homo sapiens
  Light chain CDR3 for antibody 11114 (IGKV3-20)
QQYGSSFT

SEQ ID NO: 22228 - protein, 11 aa, Homo sapiens
  Heavy chain CDR3 for antibody 11114 (IGHV4-4)
AREAYYYGLDV

SEQ ID NO: 22229 - protein, 10 aa, Homo sapiens
  Light chain CDR3 for antibody 11115 (IGKV3-15)
QQYNNWPPYT

SEQ ID NO: 22230 - protein, 12 aa, Homo sapiens
  Heavy chain CDR3 for antibody 11115 (IGHV3-33)
ARDLVGATPFDY

SEQ ID NO: 22231 - protein, 9 aa, Homo sapiens
  Light chain CDR3 for antibody 11116 (IGKV1D-16)
QQYNSYPLT

SEQ ID NO: 22232 - protein, 6 aa, Homo sapiens
  Heavy chain CDR3 for antibody 11116 (IGHV3-33)
ARTTAA

SEQ ID NO: 22233 - protein, 9 aa, Homo sapiens
  Light chain CDR3 for antibody 11117 (IGKV3-11)
QQRINWPWT

SEQ ID NO: 22234 - protein, 15 aa, Homo sapiens
  Heavy chain CDR3 for antibody 11117 (IGHV4-59)
ARDIGYYGSGSPLDY

SEQ ID NO: 22235 - protein, 9 aa, Homo sapiens
  Light chain CDR3 for antibody 11118 (IGKV1-33)
QQYDNLPFT

SEQ ID NO: 22236 - protein, 17 aa, Homo sapiens
  Heavy chain CDR3 for antibody 11118 (IGHV3-30)
ARDGVGATSYYYYGMDV

SEQ ID NO: 22237 - protein, 9 aa, Homo sapiens
  Light chain CDR3 for antibody 11119 (IGKV1-6)
LQDYHYPWT

SEQ ID NO: 22238 - protein, 23 aa, Homo sapiens
  Heavy chain CDR3 for antibody 11119 (IGHV3-11)
ARDEGVTMLRGVISYYYYYGMDV

SEQ ID NO: 22239 - protein, 9 aa, Homo sapiens
  Light chain CDR3 for antibody 11120 (IGKV1-6)
LQDYKSPFT

SEQ ID NO: 22240 - protein, 14 aa, Homo sapiens
  Heavy chain CDR3 for antibody 11120 (IGHV3-33)
AREGYSSNWYDFDY

SEQ ID NO: 22241 - protein, 8 aa, Homo sapiens
  Light chain CDR3 for antibody 11121 (IGKV6-21)
HQSSSLPT

SEQ ID NO: 22242 - protein, 17 aa, Homo sapiens
  Heavy chain CDR3 for antibody 11121 (IGHV3-23)
AKEYCSGGSCYVYYFDY

SEQ ID NO: 22243 - protein, 9 aa, Homo sapiens
  Light chain CDR3 for antibody 11122 (IGKV2-30)
MQGTHWPLT

SEQ ID NO: 22244 - protein, 11 aa, Homo sapiens
  Heavy chain CDR3 for antibody 11122 (IGHV4-59)
TRDRGLGSFDY

SEQ ID NO: 22245 - protein, 9 aa, Homo sapiens
  Light chain CDR3 for antibody 11123 (IGKV1D-16)
QQYNSYPYT

SEQ ID NO: 22246 - protein, 19 aa, Homo sapiens
  Heavy chain CDR3 for antibody 11123 (IGHV5-51)
ARHGEKGKRTTMVRGSPDV

SEQ ID NO: 22247 - protein, 9 aa, Homo sapiens
  Light chain CDR3 for antibody 11124 (IGKV1-17)
LHSNNYPWT

SEQ ID NO: 22248 - protein, 10 aa, Homo sapiens
  Heavy chain CDR3 for antibody 11124 (IGHV3-33)
ARENSTPLDY

SEQ ID NO: 22249 - protein, 9 aa, Homo sapiens
  Light chain CDR3 for antibody 11125 (IGKV1-9)
QQGNTYSRT

SEQ ID NO: 22250 - protein, 13 aa, Homo sapiens
  Heavy chain CDR3 for antibody 11125 (IGHV3-33)
ARAFIMVRGVIDY

SEQ ID NO: 22251 - protein, 9 aa, Homo sapiens
  Light chain CDR3 for antibody 11126 (IGKV1D-13)
QRFNNYLYT

SEQ ID NO: 22252 - protein, 12 aa, Homo sapiens
  Heavy chain CDR3 for antibody 11126 (IGHV3-33)
ARVDAAAPYFDY

SEQ ID NO: 22253 - protein, 9 aa, Homo sapiens
  Light chain CDR3 for antibody 11127 (IGKV1-27)
QKYNSAPYT

SEQ ID NO: 22254 - protein, 13 aa, Homo sapiens
  Heavy chain CDR3 for antibody 11127 (IGHV4-39)
ARRDVLAPAAFDY

SEQ ID NO: 22255 - protein, 9 aa, Homo sapiens
  Light chain CDR3 for antibody 11128 (IGKV1-39)
QQGYRTPLT

SEQ ID NO: 22256 - protein, 17 aa, Homo sapiens
  Heavy chain CDR3 for antibody 11128 (IGHV4-34)
AGLRFFDWLFDYYGMDV

SEQ ID NO: 22257 - protein, 8 aa, Homo sapiens
  Light chain CDR3 for antibody 11129 (IGKV1D-13)
QQFNNYPT

SEQ ID NO: 22258 - protein, 19 aa, Homo sapiens
  Heavy chain CDR3 for antibody 11129 (IGHV3-33)
ARDRYYDILTGYYKGWFDP

SEQ ID NO: 22259 - protein, 9 aa, Homo sapiens
  Light chain CDR3 for antibody 11130 (IGKV1-6)
LQDYNSPWT

SEQ ID NO: 22260 - protein, 14 aa, Homo sapiens
  Heavy chain CDR3 for antibody 11130 (IGHV3-23)
AKSRIVGALYYFGY

SEQ ID NO: 22261 - protein, 9 aa, Homo sapiens
  Light chain CDR3 for antibody 11131 (IGKV6-21)
HQSSSLPYT

SEQ ID NO: 22262 - protein, 16 aa, Homo sapiens
  Heavy chain CDR3 for antibody 11131 (IGHV3-23)
AKEGMVLRYIDGFWDY

SEQ ID NO: 22263 - protein, 9 aa, Homo sapiens
  Light chain CDR3 for antibody 11132 (IGKV1-9)
QQGNTYSRT

SEQ ID NO: 22264 - protein, 22 aa, Homo sapiens
  Heavy chain CDR3 for antibody 11132 (IGHV4-59)
AREINYGSGSYYNEDYYYGMDV

SEQ ID NO: 22265 - protein, 9 aa, Homo sapiens
  Light chain CDR3 for antibody 11133 (IGKV1-39)
QQSHSTPYT

SEQ ID NO: 22266 - protein, 13 aa, Homo sapiens
  Heavy chain CDR3 for antibody 11133 (IGHV4-39)
ARVPLTDFYYFDY

SEQ ID NO: 22267 - protein, 9 aa, Homo sapiens
  Light chain CDR3 for antibody 11134 (IGKV1-39)
QQSYSTPYA

SEQ ID NO: 22268 - protein, 16 aa, Homo sapiens
  Heavy chain CDR3 for antibody 11134 (IGHV1-24)
ATEDSSSTYYYYGLDV

SEQ ID NO: 22269 - protein, 10 aa, Homo sapiens
  Light chain CDR3 for antibody 11135 (IGKV1-39)
QQSYSSPMYT

SEQ ID NO: 22270 - protein, 14 aa, Homo sapiens
  Heavy chain CDR3 for antibody 11135 (IGHV3-33)
ARKGYSGRYYYFDY

SEQ ID NO: 22271 - protein, 9 aa, Homo sapiens
  Light chain CDR3 for antibody 11136 (IGKV1D-16)
QQYNSYPYT

SEQ ID NO: 22272 - protein, 16 aa, Homo sapiens
  Heavy chain CDR3 for antibody 11136 (IGHV3-15)
AADLGDHADAYATLDN

SEQ ID NO: 22273 - protein, 9 aa, Homo sapiens
  Light chain CDR3 for antibody 11137 (IGKV1D-16)
QQYNSYPYT

SEQ ID NO: 22274 - protein, 9 aa, Homo sapiens
  Heavy chain CDR3 for antibody 11137 (IGHV4-34)
ARDLYYFDY

SEQ ID NO: 22275 - protein, 9 aa, Homo sapiens
  Light chain CDR3 for antibody 11138 (IGKV1-39)
QQSYSTPYT

SEQ ID NO: 22276 - protein, 15 aa, Homo sapiens
  Heavy chain CDR3 for antibody 11138 (IGHV1-18)
ARSITMVRGVPPFDY

SEQ ID NO: 22277 - protein, 9 aa, Homo sapiens
  Light chain CDR3 for antibody 11139 (IGKV1-6)
LQDYNYPYT

SEQ ID NO: 22278 - protein, 16 aa, Homo sapiens
  Heavy chain CDR3 for antibody 11139 (IGHV3-33)
ARGYFGSGSSSRWVDP

SEQ ID NO: 22279 - protein, 9 aa, Homo sapiens
  Light chain CDR3 for antibody 11140 (IGKV3D-15)
QQYNNWPIT

SEQ ID NO: 22280 - protein, 16 aa, Homo sapiens
  Heavy chain CDR3 for antibody 11140 (IGHV3-33)
ARGDDILTHQYYGVDV

SEQ ID NO: 22281 - protein, 9 aa, Homo sapiens
  Light chain CDR3 for antibody 11141 (IGKV1-37)
QRTYNAPFT

SEQ ID NO: 22282 - protein, 18 aa, Homo sapiens
  Heavy chain CDR3 for antibody 11141 (IGHV3-33)
ARAYYDILTGYYRTGMDV

SEQ ID NO: 22283 - protein, 9 aa, Homo sapiens
  Light chain CDR3 for antibody 11142 (IGKV3-11)
QQRSNWMYT

SEQ ID NO: 22284 - protein, 15 aa, Homo sapiens
  Heavy chain CDR3 for antibody 11142 (IGHV3-33)
ARRICSGGSCSLLDY

SEQ ID NO: 22285 - protein, 7 aa, Homo sapiens
  Light chain CDR3 for antibody 11143 (IGKV1-17)
LQHNSYP

SEQ ID NO: 22286 - protein, 17 aa, Homo sapiens
  Heavy chain CDR3 for antibody 11143 (IGHV4-59)
ARDFLVRGEGSYYGMDV

SEQ ID NO: 22287 - protein, 7 aa, Homo sapiens
  Light chain CDR3 for antibody 11144 (IGKV3-11)
QQRSKFT

SEQ ID NO: 22288 - protein, 18 aa, Homo sapiens
  Heavy chain CDR3 for antibody 11144 (IGHV1-18)
ARDRYYYDSGSYYYGMDV

SEQ ID NO: 22289 - protein, 9 aa, Homo sapiens
  Light chain CDR3 for antibody 11145 (IGKV3-11)
QQRSNWPPT

SEQ ID NO: 22290 - protein, 16 aa, Homo sapiens
  Heavy chain CDR3 for antibody 11145 (IGHV3-33)
ARGGLTGGGDYDAFDI

SEQ ID NO: 22291 - protein, 10 aa, Homo sapiens
  Light chain CDR3 for antibody 11146 (IGKV1-17)
LQHNSYPMYT

SEQ ID NO: 22292 - protein, 18 aa, Homo sapiens
  Heavy chain CDR3 for antibody 11146 (IGHV3-33)
AREGSYYGSGSFPNWFDP

SEQ ID NO: 22293 - protein, 9 aa, Homo sapiens
  Light chain CDR3 for antibody 11147 (IGKV5-2)
LQHDKFPYT

SEQ ID NO: 22294 - protein, 14 aa, Homo sapiens
  Heavy chain CDR3 for antibody 11147 (IGHV3-20)
ARDRGSSGHDAFDI

SEQ ID NO: 22295 - protein, 9 aa, Homo sapiens
  Light chain CDR3 for antibody 11148 (IGKV1-17)
LQHTSYPFT

SEQ ID NO: 22296 - protein, 17 aa, Homo sapiens
  Heavy chain CDR3 for antibody 11148 (IGHV1-2)
ARDEGYDILTGYPHFDY

SEQ ID NO: 22297 - protein, 9 aa, Homo sapiens
  Light chain CDR3 for antibody 11149 (IGKV1-9)
QQFNSYTRT

SEQ ID NO: 22298 - protein, 16 aa, Homo sapiens
  Heavy chain CDR3 for antibody 11149 (IGHV3-23)
AKEGMVLRYFDWLWDY

SEQ ID NO: 22299 - protein, 9 aa, Homo sapiens
  Light chain CDR3 for antibody 11150 (IGKV3-11)
QQRSNWPWT

SEQ ID NO: 22300 - protein, 14 aa, Homo sapiens
  Heavy chain CDR3 for antibody 11150 (IGHV3-33)
ARDAMGTPTAWFDP

SEQ ID NO: 22301 - protein, 10 aa, Homo sapiens
  Light chain CDR3 for antibody 11151 (IGKV3-11)
QQRSTWPTLI

SEQ ID NO: 22302 - protein, 13 aa, Homo sapiens
  Heavy chain CDR3 for antibody 11151 (IGHV3-23)
ASPFNWNDGFFDY

SEQ ID NO: 22303 - protein, 9 aa, Homo sapiens
  Light chain CDR3 for antibody 11152 (IGKV1-9)
QQYNTYSRT

SEQ ID NO: 22304 - protein, 20 aa, Homo sapiens
  Heavy chain CDR3 for antibody 11152 (IGHV3-23)
AKDREMAATSHYYYYYGMDV

SEQ ID NO: 22305 - protein, 9 aa, Homo sapiens
  Light chain CDR3 for antibody 11153 (IGKV1-16)
QHYNDYPFT

SEQ ID NO: 22306 - protein, 18 aa, Homo sapiens
  Heavy chain CDR3 for antibody 11153 (IGHV3-30)
ARDRHHDILTGYSDAFEI

SEQ ID NO: 22307 - protein, 11 aa, Homo sapiens
  Light chain CDR3 for antibody 11154 (IGKV3-11)
QQRSNWPPMYT

SEQ ID NO: 22308 - protein, 15 aa, Homo sapiens
  Heavy chain CDR3 for antibody 11154 (IGHV4-39)
ARDTGYSSSWNWFDP

SEQ ID NO: 22309 - protein, 8 aa, Homo sapiens
  Light chain CDR3 for antibody 11155 (IGKV6-21)
HQSSSLPT

SEQ ID NO: 22310 - protein, 16 aa, Homo sapiens
  Heavy chain CDR3 for antibody 11155 (IGHV1-8)
AREGTMVRGVTYAFDI

SEQ ID NO: 22311 - protein, 9 aa, Homo sapiens
  Light chain CDR3 for antibody 11156 (IGKV5-2)
LQRDKFPYT

SEQ ID NO: 22312 - protein, 20 aa, Homo sapiens
  Heavy chain CDR3 for antibody 11156 (IGHV3-33)
AREDYYGSGSYYPAYNWFDP

SEQ ID NO: 22313 - protein, 9 aa, Homo sapiens
  Light chain CDR3 for antibody 11157 (IGKV1-17)
QQYNSYPYT

SEQ ID NO: 22314 - protein, 17 aa, Homo sapiens
  Heavy chain CDR3 for antibody 11157 (IGHV4-59)
ARRTTMVREIIVTHFDY

SEQ ID NO: 22315 - protein, 9 aa, Homo sapiens
  Light chain CDR3 for antibody 11158 (IGKV6-21)
HQSSSLPYT

SEQ ID NO: 22316 - protein, 16 aa, Homo sapiens
  Heavy chain CDR3 for antibody 11158 (IGHV4-59)
AREGYNWNDGVNWFDP

SEQ ID NO: 22317 - protein, 9 aa, Homo sapiens
  Light chain CDR3 for antibody 11159 (IGKV1-33)
QQYDNLPFT

SEQ ID NO: 22318 - protein, 9 aa, Homo sapiens
  Heavy chain CDR3 for antibody 11159 (IGHV4-59)
ARGGASFDY

SEQ ID NO: 22319 - protein, 9 aa, Homo sapiens
  Light chain CDR3 for antibody 11160 (IGKV1-17)
QQLKSYLYT

SEQ ID NO: 22320 - protein, 13 aa, Homo sapiens
  Heavy chain CDR3 for antibody 11160 (IGHV4-59)
ARTMVRGVAPFDY

SEQ ID NO: 22321 - protein, 9 aa, Homo sapiens
  Light chain CDR3 for antibody 11161 (IGKV1D-13)
QQFNNYPHT

SEQ ID NO: 22322 - protein, 13 aa, Homo sapiens
  Heavy chain CDR3 for antibody 11161 (IGHV3-23)
AKERLRYFDWLAY

SEQ ID NO: 22323 - protein, 9 aa, Homo sapiens
  Light chain CDR3 for antibody 11162 (IGKV3D-7)
QQDYTLPLT

SEQ ID NO: 22324 - protein, 15 aa, Homo sapiens
  Heavy chain CDR3 for antibody 11162 (IGHV3-23)
AKDGFYYGSGSSFDH

SEQ ID NO: 22325 - protein, 10 aa, Homo sapiens
  Light chain CDR3 for antibody 11163 (IGKV3-11)
QQRSNWPIFT

SEQ ID NO: 22326 - protein, 12 aa, Homo sapiens
  Heavy chain CDR3 for antibody 11163 (IGHV4-39)
ARREVILGAFDY

SEQ ID NO: 22327 - protein, 9 aa, Homo sapiens
  Light chain CDR3 for antibody 11164 (IGKV1D-13)
QHFNNYMYT

SEQ ID NO: 22328 - protein, 18 aa, Homo sapiens
  Heavy chain CDR3 for antibody 11164 (IGHV4-39)
ARQYYFGSGNYYRGWFDP

SEQ ID NO: 22329 - protein, 9 aa, Homo sapiens
  Light chain CDR3 for antibody 11165 (IGKV6-21)
HQSISLPHT

SEQ ID NO: 22330 - protein, 12 aa, Homo sapiens
  Heavy chain CDR3 for antibody 11165 (IGHV3-33)
TRGYSSKSYFDC

SEQ ID NO: 22331 - protein, 9 aa, Homo sapiens
  Light chain CDR3 for antibody 11166 (IGKV2-30)
MQGTHWPLT

SEQ ID NO: 22332 - protein, 14 aa, Homo sapiens
  Heavy chain CDR3 for antibody 11166 (IGHV4-59)
AKGGSGSYYNWFDP

SEQ ID NO: 22333 - protein, 9 aa, Homo sapiens
  Light chain CDR3 for antibody 11167 (IGKV1D-16)
QQYNSYPYT

SEQ ID NO: 22334 - protein, 12 aa, Homo sapiens
  Heavy chain CDR3 for antibody 11167 (IGHV3-33)
AREGVMGYSGSY

SEQ ID NO: 22335 - protein, 8 aa, Homo sapiens
  Light chain CDR3 for antibody 11168 (IGKV6-21)
HQSSSLPT

SEQ ID NO: 22336 - protein, 13 aa, Homo sapiens
  Heavy chain CDR3 for antibody 11168 (IGHV4-39)
ARREVVGGRGFDY

SEQ ID NO: 22337 - protein, 9 aa, Homo sapiens
  Light chain CDR3 for antibody 11169 (IGKV5-2)
LQHDNFPYT

SEQ ID NO: 22338 - protein, 12 aa, Homo sapiens
  Heavy chain CDR3 for antibody 11169 (IGHV3-11)
VRVLLWFGESDY

SEQ ID NO: 22339 - protein, 9 aa, Homo sapiens
  Light chain CDR3 for antibody 11170 (IGKV1-17)
LQDFHYPWT

SEQ ID NO: 22340 - protein, 8 aa, Homo sapiens
  Heavy chain CDR3 for antibody 11170 (IGHV3-23)
AKETGNNY

SEQ ID NO: 22341 - protein, 9 aa, Homo sapiens
  Light chain CDR3 for antibody 11171 (IGKV3D-7)
QQDYEFPLT

SEQ ID NO: 22342 - protein, 20 aa, Homo sapiens
  Heavy chain CDR3 for antibody 11171 (IGHV3-33)
ARDPAQLERRYYYFYYGMDV

SEQ ID NO: 22343 - protein, 8 aa, Homo sapiens
  Light chain CDR3 for antibody 11172 (IGKV1-13)
QQFNTYYT

SEQ ID NO: 22344 - protein, 24 aa, Homo sapiens
  Heavy chain CDR3 for antibody 11172 (IGHV3-20)
ARGRITMVRGVIINPLDYYNGMDV

SEQ ID NO: 22345 - protein, 9 aa, Homo sapiens
  Light chain CDR3 for antibody 11173 (IGKV5-2)
LQHDKFPYT

SEQ ID NO: 22346 - protein, 7 aa, Homo sapiens
  Heavy chain CDR3 for antibody 11173 (IGHV3-33)
ARELFDS

SEQ ID NO: 22347 - protein, 9 aa, Homo sapiens
  Light chain CDR3 for antibody 11174 (IGKV1-9)
QQLNNYLFT

SEQ ID NO: 22348 - protein, 13 aa, Homo sapiens
  Heavy chain CDR3 for antibody 11174 (IGHV3-33)
ARSGSYWGYYFDY

SEQ ID NO: 22349 - protein, 9 aa, Homo sapiens
  Light chain CDR3 for antibody 11175 (IGKV1-9)
QQLHSYPYT

SEQ ID NO: 22350 - protein, 18 aa, Homo sapiens
  Heavy chain CDR3 for antibody 11175 (IGHV3-33)
AREGYDILTGYYTVKFDY

SEQ ID NO: 22351 - protein, 9 aa, Homo sapiens
  Light chain CDR3 for antibody 11176 (IGKV3D-7)
QQDYEFALT

SEQ ID NO: 22352 - protein, 12 aa, Homo sapiens
  Heavy chain CDR3 for antibody 11176 (IGHV3-13)
ARDRGYSGYFDY

SEQ ID NO: 22353 - protein, 9 aa, Homo sapiens
  Light chain CDR3 for antibody 11177 (IGKV1D-16)
QQYITYPYT

SEQ ID NO: 22354 - protein, 13 aa, Homo sapiens
  Heavy chain CDR3 for antibody 11177 (IGHV3-64)
ARERYYGSGYAHF

SEQ ID NO: 22355 - protein, 9 aa, Homo sapiens
  Light chain CDR3 for antibody 11178 (IGKV1-17)
LQQNSYPWT

SEQ ID NO: 22356 - protein, 11 aa, Homo sapiens
  Heavy chain CDR3 for antibody 11178 (IGHV3-33)
ARLSGEGHFDS

SEQ ID NO: 22357 - protein, 9 aa, Homo sapiens
  Light chain CDR3 for antibody 11179 (IGKV3D-7)
QQDYKLPLT

SEQ ID NO: 22358 - protein, 15 aa, Homo sapiens
  Heavy chain CDR3 for antibody 11179 (IGHV3-33)
ARHSSGFYYYYGMDV

SEQ ID NO: 22359 - protein, 9 aa, Homo sapiens
  Light chain CDR3 for antibody 11180 (IGKV3D-20)
QQHGNSPLT

SEQ ID NO: 22360 - protein, 18 aa, Homo sapiens
  Heavy chain CDR3 for antibody 11180 (IGHV4-59)
AREGHYYTSGSYYKAFDY

SEQ ID NO: 22361 - protein, 9 aa, Homo sapiens
  Light chain CDR3 for antibody 11181 (IGKV1-9)
QQLNNYLFT

SEQ ID NO: 22362 - protein, 18 aa, Homo sapiens
  Heavy chain CDR3 for antibody 11181 (IGHV4-59)
AREGHYYTSGSYYKAFDY

SEQ ID NO: 22363 - protein, 9 aa, Homo sapiens
  Light chain CDR3 for antibody 11182 (IGKV1D-16)
QQYHSYPYT

SEQ ID NO: 22364 - protein, 17 aa, Homo sapiens
  Heavy chain CDR3 for antibody 11182 (IGHV4-34)
VRDGSGSYTHYYYGMDV

SEQ ID NO: 22365 - protein, 9 aa, Homo sapiens
  Light chain CDR3 for antibody 11183 (IGKV1-16)
QHYNDYPFT

SEQ ID NO: 22366 - protein, 12 aa, Homo sapiens
  Heavy chain CDR3 for antibody 11183 (IGHV3-33)
AREGTRWVYFDY

SEQ ID NO: 22367 - protein, 9 aa, Homo sapiens
  Light chain CDR3 for antibody 11184 (IGKV1D-16)
QQYHSYPYT

SEQ ID NO: 22368 - protein, 10 aa, Homo sapiens
  Heavy chain CDR3 for antibody 11184 (IGHV3-23)
ATIVGPFLDV

SEQ ID NO: 22369 - protein, 9 aa, Homo sapiens
  Light chain CDR3 for antibody 11185 (IGKV3-20)
QQCYSSPFT

SEQ ID NO: 22370 - protein, 18 aa, Homo sapiens
  Heavy chain CDR3 for antibody 11185 (IGHV1-46)
ARDGDYVWGSYRSDWFDP

SEQ ID NO: 22371 - protein, 10 aa, Homo sapiens
  Light chain CDR3 for antibody 11186 (IGKV3-15)
QQYNNWPPIT

SEQ ID NO: 22372 - protein, 12 aa, Homo sapiens
  Heavy chain CDR3 for antibody 11186 (IGHV3-33)
ARDPGYYYGLDV

SEQ ID NO: 22373 - protein, 9 aa, Homo sapiens
  Light chain CDR3 for antibody 11187 (IGKV3-20)
QQYSSSPIT

SEQ ID NO: 22374 - protein, 16 aa, Homo sapiens
  Heavy chain CDR3 for antibody 11187 (IGHV4-59)
ARQLLWFGELKGVFDY

SEQ ID NO: 22375 - protein, 9 aa, Homo sapiens
  Light chain CDR3 for antibody 11188 (IGKV5-2)
LQHDNFPYT

SEQ ID NO: 22376 - protein, 14 aa, Homo sapiens
  Heavy chain CDR3 for antibody 11188 (IGHV3-33)
ARDAMGTSTAWFDP

SEQ ID NO: 22377 - protein, 8 aa, Homo sapiens
  Light chain CDR3 for antibody 11189 (IGKV3D-7)
QQDYNLLT

SEQ ID NO: 22378 - protein, 19 aa, Homo sapiens
  Heavy chain CDR3 for antibody 11189 (IGHV3-33)
ARGGVVRGVIEYYYYGMDV

SEQ ID NO: 22379 - protein, 9 aa, Homo sapiens
  Light chain CDR3 for antibody 11190 (IGKV1-9)
QQLNGYPFT

SEQ ID NO: 22380 - protein, 11 aa, Homo sapiens
  Heavy chain CDR3 for antibody 11190 (IGHV3-23)
AKEGTYFDIPH

SEQ ID NO: 22381 - protein, 9 aa, Homo sapiens
  Light chain CDR3 for antibody 11191 (IGKV1-17)
QQYHSYPYT

SEQ ID NO: 22382 - protein, 11 aa, Homo sapiens
  Heavy chain CDR3 for antibody 11191 (IGHV3-33)
ARDRSSGPFDH

SEQ ID NO: 22383 - protein, 9 aa, Homo sapiens
  Light chain CDR3 for antibody 11192 (IGKV3-11)
QQRSDWPLT

SEQ ID NO: 22384 - protein, 12 aa, Homo sapiens
  Heavy chain CDR3 for antibody 11192 (IGHV3-33)
TRGYSSKSYFDY

SEQ ID NO: 22385 - protein, 10 aa, Homo sapiens
  Light chain CDR3 for antibody 11193 (IGKV3-20)
QQYGRSPPVT

SEQ ID NO: 22386 - protein, 17 aa, Homo sapiens
  Heavy chain CDR3 for antibody 11193 (IGHV3-23)
AKDYDILTGYSHNWFDP

SEQ ID NO: 22387 - protein, 9 aa, Homo sapiens
  Light chain CDR3 for antibody 11194 (IGKV1-6)
QQFNNYMYT

SEQ ID NO: 22388 - protein, 13 aa, Homo sapiens
  Heavy chain CDR3 for antibody 11194 (IGHV3-33)
ARDQRYSSGWYDY

SEQ ID NO: 22389 - protein, 9 aa, Homo sapiens
  Light chain CDR3 for antibody 11195 (IGKV1-9)
QQLKSYLYT

SEQ ID NO: 22390 - protein, 14 aa, Homo sapiens
  Heavy chain CDR3 for antibody 11195 (IGHV3-33)
ARDRIAAASSDFDC

SEQ ID NO: 22391 - protein, 8 aa, Homo sapiens
  Light chain CDR3 for antibody 11196 (IGKV1D-13)
QQFNNYPT

SEQ ID NO: 22392 - protein, 12 aa, Homo sapiens
  Heavy chain CDR3 for antibody 11196 (IGHV3-33)
ARKAYALYVLDV

SEQ ID NO: 22393 - protein, 10 aa, Homo sapiens
  Light chain CDR3 for antibody 11197 (IGKV3-11)
QQRSNWLMYT

SEQ ID NO: 22394 - protein, 21 aa, Homo sapiens
  Heavy chain CDR3 for antibody 11197 (IGHV3-23)
AKDIDYYGSGSYPLYYYGMDV

SEQ ID NO: 22395 - protein, 9 aa, Homo sapiens
  Light chain CDR3 for antibody 11198 (IGKV5-2)
LQHDNFPWT

SEQ ID NO: 22396 - protein, 16 aa, Homo sapiens
  Heavy chain CDR3 for antibody 11198 (IGHV1-46)
ARGGGYSGSYSNWFDP

SEQ ID NO: 22397 - protein, 9 aa, Homo sapiens
  Light chain CDR3 for antibody 11199 (IGKV1-9)
QQLNRYPYT

SEQ ID NO: 22398 - protein, 23 aa, Homo sapiens
  Heavy chain CDR3 for antibody 11199 (IGHV3-11)
ARDEGVTMVRGVISYYYYYGMDV

SEQ ID NO: 22399 - protein, 9 aa, Homo sapiens
  Light chain CDR3 for antibody 11200 (IGKV1-9)
QQLNSYPNT

SEQ ID NO: 22400 - protein, 13 aa, Homo sapiens
  Heavy chain CDR3 for antibody 11200 (IGHV4-39)
ARRGVLAPAAFDH

SEQ ID NO: 22401 - protein, 9 aa, Homo sapiens
  Light chain CDR3 for antibody 11201 (IGKV1-6)
LQDYNYPYT

SEQ ID NO: 22402 - protein, 12 aa, Homo sapiens
  Heavy chain CDR3 for antibody 11201 (IGHV1-46)
TFSRSGGGCVDY

SEQ ID NO: 22403 - protein, 11 aa, Homo sapiens
  Light chain CDR3 for antibody 11202 (IGKV3-11)
QQRSNWPPTWT

SEQ ID NO: 22404 - protein, 15 aa, Homo sapiens
  Heavy chain CDR3 for antibody 11202 (IGHV3-23)
AKDGSYYDYYYGMDV

SEQ ID NO: 22405 - protein, 9 aa, Homo sapiens
  Light chain CDR3 for antibody 11203 (IGKV1-39)
QQGFSTPWT

SEQ ID NO: 22406 - protein, 14 aa, Homo sapiens
  Heavy chain CDR3 for antibody 11203 (IGHV4-39)
ARRGVLVPPGGMDV

SEQ ID NO: 22407 - protein, 9 aa, Homo sapiens
  Light chain CDR3 for antibody 11204 (IGKV1-6)
LQDYNYPLT

SEQ ID NO: 22408 - protein, 14 aa, Homo sapiens
  Heavy chain CDR3 for antibody 11204 (IGHV3-33)
ARDRGDILTGYLDY

SEQ ID NO: 22409 - protein, 8 aa, Homo sapiens
  Light chain CDR3 for antibody 11205 (IGKV3-20)
QQYGSSLT

SEQ ID NO: 22410 - protein, 14 aa, Homo sapiens
  Heavy chain CDR3 for antibody 11205 (IGHV1-46)
ARDGVGAKEGGFDY

SEQ ID NO: 22411 - protein, 10 aa, Homo sapiens
  Light chain CDR3 for antibody 11206 (IGKV3-20)
QQYGSSPPYT

SEQ ID NO: 22412 - protein, 19 aa, Homo sapiens
  Heavy chain CDR3 for antibody 11206 (IGHV3-21)
ARGRGSYYYGPGSHYGMDV

SEQ ID NO: 22413 - protein, 9 aa, Homo sapiens
  Light chain CDR3 for antibody 11207 (IGKV1-27)
QKYNSAPYT

SEQ ID NO: 22414 - protein, 9 aa, Homo sapiens
  Heavy chain CDR3 for antibody 11207 (IGHV3-30)
ARGRVSLDV

SEQ ID NO: 22415 - protein, 10 aa, Homo sapiens
  Light chain CDR3 for antibody 11208 (IGKV1-39)
QQSYSTPMYT

SEQ ID NO: 22416 - protein, 11 aa, Homo sapiens
  Heavy chain CDR3 for antibody 11208 (IGHV3-33)
ARGSGSYAFDS

SEQ ID NO: 22417 - protein, 11 aa, Homo sapiens
  Light chain CDR3 for antibody 11209 (IGKV3-11)
QQRSNWPPTWT

SEQ ID NO: 22418 - protein, 24 aa, Homo sapiens
  Heavy chain CDR3 for antibody 11209 (IGHV1-46)
ARDEARGLLTGYYNMREYYYGMDV

SEQ ID NO: 22419 - protein, 9 aa, Homo sapiens
  Light chain CDR3 for antibody 11210 (IGKV1-39)
QQSYSTPLT

SEQ ID NO: 22420 - protein, 11 aa, Homo sapiens
  Heavy chain CDR3 for antibody 11210 (IGHV3-23)
ATREYSSSCDY

SEQ ID NO: 22421 - protein, 8 aa, Homo sapiens
  Light chain CDR3 for antibody 11211 (IGKV1-5)
QQYNSYYT

SEQ ID NO: 22422 - protein, 19 aa, Homo sapiens
  Heavy chain CDR3 for antibody 11211 (IGHV3-33)
ARGVRLRYFEPYYYYGMDV

SEQ ID NO: 22423 - protein, 9 aa, Homo sapiens
  Light chain CDR3 for antibody 11212 (IGKV3-20)
QQYGSSPRT

SEQ ID NO: 22424 - protein, 16 aa, Homo sapiens
  Heavy chain CDR3 for antibody 11212 (IGHV1-24)
ATEESSSYYYYYAMDI

SEQ ID NO: 22425 - protein, 9 aa, Homo sapiens
  Light chain CDR3 for antibody 11213 (IGKV3D-7)
QQDYTLPYT

SEQ ID NO: 22426 - protein, 17 aa, Homo sapiens
  Heavy chain CDR3 for antibody 11213 (IGHV3-23)
AKDTITMVRGALFGMDV

SEQ ID NO: 22427 - protein, 9 aa, Homo sapiens
  Light chain CDR3 for antibody 11214 (IGKV1-33)
QQYDNLPFT

SEQ ID NO: 22428 - protein, 19 aa, Homo sapiens
  Heavy chain CDR3 for antibody 11214 (IGHV3-30)
ARRKNYYGSGSWHYYGMDV

SEQ ID NO: 22429 - protein, 9 aa, Homo sapiens
  Light chain CDR3 for antibody 11215 (IGKV1D-16)
QQYNSFPLT

SEQ ID NO: 22430 - protein, 11 aa, Homo sapiens
  Heavy chain CDR3 for antibody 11215 (IGHV4-59)
ARSIRYAVFDY

SEQ ID NO: 22431 - protein, 9 aa, Homo sapiens
  Light chain CDR3 for antibody 11216 (IGKV1D-13)
QQFNNYPRT

SEQ ID NO: 22432 - protein, 11 aa, Homo sapiens
  Heavy chain CDR3 for antibody 11216 (IGHV3-33)
ARGSGSYAFDY

SEQ ID NO: 22433 - protein, 9 aa, Homo sapiens
  Light chain CDR3 for antibody 11217 (IGKV1-17)
LQLNSFPWT

SEQ ID NO: 22434 - protein, 12 aa, Homo sapiens
  Heavy chain CDR3 for antibody 11217 (IGHV3-33)
TRGYSSKSYFDY

SEQ ID NO: 22435 - protein, 9 aa, Homo sapiens
  Light chain CDR3 for antibody 11218 (IGKV1-17)
QQLNGYPFT

SEQ ID NO: 22436 - protein, 20 aa, Homo sapiens
  Heavy chain CDR3 for antibody 11218 (IGHV3-33)
SRGGATLVRGVIDYYYGMDV

SEQ ID NO: 22437 - protein, 8 aa, Homo sapiens
  Light chain CDR3 for antibody 11219 (IGKV3-20)
QQYGSSLT

SEQ ID NO: 22438 - protein, 18 aa, Homo sapiens
  Heavy chain CDR3 for antibody 11219 (IGHV3-23)
AKDRITGTTYGYYSGLDV

SEQ ID NO: 22439 - protein, 9 aa, Homo sapiens
  Light chain CDR3 for antibody 11220 (IGKV1-6)
LQDYNYPYT

SEQ ID NO: 22440 - protein, 10 aa, Homo sapiens
  Heavy chain CDR3 for antibody 11220 (IGHV4-39)
ASSNWNDGPL

SEQ ID NO: 22441 - protein, 9 aa, Homo sapiens
  Light chain CDR3 for antibody 11221 (IGKV1-37)
QRTSNAPYT

SEQ ID NO: 22442 - protein, 24 aa, Homo sapiens
  Heavy chain CDR3 for antibody 11221 (IGHV3-20)
ARGRITMVRGVIINPLDYYNGMDV

SEQ ID NO: 22443 - protein, 10 aa, Homo sapiens
  Light chain CDR3 for antibody 11222 (IGKV3-11)
QQRSTWPTLT

SEQ ID NO: 22444 - protein, 11 aa, Homo sapiens
  Heavy chain CDR3 for antibody 11222 (IGHV4-59)
AREMGHDTFDI

SEQ ID NO: 22445 - protein, 9 aa, Homo sapiens
  Light chain CDR3 for antibody 11223 (IGKV1-17)
LQHNGYPLT

SEQ ID NO: 22446 - protein, 14 aa, Homo sapiens
  Heavy chain CDR3 for antibody 11223 (IGHV3-33)
ARDGYDILTGPFDY

SEQ ID NO: 22447 - protein, 9 aa, Homo sapiens
  Light chain CDR3 for antibody 11224 (IGKV1D-13)
QRFNNYLYT

SEQ ID NO: 22448 - protein, 11 aa, Homo sapiens
  Heavy chain CDR3 for antibody 11224 (IGHV3-33)
AREGAVARFDY

SEQ ID NO: 22449 - protein, 8 aa, Homo sapiens
  Light chain CDR3 for antibody 11225 (IGKV1D-13)
QQFNNYPT

SEQ ID NO: 22450 - protein, 8 aa, Homo sapiens
  Heavy chain CDR3 for antibody 11225 (IGHV3-20)
APHWIFDY

SEQ ID NO: 22451 - protein, 9 aa, Homo sapiens
  Light chain CDR3 for antibody 11226 (IGKV1-6)
LQDFNYPRT

SEQ ID NO: 22452 - protein, 9 aa, Homo sapiens
  Heavy chain CDR3 for antibody 11226 (IGHV4-59)
ARGGASFAY

SEQ ID NO: 22453 - protein, 10 aa, Homo sapiens
  Light chain CDR3 for antibody 11227 (IGKV1-17)
LQHNSYPMYT

SEQ ID NO: 22454 - protein, 15 aa, Homo sapiens
  Heavy chain CDR3 for antibody 11227 (IGHV1-18)
ARRSPNWGHYYGMDV

SEQ ID NO: 22455 - protein, 9 aa, Homo sapiens
  Light chain CDR3 for antibody 11228 (IGKV1-17)
LHSNNYPPT

SEQ ID NO: 22456 - protein, 12 aa, Homo sapiens
  Heavy chain CDR3 for antibody 11228 (IGHV3-33)
ARDLVGATPFDY

SEQ ID NO: 22457 - protein, 9 aa, Homo sapiens
  Light chain CDR3 for antibody 11229 (IGKV1-39)
QQYYSYPIT

SEQ ID NO: 22458 - protein, 13 aa, Homo sapiens
  Heavy chain CDR3 for antibody 11229 (IGHV4-39)
ARHPPSRDYGMDV

SEQ ID NO: 22459 - protein, 9 aa, Homo sapiens
  Light chain CDR3 for antibody 11230 (IGKV1-9)
QQLKSYPYT

SEQ ID NO: 22460 - protein, 11 aa, Homo sapiens
  Heavy chain CDR3 for antibody 11230 (IGHV1-46)
AREEDLGAFDI

SEQ ID NO: 22461 - protein, 9 aa, Homo sapiens
  Light chain CDR3 for antibody 11231 (IGKV1D-13)
QRFNNYLYT

SEQ ID NO: 22462 - protein, 14 aa, Homo sapiens
  Heavy chain CDR3 for antibody 11231 (IGHV1-18)
ARCFGSGSYGWFDP

SEQ ID NO: 22463 - protein, 9 aa, Homo sapiens
  Light chain CDR3 for antibody 11232 (IGKV1-17)
LQHNSYPYT

SEQ ID NO: 22464 - protein, 15 aa, Homo sapiens
  Heavy chain CDR3 for antibody 11232 (IGHV3-33)
ARRGGIAAAGYYFDY

SEQ ID NO: 22465 - protein, 9 aa, Homo sapiens
  Light chain CDR3 for antibody 11233 (IGKV5-2)
LQHDNFPYT

SEQ ID NO: 22466 - protein, 16 aa, Homo sapiens
  Heavy chain CDR3 for antibody 11233 (IGHV4-59)
ARGRYCDWLLGDVFDI

SEQ ID NO: 22467 - protein, 9 aa, Homo sapiens
  Light chain CDR3 for antibody 11234 (IGKV3-20)
QQYGISPYT

SEQ ID NO: 22468 - protein, 9 aa, Homo sapiens
  Heavy chain CDR3 for antibody 11234 (IGHV1-18)
ARGKDLFDH

SEQ ID NO: 22469 - protein, 9 aa, Homo sapiens
  Light chain CDR3 for antibody 11235 (IGKV3D-7)
QQDYEFPLT

SEQ ID NO: 22470 - protein, 9 aa, Homo sapiens
  Heavy chain CDR3 for antibody 11235 (IGHV1-8)
ARGRLDFDY

SEQ ID NO: 22471 - protein, 7 aa, Homo sapiens
  Light chain CDR3 for antibody 11236 (IGKV1-17)
LQHNSYP

SEQ ID NO: 22472 - protein, 20 aa, Homo sapiens
  Heavy chain CDR3 for antibody 11236 (IGHV3-33)
SRGGATLVRGVIDYYYGMDV

SEQ ID NO: 22473 - protein, 9 aa, Homo sapiens
  Light chain CDR3 for antibody 11237 (IGKV3D-7)
QQDYNLPYT

SEQ ID NO: 22474 - protein, 20 aa, Homo sapiens
  Heavy chain CDR3 for antibody 11237 (IGHV4-59)
ARDRGYDILTGYYGYYGMDV

SEQ ID NO: 22475 - protein, 10 aa, Homo sapiens
  Light chain CDR3 for antibody 11238 (IGKV3-20)
QQYGRSPPVT

SEQ ID NO: 22476 - protein, 18 aa, Homo sapiens
  Heavy chain CDR3 for antibody 11238 (IGHV6-1)
ARDQYSYGPYYYYYGMDV

SEQ ID NO: 22477 - protein, 9 aa, Homo sapiens
  Light chain CDR3 for antibody 11239 (IGKV6-21)
QQSSSLPFT

SEQ ID NO: 22478 - protein, 20 aa, Homo sapiens
  Heavy chain CDR3 for antibody 11239 (IGHV3-33)
ARERCSSTSCYGYYYYGMDV

SEQ ID NO: 22479 - protein, 9 aa, Homo sapiens
  Light chain CDR3 for antibody 11240 (IGKV1-39)
QQSYSTPYT

SEQ ID NO: 22480 - protein, 18 aa, Homo sapiens
  Heavy chain CDR3 for antibody 11240 (IGHV1-46)
ARDGDYVWGSYRSDWFDP

SEQ ID NO: 22481 - protein, 9 aa, Homo sapiens
  Light chain CDR3 for antibody 11241 (IGKV1D-16)
QQYDSYPYT

SEQ ID NO: 22482 - protein, 17 aa, Homo sapiens
  Heavy chain CDR3 for antibody 11241 (IGHV3-33)
ARGYCSRTSCYLYYFDY

SEQ ID NO: 22483 - protein, 9 aa, Homo sapiens
  Light chain CDR3 for antibody 11242 (IGKV1-6)
LQDYNYPYT

SEQ ID NO: 22484 - protein, 18 aa, Homo sapiens
  Heavy chain CDR3 for antibody 11242 (IGHV3-33)
ARDGYSVYDYYYYYGMDV

SEQ ID NO: 22485 - protein, 9 aa, Homo sapiens
  Light chain CDR3 for antibody 11243 (IGKV1D-16)
QQYNSYPFT

SEQ ID NO: 22486 - protein, 12 aa, Homo sapiens
  Heavy chain CDR3 for antibody 11243 (IGHV3-23)
AKEYDILAGCVH

SEQ ID NO: 22487 - protein, 9 aa, Homo sapiens
  Light chain CDR3 for antibody 11244 (IGKV1-9)
QQLISYPLT

SEQ ID NO: 22488 - protein, 12 aa, Homo sapiens
  Heavy chain CDR3 for antibody 11244 (IGHV3-13)
AIGTMVRGIPDY

SEQ ID NO: 22489 - protein, 9 aa, Homo sapiens
  Light chain CDR3 for antibody 11245 (IGKV1D-13)
QHFNNYMYT

SEQ ID NO: 22490 - protein, 20 aa, Homo sapiens
  Heavy chain CDR3 for antibody 11245 (IGHV3-11)
ARGGATLIRGLIDYYYGMDV

SEQ ID NO: 22491 - protein, 9 aa, Homo sapiens
  Light chain CDR3 for antibody 11246 (IGKV1-17)
LQHNSYPYT

SEQ ID NO: 22492 - protein, 11 aa, Homo sapiens
  Heavy chain CDR3 for antibody 11246 (IGHV4-59)
ARDRGHYGMDV

SEQ ID NO: 22493 - protein, 10 aa, Homo sapiens
  Light chain CDR3 for antibody 11247 (IGKV3-15)
QQYNNWPPYT

SEQ ID NO: 22494 - protein, 16 aa, Homo sapiens
  Heavy chain CDR3 for antibody 11247 (IGHV3-33)
ARAVYYGSGSSRIMDV

SEQ ID NO: 22495 - protein, 9 aa, Homo sapiens
  Light chain CDR3 for antibody 11248 (IGKV5-2)
LQHDKFPYT

SEQ ID NO: 22496 - protein, 19 aa, Homo sapiens
  Heavy chain CDR3 for antibody 11248 (IGHV3-33)
ARGVRLRYFDPYYHYGMDV

SEQ ID NO: 22497 - protein, 9 aa, Homo sapiens
  Light chain CDR3 for antibody 11249 (IGKV1-9)
QQLNRYPYT

SEQ ID NO: 22498 - protein, 9 aa, Homo sapiens
  Heavy chain CDR3 for antibody 11249 (IGHV3-30)
ARGRVSLDV

SEQ ID NO: 22499 - protein, 8 aa, Homo sapiens
  Light chain CDR3 for antibody 11250 (IGKV1-5)
QQYNSYYT

SEQ ID NO: 22500 - protein, 12 aa, Homo sapiens
  Heavy chain CDR3 for antibody 11250 (IGHV1-18)
ARVGSSGWYFDY

SEQ ID NO: 22501 - protein, 9 aa, Homo sapiens
  Light chain CDR3 for antibody 11251 (IGKV1-27)
QKYNSAPYT

SEQ ID NO: 22502 - protein, 17 aa, Homo sapiens
  Heavy chain CDR3 for antibody 11251 (IGHV4-39)
AGRLTYYYGSGSPSFDY

SEQ ID NO: 22503 - protein, 8 aa, Homo sapiens
  Light chain CDR3 for antibody 11252 (IGKV3-20)
QQYGSSRT

SEQ ID NO: 22504 - protein, 17 aa, Homo sapiens
  Heavy chain CDR3 for antibody 11252 (IGHV3-33)
ARGFSGYDGYYYYGMDV

SEQ ID NO: 22505 - protein, 9 aa, Homo sapiens
  Light chain CDR3 for antibody 11253 (IGKV1-9)
QQLNSYPLT

SEQ ID NO: 22506 - protein, 12 aa, Homo sapiens
  Heavy chain CDR3 for antibody 11253 (IGHV1-18)
ARLGGFGEFPDC

SEQ ID NO: 22507 - protein, 9 aa, Homo sapiens
  Light chain CDR3 for antibody 11254 (IGKV1-6)
LQDYNYPYT

SEQ ID NO: 22508 - protein, 20 aa, Homo sapiens
  Heavy chain CDR3 for antibody 11254 (IGHV3-23)
AKDGRSGSYDYYYYYYGMDV

SEQ ID NO: 22509 - protein, 10 aa, Homo sapiens
  Light chain CDR3 for antibody 11255 (IGKV1-39)
QQSYSTPMYT

SEQ ID NO: 22510 - protein, 16 aa, Homo sapiens
  Heavy chain CDR3 for antibody 11255 (IGHV3-33)
AREGYSSSWFDRNFDY

SEQ ID NO: 22511 - protein, 9 aa, Homo sapiens
  Light chain CDR3 for antibody 11256 (IGKV1-27)
QKYNSAPYT

SEQ ID NO: 22512 - protein, 12 aa, Homo sapiens
  Heavy chain CDR3 for antibody 11256 (IGHV3-23)
AKDGWFGESLDY

SEQ ID NO: 22513 - protein, 9 aa, Homo sapiens
  Light chain CDR3 for antibody 11257 (IGKV1D-16)
QQYYSYPRT

SEQ ID NO: 22514 - protein, 18 aa, Homo sapiens
  Heavy chain CDR3 for antibody 11257 (IGHV1-46)
ARDLTGRTENYYFYGMDV

SEQ ID NO: 22515 - protein, 9 aa, Homo sapiens
  Light chain CDR3 for antibody 11258 (IGKV1D-16)
QQYNSFPLT

SEQ ID NO: 22516 - protein, 24 aa, Homo sapiens
  Heavy chain CDR3 for antibody 11258 (IGHV1-46)
ARDEARGLLTGYYNMREYYYGMDV

SEQ ID NO: 22517 - protein, 9 aa, Homo sapiens
  Light chain CDR3 for antibody 11259 (IGKV1-17)
LQHNSYPYT

SEQ ID NO: 22518 - protein, 15 aa, Homo sapiens
  Heavy chain CDR3 for antibody 11259 (IGHV3-33)
ASRDILTGYYEWFDP

SEQ ID NO: 22519 - protein, 10 aa, Homo sapiens
  Light chain CDR3 for antibody 11260 (IGKV1-39)
QQSYSTPMYT

SEQ ID NO: 22520 - protein, 19 aa, Homo sapiens
  Heavy chain CDR3 for antibody 11260 (IGHV3-33)
AREDYYGSGSYYNEDWFDP

SEQ ID NO: 22521 - protein, 9 aa, Homo sapiens
  Light chain CDR3 for antibody 11261 (IGKV1-9)
QQLNSYPRT

SEQ ID NO: 22522 - protein, 17 aa, Homo sapiens
  Heavy chain CDR3 for antibody 11261 (IGHV1-18)
ARDRACTMVRGVPPFDY

SEQ ID NO: 22523 - protein, 9 aa, Homo sapiens
  Light chain CDR3 for antibody 11262 (IGKV3-11)
QQRSNWMYT

SEQ ID NO: 22524 - protein, 17 aa, Homo sapiens
  Heavy chain CDR3 for antibody 11262 (IGHV3-23)
AKEGSSSSWYGGLYFDY

SEQ ID NO: 22525 - protein, 8 aa, Homo sapiens
  Light chain CDR3 for antibody 11263 (IGKV3-20)
QQYGSSLT

SEQ ID NO: 22526 - protein, 18 aa, Homo sapiens
  Heavy chain CDR3 for antibody 11263 (IGHV3-11)
ARDGYYGSGSFYYYGMDV

SEQ ID NO: 22527 - protein, 9 aa, Homo sapiens
  Light chain CDR3 for antibody 11264 (IGKV1-9)
QQLISYPLT

SEQ ID NO: 22528 - protein, 17 aa, Homo sapiens
  Heavy chain CDR3 for antibody 11264 (IGHV3-23)
AKEYCSGGSCYVYYFDY

SEQ ID NO: 22529 - protein, 9 aa, Homo sapiens
  Light chain CDR3 for antibody 11265 (IGKV1D-13)
QQFNNYPHT

SEQ ID NO: 22530 - protein, 11 aa, Homo sapiens
  Heavy chain CDR3 for antibody 11265 (IGHV3-33)
ARDRGYSYFDY

SEQ ID NO: 22531 - protein, 10 aa, Homo sapiens
  Light chain CDR3 for antibody 11266 (IGKV3-11)
QQRSNWPALT

SEQ ID NO: 22532 - protein, 14 aa, Homo sapiens
  Heavy chain CDR3 for antibody 11266 (IGHV3-33)
ARDRRDFYYYGMDV

SEQ ID NO: 22533 - protein, 9 aa, Homo sapiens
  Light chain CDR3 for antibody 11267 (IGKV1-27)
QKYNSAPLT

SEQ ID NO: 22534 - protein, 13 aa, Homo sapiens
  Heavy chain CDR3 for antibody 11267 (IGHV3-h)
ARYRYSGYGAFDY

SEQ ID NO: 22535 - protein, 11 aa, Homo sapiens
  Light chain CDR3 for antibody 11268 (IGKV3-11)
QQRSIWPPTWT

SEQ ID NO: 22536 - protein, 15 aa, Homo sapiens
  Heavy chain CDR3 for antibody 11268 (IGHV4-39)
ARQGLVATIKGYFQH

SEQ ID NO: 22537 - protein, 10 aa, Homo sapiens
  Light chain CDR3 for antibody 11269 (IGKV1-39)
QQSYSTPMYT

SEQ ID NO: 22538 - protein, 20 aa, Homo sapiens
  Heavy chain CDR3 for antibody 11269 (IGHV1-f)
ATHYDILTGSPYYYYCALDV

SEQ ID NO: 22539 - protein, 9 aa, Homo sapiens
  Light chain CDR3 for antibody 11270 (IGKV1-6)
LQDYNYPYT

SEQ ID NO: 22540 - protein, 15 aa, Homo sapiens
  Heavy chain CDR3 for antibody 11270 (IGHV3-33)
ARDGSSSWSPSWFDP

SEQ ID NO: 22541 - protein, 8 aa, Homo sapiens
  Light chain CDR3 for antibody 11271 (IGKV1-5)
QQYHSYYT

SEQ ID NO: 22542 - protein, 15 aa, Homo sapiens
  Heavy chain CDR3 for antibody 11271 (IGHV3-33)
ARRSILTGSYWYFDL

SEQ ID NO: 22543 - protein, 9 aa, Homo sapiens
  Light chain CDR3 for antibody 11272 (IGKV6-21)
HQSSSLPFT

SEQ ID NO: 22544 - protein, 16 aa, Homo sapiens
  Heavy chain CDR3 for antibody 11272 (IGHV3-33)
ARDQGILTGYYTAIDY

SEQ ID NO: 22545 - protein, 10 aa, Homo sapiens
  Light chain CDR3 for antibody 11273 (IGKV1-9)
QQLDSYPMYT

SEQ ID NO: 22546 - protein, 8 aa, Homo sapiens
  Heavy chain CDR3 for antibody 11273 (IGHV3-23)
AETFLFDY

SEQ ID NO: 22547 - protein, 9 aa, Homo sapiens
  Light chain CDR3 for antibody 11274 (IGKV1-9)
QQLKSYLYT

SEQ ID NO: 22548 - protein, 16 aa, Homo sapiens
  Heavy chain CDR3 for antibody 11274 (IGHV3-33)
AREVAGSYYYYYGIDV

SEQ ID NO: 22549 - protein, 10 aa, Homo sapiens
  Light chain CDR3 for antibody 11275 (IGKV1-17)
LQHNSYPMYT

SEQ ID NO: 22550 - protein, 14 aa, Homo sapiens
  Heavy chain CDR3 for antibody 11275 (IGHV3-33)
ARQYSYGYPYYLDY

SEQ ID NO: 22551 - protein, 9 aa, Homo sapiens
  Light chain CDR3 for antibody 11276 (IGKV1D-16)
QQLNSYPWT

SEQ ID NO: 22552 - protein, 12 aa, Homo sapiens
  Heavy chain CDR3 for antibody 11276 (IGHV3-33)
ARESGGSYSFDY

SEQ ID NO: 22553 - protein, 9 aa, Homo sapiens
  Light chain CDR3 for antibody 11277 (IGKV3D-20)
QQFGSLPLT

SEQ ID NO: 22554 - protein, 14 aa, Homo sapiens
  Heavy chain CDR3 for antibody 11277 (IGHV4-39)
ARDSGYDYYYGMDV

SEQ ID NO: 22555 - protein, 9 aa, Homo sapiens
  Light chain CDR3 for antibody 11278 (IGKV5-2)
LQHDNFPWT

SEQ ID NO: 22556 - protein, 14 aa, Homo sapiens
  Heavy chain CDR3 for antibody 11278 (IGHV3-66)
ARRGVIVPAAGFDP

SEQ ID NO: 22557 - protein, 9 aa, Homo sapiens
  Light chain CDR3 for antibody 11279 (IGKV1-9)
QQGNTYSRT

SEQ ID NO: 22558 - protein, 17 aa, Homo sapiens
  Heavy chain CDR3 for antibody 11279 (IGHV1-24)
ATEGYDILHGYYNVLDY

SEQ ID NO: 22559 - protein, 8 aa, Homo sapiens
  Light chain CDR3 for antibody 11280 (IGKV3D-7)
QQDYNLLT

SEQ ID NO: 22560 - protein, 12 aa, Homo sapiens
  Heavy chain CDR3 for antibody 11280 (IGHV3-33)
AKDPGWQQLAEY

SEQ ID NO: 22561 - protein, 8 aa, Homo sapiens
  Light chain CDR3 for antibody 11281 (IGKV3-15)
QQYNNYPT

SEQ ID NO: 22562 - protein, 13 aa, Homo sapiens
  Heavy chain CDR3 for antibody 11281 (IGHV3-33)
AREYFDWLLPLDY

SEQ ID NO: 22563 - protein, 9 aa, Homo sapiens
  Light chain CDR3 for antibody 11282 (IGKV1D-16)
QQCNSYPRT

SEQ ID NO: 22564 - protein, 16 aa, Homo sapiens
  Heavy chain CDR3 for antibody 11282 (IGHV3-23)
AKDGIGELSYYYGMDV

SEQ ID NO: 22565 - protein, 9 aa, Homo sapiens
  Light chain CDR3 for antibody 11283 (IGKV3-11)
QQRSDWPLT

SEQ ID NO: 22566 - protein, 17 aa, Homo sapiens
  Heavy chain CDR3 for antibody 11283 (IGHV3-33)
ARSGIVGATDYYYGLDV

SEQ ID NO: 22567 - protein, 9 aa, Homo sapiens
  Light chain CDR3 for antibody 11284 (IGKV2-30)
MQGIHWPLT

SEQ ID NO: 22568 - protein, 17 aa, Homo sapiens
  Heavy chain CDR3 for antibody 11284 (IGHV3-33)
ARSPYDILTGYSYYLDY

SEQ ID NO: 22569 - protein, 9 aa, Homo sapiens
  Light chain CDR3 for antibody 11285 (IGKV1D-13)
QRFNNYLYT

SEQ ID NO: 22570 - protein, 18 aa, Homo sapiens
  Heavy chain CDR3 for antibody 11285 (IGHV3-33)
ARDGRISLVRGIIDAFDI

SEQ ID NO: 22571 - protein, 9 aa, Homo sapiens
  Light chain CDR3 for antibody 11286 (IGKV3D-20)
QQYGYSPLT

SEQ ID NO: 22572 - protein, 13 aa, Homo sapiens
  Heavy chain CDR3 for antibody 11286 (IGHV3-33)
ARRYSSGWYPFDY

SEQ ID NO: 22573 - protein, 9 aa, Homo sapiens
  Light chain CDR3 for antibody 11287 (IGKV2-30)
MQGTHWPLT

SEQ ID NO: 22574 - protein, 13 aa, Homo sapiens
  Heavy chain CDR3 for antibody 11287 (IGHV3-11)
ARDGYSYGPYFDY

SEQ ID NO: 22575 - protein, 9 aa, Homo sapiens
  Light chain CDR3 for antibody 11288 (IGKV3-11)
QQRSSWPPT

SEQ ID NO: 22576 - protein, 15 aa, Homo sapiens
  Heavy chain CDR3 for antibody 11288 (IGHV3-23)
AKEALRYFDWSGMDV

SEQ ID NO: 22577 - protein, 9 aa, Homo sapiens
  Light chain CDR3 for antibody 11289 (IGKV3-11)
QQRSSWPPT

SEQ ID NO: 22578 - protein, 12 aa, Homo sapiens
  Heavy chain CDR3 for antibody 11289 (IGHV4-39)
ARDSGSYYFFDY

SEQ ID NO: 22579 - protein, 9 aa, Homo sapiens
  Light chain CDR3 for antibody 11290 (IGKV1-27)
QQYINWPLT

SEQ ID NO: 22580 - protein, 17 aa, Homo sapiens
  Heavy chain CDR3 for antibody 11290 (IGHV4-61)
ARNTMVGTWQRQGNLDH

SEQ ID NO: 22581 - protein, 10 aa, Homo sapiens
  Light chain CDR3 for antibody 11291 (IGKV1-39)
QQSYSTPMYT

SEQ ID NO: 22582 - protein, 9 aa, Homo sapiens
  Heavy chain CDR3 for antibody 11291 (IGHV3-33)
AREYKEFDY

SEQ ID NO: 22583 - protein, 9 aa, Homo sapiens
  Light chain CDR3 for antibody 11292 (IGKV3-11)
QQRSNWMYT

SEQ ID NO: 22584 - protein, 24 aa, Homo sapiens
  Heavy chain CDR3 for antibody 11292 (IGHV1-46)
ARDEARGLLTGYYNMREYYYGMDV

SEQ ID NO: 22585 - protein, 9 aa, Homo sapiens
  Light chain CDR3 for antibody 11293 (IGKV1-27)
QKYNSAPYT

SEQ ID NO: 22586 - protein, 18 aa, Homo sapiens
  Heavy chain CDR3 for antibody 11293 (IGHV3-33)
ARKGGYYSGSGSYRHFDF

SEQ ID NO: 22587 - protein, 8 aa, Homo sapiens
  Light chain CDR3 for antibody 11294 (IGKV3-20)
QQYGSSPT

SEQ ID NO: 22588 - protein, 24 aa, Homo sapiens
  Heavy chain CDR3 for antibody 11294 (IGHV1-46)
AGPITMVRGVIIPDYYYYYYGMDV

SEQ ID NO: 22589 - protein, 10 aa, Homo sapiens
  Light chain CDR3 for antibody 11295 (IGKV3-11)
QQRSNWPTWT

SEQ ID NO: 22590 - protein, 13 aa, Homo sapiens
  Heavy chain CDR3 for antibody 11295 (IGHV1-18)
ARSITMVRGVIGY

SEQ ID NO: 22591 - protein, 9 aa, Homo sapiens
  Light chain CDR3 for antibody 11296 (IGKV1D-16)
LQDYKSPFT

SEQ ID NO: 22592 - protein, 19 aa, Homo sapiens
  Heavy chain CDR3 for antibody 11296 (IGHV3-23)
AKDGRSGSYDYYYYYGMDV

SEQ ID NO: 22593 - protein, 9 aa, Homo sapiens
  Light chain CDR3 for antibody 11297 (IGKV1-17)
LQLNSFPWT

SEQ ID NO: 22594 - protein, 13 aa, Homo sapiens
  Heavy chain CDR3 for antibody 11297 (IGHV4-59)
ARAAWYSSSWFDY

SEQ ID NO: 22595 - protein, 9 aa, Homo sapiens
  Light chain CDR3 for antibody 11298 (IGKV1-9)
QQVKSYPYT

SEQ ID NO: 22596 - protein, 18 aa, Homo sapiens
  Heavy chain CDR3 for antibody 11298 (IGHV1-46)
ARDLTGRTENYYFYGMDV

SEQ ID NO: 22597 - protein, 9 aa, Homo sapiens
  Light chain CDR3 for antibody 11299 (IGKV3-15)
QQYNNWPYT

SEQ ID NO: 22598 - protein, 20 aa, Homo sapiens
  Heavy chain CDR3 for antibody 11299 (IGHV3-33)
ARRMVRGVKKTYYYYYGLDV

SEQ ID NO: 22599 - protein, 9 aa, Homo sapiens
  Light chain CDR3 for antibody 11300 (IGKV1-6)
LQDFHYPWT

SEQ ID NO: 22600 - protein, 13 aa, Homo sapiens
  Heavy chain CDR3 for antibody 11300 (IGHV3-53)
ASPFNWNDGFFDY

SEQ ID NO: 22601 - protein, 10 aa, Homo sapiens
  Light chain CDR3 for antibody 11301 (IGKV1-39)
QQSYSTPMYT

SEQ ID NO: 22602 - protein, 17 aa, Homo sapiens
  Heavy chain CDR3 for antibody 11301 (IGHV3-33)
ARDSYDILTGYYKPFDY

SEQ ID NO: 22603 - protein, 10 aa, Homo sapiens
  Light chain CDR3 for antibody 11302 (IGKV3-11)
QQRSNWPTWT

SEQ ID NO: 22604 - protein, 13 aa, Homo sapiens
  Heavy chain CDR3 for antibody 11302 (IGHV3-33)
ASTGDSYYYGMDV

SEQ ID NO: 22605 - protein, 9 aa, Homo sapiens
  Light chain CDR3 for antibody 11303 (IGKV1-33)
QQYDNLPFT

SEQ ID NO: 22606 - protein, 17 aa, Homo sapiens
  Heavy chain CDR3 for antibody 11303 (IGHV3-33)
ARCGYSSSWYDPYYFDY

SEQ ID NO: 22607 - protein, 9 aa, Homo sapiens
  Light chain CDR3 for antibody 11304 (IGKV1-17)
LHSNNYPWT

SEQ ID NO: 22608 - protein, 13 aa, Homo sapiens
  Heavy chain CDR3 for antibody 11304 (IGHV4-39)
ARREVVGGRGFDY

SEQ ID NO: 22609 - protein, 9 aa, Homo sapiens
  Light chain CDR3 for antibody 11305 (IGKV1-9)
QQLNSYPRT

SEQ ID NO: 22610 - protein, 9 aa, Homo sapiens
  Heavy chain CDR3 for antibody 11305 (IGHV1-8)
ARGSLDFDY

SEQ ID NO: 22611 - protein, 11 aa, Homo sapiens
  Light chain CDR3 for antibody 11306 (IGKV3-11)
QQRSNWPPTWT

SEQ ID NO: 22612 - protein, 14 aa, Homo sapiens
  Heavy chain CDR3 for antibody 11306 (IGHV3-33)
AREGYSSNWYDFDY

SEQ ID NO: 22613 - protein, 9 aa, Homo sapiens
  Light chain CDR3 for antibody 11307 (IGKV1D-13)
QQFNNYPYT

SEQ ID NO: 22614 - protein, 16 aa, Homo sapiens
  Heavy chain CDR3 for antibody 11307 (IGHV3-33)
ARGANYYGSGIPNFEY

SEQ ID NO: 22615 - protein, 9 aa, Homo sapiens
  Light chain CDR3 for antibody 11308 (IGKV2D-28)
MQALQTPPT

SEQ ID NO: 22616 - protein, 21 aa, Homo sapiens
  Heavy chain CDR3 for antibody 11308 (IGHV3-33)
ARKRLYDILTGYYKAYYGMDV

SEQ ID NO: 22617 - protein, 9 aa, Homo sapiens
  Light chain CDR3 for antibody 11309 (IGKV1-6)
LQDYNYPWT

SEQ ID NO: 22618 - protein, 16 aa, Homo sapiens
  Heavy chain CDR3 for antibody 11309 (IGHV3-33)
ARDAKYYDILTGYHDY

SEQ ID NO: 22619 - protein, 8 aa, Homo sapiens
  Light chain CDR3 for antibody 11310 (IGKV1D-13)
QQFNNYPT

SEQ ID NO: 22620 - protein, 18 aa, Homo sapiens
  Heavy chain CDR3 for antibody 11310 (IGHV4-39)
ARQYYFGSGNYYRGWFDP

SEQ ID NO: 22621 - protein, 9 aa, Homo sapiens
  Light chain CDR3 for antibody 11311 (IGKV5-2)
LQHDNFPWT

SEQ ID NO: 22622 - protein, 10 aa, Homo sapiens
  Heavy chain CDR3 for antibody 11311 (IGHV4-59)
VSSGTSLLAY

SEQ ID NO: 22623 - protein, 9 aa, Homo sapiens
  Light chain CDR3 for antibody 11312 (IGKV2-30)
MQGTHWPLT

SEQ ID NO: 22624 - protein, 15 aa, Homo sapiens
  Heavy chain CDR3 for antibody 11312 (IGHV3-11)
ARDLGYYGSGSRMDV

SEQ ID NO: 22625 - protein, 8 aa, Homo sapiens
  Light chain CDR3 for antibody 11313 (IGKV3-20)
QQYGSSLT

SEQ ID NO: 22626 - protein, 17 aa, Homo sapiens
  Heavy chain CDR3 for antibody 11313 (IGHV4-59)
ARDRELLWFGEFGGMDV

SEQ ID NO: 22627 - protein, 8 aa, Homo sapiens
  Light chain CDR3 for antibody 11314 (IGKV1D-13)
QQFNNYYT

SEQ ID NO: 22628 - protein, 12 aa, Homo sapiens
  Heavy chain CDR3 for antibody 11314 (IGHV3-33)
AREGTGGNWFDP

SEQ ID NO: 22629 - protein, 8 aa, Homo sapiens
  Light chain CDR3 for antibody 11315 (IGKV1D-13)
QQFNNYYT

SEQ ID NO: 22630 - protein, 14 aa, Homo sapiens
  Heavy chain CDR3 for antibody 11315 (IGHV1-2)
ARDYYGSGNYYMGY

SEQ ID NO: 22631 - protein, 10 aa, Homo sapiens
  Light chain CDR3 for antibody 11316 (IGKV3-20)
QQYGRSPPVT

SEQ ID NO: 22632 - protein, 11 aa, Homo sapiens
  Heavy chain CDR3 for antibody 11316 (IGHV3-23)
GEFSSGWSFDY

SEQ ID NO: 22633 - protein, 9 aa, Homo sapiens
  Light chain CDR3 for antibody 11317 (IGKV1-16)
QHYNDYPFT

SEQ ID NO: 22634 - protein, 14 aa, Homo sapiens
  Heavy chain CDR3 for antibody 11317 (IGHV3-33)
ARAISGSSYWYFDL

SEQ ID NO: 22635 - protein, 9 aa, Homo sapiens
  Light chain CDR3 for antibody 11318 (IGKV1-39)
QQGFSTPWT

SEQ ID NO: 22636 - protein, 14 aa, Homo sapiens
  Heavy chain CDR3 for antibody 11318 (IGHV4-39)
ARQGTMIRGGYFDY

SEQ ID NO: 22637 - protein, 9 aa, Homo sapiens
  Light chain CDR3 for antibody 11319 (IGKV2-30)
MQGTHWPLT

SEQ ID NO: 22638 - protein, 16 aa, Homo sapiens
  Heavy chain CDR3 for antibody 11319 (IGHV1-24)
ATDWNDRGYYYYGMDV

SEQ ID NO: 22639 - protein, 10 aa, Homo sapiens
  Light chain CDR3 for antibody 11320 (IGKV1-39)
QQSYSTPMYT

SEQ ID NO: 22640 - protein, 17 aa, Homo sapiens
  Heavy chain CDR3 for antibody 11320 (IGHV3-33)
ARGGAAAGPYLYYGLDV

SEQ ID NO: 22641 - protein, 10 aa, Homo sapiens
  Light chain CDR3 for antibody 11321 (IGKV1-17)
LQHNSYPIYT

SEQ ID NO: 22642 - protein, 17 aa, Homo sapiens
  Heavy chain CDR3 for antibody 11321 (IGHV4-39)
AGRLTYYFGSGSPSFDY

SEQ ID NO: 22643 - protein, 9 aa, Homo sapiens
  Light chain CDR3 for antibody 11322 (IGKV1-27)
QKYNSAPYT

SEQ ID NO: 22644 - protein, 22 aa, Homo sapiens
  Heavy chain CDR3 for antibody 11322 (IGHV3-11)
AKDDLPYYDILTHSTTTGCMDV

SEQ ID NO: 22645 - protein, 9 aa, Homo sapiens
  Light chain CDR3 for antibody 11323 (IGKV1-33)
QQYDNLPFT

SEQ ID NO: 22646 - protein, 15 aa, Homo sapiens
  Heavy chain CDR3 for antibody 11323 (IGHV3-20)
ARDRGSSGWRDWFDP

SEQ ID NO: 22647 - protein, 10 aa, Homo sapiens
  Light chain CDR3 for antibody 11324 (IGKV1-17)
LQHNSYPMYT

SEQ ID NO: 22648 - protein, 14 aa, Homo sapiens
  Heavy chain CDR3 for antibody 11324 (IGHV3-33)
ARDGYDILTGPMDV

SEQ ID NO: 22649 - protein, 9 aa, Homo sapiens
  Light chain CDR3 for antibody 11325 (IGKV3D-7)
QQDSNLPYT

SEQ ID NO: 22650 - protein, 26 aa, Homo sapiens
  Heavy chain CDR3 for antibody 11325 (IGHV4-39)
ARQGLLWFGDLKAYDSSGYYYGYCHH

SEQ ID NO: 22651 - protein, 9 aa, Homo sapiens
  Light chain CDR3 for antibody 11326 (IGKV5-2)
LQHDNFPWT

SEQ ID NO: 22652 - protein, 14 aa, Homo sapiens
  Heavy chain CDR3 for antibody 11326 (IGHV3-23)
AKGGDILTGYYTDY

SEQ ID NO: 22653 - protein, 9 aa, Homo sapiens
  Light chain CDR3 for antibody 11327 (IGKV1-6)
LQDYNYPWT

SEQ ID NO: 22654 - protein, 14 aa, Homo sapiens
  Heavy chain CDR3 for antibody 11327 (IGHV3-33)
ARGDGDILTGYLDY

SEQ ID NO: 22655 - protein, 9 aa, Homo sapiens
  Light chain CDR3 for antibody 11328 (IGKV1-16)
QQYNNYPRT

SEQ ID NO: 22656 - protein, 15 aa, Homo sapiens
  Heavy chain CDR3 for antibody 11328 (IGHV1-2)
ARDLGYYGSGSRMDV

SEQ ID NO: 22657 - protein, 8 aa, Homo sapiens
  Light chain CDR3 for antibody 11329 (IGKV3-20)
QQYGSSLT

SEQ ID NO: 22658 - protein, 15 aa, Homo sapiens
  Heavy chain CDR3 for antibody 11329 (IGHV3-33)
ARDHLTGYYYYGMDV

SEQ ID NO: 22659 - protein, 8 aa, Homo sapiens
  Light chain CDR3 for antibody 11330 (IGKV6-21)
HQSSSLYT

SEQ ID NO: 22660 - protein, 11 aa, Homo sapiens
  Heavy chain CDR3 for antibody 11330 (IGHV4-59)
ARSLRYSFFDY

SEQ ID NO: 22661 - protein, 9 aa, Homo sapiens
  Light chain CDR3 for antibody 11331 (IGKV3-15)
QQYNNWPRT

SEQ ID NO: 22662 - protein, 11 aa, Homo sapiens
  Heavy chain CDR3 for antibody 11331 (IGHV3-33)
ARDILTGFLDH

SEQ ID NO: 22663 - protein, 9 aa, Homo sapiens
  Light chain CDR3 for antibody 11332 (IGKV3D-20)
QQYGYSPRT

SEQ ID NO: 22664 - protein, 11 aa, Homo sapiens
  Heavy chain CDR3 for antibody 11332 (IGHV4-59)
ARSLRYSVFDY

SEQ ID NO: 22665 - protein, 9 aa, Homo sapiens
  Light chain CDR3 for antibody 11333 (IGKV2-30)
MQGTHWPLT

SEQ ID NO: 22666 - protein, 18 aa, Homo sapiens
  Heavy chain CDR3 for antibody 11333 (IGHV3-33)
ARRTAAGTGDYYYYGMDV

SEQ ID NO: 22667 - protein, 9 aa, Homo sapiens
  Light chain CDR3 for antibody 11334 (IGKV3-20)
QQYHSYPYT

SEQ ID NO: 22668 - protein, 13 aa, Homo sapiens
  Heavy chain CDR3 for antibody 11334 (IGHV1-46)
ARDAGYSSSLFDY

SEQ ID NO: 22669 - protein, 9 aa, Homo sapiens
  Light chain CDR3 for antibody 11335 (IGKV1-37)
QRTSNAPYT

SEQ ID NO: 22670 - protein, 14 aa, Homo sapiens
  Heavy chain CDR3 for antibody 11335 (IGHV3-33)
ARGAAAGNFYGLDV

SEQ ID NO: 22671 - protein, 9 aa, Homo sapiens
  Light chain CDR3 for antibody 11336 (IGKV1-6)
LQDYNYPWT

SEQ ID NO: 22672 - protein, 11 aa, Homo sapiens
  Heavy chain CDR3 for antibody 11336 (IGHV3-23)
AKEQKEAAMGA

SEQ ID NO: 22673 - protein, 9 aa, Homo sapiens
  Light chain CDR3 for antibody 11337 (IGKV1D-16)
QQLISYQLT

SEQ ID NO: 22674 - protein, 14 aa, Homo sapiens
  Heavy chain CDR3 for antibody 11337 (IGHV3-33)
ARASSGSSYWYFDL

SEQ ID NO: 22675 - protein, 9 aa, Homo sapiens
  Light chain CDR3 for antibody 11338 (IGKV1-39)
QQSYRTPLT

SEQ ID NO: 22676 - protein, 17 aa, Homo sapiens
  Heavy chain CDR3 for antibody 11338 (IGHV3-64)
ARERYYGSGSYYSWFDP

SEQ ID NO: 22677 - protein, 9 aa, Homo sapiens
  Light chain CDR3 for antibody 11339 (IGKV1-5)
LQHNSYPYT

SEQ ID NO: 22678 - protein, 16 aa, Homo sapiens
  Heavy chain CDR3 for antibody 11339 (IGHV3-33)
ARERVYYFGAGSYFDY

SEQ ID NO: 22679 - protein, 9 aa, Homo sapiens
  Light chain CDR3 for antibody 11340 (IGKV1-9)
QQLNSYPYT

SEQ ID NO: 22680 - protein, 12 aa, Homo sapiens
  Heavy chain CDR3 for antibody 11340 (IGHV4-59)
AKDGYSYGYFDY

SEQ ID NO: 22681 - protein, 9 aa, Homo sapiens
  Light chain CDR3 for antibody 11341 (IGKV2-30)
MQGTHWPLT

SEQ ID NO: 22682 - protein, 15 aa, Homo sapiens
  Heavy chain CDR3 for antibody 11341 (IGHV3-33)
ARHSSGFYYYYGMDV

SEQ ID NO: 22683 - protein, 9 aa, Homo sapiens
  Light chain CDR3 for antibody 11342 (IGKV1-33)
QQYDNLPFT

SEQ ID NO: 22684 - protein, 14 aa, Homo sapiens
  Heavy chain CDR3 for antibody 11342 (IGHV3-33)
ARRGYSGYDWYFDY

SEQ ID NO: 22685 - protein, 9 aa, Homo sapiens
  Light chain CDR3 for antibody 11343 (IGKV3-20)
QQYGSSIFT

SEQ ID NO: 22686 - protein, 15 aa, Homo sapiens
  Heavy chain CDR3 for antibody 11343 (IGHV3-23)
AKEALRYFDWSGMDV

SEQ ID NO: 22687 - protein, 9 aa, Homo sapiens
  Light chain CDR3 for antibody 11344 (IGKV4-1)
QQYYTTPPT

SEQ ID NO: 22688 - protein, 9 aa, Homo sapiens
  Heavy chain CDR3 for antibody 11344 (IGHV4-59)
AREGGSGSL

SEQ ID NO: 22689 - protein, 9 aa, Homo sapiens
  Light chain CDR3 for antibody 11345 (IGKV1-6)
LQDYNYPWT

SEQ ID NO: 22690 - protein, 11 aa, Homo sapiens
  Heavy chain CDR3 for antibody 11345 (IGHV3-33)
ARDWSSGPFDY

SEQ ID NO: 22691 - protein, 9 aa, Homo sapiens
  Light chain CDR3 for antibody 11346 (IGKV3-20)
QQFGRSPRT

SEQ ID NO: 22692 - protein, 15 aa, Homo sapiens
  Heavy chain CDR3 for antibody 11346 (IGHV3-30)
ARGAMVRGVDYGMDV

SEQ ID NO: 22693 - protein, 8 aa, Homo sapiens
  Light chain CDR3 for antibody 11347 (IGKV1-27)
QQYNNYPT

SEQ ID NO: 22694 - protein, 10 aa, Homo sapiens
  Heavy chain CDR3 for antibody 11347 (IGHV3-33)
ARDVVVYFDY

SEQ ID NO: 22695 - protein, 9 aa, Homo sapiens
  Light chain CDR3 for antibody 11348 (IGKV3-20)
QQYGSSPWT

SEQ ID NO: 22696 - protein, 17 aa, Homo sapiens
  Heavy chain CDR3 for antibody 11348 (IGHV1-2)
ARAGAAGTPYYYYYMDV

SEQ ID NO: 22697 - protein, 8 aa, Homo sapiens
  Light chain CDR3 for antibody 11349 (IGKV6-21)
HQSSSLPT

SEQ ID NO: 22698 - protein, 13 aa, Homo sapiens
  Heavy chain CDR3 for antibody 11349 (IGHV3-23)
ARDPLYSGSYFDY

SEQ ID NO: 22699 - protein, 9 aa, Homo sapiens
  Light chain CDR3 for antibody 11350 (IGKV6-21)
HQSSSLPYT

SEQ ID NO: 22700 - protein, 15 aa, Homo sapiens
  Heavy chain CDR3 for antibody 11350 (IGHV4-59)
ARDLGYYGSGSPLAY

SEQ ID NO: 22701 - protein, 9 aa, Homo sapiens
  Light chain CDR3 for antibody 11351 (IGKV3-15)
QQYNDWPLT

SEQ ID NO: 22702 - protein, 9 aa, Homo sapiens
  Heavy chain CDR3 for antibody 11351 (IGHV3-23)
AKEQLLFDY

SEQ ID NO: 22703 - protein, 9 aa, Homo sapiens
  Light chain CDR3 for antibody 11352 (IGKV1-39)
QQGFSTPWT

SEQ ID NO: 22704 - protein, 17 aa, Homo sapiens
  Heavy chain CDR3 for antibody 11352 (IGHV4-39)
ARQYYFGSGNYYSHFHY

SEQ ID NO: 22705 - protein, 9 aa, Homo sapiens
  Light chain CDR3 for antibody 11353 (IGKV1-37)
QRTYNAPFT

SEQ ID NO: 22706 - protein, 14 aa, Homo sapiens
  Heavy chain CDR3 for antibody 11353 (IGHV3-33)
AREGYSSNWYDFDY

SEQ ID NO: 22707 - protein, 9 aa, Homo sapiens
  Light chain CDR3 for antibody 11354 (IGKV5-2)
LQHDKFPYT

SEQ ID NO: 22708 - protein, 20 aa, Homo sapiens
  Heavy chain CDR3 for antibody 11354 (IGHV3-33)
ARDPAQLERQYYYSYYGMDV

SEQ ID NO: 22709 - protein, 9 aa, Homo sapiens
  Light chain CDR3 for antibody 11355 (IGKV1-33)
QQYDNLPFT

SEQ ID NO: 22710 - protein, 12 aa, Homo sapiens
  Heavy chain CDR3 for antibody 11355 (IGHV1-46)
ARGLIGDHASDI

SEQ ID NO: 22711 - protein, 9 aa, Homo sapiens
  Light chain CDR3 for antibody 11356 (IGKV1D-16)
QQYNSYPLT

SEQ ID NO: 22712 - protein, 21 aa, Homo sapiens
  Heavy chain CDR3 for antibody 11356 (IGHV4-59)
ARGPSRYDILTGYSYYYGMDV

SEQ ID NO: 22713 - protein, 9 aa, Homo sapiens
  Light chain CDR3 for antibody 11357 (IGKV1D-16)
QQYNSYPYT

SEQ ID NO: 22714 - protein, 17 aa, Homo sapiens
  Heavy chain CDR3 for antibody 11357 (IGHV1-18)
ARERYYGSGSYKDKMDV

SEQ ID NO: 22715 - protein, 8 aa, Homo sapiens
  Light chain CDR3 for antibody 11358 (IGKV3-11)
LQRGNWPT

SEQ ID NO: 22716 - protein, 20 aa, Homo sapiens
  Heavy chain CDR3 for antibody 11358 (IGHV3-20)
ARDLCSSTSCYGYYYYGMDV

SEQ ID NO: 22717 - protein, 9 aa, Homo sapiens
  Light chain CDR3 for antibody 11359 (IGKV1-37)
QRTYNAPYT

SEQ ID NO: 22718 - protein, 12 aa, Homo sapiens
  Heavy chain CDR3 for antibody 11359 (IGHV3-33)
AREKGGSYSFDY

SEQ ID NO: 22719 - protein, 8 aa, Homo sapiens
  Light chain CDR3 for antibody 11360 (IGKV1-5)
QQYNSYST

SEQ ID NO: 22720 - protein, 18 aa, Homo sapiens
  Heavy chain CDR3 for antibody 11360 (IGHV3-33)
ARGGVLYDILTGFYGMDV

SEQ ID NO: 22721 - protein, 9 aa, Homo sapiens
  Light chain CDR3 for antibody 11361 (IGKV3-11)
QQRSKWPPT

SEQ ID NO: 22722 - protein, 9 aa, Homo sapiens
  Heavy chain CDR3 for antibody 11361 (IGHV1-18)
ARGKDWFDP

SEQ ID NO: 22723 - protein, 9 aa, Homo sapiens
  Light chain CDR3 for antibody 11362 (IGKV1-6)
LQDYNYPWT

SEQ ID NO: 22724 - protein, 18 aa, Homo sapiens
  Heavy chain CDR3 for antibody 11362 (IGHV3-33)
SRGGATLGRGVIDYGMDV

SEQ ID NO: 22725 - protein, 8 aa, Homo sapiens
  Light chain CDR3 for antibody 11363 (IGKV3D-7)
QQDYNLPT

SEQ ID NO: 22726 - protein, 9 aa, Homo sapiens
  Heavy chain CDR3 for antibody 11363 (IGHV3-33)
ARELAYFDY

SEQ ID NO: 22727 - protein, 9 aa, Homo sapiens
  Light chain CDR3 for antibody 11364 (IGKV1-9)
QQLNSYPLT

SEQ ID NO: 22728 - protein, 13 aa, Homo sapiens
  Heavy chain CDR3 for antibody 11364 (IGHV4-59)
ASDAGYSSCCFDY

SEQ ID NO: 22729 - protein, 8 aa, Homo sapiens
  Light chain CDR3 for antibody 11365 (IGKV6-21)
HQSSSLPT

SEQ ID NO: 22730 - protein, 14 aa, Homo sapiens
  Heavy chain CDR3 for antibody 11365 (IGHV3-20)
ARDGGSTCYDWFDP

SEQ ID NO: 22731 - protein, 9 aa, Homo sapiens
  Light chain CDR3 for antibody 11366 (IGKV3-20)
QQYNSYPYT

SEQ ID NO: 22732 - protein, 16 aa, Homo sapiens
  Heavy chain CDR3 for antibody 11366 (IGHV3-66)
ARESLKLGIYYYGMDV

SEQ ID NO: 22733 - protein, 9 aa, Homo sapiens
  Light chain CDR3 for antibody 11367 (IGKV1-6)
LQVYSYPWT

SEQ ID NO: 22734 - protein, 11 aa, Homo sapiens
  Heavy chain CDR3 for antibody 11367 (IGHV3-33)
ARDKSSGWSDY

SEQ ID NO: 22735 - protein, 9 aa, Homo sapiens
  Light chain CDR3 for antibody 11368 (IGKV1-9)
QQLKSYPYT

SEQ ID NO: 22736 - protein, 15 aa, Homo sapiens
  Heavy chain CDR3 for antibody 11368 (IGHV3-33)
ARDTGYSSSWNWFDP

SEQ ID NO: 22737 - protein, 9 aa, Homo sapiens
  Light chain CDR3 for antibody 11369 (IGKV1-6)
LQDFHYPWT

SEQ ID NO: 22738 - protein, 10 aa, Homo sapiens
  Heavy chain CDR3 for antibody 11369 (IGHV3-33)
ARDGSGSQPI

SEQ ID NO: 22739 - protein, 10 aa, Homo sapiens
  Light chain CDR3 for antibody 11370 (IGKV3-15)
QQYNNWPPYT

SEQ ID NO: 22740 - protein, 18 aa, Homo sapiens
  Heavy chain CDR3 for antibody 11370 (IGHV3-33)
ARGLLWFGVSYYYYGMDV

SEQ ID NO: 22741 - protein, 9 aa, Homo sapiens
  Light chain CDR3 for antibody 11371 (IGKV3-11)
QQRSSWPPT

SEQ ID NO: 22742 - protein, 15 aa, Homo sapiens
  Heavy chain CDR3 for antibody 11371 (IGHV3-33)
ARDSRPEITGPPFDY

SEQ ID NO: 22743 - protein, 9 aa, Homo sapiens
  Light chain CDR3 for antibody 11372 (IGKV1D-13)
QHFNNYMYT

SEQ ID NO: 22744 - protein, 20 aa, Homo sapiens
  Heavy chain CDR3 for antibody 11372 (IGHV3-33)
AKDREMAATSHYYYYYGMDV

SEQ ID NO: 22745 - protein, 8 aa, Homo sapiens
  Light chain CDR3 for antibody 11373 (IGKV1-5)
QQYNSYYT

SEQ ID NO: 22746 - protein, 15 aa, Homo sapiens
  Heavy chain CDR3 for antibody 11373 (IGHV3-33)
ARDGSGSYSLYGMDV

SEQ ID NO: 22747 - protein, 9 aa, Homo sapiens
  Light chain CDR3 for antibody 11374 (IGKV4-1)
QQYYTTPPT

SEQ ID NO: 22748 - protein, 20 aa, Homo sapiens
  Heavy chain CDR3 for antibody 11374 (IGHV3-11)
ARGGATLIRGLIDYYYGMDV

SEQ ID NO: 22749 - protein, 9 aa, Homo sapiens
  Light chain CDR3 for antibody 11375 (IGKV1-17)
LHSNNYPWT

SEQ ID NO: 22750 - protein, 17 aa, Homo sapiens
  Heavy chain CDR3 for antibody 11375 (IGHV1-18)
ARERYYGSGIYKYAMDV

SEQ ID NO: 22751 - protein, 8 aa, Homo sapiens
  Light chain CDR3 for antibody 11376 (IGKV3-11)
QQRSNWLT

SEQ ID NO: 22752 - protein, 13 aa, Homo sapiens
  Heavy chain CDR3 for antibody 11376 (IGHV4-39)
ARHEVMIRGVFDY

SEQ ID NO: 22753 - protein, 9 aa, Homo sapiens
  Light chain CDR3 for antibody 11377 (IGKV1-9)
QQYNSYPRT

SEQ ID NO: 22754 - protein, 15 aa, Homo sapiens
  Heavy chain CDR3 for antibody 11377 (IGHV3-33)
ARRGGIAAAGYYFDY

SEQ ID NO: 22755 - protein, 9 aa, Homo sapiens
  Light chain CDR3 for antibody 11378 (IGKV1-17)
LQHNSYPYT

SEQ ID NO: 22756 - protein, 10 aa, Homo sapiens
  Heavy chain CDR3 for antibody 11378 (IGHV3-13)
ARDRGSYYDY

SEQ ID NO: 22757 - protein, 8 aa, Homo sapiens
  Light chain CDR3 for antibody 11379 (IGKV3-20)
QQYGSSRT

SEQ ID NO: 22758 - protein, 10 aa, Homo sapiens
  Heavy chain CDR3 for antibody 11379 (IGHV3-33)
ARDLGWSFDH

SEQ ID NO: 22759 - protein, 9 aa, Homo sapiens
  Light chain CDR3 for antibody 11380 (IGKV1-6)
LQAYNYPYT

SEQ ID NO: 22760 - protein, 20 aa, Homo sapiens
  Heavy chain CDR3 for antibody 11380 (IGHV3-20)
ARDSCSSTSCYGYYYYGMDV

SEQ ID NO: 22761 - protein, 9 aa, Homo sapiens
  Light chain CDR3 for antibody 11381 (IGKV2D-28)
MQALQTPPT

SEQ ID NO: 22762 - protein, 9 aa, Homo sapiens
  Heavy chain CDR3 for antibody 11381 (IGHV3-30)
ARDNWGFDY

SEQ ID NO: 22763 - protein, 9 aa, Homo sapiens
  Light chain CDR3 for antibody 11382 (IGKV1-27)
QKYNSAPYT

SEQ ID NO: 22764 - protein, 16 aa, Homo sapiens
  Heavy chain CDR3 for antibody 11382 (IGHV3-33)
ARGANYYGSGIHNFEY

SEQ ID NO: 22765 - protein, 9 aa, Homo sapiens
  Light chain CDR3 for antibody 11383 (IGKV1-6)
LQGYNYPRS

SEQ ID NO: 22766 - protein, 13 aa, Homo sapiens
  Heavy chain CDR3 for antibody 11383 (IGHV3-33)
ARDYCGGDCYLDY

SEQ ID NO: 22767 - protein, 9 aa, Homo sapiens
  Light chain CDR3 for antibody 11384 (IGKV1-17)
LQHNSYPRT

SEQ ID NO: 22768 - protein, 10 aa, Homo sapiens
  Heavy chain CDR3 for antibody 11384 (IGHV3-72)
CRDREGFGDV

SEQ ID NO: 22769 - protein, 9 aa, Homo sapiens
  Light chain CDR3 for antibody 11385 (IGKV1D-13)
QRFNNYLYT

SEQ ID NO: 22770 - protein, 11 aa, Homo sapiens
  Heavy chain CDR3 for antibody 11385 (IGHV3-33)
ARDILTGFLDH

SEQ ID NO: 22771 - protein, 9 aa, Homo sapiens
  Light chain CDR3 for antibody 11386 (IGKV1-27)
QKYNSAPYT

SEQ ID NO: 22772 - protein, 16 aa, Homo sapiens
  Heavy chain CDR3 for antibody 11386 (IGHV3-30)
ARDSSYYGSGYYGMDV

SEQ ID NO: 22773 - protein, 9 aa, Homo sapiens
  Light chain CDR3 for antibody 11387 (IGKV1-9)
QQLHIYPWT

SEQ ID NO: 22774 - protein, 14 aa, Homo sapiens
  Heavy chain CDR3 for antibody 11387 (IGHV3-33)
ARDGYDFLTGPFDY

SEQ ID NO: 22775 - protein, 9 aa, Homo sapiens
  Light chain CDR3 for antibody 11388 (IGKV1-39)
QQSYRTPLT

SEQ ID NO: 22776 - protein, 14 aa, Homo sapiens
  Heavy chain CDR3 for antibody 11388 (IGHV3-11)
ARDRGRHNYFGMDV

SEQ ID NO: 22777 - protein, 9 aa, Homo sapiens
  Light chain CDR3 for antibody 11389 (IGKV1-9)
QQLNSYPYT

SEQ ID NO: 22778 - protein, 10 aa, Homo sapiens
  Heavy chain CDR3 for antibody 11389 (IGHV1-8)
AKEQWLAPDY

SEQ ID NO: 22779 - protein, 9 aa, Homo sapiens
  Light chain CDR3 for antibody 11390 (IGKV3-20)
QQYGSSPYT

SEQ ID NO: 22780 - protein, 9 aa, Homo sapiens
  Heavy chain CDR3 for antibody 11390 (IGHV3-30)
VRDDYGVDV

SEQ ID NO: 22781 - protein, 9 aa, Homo sapiens
  Light chain CDR3 for antibody 11391 (IGKV3-11)
QQRSSWPPT

SEQ ID NO: 22782 - protein, 12 aa, Homo sapiens
  Heavy chain CDR3 for antibody 11391 (IGHV4-39)
ARHGSGSSYFDY

SEQ ID NO: 22783 - protein, 8 aa, Homo sapiens
  Light chain CDR3 for antibody 11392 (IGKV6-21)
HQSSSLYT

SEQ ID NO: 22784 - protein, 11 aa, Homo sapiens
  Heavy chain CDR3 for antibody 11392 (IGHV4-4)
AREAYYYGLDV

SEQ ID NO: 22785 - protein, 9 aa, Homo sapiens
  Light chain CDR3 for antibody 11393 (IGKV3-11)
QQRSNWQYT

SEQ ID NO: 22786 - protein, 15 aa, Homo sapiens
  Heavy chain CDR3 for antibody 11393 (IGHV3-23)
AKDRYFDWLSDAFDI

SEQ ID NO: 22787 - protein, 8 aa, Homo sapiens
  Light chain CDR3 for antibody 11394 (IGKV1D-13)
QQFNNYYT

SEQ ID NO: 22788 - protein, 15 aa, Homo sapiens
  Heavy chain CDR3 for antibody 11394 (IGHV1-69)
ARGAVDDYYYYGMDV

SEQ ID NO: 22789 - protein, 9 aa, Homo sapiens
  Light chain CDR3 for antibody 11395 (IGKV1-6)
LQDYNYPYT

SEQ ID NO: 22790 - protein, 16 aa, Homo sapiens
  Heavy chain CDR3 for antibody 11395 (IGHV3-33)
ARGYEMLTGDYHGMDV

SEQ ID NO: 22791 - protein, 9 aa, Homo sapiens
  Light chain CDR3 for antibody 11396 (IGKV1-17)
LQQYSYPWT

SEQ ID NO: 22792 - protein, 13 aa, Homo sapiens
  Heavy chain CDR3 for antibody 11396 (IGHV4-28)
ARKGATGYYGMDV

SEQ ID NO: 22793 - protein, 8 aa, Homo sapiens
  Light chain CDR3 for antibody 11397 (IGKV1D-13)
QQFNNYYT

SEQ ID NO: 22794 - protein, 11 aa, Homo sapiens
  Heavy chain CDR3 for antibody 11397 (IGHV4-59)
TRDRGLGSFDY

SEQ ID NO: 22795 - protein, 8 aa, Homo sapiens
  Light chain CDR3 for antibody 11398 (IGKV3-11)
LQRGNWPT

SEQ ID NO: 22796 - protein, 14 aa, Homo sapiens
  Heavy chain CDR3 for antibody 11398 (IGHV3-15)
ARDKTYPLSYGMDV

SEQ ID NO: 22797 - protein, 9 aa, Homo sapiens
  Light chain CDR3 for antibody 11399 (IGKV1D-13)
QQFNNYPYT

SEQ ID NO: 22798 - protein, 14 aa, Homo sapiens
  Heavy chain CDR3 for antibody 11399 (IGHV3-23)
AKDDIVRATGAFDI

SEQ ID NO: 22799 - protein, 9 aa, Homo sapiens
  Light chain CDR3 for antibody 11400 (IGKV3D-7)
QQDYEFPLT

SEQ ID NO: 22800 - protein, 11 aa, Homo sapiens
  Heavy chain CDR3 for antibody 11400 (IGHV3-74)
ARDRGNWGFDY

SEQ ID NO: 22801 - protein, 9 aa, Homo sapiens
  Light chain CDR3 for antibody 11401 (IGKV1D-16)
QQHNSYPYT

SEQ ID NO: 22802 - protein, 10 aa, Homo sapiens
  Heavy chain CDR3 for antibody 11401 (IGHV3-74)
ARADWGGFDY

SEQ ID NO: 22803 - protein, 9 aa, Homo sapiens
  Light chain CDR3 for antibody 11402 (IGKV2D-28)
MQALQTPPT

SEQ ID NO: 22804 - protein, 10 aa, Homo sapiens
  Heavy chain CDR3 for antibody 11402 (IGHV3-74)
ARENWGGFDY

SEQ ID NO: 22805 - protein, 9 aa, Homo sapiens
  Light chain CDR3 for antibody 11403 (IGKV1-39)
QQSYRTPLT

SEQ ID NO: 22806 - protein, 16 aa, Homo sapiens
  Heavy chain CDR3 for antibody 11403 (IGHV1-24)
ATDWNDRGYYYYGMDV

SEQ ID NO: 22807 - protein, 9 aa, Homo sapiens
  Light chain CDR3 for antibody 11404 (IGKV3D-7)
QQDYNLPYT

SEQ ID NO: 22808 - protein, 14 aa, Homo sapiens
  Heavy chain CDR3 for antibody 11404 (IGHV3-74)
ARDAYDILTGYYDY

SEQ ID NO: 22809 - protein, 10 aa, Homo sapiens
  Light chain CDR3 for antibody 11405 (IGKV3-11)
QQRSNWPIYT

SEQ ID NO: 22810 - protein, 17 aa, Homo sapiens
  Heavy chain CDR3 for antibody 11405 (IGHV3-33)
ARDSYDILTGYYKPFDY

SEQ ID NO: 22811 - protein, 11 aa, Homo sapiens
  Light chain CDR3 for antibody 11406 (IGKV3-11)
QQRSNWPPTWT

SEQ ID NO: 22812 - protein, 13 aa, Homo sapiens
  Heavy chain CDR3 for antibody 11406 (IGHV3-23)
AKDRGGSYSYFDF

SEQ ID NO: 22813 - protein, 9 aa, Homo sapiens
  Light chain CDR3 for antibody 11407 (IGKV2D-28)
MQALQTPPT

SEQ ID NO: 22814 - protein, 14 aa, Homo sapiens
  Heavy chain CDR3 for antibody 11407 (IGHV3-15)
SIYYYGSGRDFFDY

SEQ ID NO: 22815 - protein, 9 aa, Homo sapiens
  Light chain CDR3 for antibody 11408 (IGKV1-17)
LQHDSFPWT

SEQ ID NO: 22816 - protein, 19 aa, Homo sapiens
  Heavy chain CDR3 for antibody 11408 (IGHV3-20)
ARDLCSSTSCYGYYYGMDV

SEQ ID NO: 22817 - protein, 9 aa, Homo sapiens
  Light chain CDR3 for antibody 11409 (IGKV1D-16)
QQYNSYPYT

SEQ ID NO: 22818 - protein, 18 aa, Homo sapiens
  Heavy chain CDR3 for antibody 11409 (IGHV3-23)
AKDRITGTTYGYYAGLDV

SEQ ID NO: 22819 - protein, 9 aa, Homo sapiens
  Light chain CDR3 for antibody 11410 (IGKV1D-16)
QQYHSYPYT

SEQ ID NO: 22820 - protein, 20 aa, Homo sapiens
  Heavy chain CDR3 for antibody 11410 (IGHV3-33)
ARDPAQMERRYYYFYYGMDV

SEQ ID NO: 22821 - protein, 8 aa, Homo sapiens
  Light chain CDR3 for antibody 11411 (IGKV1-5)
QQYNSYWT

SEQ ID NO: 22822 - protein, 18 aa, Homo sapiens
  Heavy chain CDR3 for antibody 11411 (IGHV3-33)
ARDHYDILTGYYKGWFDP

SEQ ID NO: 22823 - protein, 9 aa, Homo sapiens
  Light chain CDR3 for antibody 11412 (IGKV3-15)
QQYNNWPRT

SEQ ID NO: 22824 - protein, 14 aa, Homo sapiens
  Heavy chain CDR3 for antibody 11412 (IGHV3-33)
ARDTVAAGFNGMDV

SEQ ID NO: 22825 - protein, 8 aa, Homo sapiens
  Light chain CDR3 for antibody 11413 (IGKV1-5)
QQYNSYYT

SEQ ID NO: 22826 - protein, 17 aa, Homo sapiens
  Heavy chain CDR3 for antibody 11413 (IGHV3-33)
ARSYYDILTGYSYYFDY

SEQ ID NO: 22827 - protein, 8 aa, Homo sapiens
  Light chain CDR3 for antibody 11414 (IGKV1-5)
QQYNSYYT

SEQ ID NO: 22828 - protein, 17 aa, Homo sapiens
  Heavy chain CDR3 for antibody 11414 (IGHV3-33)
ARCGYSSSWYDPYYFDY

SEQ ID NO: 22829 - protein, 9 aa, Homo sapiens
  Light chain CDR3 for antibody 11415 (IGKV1-17)
LQHNSFPLT

SEQ ID NO: 22830 - protein, 9 aa, Homo sapiens
  Heavy chain CDR3 for antibody 11415 (IGHV3-30)
ARPNWGFDY

SEQ ID NO: 22831 - protein, 11 aa, Homo sapiens
  Light chain CDR3 for antibody 11416 (IGKV3-11)
QQRSNWPPTWT

SEQ ID NO: 22832 - protein, 17 aa, Homo sapiens
  Heavy chain CDR3 for antibody 11416 (IGHV4-39)
ARVLRYFDWLSHDAFDI

SEQ ID NO: 22833 - protein, 9 aa, Homo sapiens
  Light chain CDR3 for antibody 11417 (IGKV1-6)
LQDYNYPWT

SEQ ID NO: 22834 - protein, 15 aa, Homo sapiens
  Heavy chain CDR3 for antibody 11417 (IGHV4-59)
ARYLGHYYGSVSIDY

SEQ ID NO: 22835 - protein, 9 aa, Homo sapiens
  Light chain CDR3 for antibody 11418 (IGKV3-15)
QQYHNWPLT

SEQ ID NO: 22836 - protein, 15 aa, Homo sapiens
  Heavy chain CDR3 for antibody 11418 (IGHV3-23)
AKEFTMVRGVITPDY

SEQ ID NO: 22837 - protein, 9 aa, Homo sapiens
  Light chain CDR3 for antibody 11419 (IGKV1-9)
QQLISYPLT

SEQ ID NO: 22838 - protein, 18 aa, Homo sapiens
  Heavy chain CDR3 for antibody 11419 (IGHV3-33)
ARDYDSLTTYPEDYGMEV

SEQ ID NO: 22839 - protein, 9 aa, Homo sapiens
  Light chain CDR3 for antibody 11420 (IGKV1-27)
QKYNSAPYT

SEQ ID NO: 22840 - protein, 20 aa, Homo sapiens
  Heavy chain CDR3 for antibody 11420 (IGHV3-53)
ATHYDILTGSPYYYYCALDV

SEQ ID NO: 22841 - protein, 9 aa, Homo sapiens
  Light chain CDR3 for antibody 11421 (IGKV1-6)
LQDYKSPFT

SEQ ID NO: 22842 - protein, 17 aa, Homo sapiens
  Heavy chain CDR3 for antibody 11421 (IGHV4-39)
ARQGWYYGSGSSLLFDY

SEQ ID NO: 22843 - protein, 9 aa, Homo sapiens
  Light chain CDR3 for antibody 11422 (IGKV1-9)
QQVKGYPYT

SEQ ID NO: 22844 - protein, 18 aa, Homo sapiens
  Heavy chain CDR3 for antibody 11422 (IGHV1-46)
AREGDYVWGSYRPNWFDP

SEQ ID NO: 22845 - protein, 9 aa, Homo sapiens
  Light chain CDR3 for antibody 11423 (IGKV1-6)
LQDFHYPWT

SEQ ID NO: 22846 - protein, 12 aa, Homo sapiens
  Heavy chain CDR3 for antibody 11423 (IGHV1-46)
ARGLTGDHASDI

SEQ ID NO: 22847 - protein, 9 aa, Homo sapiens
  Light chain CDR3 for antibody 11424 (IGKV5-2)
LQHDKFPYT

SEQ ID NO: 22848 - protein, 9 aa, Homo sapiens
  Heavy chain CDR3 for antibody 11424 (IGHV3-30)
ARPNWGFDY

SEQ ID NO: 22849 - protein, 9 aa, Homo sapiens
  Light chain CDR3 for antibody 11425 (IGKV3-20)
QQYGSSPYT

SEQ ID NO: 22850 - protein, 9 aa, Homo sapiens
  Heavy chain CDR3 for antibody 11425 (IGHV3-74)
ARSEYQPTY

SEQ ID NO: 22851 - protein, 10 aa, Homo sapiens
  Light chain CDR3 for antibody 11426 (IGKV3-11)
QQRSNWLMYT

SEQ ID NO: 22852 - protein, 17 aa, Homo sapiens
  Heavy chain CDR3 for antibody 11426 (IGHV3-33)
ARGFSGYDGYYYYGMDV

SEQ ID NO: 22853 - protein, 10 aa, Homo sapiens
  Light chain CDR3 for antibody 11427 (IGKV3-11)
QQRSNWPIFT

SEQ ID NO: 22854 - protein, 10 aa, Homo sapiens
  Heavy chain CDR3 for antibody 11427 (IGHV4-39)
ARQLGNWFDP

SEQ ID NO: 22855 - protein, 9 aa, Homo sapiens
  Light chain CDR3 for antibody 11428 (IGKV1D-13)
QRFNNYLYT

SEQ ID NO: 22856 - protein, 20 aa, Homo sapiens
  Heavy chain CDR3 for antibody 11428 (IGHV1-f)
ATGLITFVRGVILTYRSFDY

SEQ ID NO: 22857 - protein, 10 aa, Homo sapiens
  Light chain CDR3 for antibody 11429 (IGKV3-15)
QQYNNWPPYT

SEQ ID NO: 22858 - protein, 15 aa, Homo sapiens
  Heavy chain CDR3 for antibody 11429 (IGHV3-33)
ARDGLRYFDWLFPWY

SEQ ID NO: 22859 - protein, 9 aa, Homo sapiens
  Light chain CDR3 for antibody 11430 (IGKV3-15)
QQYHNWPLT

SEQ ID NO: 22860 - protein, 18 aa, Homo sapiens
  Heavy chain CDR3 for antibody 11430 (IGHV3-33)
ARGLLWFGVSYYYYGMDV

SEQ ID NO: 22861 - protein, 9 aa, Homo sapiens
  Light chain CDR3 for antibody 11431 (IGKV1-17)
IQHNTYPYT

SEQ ID NO: 22862 - protein, 18 aa, Homo sapiens
  Heavy chain CDR3 for antibody 11431 (IGHV4-59)
AREGDYVWGSYRPNCFDP

SEQ ID NO: 22863 - protein, 10 aa, Homo sapiens
  Light chain CDR3 for antibody 11432 (IGKV3-20)
QQYGRSPPVT

SEQ ID NO: 22864 - protein, 14 aa, Homo sapiens
  Heavy chain CDR3 for antibody 11432 (IGHV3-33)
ARDRIAAASSDFDC

SEQ ID NO: 22865 - protein, 9 aa, Homo sapiens
  Light chain CDR3 for antibody 11433 (IGKV1-6)
LQDFHYPWT

SEQ ID NO: 22866 - protein, 13 aa, Homo sapiens
  Heavy chain CDR3 for antibody 11433 (IGHV3-33)
ASGYSGYDWYFDL

SEQ ID NO: 22867 - protein, 8 aa, Homo sapiens
  Light chain CDR3 for antibody 11434 (IGKV3D-7)
QQDYNLLT

SEQ ID NO: 22868 - protein, 11 aa, Homo sapiens
  Heavy chain CDR3 for antibody 11434 (IGHV3-33)
ARDRSTGWLDY

SEQ ID NO: 22869 - protein, 9 aa, Homo sapiens
  Light chain CDR3 for antibody 11435 (IGKV2-30)
MQGTHWPLT

SEQ ID NO: 22870 - protein, 10 aa, Homo sapiens
  Heavy chain CDR3 for antibody 11435 (IGHV3-23)
ATIVGPFLDV

SEQ ID NO: 22871 - protein, 9 aa, Homo sapiens
  Light chain CDR3 for antibody 11436 (IGKV1D-13)
QQFNNYPYT

SEQ ID NO: 22872 - protein, 13 aa, Homo sapiens
  Heavy chain CDR3 for antibody 11436 (IGHV3-33)
GRTDYYSYYGVDV

SEQ ID NO: 22873 - protein, 9 aa, Homo sapiens
  Light chain CDR3 for antibody 11437 (IGKV3-15)
QQYNNWPYT

SEQ ID NO: 22874 - protein, 8 aa, Homo sapiens
  Heavy chain CDR3 for antibody 11437 (IGHV3-23)
AETFLFDY

SEQ ID NO: 22875 - protein, 8 aa, Homo sapiens
  Light chain CDR3 for antibody 11438 (IGKV3-11)
QQRSNWLT

SEQ ID NO: 22876 - protein, 14 aa, Homo sapiens
  Heavy chain CDR3 for antibody 11438 (IGHV3-15)
SIYFYGSGRDYFDY

SEQ ID NO: 22877 - protein, 10 aa, Homo sapiens
  Light chain CDR3 for antibody 11439 (IGKV1-17)
LQHNSYPMYT

SEQ ID NO: 22878 - protein, 11 aa, Homo sapiens
  Heavy chain CDR3 for antibody 11439 (IGHV3-33)
ARARYTTGLDY

SEQ ID NO: 22879 - protein, 10 aa, Homo sapiens
  Light chain CDR3 for antibody 11440 (IGKV3-15)
QQYNNWPPIT

SEQ ID NO: 22880 - protein, 13 aa, Homo sapiens
  Heavy chain CDR3 for antibody 11440 (IGHV4-39)
ARRGVVAPAAFDY

SEQ ID NO: 22881 - protein, 10 aa, Homo sapiens
  Light chain CDR3 for antibody 11441 (IGKV1-27)
QKYNSAPMYT

SEQ ID NO: 22882 - protein, 12 aa, Homo sapiens
  Heavy chain CDR3 for antibody 11441 (IGHV3-33)
ARGYFGSGYAHF

SEQ ID NO: 22883 - protein, 9 aa, Homo sapiens
  Light chain CDR3 for antibody 11442 (IGKV1-6)
QQEYNYPLT

SEQ ID NO: 22884 - protein, 12 aa, Homo sapiens
  Heavy chain CDR3 for antibody 11442 (IGHV1-46)
AREDYDIDGMDV

SEQ ID NO: 22885 - protein, 8 aa, Homo sapiens
  Light chain CDR3 for antibody 11443 (IGKV1D-13)
QQFNNYPT

SEQ ID NO: 22886 - protein, 14 aa, Homo sapiens
  Heavy chain CDR3 for antibody 11443 (IGHV3-33)
ARQYSYGYPYYFDY

SEQ ID NO: 22887 - protein, 8 aa, Homo sapiens
  Light chain CDR3 for antibody 11444 (IGKV3D-7)
QQDYNLVT

SEQ ID NO: 22888 - protein, 18 aa, Homo sapiens
  Heavy chain CDR3 for antibody 11444 (IGHV4-59)
ARRITMVRGEGSYYGMDV

SEQ ID NO: 22889 - protein, 9 aa, Homo sapiens
  Light chain CDR3 for antibody 11445 (IGKV3-20)
QQFGRSPRT

SEQ ID NO: 22890 - protein, 15 aa, Homo sapiens
  Heavy chain CDR3 for antibody 11445 (IGHV1-18)
ARGYCSSTSCYYFDY

SEQ ID NO: 22891 - protein, 9 aa, Homo sapiens
  Light chain CDR3 for antibody 11446 (IGKV2D-28)
MQVLQTPFT

SEQ ID NO: 22892 - protein, 19 aa, Homo sapiens
  Heavy chain CDR3 for antibody 11446 (IGHV4-59)
ARDRVVGATTYYYYYGMDV

SEQ ID NO: 22893 - protein, 9 aa, Homo sapiens
  Light chain CDR3 for antibody 11447 (IGKV1-6)
LQDFHYPWT

SEQ ID NO: 22894 - protein, 12 aa, Homo sapiens
  Heavy chain CDR3 for antibody 11447 (IGHV4-39)
ARHGSGSSYFDY

SEQ ID NO: 22895 - protein, 10 aa, Homo sapiens
  Light chain CDR3 for antibody 11448 (IGKV3-11)
QQRSIWPPYT

SEQ ID NO: 22896 - protein, 14 aa, Homo sapiens
  Heavy chain CDR3 for antibody 11448 (IGHV3-23)
AKSRIVGALYYFDY

SEQ ID NO: 22897 - protein, 7 aa, Homo sapiens
  Light chain CDR3 for antibody 11449 (IGKV3-11)
QQRSKFT

SEQ ID NO: 22898 - protein, 12 aa, Homo sapiens
  Heavy chain CDR3 for antibody 11449 (IGHV1-18)
ARILFYGDYFDY

SEQ ID NO: 22899 - protein, 9 aa, Homo sapiens
  Light chain CDR3 for antibody 11450 (IGKV1-6)
LQYYNYPRT

SEQ ID NO: 22900 - protein, 14 aa, Homo sapiens
  Heavy chain CDR3 for antibody 11450 (IGHV3-33)
ARASSGSSYWYCDL

SEQ ID NO: 22901 - protein, 8 aa, Homo sapiens
  Light chain CDR3 for antibody 11451 (IGKV3-20)
QQYGSSLT

SEQ ID NO: 22902 - protein, 19 aa, Homo sapiens
  Heavy chain CDR3 for antibody 11451 (IGHV3-33)
ARDRYYDILTGYSSYYFDY

SEQ ID NO: 22903 - protein, 9 aa, Homo sapiens
  Light chain CDR3 for antibody 11452 (IGKV3D-7)
QQDYKLPLT

SEQ ID NO: 22904 - protein, 11 aa, Homo sapiens
  Heavy chain CDR3 for antibody 11452 (IGHV1-24)
ATELGLYYFDY

SEQ ID NO: 22905 - protein, 9 aa, Homo sapiens
  Light chain CDR3 for antibody 11453 (IGKV1-39)
QQSYSTPFT

SEQ ID NO: 22906 - protein, 23 aa, Homo sapiens
  Heavy chain CDR3 for antibody 11453 (IGHV4-59)
ARERTYSGILPGYYEDYYYGMDV

SEQ ID NO: 22907 - protein, 9 aa, Homo sapiens
  Light chain CDR3 for antibody 11454 (IGKV1D-13)
QQFNNYPYT

SEQ ID NO: 22908 - protein, 17 aa, Homo sapiens
  Heavy chain CDR3 for antibody 11454 (IGHV3-33)
AREGYYYGSGSYYTFDY

SEQ ID NO: 22909 - protein, 9 aa, Homo sapiens
  Light chain CDR3 for antibody 11455 (IGKV1-16)
QQYNSYPYT

SEQ ID NO: 22910 - protein, 13 aa, Homo sapiens
  Heavy chain CDR3 for antibody 11455 (IGHV4-39)
ARRDVLAPAAFEY

SEQ ID NO: 22911 - protein, 9 aa, Homo sapiens
  Light chain CDR3 for antibody 11456 (IGKV1-39)
QQSYSTPYT

SEQ ID NO: 22912 - protein, 13 aa, Homo sapiens
  Heavy chain CDR3 for antibody 11456 (IGHV3-33)
ARGRGYNYGYGDY

SEQ ID NO: 22913 - protein, 9 aa, Homo sapiens
  Light chain CDR3 for antibody 11457 (IGKV1-6)
LQDYNYPRT

SEQ ID NO: 22914 - protein, 16 aa, Homo sapiens
  Heavy chain CDR3 for antibody 11457 (IGHV3-33)
AREGDILTGYYWYFDL

SEQ ID NO: 22915 - protein, 9 aa, Homo sapiens
  Light chain CDR3 for antibody 11458 (IGKV1-17)
LHSNNYPWT

SEQ ID NO: 22916 - protein, 17 aa, Homo sapiens
  Heavy chain CDR3 for antibody 11458 (IGHV3-33)
ARGGAAAGPYLYYGLDV

SEQ ID NO: 22917 - protein, 9 aa, Homo sapiens
  Light chain CDR3 for antibody 11459 (IGKV1-9)
QQLISYPLT

SEQ ID NO: 22918 - protein, 16 aa, Homo sapiens
  Heavy chain CDR3 for antibody 11459 (IGHV3-23)
ARNWNDVGDYYYGMDV

SEQ ID NO: 22919 - protein, 9 aa, Homo sapiens
  Light chain CDR3 for antibody 11460 (IGKV1-9)
QQLISYPLT

SEQ ID NO: 22920 - protein, 18 aa, Homo sapiens
  Heavy chain CDR3 for antibody 11460 (IGHV3-30)
ARDRHHDILTGYSDAFEI

SEQ ID NO: 22921 - protein, 9 aa, Homo sapiens
  Light chain CDR3 for antibody 11461 (IGKV1-6)
LQVYSYPWT

SEQ ID NO: 22922 - protein, 20 aa, Homo sapiens
  Heavy chain CDR3 for antibody 11461 (IGHV3-20)
ARDRCSSTSCYGYYYYGMDV

SEQ ID NO: 22923 - protein, 9 aa, Homo sapiens
  Light chain CDR3 for antibody 11462 (IGKV1D-16)
QQYNSYPFT

SEQ ID NO: 22924 - protein, 16 aa, Homo sapiens
  Heavy chain CDR3 for antibody 11462 (IGHV3-33)
ARDYYDSSGYWGHFDY

SEQ ID NO: 22925 - protein, 8 aa, Homo sapiens
  Light chain CDR3 for antibody 11463 (IGKV1-5)
QQYNSYYT

SEQ ID NO: 22926 - protein, 18 aa, Homo sapiens
  Heavy chain CDR3 for antibody 11463 (IGHV3-23)
ARYHLYFGSGFGSDGMDV

SEQ ID NO: 22927 - protein, 8 aa, Homo sapiens
  Light chain CDR3 for antibody 11464 (IGKV3-20)
QQYGSSLT

SEQ ID NO: 22928 - protein, 18 aa, Homo sapiens
  Heavy chain CDR3 for antibody 11464 (IGHV1-8)
ARSRIAAAGIYYYYGMDV

SEQ ID NO: 22929 - protein, 9 aa, Homo sapiens
  Light chain CDR3 for antibody 11465 (IGKV1-27)
QKYNSAPYT

SEQ ID NO: 22930 - protein, 11 aa, Homo sapiens
  Heavy chain CDR3 for antibody 11465 (IGHV1-46)
AREEDLGAFDI

SEQ ID NO: 22931 - protein, 9 aa, Homo sapiens
  Light chain CDR3 for antibody 11466 (IGKV1-27)
QKYNSAPYT

SEQ ID NO: 22932 - protein, 13 aa, Homo sapiens
  Heavy chain CDR3 for antibody 11466 (IGHV1-18)
ARSITMVRGVIGY

SEQ ID NO: 22933 - protein, 9 aa, Homo sapiens
  Light chain CDR3 for antibody 11467 (IGKV1-6)
LQDYNYPYT

SEQ ID NO: 22934 - protein, 17 aa, Homo sapiens
  Heavy chain CDR3 for antibody 11467 (IGHV3-33)
AREGYYYGSRSYHFFDY

SEQ ID NO: 22935 - protein, 9 aa, Homo sapiens
  Light chain CDR3 for antibody 11468 (IGKV3D-7)
QQDYKLPRT

SEQ ID NO: 22936 - protein, 13 aa, Homo sapiens
  Heavy chain CDR3 for antibody 11468 (IGHV1-18)
ARKWEWDLLNFDY

SEQ ID NO: 22937 - protein, 9 aa, Homo sapiens
  Light chain CDR3 for antibody 11469 (IGKV1D-13)
QQFNNYPYT

SEQ ID NO: 22938 - protein, 17 aa, Homo sapiens
  Heavy chain CDR3 for antibody 11469 (IGHV3-23)
AKERNWNDGYYYYGMDV

SEQ ID NO: 22939 - protein, 10 aa, Homo sapiens
  Light chain CDR3 for antibody 11470 (IGKV3-11)
QQRSNWPIFT

SEQ ID NO: 22940 - protein, 10 aa, Homo sapiens
  Heavy chain CDR3 for antibody 11470 (IGHV3-33)
ARDLGWSFDH

SEQ ID NO: 22941 - protein, 9 aa, Homo sapiens
  Light chain CDR3 for antibody 11471 (IGKV1-6)
LQDFHYPWT

SEQ ID NO: 22942 - protein, 15 aa, Homo sapiens
  Heavy chain CDR3 for antibody 11471 (IGHV3-23)
AKDGSYYYYYYGMDV

SEQ ID NO: 22943 - protein, 9 aa, Homo sapiens
  Light chain CDR3 for antibody 11472 (IGKV4-1)
QQYYSTPWT

SEQ ID NO: 22944 - protein, 18 aa, Homo sapiens
  Heavy chain CDR3 for antibody 11472 (IGHV3-30)
ARDRHHDILTGYSDAFEI

SEQ ID NO: 22945 - protein, 9 aa, Homo sapiens
  Light chain CDR3 for antibody 11473 (IGKV1D-13)
QQFNNYPYT

SEQ ID NO: 22946 - protein, 9 aa, Homo sapiens
  Heavy chain CDR3 for antibody 11473 (IGHV3-33)
ARELAYFDY

SEQ ID NO: 22947 - protein, 9 aa, Homo sapiens
  Light chain CDR3 for antibody 11474 (IGKV3D-7)
QQDYTLPLT

SEQ ID NO: 22948 - protein, 20 aa, Homo sapiens
  Heavy chain CDR3 for antibody 11474 (IGHV3-33)
ARDNDSSGYYDYYYYYGMDV

SEQ ID NO: 22949 - protein, 9 aa, Homo sapiens
  Light chain CDR3 for antibody 11475 (IGKV4-1)
QQYYSTPRT

SEQ ID NO: 22950 - protein, 18 aa, Homo sapiens
  Heavy chain CDR3 for antibody 11475 (IGHV3-33)
ARGLLWFGVSYYYYGMDV

SEQ ID NO: 22951 - protein, 11 aa, Homo sapiens
  Light chain CDR3 for antibody 11476 (IGKV3-11)
QQRSNWPPTWT

SEQ ID NO: 22952 - protein, 17 aa, Homo sapiens
  Heavy chain CDR3 for antibody 11476 (IGHV3-23)
AKEGSSSSWYGGLYFDY

SEQ ID NO: 22953 - protein, 9 aa, Homo sapiens
  Light chain CDR3 for antibody 11477 (IGKV3-15)
QQYHNWPYT

SEQ ID NO: 22954 - protein, 14 aa, Homo sapiens
  Heavy chain CDR3 for antibody 11477 (IGHV3-20)
ARDEGSGGYDVFDI

SEQ ID NO: 22955 - protein, 9 aa, Homo sapiens
  Light chain CDR3 for antibody 11478 (IGKV2D-28)
MQVLQTPFT

SEQ ID NO: 22956 - protein, 17 aa, Homo sapiens
  Heavy chain CDR3 for antibody 11478 (IGHV4-59)
ARDRELLWFGEFGGMDV

SEQ ID NO: 22957 - protein, 9 aa, Homo sapiens
  Light chain CDR3 for antibody 11479 (IGKV3-20)
QQYGSSPYT

SEQ ID NO: 22958 - protein, 10 aa, Homo sapiens
  Heavy chain CDR3 for antibody 11479 (IGHV4-31)
ARHGVAGTNY

SEQ ID NO: 22959 - protein, 9 aa, Homo sapiens
  Light chain CDR3 for antibody 11480 (IGKV1D-13)
QRFNNYLYT

SEQ ID NO: 22960 - protein, 12 aa, Homo sapiens
  Heavy chain CDR3 for antibody 11480 (IGHV1-18)
ARVLFYGDYFDY

SEQ ID NO: 22961 - protein, 9 aa, Homo sapiens
  Light chain CDR3 for antibody 11481 (IGKV1D-13)
QQFNNYPYT

SEQ ID NO: 22962 - protein, 14 aa, Homo sapiens
  Heavy chain CDR3 for antibody 11481 (IGHV3-33)
ARDLDIMATSPFAY

SEQ ID NO: 22963 - protein, 9 aa, Homo sapiens
  Light chain CDR3 for antibody 11482 (IGKV6-21)
HQSSTLPLT

SEQ ID NO: 22964 - protein, 11 aa, Homo sapiens
  Heavy chain CDR3 for antibody 11482 (IGHV3-30)
ARDQGFGDLTH

SEQ ID NO: 22965 - protein, 8 aa, Homo sapiens
  Light chain CDR3 for antibody 11483 (IGKV3D-7)
QQDYNLVT

SEQ ID NO: 22966 - protein, 18 aa, Homo sapiens
  Heavy chain CDR3 for antibody 11483 (IGHV4-59)
ARERGNWNDVDYYYGMDV

SEQ ID NO: 22967 - protein, 6 aa, Homo sapiens
  Light chain CDR3 for antibody 11484 (IGKV3-20)
QQYGST

SEQ ID NO: 22968 - protein, 8 aa, Homo sapiens
  Heavy chain CDR3 for antibody 11484 (IGHV3-33)
ARDRGFDY

SEQ ID NO: 22969 - protein, 9 aa, Homo sapiens
  Light chain CDR3 for antibody 11485 (IGKV1-9)
QQLTSFPRT

SEQ ID NO: 22970 - protein, 13 aa, Homo sapiens
  Heavy chain CDR3 for antibody 11485 (IGHV3-33)
ARDYCGGDCYLDY

SEQ ID NO: 22971 - protein, 9 aa, Homo sapiens
  Light chain CDR3 for antibody 11486 (IGKV1-9)
QQLISYPLT

SEQ ID NO: 22972 - protein, 13 aa, Homo sapiens
  Heavy chain CDR3 for antibody 11486 (IGHV4-59)
APFRVMVRGVLDY

SEQ ID NO: 22973 - protein, 8 aa, Homo sapiens
  Light chain CDR3 for antibody 11487 (IGKV3-20)
QQYGSSLT

SEQ ID NO: 22974 - protein, 17 aa, Homo sapiens
  Heavy chain CDR3 for antibody 11487 (IGHV3-23)
AKDGIGELSYYYYGMDV

SEQ ID NO: 22975 - protein, 9 aa, Homo sapiens
  Light chain CDR3 for antibody 11488 (IGKV1-16)
QQYNSYPYT

SEQ ID NO: 22976 - protein, 17 aa, Homo sapiens
  Heavy chain CDR3 for antibody 11488 (IGHV1-46)
AKDYDILTGYSHNWFDH

SEQ ID NO: 22977 - protein, 9 aa, Homo sapiens
  Light chain CDR3 for antibody 11489 (IGKV3-11)
QQRSNWPYT

SEQ ID NO: 22978 - protein, 20 aa, Homo sapiens
  Heavy chain CDR3 for antibody 11489 (IGHV3-23)
AKGMGGLRYFDWPHYYGMDV

SEQ ID NO: 22979 - protein, 9 aa, Homo sapiens
  Light chain CDR3 for antibody 11490 (IGKV2-30)
MQGTHWPLT

SEQ ID NO: 22980 - protein, 9 aa, Homo sapiens
  Heavy chain CDR3 for antibody 11490 (IGHV3-30)
ARGRVSLDV

SEQ ID NO: 22981 - protein, 9 aa, Homo sapiens
  Light chain CDR3 for antibody 11491 (IGKV1D-16)
LQDYNYPRT

SEQ ID NO: 22982 - protein, 9 aa, Homo sapiens
  Heavy chain CDR3 for antibody 11491 (IGHV4-59)
ARDDGDFDY

SEQ ID NO: 22983 - protein, 9 aa, Homo sapiens
  Light chain CDR3 for antibody 11492 (IGKV1D-16)
QQYDSYPWT

SEQ ID NO: 22984 - protein, 15 aa, Homo sapiens
  Heavy chain CDR3 for antibody 11492 (IGHV3-33)
AREGLRYFHYYGMDV

SEQ ID NO: 22985 - protein, 9 aa, Homo sapiens
  Light chain CDR3 for antibody 11493 (IGKV1D-13)
QQFNNYPHT

SEQ ID NO: 22986 - protein, 12 aa, Homo sapiens
  Heavy chain CDR3 for antibody 11493 (IGHV3-33)
ARGGFDWGSIDY

SEQ ID NO: 22987 - protein, 9 aa, Homo sapiens
  Light chain CDR3 for antibody 11494 (IGKV1-6)
LQQHSYPWT

SEQ ID NO: 22988 - protein, 14 aa, Homo sapiens
  Heavy chain CDR3 for antibody 11494 (IGHV1-46)
ARKGIVGGFDAFDV

SEQ ID NO: 22989 - protein, 8 aa, Homo sapiens
  Light chain CDR3 for antibody 11495 (IGKV1-13)
QQYNSYWT

SEQ ID NO: 22990 - protein, 14 aa, Homo sapiens
  Heavy chain CDR3 for antibody 11495 (IGHV3-33)
AREEDYYYYYDMDV

SEQ ID NO: 22991 - protein, 9 aa, Homo sapiens
  Light chain CDR3 for antibody 11496 (IGKV1-9)
QQGNTYSRT

SEQ ID NO: 22992 - protein, 11 aa, Homo sapiens
  Heavy chain CDR3 for antibody 11496 (IGHV4-59)
ARDRGLGSFDY

SEQ ID NO: 22993 - protein, 6 aa, Homo sapiens
  Light chain CDR3 for antibody 11497 (IGKV3-20)
QQYGST

SEQ ID NO: 22994 - protein, 14 aa, Homo sapiens
  Heavy chain CDR3 for antibody 11497 (IGHV3-33)
ARDKTYPLSYGMDV

SEQ ID NO: 22995 - protein, 9 aa, Homo sapiens
  Light chain CDR3 for antibody 11498 (IGKV3-11)
QQRSNWPYT

SEQ ID NO: 22996 - protein, 13 aa, Homo sapiens
  Heavy chain CDR3 for antibody 11498 (IGHV3-33)
ARTDYYYYYGLDA

SEQ ID NO: 22997 - protein, 10 aa, Homo sapiens
  Light chain CDR3 for antibody 11499 (IGKV3-11)
QQRSNWPPFT

SEQ ID NO: 22998 - protein, 15 aa, Homo sapiens
  Heavy chain CDR3 for antibody 11499 (IGHV1-46)
ARGRFFDWLLSPFDY

SEQ ID NO: 22999 - protein, 9 aa, Homo sapiens
  Light chain CDR3 for antibody 11500 (IGKV1-6)
LQDYNSPYT

SEQ ID NO: 23000 - protein, 17 aa, Homo sapiens
  Heavy chain CDR3 for antibody 11500 (IGHV3-66)
ARVQYDILTGYSPYFDN

SEQ ID NO: 23001 - protein, 9 aa, Homo sapiens
  Light chain CDR3 for antibody 11501 (IGKV3-20)
QQYNYWPLT

SEQ ID NO: 23002 - protein, 17 aa, Homo sapiens
  Heavy chain CDR3 for antibody 11501 (IGHV3-23)
AKGNYGSGSYYNGDFQH

SEQ ID NO: 23003 - protein, 9 aa, Homo sapiens
  Light chain CDR3 for antibody 11502 (IGKV3-11)
QQRSSWPPT

SEQ ID NO: 23004 - protein, 13 aa, Homo sapiens
  Heavy chain CDR3 for antibody 11502 (IGHV3-33)
VSTGDSYYYVMDV

SEQ ID NO: 23005 - protein, 10 aa, Homo sapiens
  Light chain CDR3 for antibody 11503 (IGKV3-11)
QQRSNWPALT

SEQ ID NO: 23006 - protein, 14 aa, Homo sapiens
  Heavy chain CDR3 for antibody 11503 (IGHV3-33)
ARDLDIMATSPFAY

SEQ ID NO: 23007 - protein, 10 aa, Homo sapiens
  Light chain CDR3 for antibody 11504 (IGKV3-11)
QQRSNWPMYT

SEQ ID NO: 23008 - protein, 12 aa, Homo sapiens
  Heavy chain CDR3 for antibody 11504 (IGHV3-23)
ARDSGSYYYFDY

SEQ ID NO: 23009 - protein, 9 aa, Homo sapiens
  Light chain CDR3 for antibody 11505 (IGKV1-39)
QQGFSTPWT

SEQ ID NO: 23010 - protein, 13 aa, Homo sapiens
  Heavy chain CDR3 for antibody 11505 (IGHV4-39)
ARREVVGGRGFDY

SEQ ID NO: 23011 - protein, 9 aa, Homo sapiens
  Light chain CDR3 for antibody 11506 (IGKV3D-20)
QQYGSSPLT

SEQ ID NO: 23012 - protein, 5 aa, Homo sapiens
  Heavy chain CDR3 for antibody 11506 (IGHV4-39)
ARGDY

SEQ ID NO: 23013 - protein, 9 aa, Homo sapiens
  Light chain CDR3 for antibody 11507 (IGKV1-5)
QQYNTYSRT

SEQ ID NO: 23014 - protein, 23 aa, Homo sapiens
  Heavy chain CDR3 for antibody 11507 (IGHV1-18)
ARNLHYDILTGYFPYYFYYGMDV

SEQ ID NO: 23015 - protein, 9 aa, Homo sapiens
  Light chain CDR3 for antibody 11508 (IGKV1-6)
LQDFHYPWT

SEQ ID NO: 23016 - protein, 13 aa, Homo sapiens
  Heavy chain CDR3 for antibody 11508 (IGHV3-33)
ARKAYGDYFYFDY

SEQ ID NO: 23017 - protein, 8 aa, Homo sapiens
  Light chain CDR3 for antibody 11509 (IGKV1D-13)
QQFNNYPT

SEQ ID NO: 23018 - protein, 14 aa, Homo sapiens
  Heavy chain CDR3 for antibody 11509 (IGHV4-59)
AKGGSGSYYNWFDP

SEQ ID NO: 23019 - protein, 9 aa, Homo sapiens
  Light chain CDR3 for antibody 11510 (IGKV1D-16)
QQYKSYPLT

SEQ ID NO: 23020 - protein, 16 aa, Homo sapiens
  Heavy chain CDR3 for antibody 11510 (IGHV4-59)
ARGRYFEWLSHDAFDI

SEQ ID NO: 23021 - protein, 9 aa, Homo sapiens
  Light chain CDR3 for antibody 11511 (IGKV1-17)
LQHNSFPYT

SEQ ID NO: 23022 - protein, 17 aa, Homo sapiens
  Heavy chain CDR3 for antibody 11511 (IGHV4-39)
ARVLRYFEWLLGDVFDI

SEQ ID NO: 23023 - protein, 8 aa, Homo sapiens
  Light chain CDR3 for antibody 11512 (IGKV3-20)
QQYGSSRT

SEQ ID NO: 23024 - protein, 8 aa, Homo sapiens
  Heavy chain CDR3 for antibody 11512 (IGHV3-23)
AETFLFDY

SEQ ID NO: 23025 - protein, 9 aa, Homo sapiens
  Light chain CDR3 for antibody 11513 (IGKV1D-16)
QQYNYFPLT

SEQ ID NO: 23026 - protein, 13 aa, Homo sapiens
  Heavy chain CDR3 for antibody 11513 (IGHV3-23)
ASPFNWNDDFFDY

SEQ ID NO: 23027 - protein, 9 aa, Homo sapiens
  Light chain CDR3 for antibody 11514 (IGKV1-5)
QQYNSYSWT

SEQ ID NO: 23028 - protein, 13 aa, Homo sapiens
  Heavy chain CDR3 for antibody 11514 (IGHV4-39)
ARHPPSRDYGMDV

SEQ ID NO: 23029 - protein, 9 aa, Homo sapiens
  Light chain CDR3 for antibody 11515 (IGKV3D-20)
QQYGRSPRT

SEQ ID NO: 23030 - protein, 18 aa, Homo sapiens
  Heavy chain CDR3 for antibody 11515 (IGHV3-33)
ARDGYSGYDYYYYYGMDV

SEQ ID NO: 23031 - protein, 9 aa, Homo sapiens
  Light chain CDR3 for antibody 11516 (IGKV1-17)
LQHNSYPYT

SEQ ID NO: 23032 - protein, 19 aa, Homo sapiens
  Heavy chain CDR3 for antibody 11516 (IGHV3-33)
ARDNDSSGYYDYYYYGMDV

SEQ ID NO: 23033 - protein, 8 aa, Homo sapiens
  Light chain CDR3 for antibody 11517 (IGKV3D-7)
QQDYSLLT

SEQ ID NO: 23034 - protein, 16 aa, Homo sapiens
  Heavy chain CDR3 for antibody 11517 (IGHV4-61)
ARGRYFDWLLGDVFDI

SEQ ID NO: 23035 - protein, 8 aa, Homo sapiens
  Light chain CDR3 for antibody 11518 (IGKV3D-7)
QQDYNSLT

SEQ ID NO: 23036 - protein, 26 aa, Homo sapiens
  Heavy chain CDR3 for antibody 11518 (IGHV4-39)
ARQGLLWFGDLKAYDSSGYYYGYFHH

SEQ ID NO: 23037 - protein, 10 aa, Homo sapiens
  Light chain CDR3 for antibody 11519 (IGKV1-39)
QQSYSSPMYT

SEQ ID NO: 23038 - protein, 18 aa, Homo sapiens
  Heavy chain CDR3 for antibody 11519 (IGHV3-33)
ARGGVLYDILTGFYGMDV

SEQ ID NO: 23039 - protein, 10 aa, Homo sapiens
  Light chain CDR3 for antibody 11520 (IGKV1-9)
QQLDSYPMYT

SEQ ID NO: 23040 - protein, 17 aa, Homo sapiens
  Heavy chain CDR3 for antibody 11520 (IGHV4-39)
ARVLRYFDWLSHDAFDI

SEQ ID NO: 23041 - protein, 8 aa, Homo sapiens
  Light chain CDR3 for antibody 11521 (IGKV1D-13)
QQFNNYPT

SEQ ID NO: 23042 - protein, 14 aa, Homo sapiens
  Heavy chain CDR3 for antibody 11521 (IGHV3-33)
ARTTAAAGPRDFQH

SEQ ID NO: 23043 - protein, 9 aa, Homo sapiens
  Light chain CDR3 for antibody 11522 (IGKV1D-13)
QQFNNYPHT

SEQ ID NO: 23044 - protein, 12 aa, Homo sapiens
  Heavy chain CDR3 for antibody 11522 (IGHV3-33)
AREEAVAEAFDI

SEQ ID NO: 23045 - protein, 9 aa, Homo sapiens
  Light chain CDR3 for antibody 11523 (IGKV1-9)
QQLISYPLT

SEQ ID NO: 23046 - protein, 14 aa, Homo sapiens
  Heavy chain CDR3 for antibody 11523 (IGHV3-33)
ARDRDIMATSYFDY

SEQ ID NO: 23047 - protein, 10 aa, Homo sapiens
  Light chain CDR3 for antibody 11524 (IGKV3-11)
QQRSNWPIFT

SEQ ID NO: 23048 - protein, 12 aa, Homo sapiens
  Heavy chain CDR3 for antibody 11524 (IGHV3-23)
ARGYFGSGYAHF

SEQ ID NO: 23049 - protein, 9 aa, Homo sapiens
  Light chain CDR3 for antibody 11525 (IGKV2D-28)
MQVLQTPFT

SEQ ID NO: 23050 - protein, 12 aa, Homo sapiens
  Heavy chain CDR3 for antibody 11525 (IGHV4-39)
ASQMVREGWFDP

SEQ ID NO: 23051 - protein, 8 aa, Homo sapiens
  Light chain CDR3 for antibody 11526 (IGKV1-5)
QQYNSYYT

SEQ ID NO: 23052 - protein, 12 aa, Homo sapiens
  Heavy chain CDR3 for antibody 11526 (IGHV3-33)
ARKQWLVQAFDI

SEQ ID NO: 23053 - protein, 9 aa, Homo sapiens
  Light chain CDR3 for antibody 11527 (IGKV6-21)
HQSSSLPHT

SEQ ID NO: 23054 - protein, 11 aa, Homo sapiens
  Heavy chain CDR3 for antibody 11527 (IGHV4-59)
ARDRGHYGMDV

SEQ ID NO: 23055 - protein, 9 aa, Homo sapiens
  Light chain CDR3 for antibody 11528 (IGKV1-9)
QQLISYPLT

SEQ ID NO: 23056 - protein, 8 aa, Homo sapiens
  Heavy chain CDR3 for antibody 11528 (IGHV3-33)
ARDRGFDY

SEQ ID NO: 23057 - protein, 10 aa, Homo sapiens
  Light chain CDR3 for antibody 11529 (IGKV1-17)
LQHNSYPMYT

SEQ ID NO: 23058 - protein, 13 aa, Homo sapiens
  Heavy chain CDR3 for antibody 11529 (IGHV3-33)
AKEDGDYHHYFDY

SEQ ID NO: 23059 - protein, 10 aa, Homo sapiens
  Light chain CDR3 for antibody 11530 (IGKV3-20)
QQYGRSPPVT

SEQ ID NO: 23060 - protein, 16 aa, Homo sapiens
  Heavy chain CDR3 for antibody 11530 (IGHV4-59)
ARDTPYYSGSGRPFDH

SEQ ID NO: 23061 - protein, 9 aa, Homo sapiens
  Light chain CDR3 for antibody 11531 (IGKV6-21)
QQSSNLPHT

SEQ ID NO: 23062 - protein, 14 aa, Homo sapiens
  Heavy chain CDR3 for antibody 11531 (IGHV3-33)
ARDNILTAYYLFDY

SEQ ID NO: 23063 - protein, 9 aa, Homo sapiens
  Light chain CDR3 for antibody 11532 (IGKV1-27)
QKYNSAPYT

SEQ ID NO: 23064 - protein, 11 aa, Homo sapiens
  Heavy chain CDR3 for antibody 11532 (IGHV3-64)
ARERGSYAFDI

SEQ ID NO: 23065 - protein, 9 aa, Homo sapiens
  Light chain CDR3 for antibody 11533 (IGKV3D-7)
QQDYEFPIT

SEQ ID NO: 23066 - protein, 17 aa, Homo sapiens
  Heavy chain CDR3 for antibody 11533 (IGHV4-34)
AGLRCFDWLFDYYGMDV

SEQ ID NO: 23067 - protein, 8 aa, Homo sapiens
  Light chain CDR3 for antibody 11534 (IGKV3D-7)
QQDYSLLT

SEQ ID NO: 23068 - protein, 15 aa, Homo sapiens
  Heavy chain CDR3 for antibody 11534 (IGHV3-33)
ARGYYYGAGSFPFDY

SEQ ID NO: 23069 - protein, 9 aa, Homo sapiens
  Light chain CDR3 for antibody 11535 (IGKV2D-28)
MQALQTPPT

SEQ ID NO: 23070 - protein, 10 aa, Homo sapiens
  Heavy chain CDR3 for antibody 11535 (IGHV3-23)
AREWYGGMDV

SEQ ID NO: 23071 - protein, 8 aa, Homo sapiens
  Light chain CDR3 for antibody 11536 (IGKV1-5)
QQYNSYWT

SEQ ID NO: 23072 - protein, 20 aa, Homo sapiens
  Heavy chain CDR3 for antibody 11536 (IGHV3-33)
ARRMVRGVKKAYYYYYGLDV

SEQ ID NO: 23073 - protein, 9 aa, Homo sapiens
  Light chain CDR3 for antibody 11537 (IGKV1-39)
QQSYSTPLT

SEQ ID NO: 23074 - protein, 16 aa, Homo sapiens
  Heavy chain CDR3 for antibody 11537 (IGHV3-23)
ARNDILTASGYYGMDV

SEQ ID NO: 23075 - protein, 8 aa, Homo sapiens
  Light chain CDR3 for antibody 11538 (IGKV1D-13)
QQFNNYPT

SEQ ID NO: 23076 - protein, 18 aa, Homo sapiens
  Heavy chain CDR3 for antibody 11538 (IGHV3-30)
ARDRYYDILTGYSDAFEI

SEQ ID NO: 23077 - protein, 9 aa, Homo sapiens
  Light chain CDR3 for antibody 11539 (IGKV3D-7)
QQDYTLPLT

SEQ ID NO: 23078 - protein, 11 aa, Homo sapiens
  Heavy chain CDR3 for antibody 11539 (IGHV4-59)
ARVYSSSWYDY

SEQ ID NO: 23079 - protein, 9 aa, Homo sapiens
  Light chain CDR3 for antibody 11540 (IGKV1-12)
QQSYSTPFT

SEQ ID NO: 23080 - protein, 12 aa, Homo sapiens
  Heavy chain CDR3 for antibody 11540 (IGHV3-33)
ARDRAYRGSRDY

SEQ ID NO: 23081 - protein, 9 aa, Homo sapiens
  Light chain CDR3 for antibody 11541 (IGKV4-1)
QQYYTTPPT

SEQ ID NO: 23082 - protein, 13 aa, Homo sapiens
  Heavy chain CDR3 for antibody 11541 (IGHV3-33)
ARRYRSGWYPFDY

SEQ ID NO: 23083 - protein, 8 aa, Homo sapiens
  Light chain CDR3 for antibody 11542 (IGKV3-11)
QQRGNWPS

SEQ ID NO: 23084 - protein, 9 aa, Homo sapiens
  Heavy chain CDR3 for antibody 11542 (IGHV3-33)
ARELAYFDY

SEQ ID NO: 23085 - protein, 9 aa, Homo sapiens
  Light chain CDR3 for antibody 11543 (IGKV3D-7)
QQDYNLPWT

SEQ ID NO: 23086 - protein, 17 aa, Homo sapiens
  Heavy chain CDR3 for antibody 11543 (IGHV3-23)
AKDRDWKDGYYYFGMDV

SEQ ID NO: 23087 - protein, 8 aa, Homo sapiens
  Light chain CDR3 for antibody 11544 (IGKV3D-7)
QQDYNSLT

SEQ ID NO: 23088 - protein, 18 aa, Homo sapiens
  Heavy chain CDR3 for antibody 11544 (IGHV3-33)
ARRGVGARGYYYYYGMDV

SEQ ID NO: 23089 - protein, 9 aa, Homo sapiens
  Light chain CDR3 for antibody 11545 (IGKV3D-7)
QQDYDLPYP

SEQ ID NO: 23090 - protein, 11 aa, Homo sapiens
  Heavy chain CDR3 for antibody 11545 (IGHV4-59)
AREMGHDTFDI

SEQ ID NO: 23091 - protein, 8 aa, Homo sapiens
  Light chain CDR3 for antibody 11546 (IGKV3-20)
QQYGSSLT

SEQ ID NO: 23092 - protein, 11 aa, Homo sapiens
  Heavy chain CDR3 for antibody 11546 (IGHV3-33)
ARARYTTGLDY

SEQ ID NO: 23093 - protein, 10 aa, Homo sapiens
  Light chain CDR3 for antibody 11547 (IGKV3-15)
QQYNNWPPIT

SEQ ID NO: 23094 - protein, 13 aa, Homo sapiens
  Heavy chain CDR3 for antibody 11547 (IGHV3-33)
AKEDGDYHHYFDY

SEQ ID NO: 23095 - protein, 9 aa, Homo sapiens
  Light chain CDR3 for antibody 11548 (IGKV1-17)
QQYYSYPYT

SEQ ID NO: 23096 - protein, 9 aa, Homo sapiens
  Heavy chain CDR3 for antibody 11548 (IGHV3-30)
ARDSWGFDY

SEQ ID NO: 23097 - protein, 9 aa, Homo sapiens
  Light chain CDR3 for antibody 11549 (IGKV1-13)
QKYNSAPYT

SEQ ID NO: 23098 - protein, 12 aa, Homo sapiens
  Heavy chain CDR3 for antibody 11549 (IGHV3-66)
STGYFGSSYAHF

SEQ ID NO: 23099 - protein, 9 aa, Homo sapiens
  Light chain CDR3 for antibody 11550 (IGKV1-39)
QQGFSTPWT

SEQ ID NO: 23100 - protein, 18 aa, Homo sapiens
  Heavy chain CDR3 for antibody 11550 (IGHV3-33)
ARGGYSSGWDYYYYGMDV

SEQ ID NO: 23101 - protein, 8 aa, Homo sapiens
  Light chain CDR3 for antibody 11551 (IGKV1-5)
QQYNSYYT

SEQ ID NO: 23102 - protein, 11 aa, Homo sapiens
  Heavy chain CDR3 for antibody 11551 (IGHV3-33)
ARGTTVTHFDY

SEQ ID NO: 23103 - protein, 9 aa, Homo sapiens
  Light chain CDR3 for antibody 11552 (IGKV1-6)
LQDYNHPFT

SEQ ID NO: 23104 - protein, 14 aa, Homo sapiens
  Heavy chain CDR3 for antibody 11552 (IGHV3-33)
ARDRRDFYYYCRDV

SEQ ID NO: 23105 - protein, 9 aa, Homo sapiens
  Light chain CDR3 for antibody 11553 (IGKV5-2)
LQHDNFPYT

SEQ ID NO: 23106 - protein, 16 aa, Homo sapiens
  Heavy chain CDR3 for antibody 11553 (IGHV4-59)
ARQLLWFGELKGVFDY

SEQ ID NO: 23107 - protein, 9 aa, Homo sapiens
  Light chain CDR3 for antibody 11554 (IGKV2D-28)
MQALQTPPT

SEQ ID NO: 23108 - protein, 20 aa, Homo sapiens
  Heavy chain CDR3 for antibody 11554 (IGHV3-11)
ARGGATLIRGLIDYYYGMDV

SEQ ID NO: 23109 - protein, 9 aa, Homo sapiens
  Light chain CDR3 for antibody 11555 (IGKV1-6)
LQDYTYPYT

SEQ ID NO: 23110 - protein, 16 aa, Homo sapiens
  Heavy chain CDR3 for antibody 11555 (IGHV4-59)
ARDTPYYSGSGRPFDH

SEQ ID NO: 23111 - protein, 9 aa, Homo sapiens
  Light chain CDR3 for antibody 11556 (IGKV1-16)
QHYNDYPFT

SEQ ID NO: 23112 - protein, 17 aa, Homo sapiens
  Heavy chain CDR3 for antibody 11556 (IGHV3-33)
ARESLKLGIYYYYGMDV

SEQ ID NO: 23113 - protein, 9 aa, Homo sapiens
  Light chain CDR3 for antibody 11557 (IGKV1-16)
QHYNDYPFT

SEQ ID NO: 23114 - protein, 12 aa, Homo sapiens
  Heavy chain CDR3 for antibody 11557 (IGHV3-33)
AREEAVAEAFDI

SEQ ID NO: 23115 - protein, 8 aa, Homo sapiens
  Light chain CDR3 for antibody 11558 (IGKV1-5)
QQYNSYYT

SEQ ID NO: 23116 - protein, 12 aa, Homo sapiens
  Heavy chain CDR3 for antibody 11558 (IGHV3-23)
ARVNSGSPYFDY

SEQ ID NO: 23117 - protein, 8 aa, Homo sapiens
  Light chain CDR3 for antibody 11559 (IGKV3-11)
QQRGNWPS

SEQ ID NO: 23118 - protein, 15 aa, Homo sapiens
  Heavy chain CDR3 for antibody 11559 (IGHV3-33)
ARDRGWKAPGYGMDV

SEQ ID NO: 23119 - protein, 9 aa, Homo sapiens
  Light chain CDR3 for antibody 11560 (IGKV1-6)
LQDYKSPFT

SEQ ID NO: 23120 - protein, 15 aa, Homo sapiens
  Heavy chain CDR3 for antibody 11560 (IGHV3-23)
AKEFTMVRGVITPDY

SEQ ID NO: 23121 - protein, 10 aa, Homo sapiens
  Light chain CDR3 for antibody 11561 (IGKV1-17)
QQLDSYPMYT

SEQ ID NO: 23122 - protein, 14 aa, Homo sapiens
  Heavy chain CDR3 for antibody 11561 (IGHV3-20)
ARDGGSTCYDWFDP

SEQ ID NO: 23123 - protein, 9 aa, Homo sapiens
  Light chain CDR3 for antibody 11562 (IGKV1-9)
QQLHIYPWT

SEQ ID NO: 23124 - protein, 13 aa, Homo sapiens
  Heavy chain CDR3 for antibody 11562 (IGHV3-33)
ARDYTMVRGVMNY

SEQ ID NO: 23125 - protein, 10 aa, Homo sapiens
  Light chain CDR3 for antibody 11563 (IGKV3-11)
QQRSNWLMYT

SEQ ID NO: 23126 - protein, 13 aa, Homo sapiens
  Heavy chain CDR3 for antibody 11563 (IGHV3-53)
ARSGSYWGYYFDY

SEQ ID NO: 23127 - protein, 9 aa, Homo sapiens
  Light chain CDR3 for antibody 11564 (IGKV1-16)
QHYNDYPFT

SEQ ID NO: 23128 - protein, 10 aa, Homo sapiens
  Heavy chain CDR3 for antibody 11564 (IGHV3-33)
ARNILTPLDY

SEQ ID NO: 23129 - protein, 10 aa, Homo sapiens
  Light chain CDR3 for antibody 11565 (IGKV3-20)
QQYGRSPPVT

SEQ ID NO: 23130 - protein, 10 aa, Homo sapiens
  Heavy chain CDR3 for antibody 11565 (IGHV3-23)
ATIVGPFLDV

SEQ ID NO: 23131 - protein, 9 aa, Homo sapiens
  Light chain CDR3 for antibody 11566 (IGKV1-17)
LQHTSYPFT

SEQ ID NO: 23132 - protein, 17 aa, Homo sapiens
  Heavy chain CDR3 for antibody 11566 (IGHV3-33)
ARGEQWLGYYYYYGMDV

SEQ ID NO: 23133 - protein, 10 aa, Homo sapiens
  Light chain CDR3 for antibody 11567 (IGKV3-11)
QQRSNWLMYT

SEQ ID NO: 23134 - protein, 9 aa, Homo sapiens
  Heavy chain CDR3 for antibody 11567 (IGHV4-59)
AREGGSGSL

SEQ ID NO: 23135 - protein, 8 aa, Homo sapiens
  Light chain CDR3 for antibody 11568 (IGKV3-15)
QQYNNYPT

SEQ ID NO: 23136 - protein, 26 aa, Homo sapiens
  Heavy chain CDR3 for antibody 11568 (IGHV4-39)
ARQGLLWFGDLKAYDSSGYYYGYFHH

SEQ ID NO: 23137 - protein, 10 aa, Homo sapiens
  Light chain CDR3 for antibody 11569 (IGKV3-11)
QQRSNWLMYT

SEQ ID NO: 23138 - protein, 13 aa, Homo sapiens
  Heavy chain CDR3 for antibody 11569 (IGHV4-39)
ARREVVGGRGFDY

SEQ ID NO: 23139 - protein, 9 aa, Homo sapiens
  Light chain CDR3 for antibody 11570 (IGKV3-15)
QQYHNWPLT

SEQ ID NO: 23140 - protein, 10 aa, Homo sapiens
  Heavy chain CDR3 for antibody 11570 (IGHV3-23)
AKENWNDFDY

SEQ ID NO: 23141 - protein, 9 aa, Homo sapiens
  Light chain CDR3 for antibody 11571 (IGKV2D-28)
MQALQTPPT

SEQ ID NO: 23142 - protein, 15 aa, Homo sapiens
  Heavy chain CDR3 for antibody 11571 (IGHV3-64)
ARDSRPEITGPPFDY

SEQ ID NO: 23143 - protein, 8 aa, Homo sapiens
  Light chain CDR3 for antibody 11572 (IGKV6-21)
HQSSSLPT

SEQ ID NO: 23144 - protein, 17 aa, Homo sapiens
  Heavy chain CDR3 for antibody 11572 (IGHV3-33)
ARESLKLGIYYYYGMDV

SEQ ID NO: 23145 - protein, 9 aa, Homo sapiens
  Light chain CDR3 for antibody 11573 (IGKV1-17)
LQHNSYPPT

SEQ ID NO: 23146 - protein, 17 aa, Homo sapiens
  Heavy chain CDR3 for antibody 11573 (IGHV4-39)
ARERILWFGEFTYYFDY

SEQ ID NO: 23147 - protein, 9 aa, Homo sapiens
  Light chain CDR3 for antibody 11574 (IGKV1-27)
QQLNTYPWT

SEQ ID NO: 23148 - protein, 21 aa, Homo sapiens
  Heavy chain CDR3 for antibody 11574 (IGHV4-59)
AAGVLLWFGEPNYYYYYGMDV

SEQ ID NO: 23149 - protein, 9 aa, Homo sapiens
  Light chain CDR3 for antibody 11575 (IGKV1-5)
QQYNTYSRT

SEQ ID NO: 23150 - protein, 19 aa, Homo sapiens
  Heavy chain CDR3 for antibody 11575 (IGHV3-33)
ARGVRLRYFDPYYYYGMDV

SEQ ID NO: 23151 - protein, 8 aa, Homo sapiens
  Light chain CDR3 for antibody 11576 (IGKV1-17)
QQYNSYYT

SEQ ID NO: 23152 - protein, 18 aa, Homo sapiens
  Heavy chain CDR3 for antibody 11576 (IGHV4-59)
ARERGNWNDVDYYYGMDV

SEQ ID NO: 23153 - protein, 9 aa, Homo sapiens
  Light chain CDR3 for antibody 11577 (IGKV5-2)
LQHDKFPYT

SEQ ID NO: 23154 - protein, 16 aa, Homo sapiens
  Heavy chain CDR3 for antibody 11577 (IGHV4-59)
ARDTPYYSGSGRPFDH

SEQ ID NO: 23155 - protein, 10 aa, Homo sapiens
  Light chain CDR3 for antibody 11578 (IGKV1-17)
LQHNSYPMYT

SEQ ID NO: 23156 - protein, 12 aa, Homo sapiens
  Heavy chain CDR3 for antibody 11578 (IGHV4-61)
ARVYSSGWLFDY

SEQ ID NO: 23157 - protein, 8 aa, Homo sapiens
  Light chain CDR3 for antibody 11579 (IGKV3-20)
QQYGRSFT

SEQ ID NO: 23158 - protein, 17 aa, Homo sapiens
  Heavy chain CDR3 for antibody 11579 (IGHV1-18)
ARERYYGSGNYKYNMDV

SEQ ID NO: 23159 - protein, 9 aa, Homo sapiens
  Light chain CDR3 for antibody 11580 (IGKV1D-16)
QQYNSYPYT

SEQ ID NO: 23160 - protein, 14 aa, Homo sapiens
  Heavy chain CDR3 for antibody 11580 (IGHV3-33)
AREDYYGPLDWFDH

SEQ ID NO: 23161 - protein, 9 aa, Homo sapiens
  Light chain CDR3 for antibody 11581 (IGKV3-15)
QQYNNWPRT

SEQ ID NO: 23162 - protein, 11 aa, Homo sapiens
  Heavy chain CDR3 for antibody 11581 (IGHV3-33)
ARAGIAALFDY

SEQ ID NO: 23163 - protein, 8 aa, Homo sapiens
  Light chain CDR3 for antibody 11582 (IGKV3-20)
QQYGSSLT

SEQ ID NO: 23164 - protein, 17 aa, Homo sapiens
  Heavy chain CDR3 for antibody 11582 (IGHV4-39)
ARQGWYYGSGSSLLFDY

SEQ ID NO: 23165 - protein, 11 aa, Homo sapiens
  Light chain CDR3 for antibody 11583 (IGKV3-11)
QQRSNWPPTWT

SEQ ID NO: 23166 - protein, 14 aa, Homo sapiens
  Heavy chain CDR3 for antibody 11583 (IGHV3-15)
SIYYYGSGRDFFDY

SEQ ID NO: 23167 - protein, 9 aa, Homo sapiens
  Light chain CDR3 for antibody 11584 (IGKV1-6)
LQDYNYPRT

SEQ ID NO: 23168 - protein, 19 aa, Homo sapiens
  Heavy chain CDR3 for antibody 11584 (IGHV1-18)
AREVGIAVAGTLYYYGMDV

SEQ ID NO: 23169 - protein, 9 aa, Homo sapiens
  Light chain CDR3 for antibody 11585 (IGKV1-27)
QKYNSAPYT

SEQ ID NO: 23170 - protein, 11 aa, Homo sapiens
  Heavy chain CDR3 for antibody 11585 (IGHV3-33)
ARDQGGSSFDY

SEQ ID NO: 23171 - protein, 9 aa, Homo sapiens
  Light chain CDR3 for antibody 11586 (IGKV1-6)
LQDFHYPWT

SEQ ID NO: 23172 - protein, 20 aa, Homo sapiens
  Heavy chain CDR3 for antibody 11586 (IGHV3-23)
AKDREMAATSHYYYYYGMDV

SEQ ID NO: 23173 - protein, 9 aa, Homo sapiens
  Light chain CDR3 for antibody 11587 (IGKV1-5)
QQYNTYSRT

SEQ ID NO: 23174 - protein, 14 aa, Homo sapiens
  Heavy chain CDR3 for antibody 11587 (IGHV1-2)
ARDYYGSGNYYMGY

SEQ ID NO: 23175 - protein, 9 aa, Homo sapiens
  Light chain CDR3 for antibody 11588 (IGKV4-1)
QQYYTYPYT

SEQ ID NO: 23176 - protein, 13 aa, Homo sapiens
  Heavy chain CDR3 for antibody 11588 (IGHV3-33)
ARGDNWNDGGFDY

SEQ ID NO: 23177 - protein, 8 aa, Homo sapiens
  Light chain CDR3 for antibody 11589 (IGKV3-20)
QQYGSSLT

SEQ ID NO: 23178 - protein, 18 aa, Homo sapiens
  Heavy chain CDR3 for antibody 11589 (IGHV3-30)
ARDRHHDILTGYSDAFEI

SEQ ID NO: 23179 - protein, 9 aa, Homo sapiens
  Light chain CDR3 for antibody 11590 (IGKV1-27)
QKYNSAPYT

SEQ ID NO: 23180 - protein, 15 aa, Homo sapiens
  Heavy chain CDR3 for antibody 11590 (IGHV4-39)
ARRDYDISTGYLFDY

SEQ ID NO: 23181 - protein, 9 aa, Homo sapiens
  Light chain CDR3 for antibody 11591 (IGKV1-39)
QQYYSTPWT

SEQ ID NO: 23182 - protein, 11 aa, Homo sapiens
  Heavy chain CDR3 for antibody 11591 (IGHV1-24)
ATELGLYYFDY

SEQ ID NO: 23183 - protein, 8 aa, Homo sapiens
  Light chain CDR3 for antibody 11592 (IGKV1-5)
QQYNTYSS

SEQ ID NO: 23184 - protein, 9 aa, Homo sapiens
  Heavy chain CDR3 for antibody 11592 (IGHV4-59)
AREGGSGSL

SEQ ID NO: 23185 - protein, 9 aa, Homo sapiens
  Light chain CDR3 for antibody 11593 (IGKV3-11)
QQYSDWPLT

SEQ ID NO: 23186 - protein, 12 aa, Homo sapiens
  Heavy chain CDR3 for antibody 11593 (IGHV3-33)
ARESGGSYSFDY

SEQ ID NO: 23187 - protein, 11 aa, Homo sapiens
  Light chain CDR3 for antibody 11594 (IGKV3-11)
QQRSNWPPTWT

SEQ ID NO: 23188 - protein, 15 aa, Homo sapiens
  Heavy chain CDR3 for antibody 11594 (IGHV3-33)
ARDHLTGYYYYGMDV

SEQ ID NO: 23189 - protein, 9 aa, Homo sapiens
  Light chain CDR3 for antibody 11595 (IGKV1-9)
QQLKSYPYT

SEQ ID NO: 23190 - protein, 14 aa, Homo sapiens
  Heavy chain CDR3 for antibody 11595 (IGHV1-69)
ARAYYAFLTGALDI

SEQ ID NO: 23191 - protein, 9 aa, Homo sapiens
  Light chain CDR3 for antibody 11596 (IGKV1D-13)
QHFNNYMYT

SEQ ID NO: 23192 - protein, 23 aa, Homo sapiens
  Heavy chain CDR3 for antibody 11596 (IGHV4-59)
ARERTYSDILPGYYEDYYYGMDV

SEQ ID NO: 23193 - protein, 10 aa, Homo sapiens
  Light chain CDR3 for antibody 11597 (IGKV3-11)
QQRSNWPAYT

SEQ ID NO: 23194 - protein, 10 aa, Homo sapiens
  Heavy chain CDR3 for antibody 11597 (IGHV3-33)
ARNILTPLDY

SEQ ID NO: 23195 - protein, 11 aa, Homo sapiens
  Light chain CDR3 for antibody 11598 (IGKV3-11)
QQRSNWPPMYT

SEQ ID NO: 23196 - protein, 10 aa, Homo sapiens
  Heavy chain CDR3 for antibody 11598 (IGHV1-18)
AREQRLGFDY

SEQ ID NO: 23197 - protein, 9 aa, Homo sapiens
  Light chain CDR3 for antibody 11599 (IGKV1D-16)
QQYNSYPYT

SEQ ID NO: 23198 - protein, 15 aa, Homo sapiens
  Heavy chain CDR3 for antibody 11599 (IGHV3-33)
ARDQRYSSGWNWFDP

SEQ ID NO: 23199 - protein, 9 aa, Homo sapiens
  Light chain CDR3 for antibody 11600 (IGKV3-11)
QQRSNWPLT

SEQ ID NO: 23200 - protein, 20 aa, Homo sapiens
  Heavy chain CDR3 for antibody 11600 (IGHV3-33)
ARDLGWATMVRGVIRAPFDY

SEQ ID NO: 23201 - protein, 10 aa, Homo sapiens
  Light chain CDR3 for antibody 11601 (IGKV1-9)
QQLDSYPMYT

SEQ ID NO: 23202 - protein, 13 aa, Homo sapiens
  Heavy chain CDR3 for antibody 11601 (IGHV3-33)
ARTDYYSYYGLDV

SEQ ID NO: 23203 - protein, 10 aa, Homo sapiens
  Light chain CDR3 for antibody 11602 (IGKV3-11)
QQRSNWLMYT

SEQ ID NO: 23204 - protein, 15 aa, Homo sapiens
  Heavy chain CDR3 for antibody 11602 (IGHV3-30)
ARRGYGSGSPDAFDL

SEQ ID NO: 23205 - protein, 10 aa, Homo sapiens
  Light chain CDR3 for antibody 11603 (IGKV1-9)
QQLDSYPMYT

SEQ ID NO: 23206 - protein, 9 aa, Homo sapiens
  Heavy chain CDR3 for antibody 11603 (IGHV3-13)
ARDHWYFDL

SEQ ID NO: 23207 - protein, 9 aa, Homo sapiens
  Light chain CDR3 for antibody 11604 (IGKV1-9)
QQLNGYPFT

SEQ ID NO: 23208 - protein, 13 aa, Homo sapiens
  Heavy chain CDR3 for antibody 11604 (IGHV4-39)
ARHEVMIRGVFDY

SEQ ID NO: 23209 - protein, 9 aa, Homo sapiens
  Light chain CDR3 for antibody 11605 (IGKV1-9)
QQLNSYPYT

SEQ ID NO: 23210 - protein, 12 aa, Homo sapiens
  Heavy chain CDR3 for antibody 11605 (IGHV3-33)
AREGDILTSYSL

SEQ ID NO: 23211 - protein, 8 aa, Homo sapiens
  Light chain CDR3 for antibody 11606 (IGKV1D-13)
QQFNNYPT

SEQ ID NO: 23212 - protein, 15 aa, Homo sapiens
  Heavy chain CDR3 for antibody 11606 (IGHV3-33)
ARDGSGSYSLYGMDV

SEQ ID NO: 23213 - protein, 9 aa, Homo sapiens
  Light chain CDR3 for antibody 11607 (IGKV1-6)
LQDFNYPRT

SEQ ID NO: 23214 - protein, 17 aa, Homo sapiens
  Heavy chain CDR3 for antibody 11607 (IGHV4-59)
ARDFLVRGEGSYYGMDV

SEQ ID NO: 23215 - protein, 9 aa, Homo sapiens
  Light chain CDR3 for antibody 11608 (IGKV1-6)
LQDYSYPWT

SEQ ID NO: 23216 - protein, 18 aa, Homo sapiens
  Heavy chain CDR3 for antibody 11608 (IGHV4-59)
AREGDYVCGSYRPNWFDP

SEQ ID NO: 23217 - protein, 8 aa, Homo sapiens
  Light chain CDR3 for antibody 11609 (IGKV3D-7)
QQDYSLLT

SEQ ID NO: 23218 - protein, 17 aa, Homo sapiens
  Heavy chain CDR3 for antibody 11609 (IGHV3-33)
ARAYYDILTGYSYYFDY

SEQ ID NO: 23219 - protein, 8 aa, Homo sapiens
  Light chain CDR3 for antibody 11610 (IGKV6-21)
HQSSSLPT

SEQ ID NO: 23220 - protein, 12 aa, Homo sapiens
  Heavy chain CDR3 for antibody 11610 (IGHV3-33)
ARKQWLVQAFDI

SEQ ID NO: 23221 - protein, 8 aa, Homo sapiens
  Light chain CDR3 for antibody 11611 (IGKV3-11)
LQRGNWPT

SEQ ID NO: 23222 - protein, 17 aa, Homo sapiens
  Heavy chain CDR3 for antibody 11611 (IGHV3-15)
TTERYPRRYYYYFGMDV

SEQ ID NO: 23223 - protein, 11 aa, Homo sapiens
  Light chain CDR3 for antibody 11612 (IGKV3-11)
QQRSNWPPTWT

SEQ ID NO: 23224 - protein, 21 aa, Homo sapiens
  Heavy chain CDR3 for antibody 11612 (IGHV4-59)
AAGVLLWFGEPNYYYYYGMDV

SEQ ID NO: 23225 - protein, 9 aa, Homo sapiens
  Light chain CDR3 for antibody 11613 (IGKV5-2)
LQHDNFPYT

SEQ ID NO: 23226 - protein, 13 aa, Homo sapiens
  Heavy chain CDR3 for antibody 11613 (IGHV4-59)
ARERYFASYCMDV

SEQ ID NO: 23227 - protein, 10 aa, Homo sapiens
  Light chain CDR3 for antibody 11614 (IGKV3-11)
QQRSNWPIYT

SEQ ID NO: 23228 - protein, 13 aa, Homo sapiens
  Heavy chain CDR3 for antibody 11614 (IGHV3-33)
TRRIAVAGAEGDY

SEQ ID NO: 23229 - protein, 8 aa, Homo sapiens
  Light chain CDR3 for antibody 11615 (IGKV1-5)
QQYNSYYT

SEQ ID NO: 23230 - protein, 21 aa, Homo sapiens
  Heavy chain CDR3 for antibody 11615 (IGHV3-33)
AKDIDYYGSGSYPLYYYGMDV

SEQ ID NO: 23231 - protein, 11 aa, Homo sapiens
  Light chain CDR3 for antibody 11616 (IGKV3-11)
QQRSNWPPTWT

SEQ ID NO: 23232 - protein, 9 aa, Homo sapiens
  Heavy chain CDR3 for antibody 11616 (IGHV4-59)
ARSGSGIYT

SEQ ID NO: 23233 - protein, 10 aa, Homo sapiens
  Light chain CDR3 for antibody 11617 (IGKV3-11)
QQRSNWPALT

SEQ ID NO: 23234 - protein, 12 aa, Homo sapiens
  Heavy chain CDR3 for antibody 11617 (IGHV3-21)
AREGFGESSFDY

SEQ ID NO: 23235 - protein, 10 aa, Homo sapiens
  Light chain CDR3 for antibody 11618 (IGKV3-11)
QQRSNWPIFT

SEQ ID NO: 23236 - protein, 17 aa, Homo sapiens
  Heavy chain CDR3 for antibody 11618 (IGHV4-59)
AREEDYYGSGSFGTFDI

SEQ ID NO: 23237 - protein, 9 aa, Homo sapiens
  Light chain CDR3 for antibody 11619 (IGKV3D-20)
QQYGSSPYT

SEQ ID NO: 23238 - protein, 18 aa, Homo sapiens
  Heavy chain CDR3 for antibody 11619 (IGHV3-33)
ARDRYHDILAGYYMGFDY

SEQ ID NO: 23239 - protein, 9 aa, Homo sapiens
  Light chain CDR3 for antibody 11620 (IGKV1-17)
LQRNSYPYT

SEQ ID NO: 23240 - protein, 14 aa, Homo sapiens
  Heavy chain CDR3 for antibody 11620 (IGHV3-33)
ARDNILTVYYLFDY

SEQ ID NO: 23241 - protein, 10 aa, Homo sapiens
  Light chain CDR3 for antibody 11621 (IGKV3-11)
QQRSNWPIFT

SEQ ID NO: 23242 - protein, 18 aa, Homo sapiens
  Heavy chain CDR3 for antibody 11621 (IGHV3-33)
ARDHYDILTGYYKGWFDP

SEQ ID NO: 23243 - protein, 9 aa, Homo sapiens
  Light chain CDR3 for antibody 11622 (IGKV1-27)
QKYNSAPYT

SEQ ID NO: 23244 - protein, 13 aa, Homo sapiens
  Heavy chain CDR3 for antibody 11622 (IGHV3-15)
TTDRLLLFGAFDY

SEQ ID NO: 23245 - protein, 9 aa, Homo sapiens
  Light chain CDR3 for antibody 11623 (IGKV2-30)
MQGTHWPLT

SEQ ID NO: 23246 - protein, 14 aa, Homo sapiens
  Heavy chain CDR3 for antibody 11623 (IGHV3-33)
ARGLEWGGDNWFDP

SEQ ID NO: 23247 - protein, 10 aa, Homo sapiens
  Light chain CDR3 for antibody 11624 (IGKV1-6)
LQDYNYPMYT

SEQ ID NO: 23248 - protein, 13 aa, Homo sapiens
  Heavy chain CDR3 for antibody 11624 (IGHV3-11)
ARDEGYSGYNLDN

SEQ ID NO: 23249 - protein, 9 aa, Homo sapiens
  Light chain CDR3 for antibody 11625 (IGKV1-39)
QQSYRTPLT

SEQ ID NO: 23250 - protein, 24 aa, Homo sapiens
  Heavy chain CDR3 for antibody 11625 (IGHV1-46)
ARDEARGLLTGYYNRREYYYGMDV

SEQ ID NO: 23251 - protein, 9 aa, Homo sapiens
  Light chain CDR3 for antibody 11626 (IGKV1-6)
LQDYKSPFT

SEQ ID NO: 23252 - protein, 12 aa, Homo sapiens
  Heavy chain CDR3 for antibody 11626 (IGHV4-39)
ARQMVREGWFDP

SEQ ID NO: 23253 - protein, 9 aa, Homo sapiens
  Light chain CDR3 for antibody 11627 (IGKV3D-7)
QQDYEFPIT

SEQ ID NO: 23254 - protein, 17 aa, Homo sapiens
  Heavy chain CDR3 for antibody 11627 (IGHV3-33)
ARVYYDILTGYSHAFDI

SEQ ID NO: 23255 - protein, 9 aa, Homo sapiens
  Light chain CDR3 for antibody 11628 (IGKV1-17)
QQLHIYPWT

SEQ ID NO: 23256 - protein, 15 aa, Homo sapiens
  Heavy chain CDR3 for antibody 11628 (IGHV3-33)
ARDHLTGYYYYGMDV

SEQ ID NO: 23257 - protein, 8 aa, Homo sapiens
  Light chain CDR3 for antibody 11629 (IGKV3-11)
QQRSNWLT

SEQ ID NO: 23258 - protein, 17 aa, Homo sapiens
  Heavy chain CDR3 for antibody 11629 (IGHV3-23)
AKDYDILTGYSHNWFDP

SEQ ID NO: 23259 - protein, 9 aa, Homo sapiens
  Light chain CDR3 for antibody 11630 (IGKV3-15)
QQYNDWPYT

SEQ ID NO: 23260 - protein, 13 aa, Homo sapiens
  Heavy chain CDR3 for antibody 11630 (IGHV3-23)
ASTGDSYYYGMDV

SEQ ID NO: 23261 - protein, 9 aa, Homo sapiens
  Light chain CDR3 for antibody 11631 (IGKV6-21)
HQSSSLPYT

SEQ ID NO: 23262 - protein, 13 aa, Homo sapiens
  Heavy chain CDR3 for antibody 11631 (IGHV4-39)
ARPGIVAAGWFDP

SEQ ID NO: 23263 - protein, 9 aa, Homo sapiens
  Light chain CDR3 for antibody 11632 (IGKV1D-16)
QQYNSYPYT

SEQ ID NO: 23264 - protein, 15 aa, Homo sapiens
  Heavy chain CDR3 for antibody 11632 (IGHV3-33)
ARDRGWKAPGYGMDA

SEQ ID NO: 23265 - protein, 9 aa, Homo sapiens
  Light chain CDR3 for antibody 11633 (IGKV3D-20)
QQYGSSPLT

SEQ ID NO: 23266 - protein, 12 aa, Homo sapiens
  Heavy chain CDR3 for antibody 11633 (IGHV1-18)
ARDDYYGSAFDY

SEQ ID NO: 23267 - protein, 9 aa, Homo sapiens
  Light chain CDR3 for antibody 11634 (IGKV1-9)
QQLNSYPYT

SEQ ID NO: 23268 - protein, 15 aa, Homo sapiens
  Heavy chain CDR3 for antibody 11634 (IGHV3-33)
ARDRVGVKDYYSMDV

SEQ ID NO: 23269 - protein, 8 aa, Homo sapiens
  Light chain CDR3 for antibody 11635 (IGKV1-5)
QQYNSYWT

SEQ ID NO: 23270 - protein, 20 aa, Homo sapiens
  Heavy chain CDR3 for antibody 11635 (IGHV1-f)
ATGLITFVRGVILTYRSFDY

SEQ ID NO: 23271 - protein, 10 aa, Homo sapiens
  Light chain CDR3 for antibody 11636 (IGKV1-6)
LQDYNYPMYT

SEQ ID NO: 23272 - protein, 14 aa, Homo sapiens
  Heavy chain CDR3 for antibody 11636 (IGHV3-33)
AKEGYSSNWYDFDY

SEQ ID NO: 23273 - protein, 9 aa, Homo sapiens
  Light chain CDR3 for antibody 11637 (IGKV1-9)
QQLHIYPWT

SEQ ID NO: 23274 - protein, 16 aa, Homo sapiens
  Heavy chain CDR3 for antibody 11637 (IGHV3-30)
ARDSSYYGSGYYGMDV

SEQ ID NO: 23275 - protein, 9 aa, Homo sapiens
  Light chain CDR3 for antibody 11638 (IGKV1D-13)
QHFNNYMYT

SEQ ID NO: 23276 - protein, 14 aa, Homo sapiens
  Heavy chain CDR3 for antibody 11638 (IGHV4-39)
ARQGGSGSYYNLDY

SEQ ID NO: 23277 - protein, 10 aa, Homo sapiens
  Light chain CDR3 for antibody 11639 (IGKV1-17)
LQHNSYPMYT

SEQ ID NO: 23278 - protein, 17 aa, Homo sapiens
  Heavy chain CDR3 for antibody 11639 (IGHV3-33)
ARDWFGELSDYYYGMDV

SEQ ID NO: 23279 - protein, 8 aa, Homo sapiens
  Light chain CDR3 for antibody 11640 (IGKV1-5)
QQYNSYWT

SEQ ID NO: 23280 - protein, 13 aa, Homo sapiens
  Heavy chain CDR3 for antibody 11640 (IGHV1-2)
ARDGVRGSFGMDV

SEQ ID NO: 23281 - protein, 10 aa, Homo sapiens
  Light chain CDR3 for antibody 11641 (IGKV1-17)
LQHNSYPMYT

SEQ ID NO: 23282 - protein, 18 aa, Homo sapiens
  Heavy chain CDR3 for antibody 11641 (IGHV3-23)
AKEGDYYGSGSYWGYFDP

SEQ ID NO: 23283 - protein, 10 aa, Homo sapiens
  Light chain CDR3 for antibody 11642 (IGKV1-17)
LQHNSYPMYT

SEQ ID NO: 23284 - protein, 17 aa, Homo sapiens
  Heavy chain CDR3 for antibody 11642 (IGHV3-23)
AKDRDWKDGYYYFGMDV

SEQ ID NO: 23285 - protein, 8 aa, Homo sapiens
  Light chain CDR3 for antibody 11643 (IGKV3-11)
QQRGNWPS

SEQ ID NO: 23286 - protein, 11 aa, Homo sapiens
  Heavy chain CDR3 for antibody 11643 (IGHV3-23)
AKGLWSYYFDY

SEQ ID NO: 23287 - protein, 9 aa, Homo sapiens
  Light chain CDR3 for antibody 11644 (IGKV1-27)
QKYNSAPYT

SEQ ID NO: 23288 - protein, 15 aa, Homo sapiens
  Heavy chain CDR3 for antibody 11644 (IGHV3-23)
AKDRYFDWLPDAFDI

SEQ ID NO: 23289 - protein, 9 aa, Homo sapiens
  Light chain CDR3 for antibody 11645 (IGKV1-6)
LQVYSYPWT

SEQ ID NO: 23290 - protein, 16 aa, Homo sapiens
  Heavy chain CDR3 for antibody 11645 (IGHV3-33)
ARSPYDILTGYPHFDY

SEQ ID NO: 23291 - protein, 8 aa, Homo sapiens
  Light chain CDR3 for antibody 11646 (IGKV6-21)
HQSSSLPT

SEQ ID NO: 23292 - protein, 13 aa, Homo sapiens
  Heavy chain CDR3 for antibody 11646 (IGHV3-33)
ARVDTMVRGVMAY

SEQ ID NO: 23293 - protein, 10 aa, Homo sapiens
  Light chain CDR3 for antibody 11647 (IGKV1-9)
QQLDSYPMYT

SEQ ID NO: 23294 - protein, 13 aa, Homo sapiens
  Heavy chain CDR3 for antibody 11647 (IGHV3-33)
ARDWGYSHGYFDY

SEQ ID NO: 23295 - protein, 9 aa, Homo sapiens
  Light chain CDR3 for antibody 11648 (IGKV1-9)
QQLISYPLT

SEQ ID NO: 23296 - protein, 14 aa, Homo sapiens
  Heavy chain CDR3 for antibody 11648 (IGHV3-33)
ARDGLVGASSWFDP

SEQ ID NO: 23297 - protein, 8 aa, Homo sapiens
  Light chain CDR3 for antibody 11649 (IGKV1-5)
QQYNSYYT

SEQ ID NO: 23298 - protein, 14 aa, Homo sapiens
  Heavy chain CDR3 for antibody 11649 (IGHV3-20)
ARDRGSSFFDAFDI

SEQ ID NO: 23299 - protein, 9 aa, Homo sapiens
  Light chain CDR3 for antibody 11650 (IGKV5-2)
LQHDKFPYT

SEQ ID NO: 23300 - protein, 17 aa, Homo sapiens
  Heavy chain CDR3 for antibody 11650 (IGHV3-33)
ARSMVTTYGYYYYGMDV

SEQ ID NO: 23301 - protein, 8 aa, Homo sapiens
  Light chain CDR3 for antibody 11651 (IGKV3D-7)
QQDYNLYT

SEQ ID NO: 23302 - protein, 17 aa, Homo sapiens
  Heavy chain CDR3 for antibody 11651 (IGHV3-33)
ARWAPMVRGLNYYGMDV

SEQ ID NO: 23303 - protein, 9 aa, Homo sapiens
  Light chain CDR3 for antibody 11652 (IGKV4-1)
QQYYSTPLT

SEQ ID NO: 23304 - protein, 12 aa, Homo sapiens
  Heavy chain CDR3 for antibody 11652 (IGHV3-21)
AREGFGESSFDY

SEQ ID NO: 23305 - protein, 10 aa, Homo sapiens
  Light chain CDR3 for antibody 11653 (IGKV3-11)
QQRSNWPALT

SEQ ID NO: 23306 - protein, 16 aa, Homo sapiens
  Heavy chain CDR3 for antibody 11653 (IGHV3-23)
ARDLGIAAAGTGWFDP

SEQ ID NO: 23307 - protein, 9 aa, Homo sapiens
  Light chain CDR3 for antibody 11654 (IGKV3-15)
QQYNNWPYT

SEQ ID NO: 23308 - protein, 10 aa, Homo sapiens
  Heavy chain CDR3 for antibody 11654 (IGHV3-23)
ATIVGHFLDV

SEQ ID NO: 23309 - protein, 9 aa, Homo sapiens
  Light chain CDR3 for antibody 11655 (IGKV3-20)
QQYGSSPYT

SEQ ID NO: 23310 - protein, 9 aa, Homo sapiens
  Heavy chain CDR3 for antibody 11655 (IGHV3-33)
ARATGGVDY

SEQ ID NO: 23311 - protein, 9 aa, Homo sapiens
  Light chain CDR3 for antibody 11656 (IGKV1D-13)
QRFNNYLYT

SEQ ID NO: 23312 - protein, 8 aa, Homo sapiens
  Heavy chain CDR3 for antibody 11656 (IGHV3-23)
AETFLFDY

SEQ ID NO: 23313 - protein, 8 aa, Homo sapiens
  Light chain CDR3 for antibody 11657 (IGKV1D-13)
QQFNNYPT

SEQ ID NO: 23314 - protein, 13 aa, Homo sapiens
  Heavy chain CDR3 for antibody 11657 (IGHV3-21)
ATGAWASSWWGDY

SEQ ID NO: 23315 - protein, 8 aa, Homo sapiens
  Light chain CDR3 for antibody 11658 (IGKV3D-7)
QQDYNLLT

SEQ ID NO: 23316 - protein, 18 aa, Homo sapiens
  Heavy chain CDR3 for antibody 11658 (IGHV3-33)
VREGGYYGSGSYPDAFDI

SEQ ID NO: 23317 - protein, 10 aa, Homo sapiens
  Light chain CDR3 for antibody 11659 (IGKV1-17)
LQHNSYPMYT

SEQ ID NO: 23318 - protein, 13 aa, Homo sapiens
  Heavy chain CDR3 for antibody 11659 (IGHV3-33)
ARGVLWFGELFDY

SEQ ID NO: 23319 - protein, 9 aa, Homo sapiens
  Light chain CDR3 for antibody 11660 (IGKV1-6)
LQDYKSPFT

SEQ ID NO: 23320 - protein, 18 aa, Homo sapiens
  Heavy chain CDR3 for antibody 11660 (IGHV3-33)
ARGLLWFGVSYYYYGMDV

SEQ ID NO: 23321 - protein, 9 aa, Homo sapiens
  Light chain CDR3 for antibody 11661 (IGKV1-39)
QQSYSTPYT

SEQ ID NO: 23322 - protein, 22 aa, Homo sapiens
  Heavy chain CDR3 for antibody 11661 (IGHV3-11)
AREAYYDILTGYSLYYYYGMDV

SEQ ID NO: 23323 - protein, 9 aa, Homo sapiens
  Light chain CDR3 for antibody 11662 (IGKV3D-7)
QQDYELPLT

SEQ ID NO: 23324 - protein, 14 aa, Homo sapiens
  Heavy chain CDR3 for antibody 11662 (IGHV1-46)
ARDGVGAKEGGFDY

SEQ ID NO: 23325 - protein, 9 aa, Homo sapiens
  Light chain CDR3 for antibody 11663 (IGKV1D-13)
QQFNNYPYT

SEQ ID NO: 23326 - protein, 14 aa, Homo sapiens
  Heavy chain CDR3 for antibody 11663 (IGHV3-33)
ARDTVAAGFNGMDV

SEQ ID NO: 23327 - protein, 8 aa, Homo sapiens
  Light chain CDR3 for antibody 11664 (IGKV3-11)
QQRSNWLT

SEQ ID NO: 23328 - protein, 18 aa, Homo sapiens
  Heavy chain CDR3 for antibody 11664 (IGHV3-33)
ARREGITMIFYYYYGMDV

SEQ ID NO: 23329 - protein, 9 aa, Homo sapiens
  Light chain CDR3 for antibody 11665 (IGKV1-6)
QQLHIYPWT

SEQ ID NO: 23330 - protein, 17 aa, Homo sapiens
  Heavy chain CDR3 for antibody 11665 (IGHV1-18)
ARERYYGSGIYKYAMDV

SEQ ID NO: 23331 - protein, 9 aa, Homo sapiens
  Light chain CDR3 for antibody 11666 (IGKV3-20)
QQYGSSPYT

SEQ ID NO: 23332 - protein, 11 aa, Homo sapiens
  Heavy chain CDR3 for antibody 11666 (IGHV3-23)
GEFSSGWSFDY

SEQ ID NO: 23333 - protein, 9 aa, Homo sapiens
  Light chain CDR3 for antibody 11667 (IGKV1D-13)
QQFNNYPYT

SEQ ID NO: 23334 - protein, 12 aa, Homo sapiens
  Heavy chain CDR3 for antibody 11667 (IGHV3-33)
ARNYDILDYFDY

SEQ ID NO: 23335 - protein, 9 aa, Homo sapiens
  Light chain CDR3 for antibody 11668 (IGKV3D-7)
QQDYNLPYS

SEQ ID NO: 23336 - protein, 13 aa, Homo sapiens
  Heavy chain CDR3 for antibody 11668 (IGHV1-46)
ARVKLGSLGAFDI

SEQ ID NO: 23337 - protein, 10 aa, Homo sapiens
  Light chain CDR3 for antibody 11669 (IGKV1-17)
QQYNSYPMYT

SEQ ID NO: 23338 - protein, 18 aa, Homo sapiens
  Heavy chain CDR3 for antibody 11669 (IGHV3-33)
ARDRHHDILTGYSDAFEI

SEQ ID NO: 23339 - protein, 9 aa, Homo sapiens
  Light chain CDR3 for antibody 11670 (IGKV2-30)
MQGTHWPLT

SEQ ID NO: 23340 - protein, 18 aa, Homo sapiens
  Heavy chain CDR3 for antibody 11670 (IGHV1-18)
ARDPTFYYVSGSYYKFDY

SEQ ID NO: 23341 - protein, 9 aa, Homo sapiens
  Light chain CDR3 for antibody 11671 (IGKV1-6)
QQYNSYPYT

SEQ ID NO: 23342 - protein, 18 aa, Homo sapiens
  Heavy chain CDR3 for antibody 11671 (IGHV4-59)
AREGDYVWGSYRPDCFDH

SEQ ID NO: 23343 - protein, 8 aa, Homo sapiens
  Light chain CDR3 for antibody 11672 (IGKV3-11)
QQRSNWLT

SEQ ID NO: 23344 - protein, 13 aa, Homo sapiens
  Heavy chain CDR3 for antibody 11672 (IGHV3-23)
AKDRGLRYYGMDV

SEQ ID NO: 23345 - protein, 10 aa, Homo sapiens
  Light chain CDR3 for antibody 11673 (IGKV3-11)
QQRSNWLMYT

SEQ ID NO: 23346 - protein, 18 aa, Homo sapiens
  Heavy chain CDR3 for antibody 11673 (IGHV3-33)
ARGYYGSGNFYKDSGMDV

SEQ ID NO: 23347 - protein, 9 aa, Homo sapiens
  Light chain CDR3 for antibody 11674 (IGKV3-15)
QQYNNWPRT

SEQ ID NO: 23348 - protein, 14 aa, Homo sapiens
  Heavy chain CDR3 for antibody 11674 (IGHV1-18)
ARDQPTVPSGYFDY

SEQ ID NO: 23349 - protein, 8 aa, Homo sapiens
  Light chain CDR3 for antibody 11675 (IGKV3-11)
QQRSNWWT

SEQ ID NO: 23350 - protein, 14 aa, Homo sapiens
  Heavy chain CDR3 for antibody 11675 (IGHV4-39)
ARDSGYDYYYGMDV

SEQ ID NO: 23351 - protein, 9 aa, Homo sapiens
  Light chain CDR3 for antibody 11676 (IGKV5-2)
LQHDKFPYT

SEQ ID NO: 23352 - protein, 13 aa, Homo sapiens
  Heavy chain CDR3 for antibody 11676 (IGHV3-53)
AREGIAVAGDFDF

SEQ ID NO: 23353 - protein, 9 aa, Homo sapiens
  Light chain CDR3 for antibody 11677 (IGKV1-6)
LQDFNYPRT

SEQ ID NO: 23354 - protein, 18 aa, Homo sapiens
  Heavy chain CDR3 for antibody 11677 (IGHV3-33)
ARDQGIVVLPGAPWYFDL

SEQ ID NO: 23355 - protein, 8 aa, Homo sapiens
  Light chain CDR3 for antibody 11678 (IGKV6-21)
HQSSSLPT

SEQ ID NO: 23356 - protein, 14 aa, Homo sapiens
  Heavy chain CDR3 for antibody 11678 (IGHV3-33)
ARRGYSGYDWYFDY

SEQ ID NO: 23357 - protein, 9 aa, Homo sapiens
  Light chain CDR3 for antibody 11679 (IGKV1-17)
LQHNSYPRT

SEQ ID NO: 23358 - protein, 16 aa, Homo sapiens
  Heavy chain CDR3 for antibody 11679 (IGHV1-46)
ARGGGYSESYSNWFDP

SEQ ID NO: 23359 - protein, 9 aa, Homo sapiens
  Light chain CDR3 for antibody 11680 (IGKV2D-28)
MQALQTPPT

SEQ ID NO: 23360 - protein, 9 aa, Homo sapiens
  Heavy chain CDR3 for antibody 11680 (IGHV4-59)
AGGSWDFDY

SEQ ID NO: 23361 - protein, 9 aa, Homo sapiens
  Light chain CDR3 for antibody 11681 (IGKV1-17)
LQHNTYPYT

SEQ ID NO: 23362 - protein, 13 aa, Homo sapiens
  Heavy chain CDR3 for antibody 11681 (IGHV4-61)
ASRYSSGWYPFDY

SEQ ID NO: 23363 - protein, 8 aa, Homo sapiens
  Light chain CDR3 for antibody 11682 (IGKV1-5)
QQYNSYST

SEQ ID NO: 23364 - protein, 17 aa, Homo sapiens
  Heavy chain CDR3 for antibody 11682 (IGHV3-23)
AKDRDWKDGYYYFGMDV

SEQ ID NO: 23365 - protein, 10 aa, Homo sapiens
  Light chain CDR3 for antibody 11683 (IGKV1-9)
QQLNSFLMYT

SEQ ID NO: 23366 - protein, 14 aa, Homo sapiens
  Heavy chain CDR3 for antibody 11683 (IGHV3-23)
AKSRIVGALYYFDY

SEQ ID NO: 23367 - protein, 9 aa, Homo sapiens
  Light chain CDR3 for antibody 11684 (IGKV3-15)
QQYHNWPYT

SEQ ID NO: 23368 - protein, 15 aa, Homo sapiens
  Heavy chain CDR3 for antibody 11684 (IGHV3-33)
ARDALAVTGTGWFDP

SEQ ID NO: 23369 - protein, 9 aa, Homo sapiens
  Light chain CDR3 for antibody 11685 (IGKV1-17)
LQHNSYPIT

SEQ ID NO: 23370 - protein, 18 aa, Homo sapiens
  Heavy chain CDR3 for antibody 11685 (IGHV3-23)
AREYYDFLTGYYKGAFDI

SEQ ID NO: 23371 - protein, 9 aa, Homo sapiens
  Light chain CDR3 for antibody 11686 (IGKV3-15)
QQYINWPLT

SEQ ID NO: 23372 - protein, 24 aa, Homo sapiens
  Heavy chain CDR3 for antibody 11686 (IGHV1-46)
ARDEARGLLTGYYNMREYYYGMDV

SEQ ID NO: 23373 - protein, 9 aa, Homo sapiens
  Light chain CDR3 for antibody 11687 (IGKV4-1)
QQYYTTPPT

SEQ ID NO: 23374 - protein, 14 aa, Homo sapiens
  Heavy chain CDR3 for antibody 11687 (IGHV3-33)
ARDREQQLVRYFDY

SEQ ID NO: 23375 - protein, 9 aa, Homo sapiens
  Light chain CDR3 for antibody 11688 (IGKV1D-16)
QQYSSYPYT

SEQ ID NO: 23376 - protein, 12 aa, Homo sapiens
  Heavy chain CDR3 for antibody 11688 (IGHV3-33)
AREMGGSYEVDY

SEQ ID NO: 23377 - protein, 9 aa, Homo sapiens
  Light chain CDR3 for antibody 11689 (IGKV3D-20)
QQYGSSPYT

SEQ ID NO: 23378 - protein, 13 aa, Homo sapiens
  Heavy chain CDR3 for antibody 11689 (IGHV3-20)
AREGGYNFGPFDY

SEQ ID NO: 23379 - protein, 9 aa, Homo sapiens
  Light chain CDR3 for antibody 11690 (IGKV5-2)
LQHDNFPWA

SEQ ID NO: 23380 - protein, 18 aa, Homo sapiens
  Heavy chain CDR3 for antibody 11690 (IGHV1-18)
ARDRGYYYGSGSYSPFDY

SEQ ID NO: 23381 - protein, 10 aa, Homo sapiens
  Light chain CDR3 for antibody 11691 (IGKV3-20)
QQYGSSPPYT

SEQ ID NO: 23382 - protein, 13 aa, Homo sapiens
  Heavy chain CDR3 for antibody 11691 (IGHV3-33)
ARDQRYSSGWYDY

SEQ ID NO: 23383 - protein, 9 aa, Homo sapiens
  Light chain CDR3 for antibody 11692 (IGKV1-17)
LQHNSYPYT

SEQ ID NO: 23384 - protein, 16 aa, Homo sapiens
  Heavy chain CDR3 for antibody 11692 (IGHV4-61)
ARDPRYSSGWYWYFDL

SEQ ID NO: 23385 - protein, 9 aa, Homo sapiens
  Light chain CDR3 for antibody 11693 (IGKV1-17)
LQHNSYPYT

SEQ ID NO: 23386 - protein, 13 aa, Homo sapiens
  Heavy chain CDR3 for antibody 11693 (IGHV3-33)
ARDRDSSGSYFDY

SEQ ID NO: 23387 - protein, 9 aa, Homo sapiens
  Light chain CDR3 for antibody 11694 (IGKV3-11)
QQRSNWPPT

SEQ ID NO: 23388 - protein, 13 aa, Homo sapiens
  Heavy chain CDR3 for antibody 11694 (IGHV3-33)
ARDYGDYLNWFDP

SEQ ID NO: 23389 - protein, 9 aa, Homo sapiens
  Light chain CDR3 for antibody 11695 (IGKV6-21)
QQSSSLPRT

SEQ ID NO: 23390 - protein, 16 aa, Homo sapiens
  Heavy chain CDR3 for antibody 11695 (IGHV3-23)
AKEGMVLRYFDWFWDY

SEQ ID NO: 23391 - protein, 9 aa, Homo sapiens
  Light chain CDR3 for antibody 11696 (IGKV3-11)
QQRSSWPPT

SEQ ID NO: 23392 - protein, 20 aa, Homo sapiens
  Heavy chain CDR3 for antibody 11696 (IGHV3-33)
SRGGATSVRGVIDYYYGMDV

SEQ ID NO: 23393 - protein, 8 aa, Homo sapiens
  Light chain CDR3 for antibody 11697 (IGKV3-20)
QQYGRSWT

SEQ ID NO: 23394 - protein, 13 aa, Homo sapiens
  Heavy chain CDR3 for antibody 11697 (IGHV3-33)
ARTDYYYYYGLDV

SEQ ID NO: 23395 - protein, 10 aa, Homo sapiens
  Light chain CDR3 for antibody 11698 (IGKV3-20)
QQYGSSPPYT

SEQ ID NO: 23396 - protein, 12 aa, Homo sapiens
  Heavy chain CDR3 for antibody 11698 (IGHV4-59)
ARDRSGWAYFDY

SEQ ID NO: 23397 - protein, 9 aa, Homo sapiens
  Light chain CDR3 for antibody 11699 (IGKV1-17)
QQLNSYPLT

SEQ ID NO: 23398 - protein, 17 aa, Homo sapiens
  Heavy chain CDR3 for antibody 11699 (IGHV3-33)
AREGTMVRGYYYYGMDV

SEQ ID NO: 23399 - protein, 9 aa, Homo sapiens
  Light chain CDR3 for antibody 11700 (IGKV1-17)
LHSNNYPWT

SEQ ID NO: 23400 - protein, 14 aa, Homo sapiens
  Heavy chain CDR3 for antibody 11700 (IGHV3-33)
AREGYSSNWYDFDY

SEQ ID NO: 23401 - protein, 9 aa, Homo sapiens
  Light chain CDR3 for antibody 11701 (IGKV1-16)
QQYDSYPWT

SEQ ID NO: 23402 - protein, 22 aa, Homo sapiens
  Heavy chain CDR3 for antibody 11701 (IGHV4-59)
AREINYGAGSYYNEDYYYGMDV

SEQ ID NO: 23403 - protein, 9 aa, Homo sapiens
  Light chain CDR3 for antibody 11702 (IGKV2-30)
MQGTHWPLT

SEQ ID NO: 23404 - protein, 14 aa, Homo sapiens
  Heavy chain CDR3 for antibody 11702 (IGHV3-33)
ARDGIVRATDAFAI

SEQ ID NO: 23405 - protein, 10 aa, Homo sapiens
  Light chain CDR3 for antibody 11703 (IGKV3-11)
QQRSNWPILT

SEQ ID NO: 23406 - protein, 10 aa, Homo sapiens
  Heavy chain CDR3 for antibody 11703 (IGHV3-23)
AKDQVGATDC

SEQ ID NO: 23407 - protein, 8 aa, Homo sapiens
  Light chain CDR3 for antibody 11704 (IGKV3-11)
QQRSNWWT

SEQ ID NO: 23408 - protein, 15 aa, Homo sapiens
  Heavy chain CDR3 for antibody 11704 (IGHV3-33)
ARDTGYSSSWNWFDP

SEQ ID NO: 23409 - protein, 9 aa, Homo sapiens
  Light chain CDR3 for antibody 11705 (IGKV6-21)
HQSSSLPYT

SEQ ID NO: 23410 - protein, 12 aa, Homo sapiens
  Heavy chain CDR3 for antibody 11705 (IGHV3-66)
VRDRAAAPYFDL

SEQ ID NO: 23411 - protein, 9 aa, Homo sapiens
  Light chain CDR3 for antibody 11706 (IGKV1-6)
LQDYNYPYT

SEQ ID NO: 23412 - protein, 17 aa, Homo sapiens
  Heavy chain CDR3 for antibody 11706 (IGHV3-33)
ARGGATLIRGVDYGMDV

SEQ ID NO: 23413 - protein, 9 aa, Homo sapiens
  Light chain CDR3 for antibody 11707 (IGKV1-6)
LQDYNYPYT

SEQ ID NO: 23414 - protein, 17 aa, Homo sapiens
  Heavy chain CDR3 for antibody 11707 (IGHV4-59)
ARRDYVWGSYRPDWFDP

SEQ ID NO: 23415 - protein, 10 aa, Homo sapiens
  Light chain CDR3 for antibody 11708 (IGKV1-17)
QQRSNWPALT

SEQ ID NO: 23416 - protein, 16 aa, Homo sapiens
  Heavy chain CDR3 for antibody 11708 (IGHV4-59)
ARDTPYYSGSGRPFDH

SEQ ID NO: 23417 - protein, 11 aa, Homo sapiens
  Light chain CDR3 for antibody 11709 (IGKV3-11)
QQRINWPPTWT

SEQ ID NO: 23418 - protein, 13 aa, Homo sapiens
  Heavy chain CDR3 for antibody 11709 (IGHV3-11)
ARDEGYSGYNLDN

SEQ ID NO: 23419 - protein, 9 aa, Homo sapiens
  Light chain CDR3 for antibody 11710 (IGKV1-33)
QQYDNLPFT

SEQ ID NO: 23420 - protein, 15 aa, Homo sapiens
  Heavy chain CDR3 for antibody 11710 (IGHV3-33)
ARDRGMVRGDGYLDY

SEQ ID NO: 23421 - protein, 8 aa, Homo sapiens
  Light chain CDR3 for antibody 11711 (IGKV1-5)
QQYNSYWT

SEQ ID NO: 23422 - protein, 12 aa, Homo sapiens
  Heavy chain CDR3 for antibody 11711 (IGHV3-33)
ARDYGSGSFFDY

SEQ ID NO: 23423 - protein, 9 aa, Homo sapiens
  Light chain CDR3 for antibody 11712 (IGKV3-15)
QQYNNWPYT

SEQ ID NO: 23424 - protein, 19 aa, Homo sapiens
  Heavy chain CDR3 for antibody 11712 (IGHV3-33)
ARGVRLRFFDAYYYYGLDV

SEQ ID NO: 23425 - protein, 10 aa, Homo sapiens
  Light chain CDR3 for antibody 11713 (IGKV3-11)
QQRSTWPTLT

SEQ ID NO: 23426 - protein, 15 aa, Homo sapiens
  Heavy chain CDR3 for antibody 11713 (IGHV3-33)
ARDTGYSSSWNWFDP

SEQ ID NO: 23427 - protein, 8 aa, Homo sapiens
  Light chain CDR3 for antibody 11714 (IGKV3-11)
QQRSNWLT

SEQ ID NO: 23428 - protein, 14 aa, Homo sapiens
  Heavy chain CDR3 for antibody 11714 (IGHV3-33)
ARDRIAAASSDFDC

SEQ ID NO: 23429 - protein, 10 aa, Homo sapiens
  Light chain CDR3 for antibody 11715 (IGKV3-11)
QQRSNWPALT

SEQ ID NO: 23430 - protein, 14 aa, Homo sapiens
  Heavy chain CDR3 for antibody 11715 (IGHV4-39)
ARQGGSGSYYNLDY

SEQ ID NO: 23431 - protein, 9 aa, Homo sapiens
  Light chain CDR3 for antibody 11716 (IGKV3-11)
QQRSSWPPT

SEQ ID NO: 23432 - protein, 18 aa, Homo sapiens
  Heavy chain CDR3 for antibody 11716 (IGHV3-13)
ARDYYGSGSLYYYYGMDV

SEQ ID NO: 23433 - protein, 9 aa, Homo sapiens
  Light chain CDR3 for antibody 11717 (IGKV3-20)
QQYGSSPYT

SEQ ID NO: 23434 - protein, 16 aa, Homo sapiens
  Heavy chain CDR3 for antibody 11717 (IGHV2-70)
AHRAVVTSNLNCRFDF

SEQ ID NO: 23435 - protein, 9 aa, Homo sapiens
  Light chain CDR3 for antibody 11718 (IGKV1-6)
LQDYNYPRT

SEQ ID NO: 23436 - protein, 5 aa, Homo sapiens
  Heavy chain CDR3 for antibody 11718 (IGHV3-33)
ARGLE

SEQ ID NO: 23437 - protein, 10 aa, Homo sapiens
  Light chain CDR3 for antibody 11719 (IGKV3-20)
QQYGRSPPVT

SEQ ID NO: 23438 - protein, 12 aa, Homo sapiens
  Heavy chain CDR3 for antibody 11719 (IGHV3-13)
VREAGIPDAFDI

SEQ ID NO: 23439 - protein, 11 aa, Homo sapiens
  Light chain CDR3 for antibody 11720 (IGKV3-11)
QQRSNWPPTWT

SEQ ID NO: 23440 - protein, 9 aa, Homo sapiens
  Heavy chain CDR3 for antibody 11720 (IGHV3-33)
AREKAYFDY

SEQ ID NO: 23441 - protein, 8 aa, Homo sapiens
  Light chain CDR3 for antibody 11721 (IGKV1D-13)
QQFNNYPT

SEQ ID NO: 23442 - protein, 16 aa, Homo sapiens
  Heavy chain CDR3 for antibody 11721 (IGHV4-59)
ARFYFGSGSYYWYFDL

SEQ ID NO: 23443 - protein, 8 aa, Homo sapiens
  Light chain CDR3 for antibody 11722 (IGKV3-11)
QQRGNWPS

SEQ ID NO: 23444 - protein, 18 aa, Homo sapiens
  Heavy chain CDR3 for antibody 11722 (IGHV4-59)
AREGDYVWGSYRPNWFDP

SEQ ID NO: 23445 - protein, 9 aa, Homo sapiens
  Light chain CDR3 for antibody 11723 (IGKV3-20)
QQYGSSPYT

SEQ ID NO: 23446 - protein, 20 aa, Homo sapiens
  Heavy chain CDR3 for antibody 11723 (IGHV4-59)
AREQVLWFGDLPYYYYGMDV

SEQ ID NO: 23447 - protein, 10 aa, Homo sapiens
  Light chain CDR3 for antibody 11724 (IGKV1-9)
QQLDSYPMYT

SEQ ID NO: 23448 - protein, 8 aa, Homo sapiens
  Heavy chain CDR3 for antibody 11724 (IGHV3-23)
AKETGNDY

SEQ ID NO: 23449 - protein, 8 aa, Homo sapiens
  Light chain CDR3 for antibody 11725 (IGKV1-6)
LQDYNYYT

SEQ ID NO: 23450 - protein, 13 aa, Homo sapiens
  Heavy chain CDR3 for antibody 11725 (IGHV3-23)
AKDRGYSSTSTAY

SEQ ID NO: 23451 - protein, 9 aa, Homo sapiens
  Light chain CDR3 for antibody 11726 (IGKV2-30)
MQGTHWPYT

SEQ ID NO: 23452 - protein, 18 aa, Homo sapiens
  Heavy chain CDR3 for antibody 11726 (IGHV4-59)
ARERGNWNDVDYYYGMDV

SEQ ID NO: 23453 - protein, 9 aa, Homo sapiens
  Light chain CDR3 for antibody 11727 (IGKV1-17)
LHSNNYPWT

SEQ ID NO: 23454 - protein, 13 aa, Homo sapiens
  Heavy chain CDR3 for antibody 11727 (IGHV3-33)
ARDQRYSSGWYDY

SEQ ID NO: 23455 - protein, 8 aa, Homo sapiens
  Light chain CDR3 for antibody 11728 (IGKV3-11)
QQRSNWLT

SEQ ID NO: 23456 - protein, 11 aa, Homo sapiens
  Heavy chain CDR3 for antibody 11728 (IGHV3-33)
ARDRGNWGFDY

SEQ ID NO: 23457 - protein, 9 aa, Homo sapiens
  Light chain CDR3 for antibody 11729 (IGKV1-33)
QQYDNLPPT

SEQ ID NO: 23458 - protein, 17 aa, Homo sapiens
  Heavy chain CDR3 for antibody 11729 (IGHV1-24)
ATHYGSGSHYKGYGMDV

SEQ ID NO: 23459 - protein, 10 aa, Homo sapiens
  Light chain CDR3 for antibody 11730 (IGKV3-20)
QQYGSSPPYT

SEQ ID NO: 23460 - protein, 15 aa, Homo sapiens
  Heavy chain CDR3 for antibody 11730 (IGHV3-23)
AKDRDYDFLSGPFDY

SEQ ID NO: 23461 - protein, 9 aa, Homo sapiens
  Light chain CDR3 for antibody 11731 (IGKV1D-16)
QQYNSFPLT

SEQ ID NO: 23462 - protein, 18 aa, Homo sapiens
  Heavy chain CDR3 for antibody 11731 (IGHV1-18)
ARDRYYYDSGSYYYGTDV

SEQ ID NO: 23463 - protein, 8 aa, Homo sapiens
  Light chain CDR3 for antibody 11732 (IGKV3-20)
QQYGSSFT

SEQ ID NO: 23464 - protein, 18 aa, Homo sapiens
  Heavy chain CDR3 for antibody 11732 (IGHV1-18)
ARDRYYYDSGSYYYGMDV

SEQ ID NO: 23465 - protein, 9 aa, Homo sapiens
  Light chain CDR3 for antibody 11733 (IGKV1-6)
LQDYNYTWT

SEQ ID NO: 23466 - protein, 21 aa, Homo sapiens
  Heavy chain CDR3 for antibody 11733 (IGHV3-23)
AKDIEYYGSGSYPLYYYGMDV

SEQ ID NO: 23467 - protein, 9 aa, Homo sapiens
  Light chain CDR3 for antibody 11734 (IGKV3D-7)
QQDYKLPLT

SEQ ID NO: 23468 - protein, 9 aa, Homo sapiens
  Heavy chain CDR3 for antibody 11734 (IGHV4-59)
ARSGSGIYT

SEQ ID NO: 23469 - protein, 10 aa, Homo sapiens
  Light chain CDR3 for antibody 11735 (IGKV3-20)
QQYGSSPPYT

SEQ ID NO: 23470 - protein, 12 aa, Homo sapiens
  Heavy chain CDR3 for antibody 11735 (IGHV3-33)
AREGTGGNWFDP

SEQ ID NO: 23471 - protein, 9 aa, Homo sapiens
  Light chain CDR3 for antibody 11736 (IGKV1-17)
LQHNSYPYT

SEQ ID NO: 23472 - protein, 22 aa, Homo sapiens
  Heavy chain CDR3 for antibody 11736 (IGHV1-46)
ARDRYNNQSKYRNRDYYYGLDV

SEQ ID NO: 23473 - protein, 9 aa, Homo sapiens
  Light chain CDR3 for antibody 11737 (IGKV1D-16)
QQYISYPYT

SEQ ID NO: 23474 - protein, 14 aa, Homo sapiens
  Heavy chain CDR3 for antibody 11737 (IGHV1-18)
ARERYYGSGSPFDY

SEQ ID NO: 23475 - protein, 9 aa, Homo sapiens
  Light chain CDR3 for antibody 11738 (IGKV1-17)
LHSNNYPWT

SEQ ID NO: 23476 - protein, 13 aa, Homo sapiens
  Heavy chain CDR3 for antibody 11738 (IGHV3-33)
ARRYRSGWYPFDY

SEQ ID NO: 23477 - protein, 9 aa, Homo sapiens
  Light chain CDR3 for antibody 11739 (IGKV6-21)
HQSTSLPFT

SEQ ID NO: 23478 - protein, 11 aa, Homo sapiens
  Heavy chain CDR3 for antibody 11739 (IGHV3-33)
ARDRVLTPFDY

SEQ ID NO: 23479 - protein, 9 aa, Homo sapiens
  Light chain CDR3 for antibody 11740 (IGKV1-16)
QQYACYPPT

SEQ ID NO: 23480 - protein, 16 aa, Homo sapiens
  Heavy chain CDR3 for antibody 11740 (IGHV3-33)
ARDNFGSGSYYSHFHY

SEQ ID NO: 23481 - protein, 9 aa, Homo sapiens
  Light chain CDR3 for antibody 11741 (IGKV1D-16)
QQYHSYPYT

SEQ ID NO: 23482 - protein, 16 aa, Homo sapiens
  Heavy chain CDR3 for antibody 11741 (IGHV3-33)
ARIAAPGSEYYYGMDV

SEQ ID NO: 23483 - protein, 9 aa, Homo sapiens
  Light chain CDR3 for antibody 11742 (IGKV1D-16)
QQYSSYPYT

SEQ ID NO: 23484 - protein, 14 aa, Homo sapiens
  Heavy chain CDR3 for antibody 11742 (IGHV3-23)
AKSRIVGALYYFGY

SEQ ID NO: 23485 - protein, 9 aa, Homo sapiens
  Light chain CDR3 for antibody 11743 (IGKV1D-16)
QQYNSFPLT

SEQ ID NO: 23486 - protein, 17 aa, Homo sapiens
  Heavy chain CDR3 for antibody 11743 (IGHV4-59)
ARRIPMVREIIITAFDY

SEQ ID NO: 23487 - protein, 9 aa, Homo sapiens
  Light chain CDR3 for antibody 11744 (IGKV1-5)
QQYDSYPWT

SEQ ID NO: 23488 - protein, 13 aa, Homo sapiens
  Heavy chain CDR3 for antibody 11744 (IGHV3-23)
ASPFNWNDGFFDY

SEQ ID NO: 23489 - protein, 10 aa, Homo sapiens
  Light chain CDR3 for antibody 11745 (IGKV3-15)
QQYNNWPPLT

SEQ ID NO: 23490 - protein, 18 aa, Homo sapiens
  Heavy chain CDR3 for antibody 11745 (IGHV1-18)
ARDPNYYGSGSYYNYFDY

SEQ ID NO: 23491 - protein, 8 aa, Homo sapiens
  Light chain CDR3 for antibody 11746 (IGKV1D-13)
QQFNNYPT

SEQ ID NO: 23492 - protein, 15 aa, Homo sapiens
  Heavy chain CDR3 for antibody 11746 (IGHV3-33)
ARDRGMVRGDGYLDY

SEQ ID NO: 23493 - protein, 9 aa, Homo sapiens
  Light chain CDR3 for antibody 11747 (IGKV1-37)
QRTSNAPYT

SEQ ID NO: 23494 - protein, 18 aa, Homo sapiens
  Heavy chain CDR3 for antibody 11747 (IGHV3-33)
ARDGYSGYDYYYYYGMDV

SEQ ID NO: 23495 - protein, 8 aa, Homo sapiens
  Light chain CDR3 for antibody 11748 (IGKV3-20)
QQYGRSFT

SEQ ID NO: 23496 - protein, 18 aa, Homo sapiens
  Heavy chain CDR3 for antibody 11748 (IGHV3-33)
ARGLLWFGVSYYYYGMDV

SEQ ID NO: 23497 - protein, 9 aa, Homo sapiens
  Light chain CDR3 for antibody 11749 (IGKV1-27)
QKYNSAPYT

SEQ ID NO: 23498 - protein, 22 aa, Homo sapiens
  Heavy chain CDR3 for antibody 11749 (IGHV3-33)
ARMYYDILTGYYKDYYYYGMDV

SEQ ID NO: 23499 - protein, 8 aa, Homo sapiens
  Light chain CDR3 for antibody 11750 (IGKV1-5)
QQYNSYST

SEQ ID NO: 23500 - protein, 18 aa, Homo sapiens
  Heavy chain CDR3 for antibody 11750 (IGHV3-33)
ARDRYYDILTGYYMGFDY

SEQ ID NO: 23501 - protein, 8 aa, Homo sapiens
  Light chain CDR3 for antibody 11751 (IGKV3D-7)
QQDYNLLT

SEQ ID NO: 23502 - protein, 17 aa, Homo sapiens
  Heavy chain CDR3 for antibody 11751 (IGHV3-33)
ARVRGVIEGYYYYGMDV

SEQ ID NO: 23503 - protein, 8 aa, Homo sapiens
  Light chain CDR3 for antibody 11752 (IGKV1D-13)
QQFNNYPT

SEQ ID NO: 23504 - protein, 17 aa, Homo sapiens
  Heavy chain CDR3 for antibody 11752 (IGHV3-33)
ARDQDDILTGYYWYFDL

SEQ ID NO: 23505 - protein, 9 aa, Homo sapiens
  Light chain CDR3 for antibody 11753 (IGKV3-15)
QQYHNWPLT

SEQ ID NO: 23506 - protein, 10 aa, Homo sapiens
  Heavy chain CDR3 for antibody 11753 (IGHV3-33)
AREGLRYFDH

SEQ ID NO: 23507 - protein, 9 aa, Homo sapiens
  Light chain CDR3 for antibody 11754 (IGKV5-2)
LQHDNFPYT

SEQ ID NO: 23508 - protein, 12 aa, Homo sapiens
  Heavy chain CDR3 for antibody 11754 (IGHV3-53)
ARGGFDWGSIDY

SEQ ID NO: 23509 - protein, 9 aa, Homo sapiens
  Light chain CDR3 for antibody 11755 (IGKV6-21)
HQSSSLPYT

SEQ ID NO: 23510 - protein, 14 aa, Homo sapiens
  Heavy chain CDR3 for antibody 11755 (IGHV3-64)
ARDDYVSGSYYFDY

SEQ ID NO: 23511 - protein, 9 aa, Homo sapiens
  Light chain CDR3 for antibody 11756 (IGKV3D-7)
QQDYNLPYT

SEQ ID NO: 23512 - protein, 13 aa, Homo sapiens
  Heavy chain CDR3 for antibody 11756 (IGHV3-21)
ARDSTLVRGVFAY

SEQ ID NO: 23513 - protein, 9 aa, Homo sapiens
  Light chain CDR3 for antibody 11757 (IGKV1-6)
LQDYNYPWT

SEQ ID NO: 23514 - protein, 13 aa, Homo sapiens
  Heavy chain CDR3 for antibody 11757 (IGHV3-33)
AREEVNWGAFFDY

SEQ ID NO: 23515 - protein, 9 aa, Homo sapiens
  Light chain CDR3 for antibody 11758 (IGKV2-30)
MQGTHWPLT

SEQ ID NO: 23516 - protein, 16 aa, Homo sapiens
  Heavy chain CDR3 for antibody 11758 (IGHV3-11)
ARYHYGSGSYYNVGDY

SEQ ID NO: 23517 - protein, 8 aa, Homo sapiens
  Light chain CDR3 for antibody 11759 (IGKV3-11)
LQRGNWPT

SEQ ID NO: 23518 - protein, 16 aa, Homo sapiens
  Heavy chain CDR3 for antibody 11759 (IGHV1-24)
ATDWNDRGYYYYGMDV

SEQ ID NO: 23519 - protein, 9 aa, Homo sapiens
  Light chain CDR3 for antibody 11760 (IGKV1-5)
QQYNTYSRT

SEQ ID NO: 23520 - protein, 12 aa, Homo sapiens
  Heavy chain CDR3 for antibody 11760 (IGHV3-33)
ARDYISTYGMDV

SEQ ID NO: 23521 - protein, 9 aa, Homo sapiens
  Light chain CDR3 for antibody 11761 (IGKV2D-24)
TQATQFPHT

SEQ ID NO: 23522 - protein, 21 aa, Homo sapiens
  Heavy chain CDR3 for antibody 11761 (IGHV1-18)
ASGVLIWFGELLSEDYYDMDV

SEQ ID NO: 23523 - protein, 9 aa, Homo sapiens
  Light chain CDR3 for antibody 11762 (IGKV3D-7)
QQDYEFPIT

SEQ ID NO: 23524 - protein, 17 aa, Homo sapiens
  Heavy chain CDR3 for antibody 11762 (IGHV1-18)
ARDRAFTMVRGVPPFDY

SEQ ID NO: 23525 - protein, 9 aa, Homo sapiens
  Light chain CDR3 for antibody 11763 (IGKV1-17)
QQYGSSPRT

SEQ ID NO: 23526 - protein, 16 aa, Homo sapiens
  Heavy chain CDR3 for antibody 11763 (IGHV3-11)
ARYHYGSGSYYNVGDY

SEQ ID NO: 23527 - protein, 11 aa, Homo sapiens
  Light chain CDR3 for antibody 11764 (IGKV3-11)
QQRSNWPPTWT

SEQ ID NO: 23528 - protein, 14 aa, Homo sapiens
  Heavy chain CDR3 for antibody 11764 (IGHV1-18)
ARCFGSGSYGWFDP

SEQ ID NO: 23529 - protein, 9 aa, Homo sapiens
  Light chain CDR3 for antibody 11765 (IGKV6-21)
QQSSNLPHT

SEQ ID NO: 23530 - protein, 18 aa, Homo sapiens
  Heavy chain CDR3 for antibody 11765 (IGHV4-59)
AREGDYVWGSYRPNWFDP

SEQ ID NO: 23531 - protein, 10 aa, Homo sapiens
  Light chain CDR3 for antibody 11766 (IGKV1-17)
LQHNSYPMYT

SEQ ID NO: 23532 - protein, 15 aa, Homo sapiens
  Heavy chain CDR3 for antibody 11766 (IGHV3-20)
AREGPYYYGSGSLDY

SEQ ID NO: 23533 - protein, 8 aa, Homo sapiens
  Light chain CDR3 for antibody 11767 (IGKV3-20)
QQYGSSLT

SEQ ID NO: 23534 - protein, 15 aa, Homo sapiens
  Heavy chain CDR3 for antibody 11767 (IGHV3-33)
ARHSSGFYYYYGMDV

SEQ ID NO: 23535 - protein, 8 aa, Homo sapiens
  Light chain CDR3 for antibody 11768 (IGKV1D-13)
QQFNNYYT

SEQ ID NO: 23536 - protein, 17 aa, Homo sapiens
  Heavy chain CDR3 for antibody 11768 (IGHV3-23)
AKDYDILTGYSHNWFDP

SEQ ID NO: 23537 - protein, 9 aa, Homo sapiens
  Light chain CDR3 for antibody 11769 (IGKV3-11)
QQRSNWPYT

SEQ ID NO: 23538 - protein, 11 aa, Homo sapiens
  Heavy chain CDR3 for antibody 11769 (IGHV4-59)
AREMGHDIFDI

SEQ ID NO: 23539 - protein, 8 aa, Homo sapiens
  Light chain CDR3 for antibody 11770 (IGKV3D-7)
QQDYNLYT

SEQ ID NO: 23540 - protein, 15 aa, Homo sapiens
  Heavy chain CDR3 for antibody 11770 (IGHV3-33)
AKDRDYDFLSGPFDY

SEQ ID NO: 23541 - protein, 9 aa, Homo sapiens
  Light chain CDR3 for antibody 11771 (IGKV3D-7)
QQDYNLPYT

SEQ ID NO: 23542 - protein, 12 aa, Homo sapiens
  Heavy chain CDR3 for antibody 11771 (IGHV3-23)
AKEGLGNDYESY

SEQ ID NO: 23543 - protein, 9 aa, Homo sapiens
  Light chain CDR3 for antibody 11772 (IGKV1-6)
LQDYKSPFT

SEQ ID NO: 23544 - protein, 13 aa, Homo sapiens
  Heavy chain CDR3 for antibody 11772 (IGHV3-23)
AKDRGGSYSYFDF

SEQ ID NO: 23545 - protein, 10 aa, Homo sapiens
  Light chain CDR3 for antibody 11773 (IGKV1-9)
QQLDSYPMYT

SEQ ID NO: 23546 - protein, 14 aa, Homo sapiens
  Heavy chain CDR3 for antibody 11773 (IGHV3-33)
AREGYSSNWYDLDY

SEQ ID NO: 23547 - protein, 9 aa, Homo sapiens
  Light chain CDR3 for antibody 11774 (IGKV3-11)
QQRSSRPPT

SEQ ID NO: 23548 - protein, 21 aa, Homo sapiens
  Heavy chain CDR3 for antibody 11774 (IGHV3-23)
AKDIDYYGSGSYPLYYYGMDV

SEQ ID NO: 23549 - protein, 8 aa, Homo sapiens
  Light chain CDR3 for antibody 11775 (IGKV3D-7)
QQDYNLLT

SEQ ID NO: 23550 - protein, 14 aa, Homo sapiens
  Heavy chain CDR3 for antibody 11775 (IGHV1-46)
ARDGVGAKEGGFDY

SEQ ID NO: 23551 - protein, 9 aa, Homo sapiens
  Light chain CDR3 for antibody 11776 (IGKV1-9)
QQLKSYLYT

SEQ ID NO: 23552 - protein, 17 aa, Homo sapiens
  Heavy chain CDR3 for antibody 11776 (IGHV3-33)
ARVYYDILTGYSPAFDI

SEQ ID NO: 23553 - protein, 9 aa, Homo sapiens
  Light chain CDR3 for antibody 11777 (IGKV6-21)
HQSSSLPYT

SEQ ID NO: 23554 - protein, 13 aa, Homo sapiens
  Heavy chain CDR3 for antibody 11777 (IGHV4-59)
ARESPGPYDAFDI

SEQ ID NO: 23555 - protein, 10 aa, Homo sapiens
  Light chain CDR3 for antibody 11778 (IGKV3-15)
QQYNNWPPIT

SEQ ID NO: 23556 - protein, 11 aa, Homo sapiens
  Heavy chain CDR3 for antibody 11778 (IGHV4-59)
AREMGHDPFDI

SEQ ID NO: 23557 - protein, 9 aa, Homo sapiens
  Light chain CDR3 for antibody 11779 (IGKV1-39)
QQSYSTPFT

SEQ ID NO: 23558 - protein, 18 aa, Homo sapiens
  Heavy chain CDR3 for antibody 11779 (IGHV1-46)
ARDGDYVWGSYRSDWFDP

SEQ ID NO: 23559 - protein, 9 aa, Homo sapiens
  Light chain CDR3 for antibody 11780 (IGKV1-6)
QQEYNYPLT

SEQ ID NO: 23560 - protein, 8 aa, Homo sapiens
  Heavy chain CDR3 for antibody 11780 (IGHV1-46)
AKETGNNY

SEQ ID NO: 23561 - protein, 9 aa, Homo sapiens
  Light chain CDR3 for antibody 11781 (IGKV3D-20)
QQYGYSPLT

SEQ ID NO: 23562 - protein, 17 aa, Homo sapiens
  Heavy chain CDR3 for antibody 11781 (IGHV4-61)
ARNTMVGTWQRQGNLDH

SEQ ID NO: 23563 - protein, 10 aa, Homo sapiens
  Light chain CDR3 for antibody 11782 (IGKV1-39)
QQSYSTPMYT

SEQ ID NO: 23564 - protein, 8 aa, Homo sapiens
  Heavy chain CDR3 for antibody 11782 (IGHV3-33)
ARDRGFDY

SEQ ID NO: 23565 - protein, 11 aa, Homo sapiens
  Light chain CDR3 for antibody 11783 (IGKV3-11)
QQRSNWPPMYT

SEQ ID NO: 23566 - protein, 13 aa, Homo sapiens
  Heavy chain CDR3 for antibody 11783 (IGHV3-33)
ARTDYYFYYGLDV

SEQ ID NO: 23567 - protein, 9 aa, Homo sapiens
  Light chain CDR3 for antibody 11784 (IGKV2D-28)
MQALQTPPT

SEQ ID NO: 23568 - protein, 17 aa, Homo sapiens
  Heavy chain CDR3 for antibody 11784 (IGHV3-33)
ARESLKLGIYYYYGMDV

SEQ ID NO: 23569 - protein, 9 aa, Homo sapiens
  Light chain CDR3 for antibody 11785 (IGKV1-6)
LQDYKSPFT

SEQ ID NO: 23570 - protein, 17 aa, Homo sapiens
  Heavy chain CDR3 for antibody 11785 (IGHV3-33)
ARGGGYENDHYYYGMDV

SEQ ID NO: 23571 - protein, 9 aa, Homo sapiens
  Light chain CDR3 for antibody 11786 (IGKV1D-16)
QQYYSYPWT

SEQ ID NO: 23572 - protein, 13 aa, Homo sapiens
  Heavy chain CDR3 for antibody 11786 (IGHV3-33)
ARGDNWNDGGFDY

SEQ ID NO: 23573 - protein, 10 aa, Homo sapiens
  Light chain CDR3 for antibody 11787 (IGKV3-11)
QQRSNWPIFP

SEQ ID NO: 23574 - protein, 18 aa, Homo sapiens
  Heavy chain CDR3 for antibody 11787 (IGHV1-8)
ARSSIAAAGIYYYYGMDV

SEQ ID NO: 23575 - protein, 9 aa, Homo sapiens
  Light chain CDR3 for antibody 11788 (IGKV1D-16)
QQYNSYPYT

SEQ ID NO: 23576 - protein, 13 aa, Homo sapiens
  Heavy chain CDR3 for antibody 11788 (IGHV3-30)
AAPFMGRGDGMDV

SEQ ID NO: 23577 - protein, 10 aa, Homo sapiens
  Light chain CDR3 for antibody 11789 (IGKV1-17)
LQHNSYPMYT

SEQ ID NO: 23578 - protein, 8 aa, Homo sapiens
  Heavy chain CDR3 for antibody 11789 (IGHV3-33)
ARDRGFDY

SEQ ID NO: 23579 - protein, 9 aa, Homo sapiens
  Light chain CDR3 for antibody 11790 (IGKV1-17)
LQHYSYPPT

SEQ ID NO: 23580 - protein, 9 aa, Homo sapiens
  Heavy chain CDR3 for antibody 11790 (IGHV3-23)
AKDYGSESP

SEQ ID NO: 23581 - protein, 9 aa, Homo sapiens
  Light chain CDR3 for antibody 11791 (IGKV1-39)
QQSYSTPLT

SEQ ID NO: 23582 - protein, 11 aa, Homo sapiens
  Heavy chain CDR3 for antibody 11791 (IGHV1-18)
SRGGFSVGYDS

SEQ ID NO: 23583 - protein, 9 aa, Homo sapiens
  Light chain CDR3 for antibody 11792 (IGKV1-27)
QKYNSAPYT

SEQ ID NO: 23584 - protein, 14 aa, Homo sapiens
  Heavy chain CDR3 for antibody 11792 (IGHV3-33)
ARDRGRHNYFGMDV

SEQ ID NO: 23585 - protein, 10 aa, Homo sapiens
  Light chain CDR3 for antibody 11793 (IGKV3-11)
QQRSNWPILT

SEQ ID NO: 23586 - protein, 20 aa, Homo sapiens
  Heavy chain CDR3 for antibody 11793 (IGHV3-23)
SRGGATLVRGVIDYYYGMDV

SEQ ID NO: 23587 - protein, 9 aa, Homo sapiens
  Light chain CDR3 for antibody 11794 (IGKV1-9)
QQLYTYPYT

SEQ ID NO: 23588 - protein, 16 aa, Homo sapiens
  Heavy chain CDR3 for antibody 11794 (IGHV3-33)
ARGDDILTHQYYGVDV

SEQ ID NO: 23589 - protein, 9 aa, Homo sapiens
  Light chain CDR3 for antibody 11795 (IGKV2-30)
MQGTHWPYT

SEQ ID NO: 23590 - protein, 14 aa, Homo sapiens
  Heavy chain CDR3 for antibody 11795 (IGHV4-39)
ARQGGSGSYYNLDY

SEQ ID NO: 23591 - protein, 9 aa, Homo sapiens
  Light chain CDR3 for antibody 11796 (IGKV1-6)
LQDFHYPWT

SEQ ID NO: 23592 - protein, 18 aa, Homo sapiens
  Heavy chain CDR3 for antibody 11796 (IGHV3-33)
ARDEYYGSGIYYNYGMDV

SEQ ID NO: 23593 - protein, 9 aa, Homo sapiens
  Light chain CDR3 for antibody 11797 (IGKV1-9)
QQLDNYLFT

SEQ ID NO: 23594 - protein, 9 aa, Homo sapiens
  Heavy chain CDR3 for antibody 11797 (IGHV4-59)
AREGGSGSL

SEQ ID NO: 23595 - protein, 9 aa, Homo sapiens
  Light chain CDR3 for antibody 11798 (IGKV5-2)
LQHDKFPYT

SEQ ID NO: 23596 - protein, 18 aa, Homo sapiens
  Heavy chain CDR3 for antibody 11798 (IGHV3-33)
ARDQGIVVLPGAPWYFDL

SEQ ID NO: 23597 - protein, 10 aa, Homo sapiens
  Light chain CDR3 for antibody 11799 (IGKV3-11)
QQRSNWPIFT

SEQ ID NO: 23598 - protein, 9 aa, Homo sapiens
  Heavy chain CDR3 for antibody 11799 (IGHV4-34)
ARDLYYFDY

SEQ ID NO: 23599 - protein, 9 aa, Homo sapiens
  Light chain CDR3 for antibody 11800 (IGKV1-39)
QQSYSTPIT

SEQ ID NO: 23600 - protein, 22 aa, Homo sapiens
  Heavy chain CDR3 for antibody 11800 (IGHV1-18)
ARDRYNNQSKYRNRDYYYGLDV

SEQ ID NO: 23601 - protein, 10 aa, Homo sapiens
  Light chain CDR3 for antibody 11801 (IGKV3-15)
QQYNNWPPIT

SEQ ID NO: 23602 - protein, 11 aa, Homo sapiens
  Heavy chain CDR3 for antibody 11801 (IGHV3-33)
ARDRATATVDY

SEQ ID NO: 23603 - protein, 10 aa, Homo sapiens
  Light chain CDR3 for antibody 11802 (IGKV3-20)
QQYGRSPPVT

SEQ ID NO: 23604 - protein, 9 aa, Homo sapiens
  Heavy chain CDR3 for antibody 11802 (IGHV3-13)
ARDHWYFDL

SEQ ID NO: 23605 - protein, 10 aa, Homo sapiens
  Light chain CDR3 for antibody 11803 (IGKV3-11)
QQRINWPIFT

SEQ ID NO: 23606 - protein, 16 aa, Homo sapiens
  Heavy chain CDR3 for antibody 11803 (IGHV1-18)
ATEDSSSYYYYYGMDV

SEQ ID NO: 23607 - protein, 9 aa, Homo sapiens
  Light chain CDR3 for antibody 11804 (IGKV2-30)
MQGTHWPLT

SEQ ID NO: 23608 - protein, 13 aa, Homo sapiens
  Heavy chain CDR3 for antibody 11804 (IGHV1-2)
ARDGVRGSFGMDV

SEQ ID NO: 23609 - protein, 9 aa, Homo sapiens
  Light chain CDR3 for antibody 11805 (IGKV1D-16)
QQYSSYQYT

SEQ ID NO: 23610 - protein, 13 aa, Homo sapiens
  Heavy chain CDR3 for antibody 11805 (IGHV3-33)
ARAFTMVRGVIDY

SEQ ID NO: 23611 - protein, 8 aa, Homo sapiens
  Light chain CDR3 for antibody 11806 (IGKV3-20)
QQYGRSFT

SEQ ID NO: 23612 - protein, 15 aa, Homo sapiens
  Heavy chain CDR3 for antibody 11806 (IGHV3-33)
ARDTGYSSSWNWFDP

SEQ ID NO: 23613 - protein, 10 aa, Homo sapiens
  Light chain CDR3 for antibody 11807 (IGKV3-11)
QQRSNWPILT

SEQ ID NO: 23614 - protein, 16 aa, Homo sapiens
  Heavy chain CDR3 for antibody 11807 (IGHV3-23)
ARNDILTASGYYGMDV

SEQ ID NO: 23615 - protein, 9 aa, Homo sapiens
  Light chain CDR3 for antibody 11808 (IGKV1-39)
QQGFSTPWT

SEQ ID NO: 23616 - protein, 11 aa, Homo sapiens
  Heavy chain CDR3 for antibody 11808 (IGHV4-59)
ARDGVRGVFDI

SEQ ID NO: 23617 - protein, 10 aa, Homo sapiens
  Light chain CDR3 for antibody 11809 (IGKV3-11)
QQRSNWPPYT

SEQ ID NO: 23618 - protein, 15 aa, Homo sapiens
  Heavy chain CDR3 for antibody 11809 (IGHV3-64)
ARDGLRYFDWLFPWY

SEQ ID NO: 23619 - protein, 9 aa, Homo sapiens
  Light chain CDR3 for antibody 11810 (IGKV3-15)
QQYNDWPRT

SEQ ID NO: 23620 - protein, 12 aa, Homo sapiens
  Heavy chain CDR3 for antibody 11810 (IGHV3-13)
ARDRGYSGYFDY

SEQ ID NO: 23621 - protein, 9 aa, Homo sapiens
  Light chain CDR3 for antibody 11811 (IGKV3-20)
QQYGSSPYT

SEQ ID NO: 23622 - protein, 17 aa, Homo sapiens
  Heavy chain CDR3 for antibody 11811 (IGHV3-11)
ARAGPRYDSSGHDAFDI

SEQ ID NO: 23623 - protein, 9 aa, Homo sapiens
  Light chain CDR3 for antibody 11812 (IGKV5-2)
LQHDKFPYT

SEQ ID NO: 23624 - protein, 18 aa, Homo sapiens
  Heavy chain CDR3 for antibody 11812 (IGHV3-33)
AREGYYGSGSYYRGWFDP

SEQ ID NO: 23625 - protein, 10 aa, Homo sapiens
  Light chain CDR3 for antibody 11813 (IGKV1-17)
LQHNSYPMYT

SEQ ID NO: 23626 - protein, 10 aa, Homo sapiens
  Heavy chain CDR3 for antibody 11813 (IGHV3-74)
ARENWGGFDY

SEQ ID NO: 23627 - protein, 9 aa, Homo sapiens
  Light chain CDR3 for antibody 11814 (IGKV1-17)
LQYNSYPPT

SEQ ID NO: 23628 - protein, 10 aa, Homo sapiens
  Heavy chain CDR3 for antibody 11814 (IGHV3-23)
AKDRYGDYVY

SEQ ID NO: 23629 - protein, 9 aa, Homo sapiens
  Light chain CDR3 for antibody 11815 (IGKV1-16)
QQYDSYPYT

SEQ ID NO: 23630 - protein, 12 aa, Homo sapiens
  Heavy chain CDR3 for antibody 11815 (IGHV4-59)
ARHPRYLDAFDI

SEQ ID NO: 23631 - protein, 9 aa, Homo sapiens
  Light chain CDR3 for antibody 11816 (IGKV1D-16)
QQYNSYPFT

SEQ ID NO: 23632 - protein, 13 aa, Homo sapiens
  Heavy chain CDR3 for antibody 11816 (IGHV4-59)
ARREVVGGRGFDY

SEQ ID NO: 23633 - protein, 9 aa, Homo sapiens
  Light chain CDR3 for antibody 11817 (IGKV5-2)
LQHDNFPWT

SEQ ID NO: 23634 - protein, 16 aa, Homo sapiens
  Heavy chain CDR3 for antibody 11817 (IGHV3-23)
AKDGIGELSYYYGMDV

SEQ ID NO: 23635 - protein, 10 aa, Homo sapiens
  Light chain CDR3 for antibody 11818 (IGKV1-39)
QQSYSTPMYT

SEQ ID NO: 23636 - protein, 20 aa, Homo sapiens
  Heavy chain CDR3 for antibody 11818 (IGHV3-33)
AKDREMAATSHYYYYYGMDV

SEQ ID NO: 23637 - protein, 10 aa, Homo sapiens
  Light chain CDR3 for antibody 11819 (IGKV3-11)
QQRSNWPALT

SEQ ID NO: 23638 - protein, 14 aa, Homo sapiens
  Heavy chain CDR3 for antibody 11819 (IGHV3-33)
ARDLNYDILNGGGY

SEQ ID NO: 23639 - protein, 9 aa, Homo sapiens
  Light chain CDR3 for antibody 11820 (IGKV1-16)
QHYNDYPFT

SEQ ID NO: 23640 - protein, 14 aa, Homo sapiens
  Heavy chain CDR3 for antibody 11820 (IGHV3-33)
AREGYSSGWDYFDH

SEQ ID NO: 23641 - protein, 10 aa, Homo sapiens
  Light chain CDR3 for antibody 11821 (IGKV3-15)
QQYNNWPPYT

SEQ ID NO: 23642 - protein, 11 aa, Homo sapiens
  Heavy chain CDR3 for antibody 11821 (IGHV3-33)
ARGSGSYAFDY

SEQ ID NO: 23643 - protein, 10 aa, Homo sapiens
  Light chain CDR3 for antibody 11822 (IGKV1-17)
LQHNSYPMYT

SEQ ID NO: 23644 - protein, 16 aa, Homo sapiens
  Heavy chain CDR3 for antibody 11822 (IGHV3-33)
ARAYYYGSGSYPHFQH

SEQ ID NO: 23645 - protein, 8 aa, Homo sapiens
  Light chain CDR3 for antibody 11823 (IGKV3-20)
QQYGSSLT

SEQ ID NO: 23646 - protein, 17 aa, Homo sapiens
  Heavy chain CDR3 for antibody 11823 (IGHV4-34)
ARDGSGSYTHYYYGMDV

SEQ ID NO: 23647 - protein, 9 aa, Homo sapiens
  Light chain CDR3 for antibody 11824 (IGKV3D-7)
QQDYNLPYT

SEQ ID NO: 23648 - protein, 21 aa, Homo sapiens
  Heavy chain CDR3 for antibody 11824 (IGHV3-33)
ARKRLYDILTGYYKAYYGMDV

SEQ ID NO: 23649 - protein, 10 aa, Homo sapiens
  Light chain CDR3 for antibody 11825 (IGKV1-17)
LQHNSYPMYT

SEQ ID NO: 23650 - protein, 17 aa, Homo sapiens
  Heavy chain CDR3 for antibody 11825 (IGHV3-33)
ARGDGDILTGYYEWFDP

SEQ ID NO: 23651 - protein, 8 aa, Homo sapiens
  Light chain CDR3 for antibody 11826 (IGKV3-20)
QQYGSSFT

SEQ ID NO: 23652 - protein, 8 aa, Homo sapiens
  Heavy chain CDR3 for antibody 11826 (IGHV3-23)
AKESLLDY

SEQ ID NO: 23653 - protein, 9 aa, Homo sapiens
  Light chain CDR3 for antibody 11827 (IGKV3-15)
QQYNNWPYT

SEQ ID NO: 23654 - protein, 16 aa, Homo sapiens
  Heavy chain CDR3 for antibody 11827 (IGHV3-13)
ARDRSYESYYYYGMDV

SEQ ID NO: 23655 - protein, 9 aa, Homo sapiens
  Light chain CDR3 for antibody 11828 (IGKV1D-13)
QQFNNYPYT

SEQ ID NO: 23656 - protein, 14 aa, Homo sapiens
  Heavy chain CDR3 for antibody 11828 (IGHV3-20)
ARDRGSSFFDAVDI

SEQ ID NO: 23657 - protein, 9 aa, Homo sapiens
  Light chain CDR3 for antibody 11829 (IGKV6-21)
HQSSSLPQT

SEQ ID NO: 23658 - protein, 16 aa, Homo sapiens
  Heavy chain CDR3 for antibody 11829 (IGHV3-33)
ARGGLTGGGDYDAFDI

SEQ ID NO: 23659 - protein, 8 aa, Homo sapiens
  Light chain CDR3 for antibody 11830 (IGKV1-5)
QQYNSYST

SEQ ID NO: 23660 - protein, 17 aa, Homo sapiens
  Heavy chain CDR3 for antibody 11830 (IGHV1-18)
ARNLHYDILTGYPHFDY

SEQ ID NO: 23661 - protein, 9 aa, Homo sapiens
  Light chain CDR3 for antibody 11831 (IGKV1-33)
QQYDNLPFT

SEQ ID NO: 23662 - protein, 12 aa, Homo sapiens
  Heavy chain CDR3 for antibody 11831 (IGHV4-61)
ARVYSSGWIFDY

SEQ ID NO: 23663 - protein, 10 aa, Homo sapiens
  Light chain CDR3 for antibody 11832 (IGKV3-20)
QQYGRSPPVT

SEQ ID NO: 23664 - protein, 15 aa, Homo sapiens
  Heavy chain CDR3 for antibody 11832 (IGHV3-33)
ARDEHYDILTGYWDY

SEQ ID NO: 23665 - protein, 9 aa, Homo sapiens
  Light chain CDR3 for antibody 11833 (IGKV6-21)
HQSSNLPYT

SEQ ID NO: 23666 - protein, 16 aa, Homo sapiens
  Heavy chain CDR3 for antibody 11833 (IGHV1-8)
AREGTMVRGVDYGMDV

SEQ ID NO: 23667 - protein, 9 aa, Homo sapiens
  Light chain CDR3 for antibody 11834 (IGKV6-21)
HQSSSLPHT

SEQ ID NO: 23668 - protein, 18 aa, Homo sapiens
  Heavy chain CDR3 for antibody 11834 (IGHV3-23)
AKEGDYYGSGSYWGYFDP

SEQ ID NO: 23669 - protein, 9 aa, Homo sapiens
  Light chain CDR3 for antibody 11835 (IGKV5-2)
LQHDNFPYT

SEQ ID NO: 23670 - protein, 8 aa, Homo sapiens
  Heavy chain CDR3 for antibody 11835 (IGHV3-33)
ARDDPPRY

SEQ ID NO: 23671 - protein, 9 aa, Homo sapiens
  Light chain CDR3 for antibody 11836 (IGKV1-6)
LQDYKSPFT

SEQ ID NO: 23672 - protein, 12 aa, Homo sapiens
  Heavy chain CDR3 for antibody 11836 (IGHV4-59)
ARDRSGWAYFDY

SEQ ID NO: 23673 - protein, 9 aa, Homo sapiens
  Light chain CDR3 for antibody 11837 (IGKV3-11)
QQRSNWMYT

SEQ ID NO: 23674 - protein, 16 aa, Homo sapiens
  Heavy chain CDR3 for antibody 11837 (IGHV4-59)
ARRRYFEWLLGDVFDI

SEQ ID NO: 23675 - protein, 9 aa, Homo sapiens
  Light chain CDR3 for antibody 11838 (IGKV1-39)
QQGYSTPWT

SEQ ID NO: 23676 - protein, 18 aa, Homo sapiens
  Heavy chain CDR3 for antibody 11838 (IGHV3-23)
ARYHLYFGSGFGSDGMDV

SEQ ID NO: 23677 - protein, 9 aa, Homo sapiens
  Light chain CDR3 for antibody 11839 (IGKV2D-24)
MQATQFPHT

SEQ ID NO: 23678 - protein, 15 aa, Homo sapiens
  Heavy chain CDR3 for antibody 11839 (IGHV3-30)
ARRGYGSGSPDAFDL

SEQ ID NO: 23679 - protein, 9 aa, Homo sapiens
  Light chain CDR3 for antibody 11840 (IGKV1-6)
LQDYNYPFT

SEQ ID NO: 23680 - protein, 15 aa, Homo sapiens
  Heavy chain CDR3 for antibody 11840 (IGHV3-33)
ARSVCSGGSCALLDY

SEQ ID NO: 23681 - protein, 9 aa, Homo sapiens
  Light chain CDR3 for antibody 11841 (IGKV1D-16)
QQYNRYPYT

SEQ ID NO: 23682 - protein, 12 aa, Homo sapiens
  Heavy chain CDR3 for antibody 11841 (IGHV4-39)
ARREVILGAFDY

SEQ ID NO: 23683 - protein, 9 aa, Homo sapiens
  Light chain CDR3 for antibody 11842 (IGKV6-21)
HQSSSLPYT

SEQ ID NO: 23684 - protein, 19 aa, Homo sapiens
  Heavy chain CDR3 for antibody 11842 (IGHV3-33)
ARGSDYDILTGYSSDAFDI

SEQ ID NO: 23685 - protein, 9 aa, Homo sapiens
  Light chain CDR3 for antibody 11843 (IGKV2D-28)
MQALQTPFT

SEQ ID NO: 23686 - protein, 20 aa, Homo sapiens
  Heavy chain CDR3 for antibody 11843 (IGHV4-b)
AKPRSPVSRRYLYYHYGMDV

SEQ ID NO: 23687 - protein, 11 aa, Homo sapiens
  Light chain CDR3 for antibody 11844 (IGKV3-11)
QQRSNWPPTWT

SEQ ID NO: 23688 - protein, 8 aa, Homo sapiens
  Heavy chain CDR3 for antibody 11844 (IGHV3-23)
AKESLLDY

SEQ ID NO: 23689 - protein, 9 aa, Homo sapiens
  Light chain CDR3 for antibody 11845 (IGKV3D-7)
QQDYNLPYS

SEQ ID NO: 23690 - protein, 12 aa, Homo sapiens
  Heavy chain CDR3 for antibody 11845 (IGHV3-33)
ARDPGYYYGLEV

SEQ ID NO: 23691 - protein, 8 aa, Homo sapiens
  Light chain CDR3 for antibody 11846 (IGKV1D-13)
QQFNNYPT

SEQ ID NO: 23692 - protein, 13 aa, Homo sapiens
  Heavy chain CDR3 for antibody 11846 (IGHV3-23)
AKDRGLRYYGMDV

SEQ ID NO: 23693 - protein, 9 aa, Homo sapiens
  Light chain CDR3 for antibody 11847 (IGKV1-6)
LQDYNYPRT

SEQ ID NO: 23694 - protein, 13 aa, Homo sapiens
  Heavy chain CDR3 for antibody 11847 (IGHV3-33)
ARAYYDILTGYSL

SEQ ID NO: 23695 - protein, 10 aa, Homo sapiens
  Light chain CDR3 for antibody 11848 (IGKV1-17)
LQHNSYPMYT

SEQ ID NO: 23696 - protein, 13 aa, Homo sapiens
  Heavy chain CDR3 for antibody 11848 (IGHV4-39)
ARHVLLWFGEFDP

SEQ ID NO: 23697 - protein, 9 aa, Homo sapiens
  Light chain CDR3 for antibody 11849 (IGKV6-21)
HQSSSLPYT

SEQ ID NO: 23698 - protein, 13 aa, Homo sapiens
  Heavy chain CDR3 for antibody 11849 (IGHV3-53)
ARDRDSSGSYCDY

SEQ ID NO: 23699 - protein, 9 aa, Homo sapiens
  Light chain CDR3 for antibody 11850 (IGKV1-39)
QQSYSTPYT

SEQ ID NO: 23700 - protein, 15 aa, Homo sapiens
  Heavy chain CDR3 for antibody 11850 (IGHV3-33)
ARDRGSSGYDRYFDY

SEQ ID NO: 23701 - protein, 9 aa, Homo sapiens
  Light chain CDR3 for antibody 11851 (IGKV1-16)
QHYNDYPFT

SEQ ID NO: 23702 - protein, 14 aa, Homo sapiens
  Heavy chain CDR3 for antibody 11851 (IGHV3-33)
ARDAYDILTGYYDY

SEQ ID NO: 23703 - protein, 8 aa, Homo sapiens
  Light chain CDR3 for antibody 11852 (IGKV1-5)
QQYNSYYT

SEQ ID NO: 23704 - protein, 18 aa, Homo sapiens
  Heavy chain CDR3 for antibody 11852 (IGHV4-39)
ARQYYFGSGNYYRGWFDH

SEQ ID NO: 23705 - protein, 9 aa, Homo sapiens
  Light chain CDR3 for antibody 11853 (IGKV6-21)
HQSSSLPLT

SEQ ID NO: 23706 - protein, 17 aa, Homo sapiens
  Heavy chain CDR3 for antibody 11853 (IGHV3-33)
ARSMVTTYGYYYYGMDV

SEQ ID NO: 23707 - protein, 9 aa, Homo sapiens
  Light chain CDR3 for antibody 11854 (IGKV1-9)
QQLISYPYT

SEQ ID NO: 23708 - protein, 11 aa, Homo sapiens
  Heavy chain CDR3 for antibody 11854 (IGHV3-11)
ARASRGSYYDY

SEQ ID NO: 23709 - protein, 9 aa, Homo sapiens
  Light chain CDR3 for antibody 11855 (IGKV3-15)
QQYSNWPLT

SEQ ID NO: 23710 - protein, 10 aa, Homo sapiens
  Heavy chain CDR3 for antibody 11855 (IGHV1-8)
AKDRYGDYVY

SEQ ID NO: 23711 - protein, 10 aa, Homo sapiens
  Light chain CDR3 for antibody 11856 (IGKV3-11)
QQRSNWPAYT

SEQ ID NO: 23712 - protein, 19 aa, Homo sapiens
  Heavy chain CDR3 for antibody 11856 (IGHV4-59)
ARDRVVGATTYYYYYGMDV

SEQ ID NO: 23713 - protein, 9 aa, Homo sapiens
  Light chain CDR3 for antibody 11857 (IGKV3D-20)
QQFGSLPLT

SEQ ID NO: 23714 - protein, 12 aa, Homo sapiens
  Heavy chain CDR3 for antibody 11857 (IGHV4-39)
ARQMVREGWFDP

SEQ ID NO: 23715 - protein, 9 aa, Homo sapiens
  Light chain CDR3 for antibody 11858 (IGKV1-5)
QQYNTYSRT

SEQ ID NO: 23716 - protein, 18 aa, Homo sapiens
  Heavy chain CDR3 for antibody 11858 (IGHV3-33)
ARGLLWFGVSYYYYGMDV

SEQ ID NO: 23717 - protein, 11 aa, Homo sapiens
  Light chain CDR3 for antibody 11859 (IGKV3-11)
QQRSNWPPTWT

SEQ ID NO: 23718 - protein, 15 aa, Homo sapiens
  Heavy chain CDR3 for antibody 11859 (IGHV1-46)
ARGRFFDWLLSPFDY

SEQ ID NO: 23719 - protein, 9 aa, Homo sapiens
  Light chain CDR3 for antibody 11860 (IGKV3-11)
QQRSNWPLT

SEQ ID NO: 23720 - protein, 22 aa, Homo sapiens
  Heavy chain CDR3 for antibody 11860 (IGHV3-33)
AREAYYDILTGYYTGYYYGMDV

SEQ ID NO: 23721 - protein, 9 aa, Homo sapiens
  Light chain CDR3 for antibody 11861 (IGKV1-39)
QQSYSTPYT

SEQ ID NO: 23722 - protein, 11 aa, Homo sapiens
  Heavy chain CDR3 for antibody 11861 (IGHV3-30)
ARERDIGDFDY

SEQ ID NO: 23723 - protein, 9 aa, Homo sapiens
  Light chain CDR3 for antibody 11862 (IGKV1-9)
QQYNSYPYT

SEQ ID NO: 23724 - protein, 15 aa, Homo sapiens
  Heavy chain CDR3 for antibody 11862 (IGHV3-30)
ARGAMVRGGDYCMDV

SEQ ID NO: 23725 - protein, 9 aa, Homo sapiens
  Light chain CDR3 for antibody 11863 (IGKV1-6)
QQFNNYPYT

SEQ ID NO: 23726 - protein, 9 aa, Homo sapiens
  Heavy chain CDR3 for antibody 11863 (IGHV3-30)
ARGRVSLDV

SEQ ID NO: 23727 - protein, 9 aa, Homo sapiens
  Light chain CDR3 for antibody 11864 (IGKV1D-13)
QRFNNYLYT

SEQ ID NO: 23728 - protein, 11 aa, Homo sapiens
  Heavy chain CDR3 for antibody 11864 (IGHV3-33)
ARAGIAALFDY

SEQ ID NO: 23729 - protein, 9 aa, Homo sapiens
  Light chain CDR3 for antibody 11865 (IGKV1-17)
LQHNSYPYT

SEQ ID NO: 23730 - protein, 16 aa, Homo sapiens
  Heavy chain CDR3 for antibody 11865 (IGHV3-33)
ARGFSGYDGYYYGMDV

SEQ ID NO: 23731 - protein, 9 aa, Homo sapiens
  Light chain CDR3 for antibody 11866 (IGKV1-9)
QQLNNYLFT

SEQ ID NO: 23732 - protein, 26 aa, Homo sapiens
  Heavy chain CDR3 for antibody 11866 (IGHV4-39)
ARQGLLWFGDLKAYDSSGYYYGYFHH

SEQ ID NO: 23733 - protein, 9 aa, Homo sapiens
  Light chain CDR3 for antibody 11867 (IGKV3-11)
QQRSNSPLT

SEQ ID NO: 23734 - protein, 16 aa, Homo sapiens
  Heavy chain CDR3 for antibody 11867 (IGHV4-59)
ARYSGSYYGDYYGMDV

SEQ ID NO: 23735 - protein, 9 aa, Homo sapiens
  Light chain CDR3 for antibody 11868 (IGKV1-6)
QQEYNYPLT

SEQ ID NO: 23736 - protein, 18 aa, Homo sapiens
  Heavy chain CDR3 for antibody 11868 (IGHV3-33)
ARGLLWFGVSYYYYGMDV

SEQ ID NO: 23737 - protein, 8 aa, Homo sapiens
  Light chain CDR3 for antibody 11869 (IGKV3-11)
QQRSNWLT

SEQ ID NO: 23738 - protein, 13 aa, Homo sapiens
  Heavy chain CDR3 for antibody 11869 (IGHV3-33)
ARKAYGDYFYFDY

SEQ ID NO: 23739 - protein, 8 aa, Homo sapiens
  Light chain CDR3 for antibody 11870 (IGKV3D-7)
QQDYNLLT

SEQ ID NO: 23740 - protein, 18 aa, Homo sapiens
  Heavy chain CDR3 for antibody 11870 (IGHV3-33)
VRERGHYGSGSFPDAFDI

SEQ ID NO: 23741 - protein, 9 aa, Homo sapiens
  Light chain CDR3 for antibody 11871 (IGKV1-39)
QQSYSTPYT

SEQ ID NO: 23742 - protein, 19 aa, Homo sapiens
  Heavy chain CDR3 for antibody 11871 (IGHV3-33)
ARDSSYYDILTGSPYGMDV

SEQ ID NO: 23743 - protein, 9 aa, Homo sapiens
  Light chain CDR3 for antibody 11872 (IGKV3D-7)
QQDYEFPIT

SEQ ID NO: 23744 - protein, 19 aa, Homo sapiens
  Heavy chain CDR3 for antibody 11872 (IGHV3-33)
TRDPHYDILTGYAYYGMDV

SEQ ID NO: 23745 - protein, 10 aa, Homo sapiens
  Light chain CDR3 for antibody 11873 (IGKV3-20)
QQYGRSPPVT

SEQ ID NO: 23746 - protein, 17 aa, Homo sapiens
  Heavy chain CDR3 for antibody 11873 (IGHV3-33)
ARAYYDILTGYSYYFDY

SEQ ID NO: 23747 - protein, 9 aa, Homo sapiens
  Light chain CDR3 for antibody 11874 (IGKV3-20)
QQYGRSPYT

SEQ ID NO: 23748 - protein, 16 aa, Homo sapiens
  Heavy chain CDR3 for antibody 11874 (IGHV3-33)
ARGGRSDWLYYYGMDV

SEQ ID NO: 23749 - protein, 8 aa, Homo sapiens
  Light chain CDR3 for antibody 11875 (IGKV3-20)
QQYGRSFT

SEQ ID NO: 23750 - protein, 13 aa, Homo sapiens
  Heavy chain CDR3 for antibody 11875 (IGHV4-59)
ANRDYYGYYGMDV

SEQ ID NO: 23751 - protein, 9 aa, Homo sapiens
  Light chain CDR3 for antibody 11876 (IGKV3D-7)
QQDYTLPRT

SEQ ID NO: 23752 - protein, 12 aa, Homo sapiens
  Heavy chain CDR3 for antibody 11876 (IGHV3-23)
AKEGLGSDYESY

SEQ ID NO: 23753 - protein, 9 aa, Homo sapiens
  Light chain CDR3 for antibody 11877 (IGKV1-5)
QQYNTYSRT

SEQ ID NO: 23754 - protein, 12 aa, Homo sapiens
  Heavy chain CDR3 for antibody 11877 (IGHV3-20)
ARDPGYYYGLDV

SEQ ID NO: 23755 - protein, 8 aa, Homo sapiens
  Light chain CDR3 for antibody 11878 (IGKV6-21)
HQSSSLPT

SEQ ID NO: 23756 - protein, 11 aa, Homo sapiens
  Heavy chain CDR3 for antibody 11878 (IGHV3-33)
ARDILTGFLDH

SEQ ID NO: 23757 - protein, 9 aa, Homo sapiens
  Light chain CDR3 for antibody 11879 (IGKV1-39)
QQSYSTPLT

SEQ ID NO: 23758 - protein, 17 aa, Homo sapiens
  Heavy chain CDR3 for antibody 11879 (IGHV3-23)
AKGDYYGSGSYSTFFDY

SEQ ID NO: 23759 - protein, 9 aa, Homo sapiens
  Light chain CDR3 for antibody 11880 (IGKV1-17)
LQHNSYPLT

SEQ ID NO: 23760 - protein, 15 aa, Homo sapiens
  Heavy chain CDR3 for antibody 11880 (IGHV1-18)
ARIYYGSGSSYYFDY

SEQ ID NO: 23761 - protein, 9 aa, Homo sapiens
  Light chain CDR3 for antibody 11881 (IGKV1D-16)
QQYNSYPRT

SEQ ID NO: 23762 - protein, 11 aa, Homo sapiens
  Heavy chain CDR3 for antibody 11881 (IGHV3-33)
ARDRATAGLDY

SEQ ID NO: 23763 - protein, 9 aa, Homo sapiens
  Light chain CDR3 for antibody 11882 (IGKV1-6)
LQDFHYPWT

SEQ ID NO: 23764 - protein, 15 aa, Homo sapiens
  Heavy chain CDR3 for antibody 11882 (IGHV3-33)
ARRICSGGSCSLFDY

SEQ ID NO: 23765 - protein, 9 aa, Homo sapiens
  Light chain CDR3 for antibody 11883 (IGKV3D-20)
QQYGRSPRT

SEQ ID NO: 23766 - protein, 9 aa, Homo sapiens
  Heavy chain CDR3 for antibody 11883 (IGHV3-30)
ARDDWGFDY

SEQ ID NO: 23767 - protein, 9 aa, Homo sapiens
  Light chain CDR3 for antibody 11884 (IGKV5-2)
LQHDKFPYT

SEQ ID NO: 23768 - protein, 10 aa, Homo sapiens
  Heavy chain CDR3 for antibody 11884 (IGHV3-13)
ARDRGSYYDY

SEQ ID NO: 23769 - protein, 8 aa, Homo sapiens
  Light chain CDR3 for antibody 11885 (IGKV3-11)
QQRSNWLT

SEQ ID NO: 23770 - protein, 15 aa, Homo sapiens
  Heavy chain CDR3 for antibody 11885 (IGHV3-23)
AKDGSYYDYYYGMDV

SEQ ID NO: 23771 - protein, 9 aa, Homo sapiens
  Light chain CDR3 for antibody 11886 (IGKV1D-16)
QQLKSYPYT

SEQ ID NO: 23772 - protein, 13 aa, Homo sapiens
  Heavy chain CDR3 for antibody 11886 (IGHV3-33)
ASAGNSYYNVMDV

SEQ ID NO: 23773 - protein, 9 aa, Homo sapiens
  Light chain CDR3 for antibody 11887 (IGKV3-11)
QQYSNWPLT

SEQ ID NO: 23774 - protein, 9 aa, Homo sapiens
  Heavy chain CDR3 for antibody 11887 (IGHV3-30)
ARDDYGVDV

SEQ ID NO: 23775 - protein, 10 aa, Homo sapiens
  Light chain CDR3 for antibody 11888 (IGKV3-20)
QQYGRSPPVT

SEQ ID NO: 23776 - protein, 8 aa, Homo sapiens
  Heavy chain CDR3 for antibody 11888 (IGHV3-23)
AETFLFDY

SEQ ID NO: 23777 - protein, 9 aa, Homo sapiens
  Light chain CDR3 for antibody 11889 (IGKV1-9)
QQLISYPLT

SEQ ID NO: 23778 - protein, 13 aa, Homo sapiens
  Heavy chain CDR3 for antibody 11889 (IGHV3-33)
ARVDYYNYYGLDV

SEQ ID NO: 23779 - protein, 9 aa, Homo sapiens
  Light chain CDR3 for antibody 11890 (IGKV1-27)
QQYNSAPYT

SEQ ID NO: 23780 - protein, 19 aa, Homo sapiens
  Heavy chain CDR3 for antibody 11890 (IGHV3-33)
ARGGVVRGVIEYYYYGMDV

SEQ ID NO: 23781 - protein, 9 aa, Homo sapiens
  Light chain CDR3 for antibody 11891 (IGKV3D-7)
QQDYEFPLT

SEQ ID NO: 23782 - protein, 13 aa, Homo sapiens
  Heavy chain CDR3 for antibody 11891 (IGHV4-59)
ARDEGYRGYVLDT

SEQ ID NO: 23783 - protein, 10 aa, Homo sapiens
  Light chain CDR3 for antibody 11892 (IGKV3-11)
QQRSNWPIFT

SEQ ID NO: 23784 - protein, 12 aa, Homo sapiens
  Heavy chain CDR3 for antibody 11892 (IGHV3-13)
AIGTMVRGIPDY

SEQ ID NO: 23785 - protein, 9 aa, Homo sapiens
  Light chain CDR3 for antibody 11893 (IGKV1-17)
LQHNSYPRT

SEQ ID NO: 23786 - protein, 15 aa, Homo sapiens
  Heavy chain CDR3 for antibody 11893 (IGHV3-64)
ARDSHHDLLTGHYEY

SEQ ID NO: 23787 - protein, 11 aa, Homo sapiens
  Light chain CDR3 for antibody 11894 (IGKV3-11)
QQRSNWPPTWT

SEQ ID NO: 23788 - protein, 13 aa, Homo sapiens
  Heavy chain CDR3 for antibody 11894 (IGHV4-39)
ARPGIVAAGWFDP

SEQ ID NO: 23789 - protein, 8 aa, Homo sapiens
  Light chain CDR3 for antibody 11895 (IGKV1D-13)
QQFNNYYT

SEQ ID NO: 23790 - protein, 13 aa, Homo sapiens
  Heavy chain CDR3 for antibody 11895 (IGHV4-59)
ARTMVRGVAPFDY

SEQ ID NO: 23791 - protein, 8 aa, Homo sapiens
  Light chain CDR3 for antibody 11896 (IGKV1-6)
LQDYNYYT

SEQ ID NO: 23792 - protein, 14 aa, Homo sapiens
  Heavy chain CDR3 for antibody 11896 (IGHV3-23)
AKSRIVGALYYFDY

SEQ ID NO: 23793 - protein, 9 aa, Homo sapiens
  Light chain CDR3 for antibody 11897 (IGKV3-15)
QQYNNWPYT

SEQ ID NO: 23794 - protein, 10 aa, Homo sapiens
  Heavy chain CDR3 for antibody 11897 (IGHV3-23)
AKDHWGDFDY

SEQ ID NO: 23795 - protein, 9 aa, Homo sapiens
  Light chain CDR3 for antibody 11898 (IGKV1D-13)
QQFNNYPYT

SEQ ID NO: 23796 - protein, 17 aa, Homo sapiens
  Heavy chain CDR3 for antibody 11898 (IGHV3-33)
AREGAMVRGYYYYGMDV

SEQ ID NO: 23797 - protein, 9 aa, Homo sapiens
  Light chain CDR3 for antibody 11899 (IGKV1-9)
QQLNGYPFT

SEQ ID NO: 23798 - protein, 23 aa, Homo sapiens
  Heavy chain CDR3 for antibody 11899 (IGHV4-59)
ARERTYSDILPGYYEDYYYGMDV

SEQ ID NO: 23799 - protein, 9 aa, Homo sapiens
  Light chain CDR3 for antibody 11900 (IGKV1-9)
QQYYTYPYT

SEQ ID NO: 23800 - protein, 14 aa, Homo sapiens
  Heavy chain CDR3 for antibody 11900 (IGHV3-33)
AREDYYGPLNWFDP

SEQ ID NO: 23801 - protein, 10 aa, Homo sapiens
  Light chain CDR3 for antibody 11901 (IGKV1-17)
LQHNSYPMYT

SEQ ID NO: 23802 - protein, 11 aa, Homo sapiens
  Heavy chain CDR3 for antibody 11901 (IGHV1-24)
ATELGLYYFDY

SEQ ID NO: 23803 - protein, 8 aa, Homo sapiens
  Light chain CDR3 for antibody 11902 (IGKV2D-28)
MQALQTPT

SEQ ID NO: 23804 - protein, 16 aa, Homo sapiens
  Heavy chain CDR3 for antibody 11902 (IGHV1-24)
ATEDSSSTYYYYGLDV

SEQ ID NO: 23805 - protein, 10 aa, Homo sapiens
  Light chain CDR3 for antibody 11903 (IGKV1-17)
LQHNSYPMYT

SEQ ID NO: 23806 - protein, 11 aa, Homo sapiens
  Heavy chain CDR3 for antibody 11903 (IGHV3-33)
ARGTTVTHFDY

SEQ ID NO: 23807 - protein, 9 aa, Homo sapiens
  Light chain CDR3 for antibody 11904 (IGKV1D-13)
QQFNNYPHT

SEQ ID NO: 23808 - protein, 19 aa, Homo sapiens
  Heavy chain CDR3 for antibody 11904 (IGHV4-39)
ARQGDVLRYFDWLLGAFDI

SEQ ID NO: 23809 - protein, 9 aa, Homo sapiens
  Light chain CDR3 for antibody 11905 (IGKV1D-13)
QHFNNYMYT

SEQ ID NO: 23810 - protein, 19 aa, Homo sapiens
  Heavy chain CDR3 for antibody 11905 (IGHV5-51)
ARHGEKGKRITMVRGSLDV

SEQ ID NO: 23811 - protein, 9 aa, Homo sapiens
  Light chain CDR3 for antibody 11906 (IGKV3-20)
QQYGSSPYT

SEQ ID NO: 23812 - protein, 14 aa, Homo sapiens
  Heavy chain CDR3 for antibody 11906 (IGHV3-20)
ARDGGSGSYDGLDV

SEQ ID NO: 23813 - protein, 9 aa, Homo sapiens
  Light chain CDR3 for antibody 11907 (IGKV1D-16)
QQYNSYPYT

SEQ ID NO: 23814 - protein, 15 aa, Homo sapiens
  Heavy chain CDR3 for antibody 11907 (IGHV4-39)
ARRVRGLIITRYFDY

SEQ ID NO: 23815 - protein, 11 aa, Homo sapiens
  Light chain CDR3 for antibody 11908 (IGKV3-11)
QQRSNWPPTWT

SEQ ID NO: 23816 - protein, 11 aa, Homo sapiens
  Heavy chain CDR3 for antibody 11908 (IGHV3-33)
ARDTWDDYFDY

SEQ ID NO: 23817 - protein, 9 aa, Homo sapiens
  Light chain CDR3 for antibody 11909 (IGKV1D-13)
QQFNNYPYT

SEQ ID NO: 23818 - protein, 12 aa, Homo sapiens
  Heavy chain CDR3 for antibody 11909 (IGHV4-59)
ARVGRFGEFFDY

SEQ ID NO: 23819 - protein, 10 aa, Homo sapiens
  Light chain CDR3 for antibody 11910 (IGKV1-39)
QQSYSTPMYT

SEQ ID NO: 23820 - protein, 17 aa, Homo sapiens
  Heavy chain CDR3 for antibody 11910 (IGHV4-34)
ARDGSGSYTHYYYGMDV

SEQ ID NO: 23821 - protein, 9 aa, Homo sapiens
  Light chain CDR3 for antibody 11911 (IGKV3-11)
QQRSNWPPT

SEQ ID NO: 23822 - protein, 15 aa, Homo sapiens
  Heavy chain CDR3 for antibody 11911 (IGHV3-33)
ARGYYYGSGSYPLDY

SEQ ID NO: 23823 - protein, 9 aa, Homo sapiens
  Light chain CDR3 for antibody 11912 (IGKV5-2)
LQRDKFPYT

SEQ ID NO: 23824 - protein, 11 aa, Homo sapiens
  Heavy chain CDR3 for antibody 11912 (IGHV3-33)
ARDRGNWGFDY

SEQ ID NO: 23825 - protein, 9 aa, Homo sapiens
  Light chain CDR3 for antibody 11913 (IGKV1-6)
LQDFHYPWT

SEQ ID NO: 23826 - protein, 14 aa, Homo sapiens
  Heavy chain CDR3 for antibody 11913 (IGHV3-33)
ARDREQQLVRYFDY

SEQ ID NO: 23827 - protein, 9 aa, Homo sapiens
  Light chain CDR3 for antibody 11914 (IGKV1-9)
QQLISYPLT

SEQ ID NO: 23828 - protein, 18 aa, Homo sapiens
  Heavy chain CDR3 for antibody 11914 (IGHV3-33)
ARKRLYDILTGYPYYFDY

SEQ ID NO: 23829 - protein, 9 aa, Homo sapiens
  Light chain CDR3 for antibody 11915 (IGKV1D-16)
QQYNSYPFT

SEQ ID NO: 23830 - protein, 17 aa, Homo sapiens
  Heavy chain CDR3 for antibody 11915 (IGHV4-59)
ARDFLVRGEGSYYGMEV

SEQ ID NO: 23831 - protein, 9 aa, Homo sapiens
  Light chain CDR3 for antibody 11916 (IGKV1-9)
QQLISYPLT

SEQ ID NO: 23832 - protein, 18 aa, Homo sapiens
  Heavy chain CDR3 for antibody 11916 (IGHV3-33)
ARKRLYDILTGYSDAFEI

SEQ ID NO: 23833 - protein, 9 aa, Homo sapiens
  Light chain CDR3 for antibody 11917 (IGKV6-21)
HQSSNLPYT

SEQ ID NO: 23834 - protein, 15 aa, Homo sapiens
  Heavy chain CDR3 for antibody 11917 (IGHV1-8)
AREGTMVRGVPPFDY

SEQ ID NO: 23835 - protein, 8 aa, Homo sapiens
  Light chain CDR3 for antibody 11918 (IGKV3-11)
QQRSNWLT

SEQ ID NO: 23836 - protein, 12 aa, Homo sapiens
  Heavy chain CDR3 for antibody 11918 (IGHV3-33)
AREGDILTSYSL

SEQ ID NO: 23837 - protein, 10 aa, Homo sapiens
  Light chain CDR3 for antibody 11919 (IGKV1-39)
QQSYSTPMYT

SEQ ID NO: 23838 - protein, 15 aa, Homo sapiens
  Heavy chain CDR3 for antibody 11919 (IGHV3-33)
ARDRMVRGVMGYFDY

SEQ ID NO: 23839 - protein, 9 aa, Homo sapiens
  Light chain CDR3 for antibody 11920 (IGKV3-15)
QQYSNWPFT

SEQ ID NO: 23840 - protein, 18 aa, Homo sapiens
  Heavy chain CDR3 for antibody 11920 (IGHV1-18)
ARDPNYYGSGSYYNYFGY

SEQ ID NO: 23841 - protein, 9 aa, Homo sapiens
  Light chain CDR3 for antibody 11921 (IGKV1-39)
QQSYRTPLT

SEQ ID NO: 23842 - protein, 6 aa, Homo sapiens
  Heavy chain CDR3 for antibody 11921 (IGHV3-23)
AKYIDY

SEQ ID NO: 23843 - protein, 9 aa, Homo sapiens
  Light chain CDR3 for antibody 11922 (IGKV2-30)
MQGTHWPYT

SEQ ID NO: 23844 - protein, 12 aa, Homo sapiens
  Heavy chain CDR3 for antibody 11922 (IGHV3-33)
ARKGYGLYVLDV

SEQ ID NO: 23845 - protein, 9 aa, Homo sapiens
  Light chain CDR3 for antibody 11923 (IGKV3D-7)
QQDYTLPLT

SEQ ID NO: 23846 - protein, 16 aa, Homo sapiens
  Heavy chain CDR3 for antibody 11923 (IGHV3-20)
AREGYSSSWFDRNFDY

SEQ ID NO: 23847 - protein, 9 aa, Homo sapiens
  Light chain CDR3 for antibody 11924 (IGKV1-9)
QQLNTYPWT

SEQ ID NO: 23848 - protein, 17 aa, Homo sapiens
  Heavy chain CDR3 for antibody 11924 (IGHV4-39)
ARVLRYFDWLSHDAFDI

SEQ ID NO: 23849 - protein, 8 aa, Homo sapiens
  Light chain CDR3 for antibody 11925 (IGKV3-11)
QQRSNWLT

SEQ ID NO: 23850 - protein, 13 aa, Homo sapiens
  Heavy chain CDR3 for antibody 11925 (IGHV4-39)
ARRDVLAPAAFDY

SEQ ID NO: 23851 - protein, 9 aa, Homo sapiens
  Light chain CDR3 for antibody 11926 (IGKV1-9)
QQLKSYLYT

SEQ ID NO: 23852 - protein, 13 aa, Homo sapiens
  Heavy chain CDR3 for antibody 11926 (IGHV1-18)
AREYCSGGSCYDY

SEQ ID NO: 23853 - protein, 9 aa, Homo sapiens
  Light chain CDR3 for antibody 11927 (IGKV1-16)
QKYNSNPLT

SEQ ID NO: 23854 - protein, 11 aa, Homo sapiens
  Heavy chain CDR3 for antibody 11927 (IGHV3-33)
ARDRVLTPFDY

SEQ ID NO: 23855 - protein, 9 aa, Homo sapiens
  Light chain CDR3 for antibody 11928 (IGKV1-17)
LHSNNYPWT

SEQ ID NO: 23856 - protein, 14 aa, Homo sapiens
  Heavy chain CDR3 for antibody 11928 (IGHV3-33)
ARGAAAGNFYGLDV

SEQ ID NO: 23857 - protein, 8 aa, Homo sapiens
  Light chain CDR3 for antibody 11929 (IGKV3D-7)
QQDYSLLT

SEQ ID NO: 23858 - protein, 19 aa, Homo sapiens
  Heavy chain CDR3 for antibody 11929 (IGHV3-33)
AKDGRSGSYDYYYYYGMDV

SEQ ID NO: 23859 - protein, 9 aa, Homo sapiens
  Light chain CDR3 for antibody 11930 (IGKV1-9)
QQLKSYPYT

SEQ ID NO: 23860 - protein, 13 aa, Homo sapiens
  Heavy chain CDR3 for antibody 11930 (IGHV3-30)
AAPFMVRGDGMDV

SEQ ID NO: 23861 - protein, 9 aa, Homo sapiens
  Light chain CDR3 for antibody 11931 (IGKV1D-16)
QHYNDYPFT

SEQ ID NO: 23862 - protein, 12 aa, Homo sapiens
  Heavy chain CDR3 for antibody 11931 (IGHV3-13)
ARDRGYSGYFDY

SEQ ID NO: 23863 - protein, 9 aa, Homo sapiens
  Light chain CDR3 for antibody 11932 (IGKV6-21)
HQSSSLPYT

SEQ ID NO: 23864 - protein, 15 aa, Homo sapiens
  Heavy chain CDR3 for antibody 11932 (IGHV3-64)
ARDSHHDLLTGHYEY

SEQ ID NO: 23865 - protein, 9 aa, Homo sapiens
  Light chain CDR3 for antibody 11933 (IGKV6-21)
HQSTSLPFA

SEQ ID NO: 23866 - protein, 9 aa, Homo sapiens
  Heavy chain CDR3 for antibody 11933 (IGHV3-30)
ARPNWGFDY

SEQ ID NO: 23867 - protein, 10 aa, Homo sapiens
  Light chain CDR3 for antibody 11934 (IGKV3-11)
QQRSNWPPYT

SEQ ID NO: 23868 - protein, 10 aa, Homo sapiens
  Heavy chain CDR3 for antibody 11934 (IGHV3-30)
ARGSWYGFDY

SEQ ID NO: 23869 - protein, 10 aa, Homo sapiens
  Light chain CDR3 for antibody 11935 (IGKV1-17)
QQLDSYPMYT

SEQ ID NO: 23870 - protein, 15 aa, Homo sapiens
  Heavy chain CDR3 for antibody 11935 (IGHV3-33)
ARDHLTGYYYYGMDV

SEQ ID NO: 23871 - protein, 9 aa, Homo sapiens
  Light chain CDR3 for antibody 11936 (IGKV1-9)
QQLKSYLYT

SEQ ID NO: 23872 - protein, 15 aa, Homo sapiens
  Heavy chain CDR3 for antibody 11936 (IGHV3-33)
ARRICSGGSCSLFDY

SEQ ID NO: 23873 - protein, 9 aa, Homo sapiens
  Light chain CDR3 for antibody 11937 (IGKV1-6)
LQDYNYPRT

SEQ ID NO: 23874 - protein, 13 aa, Homo sapiens
  Heavy chain CDR3 for antibody 11937 (IGHV3-33)
ARGDGDILTGYSL

SEQ ID NO: 23875 - protein, 9 aa, Homo sapiens
  Light chain CDR3 for antibody 11938 (IGKV1-27)
QKYNSAPYT

SEQ ID NO: 23876 - protein, 23 aa, Homo sapiens
  Heavy chain CDR3 for antibody 11938 (IGHV4-59)
ARERTYSGILPGYYEDYYYGMDV

SEQ ID NO: 23877 - protein, 9 aa, Homo sapiens
  Light chain CDR3 for antibody 11939 (IGKV3-20)
QHYGSSPYT

SEQ ID NO: 23878 - protein, 9 aa, Homo sapiens
  Heavy chain CDR3 for antibody 11939 (IGHV4-59)
ARGGVHIDS

SEQ ID NO: 23879 - protein, 9 aa, Homo sapiens
  Light chain CDR3 for antibody 11940 (IGKV1D-16)
QQYNSFPLT

SEQ ID NO: 23880 - protein, 11 aa, Homo sapiens
  Heavy chain CDR3 for antibody 11940 (IGHV4-59)
AREMGHDAFDI

SEQ ID NO: 23881 - protein, 10 aa, Homo sapiens
  Light chain CDR3 for antibody 11941 (IGKV3-20)
QQYGSSPPYT

SEQ ID NO: 23882 - protein, 20 aa, Homo sapiens
  Heavy chain CDR3 for antibody 11941 (IGHV3-33)
ARDWMVRGVIITDYYYGMDV

SEQ ID NO: 23883 - protein, 9 aa, Homo sapiens
  Light chain CDR3 for antibody 11942 (IGKV1-9)
QQLNSYPLT

SEQ ID NO: 23884 - protein, 12 aa, Homo sapiens
  Heavy chain CDR3 for antibody 11942 (IGHV1-18)
STSDGSSTSFDY

SEQ ID NO: 23885 - protein, 9 aa, Homo sapiens
  Light chain CDR3 for antibody 11943 (IGKV6-21)
HQSSSLPLT

SEQ ID NO: 23886 - protein, 15 aa, Homo sapiens
  Heavy chain CDR3 for antibody 11943 (IGHV3-33)
ARRVCSGGSCSLFDY

SEQ ID NO: 23887 - protein, 9 aa, Homo sapiens
  Light chain CDR3 for antibody 11944 (IGKV2D-28)
MQALQTPRT

SEQ ID NO: 23888 - protein, 20 aa, Homo sapiens
  Heavy chain CDR3 for antibody 11944 (IGHV3-23)
AKDREMAATSHYYYYYGMDV

SEQ ID NO: 23889 - protein, 9 aa, Homo sapiens
  Light chain CDR3 for antibody 11945 (IGKV1-6)
LQDYNYPWT

SEQ ID NO: 23890 - protein, 7 aa, Homo sapiens
  Heavy chain CDR3 for antibody 11945 (IGHV1-46)
AREGGDY

SEQ ID NO: 23891 - protein, 9 aa, Homo sapiens
  Light chain CDR3 for antibody 11946 (IGKV5-2)
LQHAKFPYT

SEQ ID NO: 23892 - protein, 12 aa, Homo sapiens
  Heavy chain CDR3 for antibody 11946 (IGHV3-33)
AREKGGSYSFDY

SEQ ID NO: 23893 - protein, 9 aa, Homo sapiens
  Light chain CDR3 for antibody 11947 (IGKV1-17)
LQHNSYPYT

SEQ ID NO: 23894 - protein, 13 aa, Homo sapiens
  Heavy chain CDR3 for antibody 11947 (IGHV3-33)
ARGGYYGSGSLDY

SEQ ID NO: 23895 - protein, 9 aa, Homo sapiens
  Light chain CDR3 for antibody 11948 (IGKV1D-16)
QQYHSYPYT

SEQ ID NO: 23896 - protein, 17 aa, Homo sapiens
  Heavy chain CDR3 for antibody 11948 (IGHV1-24)
TTVVLYYDILPGYSLDY

SEQ ID NO: 23897 - protein, 8 aa, Homo sapiens
  Light chain CDR3 for antibody 11949 (IGKV3-15)
QQYNNWPT

SEQ ID NO: 23898 - protein, 24 aa, Homo sapiens
  Heavy chain CDR3 for antibody 11949 (IGHV3-20)
ARGRITMVRGVIIDPLDYYNGMDV

SEQ ID NO: 23899 - protein, 9 aa, Homo sapiens
  Light chain CDR3 for antibody 11950 (IGKV3-11)
QQRSNWPYT

SEQ ID NO: 23900 - protein, 14 aa, Homo sapiens
  Heavy chain CDR3 for antibody 11950 (IGHV3-33)
VSAISGSSYWYFAL

SEQ ID NO: 23901 - protein, 9 aa, Homo sapiens
  Light chain CDR3 for antibody 11951 (IGKV1-6)
LQDYKSPFT

SEQ ID NO: 23902 - protein, 13 aa, Homo sapiens
  Heavy chain CDR3 for antibody 11951 (IGHV3-23)
AKDRGYSSTSTAY

SEQ ID NO: 23903 - protein, 10 aa, Homo sapiens
  Light chain CDR3 for antibody 11952 (IGKV3-15)
QQYNNWPPIT

SEQ ID NO: 23904 - protein, 15 aa, Homo sapiens
  Heavy chain CDR3 for antibody 11952 (IGHV3-23)
AKDGSYYDYYYGMDV

SEQ ID NO: 23905 - protein, 9 aa, Homo sapiens
  Light chain CDR3 for antibody 11953 (IGKV1-9)
QQLYTYPYT

SEQ ID NO: 23906 - protein, 17 aa, Homo sapiens
  Heavy chain CDR3 for antibody 11953 (IGHV3-33)
ARCGYSSSWYDAYYFDY

SEQ ID NO: 23907 - protein, 9 aa, Homo sapiens
  Light chain CDR3 for antibody 11954 (IGKV1-17)
LQHNSYPFT

SEQ ID NO: 23908 - protein, 18 aa, Homo sapiens
  Heavy chain CDR3 for antibody 11954 (IGHV3-20)
ARDPSGYDSYYYYYGMDV

SEQ ID NO: 23909 - protein, 9 aa, Homo sapiens
  Light chain CDR3 for antibody 11955 (IGKV1D-13)
QHFNNYMYT

SEQ ID NO: 23910 - protein, 16 aa, Homo sapiens
  Heavy chain CDR3 for antibody 11955 (IGHV4-39)
ARQGWYYGSGSSYFDY

SEQ ID NO: 23911 - protein, 9 aa, Homo sapiens
  Light chain CDR3 for antibody 11956 (IGKV1-39)
QQSYSTPLT

SEQ ID NO: 23912 - protein, 15 aa, Homo sapiens
  Heavy chain CDR3 for antibody 11956 (IGHV3-33)
AKGGTMVRGVIAFDY

SEQ ID NO: 23913 - protein, 10 aa, Homo sapiens
  Light chain CDR3 for antibody 11957 (IGKV3-11)
QQRSNWPALA

SEQ ID NO: 23914 - protein, 15 aa, Homo sapiens
  Heavy chain CDR3 for antibody 11957 (IGHV3-20)
ARDRGSSGWRDWFDP

SEQ ID NO: 23915 - protein, 9 aa, Homo sapiens
  Light chain CDR3 for antibody 11958 (IGKV1-9)
QQLNTYPWT

SEQ ID NO: 23916 - protein, 13 aa, Homo sapiens
  Heavy chain CDR3 for antibody 11958 (IGHV3-33)
AKRYSSGWYPFDF

SEQ ID NO: 23917 - protein, 8 aa, Homo sapiens
  Light chain CDR3 for antibody 11959 (IGKV3-11)
QQRSNWLT

SEQ ID NO: 23918 - protein, 12 aa, Homo sapiens
  Heavy chain CDR3 for antibody 11959 (IGHV4-39)
ARQMVREGWFDP

SEQ ID NO: 23919 - protein, 9 aa, Homo sapiens
  Light chain CDR3 for antibody 11960 (IGKV1D-13)
QQFNNYPYT

SEQ ID NO: 23920 - protein, 14 aa, Homo sapiens
  Heavy chain CDR3 for antibody 11960 (IGHV3-33)
ARETSGSSYWYFDL

SEQ ID NO: 23921 - protein, 9 aa, Homo sapiens
  Light chain CDR3 for antibody 11961 (IGKV1D-16)
QQYNSYPLT

SEQ ID NO: 23922 - protein, 17 aa, Homo sapiens
  Heavy chain CDR3 for antibody 11961 (IGHV3-64)
ARERYYGSGSYYSWFDP

SEQ ID NO: 23923 - protein, 9 aa, Homo sapiens
  Light chain CDR3 for antibody 11962 (IGKV3D-7)
QQDYNLPYT

SEQ ID NO: 23924 - protein, 14 aa, Homo sapiens
  Heavy chain CDR3 for antibody 11962 (IGHV3-20)
ARDRGSSFFDAFDI

SEQ ID NO: 23925 - protein, 9 aa, Homo sapiens
  Light chain CDR3 for antibody 11963 (IGKV2D-30)
MQGTHWPLT

SEQ ID NO: 23926 - protein, 13 aa, Homo sapiens
  Heavy chain CDR3 for antibody 11963 (IGHV3-11)
AREGGYRGYVLDN

SEQ ID NO: 23927 - protein, 9 aa, Homo sapiens
  Light chain CDR3 for antibody 11964 (IGKV3D-7)
QQEYNYPLT

SEQ ID NO: 23928 - protein, 14 aa, Homo sapiens
  Heavy chain CDR3 for antibody 11964 (IGHV1-46)
ARDGVGAKEGGSDY

SEQ ID NO: 23929 - protein, 11 aa, Homo sapiens
  Light chain CDR3 for antibody 11965 (IGKV3-11)
QQRSNCPPTWT

SEQ ID NO: 23930 - protein, 14 aa, Homo sapiens
  Heavy chain CDR3 for antibody 11965 (IGHV3-33)
ARDRIAAASSDFDC

SEQ ID NO: 23931 - protein, 9 aa, Homo sapiens
  Light chain CDR3 for antibody 11966 (IGKV1-6)
QQEYNYPLT

SEQ ID NO: 23932 - protein, 19 aa, Homo sapiens
  Heavy chain CDR3 for antibody 11966 (IGHV1-18)
ARDDILTGYSLYYYYGMDV

SEQ ID NO: 23933 - protein, 8 aa, Homo sapiens
  Light chain CDR3 for antibody 11967 (IGKV6-21)
HQSSSLPT

SEQ ID NO: 23934 - protein, 26 aa, Homo sapiens
  Heavy chain CDR3 for antibody 11967 (IGHV4-39)
ARQGLLWFGDLKAYDSSGYYYGYFHH

SEQ ID NO: 23935 - protein, 10 aa, Homo sapiens
  Light chain CDR3 for antibody 11968 (IGKV3-11)
QQRSNWPALT

SEQ ID NO: 23936 - protein, 11 aa, Homo sapiens
  Heavy chain CDR3 for antibody 11968 (IGHV4-39)
ARLLVGATTDY

SEQ ID NO: 23937 - protein, 10 aa, Homo sapiens
  Light chain CDR3 for antibody 11969 (IGKV3-15)
QQYNNWPPIT

SEQ ID NO: 23938 - protein, 12 aa, Homo sapiens
  Heavy chain CDR3 for antibody 11969 (IGHV3-13)
ARDRGYSGYIDY

SEQ ID NO: 23939 - protein, 9 aa, Homo sapiens
  Light chain CDR3 for antibody 11970 (IGKV1-17)
LQHYSYPRT

SEQ ID NO: 23940 - protein, 13 aa, Homo sapiens
  Heavy chain CDR3 for antibody 11970 (IGHV4-39)
ARHEVMIRGVLDY

SEQ ID NO: 23941 - protein, 10 aa, Homo sapiens
  Light chain CDR3 for antibody 11971 (IGKV3-15)
QQYNNWPPYT

SEQ ID NO: 23942 - protein, 15 aa, Homo sapiens
  Heavy chain CDR3 for antibody 11971 (IGHV4-39)
ARQGLVATIKGYFQH

SEQ ID NO: 23943 - protein, 10 aa, Homo sapiens
  Light chain CDR3 for antibody 11972 (IGKV3-11)
QQRSNWPIFT

SEQ ID NO: 23944 - protein, 14 aa, Homo sapiens
  Heavy chain CDR3 for antibody 11972 (IGHV3-23)
AKCDYDILTGILDY

SEQ ID NO: 23945 - protein, 9 aa, Homo sapiens
  Light chain CDR3 for antibody 11973 (IGKV1-17)
LQHNGYPLT

SEQ ID NO: 23946 - protein, 13 aa, Homo sapiens
  Heavy chain CDR3 for antibody 11973 (IGHV4-39)
ARHEVMIRGVFDY

SEQ ID NO: 23947 - protein, 10 aa, Homo sapiens
  Light chain CDR3 for antibody 11974 (IGKV3-11)
QQRSNWPILT

SEQ ID NO: 23948 - protein, 14 aa, Homo sapiens
  Heavy chain CDR3 for antibody 11974 (IGHV3-33)
ARGGYSGYRYYFDY

SEQ ID NO: 23949 - protein, 9 aa, Homo sapiens
  Light chain CDR3 for antibody 11975 (IGKV1-6)
LQDFHYPWT

SEQ ID NO: 23950 - protein, 11 aa, Homo sapiens
  Heavy chain CDR3 for antibody 11975 (IGHV4-59)
AREMGHDTFDI

SEQ ID NO: 23951 - protein, 9 aa, Homo sapiens
  Light chain CDR3 for antibody 11976 (IGKV1-9)
QQLISYPLT

SEQ ID NO: 23952 - protein, 18 aa, Homo sapiens
  Heavy chain CDR3 for antibody 11976 (IGHV3-33)
AREGDYVWGSYRPNWFDP

SEQ ID NO: 23953 - protein, 9 aa, Homo sapiens
  Light chain CDR3 for antibody 11977 (IGKV3D-7)
QQDYNLPYT

SEQ ID NO: 23954 - protein, 13 aa, Homo sapiens
  Heavy chain CDR3 for antibody 11977 (IGHV3-11)
ARDEGYRGYGLDS

SEQ ID NO: 23955 - protein, 10 aa, Homo sapiens
  Light chain CDR3 for antibody 11978 (IGKV3-20)
QQYGRSPPVT

SEQ ID NO: 23956 - protein, 15 aa, Homo sapiens
  Heavy chain CDR3 for antibody 11978 (IGHV3-20)
ARDRGSSGWRDWFDP

SEQ ID NO: 23957 - protein, 8 aa, Homo sapiens
  Light chain CDR3 for antibody 11979 (IGKV3D-7)
QQDYNLLT

SEQ ID NO: 23958 - protein, 15 aa, Homo sapiens
  Heavy chain CDR3 for antibody 11979 (IGHV3-33)
ARDRGSSGYDRYFDY

SEQ ID NO: 23959 - protein, 10 aa, Homo sapiens
  Light chain CDR3 for antibody 11980 (IGKV3-11)
QQRSNWPMYT

SEQ ID NO: 23960 - protein, 9 aa, Homo sapiens
  Heavy chain CDR3 for antibody 11980 (IGHV1-8)
ARGRLDFDY

SEQ ID NO: 23961 - protein, 10 aa, Homo sapiens
  Light chain CDR3 for antibody 11981 (IGKV1-27)
QKYNSAPMYT

SEQ ID NO: 23962 - protein, 14 aa, Homo sapiens
  Heavy chain CDR3 for antibody 11981 (IGHV3-33)
ARGAAAGNFYGLDV

SEQ ID NO: 23963 - protein, 9 aa, Homo sapiens
  Light chain CDR3 for antibody 11982 (IGKV1-9)
QQLSNAPLT

SEQ ID NO: 23964 - protein, 17 aa, Homo sapiens
  Heavy chain CDR3 for antibody 11982 (IGHV3-23)
AKRLPDLLGGGRHYIDV

SEQ ID NO: 23965 - protein, 9 aa, Homo sapiens
  Light chain CDR3 for antibody 11983 (IGKV1-6)
LQVYSYPWT

SEQ ID NO: 23966 - protein, 17 aa, Homo sapiens
  Heavy chain CDR3 for antibody 11983 (IGHV3-33)
ARGYCSRTSCYLYYFDY

SEQ ID NO: 23967 - protein, 8 aa, Homo sapiens
  Light chain CDR3 for antibody 11984 (IGKV3-20)
QQYGSSFT

SEQ ID NO: 23968 - protein, 13 aa, Homo sapiens
  Heavy chain CDR3 for antibody 11984 (IGHV3-33)
AKRYSSGWYPFDF

SEQ ID NO: 23969 - protein, 9 aa, Homo sapiens
  Light chain CDR3 for antibody 11985 (IGKV1-16)
QQYHSYPYT

SEQ ID NO: 23970 - protein, 15 aa, Homo sapiens
  Heavy chain CDR3 for antibody 11985 (IGHV4-59)
ARDRAVAGTIHAFGI

SEQ ID NO: 23971 - protein, 9 aa, Homo sapiens
  Light chain CDR3 for antibody 11986 (IGKV1-5)
QQYNTYSRT

SEQ ID NO: 23972 - protein, 17 aa, Homo sapiens
  Heavy chain CDR3 for antibody 11986 (IGHV3-h)
ARGEQWLGYYYYYDMDV

SEQ ID NO: 23973 - protein, 8 aa, Homo sapiens
  Light chain CDR3 for antibody 11987 (IGKV1-5)
QQYNSYWT

SEQ ID NO: 23974 - protein, 9 aa, Homo sapiens
  Heavy chain CDR3 for antibody 11987 (IGHV1-8)
ARERLDLDY

SEQ ID NO: 23975 - protein, 9 aa, Homo sapiens
  Light chain CDR3 for antibody 11988 (IGKV6-21)
HQSSSLPYT

SEQ ID NO: 23976 - protein, 23 aa, Homo sapiens
  Heavy chain CDR3 for antibody 11988 (IGHV3-33)
ARDRGITMVRGVITYYYFYGMDV

SEQ ID NO: 23977 - protein, 9 aa, Homo sapiens
  Light chain CDR3 for antibody 11989 (IGKV1-6)
LQDFHYPWT

SEQ ID NO: 23978 - protein, 12 aa, Homo sapiens
  Heavy chain CDR3 for antibody 11989 (IGHV3-33)
ARGYFGSGYAHF

SEQ ID NO: 23979 - protein, 9 aa, Homo sapiens
  Light chain CDR3 for antibody 11990 (IGKV5-2)
LQHDKFLYT

SEQ ID NO: 23980 - protein, 18 aa, Homo sapiens
  Heavy chain CDR3 for antibody 11990 (IGHV3-33)
ARGGYSSGWDYYYYGMDV

SEQ ID NO: 23981 - protein, 9 aa, Homo sapiens
  Light chain CDR3 for antibody 11991 (IGKV1-6)
QQDYEFPLT

SEQ ID NO: 23982 - protein, 18 aa, Homo sapiens
  Heavy chain CDR3 for antibody 11991 (IGHV4-59)
AKDRITGTTYGYYSGLDV

SEQ ID NO: 23983 - protein, 9 aa, Homo sapiens
  Light chain CDR3 for antibody 11992 (IGKV3D-20)
QQYGSGPWT

SEQ ID NO: 23984 - protein, 18 aa, Homo sapiens
  Heavy chain CDR3 for antibody 11992 (IGHV3-33)
AREGYDILTGYYNVKFDY

SEQ ID NO: 23985 - protein, 8 aa, Homo sapiens
  Light chain CDR3 for antibody 11993 (IGKV6-21)
HQSSSLYT

SEQ ID NO: 23986 - protein, 12 aa, Homo sapiens
  Heavy chain CDR3 for antibody 11993 (IGHV4-61)
ARVGSSGWYFDY

SEQ ID NO: 23987 - protein, 8 aa, Homo sapiens
  Light chain CDR3 for antibody 11994 (IGKV3-11)
QQRSNWLT

SEQ ID NO: 23988 - protein, 9 aa, Homo sapiens
  Heavy chain CDR3 for antibody 11994 (IGHV1-8)
ARGPRIMDV

SEQ ID NO: 23989 - protein, 9 aa, Homo sapiens
  Light chain CDR3 for antibody 11995 (IGKV1D-13)
QHFNNYMYT

SEQ ID NO: 23990 - protein, 16 aa, Homo sapiens
  Heavy chain CDR3 for antibody 11995 (IGHV4-b)
ARDTPYYSGSGRPFDH

SEQ ID NO: 23991 - protein, 9 aa, Homo sapiens
  Light chain CDR3 for antibody 11996 (IGKV1-9)
QQLISYPLT

SEQ ID NO: 23992 - protein, 17 aa, Homo sapiens
  Heavy chain CDR3 for antibody 11996 (IGHV3-33)
ARSPYDILTGYSYYFDY

SEQ ID NO: 23993 - protein, 9 aa, Homo sapiens
  Light chain CDR3 for antibody 11997 (IGKV6-21)
HQSSSLPHT

SEQ ID NO: 23994 - protein, 15 aa, Homo sapiens
  Heavy chain CDR3 for antibody 11997 (IGHV3-33)
AKGGTMVRGVIAFDY

SEQ ID NO: 23995 - protein, 8 aa, Homo sapiens
  Light chain CDR3 for antibody 11998 (IGKV6-21)
HQSSSLPH

SEQ ID NO: 23996 - protein, 18 aa, Homo sapiens
  Heavy chain CDR3 for antibody 11998 (IGHV3-23)
AKEGNYYGSGSYWGYFDP

SEQ ID NO: 23997 - protein, 9 aa, Homo sapiens
  Light chain CDR3 for antibody 11999 (IGKV1-6)
QQYDNLPFT

SEQ ID NO: 23998 - protein, 16 aa, Homo sapiens
  Heavy chain CDR3 for antibody 11999 (IGHV3-33)
ARGYDMLTGDYYGMDV

SEQ ID NO: 23999 - protein, 10 aa, Homo sapiens
  Light chain CDR3 for antibody 12000 (IGKV3-20)
QQYGSSPPYT

SEQ ID NO: 24000 - protein, 13 aa, Homo sapiens
  Heavy chain CDR3 for antibody 12000 (IGHV3-33)
ARIDYYSYYGMDV

SEQ ID NO: 24001 - protein, 9 aa, Homo sapiens
  Light chain CDR3 for antibody 12001 (IGKV1-9)
QQLNRYPYT

SEQ ID NO: 24002 - protein, 16 aa, Homo sapiens
  Heavy chain CDR3 for antibody 12001 (IGHV3-23)
ARDLGIAAAGTGWFDP

SEQ ID NO: 24003 - protein, 9 aa, Homo sapiens
  Light chain CDR3 for antibody 12002 (IGKV1-6)
LQDYNYPYT

SEQ ID NO: 24004 - protein, 12 aa, Homo sapiens
  Heavy chain CDR3 for antibody 12002 (IGHV1-18)
ARAPYNWNDPDY

SEQ ID NO: 24005 - protein, 6 aa, Homo sapiens
  Light chain CDR3 for antibody 12003 (IGKV3-20)
QQYGST

SEQ ID NO: 24006 - protein, 14 aa, Homo sapiens
  Heavy chain CDR3 for antibody 12003 (IGHV3-33)
ARQYSYGYPYYFDY

SEQ ID NO: 24007 - protein, 9 aa, Homo sapiens
  Light chain CDR3 for antibody 12004 (IGKV2-30)
MQGTHWPLT

SEQ ID NO: 24008 - protein, 16 aa, Homo sapiens
  Heavy chain CDR3 for antibody 12004 (IGHV3-33)
ARDRGGMTMVRGGFDY

SEQ ID NO: 24009 - protein, 8 aa, Homo sapiens
  Light chain CDR3 for antibody 12005 (IGKV1-5)
QQYNSYYT

SEQ ID NO: 24010 - protein, 17 aa, Homo sapiens
  Heavy chain CDR3 for antibody 12005 (IGHV3-33)
ARENDILTGSYYYGMDV

SEQ ID NO: 24011 - protein, 9 aa, Homo sapiens
  Light chain CDR3 for antibody 12006 (IGKV1-6)
LQDYNYPWT

SEQ ID NO: 24012 - protein, 11 aa, Homo sapiens
  Heavy chain CDR3 for antibody 12006 (IGHV3-33)
ARDRILTPFDY

SEQ ID NO: 24013 - protein, 9 aa, Homo sapiens
  Light chain CDR3 for antibody 12007 (IGKV1D-16)
QQYNSYPYT

SEQ ID NO: 24014 - protein, 18 aa, Homo sapiens
  Heavy chain CDR3 for antibody 12007 (IGHV3-33)
AKDGYDILTGYYYYYFDL

SEQ ID NO: 24015 - protein, 9 aa, Homo sapiens
  Light chain CDR3 for antibody 12008 (IGKV1D-13)
QHFNNYMYT

SEQ ID NO: 24016 - protein, 20 aa, Homo sapiens
  Heavy chain CDR3 for antibody 12008 (IGHV3-33)
AREDYYGSGSYYPAYNWFDP

SEQ ID NO: 24017 - protein, 9 aa, Homo sapiens
  Light chain CDR3 for antibody 12009 (IGKV1-6)
LQDFNYPRT

SEQ ID NO: 24018 - protein, 15 aa, Homo sapiens
  Heavy chain CDR3 for antibody 12009 (IGHV4-59)
ARRDYDISTGYLFDY

SEQ ID NO: 24019 - protein, 8 aa, Homo sapiens
  Light chain CDR3 for antibody 12010 (IGKV3D-7)
QQDYNLLT

SEQ ID NO: 24020 - protein, 10 aa, Homo sapiens
  Heavy chain CDR3 for antibody 12010 (IGHV3-33)
ARVVDTAMAY

SEQ ID NO: 24021 - protein, 9 aa, Homo sapiens
  Light chain CDR3 for antibody 12011 (IGKV3-11)
QQRSNWQYT

SEQ ID NO: 24022 - protein, 13 aa, Homo sapiens
  Heavy chain CDR3 for antibody 12011 (IGHV1-18)
ARGGGVRGAPLDY

SEQ ID NO: 24023 - protein, 10 aa, Homo sapiens
  Light chain CDR3 for antibody 12012 (IGKV3-15)
QQYNNWPPIT

SEQ ID NO: 24024 - protein, 10 aa, Homo sapiens
  Heavy chain CDR3 for antibody 12012 (IGHV3-33)
ARDVVVYFDY

SEQ ID NO: 24025 - protein, 9 aa, Homo sapiens
  Light chain CDR3 for antibody 12013 (IGKV3-11)
QQRSNWPPT

SEQ ID NO: 24026 - protein, 17 aa, Homo sapiens
  Heavy chain CDR3 for antibody 12013 (IGHV3-33)
ARDPARGNVRSFYGLDV

SEQ ID NO: 24027 - protein, 9 aa, Homo sapiens
  Light chain CDR3 for antibody 12014 (IGKV1-9)
QQLHIYPWT

SEQ ID NO: 24028 - protein, 15 aa, Homo sapiens
  Heavy chain CDR3 for antibody 12014 (IGHV3-33)
ARGYYYGSGSFPVDY

SEQ ID NO: 24029 - protein, 10 aa, Homo sapiens
  Light chain CDR3 for antibody 12015 (IGKV3-15)
QQYNNWPPYT

SEQ ID NO: 24030 - protein, 13 aa, Homo sapiens
  Heavy chain CDR3 for antibody 12015 (IGHV3-23)
ASPFNWNDGFFDY

SEQ ID NO: 24031 - protein, 9 aa, Homo sapiens
  Light chain CDR3 for antibody 12016 (IGKV3-20)
QQYGTSPFP

SEQ ID NO: 24032 - protein, 18 aa, Homo sapiens
  Heavy chain CDR3 for antibody 12016 (IGHV3-33)
ARREGIVGATTYYYGMDV

SEQ ID NO: 24033 - protein, 9 aa, Homo sapiens
  Light chain CDR3 for antibody 12017 (IGKV2-24)
MQATQFPHT

SEQ ID NO: 24034 - protein, 14 aa, Homo sapiens
  Heavy chain CDR3 for antibody 12017 (IGHV3-33)
ARAISGSSYWYFDL

SEQ ID NO: 24035 - protein, 10 aa, Homo sapiens
  Light chain CDR3 for antibody 12018 (IGKV3-11)
QQRSNWPALT

SEQ ID NO: 24036 - protein, 11 aa, Homo sapiens
  Heavy chain CDR3 for antibody 12018 (IGHV4-59)
VRERGYYGMDV

SEQ ID NO: 24037 - protein, 9 aa, Homo sapiens
  Light chain CDR3 for antibody 12019 (IGKV3D-7)
QQDYEFPLT

SEQ ID NO: 24038 - protein, 11 aa, Homo sapiens
  Heavy chain CDR3 for antibody 12019 (IGHV4-59)
ARDRGHYGMDV

SEQ ID NO: 24039 - protein, 10 aa, Homo sapiens
  Light chain CDR3 for antibody 12020 (IGKV1-17)
LQHNSYPIYT

SEQ ID NO: 24040 - protein, 18 aa, Homo sapiens
  Heavy chain CDR3 for antibody 12020 (IGHV4-39)
ARQYYFGSGNYYRGWFDP

SEQ ID NO: 24041 - protein, 10 aa, Homo sapiens
  Light chain CDR3 for antibody 12021 (IGKV1-6)
LQDYNYPMYT

SEQ ID NO: 24042 - protein, 18 aa, Homo sapiens
  Heavy chain CDR3 for antibody 12021 (IGHV3-33)
ARDGRISLVRGIIDAFDI

SEQ ID NO: 24043 - protein, 9 aa, Homo sapiens
  Light chain CDR3 for antibody 12022 (IGKV1-6)
LQDYNYPYT

SEQ ID NO: 24044 - protein, 11 aa, Homo sapiens
  Heavy chain CDR3 for antibody 12022 (IGHV4-59)
AREMGHDILDI

SEQ ID NO: 24045 - protein, 10 aa, Homo sapiens
  Light chain CDR3 for antibody 12023 (IGKV1D-13)
LQDYNYPMYT

SEQ ID NO: 24046 - protein, 18 aa, Homo sapiens
  Heavy chain CDR3 for antibody 12023 (IGHV3-33)
ARDGYSGYDYYYYYGMDV

SEQ ID NO: 24047 - protein, 10 aa, Homo sapiens
  Light chain CDR3 for antibody 12024 (IGKV1-17)
LQHNSYPMYT

SEQ ID NO: 24048 - protein, 15 aa, Homo sapiens
  Heavy chain CDR3 for antibody 12024 (IGHV3-23)
AKDLSSGWYAYFFDY

SEQ ID NO: 24049 - protein, 10 aa, Homo sapiens
  Light chain CDR3 for antibody 12025 (IGKV3-15)
QQYNNWPPYT

SEQ ID NO: 24050 - protein, 15 aa, Homo sapiens
  Heavy chain CDR3 for antibody 12025 (IGHV3-23)
AKEALRYFDWSGMDV

SEQ ID NO: 24051 - protein, 7 aa, Homo sapiens
  Light chain CDR3 for antibody 12026 (IGKV1-17)
LQHNSYP

SEQ ID NO: 24052 - protein, 20 aa, Homo sapiens
  Heavy chain CDR3 for antibody 12026 (IGHV1-f)
ATGLITFARGVILTYRSFDY

SEQ ID NO: 24053 - protein, 9 aa, Homo sapiens
  Light chain CDR3 for antibody 12027 (IGKV1-33)
QQYDNLPFT

SEQ ID NO: 24054 - protein, 18 aa, Homo sapiens
  Heavy chain CDR3 for antibody 12027 (IGHV3-53)
AKAGDYYVSGSYWGYFDL

SEQ ID NO: 24055 - protein, 8 aa, Homo sapiens
  Light chain CDR3 for antibody 12028 (IGKV3D-7)
QQDYSLLT

SEQ ID NO: 24056 - protein, 16 aa, Homo sapiens
  Heavy chain CDR3 for antibody 12028 (IGHV3-33)
ARDRGGMTMVRGGFDY

SEQ ID NO: 24057 - protein, 10 aa, Homo sapiens
  Light chain CDR3 for antibody 12029 (IGKV1-17)
LQHNSYPMYT

SEQ ID NO: 24058 - protein, 15 aa, Homo sapiens
  Heavy chain CDR3 for antibody 12029 (IGHV3-30)
ARDSRPEITGPPFDY

SEQ ID NO: 24059 - protein, 9 aa, Homo sapiens
  Light chain CDR3 for antibody 12030 (IGKV3-11)
QQRSNWPYT

SEQ ID NO: 24060 - protein, 18 aa, Homo sapiens
  Heavy chain CDR3 for antibody 12030 (IGHV3-33)
ARERYYYGSGSYPDAFDI

SEQ ID NO: 24061 - protein, 9 aa, Homo sapiens
  Light chain CDR3 for antibody 12031 (IGKV1-17)
LHSNNYPWT

SEQ ID NO: 24062 - protein, 11 aa, Homo sapiens
  Heavy chain CDR3 for antibody 12031 (IGHV3-74)
ARDRGNWGFDY

SEQ ID NO: 24063 - protein, 9 aa, Homo sapiens
  Light chain CDR3 for antibody 12032 (IGKV1D-16)
QQFNNYPYT

SEQ ID NO: 24064 - protein, 14 aa, Homo sapiens
  Heavy chain CDR3 for antibody 12032 (IGHV3-33)
ARASSGSSYWYIDL

SEQ ID NO: 24065 - protein, 9 aa, Homo sapiens
  Light chain CDR3 for antibody 12033 (IGKV1-39)
QQSYSTPFI

SEQ ID NO: 24066 - protein, 14 aa, Homo sapiens
  Heavy chain CDR3 for antibody 12033 (IGHV4-59)
ARGAAAGNFYGLDV

SEQ ID NO: 24067 - protein, 9 aa, Homo sapiens
  Light chain CDR3 for antibody 12034 (IGKV6-21)
HQSSSLPYT

SEQ ID NO: 24068 - protein, 15 aa, Homo sapiens
  Heavy chain CDR3 for antibody 12034 (IGHV4-39)
ARRSKYTSAWYPFDY

SEQ ID NO: 24069 - protein, 9 aa, Homo sapiens
  Light chain CDR3 for antibody 12035 (IGKV1-39)
QQSYSTPYT

SEQ ID NO: 24070 - protein, 18 aa, Homo sapiens
  Heavy chain CDR3 for antibody 12035 (IGHV4-39)
ARGALTYYDILTGYFFDY

SEQ ID NO: 24071 - protein, 9 aa, Homo sapiens
  Light chain CDR3 for antibody 12036 (IGKV1-6)
LQDYNYPYT

SEQ ID NO: 24072 - protein, 15 aa, Homo sapiens
  Heavy chain CDR3 for antibody 12036 (IGHV3-33)
ARDSGGGAGTLPFDY

SEQ ID NO: 24073 - protein, 9 aa, Homo sapiens
  Light chain CDR3 for antibody 12037 (IGKV1-27)
QKYNSAPYT

SEQ ID NO: 24074 - protein, 19 aa, Homo sapiens
  Heavy chain CDR3 for antibody 12037 (IGHV3-33)
ARGSDYDILTGYSSDAFDI

SEQ ID NO: 24075 - protein, 9 aa, Homo sapiens
  Light chain CDR3 for antibody 12038 (IGKV1-27)
QKYNSAPHT

SEQ ID NO: 24076 - protein, 15 aa, Homo sapiens
  Heavy chain CDR3 for antibody 12038 (IGHV3-33)
AKDRNSGYDWGGFDY

SEQ ID NO: 24077 - protein, 9 aa, Homo sapiens
  Light chain CDR3 for antibody 12039 (IGKV3-20)
QQYGSSPRT

SEQ ID NO: 24078 - protein, 16 aa, Homo sapiens
  Heavy chain CDR3 for antibody 12039 (IGHV3-33)
ARGSVSDILTGAYFDY

SEQ ID NO: 24079 - protein, 9 aa, Homo sapiens
  Light chain CDR3 for antibody 12040 (IGKV1-27)
QKYNSAPYT

SEQ ID NO: 24080 - protein, 14 aa, Homo sapiens
  Heavy chain CDR3 for antibody 12040 (IGHV4-39)
ARQGDILTGYSFDN

SEQ ID NO: 24081 - protein, 9 aa, Homo sapiens
  Light chain CDR3 for antibody 12041 (IGKV1-6)
QQEYNYPLT

SEQ ID NO: 24082 - protein, 11 aa, Homo sapiens
  Heavy chain CDR3 for antibody 12041 (IGHV4-59)
AREMGHDIFDI

SEQ ID NO: 24083 - protein, 8 aa, Homo sapiens
  Light chain CDR3 for antibody 12042 (IGKV3-20)
QQYGSSFT

SEQ ID NO: 24084 - protein, 13 aa, Homo sapiens
  Heavy chain CDR3 for antibody 12042 (IGHV3-53)
ARSGSYWGYYFDY

SEQ ID NO: 24085 - protein, 10 aa, Homo sapiens
  Light chain CDR3 for antibody 12043 (IGKV1-17)
LQHNSYPMYT

SEQ ID NO: 24086 - protein, 16 aa, Homo sapiens
  Heavy chain CDR3 for antibody 12043 (IGHV3-33)
ARDKNTDYDILTGFDY

SEQ ID NO: 24087 - protein, 10 aa, Homo sapiens
  Light chain CDR3 for antibody 12044 (IGKV3-11)
QQRSNWPIYT

SEQ ID NO: 24088 - protein, 12 aa, Homo sapiens
  Heavy chain CDR3 for antibody 12044 (IGHV3-33)
ARKGYDMHAFDI

SEQ ID NO: 24089 - protein, 9 aa, Homo sapiens
  Light chain CDR3 for antibody 12045 (IGKV5-2)
LQHDNFPWT

SEQ ID NO: 24090 - protein, 12 aa, Homo sapiens
  Heavy chain CDR3 for antibody 12045 (IGHV1-46)
ARALTVGASFDY

SEQ ID NO: 24091 - protein, 9 aa, Homo sapiens
  Light chain CDR3 for antibody 12046 (IGKV5-2)
LQHDNFPYT

SEQ ID NO: 24092 - protein, 18 aa, Homo sapiens
  Heavy chain CDR3 for antibody 12046 (IGHV3-33)
ARGAYSSGWDYYYYGMDA

SEQ ID NO: 24093 - protein, 9 aa, Homo sapiens
  Light chain CDR3 for antibody 12047 (IGKV1-16)
QHYNDYPFT

SEQ ID NO: 24094 - protein, 10 aa, Homo sapiens
  Heavy chain CDR3 for antibody 12047 (IGHV3-30)
ARGSWCGFDY

SEQ ID NO: 24095 - protein, 9 aa, Homo sapiens
  Light chain CDR3 for antibody 12048 (IGKV3-11)
QQRSNWMYT

SEQ ID NO: 24096 - protein, 9 aa, Homo sapiens
  Heavy chain CDR3 for antibody 12048 (IGHV3-23)
AKEQQLFDY

SEQ ID NO: 24097 - protein, 9 aa, Homo sapiens
  Light chain CDR3 for antibody 12049 (IGKV3-20)
QQYGTSPFP

SEQ ID NO: 24098 - protein, 16 aa, Homo sapiens
  Heavy chain CDR3 for antibody 12049 (IGHV3-30)
ARDIAVAGHVYYGMDV

SEQ ID NO: 24099 - protein, 8 aa, Homo sapiens
  Light chain CDR3 for antibody 12050 (IGKV3-15)
QQYNNWPT

SEQ ID NO: 24100 - protein, 15 aa, Homo sapiens
  Heavy chain CDR3 for antibody 12050 (IGHV3-33)
ARAYDLPHYYYGMDV

SEQ ID NO: 24101 - protein, 9 aa, Homo sapiens
  Light chain CDR3 for antibody 12051 (IGKV1-33)
QQYDNLPFT

SEQ ID NO: 24102 - protein, 18 aa, Homo sapiens
  Heavy chain CDR3 for antibody 12051 (IGHV3-33)
ARGAYSSGWDYYYYGMDV

SEQ ID NO: 24103 - protein, 10 aa, Homo sapiens
  Light chain CDR3 for antibody 12052 (IGKV3-20)
QQYGRSPPVT

SEQ ID NO: 24104 - protein, 20 aa, Homo sapiens
  Heavy chain CDR3 for antibody 12052 (IGHV1-18)
AREVGIAVAGTLYYYYGMDV

SEQ ID NO: 24105 - protein, 9 aa, Homo sapiens
  Light chain CDR3 for antibody 12053 (IGKV1-9)
QQLKSYLYT

SEQ ID NO: 24106 - protein, 13 aa, Homo sapiens
  Heavy chain CDR3 for antibody 12053 (IGHV3-33)
ARRATLVRGVFDP

SEQ ID NO: 24107 - protein, 8 aa, Homo sapiens
  Light chain CDR3 for antibody 12054 (IGKV3-20)
QQYGSSFT

SEQ ID NO: 24108 - protein, 15 aa, Homo sapiens
  Heavy chain CDR3 for antibody 12054 (IGHV3-33)
ARDSRPEIIGPPFDY

SEQ ID NO: 24109 - protein, 9 aa, Homo sapiens
  Light chain CDR3 for antibody 12055 (IGKV1-6)
LQVYSYPWT

SEQ ID NO: 24110 - protein, 13 aa, Homo sapiens
  Heavy chain CDR3 for antibody 12055 (IGHV4-34)
ASNFYYYYYGMDV

SEQ ID NO: 24111 - protein, 9 aa, Homo sapiens
  Light chain CDR3 for antibody 12056 (IGKV1-37)
QRTYNAPYT

SEQ ID NO: 24112 - protein, 19 aa, Homo sapiens
  Heavy chain CDR3 for antibody 12056 (IGHV3-33)
AREDYYGSGSYYNEDWFDP

SEQ ID NO: 24113 - protein, 9 aa, Homo sapiens
  Light chain CDR3 for antibody 12057 (IGKV1-17)
LRHNCYPYT

SEQ ID NO: 24114 - protein, 14 aa, Homo sapiens
  Heavy chain CDR3 for antibody 12057 (IGHV3-33)
ARDNILTAYYLFDY

SEQ ID NO: 24115 - protein, 9 aa, Homo sapiens
  Light chain CDR3 for antibody 12058 (IGKV1D-16)
QQYITYPYT

SEQ ID NO: 24116 - protein, 12 aa, Homo sapiens
  Heavy chain CDR3 for antibody 12058 (IGHV3-33)
ARDRAYRGSLDY

SEQ ID NO: 24117 - protein, 9 aa, Homo sapiens
  Light chain CDR3 for antibody 12059 (IGKV3D-7)
QQDYNLPYS

SEQ ID NO: 24118 - protein, 13 aa, Homo sapiens
  Heavy chain CDR3 for antibody 12059 (IGHV3-33)
ARGVLWFGELFDY

SEQ ID NO: 24119 - protein, 9 aa, Homo sapiens
  Light chain CDR3 for antibody 12060 (IGKV1-6)
QQYDNLPPT

SEQ ID NO: 24120 - protein, 10 aa, Homo sapiens
  Heavy chain CDR3 for antibody 12060 (IGHV3-33)
ARVVDTAMAY

SEQ ID NO: 24121 - protein, 9 aa, Homo sapiens
  Light chain CDR3 for antibody 12061 (IGKV2-30)
MQGTHWPLT

SEQ ID NO: 24122 - protein, 14 aa, Homo sapiens
  Heavy chain CDR3 for antibody 12061 (IGHV3-20)
AREGWFGDYYGMDV

SEQ ID NO: 24123 - protein, 8 aa, Homo sapiens
  Light chain CDR3 for antibody 12062 (IGKV1-5)
QQYNSYWT

SEQ ID NO: 24124 - protein, 20 aa, Homo sapiens
  Heavy chain CDR3 for antibody 12062 (IGHV3-33)
ARDPAQLERRYYYFYYGMDV

SEQ ID NO: 24125 - protein, 9 aa, Homo sapiens
  Light chain CDR3 for antibody 12063 (IGKV2-30)
MQGTHWPLT

SEQ ID NO: 24126 - protein, 10 aa, Homo sapiens
  Heavy chain CDR3 for antibody 12063 (IGHV3-30)
ARGSWYGFDY

SEQ ID NO: 24127 - protein, 10 aa, Homo sapiens
  Light chain CDR3 for antibody 12064 (IGKV3-11)
QQRSTWPTLI

SEQ ID NO: 24128 - protein, 13 aa, Homo sapiens
  Heavy chain CDR3 for antibody 12064 (IGHV3-23)
AKDRGYSSTSTAY

SEQ ID NO: 24129 - protein, 9 aa, Homo sapiens
  Light chain CDR3 for antibody 12065 (IGKV1D-13)
QQFNNYPHT

SEQ ID NO: 24130 - protein, 14 aa, Homo sapiens
  Heavy chain CDR3 for antibody 12065 (IGHV3-20)
ARDEGSTWSDIFDI

SEQ ID NO: 24131 - protein, 11 aa, Homo sapiens
  Light chain CDR3 for antibody 12066 (IGKV3-11)
QQRSNWPPTWP

SEQ ID NO: 24132 - protein, 13 aa, Homo sapiens
  Heavy chain CDR3 for antibody 12066 (IGHV4-39)
ARRDVLAPAAFEY

SEQ ID NO: 24133 - protein, 9 aa, Homo sapiens
  Light chain CDR3 for antibody 12067 (IGKV1-9)
QQLNTYPYT

SEQ ID NO: 24134 - protein, 9 aa, Homo sapiens
  Heavy chain CDR3 for antibody 12067 (IGHV3-13)
ARDHWYFDL

SEQ ID NO: 24135 - protein, 9 aa, Homo sapiens
  Light chain CDR3 for antibody 12068 (IGKV3D-20)
QQYGRSPRT

SEQ ID NO: 24136 - protein, 15 aa, Homo sapiens
  Heavy chain CDR3 for antibody 12068 (IGHV1-24)
ATDWNDRGYYYGMDV

SEQ ID NO: 24137 - protein, 9 aa, Homo sapiens
  Light chain CDR3 for antibody 12069 (IGKV3-11)
QQRINWPPT

SEQ ID NO: 24138 - protein, 14 aa, Homo sapiens
  Heavy chain CDR3 for antibody 12069 (IGHV3-20)
AREGWFGDYYGMDV

SEQ ID NO: 24139 - protein, 9 aa, Homo sapiens
  Light chain CDR3 for antibody 12070 (IGKV6-21)
HQSSSLPYT

SEQ ID NO: 24140 - protein, 16 aa, Homo sapiens
  Heavy chain CDR3 for antibody 12070 (IGHV3-66)
AREVGAKDYYYYGMDV

SEQ ID NO: 24141 - protein, 10 aa, Homo sapiens
  Light chain CDR3 for antibody 12071 (IGKV1-39)
QQSYSTPMYT

SEQ ID NO: 24142 - protein, 11 aa, Homo sapiens
  Heavy chain CDR3 for antibody 12071 (IGHV3-74)
ARDRGNWGFDY

SEQ ID NO: 24143 - protein, 9 aa, Homo sapiens
  Light chain CDR3 for antibody 12072 (IGKV3-15)
QQYNNWPRT

SEQ ID NO: 24144 - protein, 18 aa, Homo sapiens
  Heavy chain CDR3 for antibody 12072 (IGHV3-33)
ARDRDRYGSGTYPDAIDI

SEQ ID NO: 24145 - protein, 9 aa, Homo sapiens
  Light chain CDR3 for antibody 12073 (IGKV3D-7)
QQDYSFPIT

SEQ ID NO: 24146 - protein, 13 aa, Homo sapiens
  Heavy chain CDR3 for antibody 12073 (IGHV4-39)
APFRVMVRGVLDY

SEQ ID NO: 24147 - protein, 10 aa, Homo sapiens
  Light chain CDR3 for antibody 12074 (IGKV3-15)
QQYNNWPPYT

SEQ ID NO: 24148 - protein, 10 aa, Homo sapiens
  Heavy chain CDR3 for antibody 12074 (IGHV3-33)
ARDGSGSQPI

SEQ ID NO: 24149 - protein, 9 aa, Homo sapiens
  Light chain CDR3 for antibody 12075 (IGKV1-17)
LQHNNYPLT

SEQ ID NO: 24150 - protein, 20 aa, Homo sapiens
  Heavy chain CDR3 for antibody 12075 (IGHV3-33)
ARDNDSSGYYDYYYYYGMDV

SEQ ID NO: 24151 - protein, 9 aa, Homo sapiens
  Light chain CDR3 for antibody 12076 (IGKV3D-20)
QQHGNSPLT

SEQ ID NO: 24152 - protein, 12 aa, Homo sapiens
  Heavy chain CDR3 for antibody 12076 (IGHV4-39)
ARHGSGSSYFDY

SEQ ID NO: 24153 - protein, 9 aa, Homo sapiens
  Light chain CDR3 for antibody 12077 (IGKV1D-16)
QQYNYWPLT

SEQ ID NO: 24154 - protein, 13 aa, Homo sapiens
  Heavy chain CDR3 for antibody 12077 (IGHV3-33)
ASGYSGYDWYFDL

SEQ ID NO: 24155 - protein, 9 aa, Homo sapiens
  Light chain CDR3 for antibody 12078 (IGKV5-2)
LQHDKFPYT

SEQ ID NO: 24156 - protein, 20 aa, Homo sapiens
  Heavy chain CDR3 for antibody 12078 (IGHV3-23)
AKDRMTTVTSYYYYSYGMDV

SEQ ID NO: 24157 - protein, 10 aa, Homo sapiens
  Light chain CDR3 for antibody 12079 (IGKV1-9)
QQLDSYPMYT

SEQ ID NO: 24158 - protein, 21 aa, Homo sapiens
  Heavy chain CDR3 for antibody 12079 (IGHV3-33)
ARDEYYEIVTGYGYYHYGMDV

SEQ ID NO: 24159 - protein, 9 aa, Homo sapiens
  Light chain CDR3 for antibody 12080 (IGKV1D-16)
QQYNSFPLT

SEQ ID NO: 24160 - protein, 17 aa, Homo sapiens
  Heavy chain CDR3 for antibody 12080 (IGHV3-33)
ARSPYDILTGYSYYFDY

SEQ ID NO: 24161 - protein, 10 aa, Homo sapiens
  Light chain CDR3 for antibody 12081 (IGKV3-11)
QQRSNWPMYT

SEQ ID NO: 24162 - protein, 13 aa, Homo sapiens
  Heavy chain CDR3 for antibody 12081 (IGHV3-23)
AREYFDWLLPLDY

SEQ ID NO: 24163 - protein, 9 aa, Homo sapiens
  Light chain CDR3 for antibody 12082 (IGKV1-6)
LQDYNYPRT

SEQ ID NO: 24164 - protein, 12 aa, Homo sapiens
  Heavy chain CDR3 for antibody 12082 (IGHV1-46)
ARGPTGDHALDI

SEQ ID NO: 24165 - protein, 9 aa, Homo sapiens
  Light chain CDR3 for antibody 12083 (IGKV1D-13)
QQFNNYPHT

SEQ ID NO: 24166 - protein, 10 aa, Homo sapiens
  Heavy chain CDR3 for antibody 12083 (IGHV1-18)
ARGPTSDVDY

SEQ ID NO: 24167 - protein, 9 aa, Homo sapiens
  Light chain CDR3 for antibody 12084 (IGKV1-16)
QQYSSYPYT

SEQ ID NO: 24168 - protein, 14 aa, Homo sapiens
  Heavy chain CDR3 for antibody 12084 (IGHV3-33)
AGQYSYGYPYYFDY

SEQ ID NO: 24169 - protein, 8 aa, Homo sapiens
  Light chain CDR3 for antibody 12085 (IGKV1D-13)
QQFNNYPT

SEQ ID NO: 24170 - protein, 17 aa, Homo sapiens
  Heavy chain CDR3 for antibody 12085 (IGHV3-33)
ARGGGYENDHYYYGMDV

SEQ ID NO: 24171 - protein, 9 aa, Homo sapiens
  Light chain CDR3 for antibody 12086 (IGKV3D-7)
QQDYSFPLT

SEQ ID NO: 24172 - protein, 20 aa, Homo sapiens
  Heavy chain CDR3 for antibody 12086 (IGHV3-23)
AKDREMAATSHYYYYYGMDV

SEQ ID NO: 24173 - protein, 6 aa, Homo sapiens
  Light chain CDR3 for antibody 12087 (IGKV3-20)
QQYGST

SEQ ID NO: 24174 - protein, 20 aa, Homo sapiens
  Heavy chain CDR3 for antibody 12087 (IGHV3-33)
ARDWMVRGVIITDYYYGMDV

SEQ ID NO: 24175 - protein, 10 aa, Homo sapiens
  Light chain CDR3 for antibody 12088 (IGKV3-11)
QQHSNWPIFT

SEQ ID NO: 24176 - protein, 18 aa, Homo sapiens
  Heavy chain CDR3 for antibody 12088 (IGHV3-33)
ARDYDSLTTYPEDYGMDV

SEQ ID NO: 24177 - protein, 9 aa, Homo sapiens
  Light chain CDR3 for antibody 12089 (IGKV3-20)
QQYGSSIFT

SEQ ID NO: 24178 - protein, 13 aa, Homo sapiens
  Heavy chain CDR3 for antibody 12089 (IGHV3-33)
ARAFIMVRGVIDY

SEQ ID NO: 24179 - protein, 9 aa, Homo sapiens
  Light chain CDR3 for antibody 12090 (IGKV1-16)
QHYNDYPFT

SEQ ID NO: 24180 - protein, 11 aa, Homo sapiens
  Heavy chain CDR3 for antibody 12090 (IGHV3-33)
ARAGIAALFDY

SEQ ID NO: 24181 - protein, 9 aa, Homo sapiens
  Light chain CDR3 for antibody 12091 (IGKV3D-7)
QQDYKLPLT

SEQ ID NO: 24182 - protein, 18 aa, Homo sapiens
  Heavy chain CDR3 for antibody 12091 (IGHV3-33)
ARREGITTIFYYYYGMDV

SEQ ID NO: 24183 - protein, 9 aa, Homo sapiens
  Light chain CDR3 for antibody 12092 (IGKV1-6)
LQDHNYPYT

SEQ ID NO: 24184 - protein, 20 aa, Homo sapiens
  Heavy chain CDR3 for antibody 12092 (IGHV3-33)
ARDRCSSTSCYGYYYYGMDV

SEQ ID NO: 24185 - protein, 9 aa, Homo sapiens
  Light chain CDR3 for antibody 12093 (IGKV1-37)
QRTSNAPYT

SEQ ID NO: 24186 - protein, 9 aa, Homo sapiens
  Heavy chain CDR3 for antibody 12093 (IGHV3-30)
ARDNWGFDY

SEQ ID NO: 24187 - protein, 9 aa, Homo sapiens
  Light chain CDR3 for antibody 12094 (IGKV6-21)
HQSSSLPYT

SEQ ID NO: 24188 - protein, 16 aa, Homo sapiens
  Heavy chain CDR3 for antibody 12094 (IGHV3-23)
ARNDILTASGYYGMDV

SEQ ID NO: 24189 - protein, 9 aa, Homo sapiens
  Light chain CDR3 for antibody 12095 (IGKV3D-20)
QQYGRSPRT

SEQ ID NO: 24190 - protein, 19 aa, Homo sapiens
  Heavy chain CDR3 for antibody 12095 (IGHV4-39)
ARQGDVLRYFDWLLGAFDI

SEQ ID NO: 24191 - protein, 9 aa, Homo sapiens
  Light chain CDR3 for antibody 12096 (IGKV1-9)
QQLNSYPWP

SEQ ID NO: 24192 - protein, 20 aa, Homo sapiens
  Heavy chain CDR3 for antibody 12096 (IGHV3-33)
SRGGATLVRGVIDYYYGMDV

SEQ ID NO: 24193 - protein, 10 aa, Homo sapiens
  Light chain CDR3 for antibody 12097 (IGKV3-11)
QQRSNWPMYT

SEQ ID NO: 24194 - protein, 15 aa, Homo sapiens
  Heavy chain CDR3 for antibody 12097 (IGHV3-23)
AKAGGRYFDWFPFDY

SEQ ID NO: 24195 - protein, 9 aa, Homo sapiens
  Light chain CDR3 for antibody 12098 (IGKV1D-13)
QRFNNYLYT

SEQ ID NO: 24196 - protein, 12 aa, Homo sapiens
  Heavy chain CDR3 for antibody 12098 (IGHV3-33)
AREEAVAEAFDI

SEQ ID NO: 24197 - protein, 9 aa, Homo sapiens
  Light chain CDR3 for antibody 12099 (IGKV3-11)
QQRSSWPPT

SEQ ID NO: 24198 - protein, 17 aa, Homo sapiens
  Heavy chain CDR3 for antibody 12099 (IGHV3-23)
SKERNWNDGYYYFGMDA

SEQ ID NO: 24199 - protein, 9 aa, Homo sapiens
  Light chain CDR3 for antibody 12100 (IGKV3D-7)
QQDYNFPLT

SEQ ID NO: 24200 - protein, 11 aa, Homo sapiens
  Heavy chain CDR3 for antibody 12100 (IGHV4-59)
AREMGHDIFDI

SEQ ID NO: 24201 - protein, 10 aa, Homo sapiens
  Light chain CDR3 for antibody 12101 (IGKV3-11)
QQRSNWPIWT

SEQ ID NO: 24202 - protein, 14 aa, Homo sapiens
  Heavy chain CDR3 for antibody 12101 (IGHV4-39)
ARQGGWYLYWYFDL

SEQ ID NO: 24203 - protein, 9 aa, Homo sapiens
  Light chain CDR3 for antibody 12102 (IGKV1-6)
QQEYNYPLT

SEQ ID NO: 24204 - protein, 15 aa, Homo sapiens
  Heavy chain CDR3 for antibody 12102 (IGHV3-20)
ARDRGSSGWRDWFDP

SEQ ID NO: 24205 - protein, 8 aa, Homo sapiens
  Light chain CDR3 for antibody 12103 (IGKV6-21)
HQSSSLPT

SEQ ID NO: 24206 - protein, 16 aa, Homo sapiens
  Heavy chain CDR3 for antibody 12103 (IGHV3-30)
ARDIAVAGHVYYGMDV

SEQ ID NO: 24207 - protein, 8 aa, Homo sapiens
  Light chain CDR3 for antibody 12104 (IGKV1-5)
QQYNSYWT

SEQ ID NO: 24208 - protein, 14 aa, Homo sapiens
  Heavy chain CDR3 for antibody 12104 (IGHV1-18)
ARDQPTVPSGYFDY

SEQ ID NO: 24209 - protein, 9 aa, Homo sapiens
  Light chain CDR3 for antibody 12105 (IGKV3-15)
QQYNDWPLT

SEQ ID NO: 24210 - protein, 15 aa, Homo sapiens
  Heavy chain CDR3 for antibody 12105 (IGHV3-33)
ARGYYYGSGSYPLDY

SEQ ID NO: 24211 - protein, 10 aa, Homo sapiens
  Light chain CDR3 for antibody 12106 (IGKV1-33)
QQYDNLPPYT

SEQ ID NO: 24212 - protein, 15 aa, Homo sapiens
  Heavy chain CDR3 for antibody 12106 (IGHV3-33)
ARDTGYSSSWNWFDP

SEQ ID NO: 24213 - protein, 8 aa, Homo sapiens
  Light chain CDR3 for antibody 12107 (IGKV1-5)
QQYHSYYT

SEQ ID NO: 24214 - protein, 17 aa, Homo sapiens
  Heavy chain CDR3 for antibody 12107 (IGHV4-34)
ARDGSGSYTHYYYGMDV

SEQ ID NO: 24215 - protein, 9 aa, Homo sapiens
  Light chain CDR3 for antibody 12108 (IGKV1-37)
QRTYNAPYT

SEQ ID NO: 24216 - protein, 13 aa, Homo sapiens
  Heavy chain CDR3 for antibody 12108 (IGHV4-34)
ASNFYYYYYGMDV

SEQ ID NO: 24217 - protein, 10 aa, Homo sapiens
  Light chain CDR3 for antibody 12109 (IGKV3-11)
QQRSNWPALT

SEQ ID NO: 24218 - protein, 14 aa, Homo sapiens
  Heavy chain CDR3 for antibody 12109 (IGHV3-23)
AKGGDILTGYYPDY

SEQ ID NO: 24219 - protein, 9 aa, Homo sapiens
  Light chain CDR3 for antibody 12110 (IGKV1-9)
QQLNSYPWP

SEQ ID NO: 24220 - protein, 12 aa, Homo sapiens
  Heavy chain CDR3 for antibody 12110 (IGHV3-33)
TRGYSSKSYFDY

SEQ ID NO: 24221 - protein, 9 aa, Homo sapiens
  Light chain CDR3 for antibody 12111 (IGKV3D-7)
QQDYNLPLT

SEQ ID NO: 24222 - protein, 10 aa, Homo sapiens
  Heavy chain CDR3 for antibody 12111 (IGHV3-72)
CRDREGFGDV

SEQ ID NO: 24223 - protein, 9 aa, Homo sapiens
  Light chain CDR3 for antibody 12112 (IGKV5-2)
LQHDNFPWT

SEQ ID NO: 24224 - protein, 19 aa, Homo sapiens
  Heavy chain CDR3 for antibody 12112 (IGHV3-33)
ARGVRLRFFAPYYYYGLDV

SEQ ID NO: 24225 - protein, 9 aa, Homo sapiens
  Light chain CDR3 for antibody 12113 (IGKV1-16)
QQYNSYPIT

SEQ ID NO: 24226 - protein, 13 aa, Homo sapiens
  Heavy chain CDR3 for antibody 12113 (IGHV3-33)
ARDYCGGDCYLDY

SEQ ID NO: 24227 - protein, 9 aa, Homo sapiens
  Light chain CDR3 for antibody 12114 (IGKV3-15)
QQYHNWPRT

SEQ ID NO: 24228 - protein, 11 aa, Homo sapiens
  Heavy chain CDR3 for antibody 12114 (IGHV3-23)
AKAGIVGCLDV

SEQ ID NO: 24229 - protein, 9 aa, Homo sapiens
  Light chain CDR3 for antibody 12115 (IGKV1-27)
QKYNSAPWT

SEQ ID NO: 24230 - protein, 13 aa, Homo sapiens
  Heavy chain CDR3 for antibody 12115 (IGHV1-46)
ARVKLGSLGAFDI

SEQ ID NO: 24231 - protein, 9 aa, Homo sapiens
  Light chain CDR3 for antibody 12116 (IGKV6-21)
HQSSSLPYT

SEQ ID NO: 24232 - protein, 15 aa, Homo sapiens
  Heavy chain CDR3 for antibody 12116 (IGHV5-51)
AIRYYSSGRYDAFDI

SEQ ID NO: 24233 - protein, 9 aa, Homo sapiens
  Light chain CDR3 for antibody 12117 (IGKV3-15)
QQYNDWPRT

SEQ ID NO: 24234 - protein, 15 aa, Homo sapiens
  Heavy chain CDR3 for antibody 12117 (IGHV3-33)
ARDRGSSGYDRYFDY

SEQ ID NO: 24235 - protein, 9 aa, Homo sapiens
  Light chain CDR3 for antibody 12118 (IGKV1-39)
QQSYSTPIT

SEQ ID NO: 24236 - protein, 15 aa, Homo sapiens
  Heavy chain CDR3 for antibody 12118 (IGHV1-18)
ARGYCSSSSYYYFDY

SEQ ID NO: 24237 - protein, 9 aa, Homo sapiens
  Light chain CDR3 for antibody 12119 (IGKV1-16)
QHYNDYPFT

SEQ ID NO: 24238 - protein, 20 aa, Homo sapiens
  Heavy chain CDR3 for antibody 12119 (IGHV3-11)
ARGGATLIRGLIDYYYGMDV

SEQ ID NO: 24239 - protein, 8 aa, Homo sapiens
  Light chain CDR3 for antibody 12120 (IGKV2D-28)
MQALQTPT

SEQ ID NO: 24240 - protein, 17 aa, Homo sapiens
  Heavy chain CDR3 for antibody 12120 (IGHV3-33)
ARGDGDILTGYYEWFDP

SEQ ID NO: 24241 - protein, 9 aa, Homo sapiens
  Light chain CDR3 for antibody 12121 (IGKV3-7)
QQDYTLPLT

SEQ ID NO: 24242 - protein, 12 aa, Homo sapiens
  Heavy chain CDR3 for antibody 12121 (IGHV3-33)
AKDPGWQQLAEY

SEQ ID NO: 24243 - protein, 8 aa, Homo sapiens
  Light chain CDR3 for antibody 12122 (IGKV1-5)
QQYNSYYT

SEQ ID NO: 24244 - protein, 15 aa, Homo sapiens
  Heavy chain CDR3 for antibody 12122 (IGHV1-18)
ARRSPNWGHYYGMDV

SEQ ID NO: 24245 - protein, 9 aa, Homo sapiens
  Light chain CDR3 for antibody 12123 (IGKV1-9)
QQLNTYPWT

SEQ ID NO: 24246 - protein, 18 aa, Homo sapiens
  Heavy chain CDR3 for antibody 12123 (IGHV6-1)
ARDQYSYGPYYYYYGMDV

SEQ ID NO: 24247 - protein, 9 aa, Homo sapiens
  Light chain CDR3 for antibody 12124 (IGKV1-17)
LQHNSYPYT

SEQ ID NO: 24248 - protein, 9 aa, Homo sapiens
  Heavy chain CDR3 for antibody 12124 (IGHV4-59)
ARDDGDFDY

SEQ ID NO: 24249 - protein, 9 aa, Homo sapiens
  Light chain CDR3 for antibody 12125 (IGKV2-30)
MQGTHWPLT

SEQ ID NO: 24250 - protein, 14 aa, Homo sapiens
  Heavy chain CDR3 for antibody 12125 (IGHV3-20)
ARDGGSSSFDWFDP

SEQ ID NO: 24251 - protein, 9 aa, Homo sapiens
  Light chain CDR3 for antibody 12126 (IGKV1-9)
QQLISYPLT

SEQ ID NO: 24252 - protein, 16 aa, Homo sapiens
  Heavy chain CDR3 for antibody 12126 (IGHV1-8)
AREGTMVRGVTYALDI

SEQ ID NO: 24253 - protein, 9 aa, Homo sapiens
  Light chain CDR3 for antibody 12127 (IGKV3-15)
QQYNNWPRT

SEQ ID NO: 24254 - protein, 17 aa, Homo sapiens
  Heavy chain CDR3 for antibody 12127 (IGHV3-23)
AKDRPVTTLYYYFGMDV

SEQ ID NO: 24255 - protein, 9 aa, Homo sapiens
  Light chain CDR3 for antibody 12128 (IGKV4-1)
QQYYTTPPT

SEQ ID NO: 24256 - protein, 9 aa, Homo sapiens
  Heavy chain CDR3 for antibody 12128 (IGHV3-13)
ARDHWYFDL

SEQ ID NO: 24257 - protein, 9 aa, Homo sapiens
  Light chain CDR3 for antibody 12129 (IGKV1-6)
LQDFHYPWT

SEQ ID NO: 24258 - protein, 17 aa, Homo sapiens
  Heavy chain CDR3 for antibody 12129 (IGHV4-39)
ARQGWYYGSGSSLLFDY

SEQ ID NO: 24259 - protein, 9 aa, Homo sapiens
  Light chain CDR3 for antibody 12130 (IGKV1D-13)
QQFNNYPHT

SEQ ID NO: 24260 - protein, 10 aa, Homo sapiens
  Heavy chain CDR3 for antibody 12130 (IGHV3-23)
AKSGSYSFDY

SEQ ID NO: 24261 - protein, 10 aa, Homo sapiens
  Light chain CDR3 for antibody 12131 (IGKV1-6)
LQDYNYPMYT

SEQ ID NO: 24262 - protein, 15 aa, Homo sapiens
  Heavy chain CDR3 for antibody 12131 (IGHV3-23)
AKDGGWNYYYYGMDV

SEQ ID NO: 24263 - protein, 9 aa, Homo sapiens
  Light chain CDR3 for antibody 12132 (IGKV1D-13)
QRFNNYLYT

SEQ ID NO: 24264 - protein, 14 aa, Homo sapiens
  Heavy chain CDR3 for antibody 12132 (IGHV3-33)
ARGGYSGYRYYFDY

SEQ ID NO: 24265 - protein, 9 aa, Homo sapiens
  Light chain CDR3 for antibody 12133 (IGKV6-21)
HQRSSSPHT

SEQ ID NO: 24266 - protein, 18 aa, Homo sapiens
  Heavy chain CDR3 for antibody 12133 (IGHV1-46)
ARDGDYVWGSYRSDWFDP

SEQ ID NO: 24267 - protein, 9 aa, Homo sapiens
  Light chain CDR3 for antibody 12134 (IGKV1-6)
LQGYSYPFT

SEQ ID NO: 24268 - protein, 13 aa, Homo sapiens
  Heavy chain CDR3 for antibody 12134 (IGHV3-11)
ARDGGAAAGTWDS

SEQ ID NO: 24269 - protein, 9 aa, Homo sapiens
  Light chain CDR3 for antibody 12135 (IGKV2D-28)
MQALQTPPT

SEQ ID NO: 24270 - protein, 18 aa, Homo sapiens
  Heavy chain CDR3 for antibody 12135 (IGHV3-33)
ARGGVLYDILTGFYGMDV

SEQ ID NO: 24271 - protein, 9 aa, Homo sapiens
  Light chain CDR3 for antibody 12136 (IGKV3-20)
QQYGSSPRT

SEQ ID NO: 24272 - protein, 15 aa, Homo sapiens
  Heavy chain CDR3 for antibody 12136 (IGHV3-33)
ARERYSSAWSSGMDV

SEQ ID NO: 24273 - protein, 11 aa, Homo sapiens
  Light chain CDR3 for antibody 12137 (IGKV3-11)
QQRSNWPPMYT

SEQ ID NO: 24274 - protein, 9 aa, Homo sapiens
  Heavy chain CDR3 for antibody 12137 (IGHV4-59)
AGGSWDFDY

SEQ ID NO: 24275 - protein, 8 aa, Homo sapiens
  Light chain CDR3 for antibody 12138 (IGKV3-11)
QQRSNWLT

SEQ ID NO: 24276 - protein, 11 aa, Homo sapiens
  Heavy chain CDR3 for antibody 12138 (IGHV4-59)
ARSLRYSFFDY

SEQ ID NO: 24277 - protein, 9 aa, Homo sapiens
  Light chain CDR3 for antibody 12139 (IGKV1-37)
QRTYNAPYT

SEQ ID NO: 24278 - protein, 13 aa, Homo sapiens
  Heavy chain CDR3 for antibody 12139 (IGHV3-11)
ARDGGAAAGTWDS

SEQ ID NO: 24279 - protein, 9 aa, Homo sapiens
  Light chain CDR3 for antibody 12140 (IGKV1-16)
QQYNSYPYT

SEQ ID NO: 24280 - protein, 18 aa, Homo sapiens
  Heavy chain CDR3 for antibody 12140 (IGHV1-46)
SRAGHYVWGSYRSDWFDP

SEQ ID NO: 24281 - protein, 8 aa, Homo sapiens
  Light chain CDR3 for antibody 12141 (IGKV3-15)
QQYNNWPT

SEQ ID NO: 24282 - protein, 12 aa, Homo sapiens
  Heavy chain CDR3 for antibody 12141 (IGHV3-33)
VRDRAAAPYFDL

SEQ ID NO: 24283 - protein, 11 aa, Homo sapiens
  Light chain CDR3 for antibody 12142 (IGKV3-11)
QQRSNWPSMYT

SEQ ID NO: 24284 - protein, 13 aa, Homo sapiens
  Heavy chain CDR3 for antibody 12142 (IGHV4-34)
ASNFYYYYYGMDV

SEQ ID NO: 24285 - protein, 9 aa, Homo sapiens
  Light chain CDR3 for antibody 12143 (IGKV5-2)
LQHDNFPWT

SEQ ID NO: 24286 - protein, 15 aa, Homo sapiens
  Heavy chain CDR3 for antibody 12143 (IGHV3-33)
ARRGGIAAAGYYFDY

SEQ ID NO: 24287 - protein, 9 aa, Homo sapiens
  Light chain CDR3 for antibody 12144 (IGKV3-15)
QQYNNWPRT

SEQ ID NO: 24288 - protein, 14 aa, Homo sapiens
  Heavy chain CDR3 for antibody 12144 (IGHV1-46)
ARAYYAFLTGALDI

SEQ ID NO: 24289 - protein, 9 aa, Homo sapiens
  Light chain CDR3 for antibody 12145 (IGKV1-33)
QQYDNLPFT

SEQ ID NO: 24290 - protein, 6 aa, Homo sapiens
  Heavy chain CDR3 for antibody 12145 (IGHV1-8)
AREGTY

SEQ ID NO: 24291 - protein, 9 aa, Homo sapiens
  Light chain CDR3 for antibody 12146 (IGKV1-17)
PQHNSYPYT

SEQ ID NO: 24292 - protein, 10 aa, Homo sapiens
  Heavy chain CDR3 for antibody 12146 (IGHV1-18)
ASSNWNDGPL

SEQ ID NO: 24293 - protein, 9 aa, Homo sapiens
  Light chain CDR3 for antibody 12147 (IGKV1D-16)
QQYYSYPRT

SEQ ID NO: 24294 - protein, 9 aa, Homo sapiens
  Heavy chain CDR3 for antibody 12147 (IGHV3-30)
ARDYFHFDY

SEQ ID NO: 24295 - protein, 9 aa, Homo sapiens
  Light chain CDR3 for antibody 12148 (IGKV1D-13)
QQFNNYPYT

SEQ ID NO: 24296 - protein, 22 aa, Homo sapiens
  Heavy chain CDR3 for antibody 12148 (IGHV3-11)
AREAYYDILTGYYTGYYYGMDV

SEQ ID NO: 24297 - protein, 10 aa, Homo sapiens
  Light chain CDR3 for antibody 12149 (IGKV1-39)
QQSYSTPMYT

SEQ ID NO: 24298 - protein, 12 aa, Homo sapiens
  Heavy chain CDR3 for antibody 12149 (IGHV3-33)
ARDSSGWSHFDY

SEQ ID NO: 24299 - protein, 9 aa, Homo sapiens
  Light chain CDR3 for antibody 12150 (IGKV3D-7)
QQDYNLPYT

SEQ ID NO: 24300 - protein, 10 aa, Homo sapiens
  Heavy chain CDR3 for antibody 12150 (IGHV3-30)
ARDGLESFDY

SEQ ID NO: 24301 - protein, 9 aa, Homo sapiens
  Light chain CDR3 for antibody 12151 (IGKV4-1)
QQYYSTPPT

SEQ ID NO: 24302 - protein, 17 aa, Homo sapiens
  Heavy chain CDR3 for antibody 12151 (IGHV3-33)
ARGEQWLGYYYYYGMDV

SEQ ID NO: 24303 - protein, 9 aa, Homo sapiens
  Light chain CDR3 for antibody 12152 (IGKV1D-16)
QQYNSYPYT

SEQ ID NO: 24304 - protein, 13 aa, Homo sapiens
  Heavy chain CDR3 for antibody 12152 (IGHV4-39)
ARRDGSYYGYFGY

SEQ ID NO: 24305 - protein, 9 aa, Homo sapiens
  Light chain CDR3 for antibody 12153 (IGKV3D-20)
QQYGYSPRT

SEQ ID NO: 24306 - protein, 16 aa, Homo sapiens
  Heavy chain CDR3 for antibody 12153 (IGHV3-33)
AKDAFYYGSGSHLFDY

SEQ ID NO: 24307 - protein, 9 aa, Homo sapiens
  Light chain CDR3 for antibody 12154 (IGKV1-9)
QQLHIYPWT

SEQ ID NO: 24308 - protein, 12 aa, Homo sapiens
  Heavy chain CDR3 for antibody 12154 (IGHV3-33)
ARESGGSYSFDY

SEQ ID NO: 24309 - protein, 9 aa, Homo sapiens
  Light chain CDR3 for antibody 12155 (IGKV1D-16)
QQYDSYPWT

SEQ ID NO: 24310 - protein, 14 aa, Homo sapiens
  Heavy chain CDR3 for antibody 12155 (IGHV4-39)
ARRGVLVPPGGMDV

SEQ ID NO: 24311 - protein, 9 aa, Homo sapiens
  Light chain CDR3 for antibody 12156 (IGKV1-6)
LQDYNYPRT

SEQ ID NO: 24312 - protein, 16 aa, Homo sapiens
  Heavy chain CDR3 for antibody 12156 (IGHV3-23)
AKEGIVLRYFDWFWDY

SEQ ID NO: 24313 - protein, 9 aa, Homo sapiens
  Light chain CDR3 for antibody 12157 (IGKV2D-24)
TQATQFPHT

SEQ ID NO: 24314 - protein, 18 aa, Homo sapiens
  Heavy chain CDR3 for antibody 12157 (IGHV3-33)
ARGYYGSGNFYKDSGMDV

SEQ ID NO: 24315 - protein, 9 aa, Homo sapiens
  Light chain CDR3 for antibody 12158 (IGKV3D-20)
QQYGYSPLT

SEQ ID NO: 24316 - protein, 22 aa, Homo sapiens
  Heavy chain CDR3 for antibody 12158 (IGHV3-23)
AKDDLPYYDILTHSTTTGGMDV

SEQ ID NO: 24317 - protein, 9 aa, Homo sapiens
  Light chain CDR3 for antibody 12159 (IGKV1-6)
QQYDSYPWT

SEQ ID NO: 24318 - protein, 16 aa, Homo sapiens
  Heavy chain CDR3 for antibody 12159 (IGHV3-23)
AKEGMVLRYFDWLWDY

SEQ ID NO: 24319 - protein, 9 aa, Homo sapiens
  Light chain CDR3 for antibody 12160 (IGKV2-30)
MQGTHWPLT

SEQ ID NO: 24320 - protein, 19 aa, Homo sapiens
  Heavy chain CDR3 for antibody 12160 (IGHV3-20)
ARDSAVAGRYYYYYYGMDV

SEQ ID NO: 24321 - protein, 9 aa, Homo sapiens
  Light chain CDR3 for antibody 12161 (IGKV1-39)
QQGFSTPWT

SEQ ID NO: 24322 - protein, 16 aa, Homo sapiens
  Heavy chain CDR3 for antibody 12161 (IGHV4-59)
ARDTPYYSGSGRPFDS

SEQ ID NO: 24323 - protein, 9 aa, Homo sapiens
  Light chain CDR3 for antibody 12162 (IGKV1-17)
LHSNNYPWT

SEQ ID NO: 24324 - protein, 11 aa, Homo sapiens
  Heavy chain CDR3 for antibody 12162 (IGHV3-33)
ARDKSSGWSDY

SEQ ID NO: 24325 - protein, 9 aa, Homo sapiens
  Light chain CDR3 for antibody 12163 (IGKV1-6)
QHYNDYPFT

SEQ ID NO: 24326 - protein, 20 aa, Homo sapiens
  Heavy chain CDR3 for antibody 12163 (IGHV1-f)
ATGLITFVRGVILTYRSFDY

SEQ ID NO: 24327 - protein, 9 aa, Homo sapiens
  Light chain CDR3 for antibody 12164 (IGKV1-16)
QHYNDYPFT

SEQ ID NO: 24328 - protein, 13 aa, Homo sapiens
  Heavy chain CDR3 for antibody 12164 (IGHV3-23)
ASPFNWNDGFFDY

SEQ ID NO: 24329 - protein, 9 aa, Homo sapiens
  Light chain CDR3 for antibody 12165 (IGKV5-2)
LQHDNFPYT

SEQ ID NO: 24330 - protein, 19 aa, Homo sapiens
  Heavy chain CDR3 for antibody 12165 (IGHV3-20)
ARDSAVAGRYYYYYYGMDV

SEQ ID NO: 24331 - protein, 9 aa, Homo sapiens
  Light chain CDR3 for antibody 12166 (IGKV1-16)
QQYNSYPYT

SEQ ID NO: 24332 - protein, 23 aa, Homo sapiens
  Heavy chain CDR3 for antibody 12166 (IGHV3-30)
ARDGDYFGSGSQRDYHYYYGLDV

SEQ ID NO: 24333 - protein, 10 aa, Homo sapiens
  Light chain CDR3 for antibody 12167 (IGKV3-11)
QQRSNWPIFT

SEQ ID NO: 24334 - protein, 14 aa, Homo sapiens
  Heavy chain CDR3 for antibody 12167 (IGHV3-33)
VSAISGSSYWYFAL

SEQ ID NO: 24335 - protein, 9 aa, Homo sapiens
  Light chain CDR3 for antibody 12168 (IGKV1D-16)
QQYNSYPRT

SEQ ID NO: 24336 - protein, 17 aa, Homo sapiens
  Heavy chain CDR3 for antibody 12168 (IGHV3-33)
AREKGLGIDYYYYGMDV

SEQ ID NO: 24337 - protein, 8 aa, Homo sapiens
  Light chain CDR3 for antibody 12169 (IGKV3-20)
QQYGSSRT

SEQ ID NO: 24338 - protein, 15 aa, Homo sapiens
  Heavy chain CDR3 for antibody 12169 (IGHV4-59)
ARDGHGNWGSGTFDY

SEQ ID NO: 24339 - protein, 9 aa, Homo sapiens
  Light chain CDR3 for antibody 12170 (IGKV3-15)
QQYHNWPLT

SEQ ID NO: 24340 - protein, 18 aa, Homo sapiens
  Heavy chain CDR3 for antibody 12170 (IGHV3-23)
ARYHLYFGSGFGSDGMDV

SEQ ID NO: 24341 - protein, 9 aa, Homo sapiens
  Light chain CDR3 for antibody 12171 (IGKV1-9)
QQLKSYLYT

SEQ ID NO: 24342 - protein, 15 aa, Homo sapiens
  Heavy chain CDR3 for antibody 12171 (IGHV4-59)
ARDLCHYYGSVSIDY

SEQ ID NO: 24343 - protein, 8 aa, Homo sapiens
  Light chain CDR3 for antibody 12172 (IGKV1-5)
QQYNSYWT

SEQ ID NO: 24344 - protein, 13 aa, Homo sapiens
  Heavy chain CDR3 for antibody 12172 (IGHV3-33)
ARALYSSSWPGDY

SEQ ID NO: 24345 - protein, 9 aa, Homo sapiens
  Light chain CDR3 for antibody 12173 (IGKV1-33)
QQYDNLPFT

SEQ ID NO: 24346 - protein, 12 aa, Homo sapiens
  Heavy chain CDR3 for antibody 12173 (IGHV4-59)
ARDSGSYYYFDY

SEQ ID NO: 24347 - protein, 9 aa, Homo sapiens
  Light chain CDR3 for antibody 12174 (IGKV3D-7)
QQDYNLPYT

SEQ ID NO: 24348 - protein, 12 aa, Homo sapiens
  Heavy chain CDR3 for antibody 12174 (IGHV3-33)
AREEAVAEAFDI

SEQ ID NO: 24349 - protein, 9 aa, Homo sapiens
  Light chain CDR3 for antibody 12175 (IGKV1-6)
LQDYKSPFT

SEQ ID NO: 24350 - protein, 15 aa, Homo sapiens
  Heavy chain CDR3 for antibody 12175 (IGHV3-33)
VCVLYDYGDYVGFDY

SEQ ID NO: 24351 - protein, 10 aa, Homo sapiens
  Light chain CDR3 for antibody 12176 (IGKV3-11)
QQRSNWPIFT

SEQ ID NO: 24352 - protein, 20 aa, Homo sapiens
  Heavy chain CDR3 for antibody 12176 (IGHV3-33)
AREDYYGSGSYYPAYNWFDP

SEQ ID NO: 24353 - protein, 10 aa, Homo sapiens
  Light chain CDR3 for antibody 12177 (IGKV1-39)
QQSYSTPMYT

SEQ ID NO: 24354 - protein, 12 aa, Homo sapiens
  Heavy chain CDR3 for antibody 12177 (IGHV3-33)
AKEGIVGVPFDY

SEQ ID NO: 24355 - protein, 9 aa, Homo sapiens
  Light chain CDR3 for antibody 12178 (IGKV1-33)
QQYDNLPFT

SEQ ID NO: 24356 - protein, 21 aa, Homo sapiens
  Heavy chain CDR3 for antibody 12178 (IGHV3-33)
ARDEYYEIVTGYGYYHYGMDV

SEQ ID NO: 24357 - protein, 9 aa, Homo sapiens
  Light chain CDR3 for antibody 12179 (IGKV1-9)
QQYYTYPYT

SEQ ID NO: 24358 - protein, 16 aa, Homo sapiens
  Heavy chain CDR3 for antibody 12179 (IGHV3-33)
ARGYDMLTGDYYGMDV

SEQ ID NO: 24359 - protein, 9 aa, Homo sapiens
  Light chain CDR3 for antibody 12180 (IGKV3-11)
QQRINWPWT

SEQ ID NO: 24360 - protein, 14 aa, Homo sapiens
  Heavy chain CDR3 for antibody 12180 (IGHV4-59)
ARDSGYDYYYGMDV

SEQ ID NO: 24361 - protein, 9 aa, Homo sapiens
  Light chain CDR3 for antibody 12181 (IGKV3-11)
QQRSNWPPT

SEQ ID NO: 24362 - protein, 18 aa, Homo sapiens
  Heavy chain CDR3 for antibody 12181 (IGHV3-33)
VREGGYYGSGSYPDAFDI

SEQ ID NO: 24363 - protein, 9 aa, Homo sapiens
  Light chain CDR3 for antibody 12182 (IGKV1-9)
QQLNSYPFT

SEQ ID NO: 24364 - protein, 18 aa, Homo sapiens
  Heavy chain CDR3 for antibody 12182 (IGHV1-46)
ARDLTGRTENYYYYGMDV

SEQ ID NO: 24365 - protein, 9 aa, Homo sapiens
  Light chain CDR3 for antibody 12183 (IGKV3-20)
QQCDSSIFT

SEQ ID NO: 24366 - protein, 11 aa, Homo sapiens
  Heavy chain CDR3 for antibody 12183 (IGHV3-33)
AREAANWGFDY

SEQ ID NO: 24367 - protein, 9 aa, Homo sapiens
  Light chain CDR3 for antibody 12184 (IGKV3-20)
QQFGRSPRT

SEQ ID NO: 24368 - protein, 20 aa, Homo sapiens
  Heavy chain CDR3 for antibody 12184 (IGHV1-18)
AREVGIAVAGTLYYYYGMDV

SEQ ID NO: 24369 - protein, 9 aa, Homo sapiens
  Light chain CDR3 for antibody 12185 (IGKV5-2)
LQHDNFPWT

SEQ ID NO: 24370 - protein, 13 aa, Homo sapiens
  Heavy chain CDR3 for antibody 12185 (IGHV3-33)
VRRIAVAGTEGDC

SEQ ID NO: 24371 - protein, 9 aa, Homo sapiens
  Light chain CDR3 for antibody 12186 (IGKV1D-16)
QQYDSYPPT

SEQ ID NO: 24372 - protein, 16 aa, Homo sapiens
  Heavy chain CDR3 for antibody 12186 (IGHV3-11)
ARDSELRYFDWFGMDV

SEQ ID NO: 24373 - protein, 9 aa, Homo sapiens
  Light chain CDR3 for antibody 12187 (IGKV6-21)
HQSSSLPHT

SEQ ID NO: 24374 - protein, 16 aa, Homo sapiens
  Heavy chain CDR3 for antibody 12187 (IGHV4-61)
ARDPRYSSGWYWYFDL

SEQ ID NO: 24375 - protein, 10 aa, Homo sapiens
  Light chain CDR3 for antibody 12188 (IGKV3-11)
QQRSNWPIFT

SEQ ID NO: 24376 - protein, 13 aa, Homo sapiens
  Heavy chain CDR3 for antibody 12188 (IGHV1-46)
ARVKLGSLGAFDI

SEQ ID NO: 24377 - protein, 9 aa, Homo sapiens
  Light chain CDR3 for antibody 12189 (IGKV1D-16)
QQYHSYPYT

SEQ ID NO: 24378 - protein, 12 aa, Homo sapiens
  Heavy chain CDR3 for antibody 12189 (IGHV1-46)
ATGLTGHHALDI

SEQ ID NO: 24379 - protein, 8 aa, Homo sapiens
  Light chain CDR3 for antibody 12190 (IGKV6-21)
HQSSSLPT

SEQ ID NO: 24380 - protein, 9 aa, Homo sapiens
  Heavy chain CDR3 for antibody 12190 (IGHV3-33)
AREYKEFDY

SEQ ID NO: 24381 - protein, 9 aa, Homo sapiens
  Light chain CDR3 for antibody 12191 (IGKV1-9)
QQLTSFPRT

SEQ ID NO: 24382 - protein, 15 aa, Homo sapiens
  Heavy chain CDR3 for antibody 12191 (IGHV3-33)
ARDHLTGYYYYGMDV

SEQ ID NO: 24383 - protein, 9 aa, Homo sapiens
  Light chain CDR3 for antibody 12192 (IGKV1-16)
QQEYNYPLT

SEQ ID NO: 24384 - protein, 18 aa, Homo sapiens
  Heavy chain CDR3 for antibody 12192 (IGHV1-18)
ARDPNYYGSGSYYNYFDY

SEQ ID NO: 24385 - protein, 9 aa, Homo sapiens
  Light chain CDR3 for antibody 12193 (IGKV1-33)
QQYDNLPFT

SEQ ID NO: 24386 - protein, 14 aa, Homo sapiens
  Heavy chain CDR3 for antibody 12193 (IGHV3-33)
ARDGYDFLTGPFDY

SEQ ID NO: 24387 - protein, 9 aa, Homo sapiens
  Light chain CDR3 for antibody 12194 (IGKV5-2)
LQHDNFPYT

SEQ ID NO: 24388 - protein, 12 aa, Homo sapiens
  Heavy chain CDR3 for antibody 12194 (IGHV3-33)
ARERGIGRYFDL

SEQ ID NO: 24389 - protein, 9 aa, Homo sapiens
  Light chain CDR3 for antibody 12195 (IGKV1-27)
QQFNNYMYT

SEQ ID NO: 24390 - protein, 13 aa, Homo sapiens
  Heavy chain CDR3 for antibody 12195 (IGHV3-23)
APPFNWNDGFFDY

SEQ ID NO: 24391 - protein, 9 aa, Homo sapiens
  Light chain CDR3 for antibody 12196 (IGKV1D-13)
QHFNNYMYT

SEQ ID NO: 24392 - protein, 17 aa, Homo sapiens
  Heavy chain CDR3 for antibody 12196 (IGHV3-23)
AKEYCSGGSCYVYYFDY

SEQ ID NO: 24393 - protein, 9 aa, Homo sapiens
  Light chain CDR3 for antibody 12197 (IGKV1-9)
QQLNTYPWT

SEQ ID NO: 24394 - protein, 13 aa, Homo sapiens
  Heavy chain CDR3 for antibody 12197 (IGHV3-33)
ASGYSGYDWYFDL

SEQ ID NO: 24395 - protein, 9 aa, Homo sapiens
  Light chain CDR3 for antibody 12198 (IGKV1-6)
LQDYNYPRT

SEQ ID NO: 24396 - protein, 12 aa, Homo sapiens
  Heavy chain CDR3 for antibody 12198 (IGHV1-46)
ARCLIGDHAVEI

SEQ ID NO: 24397 - protein, 11 aa, Homo sapiens
  Light chain CDR3 for antibody 12199 (IGKV5-2)
QQRSNWPPTWT

SEQ ID NO: 24398 - protein, 14 aa, Homo sapiens
  Heavy chain CDR3 for antibody 12199 (IGHV1-46)
ARDGVGAKEGGFDY

SEQ ID NO: 24399 - protein, 9 aa, Homo sapiens
  Light chain CDR3 for antibody 12200 (IGKV3D-7)
QQDYNLPYT

SEQ ID NO: 24400 - protein, 12 aa, Homo sapiens
  Heavy chain CDR3 for antibody 12200 (IGHV3-33)
ARVDAAAPYFDY

SEQ ID NO: 24401 - protein, 8 aa, Homo sapiens
  Light chain CDR3 for antibody 12201 (IGKV3-15)
QQYNNWPT

SEQ ID NO: 24402 - protein, 11 aa, Homo sapiens
  Heavy chain CDR3 for antibody 12201 (IGHV4-59)
ARDGSWEPFDY

SEQ ID NO: 24403 - protein, 9 aa, Homo sapiens
  Light chain CDR3 for antibody 12202 (IGKV1-9)
QQYHSYPYT

SEQ ID NO: 24404 - protein, 17 aa, Homo sapiens
  Heavy chain CDR3 for antibody 12202 (IGHV3-33)
ARESLKLGIYYYYGMDV

SEQ ID NO: 24405 - protein, 9 aa, Homo sapiens
  Light chain CDR3 for antibody 12203 (IGKV1-9)
QQLNSYPWP

SEQ ID NO: 24406 - protein, 14 aa, Homo sapiens
  Heavy chain CDR3 for antibody 12203 (IGHV3-33)
ARGGYSGYRYYFDY

SEQ ID NO: 24407 - protein, 9 aa, Homo sapiens
  Light chain CDR3 for antibody 12204 (IGKV1-6)
LQDYKSPFT

SEQ ID NO: 24408 - protein, 19 aa, Homo sapiens
  Heavy chain CDR3 for antibody 12204 (IGHV1-18)
ARDDILTGYSLYYYYGMDV

SEQ ID NO: 24409 - protein, 10 aa, Homo sapiens
  Light chain CDR3 for antibody 12205 (IGKV1-17)
LQHNSYPMYT

SEQ ID NO: 24410 - protein, 8 aa, Homo sapiens
  Heavy chain CDR3 for antibody 12205 (IGHV3-23)
AKESLLDY

SEQ ID NO: 24411 - protein, 9 aa, Homo sapiens
  Light chain CDR3 for antibody 12206 (IGKV1-9)
QQLNSYPYT

SEQ ID NO: 24412 - protein, 14 aa, Homo sapiens
  Heavy chain CDR3 for antibody 12206 (IGHV3-33)
ARQYSYGYPYYLDY

SEQ ID NO: 24413 - protein, 11 aa, Homo sapiens
  Light chain CDR3 for antibody 12207 (IGKV3-11)
QQRSNWPPTWT

SEQ ID NO: 24414 - protein, 18 aa, Homo sapiens
  Heavy chain CDR3 for antibody 12207 (IGHV3-33)
ARGGVLYDILTGFYGMDV

SEQ ID NO: 24415 - protein, 9 aa, Homo sapiens
  Light chain CDR3 for antibody 12208 (IGKV3-20)
QQYGSSPYT

SEQ ID NO: 24416 - protein, 16 aa, Homo sapiens
  Heavy chain CDR3 for antibody 12208 (IGHV3-33)
ARGRYFDWLLGDWFDP

SEQ ID NO: 24417 - protein, 9 aa, Homo sapiens
  Light chain CDR3 for antibody 12209 (IGKV1-17)
LQHYSYPRT

SEQ ID NO: 24418 - protein, 16 aa, Homo sapiens
  Heavy chain CDR3 for antibody 12209 (IGHV3-33)
VRDGSMVRRIHDAFDF

SEQ ID NO: 24419 - protein, 9 aa, Homo sapiens
  Light chain CDR3 for antibody 12210 (IGKV1-16)
QQYIRYPYT

SEQ ID NO: 24420 - protein, 14 aa, Homo sapiens
  Heavy chain CDR3 for antibody 12210 (IGHV1-46)
ARKGIVGAFDAFDI

SEQ ID NO: 24421 - protein, 9 aa, Homo sapiens
  Light chain CDR3 for antibody 12211 (IGKV6-21)
HQSSSLPYT

SEQ ID NO: 24422 - protein, 17 aa, Homo sapiens
  Heavy chain CDR3 for antibody 12211 (IGHV4-34)
ARDGSGSYTHYYYGMDV

SEQ ID NO: 24423 - protein, 9 aa, Homo sapiens
  Light chain CDR3 for antibody 12212 (IGKV1D-13)
QHFNNYMYT

SEQ ID NO: 24424 - protein, 18 aa, Homo sapiens
  Heavy chain CDR3 for antibody 12212 (IGHV3-33)
ARDYDSLTTYPEDYGMDV

SEQ ID NO: 24425 - protein, 9 aa, Homo sapiens
  Light chain CDR3 for antibody 12213 (IGKV1-33)
QQYDNLPFT

SEQ ID NO: 24426 - protein, 13 aa, Homo sapiens
  Heavy chain CDR3 for antibody 12213 (IGHV3-33)
ARVDTMVRGVMAY

SEQ ID NO: 24427 - protein, 10 aa, Homo sapiens
  Light chain CDR3 for antibody 12214 (IGKV1-39)
QQSYSTPMYT

SEQ ID NO: 24428 - protein, 13 aa, Homo sapiens
  Heavy chain CDR3 for antibody 12214 (IGHV3-23)
AKDRGYSSTSTAY

SEQ ID NO: 24429 - protein, 9 aa, Homo sapiens
  Light chain CDR3 for antibody 12215 (IGKV1-16)
QHYNDYPFT

SEQ ID NO: 24430 - protein, 14 aa, Homo sapiens
  Heavy chain CDR3 for antibody 12215 (IGHV3-33)
VRDARGATTAWFDP

SEQ ID NO: 24431 - protein, 10 aa, Homo sapiens
  Light chain CDR3 for antibody 12216 (IGKV3-20)
QQYGSSPPYT

SEQ ID NO: 24432 - protein, 19 aa, Homo sapiens
  Heavy chain CDR3 for antibody 12216 (IGHV1-18)
ARDDILTGYSLYYYYGMDV

SEQ ID NO: 24433 - protein, 10 aa, Homo sapiens
  Light chain CDR3 for antibody 12217 (IGKV3-11)
QQRSNWPIFT

SEQ ID NO: 24434 - protein, 11 aa, Homo sapiens
  Heavy chain CDR3 for antibody 12217 (IGHV4-59)
AREDYGVPFDY

SEQ ID NO: 24435 - protein, 9 aa, Homo sapiens
  Light chain CDR3 for antibody 12218 (IGKV1-17)
LQHNGYPLT

SEQ ID NO: 24436 - protein, 14 aa, Homo sapiens
  Heavy chain CDR3 for antibody 12218 (IGHV3-23)
AKSRIVGALYYFGY

SEQ ID NO: 24437 - protein, 8 aa, Homo sapiens
  Light chain CDR3 for antibody 12219 (IGKV3-20)
QQYGRSFT

SEQ ID NO: 24438 - protein, 11 aa, Homo sapiens
  Heavy chain CDR3 for antibody 12219 (IGHV4-59)
VRERGYYGMDV

SEQ ID NO: 24439 - protein, 8 aa, Homo sapiens
  Light chain CDR3 for antibody 12220 (IGKV1-5)
QQYNSYWT

SEQ ID NO: 24440 - protein, 10 aa, Homo sapiens
  Heavy chain CDR3 for antibody 12220 (IGHV3-30)
AREWYGGMDV

SEQ ID NO: 24441 - protein, 9 aa, Homo sapiens
  Light chain CDR3 for antibody 12221 (IGKV3D-20)
QQHGNSPLT

SEQ ID NO: 24442 - protein, 14 aa, Homo sapiens
  Heavy chain CDR3 for antibody 12221 (IGHV4-39)
ARQDYDILTGLFDY

SEQ ID NO: 24443 - protein, 8 aa, Homo sapiens
  Light chain CDR3 for antibody 12222 (IGKV6-21)
HQSSSLHT

SEQ ID NO: 24444 - protein, 12 aa, Homo sapiens
  Heavy chain CDR3 for antibody 12222 (IGHV3-33)
ARDIVATNYFDY

SEQ ID NO: 24445 - protein, 9 aa, Homo sapiens
  Light chain CDR3 for antibody 12223 (IGKV4-1)
QQYYSTPPT

SEQ ID NO: 24446 - protein, 12 aa, Homo sapiens
  Heavy chain CDR3 for antibody 12223 (IGHV3-33)
ARVDAAAPYFDY

SEQ ID NO: 24447 - protein, 9 aa, Homo sapiens
  Light chain CDR3 for antibody 12224 (IGKV5-2)
LQHDNFPYT

SEQ ID NO: 24448 - protein, 19 aa, Homo sapiens
  Heavy chain CDR3 for antibody 12224 (IGHV3-33)
ARGGVVRGVIEYYYYGMDV

SEQ ID NO: 24449 - protein, 6 aa, Homo sapiens
  Light chain CDR3 for antibody 12225 (IGKV3-20)
QQYGST

SEQ ID NO: 24450 - protein, 13 aa, Homo sapiens
  Heavy chain CDR3 for antibody 12225 (IGHV3-33)
ASTGDSYYYDMDV

SEQ ID NO: 24451 - protein, 9 aa, Homo sapiens
  Light chain CDR3 for antibody 12226 (IGKV1D-16)
QQYAGYPPT

SEQ ID NO: 24452 - protein, 11 aa, Homo sapiens
  Heavy chain CDR3 for antibody 12226 (IGHV4-59)
AREMGHDTFDI

SEQ ID NO: 24453 - protein, 10 aa, Homo sapiens
  Light chain CDR3 for antibody 12227 (IGKV1-39)
QQSYSTPMYT

SEQ ID NO: 24454 - protein, 24 aa, Homo sapiens
  Heavy chain CDR3 for antibody 12227 (IGHV3-20)
ARGRITMVRGVIINPLDYYNGMDV

SEQ ID NO: 24455 - protein, 10 aa, Homo sapiens
  Light chain CDR3 for antibody 12228 (IGKV1-6)
LQDYNYPMYT

SEQ ID NO: 24456 - protein, 18 aa, Homo sapiens
  Heavy chain CDR3 for antibody 12228 (IGHV4-59)
AREGDYVWGSYRPNWFDP

SEQ ID NO: 24457 - protein, 9 aa, Homo sapiens
  Light chain CDR3 for antibody 12229 (IGKV1-9)
QQLKSYPYT

SEQ ID NO: 24458 - protein, 10 aa, Homo sapiens
  Heavy chain CDR3 for antibody 12229 (IGHV3-23)
AKGDQWRFDP

SEQ ID NO: 24459 - protein, 9 aa, Homo sapiens
  Light chain CDR3 for antibody 12230 (IGKV1D-16)
QQYNSFPLT

SEQ ID NO: 24460 - protein, 19 aa, Homo sapiens
  Heavy chain CDR3 for antibody 12230 (IGHV3-33)
ARGARLRYFDPYYYYGMDV

SEQ ID NO: 24461 - protein, 9 aa, Homo sapiens
  Light chain CDR3 for antibody 12231 (IGKV4-1)
QQYYSTPWT

SEQ ID NO: 24462 - protein, 14 aa, Homo sapiens
  Heavy chain CDR3 for antibody 12231 (IGHV3-33)
ARQYSYGYPYYFDY

SEQ ID NO: 24463 - protein, 9 aa, Homo sapiens
  Light chain CDR3 for antibody 12232 (IGKV3D-7)
QQDYTLPLT

SEQ ID NO: 24464 - protein, 17 aa, Homo sapiens
  Heavy chain CDR3 for antibody 12232 (IGHV3-33)
ARDPARGNVRSFYGLDV

SEQ ID NO: 24465 - protein, 9 aa, Homo sapiens
  Light chain CDR3 for antibody 12233 (IGKV1-27)
QKYNSAPYT

SEQ ID NO: 24466 - protein, 15 aa, Homo sapiens
  Heavy chain CDR3 for antibody 12233 (IGHV3-64)
ARGGTGYYSYWYFDL

SEQ ID NO: 24467 - protein, 8 aa, Homo sapiens
  Light chain CDR3 for antibody 12234 (IGKV3-11)
LQRGNWPT

SEQ ID NO: 24468 - protein, 11 aa, Homo sapiens
  Heavy chain CDR3 for antibody 12234 (IGHV3-33)
ARDRVLTPFDY

SEQ ID NO: 24469 - protein, 9 aa, Homo sapiens
  Light chain CDR3 for antibody 12235 (IGKV1-9)
QQLISYPLT

SEQ ID NO: 24470 - protein, 14 aa, Homo sapiens
  Heavy chain CDR3 for antibody 12235 (IGHV3-33)
AKGGGVGAYNWFDP

SEQ ID NO: 24471 - protein, 9 aa, Homo sapiens
  Light chain CDR3 for antibody 12236 (IGKV3-11)
QQRSNWPYT

SEQ ID NO: 24472 - protein, 18 aa, Homo sapiens
  Heavy chain CDR3 for antibody 12236 (IGHV3-33)
ARGYNQGSGSYYNVCFDY

SEQ ID NO: 24473 - protein, 9 aa, Homo sapiens
  Light chain CDR3 for antibody 12237 (IGKV1D-16)
QQYNSYPRT

SEQ ID NO: 24474 - protein, 18 aa, Homo sapiens
  Heavy chain CDR3 for antibody 12237 (IGHV4-59)
AREGHYYTSGSYYKAFDY

SEQ ID NO: 24475 - protein, 9 aa, Homo sapiens
  Light chain CDR3 for antibody 12238 (IGKV3D-7)
QQDYELPIT

SEQ ID NO: 24476 - protein, 10 aa, Homo sapiens
  Heavy chain CDR3 for antibody 12238 (IGHV3-74)
ARENWGGFDY

SEQ ID NO: 24477 - protein, 8 aa, Homo sapiens
  Light chain CDR3 for antibody 12239 (IGKV3-11)
LQRGNWPT

SEQ ID NO: 24478 - protein, 11 aa, Homo sapiens
  Heavy chain CDR3 for antibody 12239 (IGHV4-59)
ARDGVRGVFDI

SEQ ID NO: 24479 - protein, 9 aa, Homo sapiens
  Light chain CDR3 for antibody 12240 (IGKV1D-16)
QQYNIYPFT

SEQ ID NO: 24480 - protein, 18 aa, Homo sapiens
  Heavy chain CDR3 for antibody 12240 (IGHV4-59)
AREGDYVWGSYRSNWFDP

SEQ ID NO: 24481 - protein, 9 aa, Homo sapiens
  Light chain CDR3 for antibody 12241 (IGKV1-39)
QQSYSSPFT

SEQ ID NO: 24482 - protein, 12 aa, Homo sapiens
  Heavy chain CDR3 for antibody 12241 (IGHV3-33)
ARESGGSYSFDY

SEQ ID NO: 24483 - protein, 9 aa, Homo sapiens
  Light chain CDR3 for antibody 12242 (IGKV3-15)
QQYNNWPYT

SEQ ID NO: 24484 - protein, 11 aa, Homo sapiens
  Heavy chain CDR3 for antibody 12242 (IGHV3-13)
ARQAIISPFDY

SEQ ID NO: 24485 - protein, 11 aa, Homo sapiens
  Light chain CDR3 for antibody 12243 (IGKV3-11)
QQRSNWPPMYT

SEQ ID NO: 24486 - protein, 20 aa, Homo sapiens
  Heavy chain CDR3 for antibody 12243 (IGHV1-f)
ATGLITFVRGVILTYRSFDY

SEQ ID NO: 24487 - protein, 9 aa, Homo sapiens
  Light chain CDR3 for antibody 12244 (IGKV1D-13)
QQFNNYPHT

SEQ ID NO: 24488 - protein, 19 aa, Homo sapiens
  Heavy chain CDR3 for antibody 12244 (IGHV3-23)
ARDKYYDILTGYPWNGMDV

SEQ ID NO: 24489 - protein, 10 aa, Homo sapiens
  Light chain CDR3 for antibody 12245 (IGKV3-11)
QQRSNWLMYT

SEQ ID NO: 24490 - protein, 12 aa, Homo sapiens
  Heavy chain CDR3 for antibody 12245 (IGHV3-33)
ARGYFGSGYAHF

SEQ ID NO: 24491 - protein, 9 aa, Homo sapiens
  Light chain CDR3 for antibody 12246 (IGKV1D-13)
QQFNNYPHT

SEQ ID NO: 24492 - protein, 15 aa, Homo sapiens
  Heavy chain CDR3 for antibody 12246 (IGHV3-33)
ARGYYYGSGSYPLDY

SEQ ID NO: 24493 - protein, 9 aa, Homo sapiens
  Light chain CDR3 for antibody 12247 (IGKV1-6)
LQDYNYPYT

SEQ ID NO: 24494 - protein, 14 aa, Homo sapiens
  Heavy chain CDR3 for antibody 12247 (IGHV3-33)
ARDGSGSYPLYFDY

SEQ ID NO: 24495 - protein, 9 aa, Homo sapiens
  Light chain CDR3 for antibody 12248 (IGKV3D-7)
QQDYTLPLT

SEQ ID NO: 24496 - protein, 16 aa, Homo sapiens
  Heavy chain CDR3 for antibody 12248 (IGHV4-39)
ARRVPYYDILTGYLDY

SEQ ID NO: 24497 - protein, 9 aa, Homo sapiens
  Light chain CDR3 for antibody 12249 (IGKV2-30)
MQGTHWPLT

SEQ ID NO: 24498 - protein, 14 aa, Homo sapiens
  Heavy chain CDR3 for antibody 12249 (IGHV3-33)
ARDGYDILTGPMDV

SEQ ID NO: 24499 - protein, 11 aa, Homo sapiens
  Light chain CDR3 for antibody 12250 (IGKV3-11)
QQRSNWPPTWT

SEQ ID NO: 24500 - protein, 17 aa, Homo sapiens
  Heavy chain CDR3 for antibody 12250 (IGHV3-66)
ARVQYDILTGYSPYFDN

SEQ ID NO: 24501 - protein, 8 aa, Homo sapiens
  Light chain CDR3 for antibody 12251 (IGKV1-5)
QQYNSYYT

SEQ ID NO: 24502 - protein, 13 aa, Homo sapiens
  Heavy chain CDR3 for antibody 12251 (IGHV4-59)
ARTMVRGVAPFDY

SEQ ID NO: 24503 - protein, 9 aa, Homo sapiens
  Light chain CDR3 for antibody 12252 (IGKV1-9)
QQLNNYLFT

SEQ ID NO: 24504 - protein, 11 aa, Homo sapiens
  Heavy chain CDR3 for antibody 12252 (IGHV4-59)
ARSLRYSVFDY

SEQ ID NO: 24505 - protein, 9 aa, Homo sapiens
  Light chain CDR3 for antibody 12253 (IGKV1-9)
QQLHSYPYT

SEQ ID NO: 24506 - protein, 15 aa, Homo sapiens
  Heavy chain CDR3 for antibody 12253 (IGHV3-53)
ARDSHHDLLTGHYEY

SEQ ID NO: 24507 - protein, 9 aa, Homo sapiens
  Light chain CDR3 for antibody 12254 (IGKV3-20)
LQYGSSPYT

SEQ ID NO: 24508 - protein, 18 aa, Homo sapiens
  Heavy chain CDR3 for antibody 12254 (IGHV3-23)
AKPDYYGSGSYYNVPFDY

SEQ ID NO: 24509 - protein, 8 aa, Homo sapiens
  Light chain CDR3 for antibody 12255 (IGKV3-20)
QQYGSSFT

SEQ ID NO: 24510 - protein, 9 aa, Homo sapiens
  Heavy chain CDR3 for antibody 12255 (IGHV1-18)
ARGKDWFDP

SEQ ID NO: 24511 - protein, 9 aa, Homo sapiens
  Light chain CDR3 for antibody 12256 (IGKV5-2)
LQHDNFPYT

SEQ ID NO: 24512 - protein, 17 aa, Homo sapiens
  Heavy chain CDR3 for antibody 12256 (IGHV3-23)
AKDRDWNDGQYYFGMDV

SEQ ID NO: 24513 - protein, 8 aa, Homo sapiens
  Light chain CDR3 for antibody 12257 (IGKV1-17)
QQYNSYWT

SEQ ID NO: 24514 - protein, 14 aa, Homo sapiens
  Heavy chain CDR3 for antibody 12257 (IGHV3-33)
ARKGYSGRYYYFDY

SEQ ID NO: 24515 - protein, 9 aa, Homo sapiens
  Light chain CDR3 for antibody 12258 (IGKV3D-20)
QQFGSLPLT

SEQ ID NO: 24516 - protein, 13 aa, Homo sapiens
  Heavy chain CDR3 for antibody 12258 (IGHV4-39)
ARREVVGGRGFDY

SEQ ID NO: 24517 - protein, 9 aa, Homo sapiens
  Light chain CDR3 for antibody 12259 (IGKV1-17)
LQHNSYPYT

SEQ ID NO: 24518 - protein, 14 aa, Homo sapiens
  Heavy chain CDR3 for antibody 12259 (IGHV3-15)
SIYFYGSGRDYFDY

SEQ ID NO: 24519 - protein, 8 aa, Homo sapiens
  Light chain CDR3 for antibody 12260 (IGKV2D-28)
MQALQTPT

SEQ ID NO: 24520 - protein, 17 aa, Homo sapiens
  Heavy chain CDR3 for antibody 12260 (IGHV1-18)
ARDRAFTMVRGVPPFDY

SEQ ID NO: 24521 - protein, 9 aa, Homo sapiens
  Light chain CDR3 for antibody 12261 (IGKV1-9)
QQLNSYPLT

SEQ ID NO: 24522 - protein, 17 aa, Homo sapiens
  Heavy chain CDR3 for antibody 12261 (IGHV4-34)
ARDGSGSYTSYYYGMDV

SEQ ID NO: 24523 - protein, 9 aa, Homo sapiens
  Light chain CDR3 for antibody 12262 (IGKV3-11)
QQRSNWPPT

SEQ ID NO: 24524 - protein, 16 aa, Homo sapiens
  Heavy chain CDR3 for antibody 12262 (IGHV3-33)
ARDQGILTGYYTALDY

SEQ ID NO: 24525 - protein, 9 aa, Homo sapiens
  Light chain CDR3 for antibody 12263 (IGKV2-30)
MQGTHWPLT

SEQ ID NO: 24526 - protein, 17 aa, Homo sapiens
  Heavy chain CDR3 for antibody 12263 (IGHV3-33)
ARGGGYENDHYYYGMDV

SEQ ID NO: 24527 - protein, 9 aa, Homo sapiens
  Light chain CDR3 for antibody 12264 (IGKV6-21)
HQSTSLPFT

SEQ ID NO: 24528 - protein, 12 aa, Homo sapiens
  Heavy chain CDR3 for antibody 12264 (IGHV4-59)
ARDRIGWAYFDY

SEQ ID NO: 24529 - protein, 9 aa, Homo sapiens
  Light chain CDR3 for antibody 12265 (IGKV1-9)
QQLNSYPWP

SEQ ID NO: 24530 - protein, 18 aa, Homo sapiens
  Heavy chain CDR3 for antibody 12265 (IGHV3-33)
ARERGYYGSDIYPAAFDI

SEQ ID NO: 24531 - protein, 9 aa, Homo sapiens
  Light chain CDR3 for antibody 12266 (IGKV1-17)
LQHYSYPRT

SEQ ID NO: 24532 - protein, 11 aa, Homo sapiens
  Heavy chain CDR3 for antibody 12266 (IGHV3-33)
ARAGIAAVFDY

SEQ ID NO: 24533 - protein, 9 aa, Homo sapiens
  Light chain CDR3 for antibody 12267 (IGKV3-20)
QQYGSSPRT

SEQ ID NO: 24534 - protein, 16 aa, Homo sapiens
  Heavy chain CDR3 for antibody 12267 (IGHV1-24)
ATEDISSYYDYYGMDV

SEQ ID NO: 24535 - protein, 11 aa, Homo sapiens
  Light chain CDR3 for antibody 12268 (IGKV3-11)
QQRSNWPPTWT

SEQ ID NO: 24536 - protein, 9 aa, Homo sapiens
  Heavy chain CDR3 for antibody 12268 (IGHV3-33)
ARATVGVDY

SEQ ID NO: 24537 - protein, 9 aa, Homo sapiens
  Light chain CDR3 for antibody 12269 (IGKV5-2)
LQHDNFPYT

SEQ ID NO: 24538 - protein, 13 aa, Homo sapiens
  Heavy chain CDR3 for antibody 12269 (IGHV3-33)
ARTDYYYYYGMDV

SEQ ID NO: 24539 - protein, 8 aa, Homo sapiens
  Light chain CDR3 for antibody 12270 (IGKV1D-13)
QQFNTYPT

SEQ ID NO: 24540 - protein, 9 aa, Homo sapiens
  Heavy chain CDR3 for antibody 12270 (IGHV3-33)
ARATVGVDY

SEQ ID NO: 24541 - protein, 9 aa, Homo sapiens
  Light chain CDR3 for antibody 12271 (IGKV1-9)
QQLISYPLT

SEQ ID NO: 24542 - protein, 18 aa, Homo sapiens
  Heavy chain CDR3 for antibody 12271 (IGHV3-23)
AKEGDYYGSGSYWGYFDP

SEQ ID NO: 24543 - protein, 9 aa, Homo sapiens
  Light chain CDR3 for antibody 12272 (IGKV1-6)
LQDYNYPYT

SEQ ID NO: 24544 - protein, 16 aa, Homo sapiens
  Heavy chain CDR3 for antibody 12272 (IGHV4-59)
ARYSGCCYGDDYGMDV

SEQ ID NO: 24545 - protein, 9 aa, Homo sapiens
  Light chain CDR3 for antibody 12273 (IGKV1-16)
QQYNSYPYT

SEQ ID NO: 24546 - protein, 7 aa, Homo sapiens
  Heavy chain CDR3 for antibody 12273 (IGHV3-33)
ARDLVDY

SEQ ID NO: 24547 - protein, 9 aa, Homo sapiens
  Light chain CDR3 for antibody 12274 (IGKV1-6)
LQDYNYPWT

SEQ ID NO: 24548 - protein, 13 aa, Homo sapiens
  Heavy chain CDR3 for antibody 12274 (IGHV4-39)
AKHEVMIRGVFDY

SEQ ID NO: 24549 - protein, 9 aa, Homo sapiens
  Light chain CDR3 for antibody 12275 (IGKV2-30)
MQGTHWPLT

SEQ ID NO: 24550 - protein, 14 aa, Homo sapiens
  Heavy chain CDR3 for antibody 12275 (IGHV3-33)
ARDAYDILTGYYDY

SEQ ID NO: 24551 - protein, 9 aa, Homo sapiens
  Light chain CDR3 for antibody 12276 (IGKV5-2)
LQHDNFPYT

SEQ ID NO: 24552 - protein, 13 aa, Homo sapiens
  Heavy chain CDR3 for antibody 12276 (IGHV4-59)
ARGYYDIFGWFDP

SEQ ID NO: 24553 - protein, 8 aa, Homo sapiens
  Light chain CDR3 for antibody 12277 (IGKV1D-13)
QQFNNYHT

SEQ ID NO: 24554 - protein, 9 aa, Homo sapiens
  Heavy chain CDR3 for antibody 12277 (IGHV4-59)
AREGGSGSL

SEQ ID NO: 24555 - protein, 9 aa, Homo sapiens
  Light chain CDR3 for antibody 12278 (IGKV1-39)
QQSYSTPLT

SEQ ID NO: 24556 - protein, 16 aa, Homo sapiens
  Heavy chain CDR3 for antibody 12278 (IGHV3-23)
AKDGIGELSYYYGMDV

SEQ ID NO: 24557 - protein, 10 aa, Homo sapiens
  Light chain CDR3 for antibody 12279 (IGKV1-9)
QQLDSYPMYT

SEQ ID NO: 24558 - protein, 16 aa, Homo sapiens
  Heavy chain CDR3 for antibody 12279 (IGHV4-59)
ARGRYFEWLLGDVFDI

SEQ ID NO: 24559 - protein, 9 aa, Homo sapiens
  Light chain CDR3 for antibody 12280 (IGKV3-11)
QQRSNWPYT

SEQ ID NO: 24560 - protein, 13 aa, Homo sapiens
  Heavy chain CDR3 for antibody 12280 (IGHV3-74)
AKRYSSGWYPFDF

SEQ ID NO: 24561 - protein, 10 aa, Homo sapiens
  Light chain CDR3 for antibody 12281 (IGKV3-11)
QQRSNWPIYT

SEQ ID NO: 24562 - protein, 15 aa, Homo sapiens
  Heavy chain CDR3 for antibody 12281 (IGHV3-23)
AKDRSGSGSYNLFDY

SEQ ID NO: 24563 - protein, 9 aa, Homo sapiens
  Light chain CDR3 for antibody 12282 (IGKV1-6)
LQDYSYPWT

SEQ ID NO: 24564 - protein, 10 aa, Homo sapiens
  Heavy chain CDR3 for antibody 12282 (IGHV3-23)
AKEQWLVLDY

SEQ ID NO: 24565 - protein, 9 aa, Homo sapiens
  Light chain CDR3 for antibody 12283 (IGKV6-21)
HQSYSLPHT

SEQ ID NO: 24566 - protein, 9 aa, Homo sapiens
  Heavy chain CDR3 for antibody 12283 (IGHV3-21)
ARGSGWSDY

SEQ ID NO: 24567 - protein, 10 aa, Homo sapiens
  Light chain CDR3 for antibody 12284 (IGKV1-39)
QQSYSTPMYT

SEQ ID NO: 24568 - protein, 14 aa, Homo sapiens
  Heavy chain CDR3 for antibody 12284 (IGHV1-46)
ARAYYAFLTGALDI

SEQ ID NO: 24569 - protein, 8 aa, Homo sapiens
  Light chain CDR3 for antibody 12285 (IGKV3-11)
QQRSNWLT

SEQ ID NO: 24570 - protein, 15 aa, Homo sapiens
  Heavy chain CDR3 for antibody 12285 (IGHV1-8)
ARDRGWKAPGYGMDV

SEQ ID NO: 24571 - protein, 10 aa, Homo sapiens
  Light chain CDR3 for antibody 12286 (IGKV3-15)
QQYNNWPPYT

SEQ ID NO: 24572 - protein, 15 aa, Homo sapiens
  Heavy chain CDR3 for antibody 12286 (IGHV3-33)
AKDRNSGYDWGGFDY

SEQ ID NO: 24573 - protein, 9 aa, Homo sapiens
  Light chain CDR3 for antibody 12287 (IGKV3-15)
QQYNNWPRT

SEQ ID NO: 24574 - protein, 11 aa, Homo sapiens
  Heavy chain CDR3 for antibody 12287 (IGHV3-33)
ARDRATATVDY

SEQ ID NO: 24575 - protein, 9 aa, Homo sapiens
  Light chain CDR3 for antibody 12288 (IGKV6-21)
HQSSSLPYT

SEQ ID NO: 24576 - protein, 15 aa, Homo sapiens
  Heavy chain CDR3 for antibody 12288 (IGHV3-23)
AKDGSYSYYYYGMDA

SEQ ID NO: 24577 - protein, 9 aa, Homo sapiens
  Light chain CDR3 for antibody 12289 (IGKV1D-16)
QQYSSYPYT

SEQ ID NO: 24578 - protein, 18 aa, Homo sapiens
  Heavy chain CDR3 for antibody 12289 (IGHV3-33)
ARGLLWCGVSYYYYGMDV

SEQ ID NO: 24579 - protein, 10 aa, Homo sapiens
  Light chain CDR3 for antibody 12290 (IGKV1-9)
QQLDSYPMYT

SEQ ID NO: 24580 - protein, 19 aa, Homo sapiens
  Heavy chain CDR3 for antibody 12290 (IGHV3-33)
AREDYYGSGSYYNEDWFDP

SEQ ID NO: 24581 - protein, 9 aa, Homo sapiens
  Light chain CDR3 for antibody 12291 (IGKV1-39)
QQGFSTPWT

SEQ ID NO: 24582 - protein, 18 aa, Homo sapiens
  Heavy chain CDR3 for antibody 12291 (IGHV1-46)
ARDLTGRTENYYYYGMDV

SEQ ID NO: 24583 - protein, 9 aa, Homo sapiens
  Light chain CDR3 for antibody 12292 (IGKV6-21)
HQSSSLPLT

SEQ ID NO: 24584 - protein, 12 aa, Homo sapiens
  Heavy chain CDR3 for antibody 12292 (IGHV3-33)
ARERGIGRYFDL

SEQ ID NO: 24585 - protein, 8 aa, Homo sapiens
  Light chain CDR3 for antibody 12293 (IGKV1-5)
QQYNSYWT

SEQ ID NO: 24586 - protein, 12 aa, Homo sapiens
  Heavy chain CDR3 for antibody 12293 (IGHV3-33)
ARKGYDMHEFDI

SEQ ID NO: 24587 - protein, 9 aa, Homo sapiens
  Light chain CDR3 for antibody 12294 (IGKV1-9)
QQLKSYLYT

SEQ ID NO: 24588 - protein, 13 aa, Homo sapiens
  Heavy chain CDR3 for antibody 12294 (IGHV3-53)
ARSGSYWGYYFDY

SEQ ID NO: 24589 - protein, 9 aa, Homo sapiens
  Light chain CDR3 for antibody 12295 (IGKV1-9)
QQLNSYPRT

SEQ ID NO: 24590 - protein, 17 aa, Homo sapiens
  Heavy chain CDR3 for antibody 12295 (IGHV1-8)
ARGDYYGSGIYKYAMDV

SEQ ID NO: 24591 - protein, 8 aa, Homo sapiens
  Light chain CDR3 for antibody 12296 (IGKV2D-28)
MQALQTPT

SEQ ID NO: 24592 - protein, 13 aa, Homo sapiens
  Heavy chain CDR3 for antibody 12296 (IGHV3-33)
ARDYCGGDCYLDY

SEQ ID NO: 24593 - protein, 9 aa, Homo sapiens
  Light chain CDR3 for antibody 12297 (IGKV1-6)
LQDYKSPFT

SEQ ID NO: 24594 - protein, 17 aa, Homo sapiens
  Heavy chain CDR3 for antibody 12297 (IGHV3-64)
ARERYYGSGSYYNCFDP

SEQ ID NO: 24595 - protein, 9 aa, Homo sapiens
  Light chain CDR3 for antibody 12298 (IGKV2D-28)
MQALQTPPT

SEQ ID NO: 24596 - protein, 11 aa, Homo sapiens
  Heavy chain CDR3 for antibody 12298 (IGHV3-23)
AKGLWSYYFDY

SEQ ID NO: 24597 - protein, 9 aa, Homo sapiens
  Light chain CDR3 for antibody 12299 (IGKV3D-20)
QQHGNSPLT

SEQ ID NO: 24598 - protein, 17 aa, Homo sapiens
  Heavy chain CDR3 for antibody 12299 (IGHV4-39)
ARVLRYFDWLSHDAFDI

SEQ ID NO: 24599 - protein, 9 aa, Homo sapiens
  Light chain CDR3 for antibody 12300 (IGKV1D-13)
QRFNNYLYT

SEQ ID NO: 24600 - protein, 8 aa, Homo sapiens
  Heavy chain CDR3 for antibody 12300 (IGHV3-23)
AKESLLDY

SEQ ID NO: 24601 - protein, 9 aa, Homo sapiens
  Light chain CDR3 for antibody 12301 (IGKV1-6)
LQDYNYPRT

SEQ ID NO: 24602 - protein, 23 aa, Homo sapiens
  Heavy chain CDR3 for antibody 12301 (IGHV4-59)
ARERTYSGILPGYYEAYYYWMDV

SEQ ID NO: 24603 - protein, 10 aa, Homo sapiens
  Light chain CDR3 for antibody 12302 (IGKV3-11)
QQRSNWPPGT

SEQ ID NO: 24604 - protein, 16 aa, Homo sapiens
  Heavy chain CDR3 for antibody 12302 (IGHV4-59)
ARGRYFDWLLGDVFDI

SEQ ID NO: 24605 - protein, 9 aa, Homo sapiens
  Light chain CDR3 for antibody 12303 (IGKV1-9)
QQLNGYPFT

SEQ ID NO: 24606 - protein, 17 aa, Homo sapiens
  Heavy chain CDR3 for antibody 12303 (IGHV3-33)
ARVYYDILTGYSPAFDI

SEQ ID NO: 24607 - protein, 9 aa, Homo sapiens
  Light chain CDR3 for antibody 12304 (IGKV1D-16)
QQYITYPYT

SEQ ID NO: 24608 - protein, 18 aa, Homo sapiens
  Heavy chain CDR3 for antibody 12304 (IGHV3-33)
ARDRDRYGSGTYPDAIDI

SEQ ID NO: 24609 - protein, 9 aa, Homo sapiens
  Light chain CDR3 for antibody 12305 (IGKV3D-7)
QQDYTLPRT

SEQ ID NO: 24610 - protein, 26 aa, Homo sapiens
  Heavy chain CDR3 for antibody 12305 (IGHV4-39)
ARQGLLWFGDLKAYDSSGYYYGYFHH

SEQ ID NO: 24611 - protein, 9 aa, Homo sapiens
  Light chain CDR3 for antibody 12306 (IGKV3-15)
QQYNNWPYT

SEQ ID NO: 24612 - protein, 16 aa, Homo sapiens
  Heavy chain CDR3 for antibody 12306 (IGHV3-33)
ARGANYYGSGIPNFEY

SEQ ID NO: 24613 - protein, 9 aa, Homo sapiens
  Light chain CDR3 for antibody 12307 (IGKV3-15)
QQYNNWPYT

SEQ ID NO: 24614 - protein, 12 aa, Homo sapiens
  Heavy chain CDR3 for antibody 12307 (IGHV3-23)
AKEGLGSDYESC

SEQ ID NO: 24615 - protein, 8 aa, Homo sapiens
  Light chain CDR3 for antibody 12308 (IGKV1-9)
QQFNNYPT

SEQ ID NO: 24616 - protein, 13 aa, Homo sapiens
  Heavy chain CDR3 for antibody 12308 (IGHV4-28)
ARKGATGYYGMDV

SEQ ID NO: 24617 - protein, 9 aa, Homo sapiens
  Light chain CDR3 for antibody 12309 (IGKV1-6)
QHFNNYMYT

SEQ ID NO: 24618 - protein, 13 aa, Homo sapiens
  Heavy chain CDR3 for antibody 12309 (IGHV1-18)
ARSYYGSGSPFDY

SEQ ID NO: 24619 - protein, 9 aa, Homo sapiens
  Light chain CDR3 for antibody 12310 (IGKV6-21)
HQSSSLPYT

SEQ ID NO: 24620 - protein, 16 aa, Homo sapiens
  Heavy chain CDR3 for antibody 12310 (IGHV1-46)
ARGGGYSESYSNWFDP

SEQ ID NO: 24621 - protein, 9 aa, Homo sapiens
  Light chain CDR3 for antibody 12311 (IGKV3D-7)
QQDYNLPYT

SEQ ID NO: 24622 - protein, 18 aa, Homo sapiens
  Heavy chain CDR3 for antibody 12311 (IGHV3-33)
ARDGRISLVRGIIDAFDI

SEQ ID NO: 24623 - protein, 9 aa, Homo sapiens
  Light chain CDR3 for antibody 12312 (IGKV1-17)
LQHNSYPLT

SEQ ID NO: 24624 - protein, 14 aa, Homo sapiens
  Heavy chain CDR3 for antibody 12312 (IGHV3-33)
ARTTAAAGPRDFHH

SEQ ID NO: 24625 - protein, 9 aa, Homo sapiens
  Light chain CDR3 for antibody 12313 (IGKV1-37)
QRTYNAPFT

SEQ ID NO: 24626 - protein, 12 aa, Homo sapiens
  Heavy chain CDR3 for antibody 12313 (IGHV1-46)
ARGLIGDHAVDI

SEQ ID NO: 24627 - protein, 9 aa, Homo sapiens
  Light chain CDR3 for antibody 12314 (IGKV1-17)
LQHNSYPYT

SEQ ID NO: 24628 - protein, 14 aa, Homo sapiens
  Heavy chain CDR3 for antibody 12314 (IGHV3-33)
ARDDILTGYSYFQH

SEQ ID NO: 24629 - protein, 8 aa, Homo sapiens
  Light chain CDR3 for antibody 12315 (IGKV1-5)
QQYNSYWT

SEQ ID NO: 24630 - protein, 11 aa, Homo sapiens
  Heavy chain CDR3 for antibody 12315 (IGHV3-33)
ARGSGSYAFDS

SEQ ID NO: 24631 - protein, 9 aa, Homo sapiens
  Light chain CDR3 for antibody 12316 (IGKV3D-7)
QQDYNLPWT

SEQ ID NO: 24632 - protein, 17 aa, Homo sapiens
  Heavy chain CDR3 for antibody 12316 (IGHV3-33)
ARKDYGILSGYYSPFDY

SEQ ID NO: 24633 - protein, 9 aa, Homo sapiens
  Light chain CDR3 for antibody 12317 (IGKV3D-20)
QQYGSSPYT

SEQ ID NO: 24634 - protein, 17 aa, Homo sapiens
  Heavy chain CDR3 for antibody 12317 (IGHV3-33)
ARDRDDILTGFYTYFDY

SEQ ID NO: 24635 - protein, 10 aa, Homo sapiens
  Light chain CDR3 for antibody 12318 (IGKV3-11)
QQRSTWPALT

SEQ ID NO: 24636 - protein, 12 aa, Homo sapiens
  Heavy chain CDR3 for antibody 12318 (IGHV3-23)
AKGYTSFWYFDL

SEQ ID NO: 24637 - protein, 10 aa, Homo sapiens
  Light chain CDR3 for antibody 12319 (IGKV3-11)
QQRSNWPALA

SEQ ID NO: 24638 - protein, 12 aa, Homo sapiens
  Heavy chain CDR3 for antibody 12319 (IGHV1-18)
AGVLFDGDYSDY

SEQ ID NO: 24639 - protein, 9 aa, Homo sapiens
  Light chain CDR3 for antibody 12320 (IGKV3D-7)
QQDYTLPLT

SEQ ID NO: 24640 - protein, 14 aa, Homo sapiens
  Heavy chain CDR3 for antibody 12320 (IGHV3-33)
AREEDYYYYYDMDV

SEQ ID NO: 24641 - protein, 9 aa, Homo sapiens
  Light chain CDR3 for antibody 12321 (IGKV1-39)
QQSYSTPFT

SEQ ID NO: 24642 - protein, 14 aa, Homo sapiens
  Heavy chain CDR3 for antibody 12321 (IGHV4-59)
ARDFLVRGVAPFDY

SEQ ID NO: 24643 - protein, 9 aa, Homo sapiens
  Light chain CDR3 for antibody 12322 (IGKV1-6)
LQDFHYPWT

SEQ ID NO: 24644 - protein, 8 aa, Homo sapiens
  Heavy chain CDR3 for antibody 12322 (IGHV3-23)
AETFLFDY

SEQ ID NO: 24645 - protein, 9 aa, Homo sapiens
  Light chain CDR3 for antibody 12323 (IGKV1-6)
LQVYSYPWT

SEQ ID NO: 24646 - protein, 12 aa, Homo sapiens
  Heavy chain CDR3 for antibody 12323 (IGHV3-23)
AKDGWFGESLDY

SEQ ID NO: 24647 - protein, 9 aa, Homo sapiens
  Light chain CDR3 for antibody 12324 (IGKV3-11)
QQRSSWPPT

SEQ ID NO: 24648 - protein, 15 aa, Homo sapiens
  Heavy chain CDR3 for antibody 12324 (IGHV3-33)
ARDHLTGYYYYGMDV

SEQ ID NO: 24649 - protein, 9 aa, Homo sapiens
  Light chain CDR3 for antibody 12325 (IGKV6-21)
HQSSSLPYT

SEQ ID NO: 24650 - protein, 12 aa, Homo sapiens
  Heavy chain CDR3 for antibody 12325 (IGHV3-30)
ARDFTGHYTSDV

SEQ ID NO: 24651 - protein, 9 aa, Homo sapiens
  Light chain CDR3 for antibody 12326 (IGKV2-30)
MQGTHWPLT

SEQ ID NO: 24652 - protein, 14 aa, Homo sapiens
  Heavy chain CDR3 for antibody 12326 (IGHV1-46)
ARSYYDILTGAFDI

SEQ ID NO: 24653 - protein, 8 aa, Homo sapiens
  Light chain CDR3 for antibody 12327 (IGKV3-20)
QQYGRSLT

SEQ ID NO: 24654 - protein, 16 aa, Homo sapiens
  Heavy chain CDR3 for antibody 12327 (IGHV4-59)
AGGSGSYRDYYYGMDV

SEQ ID NO: 24655 - protein, 8 aa, Homo sapiens
  Light chain CDR3 for antibody 12328 (IGKV3D-7)
QQDYSLLT

SEQ ID NO: 24656 - protein, 11 aa, Homo sapiens
  Heavy chain CDR3 for antibody 12328 (IGHV3-33)
ARDRATATVDY

SEQ ID NO: 24657 - protein, 9 aa, Homo sapiens
  Light chain CDR3 for antibody 12329 (IGKV1-16)
QQYKSYPYT

SEQ ID NO: 24658 - protein, 15 aa, Homo sapiens
  Heavy chain CDR3 for antibody 12329 (IGHV3-33)
AREGLRYFHYYGMDV

SEQ ID NO: 24659 - protein, 9 aa, Homo sapiens
  Light chain CDR3 for antibody 12330 (IGKV1-6)
LQDFNYPRT

SEQ ID NO: 24660 - protein, 16 aa, Homo sapiens
  Heavy chain CDR3 for antibody 12330 (IGHV4-59)
ARYSGSYYRDYYGMDV

SEQ ID NO: 24661 - protein, 10 aa, Homo sapiens
  Light chain CDR3 for antibody 12331 (IGKV1-17)
LQHNSYPMYT

SEQ ID NO: 24662 - protein, 13 aa, Homo sapiens
  Heavy chain CDR3 for antibody 12331 (IGHV4-39)
ARHPPSRDYGMDV

SEQ ID NO: 24663 - protein, 8 aa, Homo sapiens
  Light chain CDR3 for antibody 12332 (IGKV1-17)
QQDYNLLT

SEQ ID NO: 24664 - protein, 13 aa, Homo sapiens
  Heavy chain CDR3 for antibody 12332 (IGHV1-18)
ARGGGVRGAPLDY

SEQ ID NO: 24665 - protein, 9 aa, Homo sapiens
  Light chain CDR3 for antibody 12333 (IGKV1-39)
QQSYSSPFT

SEQ ID NO: 24666 - protein, 13 aa, Homo sapiens
  Heavy chain CDR3 for antibody 12333 (IGHV3-33)
ARVKLGSLGAFDI

SEQ ID NO: 24667 - protein, 9 aa, Homo sapiens
  Light chain CDR3 for antibody 12334 (IGKV6-21)
HQSSNLPYT

SEQ ID NO: 24668 - protein, 18 aa, Homo sapiens
  Heavy chain CDR3 for antibody 12334 (IGHV1-46)
ARDGYYVWGSYRCNWFDP

SEQ ID NO: 24669 - protein, 9 aa, Homo sapiens
  Light chain CDR3 for antibody 12335 (IGKV6-21)
HQSYSLPHT

SEQ ID NO: 24670 - protein, 13 aa, Homo sapiens
  Heavy chain CDR3 for antibody 12335 (IGHV3-64)
ARRATLVQGVCDP

SEQ ID NO: 24671 - protein, 10 aa, Homo sapiens
  Light chain CDR3 for antibody 12336 (IGKV1-9)
QQLDSYPMYT

SEQ ID NO: 24672 - protein, 17 aa, Homo sapiens
  Heavy chain CDR3 for antibody 12336 (IGHV3-33)
ARAYYDILTGYSYYFDY

SEQ ID NO: 24673 - protein, 8 aa, Homo sapiens
  Light chain CDR3 for antibody 12337 (IGKV6-21)
QQSSSLPT

SEQ ID NO: 24674 - protein, 15 aa, Homo sapiens
  Heavy chain CDR3 for antibody 12337 (IGHV3-23)
AKEALRYFDWSGMDV

SEQ ID NO: 24675 - protein, 9 aa, Homo sapiens
  Light chain CDR3 for antibody 12338 (IGKV1-16)
QQYIRYPYT

SEQ ID NO: 24676 - protein, 12 aa, Homo sapiens
  Heavy chain CDR3 for antibody 12338 (IGHV4-59)
AREAGIPDAFDI

SEQ ID NO: 24677 - protein, 9 aa, Homo sapiens
  Light chain CDR3 for antibody 12339 (IGKV1-9)
QQLNSYPYT

SEQ ID NO: 24678 - protein, 12 aa, Homo sapiens
  Heavy chain CDR3 for antibody 12339 (IGHV3-13)
AREAGIPDACDI

SEQ ID NO: 24679 - protein, 9 aa, Homo sapiens
  Light chain CDR3 for antibody 12340 (IGKV1-6)
LQGYNYPRS

SEQ ID NO: 24680 - protein, 15 aa, Homo sapiens
  Heavy chain CDR3 for antibody 12340 (IGHV3-30)
ARGAMVRGVDYGMDV

SEQ ID NO: 24681 - protein, 10 aa, Homo sapiens
  Light chain CDR3 for antibody 12341 (IGKV3-15)
QQYNNWPPIT

SEQ ID NO: 24682 - protein, 14 aa, Homo sapiens
  Heavy chain CDR3 for antibody 12341 (IGHV3-33)
ARDGYDILTGPFDY

SEQ ID NO: 24683 - protein, 9 aa, Homo sapiens
  Light chain CDR3 for antibody 12342 (IGKV1-17)
LQHNSYPLT

SEQ ID NO: 24684 - protein, 15 aa, Homo sapiens
  Heavy chain CDR3 for antibody 12342 (IGHV4-39)
ARRDYDILTGYLFDY

SEQ ID NO: 24685 - protein, 9 aa, Homo sapiens
  Light chain CDR3 for antibody 12343 (IGKV3-20)
QQYNRYPYT

SEQ ID NO: 24686 - protein, 13 aa, Homo sapiens
  Heavy chain CDR3 for antibody 12343 (IGHV4-39)
ARPGIVAAGWFDP

SEQ ID NO: 24687 - protein, 9 aa, Homo sapiens
  Light chain CDR3 for antibody 12344 (IGKV1D-16)
LQHNSYPPT

SEQ ID NO: 24688 - protein, 19 aa, Homo sapiens
  Heavy chain CDR3 for antibody 12344 (IGHV3-20)
ARDPPTQALHYYYYYGMDV

SEQ ID NO: 24689 - protein, 8 aa, Homo sapiens
  Light chain CDR3 for antibody 12345 (IGKV3D-7)
QQDYNLLT

SEQ ID NO: 24690 - protein, 18 aa, Homo sapiens
  Heavy chain CDR3 for antibody 12345 (IGHV3-33)
AREGYDILTGYYNVKFHY

SEQ ID NO: 24691 - protein, 9 aa, Homo sapiens
  Light chain CDR3 for antibody 12346 (IGKV4-1)
QQYYSTPLT

SEQ ID NO: 24692 - protein, 17 aa, Homo sapiens
  Heavy chain CDR3 for antibody 12346 (IGHV1-18)
ARERYYGSGNYKYNMDV

SEQ ID NO: 24693 - protein, 10 aa, Homo sapiens
  Light chain CDR3 for antibody 12347 (IGKV1-17)
LQHNSYPMYT

SEQ ID NO: 24694 - protein, 17 aa, Homo sapiens
  Heavy chain CDR3 for antibody 12347 (IGHV3-33)
ARDQDDILTGYYWYFDL

SEQ ID NO: 24695 - protein, 9 aa, Homo sapiens
  Light chain CDR3 for antibody 12348 (IGKV6-21)
HQSSSLPLT

SEQ ID NO: 24696 - protein, 10 aa, Homo sapiens
  Heavy chain CDR3 for antibody 12348 (IGHV4-59)
VSSGTSLLAY

SEQ ID NO: 24697 - protein, 10 aa, Homo sapiens
  Light chain CDR3 for antibody 12349 (IGKV1-27)
QQLDSYPMYT

SEQ ID NO: 24698 - protein, 14 aa, Homo sapiens
  Heavy chain CDR3 for antibody 12349 (IGHV3-23)
AKSRIVGALYYFDY

SEQ ID NO: 24699 - protein, 9 aa, Homo sapiens
  Light chain CDR3 for antibody 12350 (IGKV1-39)
QQGFSTPWT

SEQ ID NO: 24700 - protein, 16 aa, Homo sapiens
  Heavy chain CDR3 for antibody 12350 (IGHV4-39)
AREVAGSYYYYYGIDV

SEQ ID NO: 24701 - protein, 10 aa, Homo sapiens
  Light chain CDR3 for antibody 12351 (IGKV3-11)
QQRSNWPMYT

SEQ ID NO: 24702 - protein, 10 aa, Homo sapiens
  Heavy chain CDR3 for antibody 12351 (IGHV3-23)
AKEQWLVPDY

SEQ ID NO: 24703 - protein, 9 aa, Homo sapiens
  Light chain CDR3 for antibody 12352 (IGKV3-15)
QQYNNWPYT

SEQ ID NO: 24704 - protein, 19 aa, Homo sapiens
  Heavy chain CDR3 for antibody 12352 (IGHV3-33)
ARGRGSYYYGPGSHYGMDV

SEQ ID NO: 24705 - protein, 9 aa, Homo sapiens
  Light chain CDR3 for antibody 12353 (IGKV1D-16)
QQYNSYPPT

SEQ ID NO: 24706 - protein, 12 aa, Homo sapiens
  Heavy chain CDR3 for antibody 12353 (IGHV3-66)
ARELEQQLVFDY

SEQ ID NO: 24707 - protein, 8 aa, Homo sapiens
  Light chain CDR3 for antibody 12354 (IGKV3-11)
QQRSNWLT

SEQ ID NO: 24708 - protein, 15 aa, Homo sapiens
  Heavy chain CDR3 for antibody 12354 (IGHV1-46)
ARGAVDDYYYYGMDV

SEQ ID NO: 24709 - protein, 9 aa, Homo sapiens
  Light chain CDR3 for antibody 12355 (IGKV3D-7)
QQAYTLPLT

SEQ ID NO: 24710 - protein, 9 aa, Homo sapiens
  Heavy chain CDR3 for antibody 12355 (IGHV3-33)
ARELAYFDY

SEQ ID NO: 24711 - protein, 9 aa, Homo sapiens
  Light chain CDR3 for antibody 12356 (IGKV3-20)
QQYGSSPRT

SEQ ID NO: 24712 - protein, 13 aa, Homo sapiens
  Heavy chain CDR3 for antibody 12356 (IGHV3-33)
ASAGNSYYNVMDV

SEQ ID NO: 24713 - protein, 6 aa, Homo sapiens
  Light chain CDR3 for antibody 12357 (IGKV3-20)
QQYGST

SEQ ID NO: 24714 - protein, 8 aa, Homo sapiens
  Heavy chain CDR3 for antibody 12357 (IGHV3-23)
AETFLFDY

SEQ ID NO: 24715 - protein, 9 aa, Homo sapiens
  Light chain CDR3 for antibody 12358 (IGKV3-11)
QQRSDWPLT

SEQ ID NO: 24716 - protein, 12 aa, Homo sapiens
  Heavy chain CDR3 for antibody 12358 (IGHV3-33)
AREGIAVAGVDP

SEQ ID NO: 24717 - protein, 9 aa, Homo sapiens
  Light chain CDR3 for antibody 12359 (IGKV3-15)
QQYNNWPYT

SEQ ID NO: 24718 - protein, 10 aa, Homo sapiens
  Heavy chain CDR3 for antibody 12359 (IGHV3-33)
ARNILTPLDY

SEQ ID NO: 24719 - protein, 9 aa, Homo sapiens
  Light chain CDR3 for antibody 12360 (IGKV1-17)
LQHNSYPYT

SEQ ID NO: 24720 - protein, 17 aa, Homo sapiens
  Heavy chain CDR3 for antibody 12360 (IGHV4-34)
ARDGSGSYTHYYYGMDV

SEQ ID NO: 24721 - protein, 9 aa, Homo sapiens
  Light chain CDR3 for antibody 12361 (IGKV1D-16)
QQYYSYPPT

SEQ ID NO: 24722 - protein, 9 aa, Homo sapiens
  Heavy chain CDR3 for antibody 12361 (IGHV4-59)
AGGSWDFDY

SEQ ID NO: 24723 - protein, 9 aa, Homo sapiens
  Light chain CDR3 for antibody 12362 (IGKV1-33)
QQFNNYMYT

SEQ ID NO: 24724 - protein, 26 aa, Homo sapiens
  Heavy chain CDR3 for antibody 12362 (IGHV3-11)
ARQGLLWFGDLKAYDSSGYYYGYFHH

SEQ ID NO: 24725 - protein, 9 aa, Homo sapiens
  Light chain CDR3 for antibody 12363 (IGKV1D-13)
QRFNNYLYT

SEQ ID NO: 24726 - protein, 14 aa, Homo sapiens
  Heavy chain CDR3 for antibody 12363 (IGHV3-23)
AKSRIVGALYYFDY

SEQ ID NO: 24727 - protein, 9 aa, Homo sapiens
  Light chain CDR3 for antibody 12364 (IGKV2-30)
MQGTHWPLT

SEQ ID NO: 24728 - protein, 12 aa, Homo sapiens
  Heavy chain CDR3 for antibody 12364 (IGHV3-11)
ARESGGSFGMDV

SEQ ID NO: 24729 - protein, 9 aa, Homo sapiens
  Light chain CDR3 for antibody 12365 (IGKV3-11)
QQRSNWPPT

SEQ ID NO: 24730 - protein, 14 aa, Homo sapiens
  Heavy chain CDR3 for antibody 12365 (IGHV3-20)
ARDGGSGSYDGLDV

SEQ ID NO: 24731 - protein, 9 aa, Homo sapiens
  Light chain CDR3 for antibody 12366 (IGKV1-6)
QQFNNYPYT

SEQ ID NO: 24732 - protein, 12 aa, Homo sapiens
  Heavy chain CDR3 for antibody 12366 (IGHV3-33)
ARKAYALYVLDV

SEQ ID NO: 24733 - protein, 9 aa, Homo sapiens
  Light chain CDR3 for antibody 12367 (IGKV2-30)
MQGTHWPLT

SEQ ID NO: 24734 - protein, 11 aa, Homo sapiens
  Heavy chain CDR3 for antibody 12367 (IGHV4-59)
ARSIRYSVFDY

SEQ ID NO: 24735 - protein, 9 aa, Homo sapiens
  Light chain CDR3 for antibody 12368 (IGKV3-11)
QQRSSWPPT

SEQ ID NO: 24736 - protein, 13 aa, Homo sapiens
  Heavy chain CDR3 for antibody 12368 (IGHV3-33)
ARVDTMVRGVMAY

SEQ ID NO: 24737 - protein, 9 aa, Homo sapiens
  Light chain CDR3 for antibody 12369 (IGKV1-39)
QQSYSTPYT

SEQ ID NO: 24738 - protein, 14 aa, Homo sapiens
  Heavy chain CDR3 for antibody 12369 (IGHV3-23)
AKDDIVRATGAFDI

SEQ ID NO: 24739 - protein, 9 aa, Homo sapiens
  Light chain CDR3 for antibody 12370 (IGKV1D-13)
QQFNNYPHT

(The sequence listing continues in the following parts.)

1. A recombinant polyclonal protein composition (RPP), comprising
at least 100 antigen binding proteins (ABPs), each of the ABPs comprising a cognate pair of heavy chain CDR3 and light chain CDR3, wherein each of the ABPs specifically binds an antigen of Zika virus.

2. The RPP of claim 1, wherein each of the ABPs comprises a heavy chain CDR3 having a sequence selected from SEQ ID Nos: 2, 4, 6, through 25838 (even numbers) and SEQ ID NO: 25851-25860, and a light chain CDR3 having a sequence selected from SEQ ID Nos: 1, 3, 5, through 25837 (odd numbers).

3. The RPP of claim 1, wherein the RPP comprises an ABP comprising a heavy chain CDR1 having the sequence of GFTF[S/D][S/D][Y/H/D][A/G/Y/F] (SEQ ID NO: 25840).

4. The RPP of claim 3, wherein the RPP comprises an ABP comprising a heavy chain CDR1 having a sequence selected from the group consisting of:
a.
(SEQ ID NO: 25841)
GFTFSSYA;
b.
(SEQ ID NO: 25842)
GFTFSSYG;
c.
(SEQ ID NO: 25843)
GFTFDD[Y/H]G;
and
d.
(SEQ ID NO: 25844)
GFTFSD[Y/D][Y/F].

5. The RPP of claim 1, wherein the RPP comprises an ABP comprising a heavy chain CDR2 having the sequence of I[W/S/N][G/Y/W][S/D/N]G[G/S/D/Y][S/N/T][T/K/I] (SEQ ID NO: 25846).

6. The RPP of claim 5, wherein the RPP comprises an ABP comprising a heavy chain CDR2 having a sequence selected from the group consisting of:
a.
(SEQ ID NO: 25847)
ISGSGGST;
b.
(SEQ ID NO: 25848)
I[W/S]YDGSNK;
c.
(SEQ ID NO: 25849)
INWNG[G/D]ST
and
d.
(SEQ ID NO: 25850)
ISGSG[S/Y]TI.

7. The RPP of claim 1, wherein the RPP comprises an ABP comprising a heavy chain CDR3 having a sequence selected from
a.
(SEQ ID NO: 25851)
AKEGMVLRYFDWLWDY;
b.
(SEQ ID NO: 25852)
RX₁X₂X₃SGX₄SX₅FDY;
c.
(SEQ ID NO: 25853)
AX₁X₂X₃X₄X₅X₆VX₇X₈X₉Y;
d.
(SEQ ID NO: 25854)
ARX₁X₂GSX₃X₄X₅X₆DX₇FDX₈;
and
e.
(SEQ ID NO: 25855)
ARDEGYX₁GYX₂LDX₃.

8. The RPP of claim 7, wherein the RPP comprises an ABP comprising a heavy chain CDR3 having a sequence selected from
a. AKEGMVLRYFDWLWDY (SEQ ID NO: 25856);
b. R[D/E][R/L][S/V/L]SG[P/W]S[G/H]FDY (SEQ ID NO: 25857);
c. A[K/E/R][E/T][Q/L/T][L/W/I][L/V/W/N][G/L]V[V/P/L][F/L/N][D/N]Y (SEQ ID NO: 25858);
d. AR[D/N][R/G]GS[S/T][G/S/W/F][W/F/Y][R/F/Y]D[W/A]FD[P/I] (SEQ ID NO: 25859); and
e. ARDEGY[R/S]GY[V/N]LD[T/N/S] (SEQ ID NO: 25860).

9. The RPP of claim 1, wherein the RPP comprises at least 20, 40, 50, 100 or 200 ABPs comprising:
a. a heavy chain CDR1 having the sequence of GFTFSSYA (SEQ ID NO: 25841), a heavy chain CDR2 having the sequence of ISGSGGST (SEQ ID NO: 25847), and a heavy chain CDR3 having the sequence of AKEGMVLRYFDWLWDY (SEQ ID NO: 25856);
b. a heavy chain CDR1 having the sequence of GFTFSSYG (SEQ ID NO: 25842), a heavy chain CDR2 having the sequence of I[W/S]YDGSNK (SEQ ID NO: 25848), and a heavy chain CDR3 having the sequence of R[D/E][R/L][S/V/L]SG[P/W]S[G/H]FDY (SEQ ID NO: 25857);
c. a heavy chain CDR1 having the sequence of GFTFSSYA (SEQ ID NO: 25841), a heavy chain CDR2 having the sequence of ISGSGGST (SEQ ID NO: 25847), and a heavy chain CDR3 having the sequence of A[K/E/R][E/T][Q/L/T][L/W/I][L/V/W/N][G/L]V[V/P/L][F/L/N][D/N]Y (SEQ ID NO: 25858);
d. a heavy chain CDR1 having the sequence of GFTFDD[Y/H]G (SEQ ID NO: 25843), a heavy chain CDR2 having the sequence of INWNG[G/D]ST (SEQ ID NO: 25849), and a heavy chain CDR3 having the sequence of AR[D/N][R/G]GS[S/T][G/S/W/F][W/F/Y][R/F/Y]D[W/A]FD[P/I] (SEQ ID NO: 25859); or
e. a heavy chain CDR1 having the sequence of GFTFSD[Y/D][Y/F] (SEQ ID NO: 25844), a heavy chain CDR2 having the sequence of ISGSG[S/Y]TI (SEQ ID NO: 25850), and a heavy chain CDR3 having the sequence of ARDEGY[R/S]GY[V/N]LD[T/N/S] (SEQ ID NO: 25860).

10. The RPP of claim 1, wherein each of at least 5%, 10%, 25%, or 50% of the total ABPs in the RPP comprises:
a. a heavy chain CDR1 having the sequence of GFTFSSYA (SEQ ID NO: 25841), a heavy chain CDR2 having the sequence of ISGSGGST (SEQ ID NO: 25847), and a heavy chain CDR3 having the sequence of AKEGMVLRYFDWLWDY (SEQ ID NO: 25856);
b. a heavy chain CDR1 having the sequence of GFTFSSYG (SEQ ID NO: 25842), a heavy chain CDR2 having the sequence of I[W/S]YDGSNK (SEQ ID NO: 25848), and a heavy chain CDR3 having the sequence of R[D/E][R/L][S/V/L]SG[P/W]S[G/H]FDY (SEQ ID NO: 25857);
c. a heavy chain CDR1 having the sequence of GFTFSSYA (SEQ ID NO: 25841), a heavy chain CDR2 having the sequence of ISGSGGST (SEQ ID NO: 25847), and a heavy chain CDR3 having the sequence of A[K/E/R][E/T][Q/L/T][L/W/I][L/V/W/N][G/L]V[V/P/L][F/L/N][D/N]Y (SEQ ID NO: 25858);
d. a heavy chain CDR1 having the sequence of GFTFDD[Y/H]G (SEQ ID NO: 25843), a heavy chain CDR2 having the sequence of INWNG[G/D]ST (SEQ ID NO: 25849), and a heavy chain CDR3 having the sequence of AR[D/N][R/G]GS[S/T][G/S/W/F][W/F/Y][R/F/Y]D[W/A]FD[P/I] (SEQ ID NO: 25859); or
e. a heavy chain CDR1 having the sequence of GFTFSD[Y/D][Y/F] (SEQ ID NO: 25844), a heavy chain CDR2 having the sequence of ISGSG[S/Y]TI (SEQ ID NO: 25850), and a heavy chain CDR3 having the sequence of ARDEGY[R/S]GY[V/N]LD[T/N/S] (SEQ ID NO: 25860).

11. The RPP of claim 1, wherein each of the ABPs comprises a unique heavy chain CDR3 and a unique light chain CDR3 sequence.

12. The RPP of claim 1, comprising more than 2500 ABPs.

13. The RPP of claim 1, wherein each of the ABPs is an scFv, a full-length antibody, or an IgG1 subtype.

14. The RPP of claim 1, wherein each of the ABPs is produced in eukaryotic cell culture, optionally selected from CHO cells or yeast cells.

15. The RPP of claim 1, wherein each of the ABPs is recombinantly produced using sequences derived from B cells, plasma cells, or plasmablasts in a sample from one or more than one donor injected with one or more Zika antigens or Dengue antigens, or infected with Zika virus or Dengue virus.

16. The RPP of claim 1, wherein the average binding titer of the RPP is at least 50 times higher than the average binding titer of antibodies in a serum sample from the same donor or donors, wherein the binding titer is measured by ELISA against Zika.

17. The RPP of claim 1, wherein the average activity of the RPP is at least 50 times higher than the average activity of antibodies in a serum sample from the same donor or donors, wherein the activity is measured by an in vitro pathogen neutralization assay or an in vitro binding to antigen assay or an in vivo efficacy assay.

18. A pharmaceutical composition comprising the RPP of claim 1 and a pharmaceutically acceptable carrier or excipient.

19. A method of treating a subject in need thereof, the method comprising administering to the subject an effective amount of the RPPs of claim 1.

20. The method of claim 19, wherein the subject has a viral infection, optionally a Zika virus infection.

21. The method of claim 19, further comprising administration of one or more additional therapeutic agents.

22. A plurality of isolated polynucleotides or vectors, each polynucleotide or vector encoding an ABP of the RPP of claim 1.

23. A plurality of host cells comprising the plurality of isolated polynucleotides or vectors of claim 22.

24. An isolated protein comprising a cognate pair of heavy chain CDR3 and light chain CDR3, wherein the heavy chain CDR3 has a sequence selected from SEQ ID Nos: 2, 4, 6, through 25838 (even numbers), and the light chain CDR3 has a sequence selected from SEQ ID Nos: 1, 3, 5, through 25837 (odd numbers)

25. The isolated protein of claim 24, comprising a heavy chain CDR3 having the sequence of SEQ ID NO: [n+1] and a light chain CDR3 having the sequence of SEQ ID NO: [n], wherein n is an odd number from 1 to 25837.

26. An isolated protein comprising a cognate pair of heavy chain and light chain, wherein
a. a heavy chain CDR1 having the sequence of GFTFSSYA (SEQ ID NO: 25841), a heavy chain CDR2 having the sequence of ISGSGGST (SEQ ID NO: 25847), and a heavy chain CDR3 having the sequence of AKEGMVLRYFDWLWDY (SEQ ID NO: 25856);
b. a heavy chain CDR1 having the sequence of GFTFSSYG (SEQ ID NO: 25842), a heavy chain CDR2 having the sequence of I[W/S]YDGSNK (SEQ ID NO: 25848), and a heavy chain CDR3 having the sequence of R[D/E][R/L][S/V/L]SG[P/W]S[G/H]FDY (SEQ ID NO: 25857);
c. a heavy chain CDR1 having the sequence of GFTFSSYA (SEQ ID NO: 25841), a heavy chain CDR2 having the sequence of ISGSGGST (SEQ ID NO: 25847), and a heavy chain CDR3 having the sequence of A[K/E/R][E/T][Q/L/T][L/W/I][L/V/W/N][G/L]V[V/P/L][F/L/N][D/N]Y (SEQ ID NO: 25858);
d. a heavy chain CDR1 having the sequence of GFTFDD[Y/H]G (SEQ ID NO: 25843), a heavy chain CDR2 having the sequence of INWNG[G/D]ST (SEQ ID NO: 25849), and a heavy chain CDR3 having the sequence of AR[D/N][R/G]GS[S/T][G/S/W/F][W/F/Y][R/F/Y]D[W/A]FD[P/I] (SEQ ID NO: 25859); or
e. a heavy chain CDR1 having the sequence of GFTFSD[Y/D][Y/F] (SEQ ID NO: 25844), a heavy chain CDR2 having the sequence of ISGSG[S/Y]TI (SEQ ID NO: 25850), and a heavy chain CDR3 having the sequence of ARDEGY[R/S]GY[V/N]LD[T/N/S] (SEQ ID NO: 25860).

27. An isolated polynucleotide encoding the isolated protein of claim 26.

28. A cell comprising the isolated polynucleotide of claim 27.

29. A method of generating a recombinant polyclonal protein composition (RPP), comprising
a. providing B cells, plasma cells, or plasmablasts of a donor exposed to an antigen of Zika or Dengue virus;
b. amplifying a cognate pair of polynucleotides encoding a light chain variable region and a heavy chain variable region from each of a plurality of the plasma cells or plasmablasts by overlap extension reverse transcriptase polymerase chain reaction (OE-RT-PCR);
c. cloning polynucleotides obtained from the amplification into expression vectors, thereby obtaining constructs encoding the RPP;
d. expressing the RPP from the constructs;
e. enriching a subset of the constructs based on activity of the RPP or a member of the RPP against Zika; and
f. obtaining the RPP (also called a Recombinant Zika Immune Globulin (rZIG)).
